United States Patent Application Publication US 2008/0050393 A1 - sequence listing, part 45

SEQ ID NO: 145967 - DNA, 546 bp, Homo sapiens
  misc_feature (1)...(546): n = a,t,c or g
tctggttgtcatggatgcactggtagaagatgatatctgtattctgaatcatgaaanagcccataagagagatacagtgactccagtttcaatatattcaggagatgaatctgttgcttcccattttgctcttgtcactgcatatgaagacatcaaaaaacgacttaaggattcagagaaagagaactctttgttaaagaagagaataagatttttggaagaaaaggtaatttttatcttttaccttcattgcgtttgtgacataaggaataattcaaaatacttgaaattttgaatactttttgtcctgtcttccatgattgtactaaatttccaagaataactcactgctaatctgaaaactctgggcattatacttatcctgtgtttcacataccatgtacttggtaaatatttgtaggagaggatttaacaacttggagttatattccaaatatttttctttcattttcaggtttacttacctccatagctgtatgtattttattcagaattttcaaatctgggcaaaaaaaaaaaaaaaaa

SEQ ID NO: 145968 - DNA, 557 bp, Homo sapiens
tgaatctttgaaagtattgaatgagcagctacaatctaaagaagtagaactcctccagctgaggacagaggtggaaactcagcaggtgatgaggaatttaaatccaccttcatcaaactgggaggtggaaaagttgagctgtgacctgaagatccatggtttggaacaagagctggaactgatgaggaaagaatgtagcgatctcaaaatagaactacagaaagccaaacaaacggatccatatcaggaagacaatctgaagagcagagatctccaaaaactaagcatttcaagagtatctgtagcacagcctggagtgcagtggcgcaatcatgggatagcatgaattttgaggactgttccctcttcgcataagaatagaagtagccatcagagttcatatactttttcaaccctttttcctcaaatacgtatcatttttacttaagtaacttcaattctgtgttttaagctatctaataattgttgtttctactatgttaagatagcctctctacattgttacccaccatcccctaaaaaatgctgatctgaaa

SEQ ID NO: 145969 - DNA, 2646 bp, Homo sapiens
ttcggcagaggccgaacctggcttcgctaacgccctcccagctccctcgggtctgacttccggtttcctcgcgcgtccctggcgcgacccgcggacagcggagccccgttttccggctgagagctcatccacacttccaatcactttccggagtgcttcccctccctccggcccgtgctggtcccgacggcgggcctgggtctcgcgcgcgtattgctgggtaacgggccttctctcgcgtcggcccggcccctcctgcctcggcttcgtccctccttccagaacgtcccgggctcctgccgagtcagaagaaatggggattccctccgcgacgtgcccggagcagctcctttcgctgtgggaagcgggcggtgttttcgaagaaaccggaagcccgtggtgacccctggcgacccggtttgttttcggtccgtttccaaacactaaggaatcgaaactcggcggccttgggggcggccctacgtagcctggcttctggttgtcatggatgcactggtagaagatgatatctgtattctgaatcatgaaaaagcccataagagagatacagtgactccagtttcaatcatattacaggagatgaatctgttgctctcccattttgctcttgtcacaccatatgaagacatcaaaaaacgacttaaggattcgagaaagagaacatcttttgttaaagaagagaataagatttttggaagaaaagctaatagctcagatttgaagaagaaacaagttacgtagggacgagaaccaagtaaataaggcctatcatgcatatcgagaggtttgcattggatagagataatttgaagagcaaactggacaaaatgaataaagacaactctgaatcttttgaaagtattgaatgagcagctacaatctaaagaagtagaactcctccagctgaggacagaggtggaaactcagcaggtgatgaggaatttaaatcccaccttccatccaaactggggaggtgggaaaagttggagctggtgacctggaagatccatgggtttgggaaccaagagctggaactgatgaggaaagaatgtagcgatctcaaaatagaactacagaaagccaaacaaacggatccatatcaggaagacaatctgaagagcagagatctccaaaaactaagcatttcaagtgataatatgcagcatgcatactggggaactgaaggagaggaaatgtcttaattttacatctggtgacttcaagttacaagcttgaactactaaggaaaacttgaaaaaccttcaactgcaatcaagaaaggcctgtgccccttgtaggatgcagttgaagaccttggaagagacagcacaaaacttgcacttggatggatttttactggcaacatacgcaagacatccccctctcttaccaaatggcaaagctctttgtcataccacatcttcccctttaccaggggatgtaaaggttttatcagagaaagcaatcctccaatcatgggacagacaatgagagatccattcctaatgatgggtacatgctttcagggaacacagttcttatgggcagaattctctggaagacaattcctggggtattttccaaagtcctcctaaaatcaaagtgagacagcatttggggaaactaaaactaaaactttgcctttacccaaccttccaccactgcattacttggatcaacataatcagaactgcctttataagaattaatttgggaaggagattcacgatttcaccatgaggacacttatctctttcagtggtcctccccaagaaattatttaaccaaactgaaaggagatttggattaaaaatttttgcagaggtcttcagtatcctatatttggaaccacactgtacaatagtaccaaaacccaacatagttggttttcctagtatgaaagagcaccctctggctccatattcctaagaatcctgaaatatgctactatactaattaataagtaaaccttaagggtgtttaaaaaacctctgccttctatattaattgtaaaattttgcctctcagaagaatggaattggagattgtagacgtggttttacaaaaatgtgaaatgtctaaatatctgttcataaaaataaaaggaaaacatgttcccttcaaattgccataatggaacaaatggcaatgtgagtaggttacatttcctgttgttataatgccgtaaagatattggaaaaaataatgaaataaaagcatccttaggttatacccatctttatatgctattgcgtttcaatatttaagatttaaagtgattttttggtcacagtgttttgttgataaaatttttttagaattgaagtttgaattctaagacttgaaacaacctgatcactgaagccaactttgtcccagcacattccttaagtcctaattgggaaaaaaaaaaaaaaaaatgaaatagttgaaaaactctggggtgtaaacaaatgattgtaaccctacacactattcaataagtagtagaaggagcatcacacagatttcagtctaatctgcccttctgtgggccataatataaacataaatgtgtgtaatgataaaaagtcattttcttcaaagagactacagctagctgcacattgtgtagagcagcttcta

SEQ ID NO: 145970 - DNA, 455 bp, Homo sapiens
  misc_feature (1)...(455): n = a,t,c or g
tacggctacattggcnnnncgtctacaccgggctgactggggaaaaaacatgacaccatttccttacacctccacgcaatgccagatatgattcgacaacattcttcctgtcttataaaaagggtttatctaacccgttggtttggcagatgaaatcaactaggcttttggcttgcttttactgagcatattcaaaaccatttcagggcactatagtgnnnnnnnnnnnnnnnnnnnnnnnnnnnnnnnnnnnnnnnnnnnnnnnnnnnnnnnnnnnnnnnnnnnnnnnnnnnnnnnnnnnnnnnnnnnnnnnnnnnnnnnnnnnnnnnnnnnnnnnnnnnnnnnnnnnnnnnnnnnnnnnnnnnnnnnnnnnnnnnnnnnnnnnnnnnnnnnnnnnnnnnnnnnnnnnnnnnnnnnnnnnnnnnnnnnnnnnnnnnnnnnnnnnnngccttgga

SEQ ID NO: 145971 - DNA, 18733 bp, Homo sapiens
  misc_feature (1)...(18733): n = a,t,c or g
cttccgggaccccggggccgaccccggggaaaaggtggcgggccactgggaaaactaaactaagttgggcatgaagccaaagccaactaaatgccggcggcttggcctggctcttggccttatcctggatctggaatcctcagttcaaggtaagactcaagagtcttgttccccagccatcttctctgtaagccctgtggtccatgcaagtcattatattcattttaaggcatagaatgtataatattgtgagaaaggaggcaaagacgattgatttggggtcgctgaaccctttaatatgagttctgttaagtttggtaccaagaaaaattaaactctgtggcgtgtgcagacttgtaaactcttacaatgattgaaatgtgctattttgggatgaaaatgtgaggtttataaattttaaaagctcaaaaaaggaatctagaaaatgactcctgtgcctgttgcatggaggagatggcacctttgactgttggggggtgtctgcctacccctaagtgtctacatcagccccaagttttagtgcgctgtgacggtgtcattgttattttaacactgggagacgttatattccaattggggtgaatctgactgtgtgtattttcttttcttttttttttttttaaagataaacttggttcttactgaaaactcaattatggttagacatagttcatgtaaaacctctcagattttaaagagaaggccaaataatttggtatttgtgctcttgctcagagaagcatcatattcggaaatatcttcctaggtttatctaccatttagtgttgtttagtcagactgaaacaacttaaaacctgtaatgactaagacaatgaaaatgataggcttgtaagaaaaatacaatttgttattctttggcaaataaggaatcatgtctaaataagacggaggtcatggcttgatagagagatggctgaacctatagtagaaaaacactaggttccgccaaatggtaagggaaatgttgagtcacaatgacacacatgtcctagatttgtttcgtgaaatgcgaccttttatttgtcatgaacttacttccggtggagatgaaatcttacagatgatcgcagagacattcattttatgttggaaatttataaaatcattttcttctagttatgctaatgctgaaaaaagagcaagtaatgtttctggaacgttattaatttatgtatttttaaaatataaaacattgtcaattgtagggaacaggcttcactgggatcttttagggaatatcttcagcttgatgaaataattcccgaatagccaagtggtctgacaagatcgagagtaatgaggcccatactttagtacagtcttgaatggccagatggtgctgggcataccccaaccagagatatgtaagtctttatgttgtcaaaatttcccagaaacatgaatttcccactaagattcattaaggaaaactagaatgaaaacaaaaacgttccttgtataatattcattagaaagaaatgaagaaggccgggcatggtggctcacgcctgtaatcccagcactttgagaggccaaggtaggcagatcatgaggtcaggagtttgagaccagcctggccaacatagtgaaatcccgtctctaccaaaaatacaaaaaaattagccgggcatggtggcacacacctgtcatcccagctactcaggaggctgaggcaggagaattgcttgaacctgggaggtggaggttgcagtgagctgagattgcaccactgtactacagcctaggtgacagtgcaagactctgtcagaaagaaagaaagagagagagagagaaagaaaggaaagaaagaaagagaaggaaagaaaataattcatcatgaaattgtatagaatactagcatttatgtcatgacctcgtaggtttagctctttgttagaaaaggacacccatagaaagagacaagggagaaactgacaaactagggtgtttccgaaaaaaggctctcagtatcgggctcaagggcttgtgcccacatctgagcatgcagggaaatagatgtcccccactggctgcacatgtgagtgactgcggcacaaggctgtgatgtgaagagtcatgacaccatttcctcacacctccacgcaatgccagatatgattcgacaacattcttcctgtcttataaaaagtgtttatctagcccgttggtttggcagatgaaatcaactaggcttttggcttgcttttactgagcatattcaaaaccatttcaggtcactatagtggtttgctcgggttgccataacaaagtaccacggactgagtgggcttaaataacagaaatgtatttcctgacagttctgggagatgggagtccaagatcaaggtgctgggcagggtcgatcgcattctgaggcctctctccttgggcttataggatgggcgccttctcccttgttctggcacatgggccttttcctccatggcatccgtgtcttaataccatcttcttaggagggtcaccagggcattggatcagggccaccctaatggcctcatcttaactacctatatctgcaatgaccctatttctgaacaatttcacattgtgagattctgtgggttagaactggaacatatgaatttggtggtggtatatttttattataagtcaaacccaagtaaagatgtggggtaagattgtgtttaccaagcacaaagaaatggaaatttggggatgtgtaactctggagagcacagatgactaatctatttaatgtagggctccaggggatttgatgaggcctgtgaatcttccacttttattgcctctcttttccaatgacacccataaagaaaaaaaatggaatatccatgaacaggtgcagccaaggaggccaggcccgccatgtgtccactgtatactgtctcctagctcacaggaatgatactgatccactccttgtgctgctctttgtaaagtgatttcacatccattctctggtaatcatcatcacattccctgtgatgaggaattagcaccaattatagaggagaaaactggatctgacatttctcatctcatttgctctatacattaacctcttgcaaaaaatttgtgagtcttgcccaagacccattacaactaattaacggctgaactggtcgtctgatttcaaggccagaattaactttctactgcagctcatggatcagaggttttctttatttaaacaaacaaacaaaaaatcctttgaccgtagcccttgctataacatttcccactgagttgagggagaaattgaaagtaaacttaggagctttttatagcttgtcaaaccatgcaagagtgggggaagcttatccatcttgtggaattgatagaccaggaggaagtaactccggcttagataatgctaccattttgaataaatcaaatggtcttcttttccccttcatggtagttgctgcttaagtttctctaacatgcctgcagtaagtttccattaagaataggaaattaggctcggtacagtggctcacgtctgtagtcttagcactttgggagaccgaggagtgtggatcacttgaggtcaggagttcaagaccagcctggccaacatggtgaaacccccatctctactaaaaaatacaaaaattagctgggcgtagtggtgcgtgcctgtagtcccagctactcaggaggctgaggcaggagaatcactggaacctgggaggcagaggttacagtgagccgagatctcaccactgcactccagcctgggtgacagagtgagactctgtctcaaaaaaaaaaaaaaaaaaaagaaaaaagaaaagaaaaaaaaaagaaattagtatattgtgattatgttgagggaaaagttagtaccataatataaaaaggtatggactattggagaaagttgtttgctttggtaacatttactcatagaaagtattttggtaaagcaggactcagggtggtgggggaggtgggcagtgagggataggattcaaataaaaaccattctttcccttggaatccactacacaattaaccaacaaatcccataagtggaccttttaggaagataacatttctatccatgagcatagccactataatcacaagacatttatctcaagcaagatagagtcaagatactctcacaacctcaggggctggaactgtaaattttcacatcctgccaacacccttgaatagctatgtcaagaatttagtgtctgtaacttgttctttattttaaagtacatttaacatcatcggccccaaattagataggcttttggagtgggatcccttctacttttgatttctttataaaattttaaaatagctttgttgagatagtgttcacataccatacagttcacccattaaaagtgttcaattcagtgattaggccaggtgtggtggctcatgcctgtaatcccagcattttgggaggccaaggcaagtggatcacttgaggtcaagagtttgagactagcctggccaacatggtgagaacttgtctctactaaaaatacaaaaattaactgggcatggtggtgtgcacctgtaattccagctacttgggaggctgaggcaggagaatcacttgaacctgggaggtggaggttgcagtgagctgagattgcaccactgcactccagcctggatgacggagcaagactctgtctccaaaaaaaaaaaaaaaaaaagtgttcaatgttttttagtatattcacagagtcatgcaaccatcactataattgcttctagaacattttcatcatcccccaaaagaaagccttcgttacgaattttaattagctgagattctgaactctgggggaattttgtattctagaaatattttttactaatatgctacagttgtatttgtcatgctggtgaaaagatgtggtctttcacctggatgctttctcattaagcattatttttctgtttagcttcctgtgtgagcaaacattttctcagcttgatactcagtgcatcagcggcttgcagaagagactgcctaggcctgctctgtccagtacggtagccacaagtcacttgtggctactgaacacttgaaatgtggccaaggcaaattgggacaggctgtgaatgcaaaatatacaagatttggaacccttagtatgaagaaaagaatgcaaaatatcccagtaataacttttacattgatgatatgttaaaggacaatatttgaatatgttaggttaaataaaattaatttcacctgtttctttttacttttaaaaatatggccgctggaacatttaaaactccctatgtggtttgctttgtgtttctattggacaaagttggtctagacagtacaaggtgtgaagacaccgccctctgctggagaagatgctggatttttatttcacctacaggaagagacgtctaagtagcaattagatgctaaactaatgctgcctcaggaaagaatcaaaagagaaagagtgaaaccaggccgggcgcggtggctcacgcctataatctcagcnactttgggaggccaaggcgaggggatcacgaggtcaggagatcgagaccttcctggctaaccccgtctctattaaaactacaaaaaattagccgggcatggtggcacgtgcctgtaattccagctagtcgggaggctgaggcaggagaatagcttaaacccaggtggcggagggtgcagtgagctgagatgtgccacagcactccagcctgggcaacagagccagactctatctcaaaataaggaaaaataaaaaagaaaagaaagaaagtccataaattgagactcctagagatactaaatggtagaatgggaatttgaatttaaatttataagatgttcactctcggagatcataggtcattgttgtcctcctccttttcatgacaggaactagcaatgaagagctctgactatgtgctaggtactactctgagaacctaacatttgtatctccttattaactctattactgccccatcctacagatgagaaaattgaggcacaggaagtttaagttggccaagatcacacagccagtaaggggcagacattgaaaggtcattttgcctgccttatccccagcctccaggcagtggcagagttagctcattttggacaaacagctctcccagaccagacattgtaagctatactcaggaatcataggaaagattatgatagaataatatatagttacaaagaaaagaaagaaaatccaatgggagaatatttactgttttctatattaaagtgtttaatgtttatgtttttagaggaatattgtttattatagcaatttagaaaacaaaatgagaaaaaaaatcaccaaagattctacctccagttatttttgtgtatttccttccatttttccccccatgtctgtttatataattgaaactattattcatgcaaagaggtattctgattttctcagttatttttatttatttttaattttgtaaataaacttttttcttctgagacagtctcgctgtgtcacccaggctgaagtgcagccgtgcaatcttggctcactgtgacctcccagtctcaagcaatcttcctgcctcagcctcctaagtagctgggactgcagatgtgtgctaccacatccagctaatttttaaaatcttttttctcttttttggtagaaatgggagtctctctatgttgcccagcctgtattgaactcctgggctcaagtgatcctcccacctcagtctcccaaagtgctgggatttcaggcatgagctaccacacccaacctaatttttatttttattttattaaaaaaaaaagtttttgcctacccgcctctcaccctctcactcatttttaagtataggtttttctacaatgccacattgtcttttccataaaaagtactttcggccgggtgtggtggctcacacctgtaatcccagcactttgggagactgaggcgggtggatcacctgaggtcaggagttcgagaccagcctggccaacatggtgaaaccccatccctactaaaaatacaaaaattagctggatatgattgtgggcacctgtcatcccagctactcgggaggctgaggcaggagaatcgcttgaacctgggaggcagaggttgcagtgagccgagattgtgccactgcatcccagccagggcaacagagcgagacttcatctcaaaaaaaaaaaaaaaaagtacttttcttcatttggttagtattctcttatgagttgatgccttgtaatttatctgaatgttttccattattttgtggtgagctttaaaactacccttcctgactttcaagaatcctagacatgctccttgttgctaggtaattattagttgcactcattagaataaagtatatgcttggagtggggaggagatgaactttttgaagggcggtgaagtatttctcaccaccaggcctttgtctttgctaaactgaggaaggaagattttatttcattagctaacaaagaacctcctatataggccgggcatggtggctcacgcctgtaatcctcacattttcagaggccaaggtgggtggattgcctgagctcaggagtttgagaccagcttgggcaacatggcaaaaccccatctctactaaaaatactaaaaattagctgggcgtggtggtgagtgcctgtaatcccagttactccagagggtgaggcagaaaattgcttgaacccgggaggtggaggttgccatgagccgagatcgtgacagtgcactccagcctgggcgacacagcaagactctctctcaataaaataaaataaaataaaataaaataaatacataaataaatctcctatataacctcataatatcagatttggagccttttccatagaaatgaaattcagaagaagctgagactcagatattccaagctgcctggtgctctgtgaatagaggagacttgttcttgtgaaatctgagtgcaaagacacaggacaaattgttatctacttttcattcctaaggatactgtatggccctaaaacacaagaactagaattctgtgataccacgggtactccacagtgtgttccttcccctttctgaacctgatttgtctcatctctatgaaaagatgtgggctttggggtcagatgtgggttggaatcctagcgcctgtgtggctgcaattttcttttgtgtaaaattgagataatagtacaaaagtaacaacagttaatattatcaagtgcttactgtgtgcctggcactgtgttaaattctctaagtgtattttctcatttaatttttgtgataggcttatgacactattagtatcttcatattacagtgagggttcagagaagttaaggttccataactagtcagcagacctgggacttcactccaggcagctgattccaaagcctattctaactttaaactgctactttttggagtgttgtaagaaggacaatttatataaaatgttggcacatagtgggtgctgctgttatatgaatgggcacaaaatctgtctacattttgccttttaccaaatttagaatctatttagttaaaaccttcttagggcgggtggagtgcagttgctcattcctgtaatctcagcacactgggaggccaaggcaggaggattgcttgagcccaggtgtttgagaccagcctgggcacatagtgagacccccatctctccaaaaaacaaacaaacaaacaaaaacaaaacaaaactagctgggcgttgtggtgcccctgtattcccagctactcaagaggctggggtgggagaatggcttgagcccaggagttcaaggttgcagtgagctatgatcacagtactgcactccagcttgggcagccgactgagaccctgtctcgaaaaaaaaataaaaataaaaacttcttaggacagagtgattagaagctctctagtagatacttagtaacaatgtgggttcctcgggcaggttatcctacgcagagagccaggtaccaatgggtgcgctgcaatccagacagtaattctgcaaactgccttgaagaaaaaggaccaatgttcgaactacttccaggtgaatccaacaagatcccccgtctgaggactgacctttttccgtaagtggacttttctctaattaattaattaattacttatttatttgagacggagtttcacttttcttgcccaggctggagtgcaatggcgcaatcttagctcactgcaacctccgcctcctgggttcaagcgattctcctgcttcagcctctggagcagctgggatttcaggcgcctgccaccatgcccagctaatttttttttttttttttttttgagacggagtctcactctgttgctcaggctggagtgcagtggcgcaatctcggctcactgcaagctccacctcctggattcacgccattctcccgcctcagcctcccgagtagctgggactacaggcacccgccaccacgcccggctaatttttttgtatttttagtagagacgggaatttcaccatgttggccaggctggtctcgaactcctgacctcaagtgatccacccgccttgacctcccaaaatgctgggattacaggcgtgagccactgcgcctggcctaattttttgtattattagtagagacgggctttcatcatcttggccaggctggtctcaaactcctgacctcaggtgatccacccaccttggcctcccaaagtgttgggattacaagcatgagccactgtacccggccttttctctaattttaaagtgtctgtaatttcacaacctcttggcacagatgtgggagtgtttttcttcaagctgtccagagtgttttgcttcgagctcttgctttggtagtttggctcttactctgcagtacatggtaaaagtgtactgtatatactggcatatgacatgtgcgagtatacatgattcacctatgtttttgaaattttttttgtggatggtagagaggagcattgaggacttttcatcaacaggtattgaaaatgattgaacattgttttatttgtgtaaacagaacacactatatataaaaatccaataattaactgaatggataagcaaaatgtggtataagcatacaaaggaatattattgggtcataaaaagaatgaagtactgatacatgctacaacatagataaaccttggaaacattatgcagagcgaaggaaggccagacaccaaaagccacatattgtatgattccatttagatgaaatgtccagaataggcaaatccctagaggcagaaagtagattagtgggttacaggggctggggaaagggaggaataaggagtgactgctaatgggtatgagggttttttttggaggaggtgattaaaatgttcttctgccaggtgtggtggctcatgcctgtaatcccagcactttgggaggccgaggcgggaggattgtttgagcccaggagtttgaggccagcctgggcaacatagtgagaccctatctctatttcaaatacattttttatattaaaaaaatgttcttcaagtagttggtaattatttttaaaaatggccaggtgcagaggctcatgcctgtaatcccagcaccttgggaggctgaggtgggaggatcccttgagcccaggaggtttgggaccagcctgggccatacagcaagaccctgtctctacaaaaaatacaaaaattagctaggcatagtgatgtgcacctgtggtcccagctactcgggaggctgaggtaggagaatctcttgagcctatgttgagcctgcagtgaaccctatttatgccattgcactccagcctaggcaacagagtaagactctgtctcaaaaaaagaaaaaaaaaattagggaaaggaagaataattagccaagacttgtaaaacaaaaatcaaatctcttcttttgatcacataaaacttgctttaaacttgcaaaaaagacctgatataaattcataagtaacaaaaaattgaattatattagaaaccattaattcaatgaatactaaagctatgtaggatgtagcaaaatatacatattaagaaaaggattatcataaaagttttaatctccaggctcaaacctagaaaatcactctcctcaaagccagggttaatcatcatgctccaaaccaggtacatttcacatcactttgggatcctggcaactttctcttttgttttttttttttttttgagacagggtctcctctgtcacccaggatggagtgcagtggtgtgatcatagctcactgcagcctgcaactcctcaagtgatcttcctgcctcagcctcccaagtagcgggaccacaggcacacagcaccatgcccatctaattaaaaaaatttttttttgtagagacaggggtctctgtacatttcccaggctggtcatgtactcctaagctcaagcagtcctcccacctcagcctcccaaagtgccggaattacagtcatgagccaccattcccagcgctggtgactttctccatcactggtgactttctccatcactggtattcactgcattagtgatgacatcattacaatcttcaatatgcaactttgtagtcctactcttgcattcttactttaaagcctcagcattaagtttgaatgtaatattacagcatccttcattactttaaatcattggtttcaatagtaattcatttaaatctaaaatgttaggctgcagtggctcatgcctgtaatccccccagtttgggagactgaggtgggagaatcacttgaggccaagaatttgagaccagcctgggcaacacggcaagaccccatctctaaaaattagtggcccggcgcctgtgcctcacgcctgtaatcccaacactttgggaggccgaggcggatagcttgaggtcaggagttcaagatcagcctggccaacatggcggaaacccatttctactaaaaatacaaaaattagctgggcatggtggcacgcctgtaatcccagctattgagaggccgaggcaggcagactgggaggccaaggcaggcagattgctttgagacctgcctgggtaacatggagaaatcctgtctctacagaaaaatacaaaaattagccaagcatggagaaacctcgtctctatagaaagacacaaaaactagccatgcatgcctgtggtccagctactcgaaaggctgagatgggaggattgcttgatcctgagaggtcaaggctgaagtgagccatggtgtggcactgcactccagccagggtgacagactaaaaccttgtctcaaaataaataaacacatttaaaataaataaatacaattaaaactaaaattaaaaaataaaataaaatgttaagagaatagctcaaattctccaaaagaactcttgcacaccattcctcctcttctcaaatctctattttccttccccaaagccagtaactgcttctcaccctgaccctgtgctttctttcccgtcattgcgaaagaatggtccttgcttctgtgctgatcccaaacccttttgccctcagatcctcctgtccttccctggccctgctctgtattggctgtggggtgggggtggcggtggaactgacccctggggtctgcatttctcaggctcccagggctgtggctgactttggccaatgggaggcaaggacgggagactgagagcttgggaggaagggagagaggtatgtttcttctccttactccctgcctggggtggcaccttgggcaggactctgttttgcccatggcctcagctcccaccagatgcctctagtccctgggctcaggaaatagacaacctccttccactatcgctgtagcccaaggagggaagtattttttttctttctttctttctttccttttttttttttacagagtctcactcttgttgcccaggctggagtgcagtggtgcgatctcagctcactgccacctctgcctcccgggttcaagtgattctcctgcctccgcctcccgagtagctgggattacaggtgtgcgccaccacgcctggctaatttttgtatttttagtagagatggggtttcactatgttggtcaggctggtcacaaactcctgacctcaggtgatccacccatctcggcctcccaaagtgctgggattacaggcgtgagccaccatgcctggccccaagtatgaatattaaataccactggtggtgccttgaagccctttcccatggggattgaagaaaaaccacagttaagactcaaagtaggggacaaatagcttggttgtaggccattgacgtgatccctgaaagattgtttgaacaatgttacccacaaccatccaaacttattaggaaggataaagattttctaaagctatattgaggtgaagagaagagactattcctccaactcaacgtggggatgaaaaaaaggtaaaaaccagagtttacaaaaattcacttttaatattcaaatgaaagcaacccccttctcctgcctctctgaacatggccagcatttcagacaccctaccacctcccaggctctggctgcctgataaaaaaatcccaatttttgccaaaacctcaaataccacaaaacactaaaagaacagatgtgagcaacttatttaagttctacatttagtagctgatggacacataaggctttcaagaagacactcttctcttcacaacatattaaataagtcctagcacaactgactgcttccaaaactaccacccaagcgtgccaccactcttggctgaacagaaactcttcctcatgacaagggcactatgctgatttcagcagaactgaaggaccacgactctcccagaatatctgtatttttacctctcagacttctcctgcaatgtcctaatgatcatgtaaatagtcttcaatgagaaacaggacatcaaaccttccaaacaggcagaaaatgctctgctaataccatgggagagggtgatcagtttttggcagaacaaaatggcatcaccaccttagtactgaaattagtaggagtaatagaacaatttctcctcaaatataatggctaggatcatacctaaaacccactggcctctaccatgagtgaaagaaaaggagacaataggcttgattgtacaatcccctcagtatacgtgtgtcaggtacacagagaaaagactgctaaccagtaacgtttcaatactaagagaagctattaatgtggcaaacaaccaagaggtaatatctagtttctaggtttaaaaaaaaacaatatatatatatatttataataaagttttaaatacaaagtgctttttatatatcgagaatgatacagtgttgtgaataaatccctgtttgtaatcttgcttacaagagttaactggtaaataagtattttctttcctctttccagacaatgttcaacaagtaaacaccctggtgttaggagcttgagaatcagaggccattgccagcaatgtctattacattacagcaaagccaaacttttcaaataaaatttcaccccaaatccaagaaaaattatttttattttaagaaaaaaagtttctatttagaagtaaataacccagtacgattgtggaaaagatgacatggtagtagcaccctgtcctaccctggtgataacctcaggtatgttacacagcttaaaagcatgtgcaatattacctttctttttaacctaaatcatctaactgatgggcagaaaaggtctcagaatagttgcttttcttgtttgtttttttaattttttttttctggtcggcgtagctttgtggacttttaagtttaagcagctttatctataatgtgggagcatggttctgtagactaccttgctaaacttaggactccttttacaaacacattccagtgctcataaagaactggtagtattagctcagtgtaccctctaaagagtatctcccccaccttgaaagagtgtattctcaagattcttcttgggcagttttgtcccccttaagtataaccactcatagaatcctgcctatctgccctctcactctggttggtggagtgtcaccttagcactctatgaactactcaagttcacagggaactctcagccacaacttgtggctccttctcactaagtgtggtcatggaccactctctttgtaaagcaccataatctaagacagagcaggggctgtggcagcccgtggtaccgtggtcagtcacagcagcttggtgtctaccagccacagagaagaccccactgtatggaggctacaattaaccaaacaggatttgggaaagcaaaccaatgagaaatacctatctctggcaccctagagaattacaattagataaaattgtccaaactcaatgttagaactaaaatacaaaacactgccttatcaagagtctgaaacaccttgtgacagtagtggcatcttacagaaactgacaagggcactatgtcagccttgtaccgtaaattatctgtttcatatttagaaagtcactctcttagcatctccatagttttagttaaaatatcctttagaaagactaaaaccagacaacagagctctgttaaccaatttctcatcctaggaatcacattatttctagcttttatataagtagcacttccttcagtgaaatagctaccaaaacaaatccacattacctaagtatctatagcaagagcaaaataaaatttcagcatgaccttgtaataatgagtgatccaaagctgctgccacccaaaatggaactggtgggtggagtccagttccaagtgcaggtgtctctgtccacctgtttcgatcacaaccagtcagaaggtttcccttgccagctgggcggtgggttaactcaccccattacccattccaggccaggactggaacacacaaatttgaggaattagatttttttaattggcctacttagagctggtctttcagaaatatcttcctttttttttttaagcttctctcataatagcaagtagcacgcatcatctgtgcccagatttgcattaattaccatagtttatttttgtgcatgccactcaagggccagatcctatttttagttagcctcagttgtattctgctcagcctttgcagcttcgtaggacttagtacaagaagtcacatgccggtggaaactgtccctccacataaacctctttgcacagatattacactcatacggctttatgcctgtgtgaattttcatgtggcccacgagatggtgcttcattttgaatttcttaccgcagaccccacagccgtaaggccgaagaccgaggtgcatgctcatgtgccgatctctctgactcttgtgagtgaaacttttcccacactgacaaggatacagcttgtcagtggctgagaatcctaagtgggaagcttcttctttaatccctgttaccatttcaatattctcactgtaacctgctgcgagggcagcctcctgtctgtgcccaattagattcccatctgacctctctccggaaaactcttccatggaagagccatagaaatccacctgctcatcataattgctttcatcagcctgttcatcaaactcagcttccactttcttctccccgatgtggaagtcctcctccactcccgaaggctgcaccgtgtgctctgtctgcacggtgttgatggactctgtgacctggtgctcgtcgtaggtcgcgtgcacatccatgccctcgcaagcctgttctaagcgctcgggcttcacgtggatccagcgtttgtgagccatgatgctgggcttgctgtacatgggccgggtgtagtggaactcggcgctgtcgctggcgccctcctccccatcctggcttgccatttccgtgctcaggcggtcatgctctgtggacgagttgctgggcaggtattcgtgctcggtgagctgggatgacagctcgtctttggtgctctcctcttcattttcaccatctctcagttcttgggctttgggaaaatcagtatgacccccagagcccagctcaaagctctctaccaggccattataactactgctgcttggtgactggtggtcactgccatgatttagcttctgacaaaggactgtagggtttccctctaaaacttcagtgcatttgtctaccacatgccacatctggaggaagcttgccgctgtcaagtaactaacaatttctggagcgggcattactagacgtcctgtataactagataggagaatgttctcaaacactcttgggttcatcacatcaggcaaaacaattctcctgctgtttttcaggagtacctggtcacaaaagtagggtgaactggcagcaagaacggctttgtgtgcccggaaaatgtggccttggacaacaatggagacgtcacataattgtccttgctggcgctgctggttcagtttctgtagaatggtgctggaaaaatcaggaaattctacccgaaaagagtttgttccaggctccatttcatcacaaatcttgttcggtgctacaagagaaagaaaaattagtacaaattccagcccaaagataaacttattttatcccctcctccattgttaagacaagttccaaagttccacaaagtcctctagcctatgggccccactgggtaagggattcaatccctagagcaaagcttgcaggtgcgtgtttgccaaaggcaggactcaccaccactccttgtggaactcctgattttggttctgtgtctgtgggtaagagaactgaatccatagggacaagatttgtaagctatacaaatctcccaagtaaaaccaagtactgtaaatatttacagttaaaacaaacaagatacccattcaaataatataatttttttttaaacgagatggggtcttgctctgttgcccaggctggagtgcagtggcacaatcatagttcactgcagccttgaactcttgggtaatcaagctatcatcctgcttcagcctcctgagtagctgggactgtatgtacatgccaccatgtccagctagttttttttttttttttttgagatagagttttgctcttgttgcccaggctggagtgcaatggtgtgatctcggctcactgccacctccaccttctggtttcgagcgattctcctgccttggcctcccaagtagctgggattataggcgcccgccactacacctggctatttttttttttttttnttttttgtattttttggtagagacgggatttcactatgttggccaggctggtctcgaactcccgaccgcaagtgatccacccgccttggcctcccaaagtgctgggattacaagcttgagccactgcacccagcctggaaagtatatttatgaaaggtttgcactccacaaaagcatctttgctagggtgtcaaggaagagatcactaaaccaaccccaacacatccatacaattccagcaatctagagagaggctggtccttttccttttctggattattttctgttctcagtaaaacaagtatttactgtgatactgaaacactgggaaattaacactgattaagatattttaaacactgagtcttaattataacagaaccagttttcatcagaatgcttttacgtcacattcagtgaagtgttacgctaatatattctacagccctgaagatagaaaaaaggtttctctccaggtatgagata

SEQ ID NO: 145972 - DNA, 372 bp, Homo sapiens
ggcacgaggaaggaagtattgagattgacattccagtccccaaatacttatcttctgtgagctcacaagaaactcagggcggccccttagctcctatgactggaaccattgaaaaggtgtttgtcaaagctggagacaaagtgaaagcgggagattccctcatggttatgatcgccatgaagatggagaacaagttgaaatcatcgcagaaggataaagttcgtcagtttatgatcttcacacaatctagtgaaaaaacagcagtaaggttgtctttctcaaaatgactggaagttagatgttgcaacagataattttttccaaaatccttgacttttatatacgagaagagtgtaaaagggatcattgacg

SEQ ID NO: 145973 - DNA, 576 bp, Homo sapiens
cactatttacctattttccaaggaaggaagtattgagattgacattccagtccccaaatacttatcttctgtgagctcacaagaaactcagggcggcccccttagctcctatgactggaacccattgaaaaggtgtttgtcaaagctggagacaaagtgaaagcgggaaattccctcatgggttatgttccccatgaagatggagcataccataaagtctccaaaggatggcacagtaaagaaagtgttctacagagaaggtgctcaggccaacagacaccactcctttagtcgagtttgaggaggaagaatcagacaaaagggaattcggaataaactccagcaaggaaatggccagttaagtagtgttttctctctcccccaaaaaaaggaagtgcctccagcttttttgggggtctcataaagagcagttttactaaatgattgtatgcttatgctgaacccctttcatattggagatctcatgcatttgggtcccctaattatctcacaaatatttcatactaataaagttgaattattttttattggaagccaaaaaaaaaaaaaaaaaaa

SEQ ID NO: 145974 - DNA, 377 bp, Homo sapiens
  misc_feature (1)...(377): n = a,t,c or g
agatgacatagtttgtaaatgtaccacagatgaaaataaggtgccttatttcaatgctcctgtttacttagaaaacaaagaacaaattggaaaagtggatgaaatatttggacaactcagagatttttatttttcagttaagttgtcagaaaacatgaaggcttcatcctttaaaaaactacagaagttttatatagacccatataagctgctgccactgcagaggtttttacctcgacctccaggtgagaaaggacctccaagaggtggtggcaggggaggccgaggaggaggaagaggaggaggtggcagaggtggtggcagaggtggtggttttnnnnnnnnnnnnnnnnnnnnnnnnnngggcttcagaggag

SEQ ID NO: 145975 - DNA, 652 bp, Homo sapiens
tctcagtttaaggctttttttttgtaagggaataaaacgctttattttacaaattcaaatatgcttcaaatgaaaactcctatccatttattgagcacccacagagtgccaggcactgtacaaaacattagaaagacttgttcatgctcttttagagcaaaattcactattccgttgcactttgcatgatgctgacattttagatccattgtcataaaatgaccaagatcttcaagacttgttcaagaaacaagtttccaatccatagtagaaacagatcatgcaggttaatgcagaagtcaactggtgatgtctgtcaactgtttcacttaatgtcctctccctgattaagagaaaattaaagtattaagggcacagaaaatggatttttaatagtattataacctaaatctcaagtttaaaatcagcattagttccaataatgtttagcaaacatactttaccaaatttaactgtcattcatattacacttttatttttcaaattaataataaagcaaaacaaattagaattaggtgaaaaaattgaaaagaaaaggcaaaaaaaaagtgatataaaatgaaaccacaaattaggctaagcaaagaacaccatggtgttctatatacttgctggcagagaaaattaaact

SEQ ID NO: 145976 - DNA, 1027 bp, Homo sapiens
gcaagttggcctctctgttgtaaattagtggttaaggttatctattattgccacttttccagcgctaaaggctgttttggaaccagtgttgcttgttccgcgggtgattggctttttttttttggcaaaccagttattcaagtttctggtctttaaaaaactctgtggcggtacggtaaccgaggaggttccagcgcggcggaagtaccccgcgggtgggtgtgtgcgcaaggccaagggccagaggggcacgtggcgccgtattaaggagaagttcctgcatccctgtgaagatgacatagtttgtaaatgtaccacagatgaaaataaggtgcctttatttcaatgctcctgtttactaagaaaccaaagaacaaatgggaaaagtggatgcaatatttggacaactcagagatttttatttttcagttaagtggtcagaaaacatgaggctttcatcctttaaaaaactacagaagttttatatagacccatataagctgctgccactgcagaggtttttacctctgatctccaggtgagaaaggacctcccaagaggtggtggcaggggaggccgaggaggaggaagaggaggaggtggcagaggtggtggcagaggcggtggttttagaggtggaagaggaaggtgaaggtgggggcttcagaggaggaagaggtggtggtttcagagggagacggacattaagtgaaacatgttgacagacatcaccaagtttgacttctgcattaaccctgcatgatctgtttctactatgggatttgggaaacttgtttcttgaacaagtcttgaagatcttggtcattttatgacaatggatctaaaatgtcagcatcatgcaaagtgcacgatatatagtgaattttgctctaaaagagcatgaacaagtctttctaatgttttgtacagtgcctggcactctgtgggtgctcaataaatggataggagttttcatttgaagcatatttgaatttttaaaataaagtgttttattcccttaaaaaaa

SEQ ID NO: 145977 - DNA, 2025 bp, Homo sapiens
  misc_feature (1)...(2025): n = a,t,c or g
gcctcaccacccctcgtttgcacgcacgcacgttcattctccgtcctcgcgccccttttcctacactttcctcttctccccgaccggaggagccgctctttccgcgcggtgcacttctggggcccgaggtcgagcccgccgcatgccgccgttcgcctgagggaagcgagaagaggccgcgaccggagagaaaaagcggagtcgccaaccggagagaagtcgacctcccctagcagcagccgccgccagagaggcccgcccaccaaggttcgccgtccccctgccccgttcacaatgcagcctgcttctgcaaagtggtacgaatcgaagggactatgtcttnaaatgggaatttgtgtttttgaacacattaagggatgttaaatgtaaatttttgaaaaatccaaaacttacaatttcagttgtctcggaggaagatgataatttttaaggcattttaaatgaaattgatctttttcacctgtattgattccaaatgattccaagcataaaagaacgggacagatcaattttaatgttgtttacgaaaaaggagaatctgggccagttcatggccaaagggtttaacaaaaggaaaggggcaaaggtttaatttgggtttagtgtcgacttcaataaattgggaaagactgggaagatgattcagatgaagacatgtctaattttgatcgtttctctgagcatgatgaacaacatgggtggtgatggaagtggtagattacccagaagtagatgggagcagatgatgattcacaagacagtgatgatgaaaaaatgccagatctggagtaaggaatattgtcatcacctggattttgagaaagaaaaataacttctctgcaagatttcataattgagagaattcctgagttgatcctgagttgatagctctaaaggcagatatgctgtatttgcccactttaacccatttttcaacctgtttgttttttaaaaggcttcactaagggttgatatgtaccattgtatggggcaattttaagtcagctaaggcaataaccttatgcatgaacatttcccagactttcatgaagctgttgaggtcctaggcaattaatgcagcagttgcgataaataaaaacatctccacctaagtctccttttcttcataacatagatactgacatggataggaagctctcagctttaggggaaagagaataaatttttagattatagaacatgggattcaaaagtgactggaacaaattggctgacacctttactgggtaacctggctattcttctgggtgttaaccctccaggaattgtccccactaaaatttatttttccaaaaaatttaccttccacattattcctatgtaagtgatggacttgtccagtgttcccaggtgtatccttagcctaaaactagagaatgcccctaacttaggatggttttttgaggcctatacaattggtaattggtttgacccttaagccttttacatctccttagcatgggaggacgaagaaagctgtacattgttgccttgagagtctgtacatttagtcccagatttgtatttgcactgtcgagtatggcaaatggagtggaaaaatggtttaataccactattgggatttttttatttccttttttttgattcagcttatacccgggctgaaaacctccaatttatgttccatgaccagtggggatttttttaaatgtcctacattcctttcctaataaactgttggaagaccttccttggctgtcccttttaagtgtctgggcttactgtaaatttttatgtatttacccatttactgggatgggagtttatttgaggaagaatttgggattattcctctgtttgaaaaaagaggcttgctgtaatgtcacaggaaaccttttaaaagtggatctgtaatagcatattggtagatggcactttgcagcagttggaaaagaaagtcgttgtgtgatttgattgaaataaaactaaatgtgttgtcctcctaaatctttgaaaaaaaaa

SEQ ID NO: 145978 - DNA, 591 bp, Homo sapiens
agctggagatggtcaaagcccggaaccaactggatgctgtcttgcagtgtctgctggagaagagtcacatggacagggagcgtctggatgaggaagctgggaaaacaccctcagacacccacaataaacacatatgtgatcaagctgttcgaccggagcgtggacttggcccagttcagcgagaacacgccactgtacccaatctgccgcgcctggatgcgcaacagcccctctgtgcgcgagcgtgaatgctctcccagctcacccctgcccccgctgcctgaggatgaggagggctcagaggtaaccaacagcaagagtcgtgatgtgtacaagctgccgccacccacacccccggggccacccggagatgcctgcagatcccgcatcccatctccactgcagcctgagatgcagggcacccctgacgatgagccctctgagcccgagccctcaccctccacactcatctatcgcaacatgcagcgctggaaacgcatccgccagaggtggaaggaggcctctcatcggaaccagcttcgttactcagaaagcatgaagatcctacgagagatgtacgaacgacagtga

SEQ ID NO: 145979 - DNA, 1032 bp, Homo sapiens
  misc_feature (1)...(1032): n = a,t,c or g
ggcacgagccacggtccaggctggacacaaccaaaggcggaggacccgtggcccacgaagctcatctttgaactgtccccgccttctcccgccttgacttgtgaccctaggccctttggggcgcctctgacctagctagccagatcccggacccaaaccatgttccctgtgaaggtgaaagtggagaaatcagagctggagatggccaaagcccggaaccaactggatgctgtcttgcagtgtctgctggagaagagtcacatggacagggagcgtctggatgaggaagctgggaaaacaccctcagacacccacaataaggactgctccatcgcagccactggcaaaaggccatctgcccgcttcccccaccagcggaggaagaagaggagggagatggatgatgggctggctgagggagggccgcagcgatccaacacatatgtgatcaagctgttcgaccggagcgtggacttggcccagttcagcgagaacacgccactgtacccaatctgccgcgcctggatgcgcaacagcccctctgtgcgcgacgctgaatgctctcccagctcaacccctgcccccgctgcctgaggatgaggagggcttcagaggtaaccaacagcaagagtcgttgatgtgtacaagcttgcccgccaacccacacccccgggggccaaccgaagaatgcctgcagattcccgcatccccatctccacttgcagccttgaggatgcagggcaccccttgacggtggagcccttttgagcccgagccctcaccctccacactcatctatcgcaacatgcagcgctggaaacgcatccgccagaggtgagcgtcccccagcctgcttgcccctcgtagggccctttgcaactgctgagtctcccctctgcctcccnaggtggaaggaggcctctcatcggaaccagcttcgttactcagaaagcatgaagatcctacgagagatgtacgaacgacagtgatgttcccaggtcccccnacaccagtaaacatcccccagctccg

SEQ ID NO: 145980 - DNA, 542 bp, Homo sapiens
tttttttgggttataaaagcccttttataaagccatttttaaacaaggacaaaaaaaaaagtttacaaaagaaaaaaagatacagaaaaagaataacttgcttcatatgtcccaaaaagagaaaaaaataaaggggacaatgccaacatgctcaacaataaaggcttctttttcttatttttttaatacaaaatacaagcaaaggatacacatacttaaaacagagctcaggagcagcatttaacatattcctagtcaaggacaggatgggaagtaagtgaagaatagggccaggaaaatagtgtcctatagcagaggtggttggcactcggggtagggtgtgcagtggtgctctacgaagcagcaggatcacagggatgtacttcttatcacatttctatgaagaaatgggaagatcgggatatgaaaaagaaaatgttctatccccaaataaaagcagagcatggttaatgggacctgaatgcacatttatagcataaaagaatgtcaattctatttatgttcaagtcctgtatttttgg

SEQ ID NO: 145981 - DNA, 3235 bp, Homo sapiens
ggcaaggtcggcctcaccgccctggcctagcacctttggaaactgaatacatggagtgttaaccagaaaaatgtctggcccttttgcctcgctgcctctggaaacctcagtgtttcgggctggtaggaagctacaggacagacagtgggcacggtgcctagcagcctgtcgcgcccccgcccgcctctgcattcctccagcggtggtgtacggatccagacattgtttgccacctctaggcctcttgataaaacagcaagtatttttcttgtcttaagcaatgcatgtatattttagaaaatattaattgcatagaaggaaatacaggactcgtgatcccaccactcagaaataattactattaatacggttggattttctttccagcttttttcccccttaattaattaactaattcttttttttccctggcaactccctggttcacagacttttttttttttttaacttgggcatggtggctcacacctataatcccagcactttgggaggccagagtgggaggattgcttgagcctaggagttcaaagctagcctgggcaacctagtgggaccccatttcttttttttgggggggggggtgggttataaaagcccttttataaagccaattttaaacaagaaaaaaacaaaaagtttacaaaagaaaaaaagatacagaaaaagaatacccttgcttcatatggtcccaaaaagagaaaaaaataaaggggacaatcgccaacatgctcaacaaataaaggcttctttttcttatttttttaatgtacaaaatacaagcaaaggatacacatacttaaaacaggagctcagcgacgcaggacacgcaggtcctgggaaacccttccaataaaagcaaacgcaggagttcgtttttttctttgtctatgcaggatacatacagagactcgggatattgtaaaaattaagtatcaccaaaagacccatcacaccgattcctacccaatggcatggttgcatctggtaattccacgaaccatgggtcaaccaaaatcatgtttcactttccaaccccattttcattttaaaatttaaaggaaaaaaccttttaaataaaagtgggttacattccaactttaacttcccttggtaccatgctggcagatttcagcactggttaaggtattgcaagaatggcccaaaccctctgggtgtctggatccatgtattctaggcaacattggcagtatggaagaaaagagatgccccgggtctcagcccatggactagttaatacattgatagcaggttcctgtcttttacccttcctgctcagaacataaaagattaaggacttaaaatcaaggaagactgggagtttttagagctggcaaaatgaagtctaaaagataaatcaaggcaaacaattactgagaacttggcctgttgcttaacctggcaagtctaaaagcctttctttaaccttgtaggaattagatgcataaggtttgctgcaacatgttcatggtaaacaaactaagtagagctcttatttacaaatcttgtaaccaaatacttctggaggaaaaggagaaaagaattcactaagttccagaagacaaagctttaattgccagacgtatacaaacaacacaactcacacgtaacacaccccacacaatacttcaggggtttttatacatgttattttagggcagaagctgagtactataccccccacaccccatcaaaaaaggaacaacaaaaaaatccccaattttaccctccccccaataatctagaaaaccctcccttcacccctgatgtacaaagtgtatgcacaacggtggcattctacccagccacacaaaggcatgctcaaaccagatgtcacccagttcaggtcactccattgggcatgggaaacaggcagggtttacggggatgtttcccaataagtggggttattacacagtcagcaccactgtgaattttgtgaatttgaaaaaaaaaaaaagtgtaatttatggattcaaggattcaaaaagaatcattttgtatcgaatttaccccagacaaagggaaaactggttgcgactgaaacttggctatagatagcttgatgtcccaatattcaaacaataagccaactctccattttcaagtaaatccagcttcatccacagagaaacagacaattttctaacctcaagagcaaccagcttgttacattttccctatcctatggcaggaaatgcgtattacttctgttctgttttaagcatctcagtctaaatgccatgaagaccagagcccaggtttcttccttttcaaattcttaaggtgaaagttttttccttttcagtgcagctaccaatgatgcaggcaaagaactgttcaagccagcactcattcttcaaaggctgccaaccagtggccaccatggatcttttataaaggctttccccccggttgctcctgatatttaatttctgcttttgcctaacgctcctcaaaagcatcctccgtaaactgaagtttaaagaaaagcacgattccccatcccccaaccagtacttgaaaatcccacttatctgaatgttcacagataaaaaagccattaaaaaaaagagtcaagtttagtctagctgaccatattcacaagatgttaaaagctttactggagtataacctcaaatttcactcttgatttgttatctgtaagaaaatgctatttgagccagtacccaaattaagtattaaaatgaggattgaactggggcaaacaggttattgtgaaaacagtcaatatggtaagctccttcaagggaaatcaactactgttcctcaagattagaagatgtccacactctttgcattagcctccctaaaggaggaaacacccattaattttccccttatggaatcaatatggagtggaaatatgaaatgaggagatgttttagaaagcaggacaaatctacctaccatttactggaattaaaatgtatcctctgggcccactccattggattccgattctgaggtgaggagggacttaaaagcagcagcagggttacagaaagactgaataagatgaaagtatgctacgtatgtctagctggggaaggggggatctggaaaaaaaatcttaagaactagaatgtagtgtcagtcagcatagctgctgaaatctacgttgtagaggtaaccctagcagagctaatacaaacaagctccttcaaagttaacg

SEQ ID NO: 145982 - DNA, 443 bp, Homo sapiens
  misc_feature (1)...(443): n = a,t,c or g
cgcagaccctgccggagccgctgccgctatggatgatcgagaggatctggtgtaccaggcgaagctggccgagcaggctgagcgatacgacgaaatggtggagtcaatgaagaaagtagcagggatggatgtggagctgacagttgaagaaagaaacctcctatctgttgcatataagaatgtgattggagctagaagagcctcctggagaataatcagcagcattgaacagaaagaagaaaacaagggaggagaagacaagctaaaaatgattcgctcaacctcttttgttcagtatgtgtaacttgaagctaatttgtactactggatatctgactggagccacagatacagaatctgtattgttcttactgaaacacagcatggaattaacattaaacttaaataaaacaaacctaaattnnnnnnnnnnnnnnnnnnnn

SEQ ID NO: 145983 - DNA, 1704 bp, Homo sapiens; identical to SEQ ID NO: 114640

SEQ ID NO: 145984 - DNA, 496 bp, Homo sapiens
acttccaccaacgcatcctattcgcttaggtcttgctctcaatttttccgtattctactacgaaattcttaattcccctgaccgtgcctgcaggttggcaaaagcagcttttgatgatgcaattgcagaactggatacgctgagtgaagaaagctataaggactctacaacttatcatgcagttgttacgtgataatctgacactatggacttcagacatgcagggtgacggtgaagagcagaataaagaagcgctgcaggacgtggaagacgaaaatcagtgagacataagccaacaagagaaaccatctctgaccaccccctcctcccctccttcgctcgctcaacctcttttgttcagtatgtgtaacttgaagctaatttgtactactggatatctgactggagccacagatacagaatctgtattgttcttactgaaacacagcatggaattaacattaaacttaaataaaacaaacaaattaaaaatgcc

SEQ ID NO: 145985 - DNA, 482 bp, Homo sapiens
  misc_feature (1)...(482): n = a,t,c or g
gtgttgtattttttgaaagtgcaataatttggtattttgaagacccggcgtgtggtcaggaacccccggggaaggcgggggcccagggtgcggcaccgtgtggcgtgggggggtctcagttttctagccagctacctcggtaattccaattcaggttaacttccctacggaacagcacagatgtccacagatgtccacagctgccgccgccgccgccgctcgccgccaccataccccggtccttggggcatgggttgcggtcgctttcccaaggggcagcagggaccccggccaccccggctctcgggtttgggttgattcctctccttttttgctcttggtttttccgacgggtaacgaggctgggcccggcaccctgttcccccgggagcctcactcttccagcaggaccagaccagggggcttcttnctgtncccaagcgtttcccgggcccttgcaagggccaaccatggccnttggc

SEQ ID NO: 145986 - DNA, 1925 bp, Homo sapiens
  misc_feature (1)...(1925): n = a,t,c or g
gagtcggagacactatccgcttccatccgtcgcgcagaccctgccggagccgctgccgctatggatgatcgagaggatctggtgtaccaggcgaagctggccgagcaggctgagcgatacgacgaaatggtggagtcaatgaagaaagtagcagggatggatgtggagctgacagttgaagaaagaaacctcctatctgttgcatataagaatgtgattggagctagaagagcctcctggagaataatcagcagcattgaacagaaagaagaaaacaagggaggagaagacaagctaaaaatgattcgggaatatcggcaaatggttgagactgagctaaagttaatctgttgtgacattctggatgtactggacaaacacctcattccagcagctaacactggcgagtccaaggttttctattataaaatgaaaggggactaccacaggtatctggcagaatttgccacaggaaacgacaggaaggaggctgcggagaacagcctagtggcttataaagctgctagtgatattgcaatgacagaacttccaccaacgcatcctattcgcttaggtcttgctctcaatttttccgtattctactacgaaattcttaattcccctgaccgtgcctgcaggttggcaaaagcagcttttgatgatgcaattgcagaactggatacgctgagtgaagaaagctataaggactctacacttatcatgcagttgttacgtgataatctgacactatggacttcagacatgcagggtgacggtgaagagcagaataaagaagcgctgcaggacgtggaagacgaaaatcagtgagacataagccaacaagagaaaccatctctgaccaccccctcctccccatcccaccctttggaaactccccattgtcactgagaaccaccaaatctgacttttacatttggtctcagaatttaggttcctgccctgttggttttttttttttttttttttaaacagttttcaaaagttcttaaaggcaagagtgaatttctgtggattttactggtcccagcttttaggttctttaagacactaacaggactacatagaggctttttcagcattactgtgtcgtctccgtgccagatgtggcaagatcaccattagcaaatggaaattacattggaaagcccattagacttataggtgatgcaagcatctaagagagaggttaatcacactatagggggcataaagtggtatccagttttcatttttctcaaaatggtttaaaaccgggggttttaaaccacaggtgttggcaaattaattggggtggttagcttggagatggttaaaaggtgggtttgggggaggggacctccgttgtaaagggttttggctggtaaaaaaaatgttttcccaaactcccgcctgaaaaatggtttgctgaaaaagccatgggtgctgggtaaaccagttcaaacaattccggtggctgcctcattccttgccctacttttactctcccccactgaaagcaggttaagcgttgaaaggtggtatggaaaagcctgcatgccctgttcaattctttgggtttcttctccttccccctccccctaccttctttcccctcactcctcccctccttccgctcgctcaaacctcttttgttcagtatgtgtaacttgaagctaatttgtactactgggatatctggactgggagccacacgatacagaatcgtgtattgttcttacttgaaacacaggcatggggaatttaacatttaaactttaaattaaaacaaacctaaattaaaaatgccaaaaaaaaaaaaaaaaaattttaaatttaattctaaattataaaattttnnaaaaatnnnnnttnnnttntntttttggggggggccttttaaaaaattcttggggggcccttttttg

SEQ ID NO: 145987 - DNA, 2077 bp, Homo sapiens
  misc_feature (1)...(2077): n = a,t,c or g
ttgaggagaagggggtctctgttaacatctagcctaaagtatagaactgcctggggggcaggggttaggaatctcttcactaccctgattcttgattcctggctctaccctgtctgtcccttttctttgaccagatctttctcttccctgaacgttttcttctttccctggacaggcagcctcctttgtgtgtattcagaggcagtgatgacttgctgtccaggcagctccctcctgcacacagaatgctcagggtcactgaaccacttgcttctcttttgaaagtagagctagctgccactttcacgtggcctccgcagtgtctccacctacacccctgtgctcccctgccacactgatggctcaagacaaggctggcaaaccctccccaagaaaacatctctggccccagaaaagcctctctctcccctcccctctcctcaatgaaggcacagcccaaagcccaaagcgcctcatgttgaaagcccaagtgggcccagccccacaagagcaaaaaagagggtttaattttcaagtcccccctctctctggggtcaagaacccagagggcatgctgaatgccccctgccttacttgggtgagggtgcccccgcctgagtcagtgctctcagctggcagtgcaatgcttgtagaagtaggaggaaacagttctcactgggaagaagcaagggcgaagaacccaagtgcctcgacctcgaaaggaggccctgttccctgggagtcagggttgaactggcaaagcttttgggctgagacctggggattttgaagattaccacaaacccttgctggaaacacagtgtctgttcaagcaaacctaacccagcattcccctacaaccctagggcagaccaatagtattaggaagttttgggaaaaaaacaaaaacagaatttgaagaacccttgggacccactccctggtcccctgtaggcttcagttcattcaaaggcagaagtctgggctttgcctcctattaagattggaaatggtacactacccaaacactcagtccacctgttgagccccagtgcctggaagggaagaaaggcctttccttctgtgttgaattggcgtgagaggctgacaggggttagccctggactacaaggcatccttgtcttttgagctattcacctcgagtagaaaagggatctaagggaagatcactgtagtttagttctgttgaccttgtgcacctaccccttgggaaatgtctgctggtatttctaattccacaggtccatcagatgcctgcttggattaatatataaacaataaaaacaacttttcacttcttcctattgtaatcgtgtgccatggatctgatctgtaccatgaccctacataaggctggatggcacctcaggcttgagggccccaatgtatgtgtggctgtgggtgtgggtgggagtgtgtctgctgagtaaggaacaccgattttcaagaattctaaagcctcaattcaaagtgacacattaatggatgaaacttcagatctggatcaaggagtcccggatttctaacaggtcccttggctttgggggggtgttgctgacaacttagctcaggtgccttacatcttttctaatcacagtgttgcatatgagcctgccctcactccctctgcagaatccctttgcacctgagaccctactgaagtggctggtagaaaaaggggcctgagtgggaggattattcagtatcacgatttgcagggattcccttctggggctttcattctgggaaacttttgttaggggctgcttttctttaaggtgcccacattttgatgggagggtgggacataaattttgaatgtattttgatttataaagttttttttntttttttggggttaaaagatggttgtagcatttaaaatggaaaattttcccctgggttggctagaatctggggggaatcctttgaaagggaacctaaaatgggccttcttgaagggttaaaaaaccgaggggcccttgttatcctgggggtaaaggccaggccctttcaaaccattgggcccctgacttgctgggtaaccttggacaat

SEQ ID NO: 145988 - DNA, 541 bp, Homo sapiens
  misc_feature (1)...(541): n = a,t,c or g
tcctcaagcattctgtgactcttggctgtgaattcatatttaaaagtaagtgccttaaacacttactagaagctggagttgagagcttgttaactggtctcccttgaagggtgtttgtagggggaccctaatcatgtgcacgtgtgtgtagtactcagttttaaaatttaattatgaaattttaaaaaattgtttttcattttttgtatgagtttctgaaccattttttaaaaccattattttggtatactttacacttacagaaaagttgnnnnnnnnnnnnnnnnnnnnnnnnnnnnnnnnnnnnnnnnnnnnnnnnnnnnnnnnnnnnnnnnnnnnnnnnnnnnnnnnnnnnnnnnnnnnnnnnnnnnnnnnnnnnnnnnnnnnnnnnnnnnnnnnnnnnnnnnnnnnnnnnnnnnnnnnnnnnnnnnnnnnnnnnnnnnnnnnnnnnnnnnnnnnnnnnnnnnnnnnnnnnnnnnnnnnnnnnnnnttagggatatccagtgtcaatacaaaggttttctaaatttttctttcttct

SEQ ID NO: 145989 - DNA, 772 bp, Homo sapiens
tgtgagacaggatatccctaagcttaagtgatccttctgctcagcctcccgtgtaattgagactgtaggtatgtgccaccacagccagctaacttttttatattttgtaaagacgaagtctcactgtgttgcccaggctggtcttgaactcttggcctcaagtgatcctcttgactcaacttcccaaagtgttgggattacaggtatgagccaccacacccagccccttattctatttttcaacttttctgtaagtgtaaagtataccaaaataatggttttaaaaaatgggttcagaaactcatacaaaaaatgaaaaacaattttttaaaatttcataattaaattttaaaactgaggtactacacacacgtggcacatgattaggggtccccctaccaaacaccctttcaaggggaggccagttaacaagctctcaactccagcttctagtaagtgtttaaggcacttacttttaaatatgaattcacagccaagagtcacagaatgcttgaggaaggcctctaaatgtgaatgacaacagaataccaaaaaatgcagggagctaaaaacacattaaaaacttaaatagcttcagaggtgaaaaaatactgcatacttaaaagaatgattgctataaaaatgaacatccatatagaagataacttggaaataaaattataacaaataaccattcactggctaataaagaaatttcctagaaaataaaataaaatggcagagacaaaaatagaagagaaattctcgtgcc

SEQ ID NO: 145990 - DNA, 577 bp, Homo sapiens
  misc_feature (1)...(577): n = a,t,c or g
gctctcctgacgggaagncaggctcggcatttctggcagcaagatgaccccccaaaaagcccttgggatcgagtgaaggactggcccactgtgtacgtgattgtgctcaagacagcggcagagactatgtgtcccagtttgaaggctccgccttgggaaaacagtaaacctaaagctccttgacaactgggacagcgtgacctccaccttcagcaagctgcgcgaacagctcggccctgtgacccaggagttctgggataacctggaaaaggagacagagggcctgaggcaggagatgagcaaggatctggaggaggtgaaggccaaggtgcagccctacctggacgacttccagaagaagtggcaggaggagatggagctctaccgccagaaggtggagccgctgcgcgcagagctccaagagggcgcgcgccagaagctgctgcccgtgctggagagcttcaaggtcagcttcctgagcgctctcgaggagtacactaagaagctcaacacccagtgaggcgcccgccgccgccccccttcccggtgctcagaataaacgtttccaaagtggaaa

SEQ ID NO: 145991 - DNA, 558 bp, Homo sapiens
ggaggtcccccacggcccttcaggatgaaagctgcggtgctgaccttggccgtgctcttcctgacggcctaaagctccttgacaactgggacagcgtgacctccaccttcagcaagctgcgcgaacagctcggccctgtgacccaggagttctgggataacctggaaaaggagacagagggcctgaggcaggagatgagcaaggatctggaggaggtgaaggccaaggtgcagccctacctggacgacttccagaagaagtggcaggaggagatggagctctaccgccagaaggtggagccgctgcgcgcagagctccaagagggcgcgcgccagaagctgcacgagctgcaagagaagctgagcccactgggcgaggagatgcgcgaccgcgcgcgcgcccatgtggacgcgctgcgcacgcatctggccccctacagcgacgagctgcgccagcgcttggccgcgcgccttgaggctctcaaggagaacggcggcgccagactggccgagtaccacgccaaggccaccgagcatctgagcacgctcagcgagaagg

SEQ ID NO: 145992 - DNA, 404 bp, Homo sapiens
  misc_feature (1)...(404): n = a,t,c or g
agaaggccaagcccgcgctcgaggacctccgccaaggcctgctgcccgtgctggagagcttcaaggtcagcttcctgagcgctctcgaggagtacactaagaagctcaacacccagtgaggcgcccgccgccgccccccttcccggtgctcagaataaacgtttccaaagtgggnnnnnnnnnnnnnnnnnnnnnnnnnnnnnnnnnnnnnnnnnnnnnnnntaaaaaaaaannnnnnnnnnnnnnnnnnaaaggggggggcccctaaaaaaagcccccggggggcccccatttttcgggggggagaaaaaaaannnnnnnnnnnnnnnggggggagctataaaaacccctctgggggttggggggggacaacctcttttttgggggggaaaaaataaaaaaat

SEQ ID NO: 145993 - DNA, 471 bp, Homo sapiens
gaaggaggtcccccacggcccttcaggatgaaagctgcggtgctgaccttggccgtgctcttcctgacggggagccaggctcggcatttctggcagcaagatgaacccccccagagcccctgggatcgagtgaaggacctggccactgtgtacgtggatgtgctcaaagacagcggcaaagacagcgtgacctccaccttcagcaagctgcgcgaacagctcggccctgtgacccaggagttctgggataacctggaaaaggagacagagggcctgaggcaggagatgagcaaggatctggaggaggtgaaggccaaggtgcagccctacctggacgacttccagaagaagtggcaggaggagatggagctctaccgccagaaggtggagccgctgcgcgcagagctccaagagggcgcgcgccagaagctgcacgagctgcaagagatgctgacccactgggcgaggaag

SEQ ID NO: 145994 - DNA, 1170 bp, Homo sapiens
aggaggtgcgtcctgctgcctgccccggtcactctggctccccagctcaaggttcaggccttgccccaggccgggcctctgggtacctgaggtcttctcccgctctgtgcccttctcctcacctggctgcaatgagtgggggagcacggggcttctgcatgctgaaggcaccccactcagccaggcccttcttctcctccaggtcccccacgggcccttcaggatgaaagctgcggtcctgaccttggccgtgctcttctctgacgggtgagccaggcgtcggcatttctggcagggaggatgaagcccccccagagccgcctgggatcgagtagaaggaacctggccactcgtgtaccgtggactgtgctcaaagaacagcggacagagacttatgtgtcccagtttgaagggctccgctttggggaaaacagctaaaccttaaagctcctttgacaactggggacagcgttgaccttccacctttcagccaagctgcgcgaacagtttcgggccctgttgacccagggatttcttggggattaacctggggaaaagggagacagaggggccttgaggcaagggaagatgaggcaaggatctttggaaggaagtgaaggccaaggttgcagcccttaccttggacgacttccaagaaagaagttggcaggaggagattggagcttttacccgccagaaggttggagccgcttgcgcgcaagaacttccaagaagggcgcgcgcccagaaagcttgcacgagcttgcaagaagaagcttgagcccactgggcgaggagatgcgcgaccgcgcgcgcgccccatgtggacgcgctgcgcacgccatttggccccctacagcgacgagctgcgccagcgcttgggcgcgcgcccttggggctttaagggaaaacgggggggccagaatgggccagtaccacgccccaggccaccgagcatctgagcacgctcagcgagaaagccaagcccgcgctcgaggacctccgccaaggcctgctgcccgtgctggagagcttcaaggtcagcttcctgagcgctctcgaggagtacactaagaagctcaacacccagtgaggcgcccgccgcccgcccccctttcccggggctcaggaataaaacgttttccaaagtggaaaaaaaaaaaaaaaaaa

SEQ ID NO: 145995 - DNA, 2079 bp, Homo sapiens
atggcacctggcggcggggcctggcaggccggggcggggccgggggcgggcctggcggcgcggactcccgggccatggacgagtcgagcctcctgcggcgccgcgggctccagatcccggagatcgcccgccatggctttacttactgcggccgcccggctcttgggaaccaagaatgcatcttgtcttgttcttgcagcccagcatgccagtgcttcctccatgaatttgaaagacatattggctgacctcatacctaaggagcaggccagaattaagaccttcaggcagcaacatggcaagaaggtgctcagtgcagctgttacagccctcaacagtgaaagtaactttgcccaagcatatgcacggggtatcagccgaaccaagtactgggagttgatttatgaagactctgtggatctaatcacaaagctaccttgtgtcgcagcaaagatctaccgaaatctctatggagaaggcagtggtattggggccattgactctaacctggactggtctcacagtttcaccaacatgttaggctatactgatcatcagttccctgagctcatgcacctgtacctcactatccacagtgaccatgagggcggcaatctatgcaagattgtgcccaatgtcctcttagagcagggtaaggccaagaatccttggcccaatgtagatgctcacagtggggtgctgctccagtattatggcatgatggagatgaattactacacagtcctgtttggggtgtcacgagcattgggtgtactggcacagctcatctggagccgagccttaggcttccctctagaaaggcccaagtccatgagcacagagggtctgatgaagtttgtggactctaagtcagggactggccctggatatggccagggtaccccatggaggctgttcatggtggacaacggggctgatgactggcgcatcgccatgacctgcgagcgcgtgttcctcatctcgctagagctggcagtgtgcgccattcacccggtgcccggccactaccgcttcacgtggacggcgcggctggccttcacgtacgcgccctcggtggccgaggccgacgtggacgtgctgctgtccatccccatgttcctgcgcctctacctgctgggccgggtgatgctactgcacagcaaaatcttcacggacgcctcgagccgcagcatcggggccctcaacaagatcaccttcaacacgcgcttcgtcatgaagacactcatgaccatctgccccggcaccgtgctgctggtcttcagcatctcctcctggatcatcgcagcctggaccgtgcgcgtctgcgagaggtaccacgacaagcaggaagtgaccagcaacttcctgggggccatgtggctgatttccatcaccttcctctccattggctacggcgacatggtgccccacacctactgcgggaagggtgtgtgcctgctcactggcatcatgggagctggctgtaccgcgctcgtggtggctgtggtggctcggaagctggagctcaccaaggctgagaagcacgtgcacaacttcatgatggacactcagctcaccaagcgggtaaaaaacgccgctgctaacgttctcagggagacgtggctcatctacaaacataccaggctggtgaagaagccagaccaagcccgggttcggaaacaccagcgtaagttcctccaagccatccatcagctccggagtgtgaagatcgagcaagggaagctgaacgaccaggctaacacgcttaccgacctagccaagacccagaccgtcatgtacgaccttgtatcggagctgcacgctcagcacgaggagctggaggcccgcctggccaccctggaaagccgcttggatgcgctgggcccggccccggcccccaagaccaggcagcccggagctccccctgccggtgacgcccgtggccccctcggactgcgggtgacggccctgcccgccaccagacccctaaatcttggccatcgtgtggccgccacctccgggaagccttgtacagtggcgcctcttggagttcaagaagccaacgctgagtcaggctga

SEQ ID NO: 145996 - DNA, 2961 bp, Homo sapiens
  misc_feature (1)...(2961): n = a,t,c or g
ttgttcttgcagcccggcatgccagtgcttcctccacggtaaggtttggaaaagaagactaagaataagaatcattgcggccagcctgaccttggggcagaggatttggcaaccacctggcctcttattatcctgaaatttgaaagacatattggctgacctgatacctaaggagcacgccagaattaagactttcaggcgggaacatggcaagacggtggtgggccaaatcactgtggacatgatgtatggtggcatgagaggcatgaagggattggtctatgaaacatcagttcttgatcctgatgagggcattccgttttcgaggctttagtatccctgaatgccagaaacttgcttacccaaggcttaagggtgggggaaggaacccctgcctgagggctttattttgggcttgctgggtaacttggacattattccccaacagagggaacaggtatcttggctctcaaaagagtgggcaaagagggcagctctgctttcccatgtggtcaccatgctggacaactttcccaccaatctacaccccatgtctcagctcagttgcagctgttacagccctcaacagtgaaagtaactttgcccgagcatatgcacagggtatcagccgaaccaagtactgggagttgatttatgaagactctatggatctaatcgcaaagctaccttgtgttgcagcaaagatctaccgaaatctctacagagaaggcagcgtaactaggggccattgactctaacctggactggtctcacaatttcaccaacatgttaggctatactgatcatcagttcacgtgagctcacgcgcctgtacctccaccatccaccagtgaccatgagggtgggcaatgtaagtgcccataccagccatttggtggggcagtgccttttccgacccgttacctgtcctttgcagcagccatgaacgggctggcagggcctctccatggactggcaaatcaggaagtgcttgtctggctaacacagctgcagaaggaagttggcaaagatgtgtcagatgagaagttacgagactacatctggaaacacactcaaactcaggacgggttgttcccaggctatgncccatgcagtactagggaagactgatcccgcgatatacctgtcagcgagagtttgctctgaaaaacctccctaatgacccccattgtttaaagttggttgctcacgtgtacaaagattgtgccccaatgtcctcttagagcagggtaaaggcaaagaatccttggcccaatgtagatgctcacagtggggtgctgctccagtattatggcatgaccggagatggaattactacacgggcctgtttggggtgtcacgagcattgggtgtactggcacagttcatctggatcccggggcttaggttcccctctagaaaggcccaagtccatgaagcacagagggtctgattgaagtttgtggacttctaagtcaggggtaaaactggaggacttgggtgaaagtgactaccagaaaagtgaggaagcctaaattaaaaagtatacttttgtttcagggggcctttaaagactttaagattaaattatatctgaggcactgataatatgtttgaggttaaaaatataaattaagactttaaaagatgaaaaatggtcccttcttcccctaatcaagctccctttcccctgcctgggatgagttgcccatcatacgcatgggcctggagcgatgaccaggactaatgcatgtggtatgagtaggtttggccccctcactatctctagagtgagaatctggctcctgtttccatgggtcaaagccggttgcagagaatctgtagtcactttggagctttagcttctctgccaagccctcaataagccagcaaaccaggactctgccccttcctgtttccataggaatcatgttggatagtcagctgtaccaagccccttggccctctcccatgcacacaaacccctcctagcaagacctgttggttagctggacatgctttggcaattttttttatcttaccaagtgaccataaaggcatggcatttgttgtgactggcacccaatgtttggattttttttttaaaactatccaattaaaaattaaggtctgggagtgttctgtttcccattactttaatactcacctcctcccagactttctacacctgttgcacctcaggcagaggatgttctggacctccccctcttggtccctactagagacctctcaacagatctgtgggcccagtcattgggttttatcagtgcttaatgtgaactaagttttttacttccacagaatacaaggccactaccttctgacctcccaaccccccaaccaacccccatttttaaatatgctgtgggggcatagaactccgggaatgaccaggcatgatattttcaggggtcttggtcccccgggggtattagcaccctctttttgaacagggaattgattcaaggattggaacatggtctccctcgggattatccaggtaactgggggctgaggggcattaaaaaatagtaagccctccccccctcggtcccctggccttcaagaaattgcctcctttatttatcaacatcttttttccctcccttttcccctggagagctccacaagtacaatgttttcaagaagccccccatttgccacaggttttcaaggcaacttcagaatgttctactttctttttctttgagaaaggattaagatacactcctgctgtgcccccgatctttcctccaaactcctgcctgtgtttgtgtggatacccagtcccagaaccacactgttgagttggacacactgtaaacccctgggtaactgtcaagtcatccatggagacttcaggttgttctgtataaaatgcaaaataaaaaactattattaacaatgaaaaaaaaaaaaaaaaaaaaaagggcggccgct

SEQ ID NO: 145997 - DNA, 808 bp, Homo sapiens
  misc_feature (1)...(808): n = a,t,c or g
ggcacgagagagcagttaaggcacacagagcaccagctccctcctgcgctgaagatgttccaccaaatttgggcagctctgctctacttctatggtattatccttaactccatctaccagtgccctgagcacagttcaactgacaactctggggcgtggatgggaaggagttcccagaggtccacttgggccagtggtactttatcgcaggggcagctcccactcaaggaggagttggcaactttttgaaccctgttggacaacattgtctttcaaaatatgggctgctggcttctgcccccgattgcagcttccaacctttcggtgctacccatccgcatgtgagtgggaaagatggggctcttgtgtgcccccggaaaatgggatcttacccacctggactgaagggggaggcacagatcttcaagaaacttgaaggggccgcccttgacatggaagactgaagctctttttccagcttcatggccccagggtgggaatcatgctgaaatgagaacaggcccagggtttaccagcgctttctcctctacaatcgctcacccacatcctcccgaaaagtgtgtggaggaattcaagtccctgacttcctgccctggacttccaaagccttcttagttgactcctagggaatcaagaggcctgtgagctgtccaataactgacctgtaacttcatctaagttccccagatggggnacaatgggagctgagttgttggagggaggaagcttggagacttccagctccagctcccactcaaagataataaagataatttttcaaatcctc

SEQ ID NO: 145998 - DNA, 1580 bp, Homo sapiens
attcggattctccccagacgccgaggatgcgggtcatggcgccccgagccctcctcctgctgctctcgggaggcctggccctgaccgagacctgggcctgctcccactccatgaggtatttcgacaccgccgtgtcccggcccggccgcggagagccccgcttcatcgcagtgggctacgtggacgacacgcagttcgtgcggttcgacagcgacgccgcgagtccaagaggggagccgcgggcgccgtgggtggagcaggaggggccggagtattgggaccgggagacacagaagtacaagcgccaggcacaggctgaccgagtgagcctgcggaacctgcgcggctactacaaccagagcgaggccgggtctcacaccctccagaggatgtacggctgcgacctggggcccgacgggcgcctcctccgcgggtatgaccaggtcgcctacgacggcaaggattacatcgccctgaacgaggacctgcgctcctggaccgctgcggacacggcggctcagatcacccagcgcaagtgggaggcggcccgtgtggcggagcagctgagagcctacctggagggcgagtgcgtggagtggctccgcagatacctggagaacgggaaggagacgctgcagcgcgcggaacacccaaagacacacgtgacccaccatcccgtctctgaccatgaggccaccctgaggtgctgggccctgggcttctaccctgcggagatcacactgacctggcagtgggatggggaggaccaaactcaggacaccgagcttgtggagaccaggccagcaggagatggaaccttccagaaagtgggcagctgtgatggtgccttctggagaagagcagagatacacgtgccatgtgcagcacgaggggctgccggagcccctcacccctaaagatgggagccgtcttcccagcccaccatcccccatttgtggggcatcgttgctgggcctggctgtccctggctgtccctagctgtcctagggagctgtggtggctgttgtgatgtgtaggaggaagagctcaggtggaaaaggagggagctgctctcaggctgcgtccagcaacagtgcccagggctctgatgagtctctcatcacttgtaaagcctgagacagctgcctgtgtgggactgagatgcaggatttcttcacacctctcctttgtgacttcaagagcctctggcatctctttctgcaaaggcacctgaatgtgtctgcgttcctgttagcataatgtgaggaggtggagagacagcccacccccgtgtccaccgtgacccctgtccccacactgacctgtgttccctccccgatcatctttcctgttccagagaggtggggctggatgtctccatctctgtctcaaattcatggtgcactgagctgcaacttcttacttccctaatgaagttaagaacctgaatataaatttgtgttctcaaatatttgctatgaagcgttgatggattaattaaataagtcaattcctagaagttgagagagcaaataaagacctgagaaccttccaaaaaaaaaaaaaaaagggcggccgct

SEQ ID NO: 145999 - DNA, 1708 bp, Homo sapiens
tctagagaagccaatcagcgtcgccggggtcccagttctaaagtccccacgcacccacccggactcagagtctcctcagacgcggagatgctggtcatggcgccccgaaccgtcctcctgctgctctcggcggccctggccctgaccgagacctgggccggctcccactccatgaggtatttctacacctccgtgtcccggcccggccgcggggagccccgcttcatctcagtgggctacgtggacgacacgcagttcgtgaggttcgacagcgacgccgcgagtccgagagaggagccgcgggcgccgtggatagagcaggaggggccggaatattgggaccggaacacacagatctgcaagaccaacacacagactgaccgagagagcctgcgcaccgctgcgcggctactacaaccagagcgaggccgggtctcacacttggcagacgatgtacggctgcgacgtggggccggacgggcgcctcctccgcgggcataaccagttcgcctacgacggcaaggattacatcgccctgaacgaggacctgagctcctggaccgcggcggacaccgcggctcagatcacccagcgcaagtgggaggcggcccgtgtggcggagcagctgagaacctacctggagggcacgtgcgtggagtggctccgcagatacctggagaacgggaaggagacgctgcagcgcgcggaccccccaaagacacatgtgacccaccaccccatctctgaccatgaggccaccctgaggtgctgggccctgggcttctaccctgcgggagatcacactgacctggcagcggggatgccgaggaccaaactcaggaacactgagcttgtggagaccagaccagcagggagatagaaccttccagaaagtgggcagctgtgggtggtgccttctggagaagagcagagatacacatgccatgtacagcatgaggggcctgccgaagcccctcaccactatgaagatggggagcccatcttcccagtcccaccgtcccccatacgtggggcattgttgctggggcttgggctgtccctagcaagttgtggtcatcgggagctgtggtcgctgctgtgatgtgtaggaggaagagttcaggtgggaaaaggagggagctactcctcaaggctggcgtgcaagcgacaagtgcccaggggctcttgatgtgtctctcaccagcttgaaaaagccctgagacagcttgtcttgtgagggactgagatgcaggatttcttcacggcctcccctttgtgacttcaaagaacctctggcatctctttctgcaaaggcaaccagaagtgtgtctgcggtcacggttagcataatgtgaggaggtggagagaccaggcccacccccgtgtccactgtgacccctgttccccatgctgacctgtgtttcctccccaggtcatctttcttggtcccagaaaagggtggggctggatgtctccatctttggttccacctttatgtgcactgagctgcaacttcttacttccctaactgaaaataagaatctgaatataaatttgtttgttttctcaaatatttgctatgagaggtctgatggatctaattaaataagtcaattccctggaatttgagagcaggcaaataaagacctgagaaccttccagaaaaaaaaaaaaaaaaaaaaaaaaaaaaaaaaaaagggcggccgct

SEQ ID NO: 146000 - DNA, 406 bp, Homo sapiens
tttcgtcgatggcctcggcgctgagctatgtctccaagttcaagtccttcgtgatcttgttcgtcaccccgctcctgctgctgccactcgtcattctgatgcccgccaagattctggactccaggcaggtgtgtgtccagtacatgaaggacaccaacatgctgttcctgggcggcctcatcgtggccgtggctgtggagcgctggaacctgcacaagaggatcgccctgcgcacgctcctctgggtgggggccaagcctgcacggctgatgctgggcttcatgggcgtcacagccctcctgtccatgtggatcagtaacacggcaaccacggccatgatggtgcccatcgtggaggccatattgcagcagatggaagccacaagcgcagccaccgaggccggcct

SEQ ID NO: 146001 - DNA, 339 bp, Homo sapiens; identical to SEQ ID NO: 125445

SEQ ID NO: 146002 - DNA, 495 bp, Homo sapiens
ttatccatcacagttttgtccgctcgcgaaggggaaatgggagatgttggcatcccccactgtctcttcccagggcccttgctgcttttcctttgtggcatccatcacacttgtaattacttgtttagcatctgtctgcttctctgggctgcgtgtgctggccttgttcatggctggtccccagcactgagcagcctgccatgagataagttctgcagctgcagagcattgggcgctgctgatggagtaatcaggagacattgtgctcacttcttcccttccccatcctggacctatagaatctgattctctccggtggaaccaggactctgcatttagccagttccccaggagaaatttctggggaatctgcctgatagttccattggggatcctctcggggaactgctctaatgccttcctggaggtctggctcttgaagccggcagttatcagcgtgagattgggctggagaaaaaactctttcccattcat

SEQ ID NO: 146003 - DNA, 1317 bp, Homo sapiens
atgcagatacatcagcaagctcctagccgacaggcactgctgaccccaatctgccagcaggggctacaccctctcctctttgccaattctggaaaattgaggttgttgccaatgcacctgggccacctcacagctggcagagacacaacagggacacgccccagaagcacaaacagccagttacctgatctctggtccaatctttcctatgttgcccagcgaaaggagcagagagctgaccttggtaacaggagaaagaaagaagcaccctgggagagcaaggtaggccatagaaactggaatccttcttcctcaaggcaagtcatggaaaccataaccccttttccccaaaagcctcataatccaatggaggagatgggcgcatatgctgatgacagtaatgaggacaataataatgattcctgtgtccttaagaacttaaaacctcttcaactcacacctgacctaaaacctaaatgccttattttcttctgcaacaccacttggccccagtacaaactcgacaatggctctaaatggccagaaaacggcactttcgatttctccatcctacaagacctaaataatttttgtcgaaaaatgggcaaatggtctgaggctgctcgtcgccaggccaagctaagtcccaattcttcctcagcctccgctcctccaccttataatccttctaccaccccccctcctcacacccggtccggcttacagtttagttccgcgactagctcctccccacctgcccaacaatttcctcttagagaggtggctggagctgaaggcatagtcagggaattccaatatctaactctgtcctacaacttaacctggagtgacttaagtgtcatcctgacttctaccctctccccagatgaacgggaaagagttttttctctagcccaatctcatgctgataactgccggcttcatgagccagacctccaggaaggcattagagcagttccccaaaaggatccccaatggaactaccaggcaaattccccaggtatagctaggcaagattacatggtttcctgcctagttgaagggcttaaaaaagcagcttacaaagctgttaattacaacaaacttaaagaaaccacccaaggtaaagatgaaaatccagcccagttcatggcctgcttagcagcaacctttagacgctataccgccctagacccagaggggccagaaggccaccttattcttaatatgcattttatcacccaatccactcaggttcgactcctggctggctcgtttgacagcaaccctgagacactttacagtcctagcccctaa

SEQ ID NO: 146004 - DNA, 545 bp, Homo sapiens
atgacctcgggtcctcagaccagccagcccaaggaacatctcaccaatttcaaatcggatgaacaggaaagagtttcttctctagcccaatctcacactgacaaccaccggcttcatgagccaggcctccaggaaggcattagagcagttccccgagaagatccccaatggaactatcaggcagattccccagggagtcccggccaagtcccaagtcccgaagtgtccaatgtggtaaatttgtttccacgtccaatcactgtctggatccagcatcaacgggcccgccaattgttcaagaccatcaatcgctggctggccgaagcaggcgtcatgatgactcaaggcaccttggtcgatgccaccatcattgaggcacccagctcgaccaagaacaaagagcagcaacgcgatccggagatgcatcagaccaagaaaggcaatcagtggcactttggcatgaaggcccacattggtgtcgatgccaagagtggcctgacccacagcctggtcaccaccgctggccaaacggagccagtgaacac

SEQ ID NO: 146005 - DNA, 718 bp, Homo sapiens
cagcgccatgacggtgtatgaatgccatggcaatgtccagaagttaccttatatagtctggcagccatttccagagcccctagaactctggcccagggctctgtgactgacttctttccagatcttctcggcttagcggctgaagactgacgctgtccgatcgcctcaaaaacctcctggaccatcccggatgctttgggtaactcttacagtggaggacaggaatgtcaggcctctgagcccaactaagccatcatatcccctgtgacctgcacgtatacatccatatggcctgaagcaactgaagatccacaaaagaagtgaaaatagccaattcctgccttaactgatgaaattccaccattcctgccccaccctaactgatcaattgactttgtgacaatacaccctccccgcccttgtgataatgtactttgtgatattcccccacccttgtgaatgtactttgtacaatacaccctccccacccttgagaaggtactttgtaatatgctcccccacccttaagaaggtactttgtaatgttctccccaccctttgtactttgtaagatccaccccctgcctgcaaaaaattgctcctaactccactgcctatcccaaacctataagaactaatgataatcccaccaccctttgctgactgccttttggactcagcttgcctacacccaggtgaaataaacagccttgttgct

SEQ ID NO: 146006 - DNA, 735 bp, Homo sapiens
  misc_feature (1)...(735): n = a,t,c or g
cccacccatcaccttgatcttgtcctgcctcgtnccggtgttcactgagtgcacaagcaacgtggccaccaccaccttgttcctgcccatctttgcctccatgtctcgctccatcggcctcaatccgctgtacatcatgctgccctgtaccctgagtgcctcctttgccttcatgttgcctgtggccacccctccaaatgccatcgtgttcacctatgggcacctcaaggttgctgacatggtgaaaacaggagtcataatgaacataattggagtcttctgtgtgtttttggctgtcaacacctggggacgggccatatttgactttggatcatttccctgactgggctaatgtgacacatattgagacttaggaagagccacaagaccacacacacagcccttaccctcctcaggactaccgaaccttctggcacaccttgtacagagttttggggttcacaccccaaaatgacccaacgatgtccacacaccaccaaaacccagccaatgggccacctcttcctccaagcccagatgcagagatggtcatgggcagctgggagggtaggctcagaaatgaagggaacccctcagtgggctgctgggacccatctttcccaagccttgccatttatcttttgttgaggggaggccaggtaggccgaggggttcagggatgcaggcttgttgttaccccgttcttggcctcaagcatcccccacacagggctct

SEQ ID NO: 146007 - DNA, 2212 bp, Homo sapiens
tttaacctggaatgacttaaatgtcatcctaacttctaccctctccccaaatgaacgggaaagagttttttctctagcccaatttcacactgataactgccagcttcatgagccagacctccatgaaggcattagagcagttccccgagaagatcccaatggaactatcaggcaaattccccagcagctgaagactgacactgcccgatcgcctcagaagcctcctggaccatcgcggatgctttgggtaactcttacagtggaggagctccgtttccctctgacctgggtcgggcgggcagctgcggctgctgaggctcggtggggcccctccaagacgcgtgtccgcatctgcccgccgggcgtctgcggggtgcagcgtccactggagcgcgacagcccctgggacagaggaggacagtggcctcgcttcccttctccctcccgcgcgatggcctcggcgctgagctatgtctccaagttcaagtccttcgtgatcttgttcgtcaccccgctcctgctgctgccactcgtcattctgatgcccgccaagtttgtcaggtgtgcctacgtcatcatcctcatggccatttactggtgcacagaagtcatccctctggctgtcacctctctcatgcctgtcttgcttttcccactcttccagattctggactccaggcaggtgtgtgtccactaccatgaaggacaccaacatgctgttcctgggcggcctcatcgtggccgtggctgtggagcgctggaacctgcacaagaggatcgccctgcgcacgctcctctgggtgggggccaagcctgcacggctgatgctgtgctttatgggcgccacagccctcctgtccatgtggatcagtaacacggcaaccacggccatgatggtgcccatcgtggaggccatattgcagcagatggaagccacaagcgcagccaccgaggccggcctggagctggtggacaagggcaaggccaaggagctgccagggagtcaagtgatttttgaaggccccactctggggcagcaggaagaccaagagcggaagaggttgtgtaaggccatgaccctgtgcatctgctacgcggccagcatcgggggcaccgccaccctgaccgggacgggacccaacgtggtgctcctgggccagatgaacgagttgtttcctgacagcaaggacctcgtgaactttgcttcctggtttgcatttgcctttcccaacatgctggtgatgctgctgttcgcctggctgtggctccagtttgtttacatgagattcaattttaaaaagtcctggggctgcgggctatagagcaagaaaaacgagaaggctgccctcaaggtgctgcaggaggagtaccggaagctggggcccttgtccttcgcggagatcaacgtgctgatatgcttcttcctgctggacatcctgcggttctcccgagaccccggcttcatgcccggctggctgactgttgcctgggtggagggtgagacaaagtatgtctccgatgccactgtggccatctttgtggccaccctgctattcattgtgccttcacagaagcccaagtttaacttccgcagccagactgaggaagaaaggaaaactccattttatccccctcccctgctggattgggaaggtaacccagggagaaagtgccctgggggattcgtggctgctactaggggggcggatttgctctggctaaaggatccgaggcctcggggctgtccgtgtggatggggaagcagatggagcccttgcacgcagtgcccccggcagccatcaccttgatcttgtccttgctcgttgccgtgttcactgagtgcacaagcaacgtggccaccaccaccttgttcctgcccatctttgcctccatgtctcgctccatcggcctcaatccgctgtacatcatgctgccctgtaccctgagtgcctcctttgccttcatgttgcctgtggccacccctccaaatgccatcgtgttcacctatgggcacctcaaggttgctgacatggactaccgaaccttctggcacaccttgtacagagttttggggttcacaccccaaaatgacccaacgatgtccacacaccaccaaaacccagccaatgggccacctcttcctccaagcccagatgcagagatggtcatgggcagctggaggtgtggggagcccagggaggtggatgaatga

SEQ ID NO: 146008 - DNA, 3434 bp, Homo sapiens
  misc_feature (1)...(3434): n = a,t,c or g
atggctactttcttggatgtaaacattgtattactctgtatatccacaccaacagcacaagagcagccttattttaatgaatcagaggaggagtctctcgtccctcttcagaagggactagagaaggcagcagcagttgcagacaaaagaaaatcaggtagccaggatttccctcagtgcaacaccattgagaatacaggaactaaacagtccacctgtagtccaggggatcatatcattgaaattactgaagtggaagaggatttgtttccagcagagacagtagagctactgagggaagcaagtgctgaaagtgatgtgggtaaaagcagtgaaagtgaatttactcagtataccacacaccatattctgaaatcattggcttctattgaagctaaatgcagtgatatgagctctgaaaatacaactgggcctccctcttccatggacagagttaatacagctttgcaaagagctcaaatgaaggtttgcagtctgtctaatcaaaggatggggcgtagcctgctaaaatcaaaagatttgttaaaacaaaggtacttatttgcaaaagctggctatcctctaagaaggtctcagtctttaccaaccaccttattgagcccagaaaagagaccagatgcagcccaccttccttcacctataagtacacacctgaagaggagcaggaattggaaaagcgggtgatggaacatgatggtcagtctttagttaaatcgaccattttcatctctccatcatctgtgaagaaagaagaagccccccagagtgaggcgccgcgggtggaggaatgccatcatggaaggactcctacctggttcacgtgcttgctccaccaccaaatggtctcagtctacctgttcccttcattccatccactctgagtggcaagaaaggcccctgtgtgagcacacaagaactctgagcactcacagtgttcccaacatatcaggggctacttgtagtgccttcgcttcccctttcgggtgtccttactcacatagacatgccacctacccttaccgagtgtgctctgtgaatcctccttcagccatagaaatgcagttgcgaagagtattacatgatattagaaactcactgcagaatctttcacagtaccctatgatgagaggacctgatcctgcctgctgctccatatatgtactcagaaatcatcctgttctacctctttatgaaaatactttttcaggagctccaggtaaatgaggcggagcctgaatttgtttagaacacaaattgatgggatttagaattggcaatgctgcgtcaaaaacccatgggtttattcatcagatgactgaggaaggagaaggttgaagttgatcagctccagggtttgagaaattcagtccgaatggaaccttcaggacctgggaactgcagctggaggagcgccttgctggggcctgggaggagccagcttccgtgctgtgcgcatgccttcaccccttccgctcctccgcactcatggggaatgtgtggcagtagaagcgctgataactttgtcatggcccttcttccattgaaatgtaatggaaccagtcactgaactgatgcaggagcagtcatacctgaagtctgaattgggcctgggacttggagaaatgggatttgaaattcctcctggagaaagctccagaatctgttattctccagagcacaacaagactctttttgtgaatgttctggtccctctaatgctaccagaaaaatgggagtaccttcgtactgcctcagtgggcaaatccaaaaccccattagtggcaaggaagaaagtgttccgagcatcggtggctctaacgccaacagctccttctaggaacaggctctgtgcagacaccctccagatttgggaaagttctgagggaagttgatgcagcttgaagggagccccagaaagttgtagggacctaaatctgaatctgaagtgggaaagaagggcatggaaaactcccatcaattgccagctgctgaggaaatgcataaaaattgtggaagcaagattgagtttgcagcaagtcatacggggagattaaagagtctattgttggggaaatcagaccgggaaattggtaagttggacttttgggcagcagtatcttccaggtaaggcgtctaattctaggccaggattatcattaaacagaaattataggttggccatggatcctattagctgtgtaatactggaattatcaatgatatgcactggtggaggtgttatttgtgctttagaagatacttgctgttgagctgggctactgtatacagtgtacaatgtgtatttcttcaaccatatattttaaaaagacgtacatagaaacttagggcactttgctatttcttttctaaactatcaaaaactctaggcagtttgaaaagcctaatatttatttgtatgtcaatatttttccatttgattcccctattaggaattaatttttaaaacttgaagacttccagactttatccaacttataaataacatatttcttcagactaacatcttaaaacactgacctctatgaggtatttactgtgcaataactgattcatttttttgcagagctggaagcatgcaatgattttcccccccacggctgttaattaatgtcacttccaaggaaggaaaaactgttctgttgtaaaaaatataattgctccttaattctgggggggggttactaatagcagtaggatagaattttatgaggttacctacaactacttaatgtacttacactgtaaggccttgttgctttacccaaggacaaatgtaaattttatccattgcttatgtagtatttttcttttggggaaatgtggccttatgtttaaacactatggtaacctttaacttttggcattgtccagacttctttattaggatgggagatgttcctttttccggtccttctagacctaaatgggagtatccatcccaaataagggggccctatgaccttgaatgaattagaattgaattaagctggtgtctgtttttttcaaaatgggaagtaatttgaggattggtcctccctcatacattaaatggattttagttccagttttaacccagtgaaaactttgtttttatgaaaaaaaaggaaaaatggtttccccatttggttttatatgtgttaaataaatgtgtaaagtaaccacccaaatgttattagaattttttcttctagcattataataattttttcaactcctattgtgtttcttgtgtgtggntgatattttaatcaaaagtggttgagtgtgttaacaagtgttctttgaaagaatctctaaaaggcttataaatgtttgaaatatcacacaaaggctgatttctaaaatatacatatattaaaccaataaagtatttattttgcctaaaaaaaaaa

SEQ ID NO: 146009 - DNA, 529 bp, Homo sapiens
cagagaacgagttcaaagaatagcaaagaaagaaagaggacccagtgggcgaaagatgagagtgtacttttaccaaaagttatctaagcctgagcacttgaagtctgcacataaataaataaatgacaaaagaaagaaaaaaaggccagcgaggccgggagcaggtggccttcatctgcaactgtgtctctctcagcctccacagccacggggacaccctgcacctattcccacgggacaggctggacccagagactctggacccggggcctccccttgagtagagacccgccctctgactgatggacgccagctgacctggggtcagacccgtgggctggacccctgcccaccccgcaggaaccctgaggcctaggggagctgttgagccttcagtgtctgcatgtgggaagtgggctccttcacctacctcacagggctgttgtgaggggcgctgtgatgcggttccaaagcacagggcttggcgcaccccactgtgctctcaataaatgtgtttcctgtcttaaca

SEQ ID NO: 146010 - DNA, 2934 bp, Homo sapiens
  misc_feature (1)...(2934): n = a,t,c or g
accacccattaatgtatttctgtacttaacatttgttacattggttcctatttctttatttaccaatattacctttctcatatcctttcatctaacagacctcagtgcccaggactggatgactcaaaacccctcacaacatcttgtcacctggcgctgcactcccactgctcattcatccatccacacacgcaatgtagactttttggcctttttttctttcttttgtcatttatttatttatgtgcagacttcaagtgctcaggcttagataaacttttggtaaaagtacactctcatctttcgcccactgggtcctctttctttctttgctattctttgaactcgttctctgtggtttatttttctatgccaggagcatatattatttgtatcagtcctaatgcttagcttacaatagtctgacatggtcctccttacagagttactcattactcatcctctagtctgttttttttttttaacctttctttgttgttttggttttttaaaaaaaacctttcccttctcccttttgatcacttgttccctaacttgcatcttttcattttgacgggcctcaaaatctatgtctcattctgcacttcactactcatacatccattctttctttcatttaggttctttttcattgtcaaatgtcagaggcatatatttgagttacacataccccttagtccataatcacctgatatcgctttgtgtgttgccctattacttagtgattcactggtttttttctatttatatattgattgcctagccatcaaagcggatgaaccatggtcttgtgtacacacactctcatcctggcttgcttacttctttacctatttacttgtttattcattctctcttgcttcactcattcattcatctggtcatttattatacaatgcaatagataccagtgaaacaacctctcaacaacaacagcaacaaaactcagaacattcacagtatctttggcattcctgcttcttctcactgagtcaccaaccaaggtacacacagcccacagtccagaaacacacacaaatggcggatgcagagcagagacacagtgaatgttaagtttactcccagatccttctggggctcgcgtcctaaacatactgggggcagatctgagatgagggcccacgttccccaggccccctgggcaagggcaagcgccgcctgttctgcccctctggaccgtggtgaatgaccatccccatgagaaacctgtttcaagaccccagaatacatagagacacacacatggtacatagtctcctggtgggaaacgacggacatggagttcatttttaaataggtggctttgtctgtggcaatataaaaatattttggcctttcaaggcaaatacaaaagaaactacccattaacatggctgagtgtctcagtcccaaacaataaagaacttgaagaggtttagccggaaactttgaagacagaaaatctgcccattatgttttccagacatttcgagggggcgagcggaggtcattggagcttgaagcccatttggaaggctggtccctcggcctgcgttttctccttggccctttgaagggccccccagctcacagggcacttccatcctagtctgccgatttcgagctggagaggggctggggtcccacattcgaggtccctttcccaacgttaggcattccaggttgaatttttccgcccaaaccaggaaggagaccgagaggcccgcccaggaaagaagacttgggtcccgggatggttgggccccatcagggcctcttccgcagcttccatccgcagttctttcagccgacccagccgggccaaggccccacgtgcccttttgtgaaccgtgccttcccacggagttagagcgagtccaggaagcaagtgggttgaagaggaaattggaggtgaggaaggaagacagcaaagtgtagacaggcctttcaagaagcttggctgatgcaaggagagcccgtggacaagggctgcctgggagtgctgttggagaataaataagccaagtaagccaagcaagaggggtgggaagggactgacctgtcaaaccttttcaacaaacatttgctgatcacctcctctaatgcccagatccctgcctgaggccttcttttattcttcatttaatttcttcacaacaaccctagggngggttgctcttcatcgaccccattcccccagaaaagggtaggggaggtctttcagagaggtgggggcgtgcctttggtgattcagtagcatgctcattccagaagcccaccccagggccttgggaagttttcgagcaggatgcctggccaaacccttggccccaggtccccctcctgagaattttcccaaagggaacccttcccattccaggaacatccataagggtgatgaacagagtccagtccgaacaaagactgaaccaaccccttggggagggaaacactcccagtttgctagcaggtgaacacaagcaaagacttataggaaagtactcatagagtcaaagtatgagcatagcaaaggtcagggcttaatgcccaatgccccctcactagggcattggtttaagtctttaggtaagagggacagctggctggtcaagttccggtcctcttcaatcctttgccatcctggtcctgggggtcagtgagtggctgctttgtatgttggtgggatccaggaatccgtgctcctagtgccctcgtgaggtgtagatgggcagcaggccccttggcagcagctcagcatggagaggaggtggtccttgaagtcaaggaggtggacggatgatgtcatccctgaggagagacccgggtgagggatcctctcgtgggcgctccagctctcctgaggagccgccgccaaggccagcgagccaaggcgcgctccctctctgctctccg

SEQ ID NO: 146011 - DNA, 5919 bp, Homo sapiens
acctttacaaatagaggttatttgtaaataaagtgcaggccaatggcacaaagtagtgaaggtgggattcactcaggtctgtcacttccaagcccatgttttctactttgcaaccctatttgaaaggaaaactgcaactaagattatgacccatgagacaacttatgtgtgagacaaaaagtttcacacctccccccaccccaaacacacacggtataacacagtgacccaaccttaggcaaaagggtaccactgccagcaaatgcatttaacattttattcgagattctcaacagctgccatttggtttgtatagcaaattttttacaaagtaaccttttttccatttttgatatttttatgaaaattattttcttcagttttaaagccctgtccctcccccaaagaaggattaataactaccaagtaaggattatttaggagaaaaacaaaaggcaaaaacagctttataaacacttgtgaaacagggggtaagtgtccgaagtcaagaccttctgggcccagtggaggtgctgggctgctccagggacaacccatcaccacttcaccgatccacaacatcctcaaggaggctgagcagccctgcacaagaccctgggggggctttcctgtttccacaaagctccacgtcccgtttttccgtctccatctttggctgttgggccttcccctcccaaatctggcctaacaaagggcaggcacgatctttaaatacctggtgcagctttgtaaatggagcccaggatactcctattttgcaaagttgagattcccctatcccagtcctgggggaggaaaaattcatcccaatgtagcatggatggtttcactttcttgtcccactcagacacatgctcatacttattaaatggatttattggatgcttcaaaagtcctgatgtgtagtagcacaaaagttccttgtaaaaaaagaagttgcaaaattataaaaatttctgcagcagttctggctctggatgacaaagctcattctgattagtagtttttttgacatgcacagcagcttcccctataagtcctacgttcggagggttccgtttagacaacaggaagttggaatccaagtttaaaaggctctctgctgacaaaatgtggtacatccatcaacagaattctactcagcaataaaagggacaaactaccaagacgttatctgtcatggacaaaccttaaaaacattagctaagtaaaaaagccagacccaagggaccacatattgtatgattccattgatttgaactgtccagaaagggcaaatttatagagaaagtagattagtggttgccgggggtaagaacaggattaactgtaaaagagcatgaaggatcttattgggagggataaaaatgttctaaaactgagtaatagttacagctacaccactgagggaagttactaaaatcactgaaatgtacacttgaaatgggtgttttatgatatgtaacatatgcctcattaaagttgttttaagaaaaggattccctgcctcccaaaccatccttcaagcattaaacatttttgggaggccccataatccaacagggacagaataactacttagtgatgatttacagagtgaaatattttactgttttgtagtaagcacattttagtaactgtacactagtacaatgtttgttaagattttatctcatttttgtcatattagcctaaaatgtttatttttatttaaaaagtagccaataggaaggtaagattggggagaaaggtcagtaaatgtcacaaaagagactcctagtaacacaatctgagggagctttttcttttgaaataaagatggtgcatctgtccctttacagatttctctcctgtcccctgggactggggaacggtgaatctcctgcctgacaccttgtagagattagtgtatccagctattctattgccacgatgcctctaaaaaccagactgactgggaacagcagtagggggttggccagtgagggcaggtgactaagtggtgtgcaggaaactcgcatgtttccctgggttggcttcctgctcccctgtccctgtcaccaatagcagcttcattgtgagaagattaaaacaaaggaaaaaaacccaaaaaaactgtttccaaattgtaactaaccaagtctgtgtaggaaattcacaaggcagcagagcagaggctgcagaggtgctctgtctaccgggagaactaatgatccctgtgagcaatgcagggtgcaatgagtcacatggggaaatgtggacagaggcagaaggacatcaaggcccccactacacaccaaattagagtcaatcctcctgttctccccacccacttcgcaaactaatggacgtccgcgttatcccagagggagagtggctagggacactcagtccttcccaattatgtggacgtctccaaatcttggtcaaatctgtcagatttctaacagtttcaaatacctcaatatcaccctaaactgagaaagattattagcccgtgatggtgggacccttattgacgaaggcctgccccctcctcacagttgggtagattccctgggttcctgatggttcaggagcctgggctgtcatttgtctacctggggtttgcagcagccctagtacaagaagattcattcgtgctgtttactttggcagcctcttcacacaactttcctctctaacacgtgttaattatcagagtattcacctcacctccttacttcccagcttctccaaaatcaaagcaatagtaataaacaatttggaaaatgttgcttagtattttaagccatggttagcattataaccttaattaaagagaccccaggctggggtggctcaccacacccagcctataatcccagcactttgggaggctgagatgggagaatcacttgagcacaacaattcaagagtagcttgggaaatagagcaagatccagtctctacaaaaaataaaaataataaaaataattagctggccgtggtggtgcgtacctgttgtcccagctactcgggaggctaagatgggaggattgcttgagcctaggaatttgatgctgcagtgagctatggtcataccactgcactccagcctgggtgacagagtgagactatgtctcaaaaaaaaaaaaaaaaaaaaaaaaaaagagggaccccagctgctgtgactttggaaactaaaggtgttaacaaaggtcaagcctttccttaggatcgtttctggtttcacccttatgtgattcccaaaactcaactattattgtcagaaactggcccaaagacccagggtctgcatttgcccaggcctaggtctgtatccttgaattttctgctgacagttcaaaggcctggagaaactgaaaatgcattcatttgggttttttcccttgaaaagaaagagataaattattttcatcttggaattttagagttgaataaataatcccaataattacagcatcaatcactaataaactaacattgggaccagccagattggcaactgttagaaatacatgttccatttctatacaaattctcaaacttctagttgccaatttaaaaaagtttaaacaaagtagtggcttaaattcaacatcaaaattaccccttataaatacaagtcttaccattaaagggtaaaggtgtccagtctggcttgctggttcttcttctgtgagaaaagtcactgacagccagaggctcccagcctttccccagtgaaggtccaacaagacacacatgcattttctgctaagaaggtagcaaactctaactagcctgtgttgtgagtgacaattgtgcccctacctcccaacataaatagatggcaaaaagagttggactacaagaggaaccgccggaagcagagtcctatgcatttaaaaaagaatcaatttgctagctgcttcctatacctggagtcagtatgttcagtgtctgaagaagactagaaatgccagccctcagtgtccatgctaaactggcaggaagttttcatagtcctgaagactgacattcaaaacagaccagcacagcagaaggaaagacaagctcctttctctctgcaatcccaacgcatttctaacagccttcggaattctgagcttggacaggctcacgaggatgaaggaggaaaagcagtcccagaagggagagatttcctctatgcacttgcaatgccctttcccttttagaggaaacaacccagctgaaagctgaagcttgaataaaggagtttctttattcatagtcctctctgaaaaagagttaacagtttcattctctcaacatagaggctttgggaattaatgtgtctgtctggtaatgcaagttctctaagctactctcctatgacatgtgacctaacaaggaaggcaattttttcaaatgatataatcctaaagactcaaataggaaaaaatgtgtattttaaatctggcattagcttatcactgttcaaaaagtcaacgagagctcataaggaggatttcttcagctttccataccctagtcctttccttccaacctctgtcccacagccacatactgaatttataccaactttgtttcaagttacatatcttttccctattaggcctatcacacagcacagtagcaatcagaaagaagccactattatcttcagggctctccaattcctcatccctgggagaatggcctggatggctctcctgtaccccacactgccatctacatctctatacacgaaggtagctcctggcacccagtttagttccttaggggtagcaacaaaagaccccagcaagttaaaggcaggaaagacaaagaaacacaccctaagaggtcaatctacaaaacttgcaaagctgggtatgtgggaacagtaaaatgttttaatagctgaaaagatcccagaaggtcaggtacacagtcacatgggtcaagcaggactcactttcctaggctgattttgagttcctttccataattctgtaatgtgggaagaaatatccaaactgtgaactgagcttcttactagtgtcctgaaaaatatttccttaaaaaagtgcataaacttgtctgagggaattaagacaccaggaagaccaagtgttgatgaggctggaaaaaaaaactgtccaaataaaattaagacacaacagattcaaggatgacttctgcaggctcatgctaatttgccagcacagcaggcctcccctattgcctttggtagcagtatcttttcttaaaaaggaggctggggaatagacttcatgaaagatgaggtggcagatcaaccctagtgctcttctacttataaatggtgagtctgatggtggtggtgaacacaggcttatgaacaggacaacagtaactaaatgactcaagtgacaaccaccatcacagccctaccttctgatttacaactttcaacaatcatcaaaagttactgcaaactaagtactttaagtctgtgttttcttgaatggggttcaggacaaacaggcaagggcttgacagcacattggttatccgagttcattgcaggagaccccgggggtggggcagctgagcctcaaattccagtttgcaccacctgctctttctgcttgtcccttttcccatccaactcaatagattccacaaaaagctctccaggtgctcactgtccctgataagtatacagcagggtgagaggggcatttcctaaatatccagtttttcttagtcagcttattttgtttaaatacacaccgcggaacacttctgatgaaggggggaaaatgcaatttccttaactcgaaagagctatttaaaaaaacaaaacaggaaactccccaaacaaaagtcagcagaacaaaatagaaatactcagaggcttagaataagactgagcatattagttac

SEQ ID NO: 146012 - DNA, 402 bp, Homo sapiens
tttcgtcttccggcaataatcgcctggtcgccgttaggtgccggcccaggtggcaggcgcgcccgttgggcactgggggacgcgggcgcgtcaggtgaagactgggggctgcaggcgcgctagtatcttaaatagcgaagatggagaaatactcaataatgaagagcatgaatatgcatccaaaaaaagaaaaaggaccattttagaaatgacacaaatactcaaaaggcatggctattgcaccttgggagaaacctttaatcggttagacttctcaagtgcaattcaagatacccgaaggttcaattatgtggtcaaactgcaggacaaattcgagcatcttaaaatgattcaacaggaggagataaggaagctcgaggaagagaaaaaacaactggaagg

SEQ ID NO: 146013 - DNA, 380 bp, Homo sapiens
gaaaaaggaccattttagaaatgacacaaatactcaaagtttttatcatgaaaaatggatctatgtccataaagaaagcacaaaagaaaggcatggctattgcaccttgggagaagcctttaatcggttagacttctcaagtgcaattcaagatatccgaaggttcaattatgtggtcaaaatgatgattattccccaccttctaagagacaaagaccaacgagccaccacagccaccagtcccagaacccgccaatgctggggaacggaaaatgagggagttcaactctggccctcacaatccagtggaggagacgaaactcatctgcctctgtccctctgggcacgcctcatgccaggtgcatctgtggacaggggcc

SEQ ID NO: 146014 - DNA, 480 bp, Homo sapiens
atggtgggcaaacgtcagtacacatttgtccaaaccacagaatgcacaacgagtgagccctcccagctgcttagtgtccgcgaggaggccgtccggatgcgcgatgattcaggccttctccgccagctccacccgggacgcgagcacccggcgtggacctctgcgtcccgggcccacgacgcccgcgcgggattccggggcagtgcagggtggtgtcagcagctggctcctctgactcagtaccagattcggcactggagggcagacctggggccaccgtctcctgccctacctgagcaggagttccatgggaaacctctatgtagaatcggctgcggctgcccttgtgttggtcattctcatccaagttatctcccatgtacctctgaggactcaggacacccctgcacggcggccgaccctgacagctgcttcacgcctgtgtctccgcagcacttcatcgacctcttcaagttttaa

SEQ ID NO: 146015 - DNA, 1107 bp, Homo sapiens
atgggcccacattggctgtggctccacctggccttggtgctcttgccgccccctgctctgctgctcccttcatgtgagaagggtgtgttaagagtccgtttttatcatgaaaaatggatctatgtccataaagaaagcacaaaagaaaggcatggctattgcaccttgggagaagcctttaatcggttagacttctcaagtgcaattcaagatatccgaaggttcaattatgtggtcaaaccccttctaccccgctacaagtttcaaagacttaatgctattacaaaggaccgtcagaggtcaagctcaggggtgcaactccctcatgccgggcagcctcagggggccgaccctacccaggatgagcggcgccaggtagccggggacactcccggggatccccgggccctggctgggggaggcgttgtggaccgcacgtacccaggctcatatgaggcgagtgggcggccggggctgcagctggcgttggccattgaggatcttctgcgcgacagtgcgatcggttgcaccttctgcgacaggtgccggccggttggcgcgcaacgcctgctagcgcatagtctggcccttgctgcgcccggcgccgaaaaacgggaagtcgtaaagctcctcctcgtggcttatgtgcggcggcggccgggcaaaaacctaacgacacagaactgccagctcagcagccggttacatcccgcccggccaccagtaggcagcgtccgctcatgcgcgctcctggaagaaccagcagcccccaccgcgagttctgattggctctgcatgatgattattccccaccttctaagagacaaagaccaacgagccaccacagccaccagtcccagaacccgccaatgctggggaacggaaaatgagggagttcaactctggccctcacaatccagtggaggagacgaaactcatctgcctctgtccctctgggcacgcctcatgccaggtgcatctgtggacaggggccatgctcctgggcttccaaagttggagaaagctgccaggctcaggtggccaggtgcatatcttggtgtgaggaccttcgctgtatctgggaatgcctactggttaccttggtaa

SEQ ID NO: 146016 - DNA, 2131 bp, Homo sapiens
ctggttccagttaaatgtgttaacagtgtatgtggttggtgcttaatacaaacatgatcagtgcagtactaattaacttcagtcaaacccttaaacatatagggagtaaacagaaatgttgagtgcttactcagcatggggtaagggacacatcaagtcattggtcagtattgggtatcatcatgttcttaccatcttttttctggagttttaatagttgttttttaaaaaaatctctgttttaataagccattttgatgtttgaaactaccttggataagcatatcaagacccttcagagattctaaaacatgttcagcactttctggtacaatattctcaaagaaccaggatacatcttatttctcaaaatgaaacaaaaatgtattagacattacccctgtgatttcaagcccacagtcttcactttgaagtatttgtatccttttacaaaagaaaagccaaatgaagatctccctgaaaaaatattttaatagaatatgtctttatttcagtatcttaaatagtgaagatggagaaatattcaataatgaagagcatgaatatgcatctcactgaaaggaaaaaggaccattttagaaatgacacaaatactcaaagtttttatcgtgaaaaatggatctatgtccataaagaaagcacaaaggaaaggcatggctattgcaccttgggagaagcctttaatcggttagacttctcaagtgcaattcaagatatccgaacgttcaagttatgtggtcaaactgttgcagctaattgcaaaatcccagttaacttcattgagtggcgtggcacacgaagaattacttcaacattttggataaaatcgttcaaaaggttcttgatgacctccacatttctcttttattcaaagatcttccgcaggttctaagctctaacctttgcacctcttattagaggagtagggaagtctgtattagtgggaaacatcaatatttggatttgccgattagaaactattctcgcctgggcaacaacagctacagggtcttcagatggactaaggcaagtgaacaatgggcctgacccttcagtgaccttcctctggcacatggctggaacaacatcctattaccggtttttcaggacgggtggggacattcattcacctttaggccaaggtgacccccacggttgtatatggctgtaggtgaagacagacagctgtgggaagaagcttttgtcagtaccatttttgctgaaaagcagttttgtaggacatttgatcctttcagaaaaaggtcatagttggaatgggaagttggatgtaactttgcaactttcaggaaacattacccagcgaaggagcagtacgggagacaacactgcattttctgtcggcactgcagcattctcttttggaaggactcaggacatcccctgcacggcggccgaccctgacagctgcttcacgccttgtgtcttcccagcaattcatcgccctcttccaggttttaagggcctgccccctgcccatcccctattggagatttgtgaatccctgctgtcctgtgcagggcctcatagtgagtgttctgtgaggtgggtggagactcctcggaagcccctgcttccagaaaccctgggaagaactgcccttctgcaaaggggggacctgcatggttgcattttcatcacttgaaggccgaaggccaaggaaatcatttctacttctttaaaaactccttctaagcatattaaaatgtgaaattttgcgtactctctctctctctatatatatagttcaaaaatactttaggtggtcagctccacattctttgttgacgtgacactaacggccaataatatggcttcttgaattatcaaattatagtttcccaattgggaaactaattggggggttggttacaaaacatttgatccttgtaaatacattgtacagaatatttattttttctcaaaatgcattttaactactacattggctgtgcccaaatgagtcctctttgaatagaaagtgaacccagggcaatgacagccattcttgtcttagggattatggatcggggcatgaattgtgcacacgcagcccaacaacgggcagtggtctctgtgctcctaggcatcc

SEQ ID NO: 146017 - DNA, 844 bp, Homo sapiens
tcacattaataaggtttctccccagtatgggttctctcgacgacataataagagctaagttttcacagaagttttgcttgcattcaaggcactggtatatatgaccatctatctgaataatctcatgcatatgaataaaaatctttttacccttccgagggcatacattatatattttccttttttgagttctctgattacgatttctcttctgaagtgtacattttctatggctctctcctagggagttttccgctggtcttcttgacccatcgttgccctcacagtcattttcttgataagaacttggaagatacatctgtatcaggcctatcaatcatgagcctctacaagtatccagcatcatatatgttaattccttacttggtatttccaaccctagaatccagatggaagaaaacatacattcctgatcctgacaatttgacttctcaaagaagatagcattcgtaacaagaaagactcaagaccatcttccccctcctcctcaaaaggtctctagttcagaactattcacaacactcaattcttgcctctccctggcagccgccgcgcctgccctctaggccttggggacagcacttccggttactctccggacactcgaatctgggcttcctggcggccgcagactctgcgatagtagatctaagggccaggcttcgggaaggaaagaaaagcgaacccggcacggacaagacctaggagcaactcccttcgtgcgcctagactagaggagttggggccaggccgcccacagagcgctttaacagagcgcttcaagggcccacaaggccggctacgcaaaccctttcaagctggc

SEQ ID NO: 146018 - DNA, 998 bp, Homo sapiens
ggaaataatttcgtaagcatatacaatccacttcccactaagaattagggtcaaagacattctatttgaacacttgcaattacctagatctagttggcctttggttgatagatcctctgcctcggaatttcattgagtttttttcttccttgcctttgggtgtctgcttgccacttcctaagaattcttgtagaaggcagtttcctctacttgcccaagagcactgagtacttctctactatcctattattagcttctatctcttagtgtaacttcaaaacttttaaaaagcaaggaagttggtcaaggacatgtggccacttattattacctaaagaaaacatttgttccctgttcattttattttagggggccagatctaacattgtagtgtcttttcaccagatagacttctactgtttcatcaaactcccttcttaactagacctagactttctactccaatcaggctaatctacttactgaatgtgacatatttattcctagttccatacctttgcacatgccctactctccactaattatacttaaaagtccaaaaattttttctttagtaacagacttaggtactgctaagcagttatttaacacaatattccttagttttcatatgttggttattcatatgtctatttatatgtatatttatttttatgtatgttactatgtaaatatggtttgcagttgtttttgtgtggaatcttgtctttccgtataaagttgtaaagctccttggaggagcaggatccatgtgcattgcctttatttttaatgaaattattccccctatgcattcctttacagtgcctagtgctactcattatgtgttcattgaatttgactgacatagttaaaaacttaaggtttattttaggactttcaaggaaacaaaagactttagagtcctctctctgtaattctgccccactcatttgtttaccctgggttgtatacagttctcttccttctcccctccc

SEQ ID NO: 146019 - DNA, 432 bp, Homo sapiens
cctgaggatgcacctcttgaaaatgtggagtgtgacaatatgaaccgctttgaccgaccagacagaaatgttcggcagcctcaggaaggtttttggaaaaggccaccccagaggtggagtggacaggagcattaccacctcagccaccctgaccactatcatcaccatggaaaaagtgacttgagcagcctcaagtactacagccttccagcagccttcccagacccacagaccacacccagggaaaactaataaagccacaacgtatcgaggcccgcagtgaatgctcaatccaagacatgcatcagggcggtgccatccggaagaaagctttacacacgtcttgcaccaagaaagcaactatggtttggaagagcagcctttttcatcaggcccacaattaacaatggatgtggctaagagtacaccttc

SEQ ID NO: 146020 - DNA, 541 bp, Homo sapiens
ctccagaggaaatgtctctcaaagaagagaaacatgaaaatgggccaccacaggatatgtttgattcccccaaggaaaatgaaaaagccttcagtaaaactgatgaatggatagatataagtgtctttgacaggagtgaatgtacaaaacatacttctgggaataatttggtttcaccagatacagactacagagctggttcttcgtttgaactctctccatctgatagctctgatggaacatacatgtgggatgaagaaggcttggaacccattggaaatgtccatccagttgggagctatgagtcctctgaaatgaacagcatagtatgtatggatttatatactcttggaatattttgtttaccctactatagagagacttgtgatatgattgattttgtaaaaaatttatgaattaactttactactttgagaaatggaaattcatatttgttaagagcctataaaatatctgactctaatcctgcaataaagcatggagaatatatgacatttgacttaaatataaaaaaaaaaaa

SEQ ID NO: 146021 - DNA, 2667 bp, Homo sapiens
tttcgtggggatgtgacgggcggcccttcgtctcaccttccgtcctcgggcccgcaggtcgcagggcggcctgcagctgggccgcggccgaggaggcagcgcgacctccgcactattctttcaacttttaagaacaaatgcaccttatagctcatggaagaaaaaacacaaatcaagacatttttgggttccaagttgccaaagtatggaacaaaatctgtaagaagtacattgcagccaatgccaaatgggacacctgttaatttattaggaacttccaagaatagtaatgtcaaaagttacatcaaaaataatggctctgattgtccatcatctcattcatttaattggaggaaagcaaataaatatcagctttgtgcacaaggtgtcgaagagcctaacaatactcaaaattcacatgataaaataattgatcctgaaaaacgtgttcctactcaaggaatgtttgataaaaatgggataaagggaggtttgaaaagtgtttctttattcacatcaaagttagcaaagccatccactatgtttgtgtcatctacagaggagttaaaccaaaagtctttttctggaccatctaatttgggtaaattcaccaaaggcacattattaggaaggacttcatattcttcgatcaatactccaaaatcacagttgaatggattttatggaaaccgatcagctggtagcatgcaaaaggcctagagcgaactcctgtgccaccagaagcagttctggagaaagcttagctcaatccccagacagtagtaaatctattaattgtgaaaaaatggtaaggtcacaaagtttttcacattccattcagaattcattccttccaccttcatctataaccagatcacattcctttaatagagctgtggatcttacaaagccttatcagaaccaacagctatccatttagagtgcctcttacggtccaagtatgcataaacaagaaattcccggcagccagaagtactcaatgggaatgaacatttggggtatggatttaataggccttatgctgctggtggaaagaagttggctttaccaaatggcccaggtgtaacttctactttaggttatagaatggttcatccctctctactgaaatctagccgatctccattttctgggactatgacagttgatggaaataaaaattcacctgctgacacatgtgtagaggaagatgctacagttttggctaaggacagagctgctaataaggaccaagaactgattgaaaatgaaagttatagaacaaaaaacaaccagaccatgaaacatgatgctaaaatgagatacctgagtgatgatgtggatgacatttccttgtcgtctttgtcatcttctgataagaatgatttaagtgaagactttagtgatgattttatagatatagaagactccaacagaactagaataactccagaggaaatgtctctcaaagaagagaaacatgaaaatgggccaccacaggatatgtttgattcccccaaggaaaatgaaaaagccttcagtaaaactgatgaatggatagatataagtgtctctgacaggagtgaatgtacaaaacatacttctgggaataatttggtttcaccagatacagactacagagctggttcttcgtttgaactctctccatctgatagctctgatggaacatacatgtgggaatgaagaaggcttggaacccattgggaaatgtccatccagttgggagctatgagtcctctgaaatgaacagcatagatattttgaataatcttgaatcatgtgaccttgaggatgatgatcttatgcttgatgtggatctgcctgaggatgcacctcttgaaaatgtggagtgtgacaatatgaaccgctttgaccgaccagacagaaatgttcggcagcctcaggaaggtttttggaaaaggccaccccagaggtggagtggacaggagcattacccacctcagccaccctgaccactatcatcaccatgtattaagttatttgagcagaggctctccctatagagaatctgctttgggtcattttgaaagctatggagggatgccctttttccaggctcagaagatgtttgttgatgtaccagaaaatacagtgatactggatgagatgacccttcggcacatggttcaggattgcactgctgtaaaaactcagttactcaaactgaaacgtctcctgcatcagcatgatggaagtggttcattgcatgatattcaactgtcattgccatccagtccagaaccagaagatggtgataaagtatataagaatgaagatttattaaatgaaataaaacaacttacagacgaaataaagaaaaaagatgaaaagatccaactattagaacttcagcttgcaactcagcatatctgccaccaaaaatgtaaagaggaaaaatgcacttatgctgataaatatacccaaacaccctggagacgaattcctggtgggtattctgctccctccttctctccttggcagggctccttccaggggatcccacggactgttccaccgcaccgcagacagacctcaagtactacagccttccagcagccttcccagacccacagaccacacccagggaaaactaataaagccacaacgtatcgaggcccgcagtga

SEQ ID NO: 146022 - DNA, 549 bp, Homo sapiens
tcgttcagtgggtgaatggataaactggcaaatccaaacaaatgccaaaaacaaaatgagctatcaagccatgaaagaaccttaaatgccatattattaattgaaaagaacccaatcctgaaaaaggctacatactgtatgaaaaaaggtaaaactatggagacaataaagagatccagtggttgccaggggttggtggtggagggagagataaacaggcatagcataagggatttttgccagtgaaaattcactgtgtgatactgtaagggttgatacatgttatcatgtcatcatacgtttgtccaaacccatagaatgtacaacactaagcatgaaccctaatgtaaactgtggactttatgttaagataatttgtcaatgtaggttcatcagttgtaaaaatttcccaccctcgtgggagatgttgatagtggaggaggctatgcatgtatggggataggggatatatgggaaatctctatatcttactctcaattttgctgtgaacctaaaactgttctagaaaaatagtctatttaaaaaaaa

SEQ ID NO: 146023 - DNA, 1131 bp, Homo sapiens
gagtggggccccgaaatctgagggtgatcgtagtcactagttgtggcccccatgcaggagcggagagcgagttctggtttctgaaacctcgagggatgggagagtatctgggccgggtggacggaggcggggagatggagagcgctagacaccccagttttagagtgcagatggatcccgcttaaggcaacaaaaaaaagcctggtttatgtgtcgacgctttgatgcttttgagtcgtgaggcggtctggctttttgttttgtttgtttgttttgtttttatcttccatgaacagcgcttccgtggatgggcatctcagtggttgtcgtctttttctcttcctttcacctcttttcaggttttattgtgactactgcgatacatactctcaccccatgactctccatctgtgagacagaccacactgcagtggaaagcaaacacatagagaatgtgaaagactattatcagaaattggatggaaaaagcagtctcagagcctgatttgacaaaaccaacggcttgcatttccaacaaggaaaagaaccctcctaattccattctctgctccttccttccttccaggggccgatgataccaaccttcccccccaagccttcggggttcctcctcgcccttggtatgaatgcccaagcacccccatattgggggggcccttcccatggatggccaatgattgggcccctccctcttcctggggattgattgcccagtggggacctgcttctggggaattgaggccggcccatggggaggccattattgccaattgattgcctggggtcccccaatggatgtaggaccttcttgcccgttccattgatggtgccccctcgggcccggaatgacttcgaccagacagataaggatagaggggaggcccttattgtatcgggttttatattacctgttctgcttcaccaggagatcatgctgctgtgatacttgagttttctaaacgagcataaggaagacttgctcccctgtcctatgaaagagaatagttttggaggggagaagtgggacaaaaaaagatgcagttttcctttgtattgggaaatgtgaaaataaaattgtcaactctttcagttaaaaaaaaaaaggaattc

SEQ ID NO: 146024 - DNA, 16177 bp, Homo sapiens
  misc_feature (1)...(16177): n = a,t,c or g
cggacgcgtgggcggacgcgtgggataagttgttgtgcagctgggagagctacactaagttggtcatgatgcagaagctactcaaatgcagacggcttggcctggctcttgccctcatcctggatctggaatcctcagttcaaggtaagactcaggagtcttgttccccagccatcttctctgtaagccctgtggtccatgcaagtcattatattcattttaaggcatagaatgtataatattgtgagaaaggaggcaaagaagaaggatttggggtcgctgaaccctttaatatgagttctgttaagtttggtaccaagaaaaattaaactctgtggcgtgtgcagacttgtaaactcttacaatgattgaaatgcgctattttgggatgaaaatgtgaggtttataaattttaaaagctcaaaaaaggaatctagaaaatgactcctgtgcctgttgcatggaggagatggcacctttgactgttggggggtgtctgcctacccctaagtgtctacatcagccccaagttttagtgcgctgtgacggtgtcattgttattttaacactgggagacgttatattccaattggggtgaatctgactgtgtgtattttcttttcttttttttttttttaaagataaacttggttcttactgaaaactcaattatggttagacatagttcatgtaaaacctctcagattttaaagagaaggccaaataatttggtatttgtgctcttgctcagagaagcatcatattcggaaatatcttcctaggtttatctaccatttagtgttgtttagtcagactgaaacaacttaaaacctgtaatgactaagacaatgaaaatgataggcttgtaagaaaaatacaatttgttattctttggcaaataaggaatcatgtctaaataagacggaggtcatggcttgatagagagatggctgaacctatagtagaaaaacactaggttccgccaaatggtaagggaaatgttgagtcacaatgacacacatgtcctagatttgtttcgtgaaatgcgaccttttatttgtcatgaacttacttccggtggagatgaaatcttacagatgatcgcagagacattcattttatgttggaaatttataaaatcattttcttctagttatgctaatgctgaaaaaagagcaagtaatgtttctggaacgttattaatttatgtatttttaaaatataaaacattgtcaattgtagggaacaggcttcactgggatcttttagggaatatcttcagcttgatgaaataattcccgaatagccaagtggtctgacaagatcgagagtaatgaggcccatactttagtacagtcttgaatggccagatggtgctgggcataccccaaccagagatatgtaagtctttatgttgtcaaaatttcccagaaacatgaatttcccactaagattcattaaggaaaactagaatgaaaacaaaaacgttccttgtataatattcattagaaagaaatgaagaaggccgggcatggtggctcacgcctgtaatcccagcactttgagaggccaaggtaggcagatcatgaggtcaggagtttgagaccagcctggccaacatagtgaaatcccgtctctaccaaaaatacaaaaaaattagccgggcatggtggcacacacctgtcatcccagctactcaggaggctgaggcaggagaattgcttgaacctgggaggtggaggttgcagtgagctgagattgcaccactgtactacagcctaggtgacagtgcaagactctgtcagaaagaaagaaagagagagagagagaaagaaaggaaagaaagaaagagaaggaaagaaaataattcatcatgaaattgtatagaatactagcatttatgtcatgacctcgtaggtttagctctttgttagaaaaggaaaccatagaaagagacaagggagaaactgacaaactagggtgtttccgaaaaaaggctctcagtatcgggctcaagggcttgtgcccacatctgagcatgcagggaaatagatgtcccccactggctgcacatgtgagtgactgcggcacaaggctgtgatgtgaagagtcatgacaccatttcctcacacctccacgcaatgccagatatgattcgacaacattcttcctgtcttataaaaagggtttatctaacccgttggtttggcagatgaaatcaactaggcttttggcttgcttttactgagcatattcaaaaccatttcagggcactatagtggtttgctcgggttgccataacaaagtaccacggactgagtggcttaaataacagaaatgtatttcctgacagttctggagatgggagtccaagatcaaggtgctggcagggtcgatcgcattctgaggcctctctccttggcttatagatggcgccttctcccttgtctgcacatggcctttcctccatgcatccgtgtcttaataccatcttcttagagggtcaccaggcattggatcagggccaccctaatggcctcatcttaactacctatatctgcaatgaccctatttctgaacaatttcacattgtgagattctgtgggttagaactggaacatatgaatttggtggtggtatatttttattataagtcaaacccaagtaaagatgtggggtaagattgtgtttaccaagcacaaagaaatggaaatttggggatgtgtaactctggagagcacagatgactaatctatttaatgtagggctccaggggatttgatgaggcctgtgaatcttccacttttattgcctctcttttccaatgacacccataaagaaaaaaaatggaatatccatgaacaggtgcagccaaggaggccaggcccgccatgtgtccactgtatactgtctcctagctcacaggaatgatactgatccactccttgtgctgctctttgtaaagtgatttcacatccattctctggtaatcatcatcacattccctgtgatgaggaattagcaccaattatagaggagaaaactggatctgacatttctcatctcatttgctctatacattaacctcttgcaaaaaatttgtgagtcttgcccaagacccattacaactaattaacggctgaactggtcgtctgatttcaaggccagaattaactttctactgcagctcatggatcagaggttttctttatttaaacaaacaaacaaaaaatcctttgaccgtagcccttgctataacatttcccactgagttgagggagaaattgaaagtaaacttaggagctttttatagcttgtcaaaccatgcaagagtgggggaagcttatccatcttgtggaattgatagaccaggaggaagtaactccggcttagataatgctaccattttgaataaatcaaatggtcttcttttccccttcatggtagttgctgcttaagtttctctaacatgcctgcagtaagtttccattaagaataggaaattaggctcggtacagtggctcacgtctgtagtcttagcactttgggagaccgaggagtgtggatcacttgaggtcaggagttcaagaccagcctggccaacatggtgaaacccccatctctactaaaaatacaaaaattagccaggcatagtggcatgcacctgtaatcccagctactcgagaggctgaggcaggagaatcacttgaaccagggagatggaggttgcagtgagccaagatcatgccactgcactccagcctgggcgatagactgagactctgtctcaaaaaaaaaaaaaaaaaaaagaaaaaagaaaagaaaaaaaaaagaaattagtatattgtgattatgttgagggaaaagttagtaccataatataaaaaggtatggactattggagaaagttgtttgctttggtaacatttactcatagaaagtattttggtaaagcaggactcagggtggtgggggaggtgggcagtgagggataggattcaaataaaaaccattctttcccttggaatccactacacaattaaccaacaaatcccataagtggaccttttaggaagataacatttctatccatgagcatagccactataatcacaagacatttatctcaagcaagatagagtcaagatactctcacaacctcaggggctggaactgtaaattttcacatcctgccaacacccttgaatagctatgtcaagaatttagtgtctgtaacttgttctttattttaaagtacatttaacatcatcggccccaaattagataggcttttggagtgggatcccttctacttttgatttctttataaaattttaaaatagctttgttgagatagtgttcacataccatacagttcacccattaaaagtgttcaattcagtgattaggccaggtgtggtggctcatgcctgtaatcccagcattttgggaggccaaggcaagtggatcacttgaggtcaagagtttgagactagcctggccaacatggtgagaacttgtctctactaaaaatacaaaaattaactgggcatggtggtgtgcacctgtaattccagctacttgggaggctgaggcaggagaatcacttgaacctgggaggtggaggttgcagtgagctgagattgcaccactgcactccagcctggatgacggagcaagactctgtctccaaaaaaaaaaaaaaaaaaagtgttcaatgttttttagtatattcacagagtcatgcaaccatcactataattgcttctagaacattttcatcatcccccaaaagaaagccttcgttacgaattttaattagctgagattctgaactctgggggaattttgtattctagaaatattttttactaatatgctacagttgtatttgtcatgctggtgaaaagatgtggtctttcacctggatgctttctcattaagcattatttttctgtttagcttcctgtgtgagcaaacattttctcagcttgatactcagtgcatcagcggcttgcagaagagactgcctaggcctgctctgtccagtacggtagccacaagtcacttgtggctactgaacacttgaaatgtggccaaggcaaattgggacaggctgtgaatgcaaaatatacaagatttggaacccttagtatgaagaaaagaatgcaaaatatcccagtaataacttttacattgatgatatgttaaaggacaatatttgaatatgttaggttaaataaaattaatttcacctgtttctttttacttttaaaaatatggccgctggaacatttaaaactccctatgtggtttgctttgtgtttctattggacaaagttggtctagacagtacaaggtgtgaagacaccgccctctgctggagaagatgctggatttttatttcacctacaggaagagacgtctaagtagcaattagatgctaaactaatgctgcctcaggaaagaatcaaaagagaaagagtgaaaccaggccgggcgcggtggctcacgcctataatctcagcnactttgggaggccaaggcgaggggatcacgaggtcaggagatcgagaccttcctggctaaccccgtctctattaaaactacaaaaaattagccgggcatggtggcacgtgcctgtaattccagctagtcgggaggctgaggcaggagaatagcttaaacccaggtggcggagggtgcagtgagctgagatgtgccacagcactccagcctgggcaacagagccagactctatctcaaaataaggaaaaataaaaaagaaaagaaagaaagtccataaattgagactcctagagatactaaatggtagaatgggaatttgaatttaaatttataagatgttcactctcggagatcataggtcattgttgtcctcctccttttcatgacaggaactagcaatgaagagctctgactatgtgctaggtactactctgagaacctaacatttgtatctccttattaactctattactgccccatcctacagatgagaaaattgaggcacaggaagtttaagttggccaagatcacacagccagtaaggggcagacattgaaaggtcattttgcctgccttatccccagcctccaggcagtggcagagttagctcattttggacaaacagctctcccagaccagacattgtaagctatactcaggaatcataggaaagattatgatagaataatatatagttacaaagaaaagaaagaaaatccaatgggagaatatttactgttttctatattaaagtgtttaatgtttatgtttttagaggaatattgtttattatagcaatttagaaaacaaaatgagaaaaaaaatcaccaaagattctacctccagttatttttgtgtatttccttccatttttccccccatgtctgtttatataattgaaactattattcatgcaaagaggtattctgattttctcagttatttttatttatttttaattttgtaaataaacttttttcttctgagacagtctcgctgtgtcacccaggctgaagtgcagccgtgcaatcttggctcactgtgacctcccagtctcaagcaatcttcctgcctcagcctcctaagtagctgggactgcagatgtgtgctaccacatccagctaatttttaaaatcttttttctcttttttggtagaaatgggagtctctctatgttgcccagcctgtattgaactcctgggctcaagtgatcctcccacctcagtctcccaaagtgctgggatttcaggcatgagctaccacacccaacctaatttttatttttattttattaaaaaaaaaagtttttgcctacccgcctctcaccctctcactcatttttaagtataggtttttctacaatgccacattgtcttttccataaaaagtactttcggccgggtgtggtggctcacacctgtaatcccagcactttgggagactgaggcgggtggatcacctgaggtcaggagttcgagaccagcctggccaacatggtgaaaccccatccctactaaaaatacaaaaattagctggatatgattgtgggcacctgtcatcccagctactcgggaggctgaggcaggagaatcgcttgaacctgggaggcagaggttgcagtgagccgagattgtgccactgcatcccagccagggcaacagagcgagacttcatctcaaaaaaaaaaaaaaaaagtacttttcttcatttggttagtattctcttatgagttgatgccttgtaatttatctgaatgttttccattattttgtggtgagctttaaaactacccttcctgactttcaagaatcctagacatgctccttgttgctaggtaattattagttgcactcattagaataaagtatatgcttggagtggggaggagatgaactttttgaagggcggtgaagtatttctcaccaccaggcctttgtctttgctaaactgaggaaggaagattttatttcattagctaacaaagaacctcctatataggccgggcatggtggctcacgcctgtaatcctcacattttcagaggccaaggtgggtggattgcctgagctcaggagtttgagaccagcttgggcaacatggcaaaaccccatctctactaaaaatactaaaaattagctgggcgtggtggtgagtgcctgtaatcccagttactccagagggtgaggcagaaaattgcttgaacccgggaggtggaggttgccatgagccgagatcgtgacagtgcactccagcctgggcgacacagcaagactctctctcaataaaataaaataaaataaaataaaataaatacataaataaatctcctatataacctcataatatcagatttggagccttttccatagaaatgaaattcagaagaagctgagactcagatattccaagctgcctggtgctctgtgaatagaggagacttgttcttgtgaaatctgagtgcaaagacacaggacaaattgttatctacttttcattcctaaggatactgtatggccctaaaacacaagaactagaattctgtgataccacgggtactccacagtgtgttccttcccctttctgaacctgatttgtctcatctctatgaaaagatgtgggctttggggtcagatgtgggttggaatcctagcgcctgtgtggctgcaattttcttttgtgtaaaattgagataatagtacaaaagtaacaacagttaatattatcaagtgcttactgtgtgcctggcactgtgttaaattctctaagtgtattttctcatttaatttttgtgataggcttatgacactattagtatcttcatattacagtgagggttcagagaagttaaggttccataactagtcagcagacctgggacttcactccaggcagctgattccaaagcctattctaactttaaactgctactttttggagtgttgtaagaaggacaatttatataaaatgttggcacatagtgggtgctgctgttatatgaatgggcacaaaatctgtctacattttgccttttaccaaatttagaatctatttagttaaaaccttcttagggcgggtggagtgcagttgctcattcctgtaatctcagcacactgggaggccaaggcaggaggattgcttgagcccaggtgtttgagaccagcctgggcacatagtgagacccccatctctccaaaaaacaaacaaacaaacaaaaacaaaacaaaactagctgggcgttgtggtgcccctgtattcccagctactcaagaggctggggtgggagaatggcttgagcccaggagttcaaggttgcagtgagctatgatcacagtactgcactccagcttgggcagccgactgagaccctgtctcgaaaaaaaaataaaaataaaaacttcttaggacagagtgattagaagctctctagtagatacttagtaacaatgtgggttcctcgggcaggttatcctacgcagagagccaggtaccaatgggtgcgctgcaatccagacagtaattctgcaaactgccttgaagaaaaaggaccaatgttcgaactacttccaggtgaatccaacaagatcccccgtctgaggactgacctttttccgtaagtggacttttctctaattaattaattaattacttatttatttgagacggagtttcacttttcttgcccaggctggagtgcaatggcgcaatcttagctcactgcaacctccgcctcctgggttcaagcgattctcctgcttcagcctctggagcagctgggatttcaggcgcctgccaccatgcccagctaatttttttttttttttttttttgagacggagtctcactctgttgctcaggctggagtgcagtggcgcaatctcggctcactgcaagctccacctcctggattcacgccattctcccgcctcagcctcccgagtagctgggactacaggcacccgccaccacgcccggctaatttttttgtatttttagtagagacggggtttcaccttattagccaggatggtctcgatctcctgacctagtgatccgcccgccttgacctcccaaaatgctgggattacaggcgtgagccactgcgcctggcctaattttttgtattattagtagagacgggctttcatcatcttggccaggctggtctcaaactcctgacctcaggtgatccacccaccttggcctcccaaagtgttgggattacaagcatgagccactgtacccggccttttctctaattttaaagtgtctgtaatttcacaacctcttggcacagatgtgggagtgtttttcttcaagctgtccagagtgttttgcttcgagctcttgctttggtagtttggctcttactctgcagtacatggtaaaagtgtactgtatatactggcatatgacatgtgcgagtatacatgattcacctatgtttttgaaattttttttgtggatggtagagaggagcattgaggacttttcatcaacaggtattgaaaatgattgaacattgttttatttgtgtaaacagaacacactatatataaaaatccaataattaactgaatggataagcaaaatgtggtataagcatacaaaggaatattattgggtcataaaaagaatgaagtactgatacatgctacaacatagataaaccttggaaacattatgcagagcgaaggaaggccagacaccaaaagccacatattgtatgattccatttagatgaaatgtccagaataggcaaatccctagaggcagaaagtagattagtgggttacaggggctggggaaagggaggaataaggagtgactgctaatgggtatgagggttttttttggaggaggtgattaaaatgttcttctgccaggtgtggtggctcatgcctgtaatcccagcactttgggaggccgaggcgggaggattgtttgagcccaggagtttgaggccagcctgggcaacatagtgagaccctatctctatttcaaatacattttttatattaaaaaaatgttcttcaagtagttggtaattatttttaaaaatggccaggtgcagaggctcatgcctgtaatcccagcaccttgggaggctgaggtgggaggatcccttgagcccaggaggtttgggaccagcctgggccatacagcaagaccctgtctctacaaaaaatacaaaaattagctaggcatagtgatgtgcacctgtggtcccagctactcgggaggctgaggtaggagaatctcttgagcctatgttgagcctgcagtgaaccctatttatgccattgcactccagcctaggcaacagagtaagactctgtctcaaaaaaagaaaaaaaaaattagggaaaggaagaataattagccaagacttgtaaaacaaaaatcaaatctcttcttttgatcacataaaacttgctttaaacttgcaaaaaagacctgatataaattcataagtaacaaaaaattgaattatattagaaaccattaattcaatgaatactaaagctatgtaggatgtagcaaaatatacatattaagaaaaggattatcataaaagttttaatctccaggctcaaacctagaaaatcactctcctcaaagccagggttaatcatcatgctccaaaccaggtacatttcacatcactttgggatcctggcaactttctcttttgttttttttttttttttgagacagggtctcctctgtcacccaggatggagtgcagtggtgtgatcatagctcactgcagcctgcaactcctcaagtgatcttcctgcctcagcctcccaagtagcgggaccacaggcacacagcaccatgcccatctaattaaaaaaatttttttttgtagagacaggggtctctgtacatttcccaggctggtcatgtactcctaagctcaagcagtcctcccacctcagcctcccaaagtgccggaattacagtcatgagccaccattcccagcgctggtgactttctccatcactggtgactttctccatcactggtattcactgcattagtgatgacatcattacaatcttcaatatgcaactttgtagtcctactcttgcattcttactttaaagcctcagcattaagtttgaatgtaatattacagcatccttcattactttaaatcattggtttcaatagtaattcatttaaatctaaaatgttaggctgcagtggctcatgcctgtaatccccccagtttgggagactgaggtgggagaatcacttgaggccaagaatttgagaccagcctgggcaacacggcaagaccccatctctaaaaattagtggcccggcgcctgtgcctcacgcctgtaatcccaacactttgggaggccgaggcggatagcttgaggtcaggagttcaagatcagcctggccaacatggcggaaacccatttctactaaaaatacaaaaattagctgggcatggtggcacgcctgtaatcccagctattgagaggccgaggcaggcagactgggaggccaaggcaggcagattgctttgagacctgcctgggtaacatggagaaatcctgtctctacagaaaaatacaaaaattagccaagcatggagaaacctcgtctctatagaaagacacaaaaactagccatgcatgcctgtggtccagctactcgaaaggctgagatgggaggattgcttgatcctgagaggtcaaggctgaagtgagccatggtgtggcactgcactccagccagggtgacagactaaaaccttgtctcaaaataaataaacacatttaaaataaataaatacaattaaaactaaaattaaaaaataaaataaaatgttaagagaatagctcaaattctccaaaagaactcttgcacaccattcctcctcttctcaaatctctattttccttccccaaagccagtaactgcttctcaccctgaccctgtgctttctttcccgtcattgcgaaagaatggtccttgcttctgtgctgatcccaaacccttttgccctcagatcctcctgtccttccctggccctgctctgtattggctgtggggtgggggtggcggtggaactgacccctggggtctgcatttctcaggctcccagggctgtggctgactttggccaatgggaggcaaggacgggagactgagagcttgggaggaagggagagaggtatgtttcttctccttactccctgcctggggtggcaccttgggcaggactctgttttgcccatggcctcagctcccaccagatgcctctagtccctgggctcaggaaatagacaacctccttccactatcgctgtagcccaaggagggaagtattttttttctttctttctttctttccttttttttttttacagagtctcactcttgttgcccaggctggagtgcagtggtgcgatctcagctcactgccacctctgcctcccgggttcaagtgattctcctgcctcagcctccagggtgtgccactatgcccagctaatttttgtatttttggtagagacggggttttgccatgttgaccaggctggtcttgaacttctgaccccaaatgatctgcctgcctcgtcctcccaaagtgctgggattacaggcatgagccactgtgcctggccgaaggaaatattttcttgctattgctaatctctgggttacctcgctatcccccatttagcttcacttctcctccatcacctgtatgaggaattccctctgtgttaaatatctggagaagtttcctgattggaccctggctgttgcagcttccaaggccacctctctttgtggctggtatccttttcccatgcatcttctccaggacttccattctgcagttatctctctgaactcagtgtcttcttcccatcagtataggggtggactttagtatctcctatgtttaggcaacatctctcctttgactctgcgtcttctccagtggttgcccttctctgctcctcttcacaataacacctcctgaaagggccacccatgcctgccccctcctttcctcaccccctctgtggctggacttctgttcctacactccaccctggttgacaaagtcactgattacttctctattttcagcttacttgatccttaattgccttcaaaaacagctaactgggccatgcatgtaatcccagcacttcgggaggccaaggcaggaggatcacttgagcccaggagttcaggaccagcctgcctgggcaacatagtgagaccctatctacaaaaaatagaaaaattagccgggcgttgtgactcatgcttgtggtcccagctacaaaggaagctgaggtgggaggatggcttgagtccgggagggtgaggctgcagtgagccatgatcacgccactgcactccagcctgcacaacagaaggaggccctttctgtaaaaaaaaaaatggttgaccactccttccttgaaatgcttttttcttgaggcttccatgccctgccttatcctgtttcttcctacttctctggttgtgctttttcctctgctcagtatttaacatgttggtgtgaccctggctctggcctgggcccccttctctatctacgtgctttctctcgacgacctccatcggttgcatgggtttaactaccaaatctgtgattctagctccgacaccccaggctaaagtagccacctggtcactccctattacattggtcaatttcatttctctgtgccacctatgattttcctgatttatttattcacttttcattgtctgtcttccccactaaaataaaaacttcttgagaaggggcttcatcgatctgcctctgttctatcccaggccctcaaaacaaggaccagatattcaacaaatatttattgaatgcgtacatgaattaaaactctaattggttgtatgctggtggtttattattttcatggaggaaatgacttgtaggctgtgacactcagcttttgtctctgatgctttgttgccctgttctgtcaccgagggctgtcgtcattgctctggccattttgtgctctttgaatttctaatcatcacactcaacccagaaggcagccttacctttcagcactcttcagctgaatgagtgcaagttggaggcagggtcattttttgataggaaattgaatgtttatatgctggtaaatataaagcttagctttttacaaagaatttctcaaaagtgagctttgttgaagccctgtaaattgttagaacttttatggaaattttaatttaggaaaaaatgtcatctgtttgggctgacttagttgttagttgtttgtcctttcttttttttggtggagggtatggagttttgctcttgtaacccaggctggagtgcagtggcgcgatctcggctcactgcaacctccgcctcctgggttcaagcgattctctcacctcagccttccgagtagctgggattacaggcatgcaccaccacacttggctaatttttgtattttaagtagagaccgggtttcactatgttggtcaggctggtttcgaactcctgacctcaagtgatcacccaccttggcctcccaaagtgcttggattacagacatgagccaccacacccggccaagaggacttcttttaaaaatgatttcttgggccgggtgcagtggctcacacctgtaatcccagcactttgggaggctgaggtgggtggttcacaaggtcaggagtttgagatcagcctggccaatatggtgaaactccatctctactaaaaatacaaaaattagccaggcatggtggcgcacccctgttgtcccagctactcgggaggctgaggcaggagaatcacttgaacctgggaggtggaggttgcagtgagccgagatggcaccactgcactccagcctgggcaacagagcaagactctgcctccaaaaataaaaattaaaatgatttcttaagtaaatttcaaatatagaatgtatatgctagtgataacaaaattaacactgtttatgcaagtctgcaataggtagatgtgaagttgataggtgcaataagtataggcaaacacataggaacatttgacctgtttttttgttgattttaaaacattgaataattgggaagcttttaaatctcttaatttgagcaactagatggctgtatttatctccttatattaaaaaaactattataattatctttcccacatatcaaactccactggtttttttcccatttttctttcatacttcagaaagacgagaatccaggacttgaatcgtatcttcccactttctgaggactactctggatcaggcttcggctccggctccggctctggatcaggatctgggagtggcttcctaacggaaatggaacaggattaccaactagtagacgaaagtgatgctttccatgacaaccttaggtctcttgacaggaatctgccctcagacagccaggacttgggtcaacatggattagaagaggattttatgttataaaagaggattttccaccttgacaccaggcaatgtagttagcatattttatgtacgatggttatatgattaatcttgggacagagaatttatagaaatttttaacatctgaaaagaagnntagttttatcacttttttt

SEQ ID NO: 146025 - DNA, 1251 bp, Homo sapiens
cccacgcgtccggaagttggcgtgcagctgggagagctagactaagttggtcatgatgcagaagctactcaaatgcagtcggcttgtcctggctcttgccctcatcctggttctggaatcctcagttcaagggtatcctagcgcgcaaacccaggcaccaatgggtgcgctgcaatccagacagtagttctgctcactgcctcgaagaaaaaggccacatgttcgaactacttccaggtgaatccaacaagatcccccgtcttgaggactgacctttttccaaagacgagaatccagggacttgaatccgtatcttcccactttctgaggactactctggatcaggcttcggctccggctccggctctgggatcagggtcttgggagttggttcctaacgggaaatgggaacaggaattaccaactaagtagacgaaaggtgatgctttccaatgacaacccttagggtctcttgacaggaatctgcccctcagacagccaggacttgggtcaacatggattagaagaggattctatggtataaaaggaggattttcccacccttgaccaccaggcaaatggtagttaagcaatattttaatgtacccatggttaatatgattaattcttgggacaaagaattttataggaaatttttaaacatctgaaaaagaagcttaagtttttatcatcctttttttttctcatgaattcttaaaggattatgctttaatgctgttatctatcttattgttcctcgaaaaatacctgcattttttggtatcatgttcaaccaacatcattatgaaatttattaaattcccaatggccataaaatggctttaaagaatatatatatatatttttaaagtagcttgatgagcaaacatggggcgtagtatttcctaccctattttaacaactctgacttggattgtgaattataatgatatgccccttttcttataaaaacaaaactaaaaaatattgaaccacagcgaatttgtagagtgggggtatttgacatattttacagggtggagtgtactatatactattacctttgaatgtgtttgcagagctagtggatgtgtttgtctacaagtatgattgctgttacataacaccccaaattaactcccaaattaaaacacagttgtgctgtcaatacctcatactgctttaccttttttttctggaaaattggggaattttcaaatgttactatatattaaagcagaaatataacca

SEQ ID NO: 146026 - DNA, 525 bp, Homo sapiens
gcggccgcggctcagcccagcaagtggctcccggggccctgtgacgccgccgcccgcccttcaccgaggccggtgactccgcaagcgccctcaaaacgcctttcctgacagaaatgtcccccagctcccacgtcgcgagcctcacttaaccgctaagcacctcgtgaccgacattgaaaactcccagaaccgggcccggtcaggggcagtttccgcctcctccgactgcccgccggccctccacagacccagccctcgccggcccgcaccccaaatgccgctcgccgggtcagaccccgagagccactgcgccgagaccgagtagaggctctgagggaatggggaaaggcaggtccacgaacccgagggtattggagggtattcttgcctggtgcgagcttttcctcagagtcccgcagagcggccggacccaacggagacgcttccctcacggggctccggcgtgaactggtttatctctaacgcaaccctcagcctcttgttttgcagagttctccgacgaaa

SEQ ID NO: 146027 - DNA, 1333 bp, Homo sapiens
agcctctactcggtctcggcgcagtggctctcggggtctgacccggcgagcggcatttggggtgcgggccggcgagggctgggtctgtggagggccggcgggcagtcggaggaggcggaaactgcccctgaccgggcccggttctgggagttttcaatgtcggtcacgaggtggacgcggatctgtcaacatgggtaaaggagaccccaacaagccgcggggcaaaatgtcctcgtacgctttttttcgtgcagacctgccgggaagagcacaagaagaaacaacccggacttttccgtcaatttccgcggaatttctccaagaagtgttcggagagattggaagaccatgtcttgcaaagggagaagttcgaagttttgaaggatatgggcaaaaagttgacaaagcttcgctattgacaggggagatggaaaatttacgtttccttcccaaaggtgataagaaggggaagaaaaaggaccccaattgctccttaaaaggccaccatctgccttcttcctgttttgctctgaacatcgcccaaagatcaaaagttgaacaccctggcctatccattggggatactgcaaagaaattgggtgaaatgtggtctgagcagtcagccaaagataaacaaccatatgaacagaaagcagctaagctaaagggagaaatatgaaagaggatattgctgcatatcgtgccaagggcaaaagtgaagcaggaaagaagggcccctgccaggcccaccgggctcaaagaagaagaacccaccccgaagttggagggggtgggaggggtaagaagcttgataagatgtgggaggtaggaggatgcagatgaaggattaatggcctatcctttaaatgatgcgtgtgggaatgtgtgtgtgtgctccaggcaaatatttttgcttaagaatgtgaaattccaagtgccagcctcaatacctagccttcagtataaaaactgtaccagatttttggtatagcctgataaggattcctctgtagaggaaaatactttttaaaaaatccagggttgtagctttttgatggggctactcataccaggttagattttacagcttctgatgttgaatgttcctaaatatttaatggttttttttaatttctgtgtgtatggtagcacagcaaacttgtaggaattagtatcaatagtaaattttgggttttttaggatgttgcatttcgtttttttaaaaaaaatatttgtaataccaattatgtatattatttctattgtctttgtcttaatatgctaagttaattttcactttaaaaaagccatttgaagaccaaaaaaaaaaaaa

SEQ ID NO: 146028 - DNA, 339 bp, Homo sapiens
  misc_feature (1)...(339): n = a,t,c or g
ctttttttttttcttcaagaccaaataagtattttatttttcccttcctaacactcaaattcatggcaggtgaaaagataatagaacataatcaaactaacatataaacacaattcaaaaacgtttaaccatctattatagctctttgttgtaaaacacacaaagttaaacagaaacatctttatataaattatccttaataatctgtatacactgtaaaaccctagtgcaagcngtggtgtacaaaagtgcaaacaaggttagtgattaacaacttaccatcaatataccacttcaacatactttacattcagccaaatactgagggtttcaccatgg

SEQ ID NO: 146029 - DNA, 1484 bp, Homo sapiens
  misc_feature (1)...(1484): n = a,t,c or g
gccggtcatttcctttataatcctcttttggaaattcaagttagtccttttaacccaaataaaagaggacccacctctggggatatgtgactctccctctttataaggtgactggaatttgttaaaaaccgtgtttccacttctaacccctgttaccattccccctcacaaaatccccacccaacacctggattttaaagatcctccagtgtcaagggaagccacatagtctattaaagaggcagttctgaaccaattaatttttgtccttataatttagagcattaaaatagctaatatatttaatggcactaatagttgttcacggcttttcatcatactttttaaacaggatccaaagtattcaaaggaaagtaagcgaagttatccaaagccaactttgtttcaggtgtgtcccctgccccaaatagattttagggcagaaatagaaaactgagtttacacagaactatttttggaaaagctgcactggagtagatggattcttcttcagcatacttttttgtttgtttgtttgagatggagtcttgctttgtcacccgggctgggagtgcagtgggtgtgatctccactcactggcaacctctgcttcccaggttcaagcgattctcgtgcctcaccaaccttccaagtaggcttgggattacaggcgtgcgccaccacagctgggctaatatttgtattgttagtagagacagggttttcaccatgtttgttccagggttgtcgaacttctggacctcacgtgattccacctgcctcaagcctcccaaagtgcttaggattatagggcgtgaacccacttgcgccccggccagcatggcattttaaaagtggcttaagatttagttttaaatattttggggtgaaaggcaggaacagttctgtttttgacatacaggttttctttgggattgttttcattttcaagtatagattcatgtcagaatggccaacttaacgtgggtttctgtattccctgggtgttgctcttaacctgaactccataatccagttgcccatacctgaggccaggagccactccagggtgaaaccatagtccaagttaccttaaaaagtgaataaaagtgttttccccatgggtgaaaccctccagtatttgggctgaatgttaaagtatgttgaagtggtatatttgatgggtaaggttgttaatcactaaccntggttttgcacctttgttacacccactgcttgcaccaggggtccttgggggttgaatttttccaatggttttacagtgtatacagattattaaggataatttatataaagatgtttctgtttaactttgtgtggtttacaacaaagagctataatagatggttaaacggtttttgaattgtgtttatatgttagtttgattatgttctattatcttttcacctgccatgaatttgagtgttaggaagggaaaaataaaatactaatcttggtcttga

SEQ ID NO: 146030 - DNA, 802 bp, Homo sapiens
cgtgagctgagatgacaccactgcactccagcgtgggcagcagagtgagactccaccttaaaaaaaaaaattacataaaaaaaccacgaaaggctttgttcatttctatctttgggataatattttttcacttaatatatgtatcaacctatatttatttgagtactttctcatttacatctttaatccttatggaatttattttgtgtgtggtatgagtgttgcatttgcaattaaagaatgctatactgatggcctactggtatatttcattttaataacctggttgcctagctctgaagaagatttaaaagtcctctaacttttcatgccaaagaatgaattaattttctcaaaatgtttccactttcttttcattgtgcccaaatttactctattggaccatctggcttttctaagattaaaactggctttctggagattgggttggcacagcacataaatggtacttaataatactgagtccatacacttagaaatgggttaagatggtaaatcttgttatgtgtattttataatttttcctttgtcttaataattctatttttaaggaagctattctaaggaaataatctaataggaaaaaacccccagggaatggtatctcaattaaaaaaaataacaaaataacttatttgcttggaattgtgactgtaattttatatacagatgataaagaaacctaaacatccaacaacatgggatgaatagtgactaaaatagttatgaagactatatgacatggaaacataatgttaaggcttcagataaataacctagc

SEQ ID NO: 146031 - DNA, 711 bp, Homo sapiens
  misc_feature (1)...(711): n = a,t,c or g
ccttggccacctctaggactttttccgccaaaactgagttgcagctctgtantcanggctgangtccacactntagtagacgaccaccagggggcgcctggtgtagcgcttagcatcgttttgnaccttggggtgccaanccaggggcaggncntacttcagcacgangtccttgatgcccgagtcctgggtggagccctggacgnccatcatgtggcnccggggctcatacttggactggaatttctcaggctgcattacaaccaactgcccctgggagactttcaagaactttgctatttctgtgctgaaagtgtggtgaaatttgtaatcttctctcaggttgttagcggcatcctggtattgctggtaggctgggtcactctcccccttaaagaccccgatgatgatgacatcgtctccatccttcaggaactcctggacctgcttcagggtcagaatctccttggagggaggcccggactgctcgatcatgtaatcaacgattccatatttttctcgtgggccgttgtagtcataaggccttcctttgcggaaaattttcagggtgggattgttagaagaatcctcgtccgggcctcggcacccgccacggccagcagccgcaccagccccaagagcagcaggagcaggaaggctttccggggcctcatggtagcgggggcggagcgcggtcctaggcggcggcgc

SEQ ID NO: 146032 - DNA, 882 bp, Homo sapiens
  misc_feature (1)...(882): n = a,t,c or g
aagggccaaaagggcttggtcatcgcaaagatggacgcacctgcaaacacgtcccccagcgccgctataaggtggagggcttcccaccatctactcgccccccagtggggacaaaagaacccagtttaaatttgagggtggagacagagatctggagcatttgagcaagtttatagaagaacatgccacaaaactgagcaggaccaaggaagagctttgaaggcctgaggtctgcggaaggtgggaggaggcagacgccctgcgtggcccatggtcggggcgtccacgccgaggccggcaacaaacgacagtatctcggattccttttttttttttttaattttttatactttggtgtttcacttcatgctctgaatactgaataaccatgaatgactgaatagtttagtccagatttttacagaggatacatctatttttatcattatttggggtttgaaaaatttttttttacaccttctaatttctttatttctcaaagcagataattcttctgtgtgaaaatgttttctttttttaatttaaggtttaaaattccttttccaaaaaaaanccgaggccggcaacaaacgacagtatctcggattcctttttttttttttttaattttttatactttggtgtttcacttcatgctctgaatactgaataaccatgaatgactgaatagtttagtccagatttttacagaggatacatctatttttatcattatttggggtttgaaaaattttttttttacaccttctaatttctttatttctcaaagcagataattattctgtgtgaaaatgttttctttttttaatttaaggtttaaaattccttttccaaaaaaaaaaaaaaaaaagggcggccgct

SEQ ID NO: 146033 - DNA, 385 bp, Homo sapiens
  misc_feature (1)...(385): n = a,t,c or g
ttttaacatgatttggaaaaggaattttaaaccttaaattaaaaaaagaaaacattttcacacagaagaattatctgctttgagaaataaagaaattagaagcgtggacgccccgaccatgggccacgcagggcgtctgcctcctcccaccttccgcagacctcaggccttcaaagctcttccttggtcctgctcagtnnttgtggatgttcttctataaacttgctcaaatgctncagatctctgtctccaccctcaaatttaaactggttctttttgtccccactggggngcaagtaaatggtggggagccctccaccttatacggtcgctggggacgcgntggcagtgcgccatcttggcgataccagcccttttgcccttg

SEQ ID NO: 146034 - DNA, 886 bp, Homo sapiens
  misc_feature (1)...(886): n = a,t,c or g
gtggtggaagactttgactccattgtgatgaccccagaaaagacgtctccatcgagtttcacgcgcaatggtgcgggcactcaagccagctagagcccgtgtacacagctgnnnccaagaagtacaagggccaaaagggcctggntcatcgccaagatggacgcactgccanncgacgtccccagcgacccgctataaggtggagggcttccccaccatctacttcgcccccagtggggacanaaagaacccagttaaatttgagggtggagacagagatctggagcatttgagcaagtttatagaagaacatgccacaaaactgagcaggaccaaggaagagctttgaaggcctgaggtctgcggaaggtgggaggaggcagacgccctgcgtggcccatggtcggggcgtccacgccgaggccggcaacaaacgacagtatctcggattccttttttttttttttaattttttatactttggtgtttcacttcatgctctgaatactgaataaccatgaatgactgaatagtttagtccagatttttacagaggatacatctatttttatcattatttggggtttgaaaaatttttttttacacctgttgagcacaaagtgagagctgccactgagcagccctgccaggggtgctgtttcaggctgggcatcgccaggcggcctccctgcaaaccaagggctgggggcaaaggggcatgatccagggtcccccagggtgggctcagctccagggagaggccacccacgtggcagccccacctcttgagagcccccagtgccggagcagaaaggaccctggacccagaggcagatactgcggggtggtagaaaaggtagagtaggctgtggcaatggaataaaac

SEQ ID NO: 146035 - DNA, 819 bp, Homo sapiens
atacttgggtgtttcacttcatgctctgaatactgatacccatgaatgactgaatagtttagtccagatttttacagaggatacatctatttttatcattattttgggtttgaaaaatttttttttacaccttctaatttctttatttctcaaagcagataattcttctgtgtgaaaatgttttctttttttaatttaaggtttaaaattcctttgccaaatcatgttgattttgctctttgctttttcgttgtctgagaaattgttggcgtagatttggcttctggtatgtgtttctgattgcttcaatttttttttacaccttctaatttctttatttctcaaagcagataattcttatgtgtgaaaatgttttctttttttaatttaaggtttaaaattcctttgccaaatcatgttgattttgctctttgctttttcattgtctgagaaattgttggcgtagatttggcttctggtatgtgtttctgattgcttcctgttgagcacaaagtgagagctgccactgagcagccctgccaggggtgctgtttcaggctgggcatcgccaggcggcctccctgcaaaccaagggctgggggcaaaggggcatgatccagggtcccccagggtgggctcagctccagggagaggccacccacgtggcagccccacctcttgagagcccccagtgccggagcagaaaggaccctggacccagaggcagatactgcggggtggtagaaaaggtagagtaggctgtggcaatggaataaaacacgattaaaaacgttaagaactaaaaaaaaaaaaaaaaaa

SEQ ID NO: 146036 - DNA, 554 bp, Homo sapiens
  misc_feature (1)...(554): n = a,t,c or g
gggcctagggcggcggagccgactcgtagcggccgaggcgcgcgcggtccgtgccggcgtcagtctgggattggccggcccgcgacttcctccgccccctgccaatcgccggggacgacttccgtgggtttttccggctcccccgcgtcgctaaggagcgacgggctgtcggccagaccccgagttctcggtgcgctcagcggccgccgacgctaggaggccgcgctccgcccccgctaccatgaggccccggaaagccttcctgctcctgctgctcttggggctggtgcagctgctggccgtggcgggtgccgagggcccggacgaggattcttctaacagagaaaatgccattgaggatgaagaggaggaggaggaggaagatgatgatgnaggagagaacgacttggaagttaaggaagaaaatggagtcttggtcctaaatgatgcaaactttgataattttgtggctgacaaagacatggacactgcaagagacttgcccccgagtatgataatgtcggcaaggagctcaacatgcgtactccctcaat

SEQ ID NO: 146037 - DNA, 821 bp, Homo sapiens
gatttggaaaaggaattttaaaccttaaattaaaaaaagaaaacattttcacacagaagaattatctgctttgagaaataaagaaattagaaggtgtaaaaaaaaatttttcaaaccccaaataatgataaaaatagatgtatcctctgtaaaaatctggactaaactattcagtcattcatgggtattcagtattcagagcatgaagtgaaacaccaaagtataaaaaattaaaaaaaaaaaaaaaggaatccgagatactgtcgtttgttgccggcctcggcgtggacgccccgaccatgggccacgcagggcgtttttgatttggaaaaggaattttaaaccttaaattaaaaaaagaaaacattttcacacagaagaattatctgctttgagaaataaagaaattagaaggtgtaaaaaaaaatttttcaaaccccaaataatgataaaaatagatgtatcctctgtaaaaatctggactaaactattcagtcattcatggttattcagtattcagagcatgaagtgaaacaccaaagtataaaaaattaaaaaaaaaaaaaaaggaatccgagatactgtcgtttgttgccggcctcggcgtggacgccccgaccatgggccacgcagggcgtctgcctcctcccaccttccgcagacctcaggccttcaaagctcttccttggtcctgctcagttttgtggcaagttcttctataaacttgctcaaatgctccagatctctgtctccaccctcaaatttaactgggttctttttgtccccactgggggcgaagtatatggtggggaagccctcca

SEQ ID NO: 146038 - DNA, 454 bp, Homo sapiens
ttttttttttaacgtttttaatcgtgttttattccattgccacagcctactctaccttttctaccaccccgcagtatctgcctctgggtccagggtcctttctgctccggcactgggggctctcaagaggtggggctgccacgtgggtggcctctccctggagctgagcccaccctgggggaccctctgcctcctcccaccttccgcagacctcaggccttcaaagctcttccttggtcctgctcagttttgtggcatgttcttctataaacttgctcaaatgctccagatctctgtctccaccctcaaatttaactgggttctttttgtccccactgggggcgaagtaaatggtgggaagccctccacccttatgcgggcgcttggggacgtctttgcagtggcgtccatcttggcgaagaacggccattgtgcgcctagactttttggccag

SEQ ID NO: 146039 - DNA, 1312 bp, Homo sapiens
  misc_feature (1)...(1312): n = a,t,c or g
gaataaccatgaatgactgaatagtttagtccagatttttacagaggatacatctatttttatcattatttggggtttgaaaaatttttttttacaccttctaatttctttatttctcaaagcagataattcttctgtgtgaaaatgttttctttttttaatttaaggtttaaaattcctttgccaaatcatgttgattttgctctttgctttttcgttgtctgagaaattgttggcgtagatttggcttctggtatgtgtttctgattgcttcctgttgagcacaaagtgagagctgccactgagcagccctgccaggggtgctgtttcaggctgggcatcgccaggcggcctccctgcaaaccaagggctgggggcaaaggggcatgatccgggggggnctccccccaccatctacctcgncccccnggggacaaaaagacccccagtaaattgagggtgganacagagatctggagcatttngagccaagtttaatagaagaaccatgccccacaaaactgagcagggccccaaggaanagcctttgaaaggccctgaggtnctgccggaaaggtngggatgganggcaagacgccctgcgtggccccanggttcgtggcgtcccancccgaggccggcaacaaacgacagtatccncggaancccntttttttttttttaaatttttanacttgggtgtttcacttcatgctctgaatactgaataaccatgaatgacgtgaaatagtttagtccagaatttttaccagagggataccttctatttttatcattatttggggtttgaaaaatttttttttacacccttctaatttctttatttctcaaagcagataattcttctgtgtgaaaatgttttctttttttaatttaaggtttaaaattcctttgccaaatcatgctgattttgctctttgctttttcgttgtctgagaaattgttggcgtagatttggcttctggtatgtgtttctgattgcttcctgttgagcacaaagtgagagctgccactgagcagccctgccaggggtgctgtttcaggctgggcatcgccaggcggcctccctgcaaaccaagggctgggggcaaaggggcatgatccagggtcccccagggtgggctcagctccagggagaggccacccacgtggcagccccacctcttgagagcccccagtgccggagcagaaaggaccctggacccagaggcagatactgcggggtggtagaaaaggtagagtaggctgtggcaatggaataaaacacgattaaaaacgttaaaaaaaaaaa

SEQ ID NO: 146040 - DNA, 4237 bp, Homo sapiens
ccagcggccgccgacgctaggaggccgcgctccgcccccgctaccatgaggccccggaaagccttcctgctcctgctgctcttggggctggtgcagctgctggccgtggcgggtgccgagggcccggacgaggattcttctaacagagaaaatgccattgaggatgaagaggaggaggaggaggaagatgatgatgaggaagaagacgacttggaagttaaggaagaaaatggagtcttggtcctaaatgatgcaaactttgataattttgtggctgacaaagacacagtgctgctggagttttatgctccatggtgtggacattgcaagcagtttgctccggaatatgaaaaaattgccaacatattaaaggataaagatcctcccattcctgttgccaagatcgatgcaacctcagcgtctgtgctggccagcaggtttgatgtgagtggctaccccaccatcaagatccttaagaaggggcaggctgtagactacgagggctccagaacccaggaagaaattgttgccaaggtcagagaagtctcccagcccgactggacgcctccaccagaagtcacgcttgtgttgaccaaagagaactttgatgaagttgtgaatgatgcagatatcattctggtggagttttatgccccatggtgtggacactgcaagaaacttgcccccgagtatgagaaggccgccaaggagctcagcaagcgttctcctccaattcccctggcaaaggtcgacgccaccgcagaaacagacctggccaagaggtttgatgtctctggctatcccaccctgaaaattttccgcaaaggaaggccttatgactacaacggcccacgagaaaaatatggaatcgttgattacatgatcgagcagtccgggcctccctccaaggagattctgaccctgaagcaggtccaggagttcctgaaggatggagacgatgtcatcatcatcggggtctttaagggggagagtgacccagcctaccagcaataccaggatgccgctaacaacctgagagaagattacaaatttcaccacactttcagcacagaaatagcaaagttcttgaaagtctcccaggggcagttggttgtaatgcagcctgagaaattccagtccaagtatgagccccggagccacatgatggacgtccagggctccacccaggactcggccatcaaggacttcgtgctgaagtacgccctgcccctggttggccaccgcaaggtgtcaaacgatgctaagcgctacaccaggcgccccctggtggtcgtctactacagtgtggacttcagctttgattacagagctgcaactcagttttggcggagcaaagtcctagaggtggccaaggacttccctgagtacacctttgccattgcggacgaagaggactatgctggggaggtgaaggacctggggctcagcgagagtggggaggatgtcaatgccgccatcctggacgagagtgggaagaagttcgccatggagccagaggagtttgactctgacaccctccgcgagtttgtcactgctttcaaaaaaggaaaactgaagccagtcatcaaatcccagccagtgcccaagaacaacaagggacccgtcaaggtcgtggtgggaaagacctttgactccattgtgatggaccccaagaaggacgtcctcatcgagttctacgcgccatggtgcgggcactgcaagcagctagagcccgtgtacaacagcctggccaagaagtacaagggccaaaagggcctggtcatcgccaagatggacgccactgccaacgacgtccccagcgaccgctataaggtggagggcttccccaccatctacttcgcccccagtggggacaaaaagaacccagttaaatttgagggtggagacagagatctggagcatttgagcaagtttatagaagaacatgccacaaaactgagcaggaccaaggaagagctttgaaggcctgaggtctgcggaaggtgggaggaggcagacgccctgcgtggcccatggtcggggcgtccaccggaggccggcaacaaacgacagtatctcggattcctttttttttttttttaattttttatactttgttgtttcacttcatgctctgaatactgaataaccatgaatgactgaatagtttagtccagatttttacagaggatacatctatttttatcattatttggggtttgaaaaatttttttttacaccttctaatttctttatttctcaaagcagataattcttctgtgtgaaaatgttttctttttttaatttaaggtttaaaattccttttccaaatgatggacgtccagggctccacccaggactcggccatcaaggacttcgtgctgaagtacgccctgcccctggttggccaccgcaaggtgtcaaacgatgctaagcgctacaccaggcgccccctggtggtcgtctactacagtgtggacttcagctttgattacagagctgcaactcagttttggcggagcaaagtcctagaggtggccaaggacttccctgagtacacctttgccattgcggacgaagaggactatgctggggaggtgaaggacctggggctcagcgagagtggggaggatgtcaatgccgccatcctggacgagagtgggaagaagttcgccatggagccagaggagtttgactctgacaccctccgcgagtttgtcactgctttcaaaaaaggaaaactgaagccagtcatcaaatcccagccagtgcccaagaacaacaagggacccgtcaaggtcgtggtgggaaagacctttgactccattgtgatggaccccaagaaggacgtcctcatcgagttctacgcgccatggtgcgggcactgcaagcagctagagcccgtgtacaacagcctggccaagaagtacaagggccaaaagggcctggtcatcgccaagatggacgccactgccaacgacgtccccagcgaccgctataaggtggagggcttccccaccatctacttcgcccccagtggggacaaaaagaacccagttaaatttgagggtggagacagagatctggagcatttgagcaagtttatagaagaacatgccacaaaactgagcaggaccaaggaagagctttgaaggcctgaggtctgcggaaggtgggaggaggcagacgccctgcgtggcccatggtcggggcgtccaccggaggccggcaacaaacgacagtatctcggattcctttttttttttttttaattttttatactttgttgtttcacttcatgctctgaatactgaataaccatgaatgactgaatagtttagtccagatttttacagaggatacatctatttttatcattatttggggtttgaaaaatttttttttacaccttctaatttctttatttctcaaagcagataattcttctgtgtgaaaatgttttctttttttaatttaaggtttaaaattccttttccaaatcatgttgattttgctctttaaaaaaaaaaaaaaaaaaaaaaaaaaaaaaaaaaaaagaagggctgggaccaaccgggtgaaatccacaagtctctggatttggctgaaggcaaatacacaattgaagtactttctgttttggaagtgctttcccctttggaatctggtttgaaacatgcagcttctgtctctagcccaaggaaagaccaaaacatagggaaataaaagcatttatctttgtcttggaagtaattgttgaagttgtgcagttgatcaagtgcacagttagatcccatggtttaaaaaaaattgattgttaaaccaaatttacactggcatgtgtgggtgtagtttctaaaaggcacttcacatttgaaatttttcttaccttagaaagtttctagtgatctaaatgtctagttttgtattcttttgtgtgtgttcactgtttctcagtattaccacttgaataattctctgtacaggggggtttgtgctatacactgggatgtctaattgcagcaatatgctctgaatactgaataaccatgaatgactgaatagtttagtccagatttttacagaggatacatctatttttatcattatttggggtttgaaaaatttttttttacaccttctaatttctttatttctcaaagcagataattcttctgtgtgaaaatgttttctttttttaatttaaggtttaaaattccttttccaaaaaaaaaaa

SEQ ID NO: 146041 - DNA, 3764 bp, Homo sapiens
aagaaaggctttattgctgcaattagacatcccagtgtatagcacaaacccccctgtacagagaattattcaagtggtaatactgagaaacagtgaacacacacaaaagaatacaaaactagacatttagatcactagaaactttctaaggtaagaaaaatttcaaatgtgaagtgccttttagaaactacaccacacatgccagtgtaaatttggtttaacaatcaatttctataaacattgcagctaactgtgcactgatcaactgcacaacttcaacaattacttccaagacaaagataaatgcttttatttccctatgttttggtctttccttgggctagagacagaagctgcatgtttcaaaccagattcaaaagggaaagcacttcaaaacagaaagtacttcaattgtgtatttgccttcagccacatccagagacttgtggatctcacccggttggtcccagcccttctttttttttttttttttttttttttttttttttttttaaagagcaaaatcaacatgataagaaaggctttattgctgcaattagacatcccagtgtatagcacaaacccccctgtacagagaattattcaagtggtaatactgagaaacagtgaacacacacaaaagaatacaaaactagacatttagatcactagaaactttctaaggtaagaaaaatttcaaatgtgaagtgccttttagaaactacaccacacatgccagtgtaaatttggtttaacaatcaatttctataaacattgcagctaactgtgcactgatcaactgcacaacttcaacaattacttccaagacaaagataaatgcttttatttccctatgttttggtctttccttgggctagagacagaagctgcatgtttcaaaccagattcaaaagggaaagcacttcaaaacagaaagtacttcaattgtgtatttgccttcagccacatccagagacttgtggatctcacccggttggtcccagcccttctttttttttttttttttttttttttttttttttttttaaagagcaaaatcaacatgatttggaaaaggaattttaaaccttaaattaaaaaaagaaaacattttcacacagaagaattatctgctttgagaaataaagaaattagaaggtgtaaaaaaaaaatttttcaaaccccaaataatgataaaaatagatgtatcctctgtaaaaatctggactaaactattcagtcattcatggttattcagtattcagagcatgaagtgaaacaccaaagtataaaaaattaaaaaaaaaaaaaaaaaggaatccgagattactgtcgtttggttgccggccttcggcttggacgccccgacccatgggccaagcagggcgtctgcctccttcccacctttccgcagacctcaggccttcaaagctcttccttgggacctgctcagttgttgtggcatgttgctctataaacttggctcaaatggctccagatctcggtgctccaccctcaaatttaaactggggtcctttttgtccccaactggggggcgaaagtagatgggtggggaagccccccacccttatagcgggtcgctgggggacgtcgtttgcaaggggcctccatcttggcgatgaccaggcccttttggcccttgtacttcttgggccaggctgttgtacacgggctctagctgcttgcagtgcccgcaccattggcgcgtagaactcgaatgagacgtcctttcttggggtccatcacaatggagtcaaaggtctttcccaccacgaccttggacgggtcccttgttgttcttgggcactgggttgggatttgatgactggcttcagttttccttttttgaaagcagtgaccaactccgcggagggtgtcagagtcaaactcctctggctccatggcgaacttcttcccactctcgtccaggatggcggcattgacatcctccccactctcgctgagccccaggtccttcacctccccagcatagtcctcttcgtccgcaatggcaaaggtgtactcagggaagtccttggccacctctaggactttgctccgccaaaactgagttgcagctctgtaatcaaagctgaagtccacactgtagtagacgaccaccagggggcgcctggtgtagcgcttagcatcgtttgacaccttgcggtggccaaccaggggcagggcgtacttcagcacgaagtccttgatggccgagtcctgggtggagccctggacgtccatcatgtggctccggggctcatacttggactggaatttctcaggctgcattacaaccaactgcccctgggatgactttcaagaactttgctatttctgtgctgaaagtgtggtgaaatttgtaatcttctctcaggttgttagcggcatcctggtattgctggtaggctgggtcactctcccccttaaagaccccgatgatgatgacatcgtctccatccttcaggaactcctggacctgcttcagggtcagaatctccttggagggaggcccggactgctcgatcatgtaatcaacgattccatatttttctcgtgggccgttgtagtcataaggccttcctttgcggaaaattttcagggtgggatagccagagacatcaaacctcttggccaggtctgtttctgcggtggcgtcgacctttgccaggggaattggaggagaacgcttgctgagctccttggcggccttctcatactcgggggcaagtttcttgcagtgtccacaccatggggcataaaactccaccagaatgatatctgcatcattcacaacttcatcaaagttctctttggtcaacacaagcgtgacttctggtggaggcgtccagtcgggctgggagacttctctgaccttggcaacaatttcttcctgggttctggagccctcgtagtctacagcctgccccttcttaaggatcttgatggtggggtagccactcacatcaaaccctgctggccatcacagacgctgaggtcgcatcgatcttggcaacaggaatgggaggatctttatcctttaatatgttggcaattttttcatattccggagcaaactgcttgcaatgtccacaccatggagcataaaactccagcagcacctgtgtctttgtcagccacaaaattatcaaagtctgcatcatttaggaccaagactccatctttcttccttaacttccaagtagtcttcttcctcatcatcatcttcctcctcctcctccttttcatcctcaatggcattttctcgaccaaccgggtgagatccacaagtctctggatgtggctgaaggcaaatacacaattgaagtactttctgttttgaagtgctttcccttttgaatctggtttgaaacatgcagcttctgtctctagcccaaggaaagaccaaaacatagggaaataaaagcatttatctttgtcttggaagtaattgttgaagttgtgcagttgatcagtgcacagttagatgcaatgtttatagaaattgattgttaaaccaaatttacactggcatgtgtggtgtagtttctaaaaggcacttcacatttgaaatttttcttaccttagaaagtttctagtgatctaaatgtctagttttgtattcttttgtgtgtgttcactgtttctcagtattaccacttgaataattctctgtacaggggggtttgtgctatacactgggatgtctaattgcagcaataaagcctttctttaaaaaaaaa

SEQ ID NO: 146042 - DNA, 443 bp, Homo sapiens
cagaagcagcagatcccttctgacctacagagtatgaaacttgttccttgcataaaagaagcctttttgttgaagaatgggtgaaggaaacacttgctgttctgtgccagccaaacaatacccatttgtcaccccaattgaagagagaattctcatggaagagggaaaagccttccccccctcaagatctacagctaaacagaaacttgatggaaaccctgtttctcctactccggtttattggcctctcccccacaccaaacaaagaagaaaagcacctgaatctttgcccctttgagccgactggccatctggatggagcacgtgatacagctggaccaagttggttgcatcatcgattctgagaatgaaagggtttaatgttatctaggggttttcttcatttgattcacagtcctataaaagtgtgtgccaacttcaaa

SEQ ID NO: 146043 - DNA, 5840 bp, Homo sapiens
ggtgggtttatctcaaggcctgagtagccggtaacaaacgagggttcccgggattggaccgacgcaccatgcctctgcgacttgatatcaaaagaaagctaactgctagatctgatcgagttaagagtgtggatctgcatcctacagagccatggatgttggcaagtctttacaatggcagtgtgtgtgtttggaatcatgaaacacagacactggtgaagacatttgaagtatgtgatcttcctgttcgagctgcaaagtttgttgcaaggaagaattgggttgtgacaggagcggatgacatgcagattagagtgttcaattacaatactctggagagagttcatatgtttgaagcacactcagactacattcgctgtattgctgttcatccaacccagcctttcattctaactagcagtgatgacatgcttattaagctctgggactgggataaaaaatggtcttgctcacaagtgtttgaaggacacacccattatgttatgcagattgtgatcaaccccaaagataacaatcagtttgccagtgcctctttggacaggactatcaaggtgtggcagttgggctcttcgtcaccaaacttcactttggaaggacatgagaaaggcgtgaattgcattgattactacagtggtggggacaagccatacctcatttcaggtgcagatgaccgtcttgttaaaatatgggattatcagaataaaacatgtgtgcagacactggaaggacatgcccaaaatgtgtcttgtgccagctttcatcctgagttgccaatcattatcacaggttcagaagatggaacagtacgtatttggcattcaagcacctaccggcttgagagcacactgaattatggaatggagagggtatggtgcgtggccagtctaagagggtcaaacaatgtcgctttgggctatgatgaagggagcatcattgttaagcttggtcgggaggaacctgccatgtccatggatgccaatggaaagataatttgggccaagcattcagaagtccagcaggccaacctaaaagcaatgggagatgctgaaattaaagatggtgaaagattgccactggcagtaaaggatatgggcagttgtgaaatataccctcagactattcagcacaatcctaatgggcggtttgtggtggtgtgtggtgatggggagtatatcatctacacagcaatggcattgagaaacaagagctttggatctgctcaggagtttgcatgggcccacgattcttcagagtatgcaataagagagagcaacagcattgtaaagatatttaagaactttaaggaaaaaaaatcatttaaaccagattttggagcagaaagtatctacggcggcttcttattgggagtcagatctgtaaatggcttagccttctatgactgggacaatacagaactcatacgaagaattgaaattcagcccaaacatattttctggtctgactctggagagctagtctgtattgctactgaggaatcattttttatccttaagtatctgtcagaaaaagtcttggctgcacaggaaacacatgagggagttactgaagatggcattgaagatgcctttgaggttcttggtgagattcaggaaattgtgaaaacagggctttgggtaggcgattgcttcatttacacaagttctgtgaacagattaaattattatgttggaggagaaatagtcaccattgcccacttggacaggacgatgtatctcctaggctacattcctaaagacaacaggctttatctgggggataaagaattgaacatcattagctattccctgctggtttcagtcctggaataccagacagctgtcatgcggagggactttagcatggctgataaggtccttcctaccattccaaaagaacagaggaccagagttgcacactttttggaaaagcagggcttcaagcagcaagctcttacagtatccacagatcctgagcatcgttttgagcttgctcttcagcttggagagttaaaaattgcataccagttagcagtggaagcagagtcagaacagaagtggaaacaacttgctgaacttgccattagtaaatgtcagtttggcctagcccaggagtgcctgcatcatgcacaggattatgggggccttgctgctttttggccactgccctttgaaaatgcctataatggtgaaccagcctagccagagggttcggagaagagatggccaaaaataattggccttccatggcctcctttttaccgggccagggtggtggcctgcctgaggctctaaattaggaactggacggctggccagaagctgccttcttggcccgaacttacttaccccagtcaggtttcgaggggtagtgaaactctggagagagaatctctcaaaagtcaatcagaaagcagcagaatcccttgccgcacccaacagagttagtaaacacctgttcccctgtattaaaaggaggccttttttgttgaagaattgggtgaaggaaacacatgttgattttggggccagccaaaacaatacccaccttgtcacgcccaaatgaaagagagaaatgctcatggcagcgggcaaaagactttcagcccctcaagatctacagcctcaacaggaaccttgatggggaaccctgctttctccctacctccggttattgtggccctccccacaacagccaaccaagaaaagaaaagagtttaccccgaacctagaagtagatttggataaatttggaaattagaggatattgccacaaccagatatcaatctggatgaagattattttggaggattgactggaatggctttccatttaccctgactaaaccggatcaattattatatatcaggtattgattgctaccctgacccacagtgctttgggacctatgagaaacttcttagatttttatatgtaaatgctgtggacccactgggagcacaaatgccccacatcatcttaagaagaggtttatgtgcagacatttaaatcactggtgttttccttggttaactaaaacagacatggggctttgatttttttcatactattagacccatatctcataaaacctttttgaattaatgaaggtacttgtttcctttctcaatatatgaatataggcttctagttttagaaggctgagccgaaactacaccttgcctagggatcagccccactgtcttttctttgtataactaaatctgcattttcaaatgttgtcaatcacatttttcttagagctgaatatccaggctgtaattctctaaaccctttttcttgacctcattgcatcattccacaggtcttgccccgattttgtctagcagctacccatttctggagtcaggatgtgaaacctctgttcctctgacctcattaagctgggggtctgtctaagttaacgtttgccctatttggtaacacaaaaacacaccagactttttaaccgtacgctcatctaacatgatttgagaaattcataaccaggcactcaaatatccttgtagcctacgaaaagtgagtagggtaataatttttgctttgtagggagaactacaaattgatatcttttaatctagccattttttaacatttagctcaatattaacagagaaagtgggtaggtccagtatttagtaaaataaatgtatttttaaaatatttttaggaagctgcagaatggcgactgagtgcttcttgataagtctgcagtgttagttccatataggctccctttccgtgcttctgtttttgcaaagaccttgattaaatttatttccctcagcagcctgatccttggccccttgagccgactggccatctgggatggagcacgtgatacagctgggaccaagttggttgcatcatcgattaaatctctctgaatctgggtcaatcagcaaaccatcaatctttttattatttacaaaataccacaccatttccaccaaagtatcttgttgaacgtaaaaggtcatattttccacgtttatctatatcttcataggtcttgtgatgaacctatccacataaaatgcaactcttcagaaacatgaaaataagaagtatgcagcattattcaacgtacactgattagcatgagtgctgcccaagcaagtaaaaccaggtctacttacagttgcctccatatcattaaccaattggtatgatttaaaccattcctagtacaacccaccttaggtgggaaggaggattctattaagaaagaattttggccaggcacagtggctcatgcctataatcccaacactttgggaagctgaggtgggaggactgcttgagcagtcctcatctctaggaaaattttttaaaaaattagctgggcatggcaggccacagaataagaccctgtctttaaaaaaattaaaagagaagaatttgtctaaatgacagcaagtctgtgccttctccactgtagaagtatgtggcagcctgaagcaaaataccaaacatttatagccatattaagtactttttggcaggccaactacaatttattaagcaccgattatgcatatagagaccactggaaataatgtagcacccacttcttggtcactatggcagaaaagaaatcaagtattttttcactactctccctttcccctatccctccccccatcaactaccctattctaccagctagcccattccatcttattaactaaaggtccttcagtcctccttccagattgatcttcctaaatgaaggttctgatgggggcattcctctgttcaaaaggctttcaaaggtctgctgactgaattccagattcctcagcctagcatctgaggtcacctatgatgtggctacatccaccttcctaacttaatctttaatcactcccctacatatgcatggcatatataagcaaaccagatcactggccgtttctcaagcctccttttttcctgcctgttgcttatactgttctctctacctgaaacacctcacccagctccacctgccacaacatttcctgcacttctagaaccctcctttacacccctatgaaggctttcttcaaagaatttgtaatcttctcttagtgtctagcattttaggcctgaggagataattatttgtatacttactagcacctttccccacagccatatccggactgctggctttggcacagcatactctatcctagttcgtggcatcacctatactacccaagataataccttacacatagaaggtactaatgaatacttactgagctgtaagacaaacacactgtacttcagcaaaattttagtaaataatttgattcctatacggtaaactgaaaagagaataggctttgtcatcaaacttgggtcctaaccctaccacttagtagctatgcaactttcagcaagctacttaactctacaagcttaaattccctcatctttaatcaagggttgttgtgattataaaatatatatctggcacacaactgtactcaatagattttcaggtatttctcttccctttcccctgtatcaaaacttacaacgaaattcattgagctagattaaaaatcttactcataaccatacttaagcctatattttagaaactaaaatctactcaccctgatatactctgtggaatctggctcaaactgggcaaagcagagattgaggacatcaacatgcctgtcctggctatacatagtctaaaaccacacagcagagttagcatcacatgagaacactgaagttcagcacctgtcctgatgtcatgacaggcctgcccacccacatactggccactctgtgctccc

SEQ ID NO: 146044 - DNA, 401 bp, Homo sapiens
aggcaggcaggtcagtgatgtgtcctaagggtccgaccgacctagatacccctctttgattcctcctcttgggattagtgtccatctctggaagcaggatccaggaggacgggaggggccgctgcggaccgcagtcgctccacctggaggagacaccagaaggaagacagcctgagggacgcagccatccccggctcctaccggcgccccgccccgcgcatgcgcacgcgcacagggagtcagctggctgcgcgggaggtcacgggaagtggggcggtgcccacacagctggagggaaggaggtgtcaggcggggagagacgcaaacggcgggaccagcagcgacggggaggcacacgatccgaggtccttttagtctcagaggatgggaagatcctggcg

SEQ ID NO: 146045 - DNA, 420 bp, Homo sapiens
tttcgtggaggtgtcaggcggggagagacgcaaacggtggtaccagcagcgacggtagcagcagcatggccgcgatctatgggggtgtagagggctgatcgggacagacaagtgtgtggagaggatcaatgagatggtgaacagggccaaacggaaagcaggggtggatcctctggtaccgctgcgaagcttggtggagttgtgctcatatctggaacaggctccaactgcaggctcatcaaccctgatggctccgagagtggctgcggcggctggggccatatgatgggtgatgagggttcagcctactggatcgcacaccaagcagtgaaaatagtgtttgactccattgacaacctagaggcggctcctcatgatatcggctacgtcaaacaggccatgttccactatttccaggtg

SEQ ID NO: 146046 - DNA, 2817 bp, Homo sapiens
tcagtgctgcattccctttgccagccttttcttcttaaattgctgctcctgctgctcaatgatttccagtcccaggtgaaaggaacacaattttgtcacttcagtgtttgccagagggactatggggtctgggttgacccatctccttgggaacagcttaactgagaaatgcaaactaccttcctggctgccaatcacggcggaagggaacagccttaaaggttttcttcggcgctgacccagggcaaagagatccaggctcagaatttcttctccagcttcatcctgatgaagctgaggcactcctccgctctgggtggggccagcctcctccccatggactatagcgccaatgccattgccttctattcctacaccttttcctagggggctggtcccggctccacctactccaagctcagtggacactgggtctggaaggaaggagtcttttgcttcctttctcctgctcagatgtccttgactctcctctgagtctccctctttccaagccgcctcccctctacctaacacagtctccctgaagacaccacagtacaaaagctcaacttcccgcacctcacctttactcccagacatgggagagagatgacatgaagacccgaacgccacttggcaaaagatctgtggtccctggccatctcgactctcccctttgtgcctgtcagctgccatgggggtcagttgcacaagggcccagcaggtctgtgtgttttcccaagggactgccgcatggccaatgctgaggagaagctgatggacgaccttcccttctgaacaaaacccgttacaactacctgatcctcccctggtgaggtggctgccttctgacacaccagatgctctctttagcatggttggcccccacacaccaagcctgtcaaatttacagccttcaataaggctttggccaattaatgagcagctccctctcctaggaggaaggacgtctaaaggatgaggagggcagtagaaccccgtacgctctgccccctccctccacagttggaccgaaaggaagggggctttcagacaggcttgcccaggctggggtctgagtgtcactgtccagccaatggtcatcccgctcccatcctcaccttcttgcttaatgggtgagcccagctgctgccgcagctgccacccagcccatgtggacaagctggcctggccttcacacaggcctgggccacggcaagagcacagcaggatcagctcaggcagtgcctgaacaggaagggcctttatgaaggaagctttgccagttttggtcagctgttttaacttctccgaagctactgttttgctgtatttccctgcttgatctacactgctcttttcaagcagttttctccgcttctccttctcttttattttcatacgcttttgatatttctttttccttcgctctcgtttcttgtctgtagctgttttttcagcagctgtttttatatctccagctttatttttctccttgatctcctctggggccaggagagctgcatcactaacactcactggggctacttcctccatggttatggctggcagatttgacacaactttaatctctggtacaggcggtttagggataaagtggaagtttgagagggcatccaattttaagaagagggaatccatcatcttctgaatttctacatgttctggattttcttcttctgctgttttttgctggttgagtttgatgtactcctgttcataaatttcagcaaggctcaatttactcttctcatggtctaaggttaaacgctttttatattcatatgcatcctctttaggtttttctttacgtactacatcatcccaagcctgatctcttatcctctgtttaatgatatcttccagttgaagggtggtttcctctgtaatcacaggtgcagaagcccctccttcagatcgtactctgccactcctccgagagcttaagccgttgccgtagaggtcgccgtcgccacaacagtctcggccctccactgcttctttccctgaattggccttccggtgtatgatgagagaaagtttacacaatctcataggtttgaaaaacaggctcttctggtccacgtggtgtccttgagcagtcagaaatactccttgaggatgaacctttattaccaggatagcaatgggatgtaaggaagggttgatgaacttctctcgtctcacttcatgtctcaggtgttccttcagtgtgcagatgtcatgtagcagtaaggtgtaggatgccatttttgattgtggcctttggagaccatattcagggctaggtataatgactatcttttctatatctgctgctgagcttggtgctgtggacccactggtgaatgtgacatggttcttgtccttgaagggcacacagagagtggaaaaaacttgggcagtatggccgttttcatgatattgattcttcatatccatgagcatggaatgttcttctatttctttgtgtcctcttttatttcgttgagcagtggtttgtagttctctttgaagaggtccttcacatcccttgtaagttggattcctaggtattttattctctctggtagaattcagctgtgaatccgtctggtcctggactttttttttgcttggtaggctattaattactgccttaatttcagaacctgttgttggtctattcagagattcaacttcttcctggtttagtcttgggagggtgtatgtgtcaaggaatttatccatctcatttagattttctagtttatttgtgtagaggtgtttatagtattctctgatggtagtttgcat

SEQ ID NO: 146047 - DNA, 494 bp, Homo sapiens
tattcccggttcgacgatttcgtctggagggaaggaggtgtcaggcggtgagagacgcaaacggcgggaccatcagcgacggtagcagcagcatggccgcgatctatgggggtgtagaggggtgagtgcggcccggcggagggagcctgggcccgaaggcggggcggaaggccgtggccagcctggcaagctggtggccttgatcctcggcgtccgggcactttgggcggcgggaccttgcggtgaagaggtgtgtgcacgcgcaggggcgccctggagcgcacagctgtatgccttacggggactctgcctgtgcaacagccacaccccgggttggggatcctttgtgtttcttggcggaaccacgcccctttcttccacgaaacacccactccgctgtcttcagctggagaagcagctcctttttcctattcctgacctcggacagagttttgcagaacaggtgtcaggtgtgaaattgctgagcgcgggca

SEQ ID NO: 146048 - DNA, 639 bp, Homo sapiens; identical to SEQ ID NO: 119936

SEQ ID NO: 146049 - DNA, 729 bp, Homo sapiens; identical to SEQ ID NO: 141063

SEQ ID NO: 146050 - DNA, 712 bp, Homo sapiens
cgcggccgcgtcgacgcttctcgggtgctgtgcttcacgttttggtactaaaggccgagactgttgtggcgacggcgacctctacggcaacggcttaagctctcggaggagtggcagagtacgatctgaaggaggggcttctggttagcccaggttccatcataatgaatggatccaatatggcaaatacatcaccgagtgtaaaatccaaagaggaccaggggttaagtgggcacgatgaaaaggaaaacccatttgcagagtacatgtggatggagaatgaagaggatttcaacagacaggtggaggaggaactgcaagagcaagacttcttggaccgctgcttccaagagatgctggatgaagaagaccaagactggtttattccatcacgagacctgcctcaggccatgggacagttgcaacagcagttaaatggactgtcagtcagtgaaggtcatgattctgaagatattttgagcaaaagtaacctgaacccagatgccaaggagtttattccaggagagaagtactgagccgagaaagctttgaggaagacttgtctgtccccacatctggggatagtaatgcacaaaatggtggagctgaagagggggatggggcgggcgaggggtgcacagcgggaaggggagtggtggtctcacgatactgtgactctgagtaactaatatgctcagtctaattctaagaa

SEQ ID NO: 146051 - DNA, 2873 bp, Homo sapiens
atcccagaatcctcaccccattcccagttaaaggcataacgaagaaagcaatattcacaaaggaaatgcggaaaggaataaaagcccatcaagcccacaaaaataatgtgactaagaggcaggatttgcagaagtagagatttaatgtggttgacctttctcacccacacaagaaaaaggatggagcagatcttgagataacagatcatgagattcgactgttctgctgagcagcctccgcagggtgctttgaatgtccctgtttctcaggctgtagatgaaagggttcagcatgggggtgaccacagtgtacatcactgacaccaccacaccattcctggggggtggtgacaccagctgaagtcaggtacacgccaatgcctgtttcataaaataagcaaacaactgccaggtgagagccacaggtggagaaggctttatacttcccatctgacgatggaattcttggaatggaggagacaattttatagtaagacaaaaggatccctgaaatgggaagaaaaccaaatatagggatatctaaaatacatgaatatgctattgatgatgctgtcagaacaggcaaggttgagaagttgagatgggtcacagaaaaaaaattatagatttccacattcttgaagaaggtgagttgtgtaacacaatccagctgtgcagctgggaatccaacaggctaaggaaaaaggacaccaaaactaagaagacacagaggtgaggattcatgatgactcggtagtgcagggggtgacagatgggcagatggccacaaatcggtcataggccatcacagtcaggagcatgtcttctatacatgcaaaaaggaccaagaaagatatccgtgtcaggcagccctcataagagatgactctggtatgagactgcatgtccacaatcatcttaggaaccgtggccaaggtgaaaccgatgtcagcccagcacaggttggagaggaagaagcacatgggggtgtggaggtgggggtcagagctgacagccaggatgatgagcaggttcctcagcaccgtgaccagatacatggacagggacagaccagccaggatgggctgcagttctggatcctctgtgatattgttcccaatatgcgaggggggagaggatgatactactcccaatatcgcaggggtgttcacatccccagtgacaattttcctaatatctccacactttggcatctctgtgaagtctacctggagatcttcaaagggggctgctccataagcttgtatgccgggtggaacggctggaccttgcctcgcatgatgctgtcggcagctgacacatcgctgcctcaccgttttggcaagggcctcactgagttctaaggcccgaatgaaagcaatgagttcagctttctgggctgaagtgccctggggcatcgatctggcttcaacaacagtgtccaggttatcacgcataccctgcacctctctctccttaggtgttgatgaagctgctcccatgcacgtatagttcccagtgtactgatgcccaagcttggtcccggatgtcaggtctgctagagtcaactgctgtcggcagatctgagctttcttcttggacaccttatacccacagtcctccaggtgtcggcgtagggcaatccgttcccttggcacacccgactgccgtggggtgtcccagcaaaagctcatcaacccttctaccaggatgagcagggccctttcctccttgtccggggcctcctgctctgagtcaccttgttttcttttgagctgagggcatttgttcttccactgtcctatttctttacaataagcacactggttatgctgcaaactctgacagccaagctgagtttcttttccagggccccccttcccttgcttctttggggggacagctctgattgctgcagtggggtccccttccacactgtggaagctttgttcttttgctctttgcaataaatcttgttgctgctcactgtttgggtccacactgcctttatgagctgtaacactcactgagaaggtctgcagcttcactccaggagggtccgcggcttcattcttgaagtcagtgagaccaagaacccaccaattctggacacacttatacacttggcactgggaggtcagggtttgcatgtcgctgtctagagcccggatctgctgcaccatgtccgtctcactgtcgatcagctgggccagagggcactctctaggcagcttgtccaggtaaacttccgggtcgaagtgcgccccgttcagatcagtggggtccagggggtcgggccccgcagggagtcccaacgcctccccttccgagaggcctttgtaaagctttagcatcctgtgtgccttccgccgacgctccgtgagcctcccgctcctgcccttctggggagtccccaggtccacatcctgggctaggcccagtgacagctgccgccgccataggtccaattgatcatggtggataagctttttgatgtgctgctggattcggtttgccggtattttattgaggatttttgcatcaatgttcatcaaggatattggccaaaaattctcttttttggttgtgtctctgccaggctttggtatcaggatgatgctggcctcataaaatgcgttagggaggattccctctttttctattgattggaatagtttcagaaggaatggtaccagctcctccttgtacctctggtagaattcggctgtgaatccatctggtcctgcactttttttgattcgtaagctattgattattgccacaatttcagagcctgttattggtctattcagagattcaacttcttcctggtttagtcttgggagggtgtatgtgttgaggaatttatccat

SEQ ID NO: 146052 - DNA, 3114 bp, Homo sapiens
  misc_feature (1)...(3114): n = a,t,c or g
atgaatacatcacaattattagaaatagccaaccaggtgtttgtaaacagggctgcagtaagccttgaggaaaaccgcaaagagaatggacatcaggcccggcgaaacaccgacctggttgtcagctgcagcaatcagaggggtcaggagtcactggaaaagttgttaggccggtatttctacatctcgcatttgtcagccctcgccaaaaccatgaggcagcggtttgttacctgccgacaccataatgcgaggcaaggtccagctgttccgcccggcatacaagcttatgcagcagcccccattgaagatctgcaggccattaggaacaatatcacagcgggtgtttacacaccctgcgatattggaggtaatatcatcctctgccccctggcatattaccaacgatatcaaacaggggtggtgtacaccccttgtgatattgggagtattatcatcctctccacctccgggtgtccaagtcacacagagccacggaatctcacaggtgtctcagaattcctcctcctgggactctcagaggatccagaactgcagcctgtcctccctgggctgtccctgtccatgtatctgctcacggtgctgaggaacctgctcatcatcctggctgtcagctctgactcccacctccacacccccatgtacttcttcctctccaacccgtcatgggctgacatcgctttcacctcggccacagttcccaagatgattgtggacatgcagagtggtgtggtggtgtcagtgatgtacactgtggtcacccccatgctgaaccctttcatctactgcctgagaaacagggacattcaaagcgccctgtggaggctgcgcagcagaacagtcgaatctcatgatctgttccatcctttttcttgtgtgggtatccactgtcaggtctctgagcttgatgctgtcatgtcccttgacaccgcttccggggcttttcggtggatggcttttggggtggaagtggcagccccagcttaccagccatcatgctcatgtccgggatctcagtcctctggggaaggggccagaaaaggctggagcagccgaagtctttcggaaacagtatctgcggtatattcagggctgactcaggaaagaagatgccagccccagagtcccacctccaccgttggttccatcataatgaatggatccaatatggcaaatacatcaccgagtgtaaaatccaaagaggaccaggggttaagtgggcacgatgaaaaggaaaacccatttgcagagtacatgtggatggagaatgaagaggatttcaacagacaggtggaggaggaactgcaggagcaagacttcttggaccgctgcttccaagagatgctggatgaagaagaccaagactggtttattccctcacgagacctgcctcaggccatgggacagttgcaacagcagttaaatggactgtcagtcagtgaaggtcatgattctgaagatattttggtccatgggcgcaggtccctgagcccacagcttcgcgggggtctggccgagcatgcgtcacaacctacgcggccaagagcagtgcgcacgcgcaacctaacgcgggactgccagcaacttccgggcgtttacaggcaggcaggatccaggaggacgggaggggccgctgcggaccgcagtcgctccacctggaggagacaccagaaggaagacagcctgagggacgcagccatccccggctcctaccggcgccccgccccgcgcatgcgcacgcgcacagggagtcagctggctgcgcgggaggtcacgggaagtggggcggtgcccagacagctggagggaaggaggtgtcaggcggggagagacgcaaacggcgggaccagcagcgacggtagcagcagcatggccgcgatctatgggggtgtagagggggtgaggcacacgatccgaggtccttttagtctcagaggatgggaagatcctggcagaagcagatggactgagcacaattcactgtttgatcgggacagacaagtgtgtggagaggatcaatgagatggtgaacagggccaaacggaaagcaggggtggatcctctggtaccgctgcgaagcttgggcctatctctgagcggtggggaccaagaggacgcggggaggatcctgatcgaggagctgagggaccgatttccctacctgagtgaaagctacttaatcaccaccgatgccgccggctccatcgccacagctacaccggatggtggagttgtgctcatatctggaacaggctccaactgcgggctcatcaaccctgatggctccgagagtggctgcggcggctggggccatatgatgggtgatgagggttcagcctactggatcgcacaccaagcagtgaaaatagtgtttgactccattgacaacctagaggcggctcctcatggatatcggctacgtcaaacaggccatgtttccactatttccaggtgccagatcggctagggatactcactcacctgtataaggacctttgataaaatgccaggtttgctgggttttngcccggaaaattgcagaaggtgctcagcaggggagaccccctttcccgctatatctttcagggaaggctggggagatgctggggcagacacatcgtaggcagtgttgcccgagattgacccgggtcttgtnccccagggcaagaattggactccccatcctgtnccgtgggctctgtgtgggaagagctgggagctgctgaaggaaggttttcttttggcgctgaccccagggcagagagatcccaggctcagaactttcttctccaagctttcacccctgatgaaagcttgaggcaattcctccgctctgggtggggcccagccttaggggccaggcacatcgggcacctcctccccatggactatagcgccaatgcctattgccttctattcctacaccttttcctagggggctggtcccggctccacccccctccaagctcagtggacactgggtctgaaaaggaaaggagtcttttgcttcctttctcctttttacaaaaacaaaccttggaggaaattaaatgcactttatccactccccaaaaaaaaaaaaaaaaagtcgac

SEQ ID NO: 146053 - DNA, 1056 bp, Homo sapiens
  misc_feature (1)...(1056): n = a,t,c or g
ttatggggtacagtgttaaacatgatagaggctctgccgtcttggactttaatagcttagagaagagagcaaatgagctgacaggtggttataatgtgagtcagtgctgtggtttaggaattggagagaactcaaagcagaggtatttggtgtaatggtaggctttctggagaaaatgatatttaagccaagaactcttagaagttagctaagagagagatgggaaaatgagtcgacattgctggagtagataaaaccgcatgttaaaggcaggaagatggggaaaaaaaaagttcagtaaagctggaatggggaaatgtagtcagggactgaaattttaaagggctttatcaacctcagtaaagagtttggaccttatgttgagggtggctgaaaacatattcatagtgtcatgaacaaccttttatcttcagtcacttgggctgatatatagagaatggatttagagagatgagaccaggtgcagtccatatgagatgtgaaatagagaagtggaatcgtagggacggggagaaattgacaggtgagggctacttagcaattagaatttttttttttcaattttaatttttttttttnagacggagtctcgctctgtcgcccaggctggagtgcaatggtgcgatctccgctcactgcaagctccgcctcccgggttcacgccattctcctgcctcagcctcccgagtagctgggactacaggtgcccaccaccatgcctggctaattttttttgtatttttagtagagacagggtttcaccatgttagccaggatggtctcgatctcctgacctcgtgatccacctgccgcggcctcccaaagtgctgggataacaggcgtgagccatcgcgcccggccgagaggtaccttttatgacaactgaaatcattcagtttcaagaggagttgggtactgaaaccaaacttgcttactccaaagcccaaaatcctttccaccatgcctgtgtgtctgtaaggctacactagaaatgcttcctttcttatagtgggaagcatgggtactaagctcttt

SEQ ID NO: 146054 - DNA, 485 bp, Homo sapiens
gcgcggagagacgcagcggaggttttcctggtttcggaccccagcggccggatggtgaaattctccctgcagcggatcctcaatagccactgcttcgccagagagaaggaaggggataaacccagcgccaccatccacgccagccgcaccatgccgctcctaagcctgcacagccgcggcggcagcagcagtgagaggatgatcggctgaatgtaacagaggaactaacgtccaacgacaagacgaggattctcaacgtccagtccaggctcacagacgccaaacgcattaactggcgaacagtgctgagtggcggcagcctctacatcgagatcccgggcggcgcgctgcccgaggggagcaaggacagctttgcagttctcctggagttcgctgaggagcagctgcgagccgaccatgtcttcatttgcttccacaagaaccgcgaggacagagccgccttgctccgaaccttcagctttttg

SEQ ID NO: 146055 - DNA, 1257 bp, Homo sapiens
  misc_feature (1)...(1257): n = a,t,c or g
ggccgcaatcgaaaccctnnnatttgagagcatagtccangtggtggaattcgagcagcggcggcggcgcggagagacgcagcggaggttttcctggtttcggaccccagcggccggatggtgaaatcctccctgcagcggatcctcaataggcccttgctcgccaaagagaaggaaggggataaaaccagggccacccatccaccgcaagccggcaccatccggctcctaaagcctgcacagccgcggcggcagcaagcagtgagagttccagggtctccctccactgctgtaagtaacccgggttcgggggcctcggtggtgctcctgatgcccctcacccacccctgaaagatcccagggtgggcgaagggaatagtcaaaggaatcccaatcttttcagctaacttattctactccgaatgatcggctgaatgaacagaaggaactaaacgtcccacgacaaagacgagcattctcgacgtcccagttccaggctcacagacggcaaaacgccattaaattggcgaaacaattgctgaagtggcggcagcctctttaacataaagcccgcgggcgggcgccgctggcccgaggggagcaaaggacagcttttgcagtttctcctggagttcgcttaaggagcaacctgcggagccgaccccaaggtcttcatttgcttccaaacaagaacccgcgagaaggcagagccgcctttgctccgaaactttcagcttttttgggctttgcagattggtgagaccggggggcatcccccttgtccccaaagagacccccgacgcttgcttcatggccttacaacgttcgagagagagtcttccgggagaggaggaggaagtaggggcccgcctccggggctgggcaattcccccgccctggggccacccccttgtctgcacgggtgggtaggaaccgtagactcgctcatctcgcctgggtttgtccgccatgttgtaatcgtgcaaataaacgctcactcccaataaacgggggattttctgaaaggtttaatattgtggttggtgatactgaagtatttgctttaaattctaaataaaaatttatattttacttttttattgctggtttaagatgattcagattatccttgtactttgaggagaagtttcttatttggagtcttttggaaacagtcttagtcttttaacttggaaagatgaggtattaaatcccctccattgctctccaaaagccgaataaagtgattacaccccg

SEQ ID NO: 146056 - DNA, 1054 bp, Homo sapiens
  misc_feature (1)...(1054): n = a,t,c or g
gaatcagtggacttggcggcagaggcagtgcggatccggcgttctccactgatcttttccaaggctgtacacatcatggcggcggcttttcggaaggcggctaagtcccggcagcgggaacacagagagcgaagccagcctggctttcgaaaacatctgggcctgctggagaaaaagaaagattacaaacttcgtgcagatgactaccgtaaaaaaacaagaattacctcaaaagctcttcggaaagaaggctcttgaaaaaaaatccagatgaattctactacaaaatgactcgggttaaactccaggggtggagttacatattattaagggagactaagggaaggaagtaaccccaggaacaacttaaagctgatgaggaacttcaggacgtcaaatatatagaaatgaagagggttgcagaagctaagaaaatcgaaagactaaaatcagagctccatcttgctgggatttccaggggaagcaacagaacaagcatgtgttcttttttgacacccaaaaaggaagttgaacagtttgatgtcggcaactcacctgcaaacagccccggagctagtcgacagagtctttaataggcccaggatagagaccttgcagaaagaaaaagtgaaaggagttacccaatcagactggacttaagcgaatagctaaagaaaggcaaaagcagtataactgccctgcacatcagcggattgaaccgagagaagaaattggtnccgttattgcctcagaaaattcaaacacgcaaagatcttatggataaaactcagaaagtgaagggtgaagaaagaaacggtgaactccccatgctatttataaatttcagaagtccgtcgaaaaccgttgacgtgttatagataagccttgtcattctgtatcaaaaatctgttgtcgttttctagtaacttcaaattccattactccaaatggcatggttttccggtttgtaacccataactaaattgtcaggtctgacatttaatgtctttctatggacaacattaaatctccctaccattctgtaaaaaaaaaa

SEQ ID NO: 146057 - DNA, 2141 bp, Homo sapiens
atcttcgggctgtcagagttggtctgttactcggtggtggcggagtctacggaagcccgttttcgcgttcacttttcctggctgtagagccgctttccccctggcgggtgagagtgcagagaccgaaggtgcgagatgagcactatgttcgcgggacactctcctcatcgtttttatctctgtgtgcacggctctgctcgcagaggggcataacctcgggtcctcggtttacaggacagacaaggtacacgagactctaggcagaagtggaaaaacagagtaaaaaattgggaaaaggaaggaaggaaacaattaacagagttcagctggttcggacaacagaaaaagaaaatagagagacaagaagaggaaacttgaaggaataacaacagagatctatccaatggttcgaattgaaatccatgtttgcttattggcttttgttttactgcccttaatgggaatgttcaattccatatttgatggtagagtggtggcaaaagcttccttttaacccctcttttcttacatccaaaggactgtctcatccgaaatctgctggggagatgacacccacagacttgttcctttcattttccctgtatattctctgtactatgtcgattcggacagaacattcagaagatttctcggccttgcccccttcacgagcccgccaccaagcaaggcagggtggatttcttgggcccaccacctccttctggggaagttctcttggaactcaaggaactctttattttctattcattctttctaggacacacacacatcaggatggggcaactgttttgtagccaagagcccataggtagcctttactacttgggcctctttctagttttgaattatttcttaagccttttggggtatgattagagtgaaaaatggccagcccagccaaacttgataggggcttttgggtcctaggatgatttttattcaaataagtggatttgattagttaagttcagggtaatgtttatgtaatgaaaaacaaataggcatcccttcttgtttcatttaccataagtattttcctgtgggacccgactcctcaaggccactgtgtatgcccctgccaagttggctcgtctatggagccttttaggagatttagaagaaaaatttagtttgtttaacccttgtaactgtttgttttgttgttgttttttttttcaagcacaaatacatggacataagatcaataaagaggccaaatttttagctgttttatgtacaaggagagatctgtttcattttgttttgccgtatttctagatataagttttagcatgggccaggaaggactaaaataaaagtttttaaggtactgtactttttgccatacttgactcatatactcaaaatacagagttgtcttggtgtacgaattggaaagcaagagtggaaaggaacgtaataactcgttggagtttaaaaatgagggtcttggcaagtaacactgatgtctgaaaaaaaaattaaatataaataattaaataaaaatgagggtcctcagctgttctcttcatatcctattacagtctctcagattcttgtgggggccactcttagatctcccttggagacaaggttatagttatatgttgttaatcctcgcagagcttccttttagtcacaatagccttcattttctgccatgccccttcataagggagaaggatgtttgtaccatgatcctccccgcataatctatggaattaggagtcctgtgtggagtcttatcaataaataaagaacaatcatcaaatgtctacttaaatgtgagtattctaccagtgagaaaaaacacataattttcaaggtaatcattgttaaaccaacagcaaacttttgtctttttcagcgccataaagtccagaagacagtagaaaagtatcttcaaagtgctgaggaaaataagtatcaacttagaattttatgtacaatattggaggcaaaataaagacatgtttagacatacaaaactaagagagttgaattattaaaggttatattccaaggacaaaaaagaggatctgcccaaggtgaaggtatggcatacaagaaacaatggtcaacagagaaataaaatatatggatgaatatatggaaaaaaa

SEQ ID NO: 146058 - DNA, 457 bp, Homo sapiens
tgtcatactgaaggagctctgtggaaatctctgttttcttctgtgtggatttaatgagagaaatttaaatatgtctagagtggatgtatatacaacacattctccttgttcattttcacccaaatgaagtgtgaacgtgatgttttcggatgcaaactcagctcagggattcattttgtgtcttagttttatatgcatccttatttttaatacacctgcttcacgtccctatgttgggaagtccatatttgtctgcttttcttgcagcatcatttccttacaatactgtccggtggacaaaatgacaattgatatgtttttctgatataattactttagctgcactaacagtacaatgcttgttaatggttaatataggcagggcgaatactactttgtaacttttaaagtcttaaacttttcaataaaattgagtgagacttataagcccaaagaa

SEQ ID NO: 146059 - DNA, 2703 bp, Homo sapiens
  misc_feature (1)...(2703): n = a,t,c or g
tttcgtggctgctctgattggctgaacaaatagtcccgaggggggtgggcatccgccctcccgacaaggcagaccaggccccctgcaggtcccctatccgcaccccggcccctgagagctggcactgcgactcgagacagcgttttcggcaggacagctccagaatgaaaatgcgggtcttggggttggtggtctgtttggttctctggaccctgcattctgaggggtctggagggaaactgacagctgtggatcctgaaacaaacatgaatgtgagtgaaattatctcttactggggattccctagtgaggaatacctagttgagacagaagatggatatattctgtgccttaaccgaattcctcatgggaggaagaaccattcttgacaaaggtcccaaaccagttgtcttccctgcaacatggcttgctggcagattctagtaactgggtcacaaaaccttggcaacagcaggctgggcttcattcttgctgatgctgcgattgacgtgtggatgggcaacaccagaggaaatacctggtctccgaaacataagacactctcagtttctcaggatgaattctgggctttcagttatgatgagatggcaaaatatgacctaccagcttccattaactttctttctgaataaaactgggccaagaacaagtgtattatgtgggtcattctcaaggcaccactataggttttatagccattttcacagatgctggagctggctaaaggattaaaaatgttttttgcctggggtcctgtggcttccgtcgccttctgtactagccctatggccaaattaggacgattaccagatcatctcattaaggacttatttcggagacgaagaatttcttccccagagtgccttttggaaggtggctggggtaccccacnttgccactcatgtcatacttgaaggagctctgtggaaatctctgttttcttctgtgtggatttaatgagagaaatttaaatatgtctagagtggatgtatatacaacacattctcctgctggaacttttgtgcaaaacatgtaacactggagccaggctgttaaattccaaaagtttcaagcctttgactggggaagcagtgccaagaattattttcattacaaccagagttatcctcccacatacaatgtgaaggacatgcttgtgccgactgcagtctgaaacggggggtcacgactggcttgaagatgtctacggcgtcaatatctaactgactcagatcaccaaacttggtgttccatgagagcattccggaatgggagcatcttgacttcatttggggcctggatgccccttggaggctttataataaaattattaatctaatgaggaaatatcagtgaaagctggacttgagctgtgtaccaccaagtcaatgattatgtcatgtgaaaatgtgtttgcttcatttctgtaaaacacttgtttttctttcccaggtcttttgtttttttatatcccaagaaaatggataactttgaagatgccccagttcactctagtttccaattaggaaacatactaggctattttttctttaattaggggctgggaatagggaagccagtgtctcaacccatagtattgtcctctttaagtcttttaaaatatcactggatgtgtaaaaagggtccttatatccattctgtttttaaaatttaaaatatattgactttttgcccttcataggacaaagtaatatatgtgttgggaattttaaaattgtgttgtcattggtaaatctgtcactgacttaagcgaggtataaaagtacgcagttttcatgtccttgccttaaagagctctctagtctaacggtcttgtagttagagatctaaatgacattttatcatgttttcctgcagcaggtgcatagtcaaatccagaaatatcacagctgtgccagtaataaggatgctaacaattaattttatcaaacctaactgtgaccagctgtgatttgacacgttttaattgctcaggttaaatgaaatagttttccggcgtcttgcaaaaacaaattgcactggattaaaacaaaaacaaaagtatgtttttaaatggctttggaagactggatacactcaaccatctatattcatgagctcctcaatttcatgggcagggccatagttctactttatctgggggaggcaactcccctgtggagactatacccactatttttttctgagattaaatgtactcttggagccccgctaactgtcgttattgatccacatctggttgtggaagcccaaaagccccggtggttgccccatgacgaacgtgtcctacgttcattttcaccccaaaatgaagtgtgaacgtggatgttttcggatgccaaactcagcctcagggattcattttgtgtcttagttttatatgcatccgttatttttaatacacctgcttcacgtccctatgttgggaaagtccatatttgtctgcttttcttgcagcatcatttccttacaatagctgtccggtggacaaaatgacgaattgatatgtttttctgatataattactttagctgcactaacagtacaatgcttgttaatggttaatataggcagggcgaatactacttagtaacttaataaagtcttaaacattttcaataaaatagagctgagacttataggcccaaaaaaaaaaaaaaa

SEQ ID NO: 146060 - DNA, 6482 bp, Homo sapiens
  misc_feature (1)...(6482): n = a,t,c or g
ctccccgccagtccgggcgaacgcggccgggcccttggggaccgagtctcggcgccgccggggaacgggcgcgggccgcgccacagccggagcggggcagggccccgccaccgccttcttccgccggccccgccgccggccatgcattcttccggctcctctgactcccaaagccccggctggggcccggccagcccgagaaagacaggacggagtccagtgtgagaatggctataactttggaagaagctccgtggctgggctggctcttggtgaaagcactgatgaggtttgccttcatggtcgtcaacaacctggttgctattccatcctacatctgctatgtaattatacttcagccccttcgagtgctggacagtaagcggttctggtatatcgaaggaatcatgtataaatggcttttaggaatggtagcttcctggggatggtatgctggatatacagagatgcgaatggggagaagatattagagcagtgttcaaaagatgaagcagtgacgttggtgaatcatcaggcaacaggagatgtgtgcacactgatgatgtgcctccaggacaaaggactggttgttgctcacatgatgtggttgatggatcatatttttaagtacacaaactttggaattgtttctctagttcatggagacttctttataagacagggaagatcttatcgtgaccaacagctgctgcttctcaagaagcacttagaaaataattacaggagcagagatcgaaaatggattgttttgtttccagaagggggcttcctcaggaagaggcgagaaaacaagtcaggcatttgccaagaaaaataaactgccattttcttacaaatgttactctgccaaggtctgggccaacaaaaattattttgaatgcacttgttagcacaacaagaaaaatggaagtccagcaggagaagatgctaaagaattagccagcaaatcaaaaggcctccagtggataatagatacacgatagccttatcccaaagctgaacctataataatatccaaacgtggggtctttggatacaggaaaccaacagtcacacatgtaccattacgggatcttcccaaattaaagatgtaccccctggagactgaagacctttaccacttggctcaatcagcggtttgttgaaaaagaagacctcttatcacatttttatgaaacaggagcttttccacccttccaagggccataaggaagctgtttccagggagatgaccctcagcaacttgtggatatttctcatacagtctttggcatttttgtcaggctatatgtggtacaacatcattcagtatttttaccattgcctgttttaggaattgacgtggacttgtcaaggtcaccgtaggagttcagactttctttcataagtgtgcattattttacatgtgcaaatcagaatatatttaaaaaaaagcaaaagaaattcaatggatggattaatatttatccccctttgggatattttaaaactctactaaaatgaggattagtaatataatgacctgctaatatattttaagaacatgttttaaaaagatacactctatcacatatttaagcaaacatcacatttggagaagaggaaatcataaaatcatcctagaagactatctgagagaaattctgttgccaccagttatacttgacaatttagttgaagctcagaaagttatattcatccctcttagctgtagtctatattagggcagttctctagaacgcccacatttccaccaactcagtaaacttgaggggagctggttggcacctcgtgaagaactctttccctgtcgtttgcagtaacaaactccagtctgttgcagtaacaaactccagtctgttgcagtaacaaactctaggaatattgacattctctgtgggggaaaagcagtgtccactggaccccttctggtactggatgtgttctttacaaaggctagctcagtccaacattgtgtttacatacactcgtgcttttccttatctgacttctcattttgtatcagaggcatatcataaattgataattttgcaaaatgcacttttttgagatgcagatatagcaaaggattagtaatatagcctgaaaacaaatgggagcatagcagtgtgtgaggttctcgagaactgtcttgtctctgtgtgtttatttgcctgccagtgctctccagcgccatcctgccctggacaccaccctgacgtgatgcctctattgcagctcagaggctttattttttccattttgacattggcactaaatgcatttggggatggttaaaacaaattactatagaacatttaaatgatcagtttaaggggaaataggctagtttatagaaaaataagagctagtggcttataatggtgacaggttctcatgtggcacccctaggacctgtgcagacagtagtctgttgaatcattacatcaaggagctgcccctgtcagggtgagtgtaattaggaacgataccagcacataaggctccccccaatctcttccagttgctttttcttttttctttttttttttagacaggtcttactctgtcacccagggctgtagtgcagtggcataaatctcagctcacttgcagtcttctgcctcccgggtttcgaggcgattgttcctgtccttcagcctcccgagtagctggggactacaggcacccaccatcatgcttggctaaatttttgtaatttttagtagagatgggggtttcaccatgttgggccaggctggcctcgaactcctgacctcaggtgatctgcccacctcggcttcctaaagtgcctgggattgccaggcgtgagcccncccacgcccggccctccagttgctgtgtgaagagggtaaagtcaagtttcctatttcctagaaaacattttttagaaatttgttgcgatgtttgtaccaatttccctcataagagaaccacacccttctccaaaagtgctggtactgcatcagtgagatgagtagggtttttgtttgggattgtaagactattaagatcctagtaagtcagtggtagtttactgtgatgtgagcattgtagattcccccgttgtcactaatcacacaaataacaattttgagaagtaggctataaaacaaaaaaaggttgctgttttctatttttaaataaaccagaagaaaaacagaaaagatgtgaattttccccagttatgtgggaaaggtaaagcaacaccaaataaaagcccacagcagcttcatctttacgataactcagtgcatatgtgaaagagaatgatgcattaactgaaatacctcattgaatattatactactactggtaaaatgcacaagacagcgttaatgtgtttggtttgggtactggttgttataaaatgcaatttttttttaaatctaagcatttcattatgtgttctacagtgtcggtgaataaatgaaaccaatctcaatttataggtatggatgatgacagaaagcccaatagaagcttaatgatgcttctgtttgaggcccagcaagcaccactaaatttactggatgaaatgaaattgttcacttgagggattagtcaacccatttgggggagaagttgctcactgtcaaatacagcatgcacggtcctagctgatagaccttttcctcattgctacagcaagccacagggtagagtgaccagttctcctatccaaaaataaatgcgaacatgcatacataaatgtggctgagggccacttttgccatcactgtgctccaaaggaacatgatattgttaaatatactgtacacattaaactattctataagatgctttacttttcaagtacggtgtcattttcacagtctccagggtgacaaatgccaatagatatgtgagttaatttttttaaatatctccgtgagttgtaaatagatgtgtatttgatctgccctatccttctttgattctttaacatgttctctctcttttgtttgcaaaatatgtttgaaagcattggtagtgctttccttatcagtaactggagttctcctgcttgcactagagaaggtaaagagagaatcagtattcttatatggcaatctggggaagcagcaatatgccactgtacaaaactgaagaaaagttcctaatttgtactttgtgaagggagatgaaaggacgtttaaagtatatatattttgtcaagaggaaagaagataataactatgccagttttatatcaatagcttgtagaagctcagctcttcttggtcttggctagactgcctagattcccacagcagacaaggttgagaatccattgctggaatcttggtattgatgagttacagtgatggaacatgtgcttggccacaggcaggtccagtcactgcaaaagtgaccaagccagcaggtcacccttaacttcagaaacaattattggtggtgaactgtacttaaattgcagagaaacctgtaagtaatggaaggtaaagaaaaattacagaatggaaaataatattttgggcaagcaaacaaattcactgagaattccaaaagtatattaaaaaagaagatagctatgagttcagatctatcttattggtctttaatattacaaccaatccttaactttccactataaaggaaggattactagattgattactttctgggtagataatctggtaataaatgataggtaaatcaaaaattacttttatttaggagtttgaattcttactctcatcagacattttttttctagggacgcttactaattaaatgatttaagttgtttcttaggggttttttgcctatatattttatgactgtgttaatgagtagtgaaatgatgcggaaagacagctatcaggaagaggaaatacagaagccctgaataatctatgggttaggaaaagcatccctgaataatcaaaaattggcaggatttgcatttgttctcaagcctttttatgaaaatggaaatctggaaattcaccaaatgtaaacctgggaacattattctagtgttgctgtcttggattctatgttaagaagcgtcttcattctttgctcatgttgcccacttcttgtgggatttgtctgagtgttttttgacaatcacttccttaaagactcttctgaactagttggacctggttaatcatagagagtagcctttaatcatggatagtcttcttggattatttttatatttgaaaagaaaatgttttatttgcactactggagtaggaagagttaattgttttctttgttctttttttgaagtcattacacaggacttcactccagagttaccattatgagtgtgttcagctctggtccacagaggatggataaaaatggtttgttatgtttttttgctctgcagtgctatgagccttatatctgttaatatgaaggacaaagtcaaaagcagcagtggatagcaggaagggtagagactaatatgtttgggaccaaaaccatctaagttagagatttcccagatcacagaggggctgggcattctctggagcagtcattggttggtgctttattgtaatcattttgcgccaatccccaacaattaggaactggaccctgggaataagctgagggtgctgaacctgttggggaagggtgactgtagccacatgggaagataaaatatggggtttttcctgcaaaatttccatctgaagggtttttacatttaatatttttttaagacagtttaaagagcaaacgtttttttaagtgtattctagttgcaaagtatgcacacatatcttgaatggctttatttttattgtgtaaaactgttgaacacatgactgtgatgcacaaattctttaccgtgtaaggagtctatgcattttacagtaacttattttatgatcgggtgatgagaccagttatactttccaactgccattatttttattaagtgctttccattttctttaccagtttattataaaattggtatttatttttatacaggatgggttttcattttcctgatgctgtaatgtttacttccagcttgttgacctttctttgtgttatctgcatgttgtaacgtgtgataagaatgaatgtaaaggctgtggcaactgtaaggagatttttgtaaagggcgggtcacacggtggatctggtttatgaatgcatttgggatgattttggtaaccagatcaccttttcagaaatttagatgtgaacaccaaaagaagcattttcttcaacaaaaattaatagctggttctattttttttaaacctagaaaaaataaagttggatttttttcaattaaagtgcttttaattcttagcagtggggatggggcatgtgtgttttaccagagctatttgggcattaatatctgcaggcaagtacttagagcacactgtggcagttggatgctgaaggcaaacttgaaaacccattgaaaaaccatc

SEQ ID NO: 146061 - DNA, 1179 bp, Homo sapiens
tttaatttggatggattttatataaaatatataatagaatcataccatcatctatttgtagccaaagtaaaaagatttatgagaagaataaggactctgctatagatctggatgttggtttcactttcaaacacaaaaatagtttctttttaaaaaagtacagtagaatatcctccattcataattgtaattaatttagcataagcaaagaaatgaccttaggaacatacccaggttttaagatagatttctaggtaatgggcctgaaaggcattttgatctgaatttattttccaacgatttcaaatataatttgtcatctgtgtgtagacatatacgggcatgaacacacattcacccacacatacaaaaacacttagctttctatcagattcagggtaatttttttattgcaggtctcttttaatattggctagcagaaaacctatccccaacctaacagattacacacacacacacacacacacacacacacacacagaggctatttttcccacacttcctccacagtggaaaaggctctcttaacaaggataccagaagggtcggaggaggaggacaatggcttttatggctgggccttgaggacaattctggttgcatttaaatctcagtgccaaatgcactaggttccctgccgttataatttttggatcagtctcttctgaaatcaggtcacagagaaaacaggatgatttctcccaatctctcctataaaacactgtggtaagacaagatttctttttgttctgggctatcattcccatgatcatgtgcttccctttcccttaggaaccacccaagaacatacaaggaaaagttaagggaaaacatcataagaaccactgtcttgccactagcacatgctttggaggagttctgcagaatggaaacctgaaacagattcactggctgatgctccttattgacaatggaaaagaacctagtggggatgttcaaaagaagtgtatttcctttcagaatataaactcagaagcccacacatcaaaacttagagctaccttggaagacagcagtaccaaagtccaaatactccactaactcctgaacctgactacgagtcatttcctcttctgagcacatgattttcctagtgaaagccccctacctattatttgaaaatttgacagtttatac

SEQ ID NO: 146062 - DNA, 401 bp, Homo sapiens
ggtttcggttggaggactcgttggggaggtggcctgcgcttgtagagactgcatccccgagacgatggcggagggagataatcgcagcaccaacctgctggctgcagagactgcaagtctggaagaacagctgcaaggatggggagaagtgatgctgatggctgataaagtcctccgatgggaaagagcctggtttccacctgccatcatgggattatctactatctagatccatctgttctgtccggcgtttcctgttttgttatgtttttgtgcttggctgactaccttgttcccattctagcgcctagaatttttggctccaataaatggaccactgaacaacagcaaagattccatgaaatttgcagcaatctagtaaaaactcgacgcagagctgt

SEQ ID NO: 146063 - DNA, 2454 bp, Homo sapiens
tttcgtgacccatataagcagcctgcggtgcgttctctcgggttgtggttggtgtgcgggtttcggttggaggactcgttggggaggtggcctgcgcttgtagagactgcatccccgagacgatggcggagggagataatcgcagcaccaacctgctggctgcagagactgcaagtctggaagaacagctgcaaggatggggagaagagatgctgatggctgataaagtcctcccatgggaaagagcctgggttccacctgccatcatgggtgtggtttctttggtgtttctgattatctactatctagatccatctgttctgtccggcgtttcctgttttgttatgtttttgtgcttggctgactaccttgttccccattctagcgcctagaatttttgggctccaataaatggaccactggaacaacagcaaagattccatgaaatttgcagcaatctagtaaaaactcggacgcagagctgtgggttgggtggaaacgcctcttcacactaaaggaagaaaaacctaagatgtacttcatgaccatgatcgtttcccttgctgcggtttgcttgcctggggacaacaagtccacaacctgcttctcacctacctgatagtgacttccttactattgcttccctggacctaaacccaacatggaatccattttgaacgtacattgggaatggccaacatggagataaacaaacttctcaaacataaatgatagactaactgaatgattcatctgcttttaatcagtgtggattaatgcaggcacccattgccccggggaaccgtttcctgctgtactatctggatacctaaaaatgttaccggaagtagctctttggtcctccctcactcctgcccttaagttaatagaaattcagactccgccaagtaaagccttcggtgcataagtggccttcatgtccgcgtaatagttgaacgccgttccttagcagttggccttcatggacaactcattagtgttttgacttttcttacccagcgttaattgaattcttgcttttaagacaacttcctttttgtaagtggtgaaccttgccctttagtacaagttcaagtgaatctggataattgttcatctttgctttagcttagataccatgtagtggtctgtggctacaggaagctggttctgtctgcttccacagtctgcttaaaaaactgtctgacttcgtgaatatagagaccaagtttaccacttctggatgaagagaccaattaagatttcattccccattctgtttattttccagtggggaggaaggagtccccatgaaataagatgaaactgattccatgcactagtacatgtagggcttctcccttgtgccaaagcttaggcaatttgtaggaaactttgatctttttgtcccaggaaaagggaatgtctgacagggcttaaggctttcgtcccccttggcacttaagactcggaagttaggtaaatccccttaaagggctttttaaatagcagacttccaaaagattgcatttaggatttctagcatgcttttaatttcagattttcagctgacattagctatagtatacagtaggttaagactcatgtctatgactttcactctaagactggcaaaaggacagcagtcttctatgtttagtcaatattcatttcagtagaagataatcttatctaatttttgagaccagaataagccttttaaggtaaacctcaaaattatcatttttatgggtaatactgaccattttagtccccctaggttttgacatgggagatagtgactacactggtgtctgacttttttcctagagatttctccctgaaaaaaaccaaggcctgttggtgagagcagacttgaggtgatgatagttggcctctggtctacaaagatttcataactccctgggaaagcttcttataatcattcttaacttcttggtagcctagaaatttagagtagttgaaaacctttaggaaaggaacttcctgagggcccaaaaaatgtggactgacgggaaacaattccttaaactgattaactagctgtaattatagtttttgtgaattttattggcactgatgttggtaccttgtggtatatctgtcccgtattaaataagtgttgttttcgtccgtcgtttaatattgctgtgaacagtggtgccccattgtagtcatatgtttgattttttttttattatttcataagaaaaccacgttaattttaccttactttcattgtaaataagcctgtcttcctatctggatttttttgtgtgcatacatattcttacttgattaactacttttcgcagttttaatcctcgtcttatttcttcgtactttgttttgtgtaaaaggggaaaaaataaaaaaagtctggaatcttcaaaaaaaaaaaaaaaaaaaaaaaaaaaaaaaagggcggccgct

SEQ ID NO: 146064 - DNA, 618 bp, Homo sapiens
cggccgcgtcgacccgaaagcgaagaaggaagctcctgcccctccgtaaagctgaagccaaagcgaaggctttaaaggcccaagaaaggcagtgttgaaaggtgtccacagcccacaaaaagaagaagatcccgcacgttcacccacctttcccggcggcccggaagacacttgcgacctccggagacagcccaaaatatcctccggaagagccgcgtcccaggagaaacaagcttgaccactatgcgtatcatcaagtttcccgctgaccactgagtctgccatgaagaagatagaaggacaacaacacacttgtgtttcattgtgggatgtttaaagcccacaaagcaccagaatttaacaaggctgttgaaggaagctgttttggacattggatgttggggccaaggtcaacacccctggattcgggcctgatggaagaagaagaaaggcatatgttccgacttggcttcctgatttaccgattgcttttgggatgtttgccaacaaaatttggggattcatctaaacttgagttccagcttgcctaatttctgaatatatatatatatatatatatctttttcacccataaaaaaaaaaaaaaaaaaactgcgg

SEQ ID NO: 146065 - DNA, 1961 bp, Homo sapiens
caactgacaaggaaattttttaccctcctgtggcacacaataattgtaatataacaattatgattattactgataatgtacacctaagttatattagaattataggagtttcacataattttggaacatacaccaataacatatttatacaaatacagcccaaagaaaaccaaacaccatttcacatttgacaatgcttcctatataatttttatacccaaataagcccaaattatgtcattttaggactttaggggaaactaagatcttaaaggattaaattaggttagaaaaatacataatttataatttgattttggaaagcttgtcaaatacaaaaggtttaaaacacttgacattacaaaataaaattacaggtcatcgtaaagtcatttatttaatccaagtgataattcaaggatttcaaaaaaagcaaaaaccttcattctttgagagaggtgacttaactttctaaacaagaagccctaataaaaacagcctgaagccaatcacatttgattttcaaaattttgtaaacaaactataagatttaatcttgattataaaatataacttccataagccttttataacctttatgaaggagttggttaaaggcttccaagaaaaaccttgcctaatccagacacaggggtcccatatactgattttgcatcagtgtgcctttgacttgaatgattagttcatagagaaactgaacttactggatctttcaaaatcggcccttacaatcttacgcgcccacctcttccgcaatagtccctgggccttgaggagttgaatagctttaatttcttgcctagtgcctcaggaatgcagtttattttgattggcatcttctacggggccttaagatgaggctttgattgtcatcagtgtttgtgatttttcagacacaggagttaaagccctgtaactcaatgttacaaggactttaaaagcatacacaggaagatacatggatgtaataaccttgattttttaaaaattagctctttcttccctaagcaaaccaaaacttaataataatatgacaacttgattatataaaagcttttggggtgtgtgtgtgtgtgtgtatatatatatataaaatcttatcatgacttacaccaatgttcatgacatgcttggactttctggtttgtcctgaacatccctccttgttaaacaaccagttattttattttaggactaaatttaccatataaaattctttcttatataaaattatttctttttcagctttttaaccttgaaaaaattctttatttttataactttatttacattttttttcttttctggttccttttaccttgttttatatataaccttttaataagctttgaattagacaaaacttgttcaccatttttttaaaaaataaggacacacttttttttaagcaacaatgttttcctacaagatatatttattggaaaatacccaaataataaattatctattatttaatttaatatgactttatattctaaattatgtccagttggtctataagtatttatcccattacatttacctagttattttattaattgtttacctagattatttataaaaactgtgatagtcatgatttaaagttatgaaacttccattgcaaaattacaactgagacagtgaaaaacgatttgacctaactgactccaccttgctcttaacttccaagctgtccttgttcattcctgggcataggccgaatgaactttgggaggaacctagttttaagttcagcttcgaaacaatgacaataacagttcctttcccaaaacaaacctccttattggtctgtggactaaactgcctaaagccacaggataggaagtttattggtaaatctactaaattccaagagccagcttgtttttattaaaccccatttcaaatgtccttattttattaaaaatttccacagc

SEQ ID NO: 146066 - DNA, 736 bp, Homo sapiens
ggcggactatgtccgaagcaaggatttccgggactacctcatgaggtgacgagcgccgcaggccgaacccctcaactctggcccctgggccttcagcagctcctcctacatgagcaggcccagtgcccacatcagctccttgattgtctcccgagtgggcagcagcagcaccagcttccagggtggcctgggtgccggcatgggtctgccactgcactccagcctggctaacctgtatgtggatttttatagaggttttattcataactgccaaaatttggaagcaaacaagatgtcctttggtaggtgaatggcaaaataaattgtggtacacctggttccaactacacaacgttctggaaaaggcaaaattatggagctagtcgaaagatcggtggttgcaagggttgaggtggggcacagaggatttttagagaggggtcttcccattgctgccatcaatgatatgaaaaagtctccagagattatcagtgggcggatgacatttggtacagcctcggaactggcttctgtttgcatgccacgcaacaaatgaagtagcccagctcatccagggagggcggcttatcaaacacgagatgactaaaacggcatctgcataacaatggaaaaggaagaacacggtcttgaagggacagcattgccagctgctgctgagtcacagatgtcattataaatagcctccctaaggaatatacactgaatgctattcttt

SEQ ID NO: 146067 - DNA, 549 bp, Homo sapiens
ctgaaaaacaatttattctcttattaagcttctttctttttaaaagtacccaatttagggtctgcattttaagaattattaacaaatatcttcataaaaatttgggaaaaggagtgtggatagatttaaacataaaaatatggagaatagttctaacagggtttgaattatagcaacaatggattgtgtaagaagtgaatcttatttttatttttaaatgttctaaataggacaatcagagatgacttggttgtagagtggaaaccagtaaggaccttgggaagctgccaaaccctttctagctctgggctcagctagaagaactgctgattcctacaggaacacttggacaatccaatacctaaatgttaaccatcaattaacccagtagacctgcaagatggaaacgaagatttgctctcacgagtttcacgtgattatttaaacacttctggggcccagtagccaactggggtcttcccattgctgccatcaatgatatgaaaaagtctccagagattatcagtgggcggatgacatttgccctct

SEQ ID NO: 146068 - DNA, 1052 bp, Homo sapiens
ctaagaactgctgattcctacaggaaacacttggacaatccaatacataaatgttaaccatcaattaccccagtaaacctgcaagatgaaaacgaagatttgttctcacgagtttcacgtgattatttaaagtaagggaaatttcagctgtttatagttctgtattaactttttcctctattcattcttttcctcatcattttttgtagcagttctggggcccagtagccacatggggtcttcccattgatgccatcaatgatatgaaaaagtctccagagattattcagtggggcggatgacattttgccctctgtttgctattcttttgacattcatggagattttgccttacaaggttacagccttcgggaacttgggcttcttgttttgcatgccacggaacaaatgaagttaggcccagcttcatccagggggaggggcggcttattccaaacacgaggatggacttaaaacgggcatctggcattaaccaatggggaaaagggaagaacaaggtctttgaaggggacagcctttgcccaggttgctgctgagttcacagattttcattattaattaggcttccctaagggaaaatacactggaatgctatttttacctaacccattctattttttaataggaaatagctggagagtttcctaaaccccaactcttctggctggccttaccaagtaattaaaatattttaccttccttttcccataaagagttagcttcaaaatatggcaattaatttaaatacctttcctgatggatgggttttatcctgcagtaatatgtatatccaccctattagaatttcccttaatgaaaaactgaagagaacaaaatttgtaacccactagcacttaaggtactcctgattccttaacattgtctttaatgaccacaagacaaccaacagctggccacgtacttaaaattttgtccccactgtttaaaaatgttacctgtgtatttccatgcagtgtatatattgagatgctgtaacttaatgtcaataaatgatttaaatatttgttaaa

SEQ ID NO: 146069 - DNA, 509 bp, Homo sapiens
  misc_feature (1)...(509): n = a,t,c or g
ggcacgaggaanaannnnnnnnnnnnnnnnnnnnnnnnnnnnnnnnnnnnnnnnnnnnnnnnnnnnnnnnnnnaanaagacctgtactttgaacaattgctttgctgagatgttgttaatttgtagctttgccccagccactttgnnnnnnnnnnnnnnnnnnnnnnnnnnnnnnnnnnnnnnnnnnnnnnnnnnnnnnnnnnnnnnnnnnnnnnnnnnnnnnnnnnnnnnnnnnnnnnnnnnnnnnnnnnnnnnnnnnnnnnnnnnnnnnnnnnnnnnnnnnnnnnnnnnnnnnnnnnnnnnnnnnnnnnnnnnnnnnnnnnnnnnnnnnnnnnnnnnnnnnnnnnnnnnnnnnnnnnnnnnnnnnnnnnnnnnnnnnnnnnnnnnnnnnnnnnnnnnnnnnnnnnnnnnnnnnnnnnnnnnnnnnnnnnnnnnnnnnnnnnnnnnnnnnnnnnnnnnnnnnnnnnnnnnnnnnnnnnnnnnnnnnnnnnnnnnnnctgtctctgctt

SEQ ID NO: 146070 - DNA, 490 bp, Homo sapiens; identical to SEQ ID NO: 133265
  misc_feature (1)...(490): n = a,t,c or g

SEQ ID NO: 146071 - DNA, 403 bp, Homo sapiens
  misc_feature (1)...(403): n = a,t,c or g
tttaactccccctcttcttaagagaattttaatgaagctgagataagaggcatatttacttgcagtttgccccattgttaccctggattcctccgagcgcacaagcttaccgcaaggctgactgtggatgtacttgggaatctctcgtcggctgtcctcaatgctcacgttcttagcataccttcaccctagagaaaggcccccacatcgggcgccagannnnnnnnnnnnnnnnnnnnnnnnnnnnnnnnnnnnnnnnnnnnnnnnnnnnnnnnnnnnnnnnnnnnnnnnnnnnnnnnnnnnnnnnnnnnnnnnnnnncaacagtgggcccaggggaccggcatcagcataccaaggacctgcaccagcaccggcctctgagttccctcagtttttattatt

SEQ ID NO: 146072 - DNA, 447 bp, Homo sapiens
  misc_feature (1)...(447): n = a,t,c or g
ataaatctggcctacgtgcacatccaggcatagtaccttcccttgaacttaattatgatatagactattttgctcacatgttttttgatgactttctccttattatcaccctgctctcctactacatttctttttgctgaaataatgaaaatcatattcaataaaaactgagggaactcataggccggtgcctgtgcaggtccttggtgtgctgagtgccggtcctctgggcccactgatgannnnnnnnnnnnnnnnnnnnnnnnnnnnnnnnnnnnnnnnnnnnnnnnnnnnnnnnnnnnnnnnnnnnnnnnnnnnnnnnnnnnnnnnnnntctctggtgcccaacatggggcccttctctagggtgaaggtactcttaaaacgtgagcattgtggacagccgaccagagaatcccgagttcgtacacagtcagccttgtggtac

SEQ ID NO: 146073 - DNA, 612 bp, Homo sapiens
atggcctcttgggatgagaaagatctgaccgtcccccagccagacacccgtaaagggtctgtgctgagctaccttcaccctctgatagatcttgtccagacccaaggtctggatacatctatacacactgaagactcccagatgggtatcttcagctcagagctatctcctcacttcagatttgcatatccagctgtcttctcagcctctccacttggtgtctacttgctgggaggtgtggagggagaggcaccggtgggaaccggggccaacgggagttccgggtgggcatggtctcagtgggcccgcactcagcggctggccgtcccacaagccccaggcagcagggctccggacctgcagcccgccatgcctgagcctccccacgcccccagctcccccatctgggctcctgcgcaagggagcctccctgacaagtgccgccccctgctccatggtgcacagtcccatcaccacctaagggctgaggagtgcaggctcagggcactggactggcaggcggctccacctgtggccctggtgcgttatccattgggtgaagccagctgggctcctgagtctgatggggacttggagaatctttatgtctag

SEQ ID NO: 146074 - DNA, 690 bp, Homo sapiens; identical to SEQ ID NO: 145835

SEQ ID NO: 146075 - DNA, 975 bp, Homo sapiens; identical to SEQ ID NO: 135593

SEQ ID NO: 146076 - DNA, 1926 bp, Homo sapiens
tcaaacatcctcctttagctctgagaagtttgttattaccgatcgtctgaagccttcttctctgaactcatcaaagttattctccgtcatctttgttctgttgctggtaaggggctgtgttccatcccccagctcaacacccgtgaagggtctgtgctgaggaggattagtaaaagaggaagtcctcttgcagttgagatagaggaaggccactgtctcctgcttgcccctgggaactgaatgtctcggtataaaacccgattgtacatttgttaaattctgagataggagaaaagcctcccttctccccactatcaccctgctcttctgccgcattcctcttgctgagatagtgaaaatagtaattaataaatactgagggaactcagagaccggtgccggtgcaggtcctgcatatgctgggctggtcccctgggcccacttttctttctctatactttgtgtcttacttcttttctcagtctctcgtcccgcgtggtcctcttcttccatgttctcactgtcaccaatctggtaaaggctcttcattctcttctttcttgtaatagcgacctcattgttcttgctccacctttcatccaaagcctcagcgaggctccatttgactgttgtaagatcagaatgagcatgcagacccactgagttgactggcaaagctttactatggataaccacagatgcaaccgcatgctgtgtcgacttccacaatggttgaactagtttacagtcccaccaacagtgtaaaagtgttcctatttctccacatgctctccagcacctggtgtttcctgacttttgaatgattgccattctaactggtgtgagatggtatctcatagtggttttgatttgcatttctctgatggccagtgatgataagcattttttcatgtgttttttggctgcataaatgtcttcttttgagaagtgtctgttcatgtccttcgcccactttttgatggggttgtttgtttttttcttgtaaatttgtttgagttcattgtagattctggatattagccctttgtcagatgagtaggttgcgaaaattttctcccattttgtaggttgcctgttcactctgatggtagtttcttttgctgtgcagaagctctttagtttaattagatcccatttgtcaattttgtcttttgttgccattgcttttggtgttttggacatgaagtccttgcccatgcctatgtcctgaatggtaatgcctgtgttttcttccggggtttttatggttttaggtctaacgtttaagtctttaatccatcttgaattgatttttgtataaggtgtaaggaagggatccagtttcagctttctacatatggctagccagttttcccagcaccatttattaaatagggaatcctttccccattgcttgtttttctcaggtttgtcaaagatcagatagttgtagatatgcggcgttatttctgagggctctgttctgttccattgatctatatctctgttttggtaccagtaccatgctgttttggttactgtagccttgtagtatagtttgaagtcaggtagtgtgatgcctccagctttgttcttttgccttaggattgacttggcgatgcaggcccttttttggttccatatgaactttaaagtagttttttccaattctgtgaagaaagtcattggtagctttatggggatggcattgaatctgtaaattaccttgggcaatatggccattttcacgatgttgattcttcctacccatgagcatggaatgttcttccatttgtttgtatcctcttttatttccttgagcagtggtttgtagttctccttgaagaggtccttcacatcccttgtaagttggattcctaggtattttattctctttgaagcaattgtgaatgggagttcactcat

SEQ ID NO: 146077 - DNA, 678 bp, Homo sapiens
agaattatggagaccaagaagtcctgcaatcttccacatgcaagctggcaacccaggaatgttggtggtgcactttgaaggcctgagagccagagagccaatggtgtagattctggtccaaatttgaagaccgtcccccagcccgacacccgtaaagggtctgtgctgaagtggattagtaaaagaggaaagcctcttgcagttgagatagaggaaagccactgtctgctgcctgcccctgagaactgaatgtctcggtataaaacctgattgtacatttgttcagttgtacacgtccagtcatagtaccttcccttgaacttcattatgacatagattctattgctcacatgtttgttgctgaccttctccttattatcaccctgctctcctactacattcctttttacttgggcttccaaaatgctgggattacaggcataaaccaccgtgcctggttctattagtacttttataaacagcatcgcgaaggtctgcagcttcacttctgaagccagcgagaccatgagcccaccgggaggaacgaagaactccagatgcgctgccttaagagctctaacactcaccgcgaagatctgcagcttcactcctccagggtccgtggcttcattcttgaagtcagtgagaccaagaacccaccaattccggacccacaac

SEQ ID NO: 146078 - DNA, 611 bp, Homo sapiens
  misc_feature (1)...(611): n = a,t,c or g
ggaactggtgggttcttggtctcactgacttaagaaagaagccgcggaccctcggaaactcctggagggcaaaggcatgcctgccatcttcatcattggattaccaccacccaacactatcgggggacctgccctgataatcagtctacaggtgtatccagcagctccagagagacagcgaccagcangaaggggccatgatgatggaggtggttttgtcaaaacgaaaatggggatatgtagggaaaagaaagagagatcagactgttactgtgtctacatagaaagggaagacataagagactccattttgaaaaagacctgtactttaaacaattgctttgcttgagatgttgttaatctgtagctttgccccagccactttgccccaaccactttgacccaatctgggagctcattaaaaacatgtgttgtattgaattcaaggtttaaggcatgtagggctgtgccaggaccgtgccttgttaaccaaatgtttgcaagcagtatacttgggtaaaagtcatcatcattctcttgtcccaataaaccaggggcacaatgcactgtggaaagccgcagggacctctgcccttgaaagctgggtatta

SEQ ID NO: 146079 - DNA, 1752 bp, Homo sapiens
ggagaactagaccaggaggcactggtgtgaccctggagtagatggaactgtttgtgcatgtgtctttcttaccttccattctcataaagaattagcacattccccacatacaccctggccagactgtgtctttgggactgcagcactaaggtgtgtttttgtttgttaacttattcccagtgcctgtgttgaccagggaggctttggggaataaaggtacataaaggtcttggagcctgggatgagcctgtggtcaaggagatgggcaggcagtgtccttgaaatttgggaatgtgactcacactctgcctgtaggggggaagaaaagagagatccagactgtttaccggggtctatgttaggaaaggggaaggacagaagagactgcattttgataaagacctgcactttaaacaattgctttgctgagatgttgttaatttgtagctttgccccagccactttgccccagccactttgacccaaccactttgatccaatctggagctcacaaaaacatgtgttgtataaaatcaaggtttaaaagggacctagggctgtgcaggacgtgccttgttaacaaaatgtttacaagtagtatacttggtaaaagtcattgccattctctagtctcaataaaccaggggcacaatgcaccgtggaaagccgcaggagcctctgcccttcagagcagggtattgtccaaggtttctccccatgtgatagtctgaaatatggcctcatgggatgagaaagacctgactgtcccccagcctgacacccgtaaagggtctgtgctgaggtggattagtcaaagaggaaagcctcttgcagttgagatggaggaaggccactgtctcctgtctgcccctgggaactgaatgtctcggtataaaaccccgattgtacatttgttcaattctgagataggagaaaaaccggccctatggtgggaggtgagacatgttttgcagtaatgctgccttggttaattcctttaactcccactgagatgtttggggtggagagaaacataaatctgggcttacgtgcacatcccagtcatagtactttccccttgaacttaattatgatatagattcttttgctcacatgttttttttgttgaccttctccttattatcaccctgctctcctactacattcctttttgctgaaataatgaaaaataataatcaataaaaactgagggaactcagaggccggtgccagtgcaggtccttggtgtgctgtgtgtcggtgcccctggacccactgatgtttctctatactttgtctctgtgtcttatttcttttctcagtctctcgtcccacccaactagaaatacccacaggtgtggaggggcaggccaccccttcagtgagggaaagaatcagtgcctaataaatgtaggcacctaccccaccactccaacttgtgctgtctgaagccttgggcacaatgggcaattcgtgagagtaaggaagtggtggggagggacaagagagagaatcatgaggaactgtgcttagttttgggaaggaggcagccccagaaaagggcactcctccccgtgggcttggaagtgtcactttttacatgacagtgtaagatatttggttgaattgtgtgtgtgtgtttgtgtttgcatatatgtctatattacatgtacatgtagattatatataatatacaatgtactttttccacgtgtatgtataatcaacaataaaatgttttaaaattgagat

SEQ ID NO: 146080 - DNA, 3297 bp, Homo sapiens
  misc_feature (1)...(3297): n = a,t,c or g
agcggccgcccttttttttttttttttttttttttttttttttttttattagtgaaagtgcatacacctttattatgtacattgttggaaagggaggccacctggagaaacttctgcactggcaactgtgttcctagagctcccttctatgcgtcccttccccnaagtgatttaatttcaagctggattggactacggaattcacaaggcagaaaagtcaaggtcatttggttttatctttggagacaggagaactcaaggaacccaaaagtacttgttactctaagtctcaggaaaaggttttcaggtcagggatatgggagggctcctggggtcctcaaggggtgaaccactttcacacaacaggataaaaccattcatttttaaaatttcaaaaatgttaaggtgccaaacttggaggttttaaggttggcactggctcccatacccccttaattaaactccaggctagggagcccagggattacatgggttagtttcaaggggcttccctaaaaattaagccttggaaaattggggggtacagggggaaggggacatccatttggcttggatggacagagtggttgaagcctaaagagagccaanaaagggctcgtgctggggaaaagaaagctgttatgccttagacttcctcctaggtgaaactccagaagtctccaaaggggaatggtaccaatggtcacccgccagctttcctggcccagtaaagcagaatgccccaggttgcctcagattccacagacatttgccaaaacagaagatgtctccctaatattataggacctaaggaatttgttgtcccaggaggagctgacccagttccctctttccagcatccaatataccatggataggaagaatggactaggtaaatgtaaaaagacctacatctatatagatattgtaagtttggacagtatctgccccaagatccattagacacctatatagtcaatatacctgtgaattcccttatactatgtaatgaatgggtttgtaatcaacatatttcacagtgtacccacagttaacagcatgcagatagtaaaatataatggtttcctgaagttatctcttaaaaaagtatttctagtccttcagctattcaaatagatatataacaattgcatatagaacgtagagaaaaattttattaaaaaattaaaactatttaaaacctgatatatgaaaataggccaaccagtgagaaaaaagtgcacttttgtgaccaaataatttagctgggttttgaaaagaccggaaccaaggaggganttcatttactcataaaagaaaggctcaaaataagttaaaacatgggatgtatttttaaaatgaccactctagtagtgaattttaaaagtcttttaagggttagagtaatctttttcattagtcttgggctatttcctctagttctgacaagtacagggcaaggaaaatgggctactctcaaggtaaggggttattcctggaaacacgggtctgggatttaggaaaataaatgaacattaggggaaatttcaattaattaagactctccaaaacccagttgtgtgctcattgcctgtaatcccagcactttggggagggcagaggtgggtggatcacctgaggttaggagttcgtgactagcctggccaacatggtgaaaccccgtctctactaaaaaacaataataataatacaaaaattagctgggcatggtggcatgagcctgttaatcccagctactgggggaggctgaggcaggagaatctcttgaacccagggaggcggaggttgcagtgaagccgagatcatgctattgcactccagcctggggcaacaagagtgaaactccatctcagaaaaaaaaaaaaaaaaagacttctctgggagggtaagggcacatattgacctggggggaagctggttgtgggtgttaaggtcattcacttttcttgcaaagcattttaggcccagttcaggcggttttcaggttggccgtttacagcccaggttcttgcctctggcctgggtgcttagggggttcagaatgagtcagtggaagtcaaaacaagagggatctaacctactacataataatctaaaaatacaaacttttaactattttaagactaacagattaccttatataaatcaccaatctctcagtatttacaagctaacaattctttcacctatttttataactgctatacattctgggaacaccacaattgacatatggaaaaagaaaagccctaccctctctttatgagttaaaggctaatttggtccccgacttcatgcttggaaggctagcgctcatctctacactagcctagatggctgtgttttgcccctatgattccttgcagcatatctatgggcagagggaagacaattgttgagtttttctcagcagcaatggtggtcagtgtctgcaggtatcggagctgaagggctgcaggagattcagtgatgaccatggaggcttctttcagagccctggatgcattcatttctccttcggctgcaataaccttggcgcgggcctcgcgggacgcttctgcttctgcagccatagctctctggagctgcacaggtagtttcacatccttaatttccacacgctccacctttattccccaggcatcagtggcatcatccagagtagactgcatgttgtgtgcaatttcttctctgtcagagaggatctgagaaagattcttggtgcccagaacattcctcagagtagtttgtgccaaaagacgggttgctgagtcagcgttggtgatatttgccacagccagggttgcattctgaacgcggtaatagaccacaccatccacgctaattgtcactgaatcctttgtcaggatctcctgaggaggaatatcaaatgaaatagttctcatgtccactttgatgaagctgtcagtgcatggcagaataaaaaacaaaccaggtcctttggctcctccttgtaaaatgcgacccaatctaaagatgatggctctttcatactcttttataatctttatgcacatccatattgagattgggaaagttataacggtgaataagaatgagaacgccaccaaaatccatccgcaaggtccaaggcccttactggggctgtggtcaggggacncgggactccaacccttgaaggagtcggggagccgctgggcttcggagtcccgtgtgtgccgcttctcggccatgctgcccgagacgcagtcgcactcccccgtcctcgttgccaaacccggagccgccgggaat

SEQ ID NO: 146081 - DNA, 381 bp, Homo sapiens; identical to SEQ ID NO: 145177
  misc_feature (1)...(381): n = a,t,c or g

SEQ ID NO: 146082 - DNA, 537 bp, Homo sapiens
aggaaatattacgagtcttcttatagtatttaacctattagtgtaaaaaatatttaaaataatatatttacatatgtttaaaacttggcctccaaagtgctgggattacaggtgtgagccactgcgcccgggcccctaattaggggtttttaataaaaacccaaaagaacttggcaaacaccccctaggtacccctttaagaaagccctcccaattggctacagccctgtgaaggattggcctgtgacccaatcagaggctgaagtggaagtcttagctcatggtcaagcagaggctgaaagtggaaacttcttgtccttttttatcacaaggcatgaaggatgtggcctgcatgctgcctgatcttgcctagaaccggctgcacctgctggtctcttggtttatgcaaactggctgcacctgctattcctttgcttatgcccctacccctggctatcctaattccctgttctcctgcctcactattactgtattctctacttctaaataaaaataaaacaaaatacaaaccgttaa

SEQ ID NO: 146083 - DNA, 725 bp, Homo sapiens
  misc_feature (1)...(725): n = a,t,c or g
accagctcatgatctcaggatgtatggaaaaataatctttgtattactattggcaggaaactttgagcattcagctgaggggccaagttggctgcctctgagaagaagcccttccacctccactccactgcacttgggtgccattcccctcatttgaatgtctccaagagatgagcaaagaaattgtgagcatatcagcattaagtaccactgaggtggcaatgcacacttcaaccctccttccttcaagtcaccaaagagttacatcctcatccacagacaaatgggaggaaacggggacaacttgtcccatcgttttcactgtacccagctccctgtagtgataatactcattattttgtgtgtgatggctggtgttatttttgaggtgatgcttgttgttgttggaatgatcatcttaatttcttactgtattcgatgactgataaagggcatgagggatgtgggcctgcatgctgcctgatctttgcctagaaaccggctgcacctggctgttctcttgtttatggcaaactgggctngcacctggctatttccttttgcttatggcccctacccctgggctatcctaaattccctgttctcctggccttcactgattactggtattctctacttctaaataaaaataaaacaaaatacaaaaaaaattttaaaaaaaaaaaaaaaaaaaaagatctttaattaagcggtcgcaagcttat

SEQ ID NO: 146084 - DNA, 357 bp, Homo sapiens
atgtatggaaaaataatctttgtattactattgtcagcaattgtgagcatatcagcatcaagtaccactggtgtggcaatgcacacttcaacctcttcttcagtcacaaagagttacatctcatcacagacaaatggagaaagggtacaacttgcccatcatttctctgaaccagagataacactcattatttttggggtgatggctggtgttattggaacgatcctcttaatttcttacggtattcgccgactgataaagaaaagcccatctgatgtaaaacctctcccctcacctgacacagacgtgcctttaagttctgttgaaatagaaaatccagagacaagtgatcaatga

SEQ ID NO: 146085 - DNA, 441 bp, Homo sapiens
atgtatggaaaaataatctttgtattactattgtcagcaattgtgagcatatcagcatcaagtaccactggtgtggcaatgcacacttcaacctcttcttcagtcacaaagagttacatctcatcacagacaaatgatacgcacaaacgggacacatatgcagccactcctagagctcatgaagtttcagaaatttctgttagaactgtttaccctccagaagaggaaaccgagataacactcattatttttggggtgatggctggtgttattggaacgatcctcttaatttcttacggtattcgccgactgataaagaaaagcccatctgatgtaaaacctctcccctcacctgacacagacgtgcctttaagttctgttgaaatagaaaatccagagacaagtgatcaatgagaatctgttcaccaaaccaaatgtgga

SEQ ID NO: 146086 - DNA, 1088 bp, Homo sapiens
  misc_feature (1)...(1088): n = a,t,c or g
caggatgtatggaaaaataatctttgtattactattgtcagggataagaaatgtgcaccctaaataaattgtgagcatatcagcatcaagtaccactggtgtggcaatgcacacttcaacctcttcttcagtcacaaagagttacatctcatcacagacaaatgggataacactcattaattggtgggcgatgggctcgtgttatttttgaggtgatgcttgttgttgttggaatgatcatcttaatttcttactgtattcgatgactgataaaggttttcatgcctctgggattgagattagaggaagaaagcaaagaaaggacatttttttacttcactgttccatggtgtaattgtgtgcctgacggctgtagctactaacttgggcttacgttgactgggctactaagggactctagggagtcagaaactaaatgctgagtctctcaaaggcgtaggagaggattttcagagggccttaccatgacatgaggattaaactccagttctggcccgattctcatcacgaaatccttatcccatgcctcattgtgtttggtgtccccttgcctaggggacagtcctcctgggtaagatcagcaagataactcttcagtcacattccatttgatactttgaatactctggggtccttacccaccaaatgggatgggaattcagctgcttcaatcactgccttttctcagaactcggttgtccaaccacaattccctttcccttagggntagggctatattgggcaaaaatgccgtcccgaacagactgcgggcaaggtaaaccaaatattagtttctctcacccttcttgaaggcatttacagtctttgtaagcttttctcctagattttccctttcctgttcctgcttagattctaagaatgaagtgcatccttctccttttcttcattaggtgaagtgggatttacccattaccatatattcaccaccaggtcactgacgagagactccaagtgaatcgctttccctctgcattcctctccttgtacagactagagggtcacattggtgtaaaagccctaacataagcctggcaaaagagatctgg

SEQ ID NO: 146087 - DNA, 2699 bp, Homo sapiens
gcctatcagctgatgatggccgcaggaaggtgggcctggaggataacagctagcaggctaaggtcagacactgacacttgcagttgtctttggtagtttttttgcactaacttcaggaaccagctcatgatctcaggatgtatggaaaaataatctttgtattactattgtcagaaattgtgagcatatcagcattaagtaccactgaggtggcaatgcacacttcaacttcttcttcagtcacaaagagttacatctcatcacagacaaatgatacgcacaaacgggacacatatgcagccactcctagagctcatgaagtttcaggaaaattctgttacaactgtttaccctccagaagaggaaaccggagaaagggtacaacttgcccatccatttctctggaaccagctcctgtagtgataatactcattattttgtgtgtgatggctggtattattggaacgatcctcttaatttcttacagtattcgccgactgattaaagaaaagcccatctgatgtaaaaacctcttcccctcacctgacacagacgtgcctttaaggttctgttgaaattggaaatccagggacaagtgatcaatgagaatctgttcaccaaaccaaatgtggaaagaacacaaagaagacataagacttcagtcaagtgaaaaattaacacgtggactggacactccaataaattatatacctgcctaagttgtacaatttcagaatgcaattttcattataatgagttccagtgactcaatgatggggaaaaaaatctctgctcattaatatttcaaggataaagaacaaatgtttcccttgaatgcttgcttttgtgtgttagcataatttttagaattgtttgagaattctgatcccaaaactttagttgaattcatctacgtttgtttaatattaacttaacctattctattgtattataatgatgattctgtcaaatgaaaggcttgaaatacctagatgaagtttagattttcttcctattgtaaacttttgagtctggtttcattgttttaaataaattaaggggacactaaagtcctatcattcatttccttcattgctgaacaggcaagatataatattacatgaatgattactatattttgttcacactaataaagcttatgctcagaaatgcccatacacacacacaaacacacacatttatcatttaatgcataaatcaacacaaaaggttttcccattaatatgaaatattacatatatataagtgccatatttaaaataatttgtctaacagtagaactatgtcggagcactcactgaagcttcgatttcccactgaaagagttatttgttgtaagtagagttatcccggagaaggaaaaagaacttacgacctttctttataacagaaagctcaactctaaattcaacaagatgtgcaaaccggacatgcaggtgaatattttaataggttactataaggttctcaattaaattctttaatctgtccagtcccagtttctcttattaataaaactttggaaattgctttaaaccatttaaaggaaatttctagatatagaaactaaaggactgtgactatacagctgtcactcatttgtagtaaaacttaaaaagcaaaaacaaaaaacaaaaaagaccttcctgtgatactttatttccgaactaataaaaatctatatgactttttattattgtgtgataaccaagtaaatgttttctattttgcatattttcaggcatggtaacagaaatttaccttttaataaattaaaaaatctaaattttaacctacttgtatgttcggagagtgtttttgtactatattgactacttaaaatagagaatgagactaagaagggaacatttctgttgatacatgttttttaaaagtaatttttaagagcattattaggttaattttaatccaattaatgacccaaatgccaaggtaattttaaatttacatttttaataaaagcaacatgttgaaacaagagagggtgagattaacctttttgctaaagtaatttacaagtcaaagacaggaagagatcagagtgaatgtgccttcttaaccagagctacagaatttagtgaataattaaagtacaaactgctttgacctccttgaacttttccaagcaatttctctgtacttctatatatgaatgtcttagccaattttctgctactataacagaatacgacagactgggtaatttaaaaagaaaagaaatttattttcttcctagttctggaggctgggaaggcgaagggcatggcactgacatctgccttgtaactgatgagaaccttcttactgcatgataacaaagcagcaaggcaagcaaaagcgtaagatgaagagagaggaaatgaagccaaacacatcctttcatcagaagcccattccctctataaggcgttactacatttatgagaatggagtcctcatgacctaatcgtgaccttaaaggcccctcccaacactgttacaatggcaattaaatttcaacaaaggttccagaggtgacattcgaatcagcaatgaaattttcatagttaaatttggtattcgtgggggaagaaatgaccatttcccttgtatttttataattaaatcagcaaaatattgtaataaagaaatctttcctgtgaagataccatgacccc

SEQ ID NO: 146088 - DNA, 661 bp, Homo sapiens
aggaaccagctcatgatctcaggatgtatggaaaaataatctttgtattactattgtcaggaaactttgagcattcagctgaggggccaagttggctgcctctgagaagaagcccttccacctccactccactgcacttgggtgccattcccctcatttgaatgtctccaagagatgagcaaagaaattgtgagcatatcagcattaagtaccactgaggtggcaatgcacacttcaacctcttcttcagtcacaaagagttacatctcaatcacagacaaatgggaggaaacgggacaacttgtccgatcgttttcactgtaccagctcctgtagtgataatacttcattatttttgtgtgtgatgggctggtattattgggaacgatcctcttaaatttcttaacagtattcgccgactgataaagggcatgaggatgtggcctgcatgctgcctgtattgcctgcatgctgcctgatcttgcctaggaaccagctgcacctggctgttctcttgtttatggcaaactgggctgcacctggctatttccttttgcttatggcccctacccctgggctatcctaattccctgttctcctggcctcactattactggaattccccacttctaaataaaaataaaacaaaatacaaattatt

SEQ ID NO: 146089 - DNA, 1269 bp, Homo sapiens
ccgagacgcactgggggccggatgtagaatcctgcttatctgtgaaatgcagttaacacatcagctggacctatttcccgaatgcagggtaacccttctgttatttaaagatgtaaaaaatgcgggagacttgagaagaaaggccatggaaggcaccatcgatggatcactgataaatcctacagtgtttcactcttgttgcccaggctggagtgcaatggcgcgatcttggctcacggcaacctctgcctcccgggttcaagcagttgtcctgcctcagcctcctgagttgctgggattacagattgttgatccattttcagatacttgtggcacgcaaacaaagcagttcaccctctacaaacttgggaaaaatggaagacaatgaactctatctactgaaatttattttcaaccctttcccccaaataaccaatatttcacgaggctttgaaaaaattttggtatctcagcaaattgacactttcaattcctaattgtttacattgaagagggagaaaaacaaaataaatcaagaatacctaatatctcaagtagaaggtcatcaggtttctctgaaaaatcctcctcgaaataatgaataagaccgaaagtcgacaaagatatataaactctcttcacaagaagaaagtattgggacattattggatgctatcatttgtagaatgtcaacaaaagatgttttatgaaatgtccagaaatattaacaaaaattctcagcattaaagaaaacaattgattttcctttccgtgcctatacaactaaaagtcaccaatagaaaagtttaaatcacagaatggtattaaaaaaaaaaaaaaaaggccaggcgcggtggctcacacctgtaatcccagcaccccgggaggccaaggcaggcagatcacctgaggtcgggagttcgagaccagcctgaccaacatggagaaaccctgtctctactaaaaatacaaaattagccaggcatggtggcgtatgcctgaaatcccagctactcaggaggctgaggcaggcgaatctcttgaacccgggaggcggaggttgcagtgagccaagatcacaccattgcactccagcctgggcaacaagagtgaaattccatctcaaaaagaaaccaaaaaaacaaaaaaaaaacatgccgtttgagtactgtgtttttggtgttgtccaaggaaaattaaaaacctgtagcatgaataatgtttgtttttcatttcgaatcttgtgaatgtattaaatatatcgctctt

SEQ ID NO: 146090 - DNA, 1078 bp, Homo sapiens
  misc_feature (1)...(1078): n = a,t,c or g
gcacgagggctgctgggctccgcgccggggtccgagtcccacgaagccccggcccgagccgccggatgcccgcgcgcagcggggcccagttttgccgacggatggggcaaaagaagcagcgaccagctagagcagggcagccacacagctcgtccgacgcagcccagggcacctgcagagcagccacacagctcgtcgaaatccagcccaggcaccttgccccagggagcgctgcttgnggaccgcccaccactccgggcccataccgcaggcatctatttctcaagcccaaagggccaccttacccgactgggggtcggagttcttcgaccagccggcagtccccctggcccgggcatttctgggacaggtcctagtccggcgacttcctaattggcacagaactccgagggccgcatcgttgggagaccgaggcattaccttggggccagaggactgaagccgccccacttcaagggggttggcccggcaagaccccccgcaaaccgaggcatgtttcattgaaagcccggggaccctgggtcgtgtacatcatttacggcatgtacttctgcatgaacatctccagccagggggacggggctttgcgtctttcttgcgagcactggaagcccctggaaagtcttggagaccaatgcgtcagcttcgcagccaccctccgggaaaggcacccgccaagcccgtgtcctcaaaggaccgccgaagctctgcagtgggcccctccaagctggtgccaggcccctgcccatcaacaagagcttttgaccagaagggaccttggcacaggatgaagctgtatggctggagcgtggtcccctggagcccagtgagccggctgtagttggcagccaccccgggtgggcgtcggccatgcaggggagtgggcccggaaaacccctccgcttctatgttccggggcagcccctgggccagtgtggtcgacagagtggctgagcaggacacacaggcctgcgcaaagggcctgcccagacaagattttttacattgtttaaaaacccgaataaatgttttatttctggaaaaaaaaaaaaaaaaa

SEQ ID NO: 146091 - DNA, 654 bp, Homo sapiens; identical to SEQ ID NO: 144884
  misc_feature (1)...(654): n = a,t,c or g

SEQ ID NO: 146092 - DNA, 666 bp, Homo sapiens
  misc_feature (1)...(666): n = a,t,c or g
atcgagaccatattccatgtggnggaattccacagactcagagagaacccacccatggttgctgtctcctgcccgacaaagaccaacgtcaaggccggcttggggtaaggtcggcgcgcacgctgtgcgcagtatgtgtgcggaggccctggagaggatgttcctgtccttccccaccaaccaagacctacttcccgcacttcgaccttgagccacggtttctgcccaggttaaagggccacgggaaagaaggtggacgacagcgctgaccaaacgccgtggccaacgtgggacgacatgcccaaacggcgttgtccgccctgaagcgacctgcacgcgcacaagctttcgggttggacccggttcaacttcaaagctcctaaagccacttgccttgctgggtgacccttggccgcccacctccccggccgagtttcaaccccttgcggttgcaaggcttccctggggacaaatttcctggggtttttgttgaagcaaccttgcttgaactttcaaataacctttaaagttggaagcttcggttgggcaatgctttctttggccctttgggcttccccccagcccctcctcccctttcctgcacccgtacccccgtggtctttgaaataaagtcttgagtgggcggcaaaaaaaaaaaaaaaaaaa

SEQ ID NO: 146093 - DNA, 517 bp, Homo sapiens; identical to SEQ ID NO: 115477

SEQ ID NO: 146094 - DNA, 2933 bp, Homo sapiens
ccctcggacggccccggaggatgctgctgagccccggcactgcctggctgcgagcacatgatggcgatacgggagctcaaagtgtgccttctcggggacactggggttgggaaatcaagcatcgtgtgtcgatttgtccaggatcactttgaccacaacatcagccctactattgggggcatcttttatgaccaaaactgtgccttgtggaaatgaacttcacaagttcctcatctgggacactgctggtcaggaacggtttcattcattggctcccatgtactatcgaggctcagctgcagctgttatcgtgtatgattttaccgaggccggattccattttcatcccttgaagaaatgggtccaagcggctgaaagaacttggtccggaaaaacattgtaatggccatcgctggaaacaagtgcgacctctcagatatttagggaggttccccctgaagggatgctaaaggaatacggctgaatccataggtgccatcgtggttgagacaagtgcaaaaaatgcctattaatatcgaaagagctctttcaaggaaatcagccgcccagatccccacccttggaccccccatgaaaatggaaacaatgggaccatcaaaagttgagaagccaacccatgcaagccagtccgccggtgctgttgacccaagggcccgtggtccacggtacttgaagaagccagagccccacatccttttcacttctgaagaaccccacccccggggggttgcccccccccctcatttggagaagagtgagcacactggctttgcatcctggaagacctgcagggggcggggcaggaaatgtacctgaaaaggattttagaaaaccctgggaaaacccaccacaccaccaccacaaaatggcctttagtgtatgaaatgcacatggaggggatgtagttgcatttttgctaaaaaaaaaaaaaaaaacctttaaaaattgttggatgtgtacaaaagtcttactgccttattatgtgtatgggattctaaagtggcattccacttggatttcctgtgctacctatccaaattccagtaactacttcagtgtcattgcctttgttacctaaccaaccttcactgaaaggcaaatttagttcaggaggttagtttttagctagctttggaagtaagcctttatttattactttttggaggaaatcacccccagtgtcaatggaccgtcactcagacttgagacttgagttattacagaagccaggaaaagtgtattagaaactgttgtctacaccacttttaattggtgaacaatttttctaagttatggtcatatatacccaaacaaaccaaatcaaactaaattactgcatataattttgggattgggtggcctagtttgaaagagtgatttaagtaatcactatgtaagtggtgagagatgcaggacatacacattattcaagagaccacctgacatgcatctcctccgcaggaatacattcgtcctctcttagagaagtttaacgcacatagtattattttactaaggagaatatctcttgggtgtcatatctaggggggaagagaattaactaggaatttaaatttaatgttttgaatctaaatcattgggggcaaacttctaataataacaattaataataggttacaggaaagccagccagagggaagtgttcagcactttaaaattctaggaccccaaaaaactacaaaatcaggaaaaaggtatttttatgtttctaggcttgagggaggaggggctttagggctaaccagaggtcatgaccctaagaatgccaaggaactgagaatggggctccgatggaaaaccttccttttcagattccctgtctggctcaattaaagatgtttgaatccaaagggaagtcaagggaaggaaaaagcatgggaaagggaaggaggaactgatttcctacctggaaaattccaattctattaccattctaactttccataaaaaagttgggatcaagaagcagctgatttccctgccagggcttatatttaggggggtgattctttaaagggaccatttagggattggtgctccagaaatgggttaaaccatgcctgtgtgccctaacccccgggcccagctgggtacccttcctttgccccatgagccattacaagggacagcctaacctttaattgacaatcctatattgccaaaagtccaggaaagaggttgtgagcctgattgggattaaaagaccctggcaccttcaggtaacctcagcaccgcttcccacttcactcaacttaagagggttccattggaccagtgtttagggatgtggaaggctggggaaacacttattttgcttcaagagttccacttgggctctcccaaataggtacctcaaaaactgttaggcaagcggcatttgtatgtcttggacaggggctttgcaggggatttttagggtttttttccacattgtccacattaatgggttggcatgattgtggcttgcaggtccaagaaatgatcataccccttgcccaaaggtaaaaaaaaaaaaaaaaaaaaatgagttgaaaattgaagtgacctctttccagctgacttgcaggcttattttgtaacctttcctcatccagttttccctgaaaacctgggtttatctctagatagctgttcaggttttttagctgaggggtaagtatcctagctgagagttttgcatctttgggctgggtttgcagtggttgtgttttgcataaaatgtctagtctttgccacagatagtgagctacccactaatgagcccatggttttatttcagaagcacatgagggtgtgaaaccactctgttacctttctgtattgtcttagctattcaagccagtcagaggataatatatatattctcatcagcactcagagtagtcagtgaa

SEQ ID NO: 146095 - DNA, 1243 bp, Homo sapiens
  misc_feature (1)...(1243): n = a,t,c or g
agacccctgcctggcctcacccagctttctgggaaagaaaatgctgcacaagctctgagccctgctgggggtgcgaagttcctctgatgggaggtgtggggtggccatcccatccctgtgtaagacctggggaaaccactcttcaaggttcaggaggagggagggcggcccccgacccttaaccagagcgaggttgttgctttgtgtccacagggaccaggagcgaaccatgatgccaggtccctaatcatggactccccaagagctggcacccaccagggccccctcgatgcaaagacagaggtcggtgctgaccgctgcacgtcgactgcctaccaggagcagaggccccaggtggagcaagatggcaaacaggctcctctctccccagggctgccggcaatgggggggcctggccccggcccctgtaaggaccccgcgggttgtgggggagcaggtgcaagggggctccgagcccctggtgactgtcaccgtgcagtgcgccttcacagtggccctgagggcacgaagaggagccgacctgtccagcctgcgggcactgctgggccaagccttccctcaccagggcccagcttgggcaactcagttacctagccccaggtgaggacgggcactgggtccccatccccgaggaggagtcgctgcagagggcctggcaggacgcagctgcctgccccagggggctgcagctgcagtgcaggggagccgggggtcggccggtcctctaccaggtggtggccccccccccccccaaaaggggggnncccaaaccaaaangggnccttaannnctttccccccccgggnnnccccccccccccaaaggggccagaggacctgggcttccgacagggggacacggtggacgtcctgtgtgaaggtagggtgggcatggcccttcccaggcagcaccgtggtgcccggggtgtggggggcttagagctcggcctgtgctgtgagcagacgtggcacccaaaaggccacgcctgggtaacgccctgcagagcccgatgtcccccttgcagtggaccaggcatggctggagggccactgtgacggccgcatcggcatcttccccaagtgcttcgtggtccccgccggccctcggatgtcaggagcccccggccgcctgccccgatcccagcagggagatcagccctaatgatgctgtgtccatgatgcttttaataaaaacaaccccccctgcaaaaaaaaaaaaaaaa

SEQ ID NO: 146096 - DNA, 415 bp, Homo sapiens
tttcgtcgcggcaggtttcgggcttcaggacaattcgtgatggcgggggctggttccgccgctgtatcgggggcagggaccccggtggcggggcccacaggccgcgaccttttcgccgaagggctgctggagttcctgcgacccgctgtgcagcagctcgactctcacgtacacgccgtcaggtgcccgggagggaagttgggggcggggcctgtctctctggctttgtaggggcggggccaagaaagtgttctggctgggagtgggcataaatttaggaaactgattcgaggcggggaggacaggcgggaaggccgcaggtggagggttcagcggaggccggcttctctcagtacttggtaaatacgtaggggagttcgtttcctgagctccggtaactgcctgaccttgtagg

SEQ ID NO: 146097 - DNA, 1050 bp, Homo sapiens
cggccgcgtcgaccaggtttcgggcttcaggacaattcgtgatggcgggggctggttccgccgctgtatcgggggcagggaccccggtcggcggggcccacaggccgcgacctttttcgccgaagggctgctggagttcctgcgacccgctgtgcagcagctcgactctcacggacacgccgtcagagagagccaggtagagctccgggaccaaattgacaacctagccacagaactttgccgcataaattagggtcagaaggtggccctggaatcttgacccctatgttaaaaaagctacttaaatgcccggcgacgcgtttgtcttggttaacaacattctacaagaatgctcaggaaccgactgagacgggttaaccaccgtggtggccagggaacagcccgcaagaagagcaatgctggattcgggaatttacccccctggctccccaggcaaataacagatgagcctatggactcagtagcacaagtactgttccccagctgccttgtttcaacagacatgcaaagatcctaggagaccagtcccccatagacctttcagacatttaaaaaggggagccgttacagtttgtttggaagcactttcgttctttacccatttatgttaggggccccccaggaaacccttacacacagcccagaatggaggttccccaaaggaccttacattaattatgggtctttggtttctttttcacaaaatggagctgaggcctcctacttttttttttttaagctgcatacttgagggcttacccttccttcaggactaagttaacccagaggggcttcttttgtatggttacatgccctggttacatgggccctggacagcatgtcctctacctgtgacttctcattttcctgtttacactggggatttggagggggcaggccaaagtcaaagtgaatgacctctgtccacccacttttttattgcactggctttgaaatacagtaagcagtgttgaatagaaatcattttattcaataaatacttaaaatgaaaaaaaaaacctcgtgccg

SEQ ID NO: 146098 - DNA, 1759 bp, Homo sapiens
  misc_feature (1)...(1759): n = a,t,c or g
gggnaacataagacatttattactttatactaattttttcattcataaaaaggacaaagcacagtcctatactactccattgaaaaaatgataaaaaataactaaaaaatcaattcaatatttatcagtatcaaataaaactactatcacctttcctgaaatacaaagaaacaacagatgtatctatacctatataaggtttaattcaggaatcttgcgtcttaaagcaggatgattatttagttagcttgacaacagtttaaaactgatggtcccagttaaatctgtacaactgtatgagaaaatgaaaagcttcgagttatcagtgtacgagagattttaaactactttatctctgtcagaaattcaaaactaaacaacctccaaagtctgttttcctcttacctttcagaaccatttcatgcaaaatctaaccagttttgctcgttattatcatatattagaaaataaaaggcaagcatgcatttggcaaaagatttagttgttgattatataaaaatgcccaacatgggtcacattgcaaaagtaaaaccccaaagtgtaacaatgaaaacacaaacatttgtacagaaggtatacagtgtattcgtttccctaaagtatgaagacattttgtttctttttcaaatacttaaatattttatgaaatctggcaatgatcttaagactgttgacatacttcccactgggaaatcatcccatttcacttatttttaaaagtttcattttataccagagttaaatgtaaactaaggaaatattaatggatattttccataatgaagactcctaaacatttacacatcgatatatagtacaaaaattatacaaattaaagaaagggggtaaagtcggtaaaggtagtaatagatctattttgcttcctgtaaatattttttacgaacctatacggtgtcctttctaaaaagataaactctaattaggctaggcaagtttgtgctaataaaaatgggattatacctcttgaaggcatccaacactggcactatttccacaaggccaggctaattctttattactcgatttctttttacatccacacttcaaacacatttcccatggcacaccatgggagaatgaagaaatgtgcatccttcccttttccacaacttataaaaaccccaaagcacccaacacttggggagacaccatcggaaagacatattatttgcctcctccctggccttccagttttgcatactcttcaaagtacccattagcagtatattgatttggtatttttagccagttttcagtattgcattgaagtgggaaatgagcttaaaactaattattattattattattattattattgttatttttacaaaatggaatacggtagctttttcaacctacaggtgactttttgatctgacatctgcaataaagaaacgtaatacttaggaatgaagcagaaaacccaacatactagtaattgtgatattcacttaactgtcacttattcctaaccatgtaaagactgtcacatctcaataaaaaaggaagcactctacttttcaaaatttgtcactccacatatgaacaaatatagcaatattatgatactctagataagagctgtgatttttgagatttgaaattgataagaaaagcataaaataacttcagagtagaatataaaagtaaaaaaaaatctatatggtatgttaactttactattaaaaaactgattctgaaaatcaaatatttagaa

SEQ ID NO: 146099 - DNA, 1841 bp, Homo sapiens
  misc_feature (1)...(1841): n = a,t,c or g
cccccagtggcaaatccgcgccacctcgcaaacccccaactcaggcacttgggccccttttgggccccctctcgctcctccctttaggcacctccctgggcccgcccacggtctccccccagtttgggactgcgtcataagtatcccagacctcggcttgcagtagtgttagactgaagataaagtaagtgctgtttgggctaacaggatctcctcttgcagtctgcagcccaggacgctgattccagcagcgcctctaccgcgcagcccgaagattcactatggtgaaaatcgccttcaatacccctaccgccgtgcaaaaggaggaggcgcggcaagacgtgggaggccctcctgagccgcacggtcagaactcagatactgaccgggcaaggagctccgagtttgccacccagggaaaaaggagggctcctctggggagatgttatggtttactctttttagggcctttcaattcatcttgggaaggactttatttgtttggtggagcctgcatttacaagttactttcatgcccaagaggcaccattttaccgtgggagagatgtgcttttttgattctgaggatcctgcaaatttccccttcggtggaggagagccctaactttcctgcctggtgacttgagggaggctgacattcgtgaggatgacaacattgcaatcattgatgtgcctgtccccagtttctctggatagtgaccctgcagccaattatttcatgacttttgaaaagggaatgactgcttaacctggaacttgttgctgggggaactgctaatctgatgccccttcaatacttctatttgttatggcctccaaaaaaaatctgggtagagctctttgggcaaactgggcgagtgggcagatatcctgcctccaaacttatgtggttcggagaagacctagttgctgttggnaggaaaattcgtgatgttagtaaccttggcatctttatttaccaactttgcaattaacagaaagtccttccgccttcgtcgcagagacctcttgctgggtttcaacaaacgtgccattgataaatgctggaagattagacacttccccaacggaatttattgttgagaccaagatctgtcaagagtaagaggcagcgagatagagtgtccttggtaatagagaagtcagagatttacaatatgactttaacattaaggtttatgggatactcaagatatttactcatgcatttactctattgcttatgctttaaaaaaaggaaaaaaaaaaaactactaaccactgcaagctcttgtcaaattttagtttaattggcattgcttgttttttgaaactgaaattacatgagtttcattttttctttgaatttatagggtttagatttctgaaagcagcatgaatatatcacctaacatcctgacaataaattccatccgttgtttttttttgtttgtttgttttttcttttcctttaagtaagctctttattcatcttatggtgcagcaattttaaaatttgaaatattttaaattgtttttgaactttttgtgtaaaatatatcagatctcaacattgttgggtttcttttgttttttcattttgtacaactttcttgaatttaggaaattacatctttgcagttctgttaggtgctctgtaattaacctgacttatatgtgaacaattttcatgagacagtcatttttaactaatgcagtgattctttctcactactatctgtattgtggaatgcacaaaattgtgtaggtgctgaatgctgtaaggagtttaggttgtatgaattctacaaccctataataaattttactctatacaacca

SEQ ID NO: 146100 - DNA, 454 bp, Homo sapiens
agcgaggcgcgggagatcgaacacgtcatgtaccatgactggcggctggtgcccaagcacgaggaggaggccttcaccgcgttcacgccggcgccggaagacagcctggcctccgtgccgtacccgcctctcctccgggccatgattatcgcagaacgacagaaaaatggagacacaagcaccgaggagcccatgctgaatgtgcagaggatacgcatggaaccctgggattaccctgcaaaacaggaagacaaaggaagggccaagggcacccccgtctagaatgccagaaccagcgggtggccttaggccctgctgcccccacacccaactccgagggcccacgctggggaaagcgggaagcgctcgctccctttcccccattagtgctctctctgcctggatcccggcagaagctatgaaagggaataaagagaaaagaagtacccagaaa

SEQ ID NO: 146101 - DNA, 247 bp, Homo sapiens
gcagaacgacagaaaaatggagacacaagcaccgaggagcccatgctgaatgtgcagaggatacgcatggaaccctgggattaccctgcaaaacaggaagacaaaggaagggccaagggcaccccacacccaactccgagggcccacgctggggaaagcgggaagcgctcgctccctttcccccattagtgctctctctgcctggatcccggcagaagctatgaaagggaataaagagaaaagaagt

SEQ ID NO: 146102 - DNA, 771 bp, Homo sapiens
ctagacgggggtgcccttggcccttcctttgtcttcctgttttgcagggtaatcccagggttccatgcgtatcctctgcacattcagcatgggctcctcggtgcttgtgtctccatttttctgtcgttctgcgataatcatggcccggaggagaggcgggtacggcacggaggccaggctgtcttccggcgccggcgtgaacccggaccaggcgtcctctacgtgctcgggcatcatctgtcagtcatggtactaccaagtgttcgatctcccgcgcctcgctctcagtcttccctgatgaagaaaaagaggcgtctgcacacacttgctgtgccgtcggcggtcggcatcgaactgccgggcacccgctctcccgagccttacctttgaaggtcaggatgccccaggccttcccgtggtccaagttctgcgccgtgtagtcgggccgcacccgcgtgaggcgccagtagcacggctcgtcgtgctgccacagccaggacttgcgcgtgaccaggcggcccaggccgaagagcgggaggcggccgagcagctgcaagaggcggctctcgcggcgcacgtcggcccaggcccggaccggcagccggcgtccagagaacggccgcgtcaaggtctcgtagtccaccgcgtagagctgggagtcgcgcggcctgttcagttgctcccgcagggcgcgcacgcggcgggccagctccgcgatcagccgcggacgcaccttcttccgcgccatggcgggtccgcgtcctcagcggt

SEQ ID NO: 146103 - DNA, 1212 bp, Homo sapiens
tttttttttttttttaataatttttctctttattccctttcatagcttctgccgggatccaggcagagagagcactaatgggggaaagggagcgagcgcttcccgctttccccagcgtgggccctcggagttgggtgtgggggcagcagggccagaggaaaggcacaggtggcgatttgccccagccctcccccctaagatgcagaccctcagaacacgtcgcgggaaggtgagctccactgctctcaaagaggcagactcggggtgtaacgcaaagacgggtttcctttcatcaaataaaggtccccactgcctcacagcccctaaggccaacccgcttgggttctgggcaattctaagacgggggtgcccttgggcccttcctttgtcttcctgttttgcagggtaatccccagggttcccatgcgtatcctctgcacattcagcatgggctcctcggtgcttgtgtctccatttttctgtcgttctgcgataatcatggcccggaggagaggcgggtacggcacggaggccaggctgtcttccggcgccggcgtgaacgcggtgaaggcctcctcctcgtgcttgggcaccagccgccagtcatggtacatgacgtgttcgatctcccgcgcctcgctctcagtcttccctgatgaagaaaaagaggcgtctttgaaggtcaggatgccccaggccttcccgtggtccaagttgtgcaaagccataagcaagcggggtcagctcgcaaagctctcggcccccgaggtcaggaggtgggagcctcagccacgcaaacctgcagggaggaggggaggcggggagaccagccggctgcagggtcggggtgcggacggggtgcacgcacttgctccgtgtagtcgggccgcacccgcgtgaggcgccagtagcacggctcgtcgtgctgccacagccaggactagcgcgtgaccaagcggcccaggccgaagagcgggaggcgtccgagcagctgcaacagtcgggctctcgcggcgcacgtcggcccaggcccggaccggcagccggcgtccagagaacggccgcgtcaaggtctcgtagtccaccgcgtagatctgggagtcgcgcggcctgttcagttgctcccgcagggcgcgcacgcggcgggccagctccgcgatcagccgcggacgcaccttcttccgcgccatggcgggtccgcgtcctcagcgg

SEQ ID NO: 146104 - DNA, 2871 bp, Homo sapiens
  misc_feature (1)...(2871): n = a,t,c or g
aggtgagggccgcaagacaggcccggatggggccgagacccccgctgtccctgtacataaagagaccgatgggtgggagggggtcggctgctccccgagatccccctggcagagtcattcttccagccccaaccctgagttcctaaagggacacctccctcctgtccagcccttcaacagatcttctgttagatgacaaccgtgccgtgggccccgcgttgggccttgtctgaagggagaggccctggcatgcggatgggagatttagaggctgtggagaagggaacttggggctttccttccttcgtggcctcactcccctggggcctctctctatggagggggcaatggtttggtgaccagcaggctggattccaactagctaatgcattcagcaggtctgaggctggggccaggtgtcagccctaggcctccatccaacaccgtggaaatgttgctgccctcttcttggcgctgaccccaagattggggtttcctttctgccgctccctccactgttgtttatctaactgggcccccactccagggtccagagggactgtgctcactgcacagacatcactcagcttccgctccccagtcctgcagagctgttgccaggggtgcagtggggaggggagtgaaatgtggaggactgtgtacctcagtcctctctctaaactcctcagcctcccaacaggggcctcctcacctggggttctgagtgtgtaccccttttagagagtgagatgccacccgggcagcaattcgttaaaagctgggccagcacggagttgattaagggggagagagcattgacattaggacntggggtgggcaacggggggacntttgggaaggcaggttgggaattaaacagaagggagaggggcagttggagggtagaggaaaaggacctccagaggtggggtgtctgtgggggcggcctttgcctccctaaacctgtgcggaggagtggagtgtgcttgtcgctcaaacacatctctgggggactgaggacgttgtcacaagcccccaactggagaaataattccaatggcagggtcagaggcaagcattctctaaatcttgcccaacccttccatccttccctatcctatgagctgaagccctgctgtgtgtcgcagggtcttcaaaggggcatcctgccaccaccccaagtttctggccccacgttctgttcccctaaagctctgacaccgccttctgtccgtgtgctccccccaccacctccaccctgatgtgcttcagtgtgcatgtctgtgaacagccctcctgccctgccaactcccctggctaaagtctccccagcagatttagcacccagggattgagctcacatttcaggctagagaggataacccttgggccacccacatctctcacccctgatgctttttacttcgcctgagccatcagaactcctccttaccctccttcagcccctctcatcttccttcagcccagccaggcctgcaccaccaactgtgtggcctccacctatgcaacatcgcctctggctccccttcccttcttcctaacggggagtgcgaggggcccaaattgtggggataccatggcccatggcttctaaagggtttagctttactttcaggtacagatggctgagtgaggagggagaagaggctacagagagggaggcttgggcaggggaaacagctgcccaccaggttttcctggacagcagtgcccacctgcctactagcactgaacctgcctggaccctgagtctgtgctcccttgggggccctgncgtttggaaacacccttctttccctctgaaatggaaaatctgtgaaggtacaggtggtgaaactgcagcctcaggctcccattttcttagccagctggcaccctggatgtcatgctttgtgtggggacagcctggccacctcagggctcccaaggaaggaggaacgtggctcctcctccctcaggcctgttcctgagacagagcctggtctcacaagaggggaagggggacctctattattatttttgcctgtattgaccatttctgcctaggtcgtctcagacagcctcatctcccacacatgcacagacttagagagaaaccaattctttggtctattttcttggtagctttactgattgccagggaaaatgaaaaccagaaaattaattaatctctaaaattaaactttacactgaatgttcttgtttctctaattagaacttctgctagcagctgtggctatacacacacacacacacacacacacacaccctcacacctacacgtttggcaattccggaactgttcaggagggtgtcaggcacagacagactctaggttgcctagacaggcacacacatgcagtcactcccaagctcccctttggtgctctcgtcagcgcctgcttagtggaaggagtccctgggaggagcaggcactcctgggactgggggttgtagcccatgacctgcccttttgggggacacagttctggaggctctgggcccaattgaatcaagcccaaggaggatgggccaatggcgctcaagcttgaatcaagtcaagctaggtctcttgtggccctgggggctgatgtgattcctgtaggtgtggccccagggtggacagctacagagtgatgggggactcatgtagggcacctggaaggctccatgtgtcctggggacaagggcttgtggggtgggctggggcctggctggggagaagacaggtctctgtcaattgggtgcatcacactgtggcctttttgtcgtggatttaagcgcaaagattgtacaaatcaaactggtggataataaagtcgtggatgactcactgacaaaaaaaaaaaa

SEQ ID NO: 146105 - DNA, 355 bp, Homo sapiens
  misc_feature (1)...(355): n = a,t,c or g
tgcacgagtcacgaggtagaattaggggccttgaaaatatgacaaactctgagggaaacaaagacaatgtggaaagaataacttaattttaattccatctccagagagatttgaggtgtatttaagatgaaaaacaggatactacaaagaaacggannnnnnnnnnnnnnnnnnnnnnnnnnnnnnnnnnnnnnnnnnnnnnnnnnnnnnnnnnnnnnnnnnnnnnnnnnnnnnnnnnnnnnnnnnnnnnnnnnnnnnnnnnnnnnnnnnnnnnnnnnnnnnnnnnnnnnnnnnnnnnnnnnnnnnnnnnnnnnnnnnnnnnnnnnnnnnnnnnnnnnnnnnnnnnnnnnnnnng

SEQ ID NO: 146106 - DNA, 2625 bp, Homo sapiens
caaacttcattcaatgctgtattggacattccttcattcaacaaatattaaaacccactagatggtaagcttactcagcagacatggtgagatcagcagtaggctttgttttttgtggaacacctatacaaacaaaagaatgtgaagtgtgttttaataactggaagatacttaatctggctggaaatagagacttgtggggagatatcatgagcctggacacatcaagtggacctagatacttgaggaccttgaaaaccattttaaaggctttagctgggttgcatcttaatcaatgggaagtcactggaagatttttatttgggtttattaaaaattttttcaaagtaatacatgcacaaggtaaaaaattaaatagtacagaaggacttaaaatgaaaaacacagtttcccatcccaccctttttaaatctaaatcccattccctagaggtaatgcttttaacaatatttattttaggatcgtctggtaactttctaactttaaataatatgtttgagtcaataatttcttgacttactgcactttacaacatctttaataattccccattacaaaaggataagggatttaacttacactatccgccactttccttttgtccatctctctcccaaatgtctggataggttaccatcactttttttaatacatctattgggggttggattttataggctttggaaccaatacactaatcctctagtttcttgttccattaactgaagatcttttcatccccactttggaatatataagtatctcctacctttgattcccacttctcttcctcctaattctcaatctctttctgctttctttccctttgtcagcattaattactttcaacttcagttctgaataaaaaatgaaacctttcacactttgttaataggctgatctgaacattgaatactacataaatgatatccacattattttggctatttaaatacttcttactgggagcctagtataagctaggatattttcttgcgtacacacccaatatcatcatgcctgtgccatagaaaaggaaatgtacctatcaagcctcttcttattcttcatgaataactcaaaatcatgcctcattttattttgctctataattggacctgaattttttgacatattgttgatttgtctttcttttttcttgactaaataatcttctcaagcatcccagctcttcaatgatactatctatgggcactgaatgcacattcttcccagaaagcccgagacagtatgctctcatctgaaattagtctgctggatagctgtcactctagggtgagatacccttttggctgtcactctagaatgagacatcctaagtaaggtccactgttttatggatcctatttcttcttctttcctggttttcaaccctcattttggctgggagaatttccctcaaagatacttccctcaagtaagggtgcaaaggagactttcctgaaaatttgcctgacaagaaaaatgtcctccactttggatgttccttcctgaacagtctgcccttactatgaaattcctagggtaccaaaaaatttcccttaaagctctgaaagatgttgatcccattgacttctgggcattcagtgttggctgatgacaaatctgttagcagtctatttctcatccatttttgtgttgagctaatcgtgatgacctcatttgttttctccctggccactttaatatcttccttctatccttaatattccaaaattttacaatattgtgtctagatgtacgattgtattgggccctctcaatctggagacttagcttgctctgttcttcaattctttttctttttatttcttcacctaacactgtctctggcctctcttccaggaactcctaacattacatattgaatgactatgtctttgttctttctttatattttactatctatctcttttcgctctttatcttggagagattccctcaactttatttttccagactgtataccaaatacttttagcagtcttattttattttcaaagagatcttccttattctcagtcttctctttcttttccttgactttttaaagagacagggtcctcaactctgtcccccccagggctggacgtgcagtgggcaccattcatgggctcactgaaggccttgaaactcctgggggctcaaggtgatccttcccacttcaggcctcccaaggtaggctagggaccacagggcacatggccaccatgcttgggctaaatttttaaaaaattattttgtagagacggggatgttgccatcttgcctagggctgggtctcgaactcctgagttttccgtttctttgtagtatcctgtttttcatcttaaatacacctcaaatctctctggagatggaattaaaattaagttattctttccacattgtctttgtttccctcagagtttgtcatattttcaaggcccctaattctacctcgtgacttttcttattcctcttccctccccatcgcccatgtctgggaatttctaactcaccattcccatttaagaatcaacataactgttaacttgtataacagttggcatgggtttcctctgctgttgtacagttaggtct

SEQ ID NO: 146107 - DNA, 2712 bp, Homo sapiens
ggtcatcgcgcgggcgggcgggcggggtctggcggtttgaacgagacgaagacggaaccggagccggttgcgggcagtggacgcggttctgccgagagccgaagatggcagtgaacgtatactcaacgtcagtgaccagtgataacctaagtcgacatgacatgctggccctggatcaatgagtctctgcagttgaatcatgacaaagatcgaacagttgtgctcaggggctgcgtattgtcagtttatggacatgcctgttccctggctccattgccttgaagaaagtgaaattccaagctaagctagaacaccgagtacatccagaacttcaaaatactacaagcaggttttaagaagaatgggtgttgacaaaataattcctgtggacaaattattaaaagggaaagtttcaggacaattttgaattcggttcagtgggtcaagaagtttttcgatgcaaactatgatggaaaagactatgaccctgtggcttgccagaccaaggtcaagaaactgcagtggctccttcccttgttgctccagctctgaataaaccgaaggaaacctctcacttctagcagtgcagctccccagagggcccatcttcaacacagagaaccgctggcggctcctaaggctgggccctgggtgtggtgcgaaagaaccctggtgtgggcaaacggagatgacgaggcagctgagttgatgcaacaaggtcaacgtatttgaaacttactgtttgaagacttgggaggaaaggagagggatttctacttcggaaagctacggaacattgaattgatttgccaggagaacgagggggaaaacgaccctgtattgcagaggattgtagacattctgtatgccacagatgaaggctttgtgatacttgatgaagggggcccacaggaggagcaagaagagtattaacagcctggaccagcagagcaacatcggaattcttcagcttcaaagtgtgtgcttaactgtgtatacactcgttgtgttatccttagaggactcactggttataaattcataagcaaaaagtacctcttcttaaagtgcactttgcagacgtttcactgccttttccaattaagtttgagttagggagcttttaccttgtaggcagagcagtgatttaacatctagttggttcacctgggaaaacagagaggctgaccgtgggggctcaccatgcggattgcgggtcacactgaatgctggagagatgttatgtaatatgctgaggtggcgacctcagtggagaaatgtaaagactgaattgaattttaagctaatgtgaaatcagagaatgttgtaataagtaaatgccttaagagtatttaaaatatgcttccacatttcaaaatataaaatgtaacatgacaagagattttgcgtttgacattgcgtctagggaaggaagggccacaccttggaacctttggaacctgctgtgcacaggtcttacaacgctgcttgaaccctcataggcctaggctttggtctaaaaggaacatttaaaaagttgccctgtaaagttatttgggtgtcattgaccaattgcatcccagctaaaaagcaagaggcatccgttgcctgggataatagagggatgtgtttcagccctgagatgttacaagttgaagagcttggttttcattggagcatttctctatttttccagttatccccgaaatttctatgtattatattttttggggaaatagaagtgtgcccagtttttttaatcttaacaactacttttggggggacttgcccacatctctggggatttgaatgggggattgtatcccatttttactgtcttttaggttttacatttaccacgtgtctcttctctgctccccttgcccactggggactccctctttgggctccttgaaagtttgctgcttagaagttggaagtgcagcaggcaggtgatcatgctgcaagttcctttctggacctctggcaaaagggagtggtcagtgaaggccaaccgttaacttgggatctggccaagccgggggtgttttccggtatctgctgttcacaagctctccactgtaattccgaatactttgccagtgcactaaatctctttggagataaaattcattagtggggttaacctaaatgttaaattttccttttgcgggaaaatacagtaccgtgtctggaattaaattattaaatatttaaaaatactttcattcccttaactctcccctcatttggctttggccccacagccctattccagttccctttgttttggccaggattctggcaaaaatgtggcctccaccccaactactgagaattgttccagcccctgaatgtatttgtaattgaatttgtttcctggtggtagccttgtccctgaaatgtgtgtagaaagccaagtattttatgataaaaatgttgtgtaagtgcatgcctctgtgtgggaattcagagggaaaaacccagattcagtgattaacaatgcccaaaaattgcaagtaactagccgattgttctaaatgacattggtgccatttctctcttgtggccttttagacttttgttgccctaaaattccattttattgggaacccattttccacctggtctttcttgacagggttttttttctactttaaacagtttctaaataaaattctgtatttcaagagcaaaaaaaaaaaaaaaaag

SEQ ID NO: 146108 - DNA, 376 bp, Homo sapiens
attttggagaagtcttgaattcggctgcaaatgctagtgccaccaccacggagcctcttccagaaaagacacaggagagcctgtgagattcctacctttgttttgctacccactgccagatgctgcaagcgaggtccaagcacatcttgtcaacatgcattgccatgaatttctaccagatgtgcttttatttagctttacatatcttatgaaaaccaaattttaaaagccacaggtgttgattgttataaaataacatgctgccattcttgattgctagagtttttgttagtactttggatgcaattaaaactatgtgctatcacatgtgaaaagcttaataaattccatctatcagtaaaaaaaaaaaaaaaaa

SEQ ID NO: 146109 - DNA, 3971 bp, Homo sapiens
  misc_feature (1)...(3971): n = a,t,c or g
aggaggagctctgcgcggcgcggcgggcgatccgagccgggacgggctgcaggcgggggtgctgcagaggacacgaggcggcgggctggagacatggaccgcggcgagcaaggtctgctgagaacagacccagtccctgaggaaggagaagatgttgctgccacgatcagtgccacagagaccctctcggaagaggagcaggaagagctaagaagagaacttggcaaaggtagaaggaagaaatccagactctgtctgcaagtgttaagcagcaaaagaggaagcatctaggcagagattcaagcgggaaacttgggaatcaattctctacaggaactaaaacagaacattgcccaagggtggtaagacgtgacagtcacattctgcttacaagaagaccctctgaaaccttatcctcaggctggacagaaggccctcagctgctttttcgtctgttggctcagtcatcaccaaaaagctggaagatgtaaaaaacttccccaactttttaaatcattttgaagaaaaggtcgaaaacttaaagtctaaagttagggggnacccaagcctgctggtggtgatttttggagaagtctttgaattcggctgcaaatgctagtgccaccaccacggagcctcttccagaaaagacacaggagagcctgtgagattcctacctttgttctgctacccacttgccagatgctgcaagcgaggtccaagcacatcttgttcaacatgcattgcccatgaatttctaccagatgttgcttttatttagctttacaatattcctttgaccaaattagtttgtgggttaaacaaaatgaaaatatcttcacctctattcttgggaaacaccctttagtgtacatttatgttcctttatttaggaaacaccattataaaaacacttatagtaaatggggacattcactataatgatctaagaagctacagattgtcatagttgttttcctgctttacaaaattgctccagatctggaatgccagttttgacctttgtcttctataatatttcctttttttcccctctttgaatctctgtatatttgattcttaactaaaattgttctcttaaatattctgaatcctggtaattaaaagtttgggtgtattttctttacctccaaggaaagaactactagctacaaaaaatattttggaataagcattgttttggtatatatggtacatattttggttgaagacaccagactgaagtaaacagctgtgcatccaattttattatagtttggtaggtaaccaatatgtaatccaaaccttctaggggactggagagtggaccctcctatatccattatttaancaccgtttgtgacagtaacccatttcagtgtattgtttattataccaacttaaatcatcttatctttcaccaggttaatgactttaatgtctacagaacagcattcatgaatacggcacactgtatgttcagtaggttgaactatgaacactgtcatcaatgttcagttcaaaagcctgaaagtttagatctagaagctggtaaaaatgacaatatcaatcacattaggggaaccattgttgtcttcacttaatccatttagcactatttaaaataagcacaccaagttatatgactaatataacttgaaaattttttatactgaggggttggtgataactcttgaggatgtaatgcattaataaaaatcaactccatcattttctacttggttttcaatgtgttgggaaactggtaaaatgatactgtagaacctgtctcctactttgaaaactgaatgtcagggctgagtgaatcaaagtgtctagacatatttgcatagaggcccaaggtattctaattctaataactgcttactcaacactaccaccttttcccttatactcgtatatgattatggcctacaatgttgtatttgttatttattaaattgtgaatgttttaataattggtttatgccaaatgttaactgccaagcttggagtgacctaaagcatttttttaaaagcatggctagatttacttcagtataaattatcttatgaaaaccaaattttaaaagccacaggtgttgattgttataaaataacatgctgccattcttgattgctagagtttttcgttagtactttgggatgcaattaaaactatgtgctatcacatgtgaaaagcttaataaattccatctatcagtagtataggtctcaatatttattatgagaccagtggtctggaaacagcttgttgtaccgaatcaactggagtctatgcttaaaaaaaaaaaatttttttttaaccatccttaaattattgcttaatggtatcatattaacatattctaaataagggctttaaggcacaggctgttgaagcattttctcagaggagtggatctgtagaagtctgtctttctatagaaatattgtgcttactcaagtgttaaattattttttctatgaactagtctacttcttaaaattcaaacatattcttttgatcacattgtttcttgagcatcctgccctgctactaacttttcaacaaggcaaaatggagtaaagtggcaatttctttagatgagtgaaataccctcaagtctcttttctgcccaaaaagggaaaagtgatagaaatgggggtggcaagtggggtgagtggatgaaggtgggtattgggggtggctgtgaaagaaaataatggagaatcacttttctagacatctacctatacttaatctaagaaacaaagtaatctactgtaaagtactctgccccttgaaagaagtattaaaaagagtgaggatggatttagaaaaaaacatgaatttagaaatattcaaaatggtttttgtggcagattcaatattatgaattcacagatatttaaagaatgagaaacatagtaattaagtagaaatgccagaaacagttcctggttcctcttgtgtttgacactaagaaaatagccaagagtgtgaaatctcagatacttatgaaatctcacaggatgtaaggactccaagtgtagaagacaaatatccccttcttacaaaaagaaatgtcaatttatggagtttgtgcggaaatagggcaagaattcttactgcttatgagagccaagtagtcagtggaagagagtagagctcaaaactggattatcaccttagcaacttagaatagtttgaaatagaagaaaggtatttaaatttggggtctggatctgttaagatatgcacagtctattttttgtatagtattggaaaataaaaatgctataatttgggtatgggttcttttgtatacattacctgcccattgaggaaaggggcaagtccattatgcaacttctctccaaacccttcatattctggatatgatacttaaagagccatgagcagctacattctgcctattcagaaggcatttattaaatgactgcttgctgaagatgtgtccaaagagatcctacattaaggtcatttgtcagaatgatgtttgtgtttgtttagagttggctgacctccaactcctggggtcaaggaatcctactgccttagcttcccaaatagctaggactataggcatgcacccggccatgtgttttatttatagctcttaaagcccagatgaagaaatcacatttttgcccatagtgaagaaacatttggccattgattagtccttattttcagtgactgtcctgttttcattagattagagagaccctgtgtgggccacagttaatataaaccattatcacttttaagtaaacctgcacatcttagattccataatttccttattgttctgactcaaaatgaactaagagcttttcactttttgtttgtaagttctcagagagtcgggtctgcaagtgcttttgcctgccaggattttgtactcaaataaatgctatttggcaactaaaaaaaaaaaaaaaaa

SEQ ID NO: 146110 - DNA, 395 bp, Homo sapiens
gcgaaggcgaagatggcggacgtgctagatcttcacgaggctgggggcgaagatttcgccatggatgaggatggggacgagagcattcacaaactgaaagaaaaagcgaagaaacggaagggtcgcggctttggctccggtgagtttggggaaaatggggtagagtggcctagtagggcaggagctacgggttttggagtccccacccacctcataggaacaatgggagaaaggaggagttttcggtgatctcgtgtatgtcccttatagaagaggggtcccgagcgcggatgcgtgaggattatgacagcgtggagcatgatggcgatgaacccggaccacaacgctctgttgaaggctggattctctttgtaactggagtccatgaggaagcc

SEQ ID NO: 146111 - DNA, 948 bp, Homo sapiens
tttcactatacctttactttctttaatttgccagagggatatttcttgcacttaatgtatcatgtagaaatcaatttttattttcttattctggtattctctacatcttgcatggcctagcatatagtatatgttgagtatctagtgtctgagcggcacagacgagatctcgatcgaaggcgagatggcggacgtgctagatcttcacgaggctgggggcgaagatttcgccatggatgaggatggggacgagagcattcacaaactgaaagaaaaagcgaagaaacggaagggtcgcggctttggctccgaagaggggtcccgagcgcggatgcgtgaggattatgacagcgtggagcaggatggcgatgagcccggaccacaacgctctgttgaaggctggattctctttgtaactggaagtccatgaaggaagccacccgaagaagacatacacgacaaattcgccagaattatgggggaaattaaaaacatttcatcttcaaccttcgacaggcgaacagggatatcttgaaggggtatactcttagtttgaatattgaaacatacaaggaaagcccaggctgctatggagggactcaatggcccaggatttgatgggacagctggggggggtttgactggtgttttgttcggggtccacccaaaaggcaagaggagaggtggccgaagacgcagcagaaagtccagaccggagaccgtcgctgacaggtcctctgttgtccaggtgttctcttcaagattccatttggaccatggcagccttgggacaaataggactggggtgggaactttgctgtgtttatatttaatctcttaccgtatatgcgtagtatttgagttgcgaataaatgttccatttttgttttctacatttaatgttactttcctgtcctaaaattgaaagttctaaagcataaaaaaaaa

SEQ ID NO: 146112 - DNA, 1828 bp, Homo sapiens
catctggagcattctatttctccggaagtatgagaaacctgcagttgcaccaaagcgagagaacactagggggcagtgtggttagagcagaactcctcaagaggcttggaaaaggtgccgctgaaaatcacccaacagctggtgcgataaaatggggtctcattttaaccttcacttgtatcccaccattccttctattttcttctattcacccgggcttctttgcagcacagtcattttaagaatattctgagagcatcttagctctcactccatttcagctcagtgaattcttcttcccacgtgagtcgccggtgcaagaggggggttcctgcttgggtacccacatcagtaggttttgtctcctcatctgcttgtcttctgaagataaatcgttggcagaataagaaaagacagtgccgtccaccagcaaggacgcaagctaggctgctccagggaactgggtaaccatggccagcaactcccttccctccaggagcatagggaccgggtcctgggagggagaagcaaaagtcccgagcaacccattgcctcggaagtgcagcagtggaggcaggagggagcagccgggcctgtgatgcctgccataacctcatgttgggtccgtggcctgttaggaaccgggctgcatcgcaggtgagtggaagcttcatctctatttgcagccgctccccatcatttgcatcactgcctgagctccacttccagcagtcttgacgcagactatccacctggtcaccggaactgcttttcactctggtaaagtggatattgtcaccatcggttacccgttcattgacctcaacgacatggtctgcatgtcccagtatgattccacccatggctaattccacagcactgtcaagactgagaatgggaagcttgtcatcaatggaaactgcatcactcatcatccaaggcgagatcccacgaaaattaaatgagatgatgctggcactgagtacgttgtggagtccactggtgtcttcatgaccatggagaaggctgaggctcactctgccccctctgctgatgggcatgaacgatgagaagtatgaaaacagcctcaagatcatcggcaacgcctcctgtgccaccaagggctttgccccccaccagccaaggtcatccatgacaactttggaatcgtggaaggactcatggccatggtccacgccattactgccacccagaaaactgtggatggcccctccaagaaactggcatgacagccacggggctctccagaacatcatccctgcatctactggtgctaccaaggtggcatggccttccttgtctccaccaccaacgtgttggtcatggacctgacccttgagggcatcctgggctacactgagcaccaggttgtcgcctctgactttaacagcatcacccactcttccaccttcaaagctggggtgggcattgccctcaacaaccactttgtcaagcttatttcctggtatgagaatgaatttggctacagcaacagggtagtagaccttatggtccacatggcctccaaaggcagcagctagctggacaccagccccagcgagagcacaagaggaagagagagggggagtccctgccgcactcagtcctccacaacactgagactctcccctcctcacagtttccatgcagacccccaagccattttccacagtgagtgcgttcaagggttccaatttctccacatctttgccaacactcactttctgtttcactagtattaagcactgattaaacacccacatcgtaacacaacaaatctgctgacttctgttcgtgtgctttccat

SEQ ID NO: 146113 - DNA, 2922 bp, Homo sapiens
  misc_feature (1)...(2922): n = a,t,c or g
atgaagcttctggaggaacaatctggcagcaccatttgctgttcagccatattcgctgtactgcagcctccgctgctgatacccaggcaaaaagggtgtggagtggacctccagcaaactccaacagacctgcagctgagggtcctgactgttagaaggaaaattatcaaacaaaaaggacatccacaccaaaaccccatctgtacttcaccatcatcaaagaccaaaggagatgagtatgatgtatgtgccatttgtttggatgagtatgaagatggagacaaactcagaatccttccctgttcccatgcttatcactgcaagtgtgtagacccttggctaactaaaaccaaaaaaacctgtccagtgtgcaagcaaaaagttgttccttctcaaggcgattcagactctgacacagacagtagtcaagaagaaaatgaagtgacagaacatacccctttactgagacctttagcttctgtcagtgcccagtcatttggggctttatcggaatcccgctcacatcagaacatgacagaatcttcagactatgaggaagacgacaatgaagatactgacagtagtgatgcagaaaatgaaattaatgaacatgatgtcgtggncaatgcgaagggctcgaagatggccggttggcagagctacgtggataacctgatgtgcgatggctgctgccaggaggccgccattgtcggctactgcgacgccaaatacgtctgggcagccacggccgggggcgtctttcagagcattacgccaatagaaatagatatgattgtaggaaaagaccgggaaggtttctttaccaacggtttgactcttggcgcgaagaaatgctcagtgatcagagatagtctatacgtcgatggtgactgcacaatggacatccggacaaagagtcaaggtggggagccaacatacaatgtggctgtcggcagagctggtagaggtgatgcgtgtcaccaccccatggaagatttgatggacatggacatgagccctctgaggccccagaactatcttttcagttgtcaacaaaaggccgacaaagattatcactttaaggtgaataatgatgaaaatgagcaccagttatctttaagaacggtgatttcagggactggagcaaaggataaattgcatattgttgaaacagaggcaatgaattatgaaggcagtccgattaaagtaacactggcaactttgaaaatgtctgtacagccaatggtttctgggggccttgaaataacaccactggtgatcttacggttgaagtgtgcttcagagccagtgcatattagtggacagcacttagtagctgtggaggaagatgcagagtcagaagatgaagaagaggagtatgtgaaactcaagtttatctggaaagcgatctgcccccggaggtggcagaaaagttccacagaaaaaaaggaagaagagaaatctaaaagtctggaaaacatatttgcgctaataatcgatgaaaatttccttggctttgttagagatctagacatccaaatccaagaagctcaaagaacacctgggaaattcatcacaaaaagaacaccctctaggcacataatcatcaggttacttaaagtcaagacaaaggaaagaatcttaagagttgtgaggcaaaagcatcagctcaacgctgttcggcaggaagtaaaatctctttgtggcttggaagcctctcatgttcctgcagaggaagctctttctggggctggtgagccctatgacatcatcgacagcagtgatgagatggatgcccaggaggaaaacatccatgagagaactgtctccagaaaaaagaaaagcaagagacacaaagaagaactggacggggctggaggagaagagtatcccatggatatttggctattgctggcctcctatatccgtcctgaggacattgtgaatttttccctgatttgtaagaatgcctggactgtcacttgcactgctgccttttggaccaggttgtaccgaaggcactacacgctggatgcttccctgcctttgcgtctgcgaccagagtcaatggagaagctgcactgtctccgggcttgtgtgatccgatctctgtaccatatgtatgagccatttgctgctcgaatctccaagaatccagccattccagaaagcacccccagcacattaaagaattccaaatgcttacttttctggtgcagaaagattgttgggaacagacaggaaccaatgtgggaattcaacttcaagttcaaaaaacagtcccctaggttaaagagcaagtgtacaggaggattgcagcctcccgttcagtacgaagatgttcataccaatccagaccaggactgctgcctactgcaggtcaccaccctcaatttcatctttattccgattgtcatgggaatgatatttactctgtttactatcaatgtgagcacggacatgcggcatcatcgagtgagactggtgttccaagattcccctgtccatggtggtcggaaactgcgcagtgaacagggtgtgcaagtcatcctggacccagtgcacagcgttcggctctttgactgtcaggcaccgtgtatgaaatctaacaatgcgctcatcgtcatcctcggcaccgtcaccctggatgctgtaggcataggcttggttatgccggtactgccgggcctcttgcgggatatcgtccattccgacagcatcgccagtcactatggcgtgctgctagcgctatatgcgttgatgcaatttctatgcgcacccgttctcggagcactgtccgaccgctttggccgccgcccagtcctgctcgcttcgctacttggagccactatcgactacgcgatcatggcgaccacacccgtcctgtggatctacccactagtcaattcaccatcttgttga

SEQ ID NO: 146114 - DNA, 1885 bp, Homo sapiens
acatcattacgccaagcttggcacgagggcagtgcgaagggctcgaagatgtgccggttggcagagctacgtggataacctgatgtgcgatggctgctgccaggaggccgccattgccggctactgcgacgccaaatacgtctgggcagccacggccgggggcgtcgtttcagagcattacgccaatagaaatagatatgattgtaggaaaagacccggaaaggtttcttttaccagcggtttgactcttggcgcagaagaaatgctcagtgatcagagatagtctatacgtccgatggtgactgcacaatggacatccgggacaaacagtcaaaggtggggagccaacaatacaatgtggcttgtcggcagatctgggtagagcattggttattagttatggggaaaggaaaggtgttccaccggaggcacactttaacaaggaaagcatatgaaactccgctttatacctgaagggaggtctgatgtgttaagcagcctctccccatctacctaggcaactgtctttcatcaacaaccctaattatgggtcacaatgctacccaaactgtaggatggtagctaatttttctttacctattttctaaatgtcatggattcctgtttgcccaatgggatcatttgtatgtttaaccactgtatggtaaaccaacccttatctgggcaacataattgcagcacaataatgatttgcatgataccttgaaatctcgggggagggggcatgccaagttggggcatcactttgtcttaggcaattaatggggatattgattacttaaaattaagtttaatatttaagcaaggtgccggttgtacaatctctgatccagtgtcttttcagcactttgagcatttacttggctcatttagtcttccttttgtagcgcatggttgggaggaaaaagtgcatgcatcattccttcactcttctctttttcccgccccccccttcccttcgcacataggcatttgggttgcttccatctttttttatggcagtgcctgtttttttttttaaccaatttaaaattccctttttgtttgatgaggctattgaggagctggcagtagttttgcttttagtattgttgttgcacttgagcagagacaaacctttattcatagtgtctccaggacatatgaagaggtgcaatggcaaaacaagagcaaaaagcacttctccccattgaccttacagtaaccatactgattgaatccccaggggacattccatcattgcaatagctcagatttttcttccttttttctttgcacaccagcctctacctccttaggtaaaaatggtaaaaaggctgcccattatgggacattagggtatccccaaacataacccatctgggagtgtgtcccagtttgtttctttcatagggaccaaatttttatttgccagcttgagttttttataggaagttgcatttatgggggaccgggctgtcttgtgagaaattttttctcatatgtattctgtgccatactattcgttaaaatgaactgttgctattgtgagatggattttaaactgaccctattaagggtttcctttccgaaatggcacctactttaggggacattctagtatttgccttctattgtttgggccttgtggataatgtacgagatttaaaaacaaatcttgttgctgatttgtccatttctttccctgcactttgttacatctgggatacagttctaactccatctgatttaataatggcatttaaaaaaatgccaataactattaaacaccttgtttacagacagatgaaataaatttattccaaccaaaaaaaaacggacgcgtgagtcgacccaggaatccagacgtactgcaggcgtcgat

SEQ ID NO: 146115 - DNA, 1549 bp, Homo sapiens
gtggcaggagaggcggggccaattttgctgagctttctcgcgggcttgcagctgcggcaagtgctggcggcggctgctcgcgcaagtcagctggcgtgggaactaccctttgtagctgagaacggcttggctatcgatacaaagactctattgacattggtaccttcagcgggcagcagcttcctacggcataaagctgtagctacctgaagaggctacaagcatccttccctaggactgctgtaagctctgagcactctagcaggagacatgcctcggggacgaaaagagtcggcgccgccgtaatgcgagagccgcataagagaaccgcaacaatcgcaaaatccaggcctcagaggcctccgagacctctatggccggctctgtggtaacgagcaccccccgaaggacgaccctgagcggccccgaggaagtacccgagcactccagaggagggcctcttaccacccctgaaggaagcctcgagcactgcccaagcacaaaagcctttcagttgccgccggagcaatttttcaggggcaccaagaaaagttttcctggatgtctatattacgcgctcatcttcatcatggggcaacagcgccaaggaagctctggtctggaaagtgctggggaagttaggaatgcagcctggacgtcagcacagcatctttggagatccgaagaagatcgtcccagaagagttttgtgcgcagagggtacctgatttataaaccggtggccccgtagcagtccggtggagtatgagttcttctggggggccccgagcacacgtgggaattcgagcaaactgaaagttcatgcatttttgtgggcaagggtttcgtaaaccgattgctcttaaagactggccttgtaattatgactgggattcggacgatgatgccagaggttgaggctatcctccaattcaggtgcttaggggttattccgcccccttaaagtagatctggaggcagacccttgggggtgtaaaaagaggagtcacaggtacccccaaaggagtagatgcccagggtccctaagtttgaaaatgatgtccgattggggggcgggggaccactgtatttgatatttgtgatccagtgatcattgttccaactgccgaaatagagtgtttgctttttgataaatggaaaattgtattccgttttaaaattcccgtttgttgaggaataacaatatgttctcaaaatataattgaacaaattttttttctttgttcccctgtcattgaccatttagtataacagttttgcctaacgttcctaaaatgaagtccgttcccatccataatcctatgatccttgtacagcacttatagaaataagctgttcttttgaagttgaaatacccagtaaaatgttgaagaaggatggaggatttcttcatattctgacgtttctgaaaccctttgtgtctgctgttgtgtgaagattgacatttaccatgattttccttacttactgcagaacatagagaaaaataaaagcctaacgaatagtaaaaaaaaaaaaaaaaaaacact

SEQ ID NO: 146116 - DNA, 290 bp, Homo sapiens
  misc_feature (1)...(290): n = a,t,c or g
ggtcttcggtttgcacagctagaggccgcgcanagcaaaaggatgagcggaaccttgganaaggtggaattctactaagtatcagtcggccctacaagacaaagcccacccacggcattggaaagtacaagcacttaattaaagcagaagagccccaagaagaagaagggaaaagtggnagtgagagccattaatttggggacagattatgantatggggttttaaatattcatcctgacctgcatatgatatgaccctggcagagagttatgcccagtatgttcacaac

SEQ ID NO: 146117 - DNA, 1283 bp, Homo sapiens
tttggtaacaaatcattagtgtataatattgcaagcgaaaaaccagaattgtgtgctaagtactggggtaacacagagatggtaattaattctttctggagaaacagcagtgaatgtgacaacctgagtgagggtggaaagcaggagaatttctagactctgaatttcagaagcttccggaactaaaatgatgtggaagttgagtgagtctcggtgggatattgctgctgcacctggtcaaggccgttccgtcagtgttttcagacgccctgggaacgcggctgcagggtccggtcttcggtttgcacagctagaggccgcgcagcagcaaaaggatgagcggaacctctgaaaaggtgctgtgcctgaggaacaataccatttttaagcaagccttttctctcttaaggtttagaacttcaggagagaagcccatctattctgtaggtggaattctactaagtatcagtcggccctacaagtcaaaagcccacccacggcattggaaagtacaagcacttaattaaagcagaagagcccaagaagaagaagggaaaagtggaatgtgagagccattaatttggggacagattatgaatatggggttttaaatattccatctgactgcatatgatatgaccctggcagagagttatgccccgttattttccacaaccttctgcaactctctctcccattaaaagtccgaggaaagttatgcaatgcccacccaaaaccataagaagtggttgccagtttgcagggaccaagggcagccaaaatgcctcctgggactcaagtgcttacccacccatgaggcgagtggcttcagatcagcggtttgagtgctacgtttgccagaaaattttcttggaaaataatcccaaagccagtccttccctgaagggagtcaggactgttcagttgaagggagcacactgaaagaaagacttcaaggggacggtttcaaaggttcgacccagaacttgggaggactttttgggccaagtttgaagtagctactgtagacccctttcattgccagcagtggtcatatttgagtgccaaagagaagagcttactgggtagttagagttcatcaggagacccaacccctaagatttcataaagtaccccatttcccattagccagtaatgtcctcaactcctctgtggcttggctgtacttgccatttcttaccacttacctatgaggtaatgcttgttatcttccattcttattaaaaatctgctgtaaaaaaaaaaaaaaaaagtcgtatcga

SEQ ID NO: 146118 - DNA, 1127 bp, Homo sapiens
  misc_feature (1)...(1127): n = a,t,c or g
ggaatatcctccgagtgcatataagaatgagcaaccctccagcaatcatatgccacatgggacagaacaaatcacaagaggtggcgatgcatgcatgcctggaatagaagagaatgacctaccacaagttgatgatcttccccctgctataatgaagcctcctatttcaggttctcagcatgaaagacatcaagcaatctcccatcttgcaactggacaacctctctccccaaatatgcctccagatacacacataaaccacaatggaaaccccggtacttgaaaacagaatccttccagtcctcttcagcgtttaattgcaggctcaaacttggacagtgaacccagaattcaaacagatatactaaagcaggctaccaaggacagagtcagtgatttccataaattgaagcaaagccgattctttgatgaaaatgaatcccctgttgatccgcagcatggctctaaactggcggattataatggggatgatggtaacgtaggtgagtatgaggcagacaagcaggctgagctggcttacaatgaggaagaagatggtgatggtggagaggaagacgtcccccctgatgaagaacgagagcttcaaatggaaaaaaacaggctatggaaagcaacatttcaatgatgtcctttaagtcctaaaggaatgcttcagaaaacctaaagtgctgtaaaatgaaatcattctactttgtcctttctgacttttgttgtaaagacgaattgtatcagttgtaaagatacattgagatagaattaaggaaaaactttaatgaaggaatgtacccatgtacatatgtgaactttttcatattgtattatcgaggtatacgacttttttggttatgatacagttaagccaaaaacagctaatctttgcatctaaagcaaactaatgtatatttcacattttattgagccgacttatttccacaaatagataaacaggacaaaatagttgtacaggttatatgtggcatagcataaccacagtaagaacagaacagatattcagcagaaaactttttatactctaattcnnnnnnnnnnnnnnnnaaaaacaaattttaatttttgttccacagggggagtttgaattgacccaa

SEQ ID NO: 146119 - DNA, 620 bp, Homo sapiens
ggcacgaggaggggcagaccagcttctcttgacctccccaaatctggacgcctgagggggcatcccgccccgcctcctcacagcttagggagtggcttgcattcaaaagttgtcggtttctgttccttgaaattggggtgggggtaggggatggttatcatatgttgtttgggggcccccaggacccaaccctttcaggcccagcttccgaacctgagtgccaaattgctggctttcccttctaccctctccactcctccagtgtccgagttggagagtgctctgcagatggagccagctgccttccaggctttatattctgctgagaagccaaagctggaagatgagcatctcgttttcttctgtcagatgggcaagcggggcctccaggccacggagctggcccggagtcttggatacactggggctcgcaactacgctggagcctatagagaatggttggagaaagagagttaggcaggaggcagcttactgattgccaccccctggccccttaatggccaccttaactaagggtgtgaacgggctgacttggtgaattgggcaactccttatagtgttgtgcacacaaaagcatcaaataaagaacatttaatcaa

SEQ ID NO: 146120 - DNA, 766 bp, Homo sapiens
tttcgtgggcgggccagggccgcactccggagactcgcggttgctacgcgcaccatggctggaggtacctgcgggggattcctggggccgcggttctcttggtcctctgggttgaggcgtggcagggagtggggtggcggagcgaaggggcgtggctgaggggtcttcgtgcacaccctaccgggaggggcgctgccaggtgaggggatgccatggcggccgtgactcctaggccccctcttcctgaaggctgtcgcgccccttcctcagcgcccacggtctcgcttcctgaactccgttcactcctagcctccggacgggcccggctcttcgacgtgcgctctcgcgaggaggcggcagctgggaccatcccaggggcgctcaacatcccggtgtccgagttggagagtgctctgcagatggagccagcttgccttccagggctttatattcttgcttgagaagccaaagctgggaagatgagcatcttcgttttctttcttgttcagatggggcaagcggggcctccaggccacgcagctggcccggagtcttggatacactgggggcttcgcaacttacgctggagcctattagagaatggttggagaaagagagttaggcaggaggcagcttactgattgccaccccctggccccttaatggccaccttaacctaagggtgtgaacgggctgacttggtgaattgggcaactccttataagtgttgtgcacacaaaagcatcaaataaagaacatattaatc

SEQ ID NO: 146121 - DNA, 2572 bp, Homo sapiens
  misc_feature (1)...(2572): n = a,t,c or g
attattgtcaaaaactttcaacccatttcttcctgcctacctttggcttttcctcacaaagaatgtctagacaaacagcagcttagtctcctgacacctcttgtggggtgcatgttcctgctccaggaatgctgttcatgtggattcattccattcagtggccccttggggtttgcatgccagtgaagcgttaccatataagagccagccgtttgtgttcgcttggtaggtgtaagtaatagcagcccttacccacggagtctttatgtggtttattcctgcaaggttgttttaaactgaaataaaactgctagtgagattggttgataaccaaaacagctgctctcattttgttttggaggaaccctggtggcttgacagccaggagaaaggccatatgtgaaaccaatctcttgtggagattggaaatcctccctgatatttgggcagagcctaaacgtgcatgtttgtcactcaaacaccagaagtttgaatcagaggtctgagtgacctcttttgtggctgttcttgatggtttccaggcctcgttatgcatggtttgcttgatgcccattttttgtgccttgtgctgttggatggtaacgaccactcaccatgtaaacacagtacctcagttttctgtccacagctgcagtcgcttctgtccctcgtgcttcactgtggggcagccaggggacaagcttcttgaaagcagtgtgatacccaagtcatagggtgcttctcgtatgtggaacagggtgttcattctacagatctgttatgtgttttcctgttgactcttaagagtccctgcatgtaaatctcaaagctgagcctggctcccagagtccagactgacattacagcgcaagagtttgcaagtgtgtccagcatgcaccaactgtgcagaacttggctcggtaactttgcgtggaaaaataaagtacattttgaagtatcttgagggttgggtcaattgagacatttctagcattacttaatgacttgcattgtggtttttctgcaagcaactttaatgactttttttataccacatgggtctcccagtttctaggatgaatgcaacatggatggatgggtgatgatgacggatgagtttaattcattgtttcatttattgcctttaggggctgaaggggaaaggggaaggtttgttttttttttcttccccatttttccccccattctgtctttcttttggggggacttacaccacatgtaatgacgctatgacttaattctgctcccaagcccttgtatcttggggcttcattttagggctcatgtgtcagatctgcatgcattgcttgcatttttctgggtatctgaatgttgggtccctgtttccggggattcaacattaatttcccaaaagtatcatgggacttgtgacaatacaagacatgaatctatgtataaaatttatcggcctttctcatttacctgctctagtattattgtattgtgtgtgcgtgcgtgtgtgatgtcaggctgccacgtaaaacttcagagaaaaatcttaaaagcagaccatccttttttgcatgctctattctaagtaggaatgttcaatgtaactggactaaaattggcatgtttaaagatatttaggggtttttttgttttccttatttttatttgttttcagtttcctgtatatttgcttacctgtgccgttttagtgggttttaggataaaaatgcactggtgaagccaaatgtaggtgcccaacagaaggtggattttccaggttgtaaatggccatgccagcaatttggaaggggcctgtggtttccctaaaaaaaaaatcacagttacttctaaaccagatttcatctcttttattgttttatgtgccaaaccacgaaggccaatttgggcttcaatctctgaaccactgtaggacccattaggaaggactgttcccgattgttaccaaattgtagtgccctgaaaaccactccttaaagctgattggtcttaaccaaaatggaaagttccccccaaagaccaaaaccagaacaattatttattaaccaaattaattttgggttgaaatggtctgtgggttccttggggaaatgctggcgcctctttgtgttttttcccttcattaggtgccagttgggggatggaatgtgtaataggtccagaggtcctccgtggttccacattttaaaattaaggaaaatgaccctcatcctttcaaagcttgaattcatttttaattttaattttattttatacaatgtgtaggacaggttccctgttctctggcatttagaagtatacacaatataaatctgttaattctgtaagtaatttttataattatgatgtaactctatgcttatcccttaaaacatttaaaataaaccctttatgtgcnnnnnnnnnnnnnnnnnnnggcgaccccgcccggaattccaaaatttagaaccggaaaatccggaaaacccccgaaggttcttttaactggggctggggccccattcaaaattttttcatttaaaccctcgttggcctttttttattgaactaacccccctag

SEQ ID NO: 146122 - DNA, 1437 bp, Homo sapiens
  misc_feature (1)...(1437): n = a,t,c or g
agaggccnnnnaggggggnnaattgaaaaccntaatcgtagaccctagtcagngnggnggaattctggtgcaggaagtggagggggtactcagagtttgaaaattgcagaacgatatggattccaatacatttctgtgggagaattattaagaaagaagatccacagtaccagcagcaagaggaaatggagtcttattgccaagataattacaactggagaattggccccacaggaaacaacaattacagagataaaacaaaaattgatgcaaatacctgatgaagagggcattgttattgatggatttccaagagatgttgcccaggctctatcttttgaggaccaaatctgtacccccgatttggtggtattcctggcttgtgctaatccggagactcaaagaaagattactgaagcgtgcagaacagcagggccgaccagacggacaatgtaaaagctacccaaaggagactaatgaacttccaagcagaatgctgctccattggttaaatacttccaggaaaaggggctcatcatgacatttgatgccgaccgcgatgaggatgaggtgttctatgacatcagcatggcagttgacaacaagttatttccaaacaaagaggctgcagcaggttcaagtgaccttgatccttcgatgatattggacactggagagatcattgatacaggatctgattatgaagatcagggtgatgaccagttaaatgtatttggagaggacactatgggaggtttcatggaagatttgagaaagtgtaaaattattttcataattgggggtcctggctctggcaaaggcacacagtgtgaaaagctggtggaaaaatatggatttacacatctctcaactggcgagctcctgcgtgaggaactggcatcataatctgaaagaagcaaattgatcaaagacattatggaacgtggagacctggtgccctcaggcatcgttttggagctcctgaaggaggccatggtgggcatgcctcggggacaccaggggcttcctgattgaccggctatcctcgggaaggtgaagcaaggggaagagttccggacgcaggatttggagaccccacagttgggtgatctgtatggaatggctcggcagacacccatgaccaaccgcctttctccaaaggagccggagcagcctgcctgtggacgacaccaccaagtaccatggccaagcgcctagaagcctactaccgaggcgtccatccccgtgatcgcctactacgagacaaaaacacagctacacaagataaatgcagagggaacaccagaggacgtttttcttcaactctgcacaagctaattgactctattattttctgaaggcaaaaatgcatgtttgggttagaaatggaaaccagaaaaaaccattaaaaagttcattccttaaaaaaaaaaaaaa

SEQ ID NO: 146123 - DNA, 473 bp, Homo sapiens
cccagtaggggcagcattttgctaaatgtaaaagatagccatttaaaactcatacatatacatgtgtatatacagttatatcaacactatttatatacatatatatctggagagcaatatttcattgcctttgaatatctatatatctactcccacaatatatactagagacatactgtgtgagtacatacgaaagcatatgtacacatgctctgacatgtatatatacacttttgtctgtgtgtgcataagagctttaaaggcacaatatatagggatgcaagttttctagagagctgcagcaaagttaatacagaatgtcacaaactgagaaaagtcaaaaggaaatatagcagaattcatcacacaggaattcatcaaagcagtttaatcataacttcaccatttacattttaatggaaagcatacaaggtcacatgttagcctcttgcggacgcgtgggtcgacccgga

SEQ ID NO: 146124 - DNA, 412 bp, Homo sapiens
cgtcggtggggccggcggtcagtctgcggcagcggcagcaagacggtgcagtgaaggagagtgggcgtctggcggggtccgcagtttcagcagagccgctgcagccatggccccaatcaagacacacctgccagggtttgtggagcaggctgaggctctgaaggccaagggagtccaggtggtggcctgtctgagtgttaatgatgcctttgtgactggcgagtggggccgagcccacaaggcggaaggcaaggttcggctcctggctgatcccactggggcctttgggaaggagacagacttattactagatgattcgctggtgtccatctttgggaatcgacgtctcaagaggttctccatggtggtacaggatggcatagtgaaggccctgaatgtggaaccagatggc

SEQ ID NO: 146125 - DNA, 598 bp, Homo sapiens
agggggacgccgctgtgccgctagcggtgccccgcctgctgcggtggcaccagccaggaggcggagtggaagtggccgtggggcgggtatgggactagctggcgtgtgcgccctgagacgctcagcgggctatatactcgtcggtggggccggcggtcagtctgcggcagcggcagcaagacggtacagtgaaggagagtgggcgtctggcggcgtccgcagtttcagcagagccgctgcagccatggccccaatcaaggttcggctcctggctgatcccactggggcctttgggaaggagacagacttattactagatgattcgctggtgtccatctttgggaatcgacgtctcaagaggttctccatggtggtacaggatggcatagtgaaggccctgaatggtggaaccagatggcacaggccttacctgcagcctggcacccaatatcatctcacagctctgaggccctgggccagattacttcctccacccctccctatctcacctgcccagccctgtgctggggccctgcaattggaatgttggccagatttctgcaataaacacttgtggtttgcggccaaaaaaaaaaaa

SEQ ID NO: 146126 - DNA, 934 bp, Homo sapiens
  misc_feature (1)...(934): n = a,t,c or g
cggcccaggcccgccttccgcagggtgtcgccgctgtgccgctagcggtgccccgcctgctgcggtggcaccagccaggaggcggagtggaagtggccgtggggcgggtatgggactagctggcgtgtgcgccctgagacgctcagcgggctatatactcgtcggtggggccggcggtcagtcttggncccccgggcagcggcagcaagacggtgcagtgaaggagagtgggcgtctggcggggtccgcagtttcagcagagccgctgcagccatggccccaatcaaggtgggagatgccatcccagcagtggaggtggtttgaaggggagcccaggaacaaggtgaacctggcagagcctgtccaagggcaagaagggtgtgctgtttggagttcctgggggccttcacccctgggatgttccaagacacacctggccaagggtttgtgggarcaaggctgaaggctctgraaggccaaagggagttcaggtggtggccctgtctgagtgttaatgatgcctttgtgactggctatttggggcccacctccacaaggcggaaaggcaaggttcggctcctggctgaatccccactggggcctttgggaaggacgacagacttattactagatgattcgctggtgtccatcttttgggaatacgacgtctcaagaaggttctccatggttggtacaggatggcatagttgaaggcccttaaatgtggaaccagatggcacaggccttcaccttgcagcctgggcacccaatatcatcttcacagctcttgaggccctgggcccagattacttcctccacccctccctattttcaccttgcccagccctgtgctggggcccttgcaatttgggaatgttggccagattttcttgcaataaacatttgtggttttgcggccaaaaaaaaaaaaatg

SEQ ID NO: 146127 - DNA, 2352 bp, Homo sapiens
gcaccaaggttgaacctgcctgtaatcctcggttgttctgattaattattcttggaactgaacttttcttttatgagggaactcctaagggttgtaggaccttggcagagggggcctggtctccattagagggtgttgttttctcctgaggacacccaggcggccttttggtcccacccctgttcctggtcccgttcccggtcacagtccccccaggcaactctttccacccgaaaattcttcccttcccttagcctgtgaaaaccctgggtattctttaaagttctggtcaatgtatatcacctccacagagctgcttaccctgcactgggaaggggagatggagacgccccctttacccaggaggtcttcagagtttcctgggaccgcggtgggtggaatcccaaggctgggggtggaaggagcagggctctggagggattcgcattcaaggcacagaattggccccttgcctgtttgtttttctaaccagtgtgatttctctgctgttcgtttattacttaccattggaatattttgagccaggagagcgccttctctctccagccatcaccgctgtggttgttcaggggtagcttttcaaaaacagggcagagcctggctgtcccaaccagggggagcaggggcttggccctgacagcttgagcccttcccctggtgtgtgctcagcctttataaagagagagagagctccgaagcaatagcaacacctgggggtgggtcagtgagggccccctcaatgattttgttgtttgatctgtgaaattccgctcacctcctggaggggtggaacagtgtgggactagagccatgtttttatgtgtcatcgtgagcatgtgccccatcgcagggcctgtggccattgggtgtgggaactacggtcagtcctccccaaggcatgggggtttggggaggagagtgacattttcatcattagcttcggagaagcttcaagcccatcctgtccccgctactgcctggccccttgctgactcaggctgcactgtttgaaaaggagcagagaggctggcactaggggccactggggggctggggtctccaggggatgactgttttcaatctctgggccaagatcacatgcaggataccacgggaaggagccatctccactctccttctccagaaccccccttgaagggcctttgggaccattagtccatttccattttacagacaaggaaatcaagacccagcttgggggaaaagccacccctggagtcacctgtgtgttcagtggcacccccaggctgggtcccctcctcccaatagaggctgagccggagccagggcagtatgaggtggggctgccactgcccatacctcctcctcccttctttctttgaagcctaatggccccccaaaagatgggcaggacaagctgtagcccatctgagaggttgggaaactgaggcccagaaacaggaagtgactcacacaagacccctcagcaagggtgcaaagggggaagaactaggggctccattgtttctttaggcgacaggagaccgttggctccagtgcatgttttgctggggacaaggatttcctgggccttcgaagccctggggttggcacagccctactgggctgcacctctataaaccagcgacttctctgggcctgagtctgggggagaggggtgccaaggagactcacctctccttgggggctggcccatctgactgagggtacacaggattgggtctagaccttgatgcctgggtggagggcccttgtaaagggccatatcctcttcaggaccaactggagggagagttaggaaacaccagctcctgcctggggcagtgagggaatgggagcagctgtgggcgcctcatttcaggcaagtcctccccaaaccttcagatgcagtgagacctggccttcctgttgttgcttttcagactttgttttcagaatgttttatcttcgagtgttgcccttcggccctcacaagagcccctggggagtatgtggtggcctgtgccgtcatccccattttcaaagcagggagctgaggtcctgggaggggaaagtgcttgcctgaggtcccactgtgttagggggtgggcaggactggaactcggttctccaacagcccagagctcactcttttacacccagaggtggagcaggtggcttagggggtggttatgtacttcacaagccaattcccttcagccaggagctcctgggtgcatttccgtgtcagaaacagtaccgagtcccaccccctctggaggcacagttgttgcgtcaggcaaggacacctgcatttatttattgagcaccagtgctgtgtcaggcccg

SEQ ID NO: 146128 - DNA, 3072 bp, Homo sapiens
cggcggtgccggaggttgtccttggcaggtttttctcggcgcttctccatggaggaggcggtgcgaacggcttcagccccgaatgctcgcatctcccactggacggcgacgaaggcggtggccgtgcgagcgcaggactgggcggcctgtgtgggggtgtgagccgcggtgcccaaggctgcgccggcgaggggaagccgcgcggccggtcggccgactagggtttgaagactgcttcattctgcctctagtaccagcggtttctctgttctgtgatcaatgtgattcacaggaactccttaagtaacaaacgaaatgagccagggggtaggaaaatatgacttctatattggtctgggattggctatgagctccagcattttcatcggaggaagtttcattttgaaaaaaaagggcctccttcgacttgccaggaaaggctctatgagagcaggtcaaggtggccatgcatatcttaaggaatggttgtggtgggctggactgctgtcaatgggagctggtgaggtggccaacttcgctgacgtatgcgtttgcaccagccaactctagtggactccacttaggagctcttcagcgtgctagtaaagtgcccattctttctttcatactttctcaatgaaagacttaatcttcatgggaaaattgggtgtttgctaagtattttaggatctacttgttatggtcattcatgctccaaaggaagaggagattgagactttaaatgaaatgtctcacaagctaggtgatccaggttttgtggtctttgcaacccttgtggtcattgtggccttgatattaatcttcgtggtgggtcctcgccatggacagacaaacattcttgtgtacataacaatctgctctgtaatcggcgcgttttcagtctcctgtgtgaagggcctgggcattgctatcaaggagctgtttgcagggaagcctgtgctgcggcatcccctgggcttggattctgctgctgagcctcatcgtctgtgtgagcacacagattaattacctaaatagggccctgggatatattcaacacttccattgtgactccaatatattatgtattctttacaacatcagttttaacttgttcagctattctttttaagggagtgggcaaggatatgcccgttggacgatgtccattggtactttgaagtggcttctttacaatcattgtggggggatattcttgttgcatgcctttaaagacgtcagctttagcctaagcaaagtctggcctgtgtcttttccgaaaaagacgaggaaagcaatgaatggcaatctctctaatatgtatgaagttccttaataataatgaagaaagcttaacctgtggaatcgaacaacacactgggtgaaaatgtctcccgaagaaatggaaatctgacagctttttaagaaaggtggaattaaaagggttaatctgtgattggtatgaagtgaatttgaatatcatcagaaatgtggcctggaaaaacattgtcctcaaataatggttcttttaaaggcaatcttttttaaaggatttccacttaaattgggaccaaggaaattactttttcttgtatttaaacaaacaatggtagctcacttaaaatgacctcagcacatgacggatttatattaacattttattgttgtagaagtattttacattttcatcccttctccaaaagccgaatgcactaatgacagttttaagtctatgaaaatgctttattttttcattggtgatgaaagtctgaaatgtgcatttcgtcatccccactccatcaatccctgaccatgtaaggcttttttattttaaaaaaaacagagttatcccaatacattatcctgtgatttacccttaccctacaaaagtggctccctgtttgtttggatgaatgattggttttatttttgaaaatatttattaagggaaaactaaagttactggaatgaagggaaccctcttccttacaaaaacaaaaaaaagggcaagaaatcaccccccaaggaaccgatttcctcagggttgagatgatcccccgtgaatccggctttcctctgaggcattcgatgggccttagcacctccatccaagcccagcacatcctggcctggctggttgcagcctgggctgggggttattctttcagttaccctaatcccatggatggccgggaaccctggattaccggttttacatcagccccttgtaccttttcagtatattttcataatgaagttatattgtcatttaagactttgaaccagctcctgggaaatagaagacctagggttgtttcttaaaagtttagccccatgttaataaataaaaaagttggaaatgaagttcttattctaaaagtctggaatgcttaggaacaaacttaacatgtttataggaatatgggtctctttgtaccaagtactttggcttaaggagctcctttggggccactacatattttgggtttctaggaaaatgtttgtttgtttatggaggagtcggtgggaaaactgcaaacatatgcagaaaaggtagaataataaaaaaggtctaatgaactccattcagctttgaacctatccactcataacccattgactggccctttaaaaaaaagtattggcagaattaatttcccacctaggtgatgggaagaaagtgttcgcctgttcccagccctgtggctcctggcctggaggttaccccagtggtgcgccagcgccaagccatcactccccgagggcctccccgtgccaatggtgctggtatcccatgcagctcaccactggctgcgtggaaactccctttttttccaactttattattggccttctaaggagctgttttagatgttttttctaactgcctcctcccaatgccattttaatactacagatgtactacatatctgtttatatactgtacctacatctgtgctttgtacataaaagaaccagttttctcccccttgaggacagagactcatttgaacatgcataggttaataaataataataaattcttatttaacaaaaaaaaaaaaaaaaaaa

SEQ ID NO: 146129 - DNA, 508 bp, Homo sapiens
ccccccatcaacgggttgaaaagaaattttgccaaaacaagcctttgcggtagcacccacctatatcacggaacctgttgaaataaagttttttttcttttccaggattcgtctttgagtacctccaggctgaaagactgttgtaccagtaaaaacttaaaggcacaaattctccttgaagaccttctcccttttatgtggccccatattttatgttgctttatctttgaaattttgcatgaaaaggaaatgaatggattcgaatgaaattgtcctttagagcatgattacttgttcccatggacaaatcttcctccatgggaaaatactgttataccaaataattctagatgagtaacaaagatctttttaggccttcattttatgttttttcttaactgttatattatgattgtgacatagattatactactactaatttttggatgtttcaaaaggtcaagaagtaaaagatgttagaaagcaaaaaaaaaaaaaaaaaagtttt

SEQ ID NO: 146130 - DNA, 402 bp, Homo sapiens
  misc_feature (1)...(402): n = a,t,c or g
cacataatgtcaaaattatacatcatgcagttcnnnnnnnnnnnnnnnnnnnnnnnnnnnnnnnnnnnnnnnnnnnnnnnnnnnnnnnnnnnnnnnnnnnnnnnnnnnnnnnnnnnnnnnnnnnnnnnnnnnnnnnnnnnnnnnnnnnnnnnnnnnnnnnnnnnnnnnnnnnnnnnnnnnnnnnnnnnnnnnnnnnnnnnnnnnnnnnnnnnnnnnnnnnnnnnnnnnnnnnnnnnnnnnnnnnnnnnnnnnnnnnnnnnnnnnnnnnnnnnnnnnnnnnnnnnnnnnnnnnnnnnnnnnnnnnnnnnnnnnnnnnnnnnnnnnnnnnnnnnacattatacagtttgaaatgaaactttgccacaacagcctttgctgagcacacacatatatcactgaccn

SEQ ID NO: 146131 - DNA, 1529 bp, Homo sapiens
tagtctcgagtttttttttttttttttttggttatgaaaacttagggactaaaattaatataatatattggcataatgttggattgaatctacattttggcagaagttaaacattcccacataatgtcaaaattatacatcatgcagttctgtttttttgtttgttttattttgttttgcttttgagtctggctctgtcaacccccaggctggaagtgcagtggccgtgatctgcaacctctgccccccgggtttcaaggcgatttctcctgccttcagccctcccgagtaggctgagattacaggtgcgcgccacccacacttgggctaatttttgtattattagtagagacgggggttttcagccatgttgggccaaggccggtctctcctgacctcaggggtgatcagcccacctcggcctcacaaagtgctgggattacaggcgtgagccaccctttgcccagcccacatcatacagtttgaaatgaaactttgccacaacccagcctttgctgtagcacacacatatatcactgaacctgtttgaaataaagtttttttttctttttcatgattcgtctttgagtacctccaggctgaaagactgttgtaccagtaaaaacttaaaggcacaaattctccttgaagaccttctcccttttatgtggccccatattttatgttgctttatctttgaaattttgcatgaaaaggaaatgaatgggattcgaatgaaattggtccttttagagcatgaattactttgttccccatgggacaaatatttttctccccttgctcttcctgggcctgaaacacgggaaaccagagtcaaaagttatctccctctccctgtgatgccttgagattttttttctgcgttgtttaatgcctggaaatccaagtcttcctccatggggaaaatactgttattaccaaataattctaggatggagttaacaaagatcttttttagggccttcattttatgtttttttcttaactgttatattatgattgcgacatagattatactactactaatttttggatgtttcaaaaggtcaagaagtaaaagatgttagaaagcaatgagtgagtccttttgatttttaacttattccccatggccctatacttcgtgtgcttttcctttttttttttgagacggaggctcactccgtcacctaggctagagtacagtggcacgatcttggctcgctgcaacctctgcctccctgattcaagtgattctcgtgcttcagcctcccatgtagctgatattacaggcacttgccaccatacccggctaatttttgtatttttagtagagatggggtttcaccatgttgcccaggctggtcttgaactcctaacctcaggtgatccgcccgcctctgccttccaaagtgctgggattacaggcgtgagccactctgcccggcttatttttctttatgtttttgcttcgtaagaggttctgttgagcagtgatttgcaactcttgctgacgttgctggggaagc

SEQ ID NO: 146132 - DNA, 486 bp, Homo sapiens
catgtgtctgttcactggtatccactgagcactgggccgttgctccgtgggtgctcctgtgtcttcaagggagtaacagttacagaggtctcccccttgaagaaagcaaactaagtattgtccctagctgtacttagtatgcaaatgaagtttggccttgagtttcccttttctggaggaagaggctgagggtgatttggagataaaggtagaggtcaggaggctttttccctctacctttcttgtctcccttctactccacggggctgtttataacttgggcttggtcttctgttacagtcttggtgatgccttggacagcagcaactccatgcaaaccatccaaaagaccaccacccgccggatagtggatggcaaagtggtgtctgagaccaatgacaccaaagttctgaggcattaagccagcagaagcagggtaccctttggggagcaggaggccaataaaaagttcagagttcaaaaaaa

SEQ ID NO: 146133 - DNA, 1110 bp, Homo sapiens
atgggccaccatcgtcggcaaagcctgagtcctgtcctatctctctcctccccggacagcatgagcttcaccactcggtccaccttctccaccaactaccagtcactgggctctgtccaggcgcccagctacggcgcccggccggtcagcagcgcggccagcgtctatgcaggcgccgggggctctggttcccggatctccgtgtcccgctccaccagcttccggggtggcatggggcctgggggcctggccgcggggatggctgggggtctggcaggaatgggaggcatccagaacaagaagaccatgcaaagcctgaacgaccgcctggcctcttacctggacagagtgaggagcctggagactgagaaccgtaggctggagagcaaaatccgggagcacttggagaataagggaccccaggtcaaagactggagccattactgcaagaccatcgaggacctgagggctcagatcttcgcaaatactgtggacaatgcctgcatcgttctgcatattgacaatgcccgtcttgctgctgatgactttagagtcaagtatgagacacagctggcgatgcgccagtctgtggagaacgacatccatgggctccgcaagctggagacagagattgaggctctcagggaggagctgctcttcatgaagaaccacgaagaggaagtaaaaggcctacaagcccagattgccagctttaggttgaccgtggaggtagatgcccccaaatctcaggacctcgccaagatcatggcagacatccgggccaaatatgacgagctggctgggaagaaccgagaggagctagacaaatactggcctcagcagtttgaggagaacaccacagtggtcaccacacagtccgccgaggttggagctgctgagatgacgctcacagagctgagacgtacagtccagtccttggagatcgacctggactccatgagaaatctgaaggccagcttggagaacaacccgagggaggtggaggcccgctactcccttcagatggtgcagctcatcgggatcctgctgcacctggagtcagagctggcacagacccgggcagagagacagcgccaggcccaggagtaa

SEQ ID NO: 146134 - DNA, 1651 bp, Homo sapiens
  misc_feature (1)...(1651): n = a,t,c or g
ggaggccnnnnnaactgaaactgaggccctcagcagccgcattcccggtcgacccacgcgtccggtcgtccgcaaagcctgagtcctgtcctttctctctccccggacagcatgagcttcaccactcgctccaccttctccaccaactaccggtccctgggctctgtccaggcgcccagctacggcgcccggccggtcagcagcgcggccagcgtctatgcaggcgctgggggctctggatcccggatctccgcgtcccgctccaccagcttcaggggcggcatggggtccgggggcctggccacgggagtgagccgggggtcatggcaggaatgggaggcatccagaacgagaaggagaccatgcaaagcctgaacgaccgcctggcctcttacctggacagagtgaggagcctggagaccgagaaccggaggcttggagagcaaaatccgggaagcacttggagaagaagggaccccaaggtcagagactggagccattacttcaagattcatcgaggaccttgagggctcagatctttcgcaaatacttgtggaacaatgccccgcatccgttctgcaagaatcgacaatgccctgtcttgcctgctgatgactttaagagtcaagtatgaagacagaagctggcccatgtgcccagtcttgtggagaaccgacatccatgggctccccaaggtccatttgatgacaccaattatcacaccgacttgcagctggagacagagatccgaggctctcaaaggaggagctgctctttcaatgaagaaggaaccacgaagaaggaagttaaaaggccttaagacgccaaattacgcagctctgggatgaacgcgtggaggttagattgcccccaaatctcaggacctcgccaaagatcatggcagacatccggggcccaaatatgacgagctgggctcgaaaaagaacccgagagggagcctagacaagtacttggtctcagcagatttgaggagagcaccacaggtggttcaccacaaaaatctgctgaggttggaagctgttgagacgcacgctcacagaagcttgaaacgtacagttccagtccttggaagatcgaccttggactccatgaagaaatctgaaaggccagctttggagaacaagcttaagggaaggttgaaggcccgcttacgcccttaccagattggagccagctccaacgggatccttgcttgcaccttgagtcagagcttggcacagacccgggcaagagggacagcggccaggcccagggagtatgaggccctgctgaaccatcaagggtcaagctggaggctgagatcgccaccttaccgccgccttgctggaagatggcgaggactttaatcttggtgatgccttggacagcagcaactccatgcaaaccatccaaaagaccaccacccgccggatagtggatggcaaagtggtgtctgagaccaatgacaccaaagttctgaggcattaagccagcagaagcagggtagcctttggggggcagggaggccaataaaaagttcagagttcaaaaaaaaaaggggagataccatgatcacgaaggtggttttcccagggcgaggcttatccattgcactccggatgtgctgacccctgcgatttcccgtcgacgc

SEQ ID NO: 146135 - DNA, 463 bp, Homo sapiens
gcagtggcatcagcgatggcggctgcgtcggggtcggttctgcagcgctgtatcgtgtcgccggcagggaggcatagcgcctctctgatcttcctgcatggctcaggtgattctggacaaggattaagaatgtggatcaagcaggttttaaatcaagatttaacattccaacacataaaaattatttatccaacagctcctcccaggtatgcagtaatttatctcacttgtcaatataactctgtggcataaaatatatatagagagatgtgccagctaggtgttctttaagcttaattttgtatttaacatactttaaattagagtactttgtccccagaatgtattctttattgcagttacactgttggaccaagttttgccaggtgagtaatttattccctttctgtaaagcattccctatagctctgaatttaaactgtgtcccaagcatggcttatgt

SEQ ID NO: 146136 - DNA, 871 bp, Homo sapiens
gcatcagcgatggcggctgcgtcggggtcggttctgcagcgctgtatcgtgtcgccggcagggaggcatagcgcctctctgatcttcctgcatggctcaggtgattctggacaaggattaagaatgtggatcaagcaggttttaaatcaagatttaacattccaacacataaaaattatttatccaacagctcctcccagttacactgttggaccaagttttgccagatcatatactcctatgaaaggaggaatctccaatgtatggtttgacagatttaaaataaccaatgactgctccacatcaccttgaatcaattgatgtcaatcgtgtccgcgcttactgatttgattgatgaagaagtaaaaagtggcatcttgaaccaacaggatattaataggagggattctctatgggaggatgcatggcaatgcatttagcatatagaaatcatcaagatgtggcaggagtatttgctctttctagttttctgaataaagcatctgctgtttaccaggctcttcagaagagtaatggtgtacttccctgaattatttcaatggccatgggaccggcagatgagttagttcttcattcttgggcagaagagacaaactcaatgttaaaatctctaggagtgaccacgaagtttcatagttttccaaatgtttaccatgagctaagcaaaactgagttagacatattgaagttatggattcttacaaagctgccaggaggaaatgaaaaaccaaaaatgaatgaatcaagagtgatttggttaatgtaagtgtaatgtctttgtgaaaagtgatttttactgccaaattataatgataattaaaatattaagaaataaaaaaaaaaaaaaaaa

SEQ ID NO: 146137 - DNA, 2159 bp, Homo sapiens
gcggtggaattctggccctcattttgagtcatatgaatatagtttggctccaccgcgaggggtggagtgcagactgctagaggaggagaatgccatgctcaggaagcgggtagaggagttaaagaagcaggtcagcaacctgctggccaccaatgaggtactactggaacaaaatgctcagttccgcaatcaggccaaggtcataaccctgagctccactgcaccagcgactgagcagactctggcccccactgtgggcactgttgccacttttaaccatggcattgcccagactcacactactctcagcagccaggctctacagcctcgtccagtgtcccagcaagaactggtggcccctgctggagctccagctgctcccccaactaatgctgcacctcctgctgctccaccacccccacccccacacttgaccccagagatcacgccactgtcagctgccctggctcaaacaattgcccaagggaatggcacctccacctgtctccatggctcctgtggctgtatctgtggctcctgtggcccctgtggctgtatcgatggcccaacccttggcaggaatcacaatgagccacaccaccactcccatggtgacttaccctatcgcttcccagagcatgcgcatcacggccatgccacactgatggggctaatggacactcccctggtatagcctcgcagggctggggtcagggggcccttgcccactcacctagccttccccatccctgtctgaagggctcccttgagaactaggacaagagactacaaggagtatgtcctgaggaggggttgggatggtgtgttttctctcacctcccttttatgagggtcctcttgtccatcttcaagcctcacagtgggggcttgcagaggagtgcagactgaagccagcaagagaggaaggactgactgaggggctgtgtcctcttaatgggaatttgggaacatccctcgtcttgtcctctcttctgcacagcacaggttccagcactggttttagaagaaaaaaataccctgcccagagggataaagccaggaaaggattgggaagtgggtggtcaggagagaaggcctgataggagccttcagacaatttgggtcctagttgcttgggttggacaatacaggaattgcttctgggccctgggaaagctgggaccatagtgctccagcccaaagactaggggagcattcattaccctagtttgacctgaaaatccatagggcagggcccactactttccaaagaaataaaagaacaattatttttaacaaatggaggcagtgaaaacttgcttagctattctgtgtggaagatgggagcagtaaatagatctcatgccaaaatgggataaagaccccagcctcacatagctttggtaagatggatagaagccagtgaagaagggtagggacccagaacaagaccaaatggggctttggggaaggcactttatggggtaaaagctttggagccacccagtctagttttaaaaatagtcccatctgtttctggtctctgtctgtatgtgctattcccaggttgcctcaataaccagggctcctagggtcatttatcaaggcaggcagtaaggagagagtatttgctgaaatgcggatgggatgttacatagttgacagatccttattcaaacagagcacgacaggtggagttgatggccattgagttgatggcaggtgccgctcatttgatggcaggtaatgtccctcctaccccaccccttcagaggccagttcctgaagccttcaaagcttgagaggtctgggaaaagagagtccttctagggacacaagcctcagggtccatccctttcctctgtctccacataggaccagaagttttaaatctactttaagccagtaaggccaggggccccaatagtcaaacctcagttcctcctcagctcacggctgatgtagggaaaacaactcaggtgtctagtctaatgggacagtagatttgggggtagagagtgatcctggattgtgttccccctcatcatgtctcctgctacctcttgctttcttgtctggttgatcactcaggtcacatctgggattggagatggtgggctaggtcaaggccagtcattaaaaaaaaaagcctaaagact

SEQ ID NO: 146138 - DNA, 388 bp, Homo sapiens
ccttttgtgagtttaggtttgatgtgctttggggctttgatcggactttgtgcttgcatttgccgaagcttatatcccaccattgccacgggcattctccatctccttgcagataccatgctgtgaagtccaggccacatggaggtgtcctgtgtagatgctccagctgaaatcccaagctaagctcccaactgacagccaacatcatttccagccatgtgtgggagccatcctggatgtccagccttaacaagccttcagaggacttcagccacagctattatcttactacatccttgtgagactctaataaagaaccaactagctgagcccaatcaacctatggaactgatagaaataaaatgaattgttgttttgtgccgctaaa

SEQ ID NO: 146139 - DNA, 2133 bp, Homo sapiens
cgcggggagagtagggtgctgtggtctgagctagagggtgaagctggcggagcaggaggatgggcgagcagtctgaatgccagaatggataaccgttttgctacagcatttgtaattgcttgtgtgcttagcctcatttccaccatctacatggaaggactccattggcacagacttctggtatgaatatcgaagtccaggtcaagaaaattccagtgatttgaataaaagcatctgggatgaattcattagtgatgaggcagatgatgcgacttataatgaatgcactttttccgatacaatggcacagtggggtttttgagacgggtgtattcaccatacccaaaaacattgcattgggtattagcccaccacgaaaggacagagtcatttgatgtggtcacaaaaatgtgtgagtttcacacttaactgagcagttcatggagaaattttgttgatcccggaaaaccaccaatagccggggattggatctccttaggacctatcttttggcgttgccagttccttttaccttttggtgagtttagggtttgatgtgctttggggggctttgatcggactttgtgccttgcatttgccgaagcttatatcccaccattgccacgggcattctccatctccttgcaggtctgtgtacactgggctcagtaagttgttatgttgctggaattgaactactccaccagaaactagagctccctgacaatgtatccggtgaatttgggatggtccttctgcctggcttgtgtctctgctccctaacagtttcatgggcttctgctctcttcatctgggctgctcacaccaaccggaaagaagtacaccttaatgaagggcatatcgtgtgggcatgagcaagaaacctgcctgcttttaacaattgccatttttaatttttttaaaataatactggtattttccccacctctcaattgtttttaatttttatttgtggatataccattttattatgaaaatcatattttatttatacaccattcaccactaaataccccccttaataccactaaaatttatgtggtttactttaagcgatgccatctttcaaataaactaatctaggtctagacagaaagaaatggatagagacttgacacaaatttatgaaagaaaattgggagtaggaatgtgaccgaaaacaagttgtgctaaatgtctgtttagacttttcagtaaaactaaagtaacctgtatctgttcaactagaaaactctatatttagtttctttggggaaacctctcatcgtcaaaactttatgttcactttgctgttgtaggatagccagtcaaccaggcagtattaggtgctgttttcaaagatttaaggctctattaaattggggaaattatctagggtgccattttcccctaagcattggacacataggcttcatctgagggtgagatatggccgctgtttgtatctgcactgtgtctgtctacaaaaagtgaaaaatacagtgtttacttgaaattttaactttgtaactgcaagaattccagttcagccgggcgagggattaggtattatttttaactctcccgtaagatttttcagtaccaccaaattggttttggattttttttccttcctcctcacataccaggggttaattaaaagtgtgctttctttttaccattatattacagttacaaggtaaaattcctcaactgcgcatttatttattccagcgccagtgactataaagaacgtttcacccataatggacccctcccagagcctgggaaaccctacccacaagatcctaaagttcctggcctgtcccattaacctcccaactatgggtctttatttcttgtgggtaatatgatgtgccctttcccttgccctaaatcccttccctggtgtgtatcaacattatttaatgtcttctaattcagtcattttgtttataagtatgtctatgaaacattggaactttaaaaaaacttatttatttattccactaactgtaggcaattggacagattaaaaaaatgttaacctccataatttctataccataacctcaatgtcttttttaaaaaataaaattaaaaatgaaaagagactcaattgtaaaaaaaaaa

SEQ ID NO: 146140 - DNA, 1662 bp, Homo sapiens
gctctgccttgcttggcacgagcagagagtaccagataggtggcagagaccatggcgcagggtgcttcaaaatgagcaagagaacccacccgaaccagataccccactgtgtggccggagggaccccagaccttcagagggctgcccctggtgttctcccacagtgcagtccctctgtattcccagagtgggatcggggctttcagccccaccctgatgcctgccctcccaggatggctggtttagtctgggtccatgtcccagacccctctattctgctccaggacagcaggacttcaggtctttcctgggggtggatataggagaaaatttctgcctggcacacacctgggctccaaccacttgccaagtgattcactcttaggcccagggggaacacaatgactatcattactgatgcagacctggctgtggagagcagctaatgtgtggcccagagagcctgtctgtgtggagcacgtagtgcacagaatacgtgagagttgctctggcaggggcagaatcctcacaggatcgcctgggaggtgaggtgtgtgtgacccactggatgggagggcaatgagtgtgcacatacaaatggggcagtgtgcatgcaacacacttaggggaggagtggccccagaattcagcacgcacacaacacacaagggagagaacccccagatgagaaaataggaaggagcaatcatttgtagatgggtgaaaaaagaatgaggttcaagggagcgtgcaccaggtgaggtgagcgtgtgtgctctcagggaagggcccaggatcccatgcctgggaggagctgccagagagaagcaaaaaggcggctgttgatcgccctgggctgggcaccagttacaggtcaggatctccaaacatggacgtcctcccctccaaatccagaagctcccagaaggtgtccttaactgcaaagcttgtgcagggtactcctccagatggaatcaggaagtcgagacaccatcccaggtgtgtgtaagagagagagagagaacagggaggatacagaagtattgcagcccagattcccctatcaggggggacagctggtgggcaaagcagccaccccacagccttttggctagagtacagtggggtggaccctccagccccaatagccctagtacccagctgggcagggttgcccacccctgctgtccacctgctccatcctcttagggttccaaaaggccccctgaaccgcaacagggaaggctggggcccaaacctgggtctccccaggcctgaggaaatgcctccccacccaaatgtccccctgctccagtccccactccctgtcactcccacgctctgcactggggagaaaacgggaggtgctcgtgctggcccctgggtgggagcggggagtccctggtgagacccccggtgagatggacccatcccttgccccgtgggggatcccctttccccacatccgtgctgtgtcattgttgctctgcttcctttcaatgtgtcagtgcctggggggaggggaggagcaccccctcagcccccctgaacctgaccaaaagccatggctgttgctcccccctttgtatgatgcaaatgctgaaatgtacaaaatcaaccatgacaacaaagaaaaagaccttgtacagcaaaaaaaaaaaa

SEQ ID NO: 146141 - DNA, 1183 bp, Homo sapiens
  misc_feature (1)...(1183): n = a,t,c or g
agaaaaaaaanttcgagacccctagtcctgtgaggtcgaattcgcatgcagcggcagtcgacaacaggaggcagaggcatcatggagggtccccggggatggctggtgctctctgtgctggccatatcgctggcctctatggtgaccgaggacttgtgccgagcaccagacgggaagaaaggggaggcaggaagacctggcagacgggggcggccaggcctcaagggggagcaaggggagccgggggcccctggcatccggacaggcatccaaggcctttaaaggagaccagggggaacctgggccctctggaaaccccggcaaggtgggctacccagggcccagcggccccctcggggcccgtggcatcccgggaattaaaggcaccaagggcagcccaggaaacatcaaaggaccagccgaggccagccttctccgccattcggccggaaccccccaatggggggccaacgtggtcattcttcgacacggtcattcaccaaccaggaagaaccggtccaggacccatccggcccgattggtttgccccgaacccggctactactacttcacccttccagggtgctggtccccagtggggaaatctgcctgtccatcgtctccctcctccaaggggccagggtccgacgctcccctggggctttctgttgacacccaccaacaagggggctcttccaggtggtgtcagggggcatggggcttccagctgcagcagggtgaccagggtctgggttgaaaaaaaacccccccaaaaagggtcacatttttaccagggctctgagggccgacagcggttttcaccggcttccttcatctttcccatctgcctgagccagggaaggaccccctctcccccacccacctctctggcttccatgctccgcctgtaaaaattggggggctattgcttcagctgctgaagggagggggctgagctctgagagaccccaggatctggcgtgcccctgtgacacgatgctcgtaagaatgctctgttttcttagaacctcatcactggcaataaacatacgtgtgtcttgtgtctgctgaaaaaaaaaaaaaaaaaaaaaaaaaaaggggcgcccgttttaaagaatccttggggggccccaaatttacggggggagggaaagaaatatttttttccttatggggggcgatt

SEQ ID NO: 146142 - DNA, 1714 bp, Homo sapiens
ttttttttttttttttttaatttgctaaactttattttatacagtacacgtttacatttacatagtcatggtgtcaacttgttaacacaacgaagccctaatggacccgttttgaaattagaagctggacagcttcacaggctttggtctcttcaacgaatccaattcacccctgggtttcgcttggcacacaccccaggagaacgtcgatgcacacagcttgtgtagctgcaaacggaaaccactctcttttctctcgtatttttcaagtcagactcactcaggattttgaaatgaatcatccacgagaaatttgtttttaaagttgaatcactgagaacatctaacaactgttccacattctttatccacaaaaactgaagtcggaaaagacgccctgaaaaacttgccaagggcttaatactctatgatagaaatattacttactgttcaccatgttaatacatttacttactaccatacacctggaacagtcacgggcagaacaagagcatgtgaatgacgaaaggaaacttgctttcagggtgtcagattatagaacatgcacaggaatttcttccacttctaacctcgctcatcagtcacatttacaagaaactcaattttaagcaaagagatgcctgaaataactaagacgtgtacaaaaacaagttaacctatgaacacaaggtaatattctgatagtcttcgatgtgacttccaacatatctgagtagtcacttttcagttttttaaacacgtgagaaaaatagatttggattacatctttgtggaaagggctaggatacagtttggaaaaccattatctcagggaccctgctctctcctctacacatgcgcacgcaaacacacacacacacacacacacacacaatgacacatggtggtctggtctaatatagtgtgtctgaattcagagggcagacattaacagccaagttttgtttttttgagagagagtctcactctgctgcccaggctggagtgccgtggcacaatcttggctcattgcaacctctgcctcccaggttcaagcgattctcctgcctcagcctcccgagtagctggggactacaggcgcgtgccacaacgcccggctaatctttgtatttttagtagagacggggtttcaccatgttgtccaggctggtctcaactcctgacctcaggtgatccacccaccttgccctcccaaagtgctaggattacaggcgtgcacttggcacctagcccactgatcactcttctgcttacagaatatcagaagtcattctagaggcaaatttgaagagtggaaaaatcactttttctgaatgatcttgtttttggtgtagatgtttttattgtgtgggttagtttaatgaatacataaaggactaccagtaccattctgtctttaactccgtgggcatctgtgggaataaccctgctaatgttaacacgtgagaaagcctttggtcatgccacccactctaccagttgtccccaccatcccccgccctcctccctgtgagacactgggccaaaggctcactacccctgtgcgttgtccagcacacagacactatgtgcattatttgtacataaggataatcacatctacctgagactgctatcatggaaattaaatgtttggtacatgtaaagtctttgaaagtgtaactggaatattgtgtaattttaataaataata

SEQ ID NO: 146143 - DNA, 484 bp, Homo sapiens
  misc_feature (1)...(484): n = a,t,c or g
ccactgcacaaaggggcgcgcgcacacacacacgttgcttcctcacacccaataagaccaaaacctccatctcaccttccctcactaacttagctgccatgctccgagccccgctgtggagagacccacatggtacagaacaaagggcagcttccagccaacagccagcgaggaactgaggcctnnnnnnnnnnnnnnnnnnnnnnnnnnnnnnnnnnnnnnnnnnnnnnnnnnnnnnnnnnnnnnnnnnnnnnnnnnnnnnnnnnnnnnnnnnnnnnnnnnnnnnnnnnnnnnnnnnnnnnnnnnnnnnnnnnnnnnnnnnnnnnnnnnnnnnnnnnnnnnnnnnnnnnnnnnnnnnnnnnnnnnnnnnnnnnnnnnnnnnnnnnnnnnnnnnnnnnnnnnnnnnnnnnnnnnnnnnnnnnnnnnnnnnnnnctgactgatacgaattccnccncnctggactagggatatgaaacaacccct

SEQ ID NO: 146144 - DNA, 432 bp, Homo sapiens
  misc_feature (1)...(432): n = a,t,c or g
ccacatggtacagaacaaagggcagcttccagccaacagccagcgaggaactgaggcctnnnnnnnnnnnnnnnnnnnnnnnnnnnnnnnnnnnnnnnnnnnnnnnnnnnnnnnnnnnnnnnnnnnnnnnnnnnnnnnnnnnnnnnnnnnnnnnnnnnnnnnnnnnnnnnnnnnnnnnnnnnnnnnnnnnnnnnnnnnnnnnnnnnnnnnnnnnnnnnnnnnnnnnnnnnnnnnnnnnnnnnnnnnnnnnnnnnnnnnnnnnnnnnnnnnnnnnnnnnnnnnnnnnnnnnnnnnnnnnnnnnnnnnnnctgactgatccagatttggaaccgaaagtcacattgctagagtcatgtagctatagagtggaacccagatcgtgtccctcaatcaggacaaaccctcgtcnngggtggtgtcaacgactatcgt

SEQ ID NO: 146145 - DNA, 413 bp, Homo sapiens
  misc_feature (1)...(413): n = a,t,c or g
atcattacgccaagcttggcacgagggtttgtcctgattgagggacacgatctgtgttccactctatagcaacatgactctagcaatgtgactttcggttccaaatcnnnnnnnnnnnnnnnnnnnnnnnnnnnnnnnnnnnnnnnnnnnnnnnnnnnnnnnnnnnnnnnnnnnnnnnnnnnnnnnnnnnnnnnnnnnnnnnnnnnnnnnnnnnnnnnnnnnnnnnnnnnnnnnnnnnnnnnnnnnnnnnnnnnnnnnnnnnnnnnnnnnnnnnnnnnnnnnnnnnnnnnnnnnnnnnnnnnnnnnnnnnnnnnnnnnnnnnnnnnnnnnnnnnnnnnnnnnnnnnnnnnnnnnnnnnnnnnnnnnnnaggcctcagttcctccctggctgttggctggaagctgccctttgg

SEQ ID NO: 146146 - DNA, 430 bp, Homo sapiens
  misc_feature (1)...(430): n = a,t,c or g
aatacgcctagcgtggaacgagcgtttgtcctgattgagggacacgatctgtgttccactctatatcaacatgactctagcaatgtgactttcgggtccaaatcnnnnnnnnnnnnnnnnnnnnnnnnnnnnnnnnnnnnnnnnnnnnnnnnnnnnnnnnnnnnnnnnnnnnnnnnnnnnnnnnnnnnnnnnnnnnnnnnnnnnnnnnnnnnnnnnnnnnnnnnnnnnnnnnnnnnnnnnnnnnnnnnnnnnnnnnnnnnnnnnnnnnnnnnnnnnnnnnnnnnnnnnnnnnnnnnnnnnnnnnnnnnnnnnnnnnnnnnnnnnnnnnnnnnnnnnnnnnnnnnnnnnnnnnnnnnnnnnnnnnnaggcctcagttcctcgctggctgttggctggaagctgccctttgttctgtaccatgtgggtctct

SEQ ID NO: 146147 - DNA, 1574 bp, Homo sapiens
ttttttttggtggggaatgcaggatccacttttttattgcaggaagactatgtctagagcgaaggctacacagaccccacgatgggggtagtgggggcacccacagtgcggggggagagggggcaggggcggagtcacaagcaagcatggcctggcacagtcccacaagcaccagggatgcccaggcaggatgggccagcagccaggacaggctcgggccccctcctattgcagatgccctctctccccagggtcgggcagggccttgaggtgggagaggcctggaggtgggcagggccccaaggagattgtgctatcagggtgtgtccctgagaaagggccgcagacccctgcccagcctcactctctccggcaccttcagaacccagaagctactgccaggacaggagaggaggcaacatcagctgctggtgggccctgggccagcccaagttttggggggacccagctctgctcagacacaatgccagctcttctgggagcccggtccacgtgctggatagcaacacacacgcacgtgtgcacactccctctctctgagtgtggtccaataaacattttgttggagtaaaacactcacacgaacacagaggaaaacaaacatgcttgtaccaaatcagacacgagcaatctgttacctacatagtcccacctggccacatgactacatgagacacagtgtgtgcaatctctctctctctctcactgcacaaaagggcgcgcgcacacacacacgttgcttcctcacaccccaataagaccaaaaacttccatctaaccttccctcactaactttagctgcccatgctccgaacccccgctgtggaaaagaccccacagggttacagaacaaagggccagcttcccagcccaaacagcccagcgaggaactgaggccttcagtcttgcaacagcaaggaactgaatgctgcaacaaccacatgagcttctaagaagcaaatccttccccgatcaggccttctacatgagacctctgccctggcgaatgctttgattgcagcctcctgagatcccaagtaagaggacccagccaacctgcacccaggctcttgacccacagaatctatgagataataagcatgtgttgtttctggttgctacatttgtggtcatttgttacacagcagtagctgactgatacagatttggaaccgaaagtcacattgctagagtcatgttgctatagagtggaacacagatcgtgtccctcaatcaggacaaacatatttacagataaatgctctcagataacccatatcacccactccccaaaatatagtcatgctcatacaggcacaaagattcacacagacacctcacacatatccagtcttgctgacaaccacacacaggtatctgcaactacccacctctctgtataccctacaccactattacacacacagactgccacaaaaacatatcatcccagacagacacacacaggtatacacgcagatgcacttagatacaagtcacccatccgcgccccccaggttgcacaaatacaccataccataaccacttccgtg

SEQ ID NO: 146148 - DNA, 1706 bp, Homo sapiens
ggcacgaggaggcggcgtggagatcgctgggagcggttgcggcgtgcggggagctgagttatagctgtgacttctgccctgccaggccgcacacaagctgcctggacccgtgttgtaaaaatggaccttctagcagcaaagatggccgtaggtggaggatctctgatgacagacctaacttccagcatttccaaacctctggttccagttgggaacaaacctttaatttggtacccattgaacctgcttgagcgtgttggatttgaagaagtcattgtggttacaaccagggatgttcaaaaggctctatgtgcagaattcaagatgaaaatgaagccagatattgtgtgtatttcttgatgacgctgacatgggaactgcagattctttgcgctacatatatccaaaacttaagacagatgtgctggtgctgagctgtgatctgataacagacgttgccttacatgaggttgtggacctgtttagagcttatgatgcatcacttgctatgttgatgagaaaaggccaagatagcatagaacctgttcccggtcaaaaggggaaaaaaaaagcagtggagcagcgtgacttcattggagtggacagcacaggaaagaggctgctcttcatggctaatgaagcagacttggatgaagagctggtcattaagggatccatcctacagaagcatcctagaatacgtttccacacgggtcttgtggatgcccacctctactgtttgaaaaaatacatcgtggatttcctaatggaaaatggggtcaataacttctatccggagtgaacttgattccatatttagttgaggaaaacagttttcctcagcttcctcacaacaggggacaaggaaggaaaaagagggagggtctaaaggaaaaaggggcttgaagtcctttaggatatcttacagtttttattaaaaggaagccaattacactggaaccggggctccctatggatggcctgctgaaatgcctgtcgaggagacaggtgggaagacttgtccagatcacaggtgcgctgctatgtccacatcatgaaagaggggctctgctctcgagtgagcacactgggactctacatggaagcaaacagacagggtgcccaaatttctgtctgctctctgtccaggaagaacccaccagtccatttcgtcaagcccagattgtcagcattacacctgggttggagttgacaggcctcattgggcccagagaccacagattgggagagaaagtcatcccattaagcgcctcagtcattggctcatccctgtcctcataaaagatagagtgactattacccaattgccttcctcatgaactcagtcaccttttggaggaaggaagcaaatatccaaggcagtgtcattctgcaacaatgctgtgatcgtagaagggtgcagacatcaaggaactgcttgattgggaagtgggccagaaggattgaagccaatagctaaacgtagtgtatgtaggtgatcgtaggggaatgaccagctcatggagatctgagttctgggcaagtcagactccttccttttggcctcctaagccacagatgttggccggcccaccttgtttaactctgtatttatttcccaataaagaagggcttccaaaggcatgctggagacttgtggagcagtccaaagctccatgtcaggtgggctccaggtgtacacagtg

SEQ ID NO: 146149 - DNA, 1218 bp, Homo sapiens
agtcgctagattttttgaaagtcccaagagaagtggtggtcttcccttctgtcatcccagtatatatagttatacatgtaaatatctaaataccccatgtaatgggaaggctatgtacagggcagccttcccaaacgctgtgagggcacagagctgctgtggctgctccaccagggtgtgctggtggctcagctttggggttggactcccacgttcacctccccctcctggtccaggcagaggcaccagaacccatcctgccttttctccagtgtgagcatttcagggagccaccatcagccttgggttcatgagaggaagaaacccccaaagaccaatgcctgggagcccacttctccagcgacaccttccctcgccagagcaggctcctaggagtgcatggcaggggtgccgggtccctgtgcacgggtttgctttctgaacattgcccatcaacaccgccttcagggagtcccagagtaacctactacctcccccatcgctcctctgcccccctcaccctgtgggcaccaacacctcccgcacacagatgaaaaccatctacagagcccttcccgggtccctcgacccaagtggtgtagccgttaccaatgtttacaaccaaggggcccgcccctccttagatgtgtttactccgcattcacaggccacctgttggtttgagtttcatgtgtctccttccctggcctaggttgacttgagcacacaactcgatctttcttcccctccatcaaggcagtgtgtgaggactgtgtgggaatgacatttcttgtacatactttagcacagccaccttagagtatgaacttgtactattgttctgtaaagagggtgaaatagagcttattgtaaagtgtcgggagaagtatagtattgtatttgtaacaatatcgttctttgtatacacaaaactcaaatgatctatatataaatataaataaatatataaatkakkcccrktctccasgtgagcctggaatgtggacaccsgcacacccactgaatgtacttccttgacagtctggtcactggtccctccctscsthcsvtcctccgtcccgtggccacagtcatccagtttggggttgtgatgtatttactgtgctatctatctccctttatttaactgaacgctaawtgtctgtataagagttgctgcaacaataaacaagaacttcccctcttggcaaaaaaaaa

SEQ ID NO: 146150 - DNA, 583 bp, Homo sapiens
ctttttcagaaacatacatggaaatacagaactacacctgtaattacagagggcatatgaaccctagtttgataagccttgctttaaaggatgcagtgtgttctattaaatgtatttaatacaattgcagaaatggaaaatgtggacctccattaaacaaattttttagttcctaatgagataaacttgggaccaaaccgattcctcttgttttagtgctcaaaaatagtttcatttttaggtatttatgctttagtggcctttttttctacctttaaaattgtttaagttccaagtaattttatttttggatgttatatatattcttaacttttatctctacagatattttctggcaagtttctatacgaagtatgatccaactcacttcatcctaaacacagcttctctcctgagtgtactaattcccaaaatgccacaactacatggtgttcggatctttggaattaataagtattgaaatgttttgaaactgaaaaaaaattttacagctactgaatttcttataaggaaggagtggttagtaaactgcactgtttctgtgataatgtgaaatgagaag

SEQ ID NO: 146151 - DNA, 2076 bp, Homo sapiens
tttcgtccgcggccgtagcagccgggctggtcctgctgcgatccggcgtcccggagtggggcggcggagcaaacatgaacgttggagttgcccacagtgaagtgaatccaaatacccgtgtcatgaacagagctgtgtatgtggctgacatatgcattgggagttggcttgcttcatattgtcttactcagcattcccttcttcagtgttcctgttgcttggactttaacaaatattatacataatctggggatgcacgtatttttgcatgcagtgaaaggaacacctttcgaaactcctgaccagggtaaagcaaggctcctaactcattgggaacaactgggactatggagtacagtttacatcttcaccggaagtttttcacaatttctccaataattctatattttctggcaagtttctatacgaagatggatccaactcacttcatcctaaaccacagcttctcctcctgagtggtactaaattccccaaaatggccacaactacatggtgttcggatctttgggaattaataagtattggaaaatgtttggaaactgaaaaaaaaattttaccagctactgaatttcttataaggaaggagtggttaagtaaactggccctgtttctctgataatggtgaaaattgagaaagtattttaccattgggagggcccaatgggctggttccttcaagtgcctgttttgaagtgcagatttcccattaaatgatgccctctgtttaatacccccctggtacatttcctgaagaggggctttataagctatgcggggcaggccccagcttataagtttaaagggcaatcacagtgagggtgtagtagataaattcaaggaaataacagatttgtaagaaactaggaccagcttaacttataatgaatgggcattgtgttaagaaaagaacatttccagtcattcagctgtggttatttaaagcagacttacatgtaaaccggaatcctctctatacaaggtttattaaaggattatttttattaccgtacatatttctcttgttttatgtaagcggatgtatatcctcttgttttatacaagccagttcccacttatgagggtacttttttggttttgctggcttaatattgtgtattggtcaatgaggccatttttacatttattacgttacagagttcatggaggttcacctttgtgactgattggtgataaaagatagccaagtgtcttacaagcagcctctgagtcaagtgttctaattttggaacaaagcaggttttactgcttttccagacacaaggctgctaaaccaattaagaaaataattaatttctttcaagcaactaaaaaatatatggtaatttaaaggtgtctgcttatttggttgaacaatttaattgggaaagtttgtcatcatttgaaaaaggaaatataaaaggaacaaccatatagccaacctgtggtcttggcagaaacaacgtctctagcaatagtaccaaagtaagtaatggagtcttttttttggcaggtctgcagtaaaaggtaaccattttcttttcttagtcctcctgctctcaacccccatattttgcctttgaatacgtgggttttagtatatatagcccaaaatggtaactgtctccagaacagcaaccacattgaattcttgtgacttaggaaagcttcttatagttgctgacattaattgcaagaaataactatatactactttgagaagtaaacatgtgcaaaaaaaacaaagtttcagatatgggacaaaatttaaaaattcagtaacatttataaacagaattgaatgaaaagagttacagaccaacttaaacatcaattcgtgtcagtaaactgacttttgggggtaatgatcattgttttgtatctcaaaagtattgagtttagaaatcagttgtatgatactacctttgtatgtctgtcttttcccgtgtatttttaaataactggtgatctataatttaataaaatttttcgttggtgtaatattatttcaaaagccctcctaatttagtcatcaaaattaaaatgacattttcaagt

SEQ ID NO: 146152 - DNA, 1804 bp, Homo sapiens
tttttttttttttttttgagatggagtttcgctcctgtggcccaggctggagcgcaatggcgtgatctccgctcactgcaacctctgcctcccggcttcaaacgattctcctgcctcagcttccctagtagctgggattacaagtgcatgccaccactgcccccaaaacaaaaataactttttttttttttaagatggagtctcgctctgtcgccaggctggagtgcagtggcgcgatcttggctcaatgcaacctcgcccggctatttttagtagaaacagggttttcaccatgctggccaggatggtctcggtctcttgatccacccaccatggcctcccgaagtgctgggattacaggcataagccaccccgcccagcccaaaaatcacttacgaagcagctactgtaatgtgaactacaaccaaattagtctagaggatagtagtattgaataaaacatttacattaaacccatcactttatacttttcaaaatactttttgcaactatcttgagggttcttcaacaaaagatagcgcaagtatgaactccaatttgcagaagtgagacccaaaaagattatggactatctttaggtatctgcaggagctagggaagaacaaaacatcactgcaagtggccatctatggcgcctgtctttgagggttctttaaaatggacttttgcaaacattatctcatcctgtacataaggttatacaacattgaatggccggggaatttaagtagaacagcgttttttatgggcaggttagtcagctaatggataagagacttgaaattactcttttgggattagcaaatagaagggaaaaacatgataagggcacagagcggtgggtctgggggaaaaagcagaggcacagtttgaaaaaaatgtgtaagagactgactaggtaagatatggtcacagttcataagtcctttgaattctaggattaaaaaggtgaactcgagttaaggatatgaagtctgggacagctttagctgggtgtaggaatcttggtgtgaggatgagggcctgcaatttgcattgtggatcgatatgcagaggaaggaggaaatgaaacctgaaggcactgctactgaaaagaggtggaaaggatgattttacggtgagcctaaggttttgcttaagcttgaggaatagaaaaacacacaaagaaacgacttgcccaaatccattattgagacgcccccctcatttccggaagtcctttaaaatcgcagaatattaatgctgaagcaccctcccctctactcctgcgctatgaggtgtctactgtaacgccagtccttttccttggacaaagtggaacgccttactgaaggagagtccctgttaaggacagttacattcttagttctgtagaacctccgtatgtcgtaggattctcaaattctagctaatgatctaccgatttcaagccatatatggtacgaggcaatagccatataataaaagaacgtggccagtcccttagaaattatcaggttgaaatcggattccgtgactcttgcggcggcctctgggttcctaaagacttctggaaatcatgtctccctacagggctaaacagcacgcactcgcgccccttcccggtaacccgcccccatcccacccccgccctccaggccaggttcgtgagtagaatccaattttccatggcccactggatctgcagggttgctcggtgcagacccggccagcggaggaaggaggggcttcagcgacagggagggcccggagcggccagaggtattcccatcttcctcttggt

SEQ ID NO: 146153 - DNA, 391 bp, Homo sapiens
tgcggccgcacctggagcccgacggcctgcggaggcaagaaactgctcaacaagtgcgccgcctcagccgcggaggagagcggggccggcaagaaggacaaggtgaccatagccgatgactactcagatccctttgatgccaagaatgatctcaagagcaaagcaggaaagggggagagtgctggctacatggagccctatgaggcacagaggatcatgacagaatttcagaggcaggaaagtgtccggtcccagcataaaggtatccagttatatgacaccccttacgaacctgaaggccaaagtgttgactcggactcggagagcacagtcagaacagccctccgttcgacagtgtcccggaagtcatccactactacaccaccagaaa

SEQ ID NO: 146154 - DNA, 2833 bp, Homo sapiens
cgggccgccgggacgggcacgggcgcgcgggctccggcgggcgccggctgccttcctccgtcgctcgctgtctctcccggccgcattctcctccgctgcggggccgagctctccccagcgctcgcaggaaggaagaagggagccgaggacgccgagaagttcccgcggcagccgcggatcccggccaaggcggaggctgcggctccgacggggcaggagcgcgatccacggcgaggggcgtacggccaaagggtccgcggcgtggagcgctcggaccttccgctctcccccgggcgtgggccgggaccccatgagacgcgcccacgaggggcgcgagattcctagcttgggcggcgctaggcggagggaggtgttgcaggccggccggagccagagagctgccggcaggaggcggcggcggcaagaacttgaacttggcgtcgggagcgggcgccccggaggccccccgccggggccggggcgccgagggacctgcgccgcagcgctgccccccgaatggccgcggcggcggaccgggctcccgcgccgcggccctaggccgcctctcgccatggccaagtggctaaacaagtacttcagcttgggcaacagcaagaccaagagccccccgcagcccgccgcggccagactaccgcgagcagcggcgccgaggcgagcggccttcgcagcccccccaggccgtgccgccaggcctcctccgcccgcctcggcgtcctgcggtccggccaccgcctcctgcttctcagcctcttcgggctcgctgcccgacgacagcggcagcaccagcgacctcatccgcgcctaccgcgcgcagaaggagcgacacttccaggacccctacaacgggcctggctcgtcgctgcgcaaactgcgcgccatgtgccgcctggactactgcggcggcagcggggagccaggcggggtccagcgcgccttctcggcctcgtccgcgtcgggcgccgcgggctgttgctgcgcctcctcgggcgcgggcgccgccgcgtcctcgtcctcgtcctccggctctccgcatctctaccgcagcagcagcgagcggcggcccgccacgccggccgaggtgcgctacatctcccccaagcaccgcctcatcaaagtggagagcgccgcgggcggtggggccggggaccccctggggggcgcctgcgcgggcggccgcacctggagcccgacggcctgcggaggctagaaactgctcaacaagtgctcttcctcatccgcggaggagagcggggccggcatgaaagacaaggtgaccatagccgatgactacttagatccctttgatgccaagaatgatctcaaaagcatatcaggaaagggggagagtgctggctacatggaaccctatgaggaacagaggatcatgacagaatattagaggcaggaatgtgtccggtcccaacattaaggtatccagttatatgaaaccccttaagaacctgaaggccaaaattttgaatcggaatcggagagcacagttaacccccgaatgcgggaaaacaaacttccccaagattacgaacaggcccggccgattaatacggaccagcctttggaattgaacccggttcacaattcccagccctggcagcacagtttaatggcaacgagaagccgcagtcatccccctcaccttcgcggtgaccggcggcgccagctttcgtgcccctggagggggcttttaagcctatcaaacatgggagccctgagttctgcgggatcctaggagaaagggtggatcctgccgtccccctgggagaagcaaatatggtatcacggagccatcagcagaggagacgccgagaaccttgcttgcgactctgcaaggagtgtagctaccttgtccggaacagccagaccagcaagcatgactaccccctctccctgaggagcaaccagggttttatgcacatgaaactggccaaaaccaaagagaaatacgttctgggtcagaaaagccctccggttcgacagtgtcccggaagtcatccactactacaccacacagaaagctacccaatcaaaggggctgagcacttgtccctcctctatcccgtggctgtgaggacccttttgagcggaccagactctgccctgctctgtgacagagcctggagacttgcgaggtgccagaggccccccaccaaccagcccccagccactgttgctggctgtgtcgtttgtgttgtgtgtatggtactagcacaccactgcatgtctctagaatgctgttgccacttacgggggctggagaaggcctggataaagacagaagggcggcaacacaccaccccaagccccaaccccaacgaggcccttgagtttctgtgaattaaaatatttgcaaatcccaaggagatgccttccaggaatgaacaaaggcagaccagctccgaggggcggggtagggtggggcgggagctcccttggctgacatctctttgttctcccagctgtctcaaattcacacccttctgacagggcagagttttcccacaggagcccccctactgatgctgggagccaaatgctggtgctttgagagtcccggaggccccggggttcgccgccccgctggtgtgtatatgtgtgtctgtgtgagtgtgtgtgtgagtacagatgtgagaaggtggtcacacacagatgggtaagcccactgatctacttgtagtcactcagtgtaatcattaggctatcttcaaggaattcattgtgcagtcaaaaagaggatctcaatctatttatgacataggagtgtagtaaataaaaataagtccatttaactataaat

SEQ ID NO: 146155 - DNA, 1520 bp, Homo sapiens
aatgagacttacacagtgatttaaattatatacgggatgctcagcccagccacaaaagctgtggtgagatttgggccccaaatctccgactcccagattcccaaacccacattaaaaaaaaaaaaatcaccctgcagactgcctaatagctttaaccagtctctgtctccccttcttcacatccttccggtggcagaaaagtttgtgaatattaagtaaaatttgattcaatagacattttatttttttgtaaagatgatggggtcttgctaatgctgctcaggatggtcttgaaccccgtgaccacaggtgatcctcccacctctggtctcccaggggtgctgggaattaccagatgtgagcccactgcggcccagcctggtttggtagtttcttaaaagtgaaaattagacctaccatgtgacccagccattccactactaggtgtctacccaagaaaaataaaagcatgtttccacacaaagacttgtatacaaatattcatagcaactttatttggaatagcaaaaaaaaagggaaaacaacccaaacagccatcagcaggtgaatggataaacacatggtggatatccatacaatgaaacactgctcagctgtgaaaaaggaacaaactattgaaacaatatccctgttcaggagcaggatttggagaatataagaagcatatcttttataatttaaaaacttgctttctaagatttgaactgaaagatcttttttgaagatgagtgtcatggaattgacaatgatttgaagtgttatggcacttcctttgaataaaaaaatcaaagttgctaacaagttccatgtacttaaaaatattgggacagagccgctcaaagctatgaaaagttttgggccaccccatgaatatgagataagattaacaagagaggagaagggaagtgaaaaatatgggctttccatggcatttccaattgtatgaattaccattgaaaggctaagtgatggaaatgttactctctagggagtcagtgtttttcacatctaaaaatggtatcagtcataggaaaaagcttatctgtctactgccaaaaagggaagagggtaatagcacgtattgagcacctactgtattattcagatgaggtcctgccctacggaaattccagtccccactgttctggggggccctgccaatcgtctttagataataggtgtggggctaggggttccgctgtgaagttaccttccttccaagggtgctcagccagcacaaagctgtggtgagatttgggtccaggtctcagactccagattccaaaccacatttaaaaaaataaaatcatcacctgcagactgcctatagctttgacagtctccggtgtctccctttcgtttgcatccctcgggtggaaaaaaggtttatgaataattttagtaaaatttgattccaaaagacatttcttggattatcacattggggtctcaaagtgtgggtccctggaccagtgacatcagcattacctggggcactc

SEQ ID NO: 146156 - DNA, 1578 bp, Homo sapiens
  misc_feature (1)...(1578): n = a,t,c or g
gtggatttggagccatcagtgagggcatgaaaaacccgnccgaaacacgcggtccgatcacgcgtgggcttggcgttagcttggcggggttacacgcgggttcaacatgcgtatcgaaaagtgttatttctgttcggggcccatctatcctggacacggcatgatgttcgtccgcaacgattgcaaggtgttcagattttgcaaatctaaatgtcataaaaactttaaaaagaagcgcaatcctccgcaaagttaggtggaccaaagcattccggaaagcagctggtaaagagcttacagtggataattcatttgaatttgaaaaacgtaggaaatgaacctattcaaattaccagcgagacttattgggaattaaaactatttgatgcgatgaagagagttgaagaaatcaaacagaaacccccaagctaaatttataatgaacagattgaagaaaaataaagagctacagaaagttccaggatatcaaaagaagtccaagccaaaacatcccatctttatcccgggcccctccttgccaggcaaaggggaaacagttgggagaggaaatgggtacagccaggttacaaggaggatgtggacatgggaagatgcccccttaaaaatctctgtaaccatttcttttatgtacatttgaaaatgccctttggatacttggaactgctaaattactttttttttttacataaggtcacttaaatgaaaagccgattaaaagacatctttccctgcattgccatctacataatatcaggatattacggatgttagatttgcatctcagtgttaaatctttactgatagatgtacttaagtaaatcatgaaaattctacttgtaactatagaagtgaattgtggaccgtaaaatggttgtgctattgggataatggccactaggcagcattggtatagtacctaatggccaaaaattccatggctagtgatcgtataaaataaaatattcttggccagtaaaataatcccctttggttaatggttaatagaagggggggataccaaaaaaggaaccaaacaattgtaagggccagtgtccagatatttttaattttaagtatttcccctgttttgggtttaatttgccatcctaagaagagcataaatgacattggtttggatgaaagcctaaattaatgctgggactggttttgaccctgggtttaaccccttctgaatagggcagttgtgggatgctgggggatgagaacctgaataatcctttggcctgggagtgacacctacactcgtagaatttcccactttggagaatactcagttccaacttgtgattcctgatagaacagactttacttttctagcccagcgattgatctagaagcagaggaatcccagcgccttttaaaagttgttatgtggttttcttttaaaaagctcctgtttttggaaacgtagaatttatggggttcaaccgtatgttcattatttgtacataaaataaaacccatttaaaaagtaatgctgatatttattctttaaaggcactaaacaaagatatgaaatattgatgaccttggaga

SEQ ID NO: 146157 - DNA, 1553 bp, Homo sapiens
tttttttttttttttttactttgaaaggaaagtttattatttcccaatgttctttacattttcatttggaaatatcattcctgacagaaatagatacattataccttcgaaagcagaaagatcttaattaattaaaacagtttacatttaccttagcattagggtctkggctggctaatttcaaagggttaaaaattgcacctattttgggccaccttgggtcctgaataattatccagggtaaaagtataatatttcatactttatacattttgccttcatcacacatttactttcccacacagtgttcaacttcacatttaaaaagcaaattagtctttaattccctaatgaatataatagtcttgatttgattgaagtttcaaatggaaaataaaactatgcggagttttcaataactggcttagcccaataaatgttgccaatagaagtttaaacacttgtttaaacagtttgcaaagtattatttcctttattctcttcaaaacaacacagacacacataaagtcacacattacaggcatctgaactggtaaaatgttacagattaagtggcatgcaggtattttacatttttaagtgcaatgaaaaatgctgcttattcattttgcttgaaatggatgaaaacaactaaaataaatgcttaattaaaatataactattccatgtatataagggtttttgtttttaaaccaaagtggcagagataagaattttaggtcagaataacttacttcttaactgaagattgtcactgggcaacatttgggtactaaaataaaatttcctcaaaaagcacatttcctattgatctcatctcgtcatatggccgattcctatctactgcacagttagattacccacaggaagttctaaatcttgggccagcctytgctgcaatggcacagtatacttttgattgacttctctctttttcccagtcaatacttactcagaaagcacacacatavsamgagasasacacacsakgttaaataagagcctacaaaaaaatgctgtgtttactatgctcagtttctttctttgccttccctcttcttccccactggttctgaggagcaagatagtatatattttattttattttttgagatggagtttcgttcttgtcacccaggctggagtgcagtggtgtgatctcggctcactacaacctccacctcctgggttcaagcgattttcctgcctcagcctccccagtagctgggataacaggctcttgccacagggcccagctaatttctgtatttttagtagagatggggatttcaccgtgttggccaggctggtctttttagtagagatggggtttcaccaagttagtcaggctggtctcgaactcctgacctcgtcatccgcccgccttggccccccagagtgctggaatgcagtgggcaatacattatctttccctggctattttcaagattttctttgtctatattttcaaagtttgattgcaatctatctcaatttggattcatttggatctgtcttttttattcctcgtg

SEQ ID NO: 146158 - DNA, 341 bp, Homo sapiens
ggagtacgcgcgagagccttgcccatggcgaattgtggatgactgtggtggggcctttacgatgggtaccattggtggtggtatctttcaagcaatcaaaggttttcgcaattctccagtgggagtaaaccacagactacgagggagtttgacagctattaaaaccagggctccacagttaggaggtaagcagaattttcattttaactgaactatttttttctgttcctttgaagatggagctatttttatttttagattacaacaattagtgattttagtttggtctaacggtttgtcacaaacatatatccctatagtttcttcttgatttgtagttt

SEQ ID NO: 146159 - DNA, 1742 bp, Homo sapiens
cattggagtcaagatggaggagtacgcgcgagagccttgcccatggcgaattgtggatgactgtggtggggcctttacgatgggtaccattcggtggtggtatctttcaagcaatcaaaggttttcgcaattctccagtgggagtaaaccacagactacgagggagtttgacagctattaaaaccagggctccacagttaggaggtagctttgcagtttggggagggctgttttccatgattgactgtagtatggttcaagtcagaggaaaggaagatccctgggaactccatcacaagtgggtgccttaacggggagccatactggcaagcaagaaatgggacccagtggcccatggttggggtcagcccgcaatgggttggcatttttcctagcttttaatttgaagggagctggtatctttgtttgacaagatttgcctctggcacagttttcccaatgggtcctccagtttgccagaagacccctccccagtttgcctttcaactcagttaccttccctccacctttggggggacttatcggaccaatatccagtgggacttcctttcctagggatttcttttaacagaaccgagttgtggttccgagaagggatttcagaaggatccaagttaccagtcctgtttttaaaccccatagggtggggacagcctatgggccaattagcctattaaggggacatttagcacctttttctaattaaaaggaacaagcggggaagggtgctaaaagataatacgtttatttattcacacttgaaattggcatttggtgatcaaaataaaatgtttaaatcggctaaaggaaaatacagtaagtgcttgaaagatgaaggaccaaaaggccaaaaaacagtgaaatatgatcatcatgctccttgcggacttctctgcctggttttgtgtgttctgttattcaaacaataaaaagctggtgggaacttactctttcttttaagataaagttgtagacttcggatgtttccaggccccatgtccctccaaataatgccatgtttttataggttaggtccccctcatcacctgaagtgaccctcctgagaattatgccagagtccaaccatgggatccatttccacagtgagatgcctttatggattgaaggatatggtaaaatgtttaatagtttacctttgaaagtaaaatatacctatgtccttggttttgaggatattggatacaaaactctcttccctttagggctactgagtcttgattcctgatcatcagaaatttcaccagaaacaacttgcttccaatatacccaattctatatgaagaattcatggagagtgtactggcactggaagagtttagtgtttcttgtaatgccttgaaaaataaagtatgtactgttttgaaatgtgttccaagtccctctgccataaacgatgtattttggggtcctggttggccccggaaaatggatgagcacttcagaacaggtcattttccctgatattggaagtgacatgtggccctataggaggcatgatgttagttaattacacatttgcctacatctgtgggaaatggagaacaaagccatgtgggtactgtaaacacacgtttatcttttggcccaatgccatacatatggtaggcatttaattactgattgtgtttggataatttgggaatttttgactgtggtaaaatatacataaaataatactttttaaaaaaaaaaaaaaaaaa

SEQ ID NO: 146160 - DNA, 4632 bp, Homo sapiens
atggcgccgccgctcgcagccggtccctcccctcccctgcacccctcagccgcgggattggaagccgggcgcttgtgcaagagggtcctggggccgtgcggggacggggaggccaccccacgcccacttaatcggatcccaccccgagtgacggatgtccagctctgttgtgtccaagagacagacattcattcattcagtcagtcggtcaatcagtgtttcctgacccctgagcacatggcagacagcagccctctcgtgggcagcacgcccaccggttatgggaccctgacgatagggacatcaatagatcccctcagctcctcagtttcatccgtgaggctcagcggctactgtggcagtccatggagggtcatcggctatcacgtcgtggtctggatgatggctgggatccctttgctgctcttccgttggaagcccctgtggggggtgcggctgcggctccggccctgcaacctggcccacgccgaaacactcgttatcgaaataagagacaaagaggatagttcctggcagctcttcactgtccaggtgcagactgaggccatcggcgagggcagcctggagccgtccccacagtcccaggcagaggatggccggagccaggcggcagttggggcggtaccagagggtgcctggaaggatacggcccagctccacaagagcgaggaggcgaagcgggtgctgcggtattacctcttccagggccagcgctatatctggatcgagacccagcaagccttctaccaggtcagcctcctggaccatggccgctcttgtgacgacgtccaccgctcccgccatggcctcagcctccaggaccaaatggtgaggaaggccatttacggccccaacgtgatcagcataccggtcaagtcctacccccagctgctggtggacgaggcactgaacccctactatgggttccaggccttcagcatcgcgctgtggctggctgaccactactactggtacgccctgtgcatcttcctcatttcctccatctccatctgcctgtcgctgtacaagaccagaaagcaaagccagactctaagggacatggtcaagttgtccatgcgggtgtgcgtgtgccggccagggggagaggaagagtgggtggactccagtgagctagtgcccggagactgcctggtgctgccccaggagggtgggctgatgccctgtgatgccgccctggtggccggcgagtgcatggtgaatgagagctctctgacaggagagagcattccagtgctgaagacggcactgccggaggggctggggccctactgtgcagagacacaccggcggcacacactcttctgcgggaccctcatcttgcaggcccgggcctatgtgggaccgcacgtcctggcagtggtgacccgcacagggttctgcacggcaaaagggggcctggtgagctccatcttgcacccccggcccatcaacttcaagttctataaacacagcatgaagtttgtggctgccctctctgtcctggctctcctcggcaccatctacagcatcttcatcctctaccgaaaccgggtgcctctgaatgagattgtaatccgggctctcgacctggtgaccgtggtggtgccacctgccctgcctgctgccatgactgtgtgcacgctctacgcccagagccgactgcggagacagggcattttctgcatccacccactgcgcatcaacctggggggcaagctgcagctggtgtgtttcgacaagacgggcaccctcactgaggacggcttagacgtgatgggggtggtgcccctgaaggggcaggcattcctgcccctggtcccagagcctcgccgcctgcctgtggggcccctgctccgagcactggccacctgccatgccctcagccggctccaggacacccccgtgggcgaccccatggacttgaagatggtggagtctactggctgggtcctggaggaagagccggctgcagactcagcatttgggacccaggtcttggcagtgatgagacccccactttgggagccccagctgcaggcaatggaggagcccccggtgccagtcagcgtcctccaccgcttccccttctcttcggctctgcagcgcatgagtgtggtggtggcgtggccaggggccactcagcccgaggcctacgtcaaaggctccccggagctggtggcagggctctgcaaccccgagacagtgcccaccgacttcgcccagatgctgcagagctatacagctgctggctaccgtgtcgtggccctggccagcaagccactgcccactgtgcccagcctggaggcagcccagcaactgacgagggacactgtggaaggagacctgagcctcctggggctgctggtcatgaggaacctactgaagccgcagacaacgccagttatccaggctctgcgaaggacccgcatccgcgccgtcatggtgacaggggacaacctgcagacagcggtgactgtggcccggggctgtggcatggtggccccccaggagcatctgatcatcgtccacgccacccaccctgagcggggtcagcctgcctctctcgagttcctgccgatggagtcccccacagccgtgaatggcgttaaggatcctgaccaggctgcaagctacaccgtggagccagacccccgatccaggcacctggccctcagcgggcccacctttggtatcattgtgaagcacttccccaagctgctgcccaaggtcctggtccagggcactgtctttgcccgcatggcccctgagcagaagacagagctggtgtgcgagctacagaagcttcagtactgcgtgggcatgtgcggagacggcgccaatgactgtggggccctgaaggcggctgatgtcggcatctcgctgtcccaggcagaagcctcagtggtctcacccttcacctcgagcatggccagtattgagtgcgtgcccatggtcatcagggaggggcgctgttcccttgacacttcgttcagcgtcttcaagtacatggctctgtacagcctgacccagttcatctccgtcctgatcctctacacgatcaacaccaacctgggtgacctgcagttcctggccatcgacctggtcatcaccaccacagtggcagtgctcatgagccgcacggggccagcgctggtcctgggacgggtgcggccaccgggggcgctgctcagcgtgcccgtgctcagcagcctgctgctgcagatggtcctggtgaccggcgtgcagctagggggctacttcctgaccctggcccagccatggttcgtgcctctgaacaggacagtggccgcaccagacaacctgcccaactacgagaacaccgtggtcttctctctgtccagcttccagtacctcatcctggctgcagccgtgtccaagggggcgcccttccgccggccgctctacaccaatgtgcccttcctggtggccctggcgctcctgagctccgtcctggtgggccttgtcctggtccccggcctcctgcaggggccgctggcgctgaggaacatcactgacaccggcttcaagctgctgctgctgggtctggtcaccctcaacttcgtgggggccttcatgctggagagcgtgctagaccagtgcctccccgcctgcctgcgccgcctccggcccaagcgggcctccaagaagcgcttcaagcagctggaacgagagctggccgagcagccctggccgccgctgcccgccggccccctgagaaaaggaaagaaagaaccgctggttgtggaagccagccatggcccagagctcagcagtgtaggagaggagggtgcgggcctgagagaggcagcaggcttggctggagaggcagaaggaaaaccaaggcaggagagtgtcctggaagctgggagaaggcagagggagatcgaggcttactttctggctgaggggcctagggacgcaggggagtcgggggtgggggaggccgcagctgtggaagaggccagagctgtcctctctgacaccaccccggcctgcctctttgttgccatgagagctgcctacctcttcctgctattcctgcctgcaggcttgctggctcagggccagtatgacctggacccgctgccgccgttccctgaccacgtccagtacacccactatagcgaccagatcgacaacccagactactatgattatcaagaggtgactcctcggccctccgaggaacagttccagttccagtcccagcagcaagtccaacaggaagtcatcccagccccaaccccagaaccaggaaatgcagagctggagcccacagagcctgggcctcttgactgccgtgaggaacagtacccgtgcacccgcctctactccatacacaggccttgcaaacagtgtctcaacgaggtctgcttctacagcctccgccgtgtgtacgtcattaacaaggagatctgtgttcgtacagtgtgtgcccatgaggagctcctccgagtcccagccccaccgccttacccgccggctccagctctgccctgcccagaacgctgcgtcatgacagtgtacgcgcgcatgcgtgttgtgggaattgcacgggagatggaaggcttcagggacacagctttctga

SEQ ID NO: 146161 - DNA, 1178 bp, Homo sapiens
  misc_feature (1)...(1178): n = a,t,c or g
tggagaaagcgagagccttgnngctgatagcttgaggaccctcgcaggnaaccccgggncgacccacgcgtccgcccacgcgtncggcggagtgacccggacagctgtcctctctgacaccaccccggcctgcctctttgttgccatggagagctgcctacctcttcctggctattcctgcctgcaggcttgctggctcagggccagtatgacctggacccgctgccgccgttccctgaccacggtcagtacacccactatatggaccagatcgacaacccagactactatgattatcaagaggggactcctcgggccctccgagggacagttccaagttccacgtcccagcaggaagtccaacagggagtgattcccagccccaaccccagagcccaagggaatgcagagctcggagcccacagagcctgggcctcttgactgccgtgaggaacagtacccgtgcaacccgcctcttactccatacacaggccttgcaaagcagtgtctcaacgaggtctgcttctacagcctccgccgtgtgtacgtcattaacaaggagatctgtgtttcgtacagtgtgttgcccatgagggagctcctccgagcttgacctctgttcggggacaagtttttccaaatgtgggcgttgatgggccagcagcggcctgttgccaatccgtgggcggcctcctgtgcccaggagctgtgggagcttctaagggtggtgcttgcatcctgagtcctggcccctcctggggaatttggggccctcgggccctgccctgacatggtgcttttttcccccaatccccaatgttcctttttattctgtaaaaagttaagtggacttgcagccctgggggttgcaggctgcggtgcctcaggccccttcctttcaagcctgtggcccacctctggggcacaatgggggctccccaactgcccagtctgcccctcgggttgggggagtatcccaaggcctctctgtgggactctgggcccctgacgggctttcctcagcccgtttttgaaggacagacagtcccccgaggtaaggctacatcccccccacccaaagctggtctgcttggatttcctaacagcccccgtgggcatggaccacctttattttatacaaaattaaaaaaacaagtttttacaaaaaaaaaaaaaaa

SEQ ID NO: 146162 - DNA, 2052 bp, Homo sapiens
tttttttttttttttttttaattcagagacctttttttattaaatgtgtaaaaagcagttctcatcttaccaagctcaaaatcagaccgaatgtaatgagggtgtataattgttatatttataaactgtatcacccaaaaactcaatgcaggcccccttctatattacattcaacatttgcatatttacatcgatacttactgcaaaggtaaataccaaaatgaactcccatcattttagttcagaacacaggtgatataatttcaaaacaaaggcaattttttttcaaccaaaagaacagaagtctccccaagtacccaattcaactattttgccaggaaaaatacaacactaattataaggatttcccattccagtttaggtcaggtaaggatacggttggtttggtttggtttggtttggttttggtttttagaaacaggggtctcactctggtcatacggggctgggagtttcagtggtggcgatcagaattcactgcagccttgaactcctgggctccaaagaatcttcccaacctcagcctcccaaagcactgggattacaggtgtgagccatcacagtctagtaaggtatgtttttgttactgaaatacagctaaagttttggattttaatcaccaaaataacagtacttctggtttacaattgactttaaaataaaggatactaatatatatttattttcacattttttttaaatcttcaaaactgaaatacaaattctgaaagtatttggtgccctgtccattggtccaataaatttggattggtttttaaacaggtcacaaaagttcaattagctaacccagaattctatatcgtagttgcctgtcgtactggggttcagtcttaagtctgactatatcaaaagcagcagctccagaatttatttccataaaattaatccccaagagttactgggtagcttttaaagtatttccatcgcttataatacaactcactagatacgatagtctatactaagtgactcggtgacatcaaaattatctggagaagttttttaaaaaatacgtaaggatccacatcataactacactaagaatcaagaatgtctgtattttttttaacgttcccaggtttataaatgtatgcagcctagcgtgggaaaccccaacgtaccacttaagcctgtggttctcaacttttcaggtgccactggaaacactgggggaatctttaaaaacaaaaagccaaagcaaaacaaacaaagaaaaccagatgtgcttcagtaggatagagaattgtgtgcagggaaccagcattttaaacaaccactgcagttggtcccaaatgactcagaaacgctgtactacctttgtcagatatcatattataatgagtacattcagcaatttaggtgacattgtctgcaagccctaatgaactcctgccctaggcagttttagcaagtgtttgagggcaacactcagccttttcaaataaaatatatttaatattccttaaatattagggtcaaagtccaactgaattggtgagacccaccattcattgaaagaaggcaaatgcctcttttcccaacaattttaaacctttaaacaaacccagttccttagcccctcaacttaaaccctaatgcctttcctcctatcgttagcctgatatgtgatcagaggtagtgattcccatcttaccagaaatgtattgtggattataaaagataccattcatacatcttcacaggctctgtacagtccctatgtaatggagattggagaccagttggatattaaataatactgtaaaacagtaaacaatacactcttgattttaaacaatgaaacctcgtatttccctcaaacaataaattcttacatataatatccagaaaaaaattctagaaaacactaaaggtatcacgctgcctcttttgtgaagctatttactaatttttcaccatccctgtaattatctataaagtgggtatttggtgtacatcattccacttcaagaaatttttttttcttttttttggagacggagtcttgct

SEQ ID NO: 146163 - DNA, 522 bp, Homo sapiens
ctcaatttaacccaccaatggatatccattataaaaataagccatttctaaatataaatcatgtatcatacgtatatatatattatgtgtataattacatatcaacaaaagtattcaagatgcttcatccaagtaagtagaacaaaaattttgcaatatgacactcatatatacatattgtacatgtgtgtaattttttcatgtattcatttgcagtctttgtatttaaaaaacatttactgttatgtttgtataatagaacagtaatcatttattataatctaggcaagttgtaaataaattcataattcaaacagccagtatatatgcatatatgagtgttatattgcaaaatctttgttttacttacatggttaaagcagcaagaattcttttgttgatatgtaattatacacataaaatatatatatgtatgatacatgaaatatatttagaaatgttcataattttaatggatatcctttggtgtgaataattgaatacagagtttttaaaataaaa

SEQ ID NO: 146164 - DNA, 400 bp, Homo sapiens
tggtgaaatagttgtttttaaagttgaaggacgagacattccaatagttcacagagtaatcaaagttcatgaaaaagataatggagacatcaaatttctgactaaaggagataataatgaagttgatgatagaggcttgtacaaagaaggccagaactggctggaaaagaaggacgtggtgggaagagcaagaggtatgctcttttggctgtaatgggtgcatatgtgttactaaaacgtgaatcctaaaatgagaagcagttcctgggaccagattgaaatgaattctgttgaaaaagagaaaaactaatatatttgagatgttccattttctgtataaaagggaacagtgtggagatgtttttgtcttgtccaaataaaagattcaccagtaaaaaaa

SEQ ID NO: 146165 - DNA, 656 bp, Homo sapiens
gtgcgtgcgggcgccgtgggggctcatctccccgcgtccggcttggatatcttcggggacctgaagaagatgaacaagcgccagctctattaccaggttttaactctcgccatgatcgtgtcttctgcactcatgatatggaaaggcttgatcgtgctcacaggcagtgagagccccatcgtggtggtgctgagtggcagtatggagccggcctttcacagaggagacctcctgttcctcacaaatttccgggaagacccaatcagagctgagataatggagacatcaaatttctgactaaaggagataataatgaagttgatgatagaggcttgtccaaagaaggccagaactggctggaaaaaaaagaccgtggtgggaagagcaagagggtttttaccatatgttggtatggtcaccataataatgaatgactatccaaaattcaagtatgctcttttggctgtaatgggtgcatatgtgttactaaaacgtgaatcctaaaatgagaagcagttcctgggaccagattgaaatgaattctgttgaaaaagagaaaaactaatatatttgagatgttccattttctgtataaaagggaacagtgtggagatgtttttgtcttgtccaaataaaagattcaccagtaaaaaaaa

SEQ ID NO: 146166 - DNA, 417 bp, Homo sapiens
atgtttagtccatcagtatatttttgggtttttgaccataatgtagcattgaacagctcatttagagaacaagccatggggggaagaggtaatcttttgattctgtcctcagcgcagtatttaacggacttcatctgaatacatttacagaccaaatttctttgtagacctcacagtgattttccattgtgttttctttccagtatgctcttttggctgtaatgggtgcatatgtgttactaaaacgtgaatcctaaaatgagaagcagttcctgggaccagattgaaatgaattctgttgaaaaagagaaaaactaatatatttgagatgttccattttctgtataaaagggaacagtgtggagatgtttttgtcttgtccaaataaaagattcaccagtaaaaaaaaaaaaaaaa

SEQ ID NO: 146167 - DNA, 845 bp, Homo sapiens
  misc_feature (1)...(845): n = a,t,c or g
tttcgtcaggtgctccgcagccgtctgtgccacccagagccggcgggccgctaggtccccggagaaccctgctatggtgcgtgcgggcccgccgtgggggctcaatctccccgcgtctcggcttgggatatcttcagnggaccctgaagaagatgaacaagcgccagctctattaccagagttttaaaccttcgccatggatcgtgtcttctgcactcatgatatggaaaggcttgatcgtgctcacaggcagtgagagccccatcgtggtggtgctgagtggcagtatggagccggcctttcacagaggagacctccctgttcctcacaaattttccgggaagacccaaatcagagctggtgaaatagttgtttttaaagtttgaaggccgaggacattcccaattagttcacagaggtaatcaaaagttcatgaaaaagattaatggagacatcaaatttcttgacttaaagggagataataattgaagtttgatggattaggaggctttgtacaagaaggccagaaactggctggaaaagaaggacgtggtgggaagagcaagagggtttttaccatatgttggtatggtcaccaataaaaatgaatgactatccaaaattcaagtatgctcttttggctgtaatgggtgcaatatgtgtttctaaaacggtgaatcctaaaatgagaagcagttcctgggaccagattgaaatgaatttctgttgaaaaagagaaaaactaatatatttgagatgttccatttttctgtataaaagggaaacagtgtggagatgtttttgtcttgtcccaataaaagattccccagtaaagatgaaaaaaa

SEQ ID NO: 146168 - DNA, 1177 bp, Homo sapiens
  misc_feature (1)...(1177): n = a,t,c or g
ttttttttaggcagagtcttactctgtcacccaggctggagtgcagtgacacgatcttggctcactacaacctatgcctccccagttcaagtaatcctcccaccttagcctcctgagtagctgggattacaggcgcctgccaccacacccagctaatttttgtgtttttagtagagacagggtttcaccacattgtccaggctggtcttgaactcctggcctcaagagacccacccgcctcaggctcccacagcgctgggattacaggcatgagccgccatatctggcctatttatttttttaatgtttttcaaaatgagaaggttgggttaaggtaatttttaaaaaatcgcttcaaagttttcttaaactccacaattaattttcctggagactcttggcaaagcaactggtccttaataggtcatggcctcaaattcccaattggatggtcatctnggggcaaatcagtccaatgacagccacaagtggtcagaaagctttcttagcaggccctcttgggtcactaggcacactacctaggagtcaagctgtgaaaagaaggctgcttcttaaacttacaaaagataggatcttcagggatgtgctgctcttgatgtttttgaaagggcatagagaaacacacgggcaatgtttgcagaggcaacagactaaagaaagcacatctatagttgtattggctttgtgtgggttgtatggtaaacaggtagtcaccctgcttaatgtgggtatcccattttccataaatgtctatttcaccaccccaaaaagccctcttatcatgaaattaatcatctgatgcacttcaagtaccagtcacaaaaatgatggaaccccaggcagaattcccactgctagacaagccccgacaaaaactgttactgttagcccaaggaaatttgccacacaattttgataagtggcactaaagcccacataagacaggaaatgggttagaggacatcaatgtattgagacagaaagtgaaagggtgggcaggatttgcgaggttaccagtttgaatatggccattcctgcttttactaaaggtcaatttagaatacaaatgttacagaattcatttagagccaaaaagtaattctgacaaagactgtcttaaaatgcaagatttttaggtccaaaatttcttacgtaa

SEQ ID NO: 146169 - DNA, 628 bp, Homo sapiens
  misc_feature (1)...(628): n = a,t,c or g
aaanggggggaaaaaaangaattccgaacccggtttctttgggtngcttntggggaaccgggaaaaggacttncaaggtttttcntattgggaaaagcttactgaatcgggatggatgcttttcaggaaagcaaaggacagngccagtnccccatngcattatataggacngtatggaggcccatacaatattcctggatatttcattaagatttaaaggacgcatatcaagatgaagaaacaacccaangaaacccatcaacagctggctgataagaagggcctccatgttgtggaaatccgggaggaatgtggccctctgcccattgtggttgcgtccccccgggggcccttgaggaaggatccagagccagaagatgaggttccagacgtcaaactggactgggaagatgtgaagactgcacagggaatgaagcgctctgtgtggtctaatttgaagagagccgccacgtaacctctctggccttgtgcagccagttcctgtgctgccctgcacctaggagagactcagcccctcacagcttgggatgttaccttgccttttgtttgttttgagggaagtttaatctttaaactctttggaaataaataattatagctttcaaaa

SEQ ID NO: 146170 - DNA, 212 bp, Homo sapiens
cctctttcgaagtaaaagtgaaaacgtttcttacctaaagtatcctggtatcaaaatcctaatatgtttctcaatcctcgctcccgtttaaccttaatcttcttctttcggtccaactcttctctctgctggatcatgtctgcctccaccttctcctgctcttccttgcttctttgggcaatggtctgcactgctccatttttcataagagg

SEQ ID NO: 146171 - DNA, 397 bp, Homo sapiens
catgatccagcagagagaagagtgggaccgaaagaagaagatgaaggttaaacgggagcgaggatggagtggaaactcatggggaggcatcagtcttggcccccctgaccctggtccctgtggagaaacatatgaggattttgataccaggatacttgaggtttttctattgggaaagctactgatcggatggatgctttcaggaaagcaaagaacagagcagttcaccatttgcattatatagaacgatatgaagaccatacaatattccatgatatttcattaagatttaaaaggacgcatatcaagatgaagaaacaacccaaaggttacggcctccgctgccacagggccatcatcaccatctgccggctcattggcatcaaagacatgtatg

SEQ ID NO: 146172 - DNA, 2135 bp, Homo sapiens
taataataaaaaataactttttaaatgggcaaaggctctgaatagacatttctccaaaaaacatatacaaatggccaatcagcacatgaaaagatgttcaacatcatcagccatcagggaaatacaagtcaaaattgcaatggtatacaattaatataccatttaacattcccaatagtagcctacaacttccatttccactgtggaaaacggtttggaagttcctcacggtagtcaagttacttaactgctctgtaaaatgaagttaatcacattcactttggatgaatgagttcatatatattagctataattactacagcaattatcattgtgtacattattactgattgggtcaaattattaaccccgtctccctaattcatttacttttgttactttggatgaatatttaaagtagtcttgaactgagatatgtatgtaaaggttctatcacattggcatataacatgtgctcaacaaatgaaagctataattatttatttccaaagagtttaaagattaaacttccctcaaaacaaacaaaaggcaaggtaacatcccaagctgtgaggggctgagtctctcctaggtgcagggcagcacaggaactggctgcacaaggccaagagaggttacgtggcggctctcttcaaattaagaccacacaagagcgcttccattccctgtgcaagtcttcacatcttccccagtcccagttttgacgttctggaacctcatctttctgggctctggaatctttcctcaaaggggcccccggggggaccgcaaaccaaccacatgggcaagagggcccacatttccctcccgggatttccacaacatggaaggcccttctttatcagccagctgtttgatgggtttcctgtctggagaagcccacggaagaagccctgggtgaaggctgagcatattaatggacccagagaccttggcatacatgtctttgatgccaatgagccggcagatggtgcatgatggccctgtggcagcggaggccgtaaccctttgggatgtttcttcatcttgatatgcgtccttccaaatcttaatgaaatatcatggaatattgtatggtcttcatatcgttctatataatgcaaatggtgaactgctctgttctttgctttcctgaaagcatccatccgatcagtagctttcccgaatagaaaaacctgcagctccttttccgttccccacagccaccaagacacggatcgatttctttcttccctctttcgcagtcataagagaaacggtttcttcccccaagtatcctggtatcaaaatcctcatatgtttctccacagggaccagggtcaggggggccaaaactgatggcccccccatgagtttccaactccaatcctcggttcccggttaaccttcatcttcttctttcggtcccactcttatctctgctggatcatgtctgcctccaaccttctcctgctcttcccttgcttctttgggcaatggtctggcactgctccatttttcattaaggagggacattcagtccgggccatagaaaaccataacgcccttcacccaatgatctgacccccctggttcagatcctttcttttcttctttttagttcttttgcctcttcctttttttgctccagcaccagtctctgctaaagcgcctttccacagctcatctgcagtcaatttagtgaagaaactatatggtctatactgctgggctcatcaggtgactgggagaagaaatacagcatttgtgtctgcagttgcacggctcaaggctggcgttagggaatgggtgtctctggttcccagtgatgacaaatggccatttgcccggaaaacacttttccatgccaaaatggaagctgctggtaaggtgtttagggaacactgcctccccaataaatgacctgccgtcccgctacacagcacggggaggcagcccacagcgcgcaccgggtttcgccatgctggagtccgagccgcgcctcggccttccggcccagggcagccttgcccaccgcctaccgcgactgctcctcgtcaaacggcaagccttgccccccagcggaattcctgaggcccgagtccacgcagcagcgcaggccggggtgagggact

SEQ ID NO: 146173 - DNA, 517 bp, Homo sapiens
ggggaacaagatggcggcgccgaaggggagcctctgggtgaggacccaactggggctcccgccgctgctgctgctgaccatggccttggccggaggttcgggggaccgcttcggctgaagcatttgactcggtcttgggtgatacggcgtcttgccaccgggcctgtcagttgacctaccccttgcacacctaccctaaggtagggcccgtccggagcgggctgcgacccttcccttgcagcccatttctcggctccccacacgtatgtcggctctggcaacctggctgttaaatcggcccttcaatcgctgtctcccatctgtgtagctcctgttttcctccctaatcctgcctgcaccccatttctgctgtcattaccggaagtttgtcctgcactaccctgtgataggctgggggacacaaagatgagaaagacgcgatccctttcctctgggagcttgccgggctgcaggggagtcgagcactcggaggaggataggggaggatatggatgat

SEQ ID NO: 146174 - DNA, 2119 bp, Homo sapiens
  misc_feature (1)...(2119): n = a,t,c or g
aaatgcgggcggaaggcgcgctgagggcggctgtagttttccgagaccaactttcccgacagcaccgtgcgcctcccgcctacggagaactacatgccccagcctgccccgcgaagggaagaagtcaggaggccccgcttcgcgctaacgcttgcgatggttgaattcccctcctcacgccagcctaggagaagaagttcgtagtcccagaggtgaggcaggaggcggcagtttctggcgggtgagggcggagctgaagtgacagcggaggcggaagcaacggtcggtggggcggagaagggggctggccccaggaggaggaggaaacccttccgagaaaacagcaacaagctgagctgctgtgacagaggggaacaagatggcggcgcgaaaggggaagcctctgggtgaggacccaactggggctcccgccgctgctgctgctgaccatggccttggccggaggttcggggaccgcttcggctgaagcatttgactcggtcttgggtgatacggcgtcttgccaccgggcctgtcagttgacctacccctttgcacacctaccctaaggaagaggagttgtacgcatgtcagagaggttgcaggctgttttcaatttgtcagtttgtggatgatcggaattgacttaactcgaactaaattggaatgtgaatctgcatgtacagaaggcatattcccaatctgatgagcaatatgctttgccattcttgggttgccagaattcagcttgccatttcgctgaaactgagacaagaacaactttatgttccccgatggccaaaaatggcacctacttttttcctctaacttctgggtgagggttcattctgggagttgacatgatgggactccgcacagaggcttcataacctcttcatggactttttatcttcaagcccgatgacggaaaaatagttatattcccagtctaaagccagaaatcccagtacgcaccacattttggagccagggagcctacaaattttgaggagaatcatctcttaagcaaaatgtcctcagatctgcaaatggggaaattccaccaagcgcaccagggaattttcttgaagaatgaagaaagggatggcctttttaaaaagccttctattttaaactctgggtggattttaactacaaactcttgtcctctccggtgatggtattgctttgggatttgttgtgcaactgttgctacagctgtggagcagtatgttccctctggagaagctggagtaactatgggtgacttggagtttatgaatgaacaaaagctaaaccagatatccagcttccttctcttgtgggttggttagatctaaaactgaaggatcatgaagaagcagggccctcctacctaccaaaagtgaatcttgctccattcctggaaatttaagcatttttccttttaaaaagaccagtggtaatagacatctaaaattccactcctcataggagcttttaaaatgggttccattggatataggccttaaggaaatcacctataaaatgcaaactaaagttactcaaatctgtgaagactgttatttgctataactttattgggtattgtttttgtaagtaaatttaaagaggtgggatgtttgggattgtaattaattattttacctaatatcctgtagcctattttgttttttgcctttggttattgtttttttccccttttccttagctatgagctgatcattgctccttcctcacctcctgccatgatactgtcagttaccttagttaacaagctgaatatttagtagaaatgatgcttctgctcaggaatggcccacaaatctgtaatttgaaatttagcaggaaatgacctttaatgacactacattttcagggaactgaaatcattaaaattttatttgaataattnnnnnnnnnnnnnnnnnnnnnggggcggccgttttaaaggatccttggggggcccaaagtttacccgggcttgcaacgtcaaagctttttccctatagggggccgaattataacctacctgggaatttttggaaaggaccttaactttgggggggggacatattgggacaacctacctacggagttttaaggctctaagggaaat

SEQ ID NO: 146175 - DNA, 529 bp, Homo sapiens
  misc_feature (1)...(529): n = a,t,c or g
gggggcccagtagcggaccgtgttgggagggagctgggttttcattttgtctgcaggaagtactagccggacatcatgagtggctggggggtattgagcgggagactaaatccagcggccagggagaaggacgtggaaagattcttcaagggatatggacggataagagatattgatctgaaaagaggctttggttttgtggaatttgaggatccaagggatgcagatgatgctgtgtatgagcttgatggaaaagaactctgtagtgaaagggttactattgaacatgctagggctcggtcacgaggtggaagaggtagaggacgatactctgaccgttttagtagtcgcagacctcgaaatgatagacgaaatgctccacctgtaagaacagaaaatcgtcttatagttgagaatttatcctcaagagtcagctggcaggatctcaaagatttcatgagacaagctggggaagtaacgtttgcggatgcacaccgacctanattaaatgaaggggtgggtgagtttg

SEQ ID NO: 146176 - DNA, 401 bp, Homo sapiens
cctctaggtctcgtagccgatcccgttcccgtagtcgcaaatcttacagccggtcaagaaccaggagcaggagccggagccggagcaagtcccgttctgttagtaggtctcccgtgcctgagaagagccagaaacgtggttcttcaagtagatctaagtctccagcatctgtggatcgccagaggtcccggtcccgatcaaggtccagatcagttgacagtggcaattaaactgtaaataacttcgcctgggggcctttttttaaaaaacaaaaaccacaaaaattcccaaaccatacttgctaaaaattctgggtcaagggtgtcctccactctttaacagctgctggacagacacattagagcagctgtttgttattgataataaaatattataaaact

SEQ ID NO: 146177 - DNA, 785 bp, Homo sapiens
gagtggcgtagacgagttaagtcctggtctgcgtggaggtcgacgactccgtcgcagactacggacctgtctgggtctcagccgccaaagaccccgtccggtagtcattgctattatctcgattgaattactttctaataggaagtactagccggacatcatgagtggctgtcgggtattcatcgggagactaaatccagcggccagggagaaggacgtggaaagattcttcaagggatatggacggataagagatattgatctgaaaagaggctttggttttgtggaatttgaggatccaaaaggatgcagatgatgctgtgtatgagcttgatggaaaagaactctggtagtgaaagggttactattgaacatgctagggctcggtcacgaggtggaagaggtagaggacgatactctgaccgttttagtagtcgcagacctcgaaatgatagacgaaatgctccacctgtaagaacagaaaatcgtcttatagttgagaatttatcctcaagagtcagctggcaggtttgttgaaatacagttttgagttattttgatgtggctttttaaaaaagttaatgggtagctaatgttgtattgttttattaaaagtagttttaaattaatggatttaatggaattgtaattttaaacatttaattaaatgtaatttgggggatattttgaactttaatattagtgatcaaatgtaaatgttttgaggatatttttcttgttttttaaaatcaatttttaaccaaatattaaaccctttatttgcc

SEQ ID NO: 146178 - DNA, 1621 bp, Homo sapiens
  misc_feature (1)...(1621): n = a,t,c or g
gggttatcctaatcgttgtcttggtcactcttggttgggcctggttgactttgccagtcagctcctacagtgatcagttggccacctctagatctgtgtttgccggtctagacgttatcggtgcacttccttgaagtgccaggttgcagcgatcccagagcgttgataacgtgatctgatccctaagttgagacctgtcttcctgtaacgcttccgaataagaggtccggtcgaaaagagttgaaagatacgaaattaggtggtcgttggaatcctgatcgcagtaaagtggtccttggtaactgctcgagtagaacatgtctgcatccgccaatagtccgctaatagggagggctgtgcgattaaaggcttccatcgattgggtagtgtccttcaagtgggtggcgaagagccagtcgggcatatgtcatgaaggtttctccgaccgattaatggtttgctgcttgactagcctagggaaataataataaaggtaaagtaaacttttttaatgacatatggggcacaaaataactggtgtcttgtaaatgttctgtttttttaaataaaacttctctactttagtctttactttaaaaatatgtactgtttccttttttgttgtttttttgtttgtttttttttcttttgtactgagctcagcatagactaatactaccttaatgttaaaatctgaatttcttttagcattttgcttaaaagcaatatgctatttgcttattccgtgccctgacatagataatttttgaattctgatagaatacaagtgtggtaaatgccatgtttgtactttatctaacatcttctctttcagtagtcttgttttttttatatcatgtgattgtttgtgtgtcccctttcctcttctttgcttaacacaattatcttgtgttaaggatctcaaagatttcatgagaccagctggggaaagtaacgtttgcggaatgcacaccgacctaaatttaaatgaaggggtggttgagtttgcctcttatggtgacttaaagaatgctattgaaaaacttttctgaaaaggaaataaatgggagaaaaataaaattaattgaaggcagcaaaaggcacagtaggtcaagaagcaggtctcgatcccggaccagaagttcctctaggtctcgtagccgatcccgttcccgtagttcgcaaatcttacagccggtcaagaagcaggagccaggagccggagccggagcaangtccccgttctgttaagtaggtctccccgtgcctgagaagagcccagaaaccgtggttcttcaagtagatctaagtctccagcatctgtggatcgccagaggtcccggtcccgatcaaggtccagatcagttgacagtggcaattaaactgtaaataacttgccccggggggcccttttttttaaaaaacaaaaaccacaaaaattcccaaaccatacttgcttaaaaattctggtaagtatgtgcttttctgtggggggtggggatttggaagggggggtttgggttggggctggatatctttgttagatgttgggaccaccaaggggttgttgaaaactaattgtattaaatgtcttttgataagcaaaaaaaaaaaaaaaaaa

SEQ ID NO: 146179 - DNA, 1946 bp, Homo sapiens
ggcgtagacgagttaagtcctggtctgcgtggaggtcgacgactccgtcgcagactacggacctgtctgggtctcagccgccaaagaccccgtccggtaggtgagtggctcactttgagggcaagccttctcggatcgaggcttcttcatggccgctcagatcgtgagcggccggggctgctctctttgcggaggatggcgtctaatgagcgcagttgattcgaggaagtactagccggacatcatgagtggctgtcgggtattcatcgggagactaaatccagcggccagggagaaggacgtggaaagattcttcaagggatatggacggataagagatattgatctgaaaagaggctttggttttgtggaatttgaggatccaagggatgcagatgatgctgtgtatgagcttgatggaaaagaactctgtagtgaaagggttactattgaacatgctagggctcggtcacgaggtggaagaggtagaggacgatacttctgaccgttttagtagtcgcagacctcgaaatgatagacggtatgtgaagggtggatggctgcattgaacaattattggtaggggtagccatttaagattcaggagtcattagcagtgatgattttgggacctgccgtataatctgttcttctattcccacgttagccaattgttcttgatgaatctatatgagtcatagaacacaaatctattgacggaagtcattagaatggcttgtgatatctgatggcttgaacttgcccacagttgaacacaagtgctgtcattgcatttcttccattgtgaatacgaattttcttcctcagaaatgctccacctgtaagaacagaaaatcgtcttatagttgagaatttatcctcaagagtcagctggcaggatctcaaagatttcatgagacaagctggggaagtaacgtttgcggatgcacaccgacctaaattaaatgaaggggtggttgagtttgcctcttatggtgacttaaagaatgctattgaaaaactttctggaaaggaaataaatgggagaaaaataaaattaattgaaggcagcaaaaggcacaggtcaagaagcaggtctcgatcccggaccagaagttcctctaggtctcgtagccgatcccgttcccgtagtcgcaaatcttacagccggtcaagaagcaggagcaggagccggagccggagcaagtcccgttctgttagtaggtcctccccgtgccctgagaagagcccagaaacgtggttcttccaagtagaatctaagtctcccagccatctgtggaatcgcccagaggtccccggtccccgatcaaggtcccagatccagttggaccagtggccaattaaacctgtaaaataaccttcccctgggggcctttttttttaaaaaaacaaaaacccacaaaaattccccaaacccatacttgcctaaaaattctggtaagtatgtgcttttcctgtgggggtgggaatttggaaaggggggttgggttgggcctggatatcctttgtagatgtggacccacccaaggggttgttggaaaactaaattgtattaaatgtcttttgaataagccttctgctcacatttttgtgaatgtctgaagtaatatagtttgtgaatattgccagagctcttttaaaaacaaaagccaaattaaatttttttgtactagaaaaaaatttgaacattttagttcttggttataaaaatgttaattcaggatttagtttaatgccttaatttaacttaattaatagctttggacacttaaaagagctctaaatttgcttgtacataaaggcttaatttgttttccttgttagggtcaagggtgtcctccactctttaacagctgctggacagacacattagagcagctgtttgttattgataataaaatattataaaactaaaaaaaaaaaaa

SEQ ID NO: 146180 - DNA, 2009 bp, Homo sapiens
  misc_feature (1)...(2009): n = a,t,c or g
gcggccgcagtgacccccgagaagggggttgctgggaggagaagggaagagggaatttggcacgcgcagctctgctgcgntttgattccaccgccgccattttgtggccgcagagcgcccgcccgctgctgttggcgcaggcgcggtcgaggcgtcgcgagattctggcttccacccgctgtgacgcgcccgcgaggccgccattgggctggctttgcggagggcgcgggcggctccgcccgcacttctcggcctttcctaactgcggcagatgggagggggccggagagcccggagagtgtgcggctgcgcagttggaaaggtggcagtgggcgttgcggttgctgcggtctgggcccagtagcggaccgtgttgggagggagctgggttttcattttgtctgcaggtaacctggcctcattagaggctctgttggcaatctcgttcataacatcactgtgtaaacattttatgccgttgatgtttttgattgtttaatcaggcgtttctctgtgacagtcattgctattatctcgattgaattactttctaataggaagtactagccggacatcatgagtggctgtcgggtattcatcgggagactaaatccagcggccagggagaaggacgtggaaagattcttcaagggatatggacggataagagatattgatctgaaaagaggctttggttttgtggaatttgaggatccaagggatgcagatgatgctgtgtatgagcttgatggaaaagaactctgtagttgaaagggttactattgaacatgctagggctcggttcacgaggttgggaagaggtagaggacgatactctgaccgttttaataattccgcagaacttcgaaatgatagacgaaatgctccacctgtaagaccaggaaaatcgtcttatagttgagaatttatcctcaagagtcagctggcaggatctcaaagatttcattgagacaagctggggaaagtaacgttgccggatgcnacacgacttaatttaaaatgaaggggtggttgagtttgcctctatgggtgacttaaggaatgctattgaaaaactttctggaagggaattaaatgggagaaaaataaaattaattgaaaggccagcaaaaaggccacagtaggtccaanaaagcaggtcctcggatcccgggacccaaaagtcccctctaggtccccgtagccgatccccgtcccccgtagtcgcaaaccttaacagccggtccaagaagcaagagggagcagggagcccggaagcccggagccaagtccccgttcctgttaagtagggtcctcccccgtgccctgagaaagagccccagaaaccgtggttccctccaaagtaagatcctaagtcctcccagcatcctgtgggatccgcccagaggtcccggtcccccagtctngggctccgagatcagtttgacagtggcatttaaactgttaaattaacttgccctgggggcctttttttttaaaaaacaaaaaccacaaaaattcccaaaccatacttgctaaaaattctggtaagtatgtgcttttctgtgggggtgggatttggaaggggggttgggttgggctggatatctttgtaggtgtgggaccaccaaggggttgttgaaaactaattgtattaaatgtcttttgataagccttctgctcacatttttgtgaatgtctgaagtatatagtttgtgtatattgacagagctcttttataactaaagcaaatttaatttttttgtactagaaaaaaatttgaacattttagttcttggttataaaaatgttaattcagaattagtttaatgccttaattaaactaattaatagctttggacacttaaaagagctctaaatttgcttgtacataaaggcttaatttgttttccttgttagggtcaagggtgtcctccactctttaacagctgctggacagacacattagagcagctgtttgttattgataataaaatattataaaacta

SEQ ID NO: 146181 - DNA, 402 bp, Homo sapiens
  misc_feature (1)...(402): n = a,t,c or g
ttttagaattgcccttcanaaactaaatcatccagttaatgtgattcagttgcgacctgtgggattataaaattttcctgccctcataatttaagcaaaatccacgatagtatcagcccaagagtgtgttgctatttgtaagccccatggatcaatacataaactatgcataaaaataaaatttcatattttcgctcgtagnnnnnnnnnnnnnnnnnnnnnnntnnnnnnnnnnnnnnnttatnnnnnnnnnnnnnttttnnnnnnnnnnttttttcccccnnnnnnnnnnnaggatannnnnnnnnnnnggggggnnnnnnnnnnnntacccgggggcgggttttaaaaacagaggggggggaaaaaacgggggcgggaccacaaaaatttgtttgggga

SEQ ID NO: 146182 - DNA, 2878 bp, Homo sapiens
atgcagtattcgcaccactgtgagcaccttttagagagactgaacaaacagcgggaagcaggttttctctgtgactgtaccatagtgattggggaattccagtttaaagctcataggaatgtgctggcctcctttagtgagtattttggtgcgatctacagaagcacttctgagaacaatgtctttcttgatcagagtcaggtgaaggctgatggatttcagaaactgttggagtttatatacacaggaactttaaatcttgacagttggaatgttaaagaaattcatcaggctgctgactatctcaaagtggaagaggtggtcactaaatgcaaaataaagatggaagattttgcttttattgctaatccttcttctacagagatatctagtattactggaaacattgaattgaatcaacagacttgtcttcttactctgcgagattataataatcgagagaaatcagaagtatctacagatttgattcaggcaaatcctaaacaaggcgcgttagcgaaaaagtcatctcaaacgaaaaagaagaagaaggctttcaactccccgaaaacagggcagaataaaacagtgcaatatcccagtgacatcttagagaatgcatctgttgaattattcctagatgcaaataaactgcccacacctgtagtagaacaagttgcacaaataaatgataattcagaactcgagttgacggcggttgtggaaaatacttttccagcacaagatattgtgcacactgttacagtgaaacggaaacgtggaaaatcacagccaaactgtgctctgaaagaacactctatgtctaatatagccagcgtcaagagtccttatgaggcggagaactccggggaagagctggatcagaggtattccaaggccaagccaatgtgtaacacatgtgggaaagtgttttcagaagccagcagtttgagaaggcacatgagaatacataaaggagtcaaaccttacgtctgccacttatgtggaaaggcatttgacccaatgtaaccagcttgaaaacgcatgtaaagaacttcatacaggtgagaagccatacaaatgtggaatttgtgtgataaaaggatttgctcagaaatgtccagctagtcttccatagtcgcatgcatcatggcgaagaaaaaccctataaatgcgatgtatgcaacttacagtttgcaacttctagcaatctcaagattcatgcaaggaagcatagtggagagaagccatatgtctgtgataggtgtggacatgagatttgctcaagccagcacactgacctattcatgtccgtagggcattactgggaggaaaagccttatgtatggtgatacctgtggggaaggcatttgctgttctcttagttctctttattcactcctttcttcggaaaacatacaggtgaaaaaccatacatatgtggtatttgtgggaaaagttttatttcctcaggagagctcaacaaacacttttcggtcccatacaggagaaagaccatttatctgcgaattatgtggaaattcttacgcagatattaaaaatttaaagaagcacaaaacaaaagtcccattctaggtgcagataaaactcctagaactcccagtgccagaggatccaaaccttggagtgaaacaggatccccatacaaaaaagtccctttaatccagaaacctatggatgtgaaagcccttcctgatatgaactttacccattagctcttccacttgggactgaggacccatcacatgcttctgcctgtcacggatactcagtctcctacatcagatacattgttgaggtcaactgtgaatgggtattcagaaccacagttgatttttttacaacaattatactgactttgtaaggaatatggaattgctaagatatcattggtagcaaacatctctggtaaggtgcatatattcatattaaattcccattcatttgagttgtgaccattatttttcattcactgaagtaaaagcacctgatgctgcatcacaactgcaatgtttgtttttatttttggctttatgtctatactccacagagagctttttaagtaatgaattatgtagcactattttgggtggatgagttttattttcttttaaagctgccttaattccatttttattttgcattttagaattgcccttcatttactaaatcagccagttaatgtgattcagttgtgacctgtgggattttaaaattttcctgccctcataatttaagcaaaatccacgatagtatcagcccaagagtgtgttgctatttgtaagccccatggatcaatacataaactatgcataaaaataaaatttcatattttcgctcgtaaaaatttaggcgttgaataaaacatgtgctatgtctctattaacatagagtcatagaaatctattttgaacgaacaaaaatggtttcctaaattttagaaaagtgccatataaatttttgttcatttagaactgagtattctggagaaaaccaatggtcagcacttttggtttgagttatctgagattgtatttttcaaaatgaattttaagtagatatttggtgtttttatcttgtcaaagacagtttcaaaatttgattcagtttatgttttattccgttctaaaatattggagatgaggaaaatgtacttgagttttgaaatattttggtaagcctctcttactcctgttatgcactttttaaaataaatactgaattccagaaagaattttctagatataaacttaatgcatactagaaatcacttggcttctaaatttggtacattatattgcataaagagttaagaaattaacctcaattataagtaaacattttgagttaccagaaa

SEQ ID NO: 146183 - DNA, 435 bp, Homo sapiens
  misc_feature (1)...(435): n = a,t,c or g
ctataccccttaaaaannnnnnnnnnccctaaagcctttaatttctggagggaggttggcccaataagtcccccccccaaaataaaggtcccttcccaaaattcccaagtaggtttttaaacggccccccataaggaaaaaaatattaccttgccagccccggttaaatttgggccccccaaggattctttaaaacggcccccccnnnnnnnnnnnnnnnngnnnnnnnnnnnnnnnnnnnnnnnnnnnnnnnnnnnnnnnnnnnnnnnnnnnnnnnnnnnnnnnnnnnnnnnnnnnnnnnnnnnnnnnnnnnnnnnnnnnnnnnnnnnntgccatacccatcttcgaggttttatggtcatgtagaatttctgttcaaggaaagcagataacagacagggttaagggcatttgcttggaatatttaggagtttt

SEQ ID NO: 146184 - DNA, 1645 bp, Homo sapiens
  misc_feature (1)...(1645): n = a,t,c or g
cttttctttgtttgtaacttatctgtaaaaggtttctccctactgtcaaaaaaatatgcatgtatagtaattaggacttcattcctccatgttttcttcccttatcttactgtcattgtcctaaaaccttattttagaaaattgatcaagtaacatgttgcatgtggcttactctggatatatgtaagcccttctgcacatctaaacttagatggaactataacaaccaagggaatttgggaactgtaaatgagatcctcttgggcagtaatcccactgaagcggagttacaggacatgattaatgaagtgatgtctgatggtaatggcacaattgacttcccctgaatttctgacaatgatggcaagaaaaatgaaaagacacagacagtgaaggaaggaaattaggaggaagcattcccgtgtgtttggattaagggtgggcaatggcttatatttagttgcttgcaggaactttcgccatgtggatggacaaaccttgggaggaggaagtttaaccagattgaagaagtttgatggaattgatccaggggaagccagatattggatgggtgatggtccaagttaacctatgaagagtttgtacaaatgatgacagcaaaagtaagacccttgtccagaaatgtgttaaatttccttgtacaaaattgttttatttgcctttttctttggtttgtaaccttatcctgtaaaaaggttttctcccctacttgtcaaaaaaaaaatatgcatgtaataggtaattaggactttcatttcctccatgttttcttccccttatccttactgtcattgtccctaaaacccctattaaggaaaaatggatcaaagtaaccatgttgccatgtggccttacctctgggatatatccctaagccccctcctgcacatcctaaaccttagatgggagttgggtcaaaatgaggggaaacatctggggttatgcctttttttaaagtaagttttcctttagggaactgtcagcatgttgttgttaagtggagttgttttaaaaaaancttctgcgtggactatggacagtcgactatggacactcaacaatatgtactttaaaagttggcactattgccaaaacgggtgtagttatccaaggtacctcgtacacctatttttttgtaactgctggtccctgtaccagaaaacaatttttttttattgttacttgctttttaaactttgtttagccacttacttaaaagatctgcttatgggcacaatttgcctcaaaatccattccaagttggtatatttggttttccaataaaaaaaattacaatttttagacncgggagaggcttnnnnnnnnnnggggcctttttaaagaatccttgggggggccaaattttaccggggttggaaaggtaaaatttttttccttttggggggccgttttaaaacctccttgggattttttggaaaggaaccttttttttgggggggggacttattggcccaacttccttccaaaatttaaaggttttagggaaaataaaaatttttaaggggtaaagggggtaaaccaacctgcttttccttgctgtttgaaagttttttttccgggttttaatttaaaaaaattttttccccgggggggggttggtttt

SEQ ID NO: 146185 - DNA, 216 bp, Homo sapiens
cacgaaggatggtctctgccttctcttgtcggtgtatgccatctgaaccttgcattgctgtcacagcaccttgtatgatggcaggacaggctccagcagagagaactgcacagtgaccactgtatttttcacgctcttccagggatccctgtccccgacatgaagagaggtcggttggcccctggggcctgcggggatgtgacttgtcatttaatt

SEQ ID NO: 146186 - DNA, 492 bp, Homo sapiens
  misc_feature (1)...(492): n = a,t,c or g
gccatggggtgcaccagcnaagctaaaggacgggagcaagagaganagagaaagagaaagggggagcgggggtgtcacgggtatccaaaggtccttcagacatctcaggcatctttctgcctgatatggtaatttctttgtgtgtgtgtgtgtgtttgtgtgacagagtctcgctctgttgcccaggctggagtgcagtggtgcgatctcagctcactgcaacctctgccttccgggttcaagagattctcccgcctcagccatgtaagatgtgcctacctcccctttgctttccgccacgattgtaagtttcctgaggtctccccagaagcagaagctgttatgcttcccgtacagcctgcagaactgtcagccaattaaacctcttttctttataaattacccagttccatgtattctttatagcagtgcagaaatggactaatgcatgtggtaataagaatgtgccgttaccttgagatgatgggcctg

SEQ ID NO: 146187 - DNA, 4218 bp, Homo sapiens
tgtcgtgaatggtgcctccctggaggtgaaccctgcagcagccccggatttcagtctgtcaagggcaaatctgtcagggctttgatgtaaagataggagttttaggtacagagtaactaacagtcaaatctgctcattcatcaagcatctatctagcaccagctgttggcttggactagaaactggggtggtggggggcaatgacacctccaaggtcactttcacgggtgggacaggtaagtgttctgaattcattttgtgaatctgagcatgtctgttaggcacaactagccgtttcacaagtggtcccagctatagcaggaatggctcccagactaggccctgggtacagggccaggcaagtggcaggcactcggcaagtatctgaataggtgagggaagcgcgtgtcatcgaatgagttttctaggaggctcctcacctcttctagcttgcctgactgcttaactttaacatttgagcttttcgggccacaaccaccaaagttgtttgcgtgcatttaagcaccagcgtgggacgtgttggtgctacagcaaggaactagggcactgtgcatggcatctggcacatagtaagtgcgcaggcttgtcttccagagggcacagggtatggccccagcccagtgaggtattcctggactgcaaaagggcaagtgaatcagggcgtcaatccaactcaatggcctctctgaactgtcccaagtgctgtgggggccaagcagacaccctctgaatgccccaccacgtgagcaggatgattaagaattcctgcagtttgcttccatgattccaaccctagattttcacagcagacgaaaacaacccacgtggatgtctccctacagtgatagggggcccttcaacattgataagacatgttcccaataactccatccaggtctgttcttccttccttccttcttacctacctacctagacagagtctcactctgttgcccaggctggagtgcactggtgcgatctcagctcactgcaacctccgcctcctgggttcaagcaattctcctgcctcagcctcccgagtacctggtagctgggtttacaggcatgcaccaccgtgcccagctaattttttgttgttgttgtttgtattttttttttctttttagtagagacggggtttcactaggttgggccaggctggtcttgaacttatgacttcaggtgatccacccacctgggcctcccaaagtgctgggatacagatgtgagccaccacgcccagcctatccttcgttttaagtgcctaagttaatgcattcggtcattcaatgagggcaggataaagggaaccagacaaaataaagtggaactttctctttttttttgagacaagagtctcactctgttacccaggctggagtgcagtggtgcaatctcagctcactgcaacctctgcctcctgggttcaagcaattctcccacctcactgggcctcccaaagtgctgggattacaggagtaagcgaccacgcccggccaaccaaacctctatcttaggatgttaaaggaaggacccttattgactacactgggccaagaaggcaacagaggatataaagctggaatcttgtaggctaacccctggaaaggcaaggccaacggcaaatttcctccgccagggccagtttttttgggggccaattttgggaggacttttggggccacaagaagggtttccctttttatttttcaagggtttttaaaaagtgggttttaggacttcagggcaaatgccagggggaattgtgtccatatggccagagggagacacaggagccagaaatgaaggctatgggtccctgtccttcagtgaaacactgaacgctctcggaaagctccccatcattccttgcatccgctactgccacaaagacggtggcaagggaggaggctaactttcaaatgcatgcaacggcaggtaatatacttgtggaaagctggaggtttacttttcatgttttagttactttcttgcaaacagcagtcccaggaaagcaaagcaaagcaggttaaaaacttccgggttgtccattgaaggagatgatccaaaggccagtggccttcccagtgagaacccaaacagggagtggccaggcttccacttccttggggccagagtgaaaccggggtttaatcactgggctattgtggtctctgtgtctctggccctgaatgagatctccttcaatgtcgggggacagggatcccctggaagagcgtgaaaaaatacagtggtcactgtgcagttcccctctgcggaaaccctgtcctgcccatccataacaaggtgctgtgaacaagcaatgccaaggtgaaaggagatcaaatggcccccacctccagccagttagtgtttgtcccctttttgcctcttccagagttccctgaatgaagagcttttcctggcttccagtacccaatgatcacagaaggaacatcttccctgatgcaagcttagatggaagtcaatgacccctggcagtgcctaagaacagaagtcacacgtggcctgacgatgaaggggaggtaattaaagacatttcaagggaggggaaggcccacggaaaactggcaaccctgggtctcccgtttgaggccaatatactttgtgttcctaggttcagatggcatacaccgacaagagaaggcagagaccatccttcgtggtgagcacaaaatgctatgacaggtaattgcagagagaaaaaaagcacccaactctgtaaagccaaagtccagtcacccattccacaagagtccaaaatccttcaaacctctagggacagaagacaaacgtgctgcccagaatgagctgagacacaaggcaaacccttggaaatgacacatggatgaggaggctgtggttgtccctccttattcctgctggatttgcagccacggctctggatctggggcatctactggcctcccctgttcactcaagaggccactgcctctcaggagtccagaatgctctgatatctgacaccagtggtcaggaagttatgctgccctctcctcttgaacagctaagatgcttggacactagacagaggcaaagcagttatgccagaagcaggggagagtcatttcactgtcagatctgtctgttcaaagagctcacattagaccaatcacagaaaaccaccagactcacacagcttgtatttgaatgacccaggagagacttcaaggatcaactctaaagtgctagaagagaaatctgtgtttggggcactgaataaacaagtgatgtcctagaagatcaacacccccatcagtccttaggagtatgacccctattccatggaacaaggggtttccaatggacagccctgaagtgcctcagcccccccaccctccctctccctagcaagacaagcagtctgttgcctcagagggggaaactgagtgtcatttaacagggggtcagggatttctggttcctacttcaacaaacagtgcataattttggacacagcatcagatttcctgacttcttacaaaggacagctaattaaaaacgtgtcaatctgtagtaattagttggagattaacaagggcagaagagaatccaagtcttaaaactctatgtgggatacatttctgatgaagcttctatttgactaatatactgtgatgatggcactattcgattttaaactatggagacagcttttattatttcgatttggatcctggtaagtggtgatactgctatgtaacagttaaagcacaaatgtattgccatagttaaggttgaagagttatgtctatgtgtaactaaatatattggggattcaattacaaaaacggttatcctttccaaagatggcttggaaagggtgcaaaatgctaggtgtttgagagaccagagaaggcctgcagctctcagtcacctgtctccatcttcggaggtaagtctgctccctgctggtaatgcatgcatctgcccaagggcctgttcctcctctcccaaggccttcacagctggtgttcactggttggccctccagccggcaacacctctcctcctctctgcctagaggcagcatctctcggctagttaagtacatacttgctccaagacaactagacccccaaacagaattctaatcatatgctcctctaacaagccaaccagaaccttccaaaaaggtttaggcactaaagtcag

SEQ ID NO: 146188 - DNA, 2734 bp, Homo sapiens
  misc_feature (1)...(2734): n = a,t,c or g
cggccgccctttttttttttttttttgtttttgtcaatttatttagaaaaaaattaacatgggcaaatgagatacctcaggtgttacaacagagtatagaaatgtctagcaatagtcaaataatttgatctttaaatacaaaataaccacatgaacacctaatatacaggtttcatctgaatacatatttattaggataaatattagagggttgtcacatccatctaactacatacatgctttgcaaggactaggaaatcacaattagttttttttttctgaccagtttaaaggtatggaaatgattgccattgtacataccgatgtacaaagaccgatgatgggttctgtggaccgtcacttcaggctgcactgggggggggtggttatgtgtgtaccgtgtgaatcacctgtggatcatgatatccaaaaactttataccaaagttatatggaatttgggttacaattttcttcctgaaatcccccgtttcttttcattatttcccataggcaccctaaaaatacacagggtgggcagggactaggtaccactggaggcctaaataggttacatgtaggtacaataaaaacagaacaaaaacccctttcccactcagggttcagagtaatattacatggagcgagagagacagacgtggagaactcacaaatgctataaccaacaggatctagtttttccacgtgatggagttccaagcttttttttttgttttgttttgtttcgcaaaataaaaacaatacacattcccaagagaaatgaatgcatctgttgacacgtctctatttctcatttacatatgtaacaacacgtccccttgaatccgctgcctgttgaacacggcccctgtgtgggaacgggttcaagcccgaagggcccgtcgggaggcagacctgtaagctcctctgggggatccagggcttcccattagggagaaagtattagcagtttccttaaaaaataaaatggctacacggaacatgatacatggataaagcttcaaaccaagaagcatgggggtgattgcctgtacttgggcccttccccgccctgcctggctggcttccctgttccatcttgcgaaatggcggcnagaaaacaatgccctgtgggccggggtgggatgcttggcatggaaaaagtggcttgcagaggcctcgtttttgctgaggttacttaatggctcccaagtagtcgtccgaaaaggaatcagggaaggatctctccagagttcaggaccatctctgtttatgggcgttgtctacctgcacctgtcacaacctggggcttgctcccgccccggatgcctttgcacctccctcacaccctggcctggctccaagagcactccgaaagagcttgtctccagactgcaggctgtaggcaccacgcacggttcagagccagccggaagggaaagctctgggccgagcttgctggtggagccttgttggagaggggacccaggaaacccgcctcaggtgctgagcccagagatggttgcaggaggtgcccggggcctgggctgcagggagcatctcgactctccgcactggaaagccgtggatccacctgtgagcagagtgtggacacaccctgataagaaccagaatgaatcccaggcctttctggggcaaagtatcaacgccaagaagcaagaactcctaaggaaggcatctgtaagtctgtctggagcttaattcccagatggtctgacacagggcgtggccacttgccaggccacagacactgggcaagggtggccacagtgctacctggcgttggcttgtccctgcccagctgactgagggatggctctaaatagcgggctgcccggtcttcccaactccccagcacagccgccccattctgttcacccccttcaactgtacaaataagccctggttgctttttttgtttttgttttaaaaaaaaagaagactcggtctttgtcattgagtcccaggtattttaaaaacacccagcaaaggctataacccaggtcatgaaaatgttgaatattatcaaagacgatactaaaatattcacaaagatatttacaaaagcgattcttaaaataattgatttgcatactgaacaacacgctatttgaaaaaaacctcgacaacgggacaaaggaagaaaaggggccggggcaatggcagctttcctacagaaaaccttgtgccgtctgggacagtgactggaagtcaacagctggggccacctttccggtaaaacccacagaggagtgctggggaccacccacagcggacgggagagcaggaaagggccccaggcagcagccgggaagggcgcaaagaatttacagatgggaccccagtgacgggacaacctggcatcaccataggccatgtggctcacggggcacagaccagcctgaaacaaagtgaacacaggacaggctccccaggaggccctggagagtggtaagccagatggagcaaagcggtggagggaaggccagaggctgcttttgcttgagtgagcaggagtttgggtgagattgtaatgtgtggaggagtgcaggcagggtaggctggcagccaagggcagtgtctggggcaggcacaaaaacacgcccccctcccccccatgcctgcaggtacatattggtgcacatgtccatggcctgggttgcagccgggggcatcttggagcacaaattcagaggaaaaggctgcccggcccc

SEQ ID NO: 146189 - DNA, 296 bp, Homo sapiens
ttttttaaaatgcatcttgaaagaacactttatttagtgtaagagaatagattttgtcacattaaattgaaattatgacattcaatttttatttttacctaaatggaaatattatattcatctaatcaaagatgattttcaaaattaaatataatttttgccaaagatattaagttttaaacaacacgtttttattttttgtcatagcaaagaaatgatgactttattgaattagactacaccattctacttcataatatagcatctcaggtaaagtataatttacctttatttga

SEQ ID NO: 146190 - DNA, 1171 bp, Homo sapiens
cagggctctcggatgcagggagcctgggcccaaacagcagcttccggagtcggaaggagctgaggaagaagacagactgaaggagcttgcgctttttccgcctcggcaatccggacccagcagcaagcaggacgggcggcgctctgctactggtcccgttaagccagagtagcccaagccctgaagtcactgctcatccggaatggaaatcccagtcgaccaactacccagccttccaagggcggccttggtggcacagaactacatcaactaccagcaggggaccccgcacagggtgtttgaggtgcagaaggtcaaacaaagccaagcatggaaggatatttccagggaaggagggacataagtattcgccttaaaatttgctgtttgaaagaaattatacaaaaaacaagttaaaggttgaacttgcacagcttgaagtacttttaccctttcaacggggacaagaaactttgcaccaggaagtcaactttcacattttgaaggagaaacttggaaagaatccagattgaagaagacaacacatttttatcaaagacttaagtccatgaaggaaccgctacaagcacaaaatattcgcagacaaattttggaaatgtatctcaagaaatgacgcttgttctaaatttagcttgggttgcctgtgggttaatataataatggcaaaaatttctactgaagaccacttggtataaaaatggtaaaaatttcaaacttgtcaggcaaggtgccaaagaattgatgacttttattgaattagactaccccccattctacttcattaatatagcatctcaggagattattcccctggcaaatgcaagttctctggcatccacaatacggcactaaagtaaaacataatagccgtctgccaaaggaagttcacttgggatatacccccaaacccctaaccctggaagtgtaaacatgtctattgatgtgtatgccaatttcactggcatctagcttatgaggccaaataatcccaaagtgtcactttatataaatgtcttgattacagtatagaactttatagagtccatactacacagtatcactacataaacaatgtctttaaaacagtaatagtggtatgtatatccaaaataaaaagcttcaatttcagcctcaaaaaaaaaaaaaaaaa

SEQ ID NO: 146191 - DNA, 5747 bp, Homo sapiens
  misc_feature (1)...(5747): n = a,t,c or g
aggttaattctttgccccctcctttttttggggttttcaagaaaaaaacccccccttttagagtttgtttggggctttttttttcccccctttccatttttgaccttgaaaaaccgggaattttttttccaaatttaggggcccccgcaggccccacccagggcccgggggccccccaaaagggggggggtccccaaccgggaaaaacccccnnnnnnnnnnnnnnnnnnnnaacaaactgaacagtgtttggtctggaatgtgtttaaggaaaaggcaaagttccgcagaatgtgggtagaacanaaatagggaagaagtacagtttccagaagaacatgccaaaggtttcgtgcactggctgaaattcaaggaccttcaattaatttgcccagaagtgattgtgcaaacctgggaaagaggacatcttacttctgtttatgaaaaacgggaggagcttccctttgcccgcacttgccttcctttctcatatccaaaggaatcccagtcgtgtgcttgttaaattcctgcgaagcagcgaggggctctggctgaaagctgccggcagtgggccctactttccacctttcagccctaagagcaatgggttcccagcggttggccttcccaacgcgaagactcaattctggccaaggttctggggaagagggagaggtgaggggccacgatgctttcaaaaataaagtctacctgcactgggatatcatctttcctttctgtttaaaaatgctcataaaatagcaagccccagtgggttaatccaggttaagctgtcattccacaggggagaggatcaatccactttccaaaggggatcacctgggctccccccattccccccaccccgtgtgcctggtgttcttggcttctgtccctcccacctatgattcatccagggcatgatggacactagggtagacagatgagtgggatgagtacggggtaggtaaaccgagtccggggctccctaggccagattcctttcatcctactacagatatttcctatgagcccagccgttgccagcatggccatcttttttgagacggagtcttgctctgtcacccaggctggagtgcagtggcacgatctcggctcactgcagcctctgcctcccgggttcaagcgattctcctgcctcagcctcccgagtagccaggattacaggtgcccgccaccacacctaatttttgtattttagtagagacgggggttttgccatgttggccaggctggtctcgaactcctgacctcaggtgatccacctgcctcggcctcccaaagtgctgggattacaggcgtgagccaccatgcctggccaggtaaactattttaaaattatacagtgattgctccatgtttatagctcattttgattaaattaacctctacatgacattgggccatttaaactatgaccccgccatgggcagttaccaggtagcttgtgtcacttcaaatgctgaaatgtgtgtgatggtccaaagtgggtttcacaccatcacacgttctaggaatcgcttctaatttctcatttgttctgtatggctggaggctgatcacgacgtctgtaaagaacaaggtcaccaatgtgcttgcatatttcattttcctgcatatcagttcacaattaaggcatttcaggctttcctgatgctaattctcatctgagtatgaaatcctggataataaaacagacaacctaaaaataggcatatggactcatggatttatgtactttttaaagtgtgctcaagtgtttcatttatggttttattaataatttttaaagtagaatgttcaatattattactatgatttatttttatagtcagcaaacatgagacttaaaagcttttccttctagctccacatgtcggtgcacagtgtaaccttttcttaaaaaaatatggaatgctgcatgaatctgcagatcttcctcgcgcagggggccatgctaatctcctctgtgtcattccaattttagtatacctgctgccgaagtcagcaccagtttcaccttttcacattcacggtaaaactgatgggaaaccgcacgctaaatgtttaggcagcgatggccctcaactgttaatcccaacaggatggtgagtgagaagcacaggctgaaaatagagttgtctaaaacatttccacatttcaccatctgaacatcattttccactgagttattaattgtaaagagtttattctgctgaacctactaattattctcacctactgagttgacctccacgtgaagaaaaggtcactgatgaaaaagggtggctatgttctgtttctgtaatttcactgttttaacatctttttttttatatagagatggggtctcgctatgctgcccaggtcagtctcgaactcctaggctcaatcttcctgcctcagcttcccaaagtcccagggttacaggagtgcaccaccgcacccagcttcactgtcttttaaagccttaaggtggacgttctcttcaatccatcttcaaaagcacaaagccattgccttcttttttttttttttttttttgagacagggtctcactctgtcacccaggctggagtgcagagtggtgcgatcccggctcactgcaacctctgcctcccgggttcaagcgattctcctgcctcagcctcccgcccgagtaactgggactacaggtcctagcatgccaccacgtccaactaatttttttttttttttttggtatttttagtagagaggggggtttcaccgtgttagccaggatggtctcgatctcctgacttcaggtgatccgcccgccttgggcctcccaaagtgctggggattacaaggcgtaagtcaccatgcctggccatcttttttattttttaaagagatgggttctgctaagttgcccaggctggacctgaactcttgggctcaagtaatcttctcacctagtctcctgggtagctgcaaccaaaggcacccggtttatctgcattctcttttttttctttgagactgagtcttgctctgtagcccaggctggagcgcagtggcgtgatctcggctcactgcaacctccgtcttcagggttcaagcaattctcctgcctcagcctctggagtggctgggactacaggcgtgtgccaccagagcgagttaatttttttttttttttgtatttttagtggacactgggtttcactatattggccaggctggtcttggactcctgacctcaagtgatccgcctgccttggcctcccaaagtgctgggattacaggcacaggcgtgagccactacacctggcctatctgcattctcttaatagtttcttagaaatggattcttaggagtaggattacagagtcaagagacacaagttttgtaggctgggtgcggtggctcacgtctgtgcctgtaatcccagtactttaggaggccaaggtgggcagattcattgagctcaggaattcgagaccatcctggctaacacggtgaaaccccgtctctactaaaactacaaaaaattagccgggcatggtggcgggcacctgtggtcccagctacttgggaggctgaggcaggagaatggcgtgaacccgggaggcagagcttgcagtgagccaagatcgtgccactacactccagcctgggcctcaaagtgagatcctgtctccaaaacaaaaaagatacaagtatccttaaggctcctgctacacatggccaggaaggtagtctattggacagttttaaggtcattatcaatattagctcatttaattccctccaaaactctgtaaagcacattctgctaccatagttgtcatatttttgatgggggaatctacagtgagaggcagtgctgggatctgaaccccatctggacagattagctccagggcccatgctcttgactggctggccgcgctgcccacactgagttgttccttcctggcagggtaggtgtgcctatctcagggacactagacagctccgagggacctccctgtccttttcctttgtgaactgtgtcacgttctccagagcagggctcagacctgccctgcctgctctgtgcagatgcccttggccaaggttttcacactggaacaagttggtccctcctccccaccccagcctgtccttggccctcctccaggtctccttctgcataggagcagctcaccctgcctcctccagagtcctgccctagaagcgcaatccctctccttccatcccctgcctggctgcctggctccttccctcagcctccaagacatgctcagttttcttccctcctaaaacaccacccactgtctcatttccattcatttctttctttctttctttcttttttttttttgagagggagcctcactctgtcacccaggctgaagtgcagtggcatgatctccactcactgcaacctccgcctcccaggttcaagcaattctcctgcctcagcctcctgagtagctgggattacaggcgcctgccacgatgcccggctaacttttgtatttttagtagagacggggtttcgccatgttggccaggctggtctcgagctcctgacctcaggcaatctgcctgcctcagcttcccaaagtgctgggattacaggtgtgagccaccgcgcccacccattcatttctcagtcctttgaatctacttgcccctccatcccgccatgccacctaccctaacaaccttcccccttaaacctgcgggtttggccgggcgcagtacactgagtcagtactggtactgacccaggtacccctccagcctcagctccagtcagatgggacagcctgctggtccctggctgcttctgccccctcttctggagccccagccctggaggctccatgtggctcagcagaacttcttctcctcctgctctgtggtggcctcttgagggcagcactcaccttggaaagcatggagtgtttcaaccctcactgctccctgaaggaccaaggtgtcccattttacagtcgggggaggaggcactgtgataaaggggctcttcagacccacgtctgagagagccaggctgcgccgcccccgcggccttccacccttcaccgtccagccagggccactgccatcaccgcctgctggtcctcacaggcgtcggggccccaggcagtgagaaggcggctgctgactcctctttcctccccagctgccagggacctggtgagcaaagagggcttccggcgggcccggcacgtggtgggggagattcggcgcacggcccaggcagcggccgccctgagacgtggcgactacagagcctttggccgcctcatggtggagagccaccgctcactcaggtgaggccctctgggcgccccgctcctgccgggcacaggccggcccaggcccaccccttcaatatcctctctgcagagacgactatgaggtgagctgcccagagctggaccagctggtggaggctgcgcttgctgtgcctggggtttatggcagccgcatgacgggcggtggcttcggtggctgcacggtgacactgctggaggcctccgctgctccccacgccatgcggcacatccaggagcactacggcgggactgccaccttctacctctctcaagcagccgatggagccaaggtgctgtgcttgtgaggcacccccaggacagcacacggtgagggtgcggggcctgcaggccagtcccacggctctgtgcccggtgccatcttccatatc

SEQ ID NO: 146192 - DNA, 994 bp, Homo sapiens
  misc_feature (1)...(994): n = a,t,c or g
gcttagagagggatgtccccaaagggggacagggagagaagaaagaggaagcgtgcccccacccccacacaaatgtgaaggagcccagccctcgtctgtgggcctgtctggggcgatggagggcagggcccagtatgagcttgcagagtggaggctgttgggcatcgcacatgccctagctttggggcacagggatagggtttttttgtttttgttttttaacatacaggtgaaaaaggcagaagtaaggccagtccagctgggttggctgacgtcatctctgagggctctgccaggtggattaggtgaagagaggttttatgggcctctaagcaccgccccagtagtgggcgaatgccaccatgcaattggtgagtggggattctggggggggtcaggtaccttgcttttcttccaatctctccttcttagccagaactttgcgagagcccctttgatttctcttccctctattcccctcctttccccaaatgtgctaaggtcccaattcccagacccctcccaggactcaagaattgggatagtcaagcaacaaacacaccaagacaggcttcccttgtacagtaaaaagggtcatttttattttgtttccttttggcttaaaggagtgatggactttttatcacgtctcattagggcagcattggcctccatgcattcactaatacactaatcttcactgttggtcttttacaggtttacgttggttgcagcaaaaaataaaagaactctgggcactgtcgcctttaggggctttgactgggagtttgtttatctctctcccagtcaacttctgacgcccaaaagtggcctcgtttagaaaggagtgaagnagtaggaccatgttaacatgggaagtttacttacctcctctcgtgcctgctgctttaaaattacagagtctcctcatcctaagcaacaaggaggttaaggaaagaagagggggaaaatgtttttcacacacaaaccagca

SEQ ID NO: 146193 - DNA, 382 bp, Homo sapiens
  misc_feature (1)...(382): n = a,t,c or g
tcctggccctgagcgggaatcgcagtggccgaggctgagcggcaggtagaaggggcgtctccggggcttcacagggaacacaggggcttcggcccaaccacaactggaggtcgaattcaccacgtcacgtagagaaaaggggcggtgtctcgggtctccccgtgtggcatcaaggcgggctccctataggagctggtgtggacgtccgggcgtggggttagggcggatgcggggatcgcggggcgggtgttgacattgtgctctcaccaggcggatcgccccgaccctcactcctggcgtctgagtctctggcgtagcccatgctgagtgggcggctggtcctgggtctggtctccatggctggccgcgtttggttgtgccn

SEQ ID NO: 146194 - DNA, 431 bp, Homo sapiens
  misc_feature (1)...(431): n = a,t,c or g
gccganggctggagcggcaggcgnatcacccagaccctcactcctggcgtctgantctctggcgtaccantgctgagtgggcggctggtcctgggtctggtctccatggctggccgcgtttgtttgtgccagggcagcgcgggatccggggccatcggtccggtggaggccgccattcgcacgaagttggaggaggccctgagccccgaggtgctagagctctcgtttcgagggactgagccccctacaacgacaccggctggtccacgcagcgctggccgaggagctggcaggtccggtccatgcgctggccatccaggcacgggacccccgcccagtggagagagaactctcaagctggacactaagcnccccattgcctggggttgggaacaagaaaactctaggaacccccttgaacccccaagagn

SEQ ID NO: 146195 - DNA, 1251 bp, Homo sapiens
  misc_feature (1)...(1251): n = a,t,c or g
cagagtcctggccctgagcgggactcgcagtggcnnaggctgagcggcaggtagaaggggcgtctccggggcttcacagggaacacagggggttcggccaaccacaagtacgcagttgcacatgccctacttttgcccattctttgcaaatcccctaaggaacgaacgcgcctcgtggcggggcctttctaatcttcgcttgtcccttcacttccacagctgggaggtcgaattcaccacgtcacgtagagaaaaggggcggtgtctcgggtctccccgtgttggcatcaagggcgggctccctataggagctggtgtggacgtccgggcgtggggttagggcggatgcggggatcgcggggcgggtgttgacattgtgctctcaccagggcggattcgcctcgaacccttcactcctgggcgtctgagtctctggcgtaacccatgctgagtgggcggctggtcctgggtctggtctccatggctggccgcgtttgtttgtgccagggcagcgcgggatccggggccatcggtccggtggaggccgccattcgcacgaagttggaaggaggccctgagccccgagggtgctagagcttcgcaacgagagcggtggccacgcggttcccgcctgggcagtgagacttcacttccgcgttggctgttggtgagctctcgttttcgagggactgagcccccttacaacggacaccggcttgttccacgcagcgctggccgaggagcttggcaggttccggtcccatgcgcttgcccatcccaggcacggaccccccgccccagtggagagagaacttctcagctggaacaactagcccccccatgccttgggtgggaaacaagaaaacttcttaggaaccccccttgaaccccccaagagagggangccccccaggatcccgaatgggcctgggtgagcacgaattacccgaggccttcccctttgatacaagtccccaggatttgtaagggatgaagaccccctgggcccccattcctgttggggtcccatacatactctccgaagatagcaacttgcttcaggtcaaagtgaacccgagaaaagagaagaatcactcactactgctctttgccctgggattatttcagggaagggcagcccggatgtttccatgtttaaattcgttgacagaatttgcaccagacctgatgagttggaaacaatcctatacattaaaagaaattacactatgaaaaaaaaaaaaaaaaaaa

SEQ ID NO: 146196 - DNA, 1352 bp, Homo sapiens
  misc_feature (1)...(1352): n = a,t,c or g
ttttttttttttacaacataaatcatttaatgtaacatttgcaaccttagaaaggcagacatgtttaatccaagtccgtttataaattccaatttcacatggattaaaaactgcagataaattaagtcacaataatatcctgtacatgcattaaggctggtgactgctaaagtctcttgggaatctacaaataggaaatcacacgcagattactgggtctgaagagtgtctacattgttaaaaaaatcttgcttttttttttttttggtgatgcagatttcaacagtaactctggaaaactgtgaaaaatgttatttaaaaatatatatgtatatbbctactgcacagtttcaaagatgtgattcataaataatgttggctgcactgattaattttattaccattacctggccttccaassttgatgcgaacacgcagkatctcatactcaatattaggcactagtaatatccttcaggcgtactacagttttatgttagctgtattgtacatatatatttttaaatgtatgcatttatacaaactgtgtatattatgktattggggtgtcagaattktacacatcactgttatataatacacacatcattgttgtacatatgaggataagttttagtggcagaaagtctcattggcattgcattccatgtgttccaatctagtacacaatttgtcaactcttcagattatttttccagtacattcctcattagattgtgggtttcaagtttccatttgcaatttgaatgtttccagaaatctctgtcttaaccaaacctctctctccaggcacgattctgcacatgagtctgatctgtgtagagtagtatcatcaaaaatgccaaattttgatcaggaatatacctgggnctactctctttcaaaggccaattgaacatcgtgatavaaggatagcatctattcaggtcatgggaaggggtatgggtcagttgaacttgtgttgaactttggggggcaaatgtacgtcttccaaataaaaaggccatgggtaataaaaattatttgcttaaatttgagagtctctggaaggatatacatcaaactgtgagacagtgggtgtgctcaggcagaagggagsaaccagggacttacactttctactttttacattttctgcactgtttgagtttttacaaatgagtagatatcctttttctaattagaaaacacaagaaaggtatttcaacttgaaacaaaactaaacaggccaggcatggtggctcatgcactttgggaggccgaggccaaaggatcgcttgagcccaggagtttgagaccagcctgggcaacatagtgagacccccatctct

SEQ ID NO: 146197 - DNA, 2303 bp, Homo sapiens
ctcgcgcgagcgatttagtctgaggcgaagcttcggatcggccggtactgttgaaagcgacaagtggaggcgccgctctagcggccgggactctgaactatggcggctagtgatacagagcggagatgtgactagccctcagaaaagacatcaccagatagagataagaaaaaaagagcagtcagaagtatcctgtttctcctagagcttcaaaacatcattattcaagatcacgatcaaggtcaagagaaagaaaacgaaagtcagataatgaaggaagaaaacacaggagccggagcagaagcaaagagggaagaagacatgaatccaaaggttaaatcctctaagaaacataagtctgaggaacataatgacaaagaacattcttctgataaaggaagagagcgactaaattcatctgaaaatggtgaggacaggctcaaaccccaaggaaggaaggtcatcaaaaggcagaggtcactcaagatctaggtctcgtgaaagacgccatcgtattagaggcagggagcggaagaagtctcgatccaggagtagggagcggaagaaatcgagatccagaagcagagagaggaagaaatcgagatccagaagcagggaaagaaaacggcggatcaggtctcgttcccgctcaagaatccaaagacacagggcataggactagaaagcaggagtaggaccaaggagtaggagtcgagatagaaagaagagaattgaaaagccgagaagatttagcagaaagtttaagccggactcccaagtccaccttcctttagaaggcagaacccagccatgggatgcccaggaagcttttagctaagagggttgaaaaggcaaaagaaattacaagaacagcgagaaaaggaaatggttgaaaaacaaaaacaacaagaaactagctgcagcagctgcagctactggaggttctgttctcaatgttgctgccctgttggcatcaggaacacaagtaacacctcaggatagccatggcaggctcaggatgggcagccctgcaagcctaaagctttggcagagacagggaatagctgttcctagctactattaacccagccgctgttaatccaatggaatttgctgaacaagagaaaaaaaggaaaatgctttggcagggcaagaaagaaggggacaaatcccaatctgctggaaatatggggaaaaattgaattttgggaaacaagggacccaaaatgttcaaatttagggaattgatgggtattaaagagttgaagatgaaagctgggatgtagctcagttgatgaagaaagttacaaggactcctgaaagcagcaggaaagaaagtatttcgaaatttagatgctcagtatgaaatgggcaagattcacaaacccacacacaaagaggaatgggtttgggtttcacatcttccaatgcgaggaatggatgccagtttgaaaatgatcacacttgtaaagtttgggacttatagacttccttgttctgatgtcacgtcccttgtttcaccaaaccagctagcactctagcttgcatgggtgttgccattgactttaatttattgaaaaataccaaatttttgtaaatatcagatccagtggatactggtgttaggtgttgtaatcaggttaaacccacttccattaaaccttgacaggaccaatagaaggataatatttttttaggttccatgaatttctacttttccaaaaaaataaaagcgccagggggggggataaaatctcactacatggattttttcggtgtccgctcgtctgtgtgtactaattgtactataacccttgtacaagttattgttcatctctgtgaaacatgaaagagaatgtgtatgtagatgttttctttagaagatctggccatttggtacataatccagcacagataagctgggtggtaatgataataaaaatggttttctcaaaactggtgttaatttaaagttaccatgggatgtttctttgaatttgttttatagtttctgtagcatttggcaattgctgttagaaaacactagctagaaatcccctccccaccaccctttttaaggccagttaactatactacagtcaataccgtggtgagcaaaaatgtaaaaggtggaaggagaaaacttactaaaatagtatgttttcctattataagggacagacttggtattcagtatttgtcaaatattacatgtgttattcaggagatagattaatgcattaaagggatgtaagcacttttattttaataaagtgccttataccaaaaaaaaaaaaaaaaag

SEQ ID NO: 146198 - DNA, 2284 bp, Homo sapiens
  misc_feature (1)...(2284): n = a,t,c or g
gaaaaactaccccctgaactctgagagtgacaatgtggccaactacatctgtgtggtgccttttaaagagctgggccttggacttagtgaagagcagatttcagaagaggaagcacataaactttacagatggcttcagcctgcctgcattgaaggttttgttccaactctgggtggcacagagttcagagttcttcaagacggttagccctattactttctacaagccaattcacctcctgggcccttacttactccagcacttctgcctcatcgtatcttatctgatgtgactcaagggctacctcatgctcattctgcctgtttggaaaagcttaagcgcagctatgagttctatcggtacttttgaaactcagcaccagtcagtacccgcagtgtttatccaaaactcaacagaagtcaagagaactgaataatgttcacacagcagtgcgttantttggcagctccatctgaaagcattactgaatgaggtaataattcttgaagatgaacttgaaaagcttggttgtactaaagaaacacaagaactagtgtcagaggcttatcccatcctagaacagaaattaaaagttgattcagccccacgttcaagcaagcaacaattgctggggaagaggccatttctcaggtcgacaaactgctacggaggaaatacagataaaaaagggcaagccttgaaatagcatgttgaaaacccacttgttacagtagtaccttttgaaggcagcctactctacacattgcagaccaagatccaatcccagaggagcaggaaattagaagcttatgtagatgatatagatattgatagtgcatttcagaacaggcatgatttttattacttgtctcaagaagacaaagagagacagaagcgtgagcatgaagaatccaagagggtgctccaagaattaaaatctgtgctgggatttaaagcttcagaggcagaaaggcagaagtgggaagcaacttctatttagtggttcatgccgtgttgaaattccttgtttcctgtaggaccccagtgggaacccataagtaattcagaaccatcaatgaattcagatatgggaaaagtcagtaaaaatgatactgaagaggaaagtaataaatccgccacaacagacaatgaaataagtaggactgagtatttatgtgaaaactctctagaaggtaaaaataaagataattcttcaaatgaagtcttcccccaaggagcagaagaaagaatgtgttaccaatgtgagagtgaagatgaaccacaaagcaagattggaagtgggctgaccactggcccctccaactccccagggactcattacagccctccattaagcagaggctgggcacggctacagctgttcaccagattttaccttcactgctgggccttgctggcaggaagtgggctgcttagatcttcttcttccttttaccaccatggcagggaacagactttttggtgatgaggaggaagaacaaataatagaagaaaattaaaaatggagatagaagaaaagtaagaaccaagattccatatggaagtggatatttaggttggttccctttttacaaaaagtgttttagcttccaagacttggaaagggaatatgagtgtaagtttactatatataaaagctaagatgtgggatttacagggaaggaaccctggttttgaataactgatcctggaaattaggtagttacctgtaaaatggccagatcttttaggaaaataagagaaaggtaagggctcttttgaataaactgctgttttatttgtggcacaacttgatcaatcattggaaattcgtttaagtatttctaatacagaaatgaattatcatttcttgccagaatttgctaccttaaggtgattgggaaaattctgttgcaagaacattaacatttagtatgactcctttttactgtatttcttgcagtttaaataactgcaaagctattatgtttaataaacaagttggtttggtatttttattttttgttttataccagtcttaaaacaaagatccaggttctgaataaaaaaaattaattcatacaattgatacatgctggggcttggaactaagaagtagtttcaacagtgcgtgggttatgacatttcttatgtttctttgctcatgtgtgtatttagcagttaattttaagatgtcctagtgatctttaaaagaaaaatattgtaccattttttagaattacactctcacctttctttctgcaattgaaagcgatgatgtca

SEQ ID NO: 146199 - DNA, 393 bp, Homo sapiens
  misc_feature (1)...(393): n = a,t,c or g
gattttccccttcccacgttgttaaaaaccgggccaggcccagggttttaaacggccccccttaaggggaaaggttttacgttgcaagcccgggttaaatttgggccccccaagggttcttttaaaagggcccccccnnnnnnnnnnnnnnnnnnnnnnnnnaaagaagtaagcctttatttccttgttttgcaaataaaactggctaagttggttgctttttggtgattagtcaaagagaccaaatcccatatcctcgtccgactcctccgactcttccttggcttcaaccttagctggggctgcagcagcagcaggagcagctgtggtggcagcagccacaggggcagcagccacaaaggcagatggatcagccaagaaggccttgacctt

SEQ ID NO: 146200 - DNA, 354 bp, Homo sapiens
  misc_feature (1)...(354): n = a,t,c or g
ctcaccaatactttatgttgatatcacttaatattaaccagactttgctgtattgcaataaaacagagaactgttnnnnnnnnnnnnnnnnnnnnnnnnnnnnnnnnnnnnggggggggccgtttaaaagaacccctggggggcccaaatttaaccggggctggcaaggtaaaatttttcccctaaaggggggcctattaaaaccccactggggaatttttgnnnnnnnnnnnnnnnnnnnnnnnnnnnnnnnnnnnnnnnnnnnnnnnnnnnnnnnnnnnnnnnnnnnnnnnnnnnnnnnnnnnnnnngggaaaagggggaaaaacaaccggaaaagcctgggggttgaaaaa

SEQ ID NO: 146201 - DNA, 485 bp, Homo sapiens
cgtggtttaggccccatggctatcagtcctttattagagcgagagtcccgaggcccagcccccatatatgatgggtccacttgagtctccttaggcgcagaggtgcccggggctcgagcgcgggcgataatctgcgtgcattcgtcgataactgtctgtatgcgaaagctgtacgcggccgtgagcacctgcagggcttcaccctgcgccacaacgagcgaaccgctgtacaggaactctaccagctgtcgcactgtctgcgcgggcaccaccggaggcacacggatctcagagtggccgagcagcagcttgtcttggaagaagggtgagccggccgccagcacgcagcggtgggcacgcagcgaagcttcacgaatgcgcacagtcacgtcacagaagtgtcccccaagcctctgcccattgagggtctcaagcagagagcgtgagaagttctgcaggtgtatgtgatgcacagcctctgcagc

SEQ ID NO: 146202 - DNA, 705 bp, Homo sapiens
  misc_feature (1)...(705): n = a,t,c or g
aaactttccaaccgccaggcttttccggttgttttacccccttttccccttaaaaatttttattttccctaaagcctttaatttctgtagggaggttggcccattttgtcccccccccaaaataagggttctttcccaaaattcccaagtaggtttttaatcggccccccttaagggaaaaagttttacgttgccagccccggttaaatttgggccccccaggggtccttttaaacgggcccccccnnnnnnnnnnnnnnnnnnnnnnnncgtggtttaggccccatggcctacagtcctttattagagcgagagtcccgaggcccagcccccatatatgatgggtccacttgagtctccttaggcgccccatgagggagtaacagcttgggtagagagctagggaccttgcccagcctgaccctggggcaggcaagcggccccccagcccccaccaccaccccaggagagggcggggtgagaaccggaatcaaaatttgggcccgggtccaagcgcctgagcgcccggtttacgcaggaaatagtccagttctcagaagtggtctaaccagccccagccccagcccggcaccacctggagggttcaagtacatggaggagaggagtaaggcggacttaggccctggtatggagaaagggtgaagggagagagaggacctgcgctcaggagggagcgtggtctag

SEQ ID NO: 146203 - DNA, 1539 bp, Homo sapiens
taagacactcttgtttcgctccttgacaaccctggcgggggttcgctggctgcggccccggctccggcccccgcaggagcagcaccccccggggaaagacattttctgctcccaccgagttggcagggcctgcttcctgaatctcctgggtgtgtcttaactgccagtcccagcacctcctgaaagccccactctcctccagtggtcacagtggaaggatcatggtagaaacacacgggaagaacgatgactgctgattataagcgactgcagaccttccctctggtcatgcactcggacatgccacaggagatgcgcgcggagaccatggagctatgtgttcacagcctgtgagaaatttttccaacaacaaacggagagcgcccgccaagattgttcaaaagagacaatggacaagaagtttcggctcctcctgggcacgttgtgatcggcgagggctttgggttttgaagatcacccacgaggttgaaagaacctcctctaccctgtacttcgggggcaccttggctgtgtgcgtctggaagttgctccttgacactctgtcccctgccccgtcccctgcagggccttttcctgccactcatctggggtggggagcagccctaggcaggtcctggtttttccaaggagagttggggtcttttctttttgtctttgtgtaccagtttcctgagccacgcccagtgtgtgagacttgacatctccatccccaggctctcaacccgtctccctcggagtctcagggtgtggacggggcagcgggcatgggtctgtgtgggagacgtggggtggggccggtgtgacagggtagaggaggtgggagatgagatcttccgcacaggaacacgccagtccccctttctccaggggctgccttccccttggcatcctggggagccccacttgccctgccatccccagtacttgccggggaagtgtccggccgtcccttgtcattagtggtcatattgaaaatggccccccaagaaggagatgattcttttcaagggacacaggcagcttctctccttgtcctctgggaaggtgcttgacccctcaagaaaccccttccacaaacttgaccccaggctgaacagaccacttgcatctcaactgggcccagcagccccccccagccccccagccttgggtggggaccaagcaagcctttcccgtcccctcctcgacccgtacagtttgagaagccaggggctggtgtgtgggagcttgctaccctggcagtttctcgagggggtcccccgagcctctggtgggacaccttgggcaaggaagtgctctcaccacgaaggctgcttccgcaaggaaacccttggcctgcccgcgacttcgcatcaagggaccgcattgctgatttgtactggtctctgcttgggttttctaatgtcttttcgaagtgtgggaaaagggttttagtagaagggtgaatcgtattttacacagcggtcttatttatataaatgtcttggtttttacaattaaaatgaccaaaaactgaaa

SEQ ID NO: 146204 - DNA, 2362 bp, Homo sapiens
  misc_feature (1)...(2362): n = a,t,c or g
gagagtcggattcgccgccgcagcagccgccgcccccgggagccgccgggaccctcgcgtcgtcgccgccgccgccgcccagatccccgcaccatgccgtcggagaagaccttcaagcagcgccgcaccttcgaacaaagagtagaagatgtccgacttatttcgagagcagcatccaacccaaattccccggtgataattggaacgatccaagggtaataaccagcctccttgttctggataaaaacaaagttcccttgtacctgaccatgtcaacatgagtgagcttcatcaggattaattagaaggcgcttacaggctcaatgctaatcaggcccttcttcctgttggtgaaacggacacagccatggtcagcgtctccccacacccaatcctcagaggtgtatgagaagtgagaaagatgaaagatggattccctgtacatggtcctatgcccccccccggagacggtttgcgatgaacattgtcagtgtaaaactgaaaaaaaaaaaatgcagcctcttcctagaattgtttaaaccccttacccaaggaaaaaataaaggaatgttacccaactgagatcgatcagttcatcccaatcacagatcatgaaacgagtagtgttcccaccttaggagtgttaggaagttgtgtttgtgtttcaagcagaaaaacttgagctccaagtgagcacattcagctttgggaaactatattatttaaatgttaggcttagctttgtttttcaaatttttaaaagttttaaaaataaaatacttttgcattctaagttgccaataaaatagaccttcaagttattttaatgctcttttctcactaataggaacttgtaattccagcagtaatttaaaggctttcagagagaccctgagtcttctcttcaggttcacagaacccgccgcctttttgggtagaagttttctactcagctagagagatctccctaagaggatctttagtgcctgagttgtgaagcgcaacccccgcaaaacggcatttgccattcacagttgggcacaaacggcaggggtaaacggggctgtgtggaggaaaacgggccctggactgttaaacttgctggaagggtccctggactcctaaggaggaacccacacccaaagtcctcactcttggcaggggtaggacatttctggtttggttttgttctctagataggttacacacataaaagacaccactccaaaaaggaaacttggaataatttataatttttgattcgagtttccttaaaagacccctgggagaaagagtgggcatttcttctgtttcaggtttgggtctgagttcaaactagtgcctgtgttgttacgggaaagcagcagtggtcccagtggtcactctgggagtacagcggggaggaaacaccaaattagtattaacttgaaaacattaacattccagacacactcccttctggccttcccggctttaaagcttgtggattgatccacgttttttgttttttttaatgtttaaatgtgttaactcagtatttactggaaaagggtaccccacattttggaatagtagttatcactcttagggtcaggacagccatcaggaattctccccacaccaagtggcatgttcagttgtggggaggaaaacataggcaaaaagagccgtacggctctttacagatactaatgtcaaggagttaaacctcctcaggttccaacctgtggattaaaagactaggtgcttccccagtacttggcatgggggttcactattttatagttttcttggggagtatcacagggaaaatcacaatttacacccacttttaagaccctatgtggtaagcagggtcacaacttaccccttgtgtgtttaggatgtgtatggaaataccctgtataccgttaagtgaaaagctgtttacctggtaaaccgggggaaaacccagattcctttggcatccggggcccctcctactgattggttaaaagggagttccctggtcaacccctgcttccccccccaaccccccggcatgcggtctgtcccactttggcttaactttttaatatggtgtattttttacattatgtatatttctttaactggggactgtctcgtttaggactggtattacatccatatctggacattattggtaactaccgtgtgatcagtaaggattcctgtaaggaaatactgctttttaaggaaaaaaaataacatgctgaggggggtgacctatatcccatgtggagtgggtcactttatttataggggtcntttaaaacatttttaatgaacctaagttgaataaaaggcacaattaaaaactgtcaaaaaaaaaaaaaaaaaa

SEQ ID NO: 146205 - DNA, 647 bp, Homo sapiens
ccccgactcttctggtccccacagactcagagagaacccacccatggttgctgtctcctgcccgacaaagaccaacgtcaagggcccgcctgggggtaaggtcggcgcgcacgctggcgcagtatggcttcggaggccctggagaaggatgttcctgtccttccccaccaaccaagacctactttcccgcacttcgaccttgagccacgggctctgcccaaggttaaagggccacgggcaagaaggtggccgacgcgctgaccaaacgccgtggcgcacgtggacggacatgcccaaacggcgttgtccgcccctgaagcgacctgcacggcgcacaagctttcgggtggacccggtcaacttcaagctcctaagccactggcctgctggtgaccctggcccgcccacctccccggccgagttcaacccctgcggtgccacgccctccctgggacaagtttccttggctttctgtgaagcaccgttgcttgaccttcaaataccgttaagcttggaagcctcgggtagccggttcctcctgcctccgctgggcctccccccagcccctcctcccctttcctgcacccgtacccccgtggtctttgaaataaagtcttgagtgggcggcaaaaaaaaaaaaaaaaaaa

SEQ ID NO: 146206 - DNA, 1192 bp, Homo sapiens
  misc_feature (1)...(1192): n = a,t,c or g
ggaattcccgggtcgacgatttcgtccgattccttctttccttccctgacccaacttccttccaaatcctcctcctagaagccctccttggttggccctgcctactttaaagcttctttcacattttcttaggtcatgttcccctggggcctcctgccctcaaatgctttgctttttggcactctgtagatattctaaaaaatcattttgtacatgtgtgtgacaggccatctcccagttaagttgcagcctgtgctttctttttattttgcacttcccccactatttctgtgagtgcttagtaggaagtgtcaaagaagcttgacagcattttcttctaagtgtcccaactcttggttttccattacacagacagagtgcaagacgatgacttgcggaatgcctcagcatgtaacgcaacagtagagacccatcatcaacacctcccaccaatactctgtgaagctgggccaccccagacaccctgaaaccagggggaattcaaagagctggtgcgagaaagatctgcaaaattttctcaagaaggagaataagaatgaaaaggtcatagagacacatcatgagaggacctgggacacaaaatgcagcccaaccagctgagctttcgagggagttcatcatgctgatgggcgaggcttaacctggggccttcccacggaggaagattgcacgagggttgacggagggccctggccacccaaacaaatagccaggccctgggggaggggcacccccctaaagaccacagtgggccaagattcacagtgggccacggcccacggccacagtacatggtggccacggccacaggccactaatcacggaggccaggccaccctgcctctacccaaccataggccccggggcctgttatgtcaaactgtcttggctgtggggctagggggctggggccaaattaaagtctcttcctccnnnnnnnnnnnnnnnnnggttaacccggccggaatttccaaatttataaacggaaaatcctgaaaaccccggaaggttaatttaaagggggcatggggccccatttaaattttttcaattaaaacatggtttggccttttttaaggaacctataccccttaaagttaaaatttggcccatgaaccctcggatttataaaatttttaaaaggactaaaataaaggccaatttttttttg

SEQ ID NO: 146207 - DNA, 1378 bp, Homo sapiens
ccgcgtacgcgcgctcgcacgcatcccggcctcactgtccctttactcctgaaccgatggaggggcctgaggcgatctctgagcgcgctgttggccggagggaagccggaggagaccgggtcgactgggcagagcggcagagggtcgaggagcctgctctgcacgcccagggagtagaagtgggcagggagcagggtcacgtgagggagcgcgccgcgactgagcttgggtccgactggagctcaggctcgcgacccagactggtgggccaggcctccaagccggccttacacccaatccaaggatggacagacccggacacagagggacggagcgagcaaggagacatggcttcatcatttccttgcccgcgggggccattcaccgggcgacagggtttgaagaactgatctcaggggacgacttcccggggaagttgggagttcccccatagccctgagatcgaggagaccagttgcctggccgagctgtttgagaaggctgccgcgcacctgcaaggcctgattcaggtggccaagcagggagcaactctttgtaccttgtatgccaagtacaaacaggtcaaagttggaaattgtaatactcctaaaccaagcttctttgattttgaaggaaagcaaaaatgggaagcttggaaagcacttggtgattcaagcccccatccaagcaatgcaggaatatatcgcagtagttataaaactagatccaggttggaatcctcagatatccagagaagaaacggaaaagaagcaaatacaggttttggtgggccagttattagttctctatatcatgaagaaaccatcagggaagaagacaaaaatatatttgattactgcaggggaaaacaacattgaccatataaccaaaagccatcaaatccgaaaaatgtggatgtgaatgtgaaagatgaagagggtagggctcctacttcactggggcctgtgatccgaggacataaaggaactagtccacagtgttgctgcaaacatagagctgacattaaactgtcaggactaatgaaaggccaaaacaggctctacattatgcctctgcctgtggagtttctgggatattgtaggagcttgctgctcccagtctgggtgctgaccccgactctccgagaccaggatggctgcctgccagaggaggtgacaggctgcaaaacagtttctttggtgctgcagcggcacacaactggcaaggcttaatcaaaagactggaaaactgcagtctgtaatagcataaggcttccattatgaaagaaaactaccaaaaataatacttcttttccacccgtctttggtatgtattggctaataaaatcagttctgtggaactgggaaaaaaaaaaaaa

SEQ ID NO: 146208 - DNA, 802 bp, Homo sapiens
  misc_feature (1)...(802): n = a,t,c or g
tctcttcctgtggtggaatcactctggagcggctgtcatcggccactcccgggagccttctcctaccctcagtcctccatccctggaacaggttagccccatacctgggccatgcctggggcgggccctgcgcccaggacgggatctcatgccttctcttttctctcccccggtgatttctccaagccagtggaatcttgaagggcttcgaacccaacctcctccaacttggtgctgaccgtcaccatttagtacatgcgagaccctgacgaccagtacaagctcacgggaggacaccccggcaagctgggcctcgtggtgttccggggcaacgtccttggtgctaaatctgcccgcaggacggcatggaggccatcccccaaccccttcatccagcagcaggacgcctagcctggccgggggcgcggggggtgcagggcaggcccgagcaagctcggtttcccgcggacttggctgctgctcccaccgcagtaccgcctcctggaacggacgcatttctcctttttgtaaaaggtttgaatttttgttttccttaataaaattgcaaacctcatnnnnnnnnnnnnnnnnnnnnnnnnggggggggcccttttaaaaaaacccttgggggggcccaaatttacccgggggcgggaaaggaaaaatttttttctttatgggggggcaaaaaaaaacccccctggggatttttggaaaaaaacctttttttggggggggaaaaaaatgggccccccccccccccaaaattaaacgcctcgggggaaaaaaaaaatttttaggt

SEQ ID NO: 146209 - DNA, 798 bp, Homo sapiens
  misc_feature (1)...(798): n = a,t,c or g
ccactgaagcgctcagatggctgtaacgacggccgacccacgcgtccgcccacgcgtccggacacaactgtgttcactagcaacctcaaacagacacgcatggtgcatctgactcctgtggagagagtctgccgttactgccctgtggggcaaggtgaacgtggatgaaagttggtggtaaggccctgggcaggctgctggtggtcctaccctgggaccccaaaaggtcctttnaaagccctttgggggaatctgtcccaactccctgaatgctgttaatggggcaaacccctaaaggtgaaaggctcaatggcaaaagaaaaagtgctcgggtgccctttaagtggtgggcctggctcacccctggacaaccctcaaagggcacctttgcccacactggagtgagctgcactgttgacaagcttgcacgtggatccctgaagaacttcaggctccttgggcaacgtgcttggtctgtgttgcttggcccatcacttttgggaaaagaatttcaaccccaccagttgcaggcttgcctaatcaagaaaattggttggcttggtgttggctaaatgcccttggccccacaagtaatcacttaagcctcgctttccttgctggtccaatttccaattaaaaggttcctttggttccctaagtccaactactaaactggggggatattattgaaagggccttgagcatctggattctgcctaataaaaaacatttattttcatcgcatacaagaataaaacaagcgcggccgattaagaggatacttcaggggcgcaagat

SEQ ID NO: 146210 - DNA, 461 bp, Homo sapiens
gtggtggaattcccaccatggctacctgggccctcctgctccttgcagccatgctcctgggcaacccagcccctgcctccgcatctgcgtggtgaaggccattggccctcatcggtggatctgcgtttcctcgggcctacactgtctaggattgtgcggggctggtgagagaacaagatctcttccgtgttcaaggcagacttcctgccccctgcaccctgctctctcccaggccttgaggtctggtcttctctcgtctgagccctgagtactacgacctggcaagagcccacctgcgtgatgaggagaaatcctgcccgtgcctggcccaggagggcccccagggtgacctgttgaccaaaacacaggagctgggccgtgactacaggacctgtctgacgatagtccaaaaactgaagaagatggtggataagcccacccagagaagtgtttccaatgcc

SEQ ID NO: 146211 - DNA, 418 bp, Homo sapiens
aaccatgtccactgtggtgctgctgctgcagagaagtgtttccaatgctgcgacccgggtgtgtaggacggggaggtcacgatggcgcgacgtcttgtcctgtggaagaagcacaggctcctgtcctcagatcccgggaacctcagcaacctctgccggctcctcgcttcctcgatccagaatccactctccagtctccctcccctgactccctctgctgtcctcccctctcacgagaataaagtgtcaagcaagattttagccgcagctgcttcttctttggtggatttgaggggtgggtgtcagtggcatgctggggtgagctgtgtagtccttcaataaatgtctgtcgtgtgtcccatacactgttgtagatgttatggatttagtggtgaacgagacaaccttaacgaattcc

SEQ ID NO: 146212 - DNA, 4341 bp, Homo sapiens
catggctacctgggccctcctgctccttgcagccatgctcctgggcaacccaggtaaggccttcccctcgggatcgatcctgatggcccacccagcctcgcactctcaggctggctgaacctggagcttggactctgtgggcacccaggtgcccctgcctccccccggccttctcccccgtcatggaggcctggccctcccctcagagccaggcttagtccggtgtgctgcccagcctgtcactggcctggccaaggaggagagacaggccagggattctggtcctaactctactggccacactgtgtggcctgagacccccctttccctcccaagcccctgcctccgcatctgcgtggtgaaggccattggccctcatcggtggatctgcggttcctcgggcctacactgtctaggattgtgcggggctggtgagagaacaagatctcttccgtgttcaaggcagacttcctgccccctgcaccctgctctctcccaggccttgaggtcagtgtgagccccaagggcaagaacacttctggaagggagagtggatttggctgggccatctggatggaaggtaaaaaaagaaaatcccttgaaaggagattgagggaagtttctagacaaaccgacccccaaatctgtgttgctgggggaacagaggagaagagagagtctcgccctcctggctttctagaaggaacgtgagaacacgtgtttgtgctgagagtgggtcagagcggctccagggcaaagcatgtggacaggtatcctggccccctgcaaggcccagctcctgtcctaggccctggtcacctcctggactcccaccagccaggagaacgggctttccctctccttccgcctgcggaggggaagctgaagtctggtcttcctcaggtctggtcttctctcgtctgagccctgagtactacgacctggcaagagcccacctgcgtgatgaggagaaatcctgcccgtgcctggcccaggagggcccccaggtacgtgttggctctctgctcacctgccacagtccctctcctttccctcctccctggtggctcctggggtgaggtctggagctctctaatggtcaggaggtgggagtggaggctgggctgtttctgacgatgctggttttgttgaattcatgtctggccaggagggctacaggtatctggcagactcctccaggaggatcctctggggtctcaccctccaaggagcctggggctgcagaacccaaataggcagactcccctgggagttcctcaataggagaggggcaagtgcagggctgggaaagtactggggttgtgggaggctgtttctggggtgtctcagagcctctaagacaagcaaaagggtgggtaggggccaggcagccagttcaggccttcagtgtatccacgctctgggaagagatcacggacattcctgccggcctcagaaacacaaagggcccctttcctgggcactttcacgcgctcccagagtgtctgagagaccatcataagggctttctttcctgacagggtgacctgttgaccaaaacacaggagctgggccgtgactacaggacctgtctgacgatagtccaaaaactgaagaagatggtggataagcccacccaggtgaggccaaggggctacagagcctcctgtctgctgctcaatggaggggccagcctgtgaccaggtcggggatcggggagcccgggggcaccttgcacagtgatcctgggggagggcttcctagaagggaatctgtgagtccccgtgtgtctgtggatgaatttcagagaacttgtgaaattgtgactctctggaactgtgtaagtcagacggcagagtatacatggttttcatcatgtatcctcaaagagggcttgtcccagagaagttaggaatcttcccctaaagccctaacatttgtgtccaaggcagagtttgagaagctagttccccaagaggcctgggtcaggactgataaatcccagatctgctacttccaagctgcatggccttgggcaagtcacttccactttctgagcccctgttatcttatctttgaaatgtgatggataatagtccctatcttgcaagttgtcaaacccttttttttttttttccttgagataggatcttactctgagacccaggctggagtgcactggtgtgatcttggctcactgcaacctctgcctccctggcccaagcaattctcctgtctaagcctcctgagtacctggggctccaggtgtgcgccaccatgcccagctaatttttgtacttttgtagaaacagggtctcactgtgttgcccaggctggtctccaacttctgagctgaagcaatccacctgccttggcctcccaaagtgtgggattataggcatgagccactgcacctggctgctgaagctttttaaaagagctgagggctgggatgtgcttagctccacgtccagcactgagtaaatgcttaacgaatgactgtgttactaccaagaattattgtttcactctccctccttccctctcctctgctgccccaaactactcagcatcctggcactgcaggctcgcacttagccctggatacccagattcatcctcctcccctgggatggcatagaagagactttaaaaccaaatgagccaagactccaagctctgaccacacctcccacccccaccagtcttctctatgcaccccctctatatctggagcccccagccaggttctggaccaaggtagctacatggcagagcatttaatgtgtgcctggcagccatgggcaccattctccacacagaaggcaggggacaggtgcacaaggcgctgagaccccagcagggctaactgtccttgtctcaggagccctacctggccagtcttgggccaggccttggggactgggagtaggggctgacccgtctgtacagtctctggccccatggcaccaggtgccagctcctcgcacccagtactcccattgctagggctgctggaacctgcagggttggcagagctgggcaggactcaccctataaccatgtccactgtggtgctgctgctgcagagaagtgtttccaatgctgcgacccgggtgtgtaggacggggaggtcacgatggcgcgacgtctgcagaaatttcatgaggaggtatcagtctagagttatccagggcctcgtggccggagaaactgcccagcagatctgtgaggacctcaggttgtgtataccttctacaggtgagtgcagaggtgacagcagggatacctcctgagggttggagacagcttcccccaggatatatcaaagctgcctccttactcccccatctcccagcatgggaaagtgtggagaattgagcagatggactttagctagaaatgtttgagaaatactgattagagcttgggcttcagacacaggtggttgtggagtaaaatctggtctccatctctccctggctgtgtgaccttaagcaaataacttgacctctctgagcttcagtttcttcatctgtgaaggagagatagcaatcctgatttttgagattggaatgagaattgaaggaggtcaccgtgtgtgtggacctgaccctggggaaatgtcctcagactgaggctattcaaggtcatcagaccctcagtcaaactccaatcccagcccagcacatggcccctggggtcgggagctggggccatatcctcccccacaatcctgggccctgagatctgggctagggaacccttcaggcaggggagcatgaggcctttccctccatggctgcccaggctgtgcctggagagaacagatctcggctgtaggaaatggggccagaaaggggcctcggtgattggctctggcagctcagctggcacttgccaatagctctgggattttatgctggcagatcgggggtccccaccatttcctgtcattggagcttgtggcttttctattcaaggccccacagcctgctcaggctgccgactggcttccaggatgtgcctctgggtgtgttcagtagggtcaggtggctctgggaccttaagcaagtaacattctgagtgcctgcttctccttgaggacccaccacatctgcccacagctagctgttctctccgctccaggtcccctctgagccctctcaccttgtcctgtggaagaagcacaggctcctgtcctcagatcccgggaacctcagcaacctctgccggctcctcgcttcctcgatccagaatccactctccagtctccctcccctgactccctctgctgtcctcccctctcacgagaataaagtgtcaagcaagattttaaaa

SEQ ID NO: 146213 - DNA, 928 bp, Homo sapiens
cccacgcgtccgaaggcatctcagcggctgccccaccatggctacctgggccctcctgctccttgcagccatgctcctgggcaacccagcccctgcctccgcatctgcgtggtgaaggccattggccctcatcggtggatctgcgtttcctcgggcctacactgtctaggattgtgcggggctggtgagagaacaagatctcttctgtgttcaaggcagacttcctgccccctgcaccctgctctctcccaggccttgaggtcagtgtgagccccaagggcaagaacacttctggaagggagagtggatttggctgggccatctggatggaaggtctggtcttctctcgtctgagccctgagtactacgaacttgcaaagaccccacctgcgtgatgaggagaaatccttgcccgtgccattgcccaggaggcgccctcaggggtgacctgttgaccaaaacaccagaacttggcccttgaattacaaggacctgtcctgacgattagtccaaaaaacttgaagaaagatggtggataagccccacccagagaagtgtttccaatgctgcgacccgggtgtgtaggacggggaggtcacgatggcgcgacgtctgcagaaatttcatgaggaggtatcagtctagagttacccagggcctcgttggccggaggaacttgcccagcaaaatctggtgagcacctccaggttgtgtataccttctacaggtcccctctgagccctctcaccttgtcctgtggaagaagcacaggctcctgtcctcagatcccgggaacctcagcaacctctgccgcttcctcgcttcctcgatccagattccactctccagtctccttcccctgactccctctgctgtcctcccgctctcacgagaataaagtgtcaagcaagattttaaaaaaaacaaa

SEQ ID NO: 146214 - DNA, 654 bp, Homo sapiens; identical to SEQ ID NO: 144884
  misc_feature (1)...(654): n = a,t,c or g

SEQ ID NO: 146215 - DNA, 659 bp, Homo sapiens
  misc_feature (1)...(659): n = a,t,c or g
ccccgactcttctggtccccacagactcagagagaacccacccatggttgctgtctcctgccgacaaagaccaacgtcaagggcccgcctgggggtaaggtcggcgcgcacgctgtgcgcagtatgtgtgcggaggccctggagaggatgttcctgtccttccccaccaccaagacctacttcccgcacttcgaacctgagccacggtttctgcccaggtttaagggccacgggcaaggaaggtggccgacgcgcttgaccaacgccgtggcgcaacgtgggacggacattgcccaacgcgcttgttncgcccttgagcgacctgcacgcgcacaagctttcgggtgggacccggttcaactttcaagctccttaaggccacttgccttgctgggttnaccctgggccgcccacctccccgcccgagttcaacccctggcggttgcaagccttccctgggacaaagtttcctgggcttcttgttgaagcaccgtgcttgaacttccaaatacccgttaaagcttggaagcctcgggtgggccatgcttctttgcccctttgggcctttcccccagcccctcctcccctttcctgcacccgtacccccgtggtctttgaaataaagtcttgagtgggcggcaaaaaaaaaaaaaaaaaaa

SEQ ID NO: 146216 - DNA, 406 bp, Homo sapiens
tcgtaagacacaaaccaccagacgtgggcctgggctctgggctgggccaggtggatgaaggggaggctggtggtccaggcggctgctcttggctgcagggtttctgggcacacatccgggtagcacgcatcctggccttcagcaacctcgttttaaatgggaccacaccaggagcagccagggcgctttcattttcactttctttccccgggggggacaggaacattcctttacctcctgaggaaatcgggctcttccagagccacagaggagtgaaggccccagcccttcacgatgctgcgcggctatgtttgggtctgtccatcagggagaaagaaaaaccggccgagtcttgcacagggtcctcgacagcaaccccaggtaaagagcagagcaagccgtccaa

SEQ ID NO: 146217 - DNA, 491 bp, Homo sapiens
aatcgagatcgtagcaatagcggggaattcacggtctcagttccccaccaccttcccccagaacctgttggtctccagtccccatcccattaccaccaactcccaactccccactggaacccagcagtctcgtatctccatcagtgaggacagtgtgagaaatggtgtctggctcaggcacttggcagcagcttgaggggtcctcagatgtctcctgcccagcaaggatctgactaaagcagtcgtgggtgtgggaggggcctgcaggcatgcctgggttgggggcagctggccctgggcaccctggtgcaggtccagtctgccctctggatggcccctcctcttacccatattactactttgtaaccagggaggtgatgcagcgtgacatatcagccggcgacttcatcgagcatgccgagttctcggggaacctgtatggcacgaggtgggccatgcgtgggtgtgggtgggctcccagggttgctgtt

SEQ ID NO: 146218 - DNA, 1155 bp, Homo sapiens
  misc_feature (1)...(1155): n = a,t,c or g
gcgaccgccctgggccgggccccaccggacggcttgctctgctctttacctggggttgctgtcgaggaccctgtgcaagactcggccggtttttctttctccctgatggacagacccaaacatagccgcgcagcatcggtgaagggctggggccttcactcctctgtggctctggaagagcccgattttcctcaggaggcatgtcgggccccaggctggtggtgctaagcgggccttcgggagctgaggaagagcaccctgctgaagaggctgctccaggagcacagcggcaatctttggcttcagcgtgtcccgtgagtccagggctctcgtggagggataccacgaggaacccgaggcccggcgaggggagacggcaaaagattacttactttgtaaccagggaggtgatgcagcgtgacatagcagccggcgactttcatcgagcatgccgagtttctcggggaacctgtatgggcacgagcaaggttggcggtgcaggctgtgcaggcantgtaaccgcatcgtgtgtgcttggacgtggaacttgcaagggtgtgcggaacatcaggcccaccgatctgcggcccaatctacatcttctgttcagcccgcctttcactgcaacttgctggaagcagccgggcttccggcagccgcaacaacttgaaaccgaaggaagagcctggttgaaagcgggcttgctgcttgcccaggccgaacatggaagagccagccaaggaagccccggccctgtttgaatgtggtccatccattaaacgaccagcctggaacccaggcctaacgcagagctgaaggaggcgctctctgaggaaatcaagaaagctcaaaggaccggcgccctgaggcttgctgtctgttctcggccnccccgggcccatacaggaccagggcagcgagcattgagccatcccccttggcaggcgatacggcagctctgtgcccttggccagcatgtggagtggaggagatgctgcccctgtggttggaacattccgtggggtgacccctcgtatccagccatcgctgggctgtcccctgtccctatctctcactctggacccagggctgacatcctaataaaataactgttggattagaaaaaaaaaaaaaaaaaaaaaaaaaaaatttcat

SEQ ID NO: 146219 - DNA, 898 bp, Homo sapiens
  misc_feature (1)...(898): n = a,t,c or g
ccactgaagcgctcagatggctgtaacgacggccgacccacgcgtccgcccacgcgtccgcaactgtgttcactagcaacctcaaacagacaccatggtgcacctgactcctgtggagagagtctgccgttactgccctgtggggccaaggtaaacctggatgaaagttggtggtaaggccctgggcaggctgctgggtggtcctacccctgggacccccaaaaggtcctttgaaaccctttgggggaatctgtcccaactccctgaatgctggttaaatggggcaaaccccctaaaggtgaaaaggctcaatggcaaaagaaaaagtgctcgggtgccctttaagtgaatggccccggcctcaccccggacaaccctcaaagggcacctttggcccacactgaagtgaagctgcactgtgaacaagctgcaccgtggatccctgagaacttcaggctccctgggcaacagtgcctggtctgtgtcgctgggcccatcactttgggcaaagaattcaccccaccagttgcaggcttgcctattcagaaagttggtggcttggtgtggctaatgcccttggccccacaagtaatcacttaagcctcgctttccttgctggtccaatttccaattaaaaggttcctttggttccctaagtcccactcactcacctgggggatattattgaaagggccttgagcatcttggattttgcctaataaaaaaaatttatttttcattgcaaaggaaataaaaaaagaaaccatnccgggggggccctttttaaagaatccttgggggggcccaaattttacgggggtatggaaggatatatttttttccttatggggggccgttttaaaacctcccggggaattttgggaaagaacctttattt

SEQ ID NO: 146220 - DNA, 439 bp, Homo sapiens
  misc_feature (1)...(439): n = a,t,c or g
aagggaaagataaaacncaaggcagtctgggtttgagtttcaatagggcagggaaccctggcttgctttttatctttttttcccctcctttctttgtcttggttgttttaatggagggaatctcaaacccagtgctcttatctccttccagccagttttgtgtgtcatgaatgtgttcatgtgcaggctgggaacaacttttcatttagtcctcctcctcccctctgtgctccccagcctgagaaaaacagtcttcctaaatccatttagcataaaacagagattccagagatggaaacactgggtcttccaggtggcttctgagctaactgatgccatcctgagttcttgtggacacctgttcctgcctgggtcccacaatctatcttaagggtctcctgccctctatccatctccatatcctctcaatcttctgcat

SEQ ID NO: 146221 - DNA, 1871 bp, Homo sapiens
ctcagggtgacttctttccatagaatggatggagggctcttcattttcagctcatgtgcacaatcgagtccatttagtacaatacacagatacacagtaatgatataattatgtgatgcaaatattaacttcatccctttccttgtaaattcagcttttctcaccagagctcaggggcagtcatgacaataaaaataacaatagtaattacaagaaatgtgctctcgagtacagagaaaccacaaggcccatctcaacacacaagatacaaaaacaactcgcatttacggggcgtttccaggagttaatagcatacagtaccatgggtagggtgtggttggcagaagctgtccacttttttctaagtgccaggtgtccgttgctgaggatcttcgttgctcctcctcccttcgttttctaagagtaacttcccagaggaccctgcctggagcctgccaagccagagtccagcgtaaaggcccggagggctgtttgtgtctttctggcctccctagggtagagggcagagctggctgcagctctgataccctttcctggagctctgcactctctcctcccctctttaatcccctctgtctcccctcccttctgctcttcagcccccatcctttcctcctctcctcctctgccttgaccagctgacctcccagcagacagcaccgcaggcgggaaggcctctcagggcgttgataggttaatctcagtgcttctggttcatttattacatggtcaaaggggagaacggagggactatttcaggtcccagttctctggaggtgccaggggtaagggaaagataaaacccaaggcagtctgggtttgagtttcaatagggcagggaaccctggcttgctttttatctttttttcccctcctttctttgtcttggttgttttaatggagggaatctcaaacccagtggttcttatctccttccagccagttttgtgtgtcatgaatgtgttcatgtgcaggctgggaacaacttttcatttagtcctcctcctcccctctgtgctccccagcctgagaaactggtgatggcaaaaacacctcccctacatgcccaggcagaacgcgtccttgccatccgagccttacccccgagaatcagcgggacttacacttcttcgtccttttctctaccttgtttcccccttaaaagaaaaacagtccttcctaaatccatttagcataaaacagagattccagagatggaaacactgggtcttccaggtggcttctgagctaactgatgccatcctgagttcttgtggacacctgttcctgcctgggtcccacaatctatcctaagggtctcctgccctctatccatctccatatcctctcaatcttctgcatccctggccctgattctgagggctgcagggctcacagagcctccacattcccagcctcacagggctgcggcatgcttgcatcaccctgggaaagacagcccactcttcccgcctgcacccttccccagctcccccaccctatctctagtccacagacacaagggacaacaatgccccagaacccacccctccccgctcgtggacatggagagcctgacaatggggagggggtcctctcaggaggggcaggcatcccagcaaccctggcctggggaagggaagtcaggctgtgagatgcccccacctggtttacaaagtgaagcccgagccctgaccaccccagatccctgggggctctagcagtctatgcctctagattatctacacctctccgtgattctcagatggagaagaggcggtgggcagtggcagggagccaccaagatatcacggcgcgacaggaggggaggtgcattgttgctccacctt

SEQ ID NO: 146222 - DNA, 779 bp, Homo sapiens
ccactgaagcgctcagatggctgtaacgacggccgacccacgcgtccgcccacgcgtccggacacaactgtgttcactagcatcgctcatacagacactattggtgcacctgactcctgtggagagagtctgccgttactgccctgtggggcaaggtgaacgtggatgaaagttggtggagaggacctgagcagcgctgctgccggtctacccttggactcagacgttctttgactacctttgcggatcagtccactcctgacgctgctatgggcaaccctaaggtgaaggctcattcgcaagaaagtgctcggtggcctttagtggtgggcctggctgcacctgggacaacctcaagggcacctttgctcacactgaggtgagcttgcactgttgacaagcttgcacgtgggatcctggagaacttcaggctcctggggcaacgtgctggtctgttgttgctgggcccattcacttttgggaaaagaatttcaaccccaccagttgcaggcttgcctaatcaagaaaattggttggcttggtgttggctaaatgcccttggccccacaagtaatcacttaagcctcgctttccttgctggtccaatttccaattaaaaggttcctttggttccctaagtccaaatacttaaactggggggatattattgaaagggccttgagcatctggattctgcctaataaaaaacatttattttcatcgcatacaagaataaaacaagcgcggccgattaagaggatacttcaggggcgcaagat

SEQ ID NO: 146223 - DNA, 389 bp, Homo sapiens
taccagctccccgctgccctgcgctcggcgcgctggcatccggcccgggggaaagcggaccagcccttctgcaggtctgcggggccaagtgtcccggcggcgcacctcgtggcgagaatcgggagaaggaggagactacaaggataggcccaggagtaatggagtccaaagagaaacgagcagtaaacagtctcagcatggaaaatgccaaccaagaaaatgaagaaaaggagcaagttgccaagggctcccctttggatgctggtgaatactgtgtgcctagaggaaatcgtaggcggttccgcgttaggcagcccatcctgcagtatagatgggatatgatgcataggcttggagaaccacaggcaaggatgagagaagagaatatg

SEQ ID NO: 146224 - DNA, 924 bp, Homo sapiens
gcttttcttggaatctctcaccacagagctgtagaaaagccctattctggtttccagaatgggaagagacctcccaactatgctgagaagggggagtaccagttaactggccgccggcccgtgggggttggtgagaaggagggtgagcttggcggtgacgcacggccctcacgtgaccgggagctgcagagctacgcagccttcggtgcagtcgtcactcgtgtctcgctaccagctccccgctgccctgcgctcggcgggctggcatccggcccgggggaaagcggaccaggagtaatggagtccaaagagaaacgagcagtaaacagtctcagcatggaaaatgccaaccaagaaaatgaagaaaaggagcaagttgctaataaaggggagcccttggccctacctttgaatgttagtgaatactgtgtgcctagaggaaaccgtaggcggttccgcgttaggcagcccatcctgcagtatagatgggacataatgcataggcttggagagccacaggcaaggatgagagaggagaatatggaaaggattggggaggaggtgagacagctgatggaaaagctgagggaaaagcagttgagtcatagtttgcgggcagtcagcactgatccccctcaccatgaccatcacgatgagttttgccttatgccctgaatcctgatggtttccctgaagttaatagggagacccctgcttcctaaacttacacatttgtggtgtacctttgtcgtaaacgttttgatgttacctatttcttgtgggtctcctattaccagcttctaaatgaatgttgtttttgacccagtttgtaagtttctgtcagcaggagagttttacctattgcatggaaagatgctcattatatattgtgaagttaataaaacagttttaaaaagcaaaaaa

SEQ ID NO: 146225 - DNA, 903 bp, Homo sapiens
  misc_feature (1)...(903): n = a,t,c or g
ccgggagctgcagantacgcagccttcggtgcagtcgtcactcgtgtctcgctaccagctccccgctgccctgcgctcggcgggcttggcatccggcccgggggaaagcggaccagcccttctgcaggtctgcggggccaagtgtcccggcggcgcaacctcgtggcgagaatcgggagaaggaggagactacaaggataggcccaggagtaatggagtccaaagagaaacgagcagtaaacagtctcagcatggaaaatgccaaccaagaaaatgaagaaaaggagcaagttgctaataaaggggagcccttggccctccctttggatgctggtgaatactgtgtgcctagaggaaatcgtagggcggttccgcgttaggcagcccatcctgcagtatagatgggatatgatgcataggccttggagaacccacaggccaagggatgaagagaagagaataatggaaaaggattggggaggaggtgagacagctgatggaaaaaagctggagggggaaaagccagttggagtcataagtctgcggggcgagtcaggcactgaccccccctcacccatgacccatcatgattgagtttttgccctaatgcccctgaatccttgatggttttccctaaagttattaccggaaacagacccctggctttcgaatttacatgttccatgatgtgcccctgtttgtaaacctttacctgtcacttgtttaccgtgggtctcctattaccaagcttctaatttgaattattgtgtttttgaaccagtctgtaagatttttgttagcagaagaattttacctattgcatggaaagatgctcattatagtgaagttaataaagcaccgctgtattgcgaccgctctagagtatgcaagcggtcagtgtca

SEQ ID NO: 146226 - DNA, 1108 bp, Homo sapiens
atggtctacggggcttctgaggcaatcgggcagcgtcagtcttcagccgctaagccaagaaggagtcagtcagagaaccttgggccagagttccaggagctctgggagtggctgccaggaaagcgggacttgccgctaagggtgaaggagaaggggttgaggggtacttgcccctgccccaggaaagcgggacttgctgctaagggtgaaggagaaggggttgaggggttcttgcccctgccccaggaaagcagagaagggaacaggaggacaggagactggtctcctaagggaggtcggtcccccgatccgagtcacggcaccaaatttcatgcgcgtccgtgtgaagagaccaccaaacaggctttgtgtgagcaacatggctgtttatttcacctggagcatcgaattgagtgaaaaatgactctggtttcttctctatatcctcagtgtccaccttcacatccaccatggggttgagattctgagctcgctccaaagaggcttcagccctatttcggccaacagacccagtacgaatcaagaactgagctccgggatcttctggagttaccttctcctccaagaaaatgagctggcccacttcccattctaggctaaccctgtatccttgacccattccatcctgcttcttcagggatctcattatgtgctgagaagctggcagccactcccagagcccctggaactctggcccaaggctctccgactgactccttctcggcttggcggctgaagactgacgctgcccgatcacctcgaaagccccgtagaccatcacagacgccgagcttcgagtaacttgggcaagtgacaccttagggtgagtctccttgtctgtaaaaggggctgtggacagtgcctccttcattcggtgacaccgtttctgggcctccagtccccacaggcggatctgccggtcatactgtgccgcctcctcctcgctaatgccgccgccagcctcctccttctccaccatggcgccggctcttcctgcctcagctccggtcccgctcaagccaaccgcccgccggacccgcgcgccacctaccgccgccggcagcacgcccggagtgcttctgcgcat

SEQ ID NO: 146227 - DNA, 1281 bp, Homo sapiens
  misc_feature (1)...(1281): n = a,t,c or g
gacaccagcctttgcagagtcctcaacagccaatttatgctccaacaagcatcactaatgctatcactaacaggaggcatcaggcttctgccctgggaccagacaacgaaaatggaaggaataagaaacgtgttacaaatgagcagaccatcaacaaatatactcaggtgataggaattagcattgtgaatgttgtagcttttttctcttcttatccaacgttttcactacaatttttgtttgctttaattacggcttctgaggcgacaggacagtgtcagtcttcagccactaagccaagaaggagtcagagagccttgggccagagttccaggggctctgggagtggctgccagcgatttccaatagatttctgcgtggccttgacacagacagctagtgtgaatccccgcccacagaggggcggcacgttggttgccgtacaacgtggtggttccctgcatctctgcccacgtcggagaggtgcgtcggcttccgtacaacacggatactctctctctgacgcaacttcctgtcctgcgcaattctatttgacctttgaactggcaaaggcttttttcttcctcttccggggacgttgtctgcaggtatggatgttgttctcttttccctgtctttatttccttaccaatcggctgccatccgaggagctgaggaagcctagagctctcagaagcagtcctttgagctggtgtaggggtaaggggcacaacagggaggttggtggtgaggaagttccttactttgatctttggaaatcccttgttcctggtggcacctccaaagccgcactcagaatggtcccagcgtttgacatacccgacgtaggccttccccctacaatacagccctctaacaaaacctaggctgtccccgaaccccccggtaatagaatctgtttaccgtttatacccaagaaggttgggaaagcaccccaatntctgcatgtggtgtgtgccccaggcagacttccgaggggttcgtgctgtaagacctaaagtttcttatgagattgtccaaaacaaagaaacatgtcagcagggcctatggtggttccatgtgtgcttaaatgtggtcgtgaccaggatcaaagcgtgcttttcccttatcggagggagcaggaaaattcgttgtggaaagtgtttgaagggcaccaagccacaggagtccaggaaagctaaaattaaaaaaatggaacctttttttggagtaattaaaaattgaaaagacgctgtaaaaaaaaaaaaaaaaaagtcgacc

SEQ ID NO: 146228 - DNA, 945 bp, Homo sapiens
  misc_feature (1)...(945): n = a,t,c or g
cccacgcgtccgatcgccgccatcatgggtcgcatgcatgctcccgggtgagctcggggcatcaagccggattgctgggcggtgggtgggaggaagacagggagtgtgggcagcgggccgaggggatgatgttctgggctgctctggcactagccgccacttcaccttcgagactgcttctctcccccgggaagggccctgtccccagtcggcttttacccttatcggacgcagcgtcccccacttggttgaagttgaccatctgacgacggtgaaggagccagatttaccaaactggcccaagaagggcccttactcccttcacagatcggtgtaatccctgagagattcacatggtgttgccacaagtacggttttgtgacaggcaataagattttaaagaattcttaagtcctaagggacttgctcctgaatcttcctgattgatctctaccatttgaattaagaaagccagtttgctgttcggaaaggcatcttgaggagggaacaggaaagggataagggtggctaaaatttcccgtctgatttctaaataggagaggccggatttcacccgttttggctccgatattataaagaccaagcggagtcctccctccccaattgggaaatatggaatcatcttacagcctctgccctgggtcgcataaatttggtctggtgtactccaagcaactaaaatgattgtttaactaaaaaaaaaaaaaaaaactcgaggggcggccgttttaaaggatccctgggggggcccaactttacccgggcagggaaggaaatacttttttccttatgggggggcgaattaaaacctacctgggannnnnnnnnnnnnnnnnnnnnnnnnnnnnnnnnnnnnnnnnnnnnnnnnnnnnnnnnnnnnnnnnnnnnnnnnnnnnnnnnnnnnnnnnnnnnnnnnnnaaaggg

SEQ ID NO: 146229 - DNA, 1025 bp, Homo sapiens
ggagagcacagcatggcccctccagcccacttcagggcactcttgtatcacccgggtaccgccacactggtcccccacccagccagcatctcccagcacagcccctctccctggggaaatgctctgggtagccagtctaaaggcagaggcacctaactgctccccgcagcccaccccacccaagattcagacacaagccaggaaaggacccaagagaaaatccttcaaggtggcctgaggtcccatccctccctcagacccatgtggtcccaggccaggctgcctgggacacggtaaataccactgtgtgcaaaaatcgaagtacaaaaccacaagactaaacaaaacaaacccagagagccaaacttgtagaggtgggcagtccagaaagcagggggcagccctccccctttccttctctccctgatcctcagaatatatattgttgtaataggaagcatttttgcattgttctcttgtgggtgtcactacagacatgttctggcgtgttctccgagggatggagcatcctgttatatatttgacttcaaattgagatgttggcttcattttttttttttttacccaattaatctcccaatccctagcaactgtgactctgtatttagcacaagagaaagctgagaatgtgggtcttgcctccttccagaaatatgtctggctcatcaggacatttttttaaaacttcaaaatatttttaagatattttacacttttataaaacaaaaaatcaaccaacaagagacttttctgaggaggaacatttgtatttgaacaagatccttggtgtgtagttcagtcttgcagtatacaagcttttgtgtataaatgttttatgatatgattccctgtgttttgcaggggtttttttctcttttgctttttagataaatatgtatatcaatattttaaattcatctttgctttttttagaggagtttgtaatccccttataacatgaaaataaacatttcctttttaacctcaaaaaaaaaaaaaaaaaa

SEQ ID NO: 146230 - DNA, 1139 bp, Homo sapiens
gccatccagttccatcctcgtcgtacagcgtacacacgctctcacccgccgccatgactgagcagatgacccttcgtggcaccctcaagggccacaacgggctgggtaacccagagtcgctactaccccgcagttcccggaaaataatctccccgcctcccggagaaaaggccatcatccttaggaaacctgcccgggggtggagccaacctatgaatttccaaaggcgttctcggcggattcactcccacttgttgaggatggtggttatttcctaagatggccagttttgcccttccaaggcttctgggattggaaaccctgcgccctcggggatctcacaaacgggcacccacacgagggcgattttgtgggccaataccaaaggatgtgctgagtgtggccttctcctctgacaaccgccaaagattgtctctgggatctcgagaataaacccatcaaagcttatggaataaccctggggtgtgtgcaaattcaacttgtccaggaatgagagccactcgagagttgggttctttgtgtcccgcttcctcgccccaacaaccagcaaacccctatcaatcggtctccctgtggcttgggacaaagctggtccaagttatggaaacctgggctaaactgcaaagctgacgcaccaaacccacatttggccacaacaggctttcttgaacacgggtgacttgtcttcttccagatgggatcccctctgtgcttctggaggtcaaggatggccaggcccatgttatgggatctccaacgaaggccaaccccctttacaacgctagaatggtggggacatcaatcaacgcccctgtgcttcagccctaacccgctacttggctgtgtggctgccacaggccccagcaatcaagatctgggatttagagggaaagatcattgatagatgaactgaagcaagaagttatcagtaccagcagcaaggcagaaccaccccagtgcacctccctggcctggtctgctgatggccagactctgtttgctggctacacggacaacctggtgcgagtgtggcaggtgaccattggcacacgctagaagtttatggcagagctttaccaattaaaaaaaaaactggcttttctgaaaaaaaaaaaaaa

SEQ ID NO: 146231 - DNA, 1189 bp, Homo sapiens
ctgcaaggcggcggcaggagaggttgtggtgctagtttctctaagccatccagtgccatcctcgtcgctgcagcgacacacgctctcgccgccgccatgactgagcagatgacccttcgtggcaccctcaagggccacaacgggctgggtaacccagagtcgctactaccccgcagttcccggaaaataatctccccgcctcccggagaaaaggccatcatccttaggaaacctgcccgggggtggagccaacctatgaatttccaaaggcgttctcggcggattcactcccactttgttaagtgatgtggttatttcctaagatggccagttttgcccttccaaggcttctgggattggaaaccctgcgccctcggggatctcacaaacgggcacccacacgagggcgattttgtggggccatacccaaggaatgtgctgagtgtggcccgtctcctctgacaaccgccaaagattgtctctgggatctcgagaataaacccatcaaagcttatgggaatacccctgggtggtgtgcaaataccactgtcccaggatgagagcccactcaggagtgggtgttcttgtgtcccgcttcctcgccccaacaaccagcaaacccctatcatcgttctcctgtggcctgggaacaacctggttcaggttatggaaacctgggctaactgcaagctgaaggacccaaccaacattggccaacaccaggctattctgaaacaccggtgactgttctctccagaatggatcccttctgtgctttctggaggccaagggatggcccaggcccatgtttatggggatctcaaacgaaggctaaacaccttttacacgctagaatggtggggacatcaatcaacgcccctgtgcttcagcccctaacccgctacttggctgtgtgctgccacaggccccagcaatcaagatctggggatttagaggggaaagatccattgtagatgaactgaagcaagaagttatcagtaccagcagcaaggcagaaccaccccagtgcacctccctggcctggtctgctgatggccagactctgtttgctggctacacggacaacctggtgcgagtgtggcaggtgaccattggcacacgcctagaagtttatggcagagctttaccaattaaaaaaaaaactggcttttctgaaaaaaaaaaaaaa

SEQ ID NO: 146232 - DNA, 445 bp, Homo sapiens
gcggggaattcgcagactccttctcagcatgggctcgcctgtcaacgcgcaggacttctgcacggacctggccgtctccagtgccaacttcattcccacggtcactgccatctcgaccagtccggacctgcagtggctggtgcagcccgccctcgtctcctctgtggccccatcgcagaccagagcccctcaccctttcggagtccccgccccctcctctggggcttactccagggctggcgttgtgaagaccatgacaggaggccgagcgcagagcattggcaggaggggcaaggtggaacaggagacagaccaactagaagatgagaagtctgctttgcagaccgagattgccaacctgctgaaggagaaggaaaaactagagttcatcctggcagctcaccgacctgcctgcaagaatcctgatgacctgggcttcccagaa

SEQ ID NO: 146233 - DNA, 772 bp, Homo sapiens
ttctaggacttctgcacggacctggccgtctccagtgccaacttcattcccacggtcactgccatctcgaccagtccggacctgcagtggctggggcagcccgccctcgtctcctccgtggccccatcgcagaccagagcccctcaccctttcggagtccagcgcccctccgctggggcttactccagggctggcgttgtgaagaccatgacaggaggccgagcgcagagcattggcaggaggggcaaggtggaacaggtgaggaactctagcgtactcttcctgggaatgtgggggctgggtgggaagcagccccggagatgcaggagcccagtacagaggatgaagccacttgatggggcttgcttgcacatccgtaactgggagccctggctccaagcccattccatcccaactcagactctgagtctcaccataagaagtactctcatagtttcttccctaagtttcttaccgcatgctttcagactgggctcttctttgttctcttgctgaggatcttattttaaatgcaagtcacacctagtctgcaactgcaggtcagaaatggtttcacagtggggtgccaggaagcagggaagctgcaggagccagttctactggggtgggtgaatggaggtgatggcagacacttttactgaatgtcggtctttttttgtgattattctagttatctccagaagaagaagagaaaaggagaatccgaagggaaaggaataagatggctgcagccaaatgccccaacacgaaa

SEQ ID NO: 146234 - DNA, 2162 bp, Homo sapiens
cgcggcgcagcgaacgagcagtgaccgtgctcctacccagctctgcttcacagcgcccacctgtctccgcccctcggcccctcgcccggctttgcctaaccgccacgatgatgttctcgggcttcaacgcagactacgaggcgtcatcctcccgctgcagcagcgcgttccccggccgggaatagcctctcttactaccactcaccccgcagacctcctttttcagcatggggctcgcctgtcaacgcgcagggacttctgcacgggacctgggccgttttccagtgccaactttcattcccacgggtcacttgccatcttggaccagtccggaccctgcagtggctggtgcaagccagccctcgtctcctctgtgggccccatcgcagaccagagccccttcaaccttttcggagtccccaccccctaccgctggggcttagctccagggctggcgttgtgaagaccatgacaggaggccgagcgaagagcattgggcaggaggggcaaggtggaacagttatctccagaagaagaagagaaaaggagaatccgaagggaaaggaatatagatggctgcagccaaatgcccgcaaccgggaggagggagctgactgatacactccaagcgggagacagagcaactctaagatgagaggactgctttttggaccccgaatgtcgcaccctgttgaagaagagggaaaactagagttcatcctggcagctcaccgcacctgcctcgcaagatccctgatgacctggggcttcccagaaaaagaatgtctgtggcttcccttgatctgactgggggcctgccaagaggtttgccaccccggaggtctgaggaggccttcacccttgcctctcctcaatgacccttgagccccaagccctcagtggaacctgtcaagaggcatcagcagcatggagctgaagaccgagccctttgatgacttcctgttcccagcatcatccaggcccagtggctctgagacagcccgctccgtgccagacatggacctatctgggtccttctatgcagcagactgggagcctctgcacagtggctccctggggatgggggcccatggccacagaggctgggagcccctgtgcactccggtggtcacctgtactcccagctgcaactgcttacacgtcttccttcgtcttcacctaccccgaggctgactccttccccagctgtgcagctgcccaccgcaagggcagcagcagcaatgagccttcctctgactcgctcagctcacccacgctgctggccctgtgagggggcagggaaggggaggcagccggcacccacaagtggccactgcccgagctggtgcattacagagaggagaaacacatcttcccctagagggttcctgtagacctagggagggccttatcctgtgcgtgaaacacaccagggctggtgggcctcaaggacttgaaagcatccatgttgtggctcaagtcctcccttctcccgaagaatgtagcaaaacgcatgagagtgtgtattgttcccagtgacacttcagaagagctgggtagttaataagcctgttgagccaaggctggggttggtgtctcttttctccttctcccttagttcttctcatagctattaaactaacctattggggttcatttatggaaattaaccctggtgctggatattttcaaatttgtatctagtgccagctgatttttaaccaataactacctgtgttcctggcaaatagtgttatccgatttagaaatgaccaataattatactaagaaaaagatacggactttatttttctggtaagatagaaataaatagctatatccatgtactgtagtttttcttcaacatcaatgttcattgtaatgttactgatcatgcattgttgaggtggtctgaaatgttctgacattaacaggttttccatgaaaaccgttttattgtggtttttaatttatttattaagatggattctcagatatttatatttttattttatttttttctacccttgaggttcttttgacatgtggaaagtgaatttgaatgaaaaatttaagcattgtttgcttattgttcccagccattgtcaataaaagcatttaagtatgaaagcgaaaaaaaaaaaaaaaaaagggcggccgct

SEQ ID NO: 146235 - DNA, 861 bp, Homo sapiens
  misc_feature (1)...(861): n = a,t,c or g
cacccctccttgggagaatcccctagatcacagttcctcaccatggactggacctggagcatccttttcttggtggcagcaacaacaggtgtccattcacaggttcacctggtgcagtctggagctgaggtgaagaagcctggggcctcagtgaaggtctcctgcaaggcttcttttaattcctttgacacatatggtttcaactgggtgcgacaggcccctggacaaggccttgagtggatggggtgggtcagcgcttttaatggtgacacaaattatattcgaaaactccagggccgagtcaccatgaccacagactcatccacttccactgcctatctggaactgaggagtctcaaatctgacgactcggccatttattactgcgcggccactaactccgacaaatatttttggggccagggaaccctggtcaccgtctccgcagcatccccgaccagccccaaggtcttcccgctgagcctctgcagcacccagccagatgggaacgtggtcatcgcctgcctggtccagggcttcttcccccaggagccactcagtgtgacctggagcgaaagcggacagggcgtgaccgccagaaacttcccacccagccaggatgccttcggggacctgtacaccacgagcagccagctgaccctgccggccacacagtgcctaacccggnaagccgtgacatgccacgtgaagcactacacgaatcccaaccccaagagnggatgggccctggcccagattcccttaaattccaacttaccccatcttccttaacttcaacttaccccaatttccctatgctggccaccccccgattgtcactggaaccgaccgggcccctgg

SEQ ID NO: 146236 - DNA, 1744 bp, Homo sapiens
  misc_feature (1)...(1744): n = a,t,c or g
ccagccctgggattttcaggggttttcagtcggtgatcaggactgaacagagagaactcaccatggagtctgggctgaactggcttcttcttgtggctgttttaaaaggtgtccagtgtgaggtgcagatattggagtctgggggaggccaggtgcagccgggggggtcccgaacactctcctgtgcagcctctgggttcatcttttccaactatgtcatgacctgggtccggcaggctccagggaaggggctggagtgggtctcaagtactgctgcctccggtgcgaacaccttctatgcagaatctgtgaagggccgcttcaccgtctcccgagagaactccgagaacatgatgtatctgcaaatgagcagcctgagagacgaggacacgggcatttattactgtgcgaaagatggcgacgttccgaacttgggagttgcttggatagtagcaggccccggcaatgtaaggccgcgcaagtggttcgacgcctggggccaagggaccacggtcaccgtctcgtcagcatccccgaccagccccaaggtcttcccgctgagcctctgcagcacccagccagatgggaacgtggtcatcgcctgcctgcctggtccagggcttcttcccccaggagccactcagtgtgacctggagcgaaagcggacagggcgtgaccgccagaaacttcccacccagccaggatggcctccggggacctgtacaccacgagcagccagctgaccctgccggccacacagtgcctagcccgccaagtccgtgacatgccacgtgaagcactacacgaatccccacccagatgttgatggggccctgcccagttccctcaactccacctaccccatctccctcaactccacctaccccatctccctcatgctgccacccccgactgtcactgcaccgaccgggccctcgaaggacttgtttttaggttcagaagcgaacctcacgtgcacactgaccggccttgagagatgcctcagggtgtcactttcaatctgaaggccttcaagtggggaagagcgctgttcaaggaccaacntgaggcgtgaccctctgtggctgnctacagcgtggtccagttgtcttgccggggctggcgcgaagccatggaaccattggtaagacctttcacttgcactgctgccctaccccgtagtccaaggacccgcgctaaccgcccaccctcttcaaaatccgggaaacacatttccgggcccgagggtccacccttttgcccccgccgtcgggagagtctgtccctttaacgatctgttgacccctgcactgcctggcacggcgctttcagcccccaaggaccgtgttgggttcgctggttgcaggggtccccaaaacttcccccgcgaaaaagtacctgacttgggcattcccggcaggagcccaggcaagggcacccaccaccttcgctgtgaccagcatattggggcgtggcaacccgaggactgggaagaagggggacacctttttcctgcatggctggccacgatggccctcgcgctggccttcacacagaagaccatcgaccgcttggcgcgtaaacccacccatgtcaatgtcgtctgctgtcatgccggaggtggacggcacctgctactgagccggccccgcctgtccccacccctgaataaactccatgctcccccaaaaaaaaaaaaaaaaaaaaaaaaaaaaaaaaaaaaaaaaaaaaaaaaaaaaaaaaa

SEQ ID NO: 146237 - DNA, 735 bp, Homo sapiens
  misc_feature (1)...(735): n = a,t,c or g
actcttctggtcccacaagactcagagagaaccacccatggttgctgtctcctgccgacaagaccaccgtcaagggcccgctgggggtaaggtcggcgcgcacgctgccgagtatggcttcggaggcccttggagaaggattttccttgtcctttccccaaccaccaaagacctactttcccgcaacttctgaccttgagccaacggttttgccccaggtttaaagggccacgggcaaagaaagtttggccgaacgcgctgacccaaaagccgtggcggcaacgtggacgaacatgccccaaacggcgttgtccgcccctgagcgaccctgcacggcgcacaagctttcgggtggacccggttcaactttcaagcttccttaagccactgccttgcttggtgaccctggccgcccacctccccgccgagttcaacccctgcggtgcgacgcctcctctggagcaagttcctggcttctggtgagcaccgtgcttngacctccaaataaccggttaagctggaagccctcgggtagccgttcctcctgcctccgctgggcctcccaacgcggcccccctcccttccttgcacccgccctcctggctctttgaataaagtctgagtgggcggcaaaaaaaaactgaacatctccttcccagccactgggtgccagaaactcattggagtggacgatgaacgccaaattcggatcttttagagaagcgatgggcccag

SEQ ID NO: 146238 - DNA, 669 bp, Homo sapiens
aggcctagaattcggcacgagccacagactcagagagaacccaccatggtgctcgtctcctgcccgacaagaccaaagcccaacgccccccgcggctaaagctcggcgccaacgcctggcgagtatggcttcggaggcccttggaaaggatgttcctgtctttccccaacccacccaagacctacttccggcaatttcgaccctgagccaacggttttgcccaaggttaaaggggccacggccaaagaaggtggcccgacgcgctgacccaaagccgtggcgcaacgtggacgaacatgccccaaacggcgctgtccgcccctgaagcgacctgcacggcgcacaagctttcgggtggacccggtcaactttcaagcttccttaagccactgccttgcttggtgaccctggcccgcccaccttccccggccgagttcaacccctggcggtgccacgccttccctggaacaaagttcctgggcttcttgttgaagcaccgttgcttgaaccttccaaatacccgttaaagcttggaagccttcgggttggccatgcttctttgcccctttggggcttccccccagcccctcctcccctttcctgcacccgtacccccgtgggtctttgaataaaagtcttgagtgggcggcaaaaaaaaaaaaaaaaaaa

SEQ ID NO: 146239 - DNA, 2996 bp, Homo sapiens
ttttttttttttttttttgagataagagtttcactctcattgcccaggctagagtacagcagcatgatctcatctcactgcaacctccacctcccaggctcaagcggttctgctgcctcagtcttccgagtagatgggacctaacaagcatgcgccaccgcaccccagccaatttttgtactttttgtagatatggggtttcacccatgttacgcaggttggtctcaaactcctgagctcaagtgatccgtcggcctcggctttccaaagtgctaggattacaggcataagccacagtacttggccaaaattctttatgtgttaatgaaggctttccaaaatacttagttatggcttaaaatagtttactttagccatgtcttttttctagggttgacctttctgaatgatcagactgcaagatagagtttaaaattaataaaatatcgttttattatcaaatttctaattcattcattttttatagggaagaacttatagaactgaattatagtggagaaaaatcaatacaggttgagtatcccttatccaacatgctgggaccattaagtgtttcagatttcaaattattttggattttggaatactgggcattacaccagttcagcatccctaatctgaattctaaatgctccaataagcatttcctttgaacactatgttagtactcaaaaagttttcaattagggatgttcaatctgtagatctaagaatgaccaaattaaaatataagaataaggctgagtgtggtggctcaaaacattttttaaaataatttttattatgtcatggaatcctctttttaaacaaaaacacaacagatactcggtcaactggaaaacaatttatagaattctatttacatgtaacttctccagagcgaatatcttatacaaagcaaggatgtgggttaattccaatccaaataacatgaagtcgcaaattaaaatgaccaagctaactctccttgaagtctctaaccatctggctaatttatttaatacaaaatgcttatttggtcttttaaatgacaggcaactttgaaagtgtatttcacctattcttgaggaattctactagggctttagctacaaggattataggcaccaaaatccattttaataggtatttaatatttggccactaatattgagtttttaatacatacaatttcatgtaggaatactggaaaaattcagacaaatatgagtataacattttataaaatgggtaataaaaagcttttttaaaaatagcaatttaaaaacacaaagaatattcttttaaataaccacacaagctgggttagactacaaaacctaaggtctcagaaaacctttgggcttaaaaattaagactattgcaaaaccctaatctatttattataaaattttagagcaatttagaaatactgaaagttactaagaggtgccagatttttaaagatggaagtaaacccgatttttctcccttataattttggaaagattttgtaaattcaattggatgaatgttcatatttaatgtcaccttatgaagaaatcatttcctttcagttatacaatgaactactataatgcagaattgaaatggtacaagcaaaatactcaacttcatactttgataaataatatatgaaaaagatattacccataagtatgatgcaaaattttaggtagagtcccacttacctatattaaaaacaaaaacaaaaacaaaacttaagggatgaagggggaactatttatcaactaattgacttacaggacaatgccaaacgaggatgcctgactgaaagtctaggtgacccaattcctttctggtagcctgagatgcctgctccatgcctgactcccaatcttgctggaactgtgcagtctctataaaatcaaggtccaatcgaaaaagctggcatatgcgggggaaaaaaaaagagaggagaagagagggagggagagaaataggtaaatagagaaggtaggaagggagagggatggaggcaagggaggcaagaaagcaagcaagtgagccttgctaacttagaaaaatatcagtggcctttaactgacagggaatagtgcaaagttaacctttggcccctataaaacattggatactgatttaaaaaacaaaacaaaacaaaaccaaaaaaccaaaacaaaccaaaacaaaaaaaaaaaaagagaaacaccacagttcttatgagggaagcttagcctgttaagaaggcttattaccatagcacacaagaagctgccttgcttattagataaactgtccagcccaagccaaagtagcagacatattgcaattcaatttcaaaaagtttgtttgtttgtttgttttttgagacagagtcttgctttgtcacccagactgcaagtgcagtgggtacgatctcagctcactgcaatctccatctcccaggttcaagcaattctcctgccttaggctcccaagtagctagaattacaggtgcgcatcaccacgcccaactaattttttgatttttagtagagatggggtttcaccatgttggccagactggtcttcgtactcctgacctcaagtgatccgcccacctcagcctccacagtgctgggattacaagtgtgagccactgcacccggccattacaatctatttttatctagcctctagagcaggtgtcctaagtaaaagacaaaaacaacaacaaaaaaacccatttttttgttttgttttgttttttgagacagtctcactcttgttacccaggctggaatgcagtggcatgatcaaagctcactgctgcttcaacctcccaggctcaagcaattctcccactttagactcctaagtagctggtactataggtgtctggctaatttttaaattttttgtaaagatggggtcttgctatgttgtccatggtagtctcaaactcctggtctcaagtaatcctccctgcttggtctcccaaagtacctcgtgcc

SEQ ID NO: 146240 - DNA, 1236 bp, Homo sapiens
atgggagaagcatttgcacaggagaacatggcagagaacccttatatttctgtagtcaattctcatattttaaacaattgggaatttcccaaatggtcactcgatgattctacaaaggtacaactcaactcgatgaagctgggtggaacagaaatggctccgcggcgttggcagctcgtctgcgaggggaccctggctccccgaggctgcagtcctttttcttggacagaacgccccgcaggaccgttccctccactttcccccgcactaaggcagcgcaccgccagcacacacagcgctggcgcccgcatcgcgccgcaccacacgcgtctccggcttgaggagccagtcaccgagacccggagcgggaacgagatccttccgcccggtgaggaagcccggggtggctgctccgccgtcggggccgcgccgccgagccccagccgccccgggccgcccccgcacgccgcccccatgcatcccttctacacccgggccgccaccatgataggcgagatcgccgccgccgtgtccttcatctccaagtttctccgcaccaaggggctcacgagcgagcgacagctgcagaccttcagccagagcctgcaggagctgctggcaggtgagcagggcgagggcgtcggagggacgcgggccccacatccctgggtcagagtccggccgtcggggctgcgggaacctcggcagcgccccggggccggtcgcgcttgggccccgccgcgggaccgctggcaaaacggagaggagaagacaacacgcacaacaaagaaacttaagcccaccgaggcgggagctgcggtccgaggaccgtcggcggatttggggacaaaggagccgtggggctgggaacattataaacatcactggttcccagaaaagccatgcaagggatcgggttaccgttgtattcgcatcaaccataaaatggatcctctgattggacaggcagcacagcggattggactgagcagtcaggagctgttcaggcttctcccaagtgaactcacactctgggttgacccctatgaagtgtcctacagaattggagaggatggctccatctgtgtgctgtatgaagcctcaccagcaggaggtagcactcaaaacagcaccaacgtgcaaatggtagacagccgaatcagctgtaaggaggaacttctcttgggcagaacgagcccttccaaaaactacaatatgatgactgtatcaggttaa

SEQ ID NO: 146241 - DNA, 1912 bp, Homo sapiens
cctctcggagctggaaatgcagctattgagatcttcgaatgctgcggagctggaggcggaggcagctggggaggtccgaacaatggtgacaggccggccatggctcgtctcttcctctctcctgccgcctccctgtctcgaaaatacctttttaagtctaaagaaagaaagacaaagagtagttgttcggcgcttaaggcctcttcttctctctaagcctccgcccggttgagaaagcccgggggtgggctgctccgcccgtcgggggccgcgcccgcgaagccccgggccgcccccggccgcccccggcacgccgcgcccccatggcatcccattatacacccgggccggccaccaatgatagggcgagattcgccgccggccgtgtaccttcatctccaagtttctccggccccaagggggctcagcgagcgagcgacagcttccagaccttcaagccagagcctggcaggagctgctgggcagaccatttaataaacattcactggtttcccagataaagcccatgcaaagggatcggggttacccgttgtattccgcatcaacccataaaaatggatccctctgattggaccaggccagcacagcgcgattggactgagcagtcaggagctgttcaggcttctccccaagtgaactgcacactctggggttgaccccctattgaagtgtcctacagaattggagaggatggctcccatctgtgtgcctgtatgaagccctcacccgccaggaggtagcacctcaaaaccagacccaacgtgcaaatggtatgacagcccgaatcagctgtaaggaggaacttctcttgggcagaactgagcccttcccaaaaactacgaatatgatgactgtatcaggttaagatatagtctgtggatgggatcatctgatgatgatggataaatttgagtttttgctttgggtgggctcctcttggggatggattatggaatttaaacccatgtcacaagctgtgaaagatctgggcacaaaataagaatggtaaaaaaaaaaaaaaattttaagtgacagtgccatagttttggacaggaccttttcaatgattaattttaatagcctgtgagtccaagtaaatgatcactttatttgctagggagggaagtcctagggtggtttcagtttctcccagacataccccaaaattttacacccccacctctttagagaaaactctgttttccaagaatctttcctctgcgagaaaatctcgcagggggaatttgcgcccttttacccttggagaggtggtaatggtaaccctttccggcagcttttaatggggaaggttaaaccgttttaaaacatggggtagtaactggggaaattttaccaagacttttaccctagcactttaaatatgtattaaaatgtacataaagcaaaactaggtaaggccatgaccctgggggaaaatggtcagaccctggtatggtgttttttgggcccttgaaagtagccaagtgaccaggaatctgccatggccaacaggctttaaaaaagacccttaaaaagacactgtctccactggtggtgttagcaccagccagctctctgaccatttgctaggttgtagtttttttagaccgaagtaaccttcttatttttagaaagtggaggtctggtttgtaactttccttgtacttaattgggtaaaagtcttttccaccaaaccaccatctattttgtgaactttgttagtcatcttttatttggtaaattatgaactgggtgtaaatttgtacagttcatgtatattgattgtggcaaagttgtacagatttctatattttgggatgagaaatttttccttctctctataataaatccgtttcttatcttggcattttaacaaaaaaaaaaaaaaaaa

SEQ ID NO: 146242 - DNA, 507 bp, Homo sapiens
ttcacagactcagagagaacccaccatggtgctgtctcctgccgacaagaccaacgtcaaggccgcctggggatgttcctgtccttccccaccaccaagacctacttcccgcacttcgacctgagccacggctctgcccaggttaagggccacggcaagaaggtggccgacgcgctgaccaacgccgtggcgcacgtggacgacatgcccaacgcgctgtccgccctgagcgacctgcacgcgcacaagcttcgggtggacccggtcaacttcaagctcctaagccactgcctgctggtgaccctggccgcccacctccccgccgagttcacccctgcggtgcacgcctccctggacaagttcctggcttctgtgagcaccgtgctgacctccaaataccgttaagctggagcctcggtagccgttcctcctgcccgctgggcctgccaacgggccctacttccctccttgaccaggccttgctgactttgaataaagctgatgggc

SEQ ID NO: 146243 - DNA, 706 bp, Homo sapiens
  misc_feature (1)...(706): n = a,t,c or g
aggcctagaattcggcacgagccacagactcagagagaacccaccatggtgcttgtctcctgccgacaagaccaacgtcaaggccggcttggggtaaggtcggcgcgcacgctggcgagtatggtgcggaggccctggagaggatgttcctgtcctttccccaccaccaagacctacttcccgcacttcgaccctgagccacggtttctgcccaaggttaaagggcccacggcaaagaaggtggccgaacgcgctgaccaaacgccgtggcgcaacgtggacgacatgccccaaacggcgctgttccgcccttgagcgacctgcacggcgcacaagctttcgggtgggacccggttcaacttcaaagctcctaaagccacttgccttgctggtgacccctggcccgcccaccttccccggccgagtttcaacccctggcggttgcaacgtcttccctgggacaaagtttcctgggtttcttgttgaagcaccgttgcttgaaccttccaaattaccgttaaagcttggaagccttcgggttggccatgctttctttgcccctttggggcttccccccagggccctccttccctttcctggaacccgtaacccccgtggtcttttgaataaaattttgaattgggggggcaaaaaaaaaaaaaaaaaaaagatctttnaatttaagggggcggaaagtttatttcaa

SEQ ID NO: 146244 - DNA, 1676 bp, Homo sapiens
acacttccccataccgggtcgacccacgcgtccgcggacgcgtgggtttttttcttctcttaatcggaaacgtgatgggggtggaatatttcaccgctggggttaatatagcatgttatcctgtctatcttttaaagatttctgtataagactgttgagcagtttttaaaatagtgcaggataatataaaaagctgatagatggcgctatgtttgattcctacaacgaaattatcaccagctttttttcattcttaactctttaaaggattcaaacgcaactcaaatctgtgctggacttataaaaaacaattcacgaccacattttttctcagagtgtgtgaggattccttataggcgtaaatgagaagacgtgcttttttacttcaccgatgctccatgactcgtatttctttttccttgtaaatgtaatcagatgccattttatatgtgggacgtatttatactgggccaaacatattttttcttttgtccctttttttctttcctttctttttacttcctttatttctttattccttccttttcctttttttcttttttttttcttttttttttggtagttgttgttacccacgccattttacgtctccttcactgaagggctagagttttaacttttaattttttatatttaaatgtagacttttgacacttttacaaaacataaaatagacaagagagatgacaacgtttgattattttctcagtgtatttttgtaaaaaatatataaaggggggtgttaatcggtgtaaatcgctgtttggatttcctgattttataacagggcggctggtttaatatatcacacagtttaaaaaatcagcccctaatttctccatgtttacacttcaatcctgcaggcttcttaaagtgacagtatcccttaacctgccaccagtgtccaccctccggcccccgtcttgtaaaaaggggaggagaattagccaaacacatgtaagcttttaagaaaaacaaagttttaaaacggaaatacttgcttctgtccagaggcttttaaaactggtggcaatttacagcaaaaaaggggtttctgtagctttaacttgttaaaccacatcttttttgcactttttttataagcaaaaacgtgccgtttaaaccactggatctatctaaatgccgatttgagttcgcgacactatggtactggcgtttttcattcttgtatttgactatttaatcctttctacttgtcgctaaatataattgttttagtcttatggcatgatgatagcatatgtgttcaaggtttatagctgttgtgtttaaaaattgaaaaaaagtgggaaaacatctttgtaccatttaaagtctgtattataataagcaaaaagattgtgtgtatgtatgtttaatataacatgacaggcactaggacgtctgcctttttaaggcagttccgttaagggtttttgtttttaaacttttttttgccatccatcctgtgcaatatgccgtgtagaatatttgtcttaaaattcaaggccacaaaaacaatgtttgggggaaaaaaaagaaaaaatcatgccagctaatcatgtcaagttcactgcctgtcagattgttgatatataccttctgtaaataactttttttgagaaggaaataaaatcagctggaactgaacccta

SEQ ID NO: 146245 - DNA, 779 bp, Homo sapiens
ccactgaagcgctcagatggctgtaacgacggccgacccacgcgtccgcccacgcgtgcggacacaactgcgtacactagcaacctcaaacagacactattggtgcacctgactcactgaggagaagtctgccgttactgccctgtggggcaaggtgaacgtggatgaaagttggtggtaaggccctgggcaggctgctggtggtctacccttggacccagaggttcctttgagtcctttggggatctgtccactcctgatgctgttatgggcaaccctaaggtgaaggctcattcgcaagaaagttctccgcggggcctttagtggtgggcctggctcacctgggacaacctcaagggcacctttgctcacactgaggtgagcttgcactgtgacaaagctgcaccgtggatccctgaagaacttcaggctccttgggcaacgtgcttggtctgttgttgctgggcccattcacttttggcaaaagaatttcaaccccaccagttgcaggcttgcctaatcaagaaaattggttggcttggtgttggctaaatgcccttggccccacaagtaatcacttaagcctcgctttccttgctggtccaatttccaattaaaaggttcctttggttccctaagtccaactactaaactggggggatattattgaaagggccttgagcatcttggattttgcctaataaaaaacatttattttcatcgcatacaagaataaaacaagcgcggccgattaagaggatacttcaggggcgcaagat

SEQ ID NO: 146246 - DNA, 654 bp, Homo sapiens; identical to SEQ ID NO: 144884
  misc_feature (1)...(654): n = a,t,c or g

SEQ ID NO: 146247 - DNA, 703 bp, Homo sapiens
  misc_feature (1)...(703): n = a,t,c or g
ccccgactcttctggtccccacagactcagagagaacccacccatggttgctgtctcctgccgacaaagaccaacgtcaagggcccgcctggggtaaggtcggcgcgcacgctgtgcgcagtatgtgtgcggaggccctggagaggatgttcctgtccttccccaccaccaagacctacttcccgcacttcgacctgagccacggtttctgcccaggtttaagggccacgggcaaggaaggtggccgacgcgcttgaccaaacgccgtggccaacgtgggacggacattgcccaacgcgcttgttcggcccttgaagcgacctgcacgcgcacaagctttcgggtgggacccggttcaattttcaagcttcttaaggccattgcctgcttggttgaccctgggccgtccaccttccccggccgagtttcaacccctggcggttgcaaggcttccttggggacaaagtttcctgggctttttgttgaagcaccgttgcttgaaccttccaaattaccgttaaagcttggaagccttcggttggccattgtttttttgcccctttgggcctttcccccagggcccttcttccctttctggaaccgtaacccccgtggtcttttgaataaaattttgaattgggggggcaaaaaaaaaaaaaaaaaaaagatctttnaatttaagggggcggaaagtttatttcaa

SEQ ID NO: 146248 - DNA, 1058 bp, Homo sapiens
gcgcgcccttgagatcgatgtccatgtggcggaattcggatgagggaacattctgcagtataaagggagcagggaaggcgggagacagcgcagtttgaatcgcggtgcgaccgaaggagtaagggggtggaatcttcaccgtgggccgatttagccttttctctgccctgcttggctgaagcttcgcgggaatctcaaatgggctggcgggtaggtctgtaaaggactccggaaaagcccaagacaaaggcggtttcccggctcgcagagagccggcttgcagtcccaatggggccggtattaatcgacactaaaaatctagggacgcaagtcaatgaacgtgggggcgcgactgccagctgtgtacagcgcaagccatcctggaagtacctaccgcaaaaggtacttgaactggcaggaaaggcatcaaaagactttaagggtaaagcgtattacccccttcgtcacttgcaaccttgctattcgtggaagatgaagaaattggattctctcatcaagggctaccaattgctggtggtggtgtcattcccaccacatcccaccaaatctctgatagggggggaaagaaaaaggacaaccagaagactgtctaaaggatgcctgggattcccttgttatctcgggactcttaaatactcttaacagcagtccactggaatcaccaacactggacagctgttagagtatttagagtcctgtatcccctgtgaaaaacaccaaattttgccctttttgtaattcctatttgagccaagttggaagtttaattagctttcccaacccaacccaaatttcctgcatttcgagtccttaacccatatttaagtgttccgtgtggcttcaaagaagctattgtattttctagaaagtagtgggttttgattgagttgactgttttttaaaaaactgtttggattttaattgtgatgcagaagttatagtaacaaacatttggttttgtacagacattattttccactctggtggaaaagttcgcataaaggtcatatccccacctaaaaaaaaaaaaaaaaaaa

SEQ ID NO: 146249 - DNA, 410 bp, Homo sapiens
cacaatatgactgtaaaggaataagactggttttgtgtaaccctgcttacacatttttttcagacacactgtaacctattatctattatatgttattaggttttaaatttatattatattaagagactgagtgttatcaactttcgtttgtttcattttatgtaaggcaatatacaagaatatttggacagctttttggaaatgttcataaattttgatctgttctattcatgtaactatgtatgtacatgcacatctgtatatgcactatgttatatctatattatagatcttaggtaacaacaaacatatttgtgtgagtcaaaatgtacctgtatatgtatgtatgtatgtatatttctctgttaaagcaggagagctaatttctcaataaaatggatttaaatttg

SEQ ID NO: 146250 - DNA, 1252 bp, Homo sapiens
  misc_feature (1)...(1252): n = a,t,c or g
gttcatagtcttacaactcagaagggtccctccacaattggaaccatacaccccttggaacccttaatgtaaagctaacaaggacagttcccccccagaagaagatggcatccttaatgtgaacagcttttcccaagatcacagatcaagacttctctactattatgagactcttatcttaagtatctgtgcagctgctaacatggcatatggagaaaacatcgggtattataaagatttggttgtagggaattaacaaaaaaacccacttagttaagcaagtaaactctttatctaattcattctttaatctatttgattttaggtggtttgatttatggggaccctgagtaaggagcatataccaaattcttgggtgttatcccaatagtcataagagtctccctggtgcactgtacttactcaaatgttttaagagtttgcatgcagccatctctaaaatgtcaaatggtatctcttcaactggaatgacaacagattaaaaaaaatgtgcaaccataaggacaccgtaacctatgagtgacatgctaaaccagaaacccaaaacaatgggagtgacatgctaaaccagaaacccaaaacaatgggactgatgtactaaaaccggaacccaaaacaatgggagtgatgtactaaaaccagaacccaaaacaatggaagtgacgtgctaaaccagaaacccaaaacaatgggagtaacatgctaaaaccagaacccaaaacaatgggagtgacgtgctaaaaccattacccaaaacaatgggagtgatgtgctaaaccggaaacccaaaacaatggtaacttaagagtgaggctaaggcccttacattttggtcacactctcaactaagtgagaacttgactgaaaaggaggatttttttttttctgagacagagtcttgctctgtcccccagagtggagtgcagtggcatgatctcggctcactgcaagttctgcttcctgggttcaggccattctcctgcctcagcctcctgagtagctgggactacagcacgccgccagcatgcttggctatttttntgtgtatttagtagagatgagtttcaccgtattagcaaggatggtctcaatctcctgatctcgtgatctgcccacctcggcctcccaaagtgctgggattacagcatgagccaccgtgcccagccaaaaggaggaattttttaagcaaaattatgggaggccattgttttgaactaagctcatgcaatag

SEQ ID NO: 146251 - DNA, 2035 bp, Homo sapiens
  misc_feature (1)...(2035): n = a,t,c or g
gccaaatccagttttcatatttaaagcgaatgagccccctcctctcagtgggaaagatgagctgaagctttactccctcgatagtgttgggaaaagaaatcagacaaaaatctaaggaaggaccaaatattgtacatagtgtgccagtaggcttttgcaactggactgaaaatacctgccttttctctccacaggggaaagtggaagttgaagctgggaaagaagggatgaaggttgaagcgagcgccttctcatactatggcgagatggccctgacagcctctccaggtgaaaataagtcccctcctcgcccatgtggcttgaatcactcagactctctcagtcgaagcgaccgggattgacgccgtcacaccaacactggggagcagcaataaccagctcaattcttcgctcctccaagtctacatccccgattactccggtgcgagccctttcggatctgcagtttgttaagatctcaagacagcaataccaaaatgccttgatggcatcccgggatggacaaaaccccccagtcttcagacagtgaaaacactaaaatcgaattgactcttacggagctgcatgacgggttgccagacgagacagccaacctgctcaacgaacagaactgtgtgacgcacagtaaggccaaccacagcctgcacaacgaaggcgccatcttaggccgcgctggctgcacccgcccaggcccgcacccgcccagtcccgtaggcccggccctgtctgcccatgacttcactggtgtgagcttgtccgccatgctgtaccctgcaacatcctgagaccaaagaccttgtgcccttcccaggagccgcggaggaggacagtgagggaggaatggaaacgagagatgtgaagttggcagccggggcatggcgttcaagattttggagatgaactgattccgcccaaatagaatcatgtttattttttcagctctcccttttatcattattcacactcctctgccctcgatttgcatgaagttgaaaattgttgcgatttattttttccaagagaatccatgtttttaaagtgtcttttgccagagttttaaagttgttctgtctgaactctgctgtgatcccatgatgtggaccctgatgggctggacttnccccctccggtagccttccttggccctcccagcggaggggcacccttcctctgtgccccagtgggattcaccgtcgatctcgctggctgaatgaagaagaccctgttactgcagaacctgccaagtctgtcatcactgcttggggtgtagcctgcctcagagggccctccaatcacctctctgagctcaatggttattttgagaatttaatgtttaactgtaccccctttccctcaggaagatttaacatttgcttgggaatgtgattttgctcccaccctaaaggaatttttatcaccaaaatggaatgttaaatggaattttaaaacccatggttttattcattgggcaagaggcaagttgacttcatcctgtcattccagcctggggtctgccagccagccctcctccccgacccagcgcctaagctcacagagtgtcgtcgcccacctccctgggtccttgctcttgttaacccaaagatgctgctacacagaatgccaaatgggaaatcttccacagggctttttcagtaaacacggtgatgtgggagttgcaagctcctccccttcccactagaacatactttaacagaaaacgagtcggaccttcttagctgcactctgtactgtgtgcccgagaaggcatttctagacccgtgtttttaaaggagggaactttggggattgccagcccctgctcctcctcccagggagccaactgtccctcctcccctgtcgcctgggcccatggggcccggcagtggctgtgtcccctgcctgagggctctgtgcctcctgcctcagatgcggcctgtgccagagaggctgcctgtacagccagggtcagtttggccccaaacagggattcagaatccaaaaaaaaaaaaaaaaa

SEQ ID NO: 146252 - DNA, 529 bp, Homo sapiens
  misc_feature (1)...(529): n = a,t,c or g
ctggtgatgtaatcatcaatgctcttctgtatcacgataaagaggcaaatcaagcacatgattaagtaccggtacatccgcttcacaatgggaagagaagtgacgtcaangtgtttctcacggatggaattctagtcagcttcaggcgggaagccaggcgggtggagcccatgggagcaagggcgagtggccggtccccgctgtgccaggtgggcaggcaggagcaaggcctgcgagggaggaacgggccgctccccgccagccgccttccccagcagccgcaggtggtgccagccactccacagagcccgagggatgatctagcctgattcctgcgtgtccgaaagaacttaacgttttaaaggtgattgtcaagtaactgtgtggggttctaatgccagtttcctaattccatctcactggagatgtttaaagttggcctctatcctaatgactcaaaacttggttcttaactaccatgattgcttttgagggcccggaattataaatatatattatattttaaaaa

SEQ ID NO: 146253 - DNA, 542 bp, Homo sapiens
gccgtcctccttcccgcggccgtgagggagaccgcggctcggccgtagcggagctgcgagttacagaatgtctgaaggggacagtgtgggagaatccgtccatgggaaaccttcggtggtgtacagatttttcacaagacttggacagatttatcagtcctggctagacaagtccacaccctacacggctgtgcgatgggtcgtgacactgggcctgagctttgtctacatgattcgagtttacctgctgcagatgacggtccttcgctacccaccaaacagaacgaggaattccgccccttcattcgaaggctcccagagtttaaattttggcatgcggctaccaagggcatccttgtggctatggtctgtactttcttcgacgctttcaacgtcccggtgttctggccgattctggtgatgtacttcatcatgctcttctgtatcacgatgaagaggcaaatcaagcacatgattaagtaccggtacatcccgttcacacatgggaagagaagtacagaggcaaggaggatgccggcaag

SEQ ID NO: 146254 - DNA, 486 bp, Homo sapiens
gcggccgcccgtgccccgccgtcctccttcccgcggccgtgagggagaccgcggctcggccgtagcggagctgcgagttacagaatgtctgaaggggacagtgtgggagaatccgtccatgggaaaccttcggtggtgtacagatttttcacaagacttggacagatttatcagtcctggctagacaagtccacaccctacacggctgtgccaggtgggcaggcaggagcaaggcctgcgagggaggaacgggccgctccccgccagccgccttccccagcagccgcaggtggtgccagccactccacagagcccgagggatgatctagcctgattcctgcgtgtccgaaagaacttaacgttttaaaggtgattgtcaagtaactgtgtggggttctaatgccagtttcctaattccatctcactggagatgtttaaagttggcctctatcctaatgactcaaaacttgggtcttaactaccatg

SEQ ID NO: 146255 - DNA, 1803 bp, Homo sapiens
  misc_feature (1)...(1803): n = a,t,c or g
ccgtgccccgccgtcctccttcccgcggccgtgagggagaccgcggctcggccgtagcggagctgcgagttacagaatgtctgaaggggacagtgtgggagaatccgtccatgggaaaccttcggtggtgtacagatttttcacaagacttggacagatttatcagtcctggctagacaagtccacaccctacacggctgtgcgatgggtcgtgacactgggcctgagctttgtctacatgattcgagtttacctgctgcagggttggtacattgtgacctatgccttggggatctaccatctaaatcttttcatagcttttctttctcccaaagtggatccttccttaatggaagactcagatgacggtccttcgctacccaccaaacagaacgaggaattccgccccttcattcgaaggctcccagagtttaaattttgggatgcttctgtttgcggggacggtcggtgcagctgcaaggctggaggcggccggcagtgcccggtgctggctgcagatgcggcgctaaccttctctccccacttgaaggcatgcggctaccaagggcatccttgtggctatggtctgtactttcttcgacgctttcaacgtcccggtgttctggccgattctggtgatgtacttcatcatgctcttctgtatcacgatgaagaggcaaatcaagcacatgattaagtaccggtacatcccgttcacacatgggaagagaaggtacagaggcaaggaggatgccggcaaggccttcggccagctagaagcgggactgaggctgcctcacgtgttgcaagaacagttttgagccattgttaacaatgccttttttcttcacataaagtagttgattacgagggagtcaaaattttctttttaaaaaggagcttcaatgatttgtaactgaaatatcagggttctagaagaaactggcgcttaaaccaaatcgcatggatttctttttcagtgacgttcaaagtgttttctcacgggatggaaattcttaagtcaagcttgccaggcggggaaagcccaggcgggttggagccccatggggagccaagggcaagttggccggtcccccgctgtgcccaggtgggcagnccaggagcaaggcctgcgagggaggaacggggccgctccccgccagccgccttccccagcagccgcaggtggtgccagccactccacagagcccgagggatgatctagcctgattcctgcgtgtccggaaagaacttaacggttttaaaggtgattgtcaagtaactgtgtggggttctaatgccagtttcctaattccatctcactggagatgtttaaagttggcctctatcctaatgactcaaaacttggttcttaactaccatgattgcttttgagggcccggaattataaatatatattatattttaattgtttgagattattttgacacatttctttgatacgtagagtgttttgtttttaatttaaatctgtcctcatgcaaccctccatgaggggcagcgaagctggcagggagcagcctggctttgtaggttcagcactctggcccctcactgcgggagagggcggaacccacttggcatgtcagcgtttttgattcgagaaaagaaatactctcaacgttttaccaagtgattttacctccacctttactaaagtctttacctaaaacntgggcagtcgctggacacagggaaagcccaccaattgtttggccatttcgaaaggtgacccatattggcacagcagaatacgaaatcgtcgacccgggaagtcaggtc

SEQ ID NO: 146256 - DNA, 1003 bp, Homo sapiens
  misc_feature (1)...(1003): n = a,t,c or g
tgcgaccgcccgtgccccgccgtcctccttcccgcggccgtgagggagaccgcggctcggccgtagcggagctgcgagagcctcattttacagatgaggaaactgaggctggctgcgtgctcagagggtttgctgaaggcctcacagccgcttagcacagttacagaatgtctgaaggggacagtgtgggagaatccgtccatgggaaaccttcggtgggtgtacagatttttcacaatgacttggacagatttatcagtcctggctagacaagtccacaccctacacggctgtgcgaatgggtcgtgacactggggcctgagctttgtctacattgattccgagtttacctgcttgcagggttggtacatttgttgacctatgcctttggggatcttaccatctaaatctttttcataagctttctttctccccaaagtgggatccttccttaatgggaaggacttcaggatgacgggtccttcggttaccccaccaaacaggaacggagggaattcccgcccctttcattcggaagggttccccaggagttttaaatttttggcatgcgggctacccaagggcatcccttgtggncctatggtcctgtactttccttcgacgcctttcaaacgtccccggtgttctgggccgattctgggtgatgtactttcatcatgcttcttcttgtatcacggatggaaggagggcaaattcaaggcacatggatttaagttaccggtacatgcccgtttcacacatggggaaggaggaaggtacagaggcaaggaggatggccggcaaggccttcgccagctagaagcgggactgaggctgcctcacgtgttgcaagaacagtttttgagcccattgttaacaattgcctttttttctttcacataaagtagttgattacgagggagtcaaattttctttttaaaaaggagcttcaatgatttgtaactgaaatatcaggttctagaagaaactggcgcttaaacca

SEQ ID NO: 146257 - DNA, 818 bp, Homo sapiens
  misc_feature (1)...(818): n = a,t,c or g
cccacgcgtccgatcgccgccatcatgggtcgcatgcatgctcccgggtgagctcggggcatcaagccggattgctgggcggggggtgggaggaagacagggagtgtgggcagcgggccgaggggatgatgttctgggctgctctggcactagccgccacttcaccttcgagactgcttctctcccccgggaagggccctgtccccagtcggcttttacccttatcggacgcagcgtcccccacttggttgaagttgaccatctgacgacgtgaaggagccagatttacaaacttggccaagaagggcccttactcctctcacagatcggttgtaatcctgagagattccacatggttgttgcacaagtacgtttagggaacaggccatgacactttcaagatccctaaagtctaagggacttgctcctgatcttcctgaagatctctaccatttaattaaggaaagccagttgctgttcgaaagcactcttgagaggaacagaaaggattaaggatgctaaaattcccgtctgattctaatagagagccggatttcaccgttttggcttcgatattataaagaccaagcggagtcctccctcccaattgggaaatatggaatcatcttacagcctctgcccctggtcgcataaatttggtctggtgtactcaagcaataaaatgattgtttaactaaaagnnnnnnnnnnnnggaacggggcggccgttttaaaggatccctgggggggcccaactttacccgggcagggaaggaaatacttttttccttatgggggggcgaattaaaacctacctg

SEQ ID NO: 146258 - DNA, 582 bp, Homo sapiens
  misc_feature (1)...(582): n = a,t,c or g
cntgtgaagtcactttgccagccccagaacactggtctcgggcccgagaagacctcctttttcccaggcntttaggtatcaccactaaaatctccaggggcaccattgaaatcctggtgttcgacaatggcagcatctacnaaccctgaagtgcttgatatcacagaggaaactctgcattctcgcttcctggagggtgtccgcaatgttgccagtgtctgtctgcagattggctacccaactgtngcatcagtaccccattctatcatcaacgggtacaaacgagtcctggccttgtctgtggagacggattacaccttcccacttgctgaaaaggtcaaggccttcttggctgatccatctgcctttgtggctgctgccnccttgggctgctgccaccacagctgctctgtntgctgctgcagccccagctaaggttgaagccaaggaagagtcggaggagtcggacgaggatatgggatttggtcnctttgactaatcaccaaaaagcaaccaacttagccagttttatttgcaaaacaaggaaataaaggcttacttctttaaaaaaaaaaaaaaaaa

SEQ ID NO: 146259 - DNA, 764 bp, Homo sapiens
  misc_feature (1)...(764): n = a,t,c or g
aaatgtttcattgtggagcagacaatgtggcttccaagcagatgcagcagatccgcatgtcctttcgcggaaaggctgtgtgctgatggggcaagaacaccatgatgcgcaagcccatccgaggcnacctggaaaacaacccagctctggagaaactgctgcctcatatccgggggaatgtgggctttgtgttcaccaaggaggacctcactgagatcagggacatgttgctggccaataaggtgccagctgctgcccgtgctggtgccattgccccatgtgaagtcactgtgccagcccagaacactggtctcgggcccgagaagacctcctttttccaggctttaggtatcaccactaaaatctccaggggcaccattgaaatcctgggtgtccgcaatgttgccagtgtctgtctgcagattggctacccaactgttgcatcagtaccccattctatcatcaacgggtacaaacgagtcctggccttgtctgtggagacggattacaccttcccacttgctgaaaaggtcaaggccttcttggctgatccatctgcctttgtgctgctgcccctgtgctgctgccaccacagctgctcctcgtgctgctgcagccccagctaaggttgaagccaaggaagagtcggaggagtcggacgaggatatgggatttggtctctttgactaatcaccaaaaagcaaccaacttagccagttttatttgcaaaacaaggaaataaaggcttacttctttaaaaagtc

SEQ ID NO: 146260 - DNA, 1198 bp, Homo sapiens
ggggctctcgccaggcgtcctcgtggaagtgacatcgtctttaaaccccctcgtggcaatcccatgacgcaccgccgtgatgcccagggaagacagggcgacctggaagtccaactacttccttaagatcatccaactattggatgattatccgaaatgtttcattgttgggagcagacaatgtgggctccaagcagatgcagcagatccgaattgttccctggggggaagcttgtgttttgatggggcaaaaaaccatgaatgggccaggcccatccgaagggcaccctgtaaaacaaccccagcctctggagaaaactgctgccttcatatccggggagaatttgggcttttgtttcacccagggaggaccctcacttgagatcaagggacatgtttgcttggccaataaagggttgccaagctggttgcccgttgttggtgccaattgcccccatggtgaagtcactggtggccagccccagaacactggtcctcggggcccgagaagacttctttttttccagggctttaggctattaccactaaaaatctcccagggggcacccattgaaaatcctgaagtgaatgtgccagctgaatcaagaactggagaccaaagtgggaagcccagcgaagccaacgctgcttgaacatgctcaaacatctcccccttcatcctttggggctgggtcatcccagccaggtgtttcgacaaatggcagccatctaccacccctgaaagggctggatattcacagaagaaacctctgcattttttggctttcctggaggggtgtccgcaatgttgccaagtgtctgtctgccagattggcttacccaactgttgcaatcagtaccccgattctatcatcaacgggtacaaacgagtcctggccattgtctgtggacgccggattacaccttcccacttgctgaaaaggtcaaggcttttcttggctgatccatctgcctttgtggttgctgcaacctgtgggttgttgcccccccagctgctcctggtggttgttgcagccccagctaaggttgaagccaaggaagagtcggaggagtcggacgaggatatgggatttggtctctttgactaatcaccaaaaaagcaaccaactttagccaagttttaatttgcaaaaacaagggaaataaaggcttacttttttaaaaaaaaaaaaaaaaa

SEQ ID NO: 146261 - DNA, 625 bp, Homo sapiens
  misc_feature (1)...(625): n = a,t,c or g
ggagagcaggtgcagaaggctgatgaattcatccgagcctatgccaccacaacgttgacagtcatagttgagcaaatccaacatctgcaagaacaagccaggaaggtactggaagatgctcacanagatgccaacctgcaccatgtagcttgtaatatagtgaaaaaacctggcaacatttactatctctataaacgggagagtggtcagcagtatttttccatcatttctccaaaggaatgggggacaagttgtccacatgacttccttggtgcctacaaactacagcatgacttgtcctggactccgtatgaggacattgagaagcaagatgctaaaatcagcatgatggacacgttgccttgagaattgaagacatgtaggtgactcacaaacttcttggaaagagaccctgtgtgaatgtaaatgctgtcattatgacttttaattgggatgggaataatcattgagacagagtcactgtctttcgggatcctctttggaccacagatacccaagtcagtcagtttcagagtattggccagtgtactttccttcttcctctccatcacttcttcccttaagttaaagtgttagagaagaccttcttcccataaaaaggttg

SEQ ID NO: 146262 - DNA, 337 bp, Homo sapiens
ggattaggaaatgagctcagtttgtttacaacccacgctgatgggaactgcctcctttgccttctctaggaatgggggacaagttgtccacatgacttccttggtgcctgcaaactacagcatgacttgtcctggactccgtatgaggacattgagaagcaagatgctaaaatcagcatgatggacacgttgctaagccagtcagtggccctgcctccgtgcactgaacccaacttccagggactgactcactgagagtgggctttgacaaacagctctcacaggacctggctgtcaacctccttgttgcccccactgttgccttgagaaattgaga

SEQ ID NO: 146263 - DNA, 1171 bp, Homo sapiens
  misc_feature (1)...(1171): n = a,t,c or g
ggcgcgagggataaggcgctggcatggaggacgcctccgcgccggggcggaccgagggggtccttgaaaggcaaggagcgccgccagctgcaggccacggaggagccctggtggagctcaccccgacccccggcgggctggccctggtgagcccctaccacacccaccgggccgggggaccccttagacctcgtggcgctcgcagagcaggtgcagaaggctgatgaattcatccgagcaaatgccaccaacaagctgacagtcatagctgagccaantccagacatttgccagaacaagccaggaaggtactggaggaggctcacagagatgccaacctgcaccatgtagcttgtaatatagtgaaaaaacctggcgacatttactatcttctataaaccgggagagttggtcagcagtatttttccatcatttctccaaaggaattgggggacaagtttgtccacattgacttccttggtgcctacaaactacagcatgacttgtcctggactcccgtatgaggacattgagaaggcaagatgctaaaaatcagcatgatgggacacgttgctaagccagtcagtggccctgcctccgtgcactggaacccaactttccaggggactgactcacttgaggagtggggcttttgacaaacagctcttcacagggacctgggctgttcaacctccttgttgcccccactgttgccttgagaattgaagacatgtaggtgactcacaaacttcttggaaagagaccctgtgtgaatgtaaatgctgtcattatgacttttaattcgggatgggaataatcattgagacagagtcactgtctttcgggatcctctttggaccacagataccccaagtcagtcagtttccagagtattggccagtgtactttccttcttcctctccatcacttcttcccttaagttaaagtgttagagaagaccttcttcccataaaaaggttggtggatcgttttccagagagaactgttttcagtctttatatatatatatatatatatatatatataaaactggtagtatttaacattggggttgaggctgtctcacagttggtgcaactcccagtttaaaattcatctgggaacgagaatgttgagtaatggaggggtgatttaaaaaacaacaacaaca

SEQ ID NO: 146264 - DNA, 3099 bp, Homo sapiens
cagcccttcctcctctactttctaggaggggctggctaccacagacgctgtaaatacactttatgtgaaggttcattactaaggaggttagaagaaaggctatgtaattaacttcagttcagcaaagtgggggtgaataaagagaaagataatcccccctgtgtattttgtgggaaaaggggattattgaggacacctacaagagtggtatgtgacacagaagcctacaataatcaaaacagatttaaaaagaaatcttcacccataattagtatcttcatagctattaaaaaaataggtcataatttcattcttagtgccatttttcaatactacccttttaaggatttaaaccacctgacttttttctgtgtaatgaaaacaaatggcgcaaaataaatacaagttcattctctgaatactaatgtcttatgcacattcatttactaatttttaatatcaccatcttttcctcacacacacatacatacataaacacacacacacacacacccctttttcagtctttataatggagggatgttaaaaatcccctctagactgtatttggtttatgctacagtactaatactctgagttgaaggaaaattctttataccaaacaataacacgttatttaaatgtgctaaattaatcacagctgaagtttgtttagaagcttacacaaaataatcagaaaacagatcaactcttaagattttttttttaataagtgctctgtaaggaattgttgtgaggacctaaggagaaaagattgcaacaaatagagttaagtgttactaaacagcacaaagagatttgtcccaaagtcctgcttgtacctaggcaatttaagtctattaacctaatgcccccaaaatactgacagttaatatgatggggcactagggttctcagaaagttaacagacattcctaactacatacctctaaccatataatcaaggaaatttcagtggagaaatcaaagtgaaatgttgcattgtttcatttagaagtgagactctcaaaaacctttggacagacagagaagtgatacattctttttggcttctctgaacactgaggcctgagggatatggaaggaaattagaaaagcaatagctttctaaagatgtttaatcaagtgttgcttttaagttaaaaagcccaattcaggtggggtctgggtttgttttttgttttttccttttcaaatatatactcaattcaacctctgtatgtcacaaacccagaaagtttcttgtgagttgtgagacggaagaactttaaaattccaggcaagcaaaatggacatttaaaaaaggggactagagaggggaatctggccctaaggcgacaagtggttacacaaggcaattgaacccccagcagaactttaaaacctgtaaaacaaactggagccttttttccctttaatcaaccttatatgtctttttttttaactttttgaaaatttttatttaaaaaaaacacaaaaacacagacttttttcacttcagttatgtggtatgttgcattttccagtttgttcaatgctttaaagctcaaggatgcctctgctttcaattgtacatgggcctgaagcatcctagcttttggcaagcaggcaggagactcaacaaaaatcaaattaggatcggagaaagccagactaaatgcagggcacatctgtaaacatattatacatttgaaaattacaatatcaggtcaaaggtgatacaggtttacagggtggaaatggaacctatctggaactggcctaccacaagtttctgaacctggactgatacaataagttattttatatatatatatatatattatgtataaaaaaaaagttttgtttacatcaagtggaattggcaatccatgcttatacttttaaaatctaagcagggcagaaatccagactaaaaagatagttactctactctatgttgagtccaacagcttctttcatgaaccacctggtttaaaagccctaaataatcaacaaaacaagaaaacccatccatactacagtcactcaaaactggacatttctaggggtagagccaaagtagttactttctccccaaataccccaggggatccagtctacttttatcagaagactacaactctttatataaatgccctgatattttaacctgtatttgacatacatggatatactaatttctgtgtgtgtgatgtgatgctgtgtcaggccagacaacttgttattatgttactaacatcacccaatctcaattggacccttaatttctgcacacacacacaaaaatttattttagcatgctatacacaagctgcagtgccaacaggatggcaatgtaaaggataagacagggctaatgctcttctctgccccaaagaaaatttcccagaatttccacattattttccttaaaaacccatccttgcctctagtaattaaatatatttattaagatataattagaagctaacaagcctcagaagtatagtttgcatgaaaacacaccttctacagtcagggtttattatcttctcactggctaaaaacatgaaaagttttagttttcatggacttttttcttccccttttagattttgctgagaaattaaaagataatttacagaaaggtctaagtttgtcttaaatgtttgatgaaaaacaaggaaaacagcacatttagtgttagtgacggagagcaagtctggagcacctacagttgaaaagcagaatatatttttggctcccagttatacaattacattaaaatatggggcacaggaatattttttcccgattggtatatctaagccaattgcttgttctgcaacttttctttaaatgacgcgcatagattcttcaagtggttaaggtccatatgtaaccgaagctaagttaactatgtaccatcaactaactattccagaattgtagaacttcaatgccctcccctatccccgccccacaaaaaataaatggaaagaaataaagtatttccccaacaccccagaggccgcttaactcctggcaagacatgcaaatcatattcgctaaaaaaatacaccctgctaacttcaa

SEQ ID NO: 146265 - DNA, 1634 bp, Homo sapiens
  misc_feature (1)...(1634): n = a,t,c or g
ggggggcgaggctatgtcgcggtggcagcccggatcgcgtgcagggcgtgatgttaattgggacgtcgccgcggacttcttcccccggatacagtgcggcccgagcggaggccggcgccgcctccgatcttgaagagcccgcgctgccgagcccgcccccgcctgcgcaccggcaccgacgcggagctcagcccagccagacccggctcggcgcggcctggatctaacccagccaggcaggcaatactagcccctctggagcacggagctccttccccaaagacatgaagctattggagaactcgagctttgaagccatcaactcacagctgactgtggagaccggagatgcccacatcattggcaggattgagagctactcatgtaagatggcaggagacgacaaacacatgttcaagcagttctgccaggagggccagccccacgtgctggaggcactttctccaccccagacttcaggactgagccccagcagactcagcaaaagccaaggcggtgaggaggagggccccctcagtgacaagtgcagccgcaagaccctcttctacctgattgccacgctcaatgagtcctttcaggcctgactatgacttcagcacagcccgcagccactgagttcagccgggagcccagccttaagctggttgggttgaatgcagtcaactgcagtctgttctcagctgtgcggggaggacttcaaggatctgaaaccacagctgtggaacgcggttggacgaggagatctgcctgggctgaaatgtgacatctacagcgtataacccatacttggactcagatccctctcggggaggatggtagcctctggtccttcaactacttcttctacaacaagcggctcaagcgaaatcgtcttctttagcctgccgttccatcaagtggctccaccctacacaccctcagaggcaggcaacgaagctggacatggagctgggggaggaggaggtggaggaagaaagcagaagcaggggcagnggggcccgagggagaccaagcacccattggaaggaaggacaangggtccccagtgatctgtatttgatgaggaggagccgaggccccagcttcatccagcttcaaccaatgcctggaccttgtccacctgagaggcccctggggccttccccaggctgcttggccagacccctgcgctgcccacagtcctggcaatttcccaaagccaataccttgccttaaccttttggcttcaatccttgtggatgccccactcaccccttcagactcctgctgcccaatgctgtggccggacttgttcagcagggggccctggtgggaggagcgacctgcccctgccccaaatgaaactgccacagcaggggacagctggaccgcagagtttatttttgtatttctactgggcctgcacactccaagcccaaaagggtcttgtgggccggaggccccaacgagcaggccccagcaagtcaccggctctggtcttgggccggccccggtgcccacctgtacccccacctcgcccatttggccgcgtgcacttgagtgtcactttgctgcagatcgtttctttccaataaaagttttctgtgacttaaaaaaaaaaaaaaaaagggggg

SEQ ID NO: 146266 - DNA, 1800 bp, Homo sapiens; identical to SEQ ID NO: 125769

SEQ ID NO: 146267 - DNA, 1641 bp, Homo sapiens; identical to SEQ ID NO: 125770

SEQ ID NO: 146268 - DNA, 369 bp, Homo sapiens
cggcacgagagattctgtagttacaggaaagggttaattacttgctcaagatggaaaaaaaagatagtggttagaaaactttaatttgtgagccctctttagagatcctctttagagatcctctgcttgtcttggacttgattgattaatggtagacaaatagattttaacttttccaaataacacagaacaatcctaggtgttagcataacacccggtaacagtgtacctgctccttggatatctccttttccagctcccttgcggttctgagttctccaccagtgagacccatggccactctgcagaccgacttgggcgctgcttttgctgtttctcggctggaacaggatgaatatgcacctggcg

SEQ ID NO: 146269 - DNA, 351 bp, Homo sapiens
  misc_feature (1)...(351): n = a,t,c or g
ggcacgagttggtgttcctatcataataatattattggatgaagaatagttgataagattaagttttaatgttttctagtagccatggatgaggttatcagagttcatagactacaatgtaaactacaaattgttcagctaatccaggatatacttttgttcttctctttttagattccagaatgactactatcttgacttacccctttaaaaatcttcccactgcatcaaaatgggccctcagattttgtaagtnnnnnnnnnnnnnnnnnnnnnnnnagattggatttggatttataaacatctcgcacagatactgaatggtattgctttttgtaaacagtttatttt

SEQ ID NO: 146270 - DNA, 391 bp, Homo sapiens
ctgtgaatgaatgtcttaagaaaatagggtgtcctatttttagtaaagcatttagatgatttcccaattgtcttttaagactttagtttaaaatttgataatatgataattataaaacactttccttctagtgaataggtaagggttatatttcatttgtttttgtaatttttaaagcatatttctgtggagaagatatataaggcttgtggttccatagagttaaaaaaattcatttttttaataggaaaagatacagttaccaaagataatggcatccgtccttcctcactggagcagatggccaaactaaaacctgcattcatcaagccctacggcacagtgacagctgcaaattcttctttcttggaactggcaatgttatttgtat

SEQ ID NO: 146271 - DNA, 2134 bp, Homo sapiens
  misc_feature (1)...(2134): n = a,t,c or g
cccacgcgtacggctccgagagggaggttttgcggtcttcagccaacattccagaatgactactatcttgacttacccctttaaaaatcttcccactgcatcaaaatgggccctcagattttccataagacctctgagctggtcctcccagctacgagctgccccagctgtccagaccaaaacgaagaagacgttagccaaacccaatataaagaatgttgtgggtggtggatggtgttcgcactccatttttgctgtctgggcacttcatataaagacctgatgccacatgatttgggctagagcagcgtttaacgggtttgttggcatcgggaccagtgtccctaagggaagtagtttgattatattcatctttgggtacagttatttcagggaagtgaaaaacaagcaatgtgggctagagagggctggcccttgggagctgggctttctctgacaagtattcctggttcacaatgttcacctgggcttgtatctctggcccaaccaaggcccttgaccacaggtgtttggtttgattgctttttggccagtgtgatgtgatcgtggcaggtggtgttgagttgatgtccgatgtccctattcgtcactcaaggaaaatgataaaactgatgcttgatctcaataaggccaaatctatgggccagcgactgtctttaatctctaaattccgatttaatttcctagcacctgagctccctgcggtttctgagttctccaccagtgagaccatgggccactctgcagaccgactggccgctgcctttgctgtttcttttctggtatcaggatgaatatgcactgcgctctcacagtctatccaagaaggcacaggatgaaggactcctttctgatgtggtacccttcaaagtaccaggaaaagatacagttaccaaagataatggcatccgtccttcctcactggagcagatggccaaactaaaacctgcattcatcaagccctacggcacagtgacagctgcaaattcttcttttctttgactgatggtgcatctgcaatgttaatcatggcggaggaaaaggctctggccatgggttataagccgaaggcatatcttgacgggattttatgtatgtgtctcaggatccaaaagatcaactattacttggaccaacatatgctactccaaaagttctagaaaaggcaggattgtaccatgaatgatattgatgcttttgaatttcatgaagctttctcggggtcagattttggcaaatttttaagcccatggattctgattggtttgcagaaaaactacatggggtagaaaaaaccaaggtttggattgcctcccctttggagaaggtttaataactgggggtggatctctgtcccctgggacacccatttggganccactggctgcaggtttggtcactgactgctgccaacagattacggaaaaaaggaggccagtatggccttagtggctgcgtgtgcacctggacgggcagggcagtgctactgactacgtggaagcttatccaaaataatagatccagaagaagtgacctgaagtttctgtgcaacactcacactaggcaatgcccatttcaatgcattactaaattgacatttggtagttcctagctcctcttaaggaaaacagttccttgtggcccctcccaattaaaataccttggcaccttaaagccctggcccagtgttcctgagccttttccaaataatccagtttacctgcctctttccagggatttcctaagcccacccagaatcctcacatgagatgtgtgggtggttgtttttggtcctctgttgtcactaaaagactaaatgagggtttgcacgttgggaaagaggtcaactgagatttggaaatcatcctttgtaatatttgcaaattatacttgttcttatctgtgtcctaaagatgtgttctctatgaaaatacaaaccaacgtggcctaattaattatggaaaaataattcagaatctaaacaccactgaaaacttataaaaaatgtttagacacctatttatggctggtcagcgttaataaagtggagaaatattggaaaacaaaaaaaatacacattnnnnnnnnnnggggggggccccttttaaaaaac

SEQ ID NO: 146272 - DNA, 824 bp, Homo sapiens; identical to SEQ ID NO: 136527

SEQ ID NO: 146273 - DNA, 1595 bp, Homo sapiens
ttctaaagtccgcacgcacccaccgggactcagattctccccagacgccgaggatggccgtcatggcgccccgaaccctcgtcctgctactctcgggggccctggccctgacccagacctgggcgggctcccactccatgaggtatttctacacctccgtgtcccggcccggccgcggggagccccgcttcatcgccgtgggctacgtggacgacacgcagttcgtgcggttcgacagcgacgccgcgagccagaggatggagccgcgggcgccgtggatagagcaggaggggccggagtattgggaccggaacacacggaatgtgaaggcccactcacagactgaccgagcgaacctggggaccctgcgcggctactacaaccagagcgaggacggttctcacaccatccagaggatgtatggctgcgacgtggggccggacgggcgcttcctccgcgggtaccagcaggacgcttacgacggcaaggattacatcgccctgaacgaggacctgcgctcttggaccgcggcggacatggcggctcagatcacccagcgcaagtgggagactccgcccatgaggcggagcagtggagagcctacctggagggccggtgcgtggagtggctccgcagatacctggagaacgggaaggagacgctgcagcgcacggaccccccccaagacacatatgacccaccaccccatctctgaccatgaggccaccctgaggtgctgggccctgggcttctaccctgcggagatcacactgacctggcagcgggatggggaggaccagacccaggacacggagctcgtggagaccaggcctgcaggggatggaaccttccagaagtgggcggctgtggtggtgccttctggagaggagcagagatacacctgccatgtgcagcatgagggtctgcccaagcccctcaccctgagatgggagccgtcttcccagcccaccatccccatcgtgggcatcattgctggcctggttctccttggagctgtgatcactggagctgtggtcgctgctgtgatgtggaggaggaagagctcaggtggagaaggggtgaaagatagaaaaggagggagttacactcaggctgcaagcagtgacagtgcccagggctctgatgtgtctctcacagcttgtaaagtgtgagacagctgccttgtgtgggactgagaggcaagagttgttcctgcccttccctttgtgacttgaagaaccctgactttgtttctgcaaaggcacctgcatgtgtctgtgttcgtgtaggcataatgtgaggaggtggggagaccaccccacccccatgtccaccatgaccctcttcccacgctgacctgtgctccctccccaatcatctttcctgttccagagaggtggggctgaggtgtctccatctctgtctcaacttcatggtgcactgagctgtaacttcttccttccctattaaaattagaacctgagtataaatttactttctcaaattcttgccatgagaggttgatgagttaattaaaggagaagattcctaaaatttgagagacaaaataaatggaacacatgagaaccttccag

SEQ ID NO: 146274 - DNA, 2835 bp, Homo sapiens
gggggttttttattttgacctattagtatggttaaatttatggatttactatttattgaaccatttttgcatcttggaatgagccctaattgatctgttattattttaatgtcctgatggatttactttgccaatgcatatatttaggatttttatatcaatattcataagagatcagtctatagttgttgttttttaatgtgttttgtctagttttggtattcgcatctgattgctttgtaaaaacaattgagaagtttcatttctttttctgagtttcggaacagattaaatagccaagtattatttattcttcagttaccaaattcatatttactaaacactatgtgctaggaattggactggatgctgggtaatcagtagtaaacaaaacagatatggttcctgccgtgatattgcttggctcattaaggaaaatgacattaatgaagaaactacacatatgtaattataaatcatgcaagaaaaggacaggatgctttgagataatatcattgaagatctttagattgtgctttttatgcatttgagtaaatgactattgagtacatacatatacactaatagctaattatttaaattagtatgtattgatttggtgtgtaattagggctgtggtgggtgcattagtaaaatgaggtcttcataattacacaaaatataaaataatggcaatagtagctaccattgtaggaggtagctgcatcattttttaatggtagaaattaagacaggttaagtagacacttttagtctaacatgttcaattgtatacactctttggaagtctctcttaagattatagtaaaagaataaggatataaatccacaaagatcaagaggaggtgagaggaagatatagctgaaatcagtatttgggaaactagaaaggagatgggcaagtaataaatgatttcatgaattagagaatgctgaaagctgaagagaggtaacccagcaaggagcaagcagattctttccacagaatctggaaaagttttaggaattgggggtatcaagtacaggacttctgaagtcaagaattacaggatggggtgggaatagaagggttggttgatggtctttatcattttgataccctggaaccccttctccactcccacacacccagacaactactctctcctctaccttgacagaagactgaaggtttatacccaggagactaggaggctccagatggttaaggtgggggtgaagcacctaaatgaaaatgaggattgagtgaaagtcaggtcaacatgctgaacctagagcggttgtctttttttgattggcttccaaactatcaggcttacgtgcccctcaacaaaacattaacggattcttagctggggaaacttaccagcccatggcacagtatttaacagatatgaactatggaaattcacccgattgaacagttggatccatcagatcacctggagagtacagccgctggtcaggaagcattgttcacgtaccacagcttctagtcaacttttatttcattttttgagacagggcctcactttgtcacccagattgaagtgcagtagcgccatcataactcactatagcgttgaactcctgggctcaagccatcctcccacctcagcctcctgggtagccgggaatacaggcgtatgcccccacgtccagctgatatttttattttttgtagagatggggtctcactatgttgccaggctggtcttcaactcctgggcttgtgatcttcctgccttggcttcccaaagtactgggattacaggtgtgagccactggtgcctggccctagtcagcttttaaatgcctcacatttgagtataaatgtacagccaagggttgcctgccatagaatgaaagtctctaatgaaaaagagaccaagtagggaataaaaggagctgagtataaatagatttacttcagggaacagaagaaacttcaacaaataaaactagtatctttaaagagaagatattacatctgtgaaagatgaaaaagtttatataaaaaaaactgctgcgacagaagaaatttcttaaaaatttaatacaaggtttagataataaagctgaagaattctccccaaaaaaccagaagagcacaagaattagaaaataagagtgaaatgatgagaaaattagagggccaaccaaggaggttcttcatctaatacagtggaaggaaactatctgtgtcccagaactgaagaaggtgactttctagattgaaagggcctattaagcgccctgatcaataaaacagaaacaaacaaaaaataaacaaaacttcattgtaccgaatgtatagttccaaaaggaacaagaccagattgattttcttcctacttctgaaaagaagaatgggggcagagaacgaggtgctagctcttaaactgcattttaacaaattcagggaaaaaggaaaccttcttaactttaaattgtatgcaagtgctgttaggtatccccagtgggaagttccaacagttctgtgacaaagataaagttgcgcagaagaagcatatttcaggtatctccagcaacttattcatatccagaatcagccctatccaaagagagaagtctcgtatacctggctaagactgaggagccatatggtagaaatggaagaagaaagcagaatgagaaagtgcctgggtggggcatgggggaggcagagatcttagtgctaataaagtactcctagaaatgagtgcataaccttggaaagcaagggttgtgtctctaagaggcaagcagagctggcaataaaggccctcctgaaccagattacatttggagatt

SEQ ID NO: 146275 - DNA, 1627 bp, Homo sapiens
  misc_feature (1)...(1627): n = a,t,c or g
cggaaatcgcgcggatgccagaacgcgctctcagcttcgggtcctgcggctgcggctgccgccatgcatggtgcgtaagcttatagttccacgagcagaagctgctgaagcaggtggacttcctgaactgggaggtcaccgaccacaacctgcacgagctgcgcgtgctgcggcgcttaccggctgcagcggcggcgaggactacacgcgctacaaccagctgagccgtgccgtgcgtgagctggcgcggcgcctgccgagccctgcccgaacgcgaccagttccgcgtgcgcgcttcgggccgcnctgcttgaacaagctgtatgctctcggcttggtgcccacgcgcgggttcgctgggagctctgcgacttcgtcacggcctcgtccttctgccgccgccgcctccccaccgtgctcctcaagctgcgcatggcgcagcaccttcagggttcaattgcccttttgtgaagcaaggcaacgtacgcgtggggccctgacgtggttaccggaccccgccctccctggtcacgcgcaggcatgaaggactttgtcactttgggtggactcgtccaggatcaagcgggcacgtggctagagtacaatgatgggctgcgattacttcgatctggaagcctagcggatctccgcacttttgcatggctgtcttttaccagatgggaaaactgaggcctgatgctggagattctatgagggtgctctccctcaaaggttatcagaaggtccgtaaggttccttaaagaatttgattccatccagtggccaggcccatgccataaaagcccacgggaggtgccgtcccttgtttcccccggaaatgttccttagaacttggacctacctgattaattaattgaactgtgcccttgggaaaccagtgggaacgtaaccttggtgccagcactggggtattgttggcttcttgtgttggaaaactttgtaatgtaaaatggaaaaactggaaatccccacgccctgtttccctttatccgtcttgtgggttggactgggttcaattccgtttaactccgaattcttgctcctgggccgtggttaagctgtgtacagatgatggagagtttggcctcaagtttttataaactgagcgagactagtgttccaggatctcctcgccttgtttaaatgtcaataaatgcccccaactgtctttgtaagtgcaactttttaatctgtctggttttctttttttctctagagacggagtcttgcactccagcctaggggacagagtgagactctgtctgaaaaaaaaaaaagaaaagaaaaaaaatgtaagacagtgattcagaaagcaagctctggagccaaatagcctagtctgagtcctgacccctatgcttagctagctgtgtaacattgattgttttaccgagcctctctgtgcctccgttttcctcatcataaaaatgtggtaatattggaggggggtgtggaattactgtttaatggtacagagtttctgttttgggtgatgataatgttttgaaggctgggcgtggtggctcactcttgtaatcctagcactttgggaggccgatgcaggtggattgcttgagcccaggagttcaagacctgggcagcgtgg

SEQ ID NO: 146276 - DNA, 505 bp, Homo sapiens
gctcgaccagcagtgcaaacagacttcggagtacctgcgctatgaagacacgcttcttctggaagaccagccaacaggtgagaatgagatggtgatcatgagacctggaaacaaatatgagtacaagttcggctttgagcttcctcaggggcctctgggaacatccttcaaaggaaaatatgggtgtgtagactactgggtgaaggcttttcttgaccgcccgagccagccaactcaagagacaaagaaaaactttgaagtagtggatctggtggatgtcaatacccctgatttaatggcacctgtgtctgctaaaaaagaaaagaaagtttcctgcatcctcaacaacaatgtgcagtgagcatgtggaagaaaagaagcagctttacctacttgtttctttttgtctctcttcctggacactcactttttcagagactcaacagtctctgcaatggagtgtgggtccaccttagcctctgacttcctaatgtaggaggtggtc

SEQ ID NO: 146277 - DNA, 890 bp, Homo sapiens
ccgcgaggcgttattggtcacgggcctctgggaacatccttcataggaaaatatgggtgtggagactactgggtgaaggcttttcttgaccgcccgagtcagcccaattcaagggccaaagaaaaactttgaaagtatgggatctggtggatgtcaatacccctggatttaatggccacctgtgtctgctaaaaaggaaaggaaagtttcctgcatgttcattcctgatgggcgggtgtctgtctctgctcgaattgacagaaaaggattctgtgaaggtgatgagatttccatccatgctgactttgagaatacatgttcccgaattgtggtccccaaagctgccattgtggcccgccacacttaccttgccaatggccagaccaaggtgctgactcagaagttgtcatcagtcagaggcaatcatattatctcagggacatgcgcatcatggcgtggcaagagccttcgggttcagaagatcaggccttctatcctgggctgcaacatccttcgagttgaatattccttactgatctatgttagcgttcctggatccaagcaggtcttcataaaagccctttgaacccccttcctgccgtgtgttaggagatagggatattggcccctcactgcagctgccagcacttggtcagtcactctcagccatagcactttgttcactgtcctgtgtcagagcactgagctccacccttttctgagagttattacagccagaaagtgtgggctgaagatggttggtttcatgtttttgtattatgtatctttttgtatggtaaagactatattttgtacttaaccagatatatttttaccccagatggggatattctttgtaaaaaatgaaaataaagtttttttaatggaaa

SEQ ID NO: 146278 - DNA, 3073 bp, Homo sapiens
aactaacccctctttttctccaaaggagggcttgtggagatcggatcttttctccagcaattgggggaaagaaggctttttctctgaattcgcttagtgtaaccagcggcgtatattttttaggcgccttttcgaaaacctagtagttaatattcatttgtttaaatcttattttatttttaagctcaaactgcttaagaataccttaattccttaaagtgaaataattttttgcaaaggggtttcctcgatttggagctttttttttcttccaccgtcatttctaactcttaaaaccaactcagttccatcatgggtgatgttcaaggaagatcaagtcttttgaggtgggtctttaacgaccctggaaaaggtgtaacggcagtgggcgagaaggtggcctggccgggtgaatagtgggaggtgtgtggaagttacccgtgtccaaagccgttaggatccccggcttgccggagtggcctaaagtgcctttggatgccagggatccccagcagatgcaaacagacttcgggagtacccgcgctatgaagacacggtttttctgggaagaccagccaacaggtgagaattgagatggtgatcatgagacctggaaaccaatatgagtacaagttcggctttgagcttccctcaggggcctctggaacattccttcaaaggaaaatatgggtgtgtagactacctgggtgaaaggcttttcttgaccgcccgagccagccaactcaagagacaaagaaaaactttgaagtagtggatctggtggatgtcaataccccctgatttaatggcacctgtgtctggctaaaaaaagaaaagaaagtttcctgcatggtcattcctgatggggcgggtgtctgtctctgctcgaattgacagaaaaggattctgtgaaggtgatgagatttccatccatgctgactttgagaatacatgttcccgaattgtggtccccaaagctgccattgtggcccgccacacttaccttgccaatggccagaccaaggtgcttactcagaagttgtcatcagtcagaggcaatcatattatctcagggacatgcgcatcatggcgtggcaagagccttcgggttcagaagatcaggccttctatcctggggctgcaacatccttcgagttgaatattccttactgatctatgttagcgttcctgggatccaagaaggtcatccttgacctgcccctgggtaattgggcagcagatcaggtctaagcagcagaacatccaggcatgggcagccgaaccagcttttgaggatgagttgggtagatctgaacatcccttgataccccagaagttccttcctggtattttgggatgttcatttcctgaaggttcaaccgtttgggagagcccaaccactccttttgctagatgacatggatggctctcaaaacagcccctatctttatgtatgcccctgagttcaagttcatgcccaccacggacttatactgaggtggatcccttgcatcttcaaccaccaatgtgcagtgagcatgtggaagaaaagaagcagctttaccctactggtttctttttggccctctcttccctggacagttcacttttttcagagactcaacagtctctgcaatggaagtgtgggtcccacccttagccctctgacctcctaatgtaaggaggtggtccagcaggcaaatctcctgggcccttaaaaggatgcggacctccatcccctcagcccagcgcccccatgttgtgaataccaggggtgtttgttggatgggtttaaaaaataacctagaaaaactcaggccccatcccattttcctcagatctccctgaaaaattgaggccttttcgatagtttcgggtcaggtaaaaatggcctccctggcgtaagcttttcaaggtttttttggaggctttttgtaaattgtgataggaactttggaccttgaacttacgtatcatgtggagaagagccaatttaacaaactaggaagatgaaaagggaaattgtggccaaaactttgggaaaaggaggttcttaaaatcagtgtttcccctttgtgcacttgtagaaaaaaaaagaaaaaccttctagagctgatttgatggacaatggagagagctttccctgtgattataaaaaaggaagctagctgctctacggtcatctttgcttaagagtatactttaacctggcttttaaagcaagtagtaactgccccaccaaaggtccttaaaagccattttttggagcctattgcactgtgttctcctactgccaaatattttcatatggggaggatgggtttcctccttcatgtaaagtccttgggaatttgattcttaagggtgatgttctttaggcacctttaaattcccgttccaaattttttggttctccccttctgccatccttaaatgtaaggctggaaactgggtctacttgtgtcctctaggggttaaggccaaaaggccaaaaaaaattttacctacttttggagatttgcccccaatgtaccagaattatataattctaaccgcttaaaatccatgtgaaaagggttgcctgctgtccagcccttgccccactgtgacttcaaaaccccaaggagggaactccttgatccaagatgccccaacccctgtgttcagaaccctcccaaatactggccatgaggaaactaggaggggcaggtctttcataaaaaggccctttggaaccccctttcctggccctgtgttatggagataggggatattaggcccctcacgtgcagctgccaaccacttgggtcagtcactctcaggccataggcactttgtttcactgtcctgtggtcagaggcactgagctccaccctttttctgagagttattacagccgagaaagtgtgggctgaagatggttggtttcatgtttttgtattatgtatctttttgtatggtaaagactatattttgtacttaaccagatatatttttaccccagatggggatattctttgtaaaaaatgaaaataaagtttttttaatggaaaaaaaaaaaaaaaagtcgacc

SEQ ID NO: 146279 - DNA, 467 bp, Homo sapiens
  misc_feature (1)...(467): n = a,t,c or g
tctagtccacgctcggagccatgccgtccaaggtccgctgcnagtcggtgcaggtcttcgacgcaatgaagacagcgacagctgtggcgcactgcaaacgcggcaatggtctcatcaagctgctggagccagttctgcttctcggcaaggagcgatttgctggtgtagacacccgtgtccgtgtaaagggtggtggtcacgtggcccagatttatgctatccgtcagtccatctccaaagccctggtggcctattaccagaaatatgtggatgaggcttccaagaaggagatcaaagacatcctcatccagtatgaccggaccctgctggtagctgaccctcgtcgctgcgagtccaaaaagtttggaggccctggtgcccgcgctcgctaccagaaatcctaccgataagcccatcgtgactcaaaactcacttgtataataaacagtttttgagggattttaaaa

SEQ ID NO: 146280 - DNA, 459 bp, Homo sapiens
atgccgtccaaggcccgctgcagtctgtgcaggtcttcggacgcaagaagacagcgacagctgtggcgcactgaaacgcggcaatggtctcatcaaggtgaacgggcggcccctggagatgatgagccgcgcacgctacagtacaaggtgctgggatccggcaccggcgttagtggatggaggactcttggagacagagatgttgtagctcttgaaagctggggggctggcatcagcaacgggatgtttagaagttgtgttgggtgtagacagtgggctgctggagccagttctgcttctcggcaagagcgatttgctggtgtagacatccgtgtccgtgtaaagggtggtggtccgtggcccagatttatgtccaaaaagtttggaggccctggtgcccgcgctcgctaccagaaatctaccgataagcccatcgtgactcaaaactcacttgtataa

SEQ ID NO: 146281 - DNA, 727 bp, Homo sapiens
tgactttcctcttctctgggtctgtagagggccttggagtgacaccctgacccccatccactagtacttgaaggccagtggtggcagaagccacagaaacaagaagcccagtgagatggctaagctgcccagcatgtaacttaaatccctgttcattccccattcctttagctgctggagccagttctgcttctcggcaaggagcgatttgctggtgtagacatccgtgtccgtgtaaagggtggtggtcacgtggcccagatttatggtgagtcccaggaactgggcgcatggaggaggtggctctgggagggaggccttcacagcgctcctgtaccctttaattgtgtgtctttctcacagctatccgtcagtcccatctcccaaagccctggtggcctattaccagaaatgtgagtgagcatgggtccttcccatgaggtagatgggtgtgtggggatcaagtcaaggactctgtgtgattatctaaatcctcgtccctgctcttcttgccagatgtggatgaggcttccaagaaggagatcaaagacatcctcatccgagtatgaccggaccctgctggtagctgaccctcgtcgctgcgagtccaaaaagtttggaggccctggtgcccgcgctcgctaccagaaatcctaccgataagcccatcgtgactcaaaactcacttgtataataaacagtttttgagggattttaaagtttcaag

SEQ ID NO: 146282 - DNA, 715 bp, Homo sapiens
ggcgccgcgcgtgtgaggttgtctagtcaacgctcggagccatgccgtccaaagggtcccgctgcagtcggtgcagggtcttcgggacgcaagaaagacagcggacagctgttggcgcactagcaaacgcgcccaatggtctcatccaaggttgaacgggcgggcccctggagatgattgaagcccgcgcacgcctacagtacaaagctgctggagcccagttctgcttctcggcaaggcagcgatttgctgggtgtagacatcccgtgtcccgtgtaaaagggtgggtggtccacgtggccccagatttatgctatccgtcagtcccatctcccaaaagcccctggtggcctattacccagaaatgtgagtgagcatgggtccttcccatgagatgtggatgaggctttccaaagaagggagatcaaagacatccttcatcccagttatggaccggaaccctgctgggttagctggacccttcgttcgctgtgagttccaaaaagttttggaggtcctggtgccccgcgctcgctaccagaaatcctaccgataagcccatcgtgacttcaaaacttcacttgtataattaaacagttttctgagggattttaaagtttcaagaactgtgtgtggccttatgtgttggtattggatgtttaaccagacagaaatcagtaaacatcctggacctataaaaaaaaaaaaaaaaaaa

SEQ ID NO: 146283 - DNA, 901 bp, Homo sapiens
  misc_feature (1)...(901): n = a,t,c or g
cacgaccggtcctgaattcccgggtagctggcggtccccgggtgctgctggttagtgtgctctgagggagggtccgagccagccgctgtttttgccggagaggcccctcaggccggctgcttccnnnnnnnnnnnnnnnnnnnnaccagaaaacctcaggatccacaaagtatcatcaaatgaggtagtaagcattaataatgtctttcatctttgagtggatctacaatggcttcagcagtgtgctccagttcctaggactgtacaagaaatctggaaaacttgtatttcttaggtttggataatgcaggcaaaaccacttcttcttcacatgctcaaagatgatcagattgggccaacatgttccaacacgtacatctgacgatcagaagagctaacaaattgctggaatgaccctttacaacttttgatcttgtggggcacgagccaagcacgtcgcgtttggaaaaatttatctccccagccaattaatgggatttgtctttctggtggactgtgccagatcatttctcgccttcgtggaatccaaaagttgagcttaatgctttaatgactgaatgaaacaatatcccaatgtgcccaatccttatccttgggtaacaaaaattgacagaacagatgcaatcagtgaagaaaaactccgtgagatatttgggctttatgggacaggaccacaggaaaggggggaattgtgacccctgaaggagctggaatgctcgccccatgggaagtgtttcatgttgcagtgttgctcaaggagggcaaggtttacggccgagggttttccgctgggcttctcccagtattatttgactgatgtttggacggttgaaaattaaaaagagttttacttctctggcctgatcctaaaaaaaaaaaa

SEQ ID NO: 146284 - DNA, 521 bp, Homo sapiens
agtcttgctctgttgcccaggctggagtgcagtagcgcgatcttggctcactgcaacctccgcctcctgggttcaagcgattctcctgtttcagctactcaggaggctaaggcaggagaatcacttgaacctggagacagaggttgcagtgagctgagatcacgccactgcattccagcctgtgcgacagaatgagacactgtctcaagaaaaaataaaagtgggaaaatcttccaactgtcctctagagtgtgaatatatgaaaggagtcagagtggggtgaaagtctataaatgtaagacatttgggaaagccttcacacagccttttgagcacacatgagaatgtatactggagagaaaccctataaatattaagaatgtgggaaattcttcatcctagttcttttgttgttgttgatgatacaaaaatattttcatttaataaagattgtcaggttatatttaataagaaagaaagtatcatgtaaacagcccagtaataaaattttacaatcttaa

SEQ ID NO: 146285 - DNA, 1521 bp, Homo sapiens
atgggcatacgagtgaccagcgtgatcgtgtccaggccagtgccgcattctgaagctgtcttctgctgttggctgctgggggcgactgatgtttggatccctgagcaccctgccaatcccagactcaccttcccactctttccagagtccccagggagacacttaagggaaattaaactgcagagtgcaagagatgcctcagtcaagtcagccaaaaacacgcgggtcatccccaagccccagagagttattcatcctggtggccagcccaccgacaaaatggatttggatctactggacctgaatcccagaattattgctgcaattaagaaagccaaactgaaatcggtaaaggaggttttacacttttctggaccagacttgaagagactgaccaacctctccagccccgaggtctggcacttgctgagaacggcctccttacacttgcggggaagcagcatccttacagcactgcagctgcaccagcagaaggagcggttccccacgcagcaccagcgcctgagcctgggctgcccggtgctggacgcgctgctccgcggtggcctgcccctggacggcatcactgagctggccggacgcagctcggcagggaagacccagctggcgctgcagctctgcctggctgtgcagttcccgcggcagcacggaggcctggaggctggagccgtctacatctgcacggaagacgccttcccgcacaagcgcctgcagcagctcatggcccagcagccgcggctgcgcactgacgttccaggagagctgcttcagaagctccgatttggcagccagatcttcatcgagcacgtggccgatgtggacaccttgttggagtgtgtgaataagaaggtccccgtactgctgtctcggggcatggctcgcctggtggtcatcgactcggtggcagccccattccgctgtgaatttgacagccaggcctccgcccccagggccaggcatctgcagtccctgggggccatgctgcgtgagctgagcagtgccttccagagccctgtgctgtgcatcaaccaggtgacagaggccatggaggagcagggcgcagcacacgggccgctggggttctgggacgaacgtgtttccccagcccttggcataacctgggctaaccagctcctggtgagactgctggctgaccggctccgcgaggaagaggctgccctcggctgcccagcccggaccctgcgggtgctctctgccccccacctgcccccctcctcctgttcctacacgatcagtgccgaagggagttggggaactaattgtaaacagaatacacgtctacatatcagccctgagacagctggccccgctgcacacgcagcctgctggccccagcaagacacggtcagagctggacattcagagagctggcacgcttcatgctgcaacccggacacggacatgcaaggacaaacgatcagcacatcggtcaaccagcaacaggaagcacaagcaaagccccctccaacgcctctgtga

SEQ ID NO: 146286 - DNA, 1447 bp, Homo sapiens
gggccgaggtggcctctgcagcactgtggctgtgggagcactgtgtgttggggtaagagaagccagggggcctccctgaagccagctcataaaggaaggttcgtgtttcaaagggaggcggcaagggaatctgagtacctgagtccccgatgtttgaacccttccacccaatagaagtgcagtgatttcagccatttcccatctggcggtctgaatttttcccttcaaaggagagaagtggtgggcccaggcatccctcctcctgtgtgtggtcgttctggtgagaggaaccccgcgcgagagtcagcacctgtttcttcagagttgctgtcaaaataatcactgcgccccgcccccccccacagcagccgtgtgtgcagcgcccgtccccagcaaccatggcatgggaagcgttggatctgtgggcggacagcatatcctctggggtgttggtgcagctgtggcagaaaatcaggcccctggggaagtcctgtgaagtggatgcttccctgaaggcagcagcagtgtgtggctcagggggtcctcagaggccggtggtgcccgcgggtggcacggggcactctcatgggcagcacttggtcttgtgtttacagtattggagggattcacatcgttattttctggattaagctgctaggagtatcatgtacttagaaattcagtgtttatagtaagatgtattaaacattgctaatgatgtatggttacaatgtataacaggttttccattgtcataactgtatggaattttcttggaggatgtcattagcttctgtttgcactgacttgtgagctgtgtgtacgctgtggtcagatttctgaatgctgtagagcacttaccagctctgaccgtgtcttgctggggccagcaggctgcgtgtgcagcggggccagctgtctcagggctgatatgtagacgtgtattctgtttacaattaagttccccaactctgtggggaaagaacttaagcggttttagtgtttaataataatggtgaggccaatgaggggtcagggccgcgtggtccctaaggggagaggtcttcaagggcaagacccccatgggccctggcccctggaactgtgctccccccaggccgtggtgccctcccctaaggggatggtcaagtgtttcttgggactgaactgcccaggccaagcctgtttgcaaatctcctgtggtgggagttcccctgggacgggaagcccctcggccccttcccctccaggggcaggaactgagccagcatgggcggggccggccgagcttccaggcgtgttttctctgttaaatgtacctctgtctttaagctgtctcattttctaatcgctggcatgtcttgcctagaaaagcatttggaattgcttatgttcaattacagaaataaaatgtcttacttgccattgtaaaaaaaaaaaaaaaaaa

SEQ ID NO: 146287 - DNA, 429 bp, Homo sapiens; identical to SEQ ID NO: 130586

SEQ ID NO: 146288 - DNA, 792 bp, Homo sapiens
ctatgagctcgtgcccccacagagcttacagttagagtcgctggaactgggaaagaacagagctctccaggaggttggggttccccctgagcggagaggaagcacgaaaggtaatcggtaggtgagtgtttgggggtaatgttcgttaatgcaaaatataagcacaacccgcacagccaggcacgagtgcttgccctgcgcgccagaccctagagcgcactcgcgctccacttgtgcatccagtgctacaggcggggtgctccctccgccgcgcggccaagaggtctccattttggggtagctgcgaaaggctcggttcttagtctctgccccgcccgtgtagcgttgaggtgtccctcgcctcgctcccactactctttgtgtgtagccctcgtccgcggcgtgcgcaccctcccctgcggccgtggtctgacacatcgcttttggggtagatgcactgtgtcccacattcggcctgaattgatataagcacttgctgtatgcagagcatgagacagccgctgtccgggcgcaatggcgtgtgcgcttagggctccgcctcggattaccaatccggtatccgcacagtgggaccccgagactggctctgtcgccggcgagccctggatctggacgcagcgagaacgcaatcagtccgcgctgcagaggggaaatgtgcctttctgcagatgcagggaccacgagtttacactggacctgggaggccaaggcgggcagatcacttgaggtcaggagtttgagaccagcctggccaacatggcgaaaccccat

SEQ ID NO: 146289 - DNA, 1529 bp, Homo sapiens
ctcctgttttctggaactcttgtttgaaaggtgatacttcctcttgcctcccacctcagatacttacagaccaataacctaaaacctaagtggagactgttgggctaaccagaggtgagctcagtcttcttaaatctgtgacgtctgttccagatcggcccttagtgaaatctgaataattatttcctcactttaatcagacgaaatgggagctctcactctctaggaaaagcattaatgttcttcagtcaccactgttcttccataatacaaacatacagagcaaccaaaaaagagagtgacacccacaattaaatttttaaaatcagcaaaaaccaacctatagatgattcagatattggaactggagacagactttaactgtccatgttcatagggcttatggggaaaatagttgaaacagtggttgaataaggaatctcaccagagaaatggaagcttaaaaaaaccaatggaaaggccgggcacagtggctcacgcctgtaatgccagcactttgggaggccaaggcgggcggatcacttgaggtccaggagttcgagcccagcctggccaacatggtgaaaccccatctctactaaaaatactaaaattagccggcatggtggcgcgcccctgtagtcccagctactcgggaggttgaggcaggagaaccacttgaacccaggaggcagaggttgtggtgagccgagatcacaccactgcactccagcctgggaaacagagcgagactccatctcaaaaaaaaaaacaaaaacgcaagtcgttatctgtatttgaagtttaaatctagtacgtgaaataaaaaacaaaataggcttaacagcagagtgaatactacaaaagaacagtgaactcgaagacgtatcaatagaaattatctaaaatgaaggtcagagagatggaaaaaaaatggatagagcatttctacgatctatgcaacaatatcaggcagtccaatatatgtgtaatcagagtcctagaagggtaggagacagaatgggtaggataaattcacaaaagaagtgcaaaacttatacaatgaatactataaaacattgttgaaattaatgacaacctaaataaatgaaaatacatcccatattcatggatcagaagactcaacattttgttaaaatggaatactcttagctagtaaattgtagaaccagtactgaaaccaaggtctgttcaaattaatttaatcattcatataggaattcatggtgagtaggacaggcaaaggtggctgtgttcatggagcctccattagatggagggagtcattctttaataaaacggtataatttcagatagtgttaagtactgtgaaataaagcatgatgtgataagtaattggggaagatggtttaggttagatggtcaggaaatgcctctctgaaaaagtctcataaatgtctctttttctttttacattttgttttcttgaattaggaccaaataaaggccacacattgagattgctaaaaaaaaaaaaaaaaaagcat

SEQ ID NO: 146290 - DNA, 516 bp, Homo sapiens
  misc_feature (1)...(516): n = a,t,c or g
gggcagggatgttagctgtgaagctgcnaacttagtactactactatgttaagtgaccctccagccagaattcgcacgagaaaagggcccacagagaccgtctctaggatcccaaggcccaactccccgaacggtcagggtcctgtggacagctcacctagtggcannnnnnnnnnnnnnnnnnnnnnnnnnnnnnnnnnnnnnnnnnnnnnnnnnnnnnnnnnnnnnnnnnnnnnnnnnnnnnnnnnnnnnnnnnnnnnnnnnnnnnnnnnnnnnnnnnnnnnnnnnnnnnnnnnnnnnnnnnnnnnnnnnnnnnnnnnnnnnnnnnnnnnnnnnnnnnnnnnnnnnnnnnnnnnnnnnnnnnnnnnnnnnnnnnnnnnnnnnnnnnnnnnnnnnnnnnnnnnnnnnnnnnnnnnnnnnnnnnnnnnnnnnnnnnnnnnnnnnnnnnnnnnnnnnnnnnnnnnnnnnnnnnnnnnnnnnnnnnnnnnnnnnnnnnnnnnnnnnnnnnnnnnnnng

SEQ ID NO: 146291 - DNA, 402 bp, Homo sapiens
  misc_feature (1)...(402): n = a,t,c or g
gaactgcccagggtataaaaagggcccacaagagaccggctctaggatcccaaggcccaactccccgaaccactcagggtcctgtggacagctcacctagaggcannnnnnnnnnnnnnnnnnnnnnnnnnnnnnnnnnnnnnnnnnnnnnnnnnnnnnnnnnnnnnnnnnnnnnnnnnnnnnnnnnnnnnnnnnnnnnnnnnnnnnnnnnnnnnnnnnnnnnnnnnnnnnnnnnnnnnnnnnnnnnnnnnnnnnnnnnnnnnnnnnnnnnnnnnnnnnnnnnnnnnnnnnnnnnnnnnnnnnnnnnnnnnnnnnnnnnnnnnnnnnnnnnnnnnnnnnnnnnnnnnnnnnnnnnnnnnnnnnnnnnnnnnnnnnnnnnnnnnnnnnnnnnnnnnnnntctn

SEQ ID NO: 146292 - DNA, 919 bp, Homo sapiens
cccagggtataaaaagggcccacaagagaccggctctaggatcccaaggcccaactccccgaacccactcagggtcctgtggacagctcacctagtggcaatggctccaggctcccggacgtcccttgctcctggcttttgccctgctctgccttgccctgggcttcaaggaggctgggtgcccgtcccaaaccgttccgtatatccaggcttttttgaccacggtatggtccaagggccatcgcgggtcaccagctgtgccattgacaacctaccaggggtttgaagaaacctatatcccaaaggaccagaagtattcattcctgcatgactcccagacctccttctgcttctcgagactctattccgacatccctccaacatggagggaagcgcaacaagaaatccaatcttagagctgctccgcatcgtccctgctgctcatcgagctcgtggctggagcccgtgccgtttcctcaggagtattgttccgccaacaacctgggtgtatgaacacctcggcacagcgattgactatcacctccttaacggacctagagggagggcatccaaccgtttgatggggaaggctggaagacggcaagccgccggatcttgggaagatcctcaagcagacctacagcaagtttgacacaaactcgcacaaccatgacgcactgctcaaggaactacgggctgctctactgcttcaggaaggacatgggacaaggtcgaggacattcctgcgcatggtgcagtgccgcttctgtggagggcagctgttggcttctagggtgcccgagtagcatcctgtgagccgacccctccccagtgcctctcctggcccctggaaggtgccactccagtgcccaccagccttgtcctaataaaattaaggttgtatcatttcaaaaaaaaa

SEQ ID NO: 146293 - DNA, 654 bp, Homo sapiens; identical to SEQ ID NO: 144884
  misc_feature (1)...(654): n = a,t,c or g

SEQ ID NO: 146294 - DNA, 697 bp, Homo sapiens
  misc_feature (1)...(697): n = a,t,c or g
ccccgactcttctggtccccacagactcagagagaacccaccatggtgcttgtctcctgcccgacaagaccaacgtcataggccgcctgggggtaaggtcggcgcgcacgctggcgcagtatggtgcggaggccctggagaggatgttcctgtccttccccaccaaccaagacctacttcccgcacttcgaccttgagccacgggttttgcccaggtttaagggccacgggcaagaaggtggccgacgcgctgaccaaacgccgtggccaacgtgggacgacatgcccaaacggcgttgtccgccctgaagcgacctgcacgcgcacaagctttcgggtgggacccggttcaactttcaagctcctaaagccacttgccttgctgggtgacccctggcccggcccaccttccccggccgagttcaacccctggcggttgcaaggcttccttgggacaaagtttcctgggtttcttgttgaagcaccgttgcttgaaccttccaaataacgtttaaagcttggaagccttcgggttggccatgctttctttgcccctttgggcctttcccccagcccctcctcccctttcctgcacccgtacccccgtggtcttttgaataaaattttgaattgggggggcaaaaaaaaaaaaaaaaaaaagatctttnaatttaagggggcggaaagtttatttcaa

SEQ ID NO: 146295 - DNA, 444 bp, Homo sapiens
cttccaacttcagatctaactttggctacaacattccactaaaacatcttgcagacagagtggccatgtatgtgcatgcatatacactctacagtgctgttagaccttttggctgcagggttattggggctgtgccatcggcaaagccaggcaagctgcaaagacggaaatagagaagcttcagatgaaagaaatgacctgccgtgatatcgttaaagaagttgcaaaaataatttacatagtacatgacgaagttaaggataaagcttttgaactagaactcagctgggttggtgaattaactaatggaagacatgaaattgttccaaaagatataagagaagaagcagagaaatatgctaaggaatctctgaaggaagaagatgaatcagatgatgataatatgtaacatttactccagcatctattgtattgtaaatttct

SEQ ID NO: 146296 - DNA, 550 bp, Homo sapiens
tggggtagaaaaattagtcctttctaaactttatgaagaaggttccaacaaaagactttttaatgttgatcggcatgttggaatggcagtagcaggtttgttggcagatgctcgttctttagcagacatagcaagagaagaagcttccaacttcagatctaactttggctacaacattccactaaaacatcttgcagacagagtggccatgtatgtgcatgcatatacactctacagtgctgttagaccttttggctgcagaatttacatagtacatgacgaagttaaggataaagcttttgaactagaactcagctgggttggtgaattaactaatggaagacatgaaattgttccaaaagatataagagaagaagcagagaaatatgctaaggaatctctgaaggaagaagatgaatcagatgatgataatatgtaacatttactccagcatctattgtattttaaatttctactccagtccaatgtaactatttagccctggattatacatactgtccaattttcattaaatttttgtcttataact

SEQ ID NO: 146297 - DNA, 541 bp, Homo sapiens
ttgggttgattaggtatattcaacatttgtcgggagagtagatgtttcattttatttcagtccctgtgtaatttgtcttctctaatgttaaatactatgtagaatgtgtctgtgtaattttatagatacttttattatggatggacattctaatttgtactgactttgggtctgtgaactacttcaatgtttggaggttaccaaaatcttacctttcccttttctattctagaatttacatagtacatgacgaagttaaggataaagcttttgaactagaactcagctgggttgggtgaattaactaatggaagacatgaaattgttccaaaagatataagagaagaagcagagaaatatgctaaggaatctctgaaggaagaagatgaatcagatgatgataatatgtaacatttactccagcatctattgtattttaaatttctactccagtccaatgtaactatttagccctggattatacatactgtccaattttcattaaatttttgtcttataactaaaaaaaaaaaaaaaaaaa

SEQ ID NO: 146298 - DNA, 958 bp, Homo sapiens
ttttttttttttgagacggagtcttgctctgtcacccaggctggagggcagtggcaccatctctgctcactgcaacctctgcctccagggttcaagcgatcctcctgcctccgcctcccaagtagctgggattacaggaacatgccaccatacctggctacttttgtatttttggcttcaccaataatacagagacgggttttcaccaggctagtttcaaactcttgaactcacatgatctgcctactttggcccccgtaaagtgctgggattacaggcatgaacactgcaccaggcctcttaagtatatattctatcaaagatacagtcattgcatgttagagcaacatttgcttaattaactttgcttgggtatcttattctgaaactgttcattcagttacaagtagaggaatttaacccacttaaattccaggttgttgtagcttaacttgcccacaggtgtggcatataacaattttaaaaatcaattttaaacacctgttttctcttaacaggaatctctgaaggaagaagatgaatcagatgatgataatatgtaacatttactccagcatctattgtattttaaatttctactccagtccaatgtaactatttagccctggattatacatactgtccaattttcattaaatttttgtcttataactattgaagtttggttaatatctgctttacaaaattggtgggggtaaatgaggacatttactcagtattaaaatatagatttatgactactgaaaaattccctggttaaaatgctgcagaattaattccaagactgtagattaattcaaagccccatcttcatcactcaattagaatctacagatcatattctcctgggcatttgtacaaaaagcacctaccaacttagtggacaaatacctgatacggtttcccactttcatataaagtaactggtgctcgtgcc

SEQ ID NO: 146299 - DNA, 772 bp, Homo sapiens
gctagttgccttccctggtgtctatcgggacactgtataaagggaatccaatattaaaagtggcaactgattggctcttccattatcttgttcaaaaagaatttcccacaactgaaacctcctgattggatcccaaggatatgtaaaatcttctctcccatcctaatggatagtcaacatttgggggtggggaggggacgctcattattcccatcaatattaaattttgctgcttggatttttagtcctcgcttcagatcacttacaaagcaagtacgcgctttaatgtcctctaagacaccttccggaactgaacccatcactgagggaaggctctgttctttagcaacacttgtgtcaacagtacattgttccaatagttgagtttccaactctttgtgaagagcttttcctcctagggggtagtgctccccaacaatttagaactgggattccttcatatatgggtaacaccaggctttccctatatccacaatctaggaccatggcagaattaattccaagcgtcagaagagccattagatgacttggagcaagcaagacagatggaacctcaaaatatttgaaaagaacacgagtgagtgtctctctgaagtgagaaggacataataccgattcgataatcacaactcggcggtctctgggattcaccaatagatgcctgaaatatagtatgtggatgaattcctttaggtaggaatataattcttctgtattgatattatactgaacaactctgacaggcttaggc

SEQ ID NO: 146300 - DNA, 1378 bp, Homo sapiens
atggggtgtcgccctgttgggcaggctggtctcgaactcctgacctcagcgcgtacttgctttgtaagtgatctgaagcgaggactaaaaatccaagcagcaaaatttaatattgatgggaataatgagtgtccgatagacaccaggaagcaactagcagagaatttggtagtcataggtggcacttctatgttgccaggatttctccacagattgcttgcagaaataaggtatttggtagaaaaaccaaaatataaaaaagcacttggcactaagacatttcgaattcatactccacctgcaaaagctaattgtgtggcctggttgggagcaaggtctttgttgggatataacaggttcctgatgtttcagccatttagaggggaagaaactgtatggtcattactgccaaagatacaagcttactgttgcccttttctccttaagtatgacctgtcagcctctacattctctcctgacggaagagtttttcaagttgaatatgctatgaaggctgtggaaaatagtagtacagctattggaatcagatgcaaagatggggttgttcttggggtaagaaaaataagtcctttctaaactttatgaaagaagggttccaaacaaaaagacttttttaatgtttgatcggcaatgttggaatggccagtagcaggttttgttggcagatgctccgttctttagcagacatagcaagagaagaagcttccaacttcagatctaactttgggctacaccattccactaaaacatcttgcagacagagtggcccatgtatggtgccatgccatataccactctaccagtggctgttagacccttttggctgccagtttccatgttagggtccttacagtgtgaatgcacggtgcgacaactctaccatgattgaccccatccaggtgtttccataccggttaattggggctgtgccatcgggcaaaggccagggcaagcctggcaaagacggaaattagagaagccttcagatgaaagaaatgaccctgcccgtgatatcgttaaagaagttgcaaaaataatttacatagtacatgacgaagttaaggataaggccttttgaactagaacccagctggggttggtgaattaactaaatggaagacatgaaatttgttccaaaaagatataagagaagaagcagagaaatatgctaaggaatctctgaaggaagaagatgaatcagatgatgataatgtgtaabcymttactccagcatctattgtatcctaaacttctactccacgtccaatgtaactatttagccctggattatacatactgtccaattttcattaaatttttgtcttataactataaaaaaaaaaaaaaaaaaaaaacg

SEQ ID NO: 146301 - DNA, 1086 bp, Homo sapiens; identical to SEQ ID NO: 139525

SEQ ID NO: 146302 - DNA, 1170 bp, Homo sapiens
cggacgcgtgggcgggaggagtgtgacccaagtgccgcttcctctcgccgccgagggtcaagagcccgggagcgcgaccctcccccggcccggcctggcccggcctggccagtccccgcggtctctgcccgggctgacgcccaggaatgtggtcgacgagaagccccaacagcacggcgtggcctctcagcctcgagcctgatccggggatggcctctgcctccaccacaatgcatactaccaccattgcagagcctgatccaggggtttcctggattgccggaatggcagaatggaaacccccaccccccacccataattgacaatggtcgtcatggcagggtgtgatgtcgtgctgtgccaatcgtcctagtctccctcctcttcagtcatgctgcgctacatgtaccggcacaagggcacgtaccacaccaaatgaggccaagggcacggagtttgctgagagtgcagatgcagccctgcagggacgaccctgccctcctaagatgctggtgatagcagcagaaaaggagtactttatttgagggacaacagacttaactttccttgaatgccttcccccatcttccatcaggaaaaatacaaccccaatcgccccagcaccccctgctggataccacccagacagagagagagagtacacttgatttcttcccgagatagcccacctgggaaacactaaggtgccctgccccccagggaggaaacggaaggaaggaactccgcgcctacaaagaggcccacttcccccagggaccccccagggaaggccgaatggcccaccccccagaggcccacccttttgcctcccacggaggtggggaagaaaatcttggggcactatggggccccctagggcagtgcaggacaacatcagctcactggcaggacaacatcagctcactggcaggaaagtccttgtttgagggttgagggggttcttgggttacccgggggctggggaagcaaggaaataagtcatctgtatgctgactggggataatggcatcaaatgtcagtccttgacatttggggggaacagcaggtgccagagctaaaaggtacctttgtctacacattgatccagctcagaacgaattggaaataaatttgaaatgtaaccgagcaaaaaaaaaaaaaaaaaaaaga

SEQ ID NO: 146303 - DNA, 569 bp, Homo sapiens
agctcctagtccagacgccatgggtcatttcacagaggaggacaaggctactatcacaagcctgtggggcaaggtgaatgtggaagatgctggaggagaaaccctgggaaggctcctggttgtctacccatggacccagaggttctttgacagctttggcaacctgtcctctgcctctgccatcatgggcaaccccaaagtcaaggcacatggcaagaaggtgctgacttccttgggagatgccataaagcacctggatgatctcaagggcacctttgcccagctgagtgaactgcactgtgacaagctgcatgtggatcctgagaacttcaagctcctgggaaatgtgctggtgaccgttttggcaatccatttcggcaaagaattcacccctgaggtgcaagcttcctggcagacgatagtgactggactgggcaatgccctgtgcttcacaaaacacttggacttcatgtgcatgatgcaaagcttcaaggaatagcttattctgcagcactcaaatatacatctatctgctagagatcacgtgaactgcaagaaaaacgcctttt

SEQ ID NO: 146304 - DNA, 715 bp, Homo sapiens
aattttgccctcgaggccaagaattcggcgagggcaataagctcctagtcccagacgcccatggggtcatttcacagaggaggaccaaggcttactatccacaagcctgtggggcaaaggtgaaatgtggaaaaaatgctgggaaggaagaaacccctgggaaaggctccctggttgtcctaccccatggacccccagaggttcctttgaacagctttggcaaccttgtccttctgccttcttgcccatccatgggcaaacccccaaagtccaaggcaccatggcaaagaaggtgctgacttcccttgggagatgcccataaagcaccctggatgatctcaagggcacctttgcccagctgacgtgaactgcactgtgacaagctgcatgtggatcctgagaacttcaagctcctggggaaatgtgctggtgaccgtttttggcaatccattttcggcaaagatttcacccctggaggttgcagggcttcctgggcagaagatgggtgactgcaagtggccagtgccctgttcctccaggataccactgagctcactggcccatgatgcagagcttttcaaggataaggcttttattcttgcaagcaattacaaataataaatctatttctgctaagagatcacacatgattttcttcagctcttttttttacatctttttaaatatatgagccacaaagggtttatattgagaa

SEQ ID NO: 146305 - DNA, 381 bp, Homo sapiens; identical to SEQ ID NO: 145177
  misc_feature (1)...(381): n = a,t,c or g

SEQ ID NO: 146306 - DNA, 533 bp, Homo sapiens; identical to SEQ ID NO: 145233

SEQ ID NO: 146307 - DNA, 558 bp, Homo sapiens
tgatctcaaggatgtatggaaaaataattctttgtattactattgtcagaaattgtgagcatatcagcattaagtaccactgaggtggcaatgcacacttcaaccctccttccttcaagtcacaaaagagttacatcctcatccacagacaaatggagaaacggggacaacttgtcccatcgtttcactgtacccagctccctgtagtgataatactcattattttgtgtgtgatggctggtattattggaacgatcctcttaatttcttactgtattcgatgactgataaaggcatgaggatgtggcctgcatgctgcctgatcttgcctaggaaccagctgcacctgctgttctcttgcttatgcaaactgggctgcacctggctattccttttgcttatgcccctacccctgggctatcctaaattccctgttctcctggccttcactgattactggtattctctacttctaaataaaaataaaacaaaatacaaaaaaaattttaaaaaaaaaaaaaaaaaaaaagatctttaattaagcggtcgcaagcttat

SEQ ID NO: 146308 - DNA, 778 bp, Homo sapiens
  misc_feature (1)...(778): n = a,t,c or g
ttttttttttttcacagcggtttcaggctttattaacaatacggagtaaaaaaccagacggatctggaggaagggacagggctgcccgtctcagctctcaaccttcccagagaggggccaggcctggcagccctgtgcgtcgcgcctcctaagcagtcaaccttgtcccctccaaggacaggcatctgacccaatccaggtcccagggaggcggagtcgcaaaccctaactctggggtgtattctgctcggccctcctctccccctccccagatagctctcccagcctggggcaccggacagccacagactttgcagacatcacccggggaaggtttctcagtgcagacaggagctgaggtaggggttgggagaggctgacctcgaagaaggcccccgagggccaggcaaggaaaaggagttcattccactctgaagaagctcaaacactacagatttcacattgctgacgggttggacagaggccaggctcctcccctcggcaggcctctgtttctgggcccagggtggttgaggactcactgagggagagcaggtaaaagaacccgcagacagtaggcgatcatccaggtgctggcgcccctccctcctcccctgccctggctgtcagtctgtagcttcacaggtctttgctgaattccctcaccagcgtgtagcccaggcagccccagcccccctcggcgtggtagccacagccctccggacgcgtgggtcgacccgnnngnccngccgatgcgatgatccaaaannnntgcccc

SEQ ID NO: 146309 - DNA, 569 bp, Homo sapiens
cgtctgcctcctttgtcctggatttgggagttgagctccttcgtcgccattggctttcctcccccagctccagcctctctcatcttgggaatctgcgtcagaagtcactcgcagtcccgtctgcccagaagacgtaaagcaggctaccagcaattttgagaacttgcaaaaacagcttgcaaggaaaatgaagcttcctattttcatagcagatgcattcacagcaagagcatttcgtgggaatcctgctgctgtttgcctcctagaaaatgaattggatgaagacatgcatcagaaaattgcaagggagatgaacctctctgaaactgcttttatccgaaaactgcacccgacagacaactttgcacaaagttcctgctttggactgagatggtttacaccagcgagtgaggtcccactctgtggccatgccaccctggcttctgcagctgtgctgtttcacaaaataaaaaacatgaatagcacgctcacgtttgtcactctgagtggagaactaagggccagacgagcagaggacggcatcgtcctggacttgcctctttatccag

SEQ ID NO: 146310 - DNA, 2656 bp, Homo sapiens
atggaatactacacagccattgaaatgaataaaatcatgtctcttgcagcaacatggatgcagatgaaggccatcatactaggttacacttccaggggctcccccactcagtccccagtcatctatcgacagtgagctgagtactttcagaagttggaggatgattctatctccagtgggatataaattacaggaccgtcactgatgttcagatcatggctcgtctgcaagaagaaagtctcaggcaagattatgcttctacttcagcatctgtatcaagacatagttccagtgtgtcattgagttcaggaaaaaaagggacatgtagtgatcaagaatatgaccaatacagtctggaggatgaagaggaatttgatcatttgccaccacctcagcctcgtcttccaagatgttcccctttccaaagaggaattccccattcacagactttctccagcattcgggagtgtaggaggagccccagttcccagtattttccttcaaataattaccagcagcaacagtattattcacctcaagcccaaacttccagattcagcaaccaaataggaccaatggagatgtcactaagaaaattcatgattcattggagagctccaaaatatcaacattaaaagggaatttggaaagaggttattttcaaccctcctggatgactttgaggggtgtgagacttcagttggaggaagtacctgcagatattgtagaaatagcaagagaactagaattagaagtggagcctgaagatgtgactgaattcctgcaatctcatgatcaaactttagcagatcagaagttgcttcttatggctgagcaaagaaagtggtttcttgaaatggaaactactcctggtggagatgctatgaacattgttgaaataacaataaacaatttagagtataacataaactttgttgataaaggagcagcaggatttgagaggattgattctaattttgaaagaagttctactgcggaatgggtaactgtaaaacagactcaggcacatccttcaggtggtattcaagaaggcattgttatcataagagatggctccaggccttatactacccctgaacaccttccagtgcgaccaaatgtggaggaggaagacagtgacattgatgaatctagccctttctttttgaggaactactacaaagcggcacattcgtttattggtcggattaggtttaaacactccacatctttgctcagggaagcattctatatcatcacctccaaagagttctttagcgccatcaggaaactggcaagtagcccagaaaaggggaaagggggcattattttcacagcaatcaacccattcacaagatccattaatgaaatctacaaaatacaaaggaggaggggaaaagaaaggcaattaaatgattgcgtccataggtctgatgatgcgaataaaggcccggaatcgctcggctcggcaggatcgggtcagagccatgatgtagctcagggccatctgcagggtcttgtacttggacagctttttatcctggccccactggggaagtttcacccggaagaagacgtaaagcaggctaccagcaattttgagaacttgcaaaaacagcttgcaaggaaaatgaagcttcctattttcatagcagatgcattcacagcaagagcatttcgtgggaatcctgctgctgtttgcctcctagaaaatgaattggatgaagacatgcatcagaaaattgcaagggagatgaacctctctgaaactgcttttatccgaaaactgcacccgacagacaactttgcacaaaaaaacatgaatagcacgctcacgtttgtcactctgagtggagaactaagggccagacgagcagaggatggcatcgtcctggacttgcctctttatccagcccacccccaggacttccatgaagtagaggacttgataaagactgccataggcaacacactggtccaggacatctgttattctccagatacccaaaagctcctcgtccgcctcagtgacgtttacaacaggtcgtttctgggagaacctggaaagttgaacacggagaatctgctgcaagttgaaaacacagggaaggtgaaagggcttattcttacccttaaaggagagcctggtgggcagacccaagcatttgacttttactcaagatattttgcaccgtgggttggtgtggctgaagacccagtgacagggtctgcacacgctgttctcagcagctactggtcccagcatctggggaagaaagaaatgcatgcttttcagtgttcccaccgagtgaggagagctgggaatttcccttcgtccagacgtgaagggttgacattagaggatgtgcacctgttgttttagagggcacactgacagcctataggtggttatgctgtgacgctgctgtgtctaaccaccaagtattttctgcttaaaaagaaatgtaaggggctgcctttaccaaatgtgcgtagtagtctacttaatcctcatgttaaaaatcgaaaaatgggccaggcgcagtggctcatgcctgtaatcgtagcactttgagaggccaaggtgggtggatcacctgaggtcaggggttcgacaccagcctggccaacatggtgaaacctcgtctctataaaa

SEQ ID NO: 146311 - DNA, 1506 bp, Homo sapiens
atggagtttcgtcatgttggccaggctgatctcgaactcctgacctcaggtaaaaatccagaggtaagtcatccaggctggtacatagctcttctccatgaagcctggtgccccaaccccttcttcatgggccaagatggagctctagtcagcacatctaagtcccaagaacaggatggagaaacagagctagaagaggacaaagaggctagggtgtggccatgtcaaaaaagcgaaaacaacaatatttgttaccactgctggatgaacagggccatcaaaaatgggaaacattttgaaaacatgttgaaacccatttatcagccttttgaccactgcagaaatagtttaagaaatcaagaatgtgaacattccggaaaggcgagggtcagctgccggggcgacgcggcgcggagagggcgggcgggggggctgtgggagcgccggtctctatatggcggcggctctgtcgggcctggctgtccgctctcgcgctcggccgccgcccgctcctatggggtcttctgcaaggggctgactcgcacgctgctcatcttcttcgacctggcctggcggctgcgtatcaacttcccctacctctacatcgtggcttccatgatgctcaacgtccgcctgcaggtgggctgtgtggaaatccgggggtttgtttctgctacctccagtctgatcatttgggccatgagcacaggtcaggcagccctgacgtatgagaaccagcctggcactcgcagcttcgccctggtggaggtgttactattgaatagaataatctcgcagaacactaacatcagagaaggtcacctgtgtgactgtgctgaaataggaccaaaaggaaaaattggacagaagaagaaccggacacagcacggctccaagtctgtcactagggtactacgggcggtcacgaaaacaagaccggtggtaaatcaaatcgagttccgaacaaccttcacactgggaactaaacttgatcttagggatgataaagacacgatcgagaaactgaaggagaagaagctgactcccatcacctatccgcagggtctagccatggctaaggagattggtatggaatcctgtgtttttcctcctccttgtacctcttttattgtagtgacagagactggagtccagtctgggaaaggagggtgtgtgtctcccactcagggcctggtgtactcttggggaaccagctggcaaggccctgtgggtcttaacgtcagcgttggaaggtggaagcagggctgggagccggcagaaggcgcccgggccccaggagctgcctcccgctggtggtgtgatcagaagagagtggggtcgagtgtacattgccgtgtggtcgtgtttcctgtaggtgctgtaaaatacctggagtgctcggcgctcacacagcgaggcctcaagacagtgtttgacgaagcgatccgagcagtcctctgcccgcctcccgtgaagaagaggaagagaaaatgcctgctgttgtaa

SEQ ID NO: 146312 - DNA, 692 bp, Homo sapiens
atgcaggccatcaagtgtgtggtggtgggagacggagctgtaggtaaaacttgcctactgatcagttacacaaccaatgcatttcctggagaatatatccctactgtctttgacaattattctgccaatgttatggtagatggaaaaccggtgaatctgggcttatgggatacagctggacaagaagattatgacagattacgccccctatcctatccgcaaacagttggagaaacgtacggtaaggatataacctcccggggcaaagacaagccgattgccgatgtgttcttaatttgcttttcccttgtgagtcctgcatcatttgaaaatgtccgtgcaaagtggtatcctgaggtgcggcaccactgtcccaacactcccatcatcctagtgggaactaaacttgatcttagggatgataaagacacgatcgagaaactgaaggagaagaagctgactcccatcacctatccgcagggtctagccatggctaaggagattggtgctgtaaaatacctggagtgctcggcgctcacacagcgaggcctcaagacagtgtttgacgaagcgatccgagcagtcctctgcccgcctcccgtgaagaagaggaagagaaaatgcctgctgttgtaaatgtctcagcccctcgttcttggtcctgtcccttggaacctttgtacgctttgctc

SEQ ID NO: 146313 - DNA, 2444 bp, Homo sapiens
  misc_feature (1)...(2444): n = a,t,c or g
ctgcagttttcctcagctttgggtggtggccgctgccgggcatcggcttccagtccgcggagggcgaggcggcgtggacagcggccccggcacccagcgccccgccgcccgcaagccgcgcgcccgtccgccgcgccccgagcccgccgcttcctatctcagcgccctgccgccgccgccgcggcccagcgagcggccctgatgcaggccatcaagtgtgctggtggttggaaagccgaagctgtagggtaaaactttgcctactgatccagttacacaacccaatgccatttcctgggagaatatatccctactgtctttgacaatttattctgcccaatgttatggtagatggcaaaaccggtgaaatctggggcttatgggatacagctgttcaagaagattatgacagagttacgcccccctatccctatccggcaaggcagatgtgttcttattttggttttccctttgtgagtcctgcatcatttgaaaatgtccgtgcaaagtggtatctgaacgtgcgacaccactgtcccaaccactccaaatcatcctagtgggaactaaacttgatcttagggatgataaagacacgatcgagaaactgaaggagaagaagctgactctccatcacctatccgcagggtctagcccatggctaaggagattggtgctgtaaaatacctgggagtgctcggcgctcacacagcgaggcctcaagacagtgtttgacgaagcgatccgagcagtcctctgcccgcctcccgtgaagaagaggaagagaaaatgcctgctgttgtaaatgtctcagccccctcgtttcttgggtcctgtccccttggaacctttgtaacgctttgctcaaaaaaaaacaaaaaaaaaaaacaaaaaaaaaaaaacaacggtggagccttcgcactcaatgccaactttttgttacagattaatttttccataaaaccattttttgaaccaatcagtaattttaaggttttgtttgttctaaatgtaagagttcagactcacattctattaaaatttagccctaaaatgacaagccttcttaaagccttatttttcaaaagcgccccccccattcttgttcagattaagagttgccaaaataccttctgaactacactgcattgttgtgccgaggaacaccgagcactggaactttgcaaaagaccttcgtctttgaggaagacgggtagctttctgcagttagggagggtgcaggacactttgcttttcctattgtaggtttctccaggatgcgttaaagcaggaacagcctcccgaatggaggcgttggccattggaacttcaccagtgagttaggcaggcacgtgtttcccgacattaaccttgtactgtaatggagtgagcgtanacgcctccagctctttgggatcagtctttgtggatttcatagcggagttttctgaccagcttttgcgggagattttgaacagaactggctatttcctctaatgaagaattctggtttagctgtggggtgtgccgggtggggtgtggtggtggatcaaaggacaaagacagtaattttggaacaaaatacgaagtgggaagatttaccactaccattggtacaagggaatgaaagtggtcacgggggtaaaaactcctaaaagggttaatttctggtccaatgcagtagatgatgaaagaaaggtgggattatccaggaaatggtttcttaagccttttcctttctcttacaccctgccatgcctccccaaattgggcatttaattcatctttaaactggttgttctgttagtcgctaacttagtaagtgcttttcttatagaaccccttctgactgagcaatatgcctccttgtattataaaatctttctggataatgcattagaaggttttttttgtcgattagtaaaaagtgctttcccatgttaccttattcagaagctaataaggggctttccttagttttctagtaactaggtgtaaaaaatcntggtggttgcagcctttatagtttttaaaataattttaggataaattccttaaacctatgaacccttccttaaccatcactgtcttggcccagattacccgacactggtcaccttgacccaatactgacccctctttaccctcgccccacgcgggacacacgcctcctggtagtcgctttgccctattgatggttcctttggggtctgtgagggttctgtaaaactgtgctaggtgctggacgatgtttctgttacaacttaactcactggcgagaatacagcgtggggacccttcagccactacaacagaattttttaaattgacagttgcagaattgtggagtgtttttacattgatcttttgctaatgcaattagcattatgttttgcatgtatgacttaatacatccttgaatcataggaaaaactaacttaaag

SEQ ID NO: 146314 - DNA, 967 bp, Homo sapiens
cgcccacgcgttcgggccggcgcggagaatatgatgttttctgcagctgctcgcctgtctccgtgggaagggagcccaagctttgcagagaacatgaacgattggatgcccatcgccaaaggagtatgatccactcaaagcgggcagcattgatggcaccgatgaagacccacacgaccgcgcggtctggagggccaatgctggcacgatatgtccccaacaaaggtgtcataggagatcccctccctcaccctgtttgtggccagactaaacttgcaggaccaaggagggccaaataaaaggaagtctcttccccgctatggtgacatccggcggcttcggctggtcagggacttggtcacaggtttttcaaaggggctacgccttcatcgaatacaaggaggagcgtgccgtgatcaaagcttaccgagatgctgatggcctggttattgaccagccatgagatatttgtggactacgagcctggaaaggactctcaaagggtggatccctcggcgacttgtgaggcggtctatgggggaaaaaaggagtctgggccaactagaatttgggggacgggaccgggccttttcgaaaaccctattaacttgccagttgttaaaaacgacctctatagagagggaaaccgggaaaaggcgggagcgatctcgatcccgagaaagacactgggactcgaggacaagggatcgagaccatgacaggggccgggagaagagatggcaagaaagagagccgatcagggtgtggcccgacaatgacttggaggagagagagggacttcagagatgacaggatcaaggggagggagaagaaggaaagaggcaagtagaggcccaacagcagaaccccaaagtgaagttacagtggaaatgagtggagggggattgtctttcaacgcagcgtgagtttaatggttgaataaaacttactgatgatcaaaaaaaaa

SEQ ID NO: 146315 - DNA, 3752 bp, Homo sapiens
  misc_feature (1)...(3752): n = a,t,c or g
aggaaggaagcaaagggacaaaaccacctccagcagtttctacaaccaaaattccacctataacaaatatttttcccctgccagagagattctgtgaagcattagactccaaggggataaagtggcctcagacacaaaggggaatgatggttgaacgaccatgccctaagggaacaagaggaactgcctcatatctctgcatgatttccactggaacatggaaccctaagggccccgatcttagcaactgtacctcacactgggtgaatcagctggctcagaagatcagaagcggagaaaatgctgctagtcttgccaatgaactggctaaacataccaaagggccagtgtttgctggggatgtaagttcttcagtgagattgatggagcagttggtggacatccttgatgcacagctgcaggaactgaaacctagtgaaaaagattcagctggacggagttataacaagctccaaaaacgagagaagacatgcagggcttaccttaaggcaattgttgacacagtggacaaccttctgagacctgaagctttggaatcatggaaacatatgaattcttctgaacaagcacatactgcaacaatgttactcgatacattggaagaaggagcttttgtcctagctgacaatcttttagaaccaacaagggtctcaatgcccacagaaaatattgtcctggaagttgccgtactcagtacagaaggacagatccaagactttaaatttcctctgggcatcaaaggagcaggcagctcaatccaactgtccgcaaataccgtcaaacagaacagcaggaatgggcttgcaaagttggtgttcatcatttaccggagcctgggacagttccttagtacagaaaatgcaaccattaaactgggtgctgattttattggtcgtaatagcaccattgcagtgaactctcacgtcatttcagtttcaatcaataaagagtccagccgagtatacctgactgatcctgtgctttttaccctgccacacattgatcctgacaattatttcaatgcaaactgctccttctggaactactcagagagaactatgatgggatattggtctacccagggctgcaagctggttgacactaataaaactcgaacaacgtgtgcatgcagccacctaaccaattttgcaattctcatggcccacagggaaattgcatataaagatggcgttcatgaattacttcttacagtcatcacctgggtgggaattgtcatttcccttgtttgcctggctatctgcatcttcaccttctgctttttccgtggcctacagagtgaccgaaatactattcacaagaacctttgtatcaaccttttcattgctgaatttattttcctaataggcattgataagacaaaatatgcgattgcatgcccaatatttgcaggacttctacactttttctttttggcagcttttgcttggatgtgcctagaaggtgtgcagctctacctaatgttagttgaagtttttgaaagtgaatattcaaggaaaaaatattactatgttgctggttacttgtttcctgccacagtggttggagtttcagctgctattgactataagagctatggaacagaaaaagcttgctggcttcatgttgataactactttatatggagcttcattggacctgttaccttcattattctgctaaatattatcttcttggtgatcacattgtgcaaaatggtgaagcattcaaacactttgaaaccagattctagcaggttggaaaacattaagtcttgggtgcttggcgctttcgctcttctgtgtcttcttggcctcacctggtcctttgggttgctttttattaatgaggagactattgtgatggcatatctcttcactatatttaatgctttccagggagtgttcattttcatctttcactgtgctctccaaaagaaagtacgaaaagaatatggcaagtgcttcagacactcatactgctgtggaggcctcccaactgagagtccccacagttcagtgaaggcatcaaccaccagaaccagtgctcgctattcctctggcacacagagtcgtataagaagaatgtggaatgatactgtgagaaaacaatcagaatcttcttttatctcaggtgacatcaatagcacttcaacacttaatcaaggaatgactggcaattacctactaacaaaccctcttcttcgaccccacggcactaacaacccctataacacattgctcgctgaaacagttgtatgtaatgccccttcagctcctgtatttaactcaccaggacattcactgaacaatgccagggatacaagtgccatggatactctaccgctaaatggtaattttaacaacagctactcgctgcacaagggtgactataatgacagcgtgcaagttgtggactgtggactaagtctgaatgatactgcttttgagaaaatgatcatttcagaattagtgcacaacaacttacggggcagcagcaagactcacaacctcgagctcacgctaccagtcaaacctgtgattggaggtagcagcagtgaagatgatgctattgtggcagatgcttcatctttaatgcacagcgacaacccagggctggagctccatcacaaagaactcgaggcaccacttattcctcagcggactcactcccttctgtaccaaccccagaagaaagtgaagtccgagggaactgacagctatgtctcccaactgacagcagaggctgaagatcacctacagtcccccaacagagactctctttatacaagcatgcccaatcttagagactctccctatccggagagcagccctgacatggaagaagacctctctccctccaggaggagtgagaatgaggacatttactataaaagcatgccaaatcttggagctggccatcagcttcagatgtgctaccagatcagcaggggcaatagtgatggttatataatccccattaacaaagaagggtgtattccagaaggagatgttagagaaggacaaatgcagctggttacaagtctttaatcatacagctaaggaattccaaggggccacatgcgagtatttaataaataaagacaccattgggcctgacgcagctccctcaaactctgcttgaagagatgactcttgacctgtggttcctctggtgtaaaaaagatgactgaaccttgtcagttctgtgaatttttataaaacatacaaaaactttgtatatacacagagtatactaaagtgaattatttgctacaaagaaaagagatgccagccagggtattttaaggattctgctgctgtttaggaggaaattgtggaaacaaggcaaaacaaaactttccagccattttactggcngcagtctgtgaactaaatttgtaaatatggctgcaccatttttgtaggcctgcattgtattatatacaagacgtaggctttaaaatcctgtgggacaaatttactgtaccttactattcctgacaagacttggaaaagcaggagagatattctgcatcagtttgcagttcactgcaaatcttttacattaaggcaaagattgaaaacatgcttaaccactagcaatcaagccacaggccttatttcatatgtttcctcaactgtacaatgaactattctcatgaaaaatggctaaagaaattatattttgttctattgctagggtaaaataaatacatttgtgtccaactgaaa

SEQ ID NO: 146316 - DNA, 4719 bp, Homo sapiens
aactgtgttctatgtggatccagcattacaactgataagggtatttatggcacaatgaaaaattcatctttcccagaatgatatgaagatcaatgatgcagactgatggttttgatgaagctgggcatttataactagattcattaaggaatacaaagaaaatacttaaagggatcaataatggtgtcttctggttgcagaatgcgaagtctgtggtttatcattgtaatcagcttcttaccaaatacagaaggtttcagcagagcagctttaccatttgggctggtgaggcgagaattatcctgtgaaggttattctatagatctgcgatgcccgggcagtgatgtcatcatgattgagagcgctaactatggtcggacggatgacaagatttgtgatgctgacccatttcagatggagaatacagactgctacctccccgatgccttcaaaattatgactcaaaggtgcaacaatcgaacacagtgtatagtagttactgggtcagatgtgtttcctgatccatgtcctggaacatacaaataccttgaagtccaatatgaatgtgtcccttacatttttgtgtgtcctgggaccttgaaagcaattgtggactcaccatgtatatatgaagctgaacaaaaggcgggtgcttggtgcaaggaccctcttcaggctgcagataaaatttatttcatgccctggactccctatcgtaccgatactttaatagaatatgcttctttagaagatttccaaaatagtcgccaaacaacaacatataaacttccaaatcgagtagatggtactggatttgtggtgtatgatggtgctgtcttctttaacaaagaaagaacgaggaatattgtgaaatttgacttgaggactagaattaagagtggcgaggccataattaactatgccaactaccatgatacctcaccatacagatggggaggaaagactgatatcgacctagcagttgatgaaaatggtttatgggtcatttacgccactgaacagaacaatggaatgatagttattagccagctgaatccatacactcttcgatttgaagcaacgtgggagactgtatacgacaaacgtgccgcatcaaatgcttttatgatatgcggagtcctctatgtggttaggtcagtttatcaagacaatgaaagtgaaacaggcaagaactcaattgattacatttataatacccgattaaaccgaggagaatatgtagatgttcccttccccaaccagtatcagtatattgctgcagtggattacaatccaagagataaccaactttacgtgtggaacaataacttcattttacgatattctctggagtttggtccacctgatcctgcccaagtgcctaccacagctgtgacaataacttcttcagctgagctgttcaaaaccataatatcaaccacaagcactacttcacagaaaggccccatgagcacaactgtagctggatcacaggaaggaagcaaagggacaaaaccacctccagcagtttctacaaccaaaattccacctataacaaatatttttcccctgccagagagattctgtgaagcattagactccaaggggataaagtggcctcagacacaaaggggaatgatggttgaacgaccatgccctaagggaacaagaggaactgcctcatatctctgcatgatttccactggaacatggaaccctaagggccccgatcttagcaactgtacctcacactgggtgaatcagctggctcagaagatcagaagcggagaaaatgctgctagtcttgccaatgaactggctaaacataccaaagggccagtgtttgctggggatgtaagttcttcagtgagattgatggagcagttggtggacatccttgatgcacagctgcaggaactgaaacctagtgaaaaagattcagctggacggagttataacaaggcaattgttgacacagtggacaaccttctgagacctgaagctttggaatcatggaaacatatgaattcttctgaacaagcacatactgcaacaatgttactcgatacattggaagaaggagcttttgtcctagctgacaatcttttagaaccaacaagggtctcaatgcccacagaaaatattgtcctggaagttgccgtactcagtacagaaggacagatccaagactttaaatttcctctgggcatcaaaggagcaggcagctcaatccaactgtccgcaaataccgtcaaacagaacagcaggaatgggcttgcaaagttggtgttcatcatttaccggagcctgggacagttccttagtacagaaaatgcaaccattaaactgggtgctgattttattggtcgtaatagcaccattgcagtgaactctcacgtcatttcagtttcaatcaataaagagtccagccgagtatacctgactgatcctgtgctttttaccctgccacacattgatcctgacaattatttcaatgcaaactgctccttctggaactactcagagagaactatgatgggatattggtctacccagggctgcaagctggttgacactaataaaactcgaacaacgtgtgcatgcagccacctaaccaattttgcaattctcatggcccacagggaaattgcatataaagatggcgttcatgaattacttcttacagtcatcacctgggtgggaattgtcatttcccttgtttgcctggctatctgcatcttcaccttctgctttttccgtggcctacagagtgaccgaaatactattcacaagaacctttgtatcaaccttttcattgctgaatttattttcctaataggcattgataagacaaaatatgcgattgcatgcccaatatttgcaggacttctacactttttctttttggcagcttttgcttggatgtgcctagaaggtgtgcagctctacctaatgttagttgaagtttttgaaagtgaatattcaaggaaaaaatattactatgttgctggttacttgtttcctgccacagtggttggagtttcagctgctattgactataagagctatggaacagaaaaagcttgctggcttcatgttgataactactttatatggagcttcattggacctgttaccttcattattctgctaaatattatcttcttggtgatcacattgtgcaaaatggtgaagcattcaaacactttgaaaccagattctagcaggttggaaaacattaagtcttggggtgcttggcgctttcgctcttctgtgtcttcttggcctcacctgggtcctttggggttgctttttattaatgagggagactattgtggatgggcatatctctttcacttatatttaattgctttccagggggagtgttccattttccatctttccactgtgctctcccaaaaggaaaggtacgaaaaagaattatggcaaagtgccttcaagacacctccatactgcctgtggaggccctccccaacctgagagtccccccacagttcagtgaaggcatcaacccacccagaacccagtgctcgctattccctctggcacacagagtccgtataagaagaatgtggaatgatactgtgagaaaacaatcagaatcttcttttatctcaggtgacatcaatagcacttcaacacttaatcaaggacattcactgaacaatgcccagggatacaagtgccatggatactctaccgctaaatggtaattttaacaacagctactcgctgcacaagggtgactataatgacagcgtgcaagttgtggactgtggactaagtctgaatgatactgcttttgagaaaaatgatcatttcagaattagtgcacaacaacttacggggcagcagcaagactcacaacctcgagctcacgctaccagtcaaacctgtgattggaggtagcagcagtgaagatgatgctattgtggcagatgcttcatctttaaatgcacagcgacaacccaggggctgggagctccatcacaaaggaactcgaggcaccactttattcctcagcggactcactcccttctgtaccaaccccagaagaaagtgaagtccgagggaactgacagctatgtctcccaactgacagcagaggctgaagatcacctacagtcccccaacagagactctctttatacaagcatgcccaatcttaggagactctccctatccggagagcagccctgacatggaagaagacctctctccctccaggaggagtgagaatgaggacatttactataaaagcatgccaaatcttggagctggccatcagcttcagatgtgctaccagatcagcaggggcaatagtgatggttatataatccccattaacaaagaagggtgtattccagaaggagatgttagagaaggacaaatgcagctggttacaagtctttaatcattacagctaagggaattccaaggggccacatgcgagtatttaataaataaaggacaccattgggccttgacgcagctccctcaaactctgcttgaagagatgactcttgacctgtggttctctggtgtaaaaaagatgactgaaccttgcagttctgtgaatttttataaaacatacaaaaactttgtatatacacagagtatactaaagtgaattatttgttcaaagaaaagagatgccagccaggtattttaagattctgctgtttagagaaattggga

SEQ ID NO: 146317 - DNA, 506 bp, Homo sapiens
  misc_feature (1)...(506): n = a,t,c or g
gccaaattttctgcntacatcaagaattcaaaccaggcactcaatgacaatctggagaagggactctngaaagccctgttgccaaagttacacatagtacaggtggtgtgtaagaagtaccggggattcaccatccccgaggccttccggggagtgcatcggtacttgagcaatgcctacgcccgggaagaattcgcttccacctgtccagatgatgaggagatcgagctcgcctatgagcaagtggcaaaggccctcaaataagcccctcctgggactccctcaaccccctccattttctccacaaaggccctggtggtttccacattgctacccaatggacacactccaaaatggccagtgggcagggaatcctggagcacttgttccgggatggtgtggtggaagaggggatgagggaaagaaatggggggcctgggtcagatttttattgtggggtgggatgagtaggacaacatatttcagtaataaaatacagaataaaa

SEQ ID NO: 146318 - DNA, 1297 bp, Homo sapiens
tgggagcccgggataggaccgagctggaggagctgggtgtggggtgcgttgggctggtggggaggcctagtttgggtgcaagtaggtctgatttgagcttgtgttgtgctgaagggacagccctgggtctaggggagagagtccctgagtgtgagacccgccttccccggtcccagcccctcccagttcccccagggacggccacttcctggtccccgacgcaaccatggctgaagaacaaccgcaggtcggaattgttcgtgaaggctggcagtgatggggccaagattgggaactgcccattctcccagagactgttcatggtactgtggctcaagggagtcaccttcaatgttaccaccgttgacaccaaaaggcggaccgagacagtgcagaagctgtgcccaggggggcagctcccattcctgctgtatggcactgaagtgcaccccagacacaacaaagattgaggaatttctggaggcagtgctgtggccctcccagggtaccccaagcctggcagctctgaaccctgaggtccaacacagctggggctgggacatatttgccaaatttttcttgcctaacattcaagaatttcaaaccccagcactcaattgacaatctgggagaaggggattccttgaaagcccctgaaaggttttagacaattacttaaccatcccccccttccccagaagaagtggatgaaaccagttgctgaaagattgaaggtgtctctcaagaggaagttttttggatggccaacgaaggcctcacccctggcttgacttgcaaacctgttgcccaaaagttacacattaagtacaggtggttgtgtaaaagaaagtaaccggggaattcaccccatcccccgaaggccttcccggggaagtgccatcgggtaccttgaagcaaaatgccctacgccccgggaaagaattcgccttcccaccctgtcccagatgatgaggagatcgagcttcgccctatgagcaaagtggcaaaggcccttcaaataagcccctccctgggactcccctcaaccccctccattttctccacaaaggcccctggtggtttccacattgctaccccaatgggacacactccaaaattggccagtgggcagggaatcctgggagatattgaaccggcgaagggtgtggtggaagaggggatgagggaaagaaatggggggcctgggtcagatttttaattgtggggtgggatgacgtaggacaacatattacaagtaataaaatacagaataaaaatcaagtgtttttaaaaaaaa

SEQ ID NO: 146319 - DNA, 381 bp, Homo sapiens
ggcacgaggaattttatgaaattttaaaggaatactagctgtctgtgaaaatggaagagggaatactaccctgttcactttatgaaaccactataactgacagcaaaacctgacaagggtaatatatcaagatttcagactagtatttctcattaacctaaatgcatatattcttaagaaaatgttggtaaatcaccttcggtagaatatgagagacaattctgagacttatcgcaggattgtaaggattgtttaacatttgaaaatgaactcagtgtaatttgtcacaatgatagaatgaagaaagaagaatttctctcagaaaactaggaagagaatgagcttttacaatgtaaataacgggtatctactaagaaccta

SEQ ID NO: 146320 - DNA, 1466 bp, Homo sapiens
ttttaatcttatcaatattttattcatacaggagtggaaaagtagaagacatgaacagaaataaaaattctgaccaaatcttaaggagtgtgaatgagaactgaatgtatgataaatgttgcatgttcagttcaatggggaaaatttgatcgcttatttaataagtgattgtggcacaaaggctgtcttcagcaaacaccaaataactttggggcctctgctgtgagacacttttctgaatctgttagcaagagaaatgctgaagctttctcagatgtctgctgtgtctagggaagatgggggatggcttcagagcaagaggccacaggtcggctgtgagcatctgtgtctagctgttgagcatctccaacagtggatgagtgtccaggtagacctgaggctgtgccctgagatttctgatcatctcccagcactgtctccaccagctgtacttcccgcccctctcgggagaaacatagctaaaggccccctgctacgcagcttgaagaaaggaaaagaggaatatattggggagcagtttccccaatgcctcctattatcttcccaaatgtcggtcaactccccaggagcatcttggacctcaaaggaggtggggtgcacccggggcacatcagtctcctcttgctggcaggcagcttcctatccgaggcctgagacaggatgacatcctactcccttctcatcctgtccagtatcagtacttataaaccccgtctgtaggaacagccttccaggaaaacatcatgggcttcagagttctcccataaaccaggcaggctgcctcgcaagatgtttaagtcactctactgcttcctttgcaggccccctttcttccctgcctccttgcattggaccgccacaaatactttgctagggaaacccgtttgcacacgcagacaccccatccacatgctcccattatcaagggagaagggaggggtggcaagtgaaagggcgaggcaggttgaaagtagtctgtgccttctaggagcaagaaggcaaatatcatgaggggccatgaatcccatggaaaaaggggaaagtaacagatgcaagtcatctctaatctaagtctaccttggtggggtggtgtgacctcctctgcccaagtccacttgcatccataggggcttccatgttctgtagccagggcaagggaccacctacttgaccacagtctgacttcttggataccctgccccaaacttctcccatcattcccactaggaagttccaacggggcttgtttgttacagctcaagagtgaataaaagggctgctcctcctgcctccatccctgttcctgcttgctctcctcccagcccagtctccaaccctccccacccagtctccaaccctccccatgtctcagcaccactgccatgttccagccaccagacacaacaggcaccttaaaccatcatggtgtggggagagatgagaag

SEQ ID NO: 146321 - DNA, 1092 bp, Homo sapiens
atgagagccctcacactcctcgccctattggccctggccgcactttgcatcgctggccaggcaggtgagtgcccccacctcccctcaggccgcattgcagtgggggctgagaggaggaagcaccatggcccacctcttctcacccctttggctggcagtccctttgcagtctaaccaccttgttgcaggctcaatccatttgccccagctctgcccttgcagagggagaggagggaagagcaagctgcccgagacgcaggggaaggaggatgagggccctggggatgagctggggtgaaccaggctccctttcctttgcaggtgcgaagcccagcggtgcagagtccagcaaaggtgcaggtatgaggatggacctgatgggttcctggaccctcccctctcaccctggtccctcagtctcattcccccactcctgccacctcctgtctggccatcaggaaggccagcctgctccccacctgatcctcccaaacccagagccacctgatgcctgcccctctgctccacagcctttgtgtccaagcaggagggcagcgaggtagtgaagagacccaggcgctacctgtatcaatggctggggtgagagaaaaggcagagctgggccaaggccctgcctctccgggatggtctgtgggggagctgcagcagggagtggcctctctgggttgtggtgggggtacaggcagcctgccctggtgggcaccctggagccccatgtgtagggagaggagggatgggcattttgcacgggggctgatgccaccacgtcgggtgtctcagagccccaagtcccttacccggatcccctggagcccaggagggaggtgtgtgagctcaatccggactgtaacgagttggctgaccacatcggctttcaggaggcctatcggcgcttctacggcccggtctagggtgtcgctctgcctggcctggccggcaaccccagttttgctcctctccaggcacccttctttcctcttccccttgcccttgccctgacctcccagccctatggatgtggggtccccatcatcccagctgctcccaaataaactccagaagaggaaaaaa

SEQ ID NO: 146322 - DNA, 718 bp, Homo sapiens
  misc_feature (1)...(718): n = a,t,c or g
ggcacgagactcattcttggcagcgatggcttctcatcggtctgctcctcctctgccttgctggacttggtatttgtgtctgaggctggccctacgggcaccggttgaatccaagtgtcctctgatggtcaaagtttctagactgctgtccgaggcagtcctgcccatcaaatgtggccgtagcatgtgttcagaaagcctcgctgatgaccaccctgggaggccattttgccctctgggactnggaaaacccagttgagtctgggagagctgccatggggctcacaaactgagggagggaatttgtacgaacgggatatacaaaagtgggaaataggacaccaaattctttactgggaagggcactttgggcatcttcccccatttcccattgaggcattgccaggaggttggtatttcaacaggccaacggacttccggcccccgccggcttacaccattggccgccctgcttgagccccttactcctatttccaccacgggttgttcgttcaccaattcccaagggaattgaggggactttctcctccagttggaacttgaaagggacggagggatggggattttcatgttaaaccaggagtatttcctttttttactaaaagcagtgttttcacctcatatgctatgttagaaagtccaggcagagacaataaaacattcctgcgaccgcgcacttttaaaaaaaaaaaaaaaa

SEQ ID NO: 146323 - DNA, 794 bp, Homo sapiens
  misc_feature (1)...(794): n = a,t,c or g
gacactcgctttttggaacgtctgaggttatcaataagctcctagtcccagacgcccatgggtcatttcacagaggaggaccaaggctactatcacaagcctgtggggcaaaggtgaatgtggaaagatgctggaggagaaacccctgggaaggctccctggttgtctaccccatggaccccagaggtttctttgacagctttggcaacctgtcctctgcctctgccatccatgggcaacccccaaagtcaaggcacatggccaagaaggtgctgactttccttgggagatgccataaaagcacctgggatgatctcaaagggcaccttttgcccaagcctgaagtgaactgcactgttgacaagcctgcaatgtgggatcctgaggaactttcaagcttcctggggaaattttgctggtgacccgttttgggcaatcccattttcgggcaaagaatttcaccccttgaggtgccaggtttttcttgggcaggaacagaagatggcagaagatggtgacttggagttggccagtgcccttgttccttccagattaccactgagctcactggcccatgaatgcagagcttttcaaggatatggctttattcttgcaagcaattacaaataataaatctatttctgctaagagatcaccaaannnnnatnntnnnnnnncccccggattttttatttagcgggccgcacctttttccccttttagggggggtaaatttatattgggccttgggccggggttttcaaaagcggggggannnnnnnnnnaaagagccc

SEQ ID NO: 146324 - DNA, 637 bp, Homo sapiens; identical to SEQ ID NO: 144817
  misc_feature (1)...(637): n = a,t,c or g

SEQ ID NO: 146325 - DNA, 724 bp, Homo sapiens
  misc_feature (1)...(724): n = a,t,c or g
aattttgccctcgaggccaagaattcggcgagggcaataagctcctagtcccagacgcccatgggtcatttcacagaggaggaccaaggctactatcgacaagcctgtggggcaaaggtgaatgtggaaagatgctggaggagaaacccctgggaaggctccctggttgtctaccccatggaccccagaggttctttgaccagctttggcaaacctgtcctctgcctctgccatccatgggcaacccccaaaagtccaaggcacatggccnaagaaggtgctgactttccttggggagatgccataaaagcacctgggatgatctcaaagggcaccttttgcccaagcctgaagtgaacttgcactgttgacaagcctgcaatgtgggatccttgagaacttcaaagctcctggggaaatgttgctggtgacccgtttttgggcaatcccattttcggcaaaagaatttcacccctggaggttggcagggcttcctgggcagaaagatgggtgacttggagttggccagtgcccttgttccttccagataccactgaagcctcttggcccatgaattcagaagctttcaaggataaggcttttattcttgcaagcaattacaaataataaatctatttctgctaagagatcacacatgattttcttcagctcttttttttacatctttttaaatatatgagccacaaagggtttatattgagaa

SEQ ID NO: 146326 - DNA, 739 bp, Homo sapiens
  misc_feature (1)...(739): n = a,t,c or g
gacactcgctttttggaacgtctgaggttatcaataagctcctagtcccagacgcccatgggtcatttcacagaggaggaccaaggctactatcgacaagcctgtggggcaaaggtgaatgtggaaagatgctggaggagaaacccctgggaaggctcctggttgtctacccatggaccccagaggttctttgacaagctttggcaaccttgtccttctgccttcttgcccatccatggggcaacccccaaaagtcaaggcacatggcaaaagaaggtgctgactttccttggggagatgccaataaagcaccctggatgatctccaagggcaccttttgcccaagcctgaagtgnaacttgcactgttgacaagcctgcaatgtgggatcctgaagaacttcaaagctcctgggggaaaatgttgctgggtgacccgtttttgggcaattccattttcgggcaaagaatttcacccctgaaggttgcaaggcttcctggcaaaagcagaagatggcagaagatggtgactggagttggccagtgcccttgttccttccagattaccactgaagcctcttggcccatgaattcagaagctttcaaggataaggcttttattcttgcaagcaattacaaataataaatctatttctgctaagagatcacacatgattttcttcagctcttttttttacatctttttaaatatatgagccacaaagggtttatattgagaa

SEQ ID NO: 146327 - DNA, 1427 bp, Homo sapiens
taacaggtgtggagcccactgtgccccggcccatgccttatgtttttttaacaatacacttcctgaactatcaaaaagaatataaatcaaaatcactgaagtagtttttaaaaactccaaaagctacaaaacttacttacttcaatatcaattaaaaacccatttgatagttcaataacttgagtcctgctagaatcattctataagccatcagtgacagtgaagtggccaaaatttgagtcacttgataagtacaaagaacacagatttttgtcattcttactgtgaagaaaaacagtgaatgaataacttagtttatatattaacagtacttttatttaaaaaattatctagagaaatacctccttttattcaattggtaagtcaagtacttaggattaaacattcttaattaagctgattcctctatgctttcttttccttgattccaatcattattagttattctacactgcctcatttattggcagttatgccaactggctgactctggttcaactgccctatttttgctttcatcattgtttatcatatctcacttgcttttaaactccacctctttcatctcatctgatctgacacttggtttacatatcaattggctactctaaccttctaccgccagtttccaacccattcgaggtacttgggtaacaaaggaagatcctctatacacacaacaccacagaaaataagtgggaagggataataaatttcacttaaagttttagaatttttcttttttttttgagacggagtttcactcttgttgcccaggctggagtgcaaatggcttgatcttggttcactgcaacctctgcctcccaggttcaagcaattctcttgcctcggcctcccgagtagctgggactacaggcatgtgtgccagcacacccagctaatttttgtattttttagtagagatggggtttcactatgttggccaggctgctctcgaactcctgacctcagggtgatccacctgcctcagcctcccaaaagtgctgggattacaggcgtgagcgcaccgcacccgtccgagctagtttttttttgagtctcactgtgtctggagtgcagtggcgtgatcttggctcactgcaacctctgccttccggtttcaagggattctcctgcctcagcctcccaagtagctgggattatgggtgcccacctccaagcccagctaatttttgtatttttagtagacacgggttttcaccatgttggtcaggctggtctcaaactcccgacctcaagtagtctgcctgcctcaacctcccaaagtgctgggattacaggcgtgagccactgcgcctggccgtgactgattttttttcatgtagaattgtcaacacgagagatcacaagtggagcactttgaaagaccgtcggttgtgtgcacg

SEQ ID NO: 146328 - DNA, 803 bp, Homo sapiens
  misc_feature (1)...(803): n = a,t,c or g
aattttgccctcgaggccaagaattcggcgagggcaataagctcctagttccagacgcccatgggtcatttcacagaggaggaccaaggctactattcacaagcctgtggggcaaaggtgaatgtggaaagatgctggaggaagaaaacccctgggaaaggctccctggttgtctaccccatggaccccagaggttctttgacagctttggcaacctgtcctctgcctctgcccatccatgggcaaacccccaaagtccaaggcacatggcaaagaaggtgctgactttccttgggagatgccaacaaagcacctgggatgatctcaaagggcacctttgcccaagcctgaagtgnaacttgcactgttgacaagcttgcatgtgggatcctggaggaactttcaagctcctgggggaaaatgttgctgggtgacccgtttttgggcaattccattttcgggcaaagaatttcacccctggaggttgcagggcttnctggcaaaagcagaagatggcagaagatggtgactggagttggccagtgccctggtcctccagataccactgaagctcaattgcccatgaatgcagagcttttcaaggataaggcttttattcttgcaagcaattacaaataataaatctatttctgctaagagatcaccaaannnnnatnntnnnnnnncccccggattttttatttagcgggccgcacctttttccccttttagggggggtaaatttatattgggccttgggccggggttttcaaaagcggggggannnnnnnnnnaaagagccc

SEQ ID NO: 146329 - DNA, 307 bp, Homo sapiens
gaccccatatctggtaggacaagtggtggctggtgcccaggcattgcagctgtttgagtcccatgcagggcatcttggcccacagctcttcaacaagtttgcactgccttacatccgtgatgtggccaagcaagtgaaggccaggttgcgggaggcaggcctggcaccagtgcccatgatcatctttgctaaggatgggcattttgccctggaggagctggcccaagctggctatgaggtggttgggatgactttggaccacatcgctacattgccaacctgggccatgggctttatcctgacatgg

SEQ ID NO: 146330 - DNA, 473 bp, Homo sapiens
  misc_feature (1)...(473): n = a,t,c or g
atttgagaccttcgnnncggcggtggaattcgaagcgaatgggttgggacctcagggttttccggagctgaagaatgacatattcctgtgagcagcctggggagaggaaacagactacactcccgtttggtgcatgcgccaggcaggccgttacttaccagagtttagggaaacccgggctgcccaggactttttcagcacgtgtcgctctcctgaggcctgctgtgaactgactctgcagccactgcgtcgcttccctctggatgctgccatcattttctccgacatccttgttgtaccccagtggaccctgatgacatacatggttgagggtggtggctcaagcaccatggctcaggccaagcgctggctctatcagagacctcaggctagtcaccagctgcttcgcatcctcactgatgctctggtcccgtatctggtaggacaagtggtggctggggcccaggcattgt

SEQ ID NO: 146331 - DNA, 1212 bp, Homo sapiens
tttgcaaacacagccttgggcacacttgctacagcccacggggcagcagttacagacagctgaccatggaagcgaatgggttgggacctcagggttttccggagctgaagaatgacacattcctgcgagcagcctggggagaggaaacagactacactcccgtttggtgcatgcgccaggcaggccgttacttaccagagtttagggaaacccgggctgcccaggactttttcagcacgtgtcgctctcctgaggcctgctgtgaactgactctgcaggcactgggcatggaggtgaccatggtacctggcaaaggacccagcttcccagagccattaagagaagagcaggacctagaacgcctacgggatccagaagtggtagcctctgagctaggctatgtgttccaagccatcacccttacccgacaacgactggctggacgtgtgccgctgattggctttgctggtgccccatggaccctgatgacatacatggttgagggtggtggctcaagcaccatggctcaggccaagcgctggctctatcagagacctcaggctagtcaccagctgcttcgcatcctcactgatgctctggtcccgtatctggtaggacaagtggtggctggtgcccaggcattgcagctgtttgagtcccatgcagggcatcttggcccacagctcttcaacaagtttgcactgccttacatccgtgatgtggccaagcaagtgaaggccaggttgccgggaggcaggcctggcaccagtgctcatcgatcatctttgctaaggatgggcattttgccctggaggagctggcccaagctggctattgaggtggttgggcttgacttggacagtggccccaaagaaagcccgggagtgttttggggaagacggtgacattgcagggcaacctggacccctgtgccttgtatgcatctgaggaggagatcgggcagttggttaaacaaaatctggaatacttttgggccccatcgctacattgccaacctgggccatgggctttatcctgacatggacccagaacatgtgggggcctttgtggatgctgggcataaacactcacgtttggtttgacaaaactgagtgtatacctttaccctcaaggacccctaacccagatgattggttgttttcagggccataaaagttttggagttggaaaaaaaaaaaaaaaaaaaaaaaa

SEQ ID NO: 146332 - DNA, 978 bp, Homo sapiens
ggcacgagactggagggcagcagaagtacagtcaagaaagattagtggttggagcaaggccctctgtagcctgagatctgcttttttctagatcatctttgctatggatgggcattttgccctggaggagctggcccaagctggctatgaggtggttgggcttgactggacagtggccccaaagaaagcccggtaagccatggaagggtgaggccttgaggttgaggtgggggtgttggctgggggagctgccatgtatgcagttaccagaacgtggcgctggctttgcttccagggagtgtgtggggaagacggtgacattgcagggcaacctggacccctgtgccttgtatgcatctgaggtaacagccagggcccctctgtgtgtctgttactgtgcactcctgtggctgtggttgtattattctgtgtgcacttgtttttaatgtctgtctgtccttttcttctactctgtacaacataagccctagaaagaccggactttttgttgccgttgttcatttgtgtttatgcttcatgcctgggtccatactagggatctgataaattttattgaatgactgaataacactgagtagaagcatgcctacatatgcggtttgtcactagtatatatagggaggacaaaggcttgctggtcctcctgtagccagtgccctggtggtcccccaggaggagatcgggcagttggtgaagcacatgctggatgactttggaccacatcgctacattgccaacctgggccatgggctttatcctgacatggacccccaacatgtgggcgcctttgtggatgctgtgcataaacacttacgtctggtttgacaaaaatgagcggataccctttaccctctagggcccactatacaccaaatgattggcccgttttccaggacaataaaaattttcggaggtggaaccaaccccgcccgggacgaaataaccaaaaaaaatgtc

SEQ ID NO: 146333 - DNA, 807 bp, Homo sapiens
atgcccttgagagccttcaacccagtcagctccttccggtgggcgcggggcatgactatcgtcgccgcacttatgactgtcttctttatcatgcaactcgtaggacaggtgccggcagcgctctgggtcattttcggcgaggaccgctttcgctggagcgcgacgatgatcggcctgtcgcttgcggtattcggaatcttgcacgccctcgctcaagccttcgtcactggtcccgccaccaaacgtttcggcgagaagcaggccattatcgccggcatggcggccgacgcgctgggctacgtcttgctggcgttcgcgacgcgaggctggatggccttccccattatgattcttctcgcttccggcggcatcgggatgcccgcgttgcaggccatgctgtccaggcaggaacaggagtacagctgtgtagtaaagatgccttctggtgaatttgcacgtatatgccgagatctcagccatattggagatgctgttgtaatttcctgtgcaaaagacggagtgaaattttctgcaagtggagaacttggaaatggaaacattaaattgtcacagacaagtaatgtcgataaagaggaggaagctgttaccatagagatgaatgaaccagttcaactaacttttgcactgaggtacctgaacttctttacaaaagccactccactctcttcaacggtgacactcagtatgtctgcagatgtaccccttgttgtagagtataaaattgcggatatgggacacttaaaatactacttggctcccaagatcgaggatgaagaaggatcttag

SEQ ID NO: 146334 - DNA, 1435 bp, Homo sapiens
gctggcgccctggttctggaggttaccggttactgagggcgagaagcgccacccggaggctctagcctgacaaatgcttgctgacctgggccaaagctcttcccttacgcaagtctcagcccgtcgtcgcgacgttcgcccgctcgctctgaggctcctgaagccgaaaccagctagactttcctccttcccgcctgcctgttagcggcgttgttgccactccgccaccatgttcgagggcgcgcctgggtccagggctccatcctcaatgaaggtgttggatgagcactcaaggaccatcatcaacgagggcctgctggggatattaggctccagcgggtgtaaacctgcagagcatgggacatcgtcccacggtctctttgggtgcagctcaccctgcgggtctgaggggcttcgacaccgtaccgctgcggaccgcaacctgggccatgggcgttgaaacctcaccagtattgtccaaaatacttaaaatggcggccggcaatgaagattatcattaacactaagggccgaagataacgccggataccttgggcgctagtattttgaaggcaccaaaccagggagaaagttttcagactatgaaatgaagttgatggatttagatgttgaacaacttggaattccagaacaggaagtacagctgtgtagtaaagatgccttctggtgaatatgccacgtatatgccgagaatcccagcccatattgggagatgctgttgtaaatttcctgtgccacaagacgggagtgaaaatttttctgcaagtggagaacttggaaatgaaacccattaaattgtcacagacaagtaatgtcgataaagaggaggaagcttgttcccataaagatgaatgaacccagttcaacctaacttttgccactgagggtacctgaacttctttaccaaaagccactccactctcttcaacggttgacactccagtatgttctgcagatggtacccccttggttggtaggagtataaaaattgccggatatggggaccacttaaaatacctacttgggctccccaaggatccgaggatcgaagaaggatctttaggccattcttgaaaattccaagaaaataaacctaagctctttgagaactgccttcctaagatgcccagcatatactgaaagtcttttctgtcaccaaattttgtacctctaagtacatatgtagatattgttttctgtaaataacctattttttttctctattctctgcgaatttgtttaaagaataaagtccaaagtcagatctggtctagttaacctagaagtatttttgtctcttagaaatacttgtgatttttataatacaaaagggtcttgactctaaatgcagttttaagaattgtttttgaatttaaataaagttacttgaatttcaaacatcaaaaaaaaaaaa

SEQ ID NO: 146335 - DNA, 488 bp, Homo sapiens
  misc_feature (1)...(488): n = a,t,c or g
ggaccgccggagatgcctgacgcatctgtctgaggagcggtcattgacgcgatcngagcggcaagggatcgcttacacctgagacgaactacagaacagcacgtaccagaggtggaagtccaagtcaaacgcagaaggactgcctcactgagcaaccaagagtgtcagttgtacccgaggcgttctcagcagcagcaagtacctgtggtggatttccaggctgaactgaggcaggcattcttagctgagacaccaagaggcactgtagcagctgctgctgtntgctgcgactgccagtattgctggagccccaacacagtacccaccaggacggggcactccgcccccaccccgtcggcaganaaccccacctccaggcattatgggctcctccacctggtatgagaccacccattgggccccaccaattgggtttcccctggctcgagggacgccaataagcatgccgccttccgggaattgagaac

SEQ ID NO: 146336 - DNA, 531 bp, Homo sapiens
gccgggagatgcctgacgcattgttttgaggaccggtcagtaacgcgatggagcgggcaagggatcgcttacacttgagacgaattacagaacagcacgtaccagaggtggaagtccaagtcaaacgcagaaggactgcctcactgagcaaccaagagtgtcagttgtacccgaggcgttctcagcagcagcaagtacctgtggtggatttccaggctgaactgaggcaggcatttttagttgagacaccaagaggtggttaaagccatattggagtagcgaggaatttgattccaagcaaaaaccagccttcccctaggttttcagaagcatcaagttttaactgtggacattggatttggtggaacagcaatcatgactgttggcaagagtagcaagatgctgcagtcactttttcccctgcaatgggttttgtgaaattgtgtagagtgtttgtgagctttttgttccctcattttgcattaataatagctaataataaatgcatagagcaaaaaaaaaaaaaaaaaa

SEQ ID NO: 146337 - DNA, 433 bp, Homo sapiens
aaaattttataaagataaaatgcacttaccccccgtataggaaaaaagaaaattatactaaaatctttaagagggtgaattattttaggataatatggttaagaatttcattgcttttttactacatcttctgtattagatgtgtctgcttcttcaattatgttcattttaatcccctcagtgcatgatattttgttctaatctgaaaggagattctgacttgcatttgttcccaacacagtctgtactcactcttggttgctcagtgaggcagtccttctgcgtttgacttggacttccacctctggtacgtgctgttctgtagttcgtctcacgtgtaagcgatcccttgcccgctccatcgcgtcactgaacgctcctcagacagatgcgtcaggcatctccggcggcccggacgcgtgggtcgacccaa

SEQ ID NO: 146338 - DNA, 1856 bp, Homo sapiens
  misc_feature (1)...(1856): n = a,t,c or g
tcacagttgaaatttcggtagacatgtccattgatccccgttgcttatggtttctagaggccccctctcattgcaacagtgctgtggggccctaggggtccagtagccccctccccccaggtcattccggtgagggagggagctgggacccctgcactgcggcaaacaagcacgcctgcgcggccgcagaggcaggctggcgcgcatgctcaggcggggatgtgtgcgaagcctgccgctgctgcagcgagtctggcgcagagtggagcggccgccggagatgcctgacgcatctgtctgaggagcggtcagtgacgcgatggagcgggcaaggagacagggtctggctatgttgcccaggttggagtgcagtgatgcagttatagctccctgtaacctcaaactcctggttcaatctagactcctgcctcagcctcccaagtgcctgtnagtacaggcttgagggatcgcttacacctgagacgaactacagaacagcacgtaccagaggtggaagtccaagtcaaacgcagaaggactgcctcactgagcaaccaagagtgtcagttgtacccgaggcgttctcagcagcagcaagtcccttgtggtgggatttcccaggctgaacttgaggcaggcattcttagctgagacaccaagagggtggtttaaagccatatttggaggtagccgaggaatctgattccaagcaaaaaccaggcttccatctactctttgaaagcttgtgccccagctttgcatttgtttcttaggggaacccgcgttcataccttttatctatagccttccccttaggtcttcagaaagcattcaaagtttttaactgtgggacattggattttggttggaacagcaatcatgacttgtttggcaagagtaggcaagttgctgcagcaacattgactatagaatgagatgtatcctgcaagatggccgaatccttcattggcacctttaaggcttttgacaagcatatgaatttgatcctctgtgattgtgatgagttcagaaagatcaaagccaaagaatgcgaagcaaccaagagccgttgaagaaaaagccgggttttgggtctggtgttgctgcgtgggggagaacttggtatccatgactgttgaaggggccaccccccaaagatacttggcattgctcgggtaccacttgctggagctgctgaaggccctgggggttggtagggcagctggtagaggagtaccagctgggtgtgccaatttccccaggcccccttgctggattggcagggccctgttcccgagggagtttngggggaccattccccagcaggtaatgacttccacagggaaagaggcactgtaagcagctgctgctgttgcctgcgactgccagtatttgctggagccccaaacacagtacccacccagggaacgggcactccggcccccaccccgtcgggcagagcaacccaaccttccaggcattatggctcctccaccctggtatgagaccacccatgggcccaaccaatggggcttcgccctgctcgagggacgccaaataggcatgccggctccggggaatgagaccccctccaccagggcataagaggtccacctcccccgaggaatgcgtccacacaagacacttagcatactgtttgatccatctcagtcactttttcccctgcaatgcgtccttgtgaaattgtgtagagtgtctgctgagcttttttgttccctcattatagcaataataagatgctaatactaaatgcatagagcaattaaactgtgcctcgtgccaagcttggcgtnntggtggttcggacgatactcaggaggtttcaaaggggcccc

SEQ ID NO: 146339 - DNA, 637 bp, Homo sapiens; identical to SEQ ID NO: 144817
  misc_feature (1)...(637): n = a,t,c or g

SEQ ID NO: 146340 - DNA, 718 bp, Homo sapiens
  misc_feature (1)...(718): n = a,t,c or g
aattttgccctcgaggccaagaattcggcgagggcaataagctccttagtcccagacgcccatggggtcatttcacagaggaggaccaaggctactatcgacaagcctgtggggcaaaggtgaatgtggaaagatgctggaggagaaacccctgggaaggctcctggttgtctacccatggacccagaggttctttgaccagcttttggcaaacctgtcctctgcctctgcccatcatgggcaacccccaaaagtccaaggccacatggccaagaaggtgctgactttccttggggagatgcccataaagcacctggatgatctcaaagggcaccttttgcccaagcctgaagtgaactgcactgttgacaagcctgcaatgtgggatcctgagaacttcaaagctcctggggaaatgttgctggtgacccgttttgggcaatcccattttcgggcaaagaattcancccctgaaggttgcaggcttcctgggcagaaagatgggtgacttggagttggccagtgcccttgttccttccagataccactgaagcctcttggcccatgaattcagaagctttcaaggataaggcttttattcttgcaagcaattacaaataataaatctatttctgctaagagatcacacatgattttcttcagctcttttttttacatctttttaaatatatgagccacaaagggtttatattgagaa

SEQ ID NO: 146341 - DNA, 783 bp, Homo sapiens
  misc_feature (1)...(783): n = a,t,c or g
aggcggccgagctggttggtggcggcggttcttcggaacgcaaacatgcagatctttgtgaagaccctcactggacaaaaccatcaccccttgaggtacgagacccagtgacacccattgaagaatgtccaaaagccgaaaatttccaagaacaaaggagggtatcccnaccctgacccagcagcgtcttgataatttgccgggcaaacagctggagggatggcccgcacttctctcagactacaaacatcccagaaaagagtcccaccctgcaccctggtgtctgcgcctgcgtaggtggcattattgagccattctctccgccaggcttgccccagaaatactacttgcgacaaagatgatcttgccggcaagtgctatgcttcgccttcaaccctccgtgcctgtcaactggccgcaagaaagaagtgtgggtcacaccaaacaaccttgcgtccccaagaaggaaggttcaaataaggtttgttcttttccttgaagggccagcctccctgcccatggccccgtggcctgggaagcctcaataaagtgtccctttcattgactggagcagcaattggtgtcctcatggctgatctgtccagggaggtggctgaagagtgggcatctcccttagggactctactcagcactccattctgtgccacctgtggggtcttctgtcctagattctgtcacatcggcattggtccctgccctatgcccctgactctggatttgtcatctgtaaaactggagtaaaaacctcagtcgtgtaaaaaa

SEQ ID NO: 146342 - DNA, 1752 bp, Homo sapiens
  misc_feature (1)...(1752): n = a,t,c or g
tttttgagatggagtttcactcttgttgcccaggctggagtgcaatggcgcgatctcagctcactgcagccactgcctcccaggttcagagtgattctcctgcctcagcctcccgagtagctgggattaacaggcatgcgctaacacacccagctaattttgtatttttagtagagacgaggtttctccatgttcgacaggctggtctcgaactcccacctcagcctcccaaactgctgggattacaggtgtgagccaccgtgaccagccaatgtggccttcttatagtgtctactcaattggtcttttgttctgcccagttggttaacaaatgggataacgcctgctacacatcttcattgtgaaacccttcccctgtgctgagattaaatgaactctaagattattaaatagtatattttccttgacaagccctaggcgttttgatgattttaaagccttatgtataaataaaccaaaggaagtaagcagtcatattgctaatttgctaactcctatctattgaaatgggtgaagttttaaaaatttccccagggtaagtttaaggattcaaacaccatcttattngaggcacctacattgtgtgccaggtaggtaaaatagggtgctttcatacacatcgtcttcaattcctgtgagggtcaggaattatctctggcatttggaaacttgagggaaacatgctcagagtgccaaggaagcttccttggcctggaggattcacctaggaaagggaacccttcaggaggccnggccaactggaatcttgggtccctgtgatgtccaaggccccattgctctcccactgcaagaacatgggcctctaggattaatgccaccgatttcagggaacacctccgacagtcttggaaattacccccatgttgccttgtttgttttttccttctgggcttcttctattacagtctctttcattgggaaggctctgttagggccaagggccaggaggctggattactggacacgggagtcccaatggcaggataggcacattcaagatgcctaggggtcgctgggaggattaagggacttaatctgctaggaacacctgtacttgaagtggaggaggcttagggggccacagttggctgcttcattaacatagaggttttggatttttttctcttgtggtttgttttttaagtggattggcagactccttgttgcttaagagtggctttctagggcaggccactggcatctggaattcatccattggacaattaaatgttaaggaaattgggaattaaaaaaggaggagacctgcntgtttatttcgctttttgtttctcccagtggattttgatttaactcaggggcaaggctgaatatcagagtgtattcgcacttaaggattattatccattccagtaaggtattagtaacctcaattctaaatatgtcaactgtcgattttgctgcttttcaaataaaatacttgagcaatggggggagaaagaggaatttatcttcttgacctctagtcccttgattgaaaatttaactctgatttaagggagccgttgggtaagccagattccacatcccactaaactgcctggaagaggtgggaggagagcagccattaaggtatgaggtacagagtcccatcaggtgagacccatgtctgtagccactgaggttcctgttgcaacaggtgagatgtgatcttcccaaagccgcagcttcttccgcaggaggctgagacag

SEQ ID NO: 146343 - DNA, 444 bp, Homo sapiens
atgattcaacctcacccacattgaatctagaccttctcgtttaaagaaagtgagtatgaattttcacccatttggataaacgtagcctgcctgctctgacaaacatcatcaagatcttgaggcatgacattggtgccactgtccatgagctttcacgagataagaagaaagacacagtgccctggttcccaagaaccattcaagagctggacagatttgccaatcagattctcagctatggagcggaactggatgctgaccaccctgtgagtccatggcccgtaggatgagattttttcagtgcctctcctccactcccctcccttcctcttaccttctctacttggagcaatgtacttgttcacttgttcaacaaacacttattgtgttcctatttacacgagggctgggaaaaattagcaagactttattgtcatcatcaaa

SEQ ID NO: 146344 - DNA, 374 bp, Homo sapiens
gggaaattagaagataaaaacatacttttagaagaaaaaagataaatttaaacctgtctacacttaacctctccagtctcctggggtcctgtctatcctcaaccccttcagtctccttgttccctgtctaccctccagtctcctggggtcctactctaccctcaacccctaccatctcttggtgtcctgcctctaccctcaactgctaccatctattctcacacagcagccagaaggagtgcttggtaacacaagtgagatcatgaccatctatctgcccattaaaatagttacaagcattgaacttctttagtattatattaatataaaaacatttttgtatgttttattgtaatcataaatactgctgtata

SEQ ID NO: 146345 - DNA, 916 bp, Homo sapiens
  misc_feature (1)...(916): n = a,t,c or g
accagggagattacaggatgagaagtgttcatgactcatagctcacttaggtatatgggagcattccacaggaatattagctcttctgcctggtaccccactgggatactcttaagacccttggctgctgtgccctaccctgcacctggctcttatttttccttccttttcttctttttaccttgtaccctgccttttatgatcccaacctctgcatatcacttattcctgggagagggatcataagcctaaaagagttatttccattctttctgcccattcctcatgtagaaagactgagtctggcttggcttaaacctcctcccctccgagctctctgtgctttctgtctttcagtgacatctgccatgagctgttgggacatgtgcccttgttttcagatcgcagctttgcccagttttcccaggaaattggccttgcctctctgggtgcacctgatgaatacattgaaaagctcgccacaatttactggtttactgtggagtttgggctctgcaaacaaggagactccataaaggcatatggtgctgggctcctgtcatcctttggtgaattacagtactgcttatcagagaagccaaagcttctccccctggagctggagaagacaggcatccaaaattacactgtcacggagttccagcccctgtattacgtggcagagagtattaatgatgccaaggagaaagtagggaactctgctgccacaatacctcggcccttctcagttcgctacgacccatacacccaanggattgagggtctggacaatacccagcaggcttangatttgggctgatttcatttaacagttgaaattggaatcctctgcagtgcccttcagaaaaataaagttaaggccatggacaggatggtggtctgtcaggctgttgaa

SEQ ID NO: 146346 - DNA, 2756 bp, Homo sapiens
cagctgggggtaaggggggcggattattcatataattgttataccagacggtcgcaggcttagtccaattgcagagaactcgcttcccaggcttctgagagtcccggaagtgcctaaacctgtctaatcgacggggcttgggtggcccgtcgctccctggcttcttccctttacccagggcgggcagcgaagtggtgcctcctgcgtcccccacaccctccctcagcccctcccctccggcccgtcctgggcaggtgacctggagcatccggcaggctgccctggcctcctgcgtcaggacaagcccacgaggggcgttactgtgcggagatgcaccacgcaagagacaccctttgtaactctcttctcctccctagtgcgaggttaaaaccttcagccccacgtgctgtttgcaaacctgcctgtacctgaggccctaaaaagccagagacctcactcccggggagccagcatgtccactgcggtcctggaaaacccaggcttgggcaggaaactctctgactttggacagggaaacaagctatattggaagacaactgcaatcaaaaatgggtgcccatatcactggatcctcctcacctcaaagaaagaaagttgggtgcattgggcccaaagtattgcgccttatttggaggagaatgatgtaaacctgaccccacattgaatcctagaccttctcgtttaaaggaaagatgagtatggattttttccaccctttgggattaaacgtagcctgccttgctctgacaaacatcatcaagatcttgaggcatgacattggtgccactgtccatgagctttcacgagataagaagaaagacacagtgccctgggttcccaagaaccattcaaggagctggacagatttgccaatcagattctcagctatgggagcgggaactgggatgcttgaccaccctggttttaaagatcctgtgtaccgtgcaagacggaagcagtttgctgacattgcctacaactaccgccatgggcagcccatccctcgagtggaatacatggaggaagaaaagaaaacatggggcacagtgttcaagactctgaagtccttgtataaaacccatgcttgctatgagtacaatcacatttttccaccttcttgaaaagtactgtgcctcccatgaagataacattccccagcttggaagacgtttctcagttcctggcagacttgcactggtttccgcctccgacctgtagctggcctgctttcctctcgggatttcttgggtgacctggccttccgagtcttccactgcacacagtacatcagacatggatccaagcccatgtatacccccgaacctgacatctgccatgagctgttgggacatgtgcccttgttttcagatcgcagctttgcccagttttcccaggaaattggccttgcctctctgggtgcacctgatgaatccattgaaaagctcgccccaatttactggtttactgtggagtttgggctctgcaaacaaggagactccataaaggcatatggtgctgggctcctgtcatcctttggtgaattccagtactgcttatcagagaagccaaagcttctccccctgggagcctggagaagacagccatccaaaattacactgtcacggagttccagccccctgtattacctggccgaggagttttaatgatgcccaaggagaaatttagggaacctttgctgccacaattacctcggcccttctcagttccgccacgacccccatacaccccaaaggattggagggtcctgggacaatacccagcagctttaagattttggcttgattccatttaacagtgaattgggattccttttgcagttgccctccagaatataaagtaaagccatggacagaatgtgggctgtcagctgtgaatctgttgatggagatcccaactatttctttcatcagaaaaagtccgaaaagcaaaccttaatttgaaataacagccttaaatccttctacaagacggagaaccatcaaataagtcaaaattatctgtaatgacaagatatgtagttcatactcaagagcataaatggtaaatcttttggggtcatctttgatttagagatgataatcccccatactctcaattgagttaaatcagtaatctgtcgcatttcatcaagattaattaaaatttgggacctgcttcattcaagcttcatatatgctttgcagagaactcaataaaggagcatataaggctaaatgtaaaacacaagactgtcattagaattgaaatatgtggccttaatataaatcgtaacctatgaagtttatttcctatttaggttaactatgattccaattactactttgttattgtacctaagtaaatttcctttaagtcagaagcccattaaaatagttacaagcattgcaacctccttaggtattatattaatataaaaacatttttgtatgttttattgtaatccataaatactgctgtataagggtaataaaactctgcaccctaatcccccataacttcccagtatcattttcccaattaattatcaagtctgttttgggaaacactttgagggacatttatgatggcagcagatgttgactaaaggcttggttggtagatattcaggaaatgttcactgaataaataaggtaaatacattattgaaaagcaaatctgtataaatgtgaaatttttatttgtattagtaataaaacattagtagtttaaacaat

SEQ ID NO: 146347 - DNA, 600 bp, Homo sapiens; identical to SEQ ID NO: 133875
  misc_feature (1)...(600): n = a,t,c or g

SEQ ID NO: 146348 - DNA, 973 bp, Homo sapiens
  misc_feature (1)...(973): n = a,t,c or g
tccggggcctgtccagccttcctcgtcgataggaatctgcggcatcacgagaccaccttcaacttaatcatgaagtgtgacgtggacatccgcaaagacctgtacgccaacacggtgctgtcgggcggcaaccaccatgtatccgggcattgctgacaggatgcagaaggagatcacggcccttggccgccaagcacattaagattcagattcatcgcacccccaggaggcgcaagtactcggtgtggatcggtgggctccatcctggcctcactgtccaccttccagcagactgtgcttaggcaagcaggagtacgacgagtcgggcccctccatccgtccaacgcaaatgcttctaaacgacttcagcaagatgcgtagcatttgctgcatgggttaattgagaatagaaatttgcccctggcaaatgcacacacctcatgctagccctcacgaaacttggaataagcccttcgaaaagaaattgtccttgaaagcttgtatccgaaaatcaagcaactggattgtaagaaacttgttgcctgaaatttgacccttgtaantgaaagttaaactgttcccccttggtaantaaacgtgtccagggctgagtgttcctgggatttcctctagaggctggcaagaacccagttgtttttgtcttgcggggtcttgtcagggttggaaaagtccaagccgataggaccccagtttcctttcttaagctgatgtcttttggccagaacaccgtgggctgttaattgcttttaagttgggaagcggtttgcatttacgcctgtaaatgtattcattcttaatttatgtaaggttttttttgtacgcaattctcgattctttgaagagatgacaacaaattttggttttctactgttatgtgagaacattaggccccagcaacacgtcattgtgtaaggaaaaataaaagtgctgccgtaaccaaaaaaaaaaaaaa

SEQ ID NO: 146349 - DNA, 2048 bp, Homo sapiens
  misc_feature (1)...(2048): n = a,t,c or g
atccttaattaaattaatccccccccgctcagtcgccgctgccaactctcgcactctgttcttccgccgctccgccgtcgcgtttctctgccggtcgcaatggaagaagagatcgccgcgctggtcattgacaatggctccggcatgtgcaaagctggttttgctggggacgacgctccccgagccgtgtttccttccatcgtcgggcgccccagacaccagggcgtcatggtggggcatgggccacgaacggactcctacgtgggcgacgaggcccaagaagcaagcgtggcatcctgaccctgaagtaccccattgagcatggcatcgtcaccaactgggacgacatggaagaagatctggcaccacaccttctacaacgagctgcgcgtgggccccggagaagcacccagtgcttgctgaccgaggcccccctgaaccccaaggccaacagagagaagatgactcagaattatgttttgagaccttcaacacccccggccatgtaccgtggcccatccaggccgtgctgtccctctaaagcctctgggcgcaaccaattggcattgtcatggactctgggagacggggtcacccacacggttgcccatcttacgaggggctaccacactgctccacgccatttctgcgtctgggacctggcttggcccgggacctgaccgactacctcatgaagatcctcactgtagcgaggctacagcttcaccacccacgggccgagcgggaaaacgttccgcaacatcaagggagaagcttgtgctacgtcgcccctggacttcgagcagggagatgggcacccgncgcatcctcctcttctctggagaagagctacgagctgcctgatggccaggtcatcaccattggcaatgagcggttccggtgtccggaggcgctgttccagccttccttcctgggtatggaatcttgcggcatccacgagaccaccttcaactccatcatgaagtgtgacgtggacatccgcaaagacctgtacgccaacacgggcgctgtcgggcggcaccaccatggatccgggacattgccgacaagattgcagaagggagatcaaccgccctggcggccccagcaccatgaaaaatcaggaatcatcgcacccccaggagcgcaagtaactcggtgtggatcggtggctccatcctggcctcactgtccacctttccagcaagattttggattaagcaagcaggaagtacgacgagtcgggcccctccattcgtccaccgcaaatgcttctaaaacggactcagcaagatgcgtagcatttgctgcatgggttaattgaagaaatagaaaatttgcccctggcaaatggcacacacctcatgctagccttcacgaaacttggaataagccttcgaaaagaaattgtcccttgaagcttgtatcttgatatccagcactggattgtagaacttgttgctgattttgaccctggtattgaagttaactgttccccttggtatttgtttaatacccctgtacatatcttggagttcaaccctttagtacgtgtggcttggtcactttcgtggctaaaggtaagaacgtgccttgtggaaagacaagtctgtggcttggtgagtcctgtgtggcccagcagcctcctgatctgtgcagggtattaacgtgtccagggctgagtgttctgggatttctctaagaggcttggcaagaacccagttgtttttgtctttgcgggtctgtcagggttggaaagtccaaagccgtaggacccagtttcctttcttagctgatgtcctttgggccagaacaccgtgggctgttaacttgccttgagttggaagcggtttgcatttacgcctgtaaatgtattcaatcctaatttaagtaagggttttttttgtacgcaattctcgattctttgaagaagatgacaacaaacttttggttttctacatgttatgtgagaacattagcgccccacgcaacactgtcattgtggaaaggaaaaataaaagtgctgccgtaaccaaaaaaaaaaaaaa

SEQ ID NO: 146350 - DNA, 486 bp, Homo sapiens
  misc_feature (1)...(486): n = a,t,c or g
ncattcccactcgggtttgacctacngccgcccgggagaagatggctgccccagcagtggtccgggctctcccgcnaggtgcgatgcttcagtacctctgtggtcagaccatttgccaagcttgtgaggcctcctgttcaggtatacggtattgaaggtcgctatgccacagctctttattctgttttgaatccctatgtgaagcgttccattaaagtgaaaagcctaaatgacatcacagcaaaagagaggttctctcccctcactaccaacctgatcaatttgcttgctgaaaatggtcgattaagcaatacccaaggagtcgtttctgccttttctaccatgatgagtgtccatcgcggagaggtaccttgcacagtggacctctgcatctcctttaggaagaagccacactctctggaattaaaaactggtccctcaagagcttcctaaggtcaaggncaagtattggaaattgggaggcta

SEQ ID NO: 146351 - DNA, 875 bp, Homo sapiens
tttcgtcgccaacgcgcgcgtgcgcccttgcgcgtttttctcttcccactcgggtttgacctacagccgcccgggagaagatgggctgccccagcagtcgtccgggctctccccgcaaggtgcgatgcttcagtacctctgtggtcaagacattttgccaagcttgtggggccctcttgttcaggtatacggcattgaaggtcgctatgccacaggctctttattctgctgcatcaaagcagaataagctggagccaattagaaaaggagttgttgagagtagcacaaaatcctgaagggaaccccaaagtggctgcttcctgttttgaatcccctatgtgaagcggttccattaaaagtgaaaaagccctaaattgacatcaccagcaaaaagagaaggttctctcccccctcaactacccaaccctggatcaaatttgccttgcctgaaaaatgggtccgattaaagcaaatacccccaagggagtccgtttcctgcccttttccctacccatgatgaagtgtcccatccgcgggagagggtacccttgcacagtggacctctggcatctccttttagaaggaagccaaactcctcctggaatttaaaaactgtccctcaagagccttccctaagtcaaaggccaagtattgaaattggaggctaagactgatccgtcaatctttgggtggaatgattgtgcgcattggcgaagaaatatgttgacatgtctgtcaagaccaagattcagaagctggggcagggctatgcgggagattgtctaaaaagtgttggttttctgcccatcagtgaaaattcttaaacttggaagccaacaataaaaagcttccagaccagaaaaaaaaaaaaaaaa

SEQ ID NO: 146352 - DNA, 2185 bp, Homo sapiens
ttttttttttttttttttcttctacaaatgtagaggtttatttcaacaaaatgtgtaaaagagtgccatcttgaagctccctgctcattcaccagtatgtgtccaatcaaaattcctgagaccaagttgaaggccttgttttgtgaacgaagagaacagataatatgggcggtctccgtccaagcaggtcttgggtcaatatccatcatttatactcctcctgccttaataaccctgccatgtatgaggggctgtgggaatgtcagattgctcatgttctgtgccctccaacttgaaaaaaatcccttgtccaggggtaagacctacagtaaggagctctgggggatgggggagggaggcattacaggggttctaggagagggaaacatactccgtttgtgtcataatttgggtgggggagaggggaggtaaatgaagtgtaaccccaccctgcctctggaaggacatgcctggacaggcctccctgggggggtgcagggacttcataccactttgtagatatgtgggatttgatttaattgcaaaaaagcctaggagggaataatctggtcaaaaatgaatccaattcttacttaggtaagcaaatagccagccaatggtcaatgcattttccttggactgagaattgtcccccaccacttttatgcccttttctgaaggtgctgaacacctgtaccttccaccagggcagccgggctgaggctctgaatcccctgggggctgtcccgctccccataccccagcccatacagtgccccacctgcaaccccagaacccattgaaaagtcccagcccaatcctatccgccacagattccctccctgaagaaggggaggtgggagctcgttcttgtgtgcaaaactaacagggttaaaggctcaagaactgtgggcttgttccaaggaacgtttcattaccactggtttttcaaatgtccttaagtgatttccctcccttggtcatcagtgacaaagtgcagttagctgcactaaaggaaccggatgctacaccagccctgatcacctgccactcttgctttaggaacagaggaatcagtaagttcttttcttttcttgaataaactagttgttgaaagtaaactctctccaccacctgaggaagcccctgatgccagtcaggaggggccagtaagcctggaggacagcagcaccatgactgagttgtaaataatcttaaggtcatgtggattctgtgtttcctggaagcctccctcatcaggaaggccagctcctggtgctgagggtgtagctgtcaccagggtcctttcagagctgtggggaagacctgctgccctgtcctaacactctggggaagagagtagaacccgttagctgctaggacagtaatcctggaactagggaagagtgagtgtggaggcacccattaacctctccaaaaccaacccaagctcccaggcttcataggaacaactttccaagtcctcaaaacaaacagactatctatctatctcactggctctccacatggcatgaaatgaactkagtttccaccagtgcagaaagggcagttctcttctggctcctcctctgccaactcaggcttcacccacctgtggaactgctggggcccctcaagcactggccttgcagctcccagccacatgcgacagctagtccagcaagtgacgtgcaggcgagaggcaggccaacaactacctttccctttgtcctcagagactgaacccaaggttgaggtcccctaaatcaagaataactggttctattttctttctctgcttcttggctcacagttttgccctcatctttgagttcctatggagcttgtagtagattttatgctctaatttttcttcataaaaggtaccgtagtgtggttaaactgggaatcattcctctccagtgcctactgtgtgctgggctaagagtcggggtaataaacaatggacttgaggcttcctcctctccttagccctcctctgctgcctgtggctgcgactcatggggccaggagtgaggggggctgctcactgctgggcaactcctcacgcttccccatgctgggaggccaaggggctgtcaggacaggaggggcagccctactttggttagtaagacctcatggtacatgtttgtacctttcattgccttctcagtcctgtgca

SEQ ID NO: 146353 - DNA, 330 bp, Homo sapiens
tctctactacttcacctaccacgccagctctcgagggaacctgtgcgtgaacctcatgcgtggccgggagcgtgcacagaaggtggtcaccttctgtgactatgcctacaacaccttccaggtcaccaccggtggcatggtcctcaagctggagcagggggagaacgtcttcctgacctgtgggctgcttcacatccaccccggctccccctgccagcaacgctcactctacccccaacaccaccccttgcccagccaatgcacacagtagggcttggtgaatgctgctgagtgaatgagtaaataaactcttcaaggccaaaaaaaaaa

SEQ ID NO: 146354 - DNA, 420 bp, Homo sapiens
tcaaggtctgttgatgccagaccaactaggctgttccagagattctttgtcatcctggtagagcaaatcgagaggggcttgagattcctcaaatcccagctgccaaagccccacccagctgagcaaagcaaacaccttggggtggcatgtggtctgtgagctggcattgccagacccccagtcatcagggacctctgccagcaggggcggcctggaatgaacccatttgttggtggcttgagctctagaacccatcgtgctgtagagcggagccggtctgcctgggaagctggtgtcctgtgaggccactgggctgagcagcagtgggaccaggagccgagagcctactgccctcggtccgaagcggaagttcccttccccagaggcgggaagggctttcccctgacggtcccctcccat

SEQ ID NO: 146355 - DNA, 1194 bp, Homo sapiens
  misc_feature (1)...(1194): n = a,t,c or g
ggcagtaggctctcggctcctggtcccactgctgctcagcccagtggcctcacaggacaccagcttcccaggaggcgtctgacacagtatgactatgaagatccctatggggcattatactatgactgatgttgctcctgctcctgggcctaatcagatatctcccaggcccagctcagctgcaccgggcccccagccatccctggcatcccgggtatccctgggacacctggccccgatggccaacctggggaccccagggataaaaggagagaaagggcttccaggggctggctggagaccatggtgagtttcggagagaagggagacccagggattcctgggtaattccagggaaaaagttcggccccaagggccccatgggccctaaaggtggcccaggggcccctgggacccccgggccccaagggtgattcgggagactacaaggccacccagaaaatcgccttctctgccacaagaaccatcaacgtccccccttgcgccggagccagacccatccgctttcgaccacggtgtatcaccaacatgaacacccaattatgaggccccgcagtggcaagttcaccctgcaagggtgccccggtctctactaattcaacctatccacgccagtttctcgagggaacctgtgcgtgaaccctcatgcgtggccgggagcgtgcacagaaggtgggtcaccttctgtggacttatggcctacaaacaccttccagggtcaccaccggtgggcatgggtcctcagctgaagaaggncccaaaaggagggggggggggggaaaagaaaaccgttcttcctgcaggccaccgacaagaacttcacttactggggcatgggagggtgccaacagcaatcttttccgggttcctggcttttttccagatatgggagggcctgacctgtgggctggcttcacatcccaccccggctccccctgccagaaacgctcactatacccccaacaacaaccatatgaccaagccaaatgcacacaatagggattggtgaatgatgactgagtgaatgagtaaataaactcttcaaggccaagggacagtggtctaattcaactctgtgtcccagcacctggcacaccagaagtgccatgctcgagaaatgttggttacatgaatgaatgaaccatgaatgaatgaaaaaaaaaaaaaaagggc

SEQ ID NO: 146356 - DNA, 735 bp, Homo sapiens
aattttgccctcgaggccaagaattcggcgagggcaataagctccttagtcccagacgcccatgggtcatttcacagaggaggaccaaggctactatcgacaagcctgtggggcaaaggtgaaatgtggaaaaaatgctgggaaggaagaaacccctgggaaaggctccctggttgtcctaccccatggacccccagaggttcctttgaacagctttggcaaacctgtccctctgccctctgcccatccatgggcaacccccaaagtcaaggcaccatggccaagaaggtgctgacttcccttgggagatgcccataaagcaccctggattgatctcaaagggcaccttttgcccaagcctgaagtgaacttgcacttgttgacaagcttgcatgtgggatcctgaagaactttcaagcttcctggggaaatgttgctggtgacccgttttgggcaatcccattttcggcaaaagaatttcaccccctgaaggttgcaggctttcctgggcagaaagatgggtgacttggagttggccagtgcccttgttccttccagataccactgaagcctcttggcccatgaattcagaagctttcaaggataaggcttttattcttgcaagcaattacaaataataaatctatttctgctaagagatcacacatgattttcttcagctcttttttttacatctttttaaatatatgagccacaaagggtttatattgagaa

SEQ ID NO: 146357 - DNA, 2106 bp, Homo sapiens
  misc_feature (1)...(2106): n = a,t,c or g
agcggccgcggcccctgccggcggcaatcctgagcagcgactggactacgagcgggctgcggcgctgggcgggcccgatggacgagcctggggcggccgaagcccacttcctcccccggcaccgtaagctcaaggagcccngggcccccgctggcctcctcccagggcggggagccccgcgccttccccggccggctgcggcggcggcaagggcggggggcttgttactcccggccggggcggcccccgggcagcaggaagagagctggggcggttcggtgcccttgccctgtccgcccccggccaccaagcaagccggcattgggggggagcctgccgcagccggagccggctgcagcccccggcccaagtatcaggcggtgctgcccattcagacgggctctctcgtggcggcggccaaagagcctacgccctgtgctggggacaagggtggggcggactcccccgctgccaccgcctcggacccggcgggacccccaccactacctctgcccgggccgccacccctcgcgcccaccgccaccgacgggaccctggcggccagcgagggcagatggaagagtatgaggaagagccctctcgggggtcggtggcggctcgggagcctccagtcaggccgcctgcctcaaacagatccttctgctgcaattggacctcatcgaacagcagcagcagcagctgcaggccaaggaaaaggagatcgaggagctgaagtcagagagagacacgctccttgctctggattgaacgtatggaaaggcggatgcaggctggtaaagaaggataacgagaaagaaaggcacaagctgtttcagggctatgaaactgaagggagagagggaaccggagctatctgggaaaaataaactggagtgccagcccggagctttcccgagacatcccaagactctgcctcccaagcccttcttcatgtgggcggagtggaaaagggacataaaaggaaatccccatttgggaagtacagaaaagaaaagactccctgttaaaaagctggcttcctgaattttcaaaagtcaaaacaaaaactcctaagcactctcctatttaaagagggaaccctgtggttcctttatcttgaaactgtttgtaaacgtggattgagggagccaagaaaccccagaaaagccccggtctttcagtgggacaccccaccaagactctccactccccaaaagggacccagcacccatcccaaggagaaagccttctcaagtgagatagaagatttgccgtacctttccaccacagaaatgtatttgtgtcgttggcaccagccttcccccatcaccgttaccattacgggaatcctctccaaagaaggaggagactgtagcaagtaaggccatagagaacacttgccccttaatacccctagtggtggcggtcaagcctaacaagtgtgaaaaaatcctttggatttttttaaaaaagtgcaatcaataaagccagagttctgtcaagaatgagtaagttaacagccagagacagacactgtgcaggcattgcaaatagatggaattacagcaaaatgtgctcaatgtatttgccctgcttacaacactggggagatgtgtttgccaagtaagttgctcatcacaagagcacccagacttggggggtgtattctccggccaacttgccatgcccctctgaaagaagggttttctgtgcctgtgaaatgcatagaactatactttgccatgcacgactgttccctgcaatttgataatttgtgtgaaatctgggaaggtgggtctttgggtgttctcaggggccaatggtaatttttgggttggggagccagcttggggtgggggaacttttacctggggccttcgcttctttaactatataaagccctttatctgtatatttatgtccccgtttggggggcaggaggaatttgccaaaggcccaccgttttactttatccttactatacttcacaaaggttctaaaaatgtgaagagtttacttggaattgcagtagccccattggatggttcatatatttaaatcacaatggtctacaaactatttttcaaacaaaaaaaaaaaaaaaaa

SEQ ID NO: 146358 - DNA, 1789 bp, Homo sapiens
  misc_feature (1)...(1789): n = a,t,c or g
aaaaacatgatgagaagtctataaaaattgtgtgctaccaaagatctgtcttatttggcagctgctgcctcacccacagcttttgcatatctaggaggactcttctctcccaaactacctgtcaccatggcccaccgatttccagccctcacgccaggagcagaagaaggagctctcagaaattgcccagagcattgttgccaatggaaaggggatcctgggctgcagatgaatctgtaggtaccatggggaaccgcctgcagaggatcaaggtgggaaaacacttgaagagaaccgccggcagttccgaggaaatcctctttctcttgtgggacagttccattcaaccaggaggcatcggggggtgttgattcctttttccacggaggaccctcttacccagaaagggacagccaggggaaagctttttccaggaaacattccttcaagggaaaagggggattcgtgggtggggaatcaagtttaggaccaagggaggttgttccttttttgcagggaaccaaacaaaggaaaccaccatttcaaggggcttgatgggctttttagagcgttttgttcagtacaagaaggatggtgttgactttgggaagtggcgtgctgtgctgaggattgccgactcagtgtccatccagcctcgctatccatgaaaacgccaacgccctggctcgctacgccagcatctgtcagcagaatggactggtacctattgttgaaccacaggtaattcctgatggagaccatgacctggaacactgccagtatgttactgagaaggtcctggctgctgtctacaaggccctgaatgaccatcatgtttacctggagggcaccctgctaaagcccaacatggtgactgctggacatgcctgcaccaagaagtatactccagaacaagtaggctatggctcaccgtaacaggctctccaccgtactggtcctgcagctgttcctgggcatctgctttttgtctggtggcatgagtgaagaggatgccactctcaacctcaatgcttatcaaacctttgcccctctaccaaaagcccctggaaactaagtttctcttatggaacggggcctgcaggcccagtgcactggcctgccctggggtggcaaggctgcaaacaagggaggcaacccacggacggcttttatgaagcgggcccatgggctaacctgccaggccgcccaaagggacagtatgttcacacgggttcttctgggggctgcttcccaccccagtcgcctcctccacaagccctgcctataccctacctaggggtcccaatggcccggcccagccctaggcncccagtggcttcctaggtagggaggggctgaaaggggagcaaccttttccctcctaatcccctggaaattccgaccacaattaggatttgaacctgctgggaaatacaacacatgttaaatccttaaggtacaagggggaaaaaatgaaatcagttattggaaacattaaaaatgaataccaagggacctgattcaattttcacacagcgagttttccttggcaacatttttcaggttcccccttgttccaggattacccacccaagaaaataaccgggatctaaaacaataatcggctcctcatccaaagaacaactgctgattgaaacacctcattagctgagtgtagagaaagtgcatcttatgaaacaagtcttagcaagtggtagggttgggaaggagatagctgcaaccaaaaaagaaataaatattctataaaccttcaaaaaaaaaaaaaaaa

SEQ ID NO: 146359 - DNA, 845 bp, Homo sapiens
atttttagtagagacggggcctcaccgcgttacgcaggatggtctcgatctcctgacctcgtgatctgcccgtctcagcctcccaaagtgctcagattacagccgtgagccaccacgcccggcccagacaccaatattaatcagacattttattcacaactctaaacacgagaagacaatggagtaacatttatatagagttctgaggtaacccaagattaatttcacatccagaaaagctcccatatgtgagggaaaagcacaattttagatatgcaaagattcagaaaatatactacatatgtactctttgaggaaaatatatacattgaatataaacattgttattaatatagttaaaaaagcagaaaagactggatggagaaaaagaacacctgtgacatcaaatatttagaatcccttacagcagaattcacaatggaaaacagaagagggagcaatagcaacaaaattttggatactgaaaaacagataaatgcccttgcagacagctgggaaagctaggaactaacacattttacattctgaatctttacgaggcctaagaactgccagcttgtgggaggaaggaggaagggggaagctaaaacagaaagaaatttggagaaagttggttgacttatagttggatgctaagattctcttccccactctatcatgctattggttactgttgtttccccactacagaagtctagaggcttactctctacagtgggtaaaacgaatctttgttttaggggagaccaggcacaggggagagagtaggcactatgccaaaaccaagaggattaaacgaccatatacatgagacacaaaccctc

SEQ ID NO: 146360 - DNA, 1169 bp, Homo sapiens
cacatatcttaaaagcaccacacgtcaactggggataacagtaggtcaacaggtaggtaggtttaatctagataagttgaaagatagattgctatcaaaaacagttctccaagatgtgcatagccaaactgggatagaaggcaaactcccccaaagctacctgctggttttgaaaaggggtggttaagaacatggctattccccaggagtagtagaaaataatatgccctgactaccaacagcctcaagtatgccttatttgcacatcctagacttggtgtctgtaagactcagttaccacttctattttcctgtacctaggagttagcaaaaggaaactggggccttcccagccgagccactaaacctgtcttatttggaatggggattgtccagcaaagggagcaaacatgaattagatgttaagctattgagctgaagaaaagaaagcagttcacatttaggtgaaatagatgatgttatcaggaagccaggttcccaccagagtcggtgcttggtacctggtctctccagtctcaacagactcaggtccaggtctctcccccaggaagcaaccactcaataaaatagagaacatctgagaattacaaatgtctatgcttgattgctcctctaaatccagtgcataggttaaccctgcatgcccatttcttcctgggcttcttgatggcaatgtgttcttaaataactggtcttgtgttcatgctaaagacaaacttacatgaagtttttcagtttaagacattctagtgaatggctgctatgtgtttctgggcactcattcctaaccaagtctttagaggatttcagatgaccttaaagatgcaatatctttttctttctttctttccttctttttttctggggacaagagttggcgcccgttcgcccgggtgggggtgctgggagtgcagtggtgcgatctcagctcactgcagcctctgcttcccaggttcaagtgtttctcctgcctcagccttccgagtagctgggattacaggcatgtaccactatgcctggctaatttttatttctatatttttagtagagatggggtttcatcatgtttgccaggctggtctcgaactcctggcctcaagtgatccgcccacctcagcctcccaaagtgctgggattacaggcgcgag

SEQ ID NO: 146361 - DNA, 791 bp, Homo sapiens
  misc_feature (1)...(791): n = a,t,c or g
gacactcgctttttggaacgtctgaggttatcaataagcttcctagtccagacgcccatgggtcatcttacncagaggaggacaaggcttactatcgacaagcctgtggggcaaaggtgaatgtggaaagatgctggaggagaaacccctgggaaaggctccctggttgtctaccccatgggaccccagaggttctttgacagctttgggcaacctgtcctctgcctctgccatccatgggcaaacccccaaagtcaagggcacatggcaagaagggtgctgactttccttgggacgatgccataaagcacctgggatgatctcaaagggcaccttttgcccaagcctgaagtgaacttgcactgttgacaagcctgcaatgtgggatccttgagaactttcaagcttcctggggaaaatgttgctgggttgaccgtttttggcaatcccattttcggcaaaagaatttcacccctgaaggttgcaggctttcctgggcagaaagatgggtgacttggagttggccagtgcccttgttccttccagattaccactgaagcctcttggcccatgaattcagaagctttcaaggataaggcttttattcttgcaagcaattacaaataataaatctatttctgctaagagatcaccaaannnnnatnntnnnnnnncccccggattttttatttagcgggccgcacctttttccccttttagggggggtaaatttatattgggccttgggccggggttttcaaaagcggggggannnnnnnnnnaaagagccc

SEQ ID NO: 146362 - DNA, 463 bp, Homo sapiens
  misc_feature (1)...(463): n = a,t,c or g
tcgcaacggactttccnnnnaacccacgcgtccgcggcgcgctcacaatggagctctcggagtctgtgcagaaaggcttccagatgctggcggatccccgctccttcgactccaacgccttcacgcttctcctccgggcggcattccagagtctgctggacgcccaggcggacgaggccgtgttagaataataagaattccctagaaatcctactgggaagtataggcagatctctccctcatataacggatgtttcttggcgcttggaatatcagataaagaccaatcaacttcataggatgtacagacctgcatatttggtgaccttaagtgtacagaacactgattccccatcctatccagagattagttntagttgcagcatggaacaattacaggacttgggggggaaacttaaagatgcttcgaaaagcctgggaaagagcactcagttgtaacttg

SEQ ID NO: 146363 - DNA, 764 bp, Homo sapiens
  misc_feature (1)...(764): n = a,t,c or g
agaaagggctccaagatgctggcggatcccgcttccttcgactccaacgccttcacgttctcctccggggcggcattccagagtctgctgaacgccagcccggacgagncccgtgttagcacttatctagaagactgtaattttgacagagagcgaatagaactgttttgcacggaatatcagaataataagaattccctagaaatcctactgggaagtataggcagatctctccctcatataacggatgtttcttggcgcttggaatatcagataaagaccaatcaacttcataggatgtacagacctgcatatttggtgaccttaagtgtacagaacactgattcnccatcctatccagagattagttttagttgcagcatggaacaattacaggacttggtggggaaacttaaagatgcttcgaaaagcctggaaagagcaactcagttgtaacttggggaagttaacgatccgcccgagtgcagaggaaaaccagaaacgccttgccttcagctgaaccaccgtttgtgcgagctggatgtccttttcagtagaaaagaattttccttttgaatttataccattcatcaattttgacactttaaaaacgtgtgaaagggttaagagggaaagatactgcccaagtatttgaatcgtttagtagtaactgtccatttatcctattttgatctttttcaagtcttctgaaaggaagtagacagtattacaccctgaataaataaggtgttgttttccacaaa

SEQ ID NO: 146364 - DNA, 468 bp, Homo sapiens
gcgtgtcacgtggtgtgcgtgtcgaaggtcacggcgcgctcacaatggagctctcggagtctgtgcagaaaggcttccagatgctggcggatccccgctccttcgactccaacgcctttacgcttctcctccgggcggcattccagagtctgctggacgcccaggcggacgaggccgtgttaggtaagccgctcggctcggctcggagctggatccgccggggtggaggggcgctcggagaagaggagccggcggagcgagaaggggaaagccccgggaagaggaagtctccgggctttgcccttcgctccggacggagtgttggggacgtggctctgccaggactcggagcagactctgagcattgttttggccccacttggcacctgcatagagccaactccacgttcctggcccggtttccctcccagtctctttgttcttttgtaaagccggtgttcaagtctt

SEQ ID NO: 146365 - DNA, 1115 bp, Homo sapiens
  misc_feature (1)...(1115): n = a,t,c or g
ggtgtgtnaaattggaccatgcgatagacggccntgaaatcccgcgncgacccacgcgtccgacggcgcgctcacaatggagctctcggagtctgtgcagaaaggcttccagatgctggcggatccccgctccttcgactccaacgccttcacgcttctcctccgggcggcattccagagtctgctggacgcccaggcggaccgaggccgtgttagatcatcccagacttgaaacatatcgaccccagtggttttaaaacattgtccatgcagcagcctgcaacttacatactagaggcaggaaagcaccgagcctgacaagtcaactcttaagcacttatctaagaagactgtaaaattttgacagagaagcgaatagaactgttttttgcacgggaatatcaagaataataaggaattccctagaaattcctactggggaagtattagggcagatctctcccttcatataaccgggtgttttcttgggcgctttggattattcaggtaaaggaccaatcaactttccataggatggtacagaccctgcatatttgggtgaccttaaagtggtacagaacactgggattcccccatccctatcccagagaattagtttttagttgccagccatggaaccaattaccaggacttgggtgggggaaactttaaaggatgcttcgaaaaagccctggaaaagagcaacctcagttgtaaccttggggaaagttaaccgatcccccccgagttccaggaggaaaacccagaaaccgcccttgcccttcagctggaaccaccgtttgtgccgagctggatgtcctttttcagtagaaaagaatttttcccttttgaatttatacccattcatccattttgggcactttaaaaacgtgtgaaaaaaaaaaaaaggagaggggggggggggggggtcttttttttttttttnaaaaagaggggggagggggggggaaaaaaaagatactgcccaagtatttgaatcgtttagtagtaactgtccatttatcctattttgatctttttcaagtcttctgaaaggaagtagacagtattacaccctgaataaataaggtgttgttttccaaaaaaaaaaaaaa

SEQ ID NO: 146366 - DNA, 956 bp, Homo sapiens
  misc_feature (1)...(956): n = a,t,c or g
cagagtttcactctgtcgcccaggctggagtgcagtggtgtgatctcggctcactgcaacctcttgcctcccgtgttcaagcagttctcctgcctcagcctcccaaatagctgggattacagttgcctgccaccacgcccagctaatttttatatttttagtacagatggggtttcaccatgttggccaggctggtctcgaactcctgacctcaagtgatccaccgcactttggcctcccaaagtgctggggataataggtgtcagccaccgcacccagcctgggagtggccttttatgagaggggacccgttcaaatctgtgccttatggaggggtccggcagcggccacaatttgttcttgttccccttcaccccccaaatttcccctgggaacaactttttcccaggggaagacattttttcacagcaccatttcaaaacggtttgggccaaaaagaaacttttccttcatcatttcctgcactcgctgaccacaactttggaaaacccccaagctgccaacccttccccaacccgtttcacccccccnaggattgctgttgctgtagggacgccttgcttgccctgggagccctcccccagggatgttgaggccagttcccctcgatgggttacgggaattgccgttgggggtgcccggaggcgggcccatggtgttcttcgatggaagggcaagccagggttgggagcacccatgggttttcacgggccatgctttcaggggtttttcaggtcctggcccccggccagttttgccaagaggcacccccttccccagcctctcgcctgcactgatgcagacaaaatctcacctggcaggcccaacccccaccccacccctcccccgccgtgtgtggcccctcgccgcatcgttggggttttgttacgtgaaaatatcctggaaataaatacatgtttctgcacttagaaaaa

SEQ ID NO: 146367 - DNA, 357 bp, Homo sapiens; identical to SEQ ID NO: 135357

SEQ ID NO: 146368 - DNA, 192 bp, Homo sapiens; identical to SEQ ID NO: 135358

SEQ ID NO: 146369 - DNA, 575 bp, Homo sapiens
gtgaaggctagacccggtttactggaattgctctggcgatcgaggggtcctagtacaccgcaatcatgtctattatgtcctataacggaggggccgtcatggccatgaaggggaagaactgtgtggccatcgctgcagacaggcgcttcgggatccaggcccagatggtgaccacggacttccagaagatctttcccatgggtgaccggctgtacatcggtctggccgggctcgccactgacgtccagacagttgcccagcgcctcaagttccggctgaacctgtatgagttgaaggaaggtcggcagatcaaaccttataccctcatgagcatggtggccaacctcttgtatgagaaacggatccggatcacctgtttgaaaccatctcccaagccatgctgaatgctgtggaccgggatgcagtgtcaggcatgggagtcattgtccacatcatcgagaaggacaaaatcaccaccaggacactgaaggcccgaatggactaaccctgttcccagagcccacttttttttctttttttgaaataaaatagcctgtctttcaaaaaaaaaaaaa

SEQ ID NO: 146370 - DNA, 830 bp, Homo sapiens
  misc_feature (1)...(830): n = a,t,c or g
aaggctagacccggtttactggaattgctctggcgatcgaggggtcctagtacaccgcaatcatgtctattatgtcctataacggaggggccgtcatggcaatggaaggggaagaactgtgtggccatcgctgcagacaggcgcttcgggatccagggcccggttgttgaccacgaacttccagaagatctttcccatgggtgaccggctgtacatcggtctgggccnggcttcgccacttgacgtccagaccagtttgcccagcgccttcaagtttccggcttgaacctgtattgagtttgaagggaaggttcggcagattcaaacctttattaccctcatggaggcatggttggccaacctctttgttatgagaaaacggttttgggcccttacttacactgaggccagttcatttgccggggttgggacccgaaagaccctttaaagccctttcaatttgcttctctaagacctcattcgggttggccccatgggtgacttgaatgacttttgtgggtcaagtggcaaccttgcgccgaaccaaatgttacgggaatgtgttgagtccctctggggaggcccaacatgggttccggattcaactgttttgaaaaccattttcccaaggccatggttgaatgctgtgggaccgggatggcagtgttcaggcatggggagttcattgttccacatcatcgagaaggacaaaatcaccaccaaggacactgaaggcccgaatggactaaccctgttcccagagcccgacttttttttctttttttgaaattaaaatagcctgtctttcactcctaaaaaaaaaaaaaaaa

SEQ ID NO: 146371 - DNA, 2119 bp, Homo sapiens
tttcagttacattacgcaggaggatttccaaatccagaggcaatgtggccttccatttcctgaggtgccttggttggctctggatcagtggtggggactcaagagacagcctccctgtggcttccagcccctcacattccctttgtcgctttctccttcatgatgtggttttacacagaaaaacactctggtaagtagaacagtgttcttctcttgagtcagacgtctgaagcaggaaggtgaataaccttcccaagaccttagagctacagagagaatcctcagcacaggtaggagcacacaggtaggtggggtaaacgtgtacagagagcctggcttctacttggaattttcccctcccttggccttaaaaatcggatttctcccttttccagctatgttgatacaagagacaaactatttagaaagtaaaagcctcaaccgtttattttgtgttcaaagtataaccaaatgattttattgcatttacgtgctcctgggcatgcagatgcatctacacagaaacagcagttgtggttataaaatcttttaacgagtttggggcagaggctttttaattatttttgagacagagtctcattctgtcacctagcttcgtgcagtggcatgatctcggcttactgcaactatctgcctcccagactcaagcaatcctcccacctcagcctcaagagtagctgggaccgcaaaacgtcaacaccacacccagctaattttttgcatttttgggtacagacggggttttgccatgttggcccagggctgggtttcactgaggctagggcaatccacccaccttgggtttcccaaagtgctaggattacaggtgtgaagccactgcacccagccccagagttttccctgaatgtgaaaattacgtgagtgacaaggagcacccaggagccttgcctgacttactgtctgttggtaggatgtgacatatgaataatacaaaatacccgtctggtttgacctgcaggattaagtcactgctagactacagccttgatgccctctcttggtggcccctagccaacataaccagacttccaggaacaataccatgttttaaattgcttgaggtttcactacctgctgtcactctcagtccggaatcccagcaggagacacagctccagctggcctgcccagcccccatcagaaggcagggaggaaggggaatttgtcagcgtttacggctattgagtatgattcttccatgcagaggacacctgccctaaatgctgaaacttgggtctgaaaccctgccctttggagggaaattttgaccaacctcactcaagtttgtattgactcatctgtaaattaggaatgatatagcatacctcacgtttatctggagtcatgggctgaatgctgtccctttcaaattccgatgttgaagtcccaacctctagtacctcagaatgtgaccttattggtaaacggttgctgcggatacagatgaggttatactggagtcggtgggatgggctctaatccgatatgatggtgcccttaaaacaaagggaggttttggagacagacacgcacacagcaagagtgccatgtggagttgaaggacaaaactgggtgacgcttccacacaccaaggaatggcaactgccagcaaaggcatgaagccgcttctccctaacagctctcggaaggcaccaactctgaggacaccctgatcttggacgtgcacctcccagaactgtcagggaatacactcctgttgttctaagccagccagtgtttggacacaccagcactccaagctaatgtatctatcaagtgtgttgtcaggcaaggttctgttctggagcttggctcacccagacaggagaacccctcactgggggcagcgcccgcgcattcctagacaggacagattggaagaagggacttaagtgccttttaaacgatgacaactccgcttccaacccacaagcttttaccaaggatctttggggtataaagacattatggggtaggtgtgcaactcaaattaaaatgtaagctttgtttttggtgagctccagatccttagtgattggcccccaggaaaatcaacaggtatgacgactgtttcgaa

SEQ ID NO: 146372 - DNA, 1558 bp, Homo sapiens
cggaaatcccgtatcgtagggcgacggcggcttataaagtgcttcctggagcgcagacgaggtcatgaatcatgtgacggtggcttgaggaggaacctgtctttaaagctgtccctgaagtgacagcggagagaaccaggcagcccagaaaccccaggcgtggagattgatcctgcgagagaagggggttcatccatggcggatgaccctaaaagcgattccttgtataaaaagtagcctccgtgttgaaggggctccatgccattggttgtgtcagatagagatgggagtaccctgttattaaagtgggcaaatgacaatgctccagagcatgcttttgcggacctggtttcttattccacttttgcccttgcaacagaccaaggaaagcaaacttgggacttttccaaaaataaaagtattcatctgtttactattaacaccttaccaggggggtttcaattttaattcgttttacctttgggtgggtgagttttcataggcccaggcaggcagtgcccaattacagggactaatttgttcagcctaggaaaagggaacttggttccctttgttttgaaggaactgaggacaagttgtggaagtttccttaatctgacagtgggtttcagtgtgtaccttatcttcattataacaacacaatatcaatccagccatctttaggacaccaataatacttttaatccatgtgctcaagaaagggcccctttttccaacttatactaaagagcttagcatatagatgtaattttatagatagatcagttgctatattttctgggtgtagggtctttcttatttagtgagatctagggataccacagaaatgggttcaggctatcacagctcccatggagttagtctggtcaccagatatggatgagagattctattcagtgggatcagaatccaaactgggtaacattggatccacttgagccgttaagtgctgcccaattgtaccaatatggccccagggcttgccggaataaaggccaactttttattgtgaataataataagggacatattttttcttcagattaatggttttaatttcccttgccattgaagtgagggaaccataaaatgggcctgggtaaaagtaataaaatccagtacaatccacctaactttccctttgtacattattattttgccagtatagatgaatattacctaatcagtttgattattcctcagagggtgcttgctttttaaagaaaaatgaaaattatagcctaatgtttttccctcaaactctgctttctgtaaccaatcagtgttttaatgtttgtgtgttcttcataaaatttaaatacaattcgttattctgtttccaatgttagtatgtatggtaaacatgatagtacagccatttttttccatatgtggagtaaaaataaaattagtatttttaaaaatatagtttgagcactgtataggtcctttttttgttcagactttttccaaaaatctaaacataattaatatactctttcagccacatgaataaataatgagtgtttcttgtaaa

SEQ ID NO: 146373 - DNA, 517 bp, Homo sapiens
  misc_feature (1)...(517): n = a,t,c or g
aatgaaagaaaccctgcggataagaaggttaggcgagccagaggattgtgctggcatcgtgtctttcctgtgctctgaagatgccagctacatcactggggaaacagtggtggtgggtggaggaaccccgtcccgcctctgaggaccgggagacagcccacaggccagagttgggctctagctcctggtgctgttcctgcattcacccactggcctttcccacctctgctcaccttactgttcacctcatcaaatcagttctgccctgtgaaaagatccagccttccctgccgtcaaggtggcgtcttactcgggattcctgctgttgttcctgagaacacaggacaggcctgctgacaaggctgagtctaccttggcaaagaccaagatattttttcctgggccactggggaatctgaggggtgatgggagagaaggaacctggagtggaaggagcagagttgccaattaacagcttgcnaatgnggtgcggatnntccacgaagggcgctcaatn

SEQ ID NO: 146374 - DNA, 371 bp, Homo sapiens
gcgccctactctgtcacctcgctggaaggagtggaacccagacttgctggtctgatccatgcacaaggcgcggctacgaggccactgtgcccgggcagggaagtcggtgcgggtggccagctccgggatgacccgccgggacccgctcacaaataaggtggccctggtaacggcctccaccgactgggcttcagtccttacaatgtcagtaaaacagccttgctgggcctcaacaagaccttggccatagagctggccccaaggaacattagggtgaactgcctagcacctggacttatcaagactagcttcagcaggatgctctggatggacaaggaaaaagaggaaagcatgaaagaaaccctgcggat

SEQ ID NO: 146375 - DNA, 352 bp, Homo sapiens
  misc_feature (1)...(352): n = a,t,c or g
gcttcagcaggatgctctggatggacaaggaaaaagaggaaagcatgaaaagatccagccttccctgccgtcaaggtggcgtcttactcgggattcctgctgttgttgtggccttgggtaaaggcctcccctgagaacacaggacaggcctgctgacaaggctgagtctaccttggcaaagaccaagatattttttcctgggccactggggaatctgaggggtgatgggagagaaggaacctggagtggaaggagcagagttgcaaattaacaacttgcaaatgaggtgcaaataaaatgcagatgattgcgcggctttgnnnnnnnnnnnnnnnnnnnnnnnnnnnnnnnn

SEQ ID NO: 146376 - DNA, 1434 bp, Homo sapiens
atgcacaaggcggggctgctaggcctctgtgcccgggcttggaattcggtgcggatggccagctccgggatgacccgccgggacccgctcgcaaataaggtggccctggtaacggcctccaccgacgggatcggcttcgccatcgcccggcgtttggcccaggacggggcccatgtggtcgtcagcagccggaagcagcagaatgtggaccaggcggtggccacgctgcagggggaggggctgagcgtgacgggcaccgtgtgccatgtggggaaggcggaggaccgggagcggctggtggccacggctgtgaagcttcatggaggtatcgatatcctagtctccaatgctgctgtcaaccctttctttggaagcataatggatgtcactgaggaggtgtgggacaagactctggacattaatgtgaaggccccagccctgatgacaaaggcagtggtgccagaaatggagaaacgaggaggcggctcagtggtgatcgtgtcttccatagcagccttcagtccatctcctggcttcagtccttacaatgtcagtaaaacagccttgctgggcctcaacaataccctggccatagagctggccccaaggaacattagggtgaactgcctgcacctggacttatcaagactagcttcagcaggatggttaggcgagccagaggattgtgctggcatcgtgtctttcctgtgctctgaagatgccagctacatcactggggaaacagtggtgaacttgagcgtgatgttcacgggtggaggtgtctgcagagctgccagctggaaggaaggtggcacgggaactcccaggacgccacgggaatccccgaggcagcgcgagcccggagagacctcctctactgatacccaagaaaataaggtctggaatggacttccagcaaacccccaaagacctgcagctgaggggcctgttagaaggaaaactaacaaacagaaaggaatagcatcaacatcagcaaaggacagcatcaacatcagaacaggaaaggacatccacactaaaaccccatccataggtcaccaacatcaaagaccaaaggtagataaaaccacaaagatggagagaaaccagagcaaaaaggctgaaacttccagaaatcagaacgtctcttctcttccaaaggaatacaagtcctcaccagcaagggaacaaaactggatggagaataagtttgatgacttgacagacgtaagcttcagaaggtcagtaataacaaactacacccagctaaaggagcatgttctaacccattgcaaggaagctaaaaaccttgacaaaatgttaaacgaatggctaactagaatgaagaatctagagaagagcttaaatgacctgatggagctgataaccacagtacaagaacttcatgaaggatacacaagcttcaatagctga

SEQ ID NO: 146377 - DNA, 582 bp, Homo sapiens
ctgggagaccatccctgtgtgttagtgaggtcttgcattgtaaagatcttgaagaaaggagactgtgtctgtgagtcctcaacaaagcagacacctgattggagttaggagtccaaagggtttatccgaagtggcacttgctggtctgatccatgcacaaggcgcggctactagtgtccactgtgcccgggcagggaagtcggtgcggttggccagctccgggatgacccgccgggacccgctcacaaataaggtggccctggtaacggcctccaccgactgagccttacacaggttatctctagacctgacaacaacccaagcaaggcaaggactattctctcggtctgcagacgctggctcagatagctggagcaacttcccaaggtcccacagccagtaaggaaagacccagacctcccaagctcccttcctttattggctgcctgtggactaccaggctgcgaagccttatggaggtatcgatatccttagctccaaagctgttgtcaaccctctctttgaagcctaaagggtgtcacccgaggaagcgcgggacttgactctagacataattggaac

SEQ ID NO: 146378 - DNA, 1369 bp, Homo sapiens
  misc_feature (1)...(1369): n = a,t,c or g
tgcggccgctccaacatcagtggacccagacttgctggtctgagccatgcacaagacggggctgctaggcctctgtgcccgggcttggaattcggtgcggatggccagctccgggatgacccgccgggacccgctcgcgaataaggtggccctggtaacggcctccaccgacgggatcggcttcgccatcgcccggcgtttggcccaggacggggcccatgtggtcgtcagcagccggaagcagcaaaatgtggaccagggcggtggccacgcttgcagggggaggggctgagcgtgacaggcaccgtgtgccatgtggggaaggcggaggaccggggagcggcttggtggccaccggctgtgaagcttcatggaggtatcgatatcctagtctccaatgctgctgtcaaccctttctttggaagcataatggatgtcactgaggaggtgttgggacaagactctggacattaaatgtgaaaggccccaagccctgaatgacaaaggcagtggtgccagaaatggagaaacgaggaggcggctccagtggtgatcggtctttcaatagcagcccccagtccatctcctggcttcagtctttacaatgtcagtaaaccagccttgctgggccttgcccagacccctgcccatagagcttggccccaaggaacattagggttgaactgcctagcacctgggacttatcaagactagctttcagcaggatgctcttggatggacaaggaaaaagaggaaagcatgaaagaaaaccctgcggataaagaaggtttaggcgagcccagaggattgtgctggcaatcgtgtctttcctgtgctctgaagatgccagcttacattcactggggaaaacagtggtggtgggtggaggaacccccgtcccggcctctgaaggaaccgggaaaacagcccaaaggcccaaagttgggcttcttagcttcctggtgctgtttcctgcaattcaacccaactggcctttccccacctcttgctcaaccttactgtttcaccctcattcaaatcagttcttgcccctgtgaaaaagatccagccttcctgcgtgccccaaaagaaggggtgggcgtcttactcgggattccctgctgttgttgtggccttgggtaaaggcctcccctgagaacacaggacaggcctgctgacgaaggctgagtctncccttggcaaagaccaagatattttttgcccaggccactggggaatttgaggggtgatgggagagaaggaacctggagtggaaggagcagagttgcaaattaacaacttgcaaatgaggtgcaaataaaatgcagatgattgcgcggctttgaatccaaaaaaaaaaaaaaaaaaa

SEQ ID NO: 146379 - DNA, 234 bp, Homo sapiens
atgtggatcttcatctttaataaatattaccaacatgtgaaaagcccgacaatgtcaaggactggcaagagtgccacatgtgatgggtgtggaatggcagctcactgtagcaggtgctggggactcagttggggtcttggagaagcacttagttatagcaagaatgtctcataaatggtatttttttcagagggagggggaacaacttaaactagaaaacaccttcatattaat

SEQ ID NO: 146380 - DNA, 1263 bp, Homo sapiens
gcgaccgcagttcccaggcgtctgcgggcgcgagcacgccgcgaccctgcgtgcgccggggcgggggggcggggcctcgcctgcacaaatggggacgaggggggcggggcggccacaatttcgcgccaaacttgaccgcgcgttctgctgtaacgagcgggcttggaggagctcaccgctgctgtcatggttcgtttgctaaactgcatcgtcgctgtgtctcagaacatgggcatcggcaagaacggggacctgccctggccaccgctcaagaatgaattcatatatttccagagaatgaccacaacctcttcagtagaaggtaaacagaatctggtgattatggggtaagaagacctgggttctccattcctgaggaaggaatcgaccttttaaagggtaggaatttaatttagttctcagcagagaacttcaagggaaccttccacaaggagcttcattttcttttccagaagttttaggatggatgcctttaaaacttactgaacaaccagaattagcaaataaagtagacatggtctggcatagttggtggcagttctggtttataaggaagccatgaatcacctaggccatcttaaactatttgtgacaaggatcatgcaggactttgaaagtgacacgtttttttcagaaattgacttggagaaatataaacttctgcctgaatacccaggtattctctctgatgtccaggaggggaaacacatcaagtacaaatttgaagtatgtgagaaggatgattaatatgaaggtgttttctagtttaagttgttccccctccgctctgaaaaaagtatgtatttttacattagaaaaggttttttgttgactttagatctataattatttctaagcaacttgtttttattccccactactcttgtctctatcagataccatttatgagacattcttgctataactaagtgcttctccaagaccccaactggagtccccagcacctgctacagtgagctgccattccacacccatcacatgtggcactcttgccagtccttgacattgtcgggctttttcacatgttggtaatatttattaaagatgaagatccacataccattcaaatgatcagtaacattagtgtaaatcctagtagcatcttacgtgtatgtccataggttcgtagataaaagtggccaccatgttagtcacattgaaaaattgaaaacaacctggaagtccagtgatgggaaaaaaaaaaaaaaaaaaaaaaaaaaa

SEQ ID NO: 146381 - DNA, 3385 bp, Homo sapiens
  misc_feature (1)...(3385): n = a,t,c or g
gaccggccgaattccggtcgaccacgcgccgcccttgcggccggctctacgttccctgttctcgcctgcagctccgccatggctcctaaaggcagctccaaacagcagtctgaggaggacctgctcctgcaggatttcagccgcaatctctcggccaagtcctccgcgctcttcttcggaaacggcgttcatcgtgtttgccatccccatctgggttatactggcgaatatggcatatggatctattcaagtctgctgttttgtatagtgtgatgacctagttaagcacatatttggtagcctttgccatacaagaatgtgaaatttgttctcaagcacaaagtaggcacagaaggaggggaaggatgctgtttccaaaggaagtgactcgaaaacttttctggaagcttgattattaggaaaggtgttctcgggaagggaggaaagatggaaagaatcttgtggaaggaagaatgaagttggctgattatgaagctaccaacatttttccgatcttctataacaacactctgttccctggtccgtggtcattgttgcttccttcttccatattgaagaacttccaaccccacagtgtatccttttcaaggaactacatattgtccattagtggtttcatcaggactcatcgccctcctgtttactggctccaaatagaccatgtcagcttcaccccctggctttgtgtctatgggtggcctgtggtatatggaaaagtagcagggtggtcagggtgggagacacaagatgtttttatagtctagagccttttaaaaaacccagcagaatgtaattcagtatttggtttattggctggttttttggaccagattgttggaaattaaatgaattgaaagggaaactccagagtacttaggacgtttattaaaaggaaaaaaatgtcttgcaatgtgctgtaatcacaagaggagaaaataacttgtttccttgatctgtcagaggtcacagtaacctgggccgagctgttattatttattatataatagtagtaggaagttaataactggttctctgtgttccaagcacaatattacaactttttttgaaccgtaaatatcagaatgaatcctcttcccaggggattgaacagaagcttaatgtttacaagtgtttgaatttgtgatctgaaataacacaaaattaaaaacatgatttctctaattttccaactagaggaagagaaacttgtggaaaagttctttttttctcttttttttttcttaaagaagggcagccaaggtagtaacctaaaaatagtgcccaggcatatgagagttgtcctacgaggttaaagaacacactgttccactggtatggctttgggcctgaagtggccagggaggtcaacttgaccctgccatgttggtttgacttactaagacacaggaatcattgttttccttgaccagggtctcacaccctggaggaatgttaagtaagagaaagaacctctttcctgaatattgacatgtaaaagaccaaagtaatttttctgaacttctgcaattctgagaactctccaaggaatttacagtgattttacgtgcttgtcagcatttttccatgaggactttcatacatttgactctttagttcacaggttcccattgattgtgagcaagatatttatctctttagcccttggggatccaggctgagagcaatctcttgcatttttttacccgtgtatgtacagatatcatttcttgtgtatgccatgacttgaaaaagtttgggaagctctttagcaatatcagctaaaaggatatgaaatcacaggtgatagcagttgtcattcagtaatttcccacaagcagcaccccaaaggaaatatagtcctaatccttactatccacttctaaatttaatgtgaatttcatacatgttattagttgttttctttataattttataaaaattattcatcgggagtttaacttccacttccatgctatccggatgtgttgggctccatgcaagaacttggaaagaaaaacaggcaggaatgcatttgcataatgaccccagatcatcattttctgcaactgagaattatatttcatcattgcttctaagaagcctgcaattcttttacttttcttggcggcatgattatctaggtgccatcactggataatgtgggagtgactaggagaagtcatatatccactgtaaggtacagttaggggtaacactttagaggtttattatttttaaaaaacttttcttgaactcctgggccaacatgggtgaaaccccgtcttcttacttaaaaatacccaaaattaggccaggggcgtggatgggtggggtgcctgttaatcttcagctacttgggaggctgaagcagggagaactgcctgaacccgggaggcggaggttgcagtgagttcgagatcgtgctactactgcctgggtggcaagggtgagactccatctcaaaaaagaaacaaaaaaacccaaaagagttttctttacatgttggttaaaaaaaaaaagccagaccatagtttgactggtggcatggaatttgtgtatcaaataaatgcatttgcttatttgacaaaccatcagtgtccactatttgttaccagagttgggccactatcttttaaaattgctggtgaaaacttgccactagatggcagtgcctgtatagatggggaaaaaattgccaccattcttggtataatacagtgtagcctagatgaggtggtgaaataggggtatcagccgaatattcctaatatagtttctcttgaattaataaactgaagatttgtaggaaaatgagtgagcaaaatttgtttactgttgtgaatttttcctatcagcactgtttttaatcttgatgttttccaactttctgtactaatagatacatttctgtgcataagattataaagcatatactcacagttcagtagttttcgttaaggatttactgtgtgagtactttactgtgaggaattgcagaaccttttcccctctactcttgcctagaagttctgtgtggtactcatgatatgcgacctactcattctgacttagtaaaaccatgctgtagaatttttgtcttaaaaagaccacatacccagcacccatgaaataaaagattcatctgtaattgggattcaaagtgattaaattcctttgttcatactcataaatagcactaaagtgttataacattttcatttacctatttttagttccttcattttaacttaataaaaatcttggattgatattcnnnnnnnnnnnnnnnnnnnnnngggaagggggtttctttttcccccccggggggaaaaaagggggttttttttgggttaaggggaacccg

SEQ ID NO: 146382 - DNA, 456 bp, Homo sapiens
atcaaaattataaggacttaaatttatgtaatttttttatttttggatacttaaattttctattaatttgctataagtcattgaaatgttataaataattttctcatatctactctttgttcattttatttcagcctttagaaataagagggccatatgacgtggcaaatctaggcttgctgtttgggctctctgaaagtgacgccaaggctgcggtgtccaccaactgccgagcagcgcttctccatggagaaactagaaaaactgcttttggaattatctctacagtgaagaaacctcggccatcagaaggagatgaagattgtcttccagcttccaagaaagccaagtgtgagggctgaaaagaatgccccagtctctgtcagcactcccttcttcccttttatagttcatcagccacaacaaaaataaaacctttgtgtgatttaaaaaaaa

SEQ ID NO: 146383 - DNA, 689 bp, Homo sapiens
caatttccagtgccctcaatttgatgcaaatctgcaaaggaaagaatgtaattatatctagtgctgcagaaaggcctttagaaataagagggccatatgacgtggcaaatctaggcttgctgtttgggctctctgaaagtgacgccaaggctgcggtgtccaccaactgccgagcagcgcttctccatggagaaactagaaaaactgcttttggaattatctctacagtgaagaaacctcggccatcagaaggagatgaagattgtcttccagcttccaagaaagccaagtggtctcactctgtcacccaggctggagtgcagtggcacaatctcggctcactgcaacctttgcctcttgggcttcaagccattcctcccaccttcagcctcccaaggaactagaatttcaacaaagacaacttttgatctctcatcagagagatcatactcccaagaacaggctttgacccttctttaaaagaggattgtcctgggctgatgagagtcactttacctgaagatacctgggaagttttgtctcctctgaggttggcccatgcagatggactgatgcaggacattacagcctggcccactggctgcggtggtacaatttatgctcctgagcaccccatgggattacgctgtgtgtggatttctcctgaaaccacatatttgcctcttctg

SEQ ID NO: 146384 - DNA, 528 bp, Homo sapiens
accattagagataacactgtcctgcagttttacccatgaggtaatctttaggaatgaattagatgttaataatatactgatatttgtgtctgttgggaaaaaaagataatgacggtaaatggcactagcagccatagcagttcattatggcttatcatttgctattgctgtaagccaaagtaatatgttaaaccacctcattttaaattatgtcttaacttcaagcacagtggtttccctgtttgttttacagaaactagaaaaactgcttttggaattatctctacagtgaagaaacctcggccatcagaaggagatgaagattgtcttccagcttccaagaaagccaagtgtgagggctgaaaagaatgccccagtctctgtcagcactcccttcttcccttttatagttcatcagccacaacaaaaataaaacctttgtgtgatttactgttttcatttggagctagaaatcaatagtctataaaaacagttttacttgcaatccattaaaacaacaaacgaaaa

SEQ ID NO: 146385 - DNA, 1200 bp, Homo sapiens
gaattcggcacgaggtgggacttcagcatggcggtgtttgcagatttggacctgcgagcgggttctgacctgaaggctctgcgcggacttgtggcagactagccgctcaccttggctattcagttgttgctatcaatcatatcgttgactttaaggaaaagaaacaggaaattgaaaaaccagtagctgtttctgaactcttcacaactttgccaattgtacagggaaaatcaagaccaattaaaattttaactagattaacaattattgtctcggatcccatctcactgcaatggttttgagaggcaacttcttcggggggcccggctctatgatgttgttgcagttttttcccaaaggacaggaaaaaagcctttttcatattgctttgcacacatttaggatgtggggatttagtctggcataactggtaacagaggaaactaccatttttacttccaaaagacctcctattaatgtggcgattgaccgaggcctggcttttgaccttgccctaatacccctgctatcaaggactcccacaatgaggaaggtatacaatttccccagtgcccctccaattttgatgccaaatctggcaaagggaaagaatgttaattattatctaggtggctggcaggaaagggcctttagggaaataaggagggccctgatgacgtgggcaaatcctaggcttgcctgtttgggcctttttaaaagtgaacgccaagggttcgggtgtccacccaactgccgagcagcgccttctccatggagaaactagaaaaactgcttttggaattatctctacagtgaagaaacctcggccgatcagaaggagatgaagattgtcttccagcttccaagaaagccaagtgtgagggctgaaaacaatgccccagtctctggtcagcactcccttcttcccttttataggttccatcagcccacaacaaaaataaaaccctttgtgtgatttacctgttttcatttggagctagaaatcaatagtctataaaaacagttttacttgcaatccattaaaacaacaaacgaaacctagtgaagcatctttttaaaaggctgccagcttaatgaatttagatgtactttaagagagaaagactggttatttctcctttgtgtaagtgataaacaacagcaaatatacttgaataaaatgtttcaggtaaaaaaaaa

SEQ ID NO: 146386 - DNA, 1429 bp, Homo sapiens
gccttgtctgggactcagagccccctcggcttgtgccttcaggtcgcctcgtctgtgtgcatctcacgcccgagtgtgcttctgaaacgtgcattcaacctcaaacttttgccataaaatagaatgaaaccgttttgcccctgaatgaaatgtaggccttacttgtaataataagactgttccctgccttcggtctgtcattttccccacttgccctcccctacccacccccccacccacccaccctggggcttccctctgggggtcccgagggtcttcccatcacatgaagacatcaggttgggtcctgccccactgcccctccccctgttcctgccccaagccgtcaatcagattgtggagcagtacacagtcaggatgaaaatactgtaaatgcactcattgggggttttttggttttacttcatatcatgtgcaatgttgtggctttaacattttatgcaactatttatgaagacctctgttgtacctgtaataaatatatagaaaaagcacatacttccgtatggtgagctttatggttttgtgtgtgtgtgttggggttggcgggtgggtgggtagggtcgtagcccctgtgcccatcgggttcaaagagacttttcgtgaaatttgttggttttgaggactgtaaaagtgatttcatactctgaatataaaactggataatagggtaatgttttaaaatttaataatgctattattcagaatgccaaagtattatttttttttcccaaaatcagtctggacatttactactttttagactttttgacgttgaactttctgtataaaaattgggctgggttttgagcttttgggtaaggaaataaaagccgattaaggcactggccgccccgcggctggtacccaatgcccgagttcactgtgggcagcattcggcactggtgtgggggagtccttttcaacttcaagggagggctggggtttctggggcaccccttgaagttttctgggatgtctttttatcttttctcgtgtggaactggcacttacaaaagaggacccagcctcgctttccccaagccaggccaggacaccgggggtcttggaggccataaaacttggcgtagtttaagctttgcagcttccagggtattttatttattcttttgttgggtttttgtttgtttcttcttgtaaaattgtacagaaactttttaaaagaaattggattcgaaactggatgtgtatttgtaacctcataatttttatttggggattgtttcttttattatttcagttaaatttttacattattttgcatgtatatttttttgtacagagaccttacatgtttacccagtatgatgtgatgtaaatattttattttgccatcagttattttaaaaaattaaacatatttgcctgaaaaaaaaaaaaaaaaaaa

SEQ ID NO: 146387 - DNA, 1516 bp, Homo sapiens
  misc_feature (1)...(1516): n = a,t,c or g
tttttttttttttataaaaaatttattgagatgatgtaattataggcttttctttaaaaattatttgcaactcactggccctgaaaaaaggcatttttttttgttttttttttttcttttttgttacattcatttgattcagtccctttataaaccccacacctccataaacaagagattagaaactaaacaaaaaggggggcgggggaaggaaattctaaagtcgttctgggtttgcaggtgggttgcgggtcacaaagaggaaatcatcaaggaatgttcacttgggcatgtgtggaaaggattcagggggggnctgcagctgtttaggtgtttgatgcagttggggtcaaaagagtatcagggttagtcttctgtgggggttttaggggaggggattatggtgcctccctcccacctcactggcttccttgtttcacagcctttaattgtactccgaagaggagcaaggagagagttgaacagcctctaacctagcccccaaatgcttggggcaaaggaaaactgcccctttttcttgggtgtgttttcccaaatctttttatcttcagtttcctgggtggggaatgagccagacagggtgagcccaggctggatcctgaggcctaattccattcttggcatgctgtctgctcctagggcaagtcactttcacctcccctgacacccaggtttcttttttgccaaaaagggagttccctatttccaaaaatgtattccagacttggagcctaggcggtgaaaggtgggaatggtggttacttcatcatttcggtaaattgtcacagcccatttgaatttcagctaaagcgacattctcatttggacaagagatcagtatcaaaagacattggatcagagggttccaaacatactggtgaaaggagaaaatccattggtctattattcctctttttctgtggggatgccctcatctccccaaaggatttggaacattggtgatgcccaccttaagccaaaaccaagtcgcccctgggttcaagatccttaagagttccatgttaccttcaaacatagcccagtctagcccaattacccagtgctttccttctgaatagagaggagactgccctggctagcttgagatgtaggaatgagaacttcaagacccacacgtgagaatgcacatccatcacacggcagggctcctttgcattttcctctcctgacttcagatttgtctcctgacaacacccctagtacttagtgttgaaatgagtcacgccgggtggattaggcaggtacaatataaactctgaaagcagggattatggctgattgagctttgggtccctcagtgtccagcaggtgcttcatcaaggtttgctaactgaatctgaaatctttagggtctgcagggtgtaaatactgtatccaggtgctggcactacccgggttttctcataaagaacaaatgaagaggacatttgcagttaggggaattacgaaatccttattggtagtacagattgat

SEQ ID NO: 146388 - DNA, 1503 bp, Homo sapiens
cagccctccacctcccagccaagatctgtcttccttcatggtgcctccagggagccttcctggtcccaggacctctgggtggagggccatggcgtggaccttcacccttctggactgtgtggccatgctggtcatcggcttgcccaggctccagcctctccagattctgaggggtctcagcccaccgcccttggtgccttctttgtagagcccaccgctacctccctctccccgttggatgtccattccattccccaggtgcctccttcccaactgggggtggttaaagggagccccactggtgctacctggggaatggggcacctgggggccaaggcagagggaagggggtcctcccgattagggtcgagtgtcagcctgggttctatcctttggtgcagccccattgccttttcccttcaggctctgttgctccctcctctgcagctgcacgaaggcgccatctggtgtctgcatgggtgttggcagcctgggagtgatcactgcacgcccatcgtgcacacctgcccatcgtgcacacccacccatggtgcacacctgtagtcctccatgaggacatgggaaggtaggagttgccgccctgggggagggtcccgggctgctcacctctccccttctgctgagcttctgcgcacccctccctggaacttaagccatactgtgtgacctgcctctgaaaccagggtgccaggggaatggcctttctcacagctggcctttgccccgtccaccctgtgctgcttcccttcacagcattaaccttccaagtctgggtcccactgagcctcaaagctggaaggaagcccctgcgggaagggtggggtggggttgggtggctgctttcccaagaggcctgagccaagaaaccatccccatttcgttctgtggtatctccccctaccacaaaccaggctggaacccaagccccttcctccacagctgccttcagtggggtagaatggggccagggcccagctttggccttagcttgacggcagggcccctgccattgcaggagaggttggttcccactcagcttctgccggtcggcaagcctgggccaggcccttttcctgcatgtgccacctccagtgggaaaccaaaactaaagagaccactctgtgccaagtcgactatgccttagacacatcctcctaccgtccccaatgccccctgggcaggaggcagtggagaaccaagcccccatggcctcagaatttccccccagttccccaagtgtctctggggacctgaagccctggggctttcgttcctttctttgccaagggggggcctggtcctgagggcaggacagggggtttggagatgtgggcctttgatagacccacttgggccttcatgccatggcctgtggatggagaatgtgcagttatttattatgcgtattcagtttgtaaaacgtatcctctgtattcagtaaacaggctgccttttccagggagggctgccatttcatttcca

SEQ ID NO: 146389 - DNA, 1951 bp, Homo sapiens
ctcagaaacaactctcttgggagatgagggaaataagatgaattctgtgctgtcaaggcagtaagtctgaagaaaggaccatgcttcttatattatcttccaccttgcttaaaacagcccatagctttgagttgacattttcattcttggcggatagcctactttatgaaggtaaggaatgaactcctacccttcttgggtcattctctgtactgatgcgttagtcttataatactttgcaccaacctgaggaatcttctaggcttctctagcatcccctaaagactgtggctatttcacgtctctctccctgcctgccttccttttcccttcctttcccctcctcatgttttctggttgtgcccatctgtaccagctcctttccatccaccttcgtatgcacccagatttttctgttcccatctgtcctatttgttattcatcccgctgctcaacttctccagtatgttgcttcccttaagttgccattcattctcttcatgactttactaactcacttcggtctctgtctgtcaactaaacttttctaaaggttaccagttatccaatcaccaaatccatggctttttctcaaagcttagtcttgtccttgacagaactggacactattgaccatccaaatggaaattccccctttcttggtgtctctgacaaatggtcctttgccttatcttgtgctggtggtgaagaggccctcaaagccaggcctctctattcctttgactgtctcctcagccattaacccattcttcatcctcggagtggagtgattcccaagtctttggtcttgggcttaatccctaaagaacccagttctggctgggtatcgaatagttcagcttgggttggtcattgaaaggaatttctctcttctgtccatcagcctgtccctcccaactgtctaggacagtcttcggtcacctaaattcctaactgcagacttttgccctttttctctctcatcaccaaagtcccatccatttttgtttaatagaaagatcctgagctacaggcttcccattttccttgcttctcttattgcacacccccagcccattttgcttctctcttggattttgctttttcagatccacatttattgggtttcctgtccagcttcttggaaaggagctcaatcttggaaagactgatctttccaaaacattttccctggactgaagcttcggtctgaacttctcaaggcttagagaatccagttacagaccttttggggttcaggatgctatagattgacaccctcctgccatgtttttctctgcatcccaaaccttgcaaggcccctcctgtggggtgcccatctgtgcctttattccggctgtgccctcgactttccagcttcccatgtttctttgggttaggtttctctcccttccttctttctccttccccaatccgcctgtttcgtcagggcccagtttgtttcctcatacacctttcctcactaccccaccccacatggttgactctttccctcagctccaccagctcttcatcatgccactcatttcagaacttgagcaaaacagggcagtcaggatctgatggtctttctgggtctccctaagaaaactaagctctttgagggacagcccttggaaatgcttttcctatctgctgagcatggtgaccttccttaggacttccagagttcagttccttctggcagagaggttttctttctccatgccatatggatgtggactcaaatgagggggtcccacagctttttcctgggtaaccaatttgctgtggaccttatacatgttggggtttgctcttaaagaggagagcaggaagaaaggttggtttcagaaaccaagagggtcggcagtggacgcgtacattttgtcacggagtccacagagctgagcttttgcagcagactctgagaagtatcattgcttgtgtt

SEQ ID NO: 146390 - DNA, 358 bp, Homo sapiens
  misc_feature (1)...(358): n = a,t,c or g
ctttaacgtagaatcagatagctggaagagatcttcgagggaaagtaagttccctaaagtcacatctatgtctcctagctcagtgttctttgtcnnnnnnnnnnnnnnnnnnnnnnnnnnnnnnnnnnnnnnnnnnnaaagggcttcattcataccttttcccttggacctggnnnnnnnnnnnttttttttatcttttcaaatgaaatctattgatttctagtaatcatatttgaatcagtgttaaagcatatatagtcttatatgtaaactagattcttaagattatttgaacctttgagatgaagtttacactcaactaanatcattccattgattttattgattaacatcaatn

SEQ ID NO: 146391 - DNA, 2145 bp, Homo sapiens
ttttttttttttaatttttaaattgacatttattaaattcaaacagtatttgaggactatctagtttatatacatgttgaggttgataaagtattgaggactatctagtttatatacacgttgaggttgataaagttcaaattctgttttaggaagttaacaatgaattgagttcattttaactgaatgttactataaaagatggttttcttgctgcaatgtaaatctgctattaagaaattagcaaagtggctggtggtgtttgtgcctttaagatcatcgttcaaaagaattcagcaaactcgataacaaaggtaagacaaacataacctttattctctctcaaaaacccagagaacagggcctgggaaccatattcgttaatttaaccagaatcagaatactttaactttcatagtctcatttaaaattttatagcaatatactgaccattctaaaaataacaaaatacatgttgctctcaactacatagttaaaaaaggtagtaaattctcttacccaaaatagaggaggggtgggctagtgagctgctcaaacatttgtaacaaataaaaatgtatctatatacatattaatgatcatgttttcattagcctaaaatcaccattaacaaaatctaataataaaattgtgtcggtgttcaggagttgggaagccaacacattaaattaacaaagtatttttggtatatgtaaataatgggatagaatctctcggaatcaggattgtcccagaagttctaaggcagatgtcaatggacatgccacattgtcccatgttccagtaattttccaaagactagaataaactatgtaaactattcaatacaattcaatattacttaactgcctaaaaagtacttcaagatcttgcactgccttgagtgagtataatcaagttagtaattggaaaatagctgtaatagcaggcactgaagaattctgacaaataccaaacaactgtttgtttttaccaaataaactggtaagatgatatcacaaaggggttttaagttattttgctgtacaaggtttttaaaaataaactattgcttcttagaataactttaaacatactgattgatgttaatcaataaaatcaatggaatgattttagttgagtgtaaacttcatctcaaaggttcaaataatcttaagaatctagtttacatataagactatatatgctttaacattgattcaaatatgattactagaaatcaatagatttcatttgaaaagataaaaaaaaatttttttccaggtccaagggaaaaggtatgaatgaagccctttctaatcacacacacacacacacacacacacacacaatgacaaagaacactgagctaggagacatagatgtgactttagggaacttactttccctcgaagatctcttccagctatctgattctacgttaaagcatttcctctgaactgtacaaactggcctcacattttcgagtttctacacagtacctggcaaagtttgcctgttggcttttacaccaaaatactaaaatatcaaatgaatcacataaaccctgtcctacaactctgtatgccaactagttttccccagatagtaattttttaaaaattcattccacaaatcatcaagagcttcctacgttcaaggcagagtgccagaccaaacctggaacatcatggttgtcactgcccctgggaacaaattactatccgaaaaagtgaattcagttgactgcttcaggcccaacctggttcagggtcgtgattcccaaatttgagggaatatgggactctccagtggagtttgttaaaacacagcttcgaggatctcatcccagccttactgtgtctgaatctctgtttggtgtctcctaatctacctgcatatttaacaagcatgttctccctcacgcctccacgtctctgcaggtaatttgtgggcctcactctccattccagcccactctccccgaccaaagaaaagaaaaccactgtactgtagtggcgaaagccctggactcaagattcaggagtcacttgcagctgcctgatctttgttacttcacattggtaggtctctcaatctcttcctctaataggggtttaataggagtctccatagggatccctt

SEQ ID NO: 146392 - DNA, 513 bp, Homo sapiens
tttagcttgagatgggacttggtcttagagctagttctaaaggttgtttacttttcttagggaggagtctgcttactagtctttatcagctcttaaaaacagaaactcatcctgtccaaagttcgtggcagaaagggtaaagtttttaccaaattagtgctcagcaaaagaatgccctgcggtccccaaagtaaaagaatgacaagctgtaccttaaaccaaaacacttcgtaatctcatccaattgcaaaaagagttattagccaacccaggtattcccagtagtgacaagtggatataactgtgtagtcattcacctctgcttaatatgaatactttacaacctcttttgccttttgcaggaacgtccttgtgaagacctttatctgagccactgtacttcgttatcactgccatgcagtttacatgagctgttctgcagctcaaattccattttgtgaatgggtttttttttttaataaactgtatttaacttaaaaaaaaaaaaaaaaa

SEQ ID NO: 146393 - DNA, 996 bp, Homo sapiens
tttttttttttttttttttaagttaaatacagtttattaaaaaaaaaaaacccattcacaaaatcggaatttcgagctgcagaacagctcatgtaaactgcatggcagctgataacgaagtacagtggctcagataaaggtcttcaccaagacggtccttttctgccacggacttgggacagatggagtttctgttttttaagagctcgataagactagtagcagactcctccctagaaaagtaaacaaccttttagaactagctcctaagaccaagtcccatctcagccttaaaccccccatacctcccattaataacccacccatccccccaccatttggggaagtctattactttgagccgattattttaaggaaatgggtcaaaggaagataaataaaagggcaaaaatttatattcacagtacaaataatgtgctcacttccttcaactggggagccatcaatagggtgtctatttaaaacaattcatctccagaaaaaccaagttcagcttatctggactagttttggctcaatatgttaagaaaaatgtttaacaggaaaactggacttttaagtaactatatgggatgtaagtaaaatctgttctttaccttacccggcattagcaataaaacctttccctccctggttcctgaactggctagtcctaaagagtcaaggtgtgccttaactcttgtctgcctccttccttgcgatggatcactggatatttcactccctcctagctttcatggagcgtgccgtggccctgcccctggcttatctgtactccacataccacaagtgtctactctcagctgtagagtgtctgagctcggagccattcgcgctatacttgctagcagttcctagtagctgaacatctctcctggatctttaaaggcattgtcacgaatcctgaggtatctgcaaactccctcaatagttagggttccacctgctattgcaaactcagccagtatcatggat

SEQ ID NO: 146394 - DNA, 4123 bp, Homo sapiens
ctgggctgagcttttggacaaggtgctgtgccagtctacacccctcagccagctgttcttggaggtcctgcccctgggacttgtccggctcatccggagtgaggagggcctggagatgctcattcaatgagcgggaggcatctctcccttcccgtaacttctcccttaactgggtcagctctcgttcctgagagtgaaccaggactttatattgcctgagctcctcagcttgcttcagctgctctgcaagcttctcctccttgaactgtcgctcattcctcagcatagattttatgaggtctttgcactcttcatatttgtatttgttctgctgcttggccaggaagcaggccacttgagttacaaaacatttctctttgaggcttctgaactgctgtttcttctctgccagctgggggcacaatttctcattgatttctagaatgttcatctctgccttctcgctggacaaagggccggctgataccaccatgctgacgtttgtggcagaagaggtggggccagggactgggagaatgtttagagcatcctgacatccatcatgagaggattctctgtctacaaccagagatgagttgactttgtcttcctcaaatgtgattttgatgttcttgtgaggctggatggagtcacaagggccgtggctatttgaacaagtgatggcacattcctccagtgagtcctcagggactttgctctcttcagccttctgcacctccctgggggcagatgattccagtactttctcatcctcctcaacttgaacatcttcatcctcatcttcgtcattttctgggctgagcttttggacaaggtgctgtgccagtctacacccctcagccagctgttcttggaggtcctgcccctgggacttgtccggctcatccggagtgaggagggcctggagatgctcattcaatgagcgggaggcatctctcccttcccgtaacttctcccttaactgggtcagctctcgttcctgagagtgaaccaggactttatattgcctgagctcctcagcttgcttcagctgctctgcaagcttctcctccttgaactgtcgctcattcctcagcataaattttatgaggtctttacactcttcatacttgtatttcttctgtcggttggccaggaagccggccagttgagttagaaaacatctctctttgaggtttctgaactgctgtttgttctctgccaactgggggcgcaatttctcgttgatttctagaatgttcatctctgccttctcgctggaccaagggccggctgataccaccatgctgacgtttgtggcagaagaggtggagtcagggactgcatcgagctctccgcctccccaacccgccagcccaggcggccccagcagcagcgaccagaggagcccctgcagcaacgcaaaggccaggtggacacctccatctacagcctcgtggcggacgggaccttcagcgttcccagtactgacctcctttgttccttccactccaccgctccccacagctttgcccgcctttccttcacatacacacaccattttaatttcaggagtcattaccccacacaccttattgctgccaaaaccacatgggcttcctctcacttccaggctccatcgggtgcccacattgctaaacctaactagaagtgtgcacacaggggagccagggatgcattctagaagggacaagccccaagtggcgtaagacaggatggaaatgagtggaaagtggataagcactgaaacaattctatgaccatctgtttcatggccacctgtttgctcattttcttgatccataggctcacatttgatcccaactggcagctgcttcttggcattaactttggattcccaaccagtaaatcttagcaagatctgagtttctccaggtatgatattattttgtttgaccatccttatcttcaagggctttatgtggctgttccagagcccttgccaccttccctgctgctccttgtccactccagaagctgcccggctgcaggtgggggcctcagcccctgggtctgacatcgtccatttgtcattctcactggacttccctccttgcactggctcccactcccccaggacctgagatttactcattatggggcctctagcccagagcagggcatggtacctaatagtcaccccatgaatggtcagtgaaagaaggcgtccaccacaaggtcctgttggatctggcagctcttcatgtcggcccacaccatgtgaagctgctcttggtgcactgaatgggtaagtttctacatcggtgcctcggagagtccaccagaagccctgacggagcgtgccgacttccagtacagccagcgcgagctggacaccatcgaggtcttccccaccaagagcgcccgcggcaaccgtgtctcctgcatgtatgttcgctgcgtgcctggtgccaggtacacggtcctcttctcgcacggcaatgccgtggacctgggccagatgagcagcttctacattggcctgggctcccgcctccactgcaacatcttcacctacgactcctccggctacggtgccagctcgggcaggccttccgagaggaacctctatgccgacatcgacgccacctggcaggccctgcgcaccaggtgagggcgaccctgggggcagctcagcctggcgggagggagtgggtggtggtctgggggtctgtgcacgtgtggctgggagcccatcggctgaggcagcacttggggccaagtgaggcgaggctgctgcatccaggtccggaggactggcccatgaggccctgtggctgcggagcttggccatcctgccatggccagctctgagctctgtctgctcggccatctgtcctgctgcccctttgtcctgcaggaacctaggcccagagccatgagggggaggccagagcgtgcccagggcctccactggggatgtgtcccgttcgtttgagtggtgacatccaggtggcagctgggggctcctgcctgcccatgctcctgccttgcaagagggcgtctgcctgggatcagagcctagagcgtgtgggaggagagttgtggggtcccggcatgggcagggtggcaggtgggtcccgcgtgcttgggactgggcacgaggaggccttgtaactggtgctggatcagctgggtcaggggccgcacaccaatgacctgggggtgagggtgcccctgggtgggagctggtggtgctgaggtggccgaggacttgtccactcccaagggaaggtgctggtgggagggggtgccacctccgcagccaccaccctcgatgctgacctgggttgcactggcatctcactgggcgtggggactccgagagtccaaaattgggtggagacatttggggacacagctgcctgaattcctcatggccaagggggtgggcaagggctgcagggaggaagagtgtccgctgtcctggccagtgcaccaggaacggctttctaacccgggcaggaaggtatgaagcattcaggatgtgggggccacacagttcccagtgtgcactgacttggctgagtggggagactggagggtcgcatccggagctgggcccggggacgcccgctggtgggaagggtgcgcgcgcgttggaggccgcggctgaccctgctccggcgccgccaggtacggcatcagcccggacagcatcatcctgtacgggcagagcatcggcacggtgcccaccatggacctggcctcgcgctacgagtgtgccgcggtggtgctgcactcgccgctcacctcgggcatgcgcgtcgccttccgcgacaccaagaagacctactgcttcgacgccttccctaacatcgagaaggtgtccaagatcacgtctcccgtgctcatcatccacggcagggaggacgaggtgatcgacttctcgcacgggctggcgctctacgagcgctgccccaaggcggtggagccgctgtgggtggagggcgccgggcacaacgacatcgagctctacagccagtacctggagcgcctgcgtcgcttcatctcccaggagctgcccagccagcgcgccttccaaattttccttgaatctgtcctcttctacctcctccat

SEQ ID NO: 146395 - DNA, 1342 bp, Homo sapiens
agcggccgccctttttttttttttttaagtggcggagcgagggctactgcacagctagcagagtcgtggcgaggaggacagcacctgcaatcgagctctccgcctcccccacctgccagcccaggcggccccagcagcagcgaccagaggagcccctgcagcaacgcaaaggccaggtggacacctccatctacagcctcgtggcggacgggacctgttaggacacggcccttgtgggcaacaaggaccccaccttccatctgggccgccatcccagggaaaaccttcctcaacatcacgccagctgaggttggtgtcctgggttggcaaagactgggtcaaacttttgtcattgaatggacttgacactggggggcccagaaattataacttgttggttcctggggacttccactggctggcaggatgggggaattgaaccgtggatcttcatattgaagagcatcggtgggagtccccaccttcaacgtcattgtcaccatgactgccaagacgctaggcctgctgatgggcaaagaaggtatccatggcaatttcatcgacaagtaatgttatgaaatggcctcccaccttcagcgttcccagtactgacctcctttgttccttccactccaccgctccccacagctttgcccgcctttccttcacatacacacaccattttaatttcaggggtcattaccccacacaccttattgctgccaaaaccacatgggctgggggccagggatagatggacagacaccttcccccacccatacccctcctgtgtgtggctggaaaacttttttgttttgatggatttttttatgaataaaaaagattctactaaaaaaaaatcaatacctgtacatatgtgggcatattgtttgaatctgtattcttttactttgatatatttatgaatacttacaccattactactgttttaaaattactgtagctttaaaatcaggtttgaaatctagcagagtaagtcctccaacttattgcttcttcaagaccgacttgcttattctaggttctttgattttcaaatacattttgaaactagctttcaaatttctctaaaatctcctactagaaatattaatcagaattgtgttgatgtaatatgctaacaaaattgagtcttccaatcaatgaacatgatatatatttatttagccttctttaatttttctcaccaattgcttttaggggccttgtacctgcttcattgcatgtattgttaagcatgtaatgattctggctattaatctctattatgttttattgaatttcattttctagctgctaattgctagtatggagaaattaa

SEQ ID NO: 146396 - DNA, 610 bp, Homo sapiens
gctcgactttttttttgaggaagacgcggtcgtaagggctgaggattttttggttccgcaacgctcctgcttcctgagctcacccgctgcttcgctctcgcccgaggaaccaagtcggtcaggaaagcccgcgcgcaacaaccaatggctttctaaggataccggaaaaaacaactccgtggagaccggaggtgggcaattcaccgaattcgaatcaccctaacaagccgcaacgtaaaatccttggaaaaaggtgtgtgcttgactttgataaagaaggcgcaaaaaggaaaagaatctcaaaagttgaaagggaccaggttcgaatgcctaccaagacttttgagaatcactacaaagaaaacctccttgtgggtgaaaggttctaaagaccgttgggatcgttttccagattgaggatttcacaagccgacttcatttgactttgcacagttccttcttgagatttgtttaaggcagatttacttccttcagttatttgaggccgggatttgaggttggaagttcaccctttgcagatgctttaagtcaaatatctatacatacaattgatgaccagttgttaaaaaaaaaaaaaaaaaaaaagata

SEQ ID NO: 146397 - DNA, 2074 bp, Homo sapiens
gccagaagttggttttttcatgacaagcaaaaatggggaggtgtgactctatgtcagatttagttagcacagtccacagggcaggataatcctgatggcgtgtagccacatttgctgcaaaccagatgtctgcgaatggaatataatgatacccccggggctccttcctcaggggtgaggaacaggtgcctggttccctgatggtgcatggctggtgtccagtcatctttaagcctgggcagtggcccctcaaggctcgggtttccctgcacatggtattttgtgatcctccccagcggagggagagagagttatcttggtttccttttcacttgttttcgggctgcttcaaagcaaacatcccagttccaaatgttctttgtggtttgaaatcctggcagagcccagggtcacatccaagtgggactggcctctagcaccaccttctggccacaggcagagaatgggattccatcaaaagcctctcaaccaggccgtttccctaaagaatcacccagatcttaactgccctctccaccttctttttttttttccctcctattttacattctattttctcatatccagcttttctctctaagcctaaccaaatgctttggtgaatgatgcttggaaaagctggagttttaaaaggcattcatccatttatgaactttcttccagcccaggatccctgcagagaaccagaggttacaaatctgccctcctttctcccctaaaaggtccctgagggcaggagaggtgcatcgtagctccagctatagcaaaatcattgccctgactcactggggagacccagggggtttgggatgttgctgacacctcatgggccacctcatcagcccatctttgtagcttcaggttcagctctgggtgctgcaggcagggacccctctgctccctgcctgaatgcagggccagtctccaaggaactctgtctgcagagtagaaagagctgtgggctgggattcaggggcctgagggagcccctgccactgcctgcccagaaccagtgctcctcattctacatagatgacagcatgcatgtgccttttggctaacacacactcttgtttaattcccagccaccttcaccccagggatgagttccagttggtttaagccagactggtgcatttaattctggctgcaacaactggattctgttaagtgcccattgctaagccaatgagctatctgctgggctgtgggaaagagaaatgcagtctcctgcacgggagggtgtgagaaggccacccaggcagcctgcagctagagctcggcgctgagagagcacaggagagtcagacacctccattctggttacactttttccagatgctgaatggagactcgctgggaaagcccgcctccagacaatttcaacatagcgccggtaacaccctagttttgctcaaactctgacttgtgctatctgtcccagacagttcacgtctgcctcgtcacttccctccttcacactgcaccaggaaaaggccacacctccctacacagcagcagccttttaggaaatgtgctctacaggaaaagtggtttttctgattaaacatcaggaactagagtcaacaatcgctgtcctctcccgtgcctgtcacgctccactccccacccagctgcaatgtggccttgattttctcatcagtaaaatgggaaagctggatttggaggctggaagagatctcacagcttgaccaccctagtaggagggagggagaccagacggaggccaggcaaccgacccaggcagcatctggctcagacgcagacacatcttcatgttgagggacctattcttacacagcaaaacccagagaagtcgactgctcagcctgagcctgtcatccctatatagactcagcttttaggagaagagggagagttgaggagatagcatcgctctctgtatcagtgtctgatgatctggagtctgcccctggggtcactcagtcactcaacaaacatttgttgagctcttaacgtcatatatgggtgtgagctctgcccttcgaggctgtatgttctgaatgatgac

SEQ ID NO: 146398 - DNA, 2628 bp, Homo sapiens
acactgtgatctctctctctctcatttgtttggtcattgagggtttgtttgtgttttcatcaatgtctttgtaaagcacaaattatctgccttaaaggggctctgggtcggggaatcctgagccttgggtcccctccctctcttcttccctccttctccgctccctgtgcagaagggctgatattcaaaccaaaaactagagggggcagggccagggcagggaggcttccagcctgtgttcccttaacttggaggaaccagcaattttccatcctttcagaaagtctccaagccaagttcaggctcactgacctggctctgacgaggaccccaggccactctgagaagacccttggaagtagggacaaggctgcagggcctctttcgggtttccttggacagtgccatggttcccaatgctctgttgtcaccccaggacacagccactcggggcccccgctgcccccagctgatcccccactcattcccacaccctcttcctcatccctcagtgatgtgaaggtgggaaggaaaggagcttggcattgggagcccttcaagaaggtacccagaaggaaccctcccagtcctgctctctggcccacaccctgtgcaggcagctgagaggcagcgtgcagccctactgtcccttactggggcagcagagggccttcggaggcagaagtgaggccctggggttttggggggaaaggtcagctcagtgctgttccaccttttagggaggttactgaggggaaccaggatgggagaatgaggagtaaaatgctcacggcaaagtcagcagcactggtaagccaagactgagaaatacaaaggttgcttgtttgaccccaatctgcttgaaacctgactctgcttctctcatttgtcttcctaccctactcacataattcactcattgactcactcattcaccagatatttattgacctgctattataagctttacatcctcccatgttgtcctggcatgtgcagtatacacggtctaactcatctctccccagatctctcagaaccttgagcttgggaattgaactggggtcacctgtgtcctttcttatggactcgcaggattttagaaccctaatgcaccctggagggtagctgggccagacttctcatttcacaggtgaggagactggtgccccacagggattaagtgccttgcccaaggtcaggcttatctccagagggaggtgccctggactggggcccagatgttcagggaccctgcctacacctcatttccagtgtgggctgccttagttagttatgagaacagggaagggctgggaagagacagcctccaaggtcaacacttggagagggtttcacttgctctgaaagacccctggtccaggattcgccctctcccatgccttcaagtcagcatcaggcttagggcaaagaccaggcctctgaaagctgcctccttgtaattcatgcaggaaagatgtcaaaagtcagcccccatccttgggcctgatcaggggtgttcagccttaaccccacctgtgttcctgaagtctcttaccctacctgcttcaggactgagacagttaatttcacttgaacatatttattaagcacttgctgttagggccaacagtttaaggaatccaataattgaaatgggacagattcatggggactttagagttccaacagggataagtgagacccagacaatgacaatgagataaatgttaggaaggggggaggtattggggtgaccttccctgcaggtcctgggggcctagatgggcccaagactggggtgagagtcttggcagagcctttgcaacaccttaagtggacaggactgggaggtcttggtggttggagccaacgtgggttccctgcggctccttagtcacctctgatagcagattgagggaggaaaacaggtaaggcatgaggaaatggccaggttgggttaacccactggtttcaaccagttcaggaatgaggttatttggccatgactggcttgatcttgaactcaaggatctgcttcaaaatgcacacaggcctaagttgaagtttaaaccccaagcaaaacattcctccctgttaaatgggaaaatcctactttctacccccaccctggccctgttttttgtttttttttttttccccaagatcattaggatgtccttcacccctccttcactgcctctcctctttgggggacaggctgggacctttgaggaagataaagccttccttgactacccatcatattcagtgtccctgttcctcactcagagaggaaggcagaaccaagtcaggcttatttcagtaagttccacagttctacaagactgcaggaattctccttaagggaggagagcaagcaggtgtggccccagcttctggaaatggcagaagagagggttttctcattgaatgggggtgggggctcgtgtgtcctgggaaaccccatcagtcccttcatttcttgagactcaactcctgggaggagagggtctcaagagttgtccctggaaggagggcgggggcagtctgcatctatttcaggttgtggctcttggttctaggactcttacttctctggctaagggctcagcttcttgggacttc

SEQ ID NO: 146399 - DNA, 2148 bp, Homo sapiens
ttcatgcagatttttattccagatgaacatgttttaaaagtgcctgaaatatgactgccatatgaatgtgattctgcagcaaaaaacacaaaatagatcatttaattacagaaaatgagatcctctgtgaattctgaatgttaaaaaccaacactgcttttaatcctcttttaatggtttaatacaagctttgtgttctgaaacaaggctgccataagtagaatgggaatcccttcctaaaggtgggtgtgaacctcacccacaagctgagctttatagagcccttgagaaaccctcctgagcactaagcagttggggtgcctgattttcttgtaccttttgaaaaattaagtcactccccagtttcctgcataagttcttgaacagaatgaaatcacatctccattcaaaaaatgtctcaagcatctactgttgtgtaaggaacttctgattctgattgctgttacttgaataggaaatggttactcattctgtataaaagttttgcaagagaatgaattttttattctgtaatcaaaaagcaataacttgaaattcactctgtaatattataggtcagtcagaattatacaagttttaccaaattgttacacttattctccaagctgccagaacctggtatctgtatctgtaaaaccaaattaacttttgcttaaatgggaagtatacatatgtctgtatagatacattacccctttacatgtttaacatacacacacttaaacacataaatactagtgtgattatatctttggagtttgcaatatagcataaaggacaagtagaactgcacattaagattacctaccgaagcaactagatgtggctgggacacaatcaaaggaggaattttgtccacaggaaggtgaggaaattccaaatgaagcctagatcttcagtatcataaaaaggcagagctggccaggcacagtggctcatgcctgtaatcttatcactttgggaggctgagatgggaggatctcttgagaccaggtgttcaagaccagcctcatcaacatagttgagaccccatctctattaaaaaaataaataggcagagctaaactaaccccagtgtcacaaaactcaactggtcatataaatgagtgaaacaggcctctcacacaagcgatgtaaaaccagctgggagcagtgggagctgtggcaaactaaagtgcccaagccgcatttaaaaagggcatctgttcagctccatctgcttgctgcggtgcaagaatgctaaaccaggattaccagttcttcacattttttgaaatccaaattttcatgagaaacattctcatttttaaatatcaagaagtgattttaaaatgtttaaatggtgctggttaaacaaacacgtctgcagctggatttagcttgcaagctgccaagttgcaacctcttttcattctaggaacttctgtcatttttcatcatagcaagtctatgcggacaaaaagcctccaaactttccaactggtgtaggcccagtacagctggcaagggtcattaggaatataatgggctatcccccctctgccaaataagactatccacaaccccagctcagacacagtggttatatgattttgtgtccatacaggagaggccttggtgtcttcacatacattctctgagccaacatctatccagcagccctgacctcctgctataatttaagtctatttccttttaatctaataaggagttgatagtaaaaagggcaggtgatgggaaatcagtgtattaatcacaatgggagtatattggggcaactccacagcttatagtttgataaaggcaaatacatgaaaaataaaaatgctactaatgccccaaggtgtctatcaaaatgatgtagggggtatcttaaactgtccaaggcaatcatgcattgaactttattcctatgcagagccaaaacgaatagtgttgataaaatagctaaactttctaaactggagaggaggctacagtgccagagagttattgtctcttttgctttaaatggtaatcttaaaagttgcattgtgctcttcctttgttttgggatagatatatatagagagagatactataaggaagtttatttcttatgaagtacactgaataatgtatttcttt

SEQ ID NO: 146400 - DNA, 396 bp, Homo sapiens
cccacgcgtccggtattttcttgcaccaactaatgcggagtccctggcggctgaggagggcggagagttctgtggtgaaatagtgggaaggattcatgtaggcatcgggaagagcctaagtccacattataaaataggaagttgatgcggggtacagttactcccggaccggcggcgtgaaagtcgagatatcatcgttgaactgtaaacaagtgagaaccaaactttcacaggcatttaatcattggctgaaagttccagaggacaagctacagattattattgaagtgacagaaatgttgcataatgccagtttactcatcgatgatattgaagacaactcaaaactccgacgtggctttccagtggcccacagcatctatggaatcccatctg

SEQ ID NO: 146401 - DNA, 398 bp, Homo sapiens
tttcgtggcgcattttcttgcaccaactaatgcggtgtcgctggcggctgaggagggcggagagttctgtggtgaaatagtgggaaggattcatgtaggcatcgggaagagcctaagtccacattataaaataggaagttgatgcggggtacagttactcccggaccggcggcgtgaaagtcgtgatatcatcgttgaactgtgagcggcagtggcggcggctggggggaacccggatgggaagaagggcgggggaggctgggaggcggggcagaggaaagaaagaaaggagagtgaggacccggatgctgaaccggattgtgtatgaattttccatcccctagctttacgcgaggagggagaggaagggttggctcagtggcgcggaagggagcatc

SEQ ID NO: 146402 - DNA, 1883 bp, Homo sapiens
atgttaaaaaaaaaaatcataaaaagccattgttctgttacacataatctgtactgaagtcataagcatcatcctcttcaatgattttatccaagataaaagaccttgtagactgttcacctgctgtagtctcctcagaagtgcctcccctgtctcttctgcagcaaacatgcctgagctgttttcatcaacttcttcatcaacagtttcctggtcactgtctttgtcatcctccctctcctcctgcttcctttctttccgttttggcaattcttcatgtatgtccttttcttctattattccatttgtcagaccggaagactggaaaaggatgctattggccaaatgagggcccttgatggctcttatgctctgtgcattgttcttttccagttcttccagattgaagccgcttttcatgtctaccacaatactctcattaaaatatggaggaggagtccaagatgtagggggatggcaatagtaagctaatgaggcacctgtccactcagaccacagcagtttggcagcaccttcaacatttgggattccacctttttggtgcatacctcttctctgagcaagcatagtaaaaaattccagagaattcctgtagcctgggacagtatatttcagtactacctgtcgagcatcagcctgggaaaggatggcactggcagcctccatcggttttactacttcaatacttgctggacttcgcagagcaagcgcagaggaggaattaagtggagatacgatgaagctcggactatctatgattgtgatctgtttgtccaaggggacaacttgcatgctccttgtaagccccatggatacaccaacattacacatctgttcttgttttaagctattgataatgctgcttttccccacatttgggaaaccaattactccaacccgaatggctttgctgcaagtttcctgaaaacctccaagaagtttccaaaggccctctttcccaaagcagacttcacttctgaatggagcagcattcttctttgccttcacacgcttggttatcttccctttaaccctttgggttttggttgaggctctgaaacacccactgttgggcaaatctttccttcaaaataattttagccagctctcccaaatcctcctttggtacccagatctgatttatttaaatataaagtaccagctttttctgtccactctgggacaatggcctcttcctacctgaggacatctgcaaccaagaggatctctggcatccaacacctctaggacaacatcggaggcttcaatcacctttttaagttcttggcagtacagcttctttgaattctgtttgcccgacctgggctttgtttctcagttttgcaaagcccaaactcctttttccatagggtcccacatttgatggcttaaatatccaggattaggtttcaagttttcttttcttttctagttccttctgcctgtcaagtttctgctgctgttttagttcttcaagcctctgtttccttagctcagcttccctcaagaagagcctccttaaaggggagcactgtttggaactcctgggtctttcctaggcttcttgtgaccctgctttttagcctcctttcttaattttcgatgatgttctcgaacctttttttggattttataccgcttatggcaggtcatgcgtttacttgctttctttaacttaggccttttcatattggctgtagaaggaagcacaaacacagcaacctgcctccgctggcgccacgtgtgaactgaagccactgacgagcgtcacgcacttacgctgccgccgtaaagtgcgtcaccgcctctctgcgtgcgcgggcacgcagtgtcgcgcggagcagggatcgcttggcggccgc

SEQ ID NO: 146403 - DNA, 2443 bp, Homo sapiens
  misc_feature (1)...(2443): n = a,t,c or g
gtactcgcgtcagttcgcgcgttagtctcaagcctgttcctagcctagctcctagaagagctctaaggagcactgttgactcctggtcttcctagctctgtgacccgctttagcctccttctatttcgatgatgttctcgaaccttttttgattttataccgcttatggcaggtcatgcgtttacttgctttctttaactctttttgcactactcatttgtcctgggctctgcttcttgctcttttcttgcaccaactaatgcggtgtcgctggcggctgaggagggcggagagttctgtggtgaaatagtgggaaggattcatgtaggcatcgggaagagcctaagtccacattataaaataggaagttgatgcggggtacagttactcccggaccggcggcgtgaaagtcgtgatatcatcgttgaactattagctttgaagctgatattcatatgtataagacctaggagacagactaaacaatctttctagaaccgtatgactacttacttcagttaccagcaggtaaacaagtgagaacccaaacttttcacaggcatttaattcattgggctgaaagttccagaggccaagcttacagattatttatttgaagttgacaggaaattgtttggcttaatgcccagtttactcatccgatgatattgaagacaactcaaaacttccgacgtgggcttttccagtggcccacagcatctatggaatcccatctgtcatcaattctgccaattacgtgtatttccttggcttggagaaagtcttaacccttgatcacccagatgcagcgaagctttttacccgccagcttttggaactccatcacggacaaggcctagatatttactggagggataattacacttgtcccactgaataagaatataaagctatggagctgcagaaaacaggtggactgtttggattatcaaaatgcctcaagcatattgtctctgattaccaagaatatttaaaaccgctacttaatacacttgggctctttttccaaataagggatgattatgctaatctacactccaaagaatatagtgaaaacaaaagtttttgtgaagatctgacagagggaaagttctcatttcctactattcatgctatttggtcaaggcctgaaagcacccaggtgcagaatatcttgcgccagagaacagaaaacatagatataaaaaaatactgtgtacattatcttgaggatggagggttcttttgaatacactcgtaatacccttaaagagcttggaagctaaagcctataaacagattgatgcacgtggtggggaacccctgagcttagtagcctttagtaaaacaccttaagtaaagatgttccaaagaaggaaaatggaataatgtttaagcccattccttgatttgggaccctcatagctttattttaggttaatctttttttttgtcttttagccttacccaccttttaaaaaatttgtttattctcccagaaacagtaaataggtggagtagggggtggtgccagtgaattccgttttcatttagaagcccctctgtacagataatccaaaattccaaagttgaaagaatccaaaagcagccacagttatgtaggtctgatttgaatgtcataattgcagtgacaggacatttgccaccaactctatcacatactaccatcaatgttgtgtttaacacgtacaataaaaaagacttgattaccaggaatttttatccatacactttctaactgtactatctgggcagttccaagccagtttctattagctagctggaccaaagaccacaaatctctttttttcctaaacgctgctgtaaggaatatctcacttttccccccggaaacaccctcactgaagtcttctatgaaaaggcnnnnnnnnnnnnnnnnnnnnnnnnnnnnnnnagactgcgtcctttttaagcgaacattttagggcctgggagtttgtcaagtaaggaagtctcaagcccaaagagcagcgtcctgaccatgggggtttcattacgagcccttctgctggctctcaggcagaagccccacagcaccgggaccattcatgaggtcactgcccagctcatgatgtccgtgaggctgtccttttggccagtagccgtgtgcagctgtgtgggcacagatggcttcgttcatcctgatcaaggccccacctcagccacagcagtccccccaacctgtgttgtccaccctattatttcatgttacctgccaggtcctgctaggataggcaccccgtgggcattacataacacttcatggagtgggctgtgtcttgtaattttgggggacaggtttctctctttccctcttctttttttttgttcaaaagcccagagactgaacaaccagcttgcagtgttttaagtgtttcntcattgacagggttgggggctt

SEQ ID NO: 146404 - DNA, 377 bp, Homo sapiens
tttttttttttttttgtgctttaaatatatttttatttggttttctttatattaatttttttctcccatagaggaatagcattacagtctaacaatcagaattctgttacacacatacacaggcatgccacatgacccagttgaggtggttgtctccttgagtctgttgacacgtcacatggtcaaagtctcctcatttcagccagtctcaacacaaaacacccaacagggatgcactcaacttgttggttccatgtggaactatgtggcaaggggctggggagcaggcatactctaaaacagcatcaatctgcattcatacacggtgccctgctggggctagactggcataggctgggaagacacccagcttgaag

SEQ ID NO: 146405 - DNA, 378 bp, Homo sapiens
cagcccttgtcatactgtattgactgtgtacgtgcctttcaccttgagcatgcttcaggatttttttttaaaccacagaacttgaatacatgagggaaccagagttcaaagtcctatgcaaccttatgagggggttagagagtctgttttgattgatgttttctgaggccctagaggagtttgtatcaatttgtgagtattaatgtcagtactaccagctcttggatacccccctagatccatgtggctttatgtgaggggactgaatgcagacacaccatagcccccttctactactttccctctcgccctgccacctagttccacatggaaccaacaagttgagtgcatcccttgttgggtgtttgtgttgagact

SEQ ID NO: 146406 - DNA, 3056 bp, Homo sapiens
  misc_feature (1)...(3056): n = a,t,c or g
ctcactcctggtccccatacccagcatctaatcatccatgccccctactcctggcccctccatcctttcttctctggtccccatccctgtctctccctttcacccttgccctccagtcctctacctctggcctgcccctatttctgaaagcttcttccagtccctgatctggctcattccccaccttcaactcccaccttacatgtctcacactatcccatggttggcattacactcactcctgttcccttattcttcattcccagtaattccctaccaaatggtggggaccctgagcccagctctgaccaggtagagcctgtgcagcctgggctgctgtcattgccctccagtaagggctcagggttttgcttttagtctccccttccttctgccttgggggcggcactctgtggagctgcttaggcctggaaaggtacagtatgtataacaggactgtgagacgtgagttagagggagaagatggagggaatctagggaacgaggcagcctattggagatgcggacaggacagacacgttgagaagctgcagggagcacggcaccaagggagtgtgcactgtgcttgctcagagaggccataccctgctcccaggctgaagcctggagtctgcccccccttcccttttttataatccaccctttctgcaggccctgaaatctgaagggcttagttagtaccttgccactctacccccaacacgtcacccgagtagaagctgggcaaggccataccgtcctggccgtctgttcacaagcccaaggtgctagacctagcttaggagacatgcaggccacagggcttctaggcagggaaagggcacacaccctaggtcagcgtgcagagcagtgatgctgggaggacacaccatggggtgagagccatcccaaggcttgacagcttcagtctttcacctttgccttttgggctttgttattttcacaccctgctcagtatggctagccagccagtcctgagtaggagtccaggactcccactgtctcaatctgcaaattgttcctatccaggttcagggccttcagggggcctcttttcattttctcccacaggcctctctttctttctaggttgctggggagaaatgggtaccctatgatccccctccccttctcctccagtaaatacctgggaagagggaacctgaatccctggggggagnacagaaggggcaggggccaccagccttccctttttgtggtgagactgaattttgggctcagacaccagcaacagcctcttgggatgccctgagttgcttcccatttcctctttctagccgtccttttctagggggggctcactcttcctaggaacttttaagacttcttggtacctatgaacataggtcctcccctcaccccaactctaggtttccaggcctcacagccaagctgaagcttggagaaaactctgcattcccatgagggncacaaagcagctgccctccctggaccctattagccccagggcttcatgggggggtatgtgggggaagggatggggtatccccatggatgcttgggatgaggacagaggaagacctgattggggtctcctattccagggaataagccaaattaacactaaaaacggatcaaagctcccacgccagtccactagggccccagtagttgacagccttgctcctctcccaagttctccttcagaacctagttgcttttattcttccagctaccacttgggcacttcacagccagcctagggtcgttcggcacctccaagagctgaatctccctccaacccttcttgcctactcctcactgccagctggggacctaggctcagtcctgtgtggtgcccatgattccttctggtggggggaagagtttaaagttataggggcatttgggtcaaattttaaaaggccttttgtttacctatatttctgggaggctcctgtattctaggaacccaatctcttcacctgcttgggttgcaaggctcatatttttttgtaacctttccctatagattctgtaggcatttgagtgtgggcaatattttaaattgtgtataggtttctaaggaaccaacaatactcagtctcctgctagtctgactcctgaaggatcagcccttgtcatactgtattgactgtgtaaggggcctttcaccttgagcatgcttcaggatttttttttaaaccacagaacttgaatacatgagggaaccagagttcaaagtcctatgcaaccttaggagggggttagagagtctgttttgattgatgttttctgaggccctagaggagtttgttatcaatttgtgaagtattaatgtccagtactaccagcactttgcccaaaactgttcagagggacccgtttctaagagtgagtcccagttacatccaaacagtggactttccagttatttccccagttaaggtctgagtgggtcccttcaaagctggggtgtctttccaagcctttggccagtcctaggccccagcagggccaccgtgtatgaatgccagtttggtgctgtttttaagagtatgcctggctccccagccccccctgcctggaacccctcttgagcaacttggctctggacctaataaaggtctttaggtgccaaccacgggaaccccaaccaggaggctctatggaatacccacccataagatcccatggtggccttttatgtgagggggacttgaattgcagaccacacccatagcccccctttctactactttccctcgtcgccctgcccaccttagttccacatggaacccaacaagtttgagttgcatccctgttggggtgttttgtgttgagagctggctgaaatgaggagactttgaccatgtgacgtgtcaacagactcaaggagacgaaccacctcaactgggtcatgtggcatgcctgtgtatgtgtgtaacagaattctgattgtttagactgtaatgctattcctctatgggagaaaaaaattaatataaagaaaaacaaaccacccatatatttaaagcacatgaaaaaaaaaa

SEQ ID NO: 146407 - DNA, 411 bp, Homo sapiens
  misc_feature (1)...(411): n = a,t,c or g
nggttcagccgctgtgttaatcctccacgggggcctgctacgtgttgatctggtgaggtgttccactggggcaatttcgtacccaggagcgctctttggatctcgtcactcaggctgcccggagtaccccacagggatgctccacagggcaggcttaagccacctaaggggctgcctcagccttccgtcagtcaccttgcttctgggtcagggagccaagaaannnnnnnnnnnnnnnnnnnnnnnnnnnnnnnnnnnnnnnnnnnnnnnnnnnnnnnnnnnnnnnnnnnnnnnnnnnnnnnncaagatactgccttaaaatctgagctccccgagtgcacaatttctgtcctttttaagggctcactacactaaagatttcacatgaaagcggacgcgtgggtcgacccg

SEQ ID NO: 146408 - DNA, 527 bp, Homo sapiens
ttttttgtgagcaacaaggctgtttatttcacctgggtgcaggcaggctgagtctgaaaaaggagtcagtgaagggagacaggggtggggctgttttataggatttgggtgggtagtggacaattacagtcaaagggggttgttctctggtgggcagggacgggggtcacaaggtgctcagcgggggagcttctgagccaggagaaggaatttcacaaggtaatgtcaccagttaaggcaggaactggccattttcacttcttttgtgattcttcagttattttcaggccatctggatgtatacatgcaggcttgggcccagaggcctgacaagtatgagtatgataataaataatttatagaaatcaagaaaataattcaatttaccctaatatcaaaaagaatgaaattgtaggaataaatttaaccaggtaagtgaaagatctgcacaatgaaaactataaaacattgatgaaagaaattgaagaagacacaagtgaatggaaagatatttcatgttcatggat

SEQ ID NO: 146409 - DNA, 430 bp, Homo sapiens
gtgagcaataaagctttttaatcacctgggtgcaggcgggctgagtctgaaaagagtcagggaagtgagagaggggtggggccatcttataggatttgggtgggtagtggaaaattacagtcaaagggggttgttctctggcaggccggggcgggggtcataaggtgctcagcgggggagcttctgagccaggagaagggatttcacaaggtaatgtcatcagttaaggcaggaaccagccatttgcacttcttttgtgattcttcagttacttcaggccatgtggatgtatatgtgcaggcttgggctcagaggcctgacaggtacagcgtacactgctctggtgacgggtgcaccaaagtctcagaaatcaccactaaaaacttattcatgtaaccaaaaaccacctgtacccccaaaactactgaaa

SEQ ID NO: 146410 - DNA, 1317 bp, Homo sapiens
atgggagactttaacaccccactgtcaacattagacagatcaacaacacagaaagttaacaaggatatccaggaattgatctcagctctgcaccaagtggacctaatagacatctacagaactctccacctcaaatcaacagaatatacattcttctcagtcccacatcacatttattccaaaattgaccacatagttggaagtaaagcactcctcagcaaatgtaaaagaacagaaattataacaaactgtctctcagaccaccgtgcaatcaaactagatctcaggattaagaaactcactcaaaaccgctcaactacatggaaaatgaacaacctgctcctgaatgactactgggtacataacgaaatgaaggcagaaataaagatgttctttgaaacgaatgagaacaaagacacaacataccagaatctctgggacacatttaaagcatgctatccccatgaagctaccactgactttcttcacagaattgaaaaaactactttaaatttcatatggaaccaaagaagagcctgcatagccaagacaattctaagcaaaaagaacaaagctggaggcatcatgctacctgacttcaaactttactacaaggctacagaaaccaaaacagcatggttttgtatgatccgcttggcaccacatcaccaagatcttgtttctgtgatcagcgggctctgcagcacacaagttactacttcctgtccagaaaaggcccaatccctgaccaaggtatttcagttccgctctgaaatggggagatcggcctttgtagttcttcccccagtaatttcagacgctctccagagaaagcccatgcatcctgtagatcctgctcaggtgtcaacctggcatacatcttgtagaccatttcttcactctctgcaggtgattcttgccattgcgtgttctcaagccctgctgaggaagcacgatgaatggcactattttggtggaggactcaaatccctggacacttcggtggtgatgctgtttcccaacatttatggaatggtgctgagctattgcaatataaatgttgaagaagaaggtgattctgacaccccaactgctgttgggaatttggccgatgacagctctagctacttcctgctggataggggcgaagaaggggccctgcagttgtggtgtccttcagaggggaactctctaggccaggggaagtgccagcggacaccgagttgtagaaggaagggctttattcagctgggagcattggcaagctactgccttaaaatccgagctcctcgagtgcacaatttctgtcccttttga

SEQ ID NO: 146411 - DNA, 456 bp, Homo sapiens
  misc_feature (1)...(456): n = a,t,c or g
ttttttttttgtgagcaacaaggctgtttatttcacctgggtgcaggtgggctgagtccgaaaagagagtcagcgaagggagataggggtggggcccttttataggatttgggtaggtagtggaaaattacagtcaaagggggttgttctctggcgggcaggggtggggtgtcacaaggtgctcagtaggggagcttttgagccaggatnagccaggagaaggaatttcacaaggtaatgtcatcagttaaggcagggaccagccattttcacttcttttgtggtggaatatcatcacttgcttcaggaaccagccgtctggatgtgcacatgcacgtcacaggggatataaatggcttagcttgggctcagaggcctgacattcaatgccctcaagagaacagaattccttagaagaatcttcaatagccttgtgtaagttttttagttttaggt

SEQ ID NO: 146412 - DNA, 1513 bp, Homo sapiens
caacaggcactaaaaagaactataggaagatgtgagtttggaggagtacatgggagcctcatcatatagtaacttgtgaaccacagggaaaccttcacgttttactgagtgagataggtagttgaaaattagttaaaaatcaactcataacttagaaaccgatgttattcatagattccagacattgtatagaagaacattgtgaaactcccctgccctgttctgtttctctctgaccaccggtgcatgcagtccctatcatgtaccacctgcttgctcaaatcaatcacgaccctttcatgtgaaatctttagtgttgtgagcccttaaaaggaacagaaattgtgcattcggggagttcggattttaaggcagtagcttgccgatgctcccagatgaataaagcccttccttctacaactcggtgtctgagaggtttttgtctgcggcttgtcctgctacatttcttggttccctcttctctgaagggcaagggaggcacagtggggtccaagcggaacatgtcctcacacagcagggctcgcaggcacagtgccaggctctccacgtcccgggccatggggcccacggagagacgcactgcctcctgtccatagacacagcccttcaggccactcttgctgaggcggttccctgtgggcttgaggccgcagatgccgcagaaggaggaggggaagcggatgctgcctccgatatcagtgcctaagcccaggggggagcctccagacccgatgagggccccttcaccccctgaggagccccctgggcttttggaggacttccatgggttcacggtctggccaaagagggggttactgcagtcatagctgaacatggactgtggaacattggtgtgcacgaagggcacggcaccctgcagcttcagcacatgcaccactacgctgtcgcactccgccggcaccccttcattcaggctcaagcccagcgtggagtcctggccctgggaggagggatgggcaccagaagggagtgagtcagggcccgtgggcagccaagggtccactccaacaactgtcacacaggccaaaacaggtataccagtgtcccctcggaaggcctctggacctgatacctcctctaagggcccaaaatgacccaagatgcagagcaggctggcagggatggaggggacgatggaggcctggcgcttgtaggtgaagcactccttgaggctcacagggacgccatagagcaggccctgccttggggcctgagacagctgagtctcacagtcagccagataggaggtcacacagttggtccctttgttcacttcccaggcctttcccacataggtgaagagcacggcctcaggggccagctctctactgtgtaacttctgcaccagctgaggcaggggcagggctagcagcgcctctgagtccaggtctgggttctgtggggaacaaactcggatcagtcccctactcgccgaagtctcatgggcctgcagcagacaccagtggcccat

SEQ ID NO: 146413 - DNA, 590 bp, Homo sapiens
ctcggattggcggacctcccttgggagatcaatcccctgtcctcctgttctttgctccatgaaaaagatccacctatgacctcaggtcctcagacccaccagcccaaggaacatctcaccaattttaaatccgatcttctcagcttagcggctgaagactgacgctgcccgattgattgcctgggaagcctcctggaccatcacagacgccttgggtaactcttacagtggaggacaggaatgtcaggccggcctctgagcccaagcatgcatgtatacatccagaatggcctgaggcaactgaagaaccacaaaagaagtgaaaatggctagttcctgccttaactgatgacattaccttgtgacattccttctccgggacagtgagtctccggagctccccactgagcaccttgtgacccccacccctgcccgcaagagaacaaccccctttgagtgtaaattttccactacctaacccaactcctataaaactgccccacccctaactccctttgctgactcctttttcggactcagccaacctgcacccaggtgattaaaaagctttatttctcaaaaaaaaaaaa

SEQ ID NO: 146414 - DNA, 841 bp, Homo sapiens
atgattgtgaagcctccccagccatgtggaactgtcactctgctgcaagaggtgggctcccatgacctggggcagctccacctctgtgactttgcaaggtatagcctccctcgtggctgctttcacaggctggcgttgagtgtggcttttccaggacaagctgcagacaaaacctctgagacaccaagttgtagaaggaagggctttattcagctgggagcatcggcaagctactgccttaaaatccgagctcctcgagtgcacaatttctgtcccttttaagggctcacaacactgaagatttcacatgaaagggtcatgattgatttggagcaagcaaggggtacgtgacaggggctgcatgcaccggtggtcagagagaaacagaacagggcagggagtttcacaaatgttcttctatacaatgtctgggaatctatgaataacatcggtttctaagttatgaattgattttcaactactggggtttagggccagggcaggcgcaggctgggttttccgggcctagcgccaggctgcctgcctgtctttggttttacttccttgttgttttttcttaaaacaggtactgagtataaaacactatgagagggtctctcttccctcattgccacaactcattctttgttgaagtatggagaaggctggagctgcagggtcagtgggccctcctgggagctgggggccatccctggtccagccaaggcctgtgactgcagctcaagccacatcccctactttctcccatcccctcctccggaagcctcttccctgatgtcccctccaggcaggcagcctcagccagagagcctggaaatca

SEQ ID NO: 146415 - DNA, 1212 bp, Homo sapiens
gcttccactcacatggagtggggcaagttccaaagactagtcttgacaagcttcagatgtctggacttcaagtgccagttccttcccggtgttcagccagtgttaatccttctcgggagcctgctatgcgctgctctggcaaggcgttccaccggggccatttcctacccgggagcgctctttggattgcgtcactcaggctggccggagtcctctgcagggacgctccacggggctccacagggcttgtcagtcacctcgcttcctggtcagggaaccaaggactgtagcaggacaagccacagacaaaacctctcagacacggagctgtagaaggaagggctttattcagctgggagcattggcaagctactgccttaaaatccgagctccccgagtgcacaatttctgtccccttttaaggggctcacaacactaaggattcaccatgaaagggtcatgattgatttgagcaagcaggcggtatgtgacaggggctgcatgcacccggtggtcaaaaaaaaacaaaacaggggcagggagtttcacaatgttcttctatacaatgcttgggaatctatgaataacatcggtttctaagttatgaagttgatttttaactactggggttttaggccagggcaggccccaggcctggtttcgggcctggcgccggactgcctgtctttggttttacttccttgttgttttttttcttaaaagaggtactgagtataaaacaatataaaacaatatgagagggtctctctcctcccctcaaacctacctaaataaatccagtggatttgccacaatacaatatcggcacccaaaaattaccttgaaatttccccacacattaacaataaacaattttaaaagaaaatttaaaaacacttcccatttgcctagagaacttaaagtaagaaatacttaggaataaacgtacaaagcctgagaagtttgtaccttgaaatctataaatgttgatcaaaatgattaaaaacatacatagagatacaacccatattgatagtttggaaaaattaatattgttaaataattatataacccaatgtgatttagattcaatacggtacccataaaaatgcctatcagttgacattccaccacaaaagaagtgaaattggctggtccctgccttaactgatgacattaccttgtgaaattccttctcctggctcgtcgtcc

SEQ ID NO: 146416 - DNA, 398 bp, Homo sapiens
tccctcagtgtctctggtttccctgccctgcataatttaagcattagtgctaaatacatctgtcatattcctctccctggagactgcgaaatgtccagactttttcagactagtggagggaaggaatgttacataactaagtggaggcctggaactgtcaggatttgacagggctggaccagagacccttccgcctctgcctagtgtgtctgtcagggaggcaggcagctgtcacagccacagcggctctgaatggcttgagcttttagtatgtgttcaagtgcaggatactacaaactggtaaagacttccaccatgtgaagaatgtatgtaaattaaagtttattgtaatgaaggtttttactttttgcaattaaaagtgttggttgataagaaaa

SEQ ID NO: 146417 - DNA, 563 bp, Homo sapiens
tttttttttttttttttcttatcaaccaacacttttaattgcaaaaagtaaaaaccttcattacaataaactttaatttacatacattcttcacatgggggaagtctttaccagtttgtagtatcctgcacttgaacacatactaaaagctcaagccattcaaagccgctgtggctgtgacagctgcctgcctccctctgctccctgggaccatccagggcccaccacaccctgctcccggaaggagagctgcagctgacccttggcacctgtccccgatcgatgggcgggagcacttgcgctgagtccctgtcttgcctgtgactcctccttccccgaccctcgggcattgggttactgacccttccccaggggtgggagggtgaaggaaggggaaggacttgcaggccaacattttttctgaggggtaaaattttgggaaaggaagtttgggaggggaaggcttttttggataagaatggggctttcttgggaatgtcatgtgtctgcttggctcctgtcacctccctggaaaggtccacagtgctgggggggttgaaaac

SEQ ID NO: 146418 - DNA, 2518 bp, Homo sapiens
tgtgccattctgtttgaatccttccttgacgatgaagaggacctagatgtgaaggctggtggaggctgtgtaatgaccattggagaaatgctacgatcttttctcacaaaactggagtggttttctaccttgtttccaagaattccagttccagttcaaaagaatattgatcaacagattaaaacccgacctagaaaaatcaagaaagatgggaaggaaggtgctgaggaatatagacagacatttttaaccgcagacgtttaaaggtctccaaagaaatctcggagtccacgggagtcccccaagaaggccaagaagttagaagtcatcatcgggaagccccaggggtcttctagtttttgacagagaattagaaagagagaaagaacgccagcgactagagcgtgaagccaaagaaagggagaaagcacggcgaagatcccgaagtattgaccgggggtttgaacgcatgcgcttctgatgtacggaataggcttacaagtcccagtcgaagtcgtgataggaaaggggatagaagggacagggatcgagaaagagagaaagaaaatgagagaggtagaagacgagatcgtgactatgataaggaaagaggaaatgaacgagaaaaagagagagagcgatcaagagaaaggtccaaggaacagagaagtaggggagaggtagaagagaagaaacatagagaagacaaagatgataggcggcacagagatgacaaaagagattccaagaaagagaaaaaacacagtagaagcagaagcagagaaaggaaacacagaagtaggagtcgaagtagaaatgcagggaaacgaagtagaagtagaagcaaagagaaatcaagtaaacataaaaatgaaagtaaagaaaaatcaaataaacgaagtcgaagtggcagtcaaggaagaactgacagtgttgaaaaatcaaaaaaacgggaacatagtcccagcaaagaaaaatctagaaagcgtagttaggaagcaaagaacgttcccacaaacgagatcacagtgatagtaaggaccagtcagacaaacatgatcgtcgaaggagcccaaagtatagaacaagagagcccagaaaaaccagcattaaaaacaaagatgagactgtgtgaaaatattttgtaaaatgtggatcacattgaatcctattaaatgattaaatctgcttttttcccccacgttgagattgtgcagtagttccgcactcctcaagctctccctgtagggctgcattttccatttcctctttcgtgtagggaagtgcctttgtaattcccatttattgcattgggtgttttcacccaattgttaagtttgatacatgatgcacagattggttcttgcatttttattggtttggtttttgaaatgtacagtctgtacatatgtcctgaaaatgttttaattcctttggcatggttgccatgatggttaaatttgtataaggcaataaactgccactaatctatttttgttttgtaggtgtgggattatggtttgtgtactgaagttagcatggctgtgctttcccgtaatagaatgctaaagactttgagaatggatcttggatggcctattatagggagaagtatgtgctgccaatgtacaagaaggcagcattgtaggattaacattcttgtctactgtatattatcttggaaggctcttgttaatatgttacacttaatattctccacagttacctttagagagaatttatgagaagttagtttctgatgcagaggtttttaggctgtgatttcatcaaaagtccttttagcattctacctcaaagggacacttagtatgcctaaaatttattcacttagttttccttttttatttgaaaaaatacatgacatgtaatctttttttcttggaattctttctcagattttaaagtactatattaaagaaaaaaattaatgtctaaaggcctagcattccttgcaggacccctatactaaccatggtaatgggggagaggggtggggcagatgagtagagaaaccagattcaagcctcaagcttccaaagcatttttataaatgggaaaatccttaaattatgaaacagcttgatatagtgtcctttttttaaaattcagaactttttttattgataatggagattgctgtttgagtttttaaacttaatctagaacagaggagtattaaaagtaatgctgtgctgcattatttaagactatcagcaaattatttgatagattgttcttacaacttgtattctgattacagaaccatcatgagtgtggaataaatactggattaaatcctttatcctgggtcttggcttttcccccatttgttaaatttttttagcatatttatattggggaaattgatgaaacgtcagtagagtcacactttgtgtacagggatgtcttagtgcccagatgacaagtgaattttggagaaatgcatagactgggattgggcatgtggtaatcaataatctttattagaatacttgat

SEQ ID NO: 146419 - DNA, 806 bp, Homo sapiens
ccactgaagcgctcagatggctgtaacgacggccgacccacgcgtccgcccacgcgtccggacacaactgtgttcactagcaacctcaaacagacacgcatggtgcatctgactcctgtggagaaagtctgccgttactgccctgtggggccaagcgtgaacctggatgaaagttggtggtaaggccctgggcaaggctgctgggtggtcctaccctgggaccccaaaaggtcctttgaagtcctttgggggaatctgtcccaactccctgaatgctgttaatggggcaaacccctaaaggtgaaaggcctcaatggcaaaagaaaaagtgctcgggtgccctttagtgaatggcccctggctaacccctggacaaccctcaaagggcaccctttgccccacactgaagtgagcttgcactgtgacaaagctgcaccgtggatccctgaagaacttcagggctcctggggcaaccgtgcttggtctgtgttgcttggcccattcacttttggcaaaagaattcaaccccaacaagttgcaaggcttgcctattcaagaaaagttggttggctgggttgttggctaattgcccttggccccacaagtatcacctaaagctcgcctttcttgctgtccaatttctatttaaaggttcctttgttccctaagtccaactactaaactggggggatattatgaagggccttgagcatctggattctgcctaataaaaaacatttattttcatcgcatacaagaataaaacaagcgcggccgattaagaggatacttcaggggcgcaagat

SEQ ID NO: 146420 - DNA, 675 bp, Homo sapiens
taatctgttcatgaaggcagggccctcatgatgggaatcacatcttaaagcccctacgtctgagtactgttacattggggatttagttttaatatgattttcagagcagaaaaacattcaaaccatagcaatatgtattgaatatctagatcatttccaaataagatattaatatgatactgaaacatttattgctgaacataaatttagaacttactttgcctacctattacagaagaacaaaagatatttgggcctattaaacctttcctctgccatttcctgtcctgtgtcataggactaggaatcgtgtttctagaaagtatgaaatcgtgtgcttgcaaacttggaagaaaacagttcatgactgcataccttctagttctctagtgttcactggaaattaaagacactaaaagttaacaattcttattaattaatcatattaatgtaattggaatttctagaaatattaggggaagcaactttatacgcaaagcataacagaaaaataaggtgtattttttctttgaaacctatgaaatatactggccaggcacggtggctcatgcttgtaatcccagcactttgggaagctgaggcggtggatcacctgagctcaggagttcgagaccagcctggccaacatgttgaagccatgtctctgctaaaaag

SEQ ID NO: 146421 - DNA, 489 bp, Homo sapiens
  misc_feature (1)...(489): n = a,t,c or g
cttgaaacatcnactccccatggtccctccccnggactccccattaaaagtgctgaccgtaaggctttgatgctcatgcggccgttctggagacttgtgtcccacagtgaggtggatggggttgggggcctctcggctgtagtactcgtggattccagcacagagtgctctgtgatgtcatggcccgtagcgtacctgtgaaatggaacacagtggtggactcctgtctatatgtggcgtcaatatcaaacacaacagtggcatgggtgtcttcagggtaccggacacttctacggtaggacacctagtgacaccaactgccaagagcaatacacacaccgaaaactatgtcaaataaaatcaaaggctgacttagtgctgatgaaaaattccaagtcacttacaagggtaattcgaaatatcctggccccacaggatcagaaccaccagcaaaacccactgaattcacagttcctacaggtaacacac

SEQ ID NO: 146422 - DNA, 1676 bp, Homo sapiens
  misc_feature (1)...(1676): n = a,t,c or g
acccggaactacttagcccagggtttcctgagtgctcctcgggccaaaagcagagcgcacaaattccagaagaaattaccaacggcgggactatttcagtgctccgagaagtatcaccagtaaccaatcagcaaaaagctctagctcacgtggtgtatattcagcctatcaagctcctgatattcatgaatgctgtcatttccgttccgcctccttctttctcgacaagatggccacaccggcggtaccagtaagtgctcctccggccacgccaaccccagtcccggcggcggtcccagcctctgccccagcctcagttccagcgccaacgccagcaccggctgcggctccggttcccgctgcggctccagcctcatcctcagaccctgcggcagcatcggctacaactgcggctcctggccagacccccggcctcagcgcaagctccagcgcagaccccagcgcccgctctgcctggtcctgctcttccagggcccttccccggcggccgcgtggtcaaggctgcacccaagtcattttggcctccattgtggacaagctacgagagacgcaacgagggtgcttgcccgagttaatcgggaaccctgtttgggaaacttgtcgacaaaacactcagtggaaggtcaccaatttgcttttcagtgccgcacaatgagtcagaagatgaagttggctgttgacatggaatttgctaagaaatatgtatgaaactggaataaaaaaagtttcctccaaataagctcatcctggggctggtacgctacgggccatgacatcacagagcactctgtgctggatccacgagtactacagccgagaggcccccaaccccatccacctcactgtgggacacaagtcttccaggaacgggccgcatgagcatcaaagcctaacgtcagcacttttaatggggattcccttggggaggacccatggggagtgatgttcacgcctctgacagtggaaataccgcgtactacgacactgaacgcattcggaggttgaccctgatcatgaaggacctgcttttagcccccaaccagagtgatttggacttctcaagttgacttgcagcaagaaggagggggcattcagcttcgcaatccagggatgcccttgagtaccagtgttgcaaatatgccagagggatgtacctgtctgggaaaggtgtcagctgacaataccatcaggaaggtgggccacttcctgatgagcctgggttaacccaagtaccggaaaataggaaaccgatgacttttgagaccatgctcaacagcaacatcaatgacctttttattggtgacctacctggccaacctcacacagtcacgtgattgcactcaatgaagaacttgtaaacctgtgaatggaccccaagcagtacacttgctggtctaggtattaaccccaggactcagaagtgaaggagaaatgggtttttttgtggtcttgagtcacactgagatagtcagttgtgtgtgactctaataaacggagcctaccttttgtcaattaggggcaaataaggctaggaagtggcaaaagtattggggggggcgcctttaaaataacttgaattcttgtgcggtgccgagggggattannnnnnnnnnnnggggacacttaaatttaatcggcgggcccggttataaaat

SEQ ID NO: 146423 - DNA, 999 bp, Homo sapiens
tttttttatcaacaaagagaataaatgctttttattcatttgtagttatcaataaaatgaaagaaagacctagcatttttaaaactccactgtaaaacataggttaccataaaaatgtatttaatgggttaatatttcaatattttattttttaacagaaaacactcatcacatgcaaaacctgtcacttcacatcttcaagtttcataagttgataatacctaatcaaaaagtacatgtgaaaagaaagctttttcatagttgaactttaagtcattcaaaatttattcaataaaatggatgtaggtactggccaggtgcgggtggttcacgcctgtaatccccggcactttaggaggctaaggcaggaaccgaggtcaggagttcaagaccagcctgaccaacatggtgaaaccccatctctactaaaaatacaaaaattagcccggcgcgtggtgtggtgcacctgtaatcccagctactcaggaggctgaagcaggagaatcgcttgaacccaggaggcggaggttgcagtgagccgagatcgcatcactgtactccagtctgagtgacacagtgagactctgtcccccccgccccccgcaaaaaaaagatgtatgtagtgctgacaaaaaagtttcatatttggcatatttcttttaccctcccaaatattatcaaaaggtctgattctctgcgtaacagaaaagtgacaaatttcagttgctactgttcgaaagtttcataaatttaaaaagccacatcctgctatgctttcaaaccatttcactgaaacctagttcctatcaaatattaaaaataaatcatacatgtgatccagattccaggggaccagaactatagtgcttttagaaagtgactgtttacagagatgacttacaaagaaatgcattttataacaaccacactgggggactgcaacaagattacatctgcacgtggtgctgtttactaagacatgaagagctgaaggagact

SEQ ID NO: 146424 - DNA, 555 bp, Homo sapiens
ttgtgccagctggagacctatcccccgatctctcagtgcaccgcaagtgacttccccggaccagtgacagcatcatgggcgatccaggaggccgcacggagtggtcaagctaaagccggagcagctctgccaccctctccatgcgtatgccggcgcccgctttgtcttctcccttgtggatgcaatgaatggaaaggaaggtgttgtggaatgttccttcgttaagtcacaggaaacggaatgtacctacttctccacaccgctgctgcttgggaaaaagggcatcgagaagaacctgggcatcggcaaagtctcctcttttgaggagaagatgatctcggatgccatccccgagctgaaggcctccatcaagaagggggaagatttcgtgaagaccctgaagtgagccgctgtgacgggtggccagtttccttaatttatgaaggcatcatgtcactgcaaagccgttgcagatgattactgtattgacatcatcatgccttccaaattgtgggtggctctgtgggcgcatcaataaaagccgtccttgatttt

SEQ ID NO: 146425 - DNA, 2352 bp, Homo sapiens
  misc_feature (1)...(2352): n = a,t,c or g
tttcgtcagagagcaggcgctgggcagtgtggaggtcgttggagtcacttccgcgtcaccagctcctgtgcctgttatgtcgatgcccctcccgctccagccatgctctccgccctcgcccgggccgtgccaagcgcctgctctccgcccgcagcttcagcacctcggccccagaacaatgctaaagtagctgtgctaggggcctctggaggcatcgggcagccactttcacttctcctgaagaacagccccttggtgagccgcctgaccctctatgatatcgcgcacacaccccggaagtggcccgcaagatctgagccaacatcgagaccaaaagccgctgttgaaaggcttacctcgggacctggaacagcttgcctggattgcctggaaaggtttgtgatggtggtaagttattccggctggagtccccacaaagccaggcatggaccgggacggacttgttcacaaccaatgccacgattgtgggcaccctgaccgctgcctgtgcccagcactgcccggaagccatgatctgcgtcatctgccaatccggttaattccaccaatcccccatcacaagcaagaaagttttcaagaaagcttgggggcaacacccccaaaaaaaatcttcgggcgtgacgaccctgaacatcgtcagagccaaaacctttgttgcagagctgaagggtttggatccagctggagtcaacgtccctatccactggtggccatgctgggaagaccatcatccccctgatctctcaggtacacgcatatgaccctgtgaggggcttcgagtgcacccccaaggtggactttcccccaggaccagcttgacagcactcactgggccggatccaagaaggccggcacggaggtggtcaaggctaaagccggagccaggctctgccaccctctcccaatgccgtaatgccggcgccccgctttgtcttctccccttgtggatgccaatgaattggaaaaggaaaggtgtttgtgggaatgttcccttccgttaagtccacaggaaacggaatgtacctacttctcccacaccgctgctgccttgggaaaaagggcatcgagaaaaaaaaggnaaaaanctctgggcatcggcaaaagtctcctcttttgaggagaaagatgatctcggatgccatccccgagcttaaggccctccatcaagaagggggaagatttcgtgaagaccctgaagtgagccgctgtgacaggtggccgagtttccttaatttatgaaggcatcaatgtcactgcaaagccgttgcagataaactttgtattttaatttgctttggtgatgattactgtattgacatcatcatgccttccaaattgtgggtggctctgtgggcgcatcaataaaagccgtccttgattttatttttcaaggtcccttctgtaaatgctgtgctttcttccctgtgagagccaactttagagtgtctgctacctcttcattaccaatcagaattagatgatgtttaactgttagactgaagcgtgacgctttcatcagtagcttcaagaaagtctaaattgttaatttatggaattggacacagtattcagtttacccgtacatgctcctcccgcccctcctgttggcacccttgcatcgcccaggcctgattcctcctgggggtagttcacccccacggggtcatagttcagcggcgaatgccaggcagctgttttctggctgagcaaacagcacctttctcattgagcttcctctactgacctctgtccccccttgggatttccatcttctgacccgaaccctgatgttcagtggcagagacagcccatagcccagaactgtgggtagacccagggttggggtgtgcggtttggggacagcccaaacccccagccgctgtgtcaaggcctaggacgccatgctgccatcaaaagggggttcccaggtttccatccagtggccctaaagaaggggacttccttgttggtactgaggaagtgcggaattaaagagattttgactccctttagtattgggggcagtccgttcccccagacactgtggcctctgaagtggaaactgaaagctgcatacctgggaaagaactttctaggaataggcaatggccttcagtggaagagggagggctggaggtgtgcccagtacttggatgttcatctgtccacaacagctttttgtttttttaaaaaagctaaaatggaaatggattttatcataaaggatgacatcgttttcttctacaattaatacatgttcattgtataaaacccaaaaagcagctaaaaaataaagcgggaaaggaactactggtaaaaaaaaaaaaaaaa

SEQ ID NO: 146426 - DNA, 1275 bp, Homo sapiens
tttttttgtttttttttttaaaaagtcatggaggccatggggttgggaggattgcttgaggccaggagtccaagaccagcctggacaacgtagtgaaacatctatttctacaaaaaaatttaaaaaaggaaaaaattatgtcctaaaatattaaagggtcattaaaaggcacaactagaacttggaactctggggaaatctagtgcaacaaccccttgccggagagaaagatcctagaaacagctcttgaattgacagggccgaaaggtgttttataataaaacgataacaactcttcaataatcatttgagaaaatcagactgttaagccattttctcccatgaacaggacactgacctgcccacatcttgaagcatattctgttgtggaagtgggttggcaaagtagtctgaggcaaggcaaagaaatacaaactgagccctagaaaaggttagggaggcaaatcaaaggaaactggaatcaaacatcagcttcacatggggaaggctttaactggataactggaatgtataaagaacacttaagaacagcccctcagtctgaggaattggctttatttagataggaactctcaaaatgggagacaagttcttctcatgttttcaatagcagtctgaatagcttttgtaaattctcttatgtcttttctcctgatctctgacactaggggagactcaagtaaaagctttgacctatcactcatcttttcctgggcaagagatagtgttcttcaaagcactagcttggataaaaccaatcctgagatcctaagctggctagaaaaaacaaaatcttccccaccgctcaaacaactgggcctctttccttacctttcgcaaagcaatggaacttaatggcactagggcttaggcaaaggggaatcgtttcactagctgcttccatcactgggccctgcccaatgtccccagcaccttcacaccccggaacacaagtgttattgcccacaaaaagacacccccaggtgtgcctatcacacacttgtgtggagatgagacaagttactaaaagattgtcagccttcaaggtcagaaataaaccggacacaaggttctacagtgccctcttgtgttcaactgaataatactcttttacatctacgttgcatcaaatcagtaccaagacgatggttagtcccttcaaggatacctaagtgacaggacaactcagatgggatgtcatattccccagaaaatgcttgatgcccactcacttcctagatgatgagaggaccc

SEQ ID NO: 146427 - DNA, 917 bp, Homo sapiens
tttcgtcgcaggacctcactgcgccctctgcctttatctaggcagggctagaaatggtctacttgcagtccgtcttcctgcttcatccggtggccaggcagagggaacggcacgggcaagggcctggaagggaatccgagtggcccatgtcaaacgatgcccataactcagccccgtagcggacgggggcacgaggaatcaggtgtagagcctgagtctcagggtcctgatctctaaccccagcgagttctcggggatccctgggcagctttgccgctctgatggctctgcttccaggctgatcatctttggctttgagcctcaggattctatagaatcagaggagcgcgctcttttaaagacagggtaactgaggcttggaggagccttggactggccgagggaagagtgggaggggcgggctcaaaggccaggaacctcaagtcacttgagtctggcagcgtcaagggacaccccatgctgggtgtgccgtcttctctttgcatagaatcttgagctgatgatggttttgtgggttttttattaagagaaaaggcttactgaacgctttatatgcatcaattcatgagtccgtaccacagcctatgagatgttacactcatttcacagatggagaaactgagggcagaagaggtgagcttacctgcccaaggcatctagtgaccagaggggcagccagggtgtgatcctgcctcatctgacttcgtagttgggtacacatttaacttccgccttcctgtgtgtgttttccaagagcatcattaaaaagttttggccgggtgcggtggtcacgcgtgtaatcccagcactttgggaggccgacgtgagtagatcacctgaggtcaggatttcgagaccagcctggccaacatggcaaaactctgtctctactaaaa

SEQ ID NO: 146428 - DNA, 483 bp, Homo sapiens
  misc_feature (1)...(483): n = a,t,c or g
nggcgttgagtccatagccgtgtggnggaattcgtcgtgtgcggctcgnggtaatannnnntctgctcggccggccggcggcggcgagcatcatgggcatgagggctaacccgggaagcggcagctgagcgggccgggaggagcgccggtccccgtggatcccgagagtgcagagctcggggcaggggccgggaggcgtgggggagccgggccctcccctcaggaacgtgtcccggggccgacccggcccgtagtgtggaagcagcttcagctcaaagattagaacgactccgaaaagagagacaaaaccagatcaaatgcaaaaatattcagtggaaagaaagaaattctaagcaatcagcccaggagttaaagtcactgtttgaaaaaaaatctctcaaagagaagcctccaatttctgggaagcagtcgatattatctgtacgcctagaacagtgccctctgcagctgaataaccctttt

SEQ ID NO: 146429 - DNA, 798 bp, Homo sapiens
atggccttcttggacaatccaactatcattctagctcatattcgacagtcacatgtgaccagtgatgacacgggaatgtgtgagatggttctcattgatcatgatgttgacctagagaagattcatcctccttcaatgcctggagacagtgggtcagaaattcagggaagcaatggtgagactcagggctatgtatatgcccagtcagtcgatattacctcaagttgggactttggtattagaagacgctcaaacacagagtctcctaaagagccggaacagctaaggaatctcttcattggagggttgagctttgaaacaaccaatgagagcaagaggagccattgtgagcaatggggaacgctcccagactgtgtggtaatgaaagattccaacaccaagcgttccgggggttttgggtttgtcacctatgccactgtggaggaggtggatgcagccatgaatgcaaggccacacaagcgcagaaagaaatatcccctcctggggaaaaacaccaatgacaagcaactggatctgggacctgaaaaaggaaggaaacatgccctgaactgtcacagaatgaaaccagcgctcttcagcgtcctgtgtgagatcaaagagaaaacaggaggagcgactcaagccttcgcgaaagaaaataaccaaaaagcatacaaagaaacgtacggcgtctctcatattacacgccatgatatgctgcagatccctaaactagcacaaaacgaaaaatcccaagtgccctcaattcgatcaatccaacgattaaaaattatttga

SEQ ID NO: 146430 - DNA, 545 bp, Homo sapiens
agtatacaagcgaaggacgggacccgaagctcaatgacaatgtcagtgcctactgcctgcatattgctgaggatgatggggaggtggacaccgatttccccccgctggattccaatgagcccattcataagtttggcttcagtactttggccctggttgaaaagtactcatctcctggtctgacatccaaagagtcactctttgttcgaataaatgctgctcatggattctcccttattcaggtggacaacacaaaggttaccatgaaggaaatcttactgaaggcagtgaagcgaagaaaaggatcccagaaagtttcaggttcaagggcagacggggtttttgaggaggattcgcaaattgacatagccacagtacaggatatgcttagcagccatcattacaagtcattcaaagtcagcatgatccacagactgcgattcacaaccgacgtacagctaggtatctctggagacaaagtagagatagaccctgttacgaatcagaaagccagcactaagttttggattaagcagaaacccatc

SEQ ID NO: 146431 - DNA, 737 bp, Homo sapiens
gtctacctccatctgcactcgagccaggacagactgctgccaatgaccgtggtgacaatggccagcgccagggtgcaggacctgatcgggctcatctgctggcagtatacaagcgaaggacggaagccgaagctcaatgacaatgtcagtgcctactgcctgcatattgctgaggatgatggggagtggacacacgatttcaccacgctggattccaatgagcccattcataagtttggcttcagtactttggccctggttgaaaagtactcatctcctggtctgacatccaaagagtcactctttgttcgaaataaatgctgctcatggattctccccttattcaggtggacaacacaaaaggttaccatgaaggaaatcttactgaaggcagtgaagcgaagaaaaggatcccagaaagtttcaggtgcttgtgactaaattcactaatttcactggctgtcaaggctgtgttaaggaaaatgggtttgaactgctgtgggttttgagtactggactggatgtcagaaacctttgccatcacgggaaattctgtcactctggatttactgtctgttccccacagctaaattcctctgcagtgtgatttagcaccctggatccccatcaaccagttttggcatttatttgaatgcattaccccactggtttccataaactattttacaattgtttaaaataaatgactgtttatttccccaaaaaaaaaaaaaaaa

SEQ ID NO: 146432 - DNA, 3436 bp, Homo sapiens
  misc_feature (1)...(3436): n = a,t,c or g
ggcacgagggtgcggctcggggtaatagggctgctgctcggccggccggcggcggcgagcagcaggggcatgagggctaacccgggaagcggcatgtgagctgatccggtaggagatgccggtccccgtggatcccgagagtgcacagctctgtgcaagggccggaatgcgaggaggatccgggccctcccctcaggaacgtggcccggggccgacccggcccgtagtgtggaagcagcttcaggtaggtgagctcgtgaaacaatatgaagaggagaaaatagccttttaaggaaattggcccacagaaaggatggccttcttggacaatccaactatcattctagctcatattcgacagtcacatgtgaccagtgatgacacgggaatgtgtgagatggttctcattgatcatgatgttgacctagagaagattcatcctccttcaatgcctggagacagtgggtcagaaattcagggaagcaatggtgagactcagggctatgtatatgcccagtcagtcgatattacctcaagttgggactttggtattagaagacgctcaaacacagctcaaagattagaacgactccgaaaagagagacaaaaccagatcaaatgcaaaaatattcagtggaaaagaaagaaattctaagcaatcagcccaggagttaaagtcactgttttgaaaaaaaaatctctcaaaagagaagcctccaatttctggggaagcagtcgatattatctgtacgcctagaacagtgccctctgcagctgaataacccttttaacgagtattccaaatttgatggcaagggtcatgtaggtacaacagcaaccaagaagagcagatgtctacctccctctgcactcgagccaggacagactgctgccaatgaccgtggcgacaatggccagcgccagggtgcaggacctgatcgggctcatctgctgacagtatacaagcgaaggacgggagccgaagctcaaagacaatgtcagtgactactgcctgcatattgctgaggatgatggggaggtggacaccgatttccccccgctggattccaatgagcccattcataagtttggcttcagtactttggccctggttgaaaagaactcatctcctggtctgacatccaaagagtcactctttgttcgaataaatgctgctcatggattctcccttattcaggtggacaacacaaaggttaccatgaaggacatcttactgaaggcagtgaagcgaaaaaaaggattccaaaatgtttcaggccctcagtaccgtctggagaaacatagcgagcccaatgtccccgctgacctggacagcactttggagagccacagcgcacgggagttctgcctggtccgcgagaacagttcaagggcagacggggtttttgaggaggattcgcaaattgacatagccacagtacaggatatgcttagcaccctccattacaagtcatttccagtcagcatgatccacagactgcgattcacaaccgacgtacagctaggtatctctggagacaaagtagagatagaccctgttacgaatcagaaagccagcactaagttttggattaagcagaaacccatctcaatcgattccgacctgctctgtgcctgtgaccttgctgaagagaaaagccccagtccacgcattattttaactcacgtatctaaagcaatcacgactataaacactctacctttgaatcggacgctgctaccgcaaatgaaattgtgctcaaggttaactacatcctgggaatcgcgagctagcactgcccggggctgactactttgctcaaaaacaaagaaaacttgaacagaccgtacgagctttcagcttccagaaggagaaggaaatcccgggcagcattgaacaactggccttccagcctcaaatcctggttcccgtagcttcagagcctgcctgcccagggccaagtgcccttaggagcccacccggtgtcctgaagtccttcgggggggaggcccaccccctgggtccactgggcacaggggcaggtgggctcttcggggaaggtgtcgggggccccctaaggagggaagccgctggggacattgccatgggacggaagtttgctttggcaatgggcttttgataagcgatgttttngggggtcagaccaccccttagaggagccacgtgccgcccagccaccttcaatgcctgccaccctgcccgaggatgtacagagccgtgcccacacatttccttgcaacttgatcaaatttcttaaagcaaacaacaaaaatgtacatttctgtttttccttttaataaacaggtgtactctttatcatggttggtattgatgggaccattttttggggcggagggattgattatgttactctctttaaaatctgtttcccatattgaccaggcaggtttggaaaagctatggttcgatttctcagaagaaatgtttaggtcttagtcaatagttttaactatgccatttgtttaaatgagtgcatttgcttcgagggtagtgttcttactaaaagttagggacagagacctagtggtgtgtccaaggccgtgtcactttcccctttcagcacaccccagcttctgacctcagagcccagggagctgcgtgggacagtgtggggtgccagggaggaggggcggtggctggtcctcaggcacgctgcactccccagccagacatggtctttccgttttcttaagtaggcaagtgtaggtttcagctgggcagttccacctgcatgttcttctgcttcgctgccttggaaggggccacatttccccatttcctctttctccttaacagcgccttgccttccttttttcaaggcagggcggaaagctggctgtttctcacgttttcagggagaggggtgagcggagggagacctgtgtccgtgccgtccggctccctgggtgggaacaggcaagggatcagatgcccctgacaccacgcctctggcccacaccagatgcctctgccagtcctcgacagcctcttcagtgtccctcctgcggtgatgtccttactgtccccagccagggccggggaccggtgtttcactgaggacctgcattagaaacattttttaaattgttgtacaggaagagatgtgtctaaaacagcatcttaaagctgagtgtatttctttgcacaaggggtcatgctgatgaattcttctttcattctgatctttgttcagccaacagaagcgtccttttctaatgtcttccattccaaccccccacccaaaaacaaaagaaatatttgtagcttgctatctgtatttgaatttttagcaattttatatttagatactttgaaaaatgtaaatgactaatttggtcattaaatcttgtgacatattcgatattaaaatgatattaaaataaaagtcatata

SEQ ID NO: 146433 - DNA, 1217 bp, Homo sapiens
tttttagatagggtcttgctctgtcacccaggctcgagtgcagtggcgtgatgagacttcaatgcagccttgatctcccaggctcaagtgattctcccacctcagcctcccaagcaactgggaccacaaggtgtgtaccaccatgcctgggtaattttttgtttttttgtagagatgcaggtctcactgttttccaggctggtctcaaattcctgggctcaagtgatcctcccacttcagcctcacagtgttgggattgcagtcacgagccactgtacccaaccatatgtcattctttagacacactgctttactaaatttctcttttttaaaggatatcctgaatttccggttgagccaacttaacaggtaattttctattttagctttaaagcattgataagcaccatgaagcaatttagaacttaacctttaaatggccctattaaagccctccagctatgaaaattatggcagaaatgattatctacaatcttaccagcacataaggaaattcttcctctattctgaaataccatcttctcacaatatactttgatgttatgaatcaatgtctgttcttgaacattatttattgtctttctctattaaacaattccaaaataaaatttccagcacaactaaatattgttgatgataagaggatttttaaaaaagttcttttaaaacagaagcttatatacaacttagaatctaaaacccaatagatttatggtaaaccttaaaactgaaccaaaaccaaacaaaaaccaaagttttaatcatttaaaaatcatgtttattgaggtacaacttacttatagtaaaacctgcccttttcagcatatagcactgagtcttgacaaatgcacagttacgtaccaccaccgaccaaggcctgggcacatttttacctcctcgaaagttctccctgggctgcttctcccactccttgggcaaccactaacctgtttttctgtccgttatagtacttgcttttttcagtgtcatattaggtaggattcacactgtacatagtattttgagtctgacctctgtcaactggcataatgcgatttgagaattatccatgttgctgtactggcagtgcattcttttttattgctgagcagtattcaattgcatggctgtaccagtttgtttattcatttgccagttgaaggataactgagatcttcctcgtttttagcaatttt

SEQ ID NO: 146434 - DNA, 791 bp, Homo sapiens
  misc_feature (1)...(791): n = a,t,c or g
gacactcgctttttggaacgtctgaggttatcaataagctcctagtcccagacgcccatgggtcatttcacagaggaggaccaaggctactatcacaaagcctgtggggcaaaggtgaatgtggaaagatgctggaggagaaaacccctgggaaaggctccctggttgtctaccccatggaccccagaggttctttgaccagctttggcaacctgtcctctgcctctgccatccatgggcaaacccccaaagtcaaggcacatggccaagaaggtgctgactttccttgggacgatgccaacaaagcacctgggatgatctcaaagggcaccttttgcccaagcctgaagtgaactgcacttttgacaagcttgcatgtgggatcctggaggaactttcaagcttcctggggaaaatgttgctgggttgacccgtttttggcaatcccattttcggcaaaagaatttcaccccttgagggtgccaggtttttcttgggcagaaagatgggtgacttggagttggccagtgcccttgttccttccagattaccactgaagcctcttggcccatgaattcagaagctttcaaaggatatggctttattcttgcaagcaattacaaataataaatctatttctgctaagagatcaccaaannnnnatnntnnnnnnncccccggattttttatttagcgggccgcacctttttccccttttagggggggtaaatttatattgggccttgggccggggttttcaaaagcggggggannnnnnnnnnaaagagccc

SEQ ID NO: 146435 - DNA, 712 bp, Homo sapiens
gaaggatttgtaaaccccggagcgaggttctgcttacccgaggccgctgctgtgcggagacccccgggtgaagccaccgtcatcatgtctgaccaggaggcaaaaccttcaactgaggacttgggggataagaaggaaggtgaatatattaaactcaaagtcattggacaggatagcagtgagattcacttcaaagtgaaaatgacaacacatctcaagaaactcaaagagtcatactgtcaacgacagggtgttccaatgaattcactcaggtttctctttgagggtcagagaattgctgataatcatactccaaaagaactgggaatggaggaagaagatgtgattgaagtttatcaggaacaaacggggggtcattcaacagtttagttttaaaatttgagggtctggaccaaaagaagaggaatatcaggttgaagtcaagatgacagataaggtgagagtaatgactaactccaaagatggcttcactgaagaaaaggcattttaagattttttaaaaatcttgtcagaagatcccagaaaagttctaattttcattagcaattaataaagctatacatgcagaaatgaatacaacagaacactgctctttttgattttatttgtactttttggcctgggatatgggttttaaatggacattgtctgtaccagcttcattaaaataaacaatatttgtaaaaatcat

SEQ ID NO: 146436 - DNA, 1602 bp, Homo sapiens
gaagtgacgcgaggcgtagcggaagttactgcagcggcggtgttgtgctgtggggaagggagaaggatttgtaaaccccggagcgaggttctgcttacccgaggccgctgctgtgcggagcacccccgggtgaagccaccgtcatcatgtctgaccaggaggcaaaaccttcaactgaggacttgggggataagaaggaaggtgaatatattaaactcaaagtcattggatctggttttcagtgagattcacttcaaagtgaaaatgacaacacgatctcaagaaactctatagaatcatactgtcaaagacaggggtgttccaatggaattcactcaggtttctcttttgagggtcagagaattgctgatgaatcatacctccaataagaactggggaatgggaggaagaagatgttgattgaagttttttcagggaacaaacgggggggtcatttcaacagtttaggatattctttttattttttttcttttccctcaaatccttttttattttttaaaaataggtccttttgtaatgtgggtgttcaaaacgggaattggaaaactggcacccccatctctttgaaacatctggtaatttgaattctagtgctcattattcattattgtttgttttcattgtgctgatttttggtgatcaagcctcagtcccccttcatattaccctctcctttttaaaaattaccgtgtgccaccggagaggtcaccttttttccaggaccattgcaattttccagggctttgtgggtgattaaataaggatcgaccaattgccaagtgttccataatgactttcccaattgggccctgaatgttcttagccatgtgattacttcactccctggactggtggacctttccagtggggaagatgggaagtttttccagagaacctggaacctgtggaaaaaatggccctttcccttaacttggaagcctacttttttaaaatttgagggtctggacccaaaaggaagaggaatatcaggtttgaagtcaaggatgaccagataaggtgagagtaatgacttaactcccaagcatggctttcactgaagaaaaggcattttaaggattttttaaaaatcttgtcagaagatcccagaaaagttcctaattttcattagcaattaataaaggctatacatgcaggaaatgaatacaacagaacactgctctttttgattttatttgtactttttggcctgggatatgggttttaaatggacattgtctgtaccgagcttcattaaaataaacaatatttgtcaaaaatcgtactaatgcttattttattttaattgtatagaaagaaaaaaatgcctaaaataaggttttcttgcataaatactggaaattgcacatggtacaaattttttcttcattactgtacagggatgatgttaatgactttggagcactgaaagttactgaagtgccttctgaatcaaggatttaattaaggccacaatacctttttaatactcagtgttctgttttttttaaaaacttgatattcccgtatggtgcatatttgatacaggtacccaatcatgttggataaatgggcatgccagcc

SEQ ID NO: 146437 - DNA, 322 bp, Homo sapiens
  misc_feature (1)...(322): n = a,t,c or g
aagcagcgagggcgcgaccgcgggtactctgctgccggcttctcggagcggcgctgggcgaccagagcagggtcgagatgtcctacatcccgggccagccggtcaccgccgtggtgcaaagagttgaaattcacaagctgcgtcaaggtgagaacttaatcctgggtttcagcattggaggtggaatcgaccaggacccttcccagaatcccttctctgaagacaagacggacaaggtgaacggctgggacatgaccatggtcacacacgaccaggnccgcaagcggcttcaccaagcggttcggaaggaggtggtgcgtct

SEQ ID NO: 146438 - DNA, 1380 bp, Homo sapiens
aagcagcgagggcgcgaccgggggtactctgctgccggcttctcggagcggcgctgggcgatctaaattagggtcgagatgtcctacatcccgggccagccgggcaccgccgtggtgcaaagaggtgaaattcacaagctgcgtcaaggtgagaacttaatcctgggtttcagcattggaggtggaatcgaccaggatccttcccagaatcccttctctgaagacaagacggacaagggtatttatgtcacacgggtgtctgaaggaggccctgctgaaatcgctgggctgcagattgggagacaagatcatgcaggtgaacggctggggacattgaccatggtcacacacgaccaaggcccgcaagcggcttcaccaagcgcttcggaggaggtggttgcgtcttcttggttgacgcggcagtcgcatgcagaaaggccgtgcagcagtccatgctgttccttaggcagccaccaccatcttgcgactcctgcctgccgcctctctgtacagtaacgccacttccacactctggtccccatctggcttctgctgaccgctgggccccagcttcagaagggctataagctggtcccagaggcctgggctgggctttccttcccttctcccatccctgggcctgggggcttctgctgaccagctttctctcctggacaccgaggattggaaataagggcctggagctgagtagtagaccagtctgctgtgaccacaggctcatgtccgaccctgctgcttggccacagcagtggctgggcaagtgggaaccactatctcttgggagcccccaaaagctgggaaatgctggaggaaccaggcctttcccgcttttgcctggctgcagggttcggctccgcccctgcccccccagcccctcgtgtgtcccacacccgcagtgccttttgccccttcggggaactggaacacacatcctggccagaggcgctaacgaaagctttgcccccagatgaaagccccaggtggggctccgccgttccactccccactctcccggagggggtgcttggccctccccaagggtttgcccttccttacggatttagacggaggttcgagggtcacctatcagggcaagctctcaaggattgtcattttccctctttgccctgtgggtttaacttttgtatttttttaatcacaagtttgatacaaaatgtttttatcgtactctttgggagatgccctattctacttttgaatttagcttttactaattcgcatctggaagctcagcaagtgcacaagccttactttggttaccgtggaaaccactgccgcccctccccgatgtggtgcgctcaataaaaatgctggaattcaaaaaaaaaaaaaaaaaaa

SEQ ID NO: 146439 - DNA, 717 bp, Homo sapiens
gacactcgctttctggaacgtctgaggttatcaataagctcctagtccagacgcccatgggtcatttcacagaggaggacaaggctactatcgacaagcctgtggggcaaaggtgaatgtggaaagatgctggaggagaaaccctgggaaggctcctggttgtctacccatggacccagaggtttctttgacagctttggcaacctgtcctctgcctctgccatccatgggcaacccccaaagtcaaggcacatggcaagaaggtgctgactttccttggggagatgccattaaagcacctgggatgatcttcaaggggcaccttttgcccaagcctgaagtgaacttgcacttgttgacaagcctgcaatgtgggatccttgaggaacttcaaagctcctgggggaaatgttgctgggttgacccttttttggcaatcccattttcgggcaaaagaatttcaccccttgaggtgccaggtttttcttgggcagaaagatgggtgacttggagttggccaagtgcccttgttccttccagattaccactgagctcactggcccatgaatgcagagcttttcaaggataaggcttttattcttgcaagcaattacaaataataaatctatttctgctaagagatcacacatgattttcttcagctcttttttttacatctttttaaatatatgagccacaaagggtttatattgagaa

SEQ ID NO: 146440 - DNA, 3227 bp, Homo sapiens
tttttttttttttaaaaataaataggtttattctaaaattaatccaaataattgaaattatagggaaggatattaagaagagaaaagattacaagacagaggaaagcctaaaagaaaataaggtaattaaaacttcaaatcaggaaaaaaggttctcaaaaatctgactttgccttacccccaggtacagttggtggctatcaaattaggactcagtaattactttgtgtcactgagtgaaagctgctcatttgctgccaagaacctacagaggaagcccaagggggctgacgtacagctgtatggagcagcaataagcaccccagacacggacttcctagataagccaggcctcctcatccaagtacatcttggatcctctttctctctggtttcccaggtactcaggaactaggccatttggcagaaaactgtagcaaaaaagccaatcccttggcttgactctggccaaagtctgaaatgggctaaaagcccaaaaggaaaagctgggttatctgaatgacagccttcagatcctgactaacactttggaaaaacttctcgtttcttattcataatagaataagatctccagcagttacatgtgtgtgaagattatctgaggagctctgttagcccctaaaccaaatgcagggtttgaggccaatgccctttggttagacagaaccacactgcccagatggctagagaccacccagataactcaatccatcattaagttattgtaagcagcaaactgtaagcagaagtggatgatgaagatggaaaaaaatataagatagggcctgtccctggcaaactaagaacctgaatttcagacctctctgaaataggtacgactaccactggctggtgacaaggaccaatcagcgacctattgaagtgacctggaaatggagatggattgctgcttaactgtgtctctttcattggtcttggtatcagtgggcacacacgattgtttcaccaccagggggcaatctctcaccaggagcccattcaagcatggccactgccccatttgtcatctcgtgtgtgcccaagtaatcaaatgaatgcaaccatccacagtaattacaattagggtcatttatactatttaattgctttttgagattattgctgtaattaggaagggagcattgaaatgggaagggggaggttagagaagacagagatttaaaagaagcaagtaccattttccaagtataaaactcgtaatattaaaagtgacatagcagtatattcaacatgactacttaagtctaatgccagaaaacaagacaagtacagtttttgcaagaggccgatgtgacatctgcatgcgaacatgatactattaaagtgtctctaccccacctcctgctacagagtagctgctatatgcacacatacacaaaaatacacaatgaaaagccttacaaaagtgttaagtcaaactaaggctcttaattgtaaattaaagtggctacagtaggtccctttgaaaaacaccatctcccctggcaccaatgttgtcacagcacagaggaagcgagtggctcggggtctggttctggggagacgctctacaggggcacatgcttctccatcttggcagctggcaagccacagtggtgtctgctgggtggctctgggttcctggacctcattcaacataatgcactgaccaaacagctctgaccacagctactctcaaagaggtgcctgcccaggtctccctctgacacacacacatacacacactacccactcttggaacccacaatgcactgctgggcaaacaggaaaaacacacacacacacacacacacataaatgccacaccagccctgaatggtgtggccagctagtcacagttgttgggtcagtagtacagtgctcaagaacaattcagactaacatgccaaggagcctgaggaaaagtctggtagtcatggctctcccagccagcattcccagtgggggaaactagaagacaccagcctggagaggctgaatattcaggagtccctgagatggggaatggaacagaggaaagtgtcttttgactcatcttaagtactcccctccccaaatagaaacctcaaagactgatccatttcccctagggcctgggccaggagtagctcactgctcactgctgaggagaaaggcacaagatataatgtcataagagcaggacagtggctcagcctacagagttccctataggggaaagaaggcaggaaataggcgccagggtctggtccctgtccctgcacccaccctgagcagcctagtcttgggaagggattacaggccctgggccataggctgctcgcccattctgctttccctatcctgtttctctccctgtgctgctcccttttagccagggctgagaaatgttcagcacctgaggcaaaactgccatagtacctctgaaagctgaatcaagggggaagaggcagaagaacacactaatagagaaaattttccttgctacgggtgctctttcacacccacctagggtaagtcaaggcaacttgtgaaggtgctttgagctgttccttcaagcaaacacattttcattacataatggcttaacgcaagggtgcagggaaggaccaccacccacttatggtgacatatttgaatctgggtgttcatcctactctgatattcaaaaaagccatagaaaaaggtctgatttctgctcatcaccagcccaggatagggttcaggtgtgctctgaccactgccaattcaggaaggcggcaccatggccaaaagctcccagattatttggaaaccatgttttcttcctagtccatggtaacaagaaaaagccaatggaagcatcattccaaacaataatctccaaagatggtggcaaccaagtgtcaaatggggactgcaggcacagaagagaccaccccaaaccctgcctgggtggacggaagcaggtatgctagaatagtcctgtcctgcagaatagggaacggcagcttggtcgatctgtgccctggaaaaagaaaatgagttgcaatagaagtgactctaagacagacaatgaacctactcttaagagagacagggccaggcacggtggctcacgcctgtaatcccagcactttgggaggctgaggcgggggggcgggtatcacctgaggtcaggagttcaagaccagcctggccaacacggtgaacccgtctctactgaa

SEQ ID NO: 146441 - DNA, 510 bp, Homo sapiens; identical to SEQ ID NO: 123420

SEQ ID NO: 146442 - DNA, 799 bp, Homo sapiens
aggatccttaataaattaatccccccccccccgctttcctttcgctgctgcggccgcagccatgcagtatgctcaggcttcagaagatggctcgcctctaggtgtcctccggctgtggcaagaagaaggtctggttagaccccaatgagaccaatgaaatcgccaatgccaactcccgtcagcagatcccggaagctcatcaaagatgggctgatcatccgcaagcctgtttgacgggtccattcccgggctcgatgccggaaaaacacccttggcccgccggaagggcacggcacactgggcataggtaagcgggaagggtacagcccaatgccccgaatgcccagagaaaggtcacatggattgaaggagaatgaaggatttttgccgccggctgcttcagaaagataccggtgaatcttaagaagattcgattcgccacattgtattcaaaggccttgttaccttgaaggtgaagggggaatgttgtttcaaaaaacaagcggatttctcattggaacacattccacaagcttgaaggcagacaaaggccccgcaagaaagctccctggcttgaccaggcttgaggccccgcaggtcttaagaccaaggaaagcacggaaagcgccagtgaagagcggcttccagggcaaaggaaggaggagatcaatcaaagactttattccaaggaggaagagaccaagaaataaaacctcccactttgtctgtacatactgggcctctgtgattacatagatcagccattaaaataaaacaagccttaaaaaaaaaaaaaaaa

SEQ ID NO: 146443 - DNA, 2025 bp, Homo sapiens
gcagcatggcggcggtggcggctgagtcagcttgtatctgccgttggaggaggtcttgctcaaccgggcagtttgaggagctgctgcgcctcaaagccaagtccctccttgtggtccatttctgggcaccatgggctccacaggtgtgcacagatgaacgaagttaatggcagagttagctaaagaactcccatcaagtttcatttgtgaagttggaagctgaaggtgttcctgaagtatctgaaaaatatgaaattagctctgttcccacttttcttgtttttcaagaattctcagaaaatccgaccgattaggatgggtgcacatgccccaagagttgaccaaaaaagttcaagcggacatgcatctaagtgggctccttcctacccaggcgctaatggaacatctttaaaggaagattcttcaacctttcggtttggaaggaaatttgacttcatggctggcccccctggcatggttgttttattggaaaggggaacttccttccaaggaaccacgcctgtggtttcagcaaagcagatggtggaaattcttcacaaacataatattcaagctagcagttttgatatcttctcagcatgaagaggttcgacagggactcaaagcctattccagttggcctacctatcctcagctcctatggttctggagagctcataggaggacttgatataattaaggagctagaagcatctgaagaactagatacaatttgtcccaaagctcccaaattagaggaaaggctcaaagtgcttgacaaataaagcttctgtgatgctctttatgaaaggaaacaacacaggaagcaaaactgtggattcagcaaaccaaattcggggaaatacctaaatagtacctggtgttgaaatttggaaacattccgaataatattggaggatgaaagaaagttcggccaaggattaaaaagccttactccaaattgggcccaacatacccctcagcctgtatgtgaaaggggagcctggtgggaggattggatattgtgaaggaacctgaaaagaaaattgggtgaatttgctgccctataactgagaggagaaaattaataaatcttaaacttggtgccccactattaacggggtctggctctgtcaccccaggctggaagtgcagtggcacgattatggctcattgcagcctcgacttctcggggccaagcgatcctcctgcctcagccttctgagtagctgggacccacaggcgtgcaccaccaggtccacttaattttttattcttggtagagatgaggtctcgcgcatcagcctcccaaagtgatggaattacaaggagtgtcggctgtgccccttgtgatggatgaggaaaggtatccacctttctgaatcagacacgagctgcagtagcttcttgatgcttcattcaccaggatgggtaactttaaagacaagttttataactggcatcccatctggtttcagagtcttgggggcttttttcatacagctttgtctgatatttagagacattcagattcagaagccatgagttcagttagctcatgggccgggcacgtgcactgactcactggctgcagccagaacacattgagggagtcttggtgcaacttaggtcactgtaaggtctaagggctgggagctgggatttgaaccaggatctgtcagcgcagccccagtgctgtgcttgaagcctcgtgccacactggctttgaggtagcacgctgcaagttagtgagtggagttgcccaagtctggggcttctgaaatgacctggtatttttatgttcctgttagaaatggtgtggctttcacaaattaagtgcccaggctgggcacaatggctcgtgcttgtaatcccagcactttgggaggcggaggcaggcgggttgcttgagctccggagcttgagaccagcctgagcaacatggcgaaacctcatatctacaaaaaataaaaaattaactggtcaaaaaaaaaaaaaaaaaaaaaaaaaaaaaaaaaaaaaaaa

SEQ ID NO: 146444 - DNA, 1650 bp, Homo sapiens
  misc_feature (1)...(1650): n = a,t,c or g
gggtggaattcttctcgagccagagagctgagctctacgcgacgcctctgacgcccgcgcctgggcctaacgggggaattcccgggtggaccctttggttggccctgccaaggccggggaacctaagaaaggggcccggccccttgagcctgcaagaagtggacgagcagccgcagcacccgctgcatgtcacctacgccggggcggcggtcgcgacgagctgggcaaagtgctgacgcccacccaggttaagaatagacccaccaagcatttcgtgggatggtcttgattcaagggaaagctctacaccttggtcctgacaagacccggatgctcccaagcaaggaaaggatccccaaatacagagaattggcatcatttccttggttggtcaacattgaaagggcaaatgacatcagcaantggcacagtcctctccggattatgttgggctcgggggcctcccaaagggcacaggcctccaccgcctatgtctggctggttttacgagcagggacaggccgctaaaagtgtgacgagccccatccttcagcaacccgatcttggagaccaccgtggcaaaattcaaaggtgggcgtcccttcccgttaaaaagtaatgaagctccagggcccccggtggctgggcaccgtgttacccccagcccgaagtggggatgaaccaatgtgcccccaaactgtaacgaagcagctgtcctggggaaagtagggggttaagcttgggggaccctgaactggcccctggaggcccccaagcccatgtttccccagtttcagttgtttgcatgtataatagatttctccctcttcctgccccccttggccatgggtgagaccctgacccagtcagatggtaagttgagggtgacttttccctgctggcctggccctttataattttactcactcactctgatttatgttttgatcgaaatttgaacttcattttggggggtatttttggtactgtgatggggtcatcaaattattaatctgaaaatagcaacccagaatgtaaaaaaagaaaaaaactgggggggaaaaaaagacccaggtcatactagtgatagagcaaaagcatcaaaagaatcttttaaggaaggtttaaaaaaaaaaaaaaaaaaaaaaagattgggttgccctctgccctttgtgaatccctgagtcccaagaatggtaccaccaatgtgaattttatgggtgatgtcaactcaccctagacaacccagaggctgggcattgaggctaacctcccaacacagtgcatctcagatgcctcagtaggcatcaggtatgtcactctgggtcccctttaaaagggggcaattcccggggaagaagccaggaangggaaggggttggggcttttgctgttggttgggggacantgggcaattcttagaaccgggcaagcagngcttcggcttgaacaagcttggggaggaaaccctgagatcctgtgtttttttaaatttgatcgttccttccatgggggggtaagaaaagcctgggtctggagttgcctgaatgttgcattaattgtgctgtttgcttgtagttgaataaaaatagaaacctgaatgaagaaaaaacagagagcttacagtggctagtgtgcgtgagtcgtgtt

SEQ ID NO: 146445 - DNA, 2133 bp, Homo sapiens
gacgatacggcgaatcgtgcccgacgtcacatgctcccggacgccatggccgagggattttcccgggtcgacaatttcatagagctctggtgtttcacctctgtcccgccatgctgctcaccgacagtggccagggcccacagcaccaagaggcttgggccacaaagtaaaggtgcatcctgtctggagcttgtgctggcccggcgagtggagcccagagcccatcccccactaccaacatcccccagattgctgcctgcctggccgaggaggtgctggtcaagatgtgttagtgaggagctagacaagatgagcacggtcgcggagcctcgccggccgccatgtggagctgcagctggttcaacggcacagggctggtggaggagctgcctgcctgccaggacctgcagctggggctgtcactgttgtcgctgctgggcctggtggtgggcgtgccagtgggcctgtgctacaacgccctgctggtgctggccaacctacacagcaaggccagcatgaccatgccggacgtgtacttttgtcaacatgcgcagtggcaggcctggtgctcagcgcccctgccccctgtgcacctgctcggccccccgagctcatggagggtcgctgtggagtgtgggcggcgaagtctacgtggcactgcacatccccttcaatgtggtcctcactggtgttcatgtactccaccgccctgctgagcctcaaccactacatcgagcgtgcactgtgcgcggacctacatgggcagcgtgtacaacacaccggcacgtgtgcggcttcgtgtggggtggcgcgctgctgaccaacttctcctcgctgcgtcttctacatctgcagccatagtgtccacccgcgcgctagagtgcgccaagatgcagaacgcagaagctgccgacgccacgctggtgttcatcggctacgtggtgccagcactggccaccctctacgccgctggtgctactctcccgcgttccgcagggaaggacacgccccctgggaccggggaccacgggccggctggagccctcggcacacaggctgctggtggccaccgtgtgcacgcagtttgggctctggacgccacactatctgatcctgctggggcacacggtcatcatctcgcgagggaagcccgtggatgcacactacctgggggttactgcactttgtgaaggatttctccaaactcctggccttctccagcagctttgtgacaccacttctctaccgctacatgaaccagagcttccccagcaagctccaacggctgatgaaaaagctgccctgcgggggaccggcactgctccccggaccacatgggggtgcagcaggtgctggcgtaggcggcccagccctcctgggggagacgtgactctggtggacgcagagcacttagttaccctggacgctccccacatccttccagaaggagacgagctgctggaaagagaagcaggagggggtgttttcttgaaagttcctttttcccacaaatgccactcttgggccaagggctgggtccccgtggctggcatctggcttgaagtctcccgaagcctgtgcgtcttccaaacacgcagctcaaggtccacatccgcaaaagcctcctcgccttcaggcttctcaacatttcagtttgtcaatgaagtgatgaaagcttatagccagtatttatactttgtggttaaaatacttgattccccccttgtttgttttacaaaaacagatgtttcctagaaaaatggcaaatagtaaaatgaacaaaacccctaccaaagaaatggcaacagcccagggtggccgggccctgccagtgggcggcgtgtgctagcaaggcctgccgggtgtgccgcagtcaccacagggtttctgagaacatttcacagaagtgcctgagacgcggagacatggctggtgttaaatggagctattcaatagcagtgaccgcgctctcctcagccaccaaatgtccctgacaccctccccagcccccacagataacatcagctgaggttttttttcagtatgaacacagtcctaaatcaattcctcaaagtgtgcacaaaactaaagaatataaataaacaaaagaaaggtgaaaaaaaaaaaaaaaaa

SEQ ID NO: 146446 - DNA, 347 bp, Homo sapiens
agaacctcaccccattcccccaggaacatcttgctgctctcagaccagaaaatgctgacagcctcatgctggtggacttcgagtacagcagttataactataggggctttgacattgggaaccatttttgtgagtgggtttatgattatactcacgaggaatggcctttctacaaagcaaggcccacagactaccccactcaagaacagcagttgcattttattcgtcattacctggcagaggcaaagaaaggtgagaccctctcccaagaggagcagagaaaactggaagaagatttgctgtgtatgtaacacaataaacaagcttcttcttcaaaaaaaaaaaaa

SEQ ID NO: 146447 - DNA, 415 bp, Homo sapiens
gtcattacctggcagaggcaaagaaaggtgagaccctctcccaagaggagcagagaaaactggaagaagatttgctggagatgtacagcctgaaggatgagatgggcaacctcaggaagttactagagtctaccccatcgccagttgtcttctgccacaatgacatccactcctcatcctgactccaccctcccactccttggatttctcctggagcctccagggcaggaccttggagggaggaacaacgagcagaaggccctggcgactgggctgagcccccaagtgaaactgaggttcaggagaccggcctgttcctgagtttgagtaggtccccatggctggcaggccagagccccgtgctgtgtatgtaacccaataaacaagcttttttttcaaaaaaaaaaaaaaaaaa

SEQ ID NO: 146448 - DNA, 477 bp, Homo sapiens
ggagggcttcgatcgagaccatagtccatgtggtggaattcggcatctgagtctcctaacccaagatggaagagccagagggctctggagtgagcagaacctcaccccattcccccagggaacatcttgctgctctcagagccagaaaatgctgacagcctcatgctggtggacttcgagtacagcagttataactataggggctttgacattgggaaccatttttgtgagtgggtttatgattatactcacgaggaatggcctttctacaaagcaaggcccacagactaccccactcaagaacagcaggtatgtgggccagaggctggggagcaggacccatcctgtgaggaaggagggaggtggagtctggaaggaatggccggaaaggatgttacctgggaaatactccacagtctccccaattcctgactcttggccattgatcgtagttgcattttattcgtcattacctgg

SEQ ID NO: 146449 - DNA, 1287 bp, Homo sapiens
  misc_feature (1)...(1287): n = a,t,c or g
aaactaggacctacttagtgccgtggaattcgggtctgcagcggaggcctcagcaacctgctcttccgctgctcgctcccggaccacctgcccagcgttggcgaggagccccgggaggtgcttctgcggctgtacggagccatcttgcaggtgagggggttgtgagcgccgcagcaccagtggctttagggcctgtcgcttacgcgatgcgggtagtattgttcccgttgcgcagttgaggacaccgaggttcacggtctgagtaacacctcattacaccgaagcctgnnnnnnnnnnnnnnnnnnnnnnnnnnnnnnnnnnnnnnnnnnnnnnnnnnnnnnnnnnnnnnnnnnnnnnnnnnnnnnnnnnnnnnnnnnnnnnnnnnnnnnnnnnnnnnnnccaacgctaaagcctgtgctccagagcctccaggcaattggatcagaagtcgcagctctggtgggaggaaggcgagccctcatgtgtgtccctgtgccactttgccttggcccctttgctgtccatcctttttcagggcgtggactccctggtgctagaaagcgtgatgttcgccatacttgcggagcggtcgctggggccccagctgtacggagtcttcccagagggccggctggaacagtacatcccagtacgggcccagtcctaccctctcctccccaaggcacctccaccccctaaccctaccccagtgcccaatgtctgcctccacatccctcaccccaagtagggaatttcccccaaaaccctgacttcccctcattgccccagcccttcccactcctgccccagccccatcaccaccctgatagcttcctgggtgcagagtcggccattgaaaactcaagagcttcgagagccagtgttgtcagcagccattgccacgaagatggcgcaatttcatggcatggagatgcctttcaccaaggagccccactggctgtttgggaccatggagcggtgagtcaggagcctcctcagggctcctgtactcctgagctgaacctccatgccagcggatgtgtcgggggctctatccagccctccacttgagtggatctgatgtcatgggctgtcacagaacaggcttttaaatgcttgccagaggccacatgcagtgcctcatgcctgtaatcccagaactttgggagccgaggtgggtgaggtgggaggatcacttgagcccaggaggcggaggttgcagtgagctgagctcatgccattgcacttcagcctgggtgagagcaagactctgtctcaaaacacca

SEQ ID NO: 146450 - DNA, 1624 bp, Homo sapiens
atgaccggagaagcccaggccggccggaagaggagccgagcgcggccggaaggaaccgagcccgtccgaagggagcggagcgcatcctggcctggggcccggtcgagcccgcgctatggcggccgaggcgacagctgtggccggaagcggagctgttggccgctgcctggccaaaaacggcttgcagcagtctaagtgcccggacactaccccaaaacggcggcgcgcctcgtcgctgtcgcgtgacgccgagcgccgagcctaccaatggtgccgggagtacttgggcggggcctggcgccgagtgcagaccgaggagctgaaggtttaccccgtgagcggaggcctcagcaacctgctcttccgctgctcgctcccggaccacctgcccagcgttggcgaggagccccgggaggtgcttctgcggctgtacggagccattttgcagggcttggactccctggtgctagaaagcgtgatgttcgccatacttgcggagcggtcgctggggccccagctgtacggagtcttcccagagggccggctggaacagtacatcccacttcctgggtgcagagtcggccattgaaaactcaagagcttcgagagccagtgttgtcaagcaagccattgccacgaagatggcgcaatttcatggcatggagatgcctttcaccaaggagccccactggttgtttgggaaccatgagccgtaccttaaaacaaatccaggaccggccgccaactggcctccctgagatgaaactgcgtgggaatgtacggctgaaggatgaggatgggcaacctcaggaagttactagagtctaccccatcgccagtcgtcttctgccacaatgacatccaggaagggaacatcttgctgctctcagagccagaaaatgctgacagcctcatgctggtggacttcggagtacagcagttataactataggggctttgacaattgggaaccattttttgtgagtggggtttatgatttatactccagcgaggaatgccctttcacaaaaaggcaggccccccaagcccttccccccaccaaagacagcaagtgcattttattcgtcaattgcccttggcaagaggcaaatgaaaggttgagtcccttcctccaaggaggagccagaagaaaaactggaaagaaagatttgctggtaagaaagtcaagtcgggtaatgttctggcaatcccattttctttgggggtctgtggtccaatcctccagggcatccatgtccacccatagaatttggttacttggacctatgcccaagtctccggttccaagttcctacttcccagcaagaaggggcaagcttgacccagtgtccactcctgcatcctggactccaccctcccactccttggatttctcctggagcctccagggcaaggaccttggaggggaggaacaacgagcagaaggccctggcgactgggctgagcccccaagtgaaactgaggttcaggagaccggcctgttcctgagtttgagtaggtccccatggctggcatgccaaaaccccccggctgcgtatgtaacacaataaacaagcttcttcttgcaaaaaaaaaaaaaaaaaacaaaaaaaagtcgtatcga

SEQ ID NO: 146451 - DNA, 906 bp, Homo sapiens
ggtgcaattcacttaagctgcatctcacagccgaagattccagcagcccaggggatttcatttagcttttactcagaggaacatctgcggagagacccgcgaagccctctccagggcagtcctcatccagacgctccgctagtgcagacaggagcgcgcagtggccccggctcgccgcgccatggagcggatcccaagcgcgcaaccacccaccgtctgcctgcccaaagcaccgggactggagcacggagacctaccagggatgtaccctgccctcatgtaccagatgtacaagtcaagacggggattaaagcggagcgaggacagcaaggagacctacgaattgccgcaccggctcatcgagaaaaagagacgtgaccggattaacgagtgcatcgcccagctgaaggatctcctacccgaacatctcaaacttacaactttgggtcacttggaaaaagcagtggttcttgaacttaccttgaagcatgtgaaagcactaacaaacctaattgatcagcagcagcttttcaaaatgcactatgcctgattgctgatcgtgttttaactttttcttttcctgtttttattttggtattaagtcgttgcctttatttgtaaagctgttataaatatatattatataaatatattaaaaaggaaaatgtttcagatgtttatttgtataattacttgattcacacagtgagaaaaaatgaatgtattcctgtttttgaagagaagaataattttttttttctctagggagaggtacagtgtttatattttggagccttcctgaaggtgtaaaattgtaaatatttttatctatgagtaaatgttaagtagttgttttaaaatacttaataaaataattcttttcctgtggaagagaaaaaaaaaaaa

SEQ ID NO: 146452 - DNA, 3062 bp, Homo sapiens
  misc_feature (1)...(3062): n = a,t,c or g
cacacaccgccagtctgtgcgctgagtcggagccagaggccgcggggacaccgggccatgcacgcccccaactgaagctgcatctcaaagccgaagattccagcagcccaggggatttcaaagagctcagactcagaggaacatctgcggagagacccccgaagccctctccagggcagtcctcatccagacgctccgctagtgcagacaggagcgcgcagtggccccggctcgccgcgctatggagcggatccccagcgcgcaaccaccccccgcctgcctgcccaaagcaccgggactggagcacggagacctaccagggatgtaccctgcccacatgtaccaagtgtacaagtcaagacggggaataaagcggagcgaggacagcaaggagacctacaaattgccgcaccggcttatcgagaaaaaaaagacgtgaccggactaacgagtgcatcgcccagctgaaggatctcctacccgaacatctcaaacttacaactttgggtcacttggaaaaagcagtgggtttttgaacttacctttgaacatggtgaaaagcccttaccaaccttaatttgtcaagcagcaggcagaaaatcattgcccttgcagagtggtttacaagctggtgagctgtcagggagaaatgtcgaaacaggtcaagagatgttctgctcaggtttccagacatgtgcccgggaggtgcttcagtatctggcccaagcacgagaacactcgggacctgaaagtcttcgccagcttgtccacccacctcccaccgggtggtctcggagctgctgccagggtggtacctccaggaagccatcagacccagcttccaaagtgatggacttcagggaaaaacccagctctccggccaaaggttcggaaaggtcctcggaaaaactgcgtgccagtcatccagcggactttcgctcactcgagtggggagcagagcggcagcgacacggacacagacagtggctatggaggagaatcggagaagggcgacttgcgcagtgagcagccgtgcttcaaaagtgaccacggacgcaggttcacgatgggagaaaggatcggcgcaattaagcaagagtccgaagaaccccccacaaaaaagaaccggatgcagctttgggatgattgaaggcccatttcaactagcaagtgacctgaatcagcttcccccgttccctgggcccacaccacaacaccagcctcctttctgcctgcccttctacctgatcccaccttcaagcggactgcctacctgcccatgctggagaagtgcttggtatcccacctcagtgccagtgctatacccaggcctcaacgcctctgccgcagccctctctagcttcatgaacccagacaagatctcggctcccttgctcatgccccagagactcccttctcccttgccagctcatccgtccgtcgactcttctgtcttgctccaagctctgaagccaatcccccctttaaacttagaaaccaaagactaaactctctaggggatcctgctgctttgctttccttcctcgctacttcctaaaaagcaacaaaaaagtttttgtgaatgctgcaagattgttgcattgtgtatactgagataatctgaggcatggagagcagattcagggtgtgtgtgtgtgtgtgtgtgtgtgtgtgtatgtgcgtgtgcgtgcacatgtgtgcctgcgtgttggtataggactttaaagctccttttggcatagggaagtcacgaaagattgcttgacatcaggagacttgggggggattgtagcagacgtcagggcttttccccacccaaagaatagtccccttcgatacacatcatactggagtttcaaaagcttcaaagtcttggtctgtgaatcactcttcaatttgggagctgggtctgtggctttgatcataagggactttcaaaagagggctttccagggctcagctcccaaccagctgttaggaccccacccttttgcctttattgtcgacgggactcaccacacgttggggagagagagcagtcagaccgatctttctgctaacatggggaggtagcaggcactggcatagcacggcaaaggtttggggaggtttccgaaggtctgctccacacccctgccctggaaagaataaagagaatgtagttccctactcaggctttcgtagtgattagcttactaaggaactgaaaatgggccccttgtacaagctgagcntgccccggagggagggaggagttccctgggcttctggcacctgtttctaggcctaaccattagtacttactgtgcagggacccaaacccagggtctgagaaatgcggaccacccccgagcgagcacccccaaagtgcacaaaggctgagtaaaaagctgcccccttccaaacagaaactagactcagttttcaattccatcctaaaactccttttaacccaagcttagcttctcaaaggcctaaccaaacccttggcaccgcccagatcctttctgtaggctaattccctcttgcccaacggccatatggagtgtccttattgctaaaaaggattccgtctccttcaaagaagttttatttttgggcccaaagtacttgttttcccgatgtgtccgagcccagctccgcaggcagcttttcaaaatggcactatgcctgattgctgatcgtgtttttaactttttcttttcctgtttttattttgggtattaagtcgttggcctttatttgtaaagctgttataaatatatattatattaaatatattaaaaagggaaaatggttccgatgtttatttgtataattccttggttccccccagggaagaaaaaatgaatggattccctgtttttgaaaagaaaaataattttttttttttttctctagggagaggtacagtgtttatattttggagccttcctgaaggtgtaaaattgtaaatatttttatctatgagtaaatgttaagtagttgttttaaaatacctaataaaataattcctttcccggtggaagagaaaaaaaaaaaaaaaaaaaagggcggccgct

SEQ ID NO: 146453 - DNA, 1866 bp, Homo sapiens
  misc_feature (1)...(1866): n = a,t,c or g
agagaactagtctcaagttttttttttttttttttgtctttaatgtctttgtttagttattctcttctcctgtctctcctgcacgctcctccctttccacttctttcttctctcttcggtcctccccgtgggaacctaatgtatacgaaaatctagtggtgcctccagttgtattttcccatgaatcgctttattgactttgcttcaagcctttcaaatgggcatctgggtgcttacctgtgagacatcccacctgacctgccagataaaaacgaattaacccctattttgaaaactgaggataaacctgggcttgggaaaagtttaccttcccccaaggttctcagcacttaagtaatttaacttaggacttcgaaccccaggccagcgactcctggacttgcttaaggacgggcatgggtaaggaaggcagggtccaggaaggtcgagagaacctgggtgtgcaagttcctagggggatggctaaggaacgagagaagggggagcaagtgtctctgtgaagggagtgtaaagacacagaagtgaaaccggagacgcagagccctgtgagagaaggcatgaaaatgtgtccttgtgtccatgagccgaaaacatgacaaggattaagcccacagaaaaagtctttacctttgtgaagcgtgcttcccacggagtagagcgagtcaggaaaccagtgggttgaaagaggaaaattggaggttaggaaggaagaccagcaagtgtagaccaggcctttccaagaagcttggctgtgaaaggaaagacagagactgtagtggcttagaaaagatgaacagcagggaccctgggaggctccccaggctgccnggcacagccaaaagtcaagaaatgccagagggaggcccttcctggaaggtggcccgggaactgaaaacaggtaacaatccttccctcctaagaactccagggaacaggggttcaatgatccagtggggccccaatctgtggagcctcttgaacagcctctgtttccctgggagtggcagtggccggccctggctcaggacagggagttgtgaggatcaaatgaatggacggttgcaaaaagtgacaggaacattcactaccattactcactgggagcaggactctcgattttacagcccactcgaatctcactggggcctggattttcactgacccataaattattcgtcctgaacattaaggatgtaaaaaaccactggtaaaaagctccctgccagtctctgggaagacaaaaaggtcccctccctaaatagccctggattaacttcaaagccaggtctccgccccacttcaatttgtcaccgtcccaagtcatccttgcacctccatttgccacataatccaatcagcccctttcagaggctgggcagctattgtctacactgagctgggcttctctaaagcagcccaagttgtttttgtcttgtccggacaaaactggttggcttaaaacgggacgaaaaaaaattcctggtcaaatgaggaccccaattaggttccaagagactgttttcataatctttgtatcagatacctagcctggtgcactgggcagattgtcggtgccccagaaaatgtttgttgaattaattcatttttatttattctggaatttcttaattgaacacaaacacacacagcacctactgagtgctgttctcactaagggagaattgggctggacatgtgagcaaggagggacagcctcgggtgcttgagtagctcacactttccacagcaatttacaaagcactttcatagtagttacagcatttggtcttcaaaagcgccctgtggggtagatacacgagggtgtgtgtgtgtgtgtctcgtgcc

SEQ ID NO: 146454 - DNA, 480 bp, Homo sapiens
  misc_feature (1)...(480): n = a,t,c or g
ggcacgagaatgcttcatattaacatagaaaagaaatttcttcacctatctcctgagtcttttgaaatcttcacatatattattttctaaattattattatttaaaattttcttaaagatggagtcttgctctgtctcccaggctggatagagtacagtggcatgatcttagctcactgtaacctcagacttctgggatcaaacaattctcccctcagcctcctgaatagctggggctacaggtgcatgccatcatgcatggctaattttttaaaatttttcgtagagatggggtctcgctacgtagtctaggctgttctcaaactcctggggctcaagcaatcctcccacctcagcctcccaaggcgctggggattattaggtgttgagtcaccatccctggggcttctatttttatttattttaaaaaaaaattattatgtattatattaaatttccngtgaattgatagggggcagg

SEQ ID NO: 146455 - DNA, 1164 bp, Homo sapiens
tcaggaaccggaggttctaaattttgtatttgtcaccacgaccacaactcgttgtccagaaactgaaggatggtgcccaattggtaattccaagcgcctcagctttgttatgacagtgctttcatgattagctcggtgccaagtcctcacatactgcgcgtctgtgaatttccgtgttttcacgcccacctgcgtgtctgtgaatttccatgttttcacgcccacctgtgcgtctgtgaatttccgtgttttcacgcccacctgtgcgtctgtgaatttccgtgttttcacgcccacctgtgcgtctgtgaatttccgtgttttcacgcccacctgcgagtgtctgcgtctgtgaatttccgttttcacgcccacctgtgcgtctgtgaatttccgtgttttcacgcccacctgcgtgtctgtgaatttccgtgttttcatgcccacctgcccgtgtctgtgaatttctgttttcatatccacctgtgtgtctgtgaattttcgtgttttcatgcccacctgcgtgtctgtgaatttccgtgttttcacgcccacctgtgcgtgtccgcgaatttccgtgttttcacacccacctgtgcgtctgtgaatttccgtgttttcacacccacctgtgtctgtgaatttccgtgttttcacgcccacctgcgagtgtctgcgagtgtctgtgaatttccgtgttttcacgcccacctgcaagtctatgaatttccgtgttttcatgcccacctgcgggtctgtgaatttccgtgttttcatgcccacctgcgtgtctgtgaatttccgtgttttcatgcccacctgtgtgtctgtgaatttccgtgttttcatgcccacctgcgtgtgtctgtgaatttctgtgttttcatgcccacctgtgcgtctgtgattttccgtgttttcatgcccaccaatctgcaacagtattggtgtgaccagagcggtttccatggcgtaacagaactccctgccaaacatcaccgccccgtgcatcacccacaggcgcatggggattcggtctatggacccctcgctgatggtctcgcagttctcggcctctgcgcctccggctttctgcgggtccggcaggggcacggataactcttgaacttgcatagattccgggtcggcattctgcggagccat

SEQ ID NO: 146456 - DNA, 443 bp, Homo sapiens
  misc_feature (1)...(443): n = a,t,c or g
tcgacgatttcgttgtgccgccgctgtggctctaaggcctaccaccttcagaagtctacctgtggcaaatgtggctaccctgccaagcgcaagagaaagtataactggagtgccaaggctaaaagacgaaataccaccggaactggtcgaatgaggcacctaaaaattgtataccgcagattcaggcatggattccgtgaaggaacaacacctaaacccaagagggcagctgttgcagcatccagttcatcttaagaatgtcagcgattagtcatgcaataaatgttctggttttaaaaaatacatatctggttttggtaaggtatttttaatcaattaggcttgtagtatcagtgaaatactgtaggtttagggactgggctagcttcatatcagatttacttgttaagtgactgttttggaatgtttacttttggactggn

SEQ ID NO: 146457 - DNA, 429 bp, Homo sapiens
  misc_feature (1)...(429): n = a,t,c or g
tccgcacaagcgagatgacgaagggaacgtctttttttggaaagcgtcgcaataagacgcacacgttgtgccgccgctgtggctctaaggcctaccaccttcagaagtcgacctgtggcaaatgtggctaccctgccaagcgcaagagaaagtataactggagtgccaaggctaaaagacgaaataccaccggaactggtcgaatgaggcacctaaaaattgtataccgcagattcaggcatggattccgtgaaggaacaacacctaaacccaagagggcagctgttgcagcatccagttcatcttaagaatgtcaacgattagtcatgcaataaatgttctggttttaaaaaatannnnnnnnnnnnnncataataaaacttatataaaaaataaaaaaatatttaatctcctccgggggggggccct

SEQ ID NO: 146458 - DNA, 670 bp, Homo sapiens
attccgactccacttatagggaattttggccctcgaggcccaagaattcggcacgagcggccgcagaagcgagatgaccgaagggaaccgtcatcgtttggaaagcgtcggcaataagacggcacactgttgtgccagccgctgtggctcctaaggccctaccaccttcagaagtcgacctgtggcaaatgtggctaccctgccaagcgcaagagaaagtataactggagtgccaaggctaaaagacgaaataccaccggaactggtcgaatgaggcacctaaaaattgtattaccgcagattcagggcatgggatttccgtgaaggaacaacacctaaacccaagtagggcagcttgttgcagcattccagttcatcttaagaattgtcaacgattagtcatgcaattaaatgttctgggtgtaaagaatacatatctggttgtggagtttggattcataatacaagagaagcacagggcaaagacactgcattaacctccaagaactaaggaatgggaggactgggccaggcctgggtgggtgcacacctggtaattcccagctacttcaggaggctgaggcgagagaatcgcttgagccttggggggcagaggttgcagtgagctgagagaacggcgggcggcagagcgagactccatctcaaaaaa

SEQ ID NO: 146459 - DNA, 711 bp, Homo sapiens
aattttgccctcgaggccaagaattcggcgagggcaataagctcctagtcccagacgcccatggggtcatttcacagaggaggaccaaggctactattcacaagcctgtggggcaaaggtgaatgtggaaagatgctggaggagaaaacccctgggaaaggctccctggttgtctaccccatggacccagaggttctttgacagctttggcaacctgtcctctgccttttgcccatcatgggcaaacccccaaagtcaaggcacatggcaaagaaggtgctgactttccttgggagatgccataaaagcacctggatgatctcaagggcacctttgcccaagcctgagtgaacctgcacctgtgacaaagctgcaatgtggatccttgagaactttcaagctcctggggaaatgttgctggtgacccgtttttggcaatccatttccggcaaacgaattcacccctggaggttgcaaggcttcctgggcagaagatgggtgacttgcagttggccagtggccctgttcctccagataccactgaagcctcttggcccatgaattcagaagctttcaaggataaggcttttattcttgcaagcaattacaaataataaatctatttctgctaagagatcacacatgattttcttcagctcttttttttacatctttttaaatatatgagccacaaagggtttatattgagaa

SEQ ID NO: 146460 - DNA, 968 bp, Homo sapiens
  misc_feature (1)...(968): n = a,t,c or g
gccgttgaatcccgcgcggaggcggaggcttgggtgcgttcaagattcagcttcacccgtaacccaccgtcatggccgatgaatggtgagcccatgggccgcggtcggagttggggtctgagtgcggctgatgcgtggggctagagctggcggaacaggactgtgtcaaacgggtcagccgtaagcgcgtctagcgtacacttatgttttgctgagtgcaaggccttatgcggtgagaggattttaactgatggttctgatgtgtcgcgtccaaccattgctgctggagggtgtaatgggaccgttaaatacctgctttaacaagaggttcctgaagactgcccctctcatcccacgatggccctagccacgtgggaattccgcgaagctgcccaaagcccttagacaagcgccaagcccattctttgtgtgcttgcatccaaactgtgatgagcctactatgtatgtcaagttggtggaggcccttttgtgctgaacaccaaaatcaaccctaattaagggttgattgacaacaagaaactagggagaatggggttagggccttttgttaaaatttgacagaggaggggggaaaccccgtaaaagttggttaggtttgcagttgttttagttagtttaaggactattggcaaggagtctcaggccaaggatgtcattgttagagtatttcaaatgcaagaaatgaaagaaataaatctttggctcacnnnnnnnnnnnnnngggggggcccgtttaaaagaacccttggggggcccaaattttacccggcattgcaaggcataacttttttccttatggggggccattttaaaccttacttgggaattttggaaaagaacctttttttttggggggggacaaattgggacaacctccctccaaaatttaaaggttctagggaaaataaaaaattttaaggggaaaagggggtaaacctaccgccttt

SEQ ID NO: 146461 - DNA, 815 bp, Homo sapiens
  misc_feature (1)...(815): n = a,t,c or g
cccacgcgtccgctccgcccttccggctggccccgctcagtcacccgcagcaggcgtgcagtttcccggctctccgcgcggccggggaaggtcagcgccgtaatgggtntcattggcgtcgggaccctacctggacccatcagcaaaaggtgttggggctttataagcgggcgctacgccacctcgaggtcgtggtgcgtccagagagacaaatacccgatactttgcttgtttgatgagagcccggttttgaagaacataagaaatgaaaaaggatatgggcgaaggccacccagcttgctgaaggaggcccgaggaaagaatttttggtacccggtcaagcatcccaaaagccaatacatcctccccctgacttcccccctgggggggcaccctccctattgagaagatcacgatttgcttacaaggtcccaagaattgggtgccttagatgaactggcattccttctgaagaaggcaatgtatcctggattacttttgccaaagaagagaacagtggaaagaaaacttgcggaggggaaaagcttggggaaccgaagagggtttaagcagcttgcaggaaggaaacgcccacctggttggtccttttaactgaaagctttgccccctggcccgaaaaggaaggtgattttgcccccactgtgggtggttatattgtgaccagacccccgggagcggcccatgttagaaagagagagacctcatctttcatgcttgcaagtgaaatatgttacagaacatggcacttgcccctaataaaaaatcagtgaaatggtaaaaaaaaaaaaaaaaaa

SEQ ID NO: 146462 - DNA, 861 bp, Homo sapiens
atgaagatgatcttccctgcgctggtgttcttgggcctgaagaacaatgactgctgtgggtgctgcggcaacgagggctgtgggaagcgatttgcgcaaaatacgtacatcaggctcgaaccctttaagatcaacgttcttgagcagatcacgaagcatatcgaaaaactgcagtgcggaggtgtagtcaaacaactcagcaggcgtgggaacaatcagcacatcagcagcacatacgacattaatcgtgccgatacccaggttaggcgcgctgtcaataactatgacatcatagtcatgagcaacagtttcaatggccagtcggagcatcaggtgtggatcgccttggatgccgcaggcagcgtctgtgatgtctgtttcatacaccctttggaaagtcctacgctcaaggcaaacaagtttgccgctgccacatcccctttgaacagacgtaccagtgactatgagcttatcatctggactgaaacagcagtcaatcattgggaacatggttttttcacgaaccccggcaccgtgtataaatctaccaatgcgctcatcgtcatcctcggcaccgtcaccctggatgctgtaggcataggcttggttatgccggtactgccgggcctcttgcgggaaatcgtccattccgacagcatcgccagtcactatggcgtgctgctagcgctatatgcgttgatgcaatttctatgcgcacccgttctcggagcactgtccgaccgctttggccgccgcccagtcctgctcgcttcgctacttggagccactatcgactacgcgatcatggcgaccacacccgtcctgtggatctacccactagtcaattcaccatcttgttga

SEQ ID NO: 146463 - DNA, 1460 bp, Homo sapiens
ggcacgagttgagaagctgaagcaactccaaggacacagttcacagaaatttgggtctcagccccaaaatactgattgaattggggacaattacaaggactctctggccaaaaacccttgaagaggccccgtgaaggaggcagtgaggagcttttgattgctgacctgtgtcgtaccaccccagaatgtgcactgggggctgtgccagatgcctggggggggaccctcatttcccttgctttttttggcttcctgggctaacatcctgttattttttcctgggaggaaaagtgatagatgacaacgaccaccttttcccaagagatctgggtttttcggaggaatattagggaagcggtgtctttgatgatctttccctgcgctggtgtttcttggggcctgaaggaacaatgactgctgtggggtgctgcggcaacgagggctgtgggaagcgatttgcgattgttcacctccacgatatttgctgtgggttggattcttggggagctgggatactcgtttatcatctcagccatttcaatcaacaagggtccctaaaatccctcaatggccaaaaagaacatgggggctacccccttccaacgacggggattaatcctcaatgatgaaggccttaatggaacaaagtgcccgagagcctcttcaatgtgggttccctgggaatcttgaccctctttcttccatcctgctgggtcgtagggagggaatccagatggtttctctgcgccatcccaggtgggtcaatgggcctccctgggggaccctctgtggggggacttgccagtgttgtggctgctgtggggggagatggacccgttttaaacctccgagcatgagctgctcaaactcttcagcatgggcgacttacaatttcttttcataaaacttcttctcttcttggaattattaattcctatctgcttcctagctgataaagcttagaaaaggcaggttattcccttcctttcccaacccagctttgcctcgagttacgaattttgttattttcaaataaaaaatagtttggccacttaacaaatttgatttataaatctttcaaattagttcctttttagaatttaccccaacaggttcaaagcatactttttcatggatttttttattaccaaatgtaaaatgtataaagtccacatgtactgcccatacctaccttcctttgtatataaagatgtttatatcctttggaagttttacataaatcaaaggaagaaagcacatttaaaatgagaaactaagaccaatttctgtttttaagaggaaaaagaatgattgatgtatcctaagtattgttatttgttgtcttttttttgctgccttgcttgagttgcttgtgactgatcttttgaggctgtcatcatggctagggttcttttatgtatgttaaattaaaacctgaattcagaggtaacgtaaaaaaa

SEQ ID NO: 146464 - DNA, 4546 bp, Homo sapiens
  misc_feature (1)...(4546): n = a,t,c or g
tttcgtgctggtttgaaactaggggtcggtctcggccgtcgtcgttgtttgtcgccgcatccccgcttccgggttaggccgttcctgcccgccccctcctctcctcccttcggacccatagatctcaggctcggctccccgcccgccgcagcccactgttgacccggcccgtactgcggccccgtggccaccatgtccctgcacggcagacggaaggagatctacaagtatgaagcgccctggacagtctacgcgatgaactggagtgtgcggcccgataagcgctttcgctgggcgctgggcagcttcatggaggatgcacaacaacgagggctatcttgatggcttagatgaggagagatcataggttattgagcaaaaacatccttgaccgcccataccccaccaacaaagttatgtggatccctgacacaaaaggcgtctatccagacctactggcaacaagcggtgactatctccgtgtgtggagggttggtgaaacagagaccaggctggagtgtttgctaaacaataataagaacgtctgatttctgtgctcccctgacctcctttgactggaatgaggtggatccttatcttttaggtacctcaagcattgatacgacatgcaccatctgggggctggagacagggcaggtgttagggcgattgaatctccgtgtctggccacgtgaagacccagctgatcgcccatgacaaaagaggtctatgatattgcatttagccgggccgggggtggcagggacatgtttgtcctctgtgggtgctgatggctcggtgcggatgtttgacctccgccatctagaacacagcaccatcatttacgaagacccacagcatcacccactgcttcgcctctgctggaccaagcaggaccctaactacctggccaccatggccatgggatggaatgtgaggtggtgattctagatgtccgggttccctgcacacctgtcgccaggttaaacaaccatcgagcatgtgttcaatgggcatttgctttggggccccacattcatcctggccacatcttgcactgcagcgggttgaccaccagggttctcatcttgggacattccagcaaatgccccgagcccattgaggacccttatcctggcctacacagctgaaaggagagatcaacaatgtgcaagtgggcaatcaaactcagccccgaactgggaatcgcccatctgcctacaacaactgcccctggagatactcagagtgtagtgttggtggcgctgtgccccacgaggcaggggcttttgtatttcctgcctctgccccacccccaaagtaagaagaaacatgtttccagtggccagtatgtctttcattgctttgcacccactgttaccagaagctgctctaggagttcctggccagtcaccccatcgccctctgtggcagactcagtgctgtgtggcgcctcctcagcccagggctgagttttaagattttctctcctttcctcttctcctttggttcctcaattaaaaaatgtgtgtatatttgtttgtcaggcgttgtgttgaggagcagttcacgcactggctgtgtctattcctctgcccaggtgtctctgtttgctgcccaaggcagcagttcatgtctccgtccatgtccatgttccgggttaagcacttacgttgggaacaaataccaatttgtcttttctcctagtatcagtgtgtttaacaaattttaactttgtatatttgttatctatcaggctaatttttttatgaaaagaattttactctcctgcttcatttctttgtcttatagtcctccctctttgcaccttcttctcttccctcagtgcctggagctggtactgggcccctggccccatgagcagtttgccttcttgagtcactgcctgtgtagtacatacctgaccgggagtccaaaccaccttggtgctctgaagtccactgactcatcacacctttcttagccttgctcctctcaagggcattctgggcttgtaaacagaccataggaagcctctgtttaccttgaagcaccactgtccagcccattggttcccactggcagcatggtagagctgagagaaacaggctctcagggtacctgactttggnggggaaatcgtttcatgaagctgaactttcaagcatatttccagtaccattctttcagagtctgtttttccatccaaatataagccccaggccattccacttagtgtcttttcaatgataggcaagaatgatatctgagttgaacttcggtgcttctgttgtttgagtttactgtgcctggtggtatattgggcattctttggattgagtgttctgaggtgagagagtcttcccgaggcatcctgtctgtgcttccaaccctgaacaagaccttacatgagagatggactgatggactgcggcaatcctgggctgtcaagtggatagatagttaaaaagcattatactgtgggtaatgaaaagggaggaaaaaaaaagaaggaaaaggaattatagacccccagggtcagccagttaagagctctacccacacctgtcaacccctctctcccccagtttaggttctgagcagtattggacttgtagcctgcagttgtcttttgacttgcaggccgcaggtgtctttctgttatgtgaatgagttccatggaggggcatatgtgtgattccaccgttagatgagcccttggggcaggcagtttgggatgtgctcttgggggaaagttggctgtttccttgcgctctgctcctacccgaaggtttttaagtccctctgaattgctcatctgagattagtagagtagcaggcctgaaggatgatggttttgtcctctttggttctcagcgtgcttgagaagtaggacagtaactttgttcttctgggcccttaagcttttttggttaagtcttccttttcagaagtagatgtcattatatgccaaaagtctagctctttgctttaccatacagggacctgtcccaaagaaaaaggctctttttttagccagcatatttccccttctacccttttatctttgttgttctgattttagggactctgggctggcccatgtggcttgtgggttgccctcttcctggcattttgccactggattttgcactgccatcgttttggagatacaaagccgagcagttccttggtcagaaccctcctctgctttttcattgtgtttgataatgggtactgggtccttctctcaagggtaggcaaggccaaggctgatggctggcttgtttaggggggccatcagttcccttcctgtggagaagggtctgaaatggaagtcagtggtagaaggggctggtctgctggggcagggctttacatccactgagttctaggattcctttcctgatctgcacctacgcctggtctgtatggtggaatttgtcagctggaactcagaaacaacaacttgaaaaaaataataataattagaacatatttgcataagatagctatttactcctgggaaaccaacaacttttgagatttcccttgccctgtggacgcccagctcctgtcatccttccttaggtcctgcagtacagtcttcccctgaatgccaccggggacccagggggactccacccccctaaagcaagcacacacatactcacaagttgatgagttgctgggtcttttgagtcccagctctctttaccctccctttacttccaccagcccgacgacccattgacttgaggaaggggatttctacaagtctcaggattttagaaagtctgtaaagccatccatgcttccagaaagcaccgatctgttgtagttgcaaaaacaactctgtaatttgttgaggttctcaaactgacagccagcgagactgggtgggaggccctggatctgttctccctgactgcgggaggagcagccactaggactttatcaggaagcccacatggaggctcccccaggcttggggccacctggtgaagggcccttttgctcctggcagcctgaggcacagctgcctgtattgtcctcatctgttctgactgaaggatggaggtgctgaataaattaggcctcaggcctctaccaccagagagctggagaatgggtccacgtcattcaaggacctgaattttttatgctcaggagcattggaatcctcttcttcccagggaggaattagcctgcaaggttaggacttgaagagggaaggtatctaataactgggcgaggatgggtgtggtggctcacacctgtaatcccagcattttgggaggctgaggtggccagatcccaaggtcagaagatcgagaccatcctggctaacatggtgaaaccccatctctactaaaaatacaaaaaaaaattagccgggggtggtggcgggtacctgtagtcctagctacttgggaggctgaggcaggagaatggcgtgaacctgggaggtggagcttgcagtgagccaagatcgtgccactgcactccagcctgggcgacagagcaagactccgtctcaaaaaat

SEQ ID NO: 146465 - DNA, 420 bp, Homo sapiens
agggaagacaggattcaactttggaaacctccatatacagatgaaaataaaaaagttggtttggcattaaaggataggaaaaacttgttggagacccgattgcacatcactggcagagaactgaggtccaaaatagctgaaacctttggacttcaagaaaattatatcaaaattgtcataaataagaagcaactacaactagggaaaacccttgaagaacaaggcgtggctcacaatgtgaaagcgatggtgcttgaactaaaacaatctgaagaggacgcgaggaaaaacttccagttagaggaagaggagcaaaatgaggccaaactcaaagaaaaacaaattcagaggacctatagaggactataaatactggcaaagagagcagctgagacagtggtggatccagaaatgacaccg

SEQ ID NO: 146466 - DNA, 434 bp, Homo sapiens
gggggatccgaaactatcacaggggaaatgatgtacaggcttatgagtatcttaacaaggcacgtcagctctttaaagagctatatattgatccatcaaaagtggacaatttgttgcagttggggtttactgcccaggaagcccggcttggtctgagggcgtgtgatgggaacgtggatcatgcggccactcatattaccaaccgcatagagattctgctcagcaatcctcaaatgtggtggttaaaagattccaatcctgaaaccgacaaccgtcaagaaagtccttcccaggaaaacattgaccgattggtacatgggttttgatgcactcgtggccgaagctgcgctgagagtgttcagaggcaacgtacaactggccgcccagacccttgcttacaacggaggaagcctgcctcccagctgccgctgtcg

SEQ ID NO: 146467 - DNA, 456 bp, Homo sapiens
caattaaggaaggaggaaaaagagaagaaaagacgccgcctcgagaacatcaggtttctgaaagggatgggctactccacgcacgcggcccagcaggtactccacgcagccagcgggaacttggatgaggccctgaaggtagcagctccctcggggcctctggccttgtccctgagcagtgggtcctgcccagagctccctccatggctctccagcatcctcccgggctcactcctatgggctgccccgtcatccggatctgaagggcaggtttctcctgggctccagcccagacacaggctgcgtgaggccacgtgaggccccatgctcagtgcttggcccaggcctggctccaaaacgtggtgcctgtccacaccagcacagtccacaggccaggactttgtgtagggtttctgtgtgcagcagagtttagtgaaacaggcagtttccacggca

SEQ ID NO: 146468 - DNA, 416 bp, Homo sapiens
gaaagaaaagcccttatgttagctatgggatatcatgagaagggcagagctttcctgaaaagaaaagaatatggaatagccttgccatgtctgttggacgctgacaaatatttctggtaggcgcttttgtacttggtgaacaccagctttaaggaagatggcccagactatacagaacaccctgccatgcccttgagactgcagactttcatctacaacagtggttaatgtaaaagagtagttatggtgtaaactggtgaatttcttcttccctttgtatttctaattgacctttcctccctgtaaagaaaagaattttcaagcaggtaggatatcctctcttcttctgtacatgtgctatgttgctagtcggaactttccattataaagtttcctgtcagcttttcacctaatgg

SEQ ID NO: 146469 - DNA, 1477 bp, Homo sapiens
atggttgtatgggatgcagacacacagcaggttattcccaatggaatacagcttgctggactggataaaagccactctggcttcgccttggccccgcccacaaccctctttccaagcggcggcggcggcggcggcgcgaaggcgacagcggcggcgggggcggggctggcctcacccggaatgaaaacaaacggcggccgctgccgcatccgggcactctgctggtcgcggcgggagtggcgtggcgcaggtgaggacacggcggccgagtgtcctcgaccccagcctcagcagcactgcttggcgccccggttcccggtccgactgggcacctctcctggccaggggtggagcggccgcggggcgggggaccttgctaagcagtactctgacagactagaatgctgtgaaaatgaagtagaaaaggtaatagaagaaatacgttgcaaggcaattgagcgtggaacaggaaatgacaattatagaacaacgggaattgctacaatcgaggtgtttttaccaccaagactaaaaaaagataggaaaaacttgttggagacccgattgcacatcactggcagagaactgaggtccaaaatagctgaaacctttggacttcaagaaaattatatcaaaattgtcataaataagaagcaactacaactagggaaaacccttgaagaacaaggcgtggctcacaatgtgaaagcgatggtgcttgaactaaaacaatctgaagaggacgcgaggaaaaacttccagttagaggaagaggagcaaaatgaggccaaactcaaagaaaaacaaattcagaggaccaagagaggactagaaatactggcaaagagagcagcagagacagtggtggatccagaaatgacaccgtacttagacatagctaaccagacaggcagatcaatcagaattcccccatcagaaagaaaagcccttatgttagctatgggatatcatgagaagggcagagctttcctgaaaagaaaagaatatggaatagccttgccatgtctgttggacgctgacaaatatttctgtgagtgttgcagagagctgctggacacagtggataactatgccgtcctccagctggatatagtgtggtgttacttccgcctggaacagctggaatgccttgatgatgcagaaaaaaaattaaacttggcccagaaatgctttaaaaattgttacggagaaaatcatcagagactggtccacataaaaggaaattgtgggaaagagaaggtactgtttctaagactctacttacttcaagggatccgaaactatcacagtggaaatgatgtagaggcttatgagtatcttaacaagccagcagagggggcaagagagagtccagagcaggccactggagagatgaccccgcagctgcacccagcgctgtggctgcatgccattgacttcgacttcactacctggctacacccagctgcaagggagg

SEQ ID NO: 146470 - DNA, 1869 bp, Homo sapiens
gaccgctgcagtccgggcactctgctggtcgcggcgggagtggcgtggcgcagggatggcacaaaaagaaatatcttcaagcaaaaatggaccaagtttttaagggaagaaaggattcaactttggaaacctccatatacagatgaaaataaaaaagttggtttggcattaaaggaccttgctaagcagtactctgacagactagaatgctgtgaaaatgaagtagaaaaggtaatagaagaaatacgttgcaaggcaattgagcgtggaacaggaaatgacaattatagaacaacgggaattgctacaatcgaggtgtttttaccaccaagactaaaaaaaagataggaaaaacttgttggagacccgattgcacatcactggcagagaactgaggtccaaaatagctgaaacctttggacttcaagaaaattatatcaaaattgtcataaataagaagcaactacaactagggaaaacccttgaagaacaaggcgtggctcacaatgtgaaagcgatggtgcttgaactaaaacaatctgaagaggacgcgaggaaaaacttccagttagaggaagaggagcaaaatgaggccaaactcaaagaaaaacaaattcagaggaccaagagaggactagaaatactggcaaagagagcagcagagacagtggtggatccagaaatgacaccgtacttagacatagctaaccagacaggcagatcaatcagaattcccccatcagaaagaaaagcccttatgttagctatgggatatcatgagaagggcagagctttcctgaaaagaaaagaatatggaatagccttgccatgtctgttggacgctgacaaatatttctgtgagtgttgcagagagctgctggacacagtggataactatgccgtcctccagctggatatagtgtggtgttacttccgcctggaacagctggaatgccttgatgatgcagaaaaaaaattaaacttggcccagaaatgctttaaaaattgttacggagaaaatcatcagagactggtccacataaaaggaaattgtgggaaagagaaggtactgtttctaagactctacttacttcaagggatccgaaactatcacagtggaaatgatgtagaggcttatgagtatcttaacaaggcacgtcagctctttaaagagctatatattgatccatcaaaagtggacaatttgttgcagttggggtttactgcccaggaagcaccggcttggcctgagggcgtgtgatgggaacgtggatcatgcggccactcatattaccaaccgcagagaggaactggcccaaataaggaaggaggaaaaagagaagaaaagacgccgcctcgagaacatcaggtttctgaaagggatgggctactccacgcacgcgggccagccagattttgctcagcaatcctcagatgtggtggttaaatgattccaatcctgaaaccgacaaccgtcaagaaagttctttcccaggaaaacattgaccgattggtgtacatgggttttgaatgcactcgtgggccgaacctgcgctgagagtgttcagaggcaacgtccagctggccgcccagacccttgctcacaacggaggaagcctgcctcccgagctgccgctgtcgccagaagactctttgtccccgccagccacgtccccttctgactccgcaggaacctctagtgcctcaacagacgaagacatggagacagaggccgtcaatgagatactggaagacattccagagcatgaggaagactatcttgactcaactctggaagatgaagaaattattattgcagagtacctatcctatgtagaaaataggaagtcagcaacaaagaaaaactaa

SEQ ID NO: 146471 - DNA, 2458 bp, Homo sapiens
atggttgtatgggatgcagacacacagcaggttattcccaatggaatacagcttgctggactggataaaagccactctggcttcgccttggccccgcccacaaccctctttccaagcggcggcggcggcggcggcgcgaaggcgacagcggcggcgggggcggggctggcctcacccggaatgaaaacaaacggcggccgctgccgcatccgggcactctgctggtcgcggcgggagtggcgtggcgcaggtgaggacacggcggccgagtgtcctcgaccccagcctcagcagcactgcttggcgccccggttcccggtccgactgggcacctctcctggccaggggtggagcggccgcggggcgggggaccttgctaagcagtactctgacagactagaatgctgtgaaaatgaagtagaaaaggtaatagaagaaatacgttgcaaggcaattgagcgtggaacaggaaatgacaattatagaacaacgggaattgctacaatcgaggtgtttttaccaccaagactaaaaaaagataggaaaaacttgttggagacccgattgcacatcactggcagagaactgaggtccaaaatagctgaaacctttggacttcaagaaaattatatcaaaattgtcataaataagaagcaactacaactagggaaaacccttgaagaacaaggcgtggctcacaatgtgaaagctgatgggtgcttgaactaaaacaatctgaagaggacgcgaggaaaaacttccagttactaggaagaggagcaaaatgaggccaaactcatagaagaacgacttcagaggaccaagagaggactaggaaatactggcaaagagagcagcaagagccagtggtggttccagaaatgacaccgtacttagacatagctaaccagacaggcagatcaatcagaattcccccatcagaaagaaaagcccttatgttagctatgggatatcatgagaagggcagagctttcctgaaaagaaaagaatatggaatagccttgccatgtctgttgggacgctgacaaatatttctgtgagtgttgcagagagctgctggacacagtggataactacgccgtcctccagctggatatagtgtggtgttacttccgcctggaacagctggaatgccttgatgatgcagaaaaaaaattaaacttggcccagaaatgctttaaaaattgttacggagaaaatcatcagagactggtccacataaaaggaaattgtgggaaagagaaggtactgtttctaagactctacttacttcaagggatccgaaactatcacagtggaaatgatgtagaggcttatgagtatcttaacaaggcacgtcagctctttaaagagctatatattgatccatcaaaagtggacaatttgttgcagttggggtttactgcccaggaagcaccggcttggcctgagggcgtgtgatgggaacgtggatcatgcggccactcatattaccaaccgcagagaggaactggcccaaataaggaaggaggaaaaagagaagaaaagacgccgcctcgagaacatcaggtttctgaaagggatgggctactccacgcacgcggcccagcaggtactccacgcagccagcgggaacttggatgaggccctgaagattctgctcagcaatcctcagatgtggtggttaaatgattccaatcctgaaaccgacaaccgtcaagaaagtccttcccaggaaaacattgaccgattggtgtacatgggttttgatgcactcgtggcccgaagctgcgctgagagtgttcaagaggtaaagtcccagtggccgcccagacccctgcttacaacggaggaagcctgccttcccggagctgccgctgtcggcagaagactctttgtccccgccagccacgttccccttctgactccgcaggaaccgtctagtgccgtcaacagacgaagacatggagacagaggccgtcaatgagatactggaagacattccagagcatgaggaagactatcttgactcaactctggaagatgaagaaattattattgcagagtacctatcctatgtagaaaataggaagtcaagcaactaaagaaaaactaaataatgaacagaaatagcgctaattttctgcttataaatgctatcattatgaaaaggctaatgcagctctttctgttcttactttttatctgaattacaagtcctctttgggtgtaggagggggtgggcaggggacaagtccaggaggggtcccagggccttcatgcgtggtctcggggaagaagcttcctctggcctggcgcaggccgttccatctgcctcccaggtctgcgtccctaaccccttccccagcttggtgttttaccccgaaacaggaaggaacaggggtcctgtagaacaggggtcctggggaaggtgtccaaggcagggtcctgggaaggg

SEQ ID NO: 146472 - DNA, 513 bp, Homo sapiens
ccacgcgtccgcaacctttccagggagtggttgtgtgatcgccatcttagggaaaagatgttctcgtccgtggcgcactctggcgcgggcgaaccccttcgacacgccacatcctgcagctggtgcacgatggtctcggggacctccgcagcagctccccagggcccacgggccagccccgccgccctcgcaacctggcagccgccgccgtggaagagcagtatagctgtgactatggatctggcagattctttatcctttgtggacttggaggaattattagctgtggcacaacacatacaagcattggttcctctagatcctggttaaatgcagaatgaaggttggacccccaaaagtacaagggcatatttaacgggattctcagttacacttaaagaggatggtgttcgtggtttggctaaaggatgggctccgactttcctttggctactccatgcagggactcttgcaagttttggccttttatgaagtctttaaagtcttgtataa

SEQ ID NO: 146473 - DNA, 1413 bp, Homo sapiens
tgctctctgtgagccgcaacctttccaagggagtggttgtgtgatcgccatcttagggagaaagatgttctcgtccgtggcgcacctggcgcgggcgaaccccttcaacacgccacatctgcagctggtgcacgatggtctcggggacctccgcagcagctccccagggcccacgggcaagccccgccgcccctcgcaaccatggcagccgcgcccgtggaagagcagtatagctgtgactatggatctggcagattctttatcctttgtggacttggaggaattattagctgtggcacaacacatacagcattggttcctctagatctggttaaaatgcagaatgcaggtggacccccaaaagtacaaagggcatatttaacggattctcagttacacttaaagaggatggtgttccgtggtttggctaaaggatgggctccgactttccttggctactccatgcagggactctgcaagtttggcttttatgaagtctttaaaagtcttgtatagcaatatgcttggagagggagaatacttatctctagcgcacatcactatatttggctgcctctgccagtgactgaattctttgctgacattgccctggctcctatggaagctgctaaggttcgaattcaaacccagcccaggttatgccaacacttgagaggggatcagcttcccaaaatgtattaaggaagaaggccttacaagcattctacaaggggggttgctccctctctggatgagacagataccatacaccatgaattgaagttccccatgccttgaacgtactgtttgaagccactgtacaagtttgtgggttcctaagaccccgacgtgaatgattcaaacgccagagcagactggttgtaaccatttggtagcaggttaccatagctcgagtcttttgtgccaattgtttctcacccctgcctgaattcctggggtaaccggtgttggattaaggaaaaaaggttagccagtgcttcctctgggtccttcaaagagacttgggatttaaaaggtgtaatggaagggactgtttgccccgtatcatccatgattggtacccctgactggcactacagtggtttatatattactcagtaaagggttactttaggacttcctcggccctcctccaccccgagatgcaagagtcttttgaagaagaagcttggggttaactcagtagttaggatcaaagcaaattgtggactgaatctgcttgttgatccagtgtttgaagaaagtgcaaaaggaacttttatatatttgacagtgtaggaaattgtctattcctcgatacaattactgtaggtactcttgcttaaggcaagaagtttcagatttactgttgtaaataaacccgaactcttcatgaaaaaaaaacaacaaaaa

SEQ ID NO: 146474 - DNA, 433 bp, Homo sapiens
  misc_feature (1)...(433): n = a,t,c or g
actgataccgtctgaggnaccggnccctggattacggtctgcaagcaccggcccgcggtaacaggctaccaagtccgtgctgtttgtgtgtctgggtaagagggcgccgacttactcatgttgtgacgtcctctggagagttggatcgggcttgtgcgctgtaacatttgtcgatcacccattgcagaagcagttttcaggaaacttgtaaccgatcaaaacatctcaaagaattggagggtagacagcgcggcaacttccgggtatgagatagggaacccccctgactaccgagggcagagctgcatgaagaggcacggcattcccatgagccacgttgcccggcagagatttgaatagaaaaagtaatcgagttaaaacctgcaaagctaaaattgaactacttgggagctatgatccacaaaaacaactg

SEQ ID NO: 146475 - DNA, 828 bp, Homo sapiens
  misc_feature (1)...(828): n = a,t,c or g
ccagcgtggtggaattcggaagatggcggaacaggctaccaagtccgtgctgtttgtgtgtctgggtaacatttgtcgatcacccattgcagaagcagttttcaggaaacttgtaaccgatcaaaacatctcagagaattgggtcattgacagcggtgctgtttctgactggaacgtgggccggtccccagacccaagagctgtgagctgcctaagaaatcatggcattcacacagcccataaagcaagacagattaccaaagaagattttgccacatttgattatatactatgtatggatgaaagcaatctgagagatttgaatagaaaaagtaatcaagttaaaacctgcaaagctaaaattgaactacttgggagctatgatccacaaaaacaacttattattgaagatccctattatgggaatgactctgactttgagacggtgtaccagcagtgtgtcaggtgctgcagagcgttcttggagaaggcccacttaggcaggttcgtgccctgctgcggccagcctgactagaccccaccctgaggtcctgcatttctcagtcggtgtgtaatcacgttccagggcccaaagcccagctctttgttcagttgacttactgtttcttaccttaaaaagtaattgtagatggaaatcagttgtgtttggcaggagaatcaataaaaatctttgattctgaannnnnnnnnnnnnnnnnnnnnnnnnnnnnnnnnnnnnnnnnnnnnnnnnnnnnnnnnnnnnnaannannnnnnggaaaaanaanannnnntttattttnaaaaataaaaataatttaggggggggg

SEQ ID NO: 146476 - DNA, 2722 bp, Homo sapiens
aggacttcggaaccgccccgtcctcaagatcgaaaagcccagagccgcgcgctcaagcacggtgttgggggtggggtctcaggagcgcccagcaaggcgcccctgtcggcgtggacccgcgggctcaaaggcagttccccggtgacccgcccagcccctctatgcgaactcgaacgacagcaccacagcccgccagcgtcgagactcgcgctgtgccccaacccaggtgggcgccgcggagccgcgagcctgagcccgccctgcaggtgacccgcggcccttcctcctccaggtaccccttctcctgcggccccgtcccctataggtaacctttacctcccgcggctccttcccctccaagcgacccgcagcgcccgggccctccaggtgactgcgcccccgccaacccccgccccaccacacacacacaccccctcgccttcttccgccctactccctccaggtgaccccacccccgcagctcctcctcctccggacaacctgcagccccgcccctgcaggtgaacggcggcccagtccctgcaggtgacccgcggaccctccccgcccgtcctactaccgtcataggacgcctccgcaggcgcactggagccgattgcgcaggagccgattgcgcaggcgtggctctcacacgcgctgccctgttggcgttggtgcgggactgcgcaggcgcgcgggggcaagactggcagtgcgcctgcgcgcgtcggcgtgcggaacgccgcggtgtctcggcgcctctgcgcgcgggaagatggcggaacaggctaccaagtccgtgctgtttgtgtgtctgggtaacatttgtcgatcacccattgcagaagcagttttcaggaaacttgtaaccgatcaaaacatctcaaagaattggagggtagacagcgcggcaacttccggtgggtcattgacagcggtgctgtttctgactggaacgtgggccggtccccagacccaagagctgtggagctgcctaagaaatcatggcattcacacagcccataaagcaagacagattacccaaggaggtttttcccacatttgattatatactatgtatggatgaaagcaatcttgagagatttgaatagaaaaagtaatccgagttaaaacctgcaaaagctaaaaatttgaactaccctgggagctatgatccccacaaaaacaacttattattgaagatctcctattatggggaatgactctggactttggagacggtgtaccaacaggtgtgtcagggtgctgcagagcgtttcttggagaaggcccactgaggcaggtttcgtgccctgctgctgccagtcctgaattgaccccaccctgaggtcctgcatttctcagtcggtggtgtaatcacgtttccagggcccaaagtctcagctctttgttcagttgacttactgtttcttaccttaaaaaagtaattgtagatggaaatccagttgtgtttggcaggagaatcaataaaaatcctttgattccagaccagccttatgggggtatttttaagcattcttagactagttgaacatctcactttgccccagttacaaaaatagtagaacaagcaacataaaacaatgaaggaaaacctcacttgaaggcccaggtcaacatctaagcctgttgagacttagataatcgagtctacctcttcaagtaggtttgtgtggatggcctggagggcaggtgccctctggctccccagtgctacctctctcttccctaggggccttttggggaattgacaatagtccccccccgtagggagccccacagtctaggattaggaagtgtttttaattttcttacacacccataagtgcacacttgttttatttgaaaaagataggggaaggagaggaaacatttatgggaatccagtccgttgggcacccttccaataccttccatgattttttgttcgagtttacttccatggaggaggtccagccccattggctccccatctgaacccactttgccctctgaaaccttaattaccatcccagaaagaaggacacttgtatgctaagtctaatggtcagttgagggatatgactggtttttatatgccacatgtaaccccaaatgtcccaatataaattgggcttatttttttaaaataattttaaaagttgggggaaaagtgttattatttgggcctgcttaaatattggaataagtattcttcatcagcatttaataaatgtataggcagatgtaaggtaatttctgtgtattttgagataatgtcaaaatcatgaatatttcaaaataaactggggagttataaaaatacaactagagatataaatctggtgtctgcctgtttttttattgacaggtaaggaagcatttgaaaacattgtattgtcctttttacatgatctgtgatgttaggtgtgcatattttatcttcaggataaggaagtaaaatgatgaaaataagcacattgctgccccatgtcatcatgtctagtttctgaaggaagtttgaggttctacagctggaactgtccttgcccagtaccatcctctggacatgttgcctctacgctgtgccctcctgtgcagtgatgcacagctgcctggccaggacatctgcactcctgacctcagtatcatgagggtcccaggcagtgccatggggaggagacacgtttgatccttgactccctagtatctggaggataag

SEQ ID NO: 146477 - DNA, 1153 bp, Homo sapiens
  misc_feature (1)...(1153): n = a,t,c or g
cgagagagaatactatgtgcccataatgcatgagagtgatgcggagcgcgtagcacgacctattgccgattgtgatcttattgaagttcatttctagatatagtccatgtgtgcaacacgcctaatgtgaaaaaaatggtctcaggatcatcccataaggtgattcaagagcaagacctctccataggagatcaccccgttacaccggtccagagcgtctattgtaaaagaagtccgaaaatacccaagatttttgtcaaggtttccaagacaaactcggaaacgcaaatctatttagggtggcaagtgaaaataggtttccccaatttttaaaatccagtggccggtatccttgacaggaccaaataccgaatatttccttaggccccgggaattcacaaattgggtaaatacccaagggaaatataggcttcttatgtttaaaaatccccatccacaagcatgtccactgcagccctattcccaatagcaaagcctagggcagggccctaaatgcctaccaaaggtagctgggttaaagaaaatatggtatggtcagaaannnnnnnnnnnnnnnnnnnnnnnnnnnnnnnnnnnnnnnnnnnnnnnnnnnnnnnnnnnnnnnnnnnnnnnnnnnnnnnnnnnnnnnnnnnnnnnnnnnnnnnnnnncccgggaaatacnnnnnnnnnnnttgnnnnnnnnnnnnnnnnnnnnnnnnnnnnnnnnnnnnnnnnnnnnnnnnnnnnnnnnnnnnnnnnnnnnnnnnnnnnnnnnnnnnnnnnnnnnnnnnnnnnnnnnnnnnnnnnnnnnnnnnnnnnnnnnnnnnnnnnnnnnnnnnnnncagctatagaataaaataaaagatttagtcaaaacagaatatggtacgtaaacatcatggaatactctgtggccattnnnnnnnnnntcacgtcctttgcaataacatcaatgaagctggagaccgtttttcttagaaaacaaatgcagnnnnnnnnnnnnnnnnnnnnnnnnnnnnnnnnnnnnnnnnnnnnnnnnnnnnnnnnnnnnnnnnnnnnnnnnnnnnnnnnnnnnnnnnnnnnnnnnnnnnnnnnnnnnnnnnnnnnnnnnnnnnnnnnnnnnnnnnnnnnnnnnnnnnnnnnnnctcgagcc

SEQ ID NO: 146478 - DNA, 1119 bp, Homo sapiens
  misc_feature (1)...(1119): n = a,t,c or g
ggcacgagcagctcataatctcggaggcccaggatggggagatcccgccgccaccctcagatcctttgattcttccccttctacatagccatagtgcggggacccccctaatatccccagggtacccaagcctggcgccgatcccactcagggaacttgattctgagtcctagactcgtgtttttcacctccccggctcaagtttccatcttcctagcccctggctccccctagtcctctcaagaaagtggagccctattttcctgctccccaagaggaacgtatgtctccccagcccctaatttttccttcagtgacccagactttgcaacttccttagggatctgagtgcggaccccaggctctgtctctcaggcacttaagtttgagactacttattctcccccagggaccctcattttggattcccaactttagccttgagacccaatggacccaagaatttgccccttccccaactcctagagatcctgaatcagggtcccccaagactgactccactcagagccccaatgccctgtatgactagcactaccctaagaactgccctataatggatttactattatctctatttttcagatgaagagactgaggcacttaagaantattaataacctggccaaaattacacagcccttgagtaaaacagctctgaatttgagtcccacccaggggggctctaaaagccgggctattctggaatttcagctttcaaggcctggggtacccaacccaacactgaactggccatcccttaacccctttagggagcccgaataacccacaggtattccaaaccccaatttgggccctcagatacccagacattcccttatcaagttcccttacctggatccaggattgaaatccccctggtctcaaattatcaaaaaactgggcaccctggcccctcccaaaaaacccggggcattgtgggccttaaccccggaccttatttaattaccccccaaattattaataatggtaacagtaaaccttgaggcccaagccaaggttttaaccctgggggccataattttgggaggccccgggaggcaatattcgtggggagcagattctaaggcaccctgcgcc

SEQ ID NO: 146479 - DNA, 1249 bp, Homo sapiens
  misc_feature (1)...(1249): n = a,t,c or g
cccccagtctcccaagtagctgggattaccnggcgcgtgccacccacaccngcttaanttttngcatttttgtagagatggggttcccccccatgttgccccagggctggtctcaaactccctgacctcaagtatctgcccacctcggcctcccaaacctgctgggattaccaggcgtgagccaccgggccaggcctattttttaatcatttgatttccttcaatctaattaaatatgtgtctgttttctttagacagtgaaaattattggtagtttgagcaaatgatcaagattactcctttttatttaatacatttcttttgttgaaaaataaaagatttaacttaaatttcaatagcttacagtcatttttcatgttcgtcttctgctgaagctaacggcttattgttccacttctatgtacctgttttcaagctacttaaacagtattaggaacgattaagccacaaataattaagtagacaagtcataagttcagaattttgtttttgagatgaatataaaagcacctaaaggtcaaggaaaattttcttcctgtgataaggannnnnnnnnnnnnnnnnnnnnnnnnnnnnnnnnnnnnnnctaacactttgctttagtgtagatgaccactcccctatataaggtagggagaaagaatgttcggttagttcttatnnnnnnnnnnnngttgcactgcacattcacaaaaagccactctccttggctgcattggagaccctgtatgatctggcctcaggcagccctgacggccctgtttccctctgcccccctcaccccgaccctccagtcctgctccttccaaccccgacacattccatatgtctccgtctcctgaagactcagaccctcctaaggaaaaaggtgcgggtcttggtgatctttttatctaccctggtgcctggcaagcaacaaacaaatatcatcagcagaaagccaggctcagctgagatcatgagagcccaggaagcagttatatcaggagtaacaacctgggtcacagcaggcccaggaccctggaagctgagctcccctatatgggaaaggaagaactaaagccaaacttcaagtgccattccagagcctgagctcatcactgagaacctctgtctgtcccttctcctgcaaagagaaggacacaggtgggagaggagcatggggtgggaacaaggtcagacataggcctgtggtggtttgatctgttccatacctaggatggggact

SEQ ID NO: 146480 - DNA, 479 bp, Homo sapiens; identical to SEQ ID NO: 135378
  misc_feature (1)...(479): n = a,t,c or g

SEQ ID NO: 146481 - DNA, 454 bp, Homo sapiens
  misc_feature (1)...(454): n = a,t,c or g
aagctcactcattaggcaccccaggctttacactttatgcttccggctcgtatgttgtgtggaattgtgagcggataacaatttcacacaggaaacagctatgaccatgattacgccaagctcgaaattaaccctcactaaagggaacaaaagctggagctccaccgcggtggcggccgctctagaactagtggatcccccgggctgcaggaattcggcacgaggtttctagagacgcccctaagtcacctgcttcattagacggtttccaggttttctcccaggtgacgctgttagcgcctcagctggcggtgakagccggcccagcgtggcgccaccacacaccgcagagctgvccaggcacagcvcsbnccccagcgctcatggtgttgaaactgtctgtcatgcaccacggtgtctgtgtccacacagtaataaacggtttactgtccgc

SEQ ID NO: 146482 - DNA, 2154 bp, Homo sapiens
ctgaattcctgggtcgacgagttcgtctctggttcagcttccttttcctgtttggttttaagtaggctatattaatcattttgctgtcttcagagggtctgtggtcctctgatcaacataggctggtgggagtacaggactcgcctcctcagggttccctgtgctgccacttttcagccatggccacaagtgaacagagtatctgccaagcccgggcttccgtgatggtctacgatgacaccagtaagaaatgggtaccaatcaaacctggccatgcagggattcagccggatcaacatctaccacaacactgccagcaacaccttcagagtcgttggagtcaagtttcaggatcagcagcgttgtgatcaattattcaatcgtgaaagggatgaagtacaatcaggccacgccacccttcccccagtggcgagatgcccgccaggtctacggcttaaactttgcaagtaaagaagaggcaaccacgttctccaatgcaatgctgtttgccctgaacatcatgaattcccaagaaggaggcccctccagccagcgtcaggtgcagaatggcccctctcctgatgagatggacatccagagaagacaagtgatggagcagcaccagcagcagcgtcaggaatttctagaaagaagaacctcggccacagggcccatcctcccaccaggacatccttcatctgcagccagcgcccccgtctcatgtagtgggccttcaccgccccccccacccccagtcccacctccacccactggggcttaccccacctcccccacccccacttgccagccggaggagcccaggggtccagccacgacgagagcttccatgttcaggactggccgcttgccattagctggggccaagcttgagaagagttccaaacgggccagaagacgcatctggaggctccagtcccagtgggacctcaaagtccgatgccaaccgggcaagcagcgggggtggcggaggaggcctcatggaggaaatgaacaaactgctggccaagaggagaaaagcagcctcccagtcagacaagccagccgagaagaaggaagatgaaagccaaatggaagatcctagtacctccccctctccggggacccgagcagccagccagccacctaactcctcaaagggctggccggaagccttgggaccggaacaatccgttgagaaaccccttgtcctctaatcttgtccgaaacccgctcttggccaaagggccccgaaagctaagagcccccttcagtcagcagcctcactctaggatgaagcctgctgggagcggtgagtgacatggcccctggatgccttcgacttggacccgaatgaagcaggagatctagaaggaggtggtgagagagctccacaaaggtgaaaggaaggagatcatcgaccgccatcaggcaggaagcttgaagtgggatcaagcaccaccgtaaggggcccgggccctttggcgcttgattccgtcgaagcccatccgggcaacagaggacaagccagaagcccaagccaagccccaagactccaagtgcaccaagaagcacgcacaaggaagccttggggggccgcttgcttgttgaaacgttccttgaaccttgttgattcacaccattgacaagtgaaggaaaccaaagtgcaaactccctgggttttttttagattcttgccttgacaccggaacaccagggtctgcttcgtctttttttgtgttttaaatttgcttatttaaggtacatttcgtttgggtttctaagagacgcccctaagtcacctgcttcaattaagacggtttccaaggttttctccccaggtggacgctgttagcgcctcagctgggcggtgacagccggcccaagcgtggcgccaccacacaaccgcagagctggtccagggacagcttccgtccccagcggttcatgggtgttgaaactgtctgtcatgcaccacggtgtcttgtgttccacacaagtaataaaacggtttactgtccgcaccctcgggctcaggccctcgcattggtccatcacgctccgggctggggatgccccttttcagagaagggcccgggaccacggtgaccaggagtcgtaagagcaagatggcggtcttcgacaggaagctgggct

SEQ ID NO: 146483 - DNA, 684 bp, Homo sapiens
ggcgaacgcggagtagcacgccatgataggcctcggggcacgctacgagagtacaaggtagtgggtcgctgcctgcccacccccaaaatgccacacgccgccccttttaccggcatgcgaatctttgcgccctaatcaatgtcgtcgctaagtccccgcttcttggtactttgtatctcagttaaagaaagatgaagaaagtcttcagtggagattttcttactgtgcgcaggtgtttgagaagtccccccctgcgggtgaaagaacttcgggatctggctgcgctaatgactcccggagcgggcacccacaacatgtacccgggaatacccgggaccttgaccacccgcaagcgcctgttcacccaagttgcttaacccgagacaatggggttgccccggcaccggcggccccgaagcccacttccatttcagattcattgaaaggttggaggaaattcgccggccagcaagattgccgccggccgggttgttcaaagcagtttccacgaatttcaagattcaagttccccgctgccccaccgggttccttgcgccgtcaagacaagccacgctttcacgaccaagaggcccaaaactttcctcaaggtgcagggcccctcgtccggggtgtgcccccaaaataaaactcaggaaacgccccggtgaaaaaaaaaaaaaaaaa

SEQ ID NO: 146484 - DNA, 1062 bp, Homo sapiens
atgacgggctggagctgccttgtgacaggagcaggagggtttctgggacagaggatcatccgcctcttggtgaaggagaaggagctgaaggagatcagggtcttggacaaggccttcggaccagaattgagagaggaattttctaaactccagaacaagaccaagctgacagtgctggaaggagacattctggatgagccattcctgaagagagcctgccaggacgtctcggtcatcatccacaccgcctgtatcattgatgtcttcggtgtcactcacagagagtctatcatgaatgtcaatgtgaaaggtagcatagaggtagccgggcccaactcctacaaggaaatcatccagaatggccatgaagaagagcctctggaaaacacatggcccgctccatacccacacagcaaaaagcttgctgagaaggctgtactggcggctaacgggtggaatctgaaaaacggcggcaccctgtacacttgtgccttacgacccatgtatatctatggggaaggaagccgattcctttctgctagtataaacgaggccctgaacaacaatgggatcctgtcaagtgttggaaagttctccactgttaacccagtctatgttggcaatgtggcctgggcccacattctggccttgagggccctgcaggaccccaagaaggccccaagcatccgaggacagttctactatatctcagatgacacgcctcaccaaagctatgataaccttaattacaccctgagcaaagagttcggcctccgccttgattccagatggagctttcctttatccctgatgtattggattggcttcctgctggaaatagtgagcttcctactcaggccaatttacacctatcgaccgcccttcaaccgccacatagtcacattgtcaaatagcgtattcaccttctcttataagaaggctcagcgagatttggcgtataagccactctacagctgggaggaagccaagcagaaaacggtggagtgggttggttcccttgtggaccggcacaaggagaacctgaagtccaagactcagtga

SEQ ID NO: 146485 - DNA, 414 bp, Homo sapiens
gcttttaacaatctaactaatgccctctccagggtcaccctagaatcagatctgctccccagcatcttctgtttcctggtgagtgattcctgctactttggatggccatgacgggctggagctgccttgtgacaggagcaggagggtttctgggacagaggatcatccgcctcttggtgaaggagaaggagctgaaggagatcagggtcttggacaaggccttcggaccagaattgagagaggaattttctagtaagtaaacttgggtcatgggtgtgtggttccatcttaaacactgcatgtatgtggggggagatggaccttgtctagcaagttattgaaatttgtagccaaatctaagccaatctcacatccaaagtcatcaagaaataaatattaaatagtataaaatgg

SEQ ID NO: 146486 - DNA, 1257 bp, Homo sapiens
atgattatctcaatagatgcagaaaaggcctgtgacaaaattcaacagcccttcatgctaaaaactctcaataaactaggtattgatggaacatatctcaaaataataagagctatttctgacaaacctgcagccaatatcgtactgaatgggccaaagctggaagcattccctttgaaaactagcacaagacaaagatgccctccctcaccactcctattcaacacagttttggaagttctggctagggcaatcaggcaagagaaagaaataaagggtattcaattaagaaaagaggaactcaaattgtttctgtttgcagctcaggggaggcggcaaggtcctcccagtacaggtgttaccagcagagggcacactcctctccccagtcctccaccaggctccacaggaaacgccagggcagggtttaaaggaaggtttatcaccccgactttacataaccaggtaggtacccagcttctgttggaggcctgtgtccaagctacagtgccaatcttcatctacaccagtaccatagaggaaatcatccagaatggccatgaagaagagcctctggtgaacacatggcccgctccatacccacacagcaaaaagcttgttaagaaggctgtactggcggctaacgggtggaatatgaaaaacggcggcaccctgtacacttgtgccttacgacccatgtatatctatggggaaggaagccgattcctttctgctagtataaacgaggccctgaacaacaatgggatcctgtcaagtgttggaaagttctccactgttaacccagtatatgttggcaatgtggcctgggcccacattatggccttgagggccctgcaggaccccaagaaagccccaagcatccgagggcagttttactatatttcagatgacacgcctcaccaaagctatgataaccttaattacaccctgagcaaagagttcggcctccgccttgattccagatggagctttcctttatccctgatgtattggattggcttcctgctggaaatagtgagcttcctactcaggccaatttacacctatcgaccgcccttcaaccgccacatagtcacattgtcaaatagcgtgttcaccttctcttacaagaaggctcagcgagatctggcgtataagccactctccagctgggaggaagccaaccaaaaaccggtgaagtgggttggttcctttgtggtccgcaccacggagaccttgaagtccaagactcattga

SEQ ID NO: 146487 - DNA, 648 bp, Homo sapiens
gcctgacagctcactgctcagattacttttctaaaatgagatgggagagaaacagatgtttgctctttccaagaaattgatacacatgctgatttctgtgccttttttacttgttctttccgtagaatgtacaccctccactctaacaccctactctaaccatccttgaacacctatgtaacatcacctttatcagaaaacttctcagccagatacagaaatcattccaatgacctgacctgtgttcacacagaactccagaacaagaccaagctgacagtgctggaaggagacattctggatgagccattcctgaagagagcctgccagggacgtctcggtcattcatccacaccgcctgtatcattgatgtcttcggtgttcactcacagagagtctatcatgaatgtcaatgtgaaaggtagggtagcctggggaggagataaagcaaggtggggaaatgaggatcagaaagaaggacaggaaggaaagagaagtctatccattgaacacctgctgtgctctgggccaagtgactttgctgatcactaccaactgggggaactcaaggctgctattttcagttttatagatgagaaaactaggactgagcaatgacaagcaacttgtccaaagtcccacagttga

SEQ ID NO: 146488 - DNA, 1809 bp, Homo sapiens
ggcacgaggaagtacgtccactcttctgtccagcttttaacaatctaactaatgccctctccagggtcaccctagggtcaccctagaatcagatctgctccccagcatcttctgtttcctggtgagtgattcctgctactttggattggccacgatgggctggagctgccttgtgacaggagcaggagggcttctgggtcagaggatcgtccgcctgttggtggaagagaaggaactgaaggagatcagggccttggacaaggccttcagaccagaattgagagaggaattttctaaactccaagaacaaggaccaagctgacagtgctggaaggagacattctggatgagccattcctgaaggagagccttgccagggaccgtcttcggtccatcatccacaccgcctgttttcatttgatgtctttcggtgttcactcacagagagttttttcatgaatgttcaatgttgaaaggtacccagctcctgttaagaggcctgtgtccaagctagtgtgccagtcttcatctacaccagtagcatagaggtagccgggcccaactcctacaaggaaatcatccagaatggccatgaagaagagcctctggaaaacaacatggcccgctccatacccacgcagcaaaaagcttgcttaagaaggctgtactggcggctaacgggtggaatctgaaagaacggcggcgccctgtacacttgtgccttacgacccatgtatatttatggggaaggaagccgattcctttctgttagtataaacgaggccctgaacaacaatgggatcctgtcaagtgttggaaagttctccacttgttaacccagtctatgtttggcaatgtggcctggggccacattctggccttgagggccctgcaggaccccaagaaggccccaagcatccgaggacagttctactatatctcagatgacacgcctcaccaaagctatgataaccttaattacaccctgaggcaaagagtctcgggcctccgcctttggattccagatgggagctttcctttatccctgatgtattgggattgggtttctgctgggaaataggtgaggtttcctacttcaggccaatttacacctatcgaccgcccttcaaccgccacattagttcacattgttcaaattaggcgttatttcaccttctttttattaaggaagggttcagcgagattctgggcgtattaaggccacttcttacagctgggggagggaaggccaaggcaggaaaacgggttgggagttgggtttgggttccctttgtggacccggcacaagggaggaacctggaagttccaaggattcagtgagtttaaggatgaccagagatgtgccatgtgggtattggttaggagatgtcatcaaagctcccaccctcctgggccttcattacagaaaagtgaccaaggggcaacaaagcctcagggccctgcctgccctcccctttccatacaatgggcccaaccttattgtattccctcatgtccatcaaaaacctgcggcagttcattgggccccaacaagaaggtttcttgtccttaattcatattaccagagggaaagacccatgtgggttttgcttgtttaccaaatctcagtagctgattctgaacaatttagggactcttttaacttgaggttctcttttgactaatagagctccatttcccctcttaaatgagaaagcatttcttttctctttaatcttgccattccttcacatagtttgataaaaagatcaataaatgtttgaatgtttaatgtggaaaaaaaaaaaa

SEQ ID NO: 146489 - DNA, 793 bp, Homo sapiens
  misc_feature (1)...(793): n = a,t,c or g
gacactcgctttttggaacgtctgaggttatcaataagctcctagtcccagacgcccatgggtcatttcacagaggaggaccaaggctactatcaacaagcctgtggggcaaaggtgaatgtggaaagatgctggaggagaaaacccctgggaaaggctccctggttgtctaccccatggacccagaggtttctttgaccagctttggcaacctgtcctctgcctctgccatccatgggcaaacccccaaagtccaaggcacatggccaagaaggtgctgactttccttgggacgatgccaacaaagcacctggaatgattctcaaggggcaccttttgcccaagcctgaagtgaacttgcacttgttgacaagcttgcatgtgggatcctggaggaactttcaagcttcctggggaaaatgttgctgggttgaccgtttttgggcaatcccattttcggcaaaagaatttcacccctgaaggtgccaggtttttcttgggcagaaagatgggtgacttggagttggccagtgcccttgttccttccagattaccactgaagcctcttggcccatgaattcagaagctttcaaggataaggctttattcttgcaagcaattacaaataataaatctatttctgctaagagatcaccaaannnnnatnntnnnnnnncccccggattttttatttagcgggccgcacctttttccccttttagggggggtaaatttatattgggccttgggccggggttttcaaaagcggggggannnnnnnnnnaaagagccc

SEQ ID NO: 146490 - DNA, 1120 bp, Homo sapiens
ggtcgaccggcaccggaagacggaggtcctctttcgttgcctaacgcagccatggctcgtggtcccaagaagcatctgaagcgggtggcagctcactaagcattggatgctggataaattgaccggtgtgtttgctcctcgtccatccaccggtccccacaagttagagagagtgtctccccttcatcatttttcctgaggaacagacttaagtatgccctgactagcagatgaagtaaagaagatttgcatgcagcggttcattaaaatccgatggccaggtccggaactgatataacctacccctgctggattcatggatgtcatcaagcattgacaaagacgggagagaattttccgtcctgatctaattgacacccaaggggtccgcttttgcctgtaacatcgtattacaccttgagggagggccaaagtacaaagttgtgccaaaatgagaaagattcttttgtgggcaccaaaaggaatcccctcatcctgggtgactccatgatgcccggaaccatcccgctacccccgatcccccctcatccaaggtgaattgataccatttcagattggatttagagactggcaaagattacttgatttcatcaaagttcgacacctggtaaccctgtgtaatggtgacctggaggtgctaaacctaggaagaaattgggtgttgatcaccaaccagagagaggcaccctgggatcttttgaccgttggttcacgtgaaaagatgccaatggcaacaagcttttggccacttcggacttttccaacattttttggttattgggcaagggcaacaaaccatgggatttctctttccccgaggaaagggtattccgcctcaccatttgcttgaagagagagacaaaagactggcggccaaacagagcagttgggtgaaatggggtccctgggtgacatggtcagatcttttggtaccgtaattaaaaaccattgtggcaggattaatagcaaacaaaaaaaaagggggcgccgtttaaaaaattacaactttaattacgccggtctgccgaggttaaagctttttaaagggggcccaatatatcatttacttgcccggggttataaagaccggagagggaag

SEQ ID NO: 146491 - DNA, 1782 bp, Homo sapiens
ttttttcaaaattctgcacgaggggccggggctgggtggcagctgccatggactcgcttcgtttggactcagcggcctcctggagatcaacgagaaccctggtgatccagcagcgcggggtgcgaatctacgatggcgaggagaagataaaatttgatgctgggactctccttcttagtacacaccgactgatttggagagatcagaaaaatcatgagtgttgcatggccattctcctttcccaaatttgtgttcattgaagaacaggcgggctggaattgggaagagtgccaaaatagtggttcatctttcacccagctcctcctaacaaagaacctgggcccattccagagtagtaagaactcctacatcaaactctccttcaaagaacatggccagattgagttttacaggcgtttatcagaggaaatgacacaaagaagatgggagaatatgccagtttcccagtcattacaaacaaatagaggaccccagccaggaagaataagggctgtaggaattgtaggtactgaaaggaaactggaagaaaaaagaaaagaaactgacaaaaacatttctgaggcctttgaagacctcagcaaactaatgatcaaggctaaggaaatggtggaattatcaaaatcaattgctaataaaattaaagacaaacaaggtgacatcacagaagatgagaccatcaggtttaaatcctacttgcctgagcatgggaatagctaacccagttaccagagaaacctacggctcaggcacacagtaccacatgccagctggccaaacaacttggcctggaatattgcaagggtgcctttagaggaacgagggggaataatgtcactcacggaggtgtactgcttagtaaaccgagctcgaggaatggaattgctctcaccagaagatttagtgaatgcgtgcaagatgctggaagcactgaaattacctctcaggctccgtgtgtttgacagtggcgtcatggtaattgagcttcagtctcacaaggaagaggaaatggtggcctcggccctggagacagtttcagaaatgggatccctaacatcataagagtttgctaagcttgtgggaatgtctgtcctcctagccaaagaaaggttgctgcttgcagagaagatgggccatctttgccgtgatgactcagtggaaggcctgcgtttttacccaaatttatttatgacacagagctaagggttttgtatttaaaatcctttttgtccatatgcttgcgtcatgtagaggttgtatgacattgagctaagagataaaccccgatcaattgagaatttattggaacttcacagtgcaatgtaaatctcttttaatttctcactaaatatggtccaggaaatttatttagtatacgcataggaaaattcagaaaagtgaatgccaatatgaatttaaaatcatgctatagtgcagaaccctcagagtttaacttggaatatagtggattttaacttcatcctcaaatctaatcattttataaagaagggaatttagttttgcagagaataaaaagagaagttgcatgttcagacaggttagattattattttggtgtaactgaaattcactgattgcacatgacaatgttgggacaaaatatactgcagcatgctatatgaggctcctccccagggcttttagaagcagtcatagacatgtcttcaacataccaaataaaatacctttaaaaatgaaataattttatttgacacatatatttatatatattctatctagctg

SEQ ID NO: 146492 - DNA, 422 bp, Homo sapiens
  misc_feature (1)...(422): n = a,t,c or g
cggacgcgtgggctgtttagagcttaaagctacagaagcattgttaggaattgcttggacactgaattttaaactttttgacattgttaacaagcatgttcatcttttcttgtcactagtccaagaaaaatatgcttaatgtatattacaaaggctttgtatatgttaacctgttttaatgccaaaagtttgctttgtccacaatttccttaagacctcttcagaaagggatttgtttgccttaatgaatactgttgggaaaaaacacagtataatgagtgaaaagggcagaagcaagaaatttctacatcttatcgactccaagaagaatgaggatccacatttagatggcacattatgaggactttaatctttgcttaaacacnnnnnnnnnnnnnnnnnnnnnnnattcacatgatata

SEQ ID NO: 146493 - DNA, 2753 bp, Homo sapiens
gcggcggctgttattgttcggctgggctcggtcgggcgctgtctccctcggctctgcgggtgtcagttcgtccggcttcctcacagcccctcactcccggcggctgacagcagcagcggcggcggcgggcggcgcctggcgtttcgaggctgagcggcaccggggttggggcgcggaggaggagcaacaaccggaaggaggagccgtgtgccctggcactgagcggccttgtgccatggcgtacgcctatctcttcaagtacatcataatcggcgacacaggtgggggtagggtcatgcttattgctacagtttacagacaagaggtttcagcctagtgctatgactcttactaatggtgtagagttcggtgctcgaatgataactattgatgggaaacagataaagacttcagatatggggatacggcagggcaagaatccatttcgttccatcacaagggtcgtattacagtaggtgcagcaggagctttactagtttacgatattacacggaagagatacatccacccacttgacaacctgggttagaagatgccccgccagcattcccatttccaacatgggtcattatgcttattgggaaataaaagtgatttaggaatctaggaaggaggaagtaaaaaaaggaaggaaggtgaaagctttttgcaaccgaggaaccatggactccatcttccatggaaaacgtcttgtaaaaactgcttcccaatgtagaaggaggcatttattaataccagcaaaagaaattttattgaaaaaattcaaggaaggagtctttgacattaataatgaggcaaaatggcattaaaattggccctccagcatgctgctaccaatgcaacacatgcagggcaatcagggaggacagcaggctgggggcggctgctgttgagtctgtttttacttgtctagcctgcccaacgggggcctagctcacttattctttcaccccctctcctcctgctcagctgagacatgaaactatttgaaatgggctttatgtcacagaagactttaatccgccaaagtcttgtataactttgaataaatggttaatgttcacttgaaaagacagattttgggaggattgtattcatatctatttgcatttgatttctaggtcaattgatgtgattatttttgttaaatgttgtcttgtgcccttaactacggaactgaattgtattaaacactacaaagtcatcttgagtattttaaatcggtttgtgtagttagggttcccaacatctgtgggttacctaatgtttaatattataggaactgtcctcaggaaactttgtccatttttcacggctataaggaaacagaaggactcttttaattctgtatttatcatttactttctgtatatatagtttaataacctgcttgggtgtaatttgccaagcttgaattctttaatgcatttgcataaattctatactgtttagagcttaaagctacagaagcattgttagggaattgccttggacactgaattttaaactttttgatcattgttaacaagcatgttcatcttttcttgtcactaagtccaagaaaaatatgcttaatgtatattacaaaggctttgtatatgttaaccctgttttaaatgccaaaagtttgctttgtccacaatttcccttaaagacctccttcagaaaggggatttggttgccctaatgaatacctgttgggaaaaaacacagtataatgagtgaaaaggggcagaagccaagaaatttcctacatccttagcgactccaaggaaggaatgagtatcccacatttaggatgggcaccttatggaggacttttaatctttcccttaaacacaaataatgttttcttttttcttttattcacgatgatttcctaagtatatttttcatgcaggacagtttttcaaccttgatgtacagtgactgtgtaaaatttctctttcagtggcaacctctataatctttaaaatatggtgagcatcttgtctgttttgaaggggatatgacaataaatccatcagatggaaaatcctgttacaaagtagaaaagctttagtaatttactcagtgtggtggttttatcctttttttctttttctcccttggtctataatgaaattggtaccagcagtgcaaaataaaacccccatgtataaaagtggtcctttttttaattatgaccccaccctctttttaatgtatttttaagtcccacttacagcttttacatgggtttaagcatgttttttaaaagggtcagaatggttaacactcaaccctttttaaaaattttgctaaaatgcgacaaatctcaccatactgaaattatttttgttgatggtgtaagcagtgtaagcaagtgttttctcctgaactagcacaaaagcacttatgcctgaaagaaagcataaagaagttctaactctgaaactaactactttcatttcgctcatggccttcaactttctacaggtcttccctgaagattcagcagtactctctcaaaggtttgacagtactcttgtgggaaatcaccaaatgctgtcatagttttgttttaactgtctccttgagggcagagggaagggtgagagaaaatctgttttcatgggtatttgtagtacagcctttttttctttcaagtggctgtatcaaattcactggtcttactaatcactgtctttaccagtgagtacaaaaagttaaggcaactaggacaggtactg

SEQ ID NO: 146494 - DNA, 403 bp, Homo sapiens
cagtcctcatttctgtggaatctgaataagcccacgcatattttaattcccactctagattctggttctaatcaaggtccatgcatgtggtgtcaaccccgtggagacatacattcgctctggtacttatagtagaaaaccactcttaccctatactcctggctcagatgtggctggggtgatagaagctgttggagataatgcatctgctttcaagaaaggtgacagagttttcactagcagcacgatctctgggggttatgcagagtatgctcttgcagcagaccacactgtttacaaactacctgaaaaactggactttaaacaaggagctgccatcggcattccatattttactgcttatcgagctctgatccacagtgcctgtgtgaaagctggagag

SEQ ID NO: 146495 - DNA, 870 bp, Homo sapiens
  misc_feature (1)...(870): n = a,t,c or g
atggcgactggacagaagttgatgagagctgttagagtttttgaatttggtgggccagaagtcctgaaattgcgatcagatattgcagtaccgattccaaaagaccatcagaaaggtgacagagttttcactagcagcacgatctctgggggttatgcagagtatgctcttgcagcagaccacactgtttacaaactacctgaaaaactggactttaaacaaggagctgccatcggcattccatattttactgcttatcgagctctgatccacagtggggcactgcggaaaagatacccaaaaatgtggaagcgactttggaactgggtaacaggtagaggttggaacagtttggaggattcagaagaagacaggaaaatgtgggaaagtttggaacttcctagagacttgtctaatggctttgaccaaaatgctgataatgatatggacaaggaaatccaggctgatgtagtctcagatggagatgaggaacttgttgggaactggagcaaaggtgactcttgttatgttttagcaaagagactggcagcattttacccctgccctcgagacttgtggaactttgatgttgagagagatgatttagggtatccggcagaatttctaagcagcaaagcattcaagaggnttttaccactggcctacaagcatgctttggaaagggaaacgatgactaacttacatcccaagatcaaagagaaaaataactcatcatatattcataagaaaaaaagaaacccagaaaaaacacgtgcccagtgtattactaaagaaagtgatgaagaacttgaaaatgatgatgatgatgatctaggaatcaatgttaccatcttccctgaagattactaa

SEQ ID NO: 146496 - DNA, 595 bp, Homo sapiens
  misc_feature (1)...(595): n = a,t,c or g
tggggcactgcggaaaagatacccaaaaatgtggaagcgactttggaactgggtaacaggtagaggttggaacagtttggaggattcagaagaagacaggaaaatgtgggaaagtttggaacttcctagagacttgtctaatggctttgaccaaaatgctgataatgatatggacaaggaaatccaggctgatgtagtctcagatggagatgaggaacttgttgggaactggagcaaaggtgactcttgttatgttttagcaaagagactggcagcattttacccctgccctcgagacttgtggaactttgatgttgagagagatgatttagggtatccggcagaatttctaagcagcaaagcattcaagaggnttttaccactggcctacaagcatgctttggaaagggaaacgatgactaacttacatcccaagatcaaagagaaaaataactcatcatatattcataagaaaaaaagaaacccagaaaaaacacgtgcccagtgtattactaaagaaagtgatgaagaacttgaaaatgatgatgatgatgatctaggaatcaatgttaccatcttccctgaagattactaa

SEQ ID NO: 146497 - DNA, 497 bp, Homo sapiens
ggtggagcctgcaaaagttggagaaggtgtggcagtcctcatttctgtggaatctgaagaagcccacgcagattttaattcccactctagattctgtatctagatcaccatggcgactggacagaagttgatgagagctgttagagtttttgaatttggtggaccagaagtcctgaaattgcgatcagatattgcagtaccgattccaaaagaccatcaggttctaatcaaggtccatgcatgtggtgtcaaccccgtggagacatacattcgctctggtacttatagtagaaaaccactcttaccctatactcctggctcagatgtggctggggtgatagaagctgttggagataatgcatctgctttcaagaaaggtgacagagttttcactagcagcacgatctctgggggttatgcagagtatgctcttgcagcagaccacactgtttacaaactacctgaaaactggactttaacaaggagctgccatcgat

SEQ ID NO: 146498 - DNA, 744 bp, Homo sapiens
atggccccaaagtacgggagtaatgatgctggcgatttggatctgccaacaggtataaatggttttgaggttcagaaacaaaactgttgctggctactggttacacacaaactttgtgtaaaagatgatgtgattgtagctctgaagaaagcaaatggtgatgccactttgaaatttgaaccatttgttcttcatgtgcagtgtcgacaattgcaggatgcacagattctgacagctgattggtccattttacagagtgcagattggtgcatttacaatcctttagctagacatagagcgctgattggtgcgtttttacagagtgctgattggtgcgtttacaatcctttagctagacacagagcgctgattggtgcatttttacagagtgctgattggtgcgtttacaatcctttagctagacacagagcgctgattggtgcatttttacagagtgctgattggtgcatttacagtcctttagctacacacagagcgctaattggtgcgtttttacagagtgctgattggtgcatttgcagtcctctagctagacagaaaagttctccaagtccccacttgacccagaaagtccagctggcttcatctctcaatccaccctctaaacaggacacctcaactgctgctgggaatttggcgatgacggctctagctacttcctgctggataggggtgaagaaggggccctgcagttgtagtgtcctccagaggggaactctttag

SEQ ID NO: 146499 - DNA, 1780 bp, Homo sapiens
atgaatgcaggctgggagtccccgctcacagtacaggaaggtttggtgtctggtgagggctgctctgtgcttccaagatggcactgggttgttgtgtcctctggagagggggaaaactgggtctcgtgtgctcctgtggcgagcgggcgccccggaggtttggcaggggtagtgccaacggacacctcatggtgtggtagcttaaactcagagcctaaacgcaggaccagggctaggagcccaggaccagaaggcaaaacttcctacctgatttatggatgggaacttgcagcccctggaggggaatggcttcggtctggagctctacgcactagttctctgggaggacagagggcaggaaaggggtgcagccaaaatcaaactcggttccacttggacgagcagtggggagattcgctgtctgaactactaaggagagtttttaaaaccacttaccagaatctagagtgggaattaaaatctgcgtgggcttcttcagattccacagaaatgaggactgccacaccttctccaacttttgcaggctccacccaggatgcgaaggcactagaatttcccaaattaagaacgaagaggaagtttggaccttttcggccaccgctcgcttcaatatggctgcccccagggagagacgaggctaccatgaatggagccgagcgcagaccctgagtccgtcacccatggagtgcagcgcggagttcagagaaatggaaggcgcaatgtttgagcaaagcgcacctcagccggaagggcagtgttgacgaggatgtggtagagcttgtgcagtttctgaacatgcgagatcagtttttcaccaccagctcctgcgctggccgcatcctactccttgaccggggtataaatggttttgaggttcagaaacaaaactgttgctggctactggttacacacaaactttgtgtaaaagatgatgtgattgtagctctgaagaaagcaaatggtgatgccactttgaaatttgaaccatttgttcttcatgtgcagtgtcaacaattgcaggatgcacagattctgcattccatggcaatagattctggtttcaggaactctggcataacggtgggaaagagaggaaaaactatgttggctgtccggagtactcatggcttagaagttccattaagccataagggaaaactgatggtgacagaggaatatattgacttcctgttaaatgtggcaaatcaaaaaatggaggaaaacaagaaaagaattgagaggttttacaactgcctacagcatgctttggaaagggaaacgatgactaacttacatcccaagatcaaagagaaaaataactcatcatatattcataagaaaaaaagaaacccagaaaaaacacgtgcccagtgtattactaaagaaagtgatgaagaacttgataatgatgatgatgatgatctaggaatcaatggtaccatcttccctgaagattactaagctttggttctgatgtgtcttggccgtaatgtttctagtaggttttaataaagctgctcttcataagagtattttagtttgttgagtgtatcagccattcataagccagtaatgaccaagtgcagagcttcaaactataactttgttgcccagaggatgtgcagttgtcatctaagctctcagcagtacccggcttatcctacgacttcacctgaaatgctatagttatccctacttttttaccagtttctcccagaagcacctgcttaataaatcaaagatgtttgaaaaaaaaaaa

SEQ ID NO: 146500 - DNA, 762 bp, Homo sapiens
  misc_feature (1)...(762): n = a,t,c or g
cacaggngcagaacctctttggccatataggngacattcaccaggttccaggggattcatacgctggctatctttgggaggccgttattcaaccctgccaaagtgagatccattcttattgttgcatgtatttgtagttcattcattctcattgctgtatagtcttccgtttgtttatccatttttcattacatccaaaagttattcattctcccattaatagtcttttgagaatttttcaattctgagctattatgaatagtactgtgtagaacattcttatacatgtcttttggtgagtgtatacatttccatttgagtataaacccaaaaaagggaattgccaggttgtagggtgtgtatattttcagttttagtatttactgtcaaacagttttccaaagtgactgtaagaaggcaccattttaatgtgtagcataaaaatgaattacgctaatgatcttagtgggttgaatttctcgaaacacctaaattgtaccaaatgagttatattgcagcaggtatgttgttaatttcatataacaggaaaataagagcaaaagtaattgcccttattaactgacacattagtattacatactcattaggttattgctccttagaaaaaatgcgaattttaagtaatcgtaagtagtatgttgaattagtatgttgtgggaaaatctgtgatttaattttttaattgaattttaaattttgggttataacctcattaaaatgcatgatatttccttaaaaaaa

SEQ ID NO: 146501 - DNA, 2247 bp, Homo sapiens
aaatctatttatttattttgagaccaggttgtgagactggctaatttttagtatttttggtagagacagggtttcatcatgttgcccaggctgttcttgaactcttggcctcaagcgatccgcctgccttggcccctccaaagtgctgggattacaggtgtgagctactgcgcctggcagaattttgtttcttaaggactgagttctggtatcttcttttcttttttttttggagaaggagtctcgctctgtcacccaggctagagtgcagtggcgcgaatctccactcactgcaacctccgcctcccgggttcaagcaattctcctgcctcagcctctcgagtagctgggactacaggtgcatgccgccacacctggctacttttttcgtattttagtagagacagggtttcaccgtgttgctcaggctagtctcgaactcctgagctcaggcagtctgcctgccttggcctcccaaagtgctagggattacagggcgaaagccaccgtgggcccagccctggggtatcttcttttatcttagggctctagacttcttgatttcacagccttgaaccctatcttcatgcttggaaaacaacttcccaccttcccaccaaagaagccttaacgtggggtcccacaccgctaagaccaagcacctttggatattggtatctatcttgatggaattttaggttgccctcatttcctttttttcttgggccctggtggaaaataaacctgagtgactgctccccagtgcccatcacttgggcaggacactctgtcttagtttctccatgctgcctgtacaaggtcagtcccctatcccggcctagcttggggccttcactgtggctgacaagagtattattactacctacacctccgtaacagcaacacaacccagaaccctagagaaaacttcctttccaggcccccactggatcctataaagccacaaccctcccttagtgaaactcctgcccctaaagtccctcccttcccagcatttggaagcattcccacccatgaggagccaggtttaccttaagtctttgtcccactttcagtttgcaataccactaggagagaaaaggtctggatgaagggatgaagatatcaggctgcaggtatttgaggtggctatgggggaagagaagagcaaaggagagggcaaaagaccaggctatggagaggcaggggagggaaaatcactgcttcactatttccattgggcctgacgctgagtggatcctggattgtttgcgtttgggaaggagggcccaaagggagaacagtaagcaagaaccaggttctccagagccctctccccagtctctggagagggtctgcagtgaaaggagctcgggtcttccctgagccaaggtgccagggtcccagaactgcacatgggcccacacccctctctgctacttcctcaggctcttgctcactagaagagaggaaaattgtgcaattagtgctgggtttgaggaggctgacagggtgtaatcaacagggcctctccaccaggtgtggggctaggctgggtgatgggctctgccaggcgtggggctaggctgggtgacaggctctgccaggtgtggggctagacaaggagagcctgaggggagcctctttccccagggactgggtcccgttagggaatttcctcaagttttgtttcctgaggcatcactcccacccccacagcttccttctacatcttctgccttcgatcttccttccaaacttctggggcagcttctgtcactttgctcactaggggctgggttccaacactgcttgagaatcattccctccatcacccaccccagcgctgcagctttggccgctgcttgtgctctcaggcccagggtctttcctataaccctagaccctattgtctcctccgtttgcttgttctggggacactccccctgtctagaattcacagctctattccaactgctgacagcattcttttggttccagtttgggccctcttccaggaagacctcttggatttggccatggtgatgccagcaccacacaccctgaatgtttgtgaattttccctccactcacctttgcctgccttgaggtatcctggctgagaattcatctgtcttgcataggacagactgctaaatgcccggtgggtgtggagggtggagggtaagagtcatgactcctgtgtcaaaccagggacagctgctcctatgatctgggctcagggcg

SEQ ID NO: 146502 - DNA, 414 bp, Homo sapiens
acaacatgcgatgtttggaaatgatacaattacctgcacgacacatggaaattggactaaattaccagaatgcagggaagtaaaatgcccattcccatcaagaccagacaatggatttgtgaactatcctgcaaaaccaacactttattacaaggataaagccacatttggctgccatgatggatattctctggatggcccggaagaaatagaatgtaccaaactgggaaactggtctgccatgccaagttgtaaagaacacgagttctctggctttttggaaaactgatgcatccgatgtaaagccatgctaaggtggttttcagattccacataaaatgtcacacttgtttcttgttcatccaaggaacctaattgaaatttaaaaataaagctactgaatttattgccgca

SEQ ID NO: 146503 - DNA, 397 bp, Homo sapiens
  misc_feature (1)...(397): n = a,t,c or g
cccacgcgtccgcggacgcgtggggtttgtttgccatttcatgcgatgtttggaaatgatacaattacctgcacgacacatggaaattggactaaattaccagaatgcagggaagtaaaatgcccattcccatcaagaccagacaatggatttgtgaactatcctgcaaaaccaacactttattacaaggataaagccacatttggctgccatgatggatattctctggatggcccggaagaaatagaatgtaccaaactgggaaactggtctgccatgccaagttgtaaagcatcttgtaaagtacctgtgaaaaaagccactgtggtgtaccaaggagagagagtaaagattcaggaaaaatttaagaatggaatgctacatggtgataaaagtn

SEQ ID NO: 146504 - DNA, 410 bp, Homo sapiens
tccacaatgatttctccagtgctcatcttgttctcgagttttctctgccatgttgctattgcaggacggacctgtcccaagccagatgatttaccattttccacagtggtcccgttaaaaacattctatgagccaggagaagagattacgtattcctgcaagccgggctatgtgtcccgaggagggatggagaaagtttatctgccctctcacaggactgtggcccatcaacactctgaaatgtacacccagagtatgtccttttgctgggaatcttaggaaaatgggagccgtacggcttattacggactttttgaattattccccaacacggttcagtttttctttgttaacatggggttttattctggaatgggcgctggattctggccaagtgcattgagggaggg

SEQ ID NO: 146505 - DNA, 1330 bp, Homo sapiens
agaaaaccactttggtagtgccagtgtgactcatccacaatgattttctccaggtgctcatctttgttctcgagttttctctgccatgttgctattgcaggacggacctgtcccaagccagatgatttaccattttccacagtggtcccgttaaaaacattctatgagccagggagaagagattacgtattcctgcaagccgggctatgtgtcccgaggagggattgaggaaagtttatcttgccctcttcacagggactgtgggcccattcaacacttctggaaatgttacacccagagtatgtcctttttgctgggatttttaggaaaatgggaggccgtacgcttattacgactttttagaattatcccaacacggatccagttttttctttgttaacactggggttttgattctggaatggggcgctggatttctggccaagttgcactggagggaagggaaaatgggagcccgggagcttcctggtctggtggctcccatcatctggccctccaaccatccatacctacggttttgcaacacttcatgttttattaaggccattcaggttgggaaacaattcccctcctatcggggacacagcagtttttgaatgtttggcccacaacatggcgatgtttgggaaatgatacaattaccctgcacgacacatgggaaattggacctaaattacccagaatgcaggggaagtaaaatgcccccattcccccatcaagacccagacaatgggatttggtgaacctacccctgccaaaaccccaacactttatttacaagggttaaagccccacatttgggcctgccccatgatgggatattctctgggatgggcccccggaaggaaataggaatgttaaccccaaacttgggggaaacctgggtcctggcccctggccccaagttggtaaaagccatccttggtaaaaggtacccctgtgaaaaaaaggcccactgtggtgtaccccaaggagagagagtaaaggattccagggaaaaatttaaggaatgggaatgcctacatgggtgataaaagtttctttccttctgcaaaaataaggaaaagaagtgtagctatacagaggatgctcagtgtatagatggcactatcgaagtccccaaatgcttcaagggaacacagttctctggctttttggaaaacctgatgcatcccgatgtaaagccatgctaaggtggttttcagattccacacaaaatgtcacactttgtttcttgttcatccaagggaccctaattgaaatttaaaaataaagctactgaatttattgccgcaaaaaaaaaaaaaaa

SEQ ID NO: 146506 - DNA, 446 bp, Homo sapiens
ctcctgcgccggaactcccgggtcgacgatttcgtcgctttgcccgccgccgcctaaggggggctggggccggggccagccatcactgccgttgccgggatgccgcgggtgtacatcggccgcctgagctaccaggcccgggagcgcgatgtggagcgcttctttaagggctacgggaagatcctggaggtggatctgaagaacggtctgttatgttctgaacccacacatgttttcggaaggaccagatggctgacactggctaatgggaaccaaaagacgagtgaaagtaacctggttgtcacatacccccagcttagaggtgcttcaccctgccccaaggtggggaaagatcaagtgcagactgagctgtggccaacgtttgcagaccaggaatccacactagctctaatcagagagcccttggtgtgcgggaactgccagtt

SEQ ID NO: 146507 - DNA, 2433 bp, Homo sapiens
  misc_feature (1)...(2433): n = a,t,c or g
atgggtgaggttagtgggacaagtgattgtacagatgatcagtgcaggcaagtgaaaaaagccttagaaggagggaaggctgccagaggccacaggagtaaaattaagattaggttctttaggccaggggggctggggccggggccagccatcactgccgttgccgggatgccgcgggtgtacatcggccgcctgagctaccaggcccgggagcacgctgtggacacgcttacttaatggccatgcaaaaatcctggaggtggatctgaagaacggatatggttttgtggagtttgatgatctgcgtgatgcagatgatgctgtttatgaactgaatggcaaagacctttgtggtgagcgagtaattgttgagcatgcccgcggcccacggcgagatggcagttacggttctggacgcagtggatatggttatagaagaagtggccgagataaatatgggcctcctactcgcacagaggaccgacttattgtggagaattttgacaagtcggtgcagctggcaagacctaaaggattatatgcgtcaggcaggagaagtgacttatgcagatgctcacaagggacgccaaaaaatgaagggggtgattgaatttgtatcttattctgatatgaaaagagctttggaaaagttggatggaactgaagtcaatgggagaaaaatcagattagttgaagacaagccaggttccagacgacgccggtcctactccagaagccggaggtcattcaaggtctcgctctcgaagcagacattcccgtaagagcagaagccgaagtggcagcagcaaaagcagtcattctaagagtagatctcggtccaggtcgggctcccgctcccggagcaagagccggagccggagccagagtcggagccggagcaagaaagagaaaagcaggagccccagcaaggacaagagcctgcagccgcagccatagcgcgtggcaagagccgcagcaagagcaaagaccaagctgaaggagaagttccaaaacaatgacaatgttcgggaaacccaagagccggagtcctagcaggcataaaagtaagagcaaaagtcggagcaggagtcaggagaggagagtggaggaaggaagaaagcgagggagtttttagcaggggcaggagcccaggagaagagcctccgccagagtcggagccggtagcaggagcaaagcgggcagcaggtagccggtagataggagccgcagcaagagcaaggacaagaggaagagcaggaagagaagcagagaggagagccgcagtcgcagtcgcagccgcagcaagagtgagaggagcagaaagcgagggcagcaagcgagacagcaaggcgagcatcatgcaagaagaagaagaaggaagacactgaccgctcccagtccagatctccatcccgctccgtgttcaaaggagcgggaacatgcccaagtcttgaatccagccagagggaaggtcgaggagagagtgagaatgctggcaccaatcaggaagaccccggtccaggtccgagatccaatttccaaatcgaaaccaaaccttccaatcagaatgcaccgctccaagatcaaaagtcaagcttcaaaaaccccgatctcgggtccaatgtctagatccaggttctgcttccagatcgcccttcccgatctagatctaaggtcccacttcaaggtcctaactggcctatgggncacagctgggaacttacccgaggaagtctttttgttacatgttttggtaggccgttagcacaagtgattggagtagtaccatgtcactgctgtacatttttaactcccctaattggtgtgtctataattgttaaaatcctaaggtgcttccctctccagtaaaagccttccctgggcacccaggcccttccctgcctcgacctggaaaaaaaattttcccctttgaaaaatcccccttttacctcatggccccacagtaggaatatcccaaaaacgcccttggcttttccaggccctggcctttccctaccaggggagcctcaagtaaccctggacggctcctaaggctggaatgacccacatagggtaggtatgggtgaggtccaacccattttttgctcttggaatttggatgccccttcggatgtatgcccatttaggtgaaaggtgctaaagtctttaagtttcctacccactttgggtttcatattttttgggacttaacaaagttgtggaattaggcacagtcgagggaaaatttgatacctgcagttaacccataggaaataaactgtagagttccgatattctggtattgtgcgttatattgttttatattaaaaaagaaaagaaaagaattttttttaattttatttttccccgtcttgcaaagtatagtgacccctgtttccattaaatttgaataaagtctatttttgcttgaca

SEQ ID NO: 146508 - DNA, 484 bp, Homo sapiens; identical to SEQ ID NO: 133168
  misc_feature (1)...(484): n = a,t,c or g

SEQ ID NO: 146509 - DNA, 440 bp, Homo sapiens
tgttgcaggtcccattgggcatgatttcctgtatctgggtaagggtccttacagagggcagagtgattatactcttgatggtaagactgaacaactcagctcgatcttcagagcccaacagcaaatggacatcttggtaactgagatcagcgatggtgacaaagacctcctggcgcatggaactggacagagaatgcgggcgttcctcttgtaccagtacatttaaggtatgcacaatgtctgctatgtggctgtgaatgaatgattttgcggtttcatcataaggtaaagcttggctgagagaagacagatctcctaggaatttcagcttttcaagttcaccctgtgcttagaactcatcctggcccgcagagcatgccgcgagtccatggcgtcccctgtggcgggctcttggagccactttcccgagcgggaattcc

SEQ ID NO: 146510 - DNA, 543 bp, Homo sapiens
gcacgaggaactggatacctctgaaagaaagattgaatttgactctgcctctggcacctacactctctacttaatccattggagatgcccactttgaagaaccccaatccctctggaatgtggctgatttggtccatcaaagtccccctgaggaaaaagctcccctcgacctgtcttgtccccagaaccttttcactcccaaaacaggaaattcagtggatccggattggtgcccaatgtctcccaacttcacttttgctccctagcacgattatatttcaccctgggacatgcctgctatgctgggactcatgtatgtctactggactcagctcaacatgttcccagaccttgaagtacctggccatcttgggcagtgtgacgtttctggctggcaatcggatgctggcccagcaggcagtcaagagaacagcacattagttccagaagaaagatggaaattctgaaaactgaatgtcaagaaaaggagtcaagaacaattcacagtatgagaagaaaaatggaaaaaaaaaactttattta

SEQ ID NO: 146511 - DNA, 1660 bp, Homo sapiens
ctcaccattgaaaaccttctggatggactggatcagtttctcaacaatggcctcactgagcgggtcctgttgggtcaggcaacagatgccctttatgaggtgtttttgggaaacaggcttcgagcagctacgttccgactctttcctcagcttctcatgacactgcttatccagattcatcacagcatcggcctcaccatgtctgatgtcgacatcccaagtggcctgtacacagaacaggaagtgccttcagaggtcacccctttgtgcgcattgctggaaagaaatcagctccttgcacagaaggtcatgtacttattagtccctcttcttaaccgagggaatgataaacataaactcacatctgcaggcttttttgtggagagagaagacatcaagagcctgttgccatacattgtagacagcttgcgtgaaaccgatgagaagatcgttctgtcagccatccagatactcctgcaacttgttagaacaatggatttcactaccctggctgccatgatgaggaccctgttctccttatttggtgatgtgagatctgatgttcatcgtttctccgtgactctctttggagccgccataaagtctgtaaaaaacccagataagaagagtatagagaaccaagtcctggacagcttggtcccactacttctgtattctcaggatgaaaatgatgcagtagctgaggagagcaggcaagtcctaactatatgtgcccagttcctgaagtggaagctgccccaagaagtgtactccaaagatccctggcacatcaaacctactgaagcaggaacaatctgcagattctttcacttggtcccctggttacagtcagtcaaagaccatgagcgggaacgggccacggccagcatggctcaagttctgaagtgcctatccaaacatctcaacttgaaggtgccagaaattatgggagttatctgtgcccagttatccataatcagccagcctagagtccgccaacaaatcataaataccgtgctatacacagtcccaatgatgatgcacaccaagatctgggaaccaaatcacatggggaagggcgagggaatccaggggtttaacctgaggagaagccttgggaaggcagggagcctgctcttcaactggtggaaggacagtcctcccagcagcctccaagcatctaaagcacaggccttatcctactattcccatctgaaagatgtctgtaagagaaatcctctagaagcagctgaaacacaaaaggtactggtacaagaggaacgcccgcattctctgtccagttccatgcgccaggaggtctttgtcaccatcgctgatctcagagcctgccgcgagtccctggcgtcccctgtggcgggctctagaagccactttcccgagcggaagtcagcccgcggctcggactccggcgggacctgctcggaggaatggcgccgccgggtgaggagttgcgcgtggcttacaaacagggccccgcggccggcactctttggggagaggactgtcgcccgcgggaggttcctagtcgccgctcgagagccggccaggcgggatccccttcccctgcgggacaggggcatgggctcaagctctggctggggcgctctcggatcgagggtcctcgaactcgtcgtcccgg

SEQ ID NO: 146512 - DNA, 2672 bp, Homo sapiens
  misc_feature (1)...(2672): n = a,t,c or g
ttccagcgttgcgagacggtcggttccaagtgggcctgggcgcgggggagaggcgggtctgtcctcgggaactgcaaggccctgtgagcgggaggactgggatcccggccgcggctgctggaagcgtcgaagctcagcggggccgcggacactgacctgtgcttaaaactcatcctggcccgcagagcctgccgcgagtccctggcgtcccctgtggcgggctcttggagccactttcccgagcggaagtcagcccgcggttcggactccggcgggacctgctcggaggaatggcgccgccgggttcaagcactgtcttcctgttggccctgacaatcatagccagcacctgggctctgacgcccactcactacctcaccaagcatgacgtggagagactaaaagcctcgctggatcgccctttcacaaatttggaatctgccttctactccatcgtgggactcagcagccttggtgctcaggtgccagatgcaaagaaagcatgtacctacatcagatctaaccttgatcccagcaatgtggattccctcttctacgctggcccaggccaagccaaggcctctcaggatgtgagatctctatttcaaatgagaccaaagatctgcttctggcaagctgtcagtgaaggactcatctgtttaccccagatcttaccatgcaagttggcagctctaaagtgggcttttgggcctttccctttgggcaatncccaaagaaagcactcaagtggcccttaactggctcgtcttcaagcaagggaaggagactgtgctgggcaacagtccaggctctgcagacagcatcccacctgtcccagcaggctgacctgaggagcatcgtggaggagattgaggaccttgttgctcgcctggatgaactcgggggcctgtatctccaagtttgaagaaggactggaaacaacagcgttagtttgtggctgccacctacaaagctcaatggatcattgtggggactgaagccatccattaaggaaggatcaggtcatccagctgatgaacgcgatctttcagcaagaagaactttgagtcccctctccgaagccttcagcgtgggcctctggaagctgctgtgctctcgcataatcgctaccacgtgccagttgtggttgtgcctgagggctctgcttccgacactcatgaacaggctatcttgcggttgcaagtcaccaatgttctgtctcagcctctgactcaggccactgttaaactagaacatgctaaatctgttgcttccagagccactgtcctccagaagacatccttcaccccttgtagggattgtttttgaactaaatttcatgaacgtcaaattttccggtggttagtgtgacttcccttgtcgaagttgaaggtgacaaccggtatatttccaaataccgtagagctcagagtccaagatcctcccactgaagttggcatcacaaatgttgatctttccaccgtgggataaggatcagagcattgcacccccaaactacccgggtgacatacccagccaaagccaagggcacatttcattcggcaggacaggccaccaggaacttcggccttgttctttccagctggtaggatgtgaacactgggtgctgaactcactcctcaccagacatttgtccgactccataaccagaagactgggccaggaagtgggtgtttgtttgccgagccaggacaacaaggaacgtgttacaagtttgaactggatacctctgaaaggaaaggattgaatttgacttcccgctctggcacctacactctctacttaatcattggttgatgccaactttgaagaacccaaatcctctggaaatgtgggctgatgtgggtcatccaagttcccctgagggaaggaagcttccttcgactgtctttgttcccaggaacctttttcacttccaaaacagggaaatttcaggcacctgtttccggggaggccttgaggaaggagggcccccccaccgtggtgtcccaatacattcactgcccctgaatccttcttcggcccgttgctttctgcttccttcggctcttgtggatccgggattgggtgcccaaatgtcttccaactttcactttttgcttccttagcacgattatatttcacccctgggacatgcttgcttatgctgggacctccatgtatgtttactgaactcaggctcaaccatgttcccagaccttggaagtaccctggcccatcttgggccagtgtgaccgtttcctggctggccaatccggaatgctggccccagccaggcaagtcaagaggatcgctgcagagcagagcagtagattggcaaaatataggacactacgaacagcacattagttccagaagaaagatggaaattctgaaaactgaatgtcaagaaaaggagtcaagcccaattcccagtatgagaagaaaaatggaaaaaaaaaactttatttaaaaaagaaaaaagtccagattgtagttatacttttgcttgtttttcagtttccccaacacacagcagatacctggtgagctcagatagtctctttctctgacactgtgtaagaagctgtgaatattcctaacttacccagatgttgcttttgaaaagtccccctgtgtaattgttttggaataaagaaggatccaatagg

SEQ ID NO: 146513 - DNA, 739 bp, Homo sapiens; identical to SEQ ID NO: 145713
  misc_feature (1)...(739): n = a,t,c or g

SEQ ID NO: 146514 - DNA, 1126 bp, Homo sapiens
  misc_feature (1)...(1126): n = a,t,c or g
gcctgcgtgggcggccgggtggtcggcagagccgccggggcccccgggctcagaaagaggccgaaatggctgcgaagcaggccccgggcaggagtcgctcgggcgcagggaggaagtgaaccggccggaggtagcgcccggctgctggccccacagtcccgacaccttcggaactcctaactcctttacttgtccggctgaaaggtcaccagccccagtccccagctgtgccgcttgctgggcacagagcctctggtaactgccccctgatacacacagtgcccggggatagaacccgtgtgcgtggacctgggtgactgggaggccaccgagcgggcgctgggcagcgtgggccccgtggacctgctggtgaacaacgccgctgtcgccctgctgcagcccttcctggaggtcaccaaggaggcctttgacaggtgagcctgtgaaggcggaggaacctcagggaggggctgtcctggaggacgcagcagccctaatctctgaccagggtctgtccctcggcctctagatcctttgagggtgaacctgcgtgcggtcatccaggtgtcgcagattgtggcccaggggcttaattagcccggggagtccccangggcccatcgtgaaatgtctccagccagtgcttcccagcggggcagtaaactaaccatagcgtcttactgcttcccaccaaaggggtgcccttggacatgcttgaccaagggtgatgggcccttagagctcgggccccacaagctgtcccggtgtagatccggagtgaatgcaagtaaacccccacagtggtggatgacgttccatggggccagggccaccttggagtgacccccacaagggccaagattatgctgaaccgaatcccaacttggcaagtttgctggtgagtcagaggtagagcacgtggtgaacgccaatcctctttctgctgagtgaccgaagtggcatgaccacgggttccaactttgccggtggaagggggcttctgggcctggttaagctccctccacacacctcaagccccatgggcgtgcttcatccttacccccaatccctccaataaaacctgattgctgctgcccaaaaaaaaaaaaaaaaaaagtcgacgcgg

SEQ ID NO: 146515 - DNA, 330 bp, Homo sapiens
  misc_feature (1)...(330): n = a,t,c or g
ggcacgagagtcaggttccctggtggccccacgatctcggccaccatgggagcatgggctgcccggtgagcatagctgagatgcaccaaggccacataagtcacctactttgccttggctgccccatctgcatctatcaaaggaagccttggacacccaccagaggagccagcatgagggagtgtatgcctttatacaaattcactccaacttcagaaaaacgtccgcagctcatgctccccctgccagagcagcagtgtgagcagctgtgtaggtttggaagcaccccagtcacttgggcatnnnnnnnnnnnnnnnnnnnnnnnnnnn

SEQ ID NO: 146516 - DNA, 529 bp, Homo sapiens
gggtacagtcgccgcgtgcggagcttgttactggttacttggcctcatggcggtccgagcttcgttcgagaacaactgtgagatcggctgctttgccaagctcaccaacacctactgtctggtagcgatcggaggctcagagaacttctacagtgtgttcgagggcgagctctccgataccatccccgtggtgcacgcgtctatcgccggctgccgcatcatcgggcgcatgtgtgtgggagacagaagaaattctggcagatgtgctcaaggtggaagtcttcagacagacagtggccgaccaggtgctagtaggaagctactgtgtcttcagcaatcagggagggctggtgcatcccaagacttcaattgaagaccaggatgagctgtcctctcttcttcaagtcccccttgtggcggggactgtgaaccgaggcagtgaggtgattgctgctgggatggtggtgaatgactggtgtgccttctgtggcctggacacaaccagcacagagctgtcagtggtggaaaa

SEQ ID NO: 146517 - DNA, 1209 bp, Homo sapiens
  misc_feature (1)...(1209): n = a,t,c or g
gacggaaacctttttagggagtccaaggtacagtcgccgcgtgcggagcttgttactggttactgggcctcatggcggtccgagcttcgttcgagaacaacatgtgagatcggctgctttgccaagctcaccaacacctactgtctggtagcgatcggaggctcagagaacttctacagtgtgttcgagggcgagctctccgataccatccccgtggtgcacgcgtctatcngccggctgccgcattcatcgggcgcatgtgtgtggggaacaaggcacggtctcctgggtacccaacaataccaccgaccagggagctggcaacacatttcggcaacaggcctcccaagacacagtggcagatttagggcgggttggaaggagcggtttttaagcctttggggaaattttttcaaccaccttgcaattgactacgtgggccttgggtccaaccaagactttggacaagggaagacaagaagaaatttctgggcagatgttgttcaaaggttgggaagttttcagacagacagtgggccgaccaggtggctagtagaaagcctactgtgtcttcagcaatccagggagggcctgggtgccatccccaagacctttccaatgaagacccaggaatgagctgtcctctatttctttcaaagtccccctttgtggcggggacttgttaaaccaaaggcagtgaggtgatttgcctgcttgggatgggtggtgaaatgaactggtgtgcccttctgtgggcctgggacaccaaacccagcacagagctgtcaagtggtggaagagtgtcttcaaagctgaaatgaagccccagccttagcaccaattgccaaccgagcatgcgggaattccctcaattgacagcctcacctgagtcaccttccaagttgttccatgggcttcctggctctggactgtggccaacctttctccacattccgcccaatctgtaccggatgctggcagggaggtggcagagagctcactggggacttgagggggttgggcacccaaccctttttccacctgtgctttattcgcctggggatcttattcatttacttgcaaaaacctggcttctgttgtggctggctgggcaggccctgtggctgctggctgggggttttggtgtcctgtcctgtgccaccccattaaagtgcgagttccctccgggcaaaaaaaaaaaaaaaaaaa

SEQ ID NO: 146518 - DNA, 440 bp, Homo sapiens
tttcgtgggaccctgaggctcgtgagcagggacccgcggtgcgggttatgctgggggctcagatcaccgtagacaactggacactcaggaccacgccatggaggagctgcaggatgattatgaagacatgatggaggagaatctggagcaggaggaatatgaagacccagacatccccgagtcccagatggaggagccggcagctcacgacaccgaggcaacagccagactccagcttctacaagggcctagacttaaatgggggcccagatgaccctctgcagcagacaggccagctcttcgggggcctggtgcgtgatatccggcgccgctacccctattacctgagtgacatcacagatgcattcagcccccaggtcctggctgccgtcatcttcatctactttgctgcactgtcacccgccatcaccttcggcggc

SEQ ID NO: 146519 - DNA, 389 bp, Homo sapiens
cggctgcaggacttcaccaagggaccctgaggctcgtgagcagggacccgcggtgcgggttatgctgggggctcagatcaccgtagacaactggacactcaggaccacgccatggaggagctgcaggatgattatgaagacaggatgattctcctgggtatagcgggagatcttctccttcctcatttccctcatcttcatctatgagactttctccaagctgatcaagatcttccaggaccacccactacagaagacttataactacaacgtgttgatggtgcccaaacctcaggggcccctgcccaacacagccctcctctcccttgtgctcatggccggtaccttcttctttgccatgatgctgcgcaagttcaagaacagctccc

SEQ ID NO: 146520 - DNA, 415 bp, Homo sapiens
  misc_feature (1)...(415): n = a,t,c or g
tccggcgccgctacccctattacctgagtgacatcacagatgcattcagcccccaggtcctggctgccgtcatcttcatctactttgctgcactgtcacccgccatcaccttcggcggcctcctgggtcagtgccaatacctgtctccctaactcttgcctctgaccctctgggcctctgtctcagccccaacttctggactctgtctggaccctccaggacccctggcatcagcctgaccatgacttgctctatgggctcctgggaaatgatctcctgaccttgatcccactgtgacctcttacccacagggagnaaaagacccgggaaccagatggggagtgttcggagctgcttgattttccactggcagtggcaggggcatttttctttcggccctgctgggggctcagcc

SEQ ID NO: 146521 - DNA, 766 bp, Homo sapiens
ggcacgagatgaatgatggatgggtggataaatggatggatgatgaattaatagatgactggatgaatggatagtagtgctgggtagagttagctggtggtattttccagcccaagccaaagctgggagagaacagaatgccttggttttctgctgcagatcttccaggaccacccactacagaagacttataactacaacgtgttgatggtgcccaaacctcagggccccctgcccaacacagccctcctctcccttgtgctcatggccggtaccttcttctttgccatgatgctgcgcaagttcaagaacagctcctatttccctggcaagctgcgtcgggtcatcggggacttcggggtccccatctgcatcctgatcatggtcctggtggatttcttcattcaggatacctacacccagaaactctcggtgcctgatggcttcaaggtgtccaactcctcagcccggggctgggtcatcccacccactgggcttgcgttccgagtttcccatctggatgatgtttgcctccgccctgcctgctctgctggtcttcatcctcatattcctggagtctcagatcaccacgtgagagacagggtgggggctgggcctgggagggtgggaagcagggacctttccctggcattctcccaggcaggcaagagacccaggactgcaagctagtccctgcgggtgtgtggccctcccgactagcaggaatagtgaaaagccatgggcagttccaggttttgtgggacca

SEQ ID NO: 146522 - DNA, 3938 bp, Homo sapiens
  misc_feature (1)...(3938): n = a,t,c or g
aggcggcttactcactatagggctcgagcggctgcaggacttcaccaggggaccctgaggctcgtgagcagggacccgcggtgcgggttatgctgggggctcagatcaccgtagacaactggacactcaggtcctcgccatggaggagctgcaggtgggtgttccctggcatcagcagtgctcccacctggaggctctggggacctggtcctagactcctatcttcgttgggggtggaagagcccctcacagcccagcctcagcggccacttcccacaggatgattatgaagacatgatggaggagaatctggagcaggaggaatatgaagacccagacatccccgagtcccagatggaggagccggcagctcacgacaccgaggcaacagccacagactaccacaccacatcacacccgggtacccacaaggtctatgtggagctgcaggagctggtgattgacggaaaggatcccggacttgcaatggatggaggcggcgcccttgagggcaactggatgagaacctgggggagaatggggcctggggccgcccgcacctctctcacctcaccttctggagcctcctagagctgcgtagagtcttcaccaagggtactgtcctcctagacctgcaagagacctccctggctggagtggccaaccaactgctagacaggtttatctttgaagaccagatccggcctcaggaccgagaggagctgctccgggccctgctgcttaaacacagccacgctggagagctggaggccctggggggtgtgaagcctgcagtcctgacacgctctggggatccttcacagcctctgctcccccaacactcctcactggagacacagctcttctgtgagcagggagatgggggcacagaagggcactcaccatctggaattctggaaaagagtcccccggattcagaggccacgttggtgctagtgggccgcgccgacttcctggagcagccggtgctgggcttcgtgaggctgcaggaggcagcggagctggaggcggtggagctgccggtgcctatacgcttcctctttgtgttgctgggacctgaggccccccacatcgattacacccagcttggccgggctgctgccaccctcatgtcagagagggtgttccgcatagatgcctacatggctcagagccgaggggagctgctgcactccctagagggcttcctggactgcagcctagtgctgcctcccaccgatgccccctccgagcaggcactgctcagtctggtgcctgtgcagagggagctacttcgaaggcgctatcagtccagccctgccaagccagactccagcttctacaagggcctagacttaaatgggggcccagatgaccctctgcagcagacaggccagctcttcgggggcctggtgcgtgatatccggcgccgctacccctattacctgagtgacatcacagatgcattcagcccccaggtcctggctgccgtcatcttcatctactttgctgcactgtcacccgccatcaccttcggcggcctcctgggagaaaagacccggaaccagatgggagtgtcggagctgctgatctccactgcagtgcagggcattctcttcgccctgctgggggctcagcccctgcttgtggtcggcttctcaggacccctgctggtgtttgaggaagccttcttctcgttctgcgagaccaacggtttaggagtacatcgtgggccgcgtgtggatcggcttctggctcatcctgctggtggtgttggtggtggcccttcgaggggtagcttccctggtccgcttcatctccccgctataccccaggagatcttctccttcctcatttcccctcatcttcatctatgagactttctccaagctgatcaagatcttccaggaccacccactacagaagacttataactacaacgtgttgatggtgcccaaacctcagggccccctgcccaacacagccctcctctcccttgtgctcatggccggtaccttcttctttgccatgatgctgcgcaagttcaagaacagctcctatttccctggcaagctgcgtcgggtcatcggggacttcggggtccccatctccatcctgatcatggtcctggtggaatttcttcattcaggatacctacacccagaaaacttctcaggtgcctgatggcttcaaggtgtccaactcctcagcccggggctgggtcatccacccactgggcttgcgttccgagtttcccatctggatgatgtttgcctccgcccttgccttgtctgctggtcttcatcctcatattcctggagtctcagatcaccacgctgattgtcagcaaacctgagcgcaagatggtcaagggttccggcttccacctggacctgctgctggtagtaggcatgggtggggtggccgccctctttgggatgccctggctcagtgccaccaccgtgcgttccgtcacccatgccaacgccctcactgtcatgggcaaagccagcaccccaggggctgcaagcccagatccaggaggtcaaaagagcagcggatcagtggactcctggtcgctgtgcttgtgggcctgtccatcctcatggagcccatcctgtcccgcatccccctggctgtactgtttggcatcttcctctacatgggggtcacgtcgctcagcggcatccagctctttgaccgcatcttgcttctgttcaagccacccaagtatcacccagatgtgccctacgtcaagcgggtgaagacctggcgcatgcacttattcacgggcatccagatcatctgcctggcagtgctgtgggtggtgaagtccacgccggcctccctggccctgcccttcgtcctcatcctcactgtgccgctgcggcgcgtcctgctgccgctcatcttcaggaacgtggagcttcagtgtctggatgctgatgatgccaaggcaacctttgatgaggaggaaggtcgggatgaatacgacgaagtggccatgcctgtgtgaggggcgggcccaggccctagaccctcccccaccattccacatccccaccttccaaggaaaagcagaagttcatgggcacctcatggactccaggatcctcctggagcagcagctgaggccccagggctgtgggtggggaaggaaggcgtgtccaggagaccttccacaaagggtagcctggcttttctggctggggatggccgatggggcccacattagggggtttgttgcacagtccctcctgttgccacactttcactggggatcccgtgctggaagacttagatctgagccctccctcttcccagcacaggcaggggtagaagcaaaggcaggaggtgggtgagcgggtggggtgcttgctgtgtgaccttgggcaagtcccttgacctttccaggcctatatttcctcttctgtaaaatgggtatattgatgataatacccacattacaggatggttactgaggaccaaagatacatgtaaaatagggctttgtaaactccacagggactgttctatagcagtcatcatttgtctttgaacgtaccccaaggtcacatagctgggatttgaactgagcccgtgcagcttgggattttgaaccaggccttctcgatttcaaggtcccgagctctgtcctctgtcagtcatgcgtccactttcccttcccctgtgactcctcccttccccactctgctcccagcccctaccttgagaccctcttctctgggcccagagagaggcgtcctggtgaggacaagggtagagggaaggattgatccagggattggggcctggggactcagggcctcctaagtgttttgggttccttcccttcaaaacacttcattaagttcaatcaattcaattaanttccaacaaaacattttactgaggggcccccggaaatcagtnggaat

SEQ ID NO: 146523 - DNA, 477 bp, Homo sapiens
  misc_feature (1)...(477): n = a,t,c or g
aatacaaagtccaattttgatggctgctataaaatacttaggaatctctgcaatactttactacaaatacaaatgcccaagaggtcagggaaatcagcctgaagaactgggtacaggttctattctttgtggaaatttcagcctaggaatgttattcccggtacagatgtacacagtcaaaaaggcttatcgagctgtttgacgagttcttgaagtgttctggatcagtgatctgcctgtgaactttagttcacgctgaagacagtcttctcagttttcatgactgtgaagtgtgaaaatggaacgcatccttgatcttaggtgctgctgacctactttcccaaagcaaaatgttttaaaattcaaggcaatctggaacggggactatttccaaacttccttaggcagcacttttcagtgactctcgtgccgaattcctgcagcgcgggtcaagtgnnnttccncaggcggtcaacc

SEQ ID NO: 146524 - DNA, 532 bp, Homo sapiens
ccgggtggccccgcccagaagcttccgggagtgcttgtttctcagacacaaacaaaaacctgtgaagagtgcttgaagaacgttccctgtctttggtgcaacactaccaaggcttgtctggactaccagtttacaagcgtcttgccaccggcttccctttgtaaattgagctctgcacgctggggagtttgttgggtgaactttgaggcgctgatcatcaccatgtcggtagtcgggggaaccctcctcctgggcattgccatctgctgctgctgctgctgcaggaggaagaggagccggaagccggacaggagtgaggagaaggccatgcgtgagcgggaggagaggcggatacggcaggaggaacggagagcagagatgaagacaagacatgatgaaatcagaaaaaaatatggcctgtttaaagaagaaaacccgtatgctagatttgaaaactgtaacctcaaggaaaccataaagcttggagtgccttaatttttaaccagtttccaataaaacggtttactacctg

SEQ ID NO: 146525 - DNA, 612 bp, Homo sapiens
ggccggtgtgtctctacagccgccggcgttcacgccgccactccctcccggccgcagttccacgcacagcagcgaacgctcgcacttatgccttagaaaggaaggcgtccccaaagccaggctgtagcatctgattttgaagcaagctgattgcggttctacgctgtccagacgcgcagcgggattcctgaacactcgttccacatgtcttgaagaaggcttgttatcagcaggggctcaggaagaggaccttcatttgcttgttctcagaacacaaacaaaacctgtgaagagtgcctgaagaacgtctcctgtctttggtgcaacactaacaaggcttgtctggactacccagttacaagcgtcttgccaccggcttccctttgtaaattgagctctgcacgctggggagtttgttgggtgaactatgaggcgctgatcatcaccatgtcggtagtccggggaacactcctcctgggcattgccatctgctgctgctgctgctgcaagaggaagaggagccgggagccggacaagagtgaggagaaagccatgcgtgagccggaagagaggcggatactggaggatgaacggagagcaaagatgaagaca

SEQ ID NO: 146526 - DNA, 2956 bp, Homo sapiens
tcacgcctcgcccatccgcgccgcgcaggcgcactgagcctcagccgctctcctcgctaccaggctcctttcctctatcgcgcaggcgcactgaacctcagccgcgccgggaggcgagcccgttggcgagggggcggggcggatggcgagggagcggggcgagctgctttttgaggctgcgcactcgcatggccccacctcgcaggtccacttccggcgccgcggctgttccgggcggagaccgcttgtgctggagtcggagttgtaacgctccactgactgatagagcgaccggccgaccatggcgcccggagtggcccgcgggccgacgccgtactggaggctgcgcgctgggtggcgccgcgctgctcctgctgctcataccggtggccgccgcgcaggagcctcccggagctgcttgttctcagaacacaaacaaaacctgtgaagagtgcctgaagaacgtctcctgtctttggtgcaacactaacaaggcttgtctggactacccagatacaagcgtcttgccaccggcttccctttgtaaattgagctctgcacgctggggagtttgttgggtgaactttgatgcgctgatcatcaccatgtcagtagtcgggggaaccctcctcctgggcattgccatcttgctgctgctgctgctgcaggaggaagaggagccggaagccggacaggagtgaggagaaggccatgcgtgtagcgggaggataggtgtgatactgcaggaggaacggagagcagagatgaacacaagacatgatgaaatcagaaaaaaaatatggcctgtttaaagaagaaaacccgtatgctagatttgaaaacaactaaagcagctccagcacatcagtcccgacgcttcctgtgaggtgcacgctccgaagcccagcccagccgggagaccacgtggccattgcggtctactgaccttggtcagtgaacctgccagccttccaggacaggcggccggagagctgcccctgaaggacagtcctctcgtcttgcagaactggtgaccttctattcccttgttcatcttctggttcctagatttaagtcacttggaaataaggaaatctttggggtttgggctttttttatactcttctccagtttgtgaaacgctaactgcacacgaagccgcctgacggcacccagcgctgtggctgtcattctcccagggcagaaccctgcgtttctctctgtccactaacaagcttcacacgcaacacagggaagtcggtttgacttttgtcatgaggagaactgaccagccctcatcattccccataaaacccacgacagcggtctgtgggcgcatcttgagtcttcacacctgttggacttcacacgggttttgctggatgacacgggggctccagttacacagtctggataaggacttaacgtcctaacctcaattgtattaaatagcattggggaatagctaaacctttttaaaaaaatttattgggattttcctcccgtgcttaaaagatttcaccaagaaaaccttcatataaaaattcaggcccttttttggacaatttttaaaatttgtatctttactagaacatgagaatcttttttcccttggaaagcttgaattataaatgtgggtggttttggcctgcctcagcagcaccagtttgactgctcgtgtgccagcggtgtggggaggacggggcaggaacgctgcagctctctccagccctgttggcatcctcagtgcctgcaggccttcttcgctgcctgttggggctgtctggggggtgggccatttaggggatcgtggggggacgggcctttctttcttcttggggtggaccccgtccccacgaagaaagaaaggcccgtccacaggccccggctctgggcaaccgtgccccggaagcagggtgtgtccagaagtcagctgagggctctccccacaccaacccagcaggcgctggtgctccttctgcctcatgggaccagtccagcttccagccgctctggctcgagggtggtctgagcactttccttctgagtggggcttctctggggagctctccaagtggcaatgcttggaacctgcccacgtttctgtaaaaatcaaggatacgtggctttagtaagcagaccaagcgcttcgtggcagggaaagcagcgtgcggggaagtcactgaaaagtgctgcctaaggaagtttggaaatagtccccgttccagattgccttgaattttaaaacattttgctttgggaaaagtaggtcagcagcacctaagatcaaggatgcgttccattttcacacttcacagtcatgaaaactgaggaagactgtcttcagcgtggaacttaaagttcacaggcagatccactggatccaggaacacttcaagaactcgttcaaacagcttcgattaagcctttttgactgtgtaccatctgtaccgggaataacattcctaggctgaaatttcccacaaagaatagaacctgtaccccagttcttccaggctggatttccctgacctcttgggcaatttgtatttgtagtaaagtattgcagagattccctaagtattttatagcagcccatcaaaattggactttgtattgtttattcataaaaggacacttggtaatagacctccagtgaactctgtatggaatggcagtagtgtgtgtgcaaaatcccgcttcctgaggggtagggttgttgagctggcgctaggggctcggttgtggaaattacagcgtagtcgagcccttgcgctcagtgtgggaaacccacgtttgttaggtcggtcttcgtccatctggcttttttctggaattacactaagagcagccacaaaactgtaacctcaaggaaaccataaagcttggagtgccttaatttttaaccagtttccaataaaacggtttactacctgcgaaaaaaaaaaaaaaaaaa

SEQ ID NO: 146527 - DNA, 1712 bp, Homo sapiens
tgagagaatcattaacttaatttgactatctggtttgtggatgcgtttactctcatgtaagtcaacaacatcctgggattgggacacactttctgggcactgctggccagtcccaaaatggaacataaggaagtggttcttctacttctgttatttctgaagtcagcaccgactgagacagggccttctgtgcaggagtgctaccacagtaatggacagagttatcgaggcacatacttcaccactgtcacaggaagaacctgccaagcttggtcatctatgacgccacaccagcacagtagaaccccagaaaagtacccaaatgatggcttgatctcgaactactgcaggaatccggattgttcggcaggcccttggtgttatacgacggatcccaatgtcaggtgggagtactgcaacctgacacggtgctcagacgatgaagggactgtgttcgtgcctctgactgttatcccagttccaagcctagaggattcattcatacaagtggcttgatctccaactactgcaggaatccggattgttcggcaggcccttggtgttatacaacggatcccaaagtcaggtgggagtactgcaacctgacaggatgctcagacaagaatagggctgtggccgcgcctctgactattatcccggttccaagacgagaggatacttccaaacaagcactgattgatccaaggccttcaatgtaggagtgctaccatggaaatggacagagttatcgaggcacatacttcaccaccgtcacaggaagcacttgccaagcttggtcatctatgacaccacaccagcacagtaggacctcagaaaagtacccaaatgctgacttgatcatgaactactgcaggaatccagatcctgtggaaggccttggtgttacacgatggatcccaaagtcagatgggagtactgcaacctgacacgatgctcagacacagaagggactgcagtcgtgcctctgactgttatcccggttccaagcctagaggatccttccaaaccagcaccaacagagccaaggccttgggagcagcagtgctaccacggtaatggacagagttatcgaggcacatacttcaccactgtcacaggaagaacctgccaagcttggtcatctatgacgccacatcagcacatggcctgaccaggaacactgcaggaatccagattctgggaaacaaccctggtgttacacaactgatccgtgtgtgaggtgggagtactgcaacctgacacaatgctcagaaacagaatcagtgtcctagagactcccactgttgttcccgttccaagcatggaggctcattctgaagcagcaccaactgagcaaacccctgtggtccggcagtgctaccatggtaatggacagagttatcaaggcacattctccaccactgtcacaggaaggacatgtcaatcttggtcatccatgacaccacaccggtcatcagaggaccccagaaaactacccaaatgactctatgtttgggaatgggaaaggataccggggcaagaaggcaaccactgttactgggacgccacgccaagaatggactgcccaagagccccatagacacagcaggttcactccagggacaagtccacgggcaggtctggaaaaaaatgtagggacatggatgaagctggaaaccatcatcctcagcaaactatcgcaaggacaaaaa

SEQ ID NO: 146528 - DNA, 2178 bp, Homo sapiens
atgccgcagcggaagtctctatgcacccacccccgtctatacctgagcaacacattcctctttgctgctctcttacaggctacagagtgcggtggcgccagcacagagctctgctcaacgtccctctgtgctttcacgatgctgatggattatgaaggtcaaggagagcctctggatgactatgtgaatacccagggggcttcactgttcagtgtcactaagaagcagctgggagcaggaagtatagaagaatgtgcagcaaaatgtgaggaggacgaagaattcacctgcagggcattccaatatcacagtaaagagcaacaatgtgtgataatggctgaaaacaggaagtcctccataatcattaggatgagagatgtagttttatttgaaaagaaagtgtatctctcagagtgcaagactgggaatggaaagaactacagagggacgatgtccaaaacaaaaaatggcatcacctgtcaaaaatggagttccacttctccccacagacctagattctcacctgctacacacccctcagagggactggaggagaactactgcaggaatccagacaacgatccgcaggggccctggtgctatactactgatccagaaaagagatatgactactgcgacattcttgagtgtgaagaggaatgtatgcattgcagtggagaaaactatgacggcaaaatttccaagaccatgtctggactggaatgccaggcctgggactctcagagcccacacgctcatggatacattccttccaaatttccaaacaagaacctgaagaagaattactgtcgtaaccccgatagggagctgcggccttggtgtttcaccaccgaccccaacaagcgctgggaactttgtgacatcccccgctgcacaacacctccaccatcttctggtcccacctaccagtgtctgaagggaacaggtgaaaactatcgcgggaatgtggctgttaccgtgtccgggcacacctgtcagcactggagtgcacagacccctcacacacataacaggacaccagaaaacttcccctgcaaaaatttggatgaaaactactgccgcaatcctgacggaaaaagggccccatggtgccatacaaccaacagccaagtgcggtgggagtactgtaagataccgtcctgtgactcctccccagtatccacggaacaattggctcccacagcaccacctgagctaacccctgtggtccaggactgctaccatggtgatggacagagctaccgaggcacatcctccaccaccaccacaggaaagaagtgtcagtcttggtcatctatgacaccacaccggcaccagaagaccccagaaaactacccaaatgctggcctgacaatgaactactgcaggaatccagatgccgataaaggcccctggtgttttaccacagaccccagcgtcaggtgggagtactgcaacctgaaaaaatgctcaggaacagaagcgagtgttgtagcacctccgcctgttgtcctgcttccagatgtagagactccttccgaagaagactgtatgtttgggaatgggaaaggataccgaggcaagagggcgaccactgttactgggacgccatgccaggactgggctgcccaggagccccatagacacagcattttcactccagagacaaatccacgggcgggtctggaaaaaaattactgccgtaaccctgatggtgatgtaggtggtccctggtgctacacgacaaatccaagaaaactttacgactactgtgatgtccctcagtgtgcggccccttcatttgattgtgggaagcctcaagtggagccgaagaaatgtcctggaagggttgtaggggggtgtgtggcccacccacattcctggccctggcaagtcagtcttagaacaaggtccccaaggccttcatcctacaaggtcatcctgggtgcacaccaagaagtgaatctcgaaccgcatgttcaggaaatagaagtgtctaggctgttcttggagcccacacgaaaagatattgccttgctaaagctaagcagtcctgccgtcatcactgacaaagtaatcccagcttgtctgccatccccaaattatgtggtcgctgaccggaccgaatgtttcatcactggctggggagaaacccaagaacatttttatttcaattaa

SEQ ID NO: 146529 - DNA, 3655 bp, Homo sapiens
ttacattttgtcatgattttgcagcagctggtaccggttgttcctttccatgtttagcgcttccttcaggagctcttttagggcaggcctggtggtgacaaaatctctcaacaattgcttgtctgtaaagtattttatttctccttcacttatgaagcttagtttggctggatatgaaattctgggttgaaaattcttttctttaagaatgttgaatattggcccccactcttttctggcttgtagagtttctgccgagagatccactgttagtctgatgggcttccctttgaaggtaacccgacctttgtctctggctgcccttaaccttttttccttcatttcaactttggtgaatctgacaattatgtgtcttggagttgctcttctcgaggagtatgtttgtggcgttctctgtatttcctgaatctgaatgttggcctgccttgctagattggggaagttctcctggatgatatcctgcagagtgttttccaacttggttccattctccccgtcactttcaggtacaccaatcagacgtagatttggtcttttcacatagtcccatatttcttggaggctttgctcgtttctttttattcttttttctctaaacttcccttctcgcttcatttcattcatttcatcttccatcactgaaaccctttcttccagttgatcgcatcggctcctgaggcttctgcattcttcacgtagttctcgagccttggttttcagctccatcagctcctttaagcacttctctgtattggttattctagttagacattcttctaaatttttttcaaagttttcaacttctttgcctttggtttgaatgtcctcccgtagctcagagtaatttgattgtctgaagccttcttctctcagctcgtcaaagtcattctccgtccagctttgttctgttgctggtgaggaactgcattcctttggaggaggagaggcgctctgctttttagagtttccagtttttctgctctgttttttccccatctttgtggttttatctacttttggtcccccactccttccaccccatattttgccgcctcgaaggacatgaaccatctgctggctgaaggcgcttggaccttccttggctttgtttgcttcactgatcagagttctgtgaatacagtaggtgctcgataaatgcttattctggttattgccattgatgcctgtggcagtaactgcagaccggcaggctccggcagcaacgaggcgtggggctggagggcctggctctggcatccaaccctgctccatctgacacacaagcggtgtgactctggggaagctatgaacctctgcggaactctcagaagtggttcttgaggaacagaatattaaggatggaattcgtgatgaggtggactctagaggatccccacattcacatattttagtcaatactccctcaactattgtagtcatgaccaagttcagaatttccatgatgccatgtccttcacactcaagaatgtcgcagtagtcatatctcttttctggatcagtagtatagcaccagggcccctgcggatcgttgtctggattcctgcagtagttctcctccagtccctctgaggggtgtgtagcaggtgagaatctaggtctgtggggagaagtggaactccatttttgacaggtgatgccattttttgttttggacatcgtccctctgtagttctttccattcccagtcttgcactctgagagatacactttcttttcaaataaaactacatctctcatcctaatgattatggaggacttcctgttttcagccattatcacacattgttgctctttactgtgatattggaatgccctgcaggtgaattcttcgtcctcctcacattttgctgcacattcttctatacttcctgctcccagctgcttcttagtgacactgaacagtgaagccccctgggtattcacatagtcatccagaggctctccttgaccttcataatccatcagcatcgtgaaagcacagagggacgttgagcagagctctgtgctggcgccaccgcactctgtagcatttttttccagacccgcccgtggatttgtctctggagtgaaaatgctgtgtctatggggctcctgggcagcccagtcctggcatggcgtcccagtaacagtggtcgccctcttgcctcggtatcctttcccattcccaaacatacagtcttcttcggaaggagtctctacatctggaagcaggacaacaggcggaggtgctacaacactcgcttctgttcctgagcattttttcaggttgcagtactcccacctgacgctggggtctgtggtaaaacaccaggggcctttatcggcatctggattcctgcagtagttcattgtcaggccagcatttgggtagttttctggggtcttctggtgccggtgtggtgtcatagatgaccaagactgacacttctttcctgtggtggtggtggaggatgtgcctcggtagctctgtccatcaccatggtagcagtcctggaccacaggggttagctcaggtggtgctgtgggagccaattgttccgtggatactggggaggagtcacaggacggtatcttacagtactcccaccgcacttggctgttggttgtatggcaccatggggccctttttccgtcaggattgcggcagtagttttcatccaaatttttgcaggggaagttttctggtgtcctgttatgtgtgtgaggggtctgtgcactccagtgctgacaggtgtgcccggacacggtaacagccacattcccgcgatagttttcacctgttcccttcagacactggtaggtgggaccagaagatggtggaggtgttgtgcagcgggggatgtcacaaagttcccagcgcttgttggggtcggtggtgaaacaccaaggccgcagctccctatcggggttacgacagtaattcttcttcaggttcttgtttggaaatttggaaggaatgtatccatgagcgtgtgggctctgagagtcccaggcctggcattccagtccagacatggtcttggaaattttgccgtcatagttttctccactgcaatgcatacattcctctggacagagtgggaaggaaggacagagaggaagaagaaaacatttgattaactgagcatttgttccatttggatctcccacctctaggtcaaggagagcccctggatgactatgtgaatacccaggggccttcactgttcagtgtcactaagaagcagctgggggcaggaagcagagaagaatgtgcagcaaaatgtgaagaggacaaagaattcacctgcagggcattccaatatcacagtaaagagcaacagtgtgtgataatggctgaaaacaggaagtcctccataatcattaggatgagagatgcagttttatttgaaaagtaaagtgagtacattttcttcctcctcctcctactgtcctccccatcctcccactcttcctctttctctattctatctttaatttatgagaccagaggaggaaggtgctatggtgttgtaaaattgaattctgagttaggacaggatttgattactaactaaccatgtcagcttgagtatattacttcacctcctagatttaatttttttttgttcaa

SEQ ID NO: 146530 - DNA, 511 bp, Homo sapiens
acaccagaaaaggagcctccattatggcatgctgaatttaccaaggaagaattggttcagaagctcagttccaccacaaaaagtgcagatcagttaaacggccctgcttcgggaaacagaggcaacccagtgcagtccttatggagcaaattaagcttctcaaaagtgaaataagaagattggaaaggaatcaagaggagtctgcagctaacgtggaacacttgaagaacgtcttgctgcagttcattttcttgaagccaggtagtgagagagagagccttcttcctgttataaatacgatgttgcagctcagccctgaagaaaagggaaaacttgctgcggttgctcaaggtcttcaagaaacctccatacccaagaaaaaatagaaagcaaccatgttctactatggtgccaaaaatagttgaacatcgacatcaaaaagattctttctgtctgcttattcacatattctggtttgaattaaaagtgatgaaattatcctaaaaaaaaa

SEQ ID NO: 146531 - DNA, 801 bp, Homo sapiens
gtctgagagaatcattaccttaatttgactatctggtctgtggatgcgtttactctcatgtaagtcaacaacatcctgggattgggacacactttctgggcactgctggccagtcccaaaatggaacataaggaagtggttcttctacttcttttatttctgaaatcaggtcaaggagagcctctggatgactatgtaaatgcccagggggcttcactgttcagtgtcactaagaagcagctgggggcaggaagcagagaagaatgtgcagcaaaatgtgaggaggacaaagaattcacctgcagggcattccaatatcacagtaaagagcaacaatgtgtgataatggctgaaaacaagaagtcctccataatcattaggatgagagatgtagttttatttgaaaagtaaatgtatctttcagagtgcaagactgggaatggaaagaactacagagggacgatgtccaaaacaaaaaatggcatcacctgttcaaaaatgggagttccactttttccccacagacctagattctcacctgctacacacccctcagagggactggaggaatccagacaacgatgcgcaggggccctggtgttatactactgattccagaacagagatatgactactgcgacattcctgagtgtgaagggcaggagtgggctctaggaaaatgttttcatttctgctcttcacctgtaaaaattaatttgttgtaaagccccttcccacagggatattattaataattggcgtaacgtgtttccaccttttcgggaaagggtgtcagaaact

SEQ ID NO: 146532 - DNA, 13982 bp, Homo sapiens
ctgggattgggacacactttctgggcactgctggccagtcccataatggaacataaggaagtggttcttctacttcttttatttctgaaatcagcactacctgagcaaagccatgtggtccaggattgctaccatggtgatggacagagttatcaaggcacatcctccaccactgtcacaggaaggacctgccaagcttggtcatctatggaaccacatcagcataatagaaccacagaaaactacccaaatgctggcttgatcaggaactactgcaggaatccagatcctgtggcagccccttattgttatacgatggatcccaatgtcaggtgggagtactgcaacctgacacgatgctcagatgcagaagggactgccgtcgcacctccgaatgtcaccctggttccaagcctagaggctccttccgaacaagcaccgactgagcaaaggcctggggtgcaggagtgctaccatggtaatggacagagttatcgaggcacatactccaccactgtcacaggaagaacctgccaagcttggtcatctatgacaccacactcgcatagtcggaccccagaatactacccaaatgctggcttgatcatgaactactgcaggaatccagatgctgtggcagctccttattgttatacgagggatcccggtgtcaggtgggagtactgcaacctgacgcaatgctcagacgcagaagggactgccgtcgcgcctccgactgttaccccggttccaagcctagaggctccttccgaacaagcaccgactgagcaaaggcctggggtgcaggagtgctaccatggtaatggacagagttatcgaggcacatactccaccactgtcacaggaagaacctgccaagcttggtcatctatgacaccacactcgcatagtcggaccccagaatactacccaaatgctggcttgatcatgaactactgcaggaatccagatgctgtggcagctccttattgttatacgagggatcccggtgtcaggtgggagtactgcaacctgacgcaatgctcagacgcagaagggactgccgtcgcgcctccgactgttaccccggttccaagcctagaggctccttccgaacaagcaccgactgagcaaaggcctggggtgcaggagtgctaccatggtaatggacagagttatcgaggcacatactccaccactgtcacaggaagaacctgccaagcttggtcatctatgacaccacactcgcatagtcggaccccagaatactacccaaatgctggcttgatcatgaactactgcaggaatccagatgctgtggcagctccttattgttatacgagggatcccggtgtcaggtgggagtactgcaacctgacgcaatgctcagacgcagaagggactgccgtcgcgcctccgactgttaccccggttccaagcctagaggctccttccgaacaagcaccgactgagcaaaggcctggggtgcaggagtgctaccatggtaatggacagagttatcgaggcacatactccaccactgtcacaggaagaacctgccaagcttggtcatctatgacaccacactcgcatagtcggaccccagaatactacccaaatgctggcttgatcatgaactactgcaggaatccagatgctgtggcagctccttattgttatacgagggatcccggtgtcaggtgggagtactgcaacctgacgcaatgctcagacgcagaagggactgccgtcgcgcctccgactgttaccccggttccaagcctagaggctccttccgaacaagcaccgactgagcaaaggcctggggtgcaggagtgctaccatggtaatggacagagttatcgaggcacatactccaccactgtcacaggaagaacctgccaagcttggtcatctatgacaccacactcgcatagtcggaccccagaatactacccaaatgctggcttgatcatgaactactgcaggaatccagatgctgtggcagctccttattgttatacgagggatcccggtgtcaggtgggagtactgcaacctgacgcaatgctcagacgcagaagggactgccgtcgcgcctccgactgttaccccggttccaagcctagaggctccttccgaacaagcaccgactgagcaaaggcctggggtgcaggagtgctaccatggtaatggacagagttatcgaggcacatactccaccactgtcacaggaagaacctgccaagcttggtcatctatgacaccacactcgcatagtcggaccccagaatactacccaaatgctggcttgatcatgaactactgcaggaatccagatgctgtggcagctccttattgttatacgagggatcccggtgtcaggtgggagtactgcaacctgacgcaatgctcagacgcagaagggactgccgtcgcgcctccgactgttaccccggttccaagcctagaggctccttccgaacaagcaccgactgagcaaaggcctggggtgcaggagtgctaccatggtaatggacagagttatcgaggcacatactccaccactgtcacaggaagaacctgccaagcttggtcatctatgacaccacactcgcatagtcggaccccagaatactacccaaatgctggcttgatcatgaactactgcaggaatccagatgctgtggcagctccttattgttatacgagggatcccggtgtcaggtgggagtactgcaacctgacgcaatgctcagacgcagaagggactgccgtcgcgcctccgactgttaccccggttccaagcctagaggctccttccgaacaagcaccgactgagcaaaggcctggggtgcaggagtgctaccatggtaatggacagagttatcgaggcacatactccaccactgtcacaggaagaacctgccaagcttggtcatctatgacaccacactcgcatagtcggaccccagaatactacccaaatgctggcttgatcatgaactactgcaggaatccagatgctgtggcagctccttattgttatacgagggatcccggtgtcaggtgggagtactgcaacctgacgcaatgctcagacgcagaagggactgccgtcgcgcctccgactgttaccccggttccaagcctagaggctccttccgaacaagcaccgactgagcaaaggcctggggtgcaggagtgctaccatggtaatggacagagttatcgaggcacatactccaccactgtcacaggaagaacctgccaagcttggtcatctatgacaccacactcgcatagtcggaccccagaatactacccaaatgctggcttgatcatgaactactgcaggaatccagatgctgtggcagctccttattgttatacgagggatcccggtgtcaggtgggagtactgcaacctgacgcaatgctcagacgcagaagggactgccgtcgcgcctccgactgttaccccggttccaagcctagaggctccttccgaacaagcaccgactgagcaaaggcctggggtgcaggagtgctaccatggtaatggacagagttatcgaggcacatactccaccactgtcacaggaagaacctgccaagcttggtcatctatgacaccacactcgcatagtcggaccccagaatactacccaaatgctggcttgatcatgaactactgcaggaatccagatgctgtggcagctccttattgttatacgagggatcccggtgtcaggtgggagtactgcaacctgacgcaatgctcagacgcagaagggactgccgtcgcgcctccgactgttaccccggttccaagcctagaggctccttccgaacaagcaccgactgagcaaaggcctggggtgcaggagtgctaccatggtaatggacagagttatcgaggcacatactccaccactgtcacaggaagaacctgccaagcttggtcatctatgacaccacactcgcatagtcggaccccagaatactacccaaatgctggcttgatcatgaactactgcaggaatccagatgctgtggcagctccttattgttatacgagggatcccggtgtcaggtgggagtactgcaacctgacgcaatgctcagacgcagaagggactgccgtcgcgcctccgactgttaccccggttccaagcctagaggctccttccgaacaagcaccgactgagcaaaggcctggggtgcaggagtgctaccatggtaatggacagagttatcgaggcacatactccaccactgtcacaggaagaacctgccaagcttggtcatctatgacaccacactcgcatagtcggaccccagaatactacccaaatgctggcttgatcatgaactactgcaggaatccagatgctgtggcagctccttattgttatacgagggatcccggtgtcaggtgggagtactgcaacctgacgcaatgctcagacgcagaagggactgccgtcgcgcctccgactgttaccccggttccaagcctagaggctccttccgaacaagcaccgactgagcaaaggcctggggtgcaggagtgctaccatggtaatggacagagttatcgaggcacatactccaccactgtcacaggaagaacctgccaagcttggtcatctatgacaccacactcgcatagtcggaccccagaatactacccaaatgctggcttgatcatgaactactgcaggaatccagatgctgtggcagctccttattgttatacgagggatcccggtgtcaggtgggagtactgcaacctgacgcaatgctcagacgcagaagggactgccgtcgcgcctccgactgttaccccggttccaagcctagaggctccttccgaacaagcaccgactgagcaaaggcctggggtgcaggagtgctaccatggtaatggacagagttatcgaggcacatactccaccactgtcacaggaagaacctgccaagcttggtcatctatgacaccacactcgcatagtcggaccccagaatactacccaaatgctggcttgatcatgaactactgcaggaatccagatgctgtggcagctccttattgttatacgagggatcccggtgtcaggtgggagtactgcaacctgacgcaatgctcagacgcagaagggactgccgtcgcgcctccgactgttaccccggttccaagcctagaggctccttccgaacaagcaccgactgagcaaaggcctggggtgcaggagtgctaccatggtaatggacagagttatcgaggcacatactccaccactgtcacaggaagaacctgccaagcttggtcatctatgacaccacactcgcatagtcggaccccagaatactacccaaatgctggcttgatcatgaactactgcaggaatccagatgctgtggcagctccttattgttatacgagggatcccggtgtcaggtgggagtactgcaacctgacgcaatgctcagacgcagaagggactgccgtcgcgcctccgactgttaccccggttccaagcctagaggctccttccgaacaagcaccgactgagcaaaggcctggggtgcaggagtgctaccatggtaatggacagagttatcgaggcacatactccaccactgtcacaggaagaacctgccaagcttggtcatctatgacaccacactcgcatagtcggaccccagaatactacccaaatgctggcttgatcatgaactactgcaggaatccagatgctgtggcagctccttattgttatacgagggatcccggtgtcaggtgggagtactgcaacctgacgcaatgctcagacgcagaagggactgccgtcgcgcctccgactgttaccccggttccaagcctagaggctccttccgaacaagcaccgactgagcaaaggcctggggtgcaggagtgctaccatggtaatggacagagttatcgaggcacatactccaccactgtcacaggaagaacctgccaagcttggtcatctatgacaccacactcgcatagtcggaccccagaatactacccaaatgctggcttgatcatgaactactgcaggaatccagatgctgtggcagctccttattgttatacgagggatcccggtgtcaggtgggagtactgcaacctgacgcaatgctcagacgcagaagggactgccgtcgcgcctccgactgttaccccggttccaagcctagaggctccttccgaacaagcaccgactgagcaaaggcctggggtgcaggagtgctaccatggtaatggacagagttatcgaggcacatactccaccactgtcacaggaagaacctgccaagcttggtcatctatgacaccacactcgcatagtcggaccccagaatactacccaaatgctggcttgatcatgaactactgcaggaatccagatgctgtggcagctccttattgttatacgagggatcccggtgtcaggtgggagtactgcaacctgacgcaatgctcagacgcagaagggactgccgtcgcgcctccgactgttaccccggttccaagcctagaggctccttccgaacaagcaccgactgagcaaaggcctggggtgcaggagtgctaccatggtaatggacagagttatcgaggcacatactccaccactgtcacaggaagaacctgccaagcttggtcatctatgacaccacactcgcatagtcggaccccagaatactacccaaatgctggcttgatcatgaactactgcaggaatccagatgctgtggcagctccttattgttatacgagggatcccggtgtcaggtgggagtactgcaacctgacgcaatgctcagacgcagaagggactgccgtcgcgcctccgactgttaccccggttccaagcctagaggctccttccgaacaagcaccgactgagcaaaggcctggggtgcaggagtgctaccatggtaatggacagagttatcgaggcacatactccaccactgtcacaggaagaacctgccaagcttggtcatctatgacaccacactcgcatagtcggaccccagaatactacccaaatgctggcttgatcatgaactactgcaggaatccagatgctgtggcagctccttattgttatacgagggatcccggtgtcaggtgggagtactgcaacctgacgcaatgctcagacgcagaagggactgccgtcgcgcctccgactgttaccccggttccaagcctagaggctccttccgaacaagcaccgactgagcaaaggcctggggtgcaggagtgctaccatggtaatggacagagttatcgaggcacatactccaccactgtcacaggaagaacctgccaagcttggtcatctatgacaccacactcgcatagtcggaccccagaatactacccaaatgctggcttgatcatgaactactgcaggaatccagatgctgtggcagctccttattgttatacgagggatcccggtgtcaggtgggagtactgcaacctgacgcaatgctcagacgcagaagggactgccgtcgcgcctccgactgttaccccggttccaagcctagaggctccttccgaacaagcaccgactgagcaaaggcctggggtgcaggagtgctaccatggtaatggacagagttatcgaggcacatactccaccactgtcacaggaagaacctgccaagcttggtcatctatgacaccacactcgcatagtcggaccccagaatactacccaaatgctggcttgatcatgaactactgcaggaatccagatgctgtggcagctccttattgttatacgagggatcccggtgtcaggtgggagtactgcaacctgacgcaatgctcagacgcagaagggactgccgtcgcgcctccgactgttaccccggttccaagcctagaggctccttccgaacaagcaccgactgagcagaggcctggggtgcaggagtgctaccacggtaatggacagagttatcgaggcacatactccaccactgtcactggaagaacctgccaagcttggtcatctatgacaccacactcgcatagtcggaccccagaatactacccaaatgctggcttgatcatgaactactgcaggaatccagatgctgtggcagctccttattgttatacgagggatcccggtgtcaggtgggagtactgcaacctgacgcaatgctcagacgcagaagggactgccgtcgcgcctccgactgttaccccggttccaagcctagaggctccttccgaacaagcaccgactgagcaaaggcctggggtgcaggagtgctaccatggtaatggacagagttatcgaggcacatactccaccactgtcacaggaagaacctgccaagcttggtcatctatgacaccacactcgcatagtcggaccccagaatactacccaaatgctggcttgatcatgaactactgcaggaatccagatgctgtggcagctccttattgttatacgagggatcccggtgtcaggtgggagtactgcaacctgacgcaatgctcagacgcagaagggactgccgtcgcgcctccgactgttaccccggttccaagcctagaggctccttccgaacaagcaccgactgagcaaaggcctggggtgcaggagtgctaccatggtaatggacagagttatcgaggcacatactccaccactgtcacaggaagaacctgccaagcttggtcatctatgacaccacactcgcatagtcggaccccagaatactacccaaatgctggcttgatcatgaactactgcaggaatccagatgctgtggcagctccttattgttatacgagggatcccggtgtcaggtgggagtactgcaacctgacgcaatgctcagacgcagaagggactgccgtcgcgcctccgactgttaccccggttccaagcctagaggctccttccgaacaagcaccgactgagcagaggcctggggtgcaggagtgctaccacggtaatggacagagttatcgaggcacatactccaccactgtcactggaagaacctgccaagcttggtcatctatgacaccacactcgcatagtcggaccccagaatactacccaaatgctggcttgatcatgaactactgcaggaatccagatgctgtggcagctccttattgttatacgagggatcccggtgtcaggtgggagtactgcaacctgacgcaatgctcagacgcagaagggactgccgtcgcgcctccgactgttaccccggttccaagcctagaggctccttccgaacaagcaccgactgagcagaggcctggggtgcaggagtgctaccacggtaatggacagagttatcgaggcacatactccaccactgtcactggaagaacctgccaagcttggtcatctatgacaccacactcgcatagtcggaccccagaatactacccaaatgctggcttgatcatgaactactgcaggaatccagatgctgtggcagctccttattgttatacgagggatcccggtgtcaggtgggagtactgcaacctgacgcaatgctcagacgcagaagggactgccgtcgcgcctccgactgttaccccggttccaagcctagaggctccttccgaacaagcaccgactgagcagaggcctggggtgcaggagtgctaccacggtaatggacagagttatcgaggcacatactccaccactgtcactggaagaacctgccaagcttggtcatctatgacaccacactcgcatagtcggaccccagaatactacccaaatgctggcttgatcatgaactactgcaggaatccagatgctgtggcagctccttattgttatacgagggatcccggtgtcaggtgggagtactgcaacctgacgcaatgctcagacgcagaagggactgccgtcgcgcctccgactgttaccccggttccaagcctagaggctccttccgaacaagcaccgactgagcagaggcctggggtgcaggagtgctaccacggtaatggacagagttatcgaggcacatactccaccactgtcactggaagaacctgccaagcttggtcatctatgacaccacactcgcatagtcggaccccagaatactacccaaatgctggcttgatcatgaactactgcaggaatccagatcctgtggcagccccttattgttatacgagggatcccagtgtcaggtgggagtactgcaacctgacacaatgctcagacgcagaagggactgccgtcgcgcctccaactattaccccgattccaagcctagaggctccttctgaacaagcaccaactgagcaaaggcctggggtgcaggagtgctaccacggaaatggacagagttatcaaggcacatacttcattactgtcacaggaagaacctgccaagcttggtcatctatgacaccacaccggtcatcagaggaccccagaaaactacccaaatgatggcctgacaatgaactactgcaggaatccagatgccgatacaggcccttggtgttttaccacagaccccagcgtcaggtgggagtactgcaacctgacgcgatgctcagatgcagaatggactgccttcgtccctccgaatgttattctggctccaagcctagaggctttttttgaacaagcactgactgaggaaacccccggggtacaggactgctactaccattatggacagagttaccgaggcacatactccaccactgtcacaggaagaacttgccaagcttggtcatctatgacaccacaccagcatagtcggaccccagaaaactacccaaatgctggcctgaccaggaactactgcaggaatccagatgctgagattcgcccttggtgttacaccatggatcccagtgtcaggtgggagtactgcaacctgacacaatgcctggtgacagaatcaagtgtccttgcaactctcacggtggtcccagatccaagcacagaggcttcttctgaagaagcaccaacggagcaaagccccggggtccaggattgctaccatggtgatggacagagttatcgaggctcattctctaccactgtcacaggaaggacatgtcagtcttggtcctctatgacaccacactggcatcagaggacaacagaatattatccaaatggtggcctgaccaggaactactgcaggaatccagatgctgagattagtccttggtgttataccatggatcccaatgtcagatgggagtactgcaacctgacacaatgtccagtgacagaatcaagtgtccttgcgacgtccacggctgtttctgaacaagcaccaacggagcaaagccccacagtccaggactgctaccatggtgatggacagagttatcgaggctcattctccaccactgttacaggaaggacatgtcagtcttggtcctctatgacaccacactggcatcagagaaccacagaatactacccaaatggtggcctgaccaggaactactgcaggaatccagatgctgagattcgcccttggtgttataccatggatcccagtgtcagatgggagtactgcaacctgacgcaatgtccagtgatggaatcaactctcctcacaactcccacggtggtcccagttccaagcacagagcttccttctgaagaagcaccaactgaaaacagcactggggtccaggactgctaccgaggtgatggacagagttatcgaggcacactctccaccactatcacaggaagaacatgtcagtcttggtcgtctatgacaccacattggcatcggaggatcccattatactatccaaatgctggcctgaccaggaactactgcaggaatccagatgctgagattcgcccttggtgttacaccatggatcccagtgtcaggtgggagtactgcaacctgacacgatgtccagtgacagaatcgagtgtcctcacaactcccacagtggccccggttccaagcacagaggctccttctgaacaagcaccacctgagaaaagccctgtggtccaggattgctaccatggtgatggacggagttatcgaggcatatcctccaccactgtcacaggaaggacctgtcaatcttggtcatctatgataccacactggcatcagaggaccccagaaaactacccaaatgctggcctgaccgagaactactgcaggaatccagattctgggaaacaaccctggtgttacacaaccgatccgtgtgtgaggtgggagtactgcaatctgacacaatgctcagaaacagaatcaggtgtcctagagactcccactgttgttccagttccaagcatggaggctcattctgaagcagcaccaactgagcaaacccctgtggtccggcagtgctaccatggtaatggccagagttatcgaggcacattctccaccactgtcacaggaaggacatgtcaatcttggtcatccatgacaccacaccggcatcagaggaccccagaaaactacccaaatgatggcctgacaatgaactactgcaggaatccagatgccgatacaggcccttggtgttttaccatggaccccagcatcaggtgggagtactgcaacctgacgcgatgctcagacacagaagggactgtggtcgctcctccgactgtcatccaggttccaagcctagggcctccttctgaacaagactgtatgtttgggaatgggaaaggataccggggcaagaaggcaaccactgttactgggacgccatgccaggaatgggctgcccaggagccccatagacacagcacgttcattccagggacaaataaatgggcaggtctggaaaaaaattactgccgtaaccctgatggtgacatcaatggtccctggtgctacacaatgaatccaagaaaactttttgactactgtgatatccctctctgtgcatcctcttcatttgattgtgggaagcctcaagtggagccgaagaaatgtcctggaagcattgtaggggggtgtgtggcccacccacattcctggccctggcaagtcagtctcagaacaaggtttggaaagcacttctgtggaggcaccttaatatccccagagtgggtgctgactgctgctcactgcttgaagaagtcctcaaggccttcatcctacaaggtcatcctgggtgcacaccaagaagtgaacctcgaatctcatgttcaggaaatagaagtgtctaggctgttcttggagcccacacaagcagatattgccttgctaaagctaagcaggcctgccgtcatcactgacaaagtaatgccagcttgtctgccatccccagactacatggtcaccgccaggactgaatgttacatcactggctggggagaaacccaaggtacctttgggactggccttctcaaggaagcccagctccttgttattgagaatgaagtgtgcaatcgctatgagtttctgaatggaagagtccaatccaccgaactctgtgctgggcatttggccggaggcactgacagttgccagggtgacagtggagggcctctggtttgcttcgagaaggacaaatacattttacaaggagtcacttcttggggtcttggctgtgcacgccccaataagcctggtgtctatgttcgtgtttcaaggtttgttacttggattgagggagtgatgagaaataattaattggacgggagacagagtgacgcactgactcacctagaggctgggacgtgggtagggatttagcatgctggaaataactggcagtaatcaaacgaagacactgtccccagctaccagctacgccaaacctcggcatttttggtatttttgtgtataagcttttaaggtctgactgacaaattctgtattaaggtgtcatagctatgacatttgttaaaaataaactctgtacttaactttgatttgagtaaattttggtttt

SEQ ID NO: 146533 - DNA, 2122 bp, Homo sapiens
  misc_feature (1)...(2122): n = a,t,c or g
gtctgagagaatcattaacttaatttgactatctggtctgtggatgcgtttactctcatgtaagtcaacaacatcctgggattgggacacactttctgggcactgctggccagtcccaaaatggaacataaggaagtggttcttctacttcttttatttctgaaatcaggtcaaggagagcccctggatgactatgtgaatacccaggggccttcactgttcagtgtcactaagaagcagctgggggcaggaagcagagaagaatgtgcagcaaaatgtgaagaggacaaagaattccnccctgcaggggcattcccaatatcacagtaaagagcaacaatgtgtgataatggctgaaaacaggaagtcctcccataattcattagggtgagagatgcagttttatttggaaaaggtaaatgtattcttttcagagtgcaagacttgggaatggaaagaactacagagggacgatgtccaaaacaaaaaatggcatcaccttgtcaaaaatgggagttccacttctcccccgcagacctaggtcagactttccctttcatctttgtgttcatctactgtaaagttgtccctctgtgtctgtgagggattgggttccaggacccctgtgggctaaccaaaattccatgcttctcaagtcccttatgtaaaatggtgccagtatttgcatataacctacataccttctcttgtgcaatccctaatataatgtaaatgctatgtaatcgttgttatactgtattgtttttatttgtattatgttttattgtccatattgttattttcctcctcatcctttttcaagtcttttcccatcccacagttggttgaatttgtggatgtggaacccatggatacagagggcccaactgtatttaggataatttccatcaccttttaattccaaacccagaatatgtgaataagccagaccagaaagaatctttttgatgtcgatgttcaacctatttttggcacccatagtagaacatggttgctttctattttttcttgggtatggaggtttgttgaagaccctagaacatagaagaatgccctagttaaaaaaaaaaaatcaatgaaactacgagttttaggccaaatctgagaaaagaccaaagatgactatgtttgggactgaagtaaacatatcaagttagaactctcatcacatgtttgactcaaattgtggagcaaaatagtaaataaaatataaaaatgaaaatgaagatacgtgaaattcaaatgtcacaacttgccctattatttattttagtgccatttttttgtgccttttccccagtttggtgttaggtggccttaagttctcagtaatgacacttatcaaataggaacttagtgttactcacctttatccattcccccaacactcaacaaattgcctttgctatatcccttatgagatgagcagatcaaatattccccgtgagttaatgaaaactgattcaaccaaatggcgaagtcaggagactatcgggggccatggagacagctctgggccatttttatgaggtagtctaggctcatcttcatgagggaactgaggtcttggggggcgggggttacccaaataggtttcacagaagaaccagaaataaaacctgcctttctaggactgtaagtctttgtgattgtcatctaaatgggttgtctctattacaggcaactcatctctagaaacttgaaaataagtttaaatccctcctccatccccaataattcaagctgcatttcagagaaaaccagggactttggaatcagacagatcaactttgaattcttgatctgcttcttcataggctatttatggcttagggcaagttttgttttgttttgtttttacgttggccactcagtcttctcatctgtaaaacagggataataacaccttcctcaaatggttttttttattaggactaaaagagagaatgtgtggaaagatgttagtggaattcctgggcacatagttcacatggacaaaatggtgttaactacgaaaatttttacagagaaaagggcaactgacaaaagcaggtgtttggaatgaattaagaccatggcaggcttttgaggcctttatatt

SEQ ID NO: 146534 - DNA, 912 bp, Homo sapiens
tttttttttttcaaataaggcgggaattttcaaatcagtagatatttcttaaagaaactgtcatgagatttgagaacaacatgtattgagccacagctgaaggactgagaatatgatttctgcaaagcgcacagaagaggcagggcccaggctatggcaggccagctggtaggcaggtgaagccagatgggaatcccagagtgcccatctaaagccagaatttggaggcccgacaggccccaacaacgcccaaagccctcccagagaggcagatgctcagcaggtgtggagggaaccccctggccctgcttccaaggcccctcactcacctccagtggggtattcgtctccaggacatgagtctcatctccttcctggtgatgaccctgccaaagatgggtcctgccctcccatttcccttcccattggggatcgaagcacccgtgcctggccccagaaaaagaatcaggacatgctgctgtatgaattaatgaattatgggcagagggacgtggttaaacaaaaaaaagaaaagaaacatttggggacaataaaatcgaaatgcatttggaggctggagaatgggaaactcagtcttttcagagagaagcgtgaggaacaggaaatggaagctggaaactgtaggtggtgaaaagttctagtttcatgcgaaaagaacttcagctttatagtttaagtagagaagagcaatccaaagatttttaatgtaagaaataattggtccaattttcatttcatgctcaggcatttagattttatgttgaggacatgaaatttgacaggtttgaagctgggagtgccatgattaaaagtgggtgccttgctaaaatggtgaggctttttgtagtgatgaaaacacgttgagattttaagcaagagtttcataatttg

SEQ ID NO: 146535 - DNA, 738 bp, Homo sapiens; identical to SEQ ID NO: 144625

SEQ ID NO: 146536 - DNA, 1026 bp, Homo sapiens; identical to SEQ ID NO: 144626

SEQ ID NO: 146537 - DNA, 2835 bp, Homo sapiens
atgactcttaacgagcatgctgccttcaagcatctgtttaacaaagcacatcttgcaccgcccttaatccatttaaccctgagtggacacagcacatgtttcagagagcacagggttgggggccccacatatttgggtattgtgacatacccaaatgtgacactgggctcaacacctaagggacgggagttctctacctggccccttcctgaagggggcattgtgacatacttctgcacaggtatatgtcctcattttcctcaagacttttggccagagcagagcatggaagattcttttcaaaaagtattactgagaaaacatgaaaaatgtggacatgagaatttacagttaagaaaaggttgtaaaagtgtggatgagtgtaaggtgcacaaagaaggttataataaacttaaccagtgtctcacaactgcccagagcaaagtatttcaatgtgggaaatatttgaaagtcttctataaatttttaaattcaaacagacatacgataagacatactggaaagaaatgcttcaaatgtaaaaaatgtgtcaagtcattttgcatccgtttacacaaaacccaacataaatgcgtttatattacagagaagtcctgtaaatgtaaagaatgtgaaaaaacctttcattggtcctcaacccttactaatcataaggaaattcatactgaagataaaccctacaaatgtgaagaatgtggcaaagcttttaagcagctctcaacccttactacacataaaataatttgtgctaaagagaaaatctacaagtgtgaagaatgtggcaaagcatttctatggtcctcaaccctaactagacataagaggatacacactggagagaaaccctacaaatgtgaagaatgtggcaaagcttttagccattcttcaacccttgctaaacataagagaattcatactggagagaaaccctacaaatgtgaagaatgtggcaaagcttttagccgttcttcaacccttgctaaacataagagaattcatactggagagaaaccctacaaatgtaaagaatgtggcaaagcttttagcaattcctcaacccttgctaatcataagataactcatactgaagagaaaccctacaaatgtaaagaatgtgacaaagcttttaagcgactctcaacccttactaaacataaaataatacatgctggagagaaactctacaaatgtgaagaatgtggcaaagcttttaatcgatcttcaaatcttactatacataagtttattcatactggagagaaaccttacaagtgtgaagaatgtggcaaagcatttaactggtcctcaagccttactaaacataaaagatttcatactagagagaaacccttcaaatgtaaagaatgtggcaaagcatttatatggtcttcaaccctaactagacataagaggatacacactggagagaagccctacaaatgtgaagaatgtggcaaagcttttagccgttcctcaacccttactaagcataagacaattcatactggagagaaaccctacaaatgtaaagaatgtggcaaagcttttaagcactcctcagcccttgctaaacataaaataatacatgctggagagaaactctacaaatgtgaggaatgtggcaaagcttttaatcaatcttcaaatcttacgacacataagataattcatactaaagagaaaccttccaagagtgaagaatgtgacaaagcatttatctggtcctcagcccttactgaacataagagaattcataccagagagaaaacctacaaatgtgaagaatgtggcaaagcatttagccagccttcacaccttactacacataagaggatgcacactggagagaaaccctacaaatgtgaagaatgtggcaaagcttttagccaatcctcaacccttactacacataagataattcatactggagagaaaccctacaaatgtgaagaatgtggcaaagcttttaggaaatcttcaactcttactgaacataagataattcatactggagagaaaccctacaaatgtgaagaatgtggcaaagcatttagccaatcctcaaccctaactagacatacgaggatgcacactggagagaaaccatacaaatgtgaagaatgtggcaaagcttttaatcgatcctcaaagcttactacacataagataattcatactggagagaaaccttacaagtgtgaagaatgtggcaaagcatttatatcatcctcaaccctaaatggacataagagaattcatactagagagaaaccctacaaatgtgaagaatgtggcaaagcatttagccaatcttcaaccctaactagacataagaggttgcacaccggagagaaaccctacaaatgtggagaatgtggcaaagcctttaaagagtcctcagctcttactaaacataagataattcacactggagagaaaccctacaaatgtgaaaaatgtggcaaagcctttaaccagtcttcaatccttactaaccataagaaaattcatactatcacacctaaaattcatactagagagaaaccctacaaatataaagaatgtggcaaatcttttaaccggtcttcaacctttactaaacataaggtaattcatactggagtaaaactctacaaatgtgaagaatgtggcaaatcctttttctggtcctcagccctaaccagacataagaaaattcatactggacagcaaccctacaaacaggaaaaatttggcaaagcctttaaccagttttcacaccttactacagataagataactcatattggagagaaatcttacaagtgtgaataa

SEQ ID NO: 146538 - DNA, 4151 bp, Homo sapiens
ccggaattcccgtttcgacgatttcgtagtttccaggtctcgacttcactgctctgtgtcctctgctccaggaggcccagcctgtgtggccctgtgacctgcaggtattggaagagccacagctaagatgccaggaacccctggaagcctagaaatgggactgttgacatttagggatgtggccatagaattctctccggaggagtggcaatgtctggacactgcacagcagaatttatataggaatgtgatgttagagaactacagaaacctggccttcctgggtattgctctctctaagccagacctgattacttatctggagcaaggaaaagagccctggaatatgaagcaacatgagatggtggatgaacccacaggtatatgtcctcattttcctcaagacttttggccagagcagagcatggaagattcttttcaaaaagtattactgagaaaatatgaaaaatgtggacatgagaatttacagttaagaaaaggttgtaaaagtgtggatgagtgtaaggtgcacaaagaaggttataataaacttaaccagtgtctcacaactgcccagagcaaagtatttcaatgtgggaaatatttgaaagtcttctataaatttttaaattcaaacagacatacgataagacataccggaaagaaatgcttcaaatgtaaaaaatgtgtcaagtcattttgcatccgtttacacaaaaacccaacataaatgcgtttatattacagagaagtcctgtaaatgtaaagaatgtgaaaaaaccctttcatgggtcctcaacccttactaatcataaggaaattcatactgaagataaaccctacaaatgtgaagaatgtggcaaagcttttaagcagctctcaacccttactacacataaaataatctgtgctaaagagaaaatctacaagtgtgaagaatgtggcaaagcatttctatggtcctcaaccctaactagacataagaggatacacactggagagaaaccctacaaatgtgaagaatgtggcaaagcttttagccattcttcaacccttgctaaacataagagaattcatactggagagaaaccctacaaatgtgaagaatgtggcaaagcttttagccattcttcagcccttgctaaacataagagaattcatactggagagaaaccctacaaatgtaaagaatgtggcaaagcttttagcaattcctcaacccttgctaatcataagataactcatactgaagagaaaccctacaaatgtaaagaatgtgacaaaacttttaagcgactctcaacccttactaaacataaaataatacatgctggagagaaactctacaaatgtgaagaatgtggcaaagcttttaatcgatcttcaaatcttactatacataagtttattcatactggagagaaaccttacaagtgtgaagaatgtggcaaagcatttaactggtcctcaagccttactaaacataaaagatttcatactagagagaaacccttcaaatgtaaagaatgtggcaaaggatttatatggtcttcaaccctaactagacataagaggatacacactggagagaagccctacaaatgtgaagaatgtggcaaagcttttaggcaatcctcaacccttactaaacataagataattcatactggagagaaaccctacaaatttgaagaatgtggcaaagcttttagacaatccttaacccttaataaacataagataattcatagtagagagaaaccctacaaatgtaaagaatgtggcaaagcttttaagcaattctcaacccttactacacataaaataattcatgctggaaagaaactctacaaatgtgaagaatgtggcaaagcttttaatcattcctcaagtctttctacacataagataattcatactggagagaagtcttacaagtgtgaagaatgtggcaaagcatttctatggtcctcaaccctaagaagacataagaggatacacactggagagaaacccctacaaatgtgaaagaatgtggcaaagcttttagccattcttccagcccttgctaaacataagagaattcatactggagagaaaccctacaaatgtaaagaatgtggcaaagcttttagcaattcctcaacccttgctaatcataagataactcatactgaagagaaaccctacaaatgtaaagaatgtgacaaaacttttaagcgactctcaacccttactaaacataaaataatacatgctggagagaaactctacaaatgtgaagaatgtggcaaagcttttaatcgatcttcaaatcttactatacataagtttattcatactggagagaaaccttacaagtgtgaagaatgtggcaaagcatttaactggtcctcaagccttactaaacataaaagaattcatactagagagaaacccttcaaatgtaaagaatgtggcaaagcatttatatggtcttcaaccctaactagacataagaggatacacactggagagaagccctacaaatgtgaagaatgtggcaaagcttttagccgttcctcaacccttactaagcataagacaattcatactggagagaaaccctacaaatgtaaagaatgtggcaaagcttttaagcactcctcagcccttgctaaacataaaataatacatgctggagagaaactctacaaatgtgaggaatgtggcaaagcttttaatcaatcttcaaatcttacgacacataagataattcatactaaagagaaaccttccaagagtgaagaatgtgacaaagcatttatctggtcctcaacccttactgaacataagagaattcataccagagagaaaccctacaaatgtgaagaatgtggcaaagcatttagccagccttcacaccttactacacataagaggatgcacactggagagaaaccctacaaatgtgaagaatgtggcaaagcttttagccaatcctcaacccttactacacataagataattcatactggagagaaaccctacaaatgtgaagaatgtggcaaagcttttaggaaatcttcaactcttactgaacataagataattcatactggagagaaaccctacaaatgtgaagaatgtggcaaagcatttagccaatcctcaaccctaactagacatacgaggatgcacactggagagaaaccatacaaatgtgaagaatgtgggaaagcttttaatcgatcctcaaagcttactacacataagataattcatactggagagaaaccttacaagtgtgaagaatgtggcaaagcatttatatcatcctcaaccctaaatggacataagagaattcatactagagagaaaccctacaaatgtgaaggatgtgggcaaagcatttagccaatctttcaacccttaactggacataagaggttgcacaccggagagaaaccctacaaatgtggagaatgtggcaaagcctttaaagagtcctcagctcttactaaacataagataattcacactggagagaaaccctacaaatgtgaaaaatgttgcaaagcctttaaccagtcttcaatccttacttaaccataagaaaattcatactatcacacctaaaattcatactagagagaaaccctacaaatataaagaatgtggcaaatcttttaaccggtcttcaacctttactaaacataaggtaattcatactggagtaaaactctacaaatgtgaagaatgtggcaaatcctttttctggtcctcagccctaaccagacataagaaaattcatactggacagcaaccctacaaacaggaaaaatttggcaaagcctttaaccagttttcacaccttactacaagataagataactcatattggagagaaatcttacaagtgtgaataatgtggtaaagtctataaaaagtcctgaattcttaacagacataatattattcatactggagagaaactctacaaacctgaaagatgtgccaacgcttttgacaagtcaaacttttctaaacatcaagaaaatcatgctgctgagaaatcctagaaatgtgaagaatgtgacaaagcctctaaatgattgtcacacttgatcgtaggtaagataattcatactggagaaaactaccagtgtgaa

SEQ ID NO: 146539 - DNA, 891 bp, Homo sapiens; identical to SEQ ID NO: 141392

SEQ ID NO: 146540 - DNA, 1530 bp, Homo sapiens
atgccatattacgacgtttgtgccgaggctccctgtgaacagcagtgcacggacaactttggccgagtgctgtgtacttgttatccgggataccgatatgaccgggagagacaccggaagcgggagaagccatactgtctgggctgctctgatcaaggtcggcccaagtgtccttcattgttattaacagagaggcaaagcccaatgtcatctgttgtattagaagtgaattctcagaaacttagtattctctacatttggttcaaaccagatattgatgagtgtgccagcagcaatgggacgctgtgtgcccacatctgcatcaataccttgggcagctaccgctgcgagtgccgggaaggctacatccgggaagatgatgggaagacatgtaccaggggagacaaatatcccaatgacactggccatgagaagtctgagaacatggtgaaagccggaacttgctgtgccacatgcaaggagttctaccagatgaagcagaccgtgctgcagctgaagcaaaaggtacgtgccgctggggtgggaacgatgatgcctgatggaaggagggcttggccaaggccaggtggaaggatatttacaaataagaaaatatccacattgagcattcacgcagttgatgccacggaggaaatatttgagagtgtaggagatcgagagctaagacaagtctttgaaggacagaatcgtattcatcttgaaatcaagcagctgaaccggcagttagatatgattcttgatgaacagagaagatatgtctcttccttaacagaggaaatctctaaaagaggagcaggaatgcctgggcagcatgggcagattactcaacaagaactggatactgttgtgaaaactcagcatgagattctgagacaagtaaatgaaatgaaaacccttgacaaacaagaatgtcaagaaggaaaactaacaaccagaaaggacatctacaccgaaaacccatctgtacatcaccatcatcaaagaccaaaagtagataaaaccacaaagatggggaaaaaacagaacagaaaaactggaaactctaaaacgcagagcgcctctcctcctccaaaggaacgcagttcctcaccagcaacggaacaaagctggatggagaatgattttgacgagctgagagaagaaggcttcagacgatcaaattactctgagctacgggaggacattcaaaccaaaggcaaagaagttgaaaactttgaaaaaaatttagaagaatgtataactagaataaccaatacagagaagtgcttaaaggagctgatggagctgaaaaccaaggctcgagaactacgtgaagaatgcagaagcctcaggagccgatgcgatcaactggaagaaagggtatcagcgatggaagatgaaatgaatgaaatgaagcgagaagggaagtttagagaaaaaagaataaaaagaaatgagcaaagcctccaagaaatatgggactcttcgggtggcctgccagccatctttgcactgtgccttggctcatag

SEQ ID NO: 146541 - DNA, 3727 bp, Homo sapiens
  misc_feature (1)...(3727): n = a,t,c or g
cccacgcgtncgccagaatccaagatggcgggatccaggcataggggtctccgggccagagttcggccgctgttctgcgccttgctgctgtcactcggtcgcttcgtccggggcgacggcgtgggaggagaccccgcggtcgcgttgccacatcgccgtttcgagtacaaatacagcttcttgtgggccgcacctggtgcagagcgacgggaccgtgcccttctgggcccacgcgggtatttgctatttcaagttcagatcaaattcgagtagcaccatctttaaaaagccaaagaggctcagtgtggacaaagacaaaaagcggcctttgagaactgggaagttgaggtgacatttcgagtgactggaagaggtcggattggagctgatggcctagcaatttggtatgcagaaaatcaaggcttggagggccctgtgtttggatcagctgatctgtggaatggtgttggaatattttttgattcttttgacaatgatggaaagaaaaataatcctgctatagtaattataggcaacaatggacaaatccattatgaccatcaaaatgacggggctagtcaagctttggcaagttgccagagggacttccgcaacaaaccctatcctgtcccgagcaaagattacctatttaccagaacacacttgacagtaatgatccaataatgggctttacaccagataaaaatgattatgaattttgtgccaaagtggaaaatatgattatccctgcacaagggtattttggaatatctgctgcaactggaggtcttgcagatgaccatgatgtcctttcttttctgactttccagttgactgaacctggaaaagagccgcccacaccagataaagaaatttcggaaaaggaaaaagaaaagtatcaggaggaatttgagcactttcaacaagaattggataaaaaaaaagaggaattccagaagggccacccccgaccttccaatggcagcctgcggaggaaatatttgagagtgttagagatccgagagctaagacaagtctttgaaggacagaatcgtattcatcttgaaatcaagcagctgaaccggcagttagatatgattcttgatgaacagagaagatatgtctcttccttaacagaggaaatctctaaaagaggagcaggaatgcctgggcagcatgggcagattactcaacaagaactggatactgttgtgaaaactcagcatgagattctgagacaagtaaatgaaatgaaaaattccatgagtgcaacccgtaagactggtcagtggaatgcagcaccctggctctggctggaggcgtctatggggacaacacagcacttcattgacatccaaagagcacctgcacattagtaaagagggaacatagataacttagtgcagcgaaatatgcccatcaaatgaaaagccgaaatgcccagaactaccaccatttccatcatgtttgtctacggtccactttcaatatatttgttgtggtgcaaactgtaattattcattggttatatcatgtataggtctcagcaagaagcagctgccaaaaaaattcttttgactaccattttcctgtgtacttcatctatttgtgtacaaaatgatgtcgttttgagggaatttaagtatttaaattgcttcatagtctaaattattaattttcttaataaaataactgtttaaacattgatttgcagttaagaataaaccttaaagcaaagacaaccacattttaatttgttcacagtatgtaaatctgtctaaatttcagtgaatttctggtcagtatgatgcagcctctgagcagaatattgaccaagtaagagggtaaataaagtgggggcaacccctgggataatgaatgttaccccctaagtctccaatattgcaggtttcccctggtataacgtaaacacacttgccctcatgcctcccagaatatgaggtctaattaagaagtcccatcaggtttattttgtaaccaaagtcttttttagaggtcagacttcctaatcaaaggcctgggcctgcagtccctttcatcttaatgcaacttcctttgaaatcaaagaatattttgtctgagagctttaaggatctggtaatagacttcaaaatgttaagtgaaattttttttttcctctatttatcaatgatatatttcacttttaaaggaaattttagaggaaaattaatagctgctttttgcactaaaaaaccttgtgggtggaaatattcctctgagaatggcttttataggtattttgcctggtaatgtattcattcatgattgcccatattcttgaatgtttcttcattccaatggggtcaggtcaatattatgaaaataatttttatatttatatttgtaacttaaggaatttatttctccctttactacagcatgtaaattcagctcaaattgcatgatctgaggatttaaattcacaaaacctgccactacattctggtttacattagttacttcatgctggctggggttagtgaccatttgcatactcttttaaatcaaggagggctgtagtagaagcagttttaagattcttgaagggcaaaatttgaaaaaccagtgaatacttcctaattgttttccttttagtgccagaactaagggacattgtgaagcacttgttagtaaacttaaccttgaaatgtcagactggaaggagtttttatagtctttgtgcatacttctaggtattacagaaacagtctgtaaatgacattttaagatgcaaatttaaatcttgttcccagctgaattaaactgatttttgctgccttcaaaatactcttttacttcttttagctaaaatggttgtctttcatttgccataggaattccaaacaatactatcttataaaataggtactgttggaattattccaaggcctccctagggtttgctctcaaatgtcatttacaggattggggctaacggacctaaaatctatgatataaaggactttctgaagaactctgtattatagcaataccaaacgagtgctgtgtgtgcaaacagtctggcgttgctttttatgttgatatttatcctaaaacactgaaagagaatatgccagtggataactcactttacttcagtcatttcaacacagaaaatgcttctctagcatttttcttttgtagtgttaacattttgaaattcatgtttcagaggcttcatcatcacaggaatttactcttgctccatgaaaaaaaattaaatacccttcagagggaatatttaaggttgtaaactatggaaacttgaggaaatcctcttgagataaaaggctgccaaatccagtattataaagtccatggtcatatgtgcctgtgcattaaaggaataccagatctatgcagtatacctttttcaggctgaaattcaagggggaatcattctgattattcttactacaaatggagatggctattatgaaacagcatgagcatgagccttttatcttttatacttagtgatatacttttgcttgaaaatcactcagccaaagtagttcacatgatgtgtatcatatttgaagtgtggtttttctcaaaatcattgactttaaggagctcatttctgaacaaaaaggtttgctctgtgggaaaaatccaatcactgccaggattctttcatttctgtactattttgtataattgaatttgttcacttctctcacac

SEQ ID NO: 146542 - DNA, 489 bp, Homo sapiens
  misc_feature (1)...(489): n = a,t,c or g
ttttcanctccataattgaaaaacctcaggatttagaaagngtaccaagtnatatctttgtcttgtggcccntcggcttcaaaagtttcatggcatacaaatcaagacactgtgacggttgaagccctgccttgctcaagttcatctacaagccaacattcttcaaaggatccgtttnaaagactngggttcctgccaatagcgtaaggaaggtggattcctttctctcttgatttgatgggtggcttggggctttccttgcgtagtctctcttcagcgagtccagcaatnttccgaccagcgcacgccccagtaggagccgcaggactgggacccgcgtctccccaaggaccgctctaggagttgcgccaggttccggccgcactggaccgcgcactcntgaccctggagggcgggagcgctgcgactgcgcccccggggaccacggaccggtgccaacctaagcagcccggaacctgccccgcgccg

SEQ ID NO: 146543 - DNA, 1659 bp, Homo sapiens
atgagcgaggatgcctctccaccagcaaaagatccaggtgcaaagagcactgaaggcatcttggaggtccaggcaatcatcgacctgctttctgtcactgcagactgtcaaaacctatggctgctgaagcatcttatggccaatggaagctgccttaccaggaccaagatggcgacctcgggagctcggactcctacgcagtcaccgggaagggccgccgccccgcccgcggctgctggcccgggtgacacttccgcctgctataagagcagcggccctcggtgcctccttcctgacctcgcacccagctcggagcccggagcgtgcctcggcggcctgtcggttttcaccatggagcagctgagctcagcaaacacccgcttcgccttggacctgttcctggcgttgagtgagaacaatccggctggaaacatcttcatctctcccttcagcatttcatctgctatggccatggtttttctggggaccagaggtaacacggcagcacagctgtccaaggagttcttggtttcgactcagaaaacatatggtgctgacctggccagtgtggattttcagcatgcctctgaagatgcaaggaagaccataaaccagtgggtcaaaggacagacagaaggaaaaattccggaactgttggcttcgggcatggttgataacatgaccaaacttgtgctagtaaatgccatctatttcaagggaaactggaaggataaattcatgaaagaagccacgacgaatgcaccattcagattgaataagctgctggcccgggtacgaagccccttactggtcgctctaagtgcagggcctgctgagcccgcccacgcctgcgcccacctggaactcatgctggcctgtgagtgtggcgcgcagtcccggttcccacctgcgcctctccctctacacctctcctctccctccacacttcccggtaaaattgaagagttgttgccgggtagctcaattgatgcagaaaccaggctggttcttgtcaatgccatctacttcaaaggaaagtggaatgaaccgtttgacgaaacatacacaagggaaatgccctttaaaataaaccaggaggagcaaaggccagtgcagatgatgtatcaggaggccacgtttaagctcgcccacgtgggcgaggtgcgcgcgcagctgctggagctgccctacgccaggaaggagctgagcctgctggtgctgctgcctgacgacggcgtggagctcagcacggtggaaaaaagtctcacttttgagaaactcacagcctggaccaagccagactgtatgaagagtactgaggttgaagttctccttccaaaatttaaactacaagaggattatgacatggaatctgtgcttcggcatttgggaattgttgatgccttccaacagggcaaggctgacttgtcggcaatgtcagcggagagagacctgtgtctgtccaagttcgtgcacaagagttttgtggaggtgaatgaagaaggcaccgaggcagcggcagcgtcgagctgctttgtagttgcagagtgctgcatggaatctggccccaggttctgtgctgaccaccctttccttttcttcatcaggcacaacagagccaacagcattctgttctgtggcaggttctcatcgccataa

SEQ ID NO: 146544 - DNA, 589 bp, Homo sapiens
ttgaaaacagaagtttgcttctcaactaatgatccaggatcatccaatgcatcaggttcttataaaaagcaactgaatgtagtctctacttttcttgaaaggtaaaattgaagagttgttgccgggtagctcaattgatgcagaaaccaggctggttcttgtcaatgccatctacttcaaaggaaagtggaatgaaccgtttgacgaaacatacacaagggaaatgccctttaaaataaaccaggtgggggaagctttttaaaatcctgctagtttgatgaagaagttgaatggaaagatttaactttgtaaaagtgtaagtgacataagcgtaagccaaaaggaatttgaaacttaaagtatttctgaatgaatttcttaactcagtagaaaaaaacggaaggagtaaaagatatttgctgcatatatatattatatatatatgcgtgtatataatgtatatatatatgtgtagtgttttatcactgctcttaactgcctttgataatttctcataaaccattgctgccacctagttttggaaactaaagatcttcctataagcccaatttacttggctagaaagcaa

SEQ ID NO: 146545 - DNA, 681 bp, Homo sapiens
atggaagggggtggggggatatctgatgacatcacgaactgctgcatcaactcccccgagtccctgcctctggaccccctgatagaggacacaaggagtgtcctgagcccgtgtgactcagtgtctcttcccatcactttgcgggaaaatggggctgcttacaccacaccgcagcccaaacacctgtggctagagaagggcttgggtactaggaacgccttgtttcttcgcgcggaggccctggacgccgcaggctcccaacctacttctctgggctgtcaggttctgaacccggtcctgaagaggccctggcgccgggggccctgcatcatggaaactctttctaatgcaagtggtacttttgccatacgccttttaaagatactgtgtcaagataacccttcgcacaacgtgttctgttctcctgtgagcatctcctctgccctggccatggttctcctaggggcaaagggaaacaccgcaacccagatggcccagctcagggagggcatcaacagaaatttgcaagaaggattccagggcaagtgcttcattacagctgcacactgtgcaggtactgctcagctcagtctcaccaacattcagagaacctgtggaaatgattcaagatcagtgcttgtccccagacctttgtggaaaggagaggagacatacacgtga

SEQ ID NO: 146546 - DNA, 1097 bp, Homo sapiens
atggaatactatgcaaccataaaaaagaatgagatcatgtgttttgcagaaacatggatggggctggaggccattatccttagcaaacacacgcagggaacagaaaaccaaataccgcatgttctcacttatgagtggaagctaaatgatgagaacgtggacacaaagaggggagcaacaaacactgggtcctatcaaagggtggagggtaaaattgaagagttgttgccgggtagctcaattgatgcagaaaccaggctggttcttgtcaatgccatctacttcaaaggaaagtggaatgaaccgtttgacgaaacatacacaagggaaatgccctttaaaataaaccaggaggagcaaaggccagtgcagatgatgtatcaggaggccacgtttaagctcgcccacgtgggcgaggtgcgcgcgcagctgctggagctgccctacgccaggaaggagctgagcctgctggtgctgctgcctgacgacggcgtggagctcagcacggtggaaaaaagtctcacttttgagaaactcacagcctggaccaagccagactgtatgaagagtactgaggttgaagttctccttccaaaatttaaactacaagaggattatgacatggaatctgtgcttcggcatttgggaattgttgatgccttccaacagggcaaggctgacttgtcggcaatgtcagcggagagagacctgtgtctgtccaagttcgtgcacaagagttttgtggaggtgaatgaagaaggcaccgaggcagcggcagcgtcgagctgctttgtagttgcagagtgctgcatggaatctggccccagaccctccaccatgagcgccctctctgaagcaaatggctccagccatcatcttttaaaggagccatacgaagaaaacccttcatgcaatgtgcttttgtctgtcccaagtgtctcctctgctctggccatgctcttcctgggagtggaaggaaatgtggctgcccaaatggcccaagcaaggagacctccactgcataaggaggaggaattgtttgtagccattagagttgtttgccagaaatttctggatttcctcccttccagcacatg

SEQ ID NO: 146547 - DNA, 2306 bp, Homo sapiens
  misc_feature (1)...(2306): n = a,t,c or g
atgcagctgctgctggcagagtgcatgggtcagagtgggccaccaggagctgtctgccattgccagagggtgtggcaggccagagccgtccgcagaagcaaaaggccagtcccatcgaccacccaagggctgaagagtgtgggcgcatggcgtgggagtggcaggcagctccacctgcagccccagtacaggatccactgggtgaagccagctgggctcctgagtctggtggggaccatggagaacatttgtgtctggcccagcgattgtaaatacaccaatcggcactctgtatctagctcaagattgctggactcgctgaagagagactacgcaggaaagccccagccacccatcaaatcagagagaaggaatccaccttcttacgctatggcagctgcgcagctccgtgactcagaggagaccgggggatcagagtttgtttttgcggaaaagactttaaggaagtgtgtcaaatgcccacaggtagagctggaaaatgtggcctttgctaaagatgcagaagagtctagagacgcacaacggctgggtcattggtggccctgcatcatggaaactctttctaatgcaagtggtacttttgccatacgccttttaaagatactgtgtcaagataacccttcgcacaacgtgttctgttctcctgtgagcatctcctctgccctggccatggttctcctaggggcaaagggaaacaccgcaacccagatggcccaggcactgtctttaaacacagaggaagacattcatcgggctttccagtcgcttctcactgaagtgaacaaggctggcacacagtacctgctgagaacggccaacaggctctttggagagaaaacttgtcagttcctctcaacgtttaaggaatcctgtcttcaattctaccatgctgagctgaaggagctttcctttatcagagctgcagaagagtccaggaaacacatcaacacctgggtcctcaaaaaagaccgaaggtaaaattgaagagttgttgccgggtagctcaattgatgcagaaaccaggctggttcttgtcaatgccatctacttcaaaggaaagtggaatgaaccgtttgacgaaacatacacaagggaaatgccctttaaaataaaccaggaggagcaaaaggccagtgcagatgatgtatcaggaggccacgtttaagctcgccccacgtgggggggttgcgcgcgcagctgctggaagctgccctacgccaggaaggagctgagcctgctgggtgctgctgcctgacgacggcgtggagctcagcacggtggaaaaaagtctcacttttgagaaactcacagcctggaccaagccagactgtatgaagagtactgaggttgaagttctccttccaaaatttaaactacaagaggattatgacatggaatctgtgcttcggcatttgggaattgttgatgccttccaacagggcaaggctgacttgtcggcaatgtcagcggagagagacctgtgtctgtccaagttcgtgcacaagagttttgtggaggtgaatgaagaaggcaccgaggcagcggcagcgtcgagcctctgtggtagttgcagagtgctgcatggaatctggccccaggttctgtgctgaccaccctttccttttcttcatcaggcacgacagagccaacagcattctgttctgtggcaggttctcatcgccataaagggtgcacttaccgtgcactcggccatttccctcttcctgtgtccccagatccccactacagctccaagaggatgggcctagaaagccaagtgcaaagatgagggcagattctttacctgtctgccctcatgatttgccagcatgaattcatgatgctccacactcgcttatgctacttaatcagaatcttgagaaaatagcccataatgattccctgttgtattaaaattgccatcccccgaattcccataggatggcaagcaaagttcttctagaattccacatgcaattcactctggcgaccctgtgctttcctgacactgcgaatacattccttaacccgctgcctcagtggtaataaatggtgctagatattgctactattttatagatttcctggtgcttagccttataaaaaaggttgtaaaatgtacatttatattttatcnnnnnnnnnnnnnnnnaaaaaaccaatttggtttttttgccccccaggtggaagggcaggggttaattttttgttaatggaaacctccccttccggggttaacccatttttcttgcttaaccctcccaaagaagtgggaataacggccc

SEQ ID NO: 146548 - DNA, 428 bp, Homo sapiens
aggaaacgctggaacggataaagaacaacgacccaaaacttgaagaagttaacctcaataatatccggaagatccccatccccaccctcaaggcatatgcagaagccctgaaagaaaactcatatgtgaagaagttcagcatcgtggggacacggagtaatgaccccgtggcgtatgcccttgctgagatgctcaaggagaacaaggagctgaagacactgaatgtggaatccaacttcatttctggagctgggattctgcgccctggagaagcgctcccatacaacacttatctggtggagatgagaagtgacaaccagagccagcctcctggcaacaaagtggaaatggagattgtgagcatgttgggagaaaaacgcaacacttcttagagtgcggtagcattttagccagcaggacgcccgctt

SEQ ID NO: 146549 - DNA, 3423 bp, Homo sapiens
  misc_feature (1)...(3423): n = a,t,c or g
gcgctcgcccgcccgctgcccgccggagcaccgcggcctccgcccgcgtccatctgcccgccgcccgcgcctgttccgcagcccgcgtccgcgccggccccacagctctgcgtccgggtattactcagcacagaaattcaggagacacagacaagttcttccacgatgtcgtacagacgagaactagagaaataccgtgacctggatgaagatgaaatccttggagccctaacagaggaagagctgaggaccctggaaaatgagctggatgagctggaccctgataatgcactgctgcctgcaggcctgaggcagaaggatcagaccaccaaggcgcccacgggcccctttaaaagagaggagctcttggatcacttggaaaagcaagcaaaggagtttaaggaccgagaagatctggtcccctacacaggggaaaaacgaggaaaggtctgggttcctaaacagaagccactggatcctgtgctggaaagtgtgacgctggaaccggagctggaggaagccttggcaaatgcttcagatgcagaactctgtgacattgcagcgatcctgggcatgcacacgctcatgagtaaccagcagtactaccaggccctgagcagcagctccatcatgaacaaggaggggctcaacagcgtgattaaacccacacaatacaagcctgtgcccgacgaagaaccaaattcaacagacgtagaggaaacgctggaacggataaagaacaacgacccaaaacttgaagaagttaacctcaataatatccggaatatccccatccccaccctcaaggcatatgcagaagccctgaaagaaaactcatatgtgaagaagttcagcatcgtggggacacggagtggggacgggggtggcgtatgcccttgctgagatgctcaaggagaacaaggtgttgaagacactgaatgtggaatccaacttcatttctggagcttggattctgcgcctggtagaagccctcccatacaacacttctctggtggaaatgaaaattgacaaccagagccagcccctgggcaacaaagtggaaatggagattgtgagcatggtggaaaaaaanccgcaccactttctcaaattcgggctacccccttacccaagcaaggaaccccggcttcggggcatcgactgcaatgaatgaacaccattgcccttgtgagggagnaggaggcttgcggcacctgacttgggcccatcatttcccaagtgccggagtggtgtctaagtgtgtggcggtggagtcccatgcctttgaactggatgtgttctattgatgacctgtgctctgcagggggaaacccagaaggcgcaaaaagccggccagccagaaaaccctttgtggttccagttcctttatgccacctaaggttttaaggttgacctagtggtcgtagacggaaagttttctacaataccgtctaatgtgaagtttttcctttagtccacagaagttgaatcctggttattatttaaaaacgtagaaggccccctaaacctagcaggatcgttagctgaatgatgagtgttccaggcagcagcgacgttagccccaggagccccagttttcaatgggccttgctgtgtggtgtttcaagtgcatttaaaatgtgtgacacagaaacggcacactcttccacatgcttttgaagtattggtaaaacacgtgtattatcaaatttgtcttagctattagcaaataaaactgattttcattctttattaaccctccttggaattttgaaaaccctcgattaaagttgccaaattgattactgggatccagaacacaattttcccctcagaacagatagacagactgaagccactgaactctgccaggagtctaacatgagattccttttgctggatatgcagaaatgataggaaaaaaacccaatggtgaaatttcgcagtttctaaaaccaacctttcattaccaatcccagggcaacaaacatgtccctgagtgttctttaaggaacatttggggatttatgtaccattttaatactgggagtttagaactttttccttattggaatgccaaccttatggatgggatggtgaaaaatcctacgggccaaatacctttttggaaaacaccttttccatattggcacagtggggcaaatggcttatgtgaggtaagacactagagggataaatttccagatacacatgtgctatgggtattttagtaaatggccccagcttaagagacttccagcctactgatctccatcaccttaattagacaaaattgcctgctgacccttaacgccctgtaatattaaagcctccgcaggatgccggaacaatggtgaagaaactcccagatatcacaggaagttgggaaatccctggccaaaaccacaccccgaggatatttccaatgaaattgtagtattagtactgctgcccagatctcctttttaacatcaaggcgcgtcttctggggatcccacaaaaggttttaagcccacaatgcccttgtgccttttaatataccacagtgcccagttaaactaatatttttgtttgttgcttttgggagttatttttcattagtgatttcagcaaatcttcatgataaaggacaagggtcaagaactcccagagcactgagcagagaggctggtgatgaaaaggtgaagcggcatgcgcactgaactgtaaggcagtgggcagtacagggtaactggaggcggggccagggcctcagcgctatggaaggagtgtccaactgaggcttgcaacatggccccaggagtggcacccatgttgcagggacaaccatcccccatttggcttctcccttaaaacacaattgcaggctgcattcctgcatcgctgcaaaactgcaatataatattaaatctgttggtctatgcatggctgcgtatgtgtttcttggaacctgtgtgacagggacatgtgccctggcacactggccagaagactgggcagccaccatggcagtgctggatgacctcagtaagaatgtgtcatgtattccaggtgctgatctaaaaactgtggctcaaatgtcaccgagcttatatgaagctcccagagagaacatttaaaaagctcagagagtaagtgctggggaaagcagagctatcagaggaaatctctcatagaaacgaaaccaaaccaacagaaaatgaagaaggccacatctttaaggccacctctgcattaaggaatgaggcaaaattgccagtgtgcttggaactatgcccccaaaaacctgtaggggaaaacaattctgtatcagtcagaaaagacctcatttgatccccacttcccatatgtgccatggaaaaatccataagaaaagaagcacagagaagctgatcctcgtgccaagctggcgttatcatttca

SEQ ID NO: 146550 - DNA, 382 bp, Homo sapiens
  misc_feature (1)...(382): n = a,t,c or g
agaaattgcacatcaaattattgaacaacagatgggagaggatagaattttgtggcaatagaatcggtagtttaaaagattgttacagagcagcaaactgggcagaaaatccagattgtgacagcacttgatcataatacccaaggcaagcagttcattctgacaaatcacgacggctctactccaagcaaagtcattctggccaggcaagattccactccgggaaaangttttccttacaactccagatgcagcaggtgtcaaccaggttattttttaccactcctgatctgtctgcacaacacctgcaggacgtcattatgggagcagtaacttgtgaaggctgcaaaggattttttaaaagaagcatccgaaaaaattt

SEQ ID NO: 146551 - DNA, 454 bp, Homo sapiens
aaaacatattattatatgaaaatatgaagatgcttctcccccttaattatgcaagattttaaaaagagactttaggccaggcatgtggcttatacctgtaatcccagcactttggaaggctgaggcgggcatatcacttgagttctagaccagcctggccagttttttaggcttaaatcttaattccagaatcctatgtagaattgttattttattgcggtgtttggtcaagctcatagcttctgatgtcttcatacagggcatttgacactcttgcaaaagcattgaatcctggagagagcacagcctgccagagctcagtagcgggcatggaaggaagtgtacacctaatcactggagattcaagcataaattacaccgaaaaagaggggccacttctcagcgattcacatgtagctttcagggcaagaaaacagcatatcactggtgaaag

SEQ ID NO: 146552 - DNA, 1854 bp, Homo sapiens
atggtgccatgcactgtgacagggagcactgggagaggaacagctttaggggagaaattgggagttgagtttcagctccgcgctcccagccgaagtcgagcagccccaagcggcgctcccaaactgaacggctccgctggccgcaggacgccggccgggggatgcgctgggaccgcgtccgttggcggttggggtgaagggcaccccctggcccccgcccccgacgcggtcgctggtgtccccacccagcgtttcttaccggcgcttttgcgccctgctgactccggcgtcgggcgccgacgcgacagtcccgcggctgccactcgtggattggggggcgctccgggaagagaggttgaagaaagccgacgggatgtgggatcgagattcacggcggagagagctttctgtgtttggcgcctgcgcattagcaacggggagaagcggcgagaggaggtcgtgacgttcccagggtggggtggagggatcggagggccgagcagcggctctgtgagtccactgcccccttttggcttggaggcagagtgccccgccagagctacgcgttcccagccagagtaccaccaaagtttcaaggaggaggctgactggcccgattcagatcacttgcccgttcctggacccattgtggagaactgcagaagaaataatccggccagcccaggtcgcatgcacactctcaagctcaccatgccttctcctatgcctgagtacctgaatgtgcactacattggggagtctgcctccagactgctgttcttatcaatgcactgggcactttcgattccttctttccaggctctaggttctgccacagaaagggatgaatggctagaagcgatttccagggcaatagaagagtatgccaagaaaagaatcaccttctgtcctagtaggagtcttgatgagattgttacagagcagcaaactgggcagaaaatccagattgtgacagcacttgatcataatacccaaggcaagcagttcattctgacaaatcacgacggctctactccaagcaaagtcattctggccaggcaagattccactccgggaaaagttttccttacaactccagatgcagcaggtgtcaaccagttattttttaccactcctgatctgtctgcacaacacctgcagctcctaacagataattctccagaccaaggaccaaataaggtttttgatctttgcgtagtatgtggagacaaagcatcagtattgttctctcccaggcatcgttggcttcacagtatgactgatgatcctccaacaacaaaaccacttactgctcgtaaattcatttggacgaaccataaattcaacgtgactggcaccccagaacaatatgtaccttattctaccactagaaagaagattcaggagtggatcccaccttcaacaccttacaagcaagaaaacagcatatcactggtgaaagcttactggaatgaactttttactcttggtcttgcccagtgctggcaagtgatgaatgtagcaactatattagcaacatttgtcaattgtcttcacaatagtcttcaacaagatcatccaagcctagaaaacatggaacagatagagaaatttcaggaaaaggcttatgtggaattccaagattatataaccaaaacatatccagatgacacctacaggttatccagactactactcagattgccagctttaagactgatgaatgctaccatcactgaagaattgtttttcaaaggtctcattggcaatatacgaattgacagtgttatcccacatattttgaaaatggagcctgcagattataactctcaaataattggtcacagcatttga

SEQ ID NO: 146553 - DNA, 577 bp, Homo sapiens
atggtgccatgcactgtgacagggagcactgggagaggaacagctttaggggagaaattgggagttgagtttcagctccgcgctcccagccgaagtcgagcagccccaagcggcgctcccaaactgaacggctccgctggccgcaggacgccggccgggggatgcgctgggaccgcgtccgttggcggttggggtgaagggcaccccctggcccccgcccccgacgcggtcgctggtgtccccacccagcgtttcttaccggcgcttttgcgccctgctgactccggcgtcgggcgccgacgcgacagtcccgcggctgccactcgtggattggggggcgctccgggaagagaggttgaagaaagccgacgggatgtgggatcgagattcacggcggagagagctttctgtgtttggcgcctgcgcattagcaacggggagaagcggcgagaggaggtcgtgacgttcccagggtggggtggagggatcggagggccgagcagcggctctgtgagtccactgcccccttttggcttggaggcagagtgccccgccagagctacgcgttcccagccag

SEQ ID NO: 146554 - DNA, 708 bp, Homo sapiens; identical to SEQ ID NO: 118062

SEQ ID NO: 146555 - DNA, 2034 bp, Homo sapiens
gaattcgggcccgtcggctttcttcaaccctctcttcccggagcgcccccaatccacgagtggcagccgcgggactgtcgcgtcggcgcccgacgcggagtcagcaggggcgaaaagcggtagatcatggcaaccatagaagaaattgcacatcaaattattgaacaacagatgggagagattgttacagagcagcaaactgggcagaaaatccagattgtgacagcacttgatcataatacccaaggcaagcagttcattctgacaaatcacgacggctctactccaagcaaagtcattctggccaggcaagattccactccgggaaaagttttccttacaactccagatgcagcaggtgtcaaccagttattttttaccactcctgatctgtctgcacaacacctgcagctcctaacagataattctccagaccaaggaccaaataaggtttttgatctttgcgtagtatgtggagacaaagcatcaggacgtcattatggagcagtaacttgtgaaggctgcaaaggattttttaaaagaagcatccgaaaaaatttagtatattcatgtcgaggatcaaaagatttgtattattaataagcaccaccgaaaccgctgtcaatactgcaggttacagagatgtattgcgtttggaatgaagcaagactctgtccaatgtgaaagaaaacccattgaagtatcacgagaaaaatcttccaactgtgccgcttcaacagaaaaaatctatatccgaaaggaccttcgtagcccattaactgcaactccaacttttgtaacagatagtgaaagtacaaggtcaacaggactgttagattcaggaatgttcatgaatattcatccatctggagtaaaaactgagtcagctgtgctgatgacatcagataaggctgaatcatgtcagggagatttaagtacattggccaatgtggttacatcattagcgaatcttggaaaaactaaagatctttctcaaaatagtaatgaaatgtctatgattgaaagcttaagcaatgatgatacctctttgtgtgaatttcaagaaatgcagaccaacggtgatgtttcaagggcatttgacactcttgcaaaagcattgaatcctggagagagcacagcctgccagagctcagtagcgggcatggaaggaagtgtacacctaatcactggagattcaagcataaattacaccgaaaaagaggggccacttctcagcgattcacatgtagctttcaggctcaccatgccttctcctatgcctgagtacctgaatgtgcactacattggggagtctgcctccagactgctgttcttatcaatgcactgggcactttcgattccttctttccaggctctagggccaagaaaaacagccataatcactggtgaaagcttactggaatgaactttttacccttggtcttgcccagtgctggcaagtgatgaatgtagcaactatattagcaacatttgtcaattgtcttcacaatagtcttcaacaagatgccaaggtaattgcagccctcattcatttcacaagacgagcaatcactgatttataaatgcttaactatagaatggcttatgactacccaaaacagtgccccatcaacaaatggggaaaattgccttttgagctcaggaataatttataaattggggactaccttttagttctttagcatattctatttcttattgttttatataatttttaaatcatttgcttcctccttatgtttaacagcagaggggtaatcaccttaaaatgtcatcaaaaatagatctactagaaggcagcatcacattcccatcttacttatggactcctacccctggttcatgtcttatatgcctgtaatggttataaagcctaccttcaggaaagctatggttgactaattactaatggatgggttttaaacatgtccctctacaataaattaaaatctttcaatgtttgaatataatgtggaggtgtttacctgagggcctctctatctccccgaattc

SEQ ID NO: 146556 - DNA, 2375 bp, Homo sapiens
tttgaaagattttacgaactctgaccccccagaaatacccaagaacagaaagctctctccgtcgtgaatctcgatcccacatgccgacggctttcttgaacctctcttgccggagcgccccccaatccacgaggggcagccgtgggactgtcgcgtcggcgcccgacgccggaggcagcagggcgcaaaagcgccgggagatcatggcaaccatagaagaaattgcacatccaattattgaacaacagatgggagagattgttacagagcagcaaactgggcagaaaatccagattgtgacagcacttgatcataaaacccaaggcaagcaggtcattctgacaaatcacgacggctctactccaagcaaagtcattctggccaggcaagattccactccgggaaaagttttccttacaactccagatgcagcaggtgtcaaccagttattttttaccactcctgatctgtctgcacaacacctgcagctcctaacagataattctccagaccaaggaccaaataaggtttttgatctttgcgtagtatgtggagacaaagcatcaggacgtcattatggagcagtaacttgtgaaggctgcaaaggattttttaaaagaagcatccgaaaaaatttagtatattcatgtcgaggatcaaaggattgtattattaaataagcaccaccgaaaccgctgtaaatactgcaggttacagagatgtattgcgtttggaatgaggcaggactctgtccaatgtgaaagaaacccacttgaggtatcacgagaaaaatcttccaactgtgccgcttcaacagaaaaaatctatatccgaaaggaccttcgtagcccattaactgcaactccaacttttgtaacagatagtgaaagtacaaggtcaacaggactgttagattcaggaatgttcatgaatattcatccatctggagtaaaaactgagtcagctgtgctgatgacatcagataaggctgaatcatgtcagggagatttaagtacattggccaatgtggttacatcattagcgaatcttggaaaaactaaagatctttctcaaaatagtaatgaaatgtctatgattgaaagcttaagcaatgatgatacctctttgtgtgaatttcaagaaatgcagaccaacggtgatgtttcaagggcatttgacactcttgcaaaagcattgaatcctggagagagcacagcctgccagagctcagtagcgggcatggaaggaagtgtacacctaatcactggagattcaagcataaattacaccgattaaagaggggccacttctcagcgattcacatgtagctttcaggctcaccatgccttctcctatgcctgagtacctgaatgtgcactacattggggagtctgcctccagactgctgttcttatcaatgcactgggcactttcgattccttctttccagggctctaggggcaaggaaaacaggcatatcactggtggaaagcttactgggaattgaactttttactcttggtcttgcccagtgctggcaagtgatgaatgtagcaactatattagcacacatttgtcaattgtcttcacaatagtcttcaacaagataaaatgtcaacagacagaagaaaattattgatggagcacatcttcaaactacaggagttttgtaacagcatggttaaactctgcattgatggatacgattatgcctacctgaaggcaatagtactcttcagtccagatcatccaagcctagaaaacatggaacagatagagaaatttcaggaaaaggcttatgtggaattccaagattatataaccaaaacatatccagatgacagcctacaggttatccagactactactcagattgccagctttaagactggatggatgtaccatccactgaagaattgtttttcaaaggtctcattggcaatatacgaattggacagtgttatccccacatattttgaaaatggagcctgcagattataactctccaataattggtcacagcatttgaaaactgtgactgccagtgctggtaaaacttaactgttctttgcccagaacacaagacacccaaattgaactcactgcttttgaggcatctggaaatttttacctttaaaaagtaaccagaatccaaggtatttttattttagcttcccttaagaatttttgaagtgactgggcaggcagcagaaattaaatgaatttttcttcctgattcctttaaatgaatatgaaacactaccaatttattcctgggtgaaggtgatacctgaagctgtcacctcctgggttatcctaacctaagcgctcaatctaattttataaaaccaaataaattagagctcctttttctg

SEQ ID NO: 146557 - DNA, 465 bp, Homo sapiens
  misc_feature (1)...(465): n = a,t,c or g
ntgagccagggttttttggcctaaagccagcatttcctcagtctccctttgtggttcgaaggatatggactattgcaatacatttcttccttcaaatcctgaaacagtgtttggtgacataatgccaagggtaaacaagcctgatttaggcactgctttatccaggggcttcacccatgaaattaataaaacttatctgagtcacttgaaacttggttcccagaaaacacatttctggtttataatctccttttatgctcacctgacattaattatctatccttgatgatgtgtttaaactgagtagcagaaaacagaggccacactttctgggaaattttaaaggaagaaaccatttttaatgagatgaaaatatttaacgaatttaaaaagctaatgacaattttgagaaaaggtttgggatgtatattgctatgtaatttaataaactgattttatggatat

SEQ ID NO: 146558 - DNA, 380 bp, Homo sapiens
  misc_feature (1)...(380): n = a,t,c or g
nacctacccagtaacaacaggagcaaacatacatgttttcccctcatgtaactttgcatttaaatatattctgggaaactnnnnnnnnnnnnnnnnnnnnnnnnnnnnnnnnnnnnnnnnnnnnnnnnnnnnnnnnnnnnnnnnnnnnnnnnnnnnnnnnnnnnnnnnnnnnnnnnnnnnnnnnnnnnnnnnnnnnnnnnnnnnnnnnnnnnnnnnnnnnnnnnnnnnnnnnnnnnnnnnnnnnnnnnnnnnnnnnnnnnnnnnnnnnnnnnnnnnnnnnnnnnnnnnnnnnnnnnnnnnnnnnnnnnnnnnnnnnnnnnnnnnnnnnnnnnnnnnnnnnnnnnttggaaaactgtctctctctatgtatgctcgtgccg

SEQ ID NO: 146559 - DNA, 1936 bp, Homo sapiens
gtgtgtccaggctgccacgtcattatcagtgggcatctgtcccctaccaggacctgggccttctccaccctggtatccaggtgtctcagtgaatgtctggatctttaaacaaattgatgatgaaggagacctacgtttgctaataaacaaggaagtgctctctggcgtggtggtcatatcgagtaaggattcagtccaacaccagggagtgtctttgaccatggaaggaactgtaaacctccagctcagtgccaaaagtgtgggtgtgtttgaagctttttataattctgttaaggcccagctgaggaggtctgtgcaggccacagggctggaggaaaggcctgctctccctgagcggctgcagcaggaaggctccgaggaagctggtgggctgtcaggagcagaggcagcgctgcccagaagagcacggggctcgcctatccagattatcaacagcaccatagaaatggtgaagccggggaaatttcccagcggcaaaacagaaatcccttttgaatttcctctgcacttgaagggtaacaaagttctgtatgagacgtatcatggcgtgtttgtcaacattcagtatacactgcgctgtgacatgaagcggtctctgttggccaaggacttgacaaagacctgtgaatttatcgttcactccgctcctcagaaggggaagtttactcccagtcccgtggacttcacgattacacctgaaaccttacagaacgtcaaagagcattcccatcagacagaggccgggcagcaacgtgcttttcaaagattccgcagtgccctccgtggtggacgcctcacggccagggcagacaattcttcttcttccaacgtggcccagggaagccaaaagagtggacacccctgctctagaccatcatcagtccttcctggccagcgtcaggtgtgcagagtaaagagagctttgcttcccaaatttctccttcgaggacatctcaactcaacaaactgtgtcatcacgcagccactaacgggagagctggtggtggagagctcggaagccgccatcagaagcgtggagctgcagctggtgcgcgtggagaccctgggcagcagagcagaccatgaccctgactctaaaaaacgagaggacgtcggggaagcaaaagtaagagcgtggctgtgccttagcagtagccgcgtgtctaaggaaaggtgtgcagaaggctatgcccgcgacgccacggagattcagaacattcagatcgccgacggggatgtgtgcaggggcctctctgtccccatctacatggtcttccctaggctgttcacctgccctacactggagaccaccaacttcaaagtgggtaagtggcactcgcctcccagccctcatgggcccatgggaagggccgctcagcgccagggcctgctgtgggtcacagagctcagaacctgccgcccttcggtccctcagtgccagggcctgccacaggccatacagctcagagcctgctgcccttcggctgctcaacaaaaccttgttaaggagctgctgtgccgcacaggggacacacccacaggcagtcctggtgcttgtgggacttccactgtcacatggggaaacacacagacccacatcagtgtagacatgggcagaccccagccacaggtgggcactgactccaaggccccttccacagctgagctgccacagtgtggggctcagcacagggtgccctctgcccacacgatgcccttcccacccctcctcacactggggaaggagatggtgcttgtttgtcgtcaggatcaacaaggctcacccatatcagctgaagagtcggtggagaaggaatcctgtttgctgaaagaatttgaggttaacatcgtggtgctgcttcaccctgaccacctcatcacggagaacttcccgctgaagctctgcaggatatag

SEQ ID NO: 146560 - DNA, 3454 bp, Homo sapiens
  misc_feature (1)...(3454): n = a,t,c or g
ggatttcttcacgcggggagagccgttccttcctccctccgttaacccggacagcaaaggagcatttccggcgggagactgtccctacggaagggggggggctagcttggccccgtctttcacgcccagagggggcggggtgaaccgtgacagcgcttcggccctcactaaggccggctcttgcgccggaaggaggaaggcgtggggcattcgcccctcggagctagggagtgagtgcgacgccgctgcgaggtcacgtgagccactgccggcagagagggaaaggggcggggcccacaaccaagcggggaggcgccccttgtttccctggggtcacgcgcagccacaagtggcggctgctgcggagaattggagatggggaccggcctggacatcaagagtaaaagagcgaataaagtttatcacgccggggaagtgctctctggcgtggtggtcatatcgagtaaggattcagtccaacaccagggagtgtctttgaccatggaaggaactgtaaacctccagctcagtgccaaaagtgtgggtgtgtttgaagctttttataattctgttaagcctatccagattatcaacagcaccatagaaatggtgaagccggggaaatttcccagcggcaaaacagaaatcccttttgaatttcctctgcacttgaagggtaacaaagttctgtatgagacgtatcatggcgtgtttgtcaaacattcagtatacactgcgctgttgacatgaagcggtctctgttggccaaggacttgacaaagacctgtgaatttatcgttcactccgctcctcagaaggggaagtttactcccagtcccgtggacttcacgattacacctgaaaccttacagaacgtcaaagagagagctttgcttcccaaatttctccttcggaggacatccccaactcaacaaactgtgtcatcacgcagccactaacgggagagctggtggtggagagctcggaagccgcccatcagaagcgtggagctgcagctggtgcgcgtggagacgtgcgggtgtgcagaatgctatgcccgcgacgcccncggagattcagaacattccagatcgccgacggggatgtgtgcaggggcctctctgtccccatctacatggtcttccctaggctgttcacctgccctacactggagaccaccaacttcaaagtggaatttgaggttaacatcgtggtgctgcttcaccctgaccacctcatcacggagaacttcccgctgaagctctgcaggatatagcccggaggagggaagcatagagaacgggagtggccatctggaaatccagctggttatccaaatcctaaggggagctacagccagcggcatatacttgtttttgtgattactctgtatcagaaatgaaacagaccctcaaattaactttccttcctcatttcttgaggcttctgcttccaacaggcacctctaatcagaccttttctttgaaattcaacaagatttcttaatgctatttgccaagaccatttcacagaaaacattgactgtggctcttgccttatctgttcctttttaggtacagtaaaacaattgtgacagcagtttgagcttgctggagagtggcatcatggggacaaaaggaaacctctgacttgctaatggatgtagccagggactccccatagcaaagggtctgtggccatgttgacattcatgatggctgcaagcgcacttgatggtcaggaagtttgcagatactcgccaaggcagagcgcaaagtgctagccactggaaatgcatgacttccctccacccctactctattctgtagttttttggttttgtttctgagacggagtctcaattctggtcacccaggctggagtgatctcagctcactgcaacctccacctcccaggttcaagcgactctcctgcctcagcctcccgagtagttgggattacaggtgacttgccaccgtgcccggctaaatgtttgtattttttagttagagacggggcttcaccatcttggccaggctggtcttgaactcctgacctcgtgacccacccgccttggcctcccaaagtgctgggattacaggtgtgagccaccacacccagcctctgtagttctttttacaacatttttcattataactttaaattttttaagcaactggaaaagtgttccttgctctcttggggggatttggctggtgccgaagtgtttctgaagtctcaagaactgccataaaatctcacgctgccatttccctgaacagatacatacatagagagagacagttttccaaactgtgtcacgcaggctgagtgcactggcaggatcacagctcacgggcagcctcaacctccctgggttcaagcgatccctccccttcaggcctcctgagtagctgaggactacaggtgagtgccaccacactcagctaattttcaaattttttgtagacagggtctccctatgttgcccaggctggtcttgaactcctagactcaagtgatcctcctgtcttggcctcccaaagtgctgagattacaggtgtgagccactgtgcccagcagtttcccagaatatatttaaatgcaaagttacatgaggggaaaacatgtatgtttgctcctgttgttactggggtaggttctgaataggcagaaacccatgtgcagggttgggctgggttgaagggcccctctccggcaaggtgggtagcaggaaaaggtccttgacttgatgaatttggtctgcctctgagccactggaggaagctgttttgagccagggttttttggcctaaagccagcatttcctcagtctccctttgtggttcgaaggatatggactattgcaatacatttcttccttcaaatcctgccactgttttgttggcccacaactaataggacctcaaaataagccatgctgctttgcacacacactagccttcttttgtacttttcattctggatgggcttggccaaaacaggctcaggccaaagacctcccaagctgtatgtacttcccagtatccctgaaaacagtgtttggtgaccataatgcccaagggtaaacaagccctgatttaggcaccgcctttaaccccaggggcttcaccccatgaaaataaataaaacttatcctgagtcacctttcctttngggnnaanaaacttgggttccccagaaaacacatttcctggtttataatctcccttttatgctcacctgacattaattaatctatccttgatgaatgtgtttaaactgagtagcagaaaacagaggccacactttctgggaaattttaaaggaagaaaccatttttaatgagatgaaaatatttaacgaatttaaaaagctaatgacaattttgagaaaaggattgggatgtatattgctatgtaatttaataaactgattttatggatataaaaaa

SEQ ID NO: 146561 - DNA, 459 bp, Homo sapiens
  misc_feature (1)...(459): n = a,t,c or g
ggacagatgcctcatgttgaagcaggggtctgaggcctggctcacctccatcagcattgagcctccagcacctcctgtctaccaagccccgtgccagtcctgcccagaacccccaggagcccatgagccctctgactctccacaccataccccagtccatcctcctccagagcactcggacgcctgtcctgccccagccacgtgctgttccgcccccgagaagctctatgtcataaatcttaactcagatggggagaggggagcctcagagtcacatagccctggggnccaaaccccagcttcctccacccaagtactgatggccaggttcttcaacctcagtttctgtagctgtaagatggggagaatgatctctgggagggttaaatgtgcggcaaaatggccaagagttgggctctgtgactaggacattgggttccgattccacctttggtgtcg

SEQ ID NO: 146562 - DNA, 948 bp, Homo sapiens
taagtttccttgtggtcttcgtaatccaagggtaagataatggttatttagaggattgggtgaattgcatgtgtcttaggcaatcctaaatataacttctctcaattgattgcttgataagaactagttgtgctcttaggcaaggatccagatccctggtcttttatcttactgtttgaagatgcgtctattaatatatgcttgggaaagcaggtggcagaggtaacatcttctgaaagctttggcagctaagcagtattctcgctctatcatgtggcatgttgattgtctgctccctgactcccatacacagtttcctctgcctaggcaccatctccccacttttgctccctccctccccaatatgcctattcctgtttgtcctcaaccacttttctcctgtccagccctaccctatgttaatctgatttagatgcttttgactctgctctttagaactctgtaattacctctatcatggcttttacaatactctaggatctttatggttacttaactgctccctgtactaagcttgaaatttcctggaatgcgaggatcaggtccaagtggactctaaaactctagggtctagcatagtgcccagcctgtagtaggggcttaagaaatcccaattcagaaaagaaaacaaaaaataataaggtgacaaataaataaccaaaaataaaaaagaaattctgattgaatagatgaatgagtaaattttcatatttctgcctttttttattcttctactgacatttggaatacctgcctacatatgcaaattcttcctattcttaggccaagctcagtggctcacacctgtaatcccagtactttgggaggccgaggtgggcggatcactggaggccaggagttcaagaccagcgtggccaacataacgaaaccctgtctctattgaaaatacaaaaattagctgggcgt

SEQ ID NO: 146563 - DNA, 637 bp, Homo sapiens; identical to SEQ ID NO: 144817
  misc_feature (1)...(637): n = a,t,c or g

SEQ ID NO: 146564 - DNA, 771 bp, Homo sapiens
  misc_feature (1)...(771): n = a,t,c or g
aattttgccctcgaggccaagaattcggcgagggcaataagctcctagtcccagacgcccatggggtcatttcacagaggaggaccaaggcttactatccacaagcctgtggggcaaggttgaatgtggaaaaatgctggaaggaaaaaacccctgggaaaggctccctggttgtctaccccatggaccccagaggttctttgacgagctttggcaaccctgtcctctgccttttgcccatcatgggcaaacccccaaagtcaaggcacatggcaaagaaggtgctgactttccttgggagatgccaacaaagcaccctggatgatctcaagggcacctttgcccagctgacgtgaactgcactgtgacaagctgcatgtggatcctgagaacttcaagctcctggggaaatgtgctggtgaccgttttgggcaatccattttcggcaaagatttcacccctggaggttgcagggcttcctgggcagaagatgggtgactgcaagtggccagtgccctgttcctccaggataccactgagctcactggcccatgatgcagagcttttcaaggataaggcttttattcttgcaagcaattacaaataataaatctatttctgctaagagatcaccaaannnnnatnntnnnnnnncccccggattttttatttagcgggccgcacctttttccccttttagggggggtaaatttatattgggccttgggccggggttttcaaaagcggggggannnnnnnnnnaaagagccc

SEQ ID NO: 146565 - DNA, 227 bp, Homo sapiens
ccccgccgctcttcctggccgtgttgggcatcttggccactaccccgggtggtggccaccttcggctcttcctgggcctgggcacgaccctcagctactctgccctgctcaccaagaccaaccgtatctaccgcatctttgagcagggcaagcgctcggtcacaccccctcccttcatcagccccacctcacagctggtcatcaccttcagcctcacctccctgcag

SEQ ID NO: 146566 - DNA, 366 bp, Homo sapiens
  misc_feature (1)...(366): n = a,t,c or g
cgtgcnnnnnnnnnnnnnnnnnnnnnnnnnnnnnnnnnnnnnnnnnnnnnnnnnnnnnnnnnnnnnnnnnnnnnnnnnnnnnnnnnnnnnnnnnnnnnnnnnnnnnnnnnnnnnnnnnnnnnnnnnnnnnnnnnnnnnnnnnnnnnnnnnngatcacaggcagaaactgtatgcacacaccgagtgtggaaaagccctcttgtggaagtcagttatttgtgtacatcagaaaattctggaagaagagaaaccttgtgaaggtactaaatatgacaacatcttcagtaacagaggatgtccccctgtacccagaatggtgcatgctgtggagataccctgcaagtagaccgaatgtgagaaagcccn

SEQ ID NO: 146567 - DNA, 429 bp, Homo sapiens; identical to SEQ ID NO: 130586

SEQ ID NO: 146568 - DNA, 1284 bp, Homo sapiens; identical to SEQ ID NO: 145747

SEQ ID NO: 146569 - DNA, 6125 bp, Homo sapiens
cggaggcccgggcaggccggctgagctaactccccagagccaaagtggaaggcgcgccccgagcgccttctccccaggaccccggtgtccctccccgcgccccgagcccgcgctctccttcccccgccctcagagcgctccccgcccctctgtctccccgcagcccgctagacgagccgatggcgcggccccggagagcccgggagccgctgctcgtggcgctgctgccgctggcgtggctggcgcaggcgggcctggcgcgcgcggcgggctctgtgcgcctggcgggcggcctgacgctgggcggcctgttcccggtgcacgcgcggggcgcggcgggccgggcgtgcgggccgctgaagaaggagcagggcgtgcaccggctggaggccatgctgtacgcgctggaccgcgtcaacgccgaccccgagctgctgcccggcgtgcgcctgggcgcgcggctgctggacacctgctcgcgggacacctacgcgctggagcaggcgctgagcttcgtgcaggcgctgatccgcggccgcggcgacggcgacgaggtgggcgtgcgctgcccgggaggcgtccctccgctgcgccccgcgccccccgagcgcgtcgtggccgtcgtgggcgcctcggccagctccgtctccatcatggtcgccaacgtgctgcgcctgtttgcgataccccagatcagctatgcctccacagccccggagctcagcgactcccacacgctatgatttcttctcccgggtggtgccacccgactcctaccaggcgcaggccattggtggacatcgtgagggcactgggatggaactatgtgtccacgctggcctccgagggcaactatggcgaaagtggggttgaggccttcgttcagatctcccgagaggctgggggggtctgtattgcccagtctatcaagattcccagggaaccaaagccaggagagttcagcaaggtgatcaggagactcatggagacgcccaacgcccggggcatcatcatctttgccaatgaggatgacatcaggcgggtcctggaggcagctcgccaggccaacctgaccggccacttcctgtgggtcggctcagacagctggggagccaagacctcacccatcttgagcctggaggacgtggccgttggggccatcaccatcctgcccaaaagggcctccatcgacggatttgaccagtacttcatgactcgatccctggagaacaaccgcaggaacatctggttcgccgagttctgggaagagaattttaactgcaaactgaccagctcaggtacccagtcagatgattccacccgcaaatgcacaggcgaggaacgcatcggccgggactccacctacgagcaggagggcaaggtgcagtttgtgattgatgcggtgtatgccattgcccacgccctccacagcatgcaccaggcgctctgccctgggcacacaggcctgtgcccggcgatggaacccaccgatgggcggatgcttctgcagtacatccgagctgtccgcttcaacggcagcgcaggaacccctgtgatgttcaacgagaacggggatgcgcccgggcggtacgacatcttccagtaccaggcgaccaatggcagtgccagcagtggcgggtaccaggcagtgggccagtgggcagagaccctcagactggatgtggaggccctgcagtggtctggcgacccccacgaggtgccctcgtctctgtgcagcctgccctgcgggccgggggagcggaagaagatggtgaagggcgtcccctgctgttggcactgcgaggcctgtgacgggtaccgcttccaggtggacgagttcacatgcgaggcctgtcctggggacatgaggcccacgcccaaccacacgggctgccgccccacacctgtggtgcgcctgagctggtcctccccctgggcagccccgccgctcctcctggccgtgctgggcatcgtggccactaccacggtggtggccaccttcgtgcggtacaacaacacgcccatcgtccgggcctcgggccgagagctcagctacgtcctcctcaccggcatcttcctcatctacgccatcaccttcctcatggtggctgagcctggggccgcggtctgtgccgcccgcaggctcttcctgggcctgggcacgaccctcagctactctgccctgctcaccaagaccaaccgtatctaccgcatctttgagcagggcaagcgctcggtcacaccccctcccttcatcagccccacctcacagctggtcatcaccttcagcctcacctccctgcaggtggtggggatgatagcatggctgggggcccggcccccacacagcgtgattgactatgaggaacagcggacggtggaccccgagcaggccagaggggtgctcaagtgcgacatgtcggatctgtctctcatcggctgcctgggctacagcctcctgctcatggtcacgtgcacagtgtacgccatcaaggcccgtggcgtgcccgagaccttcaacgaggccaagcccatcggcttcaccatgtacaccacctgcatcatctggctggcattcgtgcccatcttctttggcactgcccagtcagctgaaaagatctacatccagacaaccacgctaaccgtgtccttgagcctgagtgcctcggtgtccctcggcatgctctacgtacccaaaacctacgtcatcctcttccatccagagcagaatgtgcagaagcgaaagcggagcctcaaggccacctccacggtggcagccccacccaagggcgaggatgcagaggcccacaagtagcagggcaggtgggaacgggactgcttgctgcctctcctttcttcctcttgcctcgaggtggaagctgtatagagcccgggtccacggtgaacagtcagtggcagggagtttgccaagaccatgctccgcgtcggtggggctggccttgagaaggaactggacccagctctaccccgattccagcatgtgagcttcatgcttcctcaccacagaccagactcgcttcccatggtgggaaacagccaccgagaaggttctagctctagaaagggactaaacttattctctcatccgaagtccaaagaggatgatgaagccctgggctttgcctggtttgcgggagatttcctcccctcagtcaacccccataacctggggattgggcagtgtggaagaacgtgtagaccccagaatgaaacatggggttggagtggaggaggagctgtctcagcaagaggagacctggggctgtgcatctggatggaggcactcaggcctgggtaggattcctctggcacggagggagagaccctgggtgagacccctgtgagcatgggaagggcctgcagtgggcgcgggagtgagctgaggaactggggtgcgcccccatgagattcccaatgccatgggctttcccccatccccccgggattgggcaaggtcagacttagagtacagctgttttcctcccctctgtgtactcccttaaatcaccccaaccttggccaggcatggtggctcacacctgtaatcccagcactttgggaggccgaggcaggtggatcacctgaggtccggagttcgagaccagcctggccaatgtggtgaaaccctgtctctactaaaaatacaaaaattagccaggtgtgatggtgggtgcctgtaatcccagttacttgggaggctgaggcaggagaatcgcttgaacctgggaggtggaggttgcagtgagctgtgattgtgccactgtactccagcctgggtgacagagcgagactctgtctcaaaaaaacaaaacaaaaaaacaccaaaaaaacccccaaacctgaagaaattcagatacacgtgtgtaatgttagtgatgtgagaacaaggagcaggggtgcatttgtgttgtgttcgggttggggatgggtttaggagctccaggttgggagcagtgacagagagtcatggccgtggtgagggtgaatcccaagtggatggctcaggacgggtatggaaacccttcattcctcataggtactgggaagtccatttgcaagctgagcgccaggcctggggaggaagaggcttgggctgcagatgcacgcacatttgtttttcactgatagtttttacaaaaagcttggtttaagttatggaattttatgtccctgggagtagaatttacatttgttaaattgaccactgtttaagatcagtatacattctctagtctgtgatgtctggagctagttttgagggtgaaccacactttatccaacatacaaactttcccatgcagcttctctggtgcgcagttggttttgaccgtgggactaggtgcttctgcaggttttaagtaattaacttaaaagcttctcctctgagaaacatttctgttgcgctactgactctccttctccacatttgttgtgttcctagggcttctctatagtgcacattaggacgtttcatttgttgctgaatgctttccagaattatttattccatagggtttctctcctgtgcagctctctcatgggtaatggggcgtgttttcttgccaaaggcggttccaccctcgtgattgtatagggctcttctcctgtatgaactctgagatcagtgagctctgatctccaagggaaagttttcctgcatttgctgttttctcatgtctctcccagtgtgaattctctggcttctagctgaaaacttttccacagttttacattcatgtggttttctccactgtgaactctgtgattcagaatcagaagcagttcttagtagaggcatttctacactgattgcactgaggatatctccccagtgtgaagtttctggcatagagtcctggcttcccgcagacgactttcacactctgccatgttcatgcctgtgggcctctctggcaggaactctgatgcaccgcgaggcccatgtactcctgtggctttctcacattcggtctacttgcagggtatctccacagcatgcaccattctgggtacagggggacatcctctgttactgaagatgttgtcatatttagtaccttcacaaggtttctctccttccagaattttctgatgtacacaaataactgacttccacaagagggcttttccacactcggtgtgtgcatacagtttctgcctgtgatcatttctttatgttattattttattttttcgagatagggtctttgctcaatttcttaggctggagtgcagtggcacgatcatagctcactgaagtttcgacctgggctcgagcgatcctcccgcttcagcctcctgagtagctggtgcgcacgaccatacccagctaatgttttgttttttgtggagacggggtctcactatgttgcccaggctggtctcgaacttctgagctcgagcgatcctcctgcctccacctcccaaagtgttcggattacaaacgtgagccatcgcacctagcctctttgatcatttctgtggtgttcagtgggggttgacagctccctaaagattttcctgtttttttgcatgcatgggtttgaattctttgaggtccaatttatttggacccctgaataaagttttgtgggttttcttctatgtgtggaattatataggcattcttccagtgtggtttctcttatgtcgagtgagagctgacctgcaccgaagtttgtcccatttgttgcccttgaattatctgtatgaattatatgttccagtgaaaatggagttctgggttggaggcttattccatgtttacacaattaaaattgcagtgttcctctctgggatgagagctctaaagcagagtaagattacgttctgatgtaagctttaaccacctatttataaggtctcacctgtggtccactgtgttgagacttctacagaagagcttctgtatagtaaccattttcttaggctgtctcacttgtgtgaatcttctgacacatttattatagctttgtcccatttcttatcctttttgctctttagaaatttccctttaatttattacattcattgcttactgtaaagagtccaggtaactgactttaattcaagttacttcctgttcaataaatttaacttttccc

SEQ ID NO: 146570 - DNA, 413 bp, Homo sapiens
  misc_feature (1)...(413): n = a,t,c or g
catgnnnnnnnnnnnnnnnnnnnnnnnnnnngtaatttagtttaaaatcccagttttcgaattacatnnnnnnnnnnnnnnnnnnnnnnnnnnnnnnnnnnnnnnnnnnnnnnnnnnnnnnnnnnnnnnnnnnnnnnnnnnnnnnnntataggaagttttattgggcagtgctgctcttaaatcctaccttccactcaactcccatacaactttcttttgtacattttgatactttctacctaatggcagctcttccaaaatagctgctttaaactctgatttaattttcaatatttggtttcatttttcaacaggccaagaggcctctggtaatgaagtgctatatatatatatatatgacgctggttctactactaatagtatgagcttgtcacactgagcctcagtttcc

SEQ ID NO: 146571 - DNA, 492 bp, Homo sapiens; identical to SEQ ID NO: 137020

SEQ ID NO: 146572 - DNA, 4134 bp, Homo sapiens
  misc_feature (1)...(4134): n = a,t,c or g
ttcccggatcgacgatttcgtccgggccgcgctgcccgcgctcctgctgccgcagttttgcctttccgctgctggcgccgcggactgtccttcggctacttggattgagctccaagacagttgatacatttttctccaagaagccatctaagtagaaagcatagaggatgtcggaaatcaccgtactgaccatggagcggacatgataagcatacattatgaagaagaaaatgcttttatactggatactctggaaaaagcaatggaaaggcccagatgatatcctactaggcatggtttatgacacagatgatgcgagtttcaagtgggttgataattcaaatatgacatttgataagtggacagacccaagatgatgagagaggatttagttgacaccttgtgcttttctgcacatcaagacaggtgaatggaaaaaaggaaattgtgaagtttcttctgtggaaggaacactatgcaaaacagctatcccatacaaaaggaaatatttatcagataaccacattttaatatcagcattggtgattgctagcacggtaattttgacagttttgggagcaatcatttggttcctgtacaaaaaacattctgattctcgtttcaccacagtttttttaaccggaccccaattaccttaatatggaaaactgtgttttggtagttggagaagaaaatgaatatcctgttcaatttgactaagtttttggtaatcttgcactaagacatcaacaaaatgccctggcagagataacttgggaaagattttaatataaaacttgacattggatattagagctttaatggtattccttattccagtaacatttttatgtactcatctgctgtgaaaagtctttaggttcattaaaaaaacaggttttagaaatgatcttagatctaatatagtgattttaagcatcccgtcaaaggcagaatctgtcacttgaatgaaggaaagcttaaagcccaagcagataaaaataaaagcccagcctatttgtcttgcctgctgtatcttccctatttagttgacccactttagtttatatgtttattagtaaacatgaaatggggaataagtgattttaagtacatcccatacatttaaatatctttgataattgttatttttttggcagataattcctctagaatgtgtatctttttatgatttagatgaagaaaattttacaacttttaacaccccacaccaattttagtttcattacttttacacacaccattttatcacaaatgactcaagttttaatgaatgtttataaattatttgaaacaaaatatgatcgctgtgtccaggatggcatagagaaagctggcaattaggttaacacttacatattatagtgcccctttaaggatttctctcttgccaccataccttttgtactttcccctatacaagatgtatctcattctcctcaagcatttataaatttttccttcaatgacatgaaaactgtgcaagcaaaaaccgaagaaaaacacttaagtacaactgtagtgacagtgatcaaagttttcagtgcatttattgtacattttaagaaaaaggtgaaaatcatttggggagtaaaaaaatgaaaaagctgaaacgagtaattttcctcaccatcaataaaccaaaaacaggaaagataaagaatgtataaatttcacgtaaattagtcacgtatcacttatcaatggggatacgttctaagaaatgcatagttagggaatcttgtgtgaaaatcagcttgtatttacacaaacccagatgggtagagcctattttgtcccaaacctacacaggcatgttactgtggcggaatactggcaggacaattggtaacacaatatttgtgtatctaaatatagaaaaggtacagtaaaaatatgggtctactaagggaaacactgttctatatgtgggtccattactgactgaagtatactgtctaggaagtctgagggctcaaaggaaaaggtaatccctctttctggaatcccacaccccattcaatttattctttacttttcttctggggagaaaagatagatatactatctcactaaactagactaaaggcaacaaagttccagcttgtgtagtctctttttattgaccacatgaatcgaaaacactcatcacaattaatggcactatcattaatgagacatgagtaactaaaaagtgatagaaaactattaacagtgcggctacatggtacctgnaaatgcaggcattacaccagctgttacacaagcacaagcatggctctgtaagagctttacatttctgagattttgtatagggattgagatgtctattttaattattggatagactattactaatgtcaatattgaacactaccctgggaattcctgcctggttttcctacccaaattgtaccactccttggaagaactacaggcacagtaaaaaaaatatgggcggtattatgtggaactaaaagagtttcttaaaggagtttcttaaagggagtggtaggaatttggggtagggaaagtgattaagtccaacttaaaaccaacagacttcatacgtctacaactacaatgtccaatggagccactagccacatggaggcttattttaagtaaatttagtttaaaatccagttttcggatttacattaggccacattgtccaagtgtttcaaattcacaggtgggttagtgggctactgttactgggggcaacatacattatagggacattttcatttatggggagtttttatttgggcagtgctgcttctttaaatcctaccttccacttcaactccccaaaaaaccttcctttggtaacattttggatactttcccacccctaatgggcagctcctcccaaaaatagctgcctttaaaactctgaatttaaattttcaaatatttgggggtttcattttttcaacagggccaagaggcctctgggtaaatggaagtgctattatatatatatatggtgggagtctcactgtggctgcccaggctacagtgcagtggctcgatcttgggctctctccaatctccgccttggcaggttttcaagcaattctcctgcctcagcctccttagtagctgggaccacagacatcttgtcaccacacccagcttaactttttgtatttttggtagagacggggttttcgccatattgactggggctggtctcaaactcctgacctcaagtgatccacccaccttgggtcttcccaaagtgctgggatttacatgcgtgagcagccacacttgggcctacattttttctttatataccagaacatctataacagggcaccttatctactcattagtgaagagataattggattacacaggcaggcttgtttactacatccagaatgtagaaactgctttcctccaacatcttggttctagctagtaataacaatataattctttggcagatattccagaataacattttaaacctacattttcttagaaaattgcattccttgtagtgagcagtgtatggtctcttttgttcagaatttaaaactgataaccaatgaaaagccttttctcttattcctctaccgtcatttacatggataatctgaagctaattatgaccaatatttaaatactaagtgggtactaggggaactacaaggaatactggtaagccttaagccattggtatcactggccattagcatttaattaaccaaaactattaccggaattatgtgcataccaatggatggtttggtccctcctggttaaaatttttttaaataaaggttttaaggggttaagcagaagacaactgtcatactgaattttattaaaagtatatatacttcaaattcaaagcatcccttaggacccacagaatatattaaaactaccacccttaaattttatatttttgctttaagacagacaatgcaaaggtaactggcaagaggtgagcaaatgttttagaacatttatattattgcttaaaatgagatttgaaattgtaataaaattctcggttatgaagtctgatgtcttctctgagcaccagtttaaaaggaaacatttcaacagtaaataatcagtgtgtactttatt

SEQ ID NO: 146573 - DNA, 1554 bp, Homo sapiens
ccctgttgttcttcccatcggcgaagatggccctggagacggggccgaaggacctgcggcatctgcgggcctgtctgctgtgttcgctggtcaaggtactatagaccagtttgaatatgatggttgtgacattttgttatgcatatctacaaatgaagggtaaccgatgagatgggtatatgactgcactagctcttcctttgatggaatcattgcgatgatgagtccagaggacaagctgggtctccaaagtggcaagcgaagtcaagtaactttaagcccaggtgtatatgccggtgtcagtcactggtcgccttgcccccaagggaatccgtgccgggagctgaaaagtcggaggagtggccctacaaattccaggagacacagctaataaagacctagcaaagatgcaaggctgccagcatctttgctctccacctccgtgcctctgcattatttcttgttcgtggaacttaaatgaacagaactttcaaatacttcctaccctccaattcagactcagctcgactgttgagagagcagcacatcattttatcattttatcttctttggactacaggtggggtgggagggatttgggttgggtggattaacagatggaattgaggagagagtaggatgctgattttcctacccgtggcccaggtctgtgccttccccatgccaaaggactctaaggtcaaatgtcaataaatatgaacctcgagaaagttctgaaggccatgacacctgccttgcctccctcttccattctcttaggcacagtaatagcttatttgccctataagaaccttcccagagcagcagaggcccttctactccctcttgactgtctcagcctctgggattgcaagcctttgtaagtgtgcttccttggcttcctatcggagggtgctgatccaagaggctcaagtaacccccatcaacttgggtgggccctgggtggtctcacactttggtaatccttctggccccttcggaggaactggggaacagcagtattccctttgaaagaaaatcctgaaggcttttgtaagaagtgctccttgaccatgtttaataattcttccctcccctgccttgtctaattttcttcctcttcaacgggttcttccctaatacccttaggcccagtctccaagcactcaactgggagacccttggggccttggggcgacccattgagtccctagtctccccttgtttgtgccccctgtaggaggtaggtccttttcctcctccggcctagtaggggaccttgggtaacatcccatttttcggccaagggtgagttgttttaggataaaaaaatttaccacaaattctcatttaaatttccgacgagaaatcctgttcgtatcccccattttgatttccctaagttccttgttctccctctaaaaagagaatgattgcaccctacaagtttaccacaggaataaatatgattgtagaaacgaagatatatgaaaattatataagtaatatataaaagtgaaatacttttgctctccttaaaaaaaaaaaaaaaaa

SEQ ID NO: 146574 - DNA, 407 bp, Homo sapiens
gcatttggctgaagtttagggcctgtcctagccaattatgttctatttgaaaggctgatgcttaacttggtctattgcaggtcactacaacaaacccaccctctcccccaaatacatatttgttaaaaatgctctttaaactaaggactcctccctttatatctcatcacagttttattttaaagaactatgatatccagtatttttccatgagagatattgatcgacttggtatccagaaggtcatggaacgaacatttgatctgctgattggcaagagacaaagaccaatccatttgagttttgatattgatgcatttgaccctacactggctccagccacaggaactcctgttgtcgggggactaacctatcgagaaggcatgtatattgctgaggaaatacac

SEQ ID NO: 146575 - DNA, 1275 bp, Homo sapiens
atgtccctggccggagagcacaggccagagtggggtgacgtcatcgaaggcacgtcccagccttgcagagcggtgggcggggcctgcgaagaagaaaagaaaaggagtggagcatggtcccgctgccataagagaagctggcttgatgaaaaggctctccagtttggggatttactcactagccctgaaatagaagtgctgttcacagatattgctaaggtcaggactcattgtcccaagtccttacctggcactgaaactgtgcaaattatagagttgagttcgttcttcctgaatattctagggggaaaaaagaaaaaacagagttgggagcaggaaggctgccacctaaaagactttggagatttgagttttactccagtccccaaagatgatctctacaacaacctgatagtgaatccacgctcagtgggtcttgccaaccaggaactggctgaggtggttagcagagctgtgtcagatggctacagctgtgtcacactgggaggagaccacagcctggcaatcggtaccattagtggccatgcccgacactgcccagacctttgtgttgtctgggttgatgcccatgctgacatcaacacaccccttaccacttcatcaggaaatctccatggacagccagtttcatttctcctcagagaactacaggataaggtaccacaactcccaggattttcctggatcaaaccttgtatctcttctgcaagtattgtgtatattggtctgagagacgtggaccctcctgaacattttattttaaagaactatgatatccagtatttttccatgagagatattgatcgacttggtatccagaaggtcatggaacgaacatttgatctgctgattggcaagagacaaagaccaatccatttgagttttgatattgatgcatttgaccctacactggctccagccacaggaactcctgttgtcgggggactaacctatcgagaaggcatgtatattgctgaggaaatacacaatacaggccaaaggaacactaccgagaactttgacacaagttctcaaaccttaacagaagggttgctatcagcactggatcttgttgaagtcaatcctcagttggccacctcagaggaagaggcgaagactacagctaacctggcagtagatgtgattgcttcaagctttggtcagacaagagaaggagggcatattgtctatgaccaacttcctactcccagttcaccagatgaatcagaaaatcaagcacgtgtgagaatttag

SEQ ID NO: 146576 - DNA, 558 bp, Homo sapiens
ttttagttgaacagggatggtttatttcattatcttaaaaggtttcttttaatctactatagcacaacagtgttttaacttaaattcatggccaagaggatgaggtgcaaggggcttcctaaaaataggtattttctactataaaatggactcttgtttttactttggcttgttctccctgtcccagtgggatgaccctcactgagagtagcagcaagggaacctgagggttttgtcacactttgttcttccagggttgctatcagcactggatcttgttgaagtcaatcctcagttggccacctcagaggaagaggcgaagactacagctaacctggcagtagatgtgattgcttcaagctttggtcagacaagagaaggagggcatattgtctatgaccaacttcctactcccagttcaccagatgaatcagaaaatcaagcacgtgtgagaatttaggagacactgtgcactgacatgtttcacaacaggcattccagaattatgaggcattgaggggatagatgaatactaaatggttgtctgggtcaatactg

SEQ ID NO: 146577 - DNA, 2498 bp, Homo sapiens
  misc_feature (1)...(2498): n = a,t,c or g
accgtagtagaatgcctatcgccagcttggcacgaggagagcagcggcgggcggtggcgctcactcccggcttccaaccgcgcggagcctctgccttggagattctcagtgctgcggatcatgtccctaaggggcagcctctcgcgtctccttccagacgcgagtgcgttccatcctgaagaaatccgtccactccgtgcatgtgataggagccccgttctcacaagggcagaaaagaaaaggagtggagcatggtcccgctgccataagagaagctggcttgatgaaaaggctctccagtttgggctgccacctaaaagactttggnaggatttgagttttactccagtccccaaagatgatctctacaacaacctgatagtgaatccacgctcagtgggttcttgccaaccaggaactggctgaggtggttagcagagctgttgtcaagatggctacagctgtgtcacactgggaggagaccacagcctggcaatcggtaccattagtggccatgcccgacactgcccagacctttgtgttgtctgggttgatgcccatgctgacatcaacacaccccttaccacttcatcaggaaatctccatggacagccagtttcatttctcctcagagaactacagggataaggtaccacaactcccaggattttcctgggattcaaaccttgtatctcttctgcgagaattgtgtatattggtctgagagacgtgtaccctcctgaacattttattttaaaaggaactatggatatccagtattttttccatggaggagatattggatcgaacttggtatccaggaaggtcatgggaacggaacatttgatctggctgattggcaagagacaaagaccaatccattttgagttatgatattgatgcatttgaccctacacatgctccagcccacagaacatcctgttgtcggtgacataacctatcgagaagccatgtatattgctgagaaaatacacaagtacagggtttgctatcagcactggatcttgttgaagtcaatcctcagttggccacctcagaggaagaggcgaagactacagctaacctggcagtagatgtgattggccttccaagcctttgggtccagacaagagaaggaggggcatattggtcctatgacccaaccttccctactccccagttcacccagatgaatcagaaaatcaagcacgtgtgagaatttaggagacactgtgcactgacatgtttcacaacaggcattccagaattatgaggcattgaggggatagatgaatacttaaatggttgttctgggtcaatactgccttaatggggacatttacacattcctcacaattgtaaagtttcccctctattttgggtgacccaatacctactgtaaatgtatttggttttttgcagttcacagggtattaatatgctacaagtactatgtaaaatttaaagaagtcataaaaccagcatttattaccttggtatatcatactggtcttgttgctgttgttccttcacatttaagtggtttttcatctttcctccctcctcccacagcctggctatacagtgcatccttgaactgttcagcccacagcagcaatatgcttagttctatccaacatcccctaaccatcatgcattcaccaaggtcaaaagttctggtcccacaaacccttccctaatagaagttcaaatggctgcggaaagaatttgtaggtaaaccagggcctcccagggatggtcgagcttccagtaagatgataatggaaagcagcagcttggttggtttgtcacttttctgggacattggaacgggagaatctttcccgacttttgctcaagttttcacttggtgtttacacagtctactcttggtacgttctaactggtctcgttgttcccccagctcttctatgatttctgagccaatctggtcagtctctgtggcaatccgatgagaacgttcaatacttttgggtggcccggttcaggctttcagtgccctgcagaagcattgccctttgagactgtagccgattcatatgctcattctctacagcatatatgccatatttcatgtctcctcggccctccaggtgtggctgtcaaaggtgtgcttctcacctcccgatggagtttagcaaggtcccttccggtagtttcgaagcttagacatcatggggtttcgcaaagtcacgggctgtcataacgtagctcctcctccatctctgccagcgtttcatttgcttcctgttgcttttcatcaaaatccctgatcaatttcttcttttattcggtccccgccgtccccagcagccgctcgggcaccccttgtaggtcttcatggaggccgcggaagatctcgtgcagcttctcgaaatgctccgaggaggcggcggaggaggccatggcgcaggccgcgctggagcagcggccaccgagattcggggccctgggccctttccttagcccggcggaat

SEQ ID NO: 146578 - DNA, 426 bp, Homo sapiens
  misc_feature (1)...(426): n = a,t,c or g
gcagcccctaccccaacacctggcatcatcgcctgttgcagaggagcctcgtgctnttctcggttggggtggtcctagccctggtgctcaacctgctgcagatccagaggaatgtcactctcttccccgaggaggtgatcgccaccatcttttcctccgccatggtgggtccctccctgcatgcgggacancanntggtatacatccccagatttctctatattcgttcttggctcccttgtatatttttctcaggaggcgtcacggtggggaacataggacgacagttagctatgggtgttcctgaaaagcccatagtgattgagtcttcaaaaccacngattcttgagagcnaaggaagatttttggaagaaaatctgganttggtggattatgncaaaggattatcctttttccttaagtaat

SEQ ID NO: 146579 - DNA, 436 bp, Homo sapiens
  misc_feature (1)...(436): n = a,t,c or g
gactcctcctttccncngccccgcctccgttcggagagccggcgggcgngcgcctctcggccaggaagcgcctcttggacgcgtgtnaccgatgcccagaagtggccttgggctggggatcaccatagcttttctagctacgctgatcacgcagtttctcgtgtataatggtgtctatcagtatacatccccagatttcctctatattcgttcttggctcccttgtatatttttctcaggaggcgtcacggtggggaacataggacgacagttagctatgggtgttcctgaaaagccccatagtgattnagtcttcaaaaccaccgattctgagagcaaggaagattttggaagaaaatctgactgtggattatgacaaagattatctttttttcttaagtaatctatttagatcgggctgactgtacaaatgact

SEQ ID NO: 146580 - DNA, 474 bp, Homo sapiens
cggacgcgtgggcggacgcgtggggctgtccttgactttagcagccctatctttgggcctttggtggacatttgatcgttccagaagtggccttgggctggggatcaccatagcttttctagctacgctgatcacgcagtttctcgggtataatggtgtctatcagtatacatccccagatttcctctatattcgttcttggctcccttgtatatttttctcaggaggcgtcacggtggggaacataggacgacagttagctatgctgatacccttctgtgaggagttgaatttgaagaccacttggctgtttcacaaaaccagaagtaattacagggtgttcctgaaaagccccatagtgattgagtcttcaaaaccaccgattctgagagcaaggaagattttggaagaaaatctgactgtggattatgaccaagattatcttttttcttaaggaaaccatttaaaaccggg

SEQ ID NO: 146581 - DNA, 2817 bp, Homo sapiens
gcggccgcctcaccagaccgcgtgcggacgggctcgcgggcggggcggggcaagctcaggccacgcccctgggcggtgcgcgcgggcggtgggtaggccgggcaggctcacgtgatgcgggccccgcggcccgccatataaacccgcgcgcccgccaggcgctgcggccgtcccgggccgtgactcctcctttcccccgccccgcctccgttcggagagccggcgggcgggcgcctctcggccaggtacgcggccggctgggataggggtcgcgggcgggctttggtcgcgcagcagccggtcctccccggaggtaggcgggcgcgggccctgttgggtctttgggacgcgggtcccgctggggccggggatgctcctctctgtgagcgcgggtcccgtccgccgctggccccgggcgggcgcacgggggtctaacttggggggggcggcgctgccgcctggcccgggtgccggggttcgcgtcccgcggggccttcctcgctctttgtctcttctgagtgaacttgatgacccccttcttccaggaagcgcctcttggacgcgtgtgaccgatgcccagattgcacgaccacttctggagctgctcctgtgcgcacagcgcgaggcgccgaggccccccgcgagccatcgccgcggggctggcggccaaggttggggagatgatcatcgttttcgtgtccgggccctccctgatggcggtcctcagtgcctcggacgctgaccccgcgcccaggggccgaagtgctgtgaagagcggcccctatcccggcagtccttaccccaacacctggcatcatagcctgatgcaaaagagcctcgtgctcttctcggttggggaggtcctagccctggtgctcaacctgctgcagatccagaggaatgtcactctcttccccgaggaggtgatcgccaccatcttttcctccgcctggtgggtccctccctcgctgcgggacagcacctgctgatgttggcctactgtacccctgtatcgacagtcacctcggagaaccccacaaatttaaggagagaatgggccaagtgtcaatgcgctgcatagcagtttttgttggcattaaccacgccagtgctaaattggattttgccaataatgtccagctgtccttgactttagcagccctatctttgggcctttggtggacatttgatcgttccagaagtggccttgggctggggaatcaccatagcttttctagctacgctgaatcacgcagtttctcgtgtataatggtgtctatcagtatacatccccagatttcctctatattcgttcttggctcccttgtaatatttttctcaggaagcgtcacgggtggggaacataggaccgacagttaggctatggggtgttcctggaaaagccccatagtgattgagtcttcaaaaccacccgattctgagaggcaagggaagattttgggaaggaaaatcttgactgtgggattatgacaaaagattatccttttttcttaaagtaatcgtatttagatcggggctgactgtacaaatggactcccggggaaaaaactcgtcacctatctagaaaagtcaagaataggggaggtgggagaatgatgactttaccctggaagtcttcccttggactgcccgcactggcgcctgtctgttgccctgggagcattctgcccaggctacgtggggtttcagggcaggtgggcagctttcccaagtattcgattttcattcatgtggattaaaacaagttgccatatttcaaagccttgaactaagactcaattaccaacccgcagttttgtgtcagtgcccaaaggaggtaggttgatgggtgcttaacaaacatgaagtatgggtgtaatagggattaatatttatccaaaagatttttaaaaaatagggctgtgtttaaaaaaaaaaaccaaaaccaggaaaagcagcagtgattatagagaggtcacactctaagtggggtcgcggcgtggccacgctttcacggtcacgctcgtccgtcctgcagtggcgtgtttacatggtcacacggtgtgtgtatccaccagtgggtcaactgcttgtcattcctcccgtgggcagtttgtgtaggacaatcttactggggcaaaagggcaatgaaaagtcttgggctcccacactgcgatatattggaattcccacctcaagtttatgaagtttatttccgaaaatccattagtcatctaagaatgaatacctggtctgccatgtatttcaatccttagtgagccaaaattgttttgtttggttactacagaatagagatgactggttttttgccacagccccatggaattttggcaatctgtgattgccttgtaaaaaaggagagtgtcatatggcactgtcatttaaacgtgtggtgtttctagtcaatgatattggtgagcacaatgtattcatttaatggcatagaccataccagacctaatttgcaagtattgggtcttcaaacttcaagtgcaatgtattatgaaaaccaatctgagccttgtatctcttaaatatttattccttctaacgtgtgagatgtcccgagagaagggttctccattcatttcagtgctgcctggaggaaactcggcaatgatttctttccagtttgtgaagttcctttcgtgttacaccctccactggaaccctcaaccttcgaaatactccagttttgggggttggggccatttacttataaatttaccgccgggtttttggaatctacatgtcttgggggcgggctcaaattcttcgaaagtggttggattaaaa

SEQ ID NO: 146582 - DNA, 371 bp, Homo sapiens
aaattccaagaacggggaataatacagattaaatacccacctgtgcattcacactctcacacacacacacacgccacgcacatatccaagctccaacggtgacaaatcaaacacctgttttcctctccacgacggtaagagtctagctcttcatctgagggtgcaaactcctttttgaagatcatgacatagcgacagtcatcatcttccccaaaggagaaggatgtcaggccagccacttccaccacatcatgtagtatgctcctctcgatcttgttcattggctgaaactttttcttgatctgcccactgtcttgaatgaaatctgacacctccttctccatccttttacgaaactccactttctgttg

SEQ ID NO: 146583 - DNA, 352 bp, Homo sapiens
  misc_feature (1)...(352): n = a,t,c or g
ggcacgaggcgctgttaccggaagtacaagcagtttgcactctataagaagatgacccaggcggccatcctgatccagagcaagttccgaaggggaggtggtgtacataggaacgcgttgcggagtccgccccgtcccccgaggggaggggtcttgtacatactgtaacatacagagtatagtgaagaatctatttaaggcgccgcggggagggctgcacggccgggcttgtggttctctagcgcggcgggggcctcctgccggctccacgggcactttctacttgtgcatgggcttggtttatacgaattgccattaaacatcgctgccccnnnnnnnnnnnnnnnnnnnn

SEQ ID NO: 146584 - DNA, 448 bp, Homo sapiens
tgtgggctgcgtctttggctgctcccttgccgatgaggtggctgtacttgtccttgtagtcgctggcagggctcaccaccacaggcccctgctgggctgcctcctcctcttgcctctgggccagctccttcagcttccgcttctcctcagccttctgggggtcccattcctctccacgacggtaagagtctagctcttcatctgagggtgcaaactcagtatgctcctctcgatcttgttcattggctgaaactttttcttgatctgcccactgtcttgaatgaaatctgacacctccttctccatccttttacgaaactccactttctgttgtttctcttgctcttgtagtttcttcaggcgggcggcctgttctcgggccttgcgccgagtctcctggtcaccgaggctgggtggcttctccatggagctcaggatggagcccagt

SEQ ID NO: 146585 - DNA, 481 bp, Homo sapiens
aataccctgtaagggtctgaataaatgaatgagtgaggggatgaacgcccaactccagtcacatggtctctgacttctgtctgcagggtggggtcaaggtgctcatcacaggtccttggaccgaagccgccgagcattactcctgtgtctttgatcacatcgcagtgccagcctcacttgtccagcctggtgtcttacgctgctactgtcccggtatgaggattgggaaccgtagcggtagggactgacatgtgggcagttaggacagatcaggacctccaggcttccagaaagcactgggaacaaatgggttgttttgagagcacaaggacttcatccagtcctgaggttgagccccaagctctcccagcaggcagaagagcccagacttaggtgtcagaagatcgaggttcctgtccaagaagtctacctcttagcttaccaatgacctcagatgagtctgatctctctgaagcccttg

SEQ ID NO: 146586 - DNA, 4558 bp, Homo sapiens
cccttatcccttcccagaatgatatggccccagttcaaaccccacccccaccctcaaatttttcatccgggattaaaaggggggggtttttgcccatgaccttgttcctctccctttccaaggcacagactccccctccccccgggcccctccaggccggggggtgcccttgccccctggagccctcaccatgaataccagggaccaccccgagggttgctgaaaccagccaccacctgaagatctttctccccaagaagctgctggagtgtcttcctcgctgcccgctgctgcctccagagaggctacggtggaatacaaatgaggagattgcatcctacctgatcacctttgagaagcatgatgagtggctgtcttgtgccccaaagacaaggcctcagaatggctccatcatcctctacaatcgcaagaaggtgaaatatcggaaggatggttacctctggaagaagcggaaggatgggaagaccacccgagaggaccacatgaagctgaaggtccagggcatggagtgtctctatggctgctacgttcactcttccatcgtccccacattccatcggcgctgctactggctgctccagaaccctgacatcgtccttgtgcactacctgaacgtcccagccctggaggactgtggaaagggctgcagccccatcttttgttccatcagcagcgaccgtcgagagtggctgaagtggtcccgggaggagttgttgggacagctgaagcccatgtttcatggcatcaagtggagctgcgggaatggaacagaagagttctctgtagaacacctggtgcagcagattttggacacccacccaaccaagcctgctccccgaacccacgcctgtctctgcagtggggggcttggttctgggagccttacccacaaatgcagcagcacgaaacaccgcatcatctctcccaaagtggagccccgagctttaaccctgacctctatcccccaccctcaccccccagagcctcctccactgatagccccacttcccccagagctccccaaggcacacacctccccatcttcttcctcttcttcctcctcatcaggttttgcagagcccctagaaatcagacctagccctcccacttctcgagggggttcttcaagaggaggcactgctatcctcctcctgacaggactggagcagcgggctggaggcttgacgcccaccaggcacttggctccacaggctgatcctaggccttccatgagtttggcagtggttgtaggcactgagccttctgccccaccagctcctcccagtcctgcctttgaccctgatcgttttctcaacagcccccagaggggccagacatatggaggggggcagggagtaagcccagacttccccgaggcagaggccgctcataccccctgttctgccctagagcctgctgctgccctggagccccaggcagctgctcggggtcccccaccacagtcagtagcaggtgggagaagaggaaactgcttcttcatccaagatgatgacagtggggaggagctcaagggtcacggggctgccccacccataccttcaccccctccctcacccccaccctcacctgcccccttggagccgtcaagcagggtaggaagaggagaggccttgtttggaggacctgttggggccagtgaactggagcccttcagtctttcatcattcccagaccttatgggagaactcatcagtgacgaagctccaagcatccctgctccgaccccccagctgtctcctgctcttagcaccatcacagacttctccccagagtggtcctacccagagggtggggtcaaggtgctcatcacaggtccttggaccgaagccgccgagcattactcctgtgtctttgatcacatcgcagtgccagcctcacttgtccagcctggtgtcttacgctgctactgtcccgcccatgaggtagggctggtgtctttgcaggtggcagggcgggaggggcccctttctgcttctgtgctctttgagtatcgagcccgccgattcctgtctctgcctagtactcaacttgactggctgtcactggacgacaaccagttccggatgtccatactagagcgactggagcagatggagaagcggatggcagagatcgcagcagctgggcaggtgccttgccagggtcctgatgctcctccagttcaggatgaaggccaggggcctgggttcgaagcacgggtagtggtcttggtagaaagcatgatcccacgctccacctggaagggtcctgaacgtctggcccatggaagccccttccggggcatgagccttctgcacctggctgctgcccagggctatgcccgcctcatcgagaccctgagccagtggcggagtgtggagactggaagcttggacttagagcaggaggttgacccgctcaacgtggatcatttctcttgcacccctctgatgtgggcttgtgccctgggacacctggaagctgctgtgctccttttccgttggaaccgacaggcactgagcattcccgactctctgggccgtctgccattgtctgtggctcattcccggggtcatgtgcgccttgcccgctgccttgaggaactacagagacaggagccttcggtggagcccccatttgccctatcgccaccctcctccagcccagacactggtctgagcagcgtctcctcgccctcggagctgtcggatggcaccttttccgtcacgtcagcctattctagtgccccagatggcagtcccccccctgcacctctgccagcctctgagatgactatggaggacatggccccaggccagctttcctctggtgtcccagaagcccccctactcctcatggactatgaggctaccaaccccaaggggcccctctcctcccttcctgccctcccaccagcttcagatgatggggctgctccagaggacgctgacagcccacaggctgtggatgtgatcccggtggacatgatctcactagccaagcagatcatcgaagccacaccggagcggattaaacgagaggacttcgtggggctgcccgaggctggagcctcaatgcgggagcggacaggggctgtggggctcagtgagaccatgtcctggctggccagctacctggagaatgtggaccatttccccagctcaacccctcccagcgaactgccctttgagcgaggtcgcctggctgtcccttcagcaccctcctgggcagagtttctctctgcatccaccagtggcaagatggaaagtgattttgccctgctgacactatcagatcacgagcagcgggaactgtatgaggctgcccgagtcatccagacggccttccgaaagtacaagggccggcggctgaaggagcagcaggaggtagcagcagctgtaatccagcgctgttaccggaagtacaagcagctgacctggattgcacttaagtttgcactctataagaagatgacccaggcggccatcctgatccagagcaagttccgaagctactatgaacagaagcgatttcagcagagccgccgagcggctgtgctcatccagcagcactaccgctcctaccgccgcaggcccggccctccccaccggacttcggccaccctgcctgcccgcaacaaaggctcctttctcaccaagaagcaggaccaggcagcccggaagatcatgagattcctgcggcgctgccgacacaggatgagggaactgaagcagaaccaggagctggaagggcttccccagccgggactggccacatgacctggccaccgcctttctcaccaccctgggggcgcctcgtgcagtcttaacagggagagggctttctggggcagggggagcccctgtcggcagctttcctgttcacctttgttggagccctctgtaggcctcctccctcctccccacgccttgctcccacacccctctcctcgtccctcctggtcgtgccccgtctcttttggtcctggctccagaaaacccgcgccccacatacctgcatcttccgctgtgacctccggagccctgcctgcccctgctccccagctcctcctgcctgcacccgactcggccccctcctgacttgccttatttatttgttcgacgcgtctctgaatgtatccgcctcggttcccaccactgccttcgctgcgcacgcccctcgtgtttcagggctgaccgtgtccccacccgactccgcatgtttgcgtctgtttcctccctctctggccctgtcttaccccatcacccgactctggccactgacctcagggccgaaggggaggtggtgtacgtaggaacgcgttgcggagtccgccccgtcccccgaggggaggggtcttgtacatactgtaacatacagagtatagtgaagaatctatttaaggcgccgcggggagggctgcacggccgggcttgtggttctctagcgcggcgggggcctcctgccggctccacgggcactttctacttgtgcatgggcttggtttatacgaattgccattaaacatcgctgcacc

SEQ ID NO: 146587 - DNA, 5243 bp, Homo sapiens
atgcaggtgcaggatgatggagtcaacctcatcccctttgccaagtgttccagggtggtcagccgatctccacccccaaggttgccttcccagagcctcagacccatgccccagcgttatggagatgtcttctggaagaaccttaatcaaaggcccacccccacttggctggaggagcagcacattccacccatgctgagagccactggttgctcccagcttggtctgtatcctcctgagcagctcccaccccctgaaatgctttggagaagaaagaagaggaggccatgtttggaaggaatgcagcagcagggccttgggggagtccccgcccgggtgagggctgtcacttaccacctggaggacctaagaaggcgtcagagcatcatcaacgacacagactccccctccccccggcccctcaggccgggggtgaccttgccccctggagccctcaccatgaataccaaggacaccaccgaggttgctgaaaacacccgcccccctgaagatctttctccccaaaaagctgctggagtgtcttcctcgctgcccgctgctgcctccagagaggctacggtggaatacaaatgaggagattgcatcctacctgatcacctttgagaagcatgatgagtggctgtcttgtgccccaaagacaaggcctcagaatggctccatcatcctctacaatcgcaagaaggtgaaatatcggaaggatggttacctctggaagaagcggaaggatgggaagaccacccgagaggaccacatgaagctgaaggtccagggcatggagtgtctctatggctgctacgttcactcttccatcgtccccacattccatcggcgctgctactggctgctccagaaccctgacatcgtccttgtgcactacctgaacgtcccagccctggaggactgtggaaagggctgcagccccatcttttgttccatcagcagcgaccgtcgagagtggctgaagtggtcccgggaggagttgttgggacagctgaagcccatgtttcatggcatcaagtggagctgcgggaatggaacagaagagttctctgtagaacacctggtgcagcagattttggacacccacccaaccaagcctgctccccgaacccacgcctgtctctgcagtggggggcttggttctgggagccttacccacaaatgcagcagcacgaaacaccgcatcatctctcccaaagtggagccccgagctttaaccctgacctctatcccccacgctcaccccccagagcctcctccactgatagccccacttcccccagagctccccaaggcacacacctccccatcttcttcctcttcttcctcctcatcaggttttgcagagcccctagaaatcagacctagccctcccacttctcgagggggttcttcaagaggaggcactgctatcctcctcctgacaggactggagcagcgggctggaggcttgacgcccaccaggcacttggctccacaggctgatcctaggccttccatgagtttggcagtggttgtaggcactgagccttctgccccaccagctcctcccagtcctgcctttgaccctgatcgttttctcaacagcccccagaggggccagacatatggaggggggcagggagtaagcccagacttccccgaggcagaggccgctcataccccctgttctgccctagagcctgctgctgccctggagccccaggcagctgctcggggtcccccaccacagtcagtagcaggtgggagaagaggaaactgcttcttcatccaagatgatgacagtggggaggagctcaagggtcacggggctgccccacccataccttcaccccctccctcacccccaccctcacctgcccccttggagccgtcaagcagggtaggaagaggagaggccttgtttggaggacctgttggggccagtgaactggagcccttcagtctttcatcattcccagaccttatgggagaactcatcagtgacgaagctccaagcatccctgctccgaccccccagctgtctcctgctcttagcaccatcacagacttctccccagagtggtcctacccagagggtggggtcaaggtgctcatcacaggtccttggaccgaagccgccgagcattactcctgtgtctttgatcacatcgcagtgccagcctcacttgtccagcctggtgtcttacgctgctactgtcccgctttgcccttaccctacactcaaaaatcagccttactaggggacctcaaggaccaccaaagtgacaggttggcagctttgctgtctacgagtgtgttctcccccagtctctacagcagcatccagcatgtgtcccatgaggtagggctggtgtctttgcaggtggcagggcgggaggggcccctttctgcttctgtgctctttgagtatcgagcccgccgattcctgtctctgcctagtactcaacttgactggctgtcactggacgacaaccagttccggatgtccatactagagcgactggagcagatggagaagcggatggcagagatcgcagcagctgggcaggtgccttgccagggtcctgatgctcctccagttcaggatgaaggccaggggcctgggttcgaagcacgggtagtggtcttggtagaaagcatgatcccacgctccacctggaagggtcctgaacgtctggcccatggaagccccttccggggcatgagccttctgcacctggctgctgcccagggctatgcccgcctcatcgagaccctgagccagtggcggagtgtggagactggaagcttggacttagagcaggaggttgacccgctcaacgtggatcatttctcttgcacccctctgatgtgggcttgtgccctgggacacctggaagctgctgtgtctccttttccgttggaaccgacaggcactgagcaatcccgactctctgggccgtctgccattgtctgtggctcattcccggggtcatgtgcgccttgcccgctgccttgaggaactacagagacaggagccttcggtggagcccccatttgccctatcgccaccctcctccagcccagacactggtctgagcagcgtctcctcgccctcggagctggacggatggcaccttttccgtcacggcagcctattctagtgccccagatggcagtcccccccctgcacctctgccagcctctgagatgactatggaggacatggccccaggccagctttcctctggtggcccagaagcccccctactcctcatggactatgaggctaccaactccaaggggcccctctcctcccttcctgccctcccaccagcttcagatgatgggggtggtccagaggacgctgacagcccacaagctgtggatgtgatcccggcggacatgatctcactagccaagcagatcatcgaagccacaccggagcggattaaacgagaggacttcgtggggctgcccgaggctggagcctcaatgcgggagcggacaggggctgtggggctcagtgagaccatgtcctggctggccagctacctgggagaatgtggaccatttccccagctcaacccctcccagcgaacttgccctttgagcggaggtcgcctgggcttgtcccttacagcaccctcctgggcagagtttctctcttgcattccaccagtgggcaagattggaaagttgatttttgccttgttgacattattcagattcaagagcagcgggaactgtatgaggctgcccgagtcatccagacggccttccgaaagtacaagggccggcggctgaaggagcagcaggaggtagcagcagctgtaatccagcgctgttaccggaagtacaagcagtttgcactctataagaagatgacccaggcggccatcctgatccagagcaagttccgaagctactatgaacagaagcgatttcagcagagccgccgagcggctgtgctcatccagcagcactaccgctcctaccgccgcaggcccggccctccccaccggacttcggccaccctgcctgcccgcaacaaaggctcctttctcaccaagaagcaggaccaggcagcccggaagatcatgagattcctgcggcgctgccgacacaggcattccgcccttccctttaagacgcaccgccccctctcagtcactcccaagatggcggacctactgggctccatcctgagctccatggagaagccacccagcctcggtgaccaggagactcggcgcaaggcccgagaacaggccgcccgcctgaaggagactacaagagcaagagaaacaacagaaagtggagtttcgtaaaaggatggagaaggaggttgtcagattttcattcaagacagtgggcagatcaagaaaaagtttcagcccaatgaacaagatcgagaggagcatactacatatgttggtgaaatgtggctgggcctgacatccttctcctttgggggaagatgatgactgtcgctatggtcatgatcttcaaaaagggagttttgacccttcaatgaaagaacttgactctttacccgtcgtgagaggaaatgggacccccagaaaggctgaggagaagcgatagctgaaggatcttggccaaaaggcaagaggaggaggcaagccccagcagggggcttgtggtggtgagccctgccagcgattacaaggacaagtacagccacctcatcgccaagggagcagccaaagacgcagcccacatgctacaggcccaataagaccctacgggctgtgtgacccgtgggcccaataaggagggaccacaacgctcccattgaaggaggcctatgaattgagatcaagagccaaagaaagcgtcctgcggcaagaagtggggaaagagttgccgcccaacctccctaagcgccccgcccagctccctttgaacccctggggcagggcagggggcagggagagacaaggctgctgctatttaggagccccatcctggggagccccacctcttgaaccacctcctaacaagttgtccttcaggctgggggggaaaacaggtgtttgatttgtcaccgttggagcttggatatgtgcgtggcatgtgtgtgtatagagtagagagtgtgaatgcacaggtgggtatttaatctgtattattccccgttcttggaattttctatccccattggggctcggggtactattacatttcaagtaaatgacgtgtttaacccaaaaaaaaaa

SEQ ID NO: 146588 - DNA, 1065 bp, Homo sapiens
tgtctcagcggctgccaacagatcatgagccatcagctcctctggggctagctatatgacaacagaactctcaccaaaggaccagacacagtgggcaccatgggacagtgtcggtcagccaacgcagaggatgctcaggaattcagtgatgtggagagggccattgagaccctcatcaagaactttcaccagtactccgtggagggtgggaaggagacgctgaccccttctgagctacgggacctggtcacccagccagctgccccatctcatgccgagcaactgtggcctggaagagaaaattgccaacctgggcagctgcaatgactctaaactggagttcaggagtatctgggagctgattggagaagcggccaagagtgtgaagctggagaggcctgtccgggggcactgagaactccctctgggaattcttggggggtgttggggagagactgtgggcctggaaataaaacttgtctcctctaccaccaccctgtaccctagcctgcacctgtcctcatctctgcaaagttcagcttccttccccaggtctctgtgcactctgtcttggatgctctggggagctcatgggtggtggagtctccaccagagggaggctcaggggactggttgggccagggatgaatatttgagggataaaaattgtgtaagagccaaagaattggtagtagggggagaacagaagaggagctgggctatgggaaatgattttgaataatggaagctgggaatatggcatggatatctggtactaaaagaagggtcgtttaagaacctctttccttatctctttccgcaatccaaaccatagctgtctgtccaagtgctctcttcctgcctccagctctgccccaggcctcctcctagactctgtccctgggctagggcaggggaggagggagagccagggttgggggagaggctgaggagagtgtgacatgtggggagaaggaccaagctgggtgcttgggcattgacagaaatgatggtgtgttttggtatcatttgattaataaaaaaaaaatgaaaaaagtgaaaaaa

SEQ ID NO: 146589 - DNA, 511 bp, Homo sapiens
aaccttctgctgtgtatgtatgccaaggagaccgtgggctttggaatgctcaaggccaaggtgtgtatgtgcccatccctccatagccctgggcccagccttcgtgcttttacactgtgttcactcccaccaggaccctgtttctagagttctcatgtctactcagtccatttctggtgtgggccagctcccaagagcaggtgggggttgggggctggttgcttcctatggcactgggagcagacctggatttggggtccctaatgccaggctgtgtgcgggactgatctctgttctccctctgcaggcccaggctttggtgcagtacctggaggagcccctcacccaagtggcggcatcttaacggcattggtggaagctggggtcagaaaagagaaatgaccatttggaggggcggggcctcctagaagaaccttcttagacaatggggggaggatgggactttgttttttccaagaataaacttcaactcctgtcaaaaaaaaaaaaa

SEQ ID NO: 146590 - DNA, 419 bp, Homo sapiens
cggagatctgggtgcaaaagcccagggttaggaaccgtaggcatgctgcgccccaaggctttgacccaggtgctaagccaagccaacactggaggcgtccagagcaccctgctgctgaataacgagggatcactgctggcctactctggttacggggacactgacgcccgggtcaccgctgccatagccagtaacatctgggccgcctacgaccggaacgggaaccaagcgtttaatgaagacaatctcaaattcatcctcatggactgcatggtatggagaggggagccagacttcccctgtcccccaaaggggatcccaagggggcgacctggaccccatcctggatggttggaggggcagggacaggatctccggaagattactaagagttggtctgcagcagcatttgtaatagg

SEQ ID NO: 146591 - DNA, 698 bp, Homo sapiens
ctcccagggcgtcccggagcaggccaacgggactacgggaagcagcgggcagcggcccgcgggaggcacctcggagatctgggtgcaaaagcccagggttaggaaccgtagcaatgctgcgccccaaggctttgacccaggtgctaagccaagccaacactggaggcgtccagagcacccctgctgctgaataacgagggatcactgctggccctactctggtttacgggggaccactgacgccccgggttcaccggctgccatagcccagtaacatctgggcccgcttacggaccggaaacgggaacccaagcgtttaatgaagacaatcttcaaatttcatccttcatgggacttgcatgggaggggccgtgttaggccattcacccgagttggccaacctttcttgcttgttgtattgtattgccaaggaggaccgtggggcttttgggaattgcttcaaggccaagggcccagggcttttgggtggcagttacctggaggagcccctcacccaagtggcggcatcttaacgggcattggtggaagctgggggtcagaaaagagaaatgacccatttggaggggctggggggcctcctaggaagaacctttttaggacaatggggggaggatgggactttgttttttccaagaataaacatcaactcctgtcatgaaaaaaaaaaaaagtcgacc

SEQ ID NO: 146592 - DNA, 794 bp, Homo sapiens
  misc_feature (1)...(794): n = a,t,c or g
tctagcagccaacgagggcgctacaaagtttggatcccaagcgagtcagaaggcgtccgagctgggccacagcctgaacgagaacgtcctcaagcctgcgcaggagaaggtgaaggagggaaagatttttgatgatgtctccagtggggtctctcagttggcgtccaaggtccagggagtcggtagtaagggatggcgggacgtcaccacctttttttcggggaaagcagagggccccttggacagcccctcggagggccacagttatcagaacagcggtctggaccacttccaaaacagcaacatagaccagagcttctgggagacctttggaagtgctgagcccaccaagacccgcaagtccccgagcagcgacagctggacgtgcgcggacacctccaccgagaggaggagctcggacagctgggaggtgtggggctcggcctccaccaacaggaacagcaacagcgacggcggggagggcggggagggcaccaagaaggcagtgccgccggccgtgcccactgatgatggctgggacaaccagaactggtagggcccactgcgcccccgtccccagcgcccccgggcgacttcgtgtttgcactctgccctcgtcgntcctcctccttccatttgacccaagaatcagcaactgcagtgtgaggacagcgtctcgggaggcaggacccttaggagaccccggtgtgcgccgcctgcgcgtggggagttcttctgtgcgtgggggccggctgctgtccagcctgtggtggggcccgccggtcccacactcc

SEQ ID NO: 146593 - DNA, 323 bp, Homo sapiens
ccctagacccaggcaccacgcacaggcatcccctgctcagctcgtgaacccggcccctcctgcctggccacgtgctatcgcgggtctgacagcacaggcccaggcaggcgtggactcgggagccgagggtggtcggatggcagcgtgagcgccagtatcatttccagcatttccatctttaccactccagtcactctcttcaaaaagaaagaactagagcaaaaccaaagttaaatatctcaacgagaagggacggtgctgatgcaggggagccacagagggttacgaccgacgcgggtctgacagcacaggcccagcaggcg

SEQ ID NO: 146594 - DNA, 4698 bp, Homo sapiens
atggcgcagccgctgcagagaacacacaggcagcggctcctccaaacattccgcataaaattaccagacgacccagcaaccccacgtcggggcacaggcccccaacacctgaacgcggggtctggccgagacgtgcacacccagaaccttcctgaacttcctggcccctcccagtccacctccagccccgcctcctccttggagccccccagttaccctgaaccagtgccccctacaccgccccccgtcccctgcctggagctgcgtcctgcggcacagcgcaggacaggctattcagctggtgtccagtccgcctgtgctgtatgctccctgcagccgggagcagccaccacgcatccatccacccttccgtcctccctgagggctggcactgcctcccggatcctgccgcgtacacagcagcgtcctggggtgacggtttctgcgctcttccctctgcaacttccatctgccatcgatcctgcacagtgtgttcgtgtctcaggcaccttggcttcctcagactccgaggtcggtcccgtcaacccaggactgcaccaggaagaagctgcagcagctggagggctcgtcctcttgggggctgtggagctctgctgccgacgtcccaggcctctaacactgtggctgcagatattccgtctgttgttgtccaggcaggaggtgaccctggccctattactgcatgtcggccccaaagcctttctgaatcacgctctctccatcgacaccgtccccagcatggacctagatggggtccttacacctgggggtgctggtgaccccattttacagatgacgagactatggtcaggaccaaatggcagagtcagagttcataacctgatgcgtgaccccggggtcctcaccacccagcggcagcgcccccagcccccgctggtgctgcgacacttccagcaccgcccagcagctgcggtatcagggaaggccgagcatccagaggccagtggaaaaaccatcttgccacggagtctgtttcctcctgaactggaaacggatttcagccctgccatttgggccccacattcttgttccacaccaggaagaatgaggtacgtggacacgtgggggggtgaccgggtgaaggggagcttcactgaacagctcagaggcgacccgcagtgggtcactcctctaagcaagcagaagtgggtggagcttccacctgttcccagctcccaccagctccacagagcgcacagccccggctacacctccccgacggcagccagcatcatggcagcccattccagacaggccgccgctgctatcaccttcaccgttgggaggggcgtcctgtctcgggccagcatgaccgccgtctccctgctgctgaaggggagggccccctttctgtgggccttggcctctgtctgtcaaatgacgaagacaggactttttataactggtgcagtcttggtgatgaataagcttaagcaaagcggcagcagtaatgatatggtcttcctgatcatcgccctggccgcagcctgggagcctcctgggggtatggggaacagatccttcagtaagtggtccctgcggacccctgctgcgagtggtcctgtgaccggggcttccaagcagctcaacagattgcccctcagcatcatggccagcccaagaaccaggaaggttcttaaagaagtcagggtgcaggatgagaacaacgtttgttttgagtgtggcgcgttcaatcctcagtgggtcagtgtgacctacggcatctggatctgcctggagtgctcggggagacaccgcgggcttggggttcacctcagctttgtgcgctctgttactatggacaagtggaaggacattgagcttgagaagatgaaagctggtgggaatgctaagttccgagagttcctggagtctcaggaggattacgatccttgctggtccttgcaggagaagtacaacagcagagccgcggccctctttagggataaggtggtcgctctggccgaaggcagagagtggtctctggagtcatcacctgcccagaactggaccccacctcagcccaggacgctgccgtccatggtgcaccgggagagtgcagagcccactgtggaggcctctcgtgttgcccatgaggctggcattgctggggtttcagcacctgagcccgagcagccactcagagctgaaggccaccctggcctcagagtctctggccagccgcagagtgtgaccgcctcctcggacaaggcttttgaagactggctgaatgatgacctcggctcctatcaaggggcccaggggaatcgctacgtggggtttgggaacacgccaccgcctcagaagaaagaagatgacttcctcaacaacgccatgtcctccctgtactcgggctggagcagcttcaccactggagccagccggtttgcctcggcagccaaggagggcgccctcgggacactggctgctgctggcctggggttctgggagctgcagaagggatgtgggacacagagggtttctgggtgctgtaaccatgggctgtgccaacgcagtaccagccagggtggtcctgagaccttggaggttctgcaggaacacagcagcccaggctgtcaggagctgctcctgtgtcagaccagctgctggcaaaggggtcccgccctgatgaaagctacaaagtttggatcccaagcgagtcagaaggtaacagaggagaagcttctgcaccctggtgcatctgaaactatcctgagtctgacgtcactttctgaaggtggtggtcagttccagggcagggagcggctgctccagggttgtgttgctgagagcctgcccggtgctgccttagtgttgcggcaccccatggtgggttcgaaggcgctgctggttactaatgccgcccctcaccttgctctctcctcacctgtcttcttgctgtcgggtaaagttttggggtcacaagcagcagccggagccggggggactcggtgcctgcctggggaggaaggagaggcgttgcaggtcagcatggggtggctgcagccggcgttggcctcaggcacaggctccacagggcctgttcccaccagcccggcccggcagggccgcatggtggcgcaggtggcggcctactgcccttcgggtgttgtgtgcaaagccccgtttcctgctccctgcgcttgtatcctgctgccttccctcctgctggtgaagctcgtgctgccctttgctggcctgtgctgccactgccgacccgtgtcccgtggtggagctgtcgcgtccgagctgggccacagcctgaacgagaacgtcctcaagcctgcgcaggagaagctggccgcggagctgtgcccagaggaggctctggtgaaggagggaaagatttttgatgatgtctccagtggggtctctcagttggcgtccaaggtagggagcctgccagatacgcgggcacagtcgaagccagtctccatattccacggccctgggcgtgagagcagggtccagggagtcggtagtaagggatggcgggacgtcaccacctttttttcggggaaagcagagggccccttggacaggggaaccaccggggatctcatcgggcctggccttgtgctgtctactgagaggccagccctggtgggcacagatgcactgcccactagcagtttggagctggtagaaaaggaagttttctgtaaaactgtcctccagttggggtggttgataaagagtgggccctggttctccagctccccagcagtttcctctgctctgaagcgggagaaacagatcccacctggtggggctgctgtggaccctgagcgctggcctgggaaggcggtcactgtccaggtgcagagctctcgggggcacagaattcccagtggtggactgagtaacagtcatttagagtcccccttctgtctctttaaaagcccctcggagggccacagttatcagaacagcggtctggaccacttccaaaacagcaacatagaccagagcttctgggagacctttggaagtgctgagcccaccaagacccgcaagtccccgagcagcgacagctggacgtgcgcggacacctccaccgagaggaggagctcggacagctgggaggtgtggggctcggcctccaccaacaggaacagcaacagcgacggcggggagggcggggagggcaccaagaaggcagtgccgccggccgtgcccactgatgatggctgggacaaccagaactgcaccgtcccaccaccaagttcaccaggttcaccagacacggcctccacaatagccacacccacacctgagctgttctcagtgctggaacttgaccatcctggaacaccctggaagaaaaaggagcgcaggggattcaacaccccctatgctggggacgatcccagcccgtatccaggaaactcaaggtgccacctgatgctggggttggagggcaaggagggtggctgtagccaggagaggcccacagaggtcctggagtctctgtgtctcaactgggtggctcccaagggtcatcctgctctggggcagcgctttagggcagatactggcgtgacccagtggatgctcaaggccagcttctgcccttcccgaaacttttctaagtgcactgggtttcccctggccacccactcatcgcgcctgctggcattgctgtccccctgttga

SEQ ID NO: 146595 - DNA, 2111 bp, Homo sapiens
  misc_feature (1)...(2111): n = a,t,c or g
aggcaccccttgtttctggattttgcctgggtcttctcagcgggacggcgcgtgccggcttgcgtgtgggggcctcctgaagctgcctgtgccgcgacagggcctgcctaacctctcttcccgtctccttccaggtccagggagtcggtagtaagggatggcgggacgtcaccacctttttttcggggaaagcagagggccccttggacagcccctcggagggccacagttatcagaacagcggtctggaccacttccaaaacagcaacatagaccagagcttctgggagacctttggaagtgctgagcccaccaagacccgcaagtccccgagcagcgacagcgtggacgtgcgcggacacctccaccgagagggnggagctcggacagctgggaggtgtggggcttggcctccaccaacagggaacagcaacagcgacggcgtggagggcggggagggcaccaagaaggcagtgccgccggccgtgcccactgatgatggctgggacaaccagaactggtagggcccactgcgcccccgtccccaacgcccccgggcgacttcgtgtttgcactctgccctcgtcgttcctcctccttccatttgacccaagaatcagcaactgcagtgtgaggacagcgtctcgggaggcaggaccctagggaggaccccggggtgccccggcctgcgcgtggggaggtctttagtggcgtgggggcgggattgctgttccagcctgtgtgggggccgtcccgtcccacactcccctgggcattcttggactcaaggccggggcttctgcgtggcttgctgggaggtgggctgcagcacagaggcctgtgactgcgttccagcggccagttcactacgcagtatcctcttggggtcctgggaccagccacgtgccgagctgtcagcgacgtgaggtgtcccttcctcgttgagatatttaactttggggttttgctctaagttctttctttttgaagatagtgactggaagtggtaaagaatggaaatgctggaaaatgatactgggcgctcacgcttgccatccggaccaccccttcgggctcccgaagtccacgcctgcctgggcctgtgctgtcagacccgcgtcggtcgtaaccctctgtggctcccctgcatcagcaccgtcccaccaccaagttcaccaggttcaccagacacggcctccacaatagccacacccacacctgagctgttctcagtgctggaacttgaccatcctgggaacaccctgggaagaaaaaggagcgcagggtggggccctcggctggaatggcagggagggtgcgatagcggacgtgggccaggcaggaggggccgggtttcaggagctgaggcagggggatgcctgtgcgtgggtgcctggggtcttagggaaggctccaggccccaggaatgggggctgccctgcacaccggtgcccggcacatggccaacccttcaccttcccgaaggactggatgatgggcctgccacgtggtgaactcgtctcctttgttgggccctgtgttgacccttcaatttttgggccagccatggcatgccgccccgaaacttcgtgcagtttgtacgtgaggtgctctccttccctgccacccatgcttcatcacttctggccttggccatgcttccctggtcaccccacttcccgggtcgccgtctgcaagcactccttggagcaagccttgggcccttcagcccctgtgcttcgtcccaccctgagggactcagccacttgcagaaacaggatgggacccgagaatttcagcgagcccttcctggcgcccggttccttccctgtgggcaacaagcctcttgggaagctggtgtggaaggcccggggtccttggctgccacggaaggaattgatcaacgaagcaaccaactgcttggagttggaactgaaggcaaaaggcggggcattagaggctcaaggtgctgagaagccaccggggaaagcagccagcacaaaggggcccaggaagccaagcccccgagagcctgagccgtggggtcctttgagtgtcttttctccaaagctgagacgtgggcggaaacaaggtcatcctctgatgatgcg

SEQ ID NO: 146596 - DNA, 2216 bp, Homo sapiens
tggctttcccattttgactttatttcactttttttttctataaaactcctccataatttcacaatttaacaaaagtttaaaatccaggaaagaaacaatcctgtaactcgttacaaacacgattctccttattccttttatccagggagttggtctcggggccgatgagtgtccctaggttcctaggtgaggacacgttctttgttaaaaaacccttatgggggcaagaaagggtattcggatacccatttgcttttccgggcgtcgggtttacattttttgttcagggagaggaggcaaaacacaggaggatttgcactgggggggcagggcgggctttaacaggggaaacacggggggccaaatcacaaaagttgccaggggccccttttccctaatgggaagttgttccccaggaggccctcgtgggggcccagcccgccgggcagttgggggtgggggtggggagagcagcttgggggatgcttgccttgggggagcccattgcttgcccagcacggtccatccaggtgggtcacgggaggccaggccctgggccccagagcagctctggaggaacaacgtggacgttccggcccaaaaggaaggttaactgaaaaactgggttggtgctttccggaaggccttggaaacggcaggaagggccagacgccaccaccgagagcaggcgggggagcccgaccctcctctggctgaagtggaaggctgctcgagtcgcatgtgtggattttgggggactcttgcgaaggagaaaggccagcaccctgggctgaggttccttgtccgtgaccccggcggcctcttgtgcgtagagctccccagcagcacgggccccccggtcagccccccctcaggcccagttccttcagtccaatgtcttagtttcccagagaagaaaggaagcgccccatggtggagtattgttggccgccctgggaaggggagagggggcacaaggggcctgccctcttcctgatacctgaaggccagtggggcccgggaaagaaacagagcaggtggcgaaggagtccccggaggcttccctccgaaggtttctcgggcctttccccgagagttcctggggagtttcccccaggacagctggcattgggggccagccttggaggcatgggtcccccaccaaggagtgttcaggatctgctgacagaatcagagcagggacaagatgatgggacctcagggagggacagatggagccccccaagtctgaactcataggctgggcgaggaggagaaacttctaggtgggttcgagggggtgcgagcccacctccaggccctcagccctcttttcctcataacttggtcagggcacaaggacttgaaaggacttgaaagtcagggggttgagaggactggaggcgcctcgagtcaatgtctgggaaacagaggctaaccaggcaggcctccagcccctgggacccccagccacgattgggctgcgtccgcgggagcgtcctggccctggaagagtgggccgggaaggaggaccggcttggcccctgggagaattctcaggcataccaggagtggggctgcgggcgcggcaccagcatgaattgcggcggtggaggccggggcgcgccagcccgcgaccagagagaaaggcagcctggaagggacagcccggccaacccgccgggcctgctgatggccgagccgcacgctcgaggggctgaccagagttcaatgcgcctcagaaaactccataaactatcccgtcttgagtttggcaaaagctcatatttttttcaaagtttgaagacttgaatgaaagagaggaagaggagcctatgggaggaggccgagccccagggcggctgatgcgagtctgtccgcggagactgttggcgctagtctgagtagagcccgagagcagactggtggctcccgggcgccctgaggactcgctgccctttgtagtgttggctgaccccacccggagccccgggaggaggcggcggcatccttggaacggcaaagggagaattctctcacatgcgcctggagagggccagctgccgtgcctggctcggcctccagccccacaacaccaccgcagagacatcttaacctacaagccccaccgtacgcaccccccacccaccccacgtgcactgttgccacagaaaagcaaatggacactgctcttgaccagacagtgcacacacacc

SEQ ID NO: 146597 - DNA, 1101 bp, Homo sapiens
ttttttatatatcctagataaaattcctctgttatatatgtggttgcttgaatttttaacataacttctacygaggaagggatacagtaaaatttccaacccttgcatggccagtcacttacttaattcctgtccttcagtgttccatctagagaattaagagatatgatgtataaaatagacatcgagggccattaagagagtaaatacttaaaaatacatgttatgaaagcaaagccaataatcactgtaggagtatgagttgcctaagggccaaaactaatgtaaataagagaaagtgtggatataaatgaccattgtttataaacagtcatgaaaaatgctgtgacttgaaatctttcccacatctcccaagaaagtaggtaggagtttatcctttccgtaatctctttttaaccctgctgactgactattacagggcttgtttaatcacagtggcaaagaaattacatgtatcttacagtaaaagaaacagaatacatggaatcgttagagaaccctgatgtgttgacctggggtaaagtacaaaggtgggagaggggatgagttatgctgttaaaatctcaggctattctgttaatgttcctgctactatgaacccaaactttttttttcccccttttgactccttgttgtcttcctctcctgtggcataaaaagcaagttctgtcggtaaacttggacaacatttggcatctgctgttgagaattggtaaggtactgcttctgagaaccttggctgcaagatccttaagcataggcagcaaatgttgagaaaagtctatcctgtagtattacatatactaagttacagaggaagccattccagtagaaaaaaaaattgggggcgtttaaaaaacatccttaaaacttttttttttttgggcggggggggggacggatcttgctggcaacgcccagggtgggagttgcaatgggccttattctcaggttcgttgcaaccttcacctccggggtttcaagcaattctcctgcctcagcctcctgagtagctgggaatataggtgcacaccaccatgcctggctaatttttgtatttttcagtaggagcagagtttt

SEQ ID NO: 146598 - DNA, 449 bp, Homo sapiens
ttaggagaaggcggccgcacagcggtggaggctttgccgggcccctcgctggaccattggtaccgatcagctggggaggaaaaagatggcccaggtactgtgctgcccagcacctgagagggagaaggtcgcttcccaaggcctggccaccacctccgtcttcccttccagtcctgacggatgagcagaagtcccgaatccaggccatgaagcccatgaccaaggaggagtgggatgcccggcagagcatcatccgcaaggtggtggaccctgagacggggcgcaccaggtggggagctttcggcctgacttacaccacaggatctgggagtgttggctgaagatgtgtgctctcgggaggagtggggccgggcggggttcctggtgcctgaaaaaggccaaatgtgggcaaaaatacggtcacttggagtaagtagttgcaggggctg

SEQ ID NO: 146599 - DNA, 523 bp, Homo sapiens
  misc_feature (1)...(523): n = a,t,c or g
gatgcccggcagagcatcatccgcaaggtggtggaccctgagacggggcgcaccaggcttattaagggagatggcgaggtcctaggaggaaatcgtaaccaaagaacgacacagagagatcaacaaggtgggtgtggccccntcatgcctgccatccagcccccagcatctgtttgtgatgtaccccgtccatcctgtgtgctttcttccccagcaagcctacccgaggggactgcctggccttccagatgcgagctgggttgcttccctgagggcccccgctggccaaggcctgtggacgaccgctggcggcccagcctgggcaggtttcagggtgccagtgggaagcctgatgggtgctggtggcctttcccccgtggattggtctctggcccagcccagtctcttctcaggggcagggggtggaggttggggtcaccggcctgcttggcacccccatgtgaaagagcagcacttttcagctattaaaggccccctggatagtcaaaaaaaaaaaaaaaaa

SEQ ID NO: 146600 - DNA, 682 bp, Homo sapiens
  misc_feature (1)...(682): n = a,t,c or g
aagaagcgggggaagtacaaggacaagaggagnnnnnnnnnnnnnnnnnnnnnnnnnctgaagaagaagggcaaggagaaggcggaagcacagcaggtggaggctctgccgggcccctcgctggaccagtggcaccgatcagctggggaggaagaggatggcccagtcctgacggatgagcagaagtcccgaatccaggccatgaagcccatgaccaaggaggagtgggatgcccggcagagcatcatccgcaagtgtggtggacccctgagacggggcgcaccaggcttattaaagggagatggcgaaggtcctaagaggaaatcgtaaccaaagaacgacacagagagatcaacaagtcaagccaacccgaggggactgcctggccttccagatgcgagctgggttgctatccctgagggccccgcgtctgccaagggcctgtggacgaacgctggcggcccagcctgggcaggtttcagggtgccagtgggaagcctgatgggtgctggtggcctttcccccgtggattggtctctggcccagcccagtctcttctcaggggcagggggtggaggttggggtcaccggcctgcttggcacccccaatctgaaagagcagcacttctcagctattaaaggccccctgggatagacaaaaaaaaaaaaaaaaaaaagcatt

SEQ ID NO: 146601 - DNA, 416 bp, Homo sapiens
gaaaggatgagggaaacgatgagggaaaggattagggttaggatgagggaaaggatgaggtaatggatgagggaaaggcattagggaaaggatgagagaaaggattgggcaccggatagctgttttttggagaaagctctaggctgaccgtactggaggacctgaaaaacgtgttcccaccccaggtcgctgtgtttgagccatcaaaagcagaaatcttccacacccaaaaggccccacttgtattcctggccacaggcttctaccccgaccacgtggagctgagctggtgggtgaatgggaaggaggtgcacagtggggtcagcacatgacccgcagcccctcatggagcaagccgccctcaatgactccagatactgcctgagcagccgtctgagggtctcggccaccttctg

SEQ ID NO: 146602 - DNA, 1191 bp, Homo sapiens
gtaaagctcccatcctgccctgaccctgccatgggcaccagcctcctctgctggatggccctgtgtctcctgggggcagatcacgcagatactggagtctcccagaaccccagacacaacatcacaaagaggggacagaatgtaactttcaggtgtgatccaatttctgaacacaaccgcctttattggtaccgacagaccctggggcagggcccagagtttctgacttacttccagaatgaagctcaactagaaaaatcaaggctgctcagtgatcggttctctgcagagaggcctaagggatctttctccaccttggagatccagcgcacagagcagggggactcggccatgtatctctgtgccagtagtataggggcagggctcccttctagcaatcagccccagcattttggtgatgggacccgactctccatcctagaggacctgaacaaggtgttcccacccgaggtcgctgtgtttgagccatcagaagcagagatctcccacacccaaaaggccacactggtgtgcctggccacaggtatcttccctgaccacgtggagctgagctggtgggtgaatgggaaggaggtgcacagtggggtcagcacggacccgcagcccctcaaggagcagcccgccctcaatgactccagatactgcctgagcagccgcctgagggtctcggccaccttctggcagaacccccgcaaccacttccgctgtcaagtccagttctacgggctctcggagaatgacgagtggacccaggatagggccaaacccgtcacccagatcgtcagcgccgaggcctggggtagagcagactgtggctttacctcggtgttcttaccagcaaggggtcctgtcttgccaccatcctctatgagatcctgctagggaaggccaccctgtatgctgtgctggtcagcgcccttgtgttgatggccatggtcaagagaaaggatttctgaaggcagccctggaagtggagttaggagcttactaacccgtcatgggtttcaatacacattcttcttttgccagcgcttctgaagagctgctctcacctctctgcatcccaatagatatccccctatgtgcatgcacacctgcacactcacggctgaaatctccctaacccagggggacaaataggctaaaccaataaaaaattgtgtgttggga

SEQ ID NO: 146603 - DNA, 1761 bp, Homo sapiens
tttcgtgtcacaactctccccagagaaggtggtgtgtggccatcacttgaagatgctgagtcttctgctccttctcctgggactaggctctgtgttcagtgctgtcatctctcaaaagccaagcagggatatctgtcaacgtggaacctctgtgaagatcgagtgccgttccttggactttcaggccacaactatgttttggtatcgtcagttcccgaaaaagagtctcatgctgatggcaacttccaatgagggctccaaggccacatacgagcaaggcgtcgagaaggacaagtttctcatcaaccatgcaagcctgaccttgtccactctgacagtgaccagtgcccatcctgaagacagcagcttctacatctgcagtgctagagagtcgactagcgatccaaaaaatgagcagtattttgggcccaggcacccggctgacagtgctcgaggacctgaaaaacgtgttcccacccgaggtcgctgtgtttgagccatcagaagcagagatctcccacacccaaaaggccacactggtgtgcctggccacagggtatcttccctgaccacgtggagctgagctggtgggtgaatgggaaggaggcgcacagtggggtcagcacagacccgcagcccctcaaggagcagcccgccctcaatgactccagatactgcctgagcagccgcctgagggtctcggccaccttctgggcagaacccccgcaaccacttccgctgtcaagtccagttctacgggctctcggagaatgacgagtggacccaggatagggccaaacctgtcacccagatcgtcagcgccgaggcctggggtagagcaggtgagtggggcctggggagatgcctggaggagattaggtgagaccagctaccagggaaaatggaaagatccaggtagcggacatgactatatccagaagaaagccagagtggacaaggtgggatgatcaaggttcacagggtcagcaaagcacggtgtgcacttcccccaccaagaagcatataggctgaatggagcacctcaagctcattcttccttcagatcctgacaccttagagctaagctttcaagtctccctgaggaccagccatacagctcagcatctgagtggtgtgcatcccattctcttctggggtcctggtttcctaagatcatagtgaccacttcgctggcactggagcaggatgagggagacagaaccagggctatcaaaggaggctgactttgtactatctgatatgcatgtgtttgtggcctgtgagtctgtgatgtaaggctcaatgtccttacaaagcagcattctctcatccatttttcttcccctgttttctttcagactgtggcttcacctccggtaagtgagtctctcctttttctctctatctttcgccgtctctgctctcgaaccagggcatggagaatccacggtcgcaggggtgcgagggaggccagagccacctgtgcacaggtacctacatgctctgttcttgtcaacagagtcttaccagcaaggggtcctgtctgccaccatcctctatgagatcttgctagggaaggccaccttgtatgccgtgctggtcagtgccctcgtgctgatggccatggtcaagagaaaggattccagaggctagctccaaaaccatcccaggtcattcttcatcctcacccaggattctgctgtacctgctcccaatctgtgttcctaaaagtgattatcactctgcttctcatctcctact

SEQ ID NO: 146604 - DNA, 2647 bp, Homo sapiens
aggatccttaattaaattaatccccccccccccctcccccgttctttctcgactccatctttcgcggtaagctgggaccgccggtttagttcgccaataatgcagcctctttgttccgcgtcccaggagcttacaaccccttcgaagggtgaccggccaggaaacgggtcgccccagatcaaaggctcatgtagcctcaacatggagggcatttcccccggaagatcaagtcgtgctcctggcaggcgcgccccctggaggatgaggccactctgggccagtgcggggtggaggcccttactaccctggaagtaaccaggcccgcatgcttggaggtaaagtccatggttccctggcccgtgctggaaaaagtgagaggtcagactcctaaggtggccaaacacggagagaagaagaagaagaagacaggtcgggctaagcggcggatgcagtacaaccggcgctttgtcaacgttgtgcccacctttggcaagaagaagggcaccacgttcaccaagatcttcgtgggcggcctgccgtaccacactaccgacgcctcgctcaggaagtacttcgagggcttcggcgacatcgaggaggccgtggtcatcaccgaccgccagacgggcaagtcccgcggctacggcttcgtgaccatggccgaccgggcggcagctgagagggcttgcaaagaccctaaccccatcatcgacggccgcaaggccaacgtgaacctggcatatctgggcgccaagccttggtgtctccagacgggctttgccattggcgtgcagcagctgcaccccaccttgatccagcggacttacgggctgaccccgaactacatgtacccaccagccatcgtgcaggccaccgtggtgatcccagccgcccctgtcccgtcgctgtcctcgccctacattgagtacacgccggccagcccggcctacgcccagtacccaccggccacctatgaccagtacccatacagccgcctcgcctgccacggatgcgcagcttcgtgggctacagctaccctgccgccgtgccccaagccctctcagccgcagcacccgcgggcaccactttcctgcagtaccaggcgccgcatgtgcagcctgacaggatgcattgaggggcgtatctgccccgaggactgtggcattgtcacctttacagctgacagagctgccaggtcattgagggctcgtgcaacagccccggttagactttcatggaggtgccaccagcacccgtgacctccgaagaccgctcgggcattccgcctgcgccctgggacagcggagagacggcttctctttaatctaggtcccattgtgtcttgagggaggacttttaagaatgactgagaactatttaaagacggcaatcccaggttccttgcacaccatgggcagcctctccttgcaccttctcctgcctctccacactccaggttccctcaggcttgtgtccccactgctgcatcggggcggggtgtcacagaccctctgcagcccctggctgccctggactgtgcagagatgcctgactccagggaaacctgaaagcaagaagttaatggactgtttattgtaacttgatcctcccgagctgtgagcgcagtctgaggtgtgaggacacggcctcctgttggagtcccattttctccatcagggcacgtgggcggcttcctcaagcccggaggagcttcccaggcgcacaggggccgccggttaacagggggccgcccgcaaaaggccccttttccagttcatagcactgaagttgcaactttttttttgtaattgttttgctactaagataatttcagaagttcagtctattttttcaagcggatactgccgccaccaagaatccaaaacctatttttgacttgggagagacttgcttttgttggttccgcccgtggagacgacgatagtgtttctgtataataaagtgtctgccggctcgcgggccaggatcctctcggtgggatgggcaccacagacaggaagcccctcaagcccgtgcgggccactgtctgctgccgcctgccgggggtggcagagtgagttgtcttaggaccccgtcactgcgactgtgacactcctcttcctttccttccttgccatctttccaaacactgtggaaggggagaaggaagtgatccacagcattcaggccacttggggtctagaccatggtggtgccagcctggggggggcagtggccctcagctctgcccgctggagcggttgagtgcagaagggtgcgcctcttccctctacccccgcaccacctgctgtgtgccagcctgagacggttcctgcctgtcttgggggttggtggagggtggaggcagtttttcccacccgtggcagggcatgctatggggcatccagggcctgtgggggtctggaggaggggacatgaggtgagaggtatcctggccgagggcggggggctgcgggggatcctcctccggacctacctcagggagctgagcgtgcaggcgctccagggcaggcctgggacagagtcaaggctcagagaataaaggtagctaatctcatcataatatttttattagaatgttctgatgataaaaataaaacttgttttctttaaagaaaaaaaaaaa

SEQ ID NO: 146605 - DNA, 482 bp, Homo sapiens
  misc_feature (1)...(482): n = a,t,c or g
gcggctgtgtcggtgtatgctccaccagttggnggcttctcttttgatnactgccgcagaatgccgtcttggaagccgattttgcaaagaggggatacaagcttccaaaggtccggaaaactggcacgaccatcgctggggtggtctataaggatggcatagttcttggagcagatacaagagcaactgaagggatggttgttgctgacaagaactgttcaaaaatacacttcatatctcctaatatttattgttgtggtgctgggacagctgcagacacagacatgacaacccagctcatttcttccttggcagcaatggctgtatttgaagataagtttaggccagacatggaggaggaggaagccaagaatctgggtgagccgacncatccgcagctggcatctttccaaccgacctgggctccggaagcaacattgacctctgcgtcatcagcaagaacaagctggatttctccgccc

SEQ ID NO: 146606 - DNA, 567 bp, Homo sapiens
  misc_feature (1)...(567): n = a,t,c or g
gatccaagagcaactgaggggatggttgtggctgacaagacctgtcaaaaatccactggccgtcttccagagnttgtgacagcaattcggatgctgaagcagatgcttttcaggtatcaaggttacattggtgcagccctagttttagggggagtagatgttactggacctacctctacagcatctatcctcatggatcaactgatatcgcagctggcatcttcaacgacctgggctccggaagcaacattgacctctgcgtcatcagcaagaacaagctggattttctccgcccatacacagtgcccaacaagaaggggaccaggcttggccggtacaggtgtgagaaagggactactgcagtcctcactgagaaaatcactcctctggagattgaggtgctggaagaaacagtccaaacaatggacacttcctgaatggcatcagtgggtggctggccgcggttctggaaggtggtgagcattgaggcccagtaagacactcatgtggctagtgtttgccgaatgaaactcaactcaataaaaaacaaaaaccaaattggaaaaa

SEQ ID NO: 146607 - DNA, 3117 bp, Homo sapiens
acagctttttttttttttttttttcccaatttaaaaaagcctttattcatacttaaataacagcatacatgataatttgatgagtaaatcaaactatataattttaaaatttgcatattttaaagttttatcagttacttacagactgtttgcaaaatagagggaggatcactcataatcttacatagcactgtcagcagtctgcctgtcctgtgccccaatccgaaatggattgaacactagatatgccatgtctcaatgtcatccgtaatatttcccgtttcccccaagtcttcacctgtcccccatctaccccagatccatttgggaaaatgttaaatgtgcagtcctaaagcgctgcccgcagggtcgcgatgtctgcccaggtactgctggctggctctagacaccagcagcagtgataagaaacaaagcagaggagacagttaaatggtagagaagagaagggggagcagaggtggtaggccgggaacaggggaataagtatggttctccccgcacgtgcccatgtgcgcacacaccgaaggccatttaaagggaagcggttaggtatgaggttgtgtttgctgaattagtggttggtttttgctgtctatctagatagcagctgctgccagctcctcgtctaagaggctttcctttgcctgcccaaccttcaactggtttgtgggaaaagcttcctggccccccatagactgttgaaaaatccccaggagaaaattccctaatttagcggatccccgtttgaaatgcattccttacaggactgccatatgtacaaaagaagaattggcttcattggccccacatagatgtcacgtgagagtgaaaaaacctggggtataaatatcaaaggaacccctatctgctggtttgctgaggagcccacttccagcagaaccttctctgtccttctgagtctgtagagggcgcttatgtcactggaatcctagtctggcatggggcaggcagaggagcaggagcccccagtgggttcagatcttctgaaaacttgaggttagcggatctgccctttgagggtctcagaatgcatatgggcatgaagttcgtgtttatccaagggtgttgcttgggtgagcgatggaagtgcacttgcatgtgtatgtactctcacgccctcgtggactgggaaggcgccgtagcacaggttagattccctgctttcagggagcctggttcatttttgtcctcgttgtatatagagcttgaacttggtgttccccaggtccagtaccactgccgttgctgcctgccttctgtttcactgctgttttctgagtgcctcgtgtgcagcctgtccttcagccctccctgaagctctgctgaccagctgtgttcccagctccttttcacgtgctctttagccagccttaccctgcattgtacttacttgggtcaggtgcccctgctagactcttaagcccctagggggcagggatctgggggcgtcatccacctctgcagccctagcttctggtatagcatgtgataggacatagcatgtgatggggcttctcggataagaaagggatgagtccatctgttcaccagtaactattagggatggggatttgtgtttaaaggtggggcaaaggagagagtgattcaaagtaatggattacttcagtgaacctataggttccttagtaggagagagagattattctgggcaagaggtcccgcccttggtctgccagcatttccccagaactaccggcttgtgttttggtgttagtttcttcctcctacagtgctgactttctcaagtaactttcagctattgttggacattcttgatcaggggatagttagtaaactgcagtcagtgggccacatctggcccactgcctgttgataatagagttttattggaacacagttatacccattttttaatgtatttgtgtgtggctgttttgtgctagcgtgacagagttgagtaggtgtggtagagacttttggccacaaagcctaaaatatttactacctggcccttttaaagataagttactaaccctctagtaactgtcagcccattgttttgtggtgattgtctgatgtggtcaagaggcggtgcatgcataaaaagttttaaaggcctggctcgggaactttgggtaacatcatcaaggtactttgagatcttttcctcatctgtgagatgggcattaaaaacaacacctgtctcgcgggaggtcttgcgcactgctagtggacgtacattgcggatgtcagagcaggccctagtttggccggggacattattgccgccgttctgtttctcaggaggaggaagccaagaatctggtgagcgaagccatcgcagctggcatcttcaacgacctgggctccggaagcaacattgacctctgcgtcatcagcaagaacaagctggattttctccgcccatacacagtgcccaacaaaaaggggaccaggtgagtgaaggagccgaagttcttcctgggtccccgggcgtcgggggccacccttggtatctccatggcatctggatggagttttcctggttctttccacattaagtacatccagtgttcccaaatcaacctcccacacagaccttcggcttgttacttgctttatgacagtgggctgctgtcaggtgtaggaaagtgatttaatttgatgggagaggtggagggtggcccaggaaagagccctaggctgggaggtggggccggagaggtttggatcatctgctgtcctttctcaagtgtcttaaagaatcccctgatttctgggagaaggtgcatttttcagggcagccccagcactttccctcagagtgccccgagattcctaactgggtgtaagtcagcaatgctaacagcctcccagaggtggccttgggagctagtgtgtgtgtgctgtgctacagggagttgtgccattgagcctgagcctacatgctgagtgggcccctcggctcagtggtgcagcgcagactcagagcagtgggagaaggttctagttgatttgctgagcagaactgggaggtttccaaacctggtggctagcatgtgtcagaggagcagctcgtttgcagctcgtgcc

SEQ ID NO: 146608 - DNA, 1071 bp, Homo sapiens
  misc_feature (1)...(1071): n = a,t,c or g
gctttcttgggaagatggcggctgtgtcggtgtatgctccaccagttggaggcttctcttttgataactgccgcaggaatgccgtcttggaagccgattttgcaaagaggggatacaagctttccaaggccccgaaaaactggcacgaccatcgctggggtggtctataaggatggcatagttcttggagcagatacaagagcaactgaagggatggttgttgctgacaagaactgttcaaaaatacacttcatatctcctaatatttattgttgtggtgctggggacagctgcagacacagccatgacaaacccagctcatttcttccaaacctgaagctccactccctcttccactggccgttcttcccagagttcgtgacagccaaatcggatgctgaagcagatgcttttcaggtatcaaggttacattggtgcagccctagttttagggggagtagatgttactggacctcacctctacaagcatctatccctcatggatcaactgataaggtgcccttatgtcacccatgggtttctggctccattggccagcaatggctgtatttggaagataagtttaggccaagaccatggaggaggaggaagcccaagaatctggtgagcgaaaanggnnccccccaatttnntcngcccagctggngcatcttcaacgaccctgggctccggaagcaacattgacctctgcgtcatcagcaagaaacaagctggattttctccgcccaatacacagtgcccaacaagaaggggaccaggcttggttggccggtacaggtgtgagaaagggcactactgcagtcctcactgagaaaattccactcctctggagcacttgagggtgctggaaagaaacacgtccaaacacatcggacaccttcctgaatagngcatcagctggcgctggctgggcccgcggtttctggaacggtggtgacgcattcacggcccagctaagacactcactgctggctaagtgtttgccgaatgaaactcaactcaataaaaaacaaaaaccaaattgggcagctgaaaaaaaaaaaaaaaaaa

SEQ ID NO: 146609 - DNA, 431 bp, Homo sapiens
aggcaaggcacgattgtcgccatcagcagcatccagggcaagatgagcattccttttcgatcagcatatgcagcctccaagcacgcaacccaggctttctttgactgtctgcgtgccgagatggaacagtatgaaattgaggtgaccgtcatcagcccagggcgaagctgctggaggtggcccaggatgttcttgctgctgcggggaagaagaagaaagatgtgatcctggctgacttactgccttccttggctgtttatcttcgaactctggctcctgggctcttcttcagcctcatggcctccagggcgagataagagcggaaatccaagaactcctagtactctgaccagccagggccagggcagagaagcagcactcttaggcttgcttactctacaagggacagttgcatttgttgagactttaat

SEQ ID NO: 146610 - DNA, 396 bp, Homo sapiens
cccacgcgtccgcggacgcgtgggccggctaccatgaagagtctgccgaaggtgaaggccatggacttcatcacctccacagccatcctgcccctgctgttcggctgcctgggcgtcttcggcctcttccggctgctgcagtgggtgcgcgggaaggcctacctgcggaatgctgtggtggtgatcacaggcgccagcccagggccgaagccctgtggaggtggcccaggatgttcttgctgctgtggggaagaagaagaaagatgtgatcctggctgacttactgccttccttggctgtttatcttcgaactctggctcctgggctcttcttcagcctcatggcctccagggccagaaaagagcggaaatccaagaactcctagtactctgacca

SEQ ID NO: 146611 - DNA, 409 bp, Homo sapiens
tgtcgacatacttgtcaacatagccaaagcactgcaggatctcagctgctgctgcaactatgtcgacatacttgtcaacaatgctgggatcagctaccgtggtaccatcatggacaccacagtggatgtggacaagagggtcatggagacaaactactttggcccagttgctctaacgaaagcactcctgccctccatgatcaagaggaggcaaggccacattgtcgccatcagcagcatccagggcaagatgagcattccttttcgatcagcatatgcagcctccaagcacgcaacccaggctttctttgactgtctgcgtgccgagatggaacagtatgaaattgaggtgaccgtcatcagccccggctacatccacaccaacctctctgtaaatgccatcaccgcg

SEQ ID NO: 146612 - DNA, 1095 bp, Homo sapiens
atggctgactcattcagcgtactagtgcactgcgtgaatgtccctgtcgttgttcctagtcgagcagtgactgcctcccacgtgcactccggcaacaagcccttcgatgtgacctctctcgagctctcgccactgctgctcggtccaagacccatccttcgccaagggaccatcttggagacactctgcttaccaacgtctgcgccaagcctccatcgggagagcaggcggtccgacgcgaagtgtagttcggctgcggtccggggccgctcggcagcggaacccagacccggcggaactaccgtgcccacaagcagcgcgcccgaaagccccccccccggggtccccgggcccctagtctttctgcgagggcgcgaggactccaggagccgtcctggttcgagcatttctgaagaaactgagttcccgcgttcgcagcctgggagtcacaggcgcccacccaccgtgggcacggttcgctatggagacctgctgccttccctgggacagtgtgacgcatggatgtcctacagctcagcagtccaggagtgggccactatctcctcagtgcctacagaagacggcctgcactccttccccatggaaagctacgccctggctcaccttggtggcatgagaagcgactgttgtcgattgctgcagagaccacatctcaatactagcgcgcagctacgaccaattcacgcgcataacacgagattcctcacgaacgagagctgcagagtgagcagattcatcggtctatctcgtgtcgtaggaactctcatacatcgggggcgatggtctatgttctccccgatacaaccatatcgttactgcgcgtgccccaagcgctatgcgtccattcaagcactcctgccctccatgatcaagaggaggcaaggccacattgtcgccatcagcagcatccagggcaagatgagcattccttttcgatcagcatacacgtatgcggcccggcaagatgccacgtgcctgcgagctgaaaggtgcttcagcatcgatcggccgcgacagcctaggctgtcgctgaggcgctgtgactgcatgttactgtcagcgacgcccgcctag

SEQ ID NO: 146613 - DNA, 1477 bp, Homo sapiens
cggacgcgtgggtcgcccacgcgtccgcgaggcgggaggatgaagttgattgactatggtctctccggctaccatgaagagtctgccgaaggtgaaggccatggacttcatcacctgccacagccatcctgtcccctgctgttcggctgcctgggcgttcttcggccttcttccggctgctgcagtgggtgccgcgggaaggcctacctgcggaatgctgtggtggtgatcacaggcgccacctcagggctgggcaaagaatgtgcaaaagtcttctatgctgcgggtgctaaactggtgctctgtggccggaatggtggggccctagaagagctcattcagagaactcaccgcttcttcatgccaccaaggtgcagacacacaagcctttacttggtggaccttccgacctcacagactctggggccatagttgcagcagcagctgaagaatccttcagttgcttttggctatggtcgacattactttgttaacaatgctgggatcagctaccgtggtaccaaccatggacaccaacagtggatgtggacaagagggtcatggagacaaactactttggcccagttgctctaacgaaagcactcctgccctccatgatcaagaggaggcaaggccacattgtcgccatcagcagcatccagggcaagatggagcattccttttcgatcaggcatatgccagccttccaagcacgcaacccagggctttctttgactgtcttgcggtgcccgagatgggaacagtatggaaattgaggtgaccgtcatcagccccgggctacatccacaccaacctctctggtaaatgccatcaccgcggatggatctaggtatggagtttatggacaccacccaccagcccagggcccgaaagccctgtggaaggtggcccccggatgttccttgcctgcctgtggggaaagaagaaagaaagatgtgaaccctggctgacttacctgcccttcccttggctgtttatccttcgaactctggctccctgggctccttccttccagccttccatgccttcccagggcccagaaaagagcgggaaatcccaagaactccctagtactctgacccagcccagggcccagggcagagaagcagcactcttaggcttgcttactcctacaagggacagttgcatttgttgagaagtttaatggagactttgtctcacaacgtgggaaagtactgaagaaacagcatctcggtgcagatcatgctggcagaggacaatcaaaaacgagcaacaagcttcttcccagggtgaggggaaacacttaaggaataaatatggagctgggcgtttaacactaaaaactagaaataaacatctcaaacagtaagagttgtagtcttccaggactagaaccttgtgtcctttgaattctcgccctgccagctcctagaaatagtttcaatcttggaatcagatgttatgtcacctgaaa

SEQ ID NO: 146614 - DNA, 461 bp, Homo sapiens
  misc_feature (1)...(461): n = a,t,c or g
cggacgtgccgaattnggtaacgacgactttccccgcgggtggaggccggggtggcgccggccggggcgggtgagtccaaaagaccggctgccgcctgctccccggagaagggcactcgtctccgtgggtgtggcggagcgcgcggtgcatgagcgctcagggaatccgggaactactggatgttgctaaacaggacattccgttcgacttctggaaggccacccctctggtcctcaaggccacagctggcttacgcctgttacctggagaaaaggcccagaagttactgcagaaggtgaaagaagtatttaaagcatcgcctttccttgtaggggatgactgtgtttccatcatgaacggaacagatgaaggcgtttcggcgtggatcaccatcaacttcctgacaggcagcttgaaaactccaggagggagcagcgtgggcatgctggacttgggcgga

SEQ ID NO: 146615 - DNA, 426 bp, Homo sapiens
cggacgcgtgggtgtgcttgtccccagcgtttattttgctcgagctgtgtgctgccagagtgtgagagggccttccaaacagagtgcacaggacggaggaagtgaaccacgtggacttctatgctttctcctactattacgaccttgcaggtggggcgggccccatagatgcggagaagggaggcagcctggtggtgggggacttcgagatcgcaaccaagtacgtgtgtcggaccctggagacacagtcgcagagcagccccttctcatgcatggacctcacctacgtcagcctgctacttcaggaggtcggctttcccaggagcaaagtgctgaagctcactcggaaaattgacaatgtttacaccacctgggctcctggggccatttttcattacatcgactccctgaacagacagaaaagtg

SEQ ID NO: 146616 - DNA, 431 bp, Homo sapiens; identical to SEQ ID NO: 108288
  misc_feature (1)...(431): n = a,t,c or g

SEQ ID NO: 146617 - DNA, 769 bp, Homo sapiens
cccctgggaggtgggactccggactggcggttttggaatgtggggcagatggtcccaacaggcccgaggcccctggtgtcaggcatcagcagcttcctcctcagagtccaggtctggcggtgccttcgtgcccacggtctttactccctgcgccgggaccaacaatgccctgggtcctgagggctgcttttgacctgtgcggggagcagccccaacttgggggggggtcttacaggcttgtggacctgccttttcctgacaattcaggtcagagtctcaagacccctgggaggggccccaaacaactgtgaggcctgggtgctctgagcccactgaccgctagccttgtgcttggccccagcggcaagcctgcacgagctgtgtgctgccaaagtgtcagaggtccttcataacagagtgcacaggacggaggaagtgaagcatgtggacttccatgctttctcctactattacgaccttgcagctggtgtgggcctcatagatgcggagaagggaggcagcctggtggtgggggacttcgagatcgcagccaagtacggtgggagtcacctggagcgtgaagggacgtgtctcatccccagtgtgtcggaccctggagacacagccgcagagcagccccttctcatgcatggacctcacctacgtcagcctgctactccaggagttcggctttcccaggagcaaagtgctgaagctcactcggaaaattgacaatgttgagaccagctgggctctgggggccattttt

SEQ ID NO: 146618 - DNA, 486 bp, Homo sapiens
ggggtgcgatcccgcgggtggaggacggtttggtttctgccggggcgggggagcccaaaagaccgggtgccgcctgctccccggaaaagggcactcgtctccgtgggtgtggcggagcgcgcggtgcatgcagccgcagcacggtccttggcaaacagggatgagaaaaatatccaaccacggtagcctgcggctggcgaaggtggcatacccactggggctgtgtgtgggcgtgttcatctatgttgcctacatcaagtggcaccgggccaccgccagccaggccttgttcagcatcaccagggcagccccgggggcccggtggggtcagcaagcccacagacccctggggacagctgcagacaggcacgaggtcttctacgggatcatgtttgatgcacgaagcactggcacccgagtacacgtcttccagttcacccggccccccagagaaactcccacgttaacccacgaaaccttcaaagg

SEQ ID NO: 146619 - DNA, 2834 bp, Homo sapiens
  misc_feature (1)...(2834): n = a,t,c or g
gactttcgcccaggccctagggaatcgtggggtcgtatcccgcggtttgatgccggggtggcgccggccgccgcgggggaccctttaatattcggctgccgcctgctccccggaaaagggcactgcgtctgcgtgggtgtggcggagcgcgcggtgcatggaatgggctatgtgaatgaaaaaaggtatccgttatgaaacttccagaaaaacgaactacatttttcagcagccgcagcacggtccttggcaaacaaggatgagaaaaatatccaaccacgggagcctgcgggtggcgaaggtggcataccccctggggctgtgtgtgggcgtgttcatctatgttgcctacatcaagtggcaccgggccaacgccacccaggccttcttcagcatcaccagggcagccccgggggcccggtggggtcagcaggcccacagccccctggggacagctgcagacgggcacgaggtcttctacgggatcatgtttgatgcaggaagcactggcacccgagtacacgtcttccagttcacccggccccccagagaaactcccacgttaacgcgcacgaaaccttcaaagcactgaagccaggtctttctgcctatgctgatgatgttgaaaagagcgctcagggaatccgggaactactggatgttgctaaacaggacattccgttcgacttctggaaggccacccctctggtcctcaaggccacagctggcttacgcctgttacctggagaaaaggcccagaagttactgcagaaggtgaaagaagtatttaaagcatcgcctttccttgtaggggatgactgtgtttccatcatgaacggaacaaatgaagagcgtttcggcgtggatcaccatcaacttcctgacaggcagcttgaaaactccaagacggagcaacgtgggcatgctggacttgggcggaggatccactcagatcgtcttcctgacacacgtggaaggcaccctgcaggcctccccacccagatacctgacggcactgaggatgtttaacaggacctacaagctctattgctacagctacctcggtctcgggctgatgtcggcacgcctggcgatcctgggcggcgtggaggggcagcctgctaaggatggaaaggagttggtcagcccttgcttgtctcccagtttcaaaggagagtgggaacacgcagaagtcacgtacagggtttcagggcagaaagcagcggcaagcctgcacgagctgtgtgctgccagagtgtcagaggtccttcaaaacagagtgcacaggacggaggaagtgaagcatgtgggacttctatgctttctcctactatttacgaccttgcagctggtgtggggcctcatagatgctgtagaagggaggcagcctggtggtgggggacttcgagatccgcagccaagtacgttttgttcggacccttggggagacacagcccgcagagcagccccttctcatgcatggacctcacctacgtcagcctgctactccaggagttcggctttcccaggagcaaagtgctgaagctcactcggaaaattgacaatgttgagaccagctgggctctgggggccatttttcattacatcgactccctgaacagacagaagagtccagcctcatagtggccgagccattccctgtccccgtcagcagtgtctgtgtgtctgcataaaccctcctgtcctgggacgtgacttcatcctggaggagccacagcacaggccgtgctgggcacttttcttgcacactggctctggggactttgcagaaggcctgggtgctgccctggcatcagcctcttccagtcacatctggccagagggctgtctggacctgggccctgctcaatgccacctgtctgcctgggctccaagtgggcaggaccaggacagaaccacaggcacacactgagggggcagtgtggctccctgcctgtcccatccccatgccccgtccgcggggctgtggctgctgctgtgcatgtccctgcgatgggagtcttgtctcccagcctgtcagtttcctccccagggcagagctccccttcctgcgagagtctgggaggcggtgcaggctgtcctggctgctctggggaagccgagggacaacccataccacccccgggacagtaggtttgggcggcaccactgggaactctggacttgagtgtgtttgcctcttccttgggtatgaatgtgtgagttcacccagaggcctgctctcctcacacattgtgtggtttggggttaatgatggagggagacacctcctcatagaccggcagggtgccccaccttttcagggggagtttccaagcatggggcgggatgccggggcatggagctgctgtaaaactaattgtgggctgtgcctgccttgaaatgaacgtctctgtccgtgtggggttgcccaaaatgcttgtggtaagaaaactgtgttcctgaaaccccccttttcctggaaaacccaactgtgtccctgtgaaatgtaatcgcctactgtgaagccgttccccgccctaacccagggcccatgtccttaggtgcaagctgtgcccacgggtgcagctgagcccacagtcccagaaccaagctctcggtgtctcgggccaccaatnccgcccacctcgggctgaccccacctcctccatggacagtgtgagccccgggccgtgcatcctgctcagtgtggcgtcagtgtcggggctgagccccttgagctgcttcagtgaatgtacagtgcccggcacgagctgaacctacatgtgttccactcccaataaaaggttgacagggaaaaaaaaaaaaaaaaa

SEQ ID NO: 146620 - DNA, 289 bp, Homo sapiens
atggggattcatcatgttgaccaggctggcctcaaactcctgacttcaagcgatctccccgctttggcctcccaaagtgctgggattgcaggtgtgagccaccgcgcctggccctaaatagattttttaaaatggatgcttagcaagaacaaaaggaaaaaaaacacccatccctcaaaaaggccaaggtcccgtccccctgttgtcggtgatttgtttgtctttctgataggttgaaaattgtgtaataaacttgatgacgctgtcaatctttaaaaaaaaaaaaaaa

SEQ ID NO: 146621 - DNA, 2018 bp, Homo sapiens
ctttcctccaaacccctaactccctccagacacccagggaataccctctgccccacaggattgaagactgcttggcagtcctcccaatcccacacctcctgtttgccaggggaaagaacctaaagacttcgtgtgattgggaggggtggcagacaggaagaaaacatgtccaggcccctggtctccatagagaatggtgctttgtccaagaaaacgtatgagtttctgattctccgggagccgttcaatggtgaggttgatgggaagacttccttcccaaagaaaatagatcctccatgcaggatctaggagagtgactgggtgtgccaaaatatgcccagggtcctggccctcagcactagttttaattggggccaagagggtccaaaccccttgctaacataccacttctttgtttaactcctttacctttccagaccctttgaggagggaccatgagaacagaaattaccttatgaaaagctacttctgttcctgctttccctctcacgtattgacggtttatttctttgacctcccagagggctgaaactctttcaactctgcgctgcccagccttctcagtggactttgcccctcctaaagcagagaaggcctatgaggttgcttgctgctggggaagcctgggcagagcaatttaccaccctcttgctggttaggtgcttggggtacctcttggcaataaccagctcttagttgttccctttccctggggggctttttccattttaacacatgggagccctttcccccagaagggtaatttcctgttttagaggaagggtattgcccattgggagatggggacattgggacctcagcaatgaagaacccttgtgaagtaaccaggaggaatggggaaagaagcaagttgggcaggatatggcctacttccataggcttttcttttttcaagtttggacgtaaccatgggcttacatcccccacgtacatacttttacttattgtgggataacctggcactagtaggcaggtaaagtcacaaatttggtgtcttttcaccttttgactgttgacttaatagctcctctcactctgcctggagatacttcctgccatcagatgaggagccagaagaaacagagcccgacttgagatgaactccagcttcagagttcttaaggacccagcattctgggggccatttttctctacaggcaaatggaattgcttttccataacatccaaattgtaatgtggttgctgctgaaggaggaggcagcagcgaggtcctgcggtacccatggggtgatgctacttctgcatgcatctacagggcatctgacacctaacatgagacgtggcatgtgagatgagacttggcatgtgagacatagggtcactagagacccttctgggtcagaggagagagactgaattggactaaacccgtcctctgttcccagcacgtttttctcatatagccctcagttcactgagggagttcccccgcaggaatggaaaggccacattcccttgggaacagaggcctacaggttggagctttttttccccctgtccccaaaccccattccccacctcccacttcagaacatggcaccccacccaactggcccaagtgttaagtgatgtgccttattgagagcaacctccgggtgttctttttaaaatgtagagaaaaggtgacagtttaaggaaaaatatatatagaataccagaaatgccgtttaccccggagaatttttttctccccatttgttttgttttttactcaatgacaccatttttagttttatttcctgatagcaaaaggaaaaaaaaccacccatccctcaaaaaggccaaggtcccgtccccctgttgtcggtgatttgtttgtctttctgataggttgaaaattgtgtaataaacttgcatgacgctgtcaattttttatactgccttgtatttttttccttttgtaacaaaatatttttaaataataaatggggtgtgagctgttttatggaaaaaaa

SEQ ID NO: 146622 - DNA, 1586 bp, Homo sapiens
ttttttttttttttcatccaaatcaaggctgtatttatcgtcactgattgacatgggaacagaatatttaaaacaaacagggtccacccgtggaaatgtggctgaaacacaaaactgagcaaagcaagtggctcgacggctgaccccgaaggctgggaatcccggcagggacacagcccaaacatcggggaacacaaaaggccgcaagggggggcagggcatgggggggctcattgtggtgaaggccaaaacccaaactgagaggaggccaggccaagggcctggtatggcggacgaccacaccgacggtgacgctgatgccttcaggcgggaaggaaaacacacagcagtgattttgtgtgtgtgtgtgtgtgtgtgtgtgtgtgtgtgtgtaaaatcagcctttagactcttgcacttctataccctccaccgatctggtctaacagattcccaaagaacacttgcaccatccacacaaacgtcccacagcaatcgccctttgcggctggaaccggccaaatcctgaaagccccacaggaagcccgccccaggagtgctgttcctgcctggcccccaggggctctgcctggggggacccaaacccccttcaacggaccccaggggctgggaaggtcgctggcggacccttccctcccccaacccagcagagcccgcccgggaaagcgctttgcattaatttgaaaggaaaatttgctgccattaaacttcttgataatgttttacagcccagcagcgccctgggttttttgtgacccatgttagacaaacaaccagaggggtttctggaaacggtttttataaagtctatctagattaagaatttagtaacggtcatatatttatatcaacagactatttacacgtttcgtttgcttttaaaaaaacaaaccaaaaaagaaattacacttctgcataataaggcaaaaaaacaaagttttgtacattattattttaatataatctgtaacttcggttccaagtaccaagggggggccagggctaggctgagtcgggggcctcacagtgcgctgggacaaagtgaccggttttttctccataaataagacaaagaaacccctggggatctggagaaggatctgaggccattaaactgcaaatcccaaccgaaaacgaagaagcaaaagtttccttttttggttcttttaaacgtctaaagagcataaaattaagaaaaaaacaaaatccattacaaacacttctcatctgtggggggaaaaaaggtacaaacgcgattttttttttcccaacagccgaatcccaaactcggaaaacaaaagatcaccctcagaaaagccgacacccaagtccccgcctccgcaggctgcgggtggagaggcggcgccgccccaggatcggcgggagctgtgcttgagttctaggaactgatggagagacggacagccggtgcgctccgctcggagaggcgtctgcggccccggggctcccgcgcctccacctccgggggatttcgggacagagaatagtcgcgcgcctcgcccggcccgaggccccccagcggagtggtccgtctccgtattcga

SEQ ID NO: 146623 - DNA, 556 bp, Homo sapiens
  misc_feature (1)...(556): n = a,t,c or g
tgatgggttgacaggtgcgtgacagtgggagctgctctcggcacaagcatgtacggcaaaggcaagagtaacagcagcgccgtcccgtccgacanncaggcccgggagaagttagcactctacgtatatgaatatctgctccatgtaggagctcagaaatcagctcaaacatttttatcagagataagatgggaaaaaaacatcacattgggggaaccaccaggattcttacattcttggtggtgtgtattttgggatctctactgtgcagctccagagagacgtgaaacatgtgaacactcaagtgaagcaaaagccttccatgattacccttttatgtcacctcggtaccctggaggtccaaggcccccattgaggatacctaatcaggcacttggaggtgtcccaggaagtcagccattactccccagtggaatggatccaactcgacaacaaggacatccaaatatgggtgggccaatgcagagaatgactcctccaagaggaatggtgccttaggaccacagtctgaccttgttatcattcagactatgga

SEQ ID NO: 146624 - DNA, 1158 bp, Homo sapiens
atggtggcacagaaagtaacctgctcatatccccatatgacagtaagaattctgcatccatccaccatcaaagtctctctgtgggaatctcaggattcagcttgggctactcccagtgatagtgaattaaatttccccaactggcttactcaacctcacagctgccgtgataggtctgtgccccagtatagaatggctgagtgtgtatatacttatcctgtaggttttgagaatgttcaaaatgattatttgcagggggacggagaggtgttctttttgaaagaatgtaccaagaggcatactgactccattgacagaaggttttgttttgacatagaagctgctgatcgcggcgccgagggccggaggtgcagcctttccccaggagagaaggcgagtcgctgtcggtcgctcagccagaaggtcgagggaaccgcgcgggtgtccctcgccagccggccctctgggaacagggcgggggcgacaccccagggagtagggctgaggaccgcaaaaatcaatcgtgggtgcgtgacagtgggagctgctctcggcacaagcatgtacggcaaaggcaagagtaacagcagcgccgtcccgtccgacagccaggcccgggagaatcccccgcgcatcgcggggctggggctggggctggggcgggggcgggggcgggtgggcgccggagacgccgccgaagtttgggagtcggagagggaccgagttcccggggagctaaagtgtgttggcgaggagcgggatccgctggaggaggctggcgtttctgcctctcgcagcggacccaactccgcggcggcggctggcgaactttttgttatgactcctgctacttttgactgggccctgccttcttactctggttcagtaacagggctcccatttggaaactggcagctccacagagaggcttgtgctgcaatggaggtggactgttgtctggtcaatggaactgtgaactgtcacctgggtcaggctgtgctgcctgtccccctgggctttggacctgctgcttccttgctggaatgctgcctcggccctccggctcccccaacaccagtcatctggcaggctgctgctaatatcactttctgtggaaagccttcccagaccttcctccctcagaactggatgggctga

SEQ ID NO: 146625 - DNA, 1858 bp, Homo sapiens
tttcgtggctgcgtggtacgccatggtgacagggctgttcccggggaggctgtgatgggttgacaggtgcgtgacagtgggagctgctctcggcacaagcatgtacggcaaagggcaagagtaacagcagcgccgtcccgtccgacagccaggcccgggagaagttagcactctacgtatatgaatatctgctccatgtaggagctcagaaatcagctcaaacattttttatcagagataagatgggaaaamamacatcacattgggggaaccaccagggattcttacattcttggtggtgtgtattttgggatctctactgtgcagctccagagagacgtgaaacatgtgaacacttcaagtgaagcaaaagccttccatgattacagtgctgcagcagcttcccagtccagtgctagggaaacattcccccagggagatgggcatgccagttaggtcctgttaccaccaggggttcttttcagccttttatgttcaccttcggttaccctgggaggtccaaggtccccattgagggttacctaatcaggcacttggggggtgtcccaggaggtcagccattactccccagtggaatggattcaacttcgacaacaaaggacatccaaatatgggtggggcaatgcagagaaatgactcccccaagaggaatgggtgcccttaggaccacagttcttgaccccttggttatcattacagaactatggaggtgcaattgagacccccactggaatgctttaggtgggcctggaatgcctggaatggaacaggggtccaggtgtggtaggccctgggccaaaccccacaaatgccaaattcattaccattctcctcagccttctcttggaatttattaggtcctccagggaggtggagggccaccagggaacacccattcatgcctagttccagcagatttcaaccaacttctggtgataacatgtatactttaatgaatgcagtacctcctggacctatacagacctaatttttccaatggggccctgggtcagatggtcccatgggtggattaggaggaatggagtcacatcacatgaatggctctttaggctccaggagatatggccagtatttccaagaattctcccaataattatgagcctgagtatccaaccggcgcattccaaaggaatgatggcgcaatgggggcaaatttcttaaatccttttcagagtgagagttactcccctagcaagccatataagtgtgttttccctttcccaggtctcttcatgaaacccacagtgagtcagcccttcccagaactacgtacggaagaaaattattcatccaccagtgtaccagttaaacaaaggaatctcagtcacaccaaaccaacctttttatttcctgctctctcccctcttttgtgaagaccagcggggtcccaaatgtgattcaaaccaactgtacgggagtggccatattagaattgccctaaactgaactgcaaataattatgtgtgtatggtatatgtgtgggaaagagaatgtactgtatatgtgtatgttatacagacattatacacattacatacattgaccccacaggacattgtaaaatattatcacatgacatcttaagtagaaataagtagggacttttattccatccttttttttcacgtttacattttaattattacaagttgctcctgccccctccctgaactattttgtgcctgtgtatatcactgctttatataagttattttttaaggtgaactcagatgttatggttttgtaaatgtctgcaatcatggataggaataaatacgcttaatttgagagctttcaaaaaaaaaaaaaaaaaaac

SEQ ID NO: 146626 - DNA, 391 bp, Homo sapiens
  misc_feature (1)...(391): n = a,t,c or g
cctgcgggatgatgctctgctgtgcttccgccttctccttgcccttcttcttcagnnnnnnnnnnnnnnnnnnnnnnnnnctcctcttgtccttgtacttcccccgcttcttccggccatcactggannnnnnnnnnnnnnnnnnnnnnnnnnnnnnggagctagaagaactggaagaagaggaggaggagctggatcttgttctcctccgggccttctgcttgcttctctcttgggatgtggaggccgagcagttcctcgaggtgtctttcctgctcttcttctttctcttttccgacccccgtccccgggaccggctgcgactcctcgagcgcttgcgggagccgacgtgagccatggcgccgcgggctcgaccgccctgcgggccgga

SEQ ID NO: 146627 - DNA, 463 bp, Homo sapiens
ttcctccagtgatggccggaagaagcgggggaagtacaaggacaagaggaggaagaagaagaagaagaggaagaagctgaagaagaagggcaaggagaaggcggaagcacagcaggtggaggctctgccgggcccctcgctggaccagtggcaccgatcagctggggaggaagaggatggcccagtcctgacggatgagcagaagtcccgaatccaggccatgaagcccatgaccaaggaggagtgggatgcccggcagagcatcatccgcaaggtggtggaccctgagacggggcgcaccaggtggggagctttcggcctgacttacaccacaggatctgggagtgttggctgaagatgtgtgctctcgggaggagtggggccgggcggggttcctggtgcctgaaaaaggccaaatgtgggcaaaaatacggtcacttggagtaagtagttgcaggggctg

SEQ ID NO: 146628 - DNA, 523 bp, Homo sapiens; identical to SEQ ID NO: 146599
  misc_feature (1)...(523): n = a,t,c or g

SEQ ID NO: 146629 - DNA, 1310 bp, Homo sapiens
ggctcaagcgcgtcttcttcggcgccttcccgcggcgccatggctcacgtcggctcccgcaagcgctcgaggagtcgcagccggtcccggggacgggggtcggaaaagagaaagaagaagagcaggaaagacacctcgaggaactgctcggcctccacatcccaaggtcgcaaggccagcacggcccctggggcggagggtgaggaccacaggcatcggggagaggaggcgcagttactacccggggaagtcgggcgagcagtggtcggggacgctcagtcatgcctctgtgcagccgggcctgagatgtgagggccaggcgccgcaggagccaggcaaggggctcctctgggaagctccatctctgttctggaaagcccctcaggaagcgctcaccctgtagccggtctgtgcctgccccaggccagagcaggggacgaaggtttacctcttcccctcctggctttccagcctcaccttctccctgcatcacagagagaagcaagcagaaggccgcggagaggaagaagatgccagctccgcctcctcttcttcgagttcgtctagctcctcttcttccgcctcgtcctcctcctcttcctccagtgatggccggaagaagcgggggaagtacaaggacaagaggaggaagaagaagaagaagaggaagaagctgaagaagaagggcaaggagaaggcggaagcacagcaggtggaggctctgccgggcccctcgctggaccagtggcaccgatcagctggggaggaagaggatggcccagtcctgacggatgagcagaagtcccgaatccaggccatgaaagcccatgaccaaggaggagtgggatgcccggcagagcatcatccgcaagtgtggtggacccctgagacggggcgcaccaggcttattaaagggagatggcgaaggtcctaagaggaaatcgtaaccaaagaacgacacagagagatcaacaagtcaagccacccagagggggactgccgatggccattgccagatgcagagcgatgggtatgcttcccgtgaggggcccccgcatggccaagggcctgatggacgacagctggcggcccagcctgggcaggtttcagggtgccagtgggaagcctgatgggtgctggtggcctttcccccgtggattggtctctggcccagcccagtctcttctcaggggcagggggtggaggttggggtcaccggcctgcttggcacccccaatctgaaagagcagcacttctcagctattaaaggccccctgggatagacaaaaaaaaaaaaaaaaaaaagcatt

SEQ ID NO: 146630 - DNA, 635 bp, Homo sapiens; identical to SEQ ID NO: 119465

SEQ ID NO: 146631 - DNA, 766 bp, Homo sapiens
aattaaaaaaaaaatttgattttgaggcagggtctcactccattgcccaggttggagtgctatggtattaccacaactcaccgcagcctcaacctcctggacttaagcgatcctcactttagccttctgagtagctgggaccccaggaaggcacccccacacccggctcatttttcctgttttttgtagaggtggagtcttcctatgtttcccaggctggagtttctttttctttaaaccatctgatttggattccttccatttagaaatgatacatcccaggtgtgagtcttggaagatgcctggggcattgcccatgactgtagcccctgtgtctgcttgtcttattaaaggaccaggggcagggtgcaagcacaggtgtcagacgacgaaaagagagttggctcccagccccacacagctcaacagtacaggtcacacaagagggctggcgtgagcagtcaagagaactccccaaaaccgagtgccagcttggatggtttctttttcttcttcagccttacagcaggtccaggttctactgaccagtgtccagtcgcgagactagaggaaaactcgccagtcgcggtggcagcgctgaatcagtggggcctccctccggctcgcaggctcacaagcctcccctgcagggagggaaattactccttgtgctcctacctggctcaccagataatctgttatggcaccaagcagattttccagacaaggcttttagttgggggcttgtgcttgagcgcacggggag

SEQ ID NO: 146632 - DNA, 578 bp, Homo sapiens
  misc_feature (1)...(578): n = a,t,c or g
gcntggtccctntctccctggctgaggatccccagggagatnctgcccagaagacagttacatcccaccatgatcnggatcacccaaccttcaacaaggatcacccacgatatcatcaccaagttcctggaaaatgaagacagaaggtctgccagcttacatttacccaaactgtccattactggaacctatgatctgaagagcgtcctgggtcaactgggcatcactaaggtcttcagcaatggggctgacctctccggggtcacagaggaggcacccctgaagctctccaaggccgtgcataaggctgtgctgaccatcgacgagaaagggactgaagcttgctggggccatgtttttagaggccatacccatgtctatcccccccgaggtcaagttcaacaaaccctttgtcttcttaatgattgaacaaaataccaagtctcccctcttcatgggaaaagtggtgaatcccacccaaaaataactgcctctcgctcctcaacccctcccctccatccctggccccctccctggatgacattaaagaagggttgagctggaaaaaaaaaaaaaaa

SEQ ID NO: 146633 - DNA, 542 bp, Homo sapiens
  misc_feature (1)...(542): n = a,t,c or g
nnnnnnnnnnnnnnnnnnnnccagctcaacccttctttaatgtcatccagggagggggccagggatggaggggaggggttgaggagcgagaggcagttatttttgggtgggattcaccacttttcccatgaagaggggagacttggtattttgttcaatcattaaaaaaatgtaattcaccaaagcaaaaactgtgtctttgtcaagctccttgaccaaatccacaattttcccttgagtacccttctccacgtaatcgttgatctgtttcttggcctcttcggtgtccccgaagttgacagtgaaggcttctgagtggtacaactttttaacatcctccaaaaacttatccactagcttcaggccctcgctgaggaacaggccattgccggtggtcagctggagctggctgtctggctggttgagggtacggaggagttcctggaagccttcatggatctgagcctccggaatctccgtgaggttgaaattcaggccctccaggatttcatcgtgagtgtcagccttggtccccagggaga

SEQ ID NO: 146634 - DNA, 405 bp, Homo sapiens
  misc_feature (1)...(405): n = a,t,c or g
tttttttttaaaaaaattttttcccccaagaagaagagggggggtttttnnnnnnnnnnnntttaaaaannnnnnnnnnnncccaaaagcaatttttttttggtgggggtgttggcaaaattcccccccccaaaaaaaannnnnnnnnnnnaaaatcccaagggggnnnnnnnnnnnccccttttnnnnnnnnnnnnnnnnnnnnnnnnnccccctttatttttggccccccccgaannnnnnnnnnaannnnnnnnnnnnnnnnnnnnnnnnnnnnnnnnnnnnnnnnnnnnnnnnnnnnnnnnnnnnnnnnnnnnnnnnnnnnnnnnnnnnnnnnnccagctcaacccttctttaatgtcatccagggagggggccagggatggaggggaggggttgaggagc

SEQ ID NO: 146635 - DNA, 426 bp, Homo sapiens
  misc_feature (1)...(426): n = a,t,c or g
ctcccccaaagaacttatgttttgaaaagagnnnnnnnnnnnaaaaaatttttttttcaatatttttccccccccaaaaaggtttttttccaaaaaaatcccccccccaaaattttacccccctcttaaaaagggccccttttaattttcccccccnnnnnnnnnnnggccccccttannnnnnnnnnatnnnnnnnnnnntttttnncnnnnnnnnnnnnnnnnnnnnnnnnnnnnnnnnnnnnnnnnnnnnnnnnnnnnnnnnnnnnnnnnnnnnnnnnnnnnnccagctcaacccttctttaatgtctccagggagggggccagggatggaggggaggggttgaggagcgcggacgcgtggtcgacccggtaattccggacgggggggggcgggcgaggtctccgtatncntggtttcaatca

SEQ ID NO: 146636 - DNA, 718 bp, Homo sapiens
acagtgcggtggaattcgtttctggagggctccagtcttccttgtcctgtcttggagtccccaagatggaatcacaggggaggaaccagataccagccatgaccccaggctccaccaagcatcttcatgtccccctgctcatcccccactcccccccacccagagttgctcatcctgccagggctggctgtgcccaccccaaggctgccctcctgggggccccagaactgcctgatcgtgccgtggcccagttttgtggcatctgcagcaacacaagagagaggacaatgtcctcctcttgacccgctgtcacctaaccagactcgggccctgcacctctcaggcacttctggaaaatgacttgaggcagattcttcctgaagcccattctccatggggcaacaaggacacctattctgtccttgtccttccatcgctgccccagaaagcctcacatatctccgtttagaatcaggtcccttctccccagatgaagaggagggtctctgctttgttttctctatctcctcctcagacttgaccagggcccagcaggcctcagaagaccattaccctattatcccttctcctccccagttcacatgggccataggcttgcttgatgggttcagggaaggccattggcaagggattccttcagctatggggaggagggaggcacattcaccctttggacccccgcaacccttccttttcc

SEQ ID NO: 146637 - DNA, 1729 bp, Homo sapiens
  misc_feature (1)...(1729): n = a,t,c or g
caaaaattttttttaaccaccagggaaaggaggttggttttccccctttaccctttaaaaannnnnnnnnncccttaagggtttaattttttttgggggggtggtcccattttttccccccccaaaaaaaaggtttttttccaaaaatcccaagtaggtttttttttggccccccttaagggaaaaaattttaattttccatccccggttaaatttgggcccccccaaggatttttttaaaaggccccccccccnttttttttttttttttttttttttttttttttttttttccagctcaaccctttctttaatgtcatcccagggaggggccccagggatggaggggagggtgttgaggagcgagaggcacgttatttttggggtgggattcaccacttttccccatgaagaggggagacttggtattttagttcaatcattaagaagacaaagggtttgttgaacttgaccctcgggggggatagacatgggtatggcctctaaaaacatgggccccagcaagcttcagtccctttcttcgtcgatggtcaacacaagccttattgcacggccttgggagagcttcagggggtgcctcctcttgtgaccccgggagagggtcaagccccatttgctgaaggaccttaggtgatggcccagttggacccagggacgctctttcagatccatagggttccagtaatgggacagttttggggtaaatttaaagcttgggcagacccttcttgtctttcatttttccgggggactttgggtgatgatatccgtggggtgagtttcatttttccaggggtgctgtagtttccccctcatcagggcaggaaagaagatggccggtggcaattgccccaagtatttcatcagcaccaccccagctggacagctttcttacagtggctggatgttaaacatgccctaaacgcttcatcataggcacccttcacggtggtcacctggtccaaggtgaagtcctctttccttgggtcctttgacttcaaaagggtctctcccattttgccctttaaagaagatgtaattcaccagagcaaaaactgtgtctctgtcaagctccttgaaccaaatccacaattttcccttgaggaccccttcccaacgtatacgttgatctgtttcttggccctcttcgaggcccccgaaatgaccggggaagcttctgagtggtacaactttttaacatcctccaaaaacttatccactagcttcaggccctcgctgaggaacaggccattgccggtggtcagctggagctggctgtctggctggttgagggtacggaggagttcctggaagccttcatggatctgagcctccggaatctccgtgaggttgaaattcaggccctccaggatttcatcgtgagtgtcagccttggtccccagggagagcattgcaaaggctgtagcgatgctcactggggagaagaagatattggtgctgttggactggtgtgccagctggcggtataggctgaaggcgaactcagccaggttgggggtgatcttgttgaaggttgggtgatcctgatcatggtgggatgtatctgtcttctgggcagcatctccctggggatcctcagccagggagacagggaccaggcagcacaggcctgccagcaggaggatgccccacgagacagaagacggcattgtcgattcactgtcccagcccccccccccccctgcag

SEQ ID NO: 146638 - DNA, 507 bp, Homo sapiens; identical to SEQ ID NO: 146242

SEQ ID NO: 146639 - DNA, 664 bp, Homo sapiens
aggcctagaattcggcacgagccacagactcagagagaacccaccatggtgctcgtctcctgcccgacaagaccaacgtcaaggccggcttggggtaaggtcggcgcgcacgctggcgagtatggtgcggaggccctggagaggatgttcctgtccttccccaccaaccaagacctacttcccgcacttcgaccttgagccacgggttttgcccaggttaaaggggccacggcaaagaaggtggccgaacgcgctgaccaaagccgtggcgcaacgtggacggacatgcccaaacggcgctgtccgccctgagcggacctgcaacggcgcacaagctttcgggtgggacccggttcaactttcaagctcctaaagccacttgccttgctggttgaccctgggccgcccaccttccccggccgagtttcaacccctggcggttgcacgccttccctggaacaaagttcctgggcttcttgttgaagcaccgttgcttgaaccttccaaataaccgtttaagcttggaagccttcgggttggccatgctttctttgcccctttggggcttccccccagggccctccttccctttcctggaacccgtaaccccgtgggtcttttgaataaaagtcttgagtgggcggcaaaaaaaaaaaaaaaaaaa

SEQ ID NO: 146640 - DNA, 362 bp, Homo sapiens
gcggccgcacatattcaccctcagcgtgcctttcccgacccccttggaggcggaaatcgcccatgggtccctggcaccagatgccgagccccaccaaagggtggttgggaaggatctcacaccgctggaaagctgaagactgtcgcctgctccgaatttccgtcatcaactttcttgaccagctttccctggtggtgcggaccatgcagcgctttgggccccccgtttcccgctaagcctggcctgggcaaatggagcgaggtcccactttgcgtctccttgtaggcagtgcgtccatccttccctagggcaggaattcccacagttgctactttcctgggagggcctcatgttttatctgg

SEQ ID NO: 146641 - DNA, 920 bp, Homo sapiens
gcgctctggaatcgagttacgcgcgaaagggcatagtttctggaggaaaccgcagcctctcaaccgctgaccgggtctcagaaggcccccggcaggcccgcttggcgggaactgaccacgcgccagtcaggctctccagggacctgcgcaggcgcgtgtgggcggagtcgtgcgcagggggcggggcttcgggaaggagccacagagagggcggggcgtaggacctgcgcttcgggggtggagtcggagcggcgcggcggcggtcatgcgggacgcggactgcagacgcaggcggaggcgctgacgggcggaggatggccggggtggccacagctgccgcgggggcgtggacacagccgcagctccggctggtggagctcccccagcgcacgcgccaggtccgggcagagacgccgcgtctgcggccagggggtcacgaatgcggccgcacatattcaccctctagcgtgcctttcccgaccccccttggaagcggaaaaatcgccccatgggtcccctggccaccagatgccgaagcccccaccaaaagggtggtttgggaaggatctcacagtgaagtggcaggatcctgggtcgtccgctggaaagctgaagactgtcgcctgcagccgaatttccgtcatcaactttcttgaccagctttccctgggtgggtgcggaccatgcagcgctttgggcccccccgtttcccgctaagcctgggcctggggcaaatgggagcgagggtcccactttgccgtctccttgtagggcagtgcgtccatccttccctaggggcaggaatttcccacagtttgctactttcctggggagggcctcatgttttatctggttcttaaatgtttgttactacaagaaaataaaactgcgctactaaaaaaaaaaaaaaaacctcgtgc

SEQ ID NO: 146642 - DNA, 1095 bp, Homo sapiens
  misc_feature (1)...(1095): n = a,t,c or g
ctataatatcacacccccccttatatatatacacncacncccncacatatatatggatannnnnnnnnnnnnnnnnnnnnnnnnnnnnnnnnnnnnnnnnnnnnnnnnnnggcagttgtcactcgttttaaccagcagaaggatgtttggtattttgtgagtggtaaactgaccttgaattttctttgtacgtgcttagacaaaattattaagtggtttattttatcatggcctgagagcaactttggggttggcattcaaaagactgtttatgtcccaacaggagaatggcatgaccgaacagtgttgtcaaccttctgaatgtcagggacaggtggtttttttctttctcaggagaaacacctatgttagagaaaggggagaggaaacagaagacaggaagagcctatgatgtaggtctgacaggtgggccaaggaacaccggggcaaaagagggcaggacagctccaaagatgtcatggccaggctgatggaagcgcccaagcagactgctcagtatttttttattttttatttttttgagacgaagtcctactccgtcacccaggctggagtgcagtggctcgatctcggctcactgcaacgtccacctcccgggcccaagcgattctcctgcctcagcctcccgtgcctggcctcagactgctcattagaggaggcctgtgtcgggcagaaatggcctagcaccctgaccttcactgtgcttggtgacagccaggaccagcatgccctgggcaggaacatggcggcaggtccccaatgccaggagcttttgtaattgaactccttgaagctgctttcttgaagggaggactgagcagtgctccttcacaacctccagaggcccaggaccaaacacctgggaatgttaacagttaaggccatgtgggtggaggagaaaagaggaaagaagggaagatgcatgaaaaagaattaagttcaagtaaagaagatgaagatgggctgggcacggtggctcatgcctgtaatctcagtactttgggaggctgaggcggacagatcacttgaggtcaggagttcaagaccagcctggccaacatggcaaaaccccat

SEQ ID NO: 146643 - DNA, 3260 bp, Homo sapiens
caaagaaatagcaacaattgtataaacaggaaaaccagccagctttcatgataaaaggaaggcgtgtctcttgccctggtatgagattaacagaaatacagatgcatttttattttgattgaaagatggtgagaatgtagaaatgcttaggactagatttttaattttttaaaataactattatcatttattatgaaatatttgttcagttgttttgagtgggtttcttgttccttttttcatttaaaacctttctttgttgactggctccaggcttgtttgcctaaattcttaggtagtttacacaagttctagaatcttttagaactttaactccattggaagcaaacctaactaatcggagtttgagatcctgggttggtttcaatagggtattctgggaattctgggcaggaacacctaaagatttttttttttttagaaggttttagatacattatcttacacaaactgtgacctaatggcaataattacctcaaatgtggggcattcatcctgggttttagccttttttgaaatcatgtagccagcttgatcttgggaattttaaaggactatggaattctctgtgggggctggaaaataaatggatttactttcatacccccggtcatcgttgcttaagtgaattctgaaaatagctcatctttacaacaaaaattaaaccaaggaagagattattctttgtgtgttgtactcaaatgcgatgttcaaatgcacatgttaagtatatatgtttttagctactgtaaaatgctgttagccttctaagctatcaaaacagtcacattttaaatgagtaaactaaacaattgactgtggatacttaagcatatttctggctacgttttatagttaaagtgttttatagtttacatttagactggtactttttaaagaaaagttctgtttataactgacatccgcaaaccccagtgaatgcctcttagttggaggttgtgtctcccccaaggcaagtgtgttgtcccagactcttctgtagtccagcatgcgcacttccctctggattattactttccacgtgaactcaagagaacatgaaaggcaatccagatggagggaaaaggtgtgagtccgcagcccgggccagatgcgaaggtctcatgcgtgtcgtctaaacacttgtcttcaaggccttctctctgacatcttggaagagtcattgagaacagataacctggttcattgatttttgtcttgatttgaatatttaacttattaatagatccactgatttccaggcaccaggcagtagaagagactgggattcaggtgaccatgaaggcacagctgctacttctgggccgggggtgatattttgatcagcgttttgtaggggaggaccatatacccctattcccatggtcgctggctgggttttccatatatctgctgtcatttaatcccgttttccccccttaaaagcaaaaatcaatgtaaaaaggcttatgtttaccgttttacctcattgtcccagcttagactcaaagtcctagttcgggtgggagggggaccttagcatcctctcaagagatggtcagggctgagcaggaggaggcagagacagaggggcagctcagccctggtccattgagacccactctaaacagacatcatatttggaacaagaagatgcttcgagacaggaatgggccccactgtcatgcagaaacagactgggggaatggcagtttccctgagtcttggtttcttttatgttttctcttgtgccaccaccaaacttgcagaggacctgctgtgacctaaagggcattccctttagcagataagaccttgaaaactgcaaaacacctgggacccagggagcttttaaaaaatacaaaaaaataccacatttgctttttccctgtgaactgtattgacagcgtgttcttaggacagtcttttggtggaaatgttactgtaaaatagttttcatctcacccctcctaatcatactcccactttcctgtttgtgtggtggtgttgctgttttttcctttacatgaattaaccaaatgaattttgtgtcattgtttttggggcttatatttttaaaacatagaaattgccttttgttcatttgaaaagtaagtatgttgtatctgaaaaagaggctgtgcctctgctgtccctcccttccttgtaaccaatctccaaacaaatctctcctggcaccgtccccttgcttatatagggtcactgtccccggggccacctgtgccttcaccctgctgttcaccactgccttgggccaaggcacccagggactcccagaaagcgcgagagccagcaataaggccccactcagccttgaggactggtgggtcacaacttccctgtcagagttcgcctgctggggctggaaggggcaatgggattgtcattgttgaaatttgtttgggctcaggttataaggaggaacttgggaagttagaaagtggacttgaccatgttgcatcctttgggtagcttcctgtaactaacaaatggaacagagagcacacccccgccccgccccaccccaagcagatgttcccgtcagcgctgccctgagtcagtcggtcccccgtttctgctctcctcccttttgtgttcctgctcacttcaagcttcttccatggactttccagggcacagtcatctctagcccccaaatcatctcttcatcctctgtgtgtgcatttttttaaccaaatgaaatagacaagaaagtcatactttggggcagcagaatttctaatttagtagaatcactgtatagagatagatgttgatatatatgtttgtgtatatatatcaaaccaaattggataggagaagtatagctttacagatgaggagaaggagctctttagaggtcggagtcaagactggtgtcttggacgtgcatgggctgtgtcccaggccactccgcacacatggggctgaggcgtggcgccgggcccttgtcatccacctcaccacggcagagccagtcaggccctgtagggtggctgctgctgtctcactgggttcccagctttcaagcgcattcagtggggtgacgggggcaacaaatcagagtgactgggaattttccattcccgtttttgcttttgaccacgtgaactgagctgcagcctctgatactctgtcacgttttcaaaaatggtatccattaggatagaaagagaatgggtctgcagaaatgtttacctttcaactgctcatgaatg

SEQ ID NO: 146644 - DNA, 877 bp, Homo sapiens
tagaaaaattacatatactttctttctttgtttcacattacaaaatctttttttctttacacaaatcacattttattgcaggaatatttcaagtgccatcaaatatttatagaagggttaaaaaaatagaagtctctctaaagtggtccagacaaggctttgtatagaataaatctttttttcccccatcttctagttttgatttaagtattttgaatacattttcttttccattgacacttagtagcctaagaagcggtccgacgcacacacatcatacacatgcaaatcacacacacacacacacacacacacacacacacacactccttcctcacctgaccctcaagcccacccccatacgctcacagataactgggtatccacactataaagaacaaccaaacttagaagcagtgtcttaagtcatgtttttcttaaagttagaaagggtgaattaggatgctgaagactttaaaaaaaaatccatagctttaatacacggttaagatgctgagcgctttaaaaaaaaatccgtagctttaacacaattgccaaactgtcccaaaaagcactttccatctgtacttttgtttgcattgtgacccaaggcccggtttttcacaatataataaccatttggacaccattggaacagaaggtattcaggctttgtacaaaagccttatttgccttatgtaaaaaaattgtacaaaggcattgtagcagcggggctgacagtgatgtggttccaatccttaaaagactattggagactgaagtttaggaaactttaattataaaaactattaaggataattgttctgatatcacccaagtattttatgtcatcacataggtgtttttgtaataatga

SEQ ID NO: 146645 - DNA, 749 bp, Homo sapiens
agtctttcctgtgtccccagcactacccaggatggatatgggtgagcagaggtgctgacttttcttaatgctggactaccaggagtgggtctagttatagacaagctccccagaggaacagggtggtctacgggggagtgaacagtgcacaacaaaaggactcgactttgtgatctggagcttagagtgcaaccaggaagactgctggtgcctgagcaggagaaaaacttgggttgggtgctggggacaccagctggagggttgtctggcctgcagcgtgcacgcctgggcgtgttgaaagggtggggtggtgtagggtaaggccctgctgacccctctgggggcctcactcctggtggcctgtggtgcctcctggcaaggccctttctcctgggccaaggatcttcaggggcctggctcctggtggcctgtgtggcctccgacaaggccctttcttctggacctaggatcctcagggcttctaatctgggtccacaaatggccttggggtgtgtgtgtgtatgtgtgaaccccctcaaactgtatgcaaataatatgagcatactgtcctgggaatgggctagaactttcctcagatcaccaaaggggtcggggaatgtgaagaccacagccctggcctatgagcctggagatctttcctccctgctggtctcccacgagaggccttggtgcctcctgggttttataatgtgggtttgacatttccataagctgctctcttgacccgc

SEQ ID NO: 146646 - DNA, 480 bp, Homo sapiens
  misc_feature (1)...(480): n = a,t,c or g
caggggcnnattgagatcgatnactctagcgaagngcggtggaatttcctggctaccactccttcagctgtctttcgagtctgggaggcccagatgttgacttgtgagaggtggcctactctatcagggcgctgncagacataccttctcctgccttttgctccctgaccccagactggctgctggagcccagatggcagccgactgctgttcactgtattgggagagccactgatttactccctgtcttttccagaacgttgtggtgagggaaaggggtgcgttggaggtgcaaagtcagcaacgattgtggcagatctgtctgagacaacaatacagacaccagatggtgaggagaggcttgggggagaggctcactccatggtctgggaccccagtggggaacgtctggctgtgcttatgaaaggaaagccaagggtacaggatggtaaaccagtcatcctcctttttcgcactcgg

SEQ ID NO: 146647 - DNA, 442 bp, Homo sapiens
ccggaattccgggtcgacgatttcgtcttgcggtacccgtccgcatacgaatctagcccgggaaccgagttgcgggagtgcggtctgtgccgttccggccaggagtttgccgactgcagacgtcctgcgaaccgtggatcaatcttcctgtcctacaactgacaaaggatcccctaaagacccctggaaggctggaccatggcacaagaactgccttcatccatcaccgggagcaagtgtggaagagatgcatcaacatttggcgtgatgtgggcctttttggggtgctaaatgaaattgcaaactcagaaaaagaggtgtttgagtgggtgaagacggcatccggctgggccctggcactctgtcgatgggcctcttccctccatgggtccctgttcccccatctgtctctcaggaacgaagatctgatcgctgaatttgc

SEQ ID NO: 146648 - DNA, 1833 bp, Homo sapiens
  misc_feature (1)...(1833): n = a,t,c or g
gtttcataatcacagcaaccctatgaaatattattctagttgcacagatacgggagctaagagttgtttcccattctcacaagtgttagctttgtggaaatgggaaacagacctctggaatctcttatacttagcccagcggtgggttgaagatggcacggaattaaagatttgggaagagactgacttcacggtcacacccctcacttttgtgctatagtggatcaatcttcctgtcctacaacttgacaaaggatcccctaaagacccctggaaggctggaccatggcacaagaactgccttcatccatcaccgggagcaagtgtggaagagatgcatcaacatttggcgtgatgtgggccttttttggggtgctaaatgaaattgcaaactcagaagaagaggtgtttgagtgggtaaagacggcatccgggctgggccctggcactctgtcgatgggcctcttcccctccatgggtcccctgttcccccatctgtctctcaagagcgaagatctgatcgctgaatttgcccaagtcacaaattggtccagctgctggttgcgagtttttccatggcagccccccaccaacaagtttgcagtggccctgctagatgactcagtccgtgtgtataatgccagcagcaccatagtcccctccctgaagcacccggctgcagcgaaatgtgggcgtctctgggcctgggaagcccctttagtgcctctgtcttgggctgtgggcttgccagagctggcattcttatctggaccctgggaccctacctccttgttttacccgaccctcttctgggctgtgcccaagtgctgtctcaccctgggcatacacctgttaccagcttggcctgggcccccagtggggggcggctgctctcagcttcacccgtggatgctgctatccgggtatgggatgtctcaacagagacctgtgtcccccttccctggtttcgaggaggtggggtgaccaacctgctctggtccccagacggcagcaaaatccttgctaccactccttcagctgtctttcgagtctgggaggcccagatgtgggacttgtggagaaggtggcctactctatcagggcgctgtcagactggctgctggagcccagatggcagccgactgctgttcactgtattgggagagccactgatttactccctgtcttttccagaacgttgtggtgagggaaaggggtgcgttggaggtgcaaagtcagcaacgattgtgggcagatctgtctgagacaacaaatacaagacaccagatggtgaggagaggcttgggggagaggctcactccatggtctgggaccccagtggggaacgtctggctgtgctttatgaaaggaaaagcccaagggttaccaggatggtaaacccagtcatcctcccttttttcggaactcgaaaacagccctgtgtttgaagctcctttccctgtggcaattatcccaggggggagccaaggagccccagcccccagctcatcactttncccatcctttccttcaacaaaggggccctgctcagtgtgggctggtccacaggccgaattgcccacatcccgctgtactttgttaatgcccagtttcccacgttttaagcccagtgcttgggcgggcccaaggaaccccctgctgggggtggaggctctattcatgacctgcccctctttactgagacatccccaaccttctgccccttggaaccttcttccaagggcaacaacctgtttctgccccactccccacattcccacctctaagaataaataagttttccttttgttttccaaaaaaaaaaaaaaaaaa

SEQ ID NO: 146649 - DNA, 457 bp, Homo sapiens
atgcctgagcaggagcccacagccgagcagctgtcctagattgcagcggagaacgaggaggatgagcactcggtcaactacaagccccgggcccagaagagcatccaggagatccaggagctggacaaggacgacgagagcctgcgaaagtacaagagagccctgctgggccgcgtggccgtttccgcagaccccaacgtccccaacgtcgtggttgcccctggacgtgtgcgtctgctgccccaggctctcagtgccaccacccccggcaggccttccctgacccagccaggaacaaacaagggaccaagtgcacacattgctgagagccgtctcctgtgcctcccccgccccatccccggtcttcgtgttgtgtctgccaggctcaggcagaggcgcctgtccctgcttcttttctgaccgggaaataaatgcccctgaaggaaaaaaaaaaaaa

SEQ ID NO: 146650 - DNA, 545 bp, Homo sapiens
ctctcccaacaggcgtctctggagagcttctagaagcatttcttttgtcttaaggaggttgtggagtaccgtataaaaatctctttccgggttaaccgagagatagtgtccggcatgaagtacatccagcatacgtacaggaaaggcgtcaagattgacatagactgactacattgtaggcagctattggccccgggccgaggagtacgagttcctgacccccaagagccctcgatggacagcctcacccaccccatctgtgctccagtcaggagccccgcttggccatcagtatttattgcctccgtccgtgccgtcctctggccactggcctggcgtctgttcccccaggctcttagtgccaccactcctcggcaggccttccctgaccctgccaggaacaaacaagggaccaagtgcacacattgctgagagccgtcttctgtgcctcccccgccccatccccggtcttcgtgttgtgtctgccaggctcaggcagaggcgcctgtccctgcttcttttctgaccgggaaataaatgcccct

SEQ ID NO: 146651 - DNA, 487 bp, Homo sapiens
tttttttttccttcaggggcatttatttcccggtcagaaaagaagcagggacaggcgcctctgcctgagcctggcagacacaacacgaagaccggggatggggcgggggaggcacaggagacggctctcagcaatgtgtgcacttggtcccttgtttgttcctggctgggtcagggaaggcctgccgggggtggtggcactgagagcctgggggaacaggcgccaggtggggtgggtgaggctgtccatcgagggctcttgggggggtgtgggctctgggcactgccgcctgagacagaaaaggcagaggcaggacaatacccagcctcctggatggtactgaggtgacttgagttttggcaatttggctttccccaagccgccggagccatctccacagccctgtccagggaagggggcaggcttggcaggcactggtgggctggggagcagcagcagcacaccccacgtgtccctgggtcactgg

SEQ ID NO: 146652 - DNA, 549 bp, Homo sapiens
  misc_feature (1)...(549): n = a,t,c or g
cagattgcagcggagaacgagnaggatgagcactcggtcaactacaagcccccggcccagaagagcatccaggagatccaggagctggacaaggacgacgagagcctgcgaaagtacaaggaggccctgctgggccgcgtggccgtttccgcagaccccaacgtccccaacgtcgtggtgactggcctgaccctggtgtgcagctcggccccgggccccctggagctggacctgacgggcgacctggagagcttcaagaagcagtcgtttgtgctgaaggagggtgtggagtaccggataaaaatctctttccgggttaaccgagagatagtgtccggcatgaagtacatccagcatacgtacaggaaaggcgtcaagattgacaagactgactacatggtaggcagctatgggccccgggccgaggagtacgagttcctcccccgccccatccccggtcttcgtgttgtgtctgccaggctcaggcagaggcgcctgtccctgcttcttttctgaccgggaaataaatgcccctgaaggaaaaaaaaa

SEQ ID NO: 146653 - DNA, 396 bp, Homo sapiens; identical to SEQ ID NO: 87940

SEQ ID NO: 146654 - DNA, 630 bp, Homo sapiens
ctcacctttgtgtgcagcttccgcccggtccccttgtatctggacttacgttcgaactgtagactccaaaaaccaatcgtttctcttcaaggaggctgtggattaccgtataaaaatctctttccggtttcaccctaaatatatttccctcatttaataacatccagcatacgtacagtaaagcgtcaagattgacaagactgactacatgttaggcagctatggccccgggccgaggagtacgagttcctgacccccgtggaggaggcacccaagggtatgctggcccggggcagctacagcatcaagtcccgcttcacagacgacgacaagaccgaccacctgtcctgggagtggaatctcaccatcagtatttattgcctccgtccgtgccgtccgtgggccactggcctggcgcctgttcccccaggctctcagtgccaccacccccggcaggccttccctgacccagccaggaacaaacaagggaccaagtgcacacattgctgagagccgtctcctgtgcctcccccgccccatccccggtcttcgtgttgtgtctgccaggctcaggcagaggcgcctgtccctgcttcttttctgaccgggaaataaatgcccctgaaggaa

SEQ ID NO: 146655 - DNA, 959 bp, Homo sapiens
  misc_feature (1)...(959): n = a,t,c or g
acagccgagcagctggcccagattgcagcggagaacgaggaggatgagcactcggtcaactacaagcccccgnccagaagagcatccaggagatccaggagctggacaaggacgacgagagcctgcgaaagtacaaggaggccctgctggcgcngttggccgtttccgcagaccccaacgtccccaacgtcgtggtgactggcctgaccctggtgtgcagctcggccccgggcccctggagctggacctgacgggcgacctggagagcttcaagaagcagtcgtttgtgctgaaggagggtgtggagtgtaccgtggggcctcactagcttctaactccctgtgtctgcatgagcatgtggcctccccgtcccttccccggtggcgaacccagtgacccagggacacgtggggtgtgcagctgctgcatacccagaacaccagcctcatccacaccaagaagaagctggagacagacctcatgcagctccagagtgaggtagaagatgccagcagggatgcaaggaacgctgaggagaaggccaagaaggccatcacggacgctgccatgatggcggaggagctgaagaaggagcaggacaccagcgcccaccttgagcggatgaagaagaacctggaacagacggtgaaggacctgcagcatcgtctagatgaggcccgatcagctggcgctgaagggcgggaagaagcagatccagaaactggagaccaggatccgagagctggagtttgaacttgagggagagcagtgccaccaccccggcaggccttccctgacccgagccaggaacaaacaagggaccaagtgcacacattgctgagagccgtctcctgtgcctcccccgccccatccccggtcttcgtgttgtgtctgccaggctcaggcagaggcgcctgtccctgcttcttttctgaccgggaaataaatgcccctgaagg

SEQ ID NO: 146656 - DNA, 629 bp, Homo sapiens
gcccagaagagcatccaggagatccaggagctggacaaggacgacgagagcctgcgaaagtacaatggtagcctgctgggccgcgtggccgtttccgcagaccccaacgtccccaacgtcgtggtgactggcctgaccctggtgtgcagctgcgccccgggccccctggagctggacctgacgggcgacctggagagcttcaagaagcagtcgtttgtgctgaaggagggtgtggagtaccggataaaaatctctttccgggttaaccgagagatagtgtccggcatgaagtacatccagcatacgtacaggaaaggcgtcaagattgacaagactgactacatggtaggcagctatgggccccgggccgaggagtacgagtccctgggccactggcctggcgcctgttcccccaggctttcagtgccaccacccccggcaggccttccctgacccagccaggaacaaacaagggaccaagtgcacacattgctgagagccgtctcctgtgcctcccccgccccatccccggttttcgtgttgtgtctgccaggctcaggcagaggcgcctgtccctgcttcttttctgaccgggaaataaatgcccccgaaggaaaaaaaaaaaaaaa

SEQ ID NO: 146657 - DNA, 2081 bp, Homo sapiens
  misc_feature (1)...(2081): n = a,t,c or g
attcccattttgtcctagatgttatacctggggtggggcacctcacactgccccagaggatgcccctgagcaggaatcgcgggggtggagaggagcgaaggtgccccccttggagcccttttggagctccgctgcagcccacactcctgctcagaagtgcgcctccgttggggatccaggtccaaggcctgtcaccgtcccgcccacaggtgtcccgacccaggctaagcttgagcatggctgagcaggagcccacagccgagcagctggcccagattgcagcggagaacgaggaggatgagcactcggtcaactacaagcccccggcccagaagagcatccaggagatccaggagctggacaaggacgacgagagcctgcgaaagtacaaggaggccctgctgggccgcngttggccgttttccgcagaccccaacgtccccaacgtcgtggtgactggcctgaccctggtgtgcagcttcggccccgggccccctggagctggacctgacgggcgacctgggagagcttcaagaagcagttcgttttgtgcttgaaggagggtgtggagtaccggataaaaatctctttccggtttaacccgagagataattgtcccggcatgaagtacatccagcatacgtacaggaaaggcgtcaagattgacaagactgactacatggtaggcagctatggggccccgggccgaaggaagtttcgagttccttacccccgttgaaggaggcaccccaagggtatgctggccccggggcagctacagcatcaagtcccgcttcacagacgacgacaagaccgaccacctgtcctgggagtggaatctcaccatcaagaaggactggaaggactgagcccagccagaggcgggcagggcagactgacggacggacgacggacaggcggatgtgtcccccccagcccctcccctccccataccaaggtgctgagcaggccctccgtgcccctcccaccctggtccgcctccctggcctggctcaaccgagtgcctccgaaccccctcctcagccctcccccacccacaggcccagcctcctcggtctcctgtctcgttgctgcttctgcctgtgctgtgggggagagaggccgcagccaggcctctgctgccctttctgtgccccccaggttctatctccccgtcacacccgaggcctggcttcaggagggagcggagcagccattctccaggccccgtgattgccacctggacgtgtgcgtctgttgctccggggtggagctggggtgtgggatgcacggcctcgtgggggccgggccgtcctccagccccgctgctccctggccagcccccttgtcgctgtcggtcccgtctaaccatgatgccttaacatgtggagtgtaccgtggggcctcactagcctctaactccctgtgtctgcatgagcatgtggcctccccgtcccttccccggtggcgaacccagtgacccagggacacgtggggtgtgctgctgctgctccccagcccaccagttgcctgggccagccttgcccccttccctgggacagggctgtggagatggcttccggcggctttggggaaagccaaattgccaaaactcaagtcacctcagtaccatccaggaggctgggtattgtcctgcctctgccttttctgtctcagcgggcagtggccaagagcccacacccccccatagagccctcgattggacagcctcacccatccccacctggggcccagccagggagccccgcctgggccatcagtatttattgcctccgtccgtgccgtccctgggccaactggcctggcgcctgttcccccaggctctcagtgccaccacccacggcaggccttccctgacccgagccgaggaacaaacaagggaccaagtgcacacattgctgagagccgtctcctgtgcctcccccgccccatccccggtcttcgtgttgtgtctgccaggctcaggcagaggccgcctgtccctgcttcttttctgaccgggaaataaatgcccctgaaggaagacaaaaaaaaaaataaaaaagttttgccgtcgacgc

SEQ ID NO: 146658 - DNA, 647 bp, Homo sapiens
actcttctggtcccacaagactcagagagaacccacccatggttgctgtctcctgccgacaaagaccaacgtcaagggcccgcctgggggtaaggtcggcgcgcacgctgtgcgcagtatgtgtgcggaggccctggagaggatgttcctgtccttccccaccaccaagacctacttcccgcacttcgacctgagccacggtttctgcccaggtttaagggccacgggcaagaaggtggccgacgcgctgaccaacgccgtggcgcacgtgggacgacatgcccaacgtcgctgtccgccctgaagcgacctgcacgcgcacaagcttcgggtggacccggttcaactttcaagctcctaaagccactggcctgcttggttgaccctggcccggcccacctccccggccgagtttcaacccctggcggttgcaacgtcttccctgggacaaagtttcctgggctttctgtgggcaaatttaaaatttgaactccaaatacccgttaagcttggaagcctcgggtgggccatgctttctttgcccctttgggcctttcccccagcccctcctcccctttcctgcacccgtacccccgtggtctttgaaataaagtcttgagtgggcggcaaaaaaaaaaaaaaaaaaa

SEQ ID NO: 146659 - DNA, 486 bp, Homo sapiens
gtcaaacacctgaaaaaagacacaagtcttgccctggtggattacatttcctttcacggtctatcaatctacattttcccaaactgtccatttctggaacctacaaactcaagagagtccttaggaatctgggcatcaccaagatcttcagcaacgaggccgacctctctggagtcagtcaggaggcacccctgaagctctccaaggctgtgcatgtggctgtgctcaccattgatgagaaagggaccgaagccaccggacccccccatctggaggagaaggcctggtctaagtatcagacagtcatgttcaaccggcccttcctggtcatcatcaaggatgacatcaccaactttccgctcttcattggaaaagtggtgaatcccacccaaaaataactggctgtcactcctcagcccctcccctccacccctggccccctccctggatgacattaaagaaaggctgaattgcaaaaaacaaaaa

SEQ ID NO: 146660 - DNA, 3914 bp, Homo sapiens
gtgggagggacagcagggcttagagtgggggtcattgtgcagatgggaaaacaaaggcccagagaggggaagaaatgcccaggagctaccgagggcaggcgacctcaaccacagcccagtgctggagctgtgagtggatgtagagcagcggaatatccattcagccagctcaggggaaggacaggggccctgaagccaggggatggagctgcagggaagggagctcagagagaaggggaggggagtctgagctcagtttcccgctgcctgaaaggagggtggtacctactcccttcacaggtcatgctccatttttccatcgggaccatcaagagggtgtttgtgtctaaggctgactgggtaactttggatgagcggtctctccgctctgagcctgtttcctcatctgtcaaatgggctctaacccactctgatctcccagggcggcagacaatgccgtcttctgtctcgtggggcatcctcctgctggcaggcctgtgctgcctggtccctgtctccctggctgaggatccccagggagatgctgcccagaagacagatacatcccaccatgatcaggatcacccaaccttcaacaagatcacccccaacctgggctgagttcgccttcagcctataccgccagctggcacaccagtccaacagcaccaatatcttcttcttccccagttgaggcattcgttacagccttttgcaatggttcttccctgggggaccaaggcttgacactcacgatggaattctggggagggccttgaattttcaaccttcaagggagattttccggaggctcagatccatgaaggcttccagggaactcctccgtacccctcaacccagccagacacgccagctcccagctgaccccaccggcaatggccctgttcccctcagcgagggccctgaagcctagttgggataagtttttgggagggatgttaaaaaagttgtaccccacctcagaagcccttcacctgtccaaccttcgggggacacccgaaggaggcccaagaaacagatccaacgatttacgtgggagaagggtacttcaagggaaaatttgttggatttggtcaaggagctttgacagagacacagttttttgctctggtgaatttacatctttcttttaaagggcaaatcgggagagacccttttgaagtcaaaggacacccgaggaaagaggactttcacgttggaccagggcgtaccaccgtggaaggtgccctatgatgaaagcgtttagggcatgtttaacatccaagcactgggaagaagcctgttccagcttgggttgctgctgatgaaataacctggggcaattgccaccggcaatcttccttcctgccctgatgaggggaaactacagcacctggggaaaatgaactcaccccacgatattcattcaccaagtttcctgggaaaatgaaagacagaaggtcttgcccagctttacattttacccaaactgttccctttattgggaaccctattgattttgaaggagcgttcctggggttcaactgggggcatcacttaagggtctttcaggcattggggctgacctttccgggggtcacagagggaggcacccctgaaagctcttccaagggccgtgcataaaggctgtgcttggaccatcggacgagaaagggactgaaagctgctgggggccatgttttttaggaggccttaccctgtcttttcccccccgaggttcaatttcaacaaaccctttgtcttcttaatgatttgaacaaaataccaaacttgaccaggcccagcaggccccagaagaccattaccctatatcccttctcctccccagtcacatggccataggcctgctgatggctcaggaaggccattgcaaggactcctcagctatgggagaggaagcacatcacccattgacccccgcaacccctccctttcctcccctgagtcccgactggggccacatgcagcctgacttctttgtgcctgttgctgtccctgcagtcttcagagggccaccgcagctccagtgccacggcaggaggctgttcctgaatagcccctgtgcccagaaatcttcctctggcctagttgtggagcctggcctaagtcgcacattgctggagatggtgaagctgaccagcatgagaggtcagtttctagaagcccaaatcccaacaggcataagcctcaccctccaatatcagctctatcagaaacaaacaaacaaaaacatgtcttattcatttgtccttttcctcaaatgggtggcacttgggcagggcagaagggctggttatccaagcttggaagatgctgacagcagacgcttcaatggcagtaggagttttctgatcactgtcattggtatcacgcttactgttgaaatcgtgacatcaggaatgatgaaaggaactagagtcagatggtctggagcggggaatgaggggatgatggggctggaagagggaaggaatgaaaggagtgtgaaggaagcgccaccaaggagagctgtggaagcccaacccaaagaccgcacctgggatgtcgggaagggccaaggtacagaaggagaaggaagagggttggaggtggagggccagcagcaccaaggctcggagccagggacaataccattctctgtctcatggggcgtcctcctgctggcaggcctgtgctgcctggtccccagctccctggttgaggatccccaggaagatgctgcccaaaagacggatacatcccaccatgatcaaggggactgggaggaccttgcttgccagaagatctcctataacgtcaccgacctcgcctttgatttgtacaaagagctggctgatctatcacaaaccagcaatgtcttagtcaccccaacaagcgtggctatggcctttgcaatgctctccctggggaccaaggctgacactcgcacagagatcctggaaggcctgaatgtcaacctcacagagacgcctgaggccaagatccacgaatgcttccagcaagttctccaagccctcagcaggccagacacccggctccagctgaccaccggcagtagcctgtttgttaacaagagtatgaagctagtggacacgtttttggaggataccaagaagctgtaccactcagaagcctcttccatcaacttcagggacaccgaggaggccaaagagcagatcaacaattatgtggagaaaagaactggaagaaaagtagtggatttggtcaaacacctgaaaaaagacacaagtcttgccctggtggattacatttcctttcacggcaagtggaaagataaattcaaggctgagcgcattatggtagagggcttccatgtggatgataagaccatcatcagagtgcctatgataaaccacctgggtagatttgacatccaccgggacagggagttatccagctgggtgctggcacagcactatgtggggaacgccactgccttcttcatcctgcccgatccaaagaagatgtggcagttggaagaaaaattgacctacagccaccttgaaaatatccagagagcctttgacataaggtctatcaatctacattttcccaaactgtccatttctggaacctacaaactcaagagagtccctaggaatctgggcatcaccaagatcttcagcaacgaggccgacctctctggagtcagtcaggaggcacccctgaagctctccaaggctgtgcatgtggctgtgctcaccattgatgagaaagggaccgaagccaccggagccccccatctggaggagaaggcctggtctaagtatcagacagtcatgttcaaccgacccttcctggtcatcatcaaggagtacatcaccaactttccgctcttcattggaaaagtggtgaatcccacccaaaaataa

SEQ ID NO: 146661 - DNA, 409 bp, Homo sapiens
  misc_feature (1)...(409): n = a,t,c or g
ntcctgggccagtggtggtgtccaacaacagctctgctcatggctctcaaagaaccagcggacctgagtcttcaatgaaagtactgttgcccagaaatggttgaataccagaagaaaggaaagtccctggattcagaacccagtgtcccatcagcagcaaagcccccatcccctgagaaaacagctcctgttgcttccacaccctcttctacacctattcctgctctgtcaccgcctaccaaagtaccagaaccaaatgagaacgtgggcgatgccgtccagaccaaactcattatgcttgtagatgacttctactatggacgggatggtggcaaagtagcccagctcacaaatttccctaaggtcgccacatctttccgatgcccacattgtaccaaaaggctgtatt

SEQ ID NO: 146662 - DNA, 437 bp, Homo sapiens
  misc_feature (1)...(437): n = a,t,c or g
tttcgtcttacttccattttttagcttttcattttttggtattagtccagataaaaaggttggaacttcttctttgccagggagctcagagccaagttatactaatgattaagggacctaagacaggcaggagggagaaatacaaagtatagcgcttgggtggcatatgtggatatactctagaaaaggagtaaaacttggaaacgctaaaaaaaactgaagggtgaaagctgaatgagaatacctgaaaccaaaccgttaacaaggaatggtagtgaagttaaggagttagcacattctagcccccaggataaccagaatgatcagatgtctttctttatagtactgttgcccagaaatggttgaataccagaagaaaggaaagtccctggattcagaacccagtgtcccatcagcagcanagcccccatcccctg

SEQ ID NO: 146663 - DNA, 520 bp, Homo sapiens
cttctaccactcccactgccacacagccaacctcactgtggcaactagctgttcagtctccaggccagtcaaaccagaccacgaatcccaagctaggtaaggcttcggaagaggagatggcagagccaggcttgggatggtgggtggagaacagatgattatcacttggtcaccgtagctccctccttcccctctccacctgcagtgagcattgccagctttgtcactgtgaagcgacctggtgttacaggcgaaaatagcaatgaagtggccaaattggtgaatacccttaacaccatcccttccctgggccagagtcctgggccagtggtggtgtccaacaacagctctgctcatggctctcaaagaaccagcggacctgagtcttcaatgaaaggtacaataacctgaaagactctgagcagccagtcattcaaaaacattaataaagtgtttgttgtatcagagctttatactcagaaatagaaaaataaaataaaatacagctgctgtagtttgt

SEQ ID NO: 146664 - DNA, 6434 bp, Homo sapiens
tttcgtccacgggagcatggcggacaccgacctgttcatggaatgtgaggaggaggagttggagccatggcagaaaatcagtgatgtcattgaggactctgtagttgaagattataattcagtggataaaactaccacagtttctgtgagccagcagccagtctcggctccagtgcccatcgctgcccatgcttctgttgctgggcacctctctacatccaccaccgttagtagcagcggggcacagaacagcgacagtacaaagaagactcttgtcacactaattgccaacaacaatgctggcaatcctttggtccagcaaggtggacagccactcatcctgacccagaatccagccccaggtctgggcacaatggttactcaaccagtattgaggcctgttcaggtcatgcagaatgccaatcatgtgactagttcccctgtggcctcacaaccaatatttatcactacgcagggatttcctgtaaggaatgtccggcctgtacaaaatgcaatgaatcaggttgggattgtgctgaacgtacagcaaggccaaacggttagaccaattacactagttccagccccaggtacccagtttgttaagccgacagttggagttccacaagtgttctcccagatgacccctgtgaggccaggctccacaatgcctgtgaggcccaccaccaacaccttcaccaccgtcatcccggccactcttaccattcgaagcaccgtcccacagtcccagtcccagcagaccaagtccactcccagcacttctaccactcccactgccacacagccaacctcactggggcaactagctgttcagtctccaggccagtcaaaccagaccacgaatcccaagctagctccctccttcccctctccacctgcagtgagcattgccagctttgtcactgtgaagcgacctggtgttacaggcgaaaatagcaatgaagtggccaaattggtgaatacccttaacaccatcccttccctgggccagagtcctgggccagtggtggtgtccaacaacagctctgctcattggctctcaaagaaccagcggacctgagtcttcaatgaaagtgacctcttccatcccagtatttgacctccaggatggtggacggaaaatatgtccacgatgtaatgctcaatttccgtgttactgaagctttgagaggtcacatgtgttactgttgcccagaaatggttgaataccagaagaaaggaaagtccctggattcagaacccagtgtcccatcagcagcaaagcccccatcccctgagaaaacagctcctgttgcttccacaccctcttctacacctattcctgctctgtcaccgcctaccaaagtaccagaaccaaatgagaacgtgggcgatgccgtccagaccaaactcattatgcttgtagatgacttctactatggacgggatggtggcaaagtagcccagctcacaaatttccctaaggtcgccacatctttccgatgcccacattgtaccaaaaggctaaaaaacaatattcgattcatgaaccatatgaaacaccacgtagaactcgatcagcagaacggtgaggtagatggtcacactatctgccagcactgttaccgccagttttccactcccttccagcttcagtgccacttggaaaatgttcatagtccctatgaatctactaccaagtgcaagatctgtgaatgggcgtttgaaagtgagccactatttctccagcatatgaaggatactcataagcctggagagatgccttatgtttgccaggtgtgtcaatatcgctcctcactctactctgaggtagatgtccattttcggatgatccatgaggatacccggcatctgctctgcccttattgcctgaaggtcttcaaaaatggcaatgcattccaacagcattacatgaggcaccagaagagaaatgtttatcactgcaacaaatgccggctgcagtttctctttgccaaggacaaaattgaacacaagcttcaacaccataaaaccttccgtaaacccaagcagctggagggcttgaaaccaggcaccaaggtgacaatccgggcttcccgagggcagccacgaactgttcctgtatcctctaatgatacacctcccagcgccttgcaggaggcagcaccgctgacctcctcaatggaccctctgcctgtcttcctttatccccctgtccagcgcagcatccagaagagagctgttaggaaaatgagtgtcatgggccggcagacatgcctggagtgcagcttcgagatcccagacttccctaatcatttccctacttacgtacactgctctctgtgtcgctatagcacctgctgttctcgagcttatgccaaccacatgatcaacaatcatgttccacggaagagccccaagtatttggctttgtttaaaaattctgtgagtggaatcaagctggcctgcacttcatgtacctttgttacctctgtgggcgatgctatggccaagcatttggtattcaacccctctcacagatccagcagcatcctgccacggggactcacttggatagctcactcaaggcatggccagactcgtgaccgagtgcatgaccggaacgtgaagaatatgtaccctcctccttccttccccactaacaaagctgccactgtgaaatctgcgggggccaccccagctgagcctgaagagctactaactcccttagccccagcactcccatcaccagcctcaactgcaaccccaccaccaacccccactcacccgcaggctttagcccttccaccgctggctacagagggagccgaatgtctgaatgttgatgatcaggatgaagggagcccagtcacccaagaacctgagctagcatcaggtggtggtggtagtggtggagttggcaaaaaggagcagctgtctgtgaagaagcttcgagtagtactgtttgctctatgctgcaatacagaacaggcagctgaacacttccgaaatccccagcgacgtattcgccgttggcttcgacgtttccaggcctcccagggggagaatctagagggcaaatatctgagctttgaggcagaagagaaactggctgagtgggtgctaaccccagcgcgaacaacagctacctgtaaatgaggagaccttgttccagaaggccaccaaaataggacgttctttggaaggggggtttaagatctcctatgagtgggctgtgcgtttcatgctgcggcaccacctgactccccatgcccggcgagctgtggcccacacccttacctaaggatgtagcagagaatgcaggactcttcattgattttgtacaacggcagattcacaaccaggacttacccttgtctatgattgtggctattgatgagatctctttgttcctggatacagaggtgctgagcagtgatgatcgaaaggagaatgccctgcagacagtgggcacaggggaaccttggtgtgatgtagtcctagccattctggcagatggcactgtccttcccaccctggttttctacagagggcagatggatcagcctgctaacatgccagactccatatttgctagaggcaaaggagagtggctacaagtgatgacgagatcatggagctgtggtcaactcgagtgtggcagaagcacacagcttgccagcgcagcaaaggcatgcttgtgatggactgtcatcgcactcacttgtcagaagaggtactggctatgcttagtgcctctagcactttgcctgcagtggtcccagcaggctgtagctccaaaattcagccattagatgtatgcatcaaaagaactgtcaagaacttcctgcataaaaaatggaaggaacaggctcgggaaatggcagatactgcatgtgattctgatgtcctgcttcagctggtgcttgtctggctgggtgaagtgctaggtgtcattggggactgtcccaaagctagttcagcgctctttcttggtggctagtgttctgcctggccccgatggcaacattaactcacctacaagaaatgctgacatgcagaaggagctaattgcctccctagaggagcaactgaagctgagtggggaacattttgagtcttccactccacgacccagatcatctcctgaagagacaattgagcctgaaagtcttcaccagctctttgagggtgaaagtgagaacgagttctttctatggctttgaagaagctgacctagatctgatggagatttgagtgttggggtcatgagggggtgtggagtgagggtgggaacatgtgagggagggtaaaggggcttagggaaaagggggcataccaggtggggtatttggtttctattttttaattttataccaccactcccccctgaagttgacttacacttccctgtggatttgtggattaattaggaaaaccaatagtaatcacgtctgagccaaggagctggcccattggtcattcacttctgctaaaaacaggtttttgtgacttttttttttttttaaatttaaatcactgtgtttggtatttttctgacaaaattaagaaaaaggaaaaaaaattatttgtgggcaaatgttaaatttttttgtttccccttttacctcaattgtatcatagtactgggtttttttgtttgttttattgtgtggccaatgtctttgggcatgatgctatctaatcattgttaatgtgagaacatttctgaagatgggaaagacaaattatgtagctcacaaactggtttattatatatatggataaaaaacttttttcattgtggtcttaacacttttatataaaaatgaaaatggaaaaaaagtcccactgaactctctcttccttctccttttctttccttccctctccagagatgttggtttctacagcaaccctagatataaaattgtggctttaaaaatgcatgaaaccacctttaattatccagaatgaatagatttgtcttttcctcaccaccttccctccaaaacatgacataaacaatattttttggcacttgtgatccttggcccctttccccattctcaacaccatccatccctctggacaaaggatcatacaggtgttattagcaagcaagagatactgaagcgatcaaacagttttagggtggaagccattcccagtttgagtcttcatcctgtaagcccccaggggcagtccctgcttttactggaactttcatcctgttagatgggagagcatgcctgtttaaggggattactgggtcctacagccgggagctaattgtttcaaggaagtgttggaacttttaaaaaggacaaggaccacttgttgaaatccaggcgtgctctgtgggctttcccctatttctcttaatacttagggaagaatctgacaggaagaagcgcacaggggtgtgcacaaagaaaatgacatgaatctttatttttcactgccagcttcaaggaaagaaaatttttttctacaatttgcatgagggattttttttaattgtatgtactcatggttgtaaaccaaaaccgtactgtaccgtacagagaaaaggagcaaaaaaccaagtcttctgtttatcctgaggctttccacaatgttcccctcctgtgagccaagggaggcaaactgcacaagctttgtaaatggggtcgtcttttaaaatgtacataagtggaacatttaataaaatgaggggaaatggatttataaacttgtttttttttctaggtgaccctgtttaataggctttcacagactggggaatgctcaagatgttgatgggcctggtgggtacaggtgtgacatttggttaccacccatttctcccaccccaccctgctttttttggtttggtttggtttttcaaccccccagcacactataatatagtgaactggtaaaagtcccttccagaaaccagcttggccagctttgtgaacccttgaacacctgaaaaacaacccaaggaacccatctgggcctcccctccccccaacttttgccctgatgcccattttaattggaccagacaaatggacttttgaaagtccagccctttgccccttgaagaaaagttccaaagaacctatggttgggtccaccgtcctatcctacaaccctaatccctacctctttggtatgtctctgcagcagccatcagccttaagcagagctgtgggttccgtgtctttcttgcacaacgattggacttttctttgaatggggttaaattttttttaagattataccaacagtggatcagttgggttttgtgccaggaagttgtatttgtggaatactacctgcatggcttagtagaagaaagaaatttatttttggtatagtatactttataattcagaaaaatacaataaacatgtatttattgactgttaaaaaaaaaaaaaaaa

SEQ ID NO: 146665 - DNA, 1149 bp, Homo sapiens
ctggtcctgtcctgttctccagcatggtgtgtctgaagctccctggaggctcctgcatggcagctctgacagtgacactgatggtgctgagctccccactggctttggctggggacacccaaccacgtttcctgtggcagggtaagtataagtgtcatttcttcaacgggacggagcgggtgcagttcctggaaagactcttctataaccaggaggagttcgtgcgcttcgacagcgacgtgggggagtaccgggcggtgacggagctagggcggcctgtcgccgagtcctggaacagccagaaggacatcctggaggacaggcggggccaggtggacaccgtgtgcagacacaactacggggttggtgagagcttcacagtgcagcggcgagtccatcctgaggtgactgtgtatcctgccaagactcagcccctgcagcaccacaacctcctggtctgctctgtgagtggtttctatccaggcagcattgaagtcaggtggttccggaacggccaggaagagaaggctggggtggtgtccacaggcctgatccagaatggagactggaccttccagaccctggtgatgctggaaacagttcctcggagtggagaagtttacacctgccaagtggagcacccaagtgtgatgagccctctcacagtggaatggagagcacggtctgaatctgcacagagcaagatgctgagtggtgtcgggggctttgtgctgggcctgctcttccttggggccgggttgttcatctacttcaggaatcagaaaggacactctggacttcagccaacaggattcctgagctgaagtgaagatgaccacattcaaggaaaaaccttctgccccagctttgcaggatgaaacacttccccgcttggctctcattcttccacaagagagacctttctccggacctggttgctactggttcagcaactctgcagaaaatgtcctcccctgtggctgcctcagctcatgcctttggcctgaagtcccagcattgatggcagcccctcatcttccaagttttgtgctcccctttacctaacgcttcctgcctcccatgcatctgtactcctcctgtgccacaaacacattacattattaaatgtttctcaaacatggagttaaa

SEQ ID NO: 146666 - DNA, 1404 bp, Homo sapiens
  misc_feature (1)...(1404): n = a,t,c or g
atgctgagtggagtcgggggcttcgtgctgggcctgctcttccttggggccgggctgttcatctacttcaggaatcagaaagctgaggagtcttttgtatcggctctctccatagacttatctggaggaggaaatatggctttgctgagcatggtgtgtctgaagttccctggagggctcctgcatggcagctctgacagtgacactgatggtgctgagctccccactggctttggctgggggacacccgacacccccgtccgcctcagaaagacagaggatgagcccctgggctgcgtgttgtcggggttgcgggtggggccagatagtgtcttccccggaggccgcttctgtaaccggatcgttcttgtccccccagcacgtttcttggagcaggttaaacatgagtgtcatttcttcaacgggacggagcgggtgcggttcctggacagatacttctatcaccaagaggagtacgtgcgcttcgacagcgacgtgggggagtaccgggcggtgacggagctggggcggcctgatgccgagtactggaacagccagaaggacctcctggagcagaagcgggccgcggtggacacctactgcagacacaactacggggttggtgagagcttcacagtgcagcggcgagtctatcctgaggtgactgtgtatcctgcaaagacccagcccctgcagcaccacaacctcctggtctgctctgtgaatggtttctatccaggcagcattgaagtcaggtggttccggaacggccaggaagagaagactggggtggtgtccacaggcctgatccagaatggagactggaccttccagaccctggtgatgctggaaacagttcctcggagtggagaggtttacacctgccaagtggagcacccaagcctgacgagccctctcacagtggaatggagagcacggtctgaatctgcacagagcaagatgctgagtggagtcgggggcttcgtgctgggcctgctcttccttggggccgggctgttcatctacttcaggaatcagaaaggacactctggacttcagccaacaggattcctgagctgaagtgaagatgaccacattcaaggaagaaccttctgccccagctttgcaggatgaaacacttccccgcttggctctcattcttccacaagagagacctttctccggacctggttgctactggttcagcagctctgcagaaaatgtcctcccttgtggctgcctcagctcgtacctttggcctgaagtcccagcattaatggcagcccctcatcttccaagttttgtgctcccctttacctaatgcttcctgcctcccatgcatctgtactcctgctgtgccacaaacanattacattattaaatgtttctcaaacatggagttaa

SEQ ID NO: 146667 - DNA, 1198 bp, Homo sapiens
cggacgcgtgggcttgcctgctgctctggcccctggtcctgtcctgttctccagcatggtgtgtctgaggctccctggaggctcctgcatggcagttctgacagtgacactgatggtgctgagctccccactggctttggctggggacaccagaccacgtttcttggagtactctacgtctgagtgtcatttcttcaatgggacggagcgggtgcggtacctggacagatacttccataaccaggaggagaacgtgcgcttcgacagcgacgtgggggagttccgggcggtgacggagctggggcggcctgatgccgagtactggaacagccagaaggacctcctggagcagaagcggggccgcggtggacaactactgcagacacaactacggggttgtggagagcttcacagtgcagcggcgagtccatcctaaggtgactgtgtatcctttcaagaacccagcccctgcagcaccacaacctcctggtctgttctgtgagtggtttctatccaggcagcattgaagtcaggtggttccggaatggccaggaagagaagactggggtggtgtccacaaggcctgatccacaatggagactggaccttcccacaccctggtgagtgctggaaacagttcctcggagtggagaggtttacacctgcccaagtggaagcacccagggcgtgacaagcccctctcacagtggaattggagagcacggtctgaatctgcacagagcaagatgctgagtggagtcgggggctttgtgctgggcctgctcttccttggggccgggctgttcatctacttcaggaatcagaaaggacactctggacttcagccaagaggattcctgagctgaagtgcagatgacacattcaaagaagaactttctgccccagctttgcaggatgaaaagctttccctcctggctgttattcttccacaagagagggctttctcaggacctggttgctactggttcagcaactgcagaaaatgtcctcccttgtggcttcctcagctcctgttcttggcctgaagccccacaggctttgatggcagcgcctcatcttcaacttttgtgctcccctttgcctaaaccctatggcctcctgtgcatctgtactcaccctgtaccacaaacacattacattattaaatgtttctcaaagatggagttaaaaaaaaaaa

SEQ ID NO: 146668 - DNA, 1970 bp, Homo sapiens
  misc_feature (1)...(1970): n = a,t,c or g
gacggaactttcgggtcgacccacgcgtccggagggaggaggggttcatagttctccctgagagagacttgcctgcttctctggcccctggtcctgtcctggtctccagcatggtgagtctgaagctccctggaggctcctgcatgacagcgcggacgagtttcactgatggtgactgagctccccactggctttggctggggacacccgaccacgtttcctgtggcagcctaagagggagtgtcatttcttcaatgggacggagcgggtgcggttcctggacagatacttctataaccaggaggagtccgtgcgcttcgacagcgacgtgggggagtaccgggcggtgacggagctggggcggcctgatgccgagtacttggaacagccagaaggacctcctggaagcagaggcgggccgcgggtggacacctacttgcagacacaacttacggggttggtgagagcttcccagtgcagcggcgaagttgagcctaaggtgactgtgtatccttcaaagacccagcccctgcagcaccacaacctcctgggttctgctctgtgagtggtttctatccaggcagcattgaagtcaggtggttcctgaacggccaggaagagaaggctggggttggtgccccaagccttgatccagaatggagattggacctttcagacctggggtgatgctggaaacagttcctcgaagtggagagggtttacactgccaaagtgagcaacccaggcgtgacaagccttctcacagtggaatggagagcacggtctgaatctgcacagagcaagatgctgagtggagtcgggggctttgtgctgggccctgctccttcccttggggcccgggcttttcaatctacttcaggaatcagaaaggacactctggacttcagccaacaggattccctgagctgaaatgcagatgaaccacattcaaggaagaaccttctgtcccagctttgcagaatgaaaagctttcctgcttggcagttattcttccacaagagagggctttctcaggacctggttgctaccggttaagcaactctgcagaaaatgttcctcccttgtggcttcctcagctcctgcccttggcctgaagtcccagcattgatgacagcgcctcatcttcagcttttgtgctcccctttgcctaaaccgtatggcctcccgtgcatctgtacctcaccctgtacgacaaacacattacattattaaatgtttctcaaagatggagttaaatatcatctggtccatttggctccaaagacagaaaatgaaaagaaaaagggaagattattttccaatagaataatgattttcatgtatatgtcatgagtgtgcgagggaatgcgtatgttaaatagctggatttagacattccacactataggcatataacaaaacttcatgcttccacataaatatgcnnnnnnnnnnnnnnnnnnnnnnnnaaaaagtaatcctaatgtttaaaaaggcaatgcataaaaactgagaacagactataacaactgaaacaaacttggcaaccatgagatgagaaaccagctagcaagtcaatcagaactctttcttcatctcgtctacaatattttgtatttataactgtaaattagtgtatagtgtttcactccagagacttcaataatacagtgttatcaaaaggacttgtacagatttcagagaaagacacatttagaagacggagaatggagtctccattatgttctatctgagagtcagtatgaaatgtcaaatataaaagtacataattcagaggtctatttcaaattaataatcatttgagcataatttctccactgtcagagacgactgttattttattttcaatcaaattaaaacttgttgtttatgaatatcttatttttagttatatgttacttgtacataagtagcagcacaatacgtacatataaaccctatgagtataa

SEQ ID NO: 146669 - DNA, 706 bp, Homo sapiens
  misc_feature (1)...(706): n = a,t,c or g
atcgagaccatattccatgtggnggaattccacagactcagagagaacccacccatggttgctgtctcctgcccgacaaagaccaacgtcaagggcccgcctgggggtaaggtcggcgcgcacgctgtgcgcagtatgtgtgcggaggccctggagaggatgttcctgtccttccccaccaaccaagacctacttcccgcacttcgaccttgagccacggtttctgcccaggttaaagggccacggcaaagaaggtggccgaacgcgctgaccaaacgccgtggcgcaccgttggacgacatgcccaaacggcgctgtccgccctgagcgacctgcacgcgcacaagcttcgggtggacccggttcaactttcaagctcctaaagccactggcctgcttggttgaccctgggccggcccacttccccgtccgagtttcacccctggcggttgcaaggcttccctgggacaaagtttcctgggcttcttgttgaagcaaccgtggctgaacttcaaatacccgttaaagcttggaagccttcgggttggccatgcttctttgcccctttgggcctccccccagcccctcctcccctttcctgcacccgtacccccgtggtcttttgaataaaattttgaattgggggggcaaaaaaaaaaaaaaaaaaaagatctttnaatttaagggggcggaaagtttatttcaa

SEQ ID NO: 146670 - DNA, 420 bp, Homo sapiens
ggacccccgttcacctagtgctggcatcctgcgcactcccatccaggtactctgggccagcgtgggaaaggcagagaatgtctgaattcttgggtctcttcctaacctgattttgagagagccgtcatgaccccacccttatcctagccttattttctgcaatctcaatctgtgtggggtaggctggatatctgagggccttggcaattccttcctggaatatggggaggagaggagagaagagtcagggcccagacttgttctagcctatggtcttgacaggtggagagctctccacagccaggcctaccagcaggggagcaactggagggtcttaaacatgcccaggactcagatccccgctctcctactcttggtattgcacggacacctatgaagaccagcagtggaggtaagcgt

SEQ ID NO: 146671 - DNA, 1176 bp, Homo sapiens
ggcacgagcgagctgttgtgcatccagaggtggaattggggcccggcattccctcctcgtcccgggctggcccttgcccccaccctgcaactcctggttgagatgggctcagccaagagcgtcccagtcacaccagcgcggcctccgccgacgaacaagcatctggctcgagtggcggacccccgttcacctagtggctggcatcctgcgcactcccatccaggtggagagctctccacagccaaggcctaccaagcaaggggagcaactggagggtcttaaacatgcccaaggactcaagatccccgctctcctactcttggtattgcacgggacacctattgaagaccaagcaagttggagaccccccaagcccacttggtgaaaacagcttgagttgaagtatttgagagctgaagactctaaatcaaatcttcccccgagagcgtgttctgcccccagaggcacctttatcttctgaattggacttgcctctggggtacccagttatctgttgaaggaacagatgccaccttggaaccagactgagttcccctccaaacaggtgttttccaaggaggaagcaagacagcccacagaaacccctgtggccagccagagctccgacaagccctcaagggaccctgagactcccagatcttcaaggttctatgcgcaatagatggaaaccaaaacagcagcaaggtacttagggaaatccccccttcacccatcctgccaggatgacaactcccctggcaccctgacactacgacagggtaaagcggccttcaaacccctaagtgaaaatgttagtgaactaaaaggaaggagcccattcttggaactggacggacttctgaaaactgaaggacgagcatgggagcaaggccaggacccatgacaaggaaaatcagcactttcccttggtggagagctgagccctgcatggccccagcaatgcagtcacccagggcctggtgatatctgtgtcctctcaccccttctttcccgagggatactgaggaatggcttgttttcttagactcctcctcagctaccaaactgggactcacagctttattgggctttctttgtgtctttgtgtgtttcttttatattaaaggaagtaattttaaatgttactttaaaaaggtaaaaaaaaaaaaaaagggc

SEQ ID NO: 146672 - DNA, 447 bp, Homo sapiens
gctcatgggaggaaggagaggtgcccgtggtggcagagggtggtgagcagggagggtccgaatactctgggactgtgttgaggtggatctgacagagttaggtgcaggccaatcagtggaggcttccagacacgcctgggaggtggtgagaaggaacaggtgccactgggctccacagctatttctgagctttgctccaggctggggtgggcggggaaggcagggttggggatggaggtgcagtaggttggtttccttcaccccaacctccttcctcccctcccggggttatgccctgcccacatgacaggcgggggacagagccgggccgagacttggtccctgctcagtgacagcaccatggacacgagatactctggaaagaagtggtcggtccccacgggtgagacacggtccaggactgttctgattccagaccctccctgt

SEQ ID NO: 146673 - DNA, 749 bp, Homo sapiens
  misc_feature (1)...(749): n = a,t,c or g
ccaagcggctgccgaagatggcggaggtgcaggtcctggtgctttgatggtcgagcccattcttccctgggcccgcctggccggccatcgtgggctaaaccaggtactgctgggccggaaaggtggtggtcgtaccgctgtgaaggcatcaaacatttctggcaatttcttacagaaacgaggttaaagtaccttggcttttcccctccaagcggatcgaacaccaacccttcccgaaggccccttaccacttcgggggcccccagccgcattcttctggcggaccgtgcgaggtatgctgcccccacaaaacccaagcggaggccaaggccgcctctggaccgtcttcaaggtgtttgacggcatccccaccgccctacggacaagaaaaaagcgggatggtggttcctggctgccctcaaggtcgtgcgttttgaagcctacaagaaagttttgcctaatttttttcttttngggggggggcgccctcggctcaccaaggttggctggaagtaccaggcagtgacagccccccctggaagaagaagaggaaaagagaaaagccaagattccactaccggaagaaagaaaacagcatcatgaggctaccggaaacaggcccgagaagaaacgtggagaaagaaaattgacaaatacacagaggtcctcaagacccacggactcctggtctgagcccaataaagactgttaattcctcaaaaaaaaaaaaaaaaaaaagggcggccgct

SEQ ID NO: 146674 - DNA, 2094 bp, Homo sapiens
atgcatggcctcaatgggacttttgatgtatccttggtaagagtataccctatttggggaccaggacctctaaccctgcaggatcaagagttgtggggacaagaagcacctaatcatgtccttgtccccggtgggacattgagtaaattgtcccccctgtctcccttgttttcgaataactacatcatcacatctgccagggcattaccctccactgaaacgttttcccagaggaatgttacggcatccggagtcatccctcagatttctctgatcatgggcccatgtgctggtggggccgtctactccccagccctaacagacttcacgttcatggtaaaggacacctcctacctgttcatcactggccctgatgttgtgaagtctgtcaccaatgaggatgttacccaggaggagctcggtggtgccaagacccacaccaccatgtcaggtgtggcccacagagcttttgaaaatgatgttgatgccttgtgtaatctccgggatttcttcaactacctgcccctgagcagtcaggacccggctcccgtccgtgagtgccacgatcccagtgaccgtctggttcctgagcttgacacaattgtccctttggaatcaaccaaagcctacaacatggtggacatcatacactctgctttcatgttactctgtgatcttctgatgattttcagccaccaattaatgacaggtggcagagagggccttcagcctttggtgttcaatccagatactggactccaatctgaactcctcagttttgtgatggatcacgtttttattgaccaagacgaggagaaccagagcatggagggtgatgaagaagatgaagctaataaaattgaggccttacataaaagaaggaatctacttgctgctttcagcaaacttatcatttatgacattgttgacatgcatgcagctgcagacatcttcaaacactacatgaagtattacaatgactatggtgatattattaaggaaacactgagtaaaaccaggcagattgataaaattcagtgtgccaagactctcattctcagtttgcaacagttatttaatgaacttgttcaagagcaaggtcccaacctagataggacatctgcccatgtcagtggcattaaagaactggcacgtcgctttgcccttacatttggattggaccagattaagacacgagaagcagttgccacacttcacaaggatggcatagagtttgcatttaaataccaaaatcagaaaggacaagagtatccacctcctaatctggcttttcttgaagtactaagtgaattttcttctaaacttcttcgacaggacaaaaagacagtgtattcttcagaacctgcagaaagagagcctcagattaagaaaaatcattcatacctagagaaattccttaccgagcagatgatggaaaggagggaggatgtatggcttccactcatctcctatagaaattcattagtcactgggggtgaagatgatagaatgtctgtgaacagtggaagtagcagcagcaaaacctcatcagtaaggaataagaaaggacgacctccacttcataaaaaacgagtagaagatgagagtctggataacacatggctaaacaggactgacaccatgattcagactcctggccccctgccagcaccacaactcacatccactgtactgcgggagaacagtcggcccatgggagaccagattcaagaacctgagtctgaacatggttctgaaccagactttttacacaatcggggtctaatggaggaagatgctgagcccatctttgaagatgtgatgatgtcatcccgaagccagttagaagatatgaatgaagaatttgaggacaccatggttattgatctgcctccatcaagaaatcggcgagagagagctgagctaaggccagacttctttgactctgcagctatcatagaagatgattcagtaaatgtcaaattattactgctttttatttatggttcctgggtcctgtttatgcatgaaattaataattatgtttctcatcatttttctagggatttggaatgcctatgttctgaagtctga

SEQ ID NO: 146675 - DNA, 6291 bp, Homo sapiens
ggctgtgacactaatacttaacatggtggttgtgtctctttatgcctgactcaatcagttgaaatccaaaagtaagttcttccttgatttacctgccaagacctgagttcaggccctcagggtgctgaggttttcctttgtgggagaaaatgccaccagatggcgggttaggattgcagctccgttgaaggcgcggcccccgctcccgaacccccggcgaccaccccgtaacaacccccccacatcgggaataacacaccggagacttttggggggaaactaggtcgatggtcggcggcgcccggatgggcagctgaggattgcctttgaggttattttaaaagttttgagttgtacagcacttgattattttgctgcattgagaaaggacctctccagccatgattacttcagaattaccagtgttacaggattcaactaatgaagctactgcccattccgatgctggcagcgagcttgaagaaacagaggtcaaaggaaaaagaataaggggtcgtcctggccggcctccatctacaaataagaaacctcgaaaatctccatgtgagaagagcaaaattgaagctggaattagaggagcaggccgtggaagagctaatggacaccctcaacagaatggggaaggggagcctgtcacattatttgaggtggtgaaactggggaaaagtgcaatgcagtccgtggtggatgactggattgaatcatataaacaagacagggacatcgcacttctggatttaatcaacttttttatccagtgttcaggatgtcgaggtactgtgagaatagagatgtttcgaaatatgcagaatgcagaaatcatcagaaaaatgactgaagaatttgatgaggacagtggtgattatcctcttaccatgcctggacctcagtggaaaaaatttcgttcaaacttttgtgaatttattggagtcctgattcgacagtgtcagtatagcataatttatgatgagtatatgatggacacagtaatctcccttttgacgggtttgtcagactcccaggtcagagcttttaggcatacaagtaccctggctgccatgaagctcatgactgctctggtgaatgttgccttaaacctcagtattcatcaggataatacccagagacaatatgaagccgagagaaataaaatgattgggaagagagccaatgaaaggttggagttactacttcagaaacgcaaagagctgcaagaaaatcaggatgaaatcgaaaatatgatgaactctatttttaagggtatatttgttcatagatacccgtgatgctattgctgagattagagccatttgtattgaaagaaattggagtatggatgaaaatgtatagtgatgccttcctaaatgacagttacctaaaatatgttggctggactcttcatgacaggcaaggggaagtcaggctgaagtgtttgaaagctctgcagagtctatataccaatagagaattattccccaaattggaactattcactaaccgattcaaggatcgcattgtatcaatgacacttgataaagaatatgatgttgctgtggaagctattcgattggttactctgatacttcatggaagtgaagaagctctttccaatgaagactgtgaaaatgtttaccacttggtgtactcggcacatcgccctgttgctgtggcagctggagagttccttcacaaaaagctatttagcagacatgacccacaagcagaagaagcattagcaaagaggaggggaagaaacagcccgaatggaaacctcattaggatgctggttcttttctttcttgaaagtgagttacatgaacatgcagcctactttggtggacagtttatgggagagctctcaagaactgttgaaagactgggaatgtatgacagagttgctattagaagaacctgttcaaggagaggaagcaatgtctgatcgtcaagagagtgctcttatagagctaatggtttgtacaattcgtcaagctgctgaggcacatcctccagtgggaaggggtaccggcaagagagtgctaactgccaaagaaaggaaaactcaaattgatgatagaaacaaattgactgaacattttattattacacttcctatgttactgtcaaagtattctgcagatgcagagaaggtagcaaacttgctacaaatcccacagtattttgatttagaaatctacagcacaggtagaatggaaaagcatctggatgctttattaaaacagattaagtttgttgtggagaaacacgtagaatcaagatgttctagaagcctgcagtaaaacctatagtatcttatgcagtgaagaatataccatccagaacagagttgacatagctcgaagccagctgattgatgagtttgtagatcgattcaatcattctgtggaagacctattgcaagagggagaagaagctgatgatgatgacatttacaatgttctttctacattaaagcggttaacttcttttcagaatgcacatgatctcacaaaatgggatctctttggtaattgctacagattattgaagactggaattgaacatggagccatgccagaacagatagtcgtgcaagcactgcagtgttcccattattcgattctttggcagttggtgaaaattactgatggctctccttccaaagaggatttgttggtattgaggaaaacggtgaaatcctttttggctgtttgccagcagtgcctgtctaatgttaatactccagtgaaagaacaggctttcatgttactctgtgatcttctgatgattttcagccaccaattaatgacaggtggcagagagggccttcagcctttggtgttcaatccagatactggactccaatctgaactcctcagttttgtgatggatcacgtttttattgaccaagacgaggagaaccagagcatggagggtgatgaagaagatgaagctaataaaattgaggccttacataaaagaaggaatctacttgctgctttcagcaaacttatcatttatgacattgttgacatgcatgcagctgcagacatcttcaaacactacatgaagtattacaatgactatggtgatattattaaggaaacactgagtaaaaccaggcagattgataaaattcagtgtgccaagactctcattctcagtttgcaacagttatttaatgaacttgttcaagagcaaggtcccaacctagataggacatctgcccatgtcagtggcattaaagaactggcacgtcgctttgcccttacatttggattggaccagattaagacacgagaagcagttgccacacttcacaaggatggcatagagtttgcatttaaataccaaaatcagaaaggacaagagtatccacctcctaatctggcttttcttgaagtactaagtgaattttcttctaaacttcttcgacaggacaaaaagacagttcattcatacctagagaaattccttaccgagcagatgatggaaaggagggaggatgtatggcttccactcatctcctatagaaattcattagtcactgggggtgaagatgatagaatgtctgtgaacagtggaagtagcagcagcaaaacctcatcagtaaggaataagaaaggacgacctccacttcataaaaaacgagtagaagatgagagtctggataacacatggctaaacaggactgacaccatgattcagactcctggccccactgccagcaccacaactcacatacactgtactgcgggagaacagtcgacccatgggagaccagattcaagaacctgagtctgaacatggttctgaaccatactttttacacaatcctcagatgcagatctcttggttaggccatccgaagttagaacacttaaatccgaaggacataacaggaatgaactacatgaaagtgataactggagctaggcatgctgctctgtgtctaatggaggaagatgctgagcccatctttgaagatgtgatgatgtcatcccgaagccagttagaagatatgaatggaagaatttggaggacaccatgggttattgatctgcctcccatcaagaaatcggcgagagagagctgagctaaggcccagacttcctttgactctgcagctatcatagaagatgattcaggatttggaatgcctatgttctgaagtctgaagaaaatttacaaatctggaactctattatttagagctagaggcctatatactgggatagcttggatggggaaaaacaacttttgatgtgatctgatttgttttttaatcaaatgattaaggtcaatccctttttgcagtgacagaagaggagcatgtaaattacccaagggaatgttggtgaatgtcaactcagaaagacctgaccctgaaaatcatttgtgtcctactgttggacttatcccaatacagatgtgtgtgtttttctgggagggaggaaggaaattttaaatttttaaaacagctgtccaaggataaacactgttatacacctgtttttatggaaaactcaacattggggtaaaaaaaacatatttttaactttattttcctgttgtacaatttaaaaaccgttttaacattttgcctttttatgttttaaaagctaaccatttttatttaacccttggggtaagcagctcatcctaattgcgaagagtgttttgggagttcactggatttggttgacctttgccggaacacaaataatgaaggagcagaacattgacaagctaagatgaaattctgacatagtacatctctggcccaaaaccacacaccctctgtggatatggatatgaattccccccagattttatatactcttggaataaaaggttttattttttatttataagtgggcataaaataagaaatgtcccatgcagccattttttccaacagatgctggacaacgttctatttaaatagcttagggagaattcaaatcaagtgcattttctattggtatttgttctgtgcatttttagcaacttctaccagcaaataaagtattctcagtaaaacgaaaatgattctcaagttatcagtttgctgtttttaccacttatttcatgccctgccaaattcaagttacacagacttccattttcttaagataatcaatcatgaagaaatcctttatcaatcattcaaaagtaattttaagtgtaacataactgtgtttacttcccatgcacttaatacccttatgcgctaattttgtgaattaagtttactgattataggaagtatgtgctgcatagaagtctgtgcttagaggggtgaaggttcctaaggcttaccttggaattacaggctacatttcagtgttaaagtggcatatttaggataattcttttggggaaagaaattatgaatcttcaggacagtctacaatggtttagagttacattctgcctacacttttatgacttgctgctattggtttaaaaaccccactttagtctcttcccttttgattttctaaagtaagcctcagaatttccaaacaattccatccacagctgtttctgggctggtttttaaagtagctgcaacagaatcatgaggctttccctttttatcaaatacgaaaaacattttttaaaattctgcacacccagtgatcatcttttgtgcgggaaagcaagatgatgatggatgattttattcatccttttagtaaagacacaaaacatttttctcaacatttgtacagttctgaaaaaaacctgggtcacccaaaaatatcttctctgctaattcagcaattcttggggctccagttaagttaggggagctggggccctcactttctccccagggattgtgggccttcactgggaagtgaagggtgcagggaatgactgggactgtcccacccccagccctgccctgccctgtgggttttgggccaggggagcaagcccatgagggtgccctggggaattggcacaaattgatccctttgcgtggacagtcttgtatggggaaacagatgctttacaggatttgtaggactaccctggccacacaaaaaggcctaaatatctactccaaatgggtttccagttcagttttgaagtcaatcaaatttttgtattttcggtgtctccttgattggttttgctagtaattctgtaaattgtacatttgcaaaatgggggttttttttccttttggacaatttgaaactgatgcttcccctttcctttaataaactattcaaaatcaggaaaaaaaaaaaaaaaaaa

SEQ ID NO: 146676 - DNA, 2664 bp, Homo sapiens; identical to SEQ ID NO: 131466

SEQ ID NO: 146677 - DNA, 1454 bp, Homo sapiens
atgattatctcaatagatgcagaaaaggcctttgacaaaattcaacaacccttcatgctgaaaactctcaatgaattagtgttggaagttctggccagggcaatcaggcaggagaaggaaataaaggtcattcaattaggaaaagaggaagtcaaattgtccctgtttgcagatgacatgattgtatatctagaaaaccccatcgtctcagcccaaaatctccttaagctgataagcaacttcagcaaagtctcaggatacaaaatcaatgtgcaaaaatcacaagcagtcttatacacaaataacagacaaacagagagccaaatcatgagtgaactcccattcacaattgcttcaaagagaataaaatacctaggaatccaacttacaagggatgtgaaagacctcttcaaggagaactacaaaccactgctcaatgaaataaaagaggatacaaacaaatggaagaagattctatgctcatgggcaggaagaatcaatatcgtgaaaatggccacactgtccaaggtaatttatagattcaatgctatccccatcaagctaccaatgactttcttcacagaattggaaaaaactactttaaagttcatatggaaccaaaaaagagcctgcatcgccaagtcaatcctaagccaaaagaacaaagctggaggcatcacgctacctgacttcaaactatactacaaggctacagtaaccaaaacagcatggtactggtaccaaaagagagatatagatcaatggaacagaacagagccctcagaaataacgccacgtatctacaattatctgatctttgacaaacctgagaaaaacaagcaatggggaaaggattccctatttaataaatggtgctgggaaaactggctagccatatgtagaaagctgaaactggatcgcttccttataccttatacaaaaattaattcaagatggattaaagacttaaacgttagacctaaaaccataaaaaccctagaagaaaacctaggcattaccattcaggacataggcatgggcaaggacttcatgtctaaaacaccaaaagcagtggcaacaaaagccaaaattgacaaatggaatctaattaaactaaagagcttctgcacagcaaaagaaactaccatcagagtgaacaggcaacctacaaaatgggagaaaattttcgcaacctactcatctgacaaagggctaatatccggaatctacaaagaactcaaacaaatttacaagaaaaaaacaaacaaccccatcaaaaagtgggccaaggacatgaacagacccttctcaaaagaagacatttatgcagccaaaagacacatgaaaaaatgctcaccatcactggccatcagagaaatgcaaatcaaaaccacaatgagataccatctcacaccagttagaatggcaatcattcaaaagtcaggaaacaacag

SEQ ID NO: 146678 - DNA, 2367 bp, Homo sapiens
gaaaccctgatagattggtgtgatgaaaaggaacttaatttgatattaacaactggaggaacaggatttgcaccacgagatgtcactccagagaattcggctgtgaatccatctggtcctggactctttttggttgtgttggaagttctggccagggcaattaggcaggagaaggaaataaagggtattcaattaggaaaagaggaagtcaaattgtccgtgtctgcagatgacatgattgtatatctagaaaaccccattgtctcagcccaaaatctccttaagctgataagcaacttcagcaaagtctcaggatacaaaatcaatgtgcaaaaatcacaagcattcctatacaccaacaacagacagagagccaaatcaataaaatacctaggaatccaacttacaagggatgtgaaggacctcttcaaggagaactacaaaccactgctcaaggaaataaaagaggatacaaacaaatggaagaacattccatgctcatgggtaggaagaatcaatatcgtgaaaatggccatactgcccaaggtaatttacagattcaatgccatccccatcaagctaccaatgcctttcttcacagaattggaaaaaactactttaaagttcatatggaaccaaaaaagagcccgcatcgccaagtcaatcctaagccaaaagaacaaagctggaggcatcacactacctgacttcaaactatactacaaggctacaataaccaaaacagcgtggtactggtaccaaaacagagatatagatcaatggaacagaacagagccctcagaaataacaccgcatatctacaactatctgatctttgacaaacctgagaaaaacaagcaatggggaaaggattccctatttaataaatggtgctgggaaaactggctagccgtatgtagaaagctgaaactggatcccttccttacaccttatacaaaaatcaattcaagatggattaaagacttaaatgttagacctaaaaccataaaaaccctagaagaaaacctaggcattaccattcaggacataggcatgggcaaggacttcatgtctaaaacaccaaaagcaatggcaacaaaagccaaaattgacaaatgggatctaattaaactaaagagcttctgcacagcaaaagaaactaccatcagagtgaacaggcaacctacaaaatgggagaaaattttcgcaacctactcatctgacaaagcactaatatccagaatctacaatgaactcaaacaaatttacaagaaaaaaacaaacaaccccatcaaaaagagggcgaaggacatgaacagacacttctcaaaagaagacatttatgcagccagaaaacacatgaaaaaatgctcaccgtcactggccatcagagaaatgcaaatcaaaaccacaatgagataccatctcacaccagttagaatggcaatcattaaaaagtcaggaaacaacagtcataccccagcagcaactggctgcatggcatggagagagaatctgtgcatttgggagaggaacagcacagtgattgtgagacgtagcattggacacagtgctgccctgtcacagcagaaagcaacaccaggcttaactcaactgaatactgcccatagagggaccatttggaccagccctacacagaggggaaccactaatccctgcgattggaaagagagctctggctggcatcaggtgaatgccgctctgggacgaagcttccagaggaaggaattggcagcaatctttgctgttctgcagcctttgctagtgatacccaggaaaacagggtctagagtggacatccagcaaactccagcagacctgcagcagagaggcctgactgttagaaggaaaactaatgaacagagaggaatagcatcaacatcaacaaaaaggatttccacacagaaaccccatccaaaggtcaccaacatcaaagagcaaagtgaatactataaatacctctatgcaaataaactagaaaatctagaagaaattgttaaattcctggacacatacacccccccaagactaaaccaggaagaagtcaaatccctgactagaccaataacaagttctgaagttgaggcagtaattaatagcataccaaccaaaaaaagcccagaaccagacagattcacagctgaattctaccagaagtacaaacaggagctggtaccatttgttctgaaactattccaaacaacagaaaaagagggaatcctccttaacttactctacgaggccagcatcatcctgataccgaaacctgagagagacacaacaaaaaaaatttcaggccaatatccccgaggaacatggatgcataaatcctcaataaaatactaa

SEQ ID NO: 146679 - DNA, 1371 bp, Homo sapiens
atgcaaaatcaagaacaaaaatcacaagcattcttatacaccaacaacagacaaacggagagccaaatcatgagtgaactcccattcacaattgcttcaaagagaataaaatacctaggaatccaacttacaagggatgtgaaggacctcttcaaggagaactacaaaccactgctcaaggaaataaaagaggatacaaagaaatggaagaacattccatgctcatgggtaggaagaatcaatatcgtgaaaatggccatactgcccaaggtgatttacagattcaatgccatccccatcaagctaccaatgactttcttcacagaattggaaaaaactactttaaagttcatagggaaccaaaaaagagcccacatcgccaagtcaatcctaagccaaaagaacaaagctggaggcatcacactacctgacttcaaactatactacaaggctacagtaaccaaagcaccatggtactggtaccaaaacagagatatagatcaatggaacagaatggagccctcagaaataacgccacatatgtacaactatctgatctttgacaaacctgagaaaaacaagcaatggggaaaggattccctatttaacaaatggtgctgggaaaactggctagccatatgtagaaagctgaaactggatcccttccttacatcttatacaaaaatcaattcaagatggattaaagacttaaacgttagacctaaaaccataaaaaccctagaagaaaacctaggcattaccattcaggacataggcatgggcaaggacttcatgtctaaaacaccaaaagcaatggcaacaaaagccaaaattgacaaatgggatctcattaaactaaagagcttctgcacagcaaaagaaactaccatcagagtgaacaggcaacctacaaaatgggagaaaatttttgaaacctactcatctgacaaagggctaatatccagaatctacaatgaactcaaacaaatttacaagaaaaaaacaaacaaccccatcaaaaagtgggcaaaggacatgaacagacacttctcaaaagaagacatttatgcagccaaaaaacacatgaaaaaatgctcaccatcactggccatcagagaaatgcaaatcaaaaccacaatgagataccatctcacaccagttagaatggcaatcattaaaaagtcaggaaacaacaggagtgaagctgcagaccttcgtggtgagtgttacagctctgaaggtggcacgtctggagttgttcattcctcccggtgggctcgtgctctcgctggctcaggagtgaagttgcagaccttcgtggtgagtgtcacggctcataaaggcagtgtggacccgaagagtgagcagtag

SEQ ID NO: 146680 - DNA, 1473 bp, Homo sapiens
ctgtgaaagcagctgggagtggggctgtactctgcaaagccacagggtcagaactgcccagggccgttggagcccacctcttgcatcagcataatccaggtgtgagacattaagtcaaaggagatcgttttggagctttaagatttaatgactgccctgctggcatcaagctaccaatgactttcttcacagaattggaaaaaactactttaaagttcatatggaaccaaaaaagagcccgcatcgccaagtcaatcctaagccaaaagaacaaagctggaggcagcacactacctgacttcaaactatactacaaggctacagtaaccaaaacagcatggtactggtaccaaaacagagatatagatcaatggaacagaacagggccctcagaaataacgccgcatacctacaactatctgatctttgacaaacctgagaaaaacaagcaatggggaaacgattccctatttaataaatggtgctgggaaaactggctagccatatgtagaaagctgaaactggatcccttccttacaccttatacaagaatcaattcaagatggattaaagatttaaacgttagacctaaaaccataaaaaccctagaagaaaacctaggcattaccattcaggacataggcatgggcaaggatttcatgtccaaaacaccaaaagcaatggcaacaaaagacaaaattgacaaatgggatctaattaaactaaagagcttctgcacagcaaaagaaactaccatcagagtgaacaggcaacccacaaaatgggagaaaattttcgcaacctactcatctgacaaagggctaatatccagaatctacaatgaactcaaacaaatttacaagaaaaaaacaaacaaccccatcaaaaagtgggcgaaggacatgaacagacacttctcaaaagaagacatttatgcagccaaaagacacatgaaaaaatgctcatcatcactagccatcagagaaatgcaaatcaaaaccactatgagataccatctcacaccagttagaatggcaatcattaaaaagtcaggaaacaacaggtgctggagaggatgtggagaaataggaacacttttacactgttggtgggactggaaactagttcaaccattgtggaagtcagtgtggcgattcctcagggatctagaactagaaataccatttgacccagccatcccattactgggtatatacccaaatgactataaatcatgctgctataaagacacatgcacacgtatgtttattgtggcattattcacaatagcaaagacttggaaccaacccaaatgtccaacaatgatagactggattaagaaaatgtggcacatatacaccatggaatactatgcagccataaaaaatgatgagttcatgtctttgtagggacatggatgaaattggaaatcatcattctcagtaaactattgcaagaacaaaaaaccaaaca

SEQ ID NO: 146681 - DNA, 1890 bp, Homo sapiens
atggataaattcctcgacacatacaccctcccaagactaaaccaggaagaagttgaatctctgaatagaccaataacaggttctgaaattgtggcaataatcaatagcttaccaaccaaaaagagtccaggaccagatggattcacagccgaattctaccagaggtacaaggaggaactggtaccattccttctgaaactattccaatcaatagaaaaagaaggaatcctccctaactcattttatgaggccagcatcatcctgataccaaagccgggcagagacacaaccaaaatagagaattttagaccaatatccctgatgaacattgatgcaaaaatcctcaataaaatactggcaaaccgaatccagcagcacatcaaaaagcttatccaccatgatcaagtgggcttcacccctgggatgcaaggctggttcaatatatgcaaatcaataaatataatccagcatataaacagaaccaaagacaaaaaccacatgattatttcaatagatgcagaaaaggcctttgacaaaattcaacaacacttcatgctaaaaactctcaataaattaggtattgatgggacgtatctcaaaatgataagaactatctatgacaaacccacagccaatatcatactgaatgggcaaaaactggaagcattccctttgaaaactggcacaagacagggatgccctctctcaccactcctattcaacatagtgatggaacttctggccagggcaattaggcaggagaaggaaataaagggtattcaattaggaaaagaggaagtcaaattgtccctgtttgcagatgacatgattagaataaaataccttggaatccaacttataagggacatgaaggacctcttcaaggagaactacaaaccactgctcaatgaaataaaagaggatacaaacaaatggaagaacatcccatgctcatgggtaggaagaatcaatatcgtgaaaatggccatactgcccaaggtaatttatagattcaatgccatccccatcaagctaccaatgactttcttcacagaattggaaaaaactactttaaatttcatatggaaccaaaaaagagcccgcaccgccaagtcaatcctaagccaaaagaacaaagccagaggcatcatgctacctgacttcaaactatactacaaggctacagtaaccaaaacagcatggtgctggtaccaaaacagagatatagatcaatggaacagaacagagccctcagaaataacaccacatatctacaactatctgatctttgacaaacctgacaaaaacaagcaatggggaaaggattccctatttaataaatggtgctgggaaaactggctagccatatgtagaaagctgaaactgcatcccttccttacaccttatacaacaattaattcaagatggattaaagacttaaacgttagacctaaaaccataaaaaccctagaagaaaacctaggcaataccattcaggacataggcatgggcaaggacttcatgtctaaaacaccaaaagcaatggcaacaaaagccaaaattgacaaatgggatctaattaaactaaagagcttctgcacagcaaaagaaaccaccatcagcgtgaacaggcaacctacaaaatgggagaaaatttttgcaacctactcatctgacacagggctaatatccagaatctacaatgaactcaaacaaatttacaagaaaaaaacaaacaaccccatcaacaagtgggcgaaggatatgaacagacacttctcaaaagaagacatttatgcagcccaaaaacacatgaaaaatgctcaccatcactggccatcagagaaatgcaaatcaaaacacaatgagataccatctcacaccagttag

SEQ ID NO: 146682 - DNA, 2676 bp, Homo sapiens
atgaaggcagaaataaagatgttctttgaaatcaatgagaacaaagacacaacataccagaatctctgggacgcattcaaagcagtgtgtagagggaaatttatagcactaaatgcccacaacagaaagcaggaaagacccaaaattgacaccctaacatcacaattaaaagaactagaaaagcaagagcaaacacattcaaaagctagcagaaggcaagaaatgactaaaatcagagcagaactgaaggaaatagagatacaaaaaacccttcaaaaaattaatgaatccaggagctggttttttgaaaggatcaacaaaattgatagaccgctagcaagactaataaagaaaaaaagagagaagaatcaaatagacgcaataaaaaatgataaaggggatatcaccaccgatcccacagaaatacaaactaccatcagagaatactacaaacacctctatgcaaataaactagaaaatctagaagaaatggataaattccttgacacatacactctcccaagactaaaccaggaagaagttgaatctctgaatagaccaataacaggacctgaaattgtggcaataatcaatagcttaccaaccaaaaggagtccaggaccagatggattcacagccgaattctaccagaggtacaaggaggaactggtaccattccttctgaaactattccaatcaatagaaaaagagggaatcctccctaactcattttatgaggccagcatcatcctgataccaaagccgggcagagacacaaccaaaaaagagaattttagaccaatatccttgatgaacattgatgcaaaaatcctcaataaaatactggcaaaccgaatccagcagcacatcaaaaagcttatccaccatgatcaagtgggcttcatccctgggatgcaaggctggttcaacatacgcaaatcaataaatgtagtccagcatataaacagaaccaaacacaaaaaccacatgattatctcaatagatgcagaaaaggcctttgacaaaattcaacagcccttcatgctaaaaactctcaataaattaagtattgatgggacgtatctcaaaataataagagctacttatgacaaacccacagccaatatcatactgaatgggcaaaatctggaagcattccctttgaaaactggcacaagacagggacaccctctctcaccactcctattcaacatagtgttggaagttctggccagggcaatcaggcaggagaaagaaataaaggcccaaaatctccttaagctcataagcaacttcagaaaagtctcagtatacaaaatcaatgtgcaaaaatcacaagcattcttatacaccaataacagacaaacagagagccaaatcatgagagaactcccattcacaattgcatcaaagagaataaaatacctaggaatccaacttacaagggatgtgaaggacctcttcaaggagaactacaaaccactgctcaacgaaataaaagaggacacaaacaaatggaagaacattccatgctcatggataggaagaatcaatattgtgaaaatggccatactgcccaaggtaatttatagattcaatgccatccccatcaagctaccaacgactttcttcacagaattggaaaaaactattttaaagttcatatggaaccaaaaaagagcccacattgccaagacaatcctaagccaaaagaacaaagctggaggcatcatgctacctgacttcaaactatactacaaggctacagtaaccaaaacagcctggtattggtaccaaaagagagatatagaccaatggaacagaatagagctctcagaaataataccacacatctacaaccatctgatctttgacaaacctgacaaaaacaagaaatggggaaaggattccgtatttaataaacggtgctgggaaaactggcttgccatatgtagaaagctgaaactggataccttccttacaccttatacaaaaattaattcaagatggattaaagacttacatgttagacctaaagccataaaaaccctagaagaaaacctaggcattaccattcaggacataggcatgggcaaggacttcacgtctaaaacaccaaaagcaatggcaacaaaagccaaaattgacaaatgggatctaattaaactaaagagcttctgcacagcaaaagaaactaccatcagagtgaacaggcaacctacaaaatgggagaaaatttttgcaatctactcatctgacaaagggctaatatccagaatctacaaagaactcaaacaaatttacaagaaaaaaacaaacaaccccatcaaaaagtgggcaaaggatatgaacagacacttctcaaaagaagacatttatgcagccaacagacacatgaaaaaatgctcatcatcactggccatcagagaaatgcaaatcaaaaccacaatgagataccatctcacaccagttagaaaggcgatcattaaaaagtcaggaaacaacaggtgctggagaggatgtggagaaataggaacacttttacactgttggtgggactgtaaactagttcaaccatttgtggaagacagtgtggcaattcctcagggatctagaactagaaataccattttacccagccatcccattactgggtatatacccaaaggattataa

SEQ ID NO: 146683 - DNA, 3048 bp, Homo sapiens
atggataaattcctcaacacatacactctcccaagactaaagcaggaagaagttgaatctctgaatagaccaattacaggctctgatattgaggcaataattaatagcttaccaaccaaaaaaaagtccaggaccagatggattcacagccgaattctgccagaggtacaaggaggagctgaaaaagagggaatcctacctaactcattttatgaggccagcatcattctcataccaaagcctgccagtgacacgacaaaaaaagagaattttagaccaatatccctgatgaacatcaatgcaaaaatcctcaataaaatactggcaaaacaaatccggcagcacatcaaaaagcttatccaccatgatcaagtgggcttcatccctgggatgcatggcttgttcaacatatgcaaatcagtaaacataatccagcatataaacagaaccaacgacaaaaaccacatgattatctcaatagatgcagaaaagccctttgacaaaattcaacaacacttcatgctaaaaactctcaataaattagcccaaaatctccttaagctgataggcaacttcagcaaagtctcaggatacaaaatcaatgtgcaaaaatcacaagcattcttatacacaaataacagacaaacagagagccaaatcatgaacgaattcccattcacaattgcttcaaagagaataaaatacctaggaatccaacttacaagggatgtgaaagacctcttcaaggagaactacaaagcactgctcaatgaaataaaagaggacacaaacaaatggaagaacattccatgctcaatgggaaaaaactactttaaagttcatatggaacaaaaaagagcccacattgccaagtcaatcattagccaaaagaacaaagctggaggcatcacgctacctgacttcaaactatactgcaaggctacagtaaccaaaacagcatggtactggtaccaaaacagagatatagaccaatggaacagaacagagtcctcagaaataatgccgcatatctacaaccatctgatctttgacaaacctgacaaaaagaagaaatggggaaaggattccctatttaataaatggtgctgggaaaactggctagccatatgtagaaagctgaaactggatcccttccttacacctgatacaaaaattaattcaagacggattaaagacttaaatgttagacctgaaatgataaaaaccctagaagaaaacctaggcaataccattcaggacataggcatgggcaaggacttcatgtctaaaacaccaaaagcaatggcaacaaaagccaaaattgacaaatgggatctaattaaactaaagagcttctgcacagcaaaagaaactaccatcagagtgaacaggcaacctacagaatgggagaaaatttttgcaatctactcatctgacaaagggctaatatccagaatctacaatgaactcaaacaaatttacaagaaaaaaacaaacaaccccatcgaaaagtgggcgaaggatatgaacagacacttctcaaaagaagacatttatgcagccaaaaaacacatgaaaaaatgctcatcatcactggtcatcagagaaatacaaatcaaaaccacaatgagataccatctcacaccagttagaatggcaatcattaaaaagtcaggaaacaacaggtgctggagaggatgtggagaaataggaacacttttacactgttggtgggactgtaaactagttcaaccattgtggaagtcagtgtggcggttcctcagggatctagaactagaaataccatttgatccagccatcccattactggctgcgccttcactgccttctggcctgcgctcgccctctaagtcttcaccatcaccaccgagccgttgcacgctggtcatcatcttgctgcacgtgttctgggacattgtattttttgatggctgcgagaagaaaaggtggtacatccttcttatagttctcctgacccgtctgctggtgtcagcctgcaccttcactgaaggctacactgtcggtttctctactttcgaggctctgagacttggactgagtcgctattggcttccttgctcctcagcttgcagacggcctattgtgggacttcaacttgtgatgataaatagcggtaactttcaggtcattgccatggaagggacagtagcctctgagtgttgccatggcaatggtaaactgacatggcacaggccggtgttgagtgtctgcagcttttccaggtgcacggtgcaagctgctggtggatctgccattctggaggatggtgaccctcttctcacagctccactaggcagtaccccacaagctgctgtatgcagagggccacgtggcagggaactgagggcagccccagctgacagccaccttttccaaagggacctatggccttttaacaaggtaatagtgcatggagaaaaaggaagtaatcagacctctcagggattactgaacactggctctgaaatgacaatagttctagaaaatccaaaatatcacagtggtccccctgttagagtatcgcctgatggaggtcaggtgatcatagaagttttagcagatccatcttacactgggcccacagctttgaataatgtcttctttgccttccagtgcaatttttactttgaccatatccctgagaattgtggcttttcagacccctctgaccctcagaatttgcaaaagggagaaggctgtccctccctagtaagagctagtactgctcccccacaggaaaaagctacagagcagcctctcctttgcaagacgacagaatcaccttttggcatgacagttggcccttgtacagatgaaacacttgaccatggggcaccaagtaagcatgttcccggaactgcccataatgagctggctctcttagatctacgtgtcataaagtcagcaggctcagcagcagtccatcacaagttaaaagtactacattggagatcaagtttaagcaacaacaagggcacaggcaggctgtatgagcaggtggcctag

SEQ ID NO: 146684 - DNA, 2145 bp, Homo sapiens; identical to SEQ ID NO: 124332

SEQ ID NO: 146685 - DNA, 1551 bp, Homo sapiens
atgagatttaaggaaaaaatccatcttcataacataaaagagcccagtgaagcagcaagtgctgatggaggagctgtagcaagttacccagatctggcaaaaatagttgatgagggtagatacaaggcagaggtaatgcagctgcggtgtgggtggagagcccctgctagtgactgtgtgcacagtgttgctgtcgttggtgttgactcagtgttggaagttctggccagggcaatcaggcaggagaaagaaataaagggtattcaattaggaaaagaagaagtcaaattgtccctgtttgcagatgacatgattgtatatttagaaaaccccaccgtctcagcccaaaatctccttaagctaataagcaacttcagcagagtctcaggatacaaaatcaatgtgcaaaaatcacaagcattcttatacaccaataacaaacaaacagagagccaaatcatgagtgaactcccattcacaattgcctcaaagacaataaaatacctaggaatccaacttacaagggatgtgaaggacctcttcaaggagaactacaaaccactgctgaacaaaataaaagaggacacaaacaaatggaagaacattccatgctcatggataggaagaatcaatattgtgaaaatggccatattgcccaaggtaatttatagattcaatgccatccacatcaagctaccaatgactttcttcacagaattggaaaaaactactttaaagttcatatggaaccaaaagggagtccacattgccaagtcaatcctaagcaaaaagaacaaagctggaggcatcatgctacctcacttcaaactatactacaaggctacagtaaccaaaacagcatggtactggtaccaaaacagatatacagaccaatgcaacagaacagagccctcagaaataataccacacatctacaaccatctgatgtttgacaaacctgacaaaaacaagaaatggggaaaggattccctatttaataaatggtgttgggaaaactggctagccatatgtagaaagctgaaactggatcccttccttacaccttacacaaaaattaattcaagatggattaaagacttaaatgttagacctaaacccataaaaaccctagaagaaaacctaggcattaccattcaggacataggcatgggcaaggacttcatgtctaaaacaccaaaagcaatcgcaacaaaagccaaaattgacaaatgggatctaattaaactaaagagcttctgcacagcaaaagaaactaccatcggagtaaacaggcaacctacagaattggagaaaatttttgcaatctactcatctgacaaagggctaatatccagaatctacaaagaactcaaacaaatttacaagaaaaaaaaacaaccccatcaaaaagtgggtgaaggatatgaacagacacttctcaaaagaagacatttatgcagtcaacagacacatgaaaaaatgctcatcatcactggtcatcagagaaatgcaaatcaaaaccacaatgagatactatctcacaccagttag

SEQ ID NO: 146686 - DNA, 1458 bp, Homo sapiens
gggctgtcaggagatctgctgggagcccaccagctgccagacgtcctatgtggagtccagcccctgccagacctcctgctaccgccccagaacctccttgctctgcagtccttgcaagacgacttactctgggctttggatccagcagctgccgctccctgggctatggatcgaggagctgctactcagtgggctgtgggtccagtggtgtcagatccctgggttatggaagctgtggcttcccttccctcggctatggatctggattctgccgcccaacctacttggcttctaggagctgccagtctccttgttacagaccagcctatggatcaaccttctgcagatcaacttgctgaatttccagaccttttaagcaaagtgtctcagtctctacgaataaaatacctaggaataaaactgacaaggaatgtgaaggacctcttcaaggagaactacaaaccactgctaaatgaaataaaagaggatacaaacaaatggaagaacattccatgctcatgggtaggaagaatcaatatcgtgaaaatggccatactgcccaaggtaatttatagattcaatgccatcccaatcaagctaccaatgactttcttcacagaattggaaaacactactttaaagttcatatggaaccaaaaaagagcctgcattgccaagtcaatcctaagccaaaagaacaaagctggaagcatcatgctacctgacttcaaactataccacaaggctacagtaaccaaaacagcatggtaccagtaccaaaacagagatatagatcagtggaatggaacagagccctcagaaataatgtcacatatctacaactatctgatctttgacaaacctgagaaaaacaagcaacggggaaaggattccctatttagtaaatgttgctgggaaaactggctagccatatgtagaaagctgaaactggatcccttccttacaccttacacaaaaattaattcaagatggattaaagacttaaatgttagacctaaaatcataaaaaccctagaagaaaacctagtcaataccattcaggacataggcatgggcaaggacttcatgtctaaaacaccaaaagcaatggcaacaaaagccaaaattgacaaatgggatctaattaaacaaaagagcttctgcacagcaaaagaaactaccatcagagtgaacaggcaacctacagaatgggagaaaatttttgcaatctactcatctgacaaagggctaatatccagaatctacaaagaactccaacaaatttatgagaaaaaaaacaaacaaccccatcaaaaagtgggcgaaggatatgaacagacacttctcaaaagaagacatttatgcagccaacagacacatgaaaaaatgctcatcatcactggccatcagagaaatgcaaatcaaaaccacaatgagataccatctcacaccagttag

SEQ ID NO: 146687 - DNA, 2031 bp, Homo sapiens
atgattatctcaatagatgcagaaaaagcctttgacaaaattcaacaacccttcatgctaaaaactctcaataaattaggtattgatgggagatatctcaaaataataagagctatctatgacaaacccacagccaatatcatactgaatgggcaaaaactggaagcattccctttgaaaactggcacaagacagggatgccctctctcaccactactattccacatagtgttggaagttctggccagggcaatcaggcaggagaaggaaataaagggcattcaattaggaaaagagaaagtcaaattgtccctgtttccagatgacatggttgtatatctagaaaaccccatcatctcagcacaaaatctccttaagctgataagcaacttcagcaaagtctcaggatacaaaatcaatgtgcaaacatcacaagcattcttatacaccaataacagacaaacagagagccaaatcatgagtgaactcccattcacaactgcttcaaagagaataaaatacctaggaattcaacttacaagggatgtgaaggacctcttcaaggataactacaaaccactgctcaaggaaataaaagaggatacaaacaaatggaagaacattccatgcttatgggtaggaagaataaatattgtgaaaatggccatactacccaaggtaatttatagattcaatgccatccccatcaagctaccaatgactttcttcacagaattggaaaaaactactttaaagttcatatggaaccaaaaaagagcccgcatcgccaagtcaatcctaagccaaaagaacaaagctggaggcatcacactacctgacttcaaactatactacaagtctacagtaaccaaaacagcatggtactggtaccaaaacagagatatagatcaatggaacagaacagagccctcagaaataatgctgcatatctccaactatctgatctttgacaaacctgacaaaaacaatcaatggggaaaggattccctatttaataaatggtgctgggaaaacaggctagccatatgtagaaagctgaaactggatcccttccttacaccttatacaaaaatcaattcaagatggattaaagacttaaatgttagacctaaaaccataaacaccctacaagaaaacctaggcaataccattcaggacataggcatgggcaaggacttcatgtctaaaacaccaaaagcaatggcaacaaaagccaaaattgacaaatgggatctaattaaactaaagagcttctgcacagcaaaagaaaccaccatcagagtgaacaggcaacctacagaatgggagaaaatttttgcaatctactcatctgacaaagggctaatatccagaatctacaatgaactcaaacaaatttacaagaaaaaaacaaacaaccccatcaaaaagtgggtgaaggatatgaacagacacttctcaaaagaagacatttatgcagccaaaaaacacatgaaaaaatgctcatcatcactggccaccagagaaatgcaaatcaaaactacaatgagataccatctcacaccagttagaatggcaatcattaaaaagtcaggaaacaacagaccgctctggcccaccatgcctggggacagtcagagaggagataagttgcgggatggaggaactccagggaaagatcattttcccactccattcgctttccaggcccctatccatcccactgagagccacctccatcactcaccgtccctccctgcattcaccatccttcaagtccacggatttgagtgcacagcagccaagcaaactagccacacccctgttgcaagtcccacaggggagtcagggaactttcttgcttcagtcacctcaagattgtctggaggcaatgtgaagattattctggattggaaaatgagaataatgaataaggaagactatggaactatttctgtaattcgaagaagctacaatagaaccttgaaacaagatggtggcagtaaagctgaagaaaataaacagagatga

SEQ ID NO: 146688 - DNA, 1549 bp, Homo sapiens; identical to SEQ ID NO: 119533

SEQ ID NO: 146689 - DNA, 1946 bp, Homo sapiens
gaaattacccagatcagcatttccccatctttcatggaataaaagagaaatcaccgaggactggaagttggctgatagaactgacatcagaaagaccattcaaaacgaagagccagtgtcaagatcctgtatacccttcctgtcattactcccaaagtagccttttcatggatccaggttacaatgagccgccagaaatagccccggtgaatgaagctgtaggcattcagataagggggccaggggcagccagctgtgcacgcttctgtgagcaacttgccacagcttgcaggatgttggaatttctggccagggcaattaggcaggagaaggaaataaagggtattcaattaggaaaagaggaagtcaaattgtccctgtttgcagatgacatgattgtatatctagaaaaccccattctctcagcccaaaatctccttaagctgataagcaacttcagcaaagtctcaggatacaaaatcaatgtacaaaactcacaagcattcttatacaccaataacagacaaacagacagccaaatcataagtgaactcccattcgcaattgcttcaaagagaataaaatacctaggaatccaacttacaagggacgtaaagaacctcttcaaggagaattacaaaccacagctcagtgaaataaaagaggatacaaagaaatggaagaacattccatgcttatgggtagaaagaatctatatcgtgaaaacggccatacaggccaaggtaatttatagattcaatgccatccccatcaagataccaatgactttcttcacagaattggaaaaaactactttaaatttcatacggaaccaaaaaagagcccgcatcaccaagtcaatactaagccaaaagaagaaagctggaggcatcacactacctgacttcaaactatactacaaggctacagtaaccaaaacagcatggtactggtaccaaaacagagatatagatcaatggaacagaacagagccctcagaaataacgccgcatatctacaactatctgatctttgacaaacctgagaaaaacaagcaatggggaaaggattccctatttaataaatgctactgggaaaactggctagccatatgtagaaagctgaaactggatcccttccttacaccttatacaaaaattaattcaagatggattaaagaattaaacgttagacctaaaaccataaaaaccctagaagaaaacctaggcattacctttcaggacataggcatgggcaaggacttcatgtctaaaacaacaaaagcaatggcaaccaaagccaaaattgacaaatgggatctaattaaactaaagagcttctgcacagcaaaagaaactaccatcagagtgaacaggcaacctacaaaatgggagaaaattttcgcaacctactcatctgacaaagggctaatatccagaatctacaatgaactcaaacaaatttacaagaaaaaaacaaacaaccccatcaaaaagtgggcgaaggacatgaacagacacttctcaaaagaagacatttatgcagccaaaaaacacatgaaaaaatgttcaccatcactggccatcagagaaatgcaaaccaaaaccacaatgagataccgtctcacaccagttagaatggcaatcattaaaaagtcaggaaacaacagtctattaattaccatcagagaatactataaacacctctatgcaaataaactagaaaatctagaggaaatggataaattcctggacacatacaccctcccaaaactaagtgaggaagaagttgaatctctggatatgctatccttttatacaactggcagcaaagattgcagcccaaactttgacaccaaaaatgctttgctaatgtacacccctgtgaaaacaaggacaaaaattcagctacagataaggaccctgcacaaagccttgactgtctga

SEQ ID NO: 146690 - DNA, 2127 bp, Homo sapiens
atggcacaagaactacgtgacgaatgcacaagcctcagtagccgattcgatcaactggaagaaagggtatcagagatggaagatcacatgaatgaaatgaagcgagaagagaaatttagaaaaaaaggaataaaaagaaatgaacaaagcctccaagaaatatgggactatgtgaaaagaccaaatctacgtctgattggtgtacctgaaacccaaaatctccttaagctgataagcaacttcagcaaagtctcaggatacaaaatcaatgtgcaaaaatcacaggcattcttatacaccaataacagacaaacagagagccaaatcatcagtgaactcccattcacaattgcttcaaagagaataagatacttaggaatccaacttacaagggatgtgaaggacctcttcaaggagaactacaaaccactgctcaacgaaataaaagaggacacacacaaatggaagaacattccatgctcatggataggaagaatcaatatcgtgaaaatggccatactgcccaaggtaatttatagattcaatgccatgcccatcaagctaccactgactttcttcacagaattggagaaaactactttaaagttcatatggaaccaaaaaagagcccgcattgccaagtcaatcctaagccaaaagaacaaaactggaggcatcacgctacctgacttcaaactatactacaaggctacagtaaccaaagcagcatggtactggtaccaaaacagagatatagatcaatggaacagaatagagccctcagaaataataccacatatctacaactacctgatctttgacaaacctgagaaaaacaagaaatggggaaaggattccctgtttaacaaatggtgctgggaaaactggctagccatatgtagaaagctgaaactggatcccttcctgacaccttatactaaaattaattcaagatggattaaagacttacatgctagatctaaaaccataaaaaccctagaagaaaacctaggcaataccattcaggacataggcattggcaaggacttcatgtctaaaacaccaaaagcaatggcaacaaaagccaaaattgacaaatgggatctaattaaactaaagagcttctgcacagcaaaagaaactaccatcagagtgaacaggcaacctaaagaatgggagaaaatttttgcaatatactcatctgacaaaaggctaatatccagaatctacgaagaaatcaaacaaatttacaagaaaaaaacaaacaaccccatcaacaagtgggcaaaggatatgaacagacacttctcaaaagaagacatttatgcagccaacagacacatgaaaaaatgttcatcatcactggtcatcagagaaatgcaaatcaaaaccacaatgagataccatctcacaccagttagaatggtgatcattaaaaagtcaggaaacaacaggagccttttccacgtaatacccaagacctgtgagctggggagtctgccacgtctagcacatgaaggacacttgcaggtcactaggggtgttcagaagtggggacatcagcttgaatttggacccagggtctggataccaaaacaggaaagctgctcaatggccttgttctgttatgctgcagagggtctgtacttcggcagcaaaggaagccagggcaaagataaactatgtggctgtggaacatttgcacgcttcaacattttgcaagaggatgatctgtctctcagagttgttagactggaagataaggagagagggtcaggtgaaaatgggattcacacttacaatacctgtgagctaaagcagcttatatttatcatgaagaaaagcaccaaggatggagcagcctggcctttgccccatgctggttcctgcaggtgcaaagggagaactactgctaatgggacagagaaggtgcctgcatgcatcatccaggagcctgaggacaggcctgcccctcccaccactgctactgccagtgcatgtgggcattgtctagggcctgaagacaagcctgtctcacccatcatcaaagctacctgcacccaagcatgccatccaggcatctgcttgctgcagccagcacttctgcacactattggggaagcataa

SEQ ID NO: 146691 - DNA, 2253 bp, Homo sapiens; identical to SEQ ID NO: 123239

SEQ ID NO: 146692 - DNA, 2485 bp, Homo sapiens; identical to SEQ ID NO: 126666

SEQ ID NO: 146693 - DNA, 2622 bp, Homo sapiens
atggataaattcctcgacacatacactctcccaagactaaaccaggaagaagttgaatgtctgaatagaccaataacaggagctgaaattgtggcaataatcaatagcttaccaaccaaaaagagtccaggaccagatggattcacagccgaattctaccagaggtacaaggaggaactggtaccattccttctgaaactattccaatcaatagaaaaagagggaatcctccctaactcattttatgaggccagcatcattctgataccaaagccgggcagagacacaaccaaaaaagagaattttagaccaatatccttgatgaacattgatgcaaaaatcctcaataaaatactggcagaccgaatccagcagcacatcaaaaagcttatccaccatgatcaagtgggcttcatccctgggatgcaaggcttgttcaatatacgcaaatcaataaatgtaatccagcatataaacagagccaaagacaaaaaccacatgaatatctcaatagatgcagaaaaggcctttgacaaaattcaacaacacttcatgctaaaaactctcaataaattagctgataagcacttcagcaaagtctcaggatacaaaatcaatgtgcaaaaatcacaagcattcttataccccaacaacagacaaacagagagccaaatcatgagtgaactcccattcacaattgcttcaaagagaataaaatacctaggaatccaacttacaagggatgtgaaggacctcttcaaggagaactacaaaccgctgctcaaggaaataaaagaggatacaaacaaatggaagaacattccatgctcatgggtaggaagaatcaatatcgtgaaaatggccatactgcccaaggtaatttacagattcaatgccatcctcatcaagctaccaatgcctttcttcacagaattggaaaaaactactttaaagtttatatggaaccaaaaaagagcccgcatcaccaagtcaatcctaagccaaaagaacaaagctggaggcatcacactacctgacttcaaactatactacaaggctacagtaaccaaaacagcatggtactggtaccaaaacagagatatagatcaatggaacagaacagagccctcagaaataatgccgcatatctacaactatctgatctttgacaaacctgagaaaaacaagcaatggggaaaggattccctatttaataaatggtgctgggaaaactggctagccatatgtagaaagctgaaactgaatcccttccttacaccttatacaaaaatcaattcaagatggattaaagacttaaacgttaggcctaaaaccataaaaaccctagaagaaaacctaggcattaccattcaggacataggcatgggcaaggacttcatgtctaaaacaccaaaagcaatggcaacaaaagacaaaattgacaaatgggatctaattaaactaaagagcttctgcacagcaaaagaaactaccatcagagtgaacaggcaacctacaaaatgggagaaaatttttgcaacctactcatctgacaaagggctaatgtccagaatctacaatgaactcaaacaaatttataagaaaaaaacaaacaaccccatcaaaaagtgggcgaaggacatgaacagacacttctcaaaagaagacatttatgcagccaaaaaacacatgaaaaaatgctcaccatcactggccatcagagaaatgcaaatcaaaaccacaatgagataccatctcacaccagttagaatggcaatcattaaaaagtcaggaaacaacagcaaactcccgtttgagccgagcaggaacaaacgcgttatgcctgaaccttgtgcacatacaattctttcttctcttgcacggcccgcttccaaaatgcattcaccgccactctccatggaaccttcagcgggccctgggggcagccagaattttccaaacgaggaagctgaggatcggcccagaaccctgaattttgaggggagtgagacttgggccctcacaggcccagacgcgagatatttcaactacacccgggaggcgcggggtgaaaactccctggtgtcgggcgggtgcaggcccctcgcggccggtcgcgccagagcttccacctcagggtgggcggccaagcgcgtgggcacgctgcagggagggccgctcacctgggcaatgccggcgcccatcagcccgccgccgatgaccgtcacgtgcttgacgattatcttcttggccgaggccgaggcggtggacgaggaggacacggaacgcatgaactgcctggtgacgaaggccatggtgtggcagcggcggcgacagcgaggagacccgggcagggaagacgcgcgaggcgggcagccgcggaaagccagactctgggggcggggacctacgcggccctgcagcccgcgcgcccccggcgtccccgtgacgccacaaggcgggggcggggcctcgagtcccgctctgcccattggccctggctgtaacgtcccagcgttgagcgggtatacacgcgcgggctcgcagctgtcagcagccggagcccgagtgagcgcgggcttgagacctgctgagcagcgggacctggcggctggcgttctg

SEQ ID NO: 146694 - DNA, 2831 bp, Homo sapiens
cagacacaatgtaccagaatatctgggacacagttaaagcagtctttagaggaaaatttatcgcactaaatgcccacatcagaaagtgggaaagatctaaacttgacaccctaacacctcaattaaaagaaatagagcttgatggggatggcattgaatctataaattacctttggcagcatgccatccccatcaagctaccaatgactttctttacagaattggaaaaaactactttaaagtttatatggaaccaagaaagagcccgcattgccaagtcaatcctaagacaaaagaacaaagctggaggcatcatgctacctgacttcaaactatactacaagcccacagtaaccaaaatagcatggtactggtaccaaaacagagatgcagaccaatggaacagaacagagccttcagaaataatgctacatatccacaaccatctgatctttgacaaacctgagaaaaacaagaaatgggaaaaggattccttatttaataaatggtgctgggaaaacaggctagccatatgtagaaagctgaaactggatcccttcgttacaccttatactaaaattaattcaagatggattaaagacttaaatgttagatctaaaaccataaaaaccctagaagaaaacctaggcaataccattcaggacataggcatgggcaaggacttcatgtctaaaataccaaaagcaatggcaacacaagccaaaactgacaaatgggatctaattaaactaaagagcttctgcacagcaaaagaaactaccatcagagtgaacaggcaacctacagaatgggagaaaatttttgcaatctactcatctgacaaagggctaatatccagaatctacaatgaactcaaacaaatttacaagaaaaaaacaaacaaccccatcaaaaagtgggtgaaggatatgaacagacacttctcaaaagaagacatttatgcagccaaaagacacatgaaaaaatgctcagcatcactggtcattagagaaatgcaaatcaaaaccacaatgagataccatctcacaccagttagaatggcgatcattaaaaagtcaggatagaaaagattaacaaagtacactactagccatactaataaagaagaaaggacagaagaatcaaatagacacaataaaaatgataaagagggtatcaccactgatcccagagaaatacaaactaccatcagagaatactataaacacctctacacaaataaagtagaaaatctggaagaaatggataaattcctggacacatacacgctcccaacactaaagcagaagaaagaagtcaaaaccctgaatagaccaataacaggttctgaaattgaggcaataattaatagcctaccaaccaaaaaagtccaggaccagacagattcacagctgaattctactagagtattagaagttctggccagggcaatcaggcaagagaaagaaataaagggtattcaattaggaaaagaggaagtcaaattgtccctgtttgcagatgacatcattgtatatttagaaaaccccatcatctcagcccaaaatcttcttaagctgataagcaacttcagcaaagtctcaggatacaaaatcaatctgcaaaaatcacaagcattcctatacaccaataacaaacaaacagggagccaaatcatgagtgaactcccattcacaattgcttcaaagagaataaaatgcctaggaatccaacttacaagggatgtgaaggatctcttcaaggagaactacaaaccactgctcaatgaaataaaagaggacacaaacgaatggaagaacattccatgctcatggataggaagaatcagtatcgtgaaaatggccatactgcccaaggtaatttatagattcaatgccatccccatcaagctaccaatgacttttttcacagaattggaaaaaactactttaaagttcatatggaaccaaaaaagagcccacatcgccaagtcaatcctaagccaaaagaacaaagctggaggcatcacactacctgacttcaaactatactacaaggctacagtaaccaaaacagcatggtactggtaccaaaacagagacatagaccaatggaacagaatagagcccctggaaataataccatacatctacaactatctgatctttgacaaatctgacaaaaacaagaaatggggaaaggattccctatttaataaatggtgctgggaaaactggctaaccatatgtagaaagctgaaactggatcccttcctcacatcttatacaaaaattaattcaagatggattaaagacttaaatgttagacctaaaaccataaaaaccccagaagaaaacctaggcaataccattcaggacataggcatgggcaaggacttcatgactaaaacaccaaaagcaatggcaacaaaagccaaaattgacaaatgggatctaattaaactaaagagcttctgcacagcacaagaaactaccatcagagtgaacaggcaacctacagaatgggagaaaatttctgcaatctactcatctgacaaagggctaatatccagaatctacaaagaacttaaacaaatttacaagacaaaaacaaacaaccccatcaaaaagtgggcaaaggatatgaacagacacttctcaaaagaagacatttatgcagccaaaagacacatgaaaaaatgctcatcatcactggccatcagagaaatgcaaatcaaaaccacaatgagataccatctcacaccagttagaatggcgatcattgaatcaagtcaggaaacaacaggtgctggagaggatgtggagaaatag

SEQ ID NO: 146695 - DNA, 4955 bp, Homo sapiens
atggttttctcaatagatgcacaaaaggcctttgacaaaattcaacaccgcttcatgctaaaaactctcaataaattaggtattgatgggacatatctcaaaataataagagctatttataacaaacccacaggcaatatcatactgaatgggcaaaaactggaagcattccctttgaaaactggcacaagacagggatgccctctctcaccactcctattcaacatagtgttggaagttctggccagggcaatcaggcaggagaaagaaataaagggtattcaattaggaaaagaggaagtcaaattgtccctatttgcagatgacataattgtatatttagaaaaccccattgtctcagcccaaaatctccttaagctgataggcaacttcagcaaagtctcaggatacaaaatcaatgtgcaaaaatcacaagcattcttatacaccaataacagacaaacagagagccaaatcatgagtgaactcccattcacaattgcttcaaagagaataaaatacctaggaatccaacttacaagagatgtgaagaacctcttcaaggagaactacaaaccactgctcaatgaaataaaagaggacacagataaatggaagaacattccatgctcatggataggaagaatccatatcgtgaaaatggccacactgcccaaggtaatttatagattacatgccatccacatcaagctaccaatgactttcttcacagaattggaaaaaactactttaaaattcatatggaacaaaaaaagagcccgcattgccaagtcaatcctaagccaaaagaacaaaggtggaggcatcacgccacctgacttcaaattatactacaaggctacagtaaccaaaacagcaaggtactggtaccaaaacagagatatagaccaatggaaaacaagagagccctcagaaataataccacacatctacaaccatctgatctttgacaaaccagacaaaaacaagaaatggggaaaggattccctatttaataaatggtgctgggaaaactggctagccatatgtagaaagttgaaactgaatcctttccttaccccttatacaaaaattaattcaagatggattaaagacttaaacattagacctaaaaccataaaaaccctagaagaaaacctaggcaataccattcaggacaaaggcgtcggcaaggacttcatgtctcaaacaccaaaagcaatggcaacaaaagccaaaatagacaaatgggatctaattaaactaaagagcttctgcacagcaaaagaaactaccatcagagtgaacaggcaacctacagaatgggagaaaatttttgcaatctactcatctgacaaagggctaatatccagaatctacaaagagctcaaacaaattgacaagaaaaaagcaaacaaccccatcaacaagtgggcaaaggatatgaacagacacttctcaaaagaagacatttatgcagccaacagacacatgaaaaaatcctcatcatcactggccatcagagaaatgcaaatcaaaaccacaatgagataccatctcacaccagttagaatggtgatcattaaaaagtcaggaaacaacagcgaaggattaaaccctggatataaagggtttcccaccattatatgggctcctcttcccgtggctcaatcgaaggactcgggcttggcatcacttaacagtgatccagatattcctagcatgctggagtgctccctgaaggctccacagctatataggagcaagaatgttggccaggtatttatcatttcttctgcgtcacaagcctttaccaaaaaagcaagaatatatgcacgcttacgagtgtctcaggctctgaagactctttgtaaaagttcctgccatgatggctggtcatttgaaagactggcaagaattcaggaagtttctctacccatctctccagacctgattctctgctcagaagcataccactacggtacaaaaccacagtggctagtggctgccacaggaaccgcacagacattccttgagctgaaccagaaaagccaacagtaccaaaagcaagagcaaacacattcaaaagctagcagaatgcaagaaataactaaaatcagagcagaactgaaggaaatagagacacgaaaaacccttcaaaaaattgatgaatccaggagctggttttttgaaaggatcaacaaaactgatagaccactagcaagattaacaaagcagaaaagagagaagaatcaaatagacgcaataaaaaatggtaaaggggatatcaccaccgatcccacaggaatacaaattaccatcagagaatactacaaacacctctacgcaaaaaaactagaaaatctagaagaaatggataaattcctcgacacgtacaccctcccaagactaaaccaggaagaagttgactctctgaatagaccaataacaggagctgaaattgtggcaataatcaatagcttaccaactaaaaagagtccaggaccagatggattcacagccgaattctaccagaggcacaaggaggaactggtaccattccttctgaaactattccagtcaatagaaaaagagggaatcctccctaactcattttatgaggccagcatcatcctgataccaaagccgggcagagacacaaccaaaaaagagaatcttagaccaatatccttgatgaacattgatgcaaaaatcctcagtaaaatactggcaaaccgaatccagcagcacatcaaaaagcttatccaccacgatcaagtgtgcttcatccctgggatgcaaggctggttcaatatacgcaaatcaataaatgtaatccagcatataaacagagccaaagacaaaaaccacatgattatctcaatagatgcagaaaaggcctttgacaaaattcaacaaaccttcatgctaaaaactctcaataaattaggtattgatgggacgtatttcaaaataataagagctatctatgaaaaacccacagccaatatcatactgaatgggcaaaaactggaagcattccctttgaaaactggcacaagacagggatgccctctctcaccactcctattcaacatagtgttggaagttctggccagggcaattaggcaggagaaggaaataaagggtattcaattaggaaaagaggaagtcaaattgtccctgtttgcagatgacatgattgtatatctagaaaaccccatcgtctcagcccaaaatctccttaagctgataagcaacttcagcaaagtctcagggtacaaaatatacaaaatcgatgtgcaaaaatcacaagcattcctatacaccaataacacagacaaacaagagagccaaatcatgagtgaactcccattcacaactgcttcaaagagaataaaatacctaggaatccaacttacaagggatgtgaaggacctcttcaagggagaaccacaaaccactgctcaacgaaataaaagaggatacaaacaaatggaagaacattttcattccatgcttatgggtaggaagaatcaatatcgtgaaaatggccatactgcccaagggaatttatagattcaatgccatccccatcaagctaccaatgactttcttcacagaattggaaaaaagctactttaaagttcatatggaaccaaaaaagagcccgcatcaccaagtcaatcctaagccaaaagaacaaagctggaggcatcacgctacctgacttcaaactatactacaaggctacactaaccaaaacagcatggtactggtatcaacacagagatataaaccaatggaacagaacagagccctcagaaataataccacacatctacaaccatctgatctttgacaaacctgacaaaaacaagaaatggggaaagcattccctatttaataaatggtgctgggaaagctggctagacatatgtagaaagctgaaactggatccttatacaaaatttacaccttacacaaaaattaattcaagatggattaaaggcttaaatgttagacctaaaaccataaaaaccctagaagataaacctattcaggttttcaataccattcaggacataggcatgggcaaggacttcatgtctaaaacaccaaaagcaatggcaacaaaagccaaaattgacaaatgggatctaattaaactaaagagcttctgcacaggaaaagaaactaccatcagagtgaacaggcaacctacagaatgggagaaaatttttgcaatctactcatctgacaaagagctaatatccagaatctacaaagaactcaaacaaatttacaagaaaaaaaacaaacaaccccatcaaaaagtgggcgaaggacatgaacagacacttctcaaaagaagacatttatgcagccaacaaacacatgaaaaaaatgctcatcatcactggccatcagagaaatgcaaatccaaaccacaatgagataccatctcacaccagttagaatggcaatcatgaaaaaagtcaggaaacaacaggtgctggagaggatgtggagaagtaggaacacttttacactgttggtgggactgtaacctagttcaaccattgtggaagtcagtgtggcgattcctcagggatctagaactagaaataccatttgacccagccatcccattactgggtatatacccaaaggactataaatcatgctgctataaagacacatgcacacgtatgtttattgtggcattattcacaatagcaaagacttggaaccaacccaaatgtccaacaatgatggactggattaagaaaatgtggcacatatataccatggaatactatgcagccataaaaaatgatgagttcatgtcctttgtagggacatggatgaaattggaaatcatcattctcagtaaactatcgcaagaacaaaaaaccaaacaccgcatattctcactcataggtgggaattga

SEQ ID NO: 146696 - DNA, 400 bp, Homo sapiens
  misc_feature (1)...(400): n = a,t,c or g
gacggtgaggtcagcttcacattctcaggaactctccttctttgggtctggctgaagttgaggatctcttactctctaggccacggaattaacccgagcaggcatggaggcctctgctctcacctctgcagtcactgggagcaactggactctccggattgaccaagttcatcctgggctccattgggtctgccattgcggctgtcattgcgaggttctactagctccctgcccctcgccctgcagagaagagaaccatgccaggggagaaggcacccagccatcctgacccagcgaggagccaactatcccaaatatacctggggtgaaatataccaaattctgcatctccagaggaaaataagaaataaagatgaattgttgcnnnnnnnnnnnnnnn

SEQ ID NO: 146697 - DNA, 1218 bp, Homo sapiens
gacggtcagcttcacattctcaggaactctccttctttgggtctggctgaagttgaggatctcttactctctaggccacggaattaacccgagcaggcatggaggcctctgctctcacctcatcagcagtgaccagtgtggccaaagtggtcagggtggcctctgctcatgcgtagttttgcccctgccaggattgctacagttgtgattggaggagttgtggccatggcggctgtgcccatggtgctcagtgccatgggcttcacctcagtaggaatcgccgcatcctccatagcagccaagatgatgtctacagcagccattgccaacgggggcggagttgctgctggcagtctggtggctattctgcagtcagtggcatggctgtacagctcctcccatcaagagccattaaggaagagcacaccggacccgaaggccacggaattaacccgagcaggcatggaggcctctgctctcacctcatcagcagtgaccagtgtggccaaagtggtcagggtggcctctggctctgccgtagttttgcccctggctgccctgagccccaacatctctctcctcagacccttgctgggggcactggaggctagctccttcatgctggggtccctcactggcaccctgttttgcaacttggagatgggcaatcggcttagaaagtggaggggaagccagtgtggatctactcacagaatgttcttttggtttccagccaggattgctacaagttgtgattggaggagttgtgggcccatggcgggctgtgccaatgggtgctcaagtgccatggggcttcaactgcgcgcgggaatcgccctcgtcctcccataagcagcccaagatgatgtcccgcggcggccattgcccaatggggggtggagtttccccggggcagcctttgtggctaactctgcagtcaatggggagcaaattggacttttccggattgaccaagttcatccctgggctccaattgggtctgccattgcggctgtcattgcgaggttctactagctccctgcccctcgccctgcagagaagagaaccatgccaggggagaaggcacccagccatcctgacccagcgaggagccaactatcccaaatatacctggggtgaaatataccaaattctgcatctccagaggaaaataagaaataaagatgaattgttgcaactcaaaaaaaaaaaaaaaaa

SEQ ID NO: 146698 - DNA, 2167 bp, Homo sapiens
  misc_feature (1)...(2167): n = a,t,c or g
cgctgaagatcggggccgctcgcgcancgcntccagcgccgcgcgatgtagcgcgggggaccgcggcccccagcagagcccgcctgcccggcttgtctaccatcagagggagatctctgcccccctggggctgagagaccccaacctttccccaagctgaacctgcccggtcttgaggtaccattccacgatgtcttcccacaaaggatctgcggtggcacaggggaatggggctcctgccagtaacagggaagctgacacggtggaactggctgaactgggacccctgctagaagagaagggcaaaccgggtaatcgccaacccacccaaaagctgaagaagagcaaacatgcccagtgccccagggaagaagaggaggaggtgcgggtacttgacacttcctctgcaagcccaccacgccatggagaagatggaagagtttgtgtacaaggtctgggagggacgttggagggtcatcccatatgatgtgctccctgacttggctaaagggcaacgactaatctgctacatggtcatagacctcccatgccctcctttcgggcttgcttcaagagcatcttccggcattcatacagaaacttggcaacatcttggacccatcttgctttggtttcgtgctgtttctctttttgggaatcttgaccatgctcagaccaaatatgtacttcatggcccctctacaaggaagaaggtggtttttgggatgttctttttgggtgcagtgctctgcctcagcttctcctggctctttcacaccgcctattgtcatttcggaggagtcttctcgacctttccccaacgggaactattcaagggattgctccttctaaatatgggggaactttggtcccctgggctctattattccttctactgctcccccacagcccacggctcatctacctctccatcgtctgtgtcctggggcatttctgccattcattgtggcgcagtgggaccggtttgccactcctaagcatccggcagacaagagcaggcgtgttcctggggacttggcttgagtgggcgtcgtgcccaccatgcactttactaatcgctggagggctttgtcaaaggccaccacagtgggccagtatgggctggttcttcctcatggctgtgatgtacatcactgggaagctggcctttaatgctgctccgaattcctgagcgcttctttcctgggaaaatttgacatatggttccagtctcatcagaattttccatgtcctgggtggtgggcagcagcttttgtccacttctatgggagttttccaaccttcaggaatttccgttaacgggcctagaaggcgggctgtaactggatggacacccttctctgagccttcccacctgcggggttggaggaggaacttcccaagtgcttttaaaaataacttctttgctgaagtgagaggaagagtctgagttgtctgtttctagaagaaacctcttaggaggaattcaggtaccaaccaaggcttcagccccactttcacacccactggggcaataaaactttccatttccatttctcctaggtgggggatgggggcatgggtcaaacttagccatcccctcctcagcaaggcattctaccggcccctcacagagacagtactttgaaactcatgttgaggattttaaccctctcctccaacccattttggggaaaattatggactggggactcttcagaaattctgtcttttctttctggaagaaaaatgtcccctccccttaccccccatccttaaacctttgtacccccggctttataaccgggccatcccatttttgtagccccacttttccaaaaaccaattatatacccctgggtccccatctttcctagggccctggatctgcttatagagcaggaaagattaaagccccccacttttttacctagcccggctaatcatggaagtgtgtcccaggcttcaaggaaacttaagttttaatttttttttttttcttggccagagtaatgtaaaatttaaatggggaaagatatttaatatttaatactaagctttaaaaagaaacctgctatcattgctatgtatcttggatgcaaagactatggatgttaataaaagaaagtacagaagacacttggcattcaaaaaaaaaaaaaaaaaa

SEQ ID NO: 146699 - DNA, 1872 bp, Homo sapiens
gaggctgcgagatccctaccgcagtagccgcctctgccgccgcggagcttcccgaacctcttcagccgcccggagccgctcccggagcccggccgtagaaggctgcaatcgcagcccgggagccccgcagcccgcgccccgagcccgccgccgcccttcgaggggcgccccaggccgcgccatggtgaaggtggcggttcaactccgctctggcccagaaggaggccaagaaggacgagcccaagagcggcgaggaggcgctcatcatcccccccgacgccgtcgcggtggactgcaaggacccagatgatgtggtactagttggccaaagaagagcctgcggttggcgcatgtgctttggactagcatttatgcttgcaggtgttattctaggaggagcatacttgtacaaatattttgcacttcaaccagatgacgtgtactactgtggaataaagtacatcaaggaatgatgtcatcttaaatgaagcccttctgcagatgccccagctgcttctctaccagacaattgaaggaaaatattaaaaatctttgaagaaagaagaagtttgaattttatcagtgtgcctgttccagagttttgcagatagtgatcctgccaaaattgttcaagactttaaccaggaaacttacagccttatttagattttaacctgggataagtgttatgtgatcccttttgaacacttccatgtgttatgccaccccgaaaaccttactggagttacttattaacatgaaaggctgggaacctatttgccctcagcccctatctggattccatgaggcacatgggttatttactggatcgcattggaaaacattgatcacctggggtttctttatttatcgactgtgtcatgacaagggaaacttacaaactggcaacgcggaggaaactatttaaaggtattcaggaaacgtgaaggccagcaattgttttcggcaatttcgggcattttcgaaaacaaatttgccgtggaaacctttaatttgttcttgaacagtcaagaaaaacattattgaggaaaattaatatcacagcataaccccacccttttacattttgtgcagggattattttttaaagtcttcttccatgtaagtagcaaatcagggctttactatcttttcatctcattaattcaattaaaaccattaccttaaaatttttttctttcgaagtgtggtgtcttttatatttgaattagtaactgtatgaagtcatagataataggtacatgtcaccttaggtagtaggaagaattacaatttactttaaatccatttatctggatttttatgttttattagcattttcaagaagacggattatctagagaataatcatatatatgcatacgtaaaaatggaccacagtgacttatttgtagttggtaggtgccccggctacctagtttgttagtgcaattgaggcccccattttaattttcctctaattaaaatgtgcagtattttcagtgtcaaatatatttaactatttagagaatgatttccacctttatgttttaatatcctaggcatctgctgtaataatattttagaaaatgtttggaatttaagaaataacttgtgttacctaatttgtataacccatatctgtgcaatggaatataaatatcacaaagttgtttaactagactgcgtgttgtttttcccgtataataaaaccaaagaatagtttggttcttcaaatcttaagagaatccacataaaagaagaaactattttttaaaaattcacttctatatatacaatgagtaaaatcacaagattttttctttaaataaaaataagtcattttaataactaaaaaaaaaaaaaaaaaaa

SEQ ID NO: 146700 - DNA, 672 bp, Homo sapiens; identical to SEQ ID NO: 135912

SEQ ID NO: 146701 - DNA, 2484 bp, Homo sapiens
aagccctgaagggtcaaaagaaatacaaaagcaaaggctattttctttttttttttctttctttcattcattccttcctctgtttctttctttcttcctttcatttttttttcttttttaagagcgagcggctctgcggtggcggtttggggtgggcgccgcgacggtgaggtcgtctcgcctcccgcgcgccggtagattggttgtttcattatggatggaggggatgatggtaaccttattatcaaaaagaggtttgtgtctgaggcagaactatgatgttcggcgcaaaaaggaggcaagaagaatgggagaaagttcgaaaacctgaagatccagaagaatgtccagaggaggtttatgaccctcgatctctatatgaaaggctacaggaacagaaggacaggaagcagcaggagttacgaggaacagtttcaaattgcaaaaacatgggtaaggggctttagatgaagatgagaccactttccttgatgaggtttctcgacagcaggaactaatagaaaagcaaccgaagagaagaagaacttgaaagaacttgaaggaatacagaaataacctcaagaaggttggaattttctcaagagaacaagaaggaagtggaaaagaaacttgacttgtgaagcctatagaaaccaagaaccaagttctcccaggcgaacgtgcttgggcaggagctgtgaagcatgaagagcttcagagagtggcaccagtgttgaaaagacttgaaaccggacccctgagccagattgacaaggattcaagaggccctcatcctggcaaagtctctcgggaaacaaccttcccttgagtggccccttccatccacttgccccctctgctgcaagtatgtattcggcatcctcccagggcctggggtggcctactctggggagtcagcgattccgagttccagcttcaggacagcgaaaggcaccattcaattgccaccggaaagattgtttttccttccatgtttcccgaaccaacactttgcttcgagggccccttagttttttccgttccctacacagggaggctcctccccaagggtagatcggaccgttcatgctgcctataggccattatgtctcctcaaaaaaaaaactcctttgcctgcatcctgtgtaccaaccatgacatttttaaccaatcccaatcttaaaaaatgtggccagaatccaacctgttggccgaatcgtgttgggttccctctttcttactccaactgcagatgaccaaacctgtccccgctgccactttcctcactgatattgggaaggagggcaaggcccagccggaagttcccactaaaaatgccccaggagaataggcaccggctggcttgccaaagggtttgggttttattgctttctgttttttcttttccccgacagcacaaagaagtaagggcagttaattggacacggtgttatttaacaccattttctattgtaaaaatgaaatgtgttgtttggttcctacctgccattgtggaagcatgcgggggaaagagaactgaccccaggtaatgaaatgggagcccttcccctggaactaaccaggtccttgatgttgtgtgactaagtaaagatgataaaccccatctgctgggggtgtcacttcacactcgggcatgcattgtgaaagctttccatacccttggccgattccctctctcctctctctccaaccccatttatgcaggaagggactgctaacaagaacgcttccatctcaaaccttttctctgcctgggaaattattttatgtttgtttttgaaataaaggatttagtttaagattctaaattttagagaaacaaaccgtaggccttgtttactaatagccagacatcagaactgcaggtagggtatgttaatgaggatgactttatttctgggcagctcctggaatcctaatattgtaaatgagtgggacacacttgcatattgtgaccattctattgaggcccttctctgtttaatgcatattatacttgtgcttttaactgtggaatctatttctaacctaaaggtgctgccctagtacttttctttgctgcctctgctgctctttatcctttccaaacagcaactctgaggccatgagcagccaaaaaacttaggtactggctcacctcgtctcatagagggaaacgggctcatcccttggattctggaggagggagagggagatggtgtggaggcctcgaggacagagatagacatgagctttgacaacaatctgtaggctctcctgctttagaataagcatgtaccattctttatccattccccttattcctacatcaattgtttttactttcttgggtgtgagactgagtgagacacacacaaaatgtgttgacactgtgatgccggcaggcagagcagctactgactttgaacatgggcagagaggcccctggatctcatccagcccactccttttccccttccagta

SEQ ID NO: 146702 - DNA, 418 bp, Homo sapiens
cccacgcgtccgcttcttacctctgcttctttttgcttgtcccttctagccctaaattcttccatgttctgccctgaccttatcctgcctacctgtcttatctcttccactggctttgtaggagaccagtatgatgtctgtgccatttgcctggatgaatatgaggatggggacaagctgcgggtactcccctgtgctcatgcctaccacagccgctgcgtggacccctggctcactcagacccggaagacctgccccatttgcaagcagcctgttcatcggggtcctggggacgaagaccaagaggaagaaactcaagggcaagaggagggtgatgaaggggagccaagggaccaccctgcctcagaaaggaccccacttttgggttctagccccactcttcccacctcctttggtt

SEQ ID NO: 146703 - DNA, 383 bp, Homo sapiens
atttgaaggagcggtggaggccacagggtttagaggaccggaagtccttcatctcaagcatccgatgctgagagcggcctgattttctctaccggaagcccttttccagaggctgggaacacggcccacctagcaggaagtctcacctccttgagctccgccacccttcccgaagtttttctgtcacctgtgttaggctccgtcccctttccgcgttttatccccgtaccagaaaaggatacatttagtgcctcccacccagctccactaaacggccttcccgcttcctgtggttgtggccgctgtgctgtggggagcggccccgacccgggggctcattcgagcgacctcggaccacaatgccagcatggactttgcagacg

SEQ ID NO: 146704 - DNA, 518 bp, Homo sapiens
gtctcgcgagatcgagtgagtacggctcgccaagttggagcgctctcgcagtagaatacagcaactattcagctgcgaggggacgggagaggtggtgagcactctcgcgagatttgaaggagcggcggaggcagagggaggagaggaccggaagtccttcatctcaagcatccaatgctgaaacggcctgattttctctaccggaagcccttttccagaggctgggaacacggcccacctagcaggaagtcccacctccttgagctccgccacccttcccgaagtttttctgtcacctgtgttaggctccgtcccctttccgcgttttatccccgtaccagaaaaggatacatttagtgcctcccacccagctccactaaacgggacgcgcggcctcctcagcctctttcctcccgctgccatgcaccctgcagccttcccgcttcctgtggttgtggccgctgtgctgtggggagcggccccgacccggggctcattcgagcgacctcggaccacaa

SEQ ID NO: 146705 - DNA, 462 bp, Homo sapiens
gtgcttctggttccagacaataccttccccttgggctattacctcatccctttcacagggattgtgggactgctggttttggccatgggagcagtaatgatagctcgttgtatccagcaccggaaacggctccagcggaatcgacttaccaaagagcaactgaaacagattcctacacatgactatcagaagggagaccagtatgatgtctgtgccatttgcctccctcttcccctgttatcctggtctaataaccccccacacatacacctctggtgacctatttgcacagaccgtcgtcttccctccagtcttctgagggataggggacattccatcccaagcttctcccttacccacacctatccttttgaggggctttggggtggggctggggcaagcagagggactgggtcttcacttcttgggctaataaaattgtttctttgtggactaaaaaaa

SEQ ID NO: 146706 - DNA, 473 bp, Homo sapiens
aatgccagcatggactttgcagaccttccagctctgtttggggctaccttgagccaggagggcctccaggggttccttgtggaggctcacccagacaatgcctgcagccccattgccccaccacccccagccccggtcaatgggtcagtctttattgcgctgcttcgaagattcgactgcaactttgacctcaaggtcctaaatgcccagaaggctggatatggtgccgctgtagtacacaatgtgaattccaatgaacttctgaacatggtgtggaatagtgaggaaatccagcagaagatctggatcccgtcgtcttccctccagtcttctgagggataggggacattccatcccaagcttctcccttacccacacctatccttttgaggggctttggggtggggctggggcaagcagagggactgggtcttcacttcttgggctaataaaattgtttctttgtggactaa

SEQ ID NO: 146707 - DNA, 486 bp, Homo sapiens
  misc_feature (1)...(486): n = a,t,c or g
gcttgtccttacttagccctaaattcttccatgttctgccctgaccttatcctgcctacctgtcttatctcttccactggctttgtaggtgaggggaaatttttgcaaggctttaaaagccttagccctgggtcattgtggctcagtgaaggactagattattttctttctgtcccaggagaccagtatgatgtctgtgccatttgcctggatgaatatgaggatggggacaagctgcgggtactcccctgtgctcatgcctaccacagccgctgcgtggacccctggctcactcagacccaggaagacctgccccatttgcaagcacgcctgttcatcggggtcctggggacgaagaccaaagaggaaagaaactcaagggcaagaggagggttatgaaggggaagccaagggaccaacctggcttcagaaaggaccccatttttggggtcngtgaccagcagtgagggcccttccccgtaatcc

SEQ ID NO: 146708 - DNA, 525 bp, Homo sapiens
tttcgtggaggagcttgatggaagcgtgcgagaaggggcgtaactgatttggaaaccagaggaaaggcgctgttttcaccgaattagaatcgcgggaaaatagagaagagtttgtttgaaggtctcgcgagatcgagtgagtacggctcgccaagttggagcgctctcgcgatagacacagcaactattcagctgcgaggggacgggagaggtggtgagcactctcgcgagatttgaaggagcggcggaggccagagggaggagaggacgcgcggcctcctcagcctctttcctcccgctgccatgcaccctgcagccttcccgctttctgtggttgtggccgctgtgctgtggggagcggccccgacccgggggctcattcgagcgacctcggaccacaatgccagcatggactttgcagaccttccagctctgtttggggctaccttgagccaggagggcctccaggggttccttgtggaggctcacccagacaatgcctgcaggcccattgccccaccaccg

SEQ ID NO: 146709 - DNA, 704 bp, Homo sapiens
  misc_feature (1)...(704): n = a,t,c or g
gcacgaggactatcagaagggagaccagtatgatgtctgtgcaatttgcctggatgaatacaaggatggggccacgctgcgggtactcccctgtgctcatggtgaggccctcactgcctgcccatgcccctctgccaccagcagccaccaggtgcttcaccttgttcctctctgcagcctaccacagccgctgcgtggacccctggctcactcagacccggaaagacctgccccatttgcaagcagcctgttcatcggggtcctggggacgaagaccaagaggaagaaactcaagggcaaagaggagggtgatgaaaggggaagcaaagggaccaaccctgccctcagaaaggaccccacttttgggttctagccccactcttccccacctcctttggttccttagccccagctccccttggtttttcctgggggccttcaacagaaatcccccactgggtcccctcccttcnttcccctggttatcctggtctaataaccccccacacatacacctctggtgacctatttgcacagaccgtcgtcttccctccagtcttctgagggataggggacattccatcccaagcttctcccttacccacacctatccttttgaggggctttggggtggggctggggcaagcagagggactgggtcttcacttcttgggctaataaaattgtttctttgtggactaaaa

SEQ ID NO: 146710 - DNA, 2146 bp, Homo sapiens
ggtcgacgatttcgtgcttgatggaagcgtgcgagaaggggcgtaactgatttggaaaccagaggattggcgctgttttcaccgaattagagtcgcgggaaaatagagaagagtttgtttgaaggtctcgcgagatcgagtgagtacggctcgccaagttggagcgctctcgcgatagacacagcaactattcagctgcgaggggacgggagaggtggtgagcactctcgcgagatttgaaggagcggcggaggccacagggaggagaggtttgtaaactaggaggctccgggtttccgggcacttttattaggtcgtcttctgggccaccagtgccccttccatctccacaggcaggccctccatcgctaacctttttttaaccggccttttaggaccggaagtccttcatctcatagcatccaaggctgaaagcggcctgattttctctaccggaagcccttttccagagtgctgataacacggaccacctagcaggaagtcccacctccttgagctgcgccacccttcccgaagtttttctgtcacctgtgataggctccgtcccctttacgcgttttatacccggaccagaaaaggagacatttagtgcctcccacccagctccactaaagcggggtggatatctcattctttgagttggtgttccttccccggcgcccccatgtagctgggaagtgggacctggggggtggttgggaccctgggattcctaaaggaggggcagggagggcgcagaactccgcttctgctccttgctaccaggacgcgcggcctcctcagcctctttcctcccgctgccatgcacccttgcagcctttcccgcttcctgtggttgtggccgctgtgctgtgggggagcggccccgacccgggggcttcatttcgagcgacctcgggaccacaattgccagcatgggatttttgcagaccttccagctctgttttggggctaccttgagccttgagggccctcaagggctccattggggagcctcacccggacaatgcctgcagccccattgccccaccacccccagccccggtcaatgggtcagtctttattgcgctgcttcgaagattcgactgcaactttgacctcaaggtcctaaatgcccagaaggctggatatggtgccgctgtaatacacaatgtgaattccaatgaacttctgaagatggtgtggaatagtgaggaaatccagcagcagatctggatcccgtctgtatttattggggagagaagctccgagtacctgcgtgccctctttgtctacgagaagggggctcgggtgcttctggttccagacaataccttccccttgggctattacctcatccctttcacagggattgtgggactgctggttttggccatgggagcagtaatgatagctcgttgtatccagcaccgggaaacggcatccagcggaatcgacttaccaaaggagcaactaaaccagattcccacacagactaatcaaaagcgagaccaagtatgatgtctgtgccatttgcctgattgaatatgaggatggggacaaagctccggggtcttccccggtgctcatgcctaccacaaacagatgtgtggacccctgggctcactcagacccgggaagacctggccccatttgcaagcacgcctgttcatcgggcgtcctggggacgaagaccaaagaggaagaaactcaagggcaaaaaggagggtgatgaaggggaagccaaggggaccaccctgcctcagaaaggactccacttttggggttctagccccactcttcccacctccctttgggttccttaggcccaagttccccttggttttttccttggggcctttcaacagatcccccactgtcccctccctcttccccctgttatcctggtctaataaccccccacacatacacctttgggtaacctatttgctacagaccgtcgtcttccctccagtcttctgagggataggggacattccatcccaagcttctcccttacccacacctatccttttgaggggcatttggggtggggctgagagacaaacagagggactgggtcttaaattcttgggctaataaaattgtattctttgtggactaaaaaaaaaaaaaaaaaaacact

SEQ ID NO: 146711 - DNA, 669 bp, Homo sapiens
  misc_feature (1)...(669): n = a,t,c or g
atcgagaccatattccatgtggnggaattccacagactcagagagaacccacccatggttgctgtctcctgcccgacaaagaccaacgtcaaggcccgcctgggggtaaggtcggcgcgcacgctgtgcgcagtatgtgtgcggaggccctggagaggatgttcctgtccttccccaccaaccaagacctacttcccgcacttcgaccttgagccacggtttctgcccaggttaaaggggccacgggcaagaaggtggccgacgcgctgaccaacgccgtggccaacgtgggacgacatgcccaacgtcgctgtccgccctgaagcgaccttgcacgcgcacaaacttcgggtggacccggttcaactttcaagctcctaaagccactggcctgcttggttgaccctggcccggcccaccttccccggccgagtttcacccctggcggtgcaacgtcttccctgggacaaagtttcctgggctttttgttgaagcaccgttgcttgaaccttccaaattaccgttaaagcttggaagccttcgggttggccatgctttctttgcccctttggggcttccccccagcccctcctcccctttcctgcacccgtacccccgtggtctttgaaataaagtcttgagtgggcggcaaaaaaaaaaaaaaaaaaa

SEQ ID NO: 146712 - DNA, 502 bp, Homo sapiens
  misc_feature (1)...(502): n = a,t,c or g
cagaataccaaactatatttactgtttacagtagtaaaggacaacaaataatgtacaaattggtgaataaacacaacagagccaacaaacatcccacccgagcccatacagcaaacaggaaatgagaacatttcagcaagatttcaagcaagcaagagatgatgggtcattgttcaggtgactgtaaaaaggcagaactatgaaaatgtttaattggtatagatcccaaaatatttcacagaactgaaatcaccagactaatgcataaattcaatacctatttggaaagcagcacggcacaaacccacggagaagaacatgaagtcatcattccatgggttcatttgtaaccacacttggaagtagctcttatacacgacaacataactgcaaattcagcaatacttagtcttacttttttatgtatagaccataatcattcatcagaagccaatactagaagaaatctgaggccacaacaccattaccaaatgnggaatgt

SEQ ID NO: 146713 - DNA, 2556 bp, Homo sapiens
agccgcggcccggcctgcgcgcgcccgacgccccggggagcgcgcctcgtgaacgcgcgcagccacgtgacccccgtgccggccaacgggtgcgccgggatttgggggataaagcgcggccccgcgcacagttgcggcgggagagcggcggggccgagagcgtgactcgcccgctccgcgctgcttcccccgcgccgcctccccgcgccgctcgcgcagccatgtccgaggagaagcccaagctgggaaggcgcgcgcccagcgcctccttgagcgcccggtgtcgggccccgcgctgctgctcctgcagagcgcggcgccctcggatcccgccccagcagtgtccccgaagcgtctttgcgtgctcctctcctgagtcattgctggttggggtcgccctctcccccggcatcgccctgggtgcgggatcctgtgtcgagtgcacggagtcggctcgggaacaagcgtctggggttacccccaaggggcgcgctctgaggggcctggcccctgtgagcagcactgccgtccttccagggcgcccatcgcgaccccggtattcacccacttctccgcatcgcgtcccggccatcgcgtcccccagtgtgcgcccacccctctccttcgtgtctccccaatcgtgccctcagtgtgcacctactcccacccatcgcgccccgtgtgcacccaccgcctccatcgcgtcccccggtgtgcgcccacccctccccatcgcgccccccggtgtacgcccacgcctccccatcacgccccccatggagggtgtgaagacagagaatgaccacatcaacctgaaggtggccgggcaggacggctccgtggtgcagttcaagatcaagaggcacacgccgcctgagcaagctgatgaaggcctactgcgagaggcagggcttgtcaatgaggcagatcagattccaggttcgacgggcagcccaatcaatggaaactggacgatctcagcacagctggagactggaaggacgaggacacccatcgacgtgtttccaagcagcaagaccgggaggtgtgccggagagcagccttggcagggcacagtttctagagggcccgtccccaagcccgggccgtccatcctcgcattgctgttgaatggtgagcacggtgaccatgccgaccacaaaggtgtctgcggaaactcgaggacattcaccacgatgattttcctctctttgatgtacttcaagttgcaactcaaaactatatctgcagggatgaatctgtaacttaaattcgggccaatcagaattgttatctttgttcaggtaaaatgagttgcaagatattgtggggtactttttgtgtgctcatttgtgttttccccccctcctacaacatttttttaacccccaaattatagcctgaatgttccgcttttagtctgggccaggggatctgactcctgagttggttgcctctcccctgctcactccagtcacatagagaattggtgtttcccgcagtggggattgcagctgttggacaggtattgggggcaaggttggtagggaggacagactgtcacttgctgttacaggcacaggtgattaaaatgctaaatattgcaaatttaaagctttgtcagtatatggaaaagtttgaagggaaaatactgggaatgcttcttcaaaaggttaaaaaataaccggggtcttttgggtaatttgacccccacgtgctctctggcccctcaagcatgtaacctcggggtctgaggccccaggaccccacccccctggccacccctccccacccccactcccctgctcagtacctgggcttggtacacagggcaagggttgggcacaacccaaatttgggccttttttctccctcttaatattgaagaaattcccccccatttctcatttgggtaatggtgttgtgggctcagaatttcttctaagtaatttggcttctgatgaatgattatcggtctataccataaaaaagtaagactaaagtattgccggaatttgccagttaatgtggtcgtgtaataaagagctacttcccaagtgtgggttaccaaatgaaccccatgggaatgatggacttccatgttcttctcggtgggtttgtgcccgtgctgctttcccaaataaggtattggaatttatgcattaagtctgggtgatttcagttcctgtgaaataattttgggatcctatacccaattaaaacatttttcataagttctggcctattgtccttccctggaggctccattgctgcttgggtgggccattctctgcctttttacagtcacctggaacaatgacccgatcatctcttgcttgcttgaaaatcctgctgaaatggttctcatttcctgtttgctgtatgggctcgggtgggatgtttgttggctctgttgtgtttattcaccaatttgtacattatttgttgtcctttactactgtatacagtaaatatagttcgggattctgccaaaagacacactacggggctcgccctcccagatcatcttttatgtgacccatcctcaagaccacg

SEQ ID NO: 146714 - DNA, 456 bp, Homo sapiens
  misc_feature (1)...(456): n = a,t,c or g
tgatcaatgtattctgccacaggcttccagcactctgtgttgttgactgcatccccaaaacctggtgtgtccacaatggtgagccgcagcctcacacccttctcttctatgtccactgcatgcttagtgatctccacagtttgcatgatcctctcttcagcaccaagaagtttccggtcccggtacagatcagtgaggaagaggctattgacaagtgtggatttgcccaggccagactctcctgccaccatgagggtaaagtcaaagcctttcttcacggactttcggtggacttggttggggagggttgcaaagcccacatactccttgtcatccatggctgcagcccgggcggggccggctccgcctggacagcgcccgagcgacccgcggcggagctgcggaattccncggcncttacctgaggaggcgtagcgtcaaaannnngggcactcc

SEQ ID NO: 146715 - DNA, 465 bp, Homo sapiens
  misc_feature (1)...(465): n = a,t,c or g
cctgcatgtgggtacgtaccagcattgtcctcagcttcaaaaagtcgcagtgccctgggttttccacttccacgatgccccaggggtagagtcgaccccgaactcgccgccctctggcctctactacagtgttgctgccaattactgcaaatgggatgctttcctttagggcttggtcctgcaatttgaagtcctcatcctcatcagagtcacagtctgggaattgatagatcttgattccaaaatgctcaatctcctcccggattttgcgtttcttgtggtccacttcgggaggtgtcagtgtgtctgccttagccaggataggcacgatgttgtcttggatgttctttcggttcaggccactctcgtctcggaaatactgctcaaactgctgancaatgtattctgccacaggcttccagcactctgtgttgttgactgcatccccaaaacctggtgtgtcca

SEQ ID NO: 146716 - DNA, 591 bp, Homo sapiens
  misc_feature (1)...(591): n = a,t,c or g
tttccacctacagatttattaaactttatttcctctgagtctctgggcagtcagcagggatgtaaggcgaagtggcagtagcatctcctgcatccgccgcagctcctcatctttctctcggataagcttctcagtttctggatctgtccctggtgggacagcagggatggggaagtcggtaccactttcccgagtcagtttgttgcgattccgttccttcaccaccaggcgggtcatgctctggatgcactgtgcccggtagttctcataatgtgtctcccgcgtcacatccttcaggtcctgcatgtgggtacgtaccagcattgtcctcagcttcacaaagtcgcagtgccctgggttttccacttccacgatgccccaggggtagagtcgaccccgaactcgccgccctctggcctctactacagtgttgctgccaattactgcaaatgggatgctttcctttagggcttggtcctgcaatttgaagtcctcatcctcatcagagtcacagtctgggaattgatagatcttgattccaaaatgctcaatctcctcccggattntgcgtttcttgtgtccactttcggg

SEQ ID NO: 146717 - DNA, 5589 bp, Homo sapiens
atggtaaggcaggcaggcaggcgggcgggcgcggggcagggctggggtgcgcagggccggtcgctcccgggcggctgcaaggggacccgcggcaccgcagccgcggctgtgcagggtgggaggcgccgtcgccggccccgggcacaggctggcactgctgccgggcggcggtgcgtcgctgctcccaagtttttccctctgagcagccacggagtgggcgccaacccctgggcgagcactggagactatggctataagcagatcaagcgtttcctggaggacaccacggatgatggagaactgagcaagttcgtgaaggatttctcaggaaatgcgagctgccacccaccagaggctaagacctgggcatccaggccccaagtcccggagccaaggccccaggccccggacctctatgatgatgacctggagttcagacccccctcgcggccccagtcctctgacaaccagcagtacttctgtgccccagcccctctcagcccatctgccaggccccgcagcccatggggcaagcttgatccctatgattcctctgaggatgacaaggagtatgtgggctttgcaaccctccccaaccaagtccaccgaaagtccgtgaagaaaggctttgactttaccctcatggtggcaggagagtctggcctgggcaaatccacacttgtcaatagcctcttcctcactgatctgtaccgggaccggaaacttcttggtgctgaagagaggatcatgcaaactgtggagatcactaagcatgcagtggacatagaagagaagggtgtgaggctgcggctcaccattgtggacacaccaggttttggggatgcagtcaacaacacagagtgctggaagcctgtggcagaatacattgatcagcagtttgagcagtatttccgagacgagagtggcctgaaccgaaagaacatccaagacaacagggtgcactgctgcctgtacttcatctcacccttcggccatgggctccggccattggatgttgaattcatgaaggccctgcatcagcgggtcaacatcgtgcctatcctggctaaggcagacacactgacacctcccgaagtggaccacaagaaacgcaaaatccgggaggagattgagcattttggaatcaagatctatcaattcccagactgtgactctgatgaggatgaggacttcaaattgcaggaccaagccctaaaggaaagcatcccatttgcagtaattggcagcaacactgtagtagaggccagagggcggcgagttcggggtcgactctacccctggggcatcgtggaagtggaaaacccagggcactgcgactttgtgaagctgaggacaatgctggtacgtacccacatgcaggacctgaaggatgtgacacgggagacacattatgagaactaccgggcacagtgcatccagagcatgacccgcctggtggtgaaggaacggaatcgcaagtatgaccagaagccaggacaaagctggcagggggagatcccaagcctagccttgggtgagaccaagccctacttttgttcttctataggccctgggctcaatctaagcggcaaactgactcgggaaagtggtaccgacttccccatccctgctgtcccaccagggacagatccagaaactgagaagcttatccgagagaaagatgaggagactaggaggccgcagctagctggcagtctcagatccaggtttcccatctctgggatgagaggagagttcttcactcaggactgccagcgcaatgcaggtcgtgaagaactgcagggtcgtttatcgatacaaagtttttctcctattctggcgttgggaccggatgacagctgcgaaaccaaaacgggaatggataaactgagagcagtggccagcagccccctctttactgctctcctattggctgccgcaaggacgcgctgtgatttcccattggtcgcgtctcccctccggcgccgcgcctccttcctccagggtgaggaggggccccccagcctggagtacatccaagccaaggatctgttcccccccaaggaactagtgaaggaggaagagaatcttcaggtccccttcacagtgctgcagggtgagggagtagagttcctgggccgggcagccgatgccctcattgccatctctaactaccggctgcatatcaaattcaaggactctgtcatcaacgtccccctccggatgattgacagtgtggagagccgtgatatgttccagttgcacatttcctgcaaggactccaaagtggtgaggtgccacttctccacttttaagcagtgccaagagtggctctcacggctaagccgagccacagcaagacctgccaagcctgaagacctctttgcctttgcctaccatgcctggtgcctggggctgaccgaggaggaccagcacactcacctatgtcagccaggtgagcacatacgttgtcgacaggaggcggagcttgcaaggatgggctttgacctgcagaacgtctggagagtctcacacatcaacagcaactacaaattgtgccccagttacccccagaagctgctggttcctgtgtggatcactgacaaagagctggagaacgtggcttccttccgctcctggaagcggattcccgtggttgtgtatagacacttgcgcaatggggctgccatcgcccgctgcagccagccagagatcagctggtggggctggcgcaatgctgatgatgagtacctggtcacgtccattgctaaagcctgtgccctggacccggggacaagggccactgggggctccctcagcaccgggaataatgataccagcgaggcgtgtgatgctgactttgattcttctctgactgcgtgctctggagtggagagcacagcagctcctcaaaagctgctgatcctggatgcgcgatcctacacggcagcagtggccaaccgggccaagggtggaggctgtgaatgtgaagagtactatcccaactgtgaggtcgtgttcatgggaatggccaacatccatgccatccggaacagctttcagtacctccgggctgtgtgtagccagatgccggatcctagcaactggttgtcggcactggagagtaccaaatggctgcagcacttgtcggtgatgctaaaagcagctgtgctggtggctaatacagtagaccgggaaggccggcctgtgctggtacactgctcagatggctgggaccgcacaccgcagatcgtagccctggccaaaatattactggacccatattacaggacgttggagggcttccaagtgttagtggagtctgactggctggattttgggcacaagtttggagatcgctgtggccaccaagagaatgtggaggaccaaaacgaacaatgccctgtgttcctccagtggcttgattctgttcatcagttgcttaagcagttcccctgcctgtttgaatttaatgaagcattcctggtaaaactggtgcaacacacatactcctgcctctacggcaccttcctggccaacaacccctgtgagcgagagaagcgcaacatctacaagcggacctgctctgtgtgggcgctccttcgagctggcaataaaaactttcataacttcctctacacacccagctcagacatggtcctgcatcctgtttgtcatgtccgggccctgcacctctggacagctgtttatctgccagcatcatctccatgcacacttggggaagaaaacatggatctttacctttccccagtggcccagagccaggagttctctggccgctctctggacagattacctaaaaccagatccatggatgatcttctttctgcctgtgacacaagcagccccctgactcgtacatccagtgaccctaacctgaataaccactgtcaggaggtcagggtaggcctggagccctggcacagcaatcctgagggatcagagacaagctttgtggactctggggtaggagggcctcagcaaactgtaggagaagtgggtcttcctcctcctctgcccagcagccagaaagactacttgagcaataaacctttcaagagtcacaaaagctgttctccaagttacaaactgcttaataccgcagtgcctcgggaaatgaagagcaacacctctgatcctgagatcaaagtcctagaagagactaagggaccagctccagacccttctgcccaggatgagctgggtaggactttagatggcataggggagccacctgaacattgtcctgaaacagaagctgtcagtgcactctccaaggtcatttctaacaagtgtgatggagtttgtaattttcctgagtcttcccagaactctcctacaggtacgccccaacaggcccagccagactccatgctaggtgtgccctccaagtgtgttcttgatcacagcctcagcaccgtttgcaacccaccgagtgctgcctgccaaactcctctagacccaagcactgacttcctcaaccaagatccctcagggtctgtggcaagtatctcccaccaggaacaactgagttctgtgccggatctgacccatggggaggaagacattggtaaaagaggaaataataggaatgggcagttattggaaaatcctcgctttgggaaaatgccattggaattggtccggaagccaatttctcagagccagatcagtgagttctcttttctagggtccaactgggacagcttccaagggatggtgacttcattcccaagtggggaggccacccctcggcggctgctttcctatggctgttgtagcaagaggccaaacagtaagcagatgcgggccacagggccctgctttgggggccagtgggctcagagagaaggtgtgaagtcacctgtctgttctagtcattccaatggacattgtactggcccaggaggaaagaaccagatgtggttgtccagtcatccaaagcaagtctctagcacaaagcccgttccactgaactgcccttctccagtgcctcctctgtatttggatgatgatggactcccctttcccacggatgtgatccagcataggttacggcaaatcgaagcagggtacaaacaagaggtggagcagctacgtcgacaggtgcgtgagcttcagatgaggctggacatccgtcactgctgtgcccctccagcagagccccccatggactatgaggatgattttacatgtttgaaggagtcagatggcagtgatactgaggattttggctctgatcacagtgaagactgcctttcagaagcaagctgggaacctgttgataagaaagagactgaggtgactcgctgggttccagaccatatggcatcacactgctataactgtgactgtgaattctggttggccaaacgaagacaccattgcagaaattgtgggaatgtattttgtgctggatgctgccacctgaagctgcccattcctgatcagcaactctatgacccagttctcgtctgtaactcatgttacgaacacattcaagtctctcgtgccagggaactcatgagccaacagctgaagaaacccattgctacagcttccagttga

SEQ ID NO: 146718 - DNA, 470 bp, Homo sapiens
cctacgatgactccatgaactaggcattacccccattttttcaggtcaagatcttatgggtcagtaaactgacctcccaacccagaacatggtcttcaccttttcttccaactggggaaagtgaggcaggttctttcctctcttgcaccagagaaaccctgcagcacagagaactggacaagactagggccaggggacctgagtgaggctccgttgttctcacctcaccactttggagtccttgcaggaaatgtgcaactggaacatatcacggctctccacactgtcaatcatccggagggggacgttgatgacagagtccttgaatttgatatgcagccggtagttagagatggcaatgagggcatcggctgcccggcccaggaactctactccctcaccctgcagcactgtgaaggggacctgaagattctcttcctccttcactagttccttgggggggaacagat

SEQ ID NO: 146719 - DNA, 630 bp, Homo sapiens
tttttttttttttttttcagatttattaaactttatttcctctgagtctctgggcagtcagcagggatgtaaggcgaagtggcagtagctgaaggggcctgagcagagctggtgctgggaggggccggcatggacaggaagaagaggaggagatttaaatatccagggctgaaagccagttaatagttctccttcatctgtttttgtattttgtgtagcatctcctgcataccgccgcagctcctcatctttctctcggataagcttctcagtttctggaatctgtccctggtgggacagcagggatggggaagtcggtaccactttcccgagtcagtttgctaaagggagaaaagggttgataaggcgaggaggaccccagcacccgcttagattgagcccagggcctatagaagaacaaaagtagggcttggtctcacccaaggctaggcttgggatctccccctgccagctttgtcctggcttctggtcatacttgcgattccgttccttcaccaccaggcgggtcatgctctggatgcactgtgcccggtagttctcataatgtgtctcccgtgtcacatccttcaggtcctgcatgtggggtacgtacagcattgtcctcagctt

SEQ ID NO: 146720 - DNA, 754 bp, Homo sapiens
actaatatagagattttatttaaactgtattgaatttttacagcacattgcatgtttgtcacaacgcaactgcacagtttggatttttggccacatcatgtcacttacacccacaacagctctgaaaggagtatttgatgaacacatctgagccaagagcccagagtctctctccaaggccatgcagtttgttcactgatgggacagtccctcaaaacagccacgctaagtagacagatacatggctatatcactgtatcttttggttaagtgccactggtacatattaagatgaaaaaaaacaaaaacaaaaacaaaaaaacaaaataaaattttttaaaaaccaacaacgtttggtccaaatggacacatgttctttcccaattttggtatcaaggctttattctcttctgtttgggttccattgttaagtgcacagaaatagacagcagcatttgtactgaaaccctcacataccaaacagcatatgctaggaggtaaaaaccaaacgctaaattctaccctcaaggtgtcaagtgttcaggataagaagcaatgtgacccagaggaggcatcagccaagggaaagacaacatgggggaaatgggcaatggaacaacaacaacgaaaaccttttgttttattttcatgccaggagaggatcaagggtgtagctcctgtgttagcaccaggacaactaggaaaagtcaggtgcaaaagagtaggggcacaatcagcagatattttcacaagg

SEQ ID NO: 146721 - DNA, 666 bp, Homo sapiens
  misc_feature (1)...(666): n = a,t,c or g
ccgcccaggaggtacttctgaaacaggtccccagtggcacctcagtttatccattcccgttttggtttcgcagctgtcatccggtcccaacgccagaataggagaaaaacctgcaggctaagagagaagggagggctgggctgaggttcagtcttggtcatctccgactggcggcgctaggatttcccccttcctgtgtcttgatgggttcctccaacactcactttgtatcgataaacgaccctgcagttcttcacgacctgcattgcgctggcagtcctgagtgaagaactctcctctcatcccagagatgggaaacctggatctgagactgccagctagctgcggccttcctagtctgtaaagcgaagggagaccagggacgctcccaaggacccggcttatcgcccctccctttccttcccggggacccagaacagaccacaagacggagggtggccgctgggaggtcgncgtggccccgcgataaccaccaaccgacagaaatggagaacagttgattcagattcagctgatattcttcaggtctgggagcgggcctgagcgcttttaatttagnccggggttaatgtnctcaaccatttttgtttattagaacgttgaaattccataatnttggnaagtttcagggngacaaggactttt

SEQ ID NO: 146722 - DNA, 999 bp, Homo sapiens
atggtggattcgttaattgcgcgcgtaggagtaatggctcgcggtaatgccattactttgcctgtatgtggtcgggatgtgaagtttactcttgaagtgctccggggtgatagtgttgagaagacctctcgggtatggtcaggtaatgaacgtgaccaggagctgcttactgaggacgcactggatgatctcatcccttcttttctactgactggtcaacagacaccggcgttcggtcgaagagtatctggtgtcatagaaattgccgatgggagtcgccgtcgtaaagctgctgcacttaccgaaagtgattatcgtgttctggttggcgagctggatgatgagcagatggctgcattatccagattgggtaacgattatcgcccaacaagtgcttatgaacgtggtcagcgttatgcaagccgattgcagaatgaatttgctggaaatatttctgcgctggctgatgcggaaaatatttcacgtaagattattacccgctgtatcaacaccgccaaattgcctaaatcagttgttgctcttttttctcaccccggtgaactatctgcccggtcagagaggatcatgcaaactgtggagatcactaagcatgcagtggacatagaagagaagggtgtgaggctgcggctcaccattgtggacacaccaggttttggggatgcagtcaacaacacagagtgctgccacgacaggtttcccgactggaaagcgggcagtgagcgcaacgcaattaattatcgtaagccgatggacacaggcatcgtctctctgaaaatcgactggatcatagagcgttaccagctgcctcaaagttaccagcgtatgcctgacttccgccgccgcttcctgcaggtctgtgttaatgagatcaacagcagaactccaatgcgcctctcatacattgagaaaaagaaaggccgccagacgactcatatcgtattttccttccgcgatatcacttccatgacgacaggatag

SEQ ID NO: 146723 - DNA, 483 bp, Homo sapiens
catgcggaccggccggattcccggctcgacaacgtatgtgctcacctggctgacataggtgagtgtgctggtcctcctcggtcagccccaggcaccaggcatgggaggcaaaggcaaagaggtcttcaggcttggcaggtcttgctgtggctcggcttagccgtgagagccactcttggcactgcttaaaagtggagaagtggcacctgccaggcaagaagccacaggcctaggtgaggcaaagtgcagttgtgccatggggctatcagggccaaaaacacagccacaggaaggctgtgaggagagaaggctgcaaagcaagaggtaaagcagtggggacccagggtggggggacgagggacactggccaacacccaacagaagttgtctcttgtgataattctcttcccaagaactcctgtgtttgaggcatacttatcctctcgaatggggcgctactgtttctcgtatcaaatctaaatg

SEQ ID NO: 146724 - DNA, 1863 bp, Homo sapiens
ttttgccacctacagatttattattactttatttcctctgagtctctgggcagtcagcagggatgtaaggcgaagtggcagtagctgaaggggcctgagcagagctggtgctgggaggggccggcatggacaggaagaagaggaggagatttaaatatccagggctgaaacacgtctaatagttctccttcatctgtttttgtaatttgtgtaacatctcctgcaatccgccgcaagctcctcaatctttctctcgggataagccttctcaagtttctgggatctgtccctggtgggacagcagggatggggaagtcggtaccactttccccgagtcaagtttgttgcggattccgttccttcaaccaccaggcgggtcatgctcctggatgcactgtgcccggtagttctccataatgtgtctcccgtgttcaacatccttcaggtccctgcatgtgggtaacgtacccagcattgtccctcagcttcaacaaatcgcagtgcccctgggttttcccacttcccacgatgcccccagggtagagtcgaccccgaactcgtcgccctctggcctctactacagtgttgctgcccaattactgcaaatgggatgctttcctttagggcttggtcctgcaatttgaagtcctcatcctcatcagagtcacagtctgggaattgatagatcttgattccaaaatgcacaatcgtctcccggattttgcgtttcttgtggtccacttcgggaggtgtcagtgtgtctgccttagccaggatcaggcacgatgttgacccgctgatgcagggccttcatgaattcaacatccaatggccggagcccatggccgaagggtgagatgaagtacaggcagcagtgcaccctgttgtcttggatgttcattcggttcaggccactctcgtctcggaaatactgctcaaactgctgatcaatgtattctgccacaggcttccagcactctgtgttgttgactgcatccccaaaacctggtgtgtccacaatggtgagccgcagcctcacacccttctcttgtatgtcacactgcatacatagtgatctccacagtttgcatgatcctctcttcagcaccaagaagtttccggtcccggtacagatcagtgagaaagaggctattgacaagtgtggatttgcccaggccaaactataactgcccccatgagggtaaagtcaaagcctttcttcacggactttcggtggaacttggttggggagggttgcaaaggcccacatactccttgtcatcctcaagaggaatcatagggatcaagcttgccccatgggctgcggggcctggcagatgggctgagaggggctggggcacagaagtactgctggttgtcagaggactggggccgcgaggggggtctgaactccaggtcatcatcatagaggtccggggcctggggccttggctccgggacttggggcctggatgcccaggtcttagcctctggtgggtggcagctcgcatttcctgagaaatccttcacgaacttgctcagttctccatcatccgtggtgtcctccaggaaacgcttgatcccagcttcagtcctgtcctcagggacagaattcccttgccatcccagtgaacggtccatgtcccacgcttcagactccctgtcagaaagctttaggtctcagtttatctgtcagagcaaagttcctcacacacagaaacagccttgttttgatgctgttgttgtctggcttcctggcttgctcctttccctttctctttgacccccttctgtctctggcaggggccaaaaaagcatgtggaatgtccttccccacccctcttctcctccccttccacgaaa

SEQ ID NO: 146725 - DNA, 5352 bp, Homo sapiens
  misc_feature (1)...(5352): n = a,t,c or g
cgacaggaggcggagcttgcaaggatgggctttgacctgcagaacgtctggatagtctcacacatcaacagcaactacaaattgtgccccagttacccccagaagctgctggttcctgtgtggatcactgacaaagagctggagaacgtggcttccttccgctcctggaagcggattcccgtggttgtgtatagacacttgcgcaatggggctgccatcgcccgctgcagccagccagagatcagctggtggggctggcgcaatgctgatgatgagtacctggtcacgtccattgctaaagcctgtgccctggacccggggacaagggccactgggggctccctcagcaccgggaataatgataccagcgaggcgtgtgatgctgactttgattcttctctgactgcgtgctctggagtggagagcacagcagctcctcaaaagctgctgatcctggatgcgcgatcctacacggcagcagtggccaaccgggccaagggtggaggctgtgaatgtgaagagtactatcccaactgtgaggtcgtgttcatgggaatggccaacatccatgccatccggaacagctttcagtacctccgggctgtgtgtagccagatgccggatcctagcaactggttgtcggcactggagagtaccaaatggctgcagcacttgtcggtgatgctaaaagcagctgtgctggtggctaatacagtagaccgggaaggccggcctgtgctggtacactgctcagatggctgggaccgcacaccgcagatcgtagccctggccaaaatattactggacccatattacaggacgttggagggcttccaagtgttagtggagtctgactggctggattttgggcacaagtttggagatcgctgtggccaccaagagaatgtggaggaccaaaacgaacaatgccctgtgttcctccagtggcttgattctgttcatcagttgcttaagcagttcccctgcctgtttgaatttaatgaagcattcctggtaaaactggtgcaacacacatactcctgcctctacggcaccttcctggccaacaacccctgtgagcgagagaagcgcaacatctacaagcggacctgctctgtgtgggcgctccttcgagctggcaataaaaactttcataacttcctctacacacccagctcagacatggtcctgcatcctgtttgtcatgtccgggccctgcacctctggacagctgtttatctgccagcatcatctccatgcacacttggggaagaaaacatggatctttacctttccccagtggcccagagccaggagttctctggccgctctctggacagattacctaaaaccagatccatggatgatcttctttctgcctgtgacacaagcagccccctgactcgtacatccagtgaccctaacctgaataaccactgtcaggaggtcagggtaggcctggagccctggcacagcaatcctgagggatcagagacaagctttgtggactctggggtaggagggcctcagcaaactgtaggagaagtgggtcttcctcctcctctgcccagcagccagaaagactacttgagcaataaacctttcaagagtcacaaaagctgttctccaagttacaaactgcttaataccgcagtgcctcgggaaatgaagagcaacacctctgatcctgagatcaaagtcctagaagagactaagggaccagctccagacccttctgcccaggatgagctgggtaggactttagatggcataggggagccacctgaacattgtcctgaaacagaagctgtcagtgcactctccaaggtcatttctaacaagtgtgatggagtttgtaattttcctgagtcttcccagaactctcctacaggtacgccccaacaggcccagccagactccatgctaggtgtgccctccaagtgtgttcttgatcacagcctcagcaccgtttgcaacccaccgagtgctgcctgccaaactcctctagacccaagcactgactttcctcaaccaagattcctcagggtctgtggcaagtatctcccaccaggaacaactgagttctgtgccggatctgacccatggggaggaagacattggtaaaagaggaaataataggaatgggcagttattggaaaatcctcgctttgggaaaatgccattggaattggtccggaagccaatttctcagagccagatcagtgagttctcttttctagggtccaactgggacagcttccaagggatggtgacttcattcccaagtggggaggccacccctcggcggctgctttcctatggctgttgtagcaagaggccaaacagtaagcagatgcgggccacagggccctgctttgggggccagtgggctcagagagaaggtgtgaagtcacctgtctgttctagtcattccaatggacattgtactggcccaggaggaaagaaccagatgtggttgtccagtcatccaaagcaagtctctagcacaaagcccgttccactgaactgcccttctccagtgcctcctctgtatttggatgatgatggactcccctttcccacggatgtgatccagcataggttacggcaaatcgaagcagggtacaaacaagaggtggagcagctacgtcgacagagtgcgtgagtttcagagtgaggctggacatccgtcactggtgtgcccctccagcagagccccccatggactatgaggatgattttacatgtttgaaggagtcagatggcagtgatactgaggattttggctctgatcacagtgaagactgcctttcagaagcaagctgggaacctgttgataagaaagagactgaggtgactcgctgggttccagaccatatggcatcacacttgctataactgtgactgtgaattctggttggccaaacgaagacaccattgcagaaattgtgggaatgtattttgtgctggatgctgccacctgaagctgcccattcctgatcagcaactctatgacccagttctcgtctgtaactcatgttacgaacacattcaagtctctcgtgccagggaactcatgagccaacagctgaagaaacccattgctacagcttccagttgaatgccggggagaaacctgtccacttttagcaggtttgaagggaggatcttcttcagttgtagtttggaaggttccttggtgtggctcatgaaatcacagagctcagagataccatcttgagaaatcctccttggtatcatgaaactggagcagaggaattgcaatttagcaggaggtcctctactggtgataccctcaccttggggtaatggtcctaacccagacccagggtctggaaagcttaatgttgagttggtgacctccagcctctttctccctggaggtcacaagatggatggattgcgtagatgttggccttgtgcaaagtgccccaaacagcaatagaaaggacatattgtattaaccaaacttccaagtggataaccagacccatcttctcctccaccttggacaaaagcagatttatagttatacaaggttagggaatttcctgttcctatttgagatgaactatatcctgtacctctgtgctctgtgtctgcatgaaggctcagcctttagaggcactccttctagttgcattagtactgtctttctgtggagtttggtttgaagactggctcagcaagtgggaggtttcaatgtatttttcagttggctcatcagccagcattggtgaatattcagtttaggggaacagttctagggagtgagacattttttgggagcagaggaaaacttctgctgatgatcgttttctggcaaacattggagttattttggagctgttgaagggcagttcgtctctgtttacacagtgggcagctcttgagttatgcactgtgaagaatgagaagggaaaagcaaaaattatccttgtgaaatatctgctgattgtgccctactctttgcacctgacttttcctagttgtcctgggtgctaacacaggagctacaccttgatcctctcctgggcatgaaaataaaaacaaaggtttttcgttgttgttgttccattgcccatttcccccatgtttgtctttcccttgggctgatgcctcctctgggtcacattgcttcttatcctgaacacttgacaccttgagggtagaatttagcgttttggtttttaacctcctaacataagctgtttgggaatgttagggatttcagtaacaaatgctgctgtctatttctgtgcacttaacaatggaacccaaacagaagagaataaagccttgataccaaaattgggaaagaacatgtgtccatttggaccaaacgttgttggtttttaaaaaattttattttgtttttttgtttttgtttttgttttttttcatcttaatatgtaccagtggcacttaaccaaaagatacagtgatatagccatgtactgtgggtgggacagatacagtctccttggcctataatgaaaccactaggactttatacagttttccttaatttgttgacatataaaatggtaaattatatttaggcttatccctgtttggaaaatgatggtagtcatctttcttactgctactttcatgttgcctttctagaaaacagcatttcattccaaaataactaggatctgcatttagaacaagaatcattatttgtcctgaccttttcagtcctacaggagacgcatctgtggttcttttgtacttgccatagatgcaaccctaaaaagttttgggcatatttaggtcagcctagcggaacttttttttttcaatttaaatgggagctgaataatggagattttgtggctgcaaaattcctgagatcattgaaaaagtaacaagctgttccttgtttctgataccataaaattattttaaagccattttaatccaatccattaaaaaatttaaccggccccagttgtgaagtggccttttaaattaaacttgtcctttccattgccaccttcactctgccctgttttcaagggggagtaaggatggggtaacatttggggggagactgtatctgtcctacttaggcgtggcctgttttgagggggactgtcccccatccagtggaaccaaactgcatgggccttggggagagaggactctggggggctcttgggcctccagangtttttcatccaaatactcctttcatgagctgttgtgggtgtaagtgacatgatgtggccaaaaaatccaaactgtgcagttgcgttgtgacaaacatgcaatgtgctgtaaaaattcaatacagtttaaataaaatctctatattagtgctgc

SEQ ID NO: 146726 - DNA, 450 bp, Homo sapiens; identical to SEQ ID NO: 115320

SEQ ID NO: 146727 - DNA, 605 bp, Homo sapiens; identical to SEQ ID NO: 115321
  misc_feature (1)...(605): n = a,t,c or g

SEQ ID NO: 146728 - DNA, 652 bp, Homo sapiens
catctacacgaaaggcaccccggagattgctttctggggaagcaatgctggggtgaaaacaacacggctagaagctcattctgaaatggggagcactgaaattttggaaaaggagaccccagaaaatctcagtaatggtaccagcagcaatgtggaagcagccaaaaggttggccaaacgcctttatcagctggacagattcaaaagatcagatgttgcaaaaccccctttggcagaacaagggaatttacaaactagttgcagaagaatatctgaagttttttgattttacaggaaatgacgctgggatcagtcactcaggtatttctttaaagcattctctcttgtgggagaaactcaagaacgagagagagttttaatacacttcctccaataaatatttttattgtaacccagataccattgcttcacaaaatggagtccattgccttacctgtgcaataatgctttttaaaaccgatttacatggccacgtaagtgtggatttgtgaaacttagatccaaaacatgtcgggcttatttttgcttttatgttcaaacacatttattttttgcctccccgtttcccattctttacatggttcccatggcaggtgaataaaaaaaaatcttttaaaaaaaaaaaaaaaaa

SEQ ID NO: 146729 - DNA, 6486 bp, Homo sapiens
  misc_feature (1)...(6486): n = a,t,c or g
aagaggagcaaactagttgcagaagaatatctgaagttttttgattttacaggaatgacgctggatcagtcactcaggtatttctttaaagcattctctcttgtgggagaaactcaagaacgagagagagttttaatacacttctccaatagatatttttattgtaacccagataccattgcttcacaagatggagtccattgccttacctgtgcaataatgcttcttaataccgatctacatggccacgtgaatattggaaagaagatgacctgtcaggagttcattgcaaatctgcaaggggtaaatgagggtgttgatttctccaaggatctgctgaaagctctgtacaactcaatcaagaatgagaagcttgaatgggcagtagatgatgaagagaaaaaaaagtctccctcagaaagtactgaggagaaagctaacggaacacatccaaagaccatcagtcgtattggaagtactactaacccatttttggacattcctcatgatccaaatgctgctgtgtacaaaagtggattcttggctcggaaaattcatgcagatatggatggaaagaagactccaagaggaaaacgaggatggaaaaccttttatgctgtactgaagggaacagttctttacttgcaaaaggatgaatacaagccagaaaaggccttgtctgaagaggacttgaaaaacgctgtgagtgtgcaccacgcattggcatccaaggccacggactatgagaagaaaccaaacgtgtttaaacttaaaactgccgactggagggtcttgctttttcaaactcagagcccagaggaaatgcaagggtggataaacaaaatcaattgtgtggcagctgtattttctgcaccaccatttccagcagcaatcggctctcagaagaagtttagccgcccacttctgcctgccactacaacaaaactgtctcaggaggagcaactgaagtcacatgaaagtaagctgaagccagatcacccacccgagctggcccgagcaccgctcatatcccccccggacaagaaggtccaaagcccaaggacgtcgatgagtacaaaactgaaagacccactatcctggagtttgagaaaacccgctatgaaatgtatgtcagcattcctcaaggaaggaggcaaagagctactgagtaacgatgaaagcgaggctgcaggactgaagaagtcgcactcgagtccttcgctgaacccggatacttctccaatcactgccaaagtcaagcgtaacgtgtcagagaggaaggatcaccgacctgaaacaccaagcattaagcaaaaagttacttagagtccatctgcggccaggaagtgctggtcatggagcaaaatagggtttttcaagatctttctggtaatccgtgaatatatttaaaaaaaaaaaaagtctgtgacaaaacggtgcattagtaattttttctattgtatatttttgttagtttctgtacagattgtctttgctcttgatttcttttgctttgatgatttttgcaacttgatagctaatgcaccttttctgtgaggaggaggggatcgtgatttcagaatgaattatgtatcccttctcttttggttttctcttgtttgcagtctgctcagttgttttatgtattctcatatcaactgttaaacttttttttaaggttaaagaatttaatccattgtgaaacacttaactggacaaactgtagttttagtaaattctagctggagttaatatacgcctttatatgtgaaatcttgcccagtcacagaggtagaattgagcactcacagatgctccagtaagaatcacagtgctgggaatctagttgctccaatatgaggcagcttcatgtgcagcttagcacttgttgttgagatcggaccctgctggaagcagggaaaagaagcgtgaagatcgtaggattgagaacttagggaagcacatttagcttgctttgaagtgctgatttccattttcagccaagcaagggaaagaggaagtggagtcattttgcctttgaaggctgaggaaagattgatacccagttaattttgtttgctaaaggatgggggcaataatcggcccttgaggagctgcagcagtaggcatgtgctcagtctgcaggaattgttacctcactcccacagggtctagactagaaatccatcatctctatcgttgatatccttccatccaggaatagatttttcttactctacatatgtgtgtgtgcgtgcgtgtgtgtgcgtgtgtgggcatggggttgtgtcctggttgtgatattgaggtcttccttccctaacaaattaatactaaaatgaaacagcttttcttgtggccttaagaccaaataaggaaggaaaacgtagctgcagttgtccacgatggatattggttctttaaaatatatctgaaagtagtagtcagaatgaattatggttggaaaactgaggaatcttctggttgcaggtgcaaagtgactttgtttattcttgtctcagtctccttgatagccacttcactctgctactactcaactttctcctaaaaatacttcatctattttcagtcctttctttctgtctactcaaaatggttctattaactttgcagtcatgagcttgttccagttacagtccctttgaagttcagggtgataaacagaatattcttctgtagaggaagagaaaggagtgaaagtttagcccactgagacctagagctttgtgatttccttaacctggaaactctgtaatcccctaaagttaaaatctccgcaagtggcacaacttcagaactaatagtatcactttgatttttctttttcctcccttagaaagtttctcgtagttctatagtttatttgttgaaggtactatgaccaaagaatcagctgctctacaggaatagcatggttccagtgaattagagaaaacctgctgtaaagccatggtagtgtctaagtggtatgttattatgatgtactagcatttatttacagaattatttattaacgtttacttccttcccctctgtaaatgtccatgactattgcccagagaaggcttacccctctctagggttgcagttgctttctttgtaataagtattttgccacacctgtaaaaaaaaaaaacctcacttttaactctctgccttgtttgggtaaaggcagtaactaagtttatgtttcagaactgcaaaacaaacaggatagttaccaatatggcccatgtattcagattggatttttgtagcctctcactggaatccaacatatccacaagcaagttatctgtctttctacctgataatctaaattatcaggatatttgttttctgcccaaatgttttatactaagccgaggggaggagaggtacccaggaccatgtcatctacaagcttcagtaactaaagaaaaaggaacttccctgaggtggcttgaatgtgtttgcccacagtctatatctatgtatatagaaaggctgtatgtattttacttatttaatatacattgaatggcaccttgctacagtatttctgacatttaaagaagagctgaaatactcggctagcatcagcaccactatagcactgtccgtgtcatatgagtcactaatattaactccagggacttctggataggctaatagatcattggatacgaagggctcttttgaagcttcagtataccatgtttgcatagtttatctttaaaaacaactttaaaggttcttttgtgagccaggatctcagactgccgtagcatgatgctgtccatctttagcgcatgggctgagaacacctcttccctgaggcttctgaaggttgctgtctgtcatgagtgcatgaaggaggccaagagtttatgctatgggaggaaccagtcactgatttgcctagattctgagagtctggcccatagccaaccacattttcctttgggataatttatttcctgtggcatctagccagaagaaattgaggatgtttcctttcacaggctgctccaagcctgttagcccaattcacggtacaagggagcaccccttccctttcctctgaaggtacgccacccacctccgtcgcccacctcagcgcccagggagccttgggacttccttccatatgataaatcattcttctttcacgtcaataacacttcatattaatttctagttacagaaaatcttggacagctatcaggaatgccttgggtcatagtgttgttggcaaaattggaccattacaggtgggcccatgtataaaatctgaattttagggggttttgttccccacctcgcatgctggcttttacagggaggtgtctgggattcctcattagcaatcaaaacttaattactgggatgcagagtccttactttatcgccagcccgtaggcatttctgaagtgcacttttttgaaacatcattttgctaactctcagcagtgtctaattaaactgagcaatacttttgtgaattttaattaatctcaggcaaaaccatgatggggagagagtcctctgatgggaaatgtagtcccggggatttatgtgttaacctttttattggctcttaggatggcaggagggataggaaagcattttttggtgcagtggtcttgtggcaaacacaagaccctctatgcgtctccaactgttatcctaatctaggaaaatgaggactgggcccctggggaaaaagtgacatgagggaatttactctgggaagagggaaaatctgggtggctttccaaggctaagataggtttgtatttcaccctgtggccaagctacagaacttctgagattgtggaagaatttttgcaaccagcagggaaagaggcctcttactgcctaaacacaaagttacactgagcttttctactgtcctttgcctattgctccctctatccatgtaaagatctgggaaggatgagaggcagggcctgcttgtcatggagctgcactcttttctttttaactaatcattgacaattggaagaaaattgaccgttaaagaagtttctcccattgtcttacttaacaaaacctttttggggtttcattaattggtccttggaaaattgagttccctttgggcaatttttcccttgcaagtcaaccagttaagcatgttgcatcctgaattccaccagaagtttagctttgcaggtttgaatccccggtaatttaactccccgtggacttggtcgagttttcagcaggttggggagccacctctcctcaattcagcagtgagtcatccccttgacttttcaaatgacagaattttttccaaattgtaaaattaggcactgtaaaacaaaggaccaaagtgggcatcctaagggttgtttaaacctggaaggtctagtttatgagggattgtccaagttgggagtttaaataggtatctggcttttgtctcaaagcatctaagttattctgacagaaaatggtaagtcagctttgcaggcagatgcgcctctgggcctcctaccttgctccacagctttctggccatcttgtctcccagggccatgccactgcttctgccacatgtcaggcaaatttctttccaccagtcttattaggcatcttacatggatcaaatcattcacagaataaccccgtgatagattattgatagcaatagagaggggcggctttgtcactgatttttctctcagattccttttccatctctcatccataaaggaaggactgaaatccaaaggcattctccttttgtacctacagtatccagaacccacgtggggcagccttctgcttaatgnacaataattgggccattgcatgcagagagaatgtcttcatagagagaatgtccattaaataccttgaatctgcatgaccagtttgacttgaatgcaacagcagggaaaattttgcaagttaccataattgtatataccagtaggttttcttaagtctcttcggttcatcctttgtaatttgtgtgtgtatcctgtagtattgccaggcttttggagactattcttacaggccagtatgtcagtcatcaaagaaaatgctgtcacctgcccattgttgtatttgtgggtatttaatagttgtaatggtatgtaaaatgccatccagtgtgtagattgccatatccagtgtaatggtacatgtaccatcaaaattatttttgtcccttaatcagtgtgatatggaaaagcaagtacaacctcataggactgattatataatgaagttgttgagagtatatatagtggtattgttttattaaacttaaactcaaataatattttgattaaaatttttaataagactttatgctagaaaattctttgagctttgaatcaccagggcaaaaatgactttcaactaaccttgtgaatcttttgcagtgtactgtgtgcaataccaagggcatagctccctgtaatttgggaaatacagaaagaaaag

SEQ ID NO: 146730 - DNA, 413 bp, Homo sapiens
gcttcccgcatagggcagggcccatcctaagcagctttcaagtcccacaaaggtggcttgtgggaggatttggaaggaattgcattgcgggcggtgagagtgtggtgtgggatcgtaccaacaagtacactaggaactgagcccaggaatgggggatgttctcctggagtttggatggtcacctgggagagtccatcatcaggggaagatcaaacacaggtgcactcagctgcccatggcctctgggacacttgccttgactagcaacttgccttgaacatcacgatgaaagcagcaagtgctgtggtctatcacaattgatttttatttgactctgtggctctaagactgccttgaaccgcctgaggcctatgcatctgaacaagtgggtctctcccttgagcaccaagagt

SEQ ID NO: 146731 - DNA, 4024 bp, Homo sapiens
  misc_feature (1)...(4024): n = a,t,c or g
ctatccagcacaagcctctgcttctccttctttcttctttgttcttccttctccctctccctctccttccctttccttccctttttccttccttccttccttccctccttcccttttctttctttctctttctttcttttctttctttttcttctgcttctgcttcctcctcctcatcttcctcctcctcctcttcctcctcttcctcttcttcttcttcctctccttcttcttcttctccttcttcttcttattcttcttcttgttctccttgttcttcttcttgttcttcttgttcttcttcttgttcttgttcctcttcctcttcttcttcttcttcttcttcttcttcttcttcttcttcttcttcttcttcttcttcttcttcttcctactttcttctttcttctttttcgagacaggtcttgctctgtcacccaagctagttttgctgctgttgaatgtaagaactgccagcaatagcgactggtgctgaattcctggtataacactgctccttattccatcctcattccacttctgagcctgctccttcaatggggcaaaggtgtccagggcagtttgcttctcttttcttaagagtcgaagaaagtcctgggctttgctctgattggatggcctactgatggccagctgagtggcctgttgattggctgaagcttgcatcaggtgcctatccaaagaccaatcgtgcccatttcctgcattttccattcccacaatgttgtacttgcagaacaggtgcaagaacaatacaagcatgagaatcgcttgaaccttgggcagtatggccattttcacgatactgattcttcctacccatgagcatggaatgttcttccatttgtttgtatcctcttttatttcattgagcagtcgtttgtagttctccttgaagaggtccttcacatcccttgtaagttggattcctaggtattttattctctgattgccctggccagaacttccaacacggatccggaagtggattgcgagccaggaggaggaagccggcggtggccccgtcagcagccggctgctgagaggccggtaggcggcggcggtcccgaggggcggcggccgcgctgctccctgagaacgggtcccgcagctgggcaggcgggcggcctgagggccgggagccattgaaagctgtacagcctcagcgtcctctacaaaggcgaggccaaggtggtgctgctcaaacccgccatacgatgtgtcttccttcagctttttcccaaagacccaccgttcaggaaattcatgaccttcacgagtcaactgattgtggagcgctccatcgaaaaggcactagagcttctgtcaaagaacaagactatctgtgccacgtctacgtccggaatgatagtcttgcaggtgggtggtcattgctgacaatgaatacccatcccggggtgggccttttaccttgctgggagaaggtactagatgaattctcccaagcaaagtcgcacaggatagactgggccagtagggatcccctggctaacaatccattacccagccctggatggtcacctcagtagataccagaacccacgagaaagctgatcccatgactaaagtgcaggccgaactagatgagaccaaaatcattctgcacaacaccccatgggagtctctgttagagcgaggtgagaagctagatgacttggtgtccaaatccgaggtgctgggaacacagtctaaagccttctataaaactgcccggaaacaaaactcatgctgtgccatcatgtgatgcagcctgccagaggcccaatgctggaatggcaccatcattcacatcagaactgcagcccctggaaaagaagagacagccatagacgaggagccagagtgggggcagactggccatttttattttgaagttcctgcgagaaatggatggtggaagggtggcgaatgttcaaattcatatgtgtggtagtgattcttggaaagaatttgaggtccccaaaggtgtatttttgggcaaatgaaaccataaactccgactggcttctgtagatgccaaagggctctttttcagctaaccctgggaaggctctgtggggagggaggtcggagccagctgtttctcgatctttggtatatctttggatcttatttgtacattaatgatattaacactccagtggggggtggggagtccctgatgctagggctggggtgggtggagtttgaagactcttgggaaagcctctcctggggccactgttgggggtgggagtgagcccaccacagaggccacaggcaggcccccacttcaggcccaaggcctggggcggggggaacagtcactgggtctcagattctgagactgttgtttagcttacctttctgctaggattggcttcccgcagagggcagggccattcctaagcagcttccaagtcccacaaaggtggcttgtggggaggatttggaaggagctgcattgtggggcggggagtgtgtggggttgggttcgtaccagcaagtaagactaaggaacctgagcccagggaaagggggattttttcctggagtttggatggtcagcttgggaagtttccatcattcaggggaagatcaaacacaggttgcattcagctgcccagggcctctgggacacttgccttgacttgcaactttgcctttgaacattcacgatcaaagcagcaggtgctgtggtctctcaaaatttgatttttatttgactctgtggctctaagactgccttgaaccgcctgaggcatatgcatctgaacaagtgggtctctcccttgagcaccaggagtgggtgccagccggccccgagggattccccagcaccccacctatggtcttgccagcataaggctttgctagttccttcttgggtcagaggtaagctgcaagagggggggaaggccaagggtttggtctaagctgtgcccctggcaacctggcaggacggcccactcacttgcccaagtcatggcaacaggctggagcagcccaggagatgggcctaaaatgttctggaatcccttgggtccctagtgttatgttccagtcttcccaccttgttgctcaggatgcagccctgggatccagcacccatggaagcttctgctggggatggtgtcacctatgggttttgaaccagtgtgggtatggtccttgggagctctgccttggagcttgccacactggctgagagcacccactgttcctgaccagagtttcagtggttcctgacccccaatgttggggcaggggctgggcaggagggtggggtctgctgtgggttcagaggactccacctcctgggctggtttaccctgctgctgcccattttctctgggtactgctggcccagaggactttgagcctgaccccctgaaagagcctgtccatgtcattttccttactgcccatagattacccctaaagcccccagggccccttgaggccccagactcagcctgcccaactggtgcccggagacggaagtggaagtgggccttggatccgagggatgcttacctctccctttccccacttgaggaccctggggagagatgggggcggggaaaatggaggtatgaattttggggtaagaggaagtgagatctccgcttgccaggtcagccccctgccttgcaagcggggcttggctttgactcaggccctgtgagatagagggcccagcccagccccacccacagatcccctgctcctgttgtgttctgttgtaaatcatttggcgagactgtattttagtaactgctgcctaacttccctgtgttctatttgagaggcgcctgtctggataaagttgtcttgaaatttnnnnnnnnnnnnnnnnnnnnnggggggcccgttttaaaggatcaaggtttacttccccgggctgtgcaaggataagtttttctttaggggcccctaaattcatttcatggcccggggtttaacaccgcgggaacgggagaaaaccttggggttccccaat

SEQ ID NO: 146732 - DNA, 817 bp, Homo sapiens
gagggggaattgggtttttttacatacaactgagttttcgcttacacgttctttaatttcttttaattcctgtttcatcaccaggctggaatgtagtggtgcaataacagctcactgtagcctcgacctcctgggctcaagccatccccaacctcaccctcccgagtagctgggaccacaggcgtgtgccaccacactcagctaatttatttaaaacaattttttttagagatgaggtctccctttgttgcccagctggtctgaaattcctggtttcaagtgaccctcacacgtcagcctcctaaagagtgaagttataagcatgaaccattgtggccagcggtgggactgatccttacaaaggtcttgtgtgcttcttatctctcttggaaccacgtcatggccatgaaaacaagctcaagctagcctactgaaggatacaagaaccatagaggaagctgagtcactttagctgaggccataatagactgattcagccctgccaacaacatggatggcagatgcttgatcgggccccagaaagttcatcagaaatggagtgagtcaaggtcaccaataactgatcagctgaaccatggactcaggaaaaattttttttaaaggtagttgtttgttttgttttttaacataccagtagctacatagcccatattgcaaatgacatcaaattggacagaatggttactgggttgtaattttggaatgacggattctaagtatcaagaagaatctgaatgggaacaaatgtataattctcatgaagtgctgtacttgattaaaaactcaatacaaaact

SEQ ID NO: 146733 - DNA, 376 bp, Homo sapiens
tttcgagtgggtgcgcacgctctgtccctgcgtgacctttcgaccccgctgtcctcaccgcaaaggcggctgtgagggccctggtggcctcgaggctcgctgcggcatctgcattcacgtccctgtcccccggcggtcggacgccttcccagcgcgcagcccttcacctctccgtgccgcgccccgcggccagggtcgcgctggatcctggtgcacctgagccgtggaggggctgaagtccagatctttgctcctgacgtccctcagatgcacgtgattgaccacaccaaggggcagccgtccgaaggcgagagcaggtgtgggggtgggattggaacttgcttcttgtctacctcccacggagcagccttttttt

SEQ ID NO: 146734 - DNA, 754 bp, Homo sapiens
ggctcgctgcggcatctgcattcacgcccctttgccccgtttgtcgtacgccttcccagcgcgcagcccttcacctctgcgtgccgcgccccgcgggcagggtctcgctggtgctgtctggatgcggagtctacaatgggaccgatatccatgaggcctctgcgatcctggtgcacctgagccgtggaggggctgaagtccagatctttgctcctgacgttcctcacatgcacgtgaatgaccacaccaaggggcagccgtccgaaggcgagagcatgaatgttttgaccgatgtctgagaggatacgccgtggcaaaatcacagacctggccaacctcagtgcagccaaccatgatgctgccatctttccaggaggctttggagcggctaaaaacctgagcacgtttgccgtggacgggaaagattgcaaggtgaataaagaagtggagcgtgtcctgaaggagttccaccaggccgggaagcccatcggtcactcacttaaggacctgcctggtcactgtccagggaggcccctaaagtggagcctcaggaagaggtgcaggctcagagctcctgaaggaggtccctgctgcagccgtgtcacagccggggtgaaggtttcgcccatggtctccacctcgggatcccgtccttgtcagagaagtgttccttggatgagcgcccagagggaggagcccatggccctttcttctgtgactgattaaaaatctcgatgaaacaagaaaaaaaaaa

SEQ ID NO: 146735 - DNA, 1898 bp, Homo sapiens
  misc_feature (1)...(1898): n = a,t,c or g
ttccccactatcttgcaaggattggcagtaaagtcctagtgatggacaacgcggcagtggggaaagtgacagccgtggctagatcatcagatgtgtctgtagaatccggcgcagtcccgacgagcaacgcgtttgtagaggggtgggtgcgcacgctctgtccctgcgtgaccttccgaccccgctgtcctcaccgcaatggcggctgtgagggccctggtggcctcgaggctcgctgcggcatctgcattcacgtccctgtcccccggcggtcggacgccttcccagcgcgcagcccttcacctctccgtgccgcgccccgcggccagggtcgcgctggtgctgtctggatgcggagtctacgatgggaccgagatccacgaggcctcggctgatcctggagcacctgagccgcggaagggctgaagaccatatctttgctcctgacgtccctcacatgcacgtgattgaccacaccaaggggcagcccgtccgaaggcgagagcaggaatgttttgaccgagtctgcgaggatcgcccgtggcaaaatcacagacctggccaacctcagtgcagccaaccatgatgcttgccatctttccagggagggttttggagcggctaaaaacctgagcacgttttgccgttggacgggaaagatttgcaaggtgaataaagaagtggagcgtgtcctgaaggagtttccaccagggccgggaagcccatcggcttgtgctgcattgcacctgtcctcgcggccaaggtgctcaaaggcgtcgaggtgactgtgggccacgagcaggaggaaggtggcaagtgggccttatgccgggaccgcagaggccatcttggccctgggtgccaagcactgcgtgaaaggaagtggtcgaagcgtcacggtggaccagaaaaacaaggtggtcacgaccccagccttcattgtgcgagacggcactccactacatccatgatggggatcggagccatggtgaggaaggtgctggaactcactggaaagtgacagcgcatggacggggcccagctaggcgccaggactttgtctcacccctttggctgaagagctgaccgctgctttccatccaagctgggaagtctggcaggcccttttttttttttttctttgccgaaacctgcaaggcgttctctctctaaggaggatgtgctgcagtgcatggggggatgtttcttcctggggtgtggctgggctgctctcacatacagaggccgaggggcaaatttcgttcttttgccacaggggacttgcctcactgtggtcccaaaaacaaatcgcagccagcttttccagaaataggaaaattctgcccgtctgaggttttaatacttcaggttaagttagtttttgggaagggaagaacattttttagggttttgcaaagcctccctgatcagggaaaccaggaaatacccacattttatggggaccctggaaagggttgggttcttggacttctggaagggggactttttgaggttaattcagccgtaagggggatttcttaaagcagggcaatccctgtagccgcagagaataaacgcccttccccaaaatggcaacttcccccanagcccacatttcaaacctgcctgagactgcctgagtgaggaatggcagtgaggtttcttcaatttagtctcgagttctctttaattttcagggaagaaagggaaattgcagctccctcagcccccaggatttgacctctgggggagtgatggtagcgttggccccagccccgtggtttcaggtttggcagaagcttgcagatgcgtccgaagggaaataaagtgtgttgacaaaaaaaaaaaaaaaaaaaaaaaaagtcgtattcgatgtcgaagcgatcatgatgattgat

SEQ ID NO: 146736 - DNA, 844 bp, Homo sapiens
atccaataccggagtgacttggaactccattctatcactatgaagaagggcggtgttcttttcctcttgggcatcatcttgctggttctgattgcagcgcatggaaccccagtagtgagaaagggtcgctgttcctgcatcatcaccaaccaagggactatccacctacaatccttgaaagaccttaaaccatttggcccaagcccttcctgccaaaaaattgacatcattgctacactgaagaatggaatccagacatgtttaaacccagattcagcagatagtgaaggaactgattaaaaagtgggagaaacaggtcagccaaaagaaaaagcaaaagaatgggaaaaaacatcaaaaaaagaaagttctgaaagtacgaaaatctcaacgttctcgtcaaaagaagactacatgagagaccactatcaccaataagtattctgtgttaaaaatgttctattttaattataccgctatcattccaaaggaggatggcatataatacaaaggcttattaatttgactagaaaatttaaaacatatactctgaaatagtaactaaagttagaaagtagattttaagaatacaaacgttaagaatagtcaaaggctatgattgtacttagtccttctaccaaccaccagttgaatttcatcatgcttaaggccatgattttagcaatacccatgtctacacagatgttcacccaaccacatcccactcacaacagctgcctggaagagcagccctaggcttccacgtactgcagcctccagagagtatctgaggcacatgtcagcaagtcctaagcctgttagcatgctggtgagccaagcagtt

SEQ ID NO: 146737 - DNA, 758 bp, Homo sapiens
  misc_feature (1)...(758): n = a,t,c or g
ccgagttacccttgcggcgcacgcctccctggacaagttcctggcttctgttagcaccgtgctgacctccaaataccgttaagctggagcctcgggggccatgcttcttgccccttgggcctccccccagcccctcctccccttcctgcacccgtacccccgtggtctttgaataaagtctgagtgggcggcnnnnnnnnnnnnnnnnnnnnnnnnnnnnnnnnnnnnnnnnnnnnnnnnnnnnnnnnnnnnnnnnnnnnnnnnnnnnnnnnnnggggggggccgnnnnnnnnnnnnnngggggggggattatttttnnnnnnnnnnnnnnnttaaaaaaaaagggggggggaaaaaaaaccccgggccccnnnnnnnnnntggggggggaaaaaaaannttttttgtattataagataagtacaacacacactccctaagtcctggtatcactatctttgatgcatacctagcccggcccaaatattatatgttttaacaaatcacaaatataaaagttttactttaagaatttgtaaaccattgggtgtcctttcactatgaagcacttctgccaaaaaaaattcttttggtgatatctaaaaaccgtaacttctagtcgttgaaaaaaaaccctccatatgatcaaattctctcttcctagtgcatttttcctaaaaaccgtcaaaataaaattcataattaactatttatttatcgtcccttagtagttcggatcacctattacaaatataact

SEQ ID NO: 146738 - DNA, 240 bp, Homo sapiens
gctcctaagccactgcctgctggtgaccctggccgggcacctccccgccgagttcacccctgcggtgcacgcctccctggacaagttcctggcttctgtgagcaccgtgctgacctccaaataccgttaagctggagcctcggtggccatgcttcttgccccttgggcctccccccagcccctcctccccttcctgcacccgtacccccgtggtctttgaataaagtctgagtgggcggc

SEQ ID NO: 146739 - DNA, 863 bp, Homo sapiens
  misc_feature (1)...(863): n = a,t,c or g
aggcctagaattcggcacgagccacagactcagagagaacccaccatggtgctgtctcctgcccgacaagaccaaagcccaacgccccccgcggctaaagctcggcgccacgcctggcgagtatggtggcgagcccctggagaggaatggtcctgttccctccccccacacccaagccttacttcccgcacttcgaacctgagccacggtttctgcccaggttaaaggggccacggcaaagaaggtggccgaacgcgctgaccaaagccgtggcgcacgtggacggacatgcccaaacggcgctgtccgccctgagcgacctgcacggcgcacaagctttcgggtgggacccggttcaactttcaagcttccttaagccacttgccttgcttgggtgaaccctgggccggcccaccttccccggccgagtttcaccccctggcggttgcacgccttccctggggacaaagtttcctgggctttttgttgaagcaccgttgcttgaaccttccaaattaccgttaaagcttggaagccttcggttgggcaatgctttctttggccctttgggcctttcccccagcccctcctcccctttcctgcacccgtacccccgtggtctttgaaataaagtcttgagtgggcggcatancttaatgcaagaaagttccttgcgaaatacccgtaagacataatggagcaggctgtgaaaaaagttaattatggttggggcgggtttttggaagaaaaagaatttttgtctcggggggtggggggaagaaataatttttttttgggggtcnnnnnnnnnnntatgggggggcggggtgtgttgcacacagtaagggggggaaaaataaact

SEQ ID NO: 146740 - DNA, 783 bp, Homo sapiens
gttgaatccacagacataagagcccatggatatggagggccaactgtataatgtaaaaaaattccttctcatgcgctagtttccagttttcatcctttgtagataaccaggggcaacagtttgatataggtcttttcacctctctttgtgtgcatatacaagtaattatttgcagatttgtctgcatattcagaatttaaaaattacacttttttttagcagctttagatgtacagaaatttgagccgatagcacagaaagttcccatattcccttcccttccctcgtttctcctattgcaaacatcttgcattaatttggcacatttattgcatttgatgagcccatatcaatatgttgttatttattggtctatagtttacatagggcttattctttgtgttgcagtttttttttttgttttgttttgtttttttaagatctcactctgtatctcaggctggagtgcactggtgccgtcatggctctgcagcctcgacctcccgggctcaagcgatcctcccaccttagcctcccaaagtgttaggggttacagacatgagccactgcacttgggccgagagttatttttttacaaaaatgggatcaagcccagtggtggcttgcgcctgtagttccagctacttgggaggttgaggtggggaggattgcttgagggttagggagtttggagacccagtctgggggaacacaggcatgactctgaccagtctgggcaacaccgcatgactctgtctcttaaaaaaaaaaaaaaaaagatct

SEQ ID NO: 146741 - DNA, 734 bp, Homo sapiens
ggcacgagtttgcagtgagagagttacttagggtctctagtcttttctactgacaaggagtctaatttagataggctaatgtttgtgaacagttgggtctgtgatgtacagtggaaaaacagattccatactttagctgaggaagctcgaaagaagctacccctaagctatggctatggcaggcactgttgaggccctgaccactatgccctcagcccacctgcacttgtctgcagctgaggctagtcccaggcaggctgaatttcttgcctgaacatttccctctaggagctaggctgaatacaggtgtatcctgtaagaagtttggacgtggagttgattctgtgctcaaccctcagccaaggagggacgggagttgatagataaatgctccacctcgctgtccccagttgtgtcacttctgaggtgtgtgccatggagtgcctcaaagggttccagcaggaccatgccctggatgtccaagaggtaacttgctcattcatgcaccctcaaacaggcctgggactacttctcaaataaacgacccgcagccttttctcaggatctgcttttgggggagccctaagacaccatcacatagacataaatctttttttttctaaactccaaataatataatcaggctctatggatttttaagccaaggaatcaatctttccatgtgagttttccttgctataatacagaaacaacttctctttgaatttagcttt

SEQ ID NO: 146742 - DNA, 575 bp, Homo sapiens
  misc_feature (1)...(575): n = a,t,c or g
ctcagaagctgcttgctctgcccncaggacaggagcttgacggatgaagtgcagccagccacncaggtgccatttccagtctgacttccagaaatgtgcaccatgtcctagagcacagacccattggctggagcctcctgggagggttcaaaccatcagctctatgagaaatgcccagaaaggctttgccgactccatccgtctgtggaggctgcctgcctccggggtgggatgggtggtttctcctgagggtgcaggggatccttctcatctcctggaccctccagggcactctgctccctattccccagctcctaggcagctgagccgggtcccttaggggaggtgaccaggagctttggtgcagggagctcttggtggggcaaagggctggacccctgccaggtctgtggacatggttatatgcccgggagaggggggtgcagggccccagggatggcccccaatcccacctctgtttattctgtaaactgcaacctataaataacctttagcattcctattgtaacaaaattaatttttatgaaataaattatatttcatagtctaataaa

SEQ ID NO: 146743 - DNA, 3024 bp, Homo sapiens
gattatttggataagtcctttttaagaaaaaaaaaagaaaatgaaaaacaacacaaaaaaaatagaaaactcttttcttgagtgtggatgagaatgggcacgctcacacttctggccaggagtgaatgtgccttgtgtgtgtgtgtgtgtgtacatgtacgcgtgtgcattgaggagagagagactgaacagagagtactttgctgctaacgaatccatcttggactaaattctgacaaggcctcagtttccccagttgtgcagggagtaggtcagacagggttttcactgtctagatttagctggttagattttcctctaaaatcttaagcagatgctgaatccataaagccaaggagtgctgagggctggagtgggtgggccctccctcccacagccccagggagatacatctggactcctgggaatctggattaagaaagttgggatgaaagaggaggactgctcaggccagttgtgagccagggagaatgttccagtctggttttggtctggtggctcctagaaagggatgtggcccagaagtgggactcaaacagagagatgaagtaggggaggggagtcctccacgggcatctctctcctggcggctggatagctttaccctagggtggggccagccctgacaccctcatcccctcctcagcccagcagcctctagagcagcgtggtgctctcttgatggccaggaatccagaatctgcccttccccaaccttggtttctccttctgtaaagcagagtgatggctgagaagtcctctctagctgcagaagcctgagcttcccggtgtcagtcagctctgcaacgtgggagccttggaggcgggtggcctggctgtgcttcatatgcccaggagtggagaaggaggctgagaagctggtttcccagctctgatctccacaggcacctcctataaccctcctctcacccaccccgctacggtctgagagatctgaaataacctttcccagtgggcagggttgccagggttgaggggacagcacataccacccccacccaacctgttcgaggggccctgcatggcacgggatgagtccctgccctgtgcagctgcctggcagtggctgggacaaggatcttgcagccagcacagaggcctcttcaaaggcctctccctcttggcactccaggcaaggcaggtgcccgcttccccaacacctccaggcagtgaccctagggcatgccccagcaggtctccgagcagccactgggacccgtctcagcacatcctggcctttgaaagtctgatatcctgagaggagggcaggttttagggccgcagttccagccagcgtccccagcctggcttccctgccatggactcagtagctcgtggggcttcttaccacccaccagccccgctggggtgcggcctggctgtgggcaaaggaggacttgcctggagatttgagagaagattccttctaccagggctgctgaggggccaggcctgcatcaggggctaggctctggctgggcccggaggctgagactaaggctttcgaccctggtgcctccatgtggatgctgcctcagacaaaggcagtgagccttccctgccaaagtgcccatcccatgggctcggcctcactggtcactgttagcccatgaacacgtgtgggcctcggtcacgtggctttgagggcagtctgaccaggctagaccacacgtgccgtgacagggggtgccattcccctcgcaggctctaatgtgcccacatgtagcctggcagtccaaagaccaagaatcaacttgcaaatctgccattaaactgctgtgcgacttcaggcatatcactgccttctctgggcttcagtgtccttttcatacctagaagtctgcggtctgaggctctttgggttcagacacactgttctaggcttctgtaggggaccttgtgatctgccgtgcccctcctccctgttcttttctgtcctccccaccccaccctcagaagctgcttgctctgcccccaggacaggagcttgacggatgaagtgcagccagccacccaggtgccatttccagtctgacttccagaaatgtgcaccatgtcctagagcacagacccattggctggagcctcctgggagggttcaaaccatcagctctatgagaaatgcccagaaaggctttgccgactccatccgtctgtggaggctgcctgcctccggggtgggatgggtggtttctcctccaattcagacccaagaggtagcccccgagggcatgtacctggtgggaagcagctcaggtacccttgggggttgcagggcccttacgcaggtatttctctctctctcctctctggggtgcgtgtgtgcgtgcgcgtgtgcgtgcctatgcttttctctgtgggcacatcaggatgtttcctcgtagagcatgtgcaacgtgtcccaacctgaagcgagcgtgtgtgtgtgctcctctgcgtcccaggtttggaacgtctagggtttggtgtgcctgtcttctgccctcccctgagcccacagggtcagtcaatgtaatcttctacgtgcctctcccttctggccttctctcaacaagtgcccccggctccagagcttcaggggtaggggttctccttgagggtgcaaggggatccttctcatctccctggaccctcccagggcacttctggtccctattccccagctccttaggcagcttgagccggtgtcccttagggaaaggtgaccaggaagctttggtgcagggagctcttggttggggacaaagggcttggacccctgcacagtgttctgtggacaatggttaatatgcccgggaagaggggggtgacagggcccacagggtatggcccccaatttcccacctctgtttattctgtaaactgcaacctatttaaataacctttagccattccctattgtaacaaaattaatttttatgaaataaattatatttcctagtctaataaaatccgggttgcatttaaaaaaaaaaaaaaaaa

SEQ ID NO: 146744 - DNA, 1481 bp, Homo sapiens
cgacttttttttttttttttttcaataatctcaattccaatttttattagtcattctatgtacattgataccaagtcctgaaaactgataaaaacatgtccagaatttctttttttccttttctgagaaagggtcttgccctctcacctaggatggagtgtagtggtgcaatcacagctcactgcagcctcagaatctcccagtctcaagtgatcctctcatgtcagtctcctgagtagctggggactacagggcacatgccatcacacccaactaatttttttattttttgtaggagatgaggggctatgttgcccaggggttaggtcttgaactctggggacttgaaggcaatcctccctgccctcagccctcccaaagtgttggggggattataggggcatgaggcacaggactggggcccatgggtttccttatacagtcaatgttacaaatgccccatttaatattttggccacaataatgaaaataaaaataacaattatagcaacatacaaatatgtacaaagattcccagacagactttgttttttggcttataacaatgtgtagatactacacaaagaatgaggatgtaattttcatttacaagcaaaatgtgaccaaaatcccttttcttcttaaaattgaaaaatgaaattcttgagaatactaattagtgacggccaaatcttagactattttaaattagccatggttaaacataggtgagttaaacattgtgccctttcccaaaattaaggtttgcagttaggaaacataaacatttgaataaaaacttcctcaaaattaattatgaagtggccttattccatgtccctttggattcccagacacacactagaaaaagtaaacgttaaagaggtgatattttggaaagcatcccctagtactgaaaagcatccctagcactgaaaaaagcatccctagtactgaaaagcatccctaacactgaaaaaagcatccctagtactgaaaaacatcttcaggagtactcagtactccctagtacatccctagtactgaaaaaagcatccctaatactgaaaagcatccctagtactaaaaaacatcttcaggagtacccagtggtcaaacaatagcaggaaattcatgatgccttacaaatactgagaccaaagtgggggaagtaataagcagttattttcctgatgtattaaatatattagaattatgaggcatgagatgatatttatgtgatttttaaaaggtttaaaatattcttagggactcaattagatattgagaatgactgataactatgatctcaaaaacagtatatcacacataatcatggtgttaccttactaatagaaatttagtttttaataactaactgaattttattttactggcttcagaagcagctgcctattttgagaactacatgagttaatacgatcatatataattacgttaatgtcacagaaaaaaaaatg

SEQ ID NO: 146745 - DNA, 492 bp, Homo sapiens; identical to SEQ ID NO: 145434

SEQ ID NO: 146746 - DNA, 500 bp, Homo sapiens
tctacaccagcgtggtggaattcggcggcttccaggtgggcgcgcaaggccgtggtcctgctttgtgcctttgacttgctgctgctgctgctactgctaccagcggctgggtcctgcgcggccgaaggctcgcccgggacgcccgacgagtctaccccacctccccggaagaagaagaaggatattcgcgattacgatgatgcagacttggcgcgtcttctggagcaatgggagacccctgagcccctttcagtgctgcctgaggtgccctctacctgtgcctgcctctcgtatgtcagaatgatttggacctgtttttgccacctcagcccccatgctctaggctaaacgagttgggcctccagacaaacagggcctgggaggaaaagagagtcctgcttcctgcctggcttccccatctgcgaggtgagttgaagtgacagcctcctgacagcttataaatgtggaggacgcagcaagttctggacatggccagccat

SEQ ID NO: 146747 - DNA, 4235 bp, Homo sapiens
gacgtggaattccggcttccaggtgggcgcgcaaggccgtggtcctgctttgtgcctctgacctgctgctgttgctgctactgctaccaccggctggggtctgggcgggccgaaggctcgcccgggacgcccggacgagtttacccccacctccccggaagaagaagaaggatattcgcgattccaatgatgcagacatggcgcgtcttctggagcacctgggagaaacacgatgacatttgaagaaggagatcttccagagcacaagagaccttcagcacctgtcgacttctcaaagatagacccgggcatagcctgaaagcatattgaaaatgacgaaaaaagggaagacttctcatgatgtttgtcactgtatcaggaagccctactgagaaggagacagaggaaattacgagcctctggcagggccagccttttcaatgccaactatgacgtccagaggttcattgtgggatcagaccgtgctatcttcatgcttcgcgatgggagctacgcctgggagatcaaggactttttggtcggtcaagacaggtgtgctgatgtaactctggagggccaggtgtaccccggcaaaggaggaggaagcaaagagaaaaataaaacaaagcaagacaagggcaaaaaaaagaaggaaggagatctgaaatctcggtcttccaaggaagaaaatcgagctgggaataaaagagaagacctgtgatggggcagcagttacgcccttttgggggaacaggtggacgtggagagctctttgcccagctcctggggtgggagtggttctcaggcaactgcacaccggatgacattctagtgtcttctagaaagggtctgccacatgacccagtttgtggtcaaagaattactgctttaatagggcttcaagtaagaagacagatgttttctaattaatactggacactgacaaattcatgtttactataaaatctccttacatggaaatgtgactgtgttgctttttcccatttacacttggtgagtcatcaactctactgagattccactccccctccaagcacctgctggtgattggggtggcctgctctggatcagatagcaaattctggatcagaggaagactttaaaactccttgacttaattgagtaaactcttcatgccatatacatcattttcattatggttaaagggtaaaatatgctttgtggaactcagatgtcttgtagccagggaagccaggggtgtgtaaatccaaaatctatggcagggaaatgcgggggaataggaaaatatgtccacttggaaatcctaagtagttttgaatttctttggacttggattcttacttcattcagtaaggagaactcttgggtgtctgtcaggttttatgtgggtctgtaaaagttagggggttctgtttttgtttcccttatttagggaaagagtacctgctgggtgtcgagggggttataaggtccccattaaatggcccagttttaaaaggatttaagtagggaatccagagtccctttgcagagtgtgacagacgactcaataacctcatttgtttcctaaacatttttcctttgataaagtgccctaaatctgtgctttcgtatagagtaacatgatgtgctactgttgatgtctgattttgccgttcatgttagagcctactgtgaataagagttagaacatttatatacagatgtcatttctaagaactaaaattctttgggaaaaaccctcaattgtgattttaataaattaaaagtagcacattacatggttagaaaatgtcagtgttaaagaatggtacaaagtgaaaagtgtatccctctcttgccgccggtggtagcttgtcccagtggaagctgctgttaacaatttgtgcccccacatccccctccctgcccatccaccaaaaaaaagtacatttacttatgtaaatgtacttatggtgatgtatgtttgttttggcctcacagcatctgtttccccttaatttggtagctgctcacatttccctcgaaagaaccacaccctctgcattctcagttctttgctttggatgggacatttgccctgcagtccccccaccctccaggccatgccctctccagggtgaggcctgtgtgatctaccgtactagggtactaggccctgaaagaggcttttcttgttcctcctgcatcttgaacctggagcgggagctgttgtaggccccgcccttggagaagagaactgtctgacagtggggagagagcgccacaccctggtggcataaacgagtccctgaatcatgccgtggctgaaccaagccctgtctgtgggctttttctgttgtactcagggcagtttgatggggttactgtcctgcatagccataatggcccagtataaagcagctgttttgatgagataattgctttaattaagcaaaaggtagcaaagctttcactccgccctgtaccttctgtttccacttaggagccttcccatgtcagaatgtgcagatctgtctcattgtttcctgtgcagtgtgcccccacttcacccagtagtttctgtgtgtctgttatgtactaggtactacaaggtgccaggacggtgtagatacagcctctgctatcgtaaaactcaatgattcggtgggggaagacaaatgtcagtaatgtacaaagtaaaatggcagctgttagaagtatgaaaggggcagggtagggggaggtagaatcttccctgaccaggttaagaaaaccagaggccttctctgagggcaagaggaggagaggagaaatagagtaaggcaggcagaggaaacagtctgagctaagaccctgtggctagaagtggcagagggagaggcagcaggaaggccagcggggaggctggggcccagtgcaggcccaggttggaggagcgtagcacatggagtttggtaggagtttgggacgccctggtggatcttaattgtgatggggtgggtgtgaaaggcagtccaggttgcactggttgcacaggagaagtgatcagaagaggaccccagccacgtgcgagccgtgagctgggaggagcttctgtaatgcaggccttagctgaaggtggtcttactcagcagggagatggtgaggtttgaaccactgtttcactgcatagtccctgctgatggacacttgagtgttcagattttttgctggtatattcagtgctgcagtggacattttcatacaaaatatttcggtacacttttgtttatatctgaaaggtaaattcctagcagtagaattattagagcaaacggaatttaacattttggtgtgtattgccaaattgccctcccaagtggtttagtcagcttacccttgccaacaatagatctatccttgccagccttggccatcacatttaccagtttaatagattgtaaaaccatatcttaattggctaccctgaagccaccatactggagaggctgcgtacagtgtttcacgtagagagagggatacccaggaggcccacctgctccaaccccagctgcatgagtcttcccagcccaggcacagacatgtggataagatttaaacatttccagccccagccttcaagcaatcctagttgacactgaggggagccaacataagctgagctgagaaacagtctgcccagtctgcagattcatgagcaaaagaaatgttgggctgggtacagtggctcacgcctgtaatcccagtactttgggaggccgaggtgggtggatcagttgaggtcaggagtttgagaccagcctggccaacatggtgaagccctgtctctactaaaaattagccgagtgtggtggtgcgggcctgtaatcccagctactcaggtggctgaggcaggagaatggcttgaacccgggaggcggaggttgcagtgagccaagatcaggccactgcactccagcctggatgacgggatgagactctgtctcaaaaaaacgaaacaaaaattttttaagagaaatgtcatttgtttttgtttttgagacagggtctcactctgttgccctcactagagtgcagtagggatcacggctcactgaagtctctacctaccggctcaattgatcttcccaccacagcctcccaaatagctgggagaaatgtcctgtttttaatgaatttgtcttcctttttgtcttgtttgttttaatatctagtgatctaataaatttggatgatatcttttgactatc

SEQ ID NO: 146748 - DNA, 439 bp, Homo sapiens; identical to SEQ ID NO: 135158
  misc_feature (1)...(439): n = a,t,c or g

SEQ ID NO: 146749 - DNA, 649 bp, Homo sapiens
  misc_feature (1)...(649): n = a,t,c or g
atttgacncgctctgcaggaattccgcaatagccgcgcgttccccggccgaccaggacaggtttatttgtatctatcctgcttatttaaataataagaagaccatcgcagagggaaggcgaatccccataagtaaggctgttgaaaatcctacagctacagagattcaagatgtatgttcagcagttgaactaaacgtatttcttgagaaaaataaaatgtactctagagaatggaatcgtgatgtccaatacagaggcagagtccgggtccagctcaaacaggaagatgggagcctctgccttgtacagttcccatcacgttaagaatgtctgaggggtcaggcggtgctggcaagatggctgcacttgagaagatgacgtttcccaagaagatgacatttccagagaaaccaagccacaaaaagtacagggccgccctgaagaaggagaaacgaaagaaacgtcggcaggaacttgctcgactgagagactcaggactctcacaggaggaggaagaggacacttttattgaagaacaacaactagaagaagagaagctattggaaagagagagggaaagattacatgaggagtggttgctgagggagcagaaggcacaagaagaattcagaataaaaaaaaaaaaaa

SEQ ID NO: 146750 - DNA, 1145 bp, Homo sapiens
ctagggtttaaataccctctagacgtttcccattgacctgtgccagtctgattggttgagggagggggatcaatcagaatgaggagtaggcccgcggccagtctgattggttgctcgaggggaccactccgaggtactttgatttttcaactgccacgcagaaaaaggaggggttgaaaagggagtacccatctgatatctaggcagcatgaattggcctttggttccctgccacccgacccttttctcctgcctcttactgctctagtgataccacttatgctattgtctatggcaggtttatttgtatctatcctgcttatttaaataataagaagaccatcggcagagggaaggcgaatccccataagtaaggctgttgaaaatcctacaagctacagagattcaagatgtatgttcagcagttggacttaacgtatttcttgagataaatatataatgtactctagagaatgggaatcgtgatgtccaatacaggaggcagagtccggggtccagctcaaaccaggaagatggggagcctctgccttgtacagttcccatcacattatacactaagcctaacttctggttcctaggtaagtcagtaatgttgtatgcagcagaaatgatacctaaactaaaaacaaggacacaaaagacaggaggtgctgaccaaagtcttcaacaaggagagggaagtaaaaaaggggaaaggaaaggaaaaggaaggtaacctagtatcaggcatcaagtaatgtggtactacctgtaagagacatgaatggagacttctaattttgtatcaggagggaaccagaagctttttgtttgcatcatttaacgtgaactgtgaaccccttgtgccctctcatcttttatcatcggaagttgacacgtgaaacaaatttacactcagaaagtgttgcatcttcgcggtataatgccgtataaaagattttttttgtctttcaatgcagttttttggaagaaaatatttttaaaatgggacaatggactgtacaataagttacttgaaataagttgtttcatgataaatttcaagtagatttacaataaacattttgtccaccttttaagttaatgaaataaaatgtagaaactgaaaaaaaaaaaaaaaaaaa

SEQ ID NO: 146751 - DNA, 457 bp, Homo sapiens
  misc_feature (1)...(457): n = a,t,c or g
gttcagccttgaagtgagtcgtggacgaacctctctcagcgtccagcctagacggcggtgttgctccggcagcgttcctgggagccgagggccagagactaagttgtgggacgacttcagcatgtctcaggccaccaagaggaagcatgtggtgaaggaggtgctaggggagcacatagtgccctccgaccagcagcagattgtcagggtactcaggaccccagggaacaatctgcatgaggtggagacagcccaagggcagcgcttcctggtgagcatgccctccaaataccgcaagaacatctggatcaagagaggggactttctcattgttgaccccattgaagagggagaaaaggtgaaggctgaaatctcgtttgtgctctgcaaggaccacgtgcgctctctgcagaaggaggggttntggcctgaggccttctctgaagtggctgagaaa

SEQ ID NO: 146752 - DNA, 395 bp, Homo sapiens
agctgttatttttctgggacctagagaagttgaatagttaggaaataaaccaaggtaggatttgaatccaggcagttagacttcagaacccatgttcttaaccaagacaccgtgtcacccctcagtaaaaggcccctccccatcttcagaacagtcctgggttctgagcctgccatccaaggaactcaggaggaggagttgacagtctcttcgttcctaaccagtgtgggacgacttcagcatgtctcaggccaccaagaggaagcatgtggtgaaggaggtgctaggggagcacatagtgccctccgaccagcagcagattgtcagggtgagtggcgtggggcacaagctgttctgctccccacccctgcagccctggagggcccctggggtgg

SEQ ID NO: 146753 - DNA, 1503 bp, Homo sapiens
  misc_feature (1)...(1503): n = a,t,c or g
atgcttcttcttgttccagctgccagctccaaaactagctcaggcgatgcctcctcactcagcatcgaggagactaacaaactccgggcaaagttggggctgaaacccttggaggttaatgccatcaagaaggaggcgggcaccaaggaggagcccgtgacagctgatgtcatcaaccctatggccttgcgacagcgagaggagctgcgggagaagctggcagctgccaaggagaagcgcctgctgaaccaaaagctggggaagataaagaccctaggagaggatgacccctggctggacgacactgcagcctggatcgagaggagccggcagctgcagaaggagaaggacctggcagagaagagggccaagttactggaggagatggaccaagagtttggtgtcagcactctggtggaggaggagttcgggcagaggcggcaggacctgtacagtgcccgggacctgcagggcctcaccgtggagcatgccattgattccttccgagaaggggagacaatgattcttaccctcaaggacaaaggcgtgctgcaggaggaggaggacgtgctggtgaacgtgaacctggtggataaggagcgggcagagaaaaatgtggagctgcggaagaagaagcctgactacctgccctatgccgaggacgagagcngcggcacggctgatggcctgcgggagcgggagctggaggagatccgggccaagctgcggctgcaggctcagtccctgagcacagtggggccccggctggcctccgaatacctcacgcctgaggagatggtgacctttaaaaagaccaagcggagggtgaagaaaatccgcaagaaggagaaggaggtagtagtgcgggcagatgacttgctgcctctcggggaccagactcaggatggggactttggttccagactgcggggacggggtcgccgccgagtgtccgaagtggaggaggagaaggagcctgtgcctcagcccctgccgtcggacgacacccgagtggagaacatggacatcagtgatgaggaggaaggtggagctccaccgccggcgtccccgcaggtgctggaggaggacgaggcggagctggagctgcagaagcagctggagaagggacgccggctgcgacagttacagcagctacagcagctgcgagacagtggcgagaagacacagatagaggcccctgactctgcagctcccacccccatgcccaaggaaaccactgacaatgtggcttcaaaccctgcttcagtgccggcttgctgtgtgatcctgggcaaagtgactcttctcgagtctcactttccttattgtcaagtgggcttcataatcgctgctctgtaccaggttattctaaggcatggggtgaccagcgtggtggtgccagcccctaatgagggacttgacagcagctgctcctcatccagccccagtgctgacagcacctgggagaagcgccgagtgacggtgagccgggcattggcctga

SEQ ID NO: 146754 - DNA, 3408 bp, Homo sapiens
atgacaacctcccaaaagcaccgagacttcgtggcagagcccatgggggagaagccagtggggagcctggctgggattggtgaagtcctgggcaagaagctggaggaaaggggttttgacaaggcctatgttgtccttggccagtttctggtgctaaagaaagatgaagacctcttccgggaatggctgaaagacacttgtggcgccaacgccaagcagtcccgggactgcttcggatgccttcgagagtgtgtggcctctcagatccagcccgactcagccagcaggacaaagggaccacggcttggaatgctggcgcagaaagcagacctggctgctgccagctccaaaactagctcaggcgatgcctcctcactcagcatcgaggagactaacaaactccgggcaaagttggggctgaaacccttggaggttaatgccatcaagaaggaggcgggcaccaaggaggagcccgtgacagctgatgtcatcaaccctatggccttgcgacagcgagaggagctgcgggagaagctggcggctgccaaggagaagcgcctgctgaaccaaaagctggggaagataaagaccctaggagaggatgacccctggctggacgacactgcagcctggatcgagaggagccggcagctgcagaaggagaaggacctggcagagaagagggccaagttactggaggagatggaccaagagtttggtgtcagcactctggtggaggaggagttcgggcagaggcggcaggacctgtacagtgcccgggacctgcagggcctcactgtggagcatgccattgattccttccgagaaggggagacaatgattcttaccctcaaggacaaaggcgtgctgcaggaggaggaggacgtgctggtgaaccgtgaacctggtggataaggagcgggcagagaaaaatgtggagctgcggaagaagaagcctgactacctgccctatgccgaggacgagagccaaaaacctcgctctatcctgtccaagtatgacgaagagcttgaaggggagcggccacattccttccgcttggagcagggcggcacggctgatggcctgcgggagcgggagctggaggagatccgggccaagctgcggctgcaggctcagtccctgagcacagtggggccccggctggcctccgaatacctcacgcctgaggagatggcactgagaagacagggcgagtatttgtgttcacaaagcgcttggcctcgcggactgcggggacggggtcgccgccgagtgtccgaagtggaggaggagaaggagcctgtgcctcagcccctgccgtcggacgacacccgagtggagaacatggacatcagtgatgaggaggaaggtggagctccaccgccggggtccccgcaggtgctggaggaggacgaggcggagctggagctgcagaagcagctggagaagggacgccggctgcgacagttacagcagctacagcagctgcgagacagtggcgagaagaacctcatggcctatgaagatggccagttggttaggaccccgtcggtgcgaccagggcaggacgtgcggctccaggctccaggaaccagaacggggctgctcaagctgctgtcgaccgtctctcaggacaagcagggctgcctggggagtggtgatggtgtgccaaatcaagacctgcagcagaggtctcagagctcaaggcagacagcaaagaaggaccgcaagcccaggggccagagcaagaaaggacagggctctgaagagtctgaagatcacttcccgcttcttcctcggaaaccctccttccccttccagtgggcctgggagagcatcgccacagatgtccgggctgtgcttcagccaagctccccaacccctggccaccaagccctgcccatgccctcctcgttctcccagcgtcagtccaggcgcaagtccacggccaacctcccagaggcccatggctgctgctggaagacagaggcgcaaaacctgaaggcgagacagcagctgggagcctggggcggtgtctccatccctactggcaaaggggagctaggatcagagccccccagtggtctccagctgcctgggaggaggccaggatcaggatcggcgtccgacaagcaggtccagctgcaaagcctgggtgctgaggaggccgagaggggtctgagttctggggtgctgccccagcgccccaggagggggtcgatctcagaggaggagcaattttcagaggccacagaggaggctgaggagggagagcacaggactccctgcagaaggagggctggttgtcagagaaaggggcagatttctggagaggaagcctccgatgagggagaagtgcagggccagagccaggggagcagccccagcttcaacaacctccgaaggcgacaatggaggaagacaagggccaaggagctgcaggggccatgggacctggagaagctgcacaggcagctacagagagacctggactgtggcccccaaaagctgccctggaagactttgagggctgccttccaggcctccaagcggaatggaaaggcctatgcctcgggatacgatgaaactttcgtgtctgccaacctccctaatcgcaccttccacaaacgacaggaagccaccaggagcctgctgcaggcctgggagcggcagcggcaggaggagcggcagcaggccgagctgcggcgggcccggacacagcatgtacagcggcaggtggcccactgcctggcagcctacgcacccagagggagccggggccctggggcggcccagcgcaagctggaggagctgagaacagtcctgggttctgagcctgccatccaaggaactcaggaggaggagttgacagtctcttcgttcctaaccagtgtgggacgacttcagcatgtctcaggccaccaagaggaagcatgtggtgaaggaggtgctaggggagcacatagtgccctccgaccagcagcagattgtcagggtactcaggaccccagggaacaatctgcatgaggtggagacagcccaagggcagcgcttcctggtgagcatgccctccaaataccgcaagaacatctggatcaagagaggggactttctcattgttgaccccattgaagagggagaaaaggtgaaggctgaaatctcgttttgtgctctgcaaggaccacgtgcgctctctgcagaaggaggggttttggcatgaggccttctctgaagtggctgagaaacacaacaacaggaacagacaaactcaaccagaactcccagctgagccacagttatcaggagaggagtccagctcagaagatgattctgacctgtttgttaacacaaaccgcagacagtatcatgagagtgaggaggagagtgaagaggaggaggcagcctga

SEQ ID NO: 146755 - DNA, 2956 bp, Homo sapiens
tgcgttgtctgggctcggcggcagccgggctcggagtggacgtgccactatggggtcgtccaagaagcatcgcggagagaaggaggcggccgggacgacggcggcggccggcaccgggggtgccaccgagcagccgccgcggcaccgggaacacaaaaaacacaagcaccggagtggcggcagtggcggtagcggtggcgaacgacggaagcggagccgggaacgtgggggcgagcgcgggagcgggcggcgcggggccgaagctgaggcccggagcagcacgcacgggcgggagcgcagccaggcagagccctccgagcggcgcgtgaagcgggagaagcgcgatgacggctacgaggccgctgccagctccaaaactagctcaggcgatgcctcctcactcagcatcgagggagactaacaaactccgggcaaagttggggctgaaacccttggaggttaatgccatcaagaaggaggcgggcaccaaggaggagcccgtgacagctgatgtcatcaaccctatggccttgcgacagcgagaggagctgcgggagaagctggcggctgccaaggagaagcgcctgctgaaccaaaagctggggaagataaagaccctaggagaggatgacccctggctggacgacactgcagcctggatcgagaggagccggcagctgcagaaggagaaggacctggcagagaagagggccaagttactggaggagatggaccaaaagtttggtgtcagcactctggtggaggaggagttcgggcagaggcggcaggacctgtacagtgcccgggacctgcagggcctcactgtggagcatgccattgattccttccgagaaggggagacaatgattcttaccctcaaggacaaaggcgtgctgcaggaggaggaggacgtgctggtgaacgtgaacctggtggataaggagcgggcagagaaaaatgtggagctgcggaagaagaagcctgactacctgccctatgccgaggacgagagcgtggacgacctggcgcagcaaaaacctcgctctatcctgtccaagtatgacgaagagcttgaaggggagcggccacattccttccgcttggagcagggcggcacggctgatggcctgcgggagcgggagctggaggagatccgggccaagctgcggctgcaggctcagtccctgagcacagtgggggccccggctggcctccgaatacctcacgcctgaggagatggtgacctttaaaaagaccaagcggagggtgaagaaaatccgcaagaaggagaaggaggtagtagtgcgggcagatgacttgctgcctctcggggaccagactcaggatggggactttggttccagactgcggggacggggtcgccgccgagtgtccgaagtggaggaggagaaggagcctgtgcctcagcccctgccgtcggacgacacccgagtggagaacatggacatcagtgatgaggaggaaggtggagctccaccgccggggtccccgcaggtgctggaggaggacgaggcggagctggagctgcagaagcagctggagaagggacgccggctgcgacagttacagcagctacagcagctgcgagacagtggcgagaaggtggtggagattgtgaagaagctggagtctcgccagcggggctgggaggaggatgaggatcccgagcggaagggggccatcgtgttcaacgccacgtccgagttctgccgcaccttgggggagatccccacctacgggctggctggcaatcgcgaggagcaggaggagctcatggactttgaacgggatgaggagcgctcagccaacggtggctccgaatctgacggggaggagaacatcggctggagcacggtgaacctggacgaggagaagcagcagcaggatttctctgcttcctccaccaccatcctggacgaggaaccgatcgtgaatagggggctggcagctgccctgctcctgtgtcagaacaaagggctgctggagaccacagtgcagaaggtggcccgggtgaaggcccccaacaagtcgctgccctcagccgtgtactgcatcgaggataagatggccatcgatgacaagtacagccggagggaggaataccgaggcttcacacaggacttcaaggagaaggacggctacaaacccgacgttaagatcgaatacgtggatgagacgggccggaaactcacacccaaggagggcccggacaatcattccagcagatctggggacccgtcccagtgcacccaggccaccaagaggaagcatgtggtgaaggaggtgctaggggagcacatagtgccctccgaccagcagcagattgtcagggtactcaggaccccagggaacaatctgcatgaggtggagacagcccaagggcagcgcttcctggtgagcatgccctccaaataccgcaagaacatctggatcaagagaggggactttctcattgttgaccccattgaagagggagaaaaggtgaaggctgaaatctcgtttgtgctctgcaaggaccacgtgcgctctctgcagaaggaggggttttggcctgaggcccttctctgaagtggctgagaaacacaaacaacaggaacagacaaactcaaccagaactcccagctgagccacagttatcaggagaaggagtccagctcagaagatgattctgacctgttttgttaacacaaaccgcagacagtatcatgagagtgaggaggagagtgaagaggaggaggcagcctgagactccaggacccaattcttcacttgctcagggactggcccctggctcttctgggcttggacattcccagggtgctctgcacatcttcacccctgcatgaggacaaagcagggctcctctctgaactgatcttttgattcagagaattaaacccctggtgggttggtgacttgaaaaaaaaaaaaaaaa

SEQ ID NO: 146756 - DNA, 1272 bp, Homo sapiens
gcggccgcgacggtagcgtcagtgtagagatcgggacgccagtgttcccagttcccaccagtccaactgcgaggagtgcgacgtgagtctgagtctgatccctccgaaaaccgtacttccggcgctgtctcggaggcctcccgtcccctcccttgtccgtcttctaactcttccccacgccaggtccgtcaagcctaagtccttgagttccgggtccgggcagcagagaaaggaagtcctctccctggaggcctatctccctcagaacggcgcgagaagcaacaccttagaaggcagcacttcccgcgaaggaccggaaaggagcgcctactaaggacgccgtcgaggtccggggcgcctcaactctatagctctaactggctagaagtgcccaacgtggaatgtttcttttttaaaggcggctcttgaagacgacccggaagcggaagtggaagaaagttctagtggcttgaggtactcgcagaagcgctcggggtggcgtgaggaaccgtttacgggaactgaagttgcggattaagcctgatcaagatgacaacctcccaaaagcaccgagacttcgtggcagagcccatgggggagaagccagtggggagcctggctgggattggtgaagtcctgggcaagaagctggaggaaaggggttttgacaaggggctattgttgtccttggccagtttctggctgatatagaaaagatgaagacctccttccgggaatggctgaaagacacttgtggcgccaacgccaaagcagtcccgggactgctttcggatgcccttcgaaaagtggtgcgaagcccttcttgttgatgctctcttggggaagttttcaattcccccagcccctcaatccagaagtttggcaagccgaagtagggactcctccccctgtccctcctacgaaggaaaagatttgctattgttcgtactcaccttccgacggtacttccgggggtcttttggggagttttctcccctaaaccattttcaacttttttttgggattcttcgctcttggcatgccttcccccgtccttttttcccttggccagtttcctgggtgacagtttaccagcttttcctggaatgggatttcccgggccccatccctcacccccaccctcactttcaatccgtttgataccatttggctccttttttggcagaacagtcactgtccttgtaaagttttttagatcaataaagtcagtggctttcatgaaaaaaaaaaaaaaaaaaaaaaaaaaaaaaa

SEQ ID NO: 146757 - DNA, 875 bp, Homo sapiens
gcccaggctggtctcaaactcctagactcaggcaatctgcccacctcggcctcccaaggtgctgggatgataggcatgagccaccgcacccagcctatctcctagatcttgaatcaaaaataaaatgtaaatcacttccattctgctagcatgagggtttgttgctaaaattgaggattctatctgacgtttactttttgttgttttttgagacaaggtcttgctttgtcgcccatgctggagtgcagtggcatcattataactcactgtcaaactcctgggactccaatgttccctccccttttagcctcccaagtagctgggtctacaggcatgaaccatcaggcccagataattaaaaaaactttttttggtgaaaacatgatcttgctatgttgctcaggctggttgtctggcattttctttgtcctttattctttatactagctaaaccctggagtatccttgaagcctttactggcatacagagtacctgaatcttactttggagcctagcatgggtcataaatatatctgattcattaacctgtgagacagctgagagaacacagactccttacctgtatctccagggcatatctgggtttttctctgccaataggattttcctgctttctagttagtaatattgaggaaagaaggaaagggcttatttatccatttgctttttttccactgtgaatccatctgttctttccatggaacatctgggggagcacctcctgattaaactcctgtctccctgaccactatcctgctgtcattggacttcttgaagcacatgggctactgccccacgacactgggatttgagaggagcttagtgtgaattgtcaggtctttcaaagcattta

SEQ ID NO: 146758 - DNA, 436 bp, Homo sapiens
  misc_feature (1)...(436): n = a,t,c or g
atggctataatctttaccacaaatgaataattaaccctgtgctcaaactgctacaaaaatatgngattcaaatgttggagccaatgaagtttgtataaaggagagtttctgccagtgggatgtggcagtgccncnctccttatatcttggctgtcagtcttttggcttggtcccgcagctccattgttgcgattgctgaaagatgaacttcgtcaggtccatctggatggcccagtcaacgattttgctgacagcccgtgggnatgccactttgatcattgcaatctctttcttagcgccanagcttgcccagagtgtccatgctgtgagcagctttcagagtcaacaagcggatcttctcaatgggcaatgcggctttcagcaatccagtgagccacaacctcatgtgcatacaacttcttcttgaaagctatcc

SEQ ID NO: 146759 - DNA, 1068 bp, Homo sapiens
atgaacatcgaagtgaaaatcctcaataaaatactggcaaaccaaatccagcaacacatcaaaaagcttatccaccacaatcaagttggcttcatccctgggatgcaaggctggttcaacatatgcaaaccaatcgatgtaatccatcacataaacagaaccaatgacaaaaaccacatgattatctcaatagatgcagaaaaggcctctgataaaattaaacaccccttcatgcaaaaactcaataaactcggtattgatagaacgtatctcaaaataataagagctatttatgacaaacccacagccaatatcatactgaatggaccaaagctggaagcactccctttgaaactgggacacattcaaagcaaaatacaaactaccatcagagaatactataaacacctctatgcaaataaactagaaaatctagaagaaatagataaattcctcgacacatacaccctcccaagactaaacgaggaagaagttgaatctctgaatagaccaataacagggtctgaaattgaggcaataattaatagcttaccagtgaaaaaaagtccaggactagatggattcacagctgaattctaccagagacacaaacagcacagcatgattcttgttcccatgaacacacctggagtaaaaataataaggcctttgtcagtttttggctacacagataattttcatggaggacattttgagatccattttaatcaagtgcgagttcctgccacaaatctaatactaggtgaaggtaggggatttgaaatttcccaaggccgccttggacctggcagaatccaccactgtatgagaacagtaggtttggcggaacgcgctttgcagatcatgtgtgagcgggcaacacaaaggatagctttcaagaagaagttgtatgcacatattgatagagaatttaaagtccagaaagccttgttttcaattggattccccgttcccaagcctatactgtactgcagtgatacttctgtcattggaacagaattttacgtaatggaacatgtgcaggtgtcagtaaagagctatctgtaa

SEQ ID NO: 146760 - DNA, 2169 bp, Homo sapiens
caaaatacttctctctccaggtaattaaacaattctgattgagatacctgtgtaggaatgagccagtcttcctcctatctaggtaatttacttaaaattcactgtttggactcacaaatcataatgtaagatatgagagtaaatgtcatatatttgtatttcacaagtattttctaacaggtgtttttggaaaacattatagggagtattgctgaacattcttcgctgtggaattttcagtattagaaagtgttgctaaattatcaaagctgtttggattaaattatcaaacaaattttttcagacctgtgtaatgaagtgattagatgtttagatcaaaggcaataatcttgaaatgtgtaattatatatataaggtcccagttactcattgttgagcagtgagaagcttcaatcaaacaactcatttattttcaaatcattgtttctgttccagatcacagcctgcatcagactatgttggtgtacgtcttttacacagttcccattccagtcatcactgcttacatgactacatgaaaacatcaaaaagacaattgtgattctgcttattatctgttttatttttcttcttagcaaactttttctaatacaatttttcttttgactagacacaaacagcacagcatgattcttgttcccatgaacacacctggagtaaaaataataaggcctttgtcagtttttggctacacagataattttcatggaggacattttgagatccattttaatcaagtgcggagttcctgccacaaatcctaatactaggtgaagggtaggggatttgaaatttcccaaggccgccttggacctgggcagaatccaccactgtatgagaacagtaggtttgggcggaacggcttttgcagatcatgtgtgagcgggcaacacaaaggatagctttcaagaagaagttgtatgcacatgaggttgtggctcactggattgctgaaagccgcattgccattgagaagatccgcttgttgactctgaaagctgctcacagcatggacactctgggcagtgctggcgctaagaaagagattgcaatgatcaaagtggctgccccacgggctgtcagcaaaatcgttgactggggccatccaggtgtgcggaggtgctggtgtttcccaggattaccctctggctaacatgtatgctataacccgagttttgcgtttagcagatggacctgacgaagttcatctttcagcaatcgcaacaatggagctgcgggaccaagccaaaagactgacagccaagatataaggagggtggcactgccacatcccactggcagaaactctcctttatacaaacttcattggctccaacatttgaatctcatatttttgtagcagtttgagcacagggttaattattcatttgtggtaaagattatagcatctattttgatcagtgggttttattatttcaagggtcacacagggttaagttcagtaagaaatgctgtagctgttgtcattcaatctagtcgctccttgaggccaggagttcaggacccagcctgggcaacatagcgagacccccattgctacaaaaaatttaaaaatgaaacaagtgtggtggcacatgcttgtagtcctagctacttgggaggctgaggcaggaggattgcttgagtctaggagtttgaggttacagtaagctgtgatcgtgacatggcctccaagccctgggtgacccgagtgagacctgtttcctaaaaataaaaaacaaaaaattaaatttcttccttggaggtggggtgggaaggtgggggagccaagaatttgacctggctctgatccctggtgtgttgtgtgggccccctttaacgtttgcccactgagccttaacctcactgtaccttcactgtacttcacacgcattggtgttaacattttaatccttagaagacccctgacccactgaggattatgtagatgagaatttgctgaagccaccgtagaagcaccttgaaatcttgtaaaaccacaagaaagtactttataaaaggtatcctatatttgaaagtggataaatcttgtaactccgaaaagttgtggatttagaagacaggattgtttttgaacattaggaatttaaaggactttttctggtccttaaaaaaaaaaaaaaaaaa

SEQ ID NO: 146761 - DNA, 2414 bp, Homo sapiens
aaatcagttgtcttagtttaagctactataacaaggtactgtagactgatggcttataagcaacagaaacttatttctcagttctgtagtctggaggtccaagatcaaggtgacactgtggtcaggttctgatgagggccctcttctgggttataaactacggacttcttgtatccttacatggcagaaagagcgacagagctctctgtagtcccttttataagctcactaatcccattcatgagggccctaccctcatgacccaattacctcccaaatgcccctcctccaaacaccaccactttgggggttaaggatttcaacagatgaattttgaaggggacacaaacattccagtccataggcatccactttttcaagcttaggtattttaattacctctttagggccccgtggaagggaaaatagataggaacctgccctgaaagatgcttcagttggggagaaaaggtgaaattccattgttagacaatttgtttaagacaatacatcttgcttgagaaggaatagaagggaaatgaaatggggggagggagtggtaggagatggaggctttgaaagaaaataaccagatttagaaacatgggtatagaaagcatcctccagtacttctgtaacaatttatcaagacctacaggaagtcagttttggatttgctcctccgagatttgcgagccagaggaaaatacttagactatcaggttggaaagttcacacttggaccaggaaaagaccaagcagttgctatagtctcctggattgtgactaatctggaggaagcaagtccctgtatccttggcaaagcttgaaaggcaggcaaatgtcttctctgtgttttctgacaggtggttgggtggtgggggttggtctctgtacctcctgttctttaccttgcttaccaagcccttccaccgactcactcctgcctccccagctaaaaattggctgtgttgcttttaccacagttaccaaggtctgagttttataaaatccaggatcacatctgacctcacctggtagatatctaggccaataaagtctaaagggctaaaaagaaggtacctctccatcctgtctcctcgaggccaggcagcacatgtgcagttaagaggcctcctggatccattgtcctcctgttgcttttcgttctaagtgatccaaactctattgctgatagggaataaaagcagggcaggctagtagtgggcaagtgctttgatggagcgtatctccaagcagggcccaagtttaggaggaggaagacctgatacaatgaatgaacagtgcgtcctcccaacccaaccaagaagtgtaattgtgttccgtctttaaccctgggcatggaatgggggagggaagagggcatgggacatttattacatagggcacattatctacattctctgcatgtgacccagatgtcagcccttccgcttcctgcgaaggttacctctaatgcacgttgccccaggccctgctgagctagttcctcaccgcagctacttaactcaccatgaattcctagaaccctcagcctctgagagtgctgggatctggcgggagaacaggcagtacttccctcactaacctacccgcacgccataccatcattgtgcaaagctgcctcatgctggaaggtctggtttacgtaaaagtgacaagttggaattgagcgtccgactctcgggtacctgccccaggcatttctcatcagccccatttcccacacagctctctcctaggcgcagccctccttcaccaccaccacccccaccccaatcacctttaggtattttctcccctaaagcctcacctgttggcattttacatctttttaagaccttattttgtattttaaatgtatgagaaaaattatggaggatgatgcaagatgagtgagtccataatggtaataattggacactaaaaacaatgaaaacttgtctcaagtatttgtgttgaaatctcaattaactgggcgactgctcccgttccattttattctgtaaaatatgtggcatcctttgtgttgaggcggcatttactaaacacccccaaggtgcaaggctgcaaagagaatccgaagcgccccaaggcgagcttatcttcccacaccctggtacagtgccccaggacagagaaggtgtttagcaagtttctgctgaatggaagagtgagcgagaagggaaagtgcatctaaaaagcacagggaacctacaaaatattttgggaaagggtttcatcagttcgagtgaaatcttgaacgtgcaaagcaccatgggggtggctggacaggcttgttggagtcgtataatgcaatgaataaaaacttacggctgccttaaatgcaaatgtcaagcccttaaataaaatttaacaaagtcaaaaaaaaa

SEQ ID NO: 146762 - DNA, 2418 bp, Homo sapiens
  misc_feature (1)...(2418): n = a,t,c or g
gacccacgcgttcggatctgaaggctacttctaggagcaagaagtttgtgttttgtgcttttccaaaggatacttccttgggcctttttctttattgactagaccaccagaggaggatgggtgggattgtaggcaaacccacctgtggcatcactgaaaataaatttgatcatacctaagaggttaggaaatggtgccattcccaccttatagtgctacataggtgctttgggcgtatgtaacattagtgtcctttcttgaagccacaagctagttttcttagttttaaaatcctggtggatgaatggcatttgtatattaaaacacttttttaaaggacagttgaaaagggcaagaggaaaccagggcagttctagaggagtgctggtgactggatagcagttttaagtggcgttcacctagtcaacacgaccgcgtgtgttgcccctgccctgggctccccgccatgacatcttcaccttgcagcttgtgctgagactgacccaagtgcagctagcactgggacacagatccttgtcttcagcaccttccaaggagccaacttttattccctttcctctctcccctccccacctcgcttcttcccaatttagtaacttagatgcttccagcacatacgtaggtagctaccccagccggtttggattacaggcctgtgctgggaacatcatctcagtttgtccaccttcctggcaggctgtagacctgacattttgagacaagcctagagtcaggagcagggactttgactcttagggaagaggcacacatgaggggcaaggctgctgggcagacgtctccagttgtccttatgttgtctgtgttgtatttttttttttttattgaccatgggtgattatttttttaaaccatcggtaatatactgaagtgagctatagcacatatcatgtgctntaagtttgtgtatttttctccatctccccttggcttcctagagtttggacatattccaggtctaaatgcttttactcaagactacagaaaggtttgaagtaagtgtgtgcatggcatgcacgtatgtaaagtaatctggggaagaagcaaagatctgtttcattcttagcctcaggcctcatgagggtctccacagggccggagctcaggttacaccactccttcgtccttacaggagatgtagggagaagaatctgcaggctgcttgtaggactgttcaccaagggggataccagcagcaagagagttgcacccgtttagccctggacccctgtttcttactgtgtgacttggctagaagttgggagttcccccaaaataaaccgtgtcccccattttaccagaacccaaacctcaacacagcgaagctgtactgtctttgtgtggcaaagatgttcccttgtaggcccctttcaggtaaccgtcttcacaatggtattttcatcacagtttaaggagcatcagccgcttctcaagtgggtagggaaagcagaaaaacgttacgcaagaggacatggatccaaaatgatgatgaagcatctcccatggggaggtgatggtggggagatgatgggctaaacaggcaaccttttcaaaaacacagctatcatagaaaagaaacttgcctcatgtaaactggattgagaaattctcagtgattctgcaatggatttttttttaatgcagaagtaatgtatactctagtattctggcgtttttatatttatgtaataatttcttaaaaccattcagacagataactatttaatttttttttaagaaaggtggaaaggtctctcgctcccaaggacagtggctggaagagttggggcacagccagttctgaatgttggtggagggtgtagtggctttttggctcagcatccagaaacaccaaaccaggctggcttaaacaagtggccggcgtgtaaaaaacagacagctctgagtcaaatctgggccccttcccacaaggggccccctgaacccaagccccccactccccttggcttaggggtgaaaagcattaccagagagatgggagcccatcctatccccaagaagcccttcacctcacccttcacctgcctgcctgttgccaactcgggctgttctgggactctgatgtgtgtggaagggatgggggaatagaacattgactgtgttgattaccttcactattcggccagcctgaccttttaataactttgtaaaaagcatgtatgtatttatagtgttttagatttttctaacttttatatcttaaaagcaagagcaccctgtttaagcattggtacccctattgttaaagatattgtgtcctctcattccctctctatcctcttgtaagtgcccttctaataaacttttcatggaaaagctcctgtgccaggagctcagtctgaaaaaaaaaaaaaaaaa

SEQ ID NO: 146763 - DNA, 4731 bp, Homo sapiens
  misc_feature (1)...(4731): n = a,t,c or g
cgactcccgttcgtcgatgtcgacgcgcgtgtctacgcggacgcaccggctaagctgcttctgccgcctttggccttctgggagcttgcggtgaggctgcgcggggccgaggccgcctccgagcgccaggtttattcagtcgccgtgaagctgctgctgctgcacccggccttccagagctgcctcctgctgaccctgcttggcttatggagaaccacccctgaggctcacgcttcatccctgggtgcaccagctatcagcgctgcctccttcctgcaggatctaatacatcggtatggcgagggtgacagcctcactctgcagcagctgaaggccctgctcaaccacctggatgtgggagtgggccggggtaatgtcacccagcacgtgcaaggacacaggaacctctccacgtgctttagttctggagacctcttcactgcccacaattttcagcgagcagttgcggattgggagcagcgagctccatgagttctgccccaccatcctccagcagctggattcccgggcctgcacctcggagaaccaggaaaacgaggagaatgagcagacggaggaggggcggccaagcgctgttgaagtgtggggatacggtctcctctgtgtgaccgtcatctccctctgctccctcctgggggccagcgtggtgcccttcatgaagaagacgctttacaagaggctgctgctctacttcagagctctggcgattggaaccctcttactcaagcgcctcttccagctcatcccgggagcagtttggtttcagcctctggaagattattatgtctccaagtctgcagtggtgtttgggggcttttatcttttctttttcacagagaagatcttgaagattcttcttaagcagaaaaatgagcatcatcatggacacagccattatgcctctgagtcgcttccctccaagaaggaccaggaggagggggtgatggagaagctgcagaacggggacctggaccacatgattcctcagcactgcagcagtgagctggacggcaaggcgcccatggtggacgagaaggtcattgtgggctcgctctctgtgcaggacctgcaggcttcccagagtgcttgctactggctgaaaggtgtccgctactctgatatcggcactctggcctggatgatcactctgaagcgacggcctccataatttcatcgatggcctggccatcggtgcttccttcactgtgtcagttttccaaggcatcagcacctcggtggccatcctctgtgaggagttcccacatgagctaggagactttgtcatcctggctcaacgctgggatgagcatccaacaagctctcttcttcaacttcctttctgcctgctgctgctacctgggtctggcctttggcatcctggccggcagccacttctctgccaactggatttttgcgctagctggaggaatgttcttgtatatttctctggctgatatgttccctgagatgaatgaggtctgtcaagaggatgaaaggaagggcagcatcttgattccatttatcatccagaacctgggcctcctgactggattcaccatcatggtggtcctcaccatgtattcaggacagatccagattgggtagggctctgccaagagcctgtgggactggaagtcgggccctgggctgcccgatcgccagcccgaggacttaccatccacaatgcaccacggaagaggccgttctatgaaaaactgacacagactgtattcctgcattcaaatgtcagccgtttgtaaaatgctgtatcctaggaataagctgccctggtaaccagtctctagctagtgcctcttgccctctcctcacctccttttctctcagtgactctggaacctgaatgcagcttacaagacaagcctgacttttttctctgattaccttggcctcctcttggaaccagtgctgaaaggttttgaatcctttacccaacaatgcaaaaatagagccaatggttataacttggctagaaatatcaagagttgaatccatagtgtggggcccatgactctagctggggcaccttgggacctccagctgggccaatagganggagacagggaggacagggaaggcctttcccattttttcaaagtctgtttaattgcctattacttctctcaaaagagaacctgaagtcagaacacatgagcagggtgagaggtgaggcaaggttcatcctgaatgggagaggaagtcgaaccactgctgtgtgtcttgtcaggatgctcacttgttcctactgagatgctggatattgattttgtaacagcacccggtgtttcacggctgtccgacgtgagctaacgtggcggtgtggctgcctggacctcctctttcaggttaacgctgacagaatggaggctcaggctgtctgcaagaaaacagttggtttggctgtgattttgacctcctcttccccactggccatcttctaagagactttggtaagctgccctccctagaagcacattcctgagcacatttgagacctctgtgttagaggggagactgcacaaactatcctccccccaggttgagacgtctgcagagtggcaagctgacttgtagaaatggggtgccatttatgctctacttagacaagggtaatcagaaatggaatcagtgcaggcaaaatttaggatttgccgcttccataaatcaaagcatgactaatagggggtctctgaaatgtaagggcacaaacttcacttagggcatcgcagatgtttgcagaatggttggcctaatgattatgctacagatgggttttaaatgacccgtctaggttactgcttccttgcaaaaaaagtcgaatcctgcattgaattggaatatgaatttgtgtaactctctccagaaaatggatggagataacttgtctttaaaactgtaggccagccttatccactgtgggagcccttgcctccgaggcttctggcttcaaggggagcttcttctccaggtttcactaggtgaattgatttattattatcatattgataatgtgagattctttagccactttggggagcctgtctctccagaagcctttcttagtggtgcccacagttggagcccaggggccatgtttgcaaactgattcatgtgcatggctgacaggagtactggttcactaccaatgcctgagcttttctcttacatagaaaaactgtccactctcagtaatcacaagcagcatccgttttgttttctcttcttgggagacatctgtcaaaccagggaatattcttgaaaagaacgtgagcagggaaaactgctgggtgatactttttttaaagttttgtttttatcttgcctgttggcttcaatacatttgaaaaatcgcttgaaaggggaaaatttcagtgatggagattctagattaaatatcaggactgatttcctggtgggaggaattatggtccagttttaccaaagaaccaattccttgaatgttggaatctaactttttatattgtcattattattgttgtttttaaacggttctttgtcttttctgttttatttttctcaagctgctttcaggagctagcagaaaataactcaaagttgaagactctggaagattttgctttaacctaactcgcattggatgtattaaatttataattttagcattcccaataggatcctatcattcccttaaaccataataccctttgtcttgggagtaggaataccaaaggttagaagttaggtgggatttctagtttagggagagggagctccaaaactattaatcttttaaccaaattgaaaaaatggaaataggggtgtttttcccctttttgtggcacaccctatattacccttaaggaaatttccttccatagacagctgcctcaaaggggaaatcctcttttaaaccgtagttggcgcagaggtcagtcctagtcggagcttaggaggggcggagacgctcacatcgtctggacttgagtcgccactgattgtggcaacagctttgcctcatgacgtcaaaaattcggcaatttcttttgatttttagttgttggaatttgctgtttcaagcatttgtacatattagaagtctaaggagtagcaagtcagtgggaggactttttcacccctgggcattagccagcttcgacctcattttcccagatgcacccagctccctattaaataagttagccagggaaagtgtatgtcaccgtgcaggaaaccagtgagggcagggacaagggggttctgcctccttcttcacttcacccaccgggcacaccagcttgccccctgtctttgccccccccaaagggtattttgtgtcctagtgtcaaaattgggagctattccttcacctggtcccttaacccttgggttttaaaaagaaggccttcctctgtttgggtagccgtaagagcctgagtatagtaagtcctcttcccaaagagatgggcaatatgctgggcatcctactttgaaaacaaagttgtctggattttttgcatggagaggttagggattttattgttcttatttccctttacagttctgcagttccatcacagtatttttttttaaataactcaggtgtatgagaagaaattaagaaaagaaaattaacttatgtgggactgtaaatgtttttattttgtaaggatttctataaataaagctatattctgtaaaaaaaaaaaaaaa

SEQ ID NO: 146764 - DNA, 1548 bp, Homo sapiens
atggggacaaggtgggagccggggtggcgcgcgcctgggctcgcgccggcagctcaggcgaggagcagcggccgagcagcgccagcagcaggcagcgagcgggcgcgggagcgggagcgggacgggggtagcgttggcggcggcggctcctcctcggccatcccctcggagcgtgcagctgacgcgcatggcgaagacagcggcgcctaccgatgggagcgcgccaacaggcctttcagcaacaactgctgttgtctggctttttacctaggaatggaggaggccaggtggctctatgctggtctgttctgtgtgtatggtgcaagcctgattgccattgccacacacgtgcctctctttggttcacagatcaaggctgaagacccagtggcgattcagccccagcagcacacctgccccctcagccggcccagctcatctgccccaggcccaactcatgttgacgggcagccagctagctggccatccacttggtatgcgatggagcatggcgactcaacacgcaggatgtgtgtcacagcggtgcggacttttccccatgacggttggttgctcacaagggaacatattgtggtcgttgtaataccaccacgacctatgatggttaacatctgcagggcagttgtccttacccaacaaacattcctggagcctcagcaaatgcaggcccagtgctgggtgctgagtctacaagaacatgtcaaactagccctcttctcaaggagctcacagtctgtaggtacagcctcattgggagtgattcagtgcagtacaattagtgctaaagcccggggatactacctgggctgtggcaagactgaggtcagggaaggcttccagagagaggatatttggcagaggctggtgtgtacagaatttgtggcagacaaagcaggcatgaggatgggacacataggggagcccaagttattgaacagaggagaaagtggctcccagcagctctgggcttccaacccatcatcttacagctctgtggcaagagagtacctgactcccagtagagccagcacaggtcagccgcaagcctcccgggcctggtcaggacccctgcgcatccgcagtgtggctcagacatccggctccgggttcagcagagtactgcgagcatgggccagccttggagcagggcgtggcatccggcggccccaggcgctggcgcggcagctggacgtgtttgggcaggccacgcagtgctgcgctcaagggacctgggctctgtggtttgtgacatcaagtctcagagctctcctatctggacgccttctggggcgactacctgagtggcccctgctgcaggccctgcggggcgtgttcctgactgaggccctgcgagagctgtgggccgggaggctgttcgcctgctgggctcagttccacctgggggagaagagaaagccatacagtgaacttgaggagttcactgaggaggagccccagagccggccggcgcaacggcccagtccattctcctatcccctgcagtcgattagtacagtcacccactag

SEQ ID NO: 146765 - DNA, 2260 bp, Homo sapiens
  misc_feature (1)...(2260): n = a,t,c or g
tggcggggcggagcagcataggttcacttcagcatgggggctccagaaataagaatgtctaagcccctggaggccgagaagcaaggtctggactccccatcagagcacacagacaccgaaagaaatggaccagacactaatcatcagaacccccaaaataagacctccccattctccgtgtccccaactggccccagtacaaagatcaaggctgaagaccccagtggcgattcagccccagcagcacccctgccccctcagccggcccagcctcatctgccccaggcccaactcatgttgacgggcagccagctagctggggacatacagcagctcctccagcttcagcagctggtgcttgtgccaagccaccacctccagccacctgctcagttcctgctaccgcaggcccagcagagccagccaggcctgctaccgacaccaaatctatttcagctacctcagcaaacccagggagctcttctgacctcccagccccgggccgggcttcccacacagccccccaaatgcttggagccaccatcccaccccgaggagcccagtgatctggaggagctggagcaattcgcccgcaccttcaagcaacgccgcatcaagctgggcttcacgcagggtgatgtgggcctggccatgggcaagctctacggcaacgacttcagccagacgaccattttccgcttcgaggccctcaaccctgagcttcaagaacatgtgcaaactcaagcccctcctggagaagtggctcaacgatgcagagactatgtctgtggactcaagcctgcccagccccatccagctgagcagccccagcctgggtttcgacggcctgcccggccggagacgcaagaagaggaccagcatcgagacaaacgtccgcttcgccttagagaagagttttctagcgaaccagaagcctacctcagaggagatcctgctgatcgccgagcagctgcacatggagaaggaagtgatccgcgtctggttctgcaaccggcgccagaaggagaaacgcatcaacccctgcagtgcggcccccatgctgcccagcccagggaagccggccagctacagcccccatatggtcacaccccaagggggcgcggggaccttaccgttgtcccaagcttccagcagtctgagcacaacagttactacctatatcctcagctgtggggacgctccaccccagccggacagctggagggggtgggggcgggggcggggctgcgccccccctcaattccatcccctctgtcactcccccacccccggccaccaccaacagcacaaaccccagcccctcaaggcagccactcggctatcggcttgtcaggcctgaaccccagcacgggccctggcctctggtggaaccctgccccttaccagcccttgatggcagcgggaatctggtgctgggggcagcccggtgcagccccggggagcccttggcttggtgacctcgccgctcttcttgaatcatgctgggctgcccctgctcagcaccccgcntgggtgtgggcctggtctcagcagcggctgcggctgtggcagcctccatctccagcaagtctcctggcctctcctcctcatcctcttcatcctcatcctcctcctcctccacttgcagcgagacggcagcacatgacccctggaggtccaggggggcccgaggcagggtccaaacctgacgcgtctggttctgcaaccggcgccagaaggagaaacgcatcaacccctgcagtgcggcccccatgctgcccagcccagggaagccggccagctacagcccccatatggtcacaccccaagggggcgcggggaccttaccgttgtcccaagcttccagcagtctgagcacaacagttactctgctgggcatgcggtagcaggaattgagcaggtggctggaggtggtggcctggcacaagcaccagctgctggagctggagaagctgctgtatgtccccagctagctggctgcccgtcaacatgagttgggcctggggcagatgaggctgggccgactgagggggcaggggtgctgctggggctgaatcgccactggggtcttcagccttgatctttgtactggggccagttggggacacggagaatggggaggtcttattttgggggttctgatgattagtgtctggtccatttctttcggtgtctgtgtgctctgatggggagtccagaccttgcttctcggcctccaggggcttagacattattctaa

SEQ ID NO: 146766 - DNA, 654 bp, Homo sapiens; identical to SEQ ID NO: 144884
  misc_feature (1)...(654): n = a,t,c or g

SEQ ID NO: 146767 - DNA, 710 bp, Homo sapiens
  misc_feature (1)...(710): n = a,t,c or g
aggcctagaattcggcacgagccacagactcagagagaacccaccatggtgctcgtctcctgcccgacaagaccaacgtcaaggccgcctggggtaaggtcggcgcgcacgctggcgagtatggtgcggaggccctggagaggatgttcctgtccttccccaccaaccaagacctacttcccgcacttcgaccttgagccaacgctctgcccaggttaaaggggccacgggaaagaaggtggccgacgcgctgaccaaacgccgtggcgcaacgtggacgaacatgccccaaacggcgctgtccggccctgaagcgaccctgcacggggcacaaagcttcggggtggacccggttcaactttcaagctccttaagccactggcctgcttggttgaccctgggcccggcccaccttccccggccgagtttcaacccctggcggttgcaacgtcttccctggggacaaagtttccttgggtttcttgttgaagaaccgttgcttgaaccttccaaaatacccgttaaagcttggaagccttcgggttggccatgctttctttgcccctttggggcttccccccagggccctccttccctttcctggaacccgtacccccggtggtcttttgaataaaattttgaattgggggggcaaaaaaaaaaaaaaaaaaaagatctttnaatttaagggggcggaaagtttatttcaa

SEQ ID NO: 146768 - DNA, 470 bp, Homo sapiens
  misc_feature (1)...(470): n = a,t,c or g
gacaacgtgaagatcatctgcctgggagacagcgcagtgggcaaatccaaactcatggagagatttctcatggatggctttcagccacagcagctgtccacgtacgccctgaccctgtacaagcacacagccacggtagatggcaagaccatccttgtggcagacataaacgtgacccaaaaaagcttcaattttgccaagaagttctccctgcccctgtatttcgtctcggctgctgatggtaccaatgttgtgaagctcttcaatgatgcaattcgattagctgtgtcttacaaacagaactcccaggacttcatggatgagatttttcaggagctcgagaacttcagcttggagcaggaagaggagaacgtgccagaccaggaacagagcagcagcatcgagnccccgccctcgtcccaagctaggcgtattgagacgacgccaatccatggccnccccccgcttnn

SEQ ID NO: 146769 - DNA, 1809 bp, Homo sapiens
atctccggagggagtgctctatctaaggataatctggggcagcctcccggattcacaggtgtcttgggccagcctaaagttgagtgacatgcggttcctcttttatgcgtgtggctgcggacacctttcaacactgccttcttggcctttaaagcctttgctttggcttcggctttaggaggagcaggagcttccttcgctttcggtgccgtattaagtcgcagatggtgggaaccaggtttctcacttcctcaatggcctgcagccacgtctccccaggtcagtcttaaggacaacgaaactctggtcttcactgtggacatgccacactaccaggtgctccaaagccatggtgacccatcctcaggcgggcggcacccgctgaagcctcagtaccacacccacagccaggagccccagtcccgcactcggccgcatgcgcactccctgcggccctcccgccagcgccgcgctgggcagccagcgcccggcggggtccttcaggccttcggccgggcagcctccctcggggtccttgcgcggttgcgtagcagctgcgaggacgcggggcgagccggaagtggagtgcgctgcggcgcgagctgggccggcgggcgtggttcgagagcgcgcagagtccagactggcggcagggcccgaaggggccgacccgcagcgtccctggtctctccagccctcactcggaaccgcacgagccaatggcagaagacaaaaccaaaccgagtgagttggaccaagggaagtatgatgctgatgacaacgtgaagatcatctgcctgggagacagcgcagtgggcaaatccaaactcatggagagatttctcatggatggcttgtatccttcaaggtttgaagtactccttgttcctgtgggtcttcccacgctcatgtatcagtgtcccactgcccacccctttgtaccagcagcccaggaaggaggattggacttttgggacacggcaggccaggacacactctcatctcctcccacccctcacccttccatggagcttgtaccagtgtgcagtcagccacagcagctgtccacgtacgccctgaccctgtacaagcacacagccacggtagatggcaagaccatccttgtggacttttgggacacggcaggccaggagcggttccagagcatgcatgcctcctactaccacaaggcccatgcctgcatcatggtgtttgatatacagaggaaagtcacctataggaacctgagcacctggtatacagagcttcgggagttcaggccagagatcccatgcatcgtggtggccaataaaattgatgacagaccaatgtcctaccttctctctacagcagacataaacgtgacccaaaaaagcttcaattttgccaagaagttctccctgcccctgtatttcgtctcggctgctgatggtaccaatgttgtgaaggtgtggttgactgcagaggtagctagcaagctcttcaatgatgcaattcgattagctgtgtcttacaaacagaactcccaggacttcatggatgagatttttcaggagctcgaggtaggtcaggtccacatttcgggtgggatggaagaaacggctcctcttcagggatagggactacaacccagtagagtgactcttgcctaagtttgccccactaaatgtatcagagctgcggttgagcaaatgcagggccaggcctcacctgcgaccttgttcacagaacttcagcttggagcaggaagaggaggacgtgccagaccaggaacagagcagcagcatcgagaccccatcagaggaggcg

SEQ ID NO: 146770 - DNA, 1617 bp, Homo sapiens
  misc_feature (1)...(1617): n = a,t,c or g
agattcgatacgcctagcttggaacgaggcgcgagctgggccggcgggcgtggttcgagagcgcgcaaagtccagactggcggcagggcccgaggggccgacccgcagcgtccctggtctctccagccctcactcggaaccgcacgtgagggcaaatccgccccggcggctggcttatcacgcggggacagcccctccgaggcctccctatcggggtgggcgaaagggcgtccgggtcgggggaagcacggaaaggtggcttcgcgaggctgttgtggggggcgggacgggcagcctggcgatgcctggacatggttggtggccagaaacatttatcgaaagatagcatacccacttagatggcgaggacaccgacaagcaagtcttcgcccgtaagcggtggctcacgcctnnnnnnnnnnnnnnnnnnnnnnnnnnnnnnnnnnnnnnnnnnnnnnnnnnnnnnnnnnnnnnnnnnnnnnnnnnnnnnnnnnnnnnnnnnnnnnnnnnnnnnnnnnnnnnnnnnnnnnnnnnnnnnnnnnnngtcttcaagcatggagccatgaagctggatttggctttctgtcgctctctctacagggtacaggtgaaagggggcagacccctcatcatgctttccaggcatctgccacttcccaggaattgtctccctggataaacaaggcgaagtccctggctgtgcagaagcagtagctgtgtggtggcacagtcaggaaaactcgggggccctgttgacagagacaataccctcccctcccttgggctggacccctctctacggctaggagccaatggcagaaaacaaaaccaaaccgagtgagttggaccaagggaagtatgatgctgatgacaacgtgaaaatcatctgcctgggagacagcgcagtgggccaatccaaactcatggagagatttctcatggatggctttcagccacagcagctgtccacgtacgccctgaccctgtacaagcacacagccacggtagatggcaagaccatccttgtggacttttgggacacggcaggccaggagcggttccagagcatgcatgcctcctactaccacaaggcccatgcctgcatcatgcagacataaacgtgacccaaaaaagcttcaattttgccaagaagttctccctgcccctgtatttcgtctcggcctgctgatggtacccaatgttgtgaagctcttcaatgatgcaattcgattagctgtgtcttacaaacagaactcccaggacttcatggatgagatttttcaggagctcgagaacttcagcttggagcaggaagaggaggacgtgccagaccaggaacagagcagcagcatcgagaccccatcagaggaggtggcctctccccacagctgaggggctggggctaggggaatagtttggacctgtgttcctcctgtgggaggctgaggactgcaagaggagagctagcagatatgcctgttcacccctctctggtacttgtggcttgctagtatgtttttatgataatctcgggcattgtttgcattgtgtttattaatagggttttgtttttattgtttccttttttacagtaaaggctgaatgacataaacattg

SEQ ID NO: 146771 - DNA, 2276 bp, Homo sapiens
cccgagctgcgaggacgcgggccgagccggaagtggagtgtgctgcggcgcgagctgggccggcgggcgtggttcgagagcgcgcagagtccagacatggcggcagggcccgaggggccgacccgcagcggccctggtctctccagccctcactcggaaccgcacacagggacaataccctcccctcccttgggcctggacccctctctacagctaggagccaatgggcaaaaaacaaaaccaaaccgagtgagttggaccaagggaagtatgatgctgatgacaacgtgaagatcatctgccctgggagacagcgcagtgggcaaattcaaactcatggagaagatttctcatggatgggctttcagccacagcagctgtccacgtacgccctgaccctgtacaagcacacagccacggtagatggaaggaccatccttgtggactttttgccacacggcaggccaggagcggttccagagcatgcatgcctcctacttaccacaaggcccacgccttgcatcatggtgtttgatgtacagaggaaagtcacctataggaacctgagcacctggtatacagaactttcgggaagtttcaggccagagatcgcatgcatcgtggtggccaataaaattgatgcagacataaacgtgacccaaaaaagcttcaattttgccaagaagttctccctgcccctgtatttcgtctcggctgcttgatggtaccaatgttgtgaagctcttcaatgatgcaattcgattagctgtgtcttacaaacagaactcgcaggacttcatggatgagatttttcaggagctcgagaacttcagcttggagcaggaagaggaggacgtgccagaccaggaacagagcagcagcatcgagaccccatcagaggaggcggcctctccccacagctgaggggctggggctaggggtgggtggagcccttttaaaatacccttcccttcaacaactctccagctctgaatggagaaactctgtaggccatcccctcttctacctcctgcaacccacccatcctattagcctcccacattctagggcccgtgatacaggggatgagggtcagcaaccagcaaactctggactggtggaagaattccccaccagatctccttgaagcagaagtagggatcagcatcattaacaccttccccaccccctccccgcaggcagacagtgaagagaatcagaaaacatgattatgtgtcactttaatacaggaaatttaggtgttttttggtgtttttgtttttgtttttgtttttgttttctttccaaagctcacctcggggacaatttccttgggcttctcctgaggtaatgatttacccccccacccacagctgagtctgtgaggccccatcctttccctacgttttctcccatcttttttcctcttcagtctcccagtcatctggtttgtttgtttctttgttcgttctgagacggagtctcgctctgtcgccagggctggagtgcagtggcgcagtctcggctcgctgcaacctctgacttcccgggttcaaacgatttctcctggcctcagcctcccgagtggctggcatcaccacgcccagctaatttttgtatttttacgtagagacggggtttcaccatgttgcccagggatggtctcgaatctcctcacctcgtgattccgcccgcctcgggcctcccaaagtgctggggattacagggatgaggcaacgcggcccgggccccaatcatctgttttttaaaacaatcgtttttgagcagatagctattcattcccagatttccgtgtacccccatctgtttcaggagctcctcctaggtaaaagctgagaatccacaggaacagccaggtggacaggccctagcctatagttagggaatacacaagcccgtaaaaaccgaagcccctaacagcccatacccacaaggtaccgccccatttgggacctacaagaaggagctttcctttaaaagttccctatttttcaggcattaaagaggctgtcctttttttttgaggaatagtttggaccttggtccctcctgtgggaggttggaggactgcaagacggagagctagcagattatgcctgttcacccctctcctggtacttgtggcttgctagtatgtttttatgaaaaatctcgggcattgtttgcatttgtgtttattaatagggtttttgttttttgttgtttccttttttacagtaaaggctgaatgacataaacattgagtaaatgtaaaa

SEQ ID NO: 146772 - DNA, 2718 bp, Homo sapiens; identical to SEQ ID NO: 143618

SEQ ID NO: 146773 - DNA, 2259 bp, Homo sapiens
atgcgcgcgagacaaaacggttgctctttctgttttcctcctccctctctggtggctctggctccaagtcagcacaaacttgagaggccttctggtgcccgtgtaggcttcaccagcctccaggaagggatagttcatgcagaatggaccagtggtctgggcctgcggaggtcaggaagggatttctgctatataaactgcgagaggctaatggaatgggagctcctctctgaagcttgtccagatttctccgaatttcagtccaaggaacatcagcatcacattctgcgggaacaagggccaaaatgcctcattatgggaacatcttcccaggcagcaagccatactgcccagacccgtcctgctcatacctacaagtaccccaacctgtacgaagcagtgggcactggcattaagctagtcccccacctctgtgagcccgctgcgactgaacatgctgaaggtgagcatactgtaggtgagcagccttcaggagaacagccttcaggtgaacacctctccggagaacagcctttgagtgagcttgagtcaggtgaacagccttcagatgaacagccttcaggtgaacatggctccggtgaacagccttctggtgagcaggcctcgggtgaacagccttcaggtgagcacgcttcaggggaacaggcttcaggtgcaccaatttcaagcacatctacaggcacaatattaaattgctacacatgtgcttatatgaatgatcaaggaaaatgtcttcgtggagagggaacctgcatcactcagaattcccagcagtgcatgttaaagaagatctttgaagaaatgtcattttcctatttctacatgcagacattcatccaccatcactcggaaaacattaatgacacataccatgaactacagaaagatgactcaaatataaactgtgtacaaagagattatgttataatggacatggatgaagctggaaaccatcattctcagcaaactatcgcaaggacaaaaaaccaaacactgcgtgttgtcactcatagggcgcccagtcccatcgaccacccaagggctgaggaatgcgagcgcacggcatgggactggcaggcagctccacctgcagccccggtgcgggatccactaggtgaagccagctgggctcctgagtctgggctaggagagagccaaagcctgggaaagctggcctttcagtggcagcctgcttccaggacctccttcctgaggacgatggacaagctattggcactgagtgtggctctgctcttcctcctgggcgatgagtcctggaagttgctgcctgaacagggttttaacagtggaggcccccgcatggtctgggaagatggcactcgctcctgtgccctgagctctgaggttgtgagggccagtcagcacaaacttgagaggccttctggtgcccgtgtaggcttcaccagcctccaggaagggatagttcatgcagaatggaccagtggtctgggcctgcggaggtcaggaaaggatttctgctatataaactgcgagaggctaatggaatgggagctcctctctgaagcttgtccagatttctccgaatttcagtccaaggaacatcagcatcacattctgcgggaacaagggccaaaatgcctcattatgggaacatcttcccaggcagcaagccatactgcccagacccgtcctgctcatacctacaagtaccccaacctgtacgaagcagtgggcactggcattaagctagtcccccacctctatcatcaaacttcagttcagcaacttccaggtgagttcttttcacttgaaaacccttctgatgctgaggctttatatgagacttcttcaggcctgaacactttaagtgagcatggttccagtgagcatggttcaagcaagcacactgtggccgagcacacttctggagaacatgctgagagtgagcatgcttcaggtgagcccgctgcgactgaacatgctgaaggtgagcatactgtaggtgagcagccttcaggagaacagccttcaggtgaacacctctccggagaacagcctttgagtgagcttgagtcaggtgaacagccttcagatgaacagccttcaggtgaacatggctccggtgaacagccttctggtgagcaggcctcgggtgaacagccttcaggtgagcacgcttcaggggaacaggcttcaggtgcaccaatttcaagcacatctacaggtacaagtgtgcagtacgtagaaaactactag

SEQ ID NO: 146774 - DNA, 1337 bp, Homo sapiens
atcttttaaactttattacaaaaaatatgtgctttttggtaatacttttttttttttttttaaagatagggcagatagccccaacacactaccctgcacacagaaaataatcattggtcttcactagtgaaataagcagtgggttgctaagggccaacttgcctgaacaggtacacaagaacctcagagcccaacccattgtgaagaaacatgggttacttctgaggttctagaattcccagaagctctgcttcagcactggaagcttttgctcagcagtttgcttcatagctctgtgaagaagctgtggcccacactggggtcccctcttttcctaaatccagatgaacaggtttctcttggctaatgagtctttatctgcttggatcttgccagaggaacatcaagtcagcctaatgagctttctggctccatagatcatcaaacttcagttcagcaacttccaggtgagttcttttcacttgaaaacccttctgatgctgaggctttatatgagacttcttcaggcctgaacactttaagtgagcatggttccagtgagcatggttcaagcaagcacactgtggccgagcacacttctggagaacatgctgagagtgagcatgcttcaggtgagcccgctgcgactgaacatgctgaaggtgagcatactgtaggtgagcagccttcaggagaacagccttcaggtgaacacctctccggagaacagcctttgagtgagcttgagtcaggtgaacagccttcagatgaacagccttcaggtgaacatggctccggtgaacagccttctggtgagcaggcctcgggtgaacagccttcaggcacaatattaaattgctacacatgtgcttatatgaatgatcaaggaaaatgtcttcgtggagagggaacctgcatcactcagaattcccagcagtgcatgttaaagaagatctttgaaggtggaaaactccaattcatggttcaagggtgtgagaacatgtgcccatctatgaacctcttctcccatggaacgaggatgcaaattatatgctgtcgaaatcaatctttctgcaataagatctagaagcctgggcccttgcttgttttgactcaggcagtaaaaagcctccatcactctatttggctcattttatatttagttccttccccagtcaacaactgaccacatctgcctctgcctgagcattaggatgctcaaacatcctatctttcttcttctattcatgcttttatccattcttctctgtcctgtcttccctgctccaactctttctctcaatattcctgatttttttttcaataaatttcacatg

SEQ ID NO: 146775 - DNA, 425 bp, Homo sapiens
tttcgtcgatgaggtgaggacgcccgggaaccggaggcggcaccgcgcggcgcacggacctgggacgcggagtcctgaagccggcggacggttttcgtacgggcggccgtgcgcgaggcgaggtaatggtaactcgggatttgaaggacagagtcgctatgtaccatcctctggaatgtccgccaaggaactctgtgaaaatgatgacctagcaaccagtttggttcttgatccctatttaggttttcaaacacacaaaatgaatactagcgcctttccttcgaggagctcaaggcatttttcaaaatctgacagtttttctcacaacaaccctgtgagatttaggcctattaaaggaaggcaggaagaactaaaggaagtaattgaacgttttaagaaagatgaacacttggagaaagccttcc

SEQ ID NO: 146776 - DNA, 397 bp, Homo sapiens
cggacgcgtgggggacaccctgaaggctggcataaatgcagtcgagaggaggtcgaacagatgtaatggtaactcgggatttgaaggacagagtcgctatgtaccatcctctggaatgtccgccaaggaactctgtgaaaatgatgacctatcaaccagtttggttcttgatccctatttaggttttcaaacacacaaaatgaatactaggtaattttcagtctttatcctgaatggaacagatgattatgttgaattcaagaacatagatggctaattttacttttgctcaaaatttaaaatgacattaaaggaaagttctttgcagaggaagggttttctgtctgtgagccaagagaagcagagaaaagactccaggaatcttgtcagttctaac

SEQ ID NO: 146777 - DNA, 430 bp, Homo sapiens
gggcactggtgcttttaaatcaagagtgggactgcctgcgcctgctcctgttatcaatagcaaatatggactcagagaaacagataaacgtttaaataggcttaaaaagttaggtgacagcagcaaaaattcagacagtcaatctgtcagctctaacactgatgcagataccactcaggaaaaaaacaatgcaaagaatcctgaagaaaagggaaggtgtttcccatgatggtgaatgtcactgccatgaattcctgaatctacctgctgctgggagtcagagtccaagcataacccgtgtagcataaaagcagcgctgtagccctattccagtctttttcgttaatgtccagagtgaacaacaagagttagtcaatcattaactgttgactgttgattctcataataaatgcagcataacgaccaaaaa

SEQ ID NO: 146778 - DNA, 2331 bp, Homo sapiens
tttcgtggcagcggggcgatgaggtgaggacgcccgggaaccggaggcggcaccgcgcggcgcacggacctgggacgcggagtcctgaagccggcggacggttttcgtacgggcggccgtgcgcgaggcgaggagagaacattgaaagtattctctaagctatttgaagagagtgactaaatgcacctgggtcacagctgtctgtgggtatgaaggggttgggagaatccaagaacatggtggtgaatggcaggagaaatggaggcccgctgtctaatgaccatcagcagaatcaatcaaaattacagcacactggggaaggacaccctgaaggctggcaaaaatgcagtctgagaggaggtcgaacagatgtaatggtaactcgggatttgaaggacagagttcgcttatgtaccatcctatggaatgaccgccaaggaactctgtgaaaatgatgacctagcaaccagtttggttcttgatccctatttaggttttcaaacacacaaaatgaatactagcgcctttccttcgaggagctcaaggcattttttcacaatctgacagcctttctcacaacaaccctgtgagatttaggcctattaaaggaaggcaggaagaactaaaggaagtaatttgaacgttttaagaaagatgaacacttggagaaagccttcaaatgtttgacttcaggcgaatgggcacggcactattttctcaacaagaataaaatgcaggagaaattattcaaagaacatgtatttatttatttgcggatgtttgcaactgacagtggatttgaaatattgccatgtaatagatactcatcagaacaaaatggagccaaaatagttgcaacaaaagagtggaaacgaaatgacaaaatagaattactggtgggttgtattgccgaactttcagaaattgaggagaacatgctacttagacatggagaaaacgacttcagtgtcatgtactccacaaggaaaaactgtgctcaactctggctgggtcctgctgcgtttataaaccatgattgcagacctaattgtaagtttgtgtcaactggtcgagatacagcatgtgtgaaggctcttaagagacattgaacctggagaagaaatttcttgttattatggagatgggttctttggagaaaataatgagttctgcgagtgttacacttgcgaaagacggggcactggtgcttttaaatccagagtgggactgcctgcgcctgctcctgttatcaatagcaaatatggactcagagaaacagataaacgtttaaataggcttaaaaagttaggtgacagcagcaaaaattcagacagtcaatctgtccagctctaaacactgatgcagataccactcaggaaaaaaacattgcaagtaagtaagggagatttgataagcatatcttttaaaagtattttcacacaatttgctttataaagtggtgcttcagtagttttaaacttttaaatactcagagagactgggacttgtgagctttggctgcacttcaaggctctagacgtgatttgagtagaggcacagtctgtatcccatctctaacttcagtaccgtcctctagactatttttcttgaataccttgggtaactggatatgagttcttcatcatatgttcccaaggtcatccatatgttttaaacattttccaaggtgttaggagactgtggatggatgtcgctaagtcctgcaagaagacaaaaggactgagtagaattaaattagactctatacattccagtgcctagccagtttgttagaaaagatgatggacttggggaattcatagcttctggccttaaggcttccaccttttcattgcttgctgacctttttcaaaacgaactgactcagttcagcagaccaccagtaccagactcaggaattgtgatagagggagcattttgaacagtgccgtattgtggacatgctgtattgggctactccaggaaagtagggagttaaaggtgggaaagggaggaaaggaaggcaacctctgagattccagtggtgtgtgggggcaagatctgatggaaactgaaaaagagaacgaagactaaacaaagagaaaggaaagagaagaaaccctaaatgggcaaaggaaagcacatcctgtttgcggagctttgaaatattggaaccatttctaattgctcctgtttttctgggtaacaccagttttctgtagttgccactaaagcagtagactcttgagtctcacttgtctctgagagagacagaagttagaaagttttgacttggcgattccgaaagtatgcctttgttggcacttaaat

SEQ ID NO: 146779 - DNA, 421 bp, Homo sapiens
tttcgtgctcgggagacatggcgggcgttaaagctctcgtggcattatccttcagtggggctattggactgacttttcttatgctgggatgtgccttagaggattatgggtaagttatcatttcaaaaagaactattcctctttctgtgtctttgtcactattagtatgggtgttagagagttcggtcaatttagcaccaagttctaaccagtgagttagtggagcccagtttatgaacacagtccctttgtgggtcaggtgtacttttgcagagggctctgttaaaaattgatgtattcattccataagcatttgtttagcacctactctggactagctggggacacacaaatgaagagagagtcctggtcttcaagaggaagtaaagccctagttgtgagtgaaagacaggcaaacggc

SEQ ID NO: 146780 - DNA, 654 bp, Homo sapiens
attttccatgaaagaagttgatgtgtgcagaactttcagtacccaatattgtaattgcactatttataatcttaccacttgagttttacttaaggcaatcattgtcaattaaaaacaagtagagaaatatgtctaattgggaacatgttaaggatgataccagacttaattaacaagcatcacagaagtaattagactcattactgaacagttcattgtctcctgttacattattaagccttttagcagctttgtgtaacatttcattggatgtttctaatgcagaaaataatagggattgcaaagagtacaatatgaaggaagtaaggatttaatccttcttttcttgtctttcagatcaaagggggagcctgcgccgttgtgttggcaggcaatgcagtcattttccttacaattcaagggtttttccttatatttggaagaggagatgattttagctgggagcagtggtagcactttattctgattacagtgcattgaatttcttagaactcatactatctgtatacatgtgcacatgcggcattttactatgaaatttaatatgctgggttttttaatacctttatatatcatgttcactttaagaaagacttcataagtaggagatgagttttattctcagcaaataga

SEQ ID NO: 146781 - DNA, 2977 bp, Homo sapiens
ggcacgagccggtctggcttgggcaggctgcccgggccgtggcaggaagccggaagcagccgcggccccagttcgggagacatggcgggcgttaaagctctcgtggcattatccttcagtggggctattggactgacttttcttatgctgggatgtgccttagaggattatgggtgtacttctctgaagtaagatgatttgtcaaaaattctgtgtggttttgttacattgggaatttatttatgtgataactgcgtttaacttgtcatatccaattactccttggagatttaagttgtcttgcatgccaccaaattcaacctatgactacttccttttgcctgctggactctcaaagaatacttcaaattcgaatggacattatgagacagctgttgaacctaagtttaattcaagtggtactcacttttctaacttatccaaaacaactttccactgttgctttcggagtgagcaagatagaaactgctccttatgtgcagacaacattgaaggaaagacatttgtttcaacagtaaattctttagtttttcaacaaatagatgcaaactggaacatacagtgctggctaaaaggagacttaaaattattcatctgttatgtggagtcattatttaagaatctattcaggaattataactataaggtccatcttttatatgttctgcctgaagtgttagaagattcacctctggttccccaaaaaggcagttttcagatggttcactgcaattgcagtgttcatgaatgttgtgaatgtcttgtgcctgtgccaacagccaaactcaacgacactctccttatgtgtttgaaaatcacatctggtggagtaattttccagtcacctctaatgtcagttcagcccataaatatggtgaagcctgatccaccattaggtttgcatatggaaatcacagatgatggtaatttaaagatttcttggtccagcccaccattggtaccatttccacttcaatatcaagtgaaatattcagagaattctacaacagttatcagagaagctgacaagattgtctcagctacatccctgctagtagacagtatacttcctgggtcttcgtatgaggttcaggtgaggggcaagagactggatggcccaggaatctggagtgactggagtactcctcgtgtctttaccacacaagatgtcatatactttccacctaaaattctgacaagtgttgggtctaatgtttcttttcactgcatctataagaaggaaaacaagattgttccctcaaaagagattgtttggtggatgaatttagctgagaaaattcctcaaagccagtatgatgttgtgagtgatcatgttagcaaagttacttttttcaatctgaatgaaaccaaacctcgaggaaagtttacctatgatgcagtgtactgctgcaatgaacatgaatgccatcatcgctatgctgaattatatgtgattgatgtcaatatcaatatctcatgtgaaactgatgggtacttaactaaaatgacttgcagatggtcaaccagtacaatccagtcacttgcggaaagcactttgcaattgaggtatcataggagcagcctttactgttctgatattccatctattcatcccatatctgagcccaaagattgctatttgcagagtgatggtttttatgaatgcattttccagccaatcttcctattatctggctacacaatgtggattaggatcaatcactctctaggttcacttgactctccaccaacatgtgtccttcctgattctgtggtgaagccactgcctccatccagtgtgaaagcagaaattactataaacattggattattgaaaatatcttgggaaaagccagtctttccagagaataaccttcaattccagattcgctatggtttaagtggaaaagaagtacaatggaagatgtatgaggtttatgatgcaaaatcaaaatctgtcagtctcccagttccagacttgtgtgcagtctatgctgttcaggtgcgctgtaagaggctagatggactgggatattggagtaattggagcaatccagcctacacagttgtcatggatataaaagttcctatgagaggacctgaattttggagaataattaatggagatactatgaaaaaggagaaaaatgtcactttactttggaagcccctgatgaaaaatgactcattgtgcagtgttcagagatatgtgataaaccatcatacttcctgcaatggaacatggtcagaagatgtgggaaatcacacgaaattcactttcctgtggacagagcaagcacatactgttacggttctggccatcaattcaattggtgcttctgttgcaaattttaatttaaccttttcatggcctatgagcaaagtaaatatcgtgcagtcactcagtgcttatcctttaaacagcagttgtgtgattgtttcctggatactatcacccagtgattacaagctaatgtattttattattgagtggaaaaatcttaatgaagatggtgaaataaaatggcttagaatctcttcatctgttaagaagtattatatccatgatcattttatccccattgagaagtaccagttcagtctttacccaatatttatggaaggagtgggaaaaccaaagataattaatagtttcactcaagatgatattgaaaaacaccagagtgatgcaggtttatatgtaattgtgccagtaattatttcctcttccatcttattgcttggaacattattaatatcacaccaaagaatgaaaaagctattttgggaagatgttccgaaccccaagaattgttcctgggcacaaggacttaattttcagaagagaacggacattctttgaagtctaatcatgatcactacagatgaacccaatgtgccaacttcccaacagtctatagagtattagaagatttttacattttgaagaagggcc

SEQ ID NO: 146782 - DNA, 2553 bp, Homo sapiens
  misc_feature (1)...(2553): n = a,t,c or g
gtctggcttgggcaggctgcccgggccgtggcaggaagccggaagcagccgcggccccagttcgggagacatggcgggcgttaaagctctcgtggcattatccttcagtggggctattggactgacttttctnatatgctgggatgtgccttagaggattatggcgtttattggcccttattcgtcctgatttttccacgccatctcccccatcccccatttcattgccaaaagagtcacctatgactcagatgcaaccagtagtgcctgtcgggaactggcatatttcttcactactggaattgttgtttcctgcctttggatttccccggtaatccttgcccgtgtggctttgatcaaaatggggagcctgcggcctttgtgttgggcaggcaatgcagtcattttccttacaattcaaggggtttttccctatatttggaagaggagatgattttagctgggaagcagtggtagcactttattctgattacagtgcattgaatttcttagaactcatactatctgtatacatgtgcacatgcggcattttactatgaaattttaataatgctgggttttttaatacctttatatatcatgatcactttaagaaaagacttcataagtaggagatgagttttattctcagccaaatagacctgtcaaatttagattatgttacccccaattaaggttacttggttggctggttcatggtaggtcacggtgcttttcaggaaattttattaacacagttcttggtagggcagctgcccacccttatgcagtgccatcggaaacctttttgcttggggggatgtgcttgggaggagggcaggataacgctggaaggcagggcctcttcatggaccccaggggaaggcccagggtggatcccgtctttgtgttgtagtccatgctattaaaagtgtggccccacagaccaagagcctcaacatttccctagagccttattagaaatgcagaatctgaagccccactctggacccaggacattttgatgagatccaaaggagttgtatgcacatggaaagtttgagaagcatcatcatagaggaagtaaacatcacacccaacttccttatctttcccagtgggctaaaaccacttaaccctctctgggtgttaccctgctcatttgtttaaaaaaaaaaaaaaaaagtctcacctgctttcatgctgaggacaagttcagatgttcaagcctataatatttaggcagttcctcaaatttatgaaaagtgttctcagaattgggagacagtcaaagggtcctaacccctcagttaggaggaataagtgtgatttttttttaaagatcacttgcacagcatgctaaatataggaataattgaatgtatatttcaatattgctaagagagtaaatttctaatgttctcataaaaaagttaaatatttgagatcatatgttaattagtgtaatcattccaccttatattcaaaaatcataaaaccgtattgtaccctataaaaatatacaataatttgtcaatatataatcaaaataaaaaacaaaacatactctctcccccaaaaaaacatctcagtggggaacagatgtatcttttcatctgaaagacaatgctgggggaagagctccactgagatgcgggcagggaggctgggctccgagccagcccctgcgttagcaggagggggagaacagataggtaactcttttacatttcctttatgatctgggcacttctccccagctccttccctctgccccccacccctactcctcaacaagttctggtttggcctgacttctctacggctctgggcttctttcccggaagagaatataggaagcaatgtaaagcacggcagtggggtggaactgcttaattttcacttacatgttgatgtaacttgtcctcccgtccctgtaggtccttttcctataataacttttatgcccacccttaaatgaatccattggggtatcccctgtccatgttgggatcctgtaatccaccagttttcccctgctccacctttttggtctaaggatctatttgaggaaagggggaaattatgggaagggagaacccatttggacccagaatacaacccaatagtcgtttaagccattgttaaagtatgaaactgaaatacattccaaaacacttaatccttgaggcttgtgatcctgagtaattagcaggtatgatgcctgggactggaaaatagaaaagtaataactaaagggttaatgtgcaacgttattttttggccttgttcatgattttatgttttcagtgtcctgtgtacatatagaattgttaaagttgtcatttccaatatttatattagaaaaattatttagatactttataattttaaccggcaatttttaataatgacacttgcatttaatgtattgtaataaatttcactttataactttaaaagtttaactttaaaatttttttgtgatgttgccttgcctgaaaagataaccaaaaatgagaggaattttttgatgttttaaaatgggcagtt

SEQ ID NO: 146783 - DNA, 479 bp, Homo sapiens
cctgctgagcaaggtcccaaaccttgatgcagatgtctttgctaccactgacagcttgtgtgccagagctcaagtctctgactgtagacacaatgtcatcatgctcatccttgcagcacttgctgacaataagtgtctcattctcatgtagttcccacaattcaccagcacctgaatcggaggccactagaatacctctctccccaacccaagtgaggtcagccactccagcctccgtttggactccggcggagcagaagccttcgttgggggcggcacaggggtccttaaaaagccagagggagccggcccagcagcgccctctcaggctggaggccccgaggataagcgccccatcggaccggttccgcgcagcctccaactgccgttccatgcaggcgggcgcattgggggaagattcctctcccgggccgccgggggcactaggggggctcggcgtcataccacagccgtcaatg

SEQ ID NO: 146784 - DNA, 2530 bp, Homo sapiens
gggtgaagcatggaagctttactgagaaatattttgcccatattccttcagactttcccagtttcataatgtgatttttacctaaattgaacctgcaaagctcaaaagtacataattgattatatttactttcaatataatcagtaattgatccatgactcctaactggcaatatccactccaccaacccaagaataaatatttaccttaagttctaactagctactttgggaagctggggaagcacaggaaaaataatgggctacaagaccaacaccatgatgactcacataagtgaaatatatctaactacacataacacacatgcttcaaaaaagacaggccaacaatgcctaaactctttatttcaccaaccagtatttctgattttcttcttgatactggattttaaaaccttagaagtctataaatactgcattcagactttccacatcaagagaaaggggaccagggcagaagatgtcaggccccatggctgttttggggtggggaaaagtgggcaaaagaatttctcaacagcctgtgtcagtttttttaacttaatttgaaacacctttaagctctccttcaatccccaaaactttccccctaatggtgtctatgatagaaaaacactttctctctcatatatgtcccatcactaagggagccagggggaaggggagtgggcattaacaacaggcaaagccaaaaactttttaattccagcccagaaaaagggatttctgattcaagtttcaatggtaaaggagttggtgtaaaaacccggtaccaaagtccctgcttccttccctcagagtgaagctgggggtggcatttttgtggactggaagcatttcctcataatggtgaattaagcactataaaaagaataaagtcaatccccatctctatgagtagcattaagagctgcttcccaagaaccccagggatgcccacatcccataacccacccagacacggccaattcctcatagacagctacataaaaccctttcgtcaacttgttttggggggtgagagagaggcagtgcttagggaagatgtaggatggattttttttattcctgccactaccaaaaactataaatctacacacacactcacacgcacatacatgtcccattttttaagaaaagcttttccctcccctgtgaactacaggaaccccagaatcccagcctcccctcaggctgaagaagacgaatgcctattaacggcacagatctagcatatcaacatactatagaaggctcctgtgttgtctcacaagcttgagagggcagggcaaagaagtggacacttcatgggggacttgctttttgtcttaaatcccaatctactcagtaacacttgcaggtccaggggctgggagaggttctgtgggcacaacgtggttggacgacctggatggtcccagcccactgtggtaagcaggggagtgattgagcggggaccaagttcgcatctctcacaaagtctctgtggggcttggcttctaaacaactcagaaaggcttgagtccagcacagcaagtgagcagtcttcactgagagaggccaggaagggaacactgtgtggggagaacaccagccccagtgacaccatgggaagtgtccagttgagctcaggacacagcttgtactcttggtgtccacaagggagactgtcccattctcatcaccaaagacaaagacttcactttgctgaggatgccaagccagcgaggtaggaaggtagccaggcgcactgcagccaatctgtgatgctggcttggggacagcgggtatcccagagttaaaattctattgtcctcgctgcatgaaagaaaacacagagtccttgtgaggaagaggcagccaacacaagtgacctgagcagcatgagctcgggtatgaactcagtacccacctgctgagcaaaggtcccaaaccttgatgcaagatgtctttgccttaccactgaacagcttgtgtgcccagagctcaaagacactgaactgtaagacacaatgtcatccatgctcaatactttgcaaaaacttgctgaaaaataagtgtctcattcttcattctaggttcccaacaattcaaacagcacctgaattcggaggccaacttagaatacctctcttccccaaacccaaagtgaggtcaagccaattccaagcctccgttttggaactccggcggagccagaagcccttcgttgggggcggcacaggggtccttaaaaagccagagggagccggcccagcagcgcccacttcaggctggaggccccgaggagaagcgccccatcggaccggtaccgcgcagcctccaactgccgttccatgcaggcgggcgcatttgggggaagattccacttcccgggccgccgggggcactagagggggtggggtttccttccgcatctccacggttccaactccaacctagactcaaactggacgccggccggagactccgctccggcagcaaaccccacgtgaagcacctctgagcct

SEQ ID NO: 146785 - DNA, 380 bp, Homo sapiens
cggaatgacttaaatatttgtctccagtctccactgttggctcaatcctcctccaccaccaggggcctcaaaaggcacatcatccgggtctccttatcttgtttgataaggctgctgcctgtctccctctgtggcaaggactgtttgttcttttgccccatttctcaacatagcacacttgtgcactgagaggagggagcattatgggaaagtccctgccttccacacctctctctagtccctgtgggacagccctagcccctgctgtcatgaaggggccaggcattggtcacctgtgggaccttctccctcactcccctccctcctagttggctttgtctgtcaggtgcagtctggcgggagtccaggaggcagcagct

SEQ ID NO: 146786 - DNA, 424 bp, Homo sapiens
cattccaattcatattcagccagtgtttattaagagcctactacacgccagacactttacatgctgatcacatttactcctcacaaccatcttgtaagggagacatcatcagtgccatttgaacaaatgaaaaactgaggctcagagagattcaataccttatccaaagctctccagacaataagtgcaaaaacaaggatttgaattcaggactgtttgattccaaatctggaactttctggaacctctgacacacacacacacacacacacacacacacacacacacagcaccatgtcctgagctgctgcctcctggactcccgccagagggagacaggcagcagccttatcaaacaagataaggagacccggatgatgtgccttttgaggcccctggtggtggaggaggattgagccaggtg

SEQ ID NO: 146787 - DNA, 1569 bp, Homo sapiens
atggcggccgccggggctgcggctacacacctagaggtggcccggggcaagcgcgccgccctcttcttcgctgcggtggccatcgtgctggggctaccgctctggtggaagaccacggagacctaccgggcctcgttgccttactcccagatcagtggcctgaatgcccttcagctccgcctcatggtgcctgtcactgtcgtgtttacgcgggagtcagtgcccctggacgaccaggagaagctgcccttcaccgttgtgcatgaaagagagattcctctgaaatggcagatcaagtccacctcttccatccccgctccccaaggatcatggcaggcggaaggtggccagaatgcccagacgctgaaaaggtctttggtcaaggttttgccaggggtgccctcctggagaaagcatgccggcttcagctgctcgtcatttgtgtccgacggccctccagagaggacaccctcactgcccccacacagcccccgcattgcgtcaccagggcccgagcaaaccccagggccgctggaggccttcgaggagatcccagtggacgtggcggaggccgaggccttcctgcctggcttctcagcagaggcctggtgtaacgggctcccctaccccagccaggagcatggcccccaagtcctgggttcagaggtcaaagtcaagcccccagttctggagagtggtgctgggatgttctgctaccagcctcccttgcagcatatgtactgctcctcccagccccccttccaccaggaagtgagtgcttttggtgaggaaggtgaaggtgattatctggatgactggacagtgctctgtaatggaccctactgggtgagagatggtgaggtgcggttcaaacactcttccactgaggtactgctgtctgtcacaggagaacaatatggtcgacctatcagtgggcaaaaagaggtgcatggcatggcccagccaagtcagaacaactactggaaagccatggaaggcatcttcatgaagcccaaggcagaagccatgttagatgagcctcaggaacaagcggagggctccctgactgtgtacgtgatatctgaacactcctcacttcttccccaggacatgatgagctacattgggcccaagaggacagcagtggtgcgggggataatgcaccgggaggcctttaacatcattggccgccgcatagtccaggtggcccaggccatgtctttgactgaggatgtgcttgctgctgctctggctgaccaccttccagaggacaagtggagcgctgagaagaggcggcctctcaagtccagcttgggctatgagatcaccttcagtttactcaacccagaccccaagtcccatgatgtctactgggacattgagggggctgtccggcgctatgtgcaacctttcctgaatgccctcggtgccgctggcaacttctctgtggactctcaggcccagagtgaccacagcagtcttcactgtcagtgggggcagtgtccccagcttcctctggagagggttcctggagcccacgttgggcaccaagagcatgtggcttcatag

SEQ ID NO: 146788 - DNA, 2845 bp, Homo sapiens
gcgcctcgccgggtctccgcttatcacacctcaggtgcggtgggcttcgggtggggggcctgcagctagctgatggcaagggaggaatagcaggggtggggattgtggtgtgcgagaggtcccgcggacggggggctcgggggtctcttcagacgagattcccttcaggcttgggccagagtcccttcgcacggagatcccaatgaacgcgggcccctggaggccggtggttggggcttctccgcgtcggggatggggccggtaccctagcccgtttccagcgcctcagtcggttccccatgccctcagaggtggcccggggcaagcgcgccgccctcttcttcgctgcggtggccatcgtgctggggctaccgctctggtggaagaccacggagacctaccgggccatcgttgccttactcccagatcagtggcctgaatgcccttcagctccgcctcatggtgcctgtcactgtcgtgtttacgcgggagtcagtgcccctggacgaccaggagaagctgcccttcacccgttgtgcatgaaagagagattcctcctgaaatacaaaatgaaaatccaaatgccgtttcccagaaggcctatcggagggctttggacccatgaggaaggaggccctgtcatcgggcagtgtgcaagaggcagaagccatgttagatgagcctcaggaacaagcggagggctccctgactgtgtacgtgatatctgaacactcctcacttcttccccaggacatgatgagctacattgggcccaagaggacagcagtggtgcgggggataatgcaccgggaggcctttaacatcattggccgccgcatagtccaggtggcccaggccatgtctttgactgaggatgtgcttgctgctgctctggctgaccaccttccagaggacaagtggagcgctgagaagaggcggcctctcaagtccagcttgggctatgagatcaccttcagtttactcaacccagaccccaagtcccatgatgtctactgggacattgagggggctgtccggcgctatgtgcaacctttcctgaatgccctcggtgccgctggcaacttctctgtggactctcagattctttactatgcaatgttgggggtgaatccccgcgtttgactcagcttcctccagctacatatttggacatgcacagcctcccccatgtcatcaacccagtggagtcccggctgggatccagtgctgcctccttgtaccctgtgctcaactttctactctacgtgcctgagcttgcacactcaccgctgtacattcaggacaaggatggcgctccagtggccaccaatgccttccatagtccccgctggggtggcattatggtatataatgttgactccaaaacctataatgcctcagtgctgccagtgagagtcgaggtggacatggtgcgagtgatggaggtgttcctggcacagttgcggttgctctttgggattgctcagccccatctgcctccaaaatgcctgctttcagggcctacgagtgaagggctaatgacctgggagctagaccggctgctctgggctcggtcagtggagaacctgggccacagccaccaccacccttacctccctgggcgcagcttcttgggcaagatcagcaacattgttcattaagggacgacgtgggcatcttgaggtgttacaaaggctgttagctcccgtccagaagtcggcagaagagttggcgtctgggcacctggcatctccctttgtcgccagccagggaagctgtgacatcctctgagcttgccttctttgacccgtcactcctccacctcctttatttccctgatgaccagaagtttgccatttacatcccactcttcctgcctatggctgtgcccatcctcctgtccctggtcaagatcttcctggagacccgcaagtcctgggagaaagcctgagaagacagactgagcagggcagcacctccataggaagccttcctttctggccaaggtgggcggtgttagattgtggagggcacgtacatggtgcctgccggaatgacttaaatatttgtctccagtctccactgttggctctccagcaaccaaagtacaacactccaagatgggttcatcttttcttcctttcccattcacctggctcaatcctcctccaccaccagggggcctcaaaaggcacatcatccgggtctccttatcttgtttgataaggctgctgcctgttctccctctgtggcaaggactgtttgttcttttgccccatttctcaacatagcacacttgtgcactggagaggaagggaagcattatggggaaagtcccctgccttccacacctctctctagtccctgtgggacagcccctagcccctgctgtcatgaaggggccaggcattggtcacctgtgggaccttctcccctcacatccccctccctccctagttggcctttgtctgtccaggtgccagtctggccgggaagtcccccagaggccagccagcttcagggacatgggtgctgtgtgtgtgtgtgtgtgtgtgtgtgtgtgtgtgtgtgtgtgtgtgtcagaggttccgagaaagttccagatttggaatcaaacagtcctgaatttcaaatcccttgtttttgcacttattgtctggagagctttggataaggtattgaatctctctgagcctcagtttttcatttgttcaaatggcactgatgatgtctcccttacaagatggttgtgaggagtaaatgtgatcagcatgtaaagtgtcgtggcgtgtagtagggtcttaataaacactggctgaataggaattggaatgataaaaaaaaa

SEQ ID NO: 146789 - DNA, 419 bp, Homo sapiens
aacgccagatcagaaaagggagctcaggtaccttccagagagtgagacccagcgcccttgtctcgcacccagtaggctttcatccccgccatggcggagctgatccagaagaagctacagggagaagtggagaaatatcaacagctacagaaggacttaagtaaatccatgtcggggaggcagaaacttgaagcacaactaacagaaaataatatcgtgaaagaggtgagggactgggatttgtggggcgaggagggacctgtactagccatggttctgatcacatatgtcccatccctccatcaggaactggccctgctggatgggtccaacgtggtctttaaacttctgggtccggtgctagtcaaacaggagctgggggaggctcgggccacagtagggaagaggctggactatat

SEQ ID NO: 146790 - DNA, 474 bp, Homo sapiens
cagatcagaaaagggagctcaggttcttttcagagagtgagacccagcgcccttgtctcgcacccagtaggctttcatccccgccatggcggagctgatccagaagaagctacagggagaagtggagaaatatcaacagctacagaaggacttaagtaaatccatgtcggggaggcagaaacttgaagcacaactaacagaaaataatatcgtgaaagagtaagcgatacgaatcccagcttcgggatcttgagcggcagtcagagcaacagagggagacccttgctcagctgcagcaggagttccagcgggcccaggcagcaaaggcaggggctcctggcaaggcctgaccccatggtggggggaggggaggggaggggagggaatgattcatctctattaactatacttgtagctaataaaatgaaaaaacaccttggtgcagaatgaacaactggactgcgttttatgatg

SEQ ID NO: 146791 - DNA, 1134 bp, Homo sapiens
  misc_feature (1)...(1134): n = a,t,c or g
agtgagtccgcccattgaaaccntnnnnnatagtagaccctagtccagngncgnggaattcgaagaagctacagggagaagtggagaaatatcaacagctacagtagggtaagggaacttggtcggtatggtctcgcccaatgcacttacaacccaaagccattaccgagataaggtttgttgccccatctgggccctcgcgtgcagagacttccccgcctcagtctcagtactcttccctgttcactcacccgctgcccccacccttttctgcttcctcagatccatatccacctgactaggattgtggggataggtggcacatttgatgtttctaaattgcctttcctctcatccccagacttaagtaaatccatgtcggggaggcagaaacttgaagcacaactaacagaatataatatcgcgaaagaggtgagggactgggatttgtggggcgaggagggacctgtactagccatggttctgatcacatatgtcccatccctccatcaggaactggccctgctggatgggtccaacgtggtctttaaacttctgggtccggtgctagtcaaacaggagctgggggaggctcgggccacagtagggaagaggctggactatatcacagctgaaatgtgagtttttattccaccaccgtgtgctgcaccctgtgatgcaagtgaaccattggagtagaggtgttgaaccattgcagaacagctctccatagtggcccctagtcctccagttcctccaaccctttccttccctttttaaccccccttcttctccctcccctggatctcaaggttttccacctatctctttcttgcgtttagcactctccatagtgagtcctactaatttctccctttctgcttgtctcccttgtctctccttagtaagcgatacgaatcccagcttcgggatcttgagcggcagtcagagcaacagagggagacccttgctcagctgcagcaggagttccagcgggcccaggcagcaaaggcaggggctcctggcaaggcctgacctccatggtggggggaggggaggggaggggagggaatgaggcagctctaggatctatactgtagctaataaaatgtaaaaacacctggcaaaaaaaaa

SEQ ID NO: 146792 - DNA, 612 bp, Homo sapiens
agaatgtaactcgagttcgtagtccgtgtggtggaattcgccagatcagaaaagggagctcaggtaccttccagagagtgagacccagcgcccttgtctcgcacccagtaggctttcatccccgccatggcggagctgatccaagaaaaagctacagggagaagtggagaaatatcaacagctacagaaggacttaagtaaatccatgtcggggaggcagaaacttgaagcacaactaacagaaaataatatcgtgaaagaggaactggccctgcttggatggttccaacgtgggtctttaaactctctgggtccggtgctagtcaaacaggagctgggggaggctcgggccacagtagggaagaggctggactatatcacagctgaaattaagcgatacgaatcccagcttcgggatcttgagcggcagtcagagcaacagagggagacccttgctcagctgcagcaggagttccagcgggcccaggcagcaaaggcaggggctcctggcaaggcctgaccccatggtgggggcagcccaagggaggcgagggaatgaggcagctctaggatctatactgtagctaataaaatgtaaaaacacctgaaaaa

SEQ ID NO: 146793 - DNA, 2495 bp, Homo sapiens
  misc_feature (1)...(2495): n = a,t,c or g
cacgcgtccggctagaaacattcttgtggagatctcctgtccacacctccaagaatccctctaagtaaacacctagaagtaaaattgctttacacaataccactgtttgcagagtgctttacaaataaccactgtttccaaaagcaaatacactaattggcacacacacacagcagtacataagggttttgattgctccatatcagctgagcccttgatattgtcagacaacttggttttcctcagtttgatagatatgaaatgttatatcctatgcttttaatatgtacttcttatatatttttaggtgcttattcctcactcatgcttccaagaagtacctgttaacattttttgccatagttttaaaattttcattttgtcctttcctcatggatctataggaatgctttatgtattcaggattctaacattttgtccattatatattttacatatatctttgccaagctggtacttattgttttacttttattatgctatcttttttgatatacacgaattattaacaatatagtcaatttgatttttaacgtttacattggtcagtctttccctttatggtttacgctttttgtgtcttgttaaagacatctttccaggaacagcgtgaggaggacagaagcacccaacaggactgctcaagccacctgcgaacactgctgctaccatgcccaagagaaaggcaaaaggagatgctaaaggtgataaagcaaaggtgaaggatgagccacagaggagatcagctcggttgtctgctaaaccagctcctccaaaaccagagcccggccttaaaaaggcttcttgcaaagaagggagagaagctttcccaaagggaggaaagggggaaaggcagatgcttgggaaagggttngggaacaaccctgcaaaaaacccgagattgcctctacacttccagttccagaaagcggaaaggcactgggggattgccaagtgaaatgttcatttttgagagctctggtacttattggtgactctactgtttgaaatactattttttttaaatcaagttttataaaagtgtagaattttggcttttttaagttatgttgttagtacacaggacacttccttgttgtcttttgtggaaagggcaagtaccactaatagggtgtatctcagaaactgaattgaaataagggaaaataggattttctgtcctggtttttgaagattgttcttgattcccttgattcccaggagagattctctggacattcacgtgtcaagccacttttggcacggaagccttacagtgtggggaaccaaaacttcgtgtctcccctttccccgatgccatcagcatagacttgacttccttaaaccagagagttttgatgtggccttggcaaccctaaaaatcagctgtgttaggtaacaaaactcaggctttctgttgatgacatcgagatggtgtcacttaaaagaagccaagattcctgttttcagtttgtggattcatccctgctggttttactttagtccctccatgtcaaagttggggcctgagaaaaagctcatacatgcctccatgtgaaggtgtccaccctctctgaaaaatctttcttggttcaaaacggccaacgaccatatcttgttaacttttacggtgacttttggaggaggggagtttggaaaattgtaaaatgttatagattgctgcctatttcctgctgaaagtaaatgtttttaaaaagtatcatataaagctgaatacaaattggtttggggggagatccttttcctacccaaagtcataaatatattctttactgccttgtggaaattttatagttttgcctttcacatttgtctttagtctgtcctgaactgatttttgtgaaaattatgagttaagaaattcaacttaacatttttccatattccgaagtgggttgtctctgcactatttactggaaaagttcatcctttcccccagtggatttgtaacactggcctctttcataaattaaatttttgtgtatgtgtgtgggtcttttgaatggtttcttattctgactgacatcaaattggtctaatcttgtagcagtaccagtacagtcctgattattgcaactttaggaaaaggtctgataaaaacccaagatgcctcccacattttgtcataatcggtaacccatttcaccttctggctccaggattcaccacaaaaattggtctttccttggagtgtcttgggctattcttagccaactgttcctccatattacttctagaattagaccaacaatttattaaattcaaacaaacccaaggggcattggaaattttggattgggattgtattgaatttatagattaatctggtaaaccatgtcatctttacaatgttgtcttccaatacatgaatatggtacagctcttcatttacttaggcctttgaaatatctttcaataaagtttataattttctccaaaaaaaaaaaaaaaaa

SEQ ID NO: 146794 - DNA, 620 bp, Homo sapiens
cggacgcgtgggcggacgcgtggggggagtcaagttccctgggttgttcccctcataaggtattagggacttgtgtcacatctctctggagttttctattttaaagaggaatctgaaagcaataagctctttggtcttcttaagatggctacacctcaatttaagatggggtattctttcactagttgaggagtagaagaggatgaccagctagactcccatggaattggaactcctattccttgcttagacattacaggttatgctttgagatctctttggggtgaaggattgaaattaaaccctgagccaccgtgtccttgtagaagcacagagtagagaacaactggcagctttgaaaaaacaccatgaagaagaaatccgttcatcataaagaaggagattgagcgtctgcagaaaagaaatttgagccgccataaagcagaaagattcaaaattgctaaaacattgatgattaagtgcacaccgtgtgccatagaatggcacatggtcatttgcccacttctggtgtagacatggttcctggtttaactaatatttgtcctgtgtgctactaacagatttataataaattgtcatccgttgaactgtgaaaaaaa

SEQ ID NO: 146795 - DNA, 561 bp, Homo sapiens
cattagcgcgtaacgagagactgcttgctggcggcagagacgccagaggtgcagctccagccagccaatggccagtgacggccgttggccggcgcggaacgtggcttggccgtgtgggggcgtgaggaccatgccaagccccgaggcttcggctcggatcagtccgagaattttccaaccgggccccgggccccccatccgggaaagccggtggggccctcggaaagagagagcaggctgaagaggaacgatatttccgagcacagagtagagaacaacttggcagctttgaaaaaacaccatgaagaagaaatccgttcatcataagaaggagatttgagcgtcttgcagaaaagaaatttgagcgccataagcagaagattcaaaatgctaaaacattgatgatttaagttgcacaccgtgtgccatagaatggcacatgttcattgcccacttctgtgtagacatggtttctggtttaactaatatttgtctgtgtgctactaacagattattaataaattgtccatcagtgaactgtgaaaaaaaaaaaaaaaaaaa

SEQ ID NO: 146796 - DNA, 508 bp, Homo sapiens
atgctgacggagctggtgcccacacaggccgagcccgcagacctggagctgctgcaggagctcaaccgcacgtgccgagccatgcagcagcgggtcctggagctcatccctcagatcgccaatgagcagctgacagaggagctgctcatcgtcaatgacaatctcaacaatgtgttcctgcgccatgaacggtttgaacggttccgaacaggccccatggctttggctggccactgagggtagggtgtggaggtgtgaaggccccctgaggagctgcggcggcccaggtacgaagctgcaactctgcgcgcagtgggcgagatctcatcagccccaggctgcaggtgagacttcaggggatgctggggccccactgcccctccgctgccttgccctccatccttcctctgttccttctggccgggcaccacagcactggggctcacctcttggttgatcctcttgtactgggagaggtgccttttgtatccccaattaaaggtagaaa

SEQ ID NO: 146797 - DNA, 309 bp, Homo sapiens
aggcccggccacccggaaagctgggggtgctcgcagggctcctgccaggcatggggggcccactcctcacccacacagcaggaggacccgttgttctcaccaagaaatgacccactcctttccccagggctctggcctcagggcctaccctcacagctgaggggcccccgggtcccccatctggcccagcgccccggaagaagacccaggagaaagatgatgacatgctgtttgccttatgagtgtggggtctggcaccctgcagcccaggtccccactgctctcacacccttaggctgggacctccct

SEQ ID NO: 146798 - DNA, 1352 bp, Homo sapiens
  misc_feature (1)...(1352): n = a,t,c or g
atggactttctcctggggaacccgttcagctctccagtgggacagcgcatcgagaaagccacagatggctccctgcagagcgaggactgggccctcaacatggagatctgcgacatcatcaacgagacggaggaaggtcccaaagatgccctccgagcagtaaagaagagaatcgtggggaataagaacttccacgaggtgatgctggctctcacagtcttagaaacctgtgtcaagaactgcgggcaccgcttccacgtgctggtggccagccaggacttcgtggagagtgtgctggttgaggaccatcctgcccaagaacaacccacccaccatcgtgacatgacaaagtgctcaacctcatccagtgcctgggctgacgcgttccgcagcctcgcccgatctgacaggtgtggtcaacaatctatgaggacctgcggaggaaaaggcctgggagttccccatgactgacctggacatgctgtcacccatccacacaccccagaggaccgtgttcaactcagagacacaatcaggacaggattctgtgggcactgactccagccagcaagaggactctggccagcatgctgcccctctgcccgccccgcccatactctccggtgacacgcccatagcaccaaccccggaacagattggggaagctgcgcagttgagctgggagatggtgagtgggaacgtgagggtgatgtcggagatgctgacggagctggtgcccacccaggccgagcccgcagacctggagctgctgcaggagctcaaccgcacgtgccgagccatgcagcagcgggtcctgggagctcatccctcagatcggcaattgagcagctgacagaggagctgctcattcgtcaatgacaatctcaacaatgtgttcctgcgccatgaacggtttgaacggttccgaacaggccagaccaccaagggccccaagtgagggccnagccggcaggttgacctgatcgacatggggccctggacccaggcagccaccggcaacctctcatcccagctggcaggaatgaacctgggctccagcagtgtgagagctggcctgcagtctctggaggcctttgggtcgactggaagatgagtttgacatgtttgcgctgacacggggcagctcactggctgaccaacggaaagagcaggcctggaggatgggagccgtcaatctgtgccccccagcccgctccgttcttgcatcagccatcggtaagggcagcatccaatggcttggtggtctctctttcagggtaaaatacgaagccccccaagcaacagacggcctggctggagccctggacgcccggcagcagagcactggcgcg

SEQ ID NO: 146799 - DNA, 2362 bp, Homo sapiens
ggtggcgctggcggttgctgtcagctgattcccggggttggtggcagcggcggtagcagcaatggactttctcctgggtgaacccgttcagctctccagtgggacagcgcatcgagaaagccacagatggctccctgcagagcgaggactgggccctcaacatggagatctgcgacatcatcaacgagacggaggaaggtcccaaagatgcccctccgagcagtaaagaagagaatcgtggggaataagaacttccacgaggtgatgctggctctcacagtcttagaaacctgtgtcaagaactgcgggcaccgcttccacgtgctggtggccagccaggacttcgtggagagtgtgctggtgaggaccatcctgcccaagaacaacccacccaccatccgtgcatgacaaagtgctcaacctcattccagttcctggggctgaacgcgttccgcagctcgcccgatctgacaggtgtggtcaccatctatgaggacctgcggaggaaaggcctggagttccccatgactgacctggacatgctgtcacccatccacacaccccagaggaccgtgttcaactcagagacacaatcaggacaggattctgtgggcactgactccagccagcaagaggactctggccagcatgctgcccctctgcccgccccgcccatactctccggtgacacgcccatagcaccaaccccggaacagattgggaagctgcgcagtgagctggagatggtgagtgggaacgtgagggtgatgtcggagatgctgacggagctggtgcccacccaggccgagcccgcagacctggagctgctgcaggagctcaaccgcacgtgccgagccatgcagcagcgggtcctggagctcatccctcagatcgccaatgagcagctgacagaggagctgctcatcgtcaatgacaatctcaacaatgtgttcctgcgccatgaacggtttgaacggttccgaacaggccagaccaccaaggccccaagtgaggccgagccggcagctggacctgatcgacatggggccctgacccagcagccaccgggcgccttctcatcccagctggcaggaatgaacctggggctccagcagtgtgagagctggcctgcagtctctggaggcctctggtcgactggaagatgagtttgacatgtttgcgctgacacggggcagctcactggctgaccaacggaaagaggtaaaatacgaaggcccccaagcaacagacggcctggctggagccctgggacgcccggcagcagagcactggcgcgatcccagttcacccagggcctgccttcatggaggacatcgagcagtggctgtccactgacgtggggaatgatgcggaagagcctaagggggtcaccagcgaaggtaaatttgacaaattcctggaagaacgggccaaagccgcggaccgattgcccaacctctccagcccctcagctgagggccccccgggtcccccatctggcccagcgccccggaagaagacccaggagaaagatgatgacatgctgtttgccttatgagtgtggggtctggcaccctgcagcccaggtccccactgctctcacacccttaggctgggacctccctccctcctctggtgttaaggctgctttgggggtggcttgttacccccttttcctcctctttgaagacgggagctgccccagctgtggctgggggtgtggaggcagtgggatgaactgggggacaggtctgcgctgcagtgggatctggctgctctgccttcctttcccaccccagctgaccatgagactttgctgagaagtgggaggccccagggacaggctggctggctggctggctgcttgacccagtgttgactctccttcactgagtgattaccctgctccgggcccattgccccaagggagccctttcagagcccacactgccaagtcgaggcccctggctggaaagctggcccaaaaagtggaaaattctgccgaaacctcttgtccccttcccctgctctgctgcatgggggccccaatggcttttggctggcccactgagggtaagggtgtggaggtgtggaggccccctgaggaagctgcggcggccccaggtacgaagcttgcaactcttgcgcgcagtggggcgagatctcaatcagccccaggctgcaggtgaggcttcaggggatgctggggccccactgcccctccgctgccttgccctccatccttcctctgttccttctggccgggcaccacagcactggggctcacctcttggttgatcctcttgtactgggaaaggtcgcctctttgtatccccaattaaaggtagaaaaccaccctgct

SEQ ID NO: 146800 - DNA, 998 bp, Homo sapiens
ggcacgagccgagatgtctcgctccgtggccttagctgtgctcgcgctactctctctttctggcctggaggctatccagcgtactccaaagattcaggtttactcacgtcatccagcagagaatggaaagtcaattttcttgaaatgctatgtgtctggggtttcatccatccgacattgaaagttgacttactgaagaatggaaaggagaattgaaaaaagtggagccatcagacttgtcctttcagcaaaggactggtcttttctatctctctgccgtacactgaatttcacccccaactgaaaaaagatggagtatgccctgcccgtgtgaacccatgtgactttgtcaccagccccaagattagttaaagtgggatcgaagacatgtaaagcagcatcaatgaaggtttgaagatgccgcattttggattggatgaattccaaatttctgcttgcttgctttttaaatattgatatgcttatacacctacccctataggcacaaaagtgtagggttataataatgttaacatggacatgatcttctttataattctactttgagtgcctgtctccatgtttgatgtatctgagcaggttgctccacagtgtagctctaagagggctggcaacctaaaaggtggggagcagagaaatcttcttatcaacaatcaacatcttggtcagattttaacctcttcaatctcttgcccctcaaagcctgttaagatagtttaagcgtgcataagttaactttccaatttacaatactctgcttagaaatttgggggacaactttagaaatataattgacaggatttattggaaatttgttataatgaatgaaacattttgtcatataagatttcatatttacttcttatacatttgataaagtaaggcatggttgtggttaatctggtttatttttgttccacaagttaaataaatcataaaacttgatgtgttaaaaaaaaaaaaaaagggcggccgct

SEQ ID NO: 146801 - DNA, 336 bp, Homo sapiens
tcccaaacgttctgtactgtccaagtcagttcctgggtacaagccaaaggtcattccaaatgctatatgtggaatttgtctgaagggtaaggagtccaacaagaaaggaaaggctgaatcacttatacactgctcccaatgtgagaatagtggtcgctggatttgtgactgttgtcagcgggcccccccaacacccaggaaagtgggcagaagggggaaaaacagcaaagagggataaaatagtttttgactctaatactgtatatgcatttaagtggaatatttggtgccatttacaacattattttcatgccaataaaagattttttttgcaaa

SEQ ID NO: 146802 - DNA, 757 bp, Homo sapiens
gcacgagggatcctgagctccctgctctagacagagatggcgattcaaatgacggcgaacatgggcgaggtgatgacaaacggaaaaataaaggcacttcggacagctcctctggcaatgtatctgaaggggaaagccctcctgacagccaggaggactctttccagggaagacagaaatctaaagacaaagctgccactccaagaaaagatggccccaaacgttctgtactgtgcaagtcagttcctgggtacaagccaaaggtcattccaaatgctatatgtggaatttgtctgaagggtaaggagtccaacaagaaaggaaaggctgaatcacttatacactgctcccaatgtgagaatagtggcccatccttcttgcctggatatgacaaatggagcttgtttctatgattaagaccttaccccatggcagtgtatggaatgtaaaacatgccatatatgtggacaacccccaccatgaagaagaaatgatgttctgttgatatgtgcgacagagggtatcatactctatggcggggcccttggtcctattccatcaggtcgctggatttgtgactgttgtcagcgggcccccccaacacccaggaaagtgggcagaagggggaaaaacagcaaagagggataaaatagtttttgactctaatactgtatatgcatttaaagtggaatatttggtgccatttacaacattattttcatgccaataaaagattttttttgcaaattaaaaaaaa

SEQ ID NO: 146803 - DNA, 1384 bp, Homo sapiens
tttttttttttctaagtatagattcttttattagacatgcaaagagaataatcacacaactaagttttccacaaacgtttatgtacacgccaatgtatgcatgagacatctttcaattaaaaatgtttaaactgattttaattttaaataccactataccaatgaggataagctgattttataacttagatttaatagctctagttttcgcagttttcggaaaatagccaggttttaaacaaaattaatatatgagctatttaaaatgggtctttttaggaggtaaggtcttacacataatgggccattttggcacctgggattttcttgtccaattaataggtgacatttgacattgtatttaggtctttccttccattcattaaaccaaatcttactgtgcatgtaggggagtataggaatgctacatttaatcttacggggtccatgctgtttacccaaattttatggatggaaattaatgctttcttcagtagggccggtcttacattgtagggcagactccccgtcaagttttgtctttcaaaatggtcctcattagcaagttaccaaaagtaaaaatagggcaataaagtaacagaattccttttaaacccatagtaagctcttctggcatgaatttatagccctcttctacccttccagccaaaggtcattccaaatgctatatgtggaatttgtctgaagggtaaggagtccaacaagaaaggaaaggctgaatcacttatacaacttgctcccaatgtgagaatagtggtaagtatctgaaatgtctttttaaaattttaaccaccgtatttattggttcaaaaactagaatttatagtttcaggcagatttcaaccaaagagtcaccaaattaaatacacagggtagcttgtgaggcatagacacagcccatgtgttttcctctacattgtatattcatttctctttggcgatttgacattatagccattctctggaagtcctaaagcaaactagtattttatgtgccatattaagttaaaatttcttatgtgaggataccactaatactgggttttgatttagggccatccttcttgccggggggtatggacaatggggggcttgtttctatgattaagacctacccatggcagtgtatggaatgtaaaacatgcattatatgtggacaaccccaccatgaagaagaaatgatgttctgtgatatgtgtgacagaggttatcatactttttgtgtgggccttggtgctattccatcaggtaaagattaaaaaaagagcaaacattatctttgggagatgagactctcccagcactccaaaaggctgcataaacgctatcatgacatgaaggaattccaccagactggactaat

SEQ ID NO: 146804 - DNA, 457 bp, Homo sapiens
cctgtttaaaaaaaaaattatgatggctgagtctgtgtcaaagaaaattaacttattttttggtgttaactaaattatctttaggtaattacattttatatagattgtgatgatatatggcagtagttttcctattactactacttttttttcttgtttttcctttgtgtttttgtaatacccagtggagccttttcttaaaatgaaactaggcaaacctaagacaattatgcttaaggaaaaaaaaagggggggaatcttacttcaaacttgttttttggaaacgggttcaaatggaatggctcagagcaggtgtgatggctcctcctgtaatcccaacactttgggaggctgaggtaggaggatcgtttgagcacaggagttcaagatgaagcctgagcaacatagtgagaccctgtctctatgaaaaaagttaaaaaaaaaaaaaaaaaccttg

SEQ ID NO: 146805 - DNA, 290 bp, Homo sapiens
  misc_feature (1)...(290): n = a,t,c or g
ctatatatttctttggctgtgntaatgaaggcctcttcaanattgcaggctgttttggctgaagtttccatgaatataagtccatgctccctagcaaaggcctctccttcttctctcttcagcatctgcgggactctaggtcactcttattcccaatgagcatgataaccatgttggaactagagtgctgccgggcatcctctaaccatgaggtcaggtggttgaagnttcacnccgtatcccagatttgcagtttgatttgttttccatnaatgctgaccatacgagct

SEQ ID NO: 146806 - DNA, 1020 bp, Homo sapiens
cccacgcgtacggtcggaggtaagtgtttatagaagtttggcggacccggaacccacaggacgcgacaccatgacttatgctgatctcttcaagtatatcatcatcggagacacaggtgtggggaagacatgtttcctcctgcagtttacagataagcggttccagcctgtccacgacctttcattaggtgtggagtttggaggctcgttatgctcaacattgatggaaaaccaattcaaactgcacatctgggactacggctgggcaagaatccttccgttctatcacccgttcctacttacaggggagcagctgggagcactgctggtgtacgacattacaagggcgttgaaacctttcaaccacctggacctcatggttaggagggttgcccgggcagcattttagtttcccaacatgggttattcattgcttcattgggaataagagtgacctagagtcccgcagggatgtgaagagagaagaaggagaggcctttgctagggagccatggacggatattcaggggaacttcagccaaaacagcctgcaattgttgaagaggccttcattaacacagccaaaagaaatatataggaagatccaccagggtttatttgatgtccacaatgaggcaaatggcatcaagattgggccccaacagtcaatttcaacatcagtgggacccagtgcctcccagcggaactctcgtgacatagggtccaactctggctgctgctgaacatctggcttgaactttttttgtccttcctggaatagcttcagatcaataggcttaatgaaagaggtctttcttgctttgggctgagagcagcctcttttttaaaggtgtgatgtttgggctttccacctaaagaccaggagagaatttgggcccttactgacctgtcctccttcagggacatgagcattccctatagattagggttcttcttatcctcctatacaaatttcttaaattgttaggatcaaagttgattatcacagtagttaaaaaa

SEQ ID NO: 146807 - DNA, 2157 bp, Homo sapiens
tttgttaaacaggcattaccattgtatatttaaaaacttgggaagttttaactgaagaaggcagcatgatatgatagcttttgctttttacaatatgatgttattagtcttgttctgtgtggttctggagagcaaaacaataaagcattgtaagttgtatgagtgtaagaacaagtattcactactaattcccagcacatgaatagtactcaatacattttcaataaatgattgaatacatgtatgataaatgaaaaccagtgggttaaacttacaaggaggcagaggcttttttttgttttgttttgtttttgagacagagtcttgctctgtcgcccaggctggagtgcagtggtgcgatctcggcttactgcagcctccacttcctgggttaatttgaagcagaagagggcagttgttatactgccctgtcagttggatgcggagtcttactcaaaattcattctcagcattcttcttttatggtatcttctttggcacttagcagcgcatcaggtaggcatcttctatttttcttcattccttaatttcctttgtatccctcaaatggttatttatttggctggagtctgttttgttcattaagcaaacatgtctttgctttgaacatgtctttgatttgatggatacttaaattcctcatcaaacattttgttgctatgcataacgttttctttggccaactccagcaatttcccacattttgacatgcaatcatgttaactcccattttcttttgtaatccaacatcttctatttagataattactttaacaatcaatgacttaatattctaatcataaatttatacaaaaataaaattacctccaaaacattgctacctttcctaaacattcagtcttgccacagtttaataaaaggaaagaacattaaaaaggataagacactgtaatgattagatgctttttataagcctaaaggcattgtgattatttagacagaagagaagaaagtgaagtgaaaacctgatagttatgtagtctcatggtttgctgttgagaggctgaacaccagctgctttccttttctaggaagataataaagtgggctttggctacaacataaagatgttgggttagacagtttcactacagtaagaacaacgggatgagttgcccaggaaattgtgaaatactttctaatgatctttaaagatataatgaacactaattcatctggatttgtttaggtgtggtcctggttaaaggcaaagggaaggatcagataacttcatgttttttccatttaacatacccaatagattcttgattaaggggaagggaaaatgagcaagatacagtccagtattctaaaaacaatcagccttacggggatcatttccaaaagcatcctggtttttggaccttaaggcctttgataccttaacccaatttgacctaccaccagtggaaaattctagtgcctgggttttatagggtagaagaaagacatgcagtcaagtggccaatacttcatgtggaggataagcaatgagatccttcttgctgtctttccttttgactgttctgggcaatatcaaattagtttcagtggcttgattctaggccaagattctggcaacagattgtagtcttaccttgtttttcttcaatctcactggatctctctctctttttaccccccttaggctgagggtaaaaagctgggattggtaggctgggtccagaacacctgaccggggcacagtgcaaggacaattggcaaggtcccatctcccaaggtgcgtcatatggcaggaatggcctgaaacaagagaagcctatcaaaaaccccctaaaactatcggacaatagcaaacttcaacaatgaaaaagtcatcttgaagttgggattacctcagactttccaaattgttaaaataatgggcctggaattttaagttttcctaaggttaaactccagtggtttggtttttattattaatagagatagaactattgtgtgttaatattaggcattagtcaataagttattttaatgtcagattttttgaatgttattattatattacctgtatgatggaaggattaccacttttccccaattttatccattaaaaacgttagaaccttctgcttagagtacttttaaaaa

SEQ ID NO: 146808 - DNA, 2834 bp, Homo sapiens
tcgatacgactttttttttttttttttttttttttttggaaagcaaggatcacacttccccctccctgttccttaatcccttttctaaaaaggggggaaaatccggatggaattttagggaattggtctggtgtcagctgtgttttattgcacacctaaatcctgattataggcttttcatttctccgcaaagcctttattttggcagttaagccaaatgtgttttccagaaagttagttattttctcctctttctttcctttctttcctccctttttcccgtctgaaccccaaacgttattgtccaaacatgaactggacagcagctttttggtttcttgaccctgtaatatggacagtctgctaatattgcacagaagggtgcagtttttggggttatagtcggtgattttcgctaatcaatcatattaggcagggaaaaaaaatgacttgtttccggttggacttggagtccttaaggaaaagtggcccatagtttagtgacaatttccaaaggctttagtaccacctgtatttcaaaatgggggacccaaactcccggaacgaaacaagctctgaacagactacgtgctcagcttagaaagaaaaaagaatctctagctgaccagtttggacttcaagatgtatattgcctttgtattcaaggagaagaagaaaaaagtcagcactttttgaagtgtctgaggttataccagtcatgacaaataattatgaagaaaatatcctgaaaggtgtgcgagattccagctattccttggaaagttccctagagcttttacagaaggatgtggtacagctccatgctcctcgatatcagtctatgagaagggatgtaattggctgtactcaggagatggatttcattctttggcctcggaatgatattgaaaaaatcgtctgtctcctgttttctagggtgggaaagaatcttgatgagccttttagggcttgttcaggccaaaattttgagtttcatcatgggtgactatggaaaaacagtttcttgcatgttacttgagccgcaaggacaagactgggatccgttgtcaacaatcctaaccagtcagtgtttctcttcattgacagacagcacttgcagactccaaaaaaacaaagctacaatctttcaagttttggcagcatctgccctctaccctgccacaggaacagcttaacccactgggcagttggcaccatagaggatcacctccgtccttatatgcccaggagtagagtacctgacccagcaaaaatgggaggaagatcagaggaatgcaggcagcagttttttttcttgtttttcttaccactttattcttttcagagttttaaaggaaaatgggacttcatggcacaggaacactatgcattttgaaacttgttccacccccgggatttttttaaatccatttttatcctcagaaccttaaacaaaaattagatgtcgtgcacggactgtgtgaaagaaagatgctttgcatatttgctgcactgcatcagtatcttactaaaaatgtgaaatgaaaggactattgtacactgaaatgcttaaatgtatctgaaagcacaaggtgatactcatttttatggtcttcccatttgtgctggtttttgcctctttgacatctgtcatcagtatttagagggtgagaagtgaatgtaacagggtataaaataaccatttttaaaaacaataactttgctataatcacagttgttccagagcactggtcagatacattcctaatgaccagaactggtttaaaaaaagaaaatccaaccatggggaaagaaatccttaaatggaaaaacggcatctccttgtagggcatttttggcctccataattttacctggggccatggtttggtttcctgggtactccatgtattttttttttccagatctctttccccaagttgctattgtaagagtattctgctgcgtgtggatgcagttatacacattaaaggcagatctggagtctgaagtagctattaaagcagctataaaacagaaatacatgcatagctgcagaaacccatgataggtagaggacttttcttttggttttgttttgttttgttttgttttgtttttggttttaccagagaagagatttttattacaaaagaaaaaaaattcccaggggaattgtgccagaaaatgctgggtttttacaccaatccctaaggaaacacctttaacaagggtttttatggaggtagtaaaaaaggtatataaaagatggaatcctaaaattgtaaaaattaaccattggagtgtccaaagttcttaaaagccagaactcattttggtgcaaaggacccttggggaggaccacccgtaagggggtttttttttttttcccccctttaaaagggagaaaaagctttgcttaagggttgcatacttttattggagtaaatctgaatgatcctactcctttggagtaaaactagtgcttaccgagtttccaattgtatttagcttctggttggaatttgaaaaaaaaagaaaaaaagaaaaaggaaaacctaaataaaataggtgaaagttccctgactattcaggtgaatacacaaagtttgaagtgttaactttttctttccatttcactgatgttactggtcaccttagagaattatttcatagtctgtggctaaatagtaaattcagaagaaaaatacctggcaattgagtgtgtaacttcaacaagaacaggaatcaagaacatactgtcagctttcaacagttagcaacctggccttatgccttgcttcatgggaaagggccattcttaaatttcaaaa

SEQ ID NO: 146809 - DNA, 587 bp, Homo sapiens
tgggttttataaatgttaaaatgttttagaatgcaagcaccaactgtctagtggagttcttgtgtcctttctctgcaggtatttgaaatatctcaccaaaaaatatttgaagaagaataatctacgtgactggttgcgcgtagttgctaacagcaaagagagttacgaattacgttacttccagattaaccaggacgaagaagaggaggaagacgaggattaaatttcatttatctggaaaattttgtatgagttcttgaataaaacttgggaaccaaaaatttgtaacttgacttctttttttttctgcttaaaaatttcaattctcgtggtaataccagagtagaaggagagggtgactttaccgaactgacagccattggggaggcagatgcgggtgtggaggtgtgggctgaaggtagtgactgtttgattttaaaaagtgtgactgtcagttgtatctgttgcttttctcaatgattcagggatacaaatgggcttctctcattcattaaaagaaaacgcgacatctttctaagattctctgtgggaaaatgactgtcaataaaatgcgggtttaagggcaa

SEQ ID NO: 146810 - DNA, 936 bp, Homo sapiens
cgtagttcgctcacctccctttctaactccgctgccgccatggctcctgtgaaaaagccttgtggtgaagggggggcaaaaaaaaagaagcaagttctgaagttcactctatgattgcaccccaccctgtagaagatggaatcatggatgctgcccaattttgagccagtttttgcaaagaaaggatcaaagtgaaacggaaaaagctgggaaccttgagtggagggggtggtgacccatcgaaaggagcaagaggcaagatcaccgtgacathccgaggtgcctttctccaaaagggtattttgaaatatctcaccaaaaaatattttgaagaagaataatctacggtgacctggtttgccgcgtagttgcttaccagccaaagagagagttacggaattacagttacttccagattaaccagggacgaaggaaggagggaggaagacgaggattaaaatttcatttttcttgaaaaatttttttattagtttccttaaattaaaactttgggaaccaaaatggtggtttatccttgtatctctgcagtgtggattgaacagaaaattggaaatcatagtcaaagggcttcccttggttcgccactcatttatttgtaacttgacttcttttttttttctgcttaaaaatttcaattctcgtggtaatacacagagtagaaggagagggtgactttaccgaactgacagccattggggaggcagatgcgggtgtggaggtgtgggctgaaggtagtgactgtttgattttaaaaagtgtgactgtcagttgtatctgttgcttttctcaatgattcagggatacaaatgggcttctctcattcattaaaagaaaacgcgacatctttctaagattctctgtgggaaaatgactgtcaataaaatgcgggtttctgggcaaaaaaaaaaaaaaaaa

SEQ ID NO: 146811 - DNA, 686 bp, Homo sapiens
ttttatatttttcttttctttctcttttttcttttctttttttttttcagagacagggtcttgctcagtggcccaggctggagtgcagtgccacgatcatggttcaccacagtctcaaacctcccaggctcaagcgatcttcccacttcagcctcccaaagtgctggggattacaggcgtgagacaccattccctgccccctttggggttccaaatgggaattttcttgttgttttctatgctgaaattttgtttctgggtttgttctgctttgctttgtactgttcttgaatttttaaggacaaattattttttatcatgataactgaggggttagggttaggttgctatgtaaattattttgaaggcttaggattctgagggctaactggcagtgagatattcagagataatatactatacttaatatcatcacataggatattttaggtgccataaaattgaaaactagacattaaaatgcaggcctcgagggatgccttacatagccttgtgaaatgacatttccacaattaaatgtaccttagtgtattataggattagcttaaaggacatcacccaagacacatgtagaatattcaggttttgacatttcaatttagagcaattattttaagaacttttcaaaatgtatttttgaacataacaggcacaatggtaaggta

SEQ ID NO: 146812 - DNA, 464 bp, Homo sapiens
  misc_feature (1)...(464): n = a,t,c or g
ttttttgaacataaactcaagattttattgtcttcataataaaagatgacacttagaacntggatcacttggccctttctcttcttatctcctcccagttcaaaatgcttgcatcttttaatagccagcattctcttagatctgcagttgggctcaacgcactcaagccttagcacaatcttctttgtagttttagcctttttccggaaaatcggcttagtttgcccaccatagccactctgcttcctgtcataacgccgttttccctgggggcgtacagaggaatccttgcccttcttggtactgtggtcactttatggggggttgggngcttgccacaatttnttacaggaaagtccgggccctcggtgcncaatttnttggggctcgaggggccaaaaatttccctataggtgaggtcgntatttaaattcggnaaatcanggtcanaggcttgttttccc

SEQ ID NO: 146813 - DNA, 465 bp, Homo sapiens
cgacccacgcgtccggatagcgctcacgcaagcatggttaacgtccctaaaacccgccggactttctgtaagaagtgtggcaagcaccaaccccataaagtgacacagtacaagaagggcaaggattctctgtacgcccagggaaagcggcgttatgacaggaagcagagtggctatggtgggcaaactaagccgattttccggaaaaaggtgagtggtagttactatttgacgtttcccagttaattgccgtaaggatatgcacttgtctctagtccacacacttcatgatataggtatagcgttagtttagcgaagttttcactgcactgatatatctagtaggtgatggagctgggaatgcaactcatgtctgactagtccacaatactgcactatttcagtggttacgattttttatcctttcccttcttgaagaggcaaaaaattgaggaatgtgccctg

SEQ ID NO: 146814 - DNA, 568 bp, Homo sapiens
  misc_feature (1)...(568): n = a,t,c or g
cgggataaccaatttccccacgggaaacagccttgacttgatttccgaatttaaatacgacctcacctataggggaaattttggccctcgaggcccaaagaatttcgncacgatgattagccctcacgcaagcatgggtttaacgtcccctaaaaccccgccggacttttctgtaagaaagtgtggcaaagcacccaacccccataaaagtgaccacagtaccaagaagggcaaggattcctctgtacgccccagggaaagcggccgttatgaccaggaagcagagtggctatggtgggcaaaactaagccgattttccggaaaaaggctaaaactacaaagaagattgtgcttaaggctttgagtgcgttgagcccaacttgcagatctaagagaatgctggctttttaaaagatggcaagcatttttgaacttgggaggagataagaagagaaaggggccaagtgcatccagttcttaagtgttcatctttttatttattgaagacaataaaaatcttgaagtttatgttcacttcaaaaaaaaaaaaaaaaaaaaaaagtcgagc

SEQ ID NO: 146815 - DNA, 2591 bp, Homo sapiens
  misc_feature (1)...(2591): n = a,t,c or g
atgcgccgacccggcgccattttggtggccgggcgcggaggtgattccacactgaggcgagcgcggcagtctgaggtggtagtggcagtgttcgtgtgctcaggtctgaatcgccgagggaggaggcggtggaggaagaggtggcggcggtggcggtggtcgtagcggtggcggaggaggcgggtacgaatcagctgcgggcggagacaatggccaacatcgcggtgcagcgaaatcaagcgggagttcaaggaggtgctgaagagcgaggagacgagcaaaaatcaaattaaagtagatcttgtagatgagaattttacagaattaagaggagaaatagcaggacctccagacacaccatttgaaaggggaaggttcccaactggagttaaaaatacccagaaacatacccatttaatccccctaaaggttccggttttatgcactaaaattatggcatcctaatattagttccgttcacaggggctatttgtttgggatatcctggaaagatcaatggggcagctggcaatggactntcccgcacgggtattatttgttcatttngcaaggcactattgggccagcctgcagaggccccagatggtcccccacaggtggcctgtaggtaggccaaatccaggtaccaaaccaaaatccccccgaaatggtccaaaccaggaccagcctccgacctttggggcacatgtgtaatgctgggagcaccccagtttcctagtcccagaatacacccaaaaaaatagaaaacccctatgtgccctatggggcttttgatagggaatggcagttattagtgggccttgttctttcaaaatccatgggatgtagagacctgcaacagaattgcctcctgagtaacctgaggcatagagagctgctggatatagtcaagcttgccctcttcttgaggagcacccaacatctgttatttttaggattctgcatagatttcttttaaactggcattcttgcctaatgatgttatctaggcaccattgggagactgaaaaaaaaaaaatccctgctctgtaaataaagctaattaaacgtctgtgtaaatttaaaaaggggaaatactttaattttttttcttaatagtgtaaaaattccctgagctaagctaaaaccatggaagaaacatgctactttagtgtttagcagtgtaccaagactagcaagagtttgcttcaggattttgttgaataattaagataatattttgagtgtgtcagggccattcaaattgttggtgttgcatcacagctaccttaactgtttttaacatggatcctctgtgcctgtgaatttacttgcatgcttgtacttgacttcttaggatgggtagctgaaaagaccaccattttaagcatttgagaattcttaaatatgaaatttattcagaattgaagaatggtgacctattcagagcctttttgtcccttgtcaacagactgggacagtgtctgattcccccttcaccccccccaaccccccggccttggccacacacaagctaatattctaaatgggtaaaatttcccctgtatccaggtgggggaaatgtgctgaaggacaggtaagtaatccccttgcctccatttttaaggtcgtaggtttggaaaggtcctgtcccagttccttcaaacactcttaaatttttcttaagtaatgtaaaaahtggaactgcccaattttatttctcttggcaaaaatagtaaatacttgatgttgcattattcccagggtttaatgaaagaacccaacttagtttttcagtgaatttgacacctattttttagtgatgaaatttttctttgagaactggcaaggatgcagtcagctgtttgcagtttttagcctgattttgggggtctatagagattgctttattgggatacttcaagtcattcttgcttgcacttcccctattgacacatggaaagctgtgttggggtgttttattgtaccatacttcagatgcacatagggaatagaagtgtgttatgaaatctggctttgctttatggatgtttctggatgaatgacggaggaattggaaaactttaccttctcttgtacatagtcagacctatttgtattacatttacattccattctaagttcaaaaagtttgaaaattattagttttgcaagatcacacactaatgtaaccatttttatgaaggttgaagtggatttatgcaggcagttctatatatagaaatacaattctttttaaatttttaggaccaatacaaaataacaaaaatgtaatggaatcagactgaattaaagtaaggctgtatattgaaagtcatattataaaaggtttgctttctttaaagtgttatttatcttaaattataatcgttaaatgtttggaagataatttttgaatcataacgtcagcataacttcatttgacttcctcaataatcttgatactagaagcaataaaagaaccattattaaatatattgtaatgttaaagatgtgbaaggttcttccaaaaatttgtaaggctttcctaattaacagtaaactcttatagctgatattattacatacta

SEQ ID NO: 146816 - DNA, 1452 bp, Homo sapiens
cttgtatctgaacatgcctttgaaattccagacaatgttagacctggacaccttattaaagaactttctaaagtaattcgagcaatagaggaggaaaacggcaaaccagttaaatctcagggaattcctattgtgtgtccagtttcacgatcctcaaatgaagcaacttccccataccattcccgaagaaagatgaggaaacttcgagatcataatgtccgaactccttctaacctagacatcctagagctccacacaagggaggacatcttgagctctaaactgaatggaaaattcaacaaacatctccaaccatcctccacagtacctgaatggagagcgaaagataatgatctacgattactgctgacaaatggaagaataattaaagatgaaaggcagccctttgcagatcaaagtctttatacagcagatagtgaaaatgaagaggataaaagaaggacaaaaaaggcaaaaatgaagatagaagagagttcaggagtagagggagtggaacatgaagaatctcaaaaaccactgaatgggttttttacacgtgtgaaatcagaactcaggagtagatcatcaggatattctgatatttctgagtcagaagactccggacccgagtgcactgcactgaaaagtatctttaccactgaagagtctgaaagttcaggtgatgaaaagaaacaagaaataacatccaactttaaggaggaatctaatgtgatgaggaacttccttcaaaagagccagaagccatctagaagtgaaattccaattaaaagggaatgtcctacctcgacgagcacagaggaagaagctattcagggcatgctgtctatggcagggttgcactattccacgtgtttacaaaggcaaatacaaagcacagactgcagtggtgaaagaaactctctccaggatcccagcagctgccatggcagtaaccatgaggttaggcagttgtatcgctatgataaaccagtggaatgtggataccatgtcaagactgaagatccagacttgaggacttcctcctggattaaacagtttgatacttccagatttcatcctcaggatctaagtagaagccagaaatgcatcagaaaggaaggttcatcagaaattagtcagagggtacaaagtaggaattatgtggacagcagcggctcaagccttcagaatggaaagtatatgcagaattcaaacctgacttcgggggcgtgccagataagtaatggcagtctaagcccagaaaggccagttggtgaaacttccttctcggtgccccttcaccccaccaagagaccggcatcaaatccaccacctatcagcaaccaggcaacaaaaggtaaacgtccaaaaaaaggaatggcaacagccaaacaacgtcttgggaagatccttaagttgaacagaaatggccatgcacgtttctttgtgtga

SEQ ID NO: 146817 - DNA, 1743 bp, Homo sapiens
cggttcgacgacttcgtcttaacattggcatgcagctcaggtgttatgagatggtgaaaaggctaaaaacaccagatcttttcaaattccctttctttgaagccatatgttggtttgtagccaaaaacttgctggaaaccctgaaagaactgagagaagatggtttccagcctcaaacttacctagtacagggagtgaaagcactgcatactgctttaaaattatggatgaaaaaagaacttgtatctgaacatgcctttgaaattccagacaatgttagacctggacaccttattaaagaactttctaaagtaattcgagcaatagaggaggaaaacggcaaaccagttaaatctcagggaattcctattgtgtgtccagtttcacgatcctcaaatgaaagccaacttcccccataccattccccgaagaacgatgaggaaacttcgagatcataatgtccgaactccttctaacctagacatccctagagctccacacaagggaggtcctcaaaagattagagatgtgtccatgggaagaggacatcttgagctctaaactgaatggaaaattcaacaaacatctccaaccatcctccacagtacctgaatggagagcgaaagataatgatctacgattactgctgacaaatggaagaataattaaagatgaaaggcagccctttgcagatcaaagtctttatacagcagatagtgaaaatgaagaggataaaagaaggacaaaaaaggcaaaaatgaagatagaagagagttcaggagtagagggagtggaacatgaagaatctcaaaaaccactgaatgggttttttacacgtgtgaaatcagaactcaggagtagatcatcaggatattctgatatttctgagtcagaagactccggacccgagtgcactgcactgaaaagtatctttaccactgaagagtctgaaagttcaggtgatgaaaagaaacaagaaataacatccaactttaaggaggaatctaatgtgatgaggaacttccttcaaaagagccagaagccatctagaagtgaaattccaattaaaagggaatgtcctacctcgacgagcacagaggaagaagctattcagggcatgctgtctatggcagggttgcactattccacgtgtttacaaaggcaaatacaaagcacagactgcagtggtgaaagaaactctctccaggatcccagcagctgccatggcagtaaccatgaggttaggcagttgtatcgctatgataaaccagtggaatgtggataccatgtcaagactgaagatccagacttgaggacttcctcctggattaaacagtttgatacttccagatttcatcctcaggatctaagtagaagccagaaatgcatcagaaaggaaggttcatcagaaattagtcagagggtacaaagtaggaattatgtggacagcagcggctcaagccttcagaatggaaagtatatgcagaattcaaacctgacttcgggggcgtgccagataagtaatgggcagtctaagcccagaaaggccagttgggtgaaactttccttctcggtgccccttcaccccaccaaggaggaccgggcattcaaattccaccacctattcaggcaaccggggcaacaaaaggtaaacgtccaaaaaaaggaatggcaacagccaaacaacgtcttgggaagatccttaagttgaacagaaatggccatgcacgtttctttgtgtga

SEQ ID NO: 146818 - DNA, 3110 bp, Homo sapiens
atgtactcggggaaccgcagcggcggccacggctactgggacggcggcggggccgcgggcgctgaggggccggcgccggcggggacactgagccccgcgcccctcttcagccccggcacctacgagcgcctggcgctgctgctgggctccattgggctgctgggcgtcggcaacaacctgctggtgctcgtcctctactacaagttccagcggctccgcactcccactcacctcctcctggtcaacatcagcctcagcgacctgctggtgtccctcttcggggtcacctttaccttcgtgtcctgcctgaggaacggctgggtgtgggacaccgtgggctgcgtgtgggacgggtttagcggcagcctcttcgcccgccccgcaccgcttcccgctcggccccgcgccccccgccctacaccgccccgctccccgctcgcctcctcaacgctgcccgaccccagccgcatggcgggtgccttcctcttcctccgtcccctcccgccccacgctgtccaggactccattcctgtggtctctcatctgccccccacttgtcaccagacgctgttacttcctaaaatggcggacaatcttcccacagagtttgatgtggttataatagggacaggtttgcccgaatccatccttgcagctgcatgttcaagaagtggtcagagggttctgcatattgattcaagaagctactatggaggaaactgggctagtttcagcttttcaggattgctatcctggttgaaggagtatcagcaaaacaatgacattggggaagaaagtactgttgtatggcaggacctgatccatgaaacagaagaagccatcactcttcgcaagaaggatgaaactattcaacacacagaagctttttgctacgccagtcaggatatggaggacaacgttgaagagattggtgctctgcagaaaaatccttctttgggggtgtctaataccttcactgaagttctggattctgcattacctgaagaaagccagttatcgtattttaatagcgacgaaatgcctgcaaaacacactcagaaaagtgatacagagatttcactagaagtaactgatgtagaggaatcagtggagaaggaaaagtattgtggagataaaacttgtatgcacacagtttcagataaagatggagataaagatgaaagcaaatctacagtagaagataaggccgatgaaccaattagaaataggattacttactctcaaatagttaaagaaggcaggaggtttaatattgatttggtgtcaaaactgctgtattctcaaggattgctaattgatcttttaatcaaatcagatgttagtcgttatgtagaatttaaaaatgtcactaggattcttgcatttcgggaaggaaaggtagaacaagttccttgttccagagcagatgtctttaatagcaaggaactcaccatggttgaaaagaggatgctaatgaaatttctcacattttgtttagagtatgaacaacatcctgatgaataccaagctttcaggcagtgttcattttcagaatacttaaaaactaaaaaactaactcccaaccttcaacattttgtactgcactcaattgcaatgacatcagaatcatcttgcactacaatagatggtcttaacgcaactaaaaacttccttcagtgtctcggacggtttggcaacaccccctttttatttcccttgtatggccaaggagaaattccccagggtttctgtaggatgtgtgcagtttttggtggaatctattgtcttcgtcataaagtacaatgctttgtagtcgacaaagaatctggacgatgtaaagcaattatagatcactttggtcaaagaataaatgctaaatattttattgtggaagacagttacctttctgaggaaacatgctcaaatgtgcagtataagcagatctctagggcagtactcattacagatcagtctatactaaagacagatttagatcagcagacttccattctgatagttcctccagcagagccaggagcttgtgctgtacgggtcacagaattatgttcttcaaccatgacatgcatgaaggacacctatctggtacatttgacatgttcatcttctaaaacagcaagagaagacttagaatcagtggtgaagaaattattcactccgtatactgaaacagaaataaacgaggaagaacttacaaagccaagactcttgtgggctctttattttaatatgagagattcctcgggaatcagcagaagctcgtataatggcttgccttccaatgtttatgtctgctctgggcctgactgtggcctgggaaatgagcatgctgtcaagcaagctgaaacacttttccaggagatctttccaactgaagaattctgccctccacctccaaatccagaagacattatctttgatggtgatgataagcagccagagcgtccctgggaaccaataatgtagtaatggccaaactagaatcctctgagggaaagcaaaaacctaggaaagcccagagaagcacccttcaaaattggaaaagagcaatctcgaaatgctgttttggacctccttcatggcatcagaattttctcatttaaaggacaggtttcccatatgagtaattagaagtggttatatatgatgaatgctatgcagatgttgtctttaactctcagacattcagcattgaatatctttgttaacctatcaatgagtgatttattgattattgaacattttgtttagaatgggctatatgacccaggattcttaaaacagagttagcctttattttagtattgggtatatatgtaagggttccatattagcaacctcagcttaaaggtaatgtatttgcctaatgaccttcagattttatctttgtctacagaacaattagtaataccccaagtaatattttaattacttttgcagctgttacagttgctgcggcctgttcgaatagtgaaacatacacaaatggtaaattatgtggatcttttgcatataatataaatgtatagacatggtggtaggaatagcaactaatacaaatgccaatatgataataaaatacatttgtctat

SEQ ID NO: 146819 - DNA, 658 bp, Homo sapiens
attttccatgaaagaagttgatgtgtgcagaactttcagtacccaatattgtaattgcactatttataatcttaccacttgagttttacttaaggcaatcattgtcaattaaaaacaagtagagaaatatgtctaattgggaacatgttaaggatgataccagacttaattaacaagcatcacagaagtaattagactcattactgaacagttcattgtctcctgttacattattaagccttttagcagctttgtgtaacatttcattggatgtttctaatgcagaaaataatagggattgcaaagagtacaatatgaaggaagtaaggatttaatccttcttttcttgtctttcagatcaaagggggagcctgcgccgttgtgttggcaggcaatgcagtcattttccttacaattcaagggtttttccttatatttggaagaggagatgattttagctgggagcagtgggtagcactttattctgattacagtgcattgaatttcttaggaactcatactatctgtatacatgtgcacatgcgggcattttactatggaaatttaatatgctggggtttttaatacctttatatatcatgttcactttaagaaagacttcataagtaggagatgagttttattctcagcaaataga

SEQ ID NO: 146820 - DNA, 1516 bp, Homo sapiens
cccagctcgggagacatggcgggcgttaaagctctcgtggcattatccttcagtggggctattggactgacttttcttatgctgggatgtgccttagaggattatggcgtttattggcccttattcgtcctgatttttccacgccatctcccccatcccccatttcattgccaaaagagtcacctatgactcagatgcaaccagtagtgcctgtcgggaactggcatatttcttcactactggaattgttgtttcctgcctttggatttccccggtaatccttgcccgtgtggctttgatcaaaatggggagcctgcggccttgtgttggcaggcaatgcagtcattttccttacaattcaagggtttttccttatatttgggaagaggagatgattttagctggggagcagtggtagcactttattctgattacagtgcattgaatttcttaggaactcatactatctgtatacatgtgcacatgcgggcattttactatggaaatttaatatgctgggggtttttaatacctttatatatcatgttcactttaagaaagacttcataagtaggagatgagttttattctcagccaaatagacctgtcaaatttaggattatgttacccccaattaaggttacttggttggctggttcatggtaggtcacggtgcttttcaggaaattttattaaccacaagtcttggtagggcagctgcccacccttatgccagtgccatcggaaacctttttgcttggggggatgtgcttgggaggagggcaggataacgctggaaggcagggcctcttcatggaccccaggggaaggccgggggtggatcccgtctttgtgttggtagtcccatgctattaaaagtgtgggcccacaggaccaaggagccttcaacattttcctaggagccttattagaaatgcagaatctgaagcccccactctggaccccaggacattttgatgagatccaaaggagttgtatgcacatggaaagtttgagaagcatcatcatagaggaagtaaacatcacacccaacttccttatctttcccagtgggctaaaaccacttaaccctctctgggtgttaccctgctcatttgtttaaaaaaaaaaaaaaaaagtctcacctgtttttttgctggggacaagttaaaaggttcaaccctataatatttaggcagtccctcaaatttatgaaaagtgttctcagaattggggagacagccaaggggaacaaagcctcagttaggaggaataaagtgtgatttttttttaaagatcacttgcacagcatgctaaatataggaataattgaatgtatatttcaatattgctaagagagtaaatttctaatgttctcataaaaaagttaaatatttgagatcatatgttaattagtgtaatcattccaccttatattcaaaaatcataaaaccgtattgtaccctataaaaatatacaataatttgtcaatatataatcaaaaaaaaaaaaaaaa

SEQ ID NO: 146821 - DNA, 286 bp, Homo sapiens
gcagcggcgaccggagcggtaggagcagcaatttatccgtgtgcagccccaaactggaaagaagatgctaattaaagtgaaggaatgatgagaagacagcagctgattacaagattttaggtggttcagtccttcacctggtgttggctctgagaggaggaggtggtcttaggcagtgatggaccctccattttacctctttaccctgtcgctcataatgaggcatcatatatcctctcactctctgggacaccatagccactgcccccttccctggatgcccagt

SEQ ID NO: 146822 - DNA, 937 bp, Homo sapiens
  misc_feature (1)...(937): n = a,t,c or g
gtgacccggaagtagaagtggcccttgcaggcaagagtgctggagggcggcagcggcgaccggagcggtaggagcagcaatttatccgtgtgcagccccaaactggaaagaagatgctaattaaagtgaagggtacctgcttctcccagtccctaacgtaggtcgcctccgagcacagccctaaaatcggggcctcccaagggctagactatgagcctttactggtggttgccaaggtgtggtatctcacccgtcctacaggaaccaaagcggggagtgtgttcagtcagtacctgccttttcttgagcctgggattctgggaccagcctcacttccttggctgaggcagacgctgaccggaaaggagattgagattgacattgaaccttacagacaaggtggagcgaaatcaaaggagcgtgtgggaggagaaagaggggaatccccccccacaacagcagaggctccatctacaagtggcaaagcagatgaaatgatgagaaagacagcagcttgatttacaagattttaaggtgggttcagtccttccaaacanacncttgggggtgtttgggcttctgagaaggagggaaggtggtctttagggcagtgatggacccctccatttttacctcttttaccctgttcgcttcattaatgaggcatccatatatcctcctccactctctggggacaccataagccactggccccctccccctggattgccccagtaatgtattgtctactgggtgggagactgtgaaggatcccaagggattcagtattcctggcccagagggcccttgctgggctactgggtggttagtttgcagtcctgtgtgcttccctctcttatgactgtgtcctgggttggcaaataaaatatttcctggcctcctggaaaaaaaaaaaaaaaaaaaaaaaaagtcgacg

SEQ ID NO: 146823 - DNA, 1673 bp, Homo sapiens
  misc_feature (1)...(1673): n = a,t,c or g
tttagattaaaatgtatatatttcaaaagagaaaaggaagcagtaagaaataagatagaggagggcctttgacaagatggcggcaggaggcagcggcgatggtggagaagcgcagctcgaaaagcgatgccgatttctggtttcctggggctgcggcccatttcggcggacccagcgctgaggcggcggcggcggcgaggcccaagaaataagaagtgggactggccggaggcttgcgcaggagccgctggggctggaggttgaccagttcctggaagacgtgcggctacaggagcgcacgagcggctggctctgttgtcagaggccccaaatgaaaaactcttcttccgtggacactgggctccaaaggaaaaatgggctgacaaaagaagagaaccaaagtcccagaagaagtcacttgcttctcaagaaaccccttccgggtttgacctcatcctccgagaacacatccaaaagtccctgccccccaaaagacgtcctccgcccaccaaggttccccaacgccaagaaggcttaggcggaaaggaagcagctatgggaagaagctggccaagcagggcgatgctgccccgggaggtgcgcagggcccaggcccggctcctcaaaccttctgcaacaagggccaagccgggcgccccaggacaccgtagagggggccttntctagagacctctgggctttcagaaaacccccttggacaggccgttgggtttggccaggatgagtttttcctggagcagaccaagaagaaaggagtgaagcggccagcacgcctgcacaccaagcctgtcccaggcgcccgccgtggaggaggcgcctagcggagctttcctacaatccatcctttgaagaccaccagaccctgctctcagcggcccacgaggtggacgttgcagcggcagaaagaggcggagaagctggagcggcagctgcgcccctgccccgccactgagcaggctcgccacccaaggagttccacattccaggagctgtgcgaggggctgctggaggagtcggatggtgagggggagccaggccagggcgaggggccggaggctggggatgccgaggtctgttccacgcccgcccgctctggccaccacagagaaagaagacggagcagcagcggcggcgggagaaggctgtgcacaggctgcgggttacagccagggccgcgttgcgggccgccccggctccgggcaacccaggagcttgttttccgcgtgcgcgggattcaaaggccccaggttggccctgaggctggcgggaactggcgcggcggcggaggcggcggcaaggcgcggcgggaggctgaggcttgacaagccccgaaggctggggacggcttcaagtaccaggcacctgacatcgacgtgcagcttgagctcggagctgacagactcgctcaggaccctgaagcccgaggggcaacatccttcgagaccggttcaagagcttccgagaggaggaatatgatcgagcctcgagagagagccaagttcaaacgcaagtacaaggtgaagctggtggagaagcgggcgttccgtgagatccagttgtagctgccatcagatgccggagactcgcccttcaataaaaaaatctcttctagctgagaaaaaaaaatagaaaggaccaaaataaaaaaaact

SEQ ID NO: 146824 - DNA, 413 bp, Homo sapiens
aaaaggtttagcaatttggggataactcttggatctagcttatgtgcgttcacatgcacatttgctagcccagagcttttaaaatgaggtctggcatatacttgattacaaatgaaaactcagaaaccaaaggattcaggaaaggcacactgatggtggggagcctcttaagagcctctaatgttctcccaaaaccagagttgagagtcggagtgccagtcgtcggggcccactattcctgaataagggacatgcaagggccagaagtagcttgactctcgcctaaatatctgtgcctttgcctgtcctttctcccactctactgaaacccggaacagattcccgcttgccttctgatgaagagaggttaggtaaagagagtttggaggaaaaaagacaccaggaggcaggct

SEQ ID NO: 146825 - DNA, 5917 bp, Homo sapiens
agcggccgccctttttttttttttttcaaagttaaaacacagttttatttactcatttataaatactggtgggtttacaggcatcatatagaagtgaatattattattcccaaactttcaaacacagaatactcaaaactatataacaacaaccagtaaaacaaaaccattcatcttagggttgaaaggccactcaaaattgcataaaattacattcagttcacaaaggcaagtctgggctgcttctcccctaaacaaccccaaccccacccccatccccaggtgtaatttacaagtgggactggaagttaatcccattacaaccccagcctgaaaaaccagttacatcctgggtgtgtggaaccttgggtgggaactagggggtgaagggggtggggggtaaagggccacaaaatggcttaccacttaaaaatggggagagggcatgggaaaccctcagggtgggttctttttcaccccctggttgatccaaggtcagggcaaaggacaaggagggaaggaaaaccataaaagccaaaagtctgaatgtgaaaccaactcaaactgaagcaacaggcttgtagcttctcccaagaaggatgccaagggtgaaaacattctttcccttcccttctgccagggaaatcattgccccctggtgtgcccagcccagtggtaggcaacaacctttcaaaaagttcaagggatgactggcctagaaaaggaggtattctggattgctgccctccctcctcagaaccctctccctaccccgcagcctgcctacatggtgtcttttttcctccaaactctctttacctaacctctcttcatcagaaggcatagcgggaatctgttccgggtttcagtagagtgggagaaaggacaggcaaaggcacagatatttaggcgagagtcaagctacttctgggcccttggcatgtcccttattcaggaatagtgggcccccgaccgactggcactcccgactctcaactcctggttttggggagaacattagaggctcttaagaggctcccccaccatccagtgtgcctttcctgaatccttgctcctttgaattggcctgagctgttgccaccaggatgcactgatacactgattgattaaggtttgtgctgggaagacacacttctggttttaagctataaacaaacagtctgaggatagagagtaaaccagacatggcctacctccatggtcctcccttggcccaggctatggaggagtccatacgggccctaaaagtcaaacctcatcctctgaggggaccatttaccatacccgaggacctttgaaactggaatagggggcggtggtggtggtgggttgggtataccccaacttctacaggaatcttgggttgattcatggaaaaccacctctctaaagcacccctcggctcccaagtgagaaaagcaaggaattaagaatgcagagggagatgaaagggagaggagtgaagtgtatgcttattctggaaggacataagagcatcctgatgtcaccttaaggggccacccaagtaaatctttattggaaacatcagggaaaaatttggaggagaaataacagaaaatatcactctggcagattcatggtccaaaataagcagatgaattggggaacagtctcaatataggctcctttgggggattagaagggagggggaaaaacaaaagatatgatttaataaataaaattggtttcttgagttttcatttgtaatcaagtatatgccagacctcattttaaaagctctgggctagcaaatgtgcatgtgaacgcacataagctagatccaagagttatccccaaattgctaaacctttttaggtaaggccagaacattcattaatggtacttgtctttagacacacccacctcttacttacagttctcccgaaggagggcttccgggacactgggttgtaagccaaacctgggttctatgtttgccctcaaccccaactctcaaaggagaagtgaatgcatctttcaccatgcagctgctggctgctggccaagattctgtgtttttttctcagccctcagaaatcacctcattcctagtagctgtgaccaacagttcctggactacaatgaagttgatctattttccaatctaatcagaacacaaaagatcaatagctgtccctgacagggtctactgcttcctgagcagtgtcaatacccattaaggaagctgattaaaatctctgctcagctggagcctgagggatgaagtcaccagtgagacagaactcatttctgtgtgacaaagctttgtttctgtgaaactctcttccttcccagtacttgcagcttccaccctgctctatgtccaaagcccctgggccttccgccttcttcccatcgcagcacacagccacctccacttccagggtctctgccctttcactccaattacaccaggtcctgttaggaggcttgtgaaaagcccaaagtgctggtcctatgcaaatatggtttgtgtggactctgggtttgtaaacactgctttggtagtctcctcttcagacctgcctcgaaggaaagtccctcttgaacgcgtatcagaacctcctacttctggtaagtccaaaatccagagggggagctcaatggaactaaagattgaggttcttgtcgaggaaaattttcttgctgctgtaaggcagagttcaagactatgaaccagacggtgctaagcagaaaaacgattagtctgctatttgggtgtgaagagccaatgtagatcccattttaagaaagctgaggaaaggtggttgaggaaacctatgaagcagcaggtctatttcctattaaaacaacttgtccaaaggctgcctgcaacaaattgctttctatccatttctccatgagctccaaatttccacctctgcaggctttaatattcttaccaagccagcaggagggaaagccattgcaacatcattcaattaccctcaatattaaattcacttcccaaaaaggatgagaagtcaaccttgatgtgctcatattaaacagtttaaatccagaagaaaacaaaaaattctggacttggatttttgaggttagaaagaatttttgaagcagaaatcccaataaatatgctgatcttcctaagaatgaataaatcacagaattttaagccaaaaggaaagggcacataaagattatccagtccaacctcattttacagacagggagggtgacctgcccaaagtcacatgactaaaaggagaaggggtggccttggaatacagatgttctgacttctagggtcttatcttttaatgttgcctttttgtcctcaaagctgcctgcttattgggttggaagaactcacatcttatgaagggttagaccctgccttgaaaatcagtatggtaggctgggcgtgggcccttacgcctgcaatcccatcgctttgggaggcccagccaggtggattgcttgagcccagcagctccagaccagcccgggcaacacggcaaaaccccatccccacaaaaaaattcaaaaattagccgggcacggcggcgcacacctgcagtcccagccgctcgggaggctgaggcgagaggatcccctgagcccgggaggcggaggttgcagcgagccgagatcacaccactgcactccagcctgggcgagagagtatggtgactaagatttgtagtaataactgggcctagatttaggccaattacacgacctctgattggtaagtgtgtgcttaaagtgcggtcagtgctggcataaacaatggggtttgagggcccctgatgatatctctgagggaaggataccagggctcctgcagtgttacttcactgataagcttccagtggaaccagtggctcatctggtagagtagaatttcccttttctttctgcttaaatgctgaatcctttctgctttctttttcctttttgcacctttggaggtgcaaagccgcctggaagctgaataactggcaacacttttaaatagttctctcttctccaggttctttctgctcactcccatgcccacctcaagggtgccgacactcaccagtggcctggaccgaaacactggcctttctctgagaggagacagtgtctgtctgtggctaggagaggctgcaaacaggccaaaaatccagacacctaacaaagtacatggctttgagagtttcttcttccatcatctttggctcaattaaatgcctctagtggagaaacagtcagtagtttacacacactttcgtgggattccacagaccattaacttgagttttagcttccttgcttcctgagtggaaccatctaataagcacatggtttggggaagggaaatgggtaaaatgttgcaaaagagagatctgaaatctcactagtggcctcagatagcaataaatgaatctaagtcttcttaaacttggggtgggaactaggacagaaaccaggggaagcccagaagagaagtaaacacatcctgcagttggaagacagggaggttctagggaacatcaaatgagaatggcccactagagaatctggtacactgagtaagcccaaagcatgtctattctttagattctttagaggcaacaccctgagatttgcataaccctttcgctagagattgggatggggctggggtcatcatactctggagctatctggaaaaggatcagcagccctggaaaaacaaactttagccccagaatctctggaatggccaaatcattacttccaaaggtgtggctcggtttttgaaaaataacaaattaatgaaaacagagttttaccaggaacattctctttcccattctgatatttcatgtaaagactctaagttaagtgacagacctgagccccatgttgttggccatgtctgcagctatttattcagcttgagctgcctggggtgctcatgagtctccaaaccagcaggtgaggactgaggattgtggccactgaagaggccagcggtaggtacctgtccaagcagcacaagaaaaaggagacctgctgatgccagtatccagagagaactgctggctagtagaaggcctataattaccatctcatggggcttccagacaatacagttgtgaaggaatggtattttatctctggagatagaccagaaatcagttaataaaattaattgcataagagaaagtacctgaaattacctaggatagtttacacttactttcatgagttcttggctatagaatccagtattcctgagattgaatagcttgcaaatctcttgtcacaaggaaaactttctggcaagaaaagtcagctttaacatggaagggtcatgtgaagtggcagggatgcaacaccaatctaagagttttgagaatctgcccccagtacttttgaaaggcacaaacagatctgaggaggctctctgtaacccctttccctggtctattgagtggaaaagggtcaagatgtattcctaataatccaattttcttttcttgagaaagaagtatcatcttccttccccgatattcaaaatgttccaggataatcaattagtcaacaccttatgttgatttcctctcccagaatgaaggatataaaacttattactctaatttagcattccctgagaactgaacttacagtactcccatgataatacgaagtctcaagatagtagcagcttctcttgaaaaatggttggaaatgaaagacagaattttatatactctaaaaatggggttttgtcagaggaaacatatctcctgttctgtaattgggattttttatttatttattattattattttttttgagatggagtcttgctctgtcacccaggctggagtgcagtggcgtgatcaaggctcactgcaagtccgcctcccgggctcac

SEQ ID NO: 146826 - DNA, 2571 bp, Homo sapiens
tttttgcacctagaaattttaggcaagtgatagctgcgtaatcatactgcggcaccgtttttttcttgcagcagtagctgcttgcggaggaggtctgcccactgcagctctctgcagtctccggctctctcctgcaggatcggtcaacgcagccgtcgccgccctctgcacccagcccaggtcgccactgcttcagtccggttctcaaagcctcagcaccatcttttatccccgagcagcctggatcgtcgttccctcagtccggacgccactgctaggtccgaccaccgccgcttctgatatttcggtgagtcttttcctgtggaggtttggtctcccaatctctgtggtagccaacttaggcgtgtacggtcctttgaaaaatggccgagtcagagaaccgcccaagagctgtcagaatcccagtcaagaagaggctggtaatcagataatggtggaagggctcggggaacatctggagcgcggtgaagatgccgctgctgggcttggagacgatgggaagtgcggtgaagaagctgccgctgggcttggggaagaaggggaaaacggtgaagatactgctgctgggtccggggaagatgggaaaaaaggtggcgatactgatgaggactcagaggcagaccgtccaaaaggacttatcggttatgttttagatacagactttgttgaaagtctacctgtgaaagttaagtaccgtgtgttagcccttaaaaagcttcaaactagagcggccaatttagaatccaaattcctgagggaatttcatgacattgaaagaaagtttgctgaaatgtaccaacccttactggaaaaaagacgtcagatcatcaatgcaatctatgaacctacagaagaggaatgtgaatataaatcagactctgaggactgtggatgatgaggaaatgtgtcatgaagagatgtatggtaatgaggagggtatggtacatgaatatgtggatgaggacgatggttatgaggactattattatgattatgctgtggaagaggaggaggaggaggaggaggaggacgacattgaggctactggagaagagaataaagaagaggaggatccttaggggaattcctgatttttggctaactgttttaaaaaacgttgatacactcactcctttgattaagaaatatgatgagcctattctgaagctcctgacagatattaaagttaagctttcagatcctggcgagcccctcagtttcacactagaatttcacttcaaacccaatgaatatttcaaaaatgagttgttgacaaagacctatgtgctgaagtcaaagctagcatattatgatccccatccctataggggaactgcgattgagtattccacaggctgtgagatagattggaatgaaggaaagaatgtcactttgaaaaccatcaagaagaaacagaaacatcgggatctgggggaacaatccgaactgtaactgaagattttcccaaggattcatttttcaattttttctctcctcatggaatcacctcaaatggaagggatggaaatgatgattttttacttggtcacaatttacgtacttacataattccaagatcagtattatttttctcaggtgatgcactggaatctcagcaggagggggtagttagagaagttaatgatgcaatttatgacaaaattatttatgataattggatggctgcaattgaggaagttaaagcttgttgcaaaaaccttgaggcattagtagaagacattgatcgttagagcagagtatacatggccctgaaattaactgccctagatatagttactcaaggtataagaagccttgtgttctgtatttttcttgtagtgttagttaaaacatatgtttcaaaaatataagaaaagttcaaaaactaattaatttgaccttgagttttagtagtagaatgttttcaagaaatgtacactgtggtaaatgatttaaaacactagtatagtgttgtgtagcttaatccttctgaagtctttttgtcatgtagctattaatctgtggctatgaaatgatcagaaatgctaagtgagatcaatatttgtttggaaaaaaaatcttgggaaacaacccaagggttttcgctgttgttgtttttctttttctatttttgtttacttaggtcctttagctagtggatttaattttgttgtgcctgcttcattttgcaataacaatgcagtagaatttaaaacttgggatgcttaagaggcctgcatatagataagaatttcaggcaaaactacatttattgttaataacagcttgttcataggctcttgtattttatgtaactgtgataaataatgaaacttagttatattgaggttattgtttgtcggtgaagtgttagtcacagtattttcaaaggttcgctcatactgttctgatgtaagctgtgtaagccataattacagtgtttaattctcttttcctattacatcattcattgaaagtgatcactttaccattttgaaaagatatttcgtgttctttcactgcaaaataaaaagaataaaaatttcaaaa

SEQ ID NO: 146827 - DNA, 525 bp, Homo sapiens
tcattgtttaatatagacggccaaagctccatcagctgctcgaagcttaccatctgcctctacttcaaaggctacaatctcagatgaagagattgaacggcaactcaaggcatcgatcgtcatttttgaaccgcgtgaatcagtgaacaagtaccatttgccgctcattttgttttcattttttcgctcgatgtcatcagttaccgtgtttgaagtgatcagcggcttcattacttttttcaatgtgtaatcattatttaactctatgataccgagggcgccgttcgctaactcagcatcgcgttttttagcgctctgctgaagcttctggctttctttacggaagaagttcgtgccgccgccgtagtacgctttgttaaataaagattcttcgccttggtatccgttttctgttcccgtgttggcttcgaatacaaggtatttatggccttttgtcttctctagacctccaaacagctctggaacttgtggccaatctttttgattttcatcagttttcatcat

SEQ ID NO: 146828 - DNA, 2622 bp, Homo sapiens
ggggttctccaaaaagtgtgttagttcccggtcacctgagctccgggtgacgcggctgcggtatctgcgtatacaagccttccgcgggtcctgcctggcgaccgccgacctcctcctgctggtctctccgctccgccaccccgaacccgccaaggtcctcgtccttttcctcctgtcctttgccagctgttgggccggaccgggccgagccgggccgcccgggcgcagtcttttaaccatggcgtccctctttcaagaagaaaaccgtggatgatgtaataaaggaacagaatcgagagttacgaggtacacagagggctattaatcagagatcgagcagctttagagaaacaagaaaaacagctggaattagaaattaagaaaattggccaagattgggaaataaggaagcttggcaaagttttagccaaacaacttgtgcatctacgggaaacagaagacggagaacttttgctgtaagttcaaaagttacttctatgtctacacaaacaaaagtgatggattccccaaatgaagatggctggagcaatgtctaccacagcaaaaacaatgcaggcagttaacaaggaagatggatccacaaaagacattacaaacaatgcaggaatttccaggaagggaaaacatggaaaatgggaaatgactgaagaaatgatcaatgatacacttgatgacatctttgacggttctgatgaccgaagaagaaagccagggatattgtgaatcaagttcttgatgaaattggaattgaaatttctggaaagatggccaaagctccatcagctggctcgaagcttaccatctgccttctactttcaaaggctacaatctcagatgaagagattgaacggcaactcaaggctttaggagtagattagtcaaaagaagtcatactattttgcttacttataattatgtagtataaaccaaggcacagtgcagatttcttttacaaaacacatggtattttgcaaaaaaaaaaaaaatgaagaccatgagtgaacagttgtttcctaacccatggctatttagaatcttttgccaaagaatgacaatgatgcaaaaatgggaacagtttggattttaattagaactgtttaggagtgatgatgtgtaaaaagttgacttctcttttgcatggcacagagaaattatattccttacttcatgtcagtttatgttctaaatctttttcactgaatataaaaatcttgttaaatgccattaggcaccaacttaaagagggttgtaaaaatattaaaagtatatcgttaattctgtatctgttgcttgtcttttgtaagcgattatgtgttatgaccataggtggttacagctgccaaattatttttaaatggtcaaaaagaagagtgctatttaaacatctgtcttaaacaaaaactgtacataacttttcttttttctttttccattaagaaaacattctagttggtaaatttcaaaatgtgcttgacacctgaccttaaatagcacagacctattgtgcacatctttaaattatttcagctggcagaaaagaattacatttaaaactgaaatcaaggcctcaatacaaaggattatcctgggctcttttctatctctgtggggcctaattgaaatatgtactcttattttaggacacgcctctgtttaaaacagaccagggttttcctggtctcagaccctatgatgacttgtccctttgatgtcacctactgtgaattgaatataattaggtaaaaataggacggtggaaataaataacactttatagtaagaaaacatatatattttggccatctaaaaatgagaattataattatatgaattataatttaaactgtttaattttgtttaatgtgtatattgaatcttccaaattgaagccattattctcaattaagtactacaactatgacaatgcttgacctacatttctaaaataaaaattcacattttttgataaataaacctacagttttaccagaaattactatctaaatgtgtattagcagtattttttaaggtgaaattgccttggtatctaatgaatgtgtagacagggagataaaatgaaggattgccagactagttagaatagaatttaggattagggttagtttggaaaaatgatgttgtaatatatggggttctaaccacatccctcccataaaaaccctgggaggagatatgtgtaaccctggttaatttgggatggtggacattttgggctaatactgacaaaatacatcttaggactcagtatacatgtgaccacggatctgctaggaggaatgaaaaacgtaaactgtatagtttatattccgtaaaccattttataatgttcaaagattaggttttgttattgatagtattaaatacacagtttctcttaacagtgatgggtgaaaacgattttaccggattatggaatgtttaccagaacatgttttgattcttgaatgtacataataatgccatctaacttatttacgttcttgtttacatgtgggagcttttgttttcaataaattattttgttaaaaaatctcaataaagatttattattgttgttcttttcttaaaaaaaaaaaaaaa

SEQ ID NO: 146829 - DNA, 652 bp, Homo sapiens
cagcccgagcgatgggcatctctcgggacaacttgcacaagcgccgcaaaaccgggggcaagagaaagccctaccacaagaagcggaagtatgagttggggcgcccagctgccaacacccaagattggcccccgccgcatccacacagtccgtgtgcggggaggtaacaagaaataccgtgccctgaggttggacgtggggaatttctcctggggctcagagtgttgtactcgtaaaacaaggatcatcgatattgtctacaatgcatctaataacgagctggttcgtaccaagaccctggtgaagaattgcatcgtgctcatcgacagcacaccgtaccgacagtgactcctgaggaagaagagattttaaacaaaaaacgatctaaaaaaattcagaagaaatatgatgaaaggaaaaagaatgccaaaatcagcagtctcctggaggagcagttccagcagggcaagcttcttgcgtgcatcgcttcaaggccgggacagtgtggccgagcagatggctatgtgctagaaggcaaagagttggagttcctatctaagaaaaatcaaggcccgcaaaggcaaataaatccttgttttgtcttcacccatgtaataaaggtgtttattgtattgttcccaaaaaaaaaaaa

SEQ ID NO: 146830 - DNA, 4871 bp, Homo sapiens
gctctttccagccagcgccgagcagatgggcatctctcgggacaactgggcacaagcccccgcaaaaccggggggccaagagaaagcccctaccagcaagaagcgaaaagtatgagtttgggccgcccagctgcccaacaccaagattttggccccccgccgcatccaacacagtcccgtgtgccggggaggttaacaagtaaataccgtgcccctaaggtttgaccgtggggaatttctcttggggggcaaagagtgttgtactcgtaaaacaagggatcatcgatgttgtctacaatgccatctaataaccgagctgggttcggtacccaagacccctggttgaaagaatttgcatccgtgctcatcgacgagcaacacccgtacccgacagtgggtacgaagtcccacttatgcgcttgcccctgggcccgcaaagaaagggagccaagcttgactccttgaggaaagaagagatttttaaaccaaaaaccgatctaaaataaattcagaagaaatatgattgaaaaggaaaaagaattgccaaaattcagccagtcttcctgggaggagcagtttccagcagggcaaagcttctttgcgttgcatcgctttcaaagcccgggacagtgttggccgagcaagatggctatatgactagagggcacagagttaggagttactatcttaggaaaatcaaggcgcgacagagcaagataaatacatagttatgtctatcacccatgtaataaaggtgtttattgttttgttcccaccaaaaaaaaaaaaaaaaaaaaaaaaaaaaaaaaaaaaaaaaaaaaaaaaaaaaaaaaaaaaaaaaaaaaaaaaccatggcgcaggaggacttcgagctgattcagcgcatcggcagcggcacctacggcgacgtctacaaggcacggaatgttaacactggtgaattagcagcaattaaagtaataaaattggaaccaggagaagactttgcagttgtgcagcaagaaattattatgatgaaagactgtaaacacccaaatattgttgcttattttggaagctatctcaggcgagataagctttggatttgcatggagttttgtggaggtggttctttacaggatatttatcacgtaactggacctctgtcagaactgcaaattgcatatgttagcagagaaacactgcagggattatattatcttcacagtaaaggaaaaatgcacagagatataaagggagctaacattctattaacggataatggtcatgtgaaattggctgattttggagtatctgcacagataacagctacaattgccaaacggaagtctttcattggcacaccatattggatggctccagaagttgcagctgttgagaggaaggggggttacaatcaactctgtgatctctgggcagtgggaatcactgccatagaacttgcagagcttcagcctcctatgtttgacttacacccaatgagagcattatttctaatgacaaaaagcaattttcagcctcctaaactaaaggataaaatgaaatggtcaaatagttttcatcactttgtgaaaatggcacttaccaaaaatccgaaaaaaagacctactgctgaaaaattattacagcatccttttgtaacacaacatttgacacggtctttggcaatcgagctgttggataaagtaaataatccagatcattccacttaccatgatttcgatgatgatgatcctgagcctcttgttgctgtaccacatagaattcactcaacaagtagaaacgtgagagaagaaaaaacacgctcagagataacctttggccaagtgaaatttgatccacccttaagaaaggagacagaaccacatcatgaacttcccgacagtgatggttttttggacagttcagaagaaatatactacactgcaagatctaatctggatctgcaactggaatatggacaaggacaccaaggtggttactttttaggtgcagacaagagtcttctcaagtctgttgaagaagaattgcatcagcgaggacacgtcgcacatttagaagatgatgaaggagatgatgatgaatctaaacactcaactctgaaagcaaaaattccacctcctttgccaccaaagcctaagtctatcttcataccacaggaaatgcattctactgaggatgaaaatcaaggaacaatcaagagatgtcccatgtcagggagcccagcaaagccatcccaagttccacctagaccaccacctcccagattacccccacacaaacctgttgccttaggaaatggaatgagctccttccagttaaatggtgaacgagatggctcattatgtcaacaacagaatgaacatagaggcacaaacctttcaagaaaagaaaagaaagatgtaccaaagcctattagtaatggtcttcctccaacacctaaagtgcatatgggtgcatgtttttcaaaagtttttaatgggtgtcccttgaaaattcactgtgcatcatcatggataaacccagatacaagagatcagtacttgatatttggtgccgaagaagggatttataccctcaatcttaatgaacttcatgaaacatcaatggaacagctattccctcgaaggtgtacatggttgtatgtaatgaacaattgcttgctatcaatatctggtaaagcttctcagctttattcccataatttaccagggctttttgattatgcaagacaaatgcaaaagttacctgttgctattccagcacacaaactccctgacagaatactgccaaggaaattttctgtatcagcaaaaatccctgaaaccaaatggtgccagaagtgttgtgttgtaagaaatccttacacgggccataaatacctatgtggagcacttcagactagcattgttctattagaatgggttgaaccaatgcagaaatttatgttaattaagcacatagattttcctataccatgtccacttagaatgtttgaaatgctggtagttcctgaacaggagtaccctttagtttgtgttggtgtcagtagaggtagagacttcaaccaagtggttcgatttgagacggtcaatccaaattctacctcttcatggtttacagaatcagataccccacagacaaatgttactcatgtaacccaactggagagagataccatccttgtatgcttggactgttgtataaaaatagtaaatctccaaggaagattaaaatctagcaggaaattgtcatcagaactcacctttgatttccagattgaatcaatagtgtgcctacaagacagtgtgctagctttctggaaacatggaatgcaaggtagaagttttagatctaatgaggtaacacaagaaatttcagatagcacaagaattttcaggctgcttggatctgacagggtcgtggttttggaaagtaggccaactgataaccccacagcaaatagcaatttgtacatcctggcgggtcatgaaaacagttactgagaattgttgtgctttgacagttaactctagaaagaaagaacactaccactgcaacattaatggatgcttgaagctgtacaaaagctgcagtaacctgtcttcagttactttgtaatttattgtggcatgagataagatggggaaaattttgttttatgtggtatggatatatttagcatattgaaccacacaagtgcttaattcattgttatgtaatctttgtacatataggcagtattttttctgtgaaacttcatattgctgaagacatacactaagaatttatgtagataatgtacttttatgagatgtacaagtaagtgtcttatctgtacagatgtaaatgttgatgaaaatgcaattggggttaatattttaagaattctttagtatattcttgggtgtggctatattacaaaatgggatgctggcaatgaaacaatacatttaacactattgtatttttattatatgtaatttagtaatatgaatataaatcttgtaacttttaaaattgtaatggaggctgtaatcattttataatctttttaattttaatgcaagtacactggtgtttatatttgcacaaagtattgatatgtgatgtattaagtcacaaaagtaagctgtgacattgtctataagcatttggctccacaaatgtatttggattgttttctatgtgaagcaaaccaattataattaaccacatgttgtagtaactggtctttttatatttaagcagaatcctgtaagattgcttgtctttgcttaaaaacaatacctttgaacatttttgaatcacagaatagcggtaccatgatagaatactgcaattgtggtcagaattacagtatgcacaaagaattaattagcattattaaagagtcctcactaaacatttcatatgatcacactgaagaactgtaacattccatagagtgaagtggttcaaatttctcttggaatttttacttttgttggccttattttatgatccttttcatatttcttttgacttagagtattaatacatggccaaaataatttagttactacctcatacaaacaatataatggttactacacatcacaggaacttagttttggtttaagtcatttttgattgcttttttccaatggaatatgtatataccaggttttagcaaaatgcacacttttggctctttttggtatatgttctttatattttaatgtgagtatatacactaagaacaaactaaattgtgatttatgatcttcatttattttaatgataatggttttaaaatatgttcctgattgtacatattgtaaaataaacatgttttttaacaaaaaaaaaaaagaaaaaaaaaaaaaaaa

SEQ ID NO: 146831 - DNA, 408 bp, Homo sapiens
cttaatggttgtgagagccctgatgctgacgattactttgagcacagtccactctcggaggacagattcagcaaactaaatgaagatagtgattttattttcaaacgaggccctgtaagtacttttactttacctctactttttatttggtgatcctttttgttaacttcattatttaggctctgaacaagaaggaacacagagggtgcgacagcccagaccctgatacttcatatgtgctaactccacatacagaagaaaaatataaaaaaattaatgaggaatttgataatatgatgcggaatcataaaatcgcacctggtctgccacctcagaacttttcaatgtctgtcacagttccagtgaccagccccaatgctttgtcctacactaacccagggagttcag

SEQ ID NO: 146832 - DNA, 1369 bp, Homo sapiens
atgcagggcagcaagaagggaaacagggcaacaaggagatacattatctgtatcaacaacaaagctctaaagccaaaatatttaagagaagtacgactggtccggctttgggaaatagaccaaatgtcaacagtttgctatcacaatgatcatgaatgccagacagaacatatggtatccctggctttggacctagagaaggaaacacatttttctacctgctgtatggcagaggttcttaaacagctggagggattactgcagcaaagattgctgagccctactccagagtttctgattcgccaggtccagggagatagaggaggacatctggacagtgaggaggaggcacctcggcccatgccaagcaacccggaggacctggagagctgggaggccacgaacacagccaggggcagtgccaaagatgcggcaactggaggaggacatcatcaggctggcccaggacatggaggagatgaaggtgaagctgctggagctgctggagaagatgttgcggcttgtggtgactacaacgagggacacagcaaattcccggccactgccctgaagcttgctgatgagcctggtccaggagccccagccccccaggagcttgtgggtgctgataagcatggtgtcgtgtctgtgacaaccccaagcttgcctccgcaaggacttgtgtactcagcaatgccgactgcctacaacactgattattcactgaccagcgctgacctgtcagcccttcaaggcttcaactcgccaggaatgctgtcgctgggacaggtgtcggcctggcagcagcaccacctaggacaagcagccctcagctctcttgttgctggagggcagttatctcagggttccaatttatccattaataccaaccaaaacatcagcatcaagtccgaaccgatttcacctcctcgggatcgtatgaccccatcgggcttccagcagcagcagcagcagcagcagcagcagcagccgccgccaccaccgcagccccagccacaacccccgcagccccagccccgacaggaaatggggcgctcccctgtggacagtctgagcagctctagtagctcctatgatggcagtgatcgggaggatccacggggcgacttccattctccaattgtgcttggccgacccccaaacactgaggacagagaaagcccttctgtaaagcgaatgaggatggacgctcatcacaagattgactggactccgttgatttcctctgaagagattttaattttgggttggcaaactcagaaatttcttgcagacgtgtatgaaccttttgagcttgcttttacactttgttctggcagatctagtgtagcctttactgtaggactag

SEQ ID NO: 146833 - DNA, 3558 bp, Homo sapiens
gaattttctgcaaggatcatatctaagtgcactttttgctgatacttcatttctagacattgagtctcactctaccccccaggctgaagtgcagtggtgtgatctcggttcactgcaacctccgcctccaggttcaagtgattctcgtacctcagcctcccgagtagctgggattacaggcgcctgccaccatgcctggctgatatttatatttttagtagagatggagtttcaccatgttggccaggctggtctcgaactctggacctcagatcttgtagaaaatttcagctgtagcccttggactagaagctgaaataacagaagctgtgtacgatgcattagggtattgaagaaaattaacttttgaattaaatatttggaatataaggaaataaggaaagttgactgaaaatggggcggaagaaaatacaaatcacacgcataatggatgaaaggaaccgacaggtcacttttacaaagagaaagtttggattaatgaagaaagcctatgaacttagtgtgctctgtgactgtgaaatagcactcatcattttcaacagctctaacaaactgtttcaatatgctagcactgatatggacaaagttcttctcaagtatacagaatataatgaacctcatgaaagcagaaccaactcggatattgttgaggctctgaacaagaaggaacacagagggtgcgacagcccagaccctgatacttcatatgtgctaactccacatacagaagaaaaatataaaaaaattaatgaggaatttgataatatgatgcggaatcataaaatcgcacctggtctgccacctcagaacttttcaatgtctgtcacagttccagtgaccagccccaatgctttgtcctacactaacccagggagttcactggtgtccccatcatttggcagccagctcaacgttaacagattcaagcatgctctctccacctcaaaccacattacatagaaaatgtgtctcctggagctccctcagagaccaccaagtactggcaatgcaggtgggatgttgagcactacagacctcacagtgccaaatggagctggaagcagtccagtggggaatggatttgtaaactcaagagcttctccaaatttgattggagctactggtgcaaatagccttaggcaaagtcatgcctacaaagtctccccctccaccaggtggtggtaatcttggaatgaacagtaggaaaccagatcttcgagttgtcatccccccttcaagcaagggcatgatgcctccactatcggaggaagaggaattggagttgaacacccaaaggatcagtagttctcaagccactcaacctcttgctaccccagtcgtgtctgtgacaaccccaagcttgcctccgcaaggactttgtgtactcagcaatgccgacttgcctacaacactgattatgtcactgaccagcgctgacctgtcagcccttcaaggcttcaactcgccaggaatgctgtcgctgggacaggtgtcggcctggcagcagcaccacctaggacaagcagccctcagctctcttgttgctggagggcagttatctcaggggttccaatttatccattaataccaaccaaaacatcagcatcaagtccgaaccgacttcacctcctcgggatcgtatgaccccatcgggcttccagcagcagcagcagcagcagcagcagcagcagccgccgccaccaccgcagccccagccacaacccccgcagccccagccccgacaggaaatggggcgctcccctgtggacagtctgagcagcttttagtagctcctatgatggcagtgatcgggaggatccacggggcgacttccattctccaattgtgcttggccgacccccaaacactgaggacagagaaagcccttctgtaaagcgaatgaggatggacgcgtgggtgacctaaggcttccaagctgatgtttgtacttttgtgttactgcagtgacctgccctacatatctaaatcggtaaataaggacatgagttaaatatatttatatgtacatacatatatatatccctttacatatatatgtatgtgggtgtgagtgtgtgtgtatgtgtgggtgtgtgttacatacacagaatcaggccacttacctgccaaactccttgtaggttctgccagatgtgtgtcccatggccagacaaagcaccctgtaggcacagaccaagtctgggcacttccttggactacttgtttcgtaaagataaccagtttttgcagagaaacgtgtacccgatatataattctcccacactagcttgcagaaacctagagggccccctacttgttttatttaactgtgcagtgactgtagttacttaagagaaaatgctttgtagaacagagcagtagaaaagcaggaaccaagaaagcaatactgtacataaaatgtcatttatattttccaacctggcatgggtgtctgttgcaaaggggtgcatgggaaagggctgttgatattaaaaacaaacaaaacaaaaaagccccacacataactgttttgcacgtgcaaaaatgtattgggtcaagaagtgatctttagctaataaagaaagagaatagaaaacacgcatgagatattcagaaaatactagcctagaaatatagagcattaacaaagtaaaattaatatattaagttataattggaatatgtcagaagtttctttttaccattccatatccttaaaaattaaaggaaactgattttaggctcatgtatattttatatgaaagaaaacacccttatgaattgatgactatatataaaattatattcactacttttgaacacattctgctatgaattatttatataagccaaagctatatgttgtaacttttttttagagaatagctttatcttggtttaactctttagttttattttaagaggggaaaacaaaaatatcttgcaagcagaaccttgaaaaaaaaaaagccatgaaccacttattctaaatgtaaattaaaagttgagccaaactctttgtgtatatagcatctttaaatatatttatcacctttgatgtaagtacctatgtattgtatggtcaccagattaaaaagtatatttttgtggattgccgccaatttggggggaaaaggcgaggtcctttattaagtattcactgtttaatatttactattttgttaaatatactgtactttggattttaattattagcccagttttttcagaggattagtataaaggggtttctcccctcactggtgggggaatgtgtgatggttacaatggaatcttcggggctgtttgggttgagcatcattatattttttgggttgtggtcaataaattggaaaggggcaaaaaaaattgggggttaagtccaacccgaataagaataaaatgtgttgtaacagattttataaggcattatttaacacttgccttttgtgaggaaaactgtagtagaacagctgacctaatttaattaatatcggaacatggcaaatagtagatgagcacaaggtttctaagggg

SEQ ID NO: 146834 - DNA, 426 bp, Homo sapiens
ggccctgccccacccactccaggatgttagggtcccctcagccaaaaaggcagctgcctgtggctcctgtaccaaccgcccagccacgctccatcgccgcccaaagggaggtgccaaggccaggaacccaagccaccccggctcccctcgcctgcccaggggccgtggtgactcacgggcagggaggcgacatcaggctggttctgccactgagcccctgaggaatctgaccctccccaaaagaagcagtgaaatggaccaaaggacttaagaatttggggggaagtgagggaaaaacgttaggtgctaacaccgctgcccagaagagtggatctcacagcccaggaacattcccaagcaggaaaaccgtccgtccgaggaacgtccatcctggctctctgcggctggtgggaaaacacaccctgc

SEQ ID NO: 146835 - DNA, 416 bp, Homo sapiens
  misc_feature (1)...(416): n = a,t,c or g
ntcaaaacaaaaattgagctccttggtcacaaagtaggcttctaaagtcggatctactcttgatcttctatttatcagtcctgtcacacttaagcttaaaagtttaactgcacctccaaaaaacacagaaatgtacaattcacagcagttataaatgaagagacaaaagagaatacgtatgtagaatgtttatgaacgtgcaaagaaagaatgaaagttgtatttttctttcctctctctctcttggaatgacgaatgaaaacgtttctaggttggccgatgttttttcctttcctccggtggctttttttctctaacttctgctcttccccctccctctctagtgctcacccgggtgtcctagtcactcccttcggagctccgactaagcccgatcgcggccgctctagaggatc

SEQ ID NO: 146836 - DNA, 3985 bp, Homo sapiens
ggaattccgggcgcggttgtgagtagtaccgggagtggggtgatcccgggctaggggagcgcggcggccgcgatcgggcttagtcggagctccgaagggagtgactaggacacccgggtgggctacttttcttccggtgcttttgctttttttttcctttgggctcgggctgagtgtcgcccactgagcaaagattccctcgtaaaacccagagcgaccctcccgtcaattgttgggctcgggagtgtcgcggtgccccgagcgcgccgggcgcggaggcaaagggagcggagccggccgcggacggggcccggagcttgcctgcctccctcgctcgccccatacgggttcgctcgcgtagagcgcagggcgcgcgcgatgaaggcggggttcccggtgcgccgctcgggccgcaaggcgccgtatggctgcggaggcatggaatctggcgctgcgctgcctggccgagcacggccacagcctgggtgggttcagcggcccttggcgccagttgcggcagcagcgcgctgtaaggcggccgaggcggcggccgacgagccggcgctgtgcctgcagtgcgatatgaacgactgctatagccgcctgcggaggctggtgcccaccatcccgcccaacaagaaagtcagcaaagtggagatcctgcagcacgttatcgactacatcctggacctgcagctggcgctggagacgcacccggccctgctgaggcagccaccaccgcccgcgccgccacaccacccggccgggacctgtccagccgcgccgccgcggaccccgctcactgcgctcaacaccgacccggccggcgcgagagaacaagcagggcgacagcattctgtgccgctgagccgcgctgtccaggtgtgcggccgcctgagcccgagccaggagcactagagagggattgggtaagagcagaagttagagaaaaaaaagccaccggagacaaggaaaaaacatcgggcaacctacaaacgtgtttcattcgtcattcccagagagagagaggaaagaaaaatacatctttcattctttcttttgcacgttcataaacattctacatacgtattctcttttgtctcttcatttataactgctgtgaattgtacatttctgtgttttttggaggtgcagttaaacctttaaagcttaagtgtgaacaggactgataaatacgaagatccaagagtaagacccgactttaagaagtcctactttgtgacccaaggagcctcaatttttcgttttgaagctttactaaatccgaccagagcattgtagatattttttttttttacatctattgtttaaaatagatgattataacggggcaggagaactttctttttctctgccaggattgttacatattgtatagataaatgagtgacatttcataccatgtatatatagagatgttctataagtgtgagaaagtatttgcttttaatagatactgtaattataagatatttttaattaaatatttttttgtaaatattatgtgtgtgtttttttttaatctatgggaatatttcttttggaaaatcatttttcagctcaattacagagctcttgatatcttgaatgtcttttctgtttggcctggctcttaatttgcttttgttttgcccagtatagactcggaagtaacagttatagctagtggtcttgcatgattgcatgagatgtttaatcacaaattaaacttgttctgagtccattcaaatgtgttttttttaaatgtagattgaaatctttgtatttgaagcatacatgttgaaaatacaccttatcagtttttaagtacagggttttatagtgtaatatatacagagtaagtgtttgtttttgtttttcaactgaggtcaaaatggattctgaatgattttgcatatgggatgaggaaatgcttggatccttaaggagtttacgaaatctgctgttttatcaaagtgaaaaaaaattgcttattactcttcattttacactaaagcttaatgtcactaagtttcatgtctgtacagattatttaaatcatggaaatgaaaaaaatgttctctgcttgctaccaaaggacaaactcttggaaatgaacactttctgctttccttcctccaaagaattaataggcaacagtgggagaaaaaaaaaggcataatggcaaatccttcaagcagggataaaagtcgatcttcaaacattaacttaagcagaccaaaaattctgatgaccgcatctagattatttttttataaaaatgattttcactatagctatgttacgctaagctactgtccaatctcttgtcatgtgcaacctcccacatgtgaatattaaagtagatttctctgtcttgtactgtgatttctggtctcatttctttaaaaccttactcttatttttcttttaaggctcttttttctccttaaggaaggtagtattttctaggttagataggactatcagggtttgtgaacattatgcatttaatgttatgggtactttacacacaagttagatggaatttttagagtgaaagaattaagtaggatttaattgggtgctttgtaaatagtcaactgtgtgtataacgtggtctgtttgatttttaaaaggaaagggatttgtttcagattatacaaggaataaaagtattataggacccaaggggactttcttatgagggttcaaatttcaggatatttatatgaatatgaaataccatggtccctagtagtcagttgaagtggcaatgtctaaacaggaaatgaacaaaactaatgctagccaggttaaaatcaatcaaaatgtttaaaaattgattctgtcctcagcatgttatttcctccgctcctgataatttactggtcttgagtattttgagaatttgatgttgaacgttataaagtcaaagaactgcttgtttagatgaggtttatttttatttttgatattattcattcttgtcacacatcaagaagaaaacactagagtgctgctggaattccaaatctgaagaattctaacgactgcattctttgttattaaaaagggcacaatccttcctttttatttggcagtttaatttcagtaggaagcatgtcacatgtgcactgttggttagaattatgcatctgtcatgcctgactgctgaaccctacctaaggccttttggcgccagtttaaaaacttattactgggtgggactgtggaacctcaaaaccaagtgggtatttttggggtttagaggatagatgttactcccttaaagtttgtatttgggggcatgaaaaactactgaaagaaggaaagtgctacagatactacatttcaaagagttggcattttccctttggccactcaagcagccattggatggtatctaaggaaccaaagtcattgtttattttttaaaaaattatatgccagttgtacaagatactaacattcccattgaaatgttggctatgtcctaaaccaggcaaccagataacaaaaacatttttgagtcttttatctagggtagttcctaattatatcaggctacttagttttaacaaaggaaaatatccctgacctcctcctcatttccctttgtagacttttccattgtaataggcacaacccaaagagtccagaactggtttaaaactcccagaaggaaaaaaaagtatcccacacagtggatgttgtttctaagaatgcctacaaaattcctgacatcctcagacatcctcaatgttaaaggaaagaaaaaaaataccttttcatttcaaagaactaaatatactttgaatattggtgtaaacacttactcaagtttattgtcaagctttaactgcctttttagaactttttaaaatttcgagcccacaaatctattgtattagttgccttctataacaataaatcttcactgaacaaaaaaaaaaaaaaaaaaaaaaaaaaaaagtcgtatcga

SEQ ID NO: 146837 - DNA, 1075 bp, Homo sapiens
  misc_feature (1)...(1075): n = a,t,c or g
tttgatttgggtgagggacgggaaggggagaatttcgtaaggtgctctccttttccacatccctaacagcngctcccgaatccctgcatctcccgccccaggctgaaccttccctctccttcctctcgcagattacactctctggcctttctgggtcgacacgcacgtagaccctccgttccataagagcagtgatggaactgtacgagataggcggggccaagacgtccgactgtacccagaggtgcctgaggtcctaaaacgattgcagagccttggggtgcccggtgcggctgcttcaaggacaagtgagatagaaggggccaaccagctactggagctctttgacctcttcaggtactttgttcatcgggaaatctatccaggcagcaagatcacacactttgagaggtatgcggagataagggaggagcaggggaagaaggagaaagggccaacccctgaagaagcaatacagaaactgaaggagacagagaagatactgatcaagaaacaggaatttttggagcagaagattcaacaggagctacaaacagccaagaagtatgggaccaagaataagagagctgccctacaggctttgcggaggaagaaaagattcgaacagcagctggcacaaactgacgggacattatccaccctggagtttcagcgtgaggccattgagaatgccactaccaatgcagaagtccttcgtaccatggagcttgctgcccaaagcatgaagaaggcctaccaggacatggacattgacaaggtagatgaactgatgactgacatcacggaacaacaggaggtggcccagcagatctcagatgccatttctcggcctatgggctttggagatgatgtggatgaggatgaactgctggaggagctagaggagctggagcaggaggaattggcccaggagttgttaaatgtgggcgacaaggaagaagaaccctcagtcaaattgcctagtgtaccttctactcatctgccggcagggccagctcccaaagtggatgaagatgaagaagcactaaagcagttggctgagtgggtatcctga

SEQ ID NO: 146838 - DNA, 778 bp, Homo sapiens
gcaggcagggtggctgccttagctgccggaggttccgcactctctaaggccccgggtgaagccccacctctgctgcgcgcagcctgcggtgcgggtcatggcgcggctaccgaagctggcagtctttgatttggattacactctctggcctttctgggtcgacacgcacgtagaccctccgttccataagagcaggtgaggtagggacagggaagactgggggcgagataggacccagccagggctgagcgcactcttgccctctccagtgatggaactgtacgagataggcggggccaagacgtccgactgtacccagaggtgcctgaggtcctaaaacgattgcagagccttggggtgcccggtgcggctgcttcaaggacaagtgagatagaaggggccaaccagctactggagctctttgacctcttcaggtgttacctgcattcacatccagaatggaatgaatcttcaaactctaagtcaagggttagagacatttgcgaaggcccaaactgggcctttgaggtccagccttgaggagagcccatttgaggcctaaactgaaaggaaatcaagaaggcattttcaggtgcatttgtaatttattaaagttcatctgtgtgtgacagaagagattttacccacagtgtgggaggtttctatttttctagcctgtgaaatggggttggttgtcctgaggtgcagagaccagaatgtgagacattagactgcatcaggtttgccatctaaacttagggcaaccccaagtgcttga

SEQ ID NO: 146839 - DNA, 1427 bp, Homo sapiens
agtgaattctctcttgactgtggctgtactggacatttaggcctggttggagaacgccttcaagggtttggctgacactgtactctatggctggaatattactgaggactttgggttctacactgtcaggaggttgataatgcagaaagattgagtgacaagctgtgatgtatcacttgggtctcaagaagaggcaggtgctagaagaaaaggctttccttcttccctggcttcttagtataatagaatcgggccaaggctgggtggagtggaaaagtagggaggatgcccgtggccaatgccttagaaagacttgactgctgtggttgcatgtgtggtcgtgttggtacctcgctgcaatcctcttccccgcccagcatcagatggcactcttgcgccatctccaggctgatgacgccccgagtggcgacgctctagtcgccatttgtctatggcaggcagggtggctgccttagctgccggaggttccgcactctctaaggccccgggtgaagccccacctctgctgcgcgcagcctgcggtgcgggtcatggcgcggctaccgaagctggcagtctttgatttgggtgagggacgggaaggggagaatttcgtaaggtgctctccttttccacatccctaacagcagctcccgaatccctgcatctcccgccccaggctgaaccttccctctccttcctctcgcagattacactctctggcctttctgggtcgacacgcacgtagaccctccgttccataacagcaggtgaggtagggacagggaagactggcggcgagataggacccagccagggctgagcgcactcttgccctctccagtgatggaactgtacgagataggcggggcccagacgtccgactgtacccagaggtgcctgaggtcctaaaacgattgcagagccttggggtgcccggtgcggctgcttcaaggacaagtgagatagaaggggccaaccagctactggagctctttgacctcttcaggtactttgttcatcgggaaatctatccaggcagcaagatcacacactttgagaggttgcagcagaagactggaattcctttctccccagatgatcctcctttgatgatgagaggcggaatattgtagacgtcagcaaactgggtactgagtgatgaggaacagcccatttggggtccctaggagggattaggtgttacctgcattcacatccagaatggaatgaatcttcaaactttaagtcaagggttagagacatttgcgaaggcccaaactgggcctttgaggtccagccttgaggagagcccatttgaggcctaaactgaaaggaaatcaagaaggcattttcaggtgcatttgtaatttattaaagttcatctgtgtgtgacagaagagattttaaaaaaaaaaaaaaaaaaa

SEQ ID NO: 146840 - DNA, 773 bp, Homo sapiens
  misc_feature (1)...(773): n = a,t,c or g
cggccgccatttgtctatggcaggcagggtggctgccttagctgccggaggttccgcactctctaaggccgcaggtgaagccccacctctgctgcgcgcagcttgcggttgcgggtcatggcgcggctaccgaagctggcagtctttgatttggattacactctctggcctttctgggtcgacacgcacgtagaccctccgttccataagagcagtgatggaactgtacgagataggcggggccaagacgtccgactgtacccagaggtgcctgaggtcctaaaacgatttgcagagccttggggttgcccggtgcggctgctttcaaggacaagtgagattaggaaggggccaaccagctactggagctcttttgacctttttcaggtactttgttcatcggggaaatctatccaggcagcaagatcacacactttgagagggttgcagcagaagactggaatttcctttctcccagatgatcttctttgatgatgagaggcgcgaatattgtagacggtcagcaaactggtgtgttacctgcacttcacatccagaatggaanttgaatctttcaaactctaagtcaagggttaagaagacatttgcgaagcgcccaaactgggcctttgagtgtccacgccttgaggagaggcccatttgaggcttataactgaaaggaaatcaagaaggcattttcaggtgcatttgtaatttattaaagttcatctgtgtgtgacagaagagattttacccacaaaaaaaaaaaaaaa

SEQ ID NO: 146841 - DNA, 479 bp, Homo sapiens
  misc_feature (1)...(479): n = a,t,c or g
nggccctgcacggaatggtngatcaacctgacttccaccttcctcaggaaaaaccagtgtgagacccgaaccatgcaggagaatggctactcatcacacgctgtggatgggactggccctgctgggggtgctgggcgacctgcaggcagcaccggagcccaggtctccgtgcagcccaacttccagcaggacaagttcctggggcgctggttcagcngcgcctcgctccaactcgagctggctccgggagaagaaggcggcgttgtccatgtgcaagtccctcggctcctacaagctaccggagtccccactgngcaagcacctactccgtgtcagtggtggagaccgactacgaccagtacgcgctgctgtacagccaagggcagcaagggcctnggaagggactttccgcatggccaacctctacaagccgaacccagacccccagggctgagttaaaggagnaattnaacgctttt

SEQ ID NO: 146842 - DNA, 1102 bp, Homo sapiens
  misc_feature (1)...(1102): n = a,t,c or g
gggataccgcgccggaattcccgggtcgagctggctccgggagaagaaggcggcgttgtccatgttcaagtctgttttggcccctgccacggatggtggcctcaacctgagctccaccttcctcaggaaaaaccagtgtgagacccgaaccatgctgctgcagcccgcggggtccctcggctcctacagctaccggagtccccgtgagtggggcctccaccggccccctgggcccagcctgggggcgacacttgccgggacgactctgggccagccccctgccgcggagatccatggggtgggaggtgatggctgccccaccagcgtcagaggcaaaggccaggcctgggcgtgactacccatgcacaagtgttagggacagagagacccttcctccagggggttggatcctctctggagcccaccattgtcttgtcaggccccttccctgccctctggagttttccccacataagcagccccccaaggcccctccatatgcctcctcccaattctcctccccaggacccaggggtttcctcactcccacctggggaatggctcccacggggaaacctcttcacttccggttctggcagcgacttctgcggctgcaccaggaatcctggttttctgagcctggctcccccagattctggtttggggacagggttcacaggctgtgcaggcgagagcagggcactggctggagagcagccgggtgggggagcatcccgggccagccgaggggctgagtgcccccaaagcccacaggtgcaccccttccctgaagcagaggtgaggtttggggggctgagtccccgacagggttgtctcttgggttcccagactggggcagcacctactccgtgttcagtggtggagaccgattacgaccagtaacgcgctgcttgttacagccaggggcagcaaggggccttgngaagngaatttccgcattggccaaccttttacaagccgaaacccagaacccccagggntgagtttaaaggagaatttaaccnntttttnnaangnccagggtttcacagaggattacctttttcttcttncccaaaccgtaaatncattaacggaacat

SEQ ID NO: 146843 - DNA, 792 bp, Homo sapiens
ccagtgcggtggaattccctccctcgctctcccacaccactggcaccaggccccggacacccattctcctgcagcaggagaatggctacttcattcacacgctgtggatgggactggccctgctgggggtgctgggcgacctgtcagggcagcaccggaggcccaggtctccgtgtcagcccaacttccagcaggacaagttcctggggcgctggttcaagcgcggccctcgcctccaactcgagctggctccgggagaagaaggcggcgttgtccatgtgcaagtctgtggtggcccctgccacgggatggtggccttcaacctgacctccaccttccttcaggaaaaaaccagtgttgagacccgaaccatgcttgctgcagccccgcggggttccctcggcttccttacagcttaccggagttccccactgggggcaggcacctactccgtgtcagtggtggagaccgactacgaccagtacgcgctgctgtacagccagggcaagcaagggccctggcgaggacttccgcatggccaccctctacagccgaacccagaccccccagggctgagttaaaggagaaattcaccgccttctgcaaggcccagggcttcacagaggataccattgtcttcctgccccaaaccgataagtgcatgacggaacaataggactccccagggctgaagctgggatgccggccagccaggtgacccccacgctctggatgtctctgctctgttccttccccgagcccctgccccggctccccgccaaagcaaccctg

SEQ ID NO: 146844 - DNA, 1494 bp, Homo sapiens
atgggggtcacagaagtcttccttaaagatgtgaccattttgctaaatcttgaagaactagtgcaatgcaggcagacatggggtgaagcccgaacaagagggaagcgcgttttgggaagtcttgcagatgaaattgttgtgaggacacagcagccaccatctttggagcacaaggcatggaatgcaacttgcaaacactggctggcagcagaggctgccctggaaaagtactacctttccattttttatgggattgagttcgttgtgggagtccttggaaataccattgttgtttacggctacatcttctctctgaagaactggaacagcagtaatatttatctctttaacctctctgtctctgacttagcttttctgtgcaccctccccatgctgataaggagttatgccaatggaaactggatatatggagacgtgctctgcataagcaaccgatatgtgcttcatgccaacctctataccagcattctctttctcacttttatcagcatagatcgatacttgataattaagtatcctttccgagaacaccttctgcaaaagaaagagtttgctattttaatctccttggccatttgggttttagtaaccttagagttactacccatacttccccttataaatcctgttataactgacaatggcaccacctgtaatgattttgcaagttctggagaccccaactacaacctcatttacagcatgtgtctaacactgttggggttctcttattcctctttttgtgatgtgtttgttttattacaagattgctctcttcctaaagcagaggaataggcaggttgctactgctctgccccttgaaaagcctctcaacttggtcatcatggcagtggtaatcttctctgtgctttttacaccctatcacgtcatgcggaatgtgaggatcgcttcacgcctggggagttggaagcagtatcagtgcactcaggtcgtcatcaactccttttacattgtgacacggcctttggcctttctgaacagtgtcatcaaccctgtcttctattttcttttgggagatcacttcagggacatgctgatgaatcaactgagacacaacttcaaatcccttacatcctttagcagatgggctcatgaactcctactttcattcagagaaaagtgaggggcttgtgaaacagattgttctacagatgaatctgtaagccagttacagtttgctttaactcatagacatcaatcagagagtgtcacagatttaaccttgatctaaagaccagttggacccagagtatgtgaaaagaatgggacgaccaagaatgtaactgggtttttttcttcctcttagaaattgaaaggaggtggaactgcccttattgtttgggcattgtaacttccaaaaatactaggtagtataaggctttctcaatcagtgcaaaaatggaagatatataaagcaacaagttgtctgcatttgatcactggtcagattgt

SEQ ID NO: 146845 - DNA, 570 bp, Homo sapiens
atgggctccaaggcaaagaagcgcgtgctgctgcccacccgcccagcgccccccacggtggagcagatcctggaggatgtgcggggtgcgccggcagagaaaacagtgttcaccatcctggccccggaagaccccccagttcccttcaggatgatggaggatgcggaggccccgggagagcagctctaccagcaaagccgggcctacgtggctgccaaccagcggctgcagcaggcgggcaacgtgctgagccagaggagtgagctcctgcagcgagccggcgtggacctgggtcgggaggtggaactgatgaacattgagcagaaaaaaaagactgatggaaacgaaaagaaattggagaaagttaaagcttaccgggagaagattgagaaggagctggagacagtttgcaatgatgtcctgtctctgcttgacaagttcctgatcaagaactgcaatgatttccagtatgagagcaaggtgttttacatgaaaatgaagggtgattactaccgctacttagctaagatgccatgtgcaggtggattccatgccgcagacatgaaataa

SEQ ID NO: 146846 - DNA, 1479 bp, Homo sapiens
tttcgtcgcgcccaggtgggaagaggccggcgactggggtgaccgcggggaaactgaggcaaaaagatgggctccaaggcaaagaagcgcgtgctgctgcccacccgcccagcgccccccacggtggagcaaatcctggaggatgtgcggggtgcgccggcagaagatccagtgttcaccatcctggccccggaagaccccccatgttcccttcaggatgatggaggatgcggaggccccgggagagcagctctaccagcaaagccgggcctacgtggctgccaaccagcggctgcagcaggcgggcaacgtgctgaggcagaggtgtgagctcctgcagcgagccggcgaggacctggagcgggaggtggcccagatgaagcaggcagcattaccgggaggcgaaggctggctcctaggcttgaccctttggggccttggtgctttgggcagggcacaagggtggtctgcaacccaggctttgcctgggggtccgtcggccccagactggcattcacggggtcccagcccacgtgggtgttgacacaggcgcccctcctgatgctggggctgcggttcatccgtcgtctcattcatgccgagttggtgggacccacccagctggctccgtcctgcgtgacctgagggccccactgcgtctctggaagaggatagggacattatttgctgtactgtgattctgtccgtcagctcacagtggccgtgctctgcagtggggcccctgggaacaaggtgccacctccttcctctcccggggcaaggcactcgcctgttccacttctgaagtccaaggtgttgggatcgaggtgttaactgtgaattccatccagcgagtgcccacccaatgtcagagcaagcccgaagggccaagccttgaaccccttgaccccacttccttctgggccccgggctcctcccacaagccacgttgatcttcacaacgaccctgggccgctggggtcacccagagaagaagcagccctgaggacccagccaggctgggcctagctccacggcacgggtgtctcccaagccactgcccttgctggaggaccgctgtgaatcactggccaggagcccagggtgtcctgagtcttcattaggccacccttgccaagctgcagcaggttcctggggctgctttccctgcgggtttctggccctgggggaagggggcgttagtgcggcggagggtcttgccaaaggcttttcatcctaaatagcaacttgagtggaaaccctgggcaagggcgggcccagaggctgggccctgcacataaagctttcgtgtgtgtctggccccgctgattggtgcctctgtgagcggctccgtcccggggcccccggaagctggggagggatgggtaccggcgaccccgggaaccctgctcagtcctgccgggcactgcatgcagggaccgtccgcctgacccagagacctgggggctgcctcaccct

SEQ ID NO: 146847 - DNA, 1551 bp, Homo sapiens
atgtgcgaactcgatattttacacgactctctttaccaattctgccccgaattacacttaaaacgactcaacagcttaacgttggcttgccacgcattacttgactgtaaaactctcactcttaccgaacttggccgtaacctgccaaccaaagcgagaacaaaacataacatcaaacgaatcgaccgattgttaggtaatcgtcacctccacaaagagcgactcgctgtataccgttggcatgctagctttatctgttcgggcaatacgatgcccattgtacttgttgactggtctgatattcgtgagcaaaaacggcttatggtattgcgagcttcagtcgcactacacggtcgttctgttactctttatgagaaagcgttcccgctttcagagcaatgttcaaagaaagctcatgaccaatttctagccgaccttgcgagcattctaccgagtaacaccacaccgctcattgtcagtgatgctggctttaaagtgccatggtataaatccgttgagaagctgggttggtactggttaagtcgagtaagaggaaaagtacaatatgcagacctaggagcggaaaactggaaacctatcagcaacttacatgatatgtcatctagtcactcaaagactttaggctataagaggctgactaaaagcaatccaatctcatgccaaattctattgtataaatctcgctctaaaggccgaaaaaatcagcgctcgacacggactcattgtcaccacccgtcacctaaaatctactcagcgtcggcaaaggagccatgggttctagcaactaacttacctgttgaaattcgaacacccaaacaacttgttaatatctattcgaagcgaatgcagattgaagaaaccttccgagacttgaaaagtcctgcctacggactaggcctacgccatagccgaacgagcagctcagagcgttttgatatcatgctgctaatcgccctgatgcttcaactaacatgttggcttgcgggcgttcatgctcagaaacaagcgtttccagattgcgattcatccgctgttcatcgccttcggtattgcaaaggacgagactataaccgcgttcgaagcagctgcgttcaacgccacgcaccagttctgaatagaaagattggtactggcagtgatcaacatgccaatgaattcggactctcctggatccttctgggtgcaaggactcccacttgcaaagcggacctctccccccgcccctactcctgcccccacccccagcctcagcagagatttctgggtgactcagggatcaccaccaagagcgtgccaaggtaccgaggtcaggagcactgcctgcaccccaagctgcagagcaccaagcgcttcatcaagtgtaccaccgcctggaacgagaaccgcaggaaatatcaggtcatgccaattgaagctcagcgtccaaagtgccagctgttgtttccaaataggagcccaacatggcagatatccatagataaagggccaagacaagacaccttcatgctctttcctccaattaagatctaa

SEQ ID NO: 146848 - DNA, 1336 bp, Homo sapiens
  misc_feature (1)...(1336): n = a,t,c or g
cggcacgaggagtacccgcactgcgaggagaagatggttatcatcaccaccaagagcgtgtccaggtaccgaggtcaggagcactgcctgcaccccaagctgcgcccctccggtcagcatgaggctcctggcggccgcgctgctcctgctgctgctggcgctgtacaccgcgcgtgtggacgggtccaaatgcaagtgcttcccggaaggagcccaagatccgctacagcgacgtgaagaagcttggaaatgaagccaaagtaacccgcactgcgaggagaagatggttatcatcaccaccaagagcgtgtccaggtaccgaggtcaggagcactgcccgcaccccaagctgcagagcaccaagcgcttcatcaagtggtacaacgccctggaacgagaaagcgcagcgcagggtctacgaagaagcgcagggtctacgaagaagaatagggtgaaaaacctcagaagggaaaactccaaaccagttgggagaacttgtgcaaaggactttgcagattaaaaaaaaaaaaaaaaagaaaaaaaaaaaaagcctttctttctcacaggcataagacacaaattatatattgttatgaagcactttttaccaacgggcagtttttacattttatagctgcgtgcgaaaggcttccagatgggagacccatctctcttgtgctccagacttcatcacaggctgctttttatcaaaaaggggaaaactcatgcctttccctttttaaaaaatgcttttttgtatttgtccatacgtcactatacatctgagcctttataagcacccgggaggaacaatgagcttggtggnacacatttccattgcagtgttgctccattcctagcttgggaagcttccgcttagaggtcctgggcgcctcggcacagcttgccacggggttctcctggggcttatggccgggtcacaagcctcagtgtgacttccacagtgggcccctgttagccggggcaagcaggaagcaaggtctctctgcatctgttctctgaggaactcaagtttggttgccagaaaaatgtgcttcattcccccctgggttaatttttacacgccctagggaaacatttccaagatccctgtgatggggcgagacaaatgatcctttaaaggaaggtgtgggggtcttttcccaacctgagggttttttgaaaggtttcacaggtttcaatattttaatggtttcagaagcatgttgaggtttcccaacattgttcagcaaaaaccttaggagaaaacttaaaaatatatgaatacatgcgcaatacacagctacagacacacattctgttgacaagggaaaac

SEQ ID NO: 146849 - DNA, 615 bp, Homo sapiens
gatcatagtcagtgcggtggaattcctttactcctgccagcttgggaaaaggccggagaaggcgaaattctgtgttttctttccggcgagagactttgtcagctcccgcacagtaacgtggaagtccaagaatccgagtggaggctcaccgaggcgaaggggccaaccatgggaaaggagagtggatgggactcaggaaggcttttggcctgagctgctgagaggatggattccgggttcagcagtgacttgggccagagcagaggcagagagacaagttaggaagctcctccagtcatcccactgagagacgcgggtggcttggtccgggactggagctgcagaagtatgagggatggtcagactggatatttctgaaggcagggctgctgtagcagctgtggtcggaggagttgtggctgtggggactgtgctcgtggcgctcagtgccatgggcttcacctcagtaggaatcgccgcatcctccatagcagccaagatgatgtctacagcagccattgccaacgggggcggagttgctgctggcagtctggtggctattctgcagtcagtgggggcagctggactctctgtgacatctaaagttatcggggg

SEQ ID NO: 146850 - DNA, 528 bp, Homo sapiens
  misc_feature (1)...(528): n = a,t,c or g
tttttttttttagaagataaccagcatctttatttttcatgcttccttaaatagttttgggagtaggagacttgtcctttggaagattgtcatccagaggcccaggaaagtcatctccaccaagagagccaacttccctgcctcagtgtggtgttcagctcggaagggggtgaacccagccaggccccaagagctgtcccagcaaagcccccgataactttagatgtcacagagagtccagctgcccctgggggaagcaagagagggtgagcacagggcacagggaggggtagcagcctttcnccctttttaaaaaaaaacagggggttgaaggccagagaccctgggtccctccagagacctgaggcccagggcagtccaaccctgtttccccacctcttgctttcctaaaaccctagggatttctgctctgggaggggctgctgcaggccactgcccgaagaggaggcaagaactctggtgaggaatcccagcaacagggcagaccctctgagaaatggcaggttc

SEQ ID NO: 146851 - DNA, 763 bp, Homo sapiens
cagctttactcctgccagcttgggaaaaggccggagaaggtgaaattctgtgtgctccctccggcgagagactttgtcagctcccgcacagtaactcttcctgtgtgaggtccaagcaccctctcttggagtctggattgggacccctttccagtaatatactcctggtgaaccatgaaaggacgatattgaggagacccctgaactaaaggaaatagaccgcaacaccaattggctgactttgggtggaagtccaagaatccgagtggaggctcaccgaggcgaaggggccaaccatgggaaaggagagtggatgggactcaggcagggctgctgtagcagctgtggtcggaggagttgtggctgtggggactgtgctcgtggcgctcaagtgccatgggcttcacctcagtaggaatcgccgcatcctccatagcagccaagatgatgtctacagcagccattgccaacgggggcggagttgctgctggcagtctggtggctattctgcagtcagtgggggcagctggactctctgtgacatctaaagttatcgggggctttgctgggacagctcttggggcctggctgggttcacccccttccagctgaacaccacactgaggcagggagttggctctcttggtggagatgactttcctgggcctctggatgacaatcttccaaaggacaagtctcctactcccaaaactatttaaggaagcatgaacaataaagatgctggttatcttcaaaaaaaaaa

SEQ ID NO: 146852 - DNA, 2792 bp, Homo sapiens
tccgccgcgcgtctcgcactccgagagccgcagcggcagcggcgcgtcctgcctgcagagagccaggccggagaagccgagcggcgcagaggacgccagggcgcgcgccgcagccacccaccctccggaccgcggcagctgctgacccgccatcgccatggcccgcgggaaagccaaggaggagggcagctggaagaaattcatctggaactcagagaagaaggagtttctgggcaggaccggtggcagttggtttaagatccttctattctacgtaatattttatggctgcctggctggcatcttcatcggaaccatccaagtgatgctgctcaccatcagtgaatttaagcccacatatcaagaccgagtggccccgccaggattaacacagattcctcagatccagaagactgagatttccttttcgtcctaatgatcaagaaagttatgaggcatatgtactgacaatagtaagggttcttggaaaagacaaagattcaggccaggagggatgacatgatttttgaagaattgtggcgattgtgcccaattgaacggaagaaaccgaggaggcttttattcatgaaacgagaagagcgaaaaggtcttccagattcaagcttggatgggctgggaaattgctctggatttaaatgatgaaacttatgggctacaaagagggcaaaccgtgcattattataaagctcaaccgagttctaggcttcaaacctaagcctcccaggaatgagtccttggagacttaccccagtgatgaagtataaccccaaatgtcccttcccgttcagtgcactggcaagccgagatgaatataaggataaagtgggaaatgggggagtatttgggactgggccaactccccctggttttcctctgccagtattaacccgtacctatggcaaaactccctgcagcccaacattacctggcagcccctgctggcccgtacaagttcacccaatccttacccatggacactgaaattcccgccatagagtggtaaggcccgtacgggtgagaaccattggggtaccagtgagaaagacccgttttccaggggccgttttgatgtaaaaaattgaagttaagagctgatcacaagcacaaatcctttcccactagcccatttaataagttaaaaaaagatacaaaaacaaaaacctactagtcttgaacaaactgtcatacgtatggggacctacacttaatctatatgctttacactagctttctgcatttaataggttaggatgttaatttaaagtgtaggcattagcaacaaaatatttattctactgtaaatgacaaaagaaaaagaaaaattgagccttgggacgtgcccatttttactgtaaattatgattccgtaactgaccttgtagtaagcagtgtttctggcccctaagtattgctgccttgtgtattttatttagtgtacagtactacaggtgcatactctggtcatttttcaagccatgttttattgtatctgttttctactttatgtgagcaaggtttgctgtccaaggtgtaaatattcaacgggaataaaactggcatggtaattttttttttttgtttgttttttgttttttggctctttcaaaggtaatggcccatcgatgagcatttttaacatactccatagtcttttcctgtggtgttaggtcttttttttttttttttttcctgggggctggggtgggggtttgtcatgggggaactgccctttaaattttaagtgacactacagagaaacacaaaaaggtgatgggttgtgttatgcttgtattggatgctgtcttgacatctcttgccttgtcctccggtatgttttaaaagctgtgtctgagatctggatcctgcccatcactttggcctagggacagggctaattaatttggctttatacattttctttttactttcctttttttcctttctgggagggcatcacatgctgggtgctgtgtctttatgaatgttttaacccattttcatgggtgggaaggaatttttatatttatggcagtttgtaacaattttattctttttcctggcaagaaaaagtgttaatgtatggaaataaacccaaagtcacttgtttgaaaataaatctttattttgaactttataaaaagcaatgccgtaccccatagactgggtgttaaatgttgtctacagtgcaaaatccatgttctaacatatgtaataattgccaggagtacagtgctcttgttgatcttgtattcagtcaggtttaaaacaccggccacataaaaagaatgaacaccattcctcgtgtgtgattcacttttgtctaaatgtcccaacctgtgacttctttactttccacaccactaattattcaagatcttgaagaagtattgaacctctaataggccattctctggcagatcagtacagtgaacagcattctggatcttagttttaccaaagattgctctgagagttccagggcgtaaatgccgggcaatttcaggatcagcaggtccacaaaattctcgaaatgtctttgtagcattattctgttgaatctccattgctacacaagggccagaatacatttctgtcaccatgtcatgatattcggtcactactcctttataaacttcatagaattgctcaacattaacccgatccatattgaacatctgcatagctgagatttcaaaacctgcatctcggatagccatcatgatcttttccaacagtccttcactgacagcatggtgtttacaatgcacgag

SEQ ID NO: 146853 - DNA, 1087 bp, Homo sapiens
tttttttttttttttaaaaggagcaatgacatttcctagaaagttactctaagaatttccctaagagggtccgggtatcatctcaagccagatctttctcatccttcaaggccctgtttggtacagcttgctaaggaagctgttccagactgcagcagccctctctggggtctctctaccacttcccagggcactcagaacttgtgcctcaagtagactgttttgtgggcactgtcccattctctgattctccatgtgagctggttttatcccatccgagcatgggctgtgaaaatcctaaaggttcaaaccccagccactcttcacctatatttcccccaaatgggctagcacggggaaaggggccccaaagtagggtgctcagtgcttgatgagagagtagaatttaaaataccccagggaggcattgtgagttaattacggaggccatgaaattgttgccacctccccaagctgattaaagagtgatactaggaaaataggtagggaagggctaatcagaaatgcctctggttcagaagatgctgagttttaaagtccagagagccaaaaaaaaaaaaaatagataaaccctaagtctatactcccagatggatgggagcatttgctgagcacctactgggagtcaggcactgtgctaggcacacaatctcactgaattctccctgcacctgacaggcaagcacattccttccatttcacagagcatcggaggctcagaggtgaagtaacttgcccagggttgtagcccaggcccttctcaggacacggctctcccagggcctccgcctccctgcactgagccctgccagttccatatgtcctccgaagcactcctgagccaccccagcatggtacctgccactctccgtgtctgcttcccatacctctctgctcctcttccccatccctgggtgggggcgggaattctgaaggggagaaggctctgactttccatgtttgcggtgaccaccctgttaagaactgaatggtgtcccctcccccaaatgcatatgttgaagcagtagcctgctatgtgactgtttttggagatgggacctttaag

SEQ ID NO: 146854 - DNA, 375 bp, Homo sapiens
  misc_feature (1)...(375): n = a,t,c or g
cagacagtcttgattctgtaaacaccaagctacacatagaaatagagcaggctttagagacctagtcaaatttgttttccctttccctttttcatttgaagggttttttttgttttttttttttagatttttagatggagtctcgctctgtcgccaggctggagtgcagtggcacgatcttggcttattgcaacctctgcctcccgggttcaagtgattctcctgcctcagcctcacatctgtaatcccagctctcagggaggcaagaggcgggaggatagcttgagcccaggagttcgagacctgcctgggcaatatagcgagaccccattctccagnnnnnnnnnnnnnnnnnnnnnnnnnnnnnnnnnnnnn

SEQ ID NO: 146855 - DNA, 490 bp, Homo sapiens
gcctactactactaaattcgcggccgcgtcgactttttttttttttttttcttttttttttgatggagtcttgctctgtcgccaggctggagtgcagtggcgcaatctcggctcactgcaacctccgactccctggttcaagtgattctcctgcctcagcctcctgagtagctgggattacaggcacgcaccaccacgtccagcaaatttttgtatttttagtagagacggggtttcaccatgttggccaggatggtctcgatctcctgaccttgtgatccacccgcctcggcctgttttttctttaagagatggagtctcgctctgtcacagagcctgcaggacagtggcacaatcttacacctcactgcagccttgaactcctgagctcaagccatcataccaccttagcctcttgagtagctgggactagacacctgccaccatgcacagctaattttttttttttttttcatagcaaggggctctt

SEQ ID NO: 146856 - DNA, 9234 bp, Homo sapiens; identical to SEQ ID NO: 145209

SEQ ID NO: 146857 - DNA, 436 bp, Homo sapiens
gagatggagtctcgctctgtcagccaggctggagtgcagtggtgcaatctcggctcactgcaacctccgcctcctgggttcaagtgattctcctgccttagcctcccgagtagctgggattacaggcacctgccaccacacctggctaatttttgtacttttagtacaggcggggtttcaccgtgttggccaggctggtcttaagctctggacttcaagtgatccgcccgccttggcctcccaaagggttgggattacaggcatgagccactgtgcctagcactttgagactcttgctacttaccgtcattttgctagtaaaggggatcattgggcccaaaagcaagtctctaatgtgtactttgctgagaagcagcctgtgctcagatacagcagggctccttcagcctgctctttcactctgtgtccaggtaaa

SEQ ID NO: 146858 - DNA, 385 bp, Homo sapiens
ggtcgactttttttttttgagatggagtcttgctctgtcacccaggctggagtgcagtggcacaatctcggctcactgcaacctccgcctcccgggttcacgccattctcctgcctcagcctcctgagttactgggactacaggcgcccagcaccacgcttggctaattttttgtatttttagtagaggcggggtttcaccacgttagccaggatggtctcaatctcctgacctcgtgatctgcccgccttggcctcccaaagtgctgggattacaggcgtgagccactgcgcccggcctctcctgtagttttcaacatagttaaatcctacaatgtctgagcaatggttacaattccttaggtagtaagggaaatacctgttga

SEQ ID NO: 146859 - DNA, 596 bp, Homo sapiens
ttttttttttttgtctttaagaaaacctaaagccttgtttggcctttttgtttatttttaaggtttttgttgtccctcaatgaccctaacctcatccccagtgagtaagagactgggaggggagagcagcagctggagggcaggctgggagcgcttgtgaagggaagaggagctatggacgtctgcttctctgccaagggagagagtgaggtaagccctgggcccgctgacttcagggtgaggccacagctactgcagcgctttttatttatttatttatttactgatgatggagtcttgctctgtcacccaggctggagtgcagtggtgcaatctcggctcactgcaacctctgcctcctgggctgcagtgattctcctgcgttcaagtaattctcctgccctcggcctttctgagtagttgggattacaggcatatgccacccacacttggctaattttttgtatttttagtagaaatggggtttcaccatgttggcgaggctggtctcgaactcctgacctcaaggatcctcctgcctcggcctcctaaggtgctgggattgcaggtgtgagccaccacgtctggccatactg

SEQ ID NO: 146860 - DNA, 4408 bp, Homo sapiens
ttttttttttttttttttttactaggcatgtccatgttttattttctttaggtgtttttctggaaaattacattttcaaggaatcagcccttacaaacagagctaatctttcaaaaaataaaacccagtatctagattctcaaaacttacaaaaccaactggaaatgtctggttgtcatgctcaattcagtttcacatcacaagtaatcatctataactatttcagtaggcaaattccaattctaaatattactaacgattaccattgttattctcaactgtgttgacaattgtcttattgctgaattgttcataatacatcttctttggcaactttattaacaccatgggacaactaaaggtctggattaacttagtatttcaaaacttcattataattatttaaaagtaaatgctagacttaaattatttaaatttaaatgctagatttaaattatttaattttaataaaatttaaatttaaatgctagaataggaaagcctccaaacatgcctaatataacaaaaacaaaaattgctaaataatcactactaaaagcatttccattgtatgtacaagtatataactcaactttaccaacaaaaatattataatttagctccaattctctatcagacctactgtgattaaaaaaaaacaaaaaataaatggagaaagcaacatctgggcacctgtcaaatttttatggaaggttgttttatataaattttaaatggcttaaaatcagccagaatgcgaatttttcactataatactttataaacttgtactttcttttttctttctttctttttttgagatggagtcttgctctgttacccaggctggagtgcagtggcgcaatctcggctcactgcaacctctgcctcccaggttcaagcgagtctcctgcctcagccttttgagtctctggaattgcagatgtgagccactgtgccaggcttcttcatttgtgaaggatagctttgctggatatagtatttttggcttacatttttttatttttattttacttgtagtatacatccccttttctcctagcctgtaaggtttctgctgagaaatcccctgttagcctgatggagattctcttataagtgacttgatgcctttctcttgctgtttttagcattttctctttgtcttttgacaattttacaataatgtgccttggagaagacctttttgagttgtatttatttggtaatctttgagcttcctgcatttggaagcattcaggaagttttcagttattattttattaaataggttttctatgcctttacccatctcatctccatccagaactcccagaatttcagtttttggtgacatatgtgtcccatatgtcatgtagccttgcttcattcttttttctttctttttgtctgactggattattttaaaagactagtcttcaggttcagaaattctttgttttgcttgatctagtctattgttaaagctgtcaattatcttttgtatttatttcaatgatttattctcttccaggatttgtgtttggttctttgttatgctgtctatctctgttgaatttgtcgttcagatactgaattgttttcctgtttggtttttttttttttttttttttttttttgtattcattatctgtgttctcttgtatctccctgagtttctttaataacattattctgaatttttttcaggcatttcatagattttcttttcattggatctgttgctggagaattattgtgcttctttggagatgttatgtttcctttttcatatttcttgcatccttatgtgactatctgtgcctctgacataacagtcatttcttccaattttatggattggcttttatatgggaaagaccttttcttatagctctatctacagtgttcattggatatcacactttggctttgattctgggtgggtacagtggtatagtctgcatatgattccttcagctgtaattggcatgagtggtgcctgtgagtcattcagtggcttagactgcagtgtttttttttgtggttgttgagatggaggagtctcgctctgtcatcccaggctggagtgcagtggcacaatcttgactcactacagcctcaaccccccggggcttgaggtgggtaatcctcccacctcagcctcccgagtagctgagtccacaggtgcacaccaccaagcccagctaatttttttttttttttttttttttgtatttttagtatagacgggggtttcaccatgttggccaggatggtctcgatctcttgacctcagagtgatccacccagcttggcgcctcccaaagtgctgggattacaaggcgtaagtcaccatgcccggcctgattaggatttttaaaatcacttctagcaccaacattttgacttaaatactattttgataaaatcatgtgaattgctattaaacaccaaaaaatatcaccactttattttgagaaatcttagtactttaatgatagccatttttggacataaactggttgcataattttgttgttgttgttgttttttagatggagtctcactctgtcactcaggctggagtgtagtggcaccatctcggctccactgcaacctctgcctcccaggttccagtgattctcctgcctcagcctcccaagtagctgggactacaggtgtgcgccaccacccccagctaattattgtgtttttagtagagatggggtttcaccatgttggccaggatggtctcaatttattgacctcatgatccacccacctcggcctccgaaagtgctgggattacaggcataagccaccacacccagcctgtgggaactatttattggatttcaaaacaccctctgcctcattaatccactaagctttctcagcaaaaagctgtttaaataaataatgggaacatctaatttaaaacagtttttctaattatagaccagtacacgaagaagagcttaacttacccaagtaatagtctagtttgggtccataatggagctgaaggctcagaggacattcagggccattacactgcaggaaaaccaaggattaagggatgtagaaatgacctaagaaaagcacgaagtggaatgtatactggaggcaagttaatgaaagctaataaatacaaagtgctgggaaaaatctaaaagcaaaatagctattgtaacttgcaatgcattaaaaaccaactttaaaaccaaaaagtcttgataaggaaactctatagtggggtctcagttaaatgctgatgatttttaatgctcagataacattaagtgggaatatttacttctgcatccgacaccaactggaatttctcacacactactacacttgttcacttttcaatcaagttccactttctgaacttgttcaaaacctcatttgaaatatatccagctactgcttttcccctttcacctagcacagggcagttacctggcaaagctctattctggccaagtcactgggactgagtagaacccacgttagcagctctggacctgaacaggagctggcccaacatcacagtgaccacccacaaagagacaagccctcctggatttttttcagcatttcttatactgactacagtagtgatgattaaagttatctgccctacagactccactgaatttgaagctgtatttattgtacagatgggggaaatgtgttttattgtgtcagttatattaatttttatcaatgtgattagatacatattttggcctattaatcttattcattatattcttagtctgagatggggttttaattctgactaacagcagctacttaagagtccaatcatacaaaatcggaggaggtattaccctttctacagctaagcgagtcagtaatacagcagcaactaatactggccattaataacgtccagagagcacattagcaaaccttgtactcccagtgactgtcaggagacttgaaaataactactattctcttccaaagtagaatagcgtttttctagatagtgaaggaaatgatagtcatagttggtctgaactccaagatcctactcctcaaaacagcaccgaagcaggggttcgggatgcctgctaagagcatttccacagttcaagtctcttcagaaccttagggaccttcgtgtctagcttcacacacccacctccacatatgaaccagcctaccacacttcacatctgggtacactggccattagcaacaatgcagtctcatgcagcagcacattaaaatcaaacgggtggcaatcgttcaccaccctcagagtgttgggagactttcacatttcatcatccttataatccacaaacagaaacatgaagggatgcaaatgagttcagcattcactcgtttggtgcactcaagtgctgag

SEQ ID NO: 146861 - DNA, 1274 bp, Homo sapiens
  misc_feature (1)...(1274): n = a,t,c or g
gtgacgtacatccggcgagtagctggcggtccccgggtgctgctggtttagtgtgctctgagggagggtccgagccagccgctgtttttgccggagaggcccctcaggccggctgcttccnnnnnnnnnnnnnnnnnnnnaccagaaaacctcaggatccacaaagtatcatcaaatgaggtagtaagcattaataatgtctttcatctttgagtggatctacaatggcttcagcagtgtgctccagttcctaggactgtacaagaaatctggaaaacttgtatttcttaggtttggataatgcaggcaaaaccacttcttcttcactggctcaaagatgatcagattgggcccacattgttcccacccctacctccgacatcagaagaagctaacaattgctgggaatgaccctttacaacttttgattcttggtgggcacggagccaagcacgtcgcggtttggaaaaatttatctccccagccaattaatgggatttgtctttctggtggactgtgccagatcatttctcgccttcgtggaatccaaaagttgagcttaatgctttaatgactgaatgaaacaatactcccaatgtgcccaatcctttatcttgggtaacaaaaattgacagaacagatgcaatcagtgaagaaaaactccgtgagatatttgggctttatggacagaccacaggaaaggggaatgtgaccctggaaggagctgaatgcctcgccccatgggaagtgtttcatgttgcagtgttgctcaaggagggcaaggtttacggccgagggttttccgctgggcttctcccagtattatttgactgatgttttgggcggttgaaaattaaaaagagttttacttctctggactgatcctattcacagcttcctcatgaacttttctaatagaacaaggaaagctctccaaccatgtctggcgtggagaagccaagagtctctgtcaactctctcattgcccagtggtgacatgtgctcttctccacactgttgggaggtaatgctgccccacgtgctggtgcaggtcagtatcctgggacttggaagctggcaggatttgccgggtaaagctgtatgccatcatggggcacctgaaaagaaaaacacgtctcaccactgtggttgattcaaaagaaagtgattctattttttaaagaaagcgttgataatgtaattggtatccctcctaactttttgagttcacaatttacttggtccagagttttctattctttctttttttaaaa

SEQ ID NO: 146862 - DNA, 3031 bp, Homo sapiens
  misc_feature (1)...(3031): n = a,t,c or g
atgatcgctgatgataagccagctgcgatggctggtgagtcagctggacagtcatctgagtctggagttggggccaacttctttggcatcacattccagacaacagaaacactgatgagcacagggcatctgaatggggccgaatgcaaagcaggtccaggcactgtgaagaccctggcggtggaggaagaggcttcccggctgtggaggaagccagacccttacaacacaagacgagaaccagacctgcgtgggggagctctggatgctacaggggctcaaggagggccactggaccgagcgcgcaaagaacctgagaccgcttgctctcaccgccgcaagtcggtcgcaggacagacaccagtgggcagcaacaaaaaaagaaaccgggttccgggacacgtgccggcggctggactaacctcagcggctgcaaccaaggagcgcgcacaatgctccgatacagggggtctggatccctactctgcgggccatttctccagagcgactttgctcttctgtcctccccacactcaccgctgcatctccctcaccaaaagcgagaagtcggagcgacaacagctctttctgcccaagccccagtcagctgttttcgggtccgagggaaggaggaccctgcgaaagctgcgacgactatcttcccctggggccatggactcggacgccagcctgggtgtccagccgcccgtcgtcgccagagcccgatgacctttttctgccggcccggagtaagggcagcagcggcagcgccgttcagctgggggcaccgtgtcctcgtccaccccgagtgactgcgcgccggagctgagtcgccgagttgcgcgccgctatgggctctgcgaggcgcgcattctgggaccaagctaggaggcagtggattcaagtcgtcctcgtccagcacctcgtcgtctacgtcgtcgtcggctgcgtcgtcctccaagaaggtcaagaagcgaatgacagagccggagctgcagcagctgcgtctcaagatcagcagccgcgagcgcaagcgcatgcacgacctcaacatcgccatggatggcctccgcgaggtcatgccgtacgcacacggcccttcggtgcgcaagctttccaagatcgccacgctgcttgctggcgcgcaactacatctccatgctcaccacttcgctggaggagatgaagcgactggtgagcgagatctacggggggccacccncgctggcttccacccgtcggcctgcggcggcctggcgcactccgcgcccctgcccgccgccaccgcgcacccggcagcagcagcgcacgccgcacatcaccccgcggtgcaccaccccatcctgccgcccgccgccgcagcggctgctgccgccgctgcagccgcggctgtgtccagcgcctctctgcccggatccgggctgccgtcggtcggctccatccgtccaccgcacggcctactcaagtctccgtctgctgccgcggccgccccgctggggggcgggggcggcggcagtggggcgagcgggggcttccagcactggggcggcatgccctgcccctgcagcatgtgccaggtgccgccgccgcaccaccacgtgtcggctatgggcgccggcagcctgccgcgcctcacctccgacgccaagtgagccgactggcgccggcgcgttctggcgacaggggagccaggggccgcggggaagcgaggactggcctgcgctgggctcgggagctctgtcgcgaggaggggcgcaggaccatggactgggggtggggcatggtggggattccagcatctgcgaacccaagcaatgggggcgcccacagagcagtggggagtgaggggatgttctctccgggacctgatcgagcgctgtctggctttaacctgagctggtccagtagacatcgttttatgaaaaggtaccgctgtgtgcattcctcactagaactcatccgacccccgacccccacctccgggaaaagattctaaaaacttctttccctgagagcgtggcctgacttgcagactcggcttgggcagcacttcggggggggagggggtgttatgggagggggacacattggggccttgctcctcttcctcctttcttggcgggtgggagactccgggtagccgcactgcagaagcaacagcccgaccgcgccctccagggttcgtccctgggcccaaggccaggggccacaagttagttgggaagccggcgtttcggtattcagaaggcgctgatggtcatatccaatctcaatattctggggtcaatccacaccctcttagaactgtggccgttcctccctgtctctcgttgatttgggagaatatggttttctaataaatctgtggatgttccttcttcaacagtatgagcaagtttatagacattcagagtagaaccacttgtggattggaataacccaaaactgccgatttcaggggcgggtgcattgtagttattattttaaaatagaaactaccccaccgactcatctttccttctctaagcacaaagtgatttggttattttggtacctgagaacgtaacagaattaaaaagcaagtgcctgtggaaaacaagttggggttaatttggggggtcctgttgggctttttaaaaatttccttttttgggatgtgtaaatttatcaaatgaatgaggtaaagtggcgcaatgcctaaggctgtttgcctcacgtgaactgccaagcccccatcggaagtcctaagccggctttccctctattttgggtttatttttgcccacgtttaaacacaaatggtaaactcctccacgtgcttcctgcgttccgtgcaaagccgcctcggcgctgcctgcgttgcaaactgggctttgtagcgtctgccgtgtaacacccttcctctgatcgcaccgcccctcgcagagagtgtatcatctgttttatttttgtaaaaacaaagtgctaaataatatttattacttgtttggttgcaaaaacggaataaatgactgagtgttgagattttaaa

SEQ ID NO: 146863 - DNA, 665 bp, Homo sapiens
ttcaattctgtatacagacttagctttagtttctccgctctgaaataaattttcaataaaatattaccagtatgatatctaaacagggttactacctgctcacatcaagttacatcctctgaccaatccttaccttccttaatgtcaaagaacaaatcatagacattaagctagagcttacctttcactgtcttctaaggcactgttctttatattctcaatgacataaggtgctttacaagtatgaacaataatctgttatacacactaatggtatcctttcatttctttaaatctggaatgtagttccttgtgtggcatcttatttctaatgtagaaaaaacagctgttatcaagcacaaaattttaatctaaggataccatttagtactactaaattaataaatttattccacttttgaaatgacagccaaaaatccacctaattgattctcatttggcacgttcttctcaattctgttcactaaattaaaattactaaatttaaactgccaagagccatgatgttgtctgcacaagacaacattttccatcactttcagaaagttatatttggcatgttaaggaaaaaaaatataatcccacagcagcagctatttaaaataagacagccacaggattcatgcagaatattttaaatattc

SEQ ID NO: 146864 - DNA, 2496 bp, Homo sapiens
gcggcgccgcaggggattgaggggttgactgagcgttgcgagctttagctttctttcgaacgccagcgctgaggacacgatgtcgcggctctcccgctcactgctttgggccgccacctgcctgggcgtgctctgcgtgctgtccgcggacaagaacacgacccagcacccgaacgtgacgactttaccgcccatcgtccgcgaaacctcggcgccagtgacgcccctcccgctggtcaccactccggcaccagaaacctgtgaaggtcgaaacagctgcgtttcctgttttaatgttagcgttgttaatactacctggcttttggatagaatgtaaatgatgagagctattgttcacataactcaacaagttagtgatttgtcaagtggggaacacgacagacttctgttccgtttccacgggccactccagtgccaacagccaattcttacagctaaaacccacagttcaagccctccccttctacaacttccaagacagttactacatcagggtacaacaaataacactgtgaattcaaacctcacaacctgtgcgaaagtctacctttgatgcagccagtttcattggaggaattgtcctggtcttggaaataagatgccacacaaggaactacattccagatttaaagaaatgaaaggataccattagtgtgtataacagattattgttcatacttgtaaagcaccttatgtcattgagaatataaagaacagtgccttagaagacagtgaaaggtaagctctagcttaatgtctatgatttgttctttgacattaaggaaggtaaggattggtcagaggatgtaacttgatgtgagcagtagtaaacctgttttagatatcatactgttaatattttattgaaaatttatttcagagcggagaaacttaagctaaagtctgttatacagaattgaaagccttcgtatcttgaacctcccaacatttttcttatggctgttgaaaagtatagagctaaattgatttaattacactttcctttgtactttaaaaaaaagtatgctagcactattgtaccttgaaaggatttccaccaaactgtcttgagtagtgacttctttggtgaggcaagaaggatatacattattttagaatcatttactatttaaatgagacaatcatattattttagaatcatttattttaaatgagacaatcatttttaggttttaagataacagaagtgaccaatgtaatttcacaacacctaaaggattttttggttgatcaggattactgtagattttttaccggattggtcctggatgaataagactgtgctttttctttttctctcccttccttcttggtttcccatagtataaataagcatgcatactttaacttctatagttttctcctttagagggtcgtcttcagttttagaggtttacttctccccttgcctttgactcattggactagtgcagaggctttaagtagtttaaaatgggcttttgcttttctaggtcattaacgttttttatttagtttctttagccaatagtggctgagtttcgcacttgattttcaatattttatagtaagaaatgacaaactgctttgtttcatttcaataaacaaactctgcatttaagataactatttaagggttgttaagatgaagcatttactgtttctttgttactcgttggtacagctgtttgttttacttgcacatttgtacatatacttaatgttttcaagtgccttaattgtttaaaatctctggcttcaaagtttcttggggaaaggtcggtttacctcacattttttgtgttccctatagtaatattctagggtacctcacaaaaatgtatttatggtgcccatggcctgttagtttttagtgagtgctgtaggattaattcgaaaataggcaaatttcccattccctcccaaaggtggcaaaaaattagcttaaactgatgttaattgccatttacctggggtatgaattcccctgacacacattccatgtccaccatatgtggcaaatttggtgaaaaccataaccaatttgaagctcctgcaatactttgagacactgctctaacaacaagcattaatataaaattagttagattttgcaagtctacaaatgagctcttgcaaacagaactcacagcctttttacttttttcccctaacctttagcaaatgtagtatcttgagcccattaatttttgggttttttttaaaatccagaaggtatatagaaaccttttcagattgtgtcatctgatttgttcttgcagatgttcttctatcaaataccttatttttaccttacagatatttggttgccacaggcagatactgctggtatttagacatttctatttcagttcattaaaaactgcaaaaccaatctgtatcatgtaccaaacttgacttaaaataaatctacatgttttttgaaaaaaaaaaaaaaaaaaaaaaaaaagggcg

SEQ ID NO: 146865 - DNA, 411 bp, Homo sapiens
  misc_feature (1)...(411): n = a,t,c or g
tttggaagcagaaaataaaaanctagtagaagcccaggagaaactgaaaactgaattaaggaagacttcagatgccctttctaaggcacaaaatgatgtgatggaaatgaagatgcagtcagagagactttcgaaagaatatgatcaactcctgaaagaacactctgaacttcagaagcaaagggagatattaccacacagaagaggagaaagcacagtgaccacannnnnnnnnnnnnnnnnnnnngagccgcagcaaaggaatgctgacagnnnnnnnnnnnnnnnnnnnnnnnnnnnnnnnnnnnnnnnnnnnnnntcttccagcaggagcatggccctacagataccgataaaacnnnnnnnnnnnnnnnnnnnnnnnnnnnnnnnnnnnnnnnnnnnattgtttca

SEQ ID NO: 146866 - DNA, 575 bp, Homo sapiens
gcttattactcaactggcaaaagaactgtcaaacaaaggtgtacttaaaactcaagcagaaaatactaacaaggctgccaaaaaatttatggaagaaaacgaaaaactaaaaaggattttgaaaagccatggtaaagatgaagaatgtgttttggaagcagaaaataaaaaactagtagaagaccaggagaaactgaaaactgaattaaggaagacttcagatgccctttctaaggcacaaaatgatgtgatggaaatgaagatgcagtcagagagactttcgaaagaatatgatcaactcctgaaagaacactctgaacttcagaagcaaagggagatattaccacacagaagaggagaaagcacagtgaccacagaggcagagattggagtgatggagccgcagcaaaggaatgctgacagccaccagaagctggaggaggcaaagaacagattcttccccagagcctcttccagcaggagcatggccctacagataccgataaaactgatattggacttcctggcctccagaactatgggaataaatttattgttaaaagctaaaaaaaaaa

SEQ ID NO: 146867 - DNA, 542 bp, Homo sapiens
tcagatgccctttctaaggcacaaaattgatgtgatggaaatgaagatgcagtcagagagactttcgaaagaatatgatcaacttcctgaaagaacactctgaacttcagcattccagttttggtgaatttttaagcaaaagaagccacaaaaatggcagcattggaaaacagactggttctagaaaaggatcgtttagaaagaggcaacaagaaaagactgtgaactttataaaagacactttgcaatatactgtgtccaaatgataattttgttatgttagcctctagaaaatttaagttcagaaaaatgcactatgaccggttcgtaatttttttaatgccacacataggttgtattgtaatggcattatcaaaatatttgatgatgtttcagatatattgcaaagtctgtattccagctcttaagaaaaatataagcatgttaaataccatatttacatattgataatgtcattggtatatggtggctgtttaccaataaaaggaaaaaattccttaaaaaaaaaaaaaaaagtcgac

SEQ ID NO: 146868 - DNA, 1119 bp, Homo sapiens
ccgcggagcagcgcagggagccaggcgggctgccggcgggtggtaaagaaaaaaattgccactccaatggcctgcagtgccaccctttctatatgccgaaataggactcatattaatcttctgcctaccttttattcctcctcagagatggcagaagatttttttcatttaatgtctggggtaaaattgcaactttttggaacaaggctttccttaccattatcatcctattgattgttctatttctagatgctgtgagagaagtaaggaaatattcctcagttcataccattgagaagagctccaccagcagacctgatgcctatgaacacacaacagatgaaactttttaggtctcaaaaaaatctttacattcctggaatttccctatttttttggctagttttgagacgtctggttacgcttattactcaactggcaaaagaacctgtcacacaaaggtgtgccttatacctccaggcagaaaatactaacaaggctgccaaaaaaatttatggaagaaaacgaaaaactaaaaaggattttgaaaagccatggtaaagatgaagaatgtgttttggaagcagaaaataaaaaactagtagaagaccaggagaaactgaaaactgaattaaggaagacttcagatgcccttttctaaggcacaaaatgatgtgatggaaatgaagatgcagtcagagagactttcgaaagaatatgatcaactcctgaaaagaacactctgaacttcaggtcccactgggcagcttctacatactggccttcgcacctgggctccataaccctcatccctccagcccaagaagtggtggtggcttttctgctattgataatcccagaggtgccttaccaccctgtttggtgtgtgtactttttcatcacctgtaaaaccaatttcccataatatctctgttggaaggaaaacaaaatctcagctccatagtttaccacttctgtaacccacaggtgactcatttgacatctatgctcctcaggtactttactacttaaataaaggttgtaataccttatgaaaattaaaccagatcctgtataagaaagcactttatatatttataatcaagaatgctatttatt

SEQ ID NO: 146869 - DNA, 2582 bp, Homo sapiens
attacatgacatactttctagtccgtttgagaatccaggggaaaatggatgtccgccatggtaatagacagtgaaaccccctcccacagtcccggggttggtgaacaggaataacacttgttttaaggactactcaaagtctatcagtcttcctctgtagggagttatgtagcagggctcttcccattatctcaaggatatctgaatatgggtaataacaaactgtcataacaagattcttctgtagatcttgagcccctgtggcgcattttggaaagacaggactactgaggaaaattaactctttattactttcaattgttaagaaagaaatctcattatatccccaatgataccgttttctgcccttactcaaagaggtctgggtgtgggtaacagccacctcccaacaacgtcagaggtccgggttcagaattcctcaacgcgactcagtcacttgggtctcaaataactactctggagtaacgagaggtcattttaacacaacagagactccaattcaactctcttctgttaacacagtcagagttctcttctcaatgctctcacaagttttaaaaatggagaagctataaaataattttgttagaagaaaagtaattttcttctgaaatggagtaaagcaaacacatacccaaggatcttaaaaagtttttttttgtttttacagaatatatgtatgtatttgtgtgtgtgtgtgtgtgtgtgtgtgtagttacaaacactatttatagtatagctaatatgttaacttcatcgcagtgtctacaaagttgtggatcccagtcttggtgccaaatgcatataaaaagctcaaaagctattatgactataccatgcaaatttatatccagaaaaccttgggaaggagactgcagctctttggagccccatggggtctctgcctttgatatttgggtacctcaactatgcatcaaaaaagttttaaatcacttttctcccagaaagaattaatgtcacagttctgaatagtataaattatacacttaaatagaccattgactgtttttgtccacatccatttacattttggggtccctcttctgcatgtggacctcacacctttaattactggatacagaaaaagatacctgaagtattgaaagggataaggtctttgcaaatgtattttttttctttaacatgataataatgataaggccacttaacaaggtttttcccaatctgtttaacttttaggatcccccattgttacccatggaaaaaatgggtagaggaaaggccaaggccaaggaaatccctggtaagtctccagatgaaaataaaaccagagagcagcgattaggaggaaaaagataggaatgaaagagggaaaagggtctaaaagtaggtaattgcctctagcgtgagattttgtggattatgttttatctgatggtgggttttgaactgttgcagatgcccacaaattaaaggttgttacggcccacccaaagaaaaatcaagtagtggtcagctcatggggatagtcccacaccacacgcaacctcggggagggtggtgcctctacctacatcgagacaactggggcctaccattggagcactctggtccttggttttggatagaacagagagggtgaggcatacgtggcattttgggataaagtattaatttagcagttcttcctgcaaattttgctttttatttttttctccaaatgctcaacttcactgtgacacctgtttgcacaactgtagtcatttcagtttatggatgcctgtgatagaaatattgtttacaaaaaatatatcatctcttttttttttctttagaaagcatctcatctaaatagtaagttaaggttgcgtctatgaaaccggtgcaccttgtcttgtttctacgagctttaaaaagtccaaatactgatgaggctgtggatcagaaggaaccaacagtgactgtgtttgctgtcaggttgccctcctttgcctcagagaacggtcatgggtcgttgggtgacgcgtgggtgtgtacgggtcatgttcctgcagaatcctagttcagtctagggagtagttgggatgtgcttatgaaatatgtcagatacagaaataaagggcatgagggatgattcttagttttctgaaattgaacagtaggaagtgttttaggctttcaatcttaatttctaggattaacaggaaagtaggtttacatcacataaaggaaaatatgacatcgcatgctgccatgatagcaagcgtaagaaacaaaatcttggtaaatatacatatatatgcatattatgcaaatatattttctattaacatacaatgttataagaatgataacataactgcaagggggaaaatcatcctagatggttttaccttagagtaacgaataacctgagacgtctatgctttctgttggatatcaggcctagaaatccatacgagatgtagagcacattttcagtgattgaaatgtcactggccaaacgtgtcactgtgttcgcacatgacagtgaagctggatccactccaagtgaacaacagaaacaaactacacactgt

SEQ ID NO: 146870 - DNA, 778 bp, Homo sapiens
tctggccatttctcttgaaactgcggctcgggacctgcggtacctgctgtagtcacgagggacgggcggcggcctggtcggcagagagtagcctgcaacattcggccgtggttacgatgagtttacccctcaatcccaaacctttcctcaattggactaacaggaaagccagtgatggtgaaacttaagtggggaatggagtacaagggctatcttggtatctgtagattggctacatgaacatgcagcttgcaaatacagaagaatacatagatggagctttgtctggacatctgggtgaagttttaataaggtgtaataatgtcctttatatccagaggtgtggaagaagaggaagaagatggggaaatgagagaatagcatcttttgtgggggatttttttttatatatatttctagacaataaagatttgtttgtttttcaacttgacttgtgaactatttgtattcagatatttacaagcaaagctgaaatgatgaaccaattgggaaagattactcaccgaactaatgctttaaaagccactgaatttcatttaagttgcttttcttttgtaagcccaatattctttttttttcccataaaggataattatttatatgctttagatatttttatgaaggtgaatttcagaccttttcttgtaaaattatctattagctgagaccttttaaatgcaactttttcttttaaagttatttttgagctacttttaacgtataaaattaaacattttcttggttattaaaaaaaaaa

SEQ ID NO: 146871 - DNA, 1106 bp, Homo sapiens
tctatttatatgtatatgaataaccaacatatgaaaactaaggaatattgtgtgaataactgcttagcagtacctaagtctgttactaacacaatattccttagttttcatatgttggttattcatatgtctatttatatgtatatttatttttatgtatgttactatgtaaatatggtttgcagttgtttttgtgtggaatcttgtctttccgtataagttgtaagctccttgagagcaggatccatgtcattcctttatttttataaattattccccctatcattcctttacagtgcctagtgctactcattactgtgttcatggaatttgactgacatagttaaaaaactttaagggtttaattttagactttcaaaggaaacaaaaggactttagagtcctctctctgtaattctgccccaactcattatgtttaccctggggttttatacagttctcttccttctcgccctcccacctttcccctggctttttgcctccaattccatagggcatacagtagggctcgcctgctagtaagcagtcacataagtgggtaccctatcccagcccattctcttttcagagcatataatactatccttagccaaacttggcctttgcttcactcatcatgcagccttctgggttggttgctatatatcatctttcttcactgatgtcccattctcttccgacagccctgaggtcttacgaatttttctactttttttttgctgttgatgaattgtttcattattaaatatatgcatgtatcaaagctattcatactccatgtgtcatttctaattgtatcccaaacattagtagatactctcctctcagggaattaaatcaaagataatgaagaagcctctttgggattcatgctatactcgattctgaccccagtagtagtagtaatagttgacagtgcaccacaggaagttggaagacatttggggtattgctttggttatgcttttgttttgtttttaaaatcctatctgattccaaaaaggatttgaagctgttgaacttggagttagcctgcccccttacctctgggcgaaaactaaagtaataaaaactagtttctgtac

SEQ ID NO: 146872 - DNA, 1827 bp, Homo sapiens
cccggctcgagcggcgcggcagagtgcggcgcaccgcagctcctgaggttttggttatgaacaggattcggattcacgtcttgccaaccaatcgggggaggatcactccagtgcccaggtctcaggaacctctgtcttgtgcattcactcatcgtccatgctctcaccctcgtctggaggggcaggagttttgcattaagcatatccttgaagacaagaatgcacccttcaagcagtgtagttatatatcgacgaaggaatggaaaaagatgtcccaatgctgccccaaagccagagaagaaagatggggtgtccttctgtgctgaacatgtccgtaggaatgccctggcacttcatgctcaaatgaagaagaccaacccagggcctgtgggtgaaacactcctgtgccagctgagctcatatgctaagacagagctgggggtctcagactccagaaagtagtcgcagtgaagccagccgaattctatttgaagacagctggagtgatggggagcaggaacccattactgtggatcagacatggagaggtgaccctgacagtgaagctgatagcatagacagtgatcaagaagatcccctaaaacatgctggtgtctatacatttttaagaagtggccctgattatgcgtgaaaagctaattcgtttgcaggcgttgtatattgatcagtttaaacgacttcagcatctgctcaaggagaagaagcgccgatacttacataatcgcaaagtggaacatgaagctctaggcagtagtctcctgactggcccagagggacttttggccaaagaacgagagaacttaaagcgattaaaatgtctgcgacgataccgccagcgctatggaggggaagccttactgcataggcagttgaaggaacggagaatgctggccacagatggtgctggccaacaggcccataccactcgttccagtcagaggtgcttggcctttgtggatgatgttcgttgttccaatcagtctcttccaatgaccagacactgccttacccatatttgtcaggatacgaatcaggttctcttcaagtgctgccagggatctgaagaggtaccctgcaacaaacctgttcctgtaagcctctctgaggatccctgctgcccactgcatttccagttgcctcctcagatgtataagcccgagcaggtactgtctgtgccagacgatctggaagccggccccatggatctgtacttgagtgctgctgagcttcagcccactgagagtttaccttctgaggtcaaggatgacttggatgttgtgggtgatggtatgcagtgtcctccttcacctttgctttttgatccttcactaacccttgaagatcatttagtcaaagaaattgctgaagacccagtggatattttgggccagatgcagatggctggagatgggtgcagatcccagggatctcgaaattctgagaaagcctctgcaccattgtctcagagtggattggctactgcaaatgggaagccagaacccacttctattagttgatagtttggggaaccattttactttggtggatttaaatttctcgttcttcaaagaagtatttctgatcatctctcacaaaacacaggcaacccagactaccttgtttttcttctggattgagtattatagtcaaacgtaaagccaaattttgaggacgtggacccgtgggtttcttcccactcagggcaaggaagagaaagagagataatccctatcaaagcttctgggattattttgggactatacctaaaaggaaagtgacatctttgtaatgggatttcccaagtca

SEQ ID NO: 146873 - DNA, 1089 bp, Homo sapiens
ttttttttccatacgattgcatttattataaacaagggtacagaccctagactcagaaacacaacagatttgagctaagacagctctggtgaaacagtaatagagggaggaggaacacgaggtattcatgtctgggccagagctgccatccaggggtacaggaggcctctgggtgaaggcagaggctaacatggggttcggagcgaccttggccgttggcctgaccatctttgtgctgtctgtcgtcactatcatcatctgcttcacctgctcctgctgctgcctttacaagacgtgccgccgaccacgtcctggttgtcaccaccaccacatccaccactgtggtgcatgccccttatcctcagcctccaagtgtgccgcccagctaccctggaccaagcctaccagggctaccacaccatgccgcctcagccagggaatgccagcagcacccttacccaattgcagtacccactcaccttacccatgcccatgcccatgggcccacccggcctaccacgagacccttggctgggaggagcagccgggactaaacaagtgtacagaccctagactcagaaacacaacagatttgagctaaaacagctctggtgaaacagtaatagagggaggaggaacacgaggtattcatgtctgggccaaagctgccatccagggtagctgggcggcacacttggaggctgaggataaggggcatgcaccacagtggtggatgtggtggtggtgacaaccggacgtggtcggcggcacgtcttgtaaaggcagcagcaggagcaggtgaagcagatgatgatagtgacgacagacagcacaaagatggtcaggccaacggccaaggtcgctccgaaccctgacatggggtcgttgtagccagggcgaaacctcagcgccgagcccagctgctccaccggctctacactggcaggcacgctggcctcaggcacagcacacctttcctcgctccacacaaatttcttcagcacgtcagagcagcagtattggtcatcacaggtaccacagcagaaatctggacaggactcggggaagaggctgagtccacggaaagcc

SEQ ID NO: 146874 - DNA, 486 bp, Homo sapiens
gcggccgcggcgcttccgatcgcgacgcggcttctggcccggaggcgccgatgcagccgggcttccccgagaacctgagcaagctgaagagcctcctgacccagctccgcgccgaggacttgaacatcgccccgcgcaaggccacactgcagccgagtacaccgaggccagcggcccctgcatcctcacaccgcaccgggacaacctgcaccagatcgacgccgtggaagggcctgccgccttcctggacatcctggccccgccctacgacccggacgatggccgggactgccactattaccgggtgctggagccggtcaggcccaaggaggcctccagctcggcctgtgacctgcctcgagaggtgtggctcctggagaccccacaggccgatgacttctggtgcgagggagaaccctatccaggtcccaaggtcttcccttgaagccactggcgcccaggagcggtgggccgaagacgtgccct

SEQ ID NO: 146875 - DNA, 3481 bp, Homo sapiens
  misc_feature (1)...(3481): n = a,t,c or g
atgccccgagacaacatggcctccttgatccaacggatcgcccgccaggcttgcctcaccttccggggcagcgggggcggccgcggcgcttccgatcgcgacgcggcttctggcccggaggcgccgatgcagccgggcttccccgagaacctgagcaagctgaagagcctcctgacccagctccgcgccgaggacttgaacatcgccccgcgcaaggccacactgcagcctctgtctgcccaacctgccgccagtcacctacatgcatatctacgagacggacggcttcagcctgggcgtgttcctgctcaagagcggcacgtccatcccgctgcacgaccacccgggcatgcacggcatgctcaaggtgctgtacggcaccgtgcgcatcagctgcatggacaagctagacgcgggcggcgggcaacggccgcgggccttgccgcccgagcagcagttcgagccgccgctgcagccccgggagcgagaagccgtgcggccgggcgtgctgcgttcgcgggccgagtacaccgaggccagcggcccctgcatcctcacaccgcaccgggacaacctgcaccagatcgacgccgtggaagggcctgccgccttcctggacatcctggccccgccctacgacccggacgatggccgggactgccactattaccgggtgctggagccggtcaggcccaaggaggcctccagctcggcctgtgacctgcctcgagaggtgtggctccttggagaccccacaggccgatgacttctggtgcgagggagaaccctatccaggtcccaaaggtcttcccttgaagccactggcgcaccaggagcggtgggccgaagacgtgccctaccctaccacaagggctgtgtctctacccccttagccttgggcgttggatctactggaatgagcagcagccgcttcctcggcagccttgggaagcacgggcgactggacagcagccgccgggcacggtatatgggggcggggtgggcggggaggctagattgtttcctggtactgtcactgccactggggctttgatttggaggaatggggcacggggactatctgaagcgcttccatcctaaaagccataatgaaaatatcttcctctcttccccagttctatacaaaatactaaagtggttttcttgctcccactccctacccctttagttaaatagggtttattttccactcatgcccttatgcctttttttcttatagttttttaacttattgactgtgcatgacccagtggtttgaattgtttttagttcaagtcattggtaaaaactaggtttaaggagatgagctactgtttaaagtgagctggcctgcctaattaattccttgtgaacactacatgattgttccagatgggggatgattctcacaacataactatgcctgtggaggacctgatttattttctttcctgcctttgcccagtacccacatccgttttactgaggccgcatctactaataaattcaccatcctgcatatactgtgtgacatggtcacattagagcttatcttccctatgaatctccagatctgtgagtcgagcagatttcatgttgcagattcacctttaatgcaaagactgtattatcctcacatgactttttttcttgtcttactgtaccttaaaaggtgatagagtaattctgtattttctaacgggaagattcaaaggagctgaatgtgttaatgcttccaaacaactgaatgtaaaacactcctagccagttgttgcattcccctatatttatttacttccaatatttttactgtaaaagtagggagaaatattatgttgatagttgtttcatattctctcaggaactttaatgttcccgactcgggtggatncccagctgtgttggctggcagtgttgtcctcaaccctctcccctaaaatgactgagccccgggttcatcctaatgtggttttccttaggaagagatagaaggcacagaagatcacaagctagagaatttgagaattaactatactactaggccattttaggggcaccaaaacttgggggtttaaacacttttccctcttcccctcccaactcctggaattgaagtcttgctatctgtgactagttttaatttttgtgcttttaatagtccgagcagtcttaccttgtttacacatgtattgacaccatttgcttcaggccatggagcactgtttctccctttttactatttataggattccgttttttcacaagacttttaataaaaagaaattgtagaaataaacacattaaaatttgcccagctgtcgtctaagccctcttgattgacttgcccaagtggcaatagagttctaatatctataataaagggagatttgctattattagtggaatgttgaccccgtatgtagagaaacagtacgtgcctttgcctctttatgcacacagagacccagggtgagggagtatttgttcccagtttttaagatagtataaaaaagcaaatacttggtgagtgatttaaaaataaaaccaaaacaaaacacaaaaagatattccacaggacatgccactttattataaaacctgacacaggcatagtaccaagtatttcctgcattgttgctaaaattgttttattgtagctccacattctggtgtagtttaaaatgcctttgggggcagtttgaagcagttcttcatgccacttagtttgaaaataaaattctagatatgcaaatgattttcttagaaaacttcacaaaaataaaagatcttgtttttttttttccataggcacagtaatgaatgtgggttatcaatcacatacttttttggattatattgtagcaaaaagttgattagcttaccaagattattaatagcaatgtatgtgttataatacaacttagtacattaaagcctacgaaaactcatcctggctgtaggatagtaataaaggaagaattatgacttcattatgaaaaaaagaagttttaaagttttcaattacgagcaatttggaagaaaaaaccctaaggtgcttttcaaaagagtaactgaaattgttgccaggcccaaaaccagcaatatgatatctcagatttagttcaataagaacagtgaaacttttggttcacctaataaatcctgagtaaattagtggtgaagacaaaataataacttgttttagtgagcccactgaggaaagaatatgccttattacaaagacaaaatgtggtgcagaaactatccttgcacctgtgtgcataaactgttagtcgtgactgacttggtgtgttgctattgtgtttctatatactccgtccaatatagataatgttttaataacaactgtgggataaaagttatcttccccttggaaagactaatgagcacaatgatattaatcacttttatggtgaataataaatgcaataattgcctcaaaaaaaaaaaaaaaaaaaac

SEQ ID NO: 146876 - DNA, 781 bp, Homo sapiens
ggaattcccgggtcgacgatttcgtggggattgtcccagaaagtgtaagagcagaatattctccagaattatggctttgtggaaaaggcctcgaaaggacgcggaacagctgccatcacccgctctctatccctgtgcaccttagagcatggtcagcttctgcggtgcatgagcccccagcacttactgctgactctccctctgcccctcaggtcacccatcctcttcagtcatactgctcagcttcttgtcttaacaagaattgctttccgggcttgtgaattatttttctttgtcatggtttctttatgttgcccaggaatccattccttcattgccacaatcacctatgagagaaacgccttccaaagcatttcatcagtacagcaacaacatctccactttggatgtgcactgtctcccccagctcccagagaaagcttctccccctgcctcaccacccatcgccttccctcctgcttttgaagcagcccaagtcgaggccaagccagatgagctgaaggtgacagtcaagctgaagcctcggctaagagctgtccatggtgggtttgaagattggaggccgctcaataaaaaatggacaggaatgaaatggaagaaagggaagatttatattggaacccctaacgggacacttaaaacacctttgggaggatgaaatagatgattctctaaagaaatgggccacttccttaaacctgatcctgggccaaagataattggaaaggtggtttggcatgaaaaagggatgaatgacaaa

SEQ ID NO: 146877 - DNA, 404 bp, Homo sapiens
gctttgccagaaagggctgtggccttactaatgagttctgctctttcctcaagcttcgcagccttactgatttcccatactcgagaataacgtttgaagaaaaggatggtgtttttggaaaaccagcattgacacccactctatcttccctacttatttaataccttttagtgccatgttaggatgacgcgtcatagcttggcactgcatgaactaaaaaccaaatatgcaaattgttcacttattttttaccctttccaattacattagcaaactttgggggctcaaatgcaaggtggttttggatgtggcaaccagttgccaaaaacagatggaggaagtgaaaccaagaaacagcgaagcaaacggactcagaggacgggtgagaaagcagcacctcgctc

SEQ ID NO: 146878 - DNA, 7635 bp, Homo sapiens
  misc_feature (1)...(7635): n = a,t,c or g
ccctactagtccttgtggggaaggttacggaatatctctgaatcttactttcatcataagtaacatgagggtgctaagagcacacttcatcgaattacagttcccttttatgggccaggtggtaactggaacacagaacagtgaaggacagaaccttggaccacaggccattcctcaggatggcagtataacacatcagatttctaggcctaatcctccaaattttggtccaggctttgtcaatgattcacagcgtaagcagtatgaaagagtggccccaggagacccaacagctgcttcaaatgcagcagaagtatcttgaagaacaaattggtgctcacagaaaatctaagaaggccctttcagctaaacaacgtactgccaagaaagctgggcgtgaatttccagaggaagatgcagaacaactcaagcatgttactgaacagcaaagcatggttcagaaacagctagaacagattcgtaaacaacagaaagaacatgctgaattgattgaagattatcggatcaaacagcagcagcaatgtgcaatggccccacctaccatgatgcccagtgtccagccccagccacccctaattccaggtgccactccacccaccatgagccaacccacctttcccatggtgccacagcagcttcagcaccagcagcacacaacagttatttctggccatactagccctgttagaatgcccagtttacctggatggcaacccaacagtgctcctgcccacctgcccctcaatcctcctagaattcagcccccaattgcccagttaccaataaaaacttgtacaccagccccagggacagtctcaaatgcaaatccacagagtggaccaccacctcgggtagaatttgatgacaacaatccctttagtgaaagttttcaagaacgggaacgtaaggaacgtttacgagaacagcaagagagacaacggatccaactcatgcaggaggtagatagacaaagagctttgcagcagaggatgggaaatgggagcagcatggtatggtgggctctgagataagtagtagtaggacatctgtgtcccagattcccttctacagttcccgactttacctttgtgattttaatgcaacctcctaggaccccttcagcagtctccacaacaccaacagcaaatggggcaggttttacagcagcagaatatacaacaaggatcaattaattcaccctccacccaaactttcatgcagactaatgagcgaaggcaggtaggccctccttcatttgttcctgattcaccatcaatccctgttggaagcccaaatttttcttctgtgaagcagggacatggaaatctttctgggaccagcttccagcagtccccagtgaggccttcttttacacctgctttaccagcagcacctccagtagctaatagcagtctcccatgtggccaagattctactataacccatggacacagttatccgggatcaacccaatcgctcattcagttgtattctgatataatcccagaggaaaaagggaaaaagaaaagaacaagaaagaagaaaagagatgatgatgcagaatccaccaaggctccatcaactccccattcagatataactgccccaccgactccaggcatctcagaaactacctctactcctgcagtgagcacacccagtgagcttcctcaacaagccgaccaagagtcggtggaaccagtcggcccatccactcccaatatggcagcaggccagctatgtacagaattagagaacaaactgcccaatagtgatttctcacaagcaactccaaatcaacagacgtatgcaaattcagaagtagacaagctctccatggaaacccctgccaaaacagaagagataaaactggaaaaggctgagacagagtcctgcccaggccaagaggagcctaaattggaggaacagaatggtagtaaggtagaaggaaacgctgtagcctgtcctgtctcctcagcacagagtcctccccattctgctggggcccctgctgccaaaggagactcagggaatgaacttctgaaacacttgttgaaaaataaaaagtcatcttctcttttgaatcaaaaacctgagggcagtatttgttcagaagatgactgtacaaaggataataaactagttgagaagcagaacccagctgaaggactgcaaactttgggggctcaaatgcaaggtggttttggatgtggcaaccagttgccaaaaacagatggaggaagtgaaaccaagaaacagcgaagcaaacggactcagaggacgggtgagaaagcagcacctcgctcaaagaaaaggaaaaaggacgaagaggagaaacaagctatgtactctagcactgacacgtttacccacttgaaacaggtgaggcagctctctctgctccctctaatggaaccaatcattggagtgaactttgcgcactttcttccttatggcagtggccaatttaatagtgggaatcgacttctaggaacttttggcagtgctaccctggaaggggtttcggactactattctcagttgatctacaagcagaataatttaagtaatcctccaacaccccctgcctctcttcctcctacaccacctcctatggcttgtcagaagatggccaatggttttgcaacaactgaagaacttgctggaaaagccggagtgttagtgagccatgaagttaccaaaactctaggacctaaaccatttcagctgcccttcagaccccaggacgacttgttggcccgagctcttgctcagggccccaagacagttgatgtgccagcctccctcccaacaccacctcataacaatcaggaagaattaaggatacaggatcactgtggtgatcgagatactcctgacagttttgttccctcatcctctcctgagagtgtggttggggtagaagtgagcaggtatccagatctgtcattggtcaaggaggagcctccagaaccggtgccgtcccccatcattccaattcttcctagcactgctgggaaaagttcagaatcaagaaggaatgacatcaaaactgagccaggcactttatattttgcgtcaccttttggtccttccccaaatggtcccagatcaggtcttatatctgtagcaattactctgcatcctacagctgctgagaacattagcagtgttgtggctgcattttccgaccttcttcacgtccgaatccctaacagctatgaggttagcagtgctccagatgtcccatccatgggtttggtcagtagccacagaatcaacccgggtttggagtatcgacagcatttacttctccgtgggcctccgccaggatctgcaaaccctcccagattagtgagctcttaccggctgaagcagcctaatgtaccatttcctccaacaagcaatggtctttctggatataaggattctagtcatggtattgcagaaagcgcagcactcagaccacagtggtgttgtcattgtaaagtggttattcttggaagtggtgtgcggaaatctttcaaagatctgacccttttgaacaaggattcccgagaaagcaccaagagggtagagaaggacattgtcttctgtagtaataactgctttattctttattcatcaactgcacaagcgaaaaactcagaaaacaaggaatccattccttcattgccacaatcacctatgagagaaacgccttccaaagcatttcatcagtacagcaacaacatctccactttggatgtgcactgtctcccccagctcccagagaaagcttctccccctgcctcaccacccatcgccttccctcctgcttttgaagcagcccaagtcgaggccaagccagatgagctgaaggtgacagtcaagctgaagcctcggctaagagctgtccatggtgggtttgaagattgcaggccgctcaataaaaaatggagaggaatgaaatggaagaagtggagcattcatattgtaatccctaaggggacatttaaaccaccttgtgaggatgaaatagatgaatttctaaagaaattgggcacttcccttaaacctgatcctgtgcccaaagactatcggaaatgttgcttttgtcatgaagaaggtgatggattgacagatggaccagcaaggctactcaaccttgacttggatctgtgggtccacttgaactgcgctctgtggtccacggaggtctatgagactcaggctggtgccttaataaatgtggagctagctctgaggagaggcctacaaatgaaatgtgtcttctgtcacaagacgggtgccactagtggatgccacagatttcgatgcaccaacatttatcacttcacttgcgccattaaagcacaatgcatgtttttttaaggacaaaactatgctttgccccatgcacaaaccaaagggaattcatgagcaagaattaagttactttgcagtcttcaggagggtctatgttcagcgtgatgaggtgcgacagattgctagcatcgtgcaacgaggagaacgggaccatacctttcgcgtgggtagcctcatcttccacacaattggtcagctgcttccacagcaggatgcaagcattccattctcctaaaggcactcttccctgtgggctatgaagccaggccggctgttactgggaggcactcgctatgccaataggcgctgccgctaacctgtgctccattgagggaggaagggatggggcgcccagtgtttgtcatcagggattgtggggaacaagggccatggaaggaccggggttcttaaggtggacatcttcacctaaaggtgtctgggataagattttggagcctgtggcatgtgtgagaaaaaagtctgaaatgctccagcttttcccagcgtatttaaaaggagaggatctgtttggcctgaccgtctctgcagtggcacgcatagcggaatcacttcctggggttgaggcatgtgaaaattataccttccgatacggccgaaatcctctcatggaacctcctcttgccgttaaccccacaggttgtgcccgttctgaacctaaaatgagtgcccatgtcaagaggtttgtgttaaggcctcacaccttaaacagcaccagcacctcaaagtcatttcagagcacagtcactggagaactgaacgcaccttatagtaaacagtttgttcactccaagtcatcgcagtaccggaagatgaaaacttgaatgggaaatccaatgtgtatctgggcacggtctcgggtttcagggggctggggcttgttatggctggttcggaggacattggaggaaacacaccatgggtcatttgagtacatcgggactaatcatttcgaaacgaagttaggccaacagggaaaagagaagctttatgagtctcagaaccgtggtgtgtacatgttccgcatggataacgaccatgtgattgacgcgacgctcacaggagggcccgcaaggtatatcaaccattcgtgtgcacctaattgtgtggctgaagtggtgacttttgagagaggacacaaaattatcatcagctccagtcggagaatccagaaaggagaagagctctgctatgactataagtttgactttgaagatgaccagcacaagattccgtgtcactgtggagctgtgaactgccggaagtggatgaactgaaatgcattccttgctagctcaacgggcggtttgtccctaggaagaggcgattcgacacaccattggaattttgcagacagaaagagatttttgttttctgttttatgactttttgaaaaagcttctgggagttctgatttcctcagtcctttaggttaaagcagcgccagggaggaagctgacagaagcagcgttcctgaagtggccgaggttaaacggaatcacagaatggtccagcannnnnnnnnnnnnnnnnnnnnnnnnnnnnnnnnnnnnnttggtttttggtttggtttttcccttgtgggtgggtttcattgtttgggttttctagtctcactaaggagaaacttttactggggcaaaaagccgatggctgccctgccccgggcaggggccttcctatgaatggaagactgaaatcaccagcgagggggacagagagtgctggcgcacggccttattaaaaaggggcaggccctctaacttcaaaatgtttttaaataaagtagacaccactgaacaaggaatgtactgaaatgacttccttagggatagagctaagggataataacttgcactaaatacatttaaatacttgattccatgagtcagtttattgtagtttttgatttctgtaaaataaggggaaacttttgtatttattattgaataagtgaatgaagctatttttaaataaagttagaagaaagccaagctgctgccgttacccgcaggactaaccaaaccccgttactttgtacagatatgtaaatattttgagaaaaaatacagtataaaaatagttattgaccaaatgctaccaggctctgcagccagctcgggggcttatataaatgttcatagggatgttacaatataattttgtgttataaaatatgccattataattatgtaataacccaaaatttcaacctaggagtgtttgggggttttttggaaaccgcagtccaattagtacctccaatggttttaaaacaccttaccttctgaacagagcggggcgtatgcctacgaactacaacttttaatagctgttttgggtaatttaaactaattttttcatattatattgttgcctccctacttcttcagtcagggtttttttgtgcttacaaatttggtgataactgtggaataactggccttaaaaatacacccaaatggagggctgaattttttcttcagcaaaagtagttttgattagaactttgtttcagccacagagaatcatggtaaacgtaataggatcatggtagcagaaaccttaaatctaaccctttagccttctatttaacacaaaaatttgaaaaagttaaaaaaaaaaaggagatgtgattatgcttacagctgcaggactctgggcaatagggtttttggaagatgtaattttaaaatgtgtttgtatggaactgtttgtttacatttctttaattaaaaaaaacactgttttgtgtttgcttgtaggaaacttaatcaggcattttggaacccgggttagctttttattttgtacttaaaattctggtactgacacttcacaggctaagtataaaatgcaagttttgtgtgcacaattcaagtggacctgtaaaactgttggtatattccagtgatgccagttcctgaaccttgtatatggcatgatgtatttttatcttacagaataaatcaattgatatatatttttctcttgataaatagctgtatgaaatttgtttcctgaatatttttcttctcttgtacaatatcctgacatcctaccagtatttgtcctaccgggtttttgttgttttctgttctgtataatagtatctaatgttggcaaaaattgaattttttgaagtatacagagtgtaaatggtgatcttctaaatctgtgtccacaaattccaaaacccataacactctggtcgacgcggccgcgaat

SEQ ID NO: 146879 - DNA, 2890 bp, Homo sapiens
atggatcctgaggtgaccttgctgctgcagtgccctggcgggggcctgccccaggagcagatacaggccgagctgagccccgcccatgaccgtcgcccactgccaggtggggacgaggccatcactgccatctgggagacccggctaaaggcccaaccctggctcttcgacgcccccaagttccgcctgcactcagccaccctggcgcctattggctctcgggggccacagctgctcctgcgcctgggccttacttcctaccgagacttcctgggcaccaactggtccagctcagctgcctggctgcgacagcagggtgccaccgactggggtgacacgcaggcctatctggcggacccactgggggtgggcgctgcactagccacagccgatgacttccttgtcttcctgcgccgctcccggcaggtggctgaggcccctgggctggtggacgtacctggtgggcaccctgagcctcagtcctgtgagaaactagaaaacacgggaggaaagattgggcacaggaagaagatgccctactccacccctgccccctgtgtatctcctttgaagctggacctctggttgtctgtcagggaaaggacaccagactcaggatcactaactctcttacactgtgccacatcagaccctcaaggccagcaggccctgtgccctggtggcagcccccagcaccaggacctcgctgggcagctggtggtacatgaactcttttccagtgtccttcaggagatctgtgatgaggtgaacctgccgctgctcaccctgagccagcccctgctgttgggcatcgcccgaaatgagaccagtgctggccgagccagtgccgagttctatgtccagtgcagcctgacttctgagcaggtgaggaagcactacctgagtgggggacccgaggcccacgagtctacaggaatcttctttgtggagacacagaacgtgcggagattgcccgagacggagatgtgggctgaactctgcccctcggccaaaggcgccatcatcctctacaaccgggtggacgtggtcttggcatccacgccaatgagaatctgcccgcccgccgccatgccgcccttactgcccctgcgcctgtgccggctgtggccccgcaaccctccctcccggctcctcggagcggccgccgggcagcggtccagacccagtacttattatgaactgttgggggtgcatcctggtgccagcactgaggaagttaaacgagctttcttctccaagtccaaagagctgcacccagaccgggaccctgggaacccaagcctgcacagccgctttgtggagctgagcgaggcataccgtgtgctcagccgtgagcagagccgccgcagctatgatgaccagctccgctcaggtagtcccccaaagtctccacgaaccacagtccatgacaagtctgcccaccaaacacacagcagctcctggacaccccccaacgcacagtactggtcccagtttcacagcgtgaggccacaggggccccagttgaggcagcagcaacacaaacaaaacaaacaagtgctggggtactgcctcctcctcatgctggcgggcatgggcctgcactacattgccttcaggaaggtgaagcagatgcaccttaacttcatggatgaaaaggatcggatcatcacagccttctacaacgaagcccgggcacgggccaggtctgtccctgctctattctgctccctgctccctgtccaggaaccacacttcgggatccctatcccaaccacccaggcccctgtctcccagcctgatgcccctggccaccagaggaaagtggtgtcatggatagatgtgtatactcgcgctacctgccagccccgggaggtggtggtgcccttgactgtggagctcatgggcaccgtggccaaacagctggtgcccagctgcgtgactgtgcagcgctgtggtggctgctgccctgacgatggcctggagtgtgtgcccactgggcagcaccaagtccggatgcaggtactgggcacgtggggcaacgggcaggggatgcagatcctcatgatccggtacccgagcagtcagctgggggagatgtccctggaagaacacagccagtgtgaatgcagacctaaaaaaaaggacagtgctgtgaagccagacagccccaggcccctctgcccacgctgcacccagcaccaccagcgccctgacccccggacctgccgctgccgctgccgacgccgcagcttcctccgttgccaagggcggggcttagagctcaacccagacacctgcaggtttagctgcctctcaactgcaggttcattacttcagttgacagatgtttggtggctgctggggcgcctgaaaataagtctggtgggggaacaggcccagccagatcattccagtcatgagtcacagcccaggtgcacaggtagagtactgtccatctgcctgagcgccgtggccacggccacgggggccgagggcaaaaggaagctgcagatcggggtcaagaagcgggtggaccactgtcccatcaaatcgcgcaaaggggatgtcctgcacatgcactacacggggaagctggaagatgggacagagtttgacagcagcctgccccagaaccagccctttgtcttctcccttggcacaggccaggtcatcaagggctgggaccaggggctgctggggatgtgtgagggggaaaagcgcaagctggtgatcccatccgagctaggtaagaggcccctcctgagggtgcagagcgagtttggggtgtgtgactgggaagggtgaaagctgcttcagcttttcattggtcttcaccgtatccatttcattacaatacatgcctcctccaagtttgggctgtgtctag

SEQ ID NO: 146880 - DNA, 843 bp, Homo sapiens
agcggccgcagaggtgttggtgtgctggaccgggggcagctgggtgtggcgtgagtggggccgcccagtcggggcaactgcagtgcagccagatagggtctggactttgcgtaaagggacaggcgggaactgaagagcggaggtggggactgcgcaggggtggaaggtatggggggtgagcaaagggggcgggtccctggctgctgtggcctcccctgaccccctccccccgctgctggggtcctcggccaagcccccttctcactggactgagacatgaggcttaagctggttccggggtcctacaaggactgttcatctgccctaaagcccctgggccacgccccacgggggccgagggcaaaagggaagctgcagatcggggtcaagaagcggggtggacccactgtcccatcaaatcgcgcaaaaggggatgtcctgcacatgcactacaccggggaagctggaagatgggaccagagtttgacagcaagcctgcccccagaaccagcccttttgtcttctccctttggcacaggccaggtcatcaagggcttgggaccaggggcttgcttggggatgtgtgagggggaaaatgcgcaagcgtggtgatcccatcccgaactagggtatggagaaccggggaactccccccaaagattccaaggccggttcaacccctggtgttcgaagtggagctgctcaaaattagagcggacgaactgagctgtaaccagactggggaggggcagggggagaaggccccccatcagggaccagactgttccaaaaaaaaaaacaaaaaacaaaaaccaatcaaaaaaactcttaaaagcccaaaaa

SEQ ID NO: 146881 - DNA, 419 bp, Homo sapiens; identical to SEQ ID NO: 145444

SEQ ID NO: 146882 - DNA, 919 bp, Homo sapiens
  misc_feature (1)...(919): n = a,t,c or g
aagatctttttttttttttttttgcgaagtgggctcgtgggttggcagtatgagagttgtaatggcccgactgttgagtgagggggagcaggggatcccaacggcttgcgctgcctttgcgcagcagcccggcgggcggccacgtcgcggcctggctggggtaggagagggcggtccccagtgcagttgggtgaactaccgttgcacactggagtttctggtgtctttgcttggaactgacctagctcgtggcagggggaactcggctagcgggccccacagcccctgctgactcaaaacaactgagttgtaagacgttcatcgccgtgttatccttgagtaaagaagcgggcttttgccatgttgtccaaggctgggtctctacttcctggggctcaagcagtccctccgtgcctcagttcttcccaaagttgctggaatttacagggaaatgaacttctggaaagccccagcccaggggacaatgcacccttccacagagaattctgccacttaatctggagttgaaggtctaaaggttttggaaatctcccccctcatgggagaggaagctttggtatgggctgtcatgccttagacaggtgaattcctggcaactttgaaccttcaaggctgggagagggtgaagagccatgccttgttctccttccttgctatgggaattttggctgacacaatatcttcccgccctgggtgctggggcatatcctaaagaactttacaactttcctgtaataatcctgtgtgagcagctgtcaccttattnggggggaaaaatgcctgaaaattagggggcacttcaagtagatagcttctatcttcctatatttgtcttatatacaactacttgctcttatcaacataactccaataaagcgattttaaagtaaagaagaaa

SEQ ID NO: 146883 - DNA, 758 bp, Homo sapiens; identical to SEQ ID NO: 146737
  misc_feature (1)...(758): n = a,t,c or g

SEQ ID NO: 146884 - DNA, 686 bp, Homo sapiens
atccccccctaataaggaaaaaaatttggcgcccttaatataaaaacattttttggcttattagtctgttgtttttatttgccgcccactcagactttattcaaagaccacgggggtacggggtgcaggaaggggaggagggggctggggggaggcccaaggggcaagaagcatggccaccgaggctccagcttaacggtattttggaggtcagcacggtgctcacagaagccaggaacttgtccagggaggcgtgcaccgcaggggttgaaactcggcggggaggtgggcggccagggtcaccaagcaggcaagtggctttaggagcttcgggtggacccggtcaactttcaagctccataagccactgcctgctggtgaccctggccgcccacctccccgccgagttcgacccctgcggtgcacgcctccctggacaagttcctggcttctgtgagcaccgtgctgacctccaaataccgttaagctggagcctcggtagccgttccgtcgctcgcgctgggcctcccaacgggccctcctcccctccttgcaccggcccttcctggtctttgaataaagtctgagtgggcggcaaaaaaaaactgaacatctccttcccagccactgggtgccagaaactcattggagtggacgatgaacgcaaacttcgtactttctatgag

SEQ ID NO: 146885 - DNA, 1588 bp, Homo sapiens
  misc_feature (1)...(1588): n = a,t,c or g
ggagttgagactttggggtctcttagtttggaggtgttgagtgcatttgtgcccctgcctggttgagagcttcttggtacctcttgccaccccttctcactgccctgacccaaccccactggaccttgatgctgcgaggagtggtgtcctgacggactcagcactcccgcctgatgtattggatcataggagagcacttgctctcctgcctctgccaggagagggcttgttcctccaactctaggaggccaggcaagcatggacaggagccaagggagcagggtcattaactttttcttctttgcaaagtgggcacttggcatcagggtcccaatcaccagaaagcaccaaaagcccctggcaccccacccactccatcctacccagggaccccaagtaggcaactgttatggcagtgggtccagcccaggccagcactgccagcctcctctccctgcagtaggcaccagctctacctcccccggcaggcaatgtcctggcttctcagcccagcaccatctgttcccctagacttctcaggggccagcccagtctgggccaccctttgtttccctcatcctcggctcccacacaggtgacagacccagcagatagcttctctctgggaaaggttggatgctgccttacatccccttctagccctcctcccatccacacacacaggcacccacccacaccaggtcggcttgtttctccacatgtagggagagaggggagaccaacccctttgtgtcttttgaaatacgaagaaaaatgtgtgttccaggagcatgactcccagtgctgcgctcttgggcccagttcagtctgtcttgtctcaaatctaggcatttttgcttcaattttattttttttaagaatacaaaaacagaaattctgcactaatttacctggtttcgtaggaaaacttttttttattttttacattttttggtgtccgtttgtattgaataatttgctacatttgtaaaatgtaagaggtatataatatatgtatatttctaacgtaaaaaacataatttttttcttttcaagattttttcttaaaaagatgagagaaacatattttttccgggaaaaaacaaacctttaaacaacaaaaaagaggagaaattaaaaccctttttctcccccttttcccccatcctctatcttatccctctttcccaggaaccaaatcaaaaaggtggattatccttctgagagaatggaaaactgttagtcccagaatgatgtcctttttcctcaatgcagtgagttatagattnctcctagttttcctccctagggatgggaaggggggcattgaggcaagccctggagagagagccccggggagtcagggtcatgaacttttttctttagtgaagtgaggaatacaatcaaagggttttgtattcagaaatgttgtgcaatattttggaatgggacattggtgtgtttagagattttagtttaaaaacaaaacaaaaagattgatcaaatctgtacagtttctattgttccagcacttttttaagtttgtattaaaagtcatgatacataatagcaaaaaaaaaaaaaaaaa

SEQ ID NO: 146886 - DNA, 236 bp, Homo sapiens; identical to SEQ ID NO: 60577

SEQ ID NO: 146887 - DNA, 654 bp, Homo sapiens; identical to SEQ ID NO: 144884
  misc_feature (1)...(654): n = a,t,c or g

SEQ ID NO: 146888 - DNA, 708 bp, Homo sapiens
  misc_feature (1)...(708): n = a,t,c or g
atcgagaccatattccatgtggnggaattccacagactcagagagaacccacccatggttgctgtctcctgccgacaagaccaccgtcaagggcccgcctggggtaaggtcggcgcgcacgctggcgagtatggcttcggaggccctggagaggatgttcctgtccttccccaccaccaagacctacttcccgcacttcgacctgagccacgggttttgcccaggtttaagggccacgggaaagaaggtggccgacgcgctgaccaaacgccgtggcgcaccgttggacgacatgcccaacgcgcttgttcggcccttgaagcgacctgcacgcgcacaagctttcgggtgggacccggttcaactttcaagctcctaaagccactggcctgcttggttgaccctgggcccggcccaccttccccggccgagtttcacccctggcggttgcaaggcttccttgggacaaagtttcctgggcttcttgttgaagcaccgttgcttgaaccttccaaattaccgttaaagcttggaagccttcgggttggccatgctttctttgcccctttgggcctttcccccagcccctcctcccctttcctgcacccgtacccccgtggtcttttgaataaaattttgaattgggggggcaaaaaaaaaaaaaaaaaaaagatctttnaatttaagggggcggaaagtttatttcaa

SEQ ID NO: 146889 - DNA, 579 bp, Homo sapiens
gctggaagatcctgaaatgaaacttaagatttcaaggtcaaatatctgcaactttgttctcattacctattgggcgcagcttctctttaaaggcttgaattgagaaaagaggggttctgctgggtggcaccttcttgctcttacctgctggtgccttcctttcccactacaggtaaagtccatggttccctggcccgtgctggaaaagtgagagttcagactcctaaggtgagtgagagtattagtggtcatggtgttaggactttttttcctttcacagctaaaccaagtccctgggctcttactcggtttgccttctccctccctggagatgagcctgagggaagggatgctaggtgtggaagacaggaaccagggcctgattaaccttcccttctccaggtggccaaacaggagaagaagaagaagaagacaggtcgggctaagcggcggatgcagtacaaccggcgctttgtcaacgttgtgcccacctttggcaagaagaagggccccaatgccaactcttaagtcttttgtaattctggctttctctaataaaaaagccacttagttcagtca

SEQ ID NO: 146890 - DNA, 1622 bp, Homo sapiens
gcggcggatgcagtacaaccggcgctttgtcaacgttgtgcccacctttggcaagaagaagggcaccacgttcaccaagatcttcgtgggcggcctgccgtaccacactaccgacgcctcgctcaggaagtacttcgagggcttcggcgacatcgaggaggccgtggtcatcaccgaccgccagacgggcaagtcccgcggctacggcttcgtgaccatggccgaccgggcggcagctgagagggcttgcaaagaccctaaccccatcatcgacggccgcaaggccaacgtgaacctggcatatctgggcgccaagccttggtgtctccagacgggctttgccattggcgtgcagcagctgcaccccaccttgatccagcggacttacgggctgaccccgcactacatctacccaccagccatcgtgcagcccagcgtggtgatcccagccgcccctgtcccgtcgctgtcctcgccctacattgagtacacgccggccagcccggtctacgcccagtacccaccggccacctatgaccagtacccatacgccgcctcgcctgccacggctgacagcttcgtgggctacagctaccctgccgccgtgcaccaggccctctcagccgcagcacccgcgggcaccactttcgtgcagtaccaggcgccgcagctgcagcctgacaggatgcagtgaggggcgttcctgccccgaggactgtggcattgtcaccttcacagcagacagagctgccaggccatgatgggctggcgacagcccggctgagcttcagtgaggtgccaccagcacccgtgacctccgaagaccgctcgggcattccgcctgcgccctgggacagcggagagacggcttctctttaatctaggtcccattgtgtcttgagggaggacttttaagaatgactgagaactatttaaagacggcaatcccaggttccttgcacaccatgggcagcctctccttgcaccttctcctgcctctccacactccaggttccctcaggcttgtgtccccactgctgcatcgtggcggggtgtcacagaccctctgcagcccctggctgccctggactgtgcagagatgcctgactccagggaaacctgaaagcaagaagttaatggactgtttattgtaacttgatcctcccgagctgtgagcgcagtctgaggtctgaggacacggcctcctgttggagtcccattttctccatcagggcacgtgggcggcttcctcaagcccggaggagcttcccaggcgcacaggggccgccggttaacagggggccgccggccaaaggccccttttccagttcatagcactgaagttgcaacttttttcttgtaattgttttgctactaagataatttcagaagttcagtctattttttcaagcggatactgccgccaccaagaatccaaaacctatttttgacttgggagagacttgcttttgttggttccgcccgtggagacgacgatagtgtttctgtataataaagtgtctgccggctcgcgggccaggatcctctcggtgggatgggcaccacagacaggaagcccctcaagcccgtgcgggccacttgtttgctgcccgctgcagggg

SEQ ID NO: 146891 - DNA, 573 bp, Homo sapiens
gtgagttgtctcaggaccccgtcactgcgacgttgacactcctctcccttcccttcctccccaactccccaaacactgtggaaggggagaaggaagtgatccacagcattcaggccacttggggtctagaccatggtggtgccagcctggggggggcagtggccctcagctctgcccgctggagcggttgagtgcagaagggtgcgcctcttccctctacccccgcaccacctgctgtgtgccagcctgagacggttcctgcctgtcttgggggttggtggagggtggaggcagtttttcccacccgtggcagggcatgctatggggcatccagggcctgtgggggtctggaggaggggacatgaggtgagaggtatcctggccgagggcggggggctgcgggggatcctcctccggacctacctcagggagctgagcgtgcaggcgctccagggcaggcctgggacagagtcaaggctcagagaataaaggtagctaatctcatcataatatttttattagaatgttctgatgataaaaataaaacttgttttctttaaagaaaaaaaaaaa

SEQ ID NO: 146892 - DNA, 614 bp, Homo sapiens
aggatccttaattaaattaatccccccccccccctcccccgttctttctcgactccatctttcgcggtagctggggaccgccggtttagttcgccaataatgcagcctctttgttccgcgtcccaggagcttacaaccccttcgaagggtgaccggccaggaaacgggtcgccccagatcaaaggctcatgtagcctcaacatggagggcatttcccccggaagatcaagtcgtgctcctggcaggcgcgccccctggaggatgaggccactctgggccagtgcggggtggaggcccttactaccctggaagtaaccaggcccgcatgcttggaggtaaaagtccatggttcccttggcccgtgcttggaaaagtgatgaaggtcagactcctaaaggtggccaaacaaggagaaagaagaaagaagaagacaggttcgggctaaagcggccggattcaagttacaaccggcgcttttgtcaaacgttgttgcccaccctttggcaagaaagaagggccccaatggccaacctcttaagtccttttgtaaattcttggctttctcctaataaaaaagccacttagttcaaaaaaaaaaaaaaaagtcgacgcgg

SEQ ID NO: 146893 - DNA, 3649 bp, Homo sapiens
ttttttttttttttttttaaaatcattctcaagtctttaattaaaatccatagagcatttaacatgaacagatgtttaaactctttcagggactctcatattttaaaatcctttgcacagcatcgtgaggctaacttcatgctagaaatctacggataacgtaacaccacaaaaatacattcggagtccattccaatggcaagtttaaaacactttaattgggcaggacaatgtaaaggatatttaaaatcaaaaattacaaaatgaggcacattaaaagtcttcccttttggaatttttaataaaatacttctctgtataagatctaatgaaaaattccagttacttataaaatagttgagaaatcaattaagatatgtatctatatatgtatgaattacacttttgtttaaatgaacaaaatgttgaacacttcaatgacagcaacagcatctattactcacattaaactagatgaaaatactacaagaagcagttggatacaggcaaaagagaatatgatacttaaagccaaaagacaaaaaaatccaaaaaacgaaaacaacctccccatcccccaccaaacccttaactgtaagggaaagaaaggaagagagaacttaaagctaactatggaccaaattctcattctttttaatgagaaacagcatgagaatttggcttcaaattactaaaacagctacagaaacctatttggcctggacaatttaatagtataccaactgctgaaacaaccaagtgcagttggtgtacggctggagggaaaaaaaaaaagactttttacaggtttaactttgtaaaaaaatgtatcttttggaaaccatagtctccttcacaaattgcacttgagatggctgaatgcattgattgagcaaggcattattatttgttcactgacacacacacaaaagcagctacagatagttgacattttggactactaaaactattttatacatgtttttcttctttaagaaaaggatctatgatgtctgtgaaacttaacggcctgtctgctctgccatgtttctggagacttgatgctggttcaacactatctcttactgtattggagaagtttgatggaaatatgaataaagtcagtccgaacgacattaatttctggaattttaagctttatcttgactaggaaaggaagctcctgcaaaactgatggtttcactgacaaagcttacaaaatgtatatactgagcactgccagtttgagtactataatttatctctagaaaaatgacaaatgaacttctgcaattgatttttaaagacagaaaacaactttcacagccacttctctacaataaattaattgtcttctacagtaaaaacaaaatttggaagcaacatgataccaagaaatacagcaagctcataaggctgagaaattgtacagttgctttaaaaaaactgtgctctaaataatgggaagaagcgtgacagaactaacttgagtgaagatctgcacagctctatctcatataataaaagtaaaaattagacaaccactataaacagttatgactaacacaaatagaacacataaataaaaagtgagtaaaaaagaccttacagtttatctatttccttgtgctagaaagatacggtatagtccaaaaatgcagtgactgggtatgtcttatttaactgtttttcttcttccatctgcctccctctctctgcctcctctcattaaaaccaagaatctagcttagtttggaagtagcagtctaaaatgaaagcaggtacctgatcatagaaagaaacaataaaaaaacttgcatcaatagttcttcattcctccaccaatcgggaaaaaaacccttcaatctttattagttacccctttgaaaagcaagaaaaatcttaaattgaaaccaaggttcagtagaggtgactttattttttttctgcagctacaactgagtcttagatgtttaagtctttagtctacatgatgtttaaatcaattaatacattcaaattctaacgctgaggtaattattaggtaatgcaggaaaatgtgaaaaggaacgagactggaaggagcaatcttcaaaattcacttaagttgctcaaaaaagaaaaaaacttattgaatagaaatatttagaaataatgtttcagttaggagacaaaggcttaaatagattgaagtgctctagttatgtggaagcataaagcaatttggggaatctgtcctatgccctaaacagtccaccattttcacaaaaagtcctcagaagattcaagttgaatgagcatatttttaaactttgggggtggtcttagtccaccccatctcaaagagagaattttaaatttcttgaagtccaactgcttttcagatatactctaaattccaggtctatcaacagattgtttcctcaacatggggcagaaatggcctctgcttcttacatcctccatagggagggcacatctcccattgacctcaggcccacatttagaatgggtctacagggggaaaagaatagagaatgcctgaccactatccagccattatggagctctctcctatcttaatctcttctcagttttgacctttagaataataatgttaaaaaaaaagtaaggataataaaacttttttctttttttttgagacagagtcttgctctgctctccaggctggagtgcagtggtgcaatctcggctcactgcagactctgcctcgcgggttcaaatgattctcatgcctcagcctcccgagtagctgggactaaaggcatgtgccatcacgcccggctaatttttgtatttttagtagagacagggcttcatcatgttggccaggcttgtctgggaactccggacctcaagtgatccgcctgccttagcctcccgaagtgctggggatttgagccactgcgcctgggctgggaaaataaaactctttcactgcctatctgtataggaacttgtcagcttgctgtgcttcaaatattgggtccaagtatccctaatgggtttaagtgccactatgtccacctgaaatttccctttggagttttcagaagatggcaggtgccgtttcttctatgctctaagacagatgtgagctgcatgctatttatataactgtccaccacaggagtaatgagtgaggcaaattcctcaatgctggagtttgtacagctgaggtgaaacatttcacactttaaagtaggaagaggttaatataacattactgtcacaatttaacttttctttgtattaccataatagatgtttcctttaaaaacaaagagagagtttataaggcaatatttatacacattgaggatttacttgagcctcattactcaagatcccactacagataaagaaacaatgttgggaactgataaacatctgagcttatgaaaataacagaaaatatattcatggaaacttatacgcctatgataaatgacagataatgaatatttctctcttatactgaaggcactgctaatacacaaatatcctgctaacatttaaactctgaaatcagcagttagtgaaaggagtccatttagtttaataccagcattttaaaaaacaagtaagactcccctaagagtcatggcagagtttccaatgagaacaa

SEQ ID NO: 146894 - DNA, 1294 bp, Homo sapiens
cccacgcgtccggaagttggcgtgcagctgggagagctagactaagttggtcatgatgcagaagctactcaaatgcagtcggcttgtcctggctcttgccctcatcctggttctggaatcctcagttcaagggtatcctagcgcgcaaacccaggcaccaatgggtgccctgtaattccagacagtaattctgcaaactgccttgaagaaaaaggaccaatgttcgaactacttccagctgaaatcaaccaagatcccccgtcttgaggactgacctttttccaaagacgagaatccagggacttgaatccgtatcttcccactttctgaggactactctggatcaggcttcggctccggctccggctctgggatcagggtcttgggagttggttccctaacgggaaatgggaacaggattaccaactaagtagacgaaaagtgatgctttccatgacaaccttaggttctcttgccaggattctggcttcagccagcagggattggggtcaacatggactagcagaggaatttaatgttataaaagaggatttacccaccttgaccaccaggcaaatggtagttaagcaatattttaatgtacccatggttaatatgattaattcttgggacaaagaattttatagaaatttttaaacatctgaaaaagaagcttaagtttttatcatcctttttttttctcatgaattcttaaaggattatgctttaatgctgttatctatcttattgttcctcgaaaaatacctgcattttttggtatcatggtccacccacatccattatgaaattaattagattccccatggccataaaatggcctttaacagaatatatatatatatttttaaagtagcttgagaagcaaaattggcaggtaatatttccatacctaaattaagactctgacttggattgtgaattataatgatatgccccttttcttataaaaacaaaaaaaaaaataatgaaacacagtgaatttgtagagtgggggtatttgacatattttacagggtggagtgtactatatactattacctttgaatgtgtttgcagagctagtgtatgtgtttgtctacaagtaagattgctgttacataacaccccaaattaactcccaaattaaaacacagttgtgctgtcaatacctcatactgctttaccttttttttcctggatatctgtgtattttcaaatgttactatattttaaagccgaatttttccccctattaaacaaaatgggggggcccgtttaagaatatccacctctc

SEQ ID NO: 146895 - DNA, 450 bp, Homo sapiens
tgagagcaagatgggtcaccagcagttgtactggagccacccgcgaaaattcggccagggttctcgctcttggtgagaaatagtttgtgattttggggaagcgttgccgtggagcgctaggctgcttaaaatctcaagtagaggaggccacgggcggcacgagggagcacgccgactgggagtcgctggtgccgccattacaggcctgtactgtggcttgggagtcccgggatgcgggtagtagccgtctgagtgcggagtcttgtaatttctatgacctgcaaaaccgctgtctcttttcttacaagtcgtgtctgttcaaaccggcacggtctgatccggaaatatggcctcaatatgtgccgccagtgtttccgtcagtacgcgaaggatatcgggttcattaagttggactaaatgctcttccttcagaggattatccggggcatc

SEQ ID NO: 146896 - DNA, 577 bp, Homo sapiens
gttgcactgctgagagcaagatgggtcaccagcagctgtactggagccacccgcgaaaattcggccagggttctcgctcttgtcgtgtctgttcaaaccggcacggtctgatccggaaatatggcctcaatatgtgccgccagtgtttccgtcagtacgcgaaggatatcggtttcattaagaaagacctgagctgtcttccttggcactgcctatggaggtgacacccatctcctccatcatggccatcctgagaccgctcgcgaagcccaagatcatcaaaaagagcaccaagttcactgggaaccagtcagactgatatgtcaaaattaagggtaactggtggaaacacagaggtattgacaacagggttcatagaaggtttgagggccagatctatgcccaacattggttatgggagaaacaaaaagacaaagcacatactgcccagtggcttctggaagttcctggtccacaacgttaaggagctggaagtactgctggtgagcaacaaatcttactgtgttgagatcactcatgatgtttcttccaagaactgcaaagccatcttggaaag

SEQ ID NO: 146897 - DNA, 662 bp, Homo sapiens
aagattaaaaacagaaacaaaaaccgaacagtgtgaacagtgcaccctgaggtctccctggggtcccttgtacccctcaggagcctgtggatgaccctgtgcaaacagttgggtggaagactgtgtcttcctgtgtgtttggatgagtaccagaactttctgcgtctgtttttcaccctacccaatgcagtgcttacctaaaaaatgcgttgaatagagcttcttgcttttacctcgttgcactgctgagaagcaaagatggggtcaccaagcagctgtactggagccaccccgcgaaaattcgggcagggtttctcgctctttgtcgtgtctgttcaaacaaccggcacggtcttgatccggaaatatggcctcaatatgtgccgccagtgtttccgtcagtacgcgaaggatatcaggtttcatttaagttggactaaatgctcttccttcagaggattatccggggcatctacttcaatgaaaaaaccatggattaattcttttgtatatataattatacattttgaaaaagccactgaaaaaaaaagaaaaaaaaatgaaattaagagggggcccttttgttttaaggggcccctttaaaccccgtgaaaaaccctgggggggtcttttaatgccgcacccttttgtggttgcccccc

SEQ ID NO: 146898 - DNA, 783 bp, Homo sapiens
ttcggacgaggctgcccacaagcctgtgaagcaatagcaggggtaaagcaaaccccagcccacaccctggcaggcagccagggatgggtggatcaggaaggctcgtggttgggcttttgcatcaggctcaggctgggcataaaggaggctcctgtgggctagagggaggcagacatggggaccatgaagacccaaagggatggccactccctggggcggtggtcactggtgctcctgctgctgggccctggtgatgcctctggccatcattgcccaggtcctcagctacaaggaagctgtgcttcgtgctatagatggcatcaaccagcggtcctcggatgctaacctctaccgcctcctggacctggaccccaggcccacgatggatggggggcccagacacgacaaaagcctgtgagcttcacagtgaaggagacagtgtgcccccaggccgacacagcaggtccccaaaggatggggacttcaaaagggacggcctgttgaaccgtggaatggggacagttaaccctcaaccatggccaggggctcctttgacatcagttgtgataaggataacaagagatttgccctgctgggtgatttcttccggaaatctaaagagaagattggcaaagagtttaaaagaattgtccagagaatcaaggattttttgcggaatcttgtacccaggacagagtcctagtgtgtgccctaccctggctcaggcttctgggctctgagaaataaactatgagagcaatttcaaaaaaaaaaaaaaaaaaa

SEQ ID NO: 146899 - DNA, 626 bp, Homo sapiens
ccctttcctcagctgccgccaaggtgctcggtctttccggaggaagctaaaggctgcccgttggggttgagggcccctcactttcatcccggcgactagccaccgcgtaccggccagcgccagcccttacactccgcccggcgccatggcccttctgtctccgtagctcgcctgcatcctactcggccctcatttctgcacggacggatgaggtgacagtcacgggaggataagatcaatgccctccattaaagcaagccggtgtaaatgttgaagcctttttggccatggctttgtttgcaaaggcccctggccaaacgtcaacattgggaagcctcatcctgcaatgttaggggcccggtggaacctgctccaagcagcttggttgctgcaccgagcaggaaggtccttgccccctccacttgcttgctgctccaagctgaaggaagaaagaaagttggaagcaaagaaaagaaagaatccgaaggaagtcttgaatgatgacattgggcttttggtcctttttgaactaaaacctcttttataaacatgtttcaataaaaaagctggaactttaaaaaaaaaaaaaaaaaaaaaaaaaaaaaaaaaaaaaaagggcggccgct

SEQ ID NO: 146900 - DNA, 624 bp, Homo sapiens; identical to SEQ ID NO: 144924

SEQ ID NO: 146901 - DNA, 680 bp, Homo sapiens
ccactgaagcgctcagatggctgtaacgacggccgacccacgcgtccgcccacgcgtccggacacaactgtgttcactagcaacctcaaacagacacgcatggtgcatctgactcctgaggagaagtctgccgttactgccctgtggggcaaggtgaacgtggatgaagttggtggtgaggccctgggcaggctgctggtggtctacccttggacccagaggttctttgagtcctttggggatctgtccactcctgatgctgttatgggcaaccctaaggtgaaggctcattcgcaagaaagggctccgcggggcctttagtgatggcctggctcacctgggacaacctcaagggcacctttgccacactgaagtgagcttgcactgtgacaaagctgcaccgtggatccctgaagaacttcaggctccttgggcaacgtgcttggtctgtgttgcttggcccatcacttttggcaaaagaatttcaaccccaccagttgcaggcttgcctaatcaagaaaattggttggcttggtgttggctaaatgcccttggccccacaagtaatcacttaagcctcgctttccttgctggtccaatttccaattaaaaggttcctttggttccctaagtccaaatacttaactggggggatattattgaaagggccttgagaatct

SEQ ID NO: 146902 - DNA, 421 bp, Homo sapiens
gcggctctcgcctgggctgtttcccggcttcatttctcccgactcagcttcccaccctgggctttccgaggtgctttcgccgctgtccccaccactgcagccatgatctccttaacggacacgcagaaaattggaatgggattaacaggatttggagtgtttttcctgttctttggaatgattctcttttttgacaaagcactactggctattggaaatgggcttctttcctgtcgttgatggctttattagaagagtgccagtccttggatccctcctaaatttacctggaattagatcatttgtagataaagttggagaaagcaacaatatggtataacaacaagtgaatttgaagactcatttaaaatattgtgttatttataaagtcatttgaagaatattcagcacataattaatt

SEQ ID NO: 146903 - DNA, 421 bp, Homo sapiens
cggacgcgtgggctttttttatatttagcttttactttacgtttaaaatttatgcattgtgtttaattaccttttccgggttgtattttctttctcttttaggttttatttgtagccggcttggcttttgtaattggtttagaaagaacattcagattcttcttccaaaaacataaaatgaaagctacaggtttttttctgggtggtgtatttgtagtccttattggttggcctttgataggcatgatcttcgaaatttatggattttttctcttgttcaggtaaggcatattattgtctctttcagtaaatcagtgtgtcagatagttagtacaaaaactcacatatttgcatcagttggagtaagatgatgatcctttccctaaaatgaaatttaatttaggtggaatcttatagattt

SEQ ID NO: 146904 - DNA, 429 bp, Homo sapiens
cccggcttcatttctcccgactcagcttcccaccctgggctttccgaggtgctttcgccgctgtccccaccactgcagccatgatctccttaacggacacgcagaaaattggaatgggattaacaggatttggagtgtttttcctgttctttggaatgattctcttttttgacaaagcactactggctattggaaataaactcctgtagcctatgatgaatatttcagaaccaagaggaatacccttgggtgacatatttatgggcagctttcctctttatgccttgccaactcatctgcttgactaagccttcctcatccagctaaaactagggaaaactactgcagacacagatgccccttggttttatttgtaggccggcttgggttttgtaattggtttaggaaggaacattccagattcttctt

SEQ ID NO: 146905 - DNA, 1157 bp, Homo sapiens
  misc_feature (1)...(1157): n = a,t,c or g
gcacgagggcggctctcgctgtggctgtttcccggcttcatttctcccgactcagcttcccaccctgggctttccgaggtgctgtcgccgctgtccccaccactgcagccatgatctccttaacggacacgcagaaaattggaatgggattaacaggatttggagtgtttttcctgttctttggaatgattctcttttttgacaaagcactactggctattggaaatgttttatttgtagccggcttggctttttgtaattggtttagaaagaacattcagattcttcttcccaaaaacataaaatgaaagctacaggtttttttctggggtgggtgtatttggtagtccttattgggttgggcctttgataggccatgatcttcgaaatttatgggattttttctcttgttcaggggcttctttccctgtcgttgttgggcntttattaggaaggagtgcccagtccttgggatcccctccccaaatttacctggaattagatcatttgtagataaagttggagaaagcaacaatatggtataacaacaagtgaaatttggaagactcatttaaaatattgtgttatttataaagtcatttgaagaatattcagcacaaaattaaattacatgaaattagccttgtaatgttctttacagggagtttaaaaccgtatagcccctacaaagtccccagcagccaaattagccaaagaagccagtgaaaacaggccttcctcctcaagtgaacctaagaagaagtccagcaagccaaacctgagagaggtgaaatcccatgttaatgatgccttaagaaactccttgaaggcctatttgtgttgtttttcccacaatgtgcgaaactcagcccatccttagagaactgtggtgcctgtttcttttctttttattttgaaggctcaggagcatccataggcatttgctttttagaaatgtccactgcaatggcaaaaatatttccagttgcactgtatctctggaagtgatgcatgaattcgattggattgtgtcattttaaagtattaaaaccaaggaacccccaattttgatgtatggattacttttttttgtaaacatggttaaaataaaacttttgtggttcttttgaattttaaaaaaaaaaaaaaaaaaaaaa

SEQ ID NO: 146906 - DNA, 1734 bp, Homo sapiens
ccgcgcgtcgtgcccgaccagagaagcaagttcgagaacgaggagttttttaggaagctgagccgcgagtgtgagattaagtacacgggcttcagggaccggccccacgaggaacgccaggcacgcttccagaacgcctgccgcgacggccgctcggaaatcgcttttgtggccacaggaaccaatctgtctctccaattttttccggccagctggcagggagaacagcgacaaacacctagccgagagtatgtcgacttagaaagagaagcaggcaaggtatatttgaaggctcccatgattctgaatggagtctgtgttatctggaaaggctggattgatctccaaagactggatggtatgggctgtctggagtttgatgaggagcgagcccagcaggaggatgcattagcacaacaggcctttgaagaggctcggagaaggacacgcgaatttgaagatagagacaggtctcatcgggaggaaatggaggtccatgagctggagaagtccaagcgggccctggagacccagatggaggagatgaagacgcagctggaagagctggaggacgagctgcaagcctcggaggacgccaaactgcggctggaagtcaacatgcaggcgctcaagggccagttcgaaagggatctccaagcccgggacgagcagaatgaggagaagaggaggcaactgcagagacagcttcacgagtatgagacggaactggaagacgagcgaaacgaacgtgccctggcagctgcagcaaagaagaagctggaaggggacctgaaagacctggagcttcaggccgactctgccatcaaggggagggaggaagccatcaagcagctacgcaaactgcaggctcagatgaaggactttcaaagagagctggaagatgcccgtgcctccagagatgagatctttgccacagccaaagagaatgagaagaaagccaagagcttggaagcagacctcatgcagctacaagaggacctcgccgccgctgagagggctcgcaaacaagcggacctcgagaaggaggaactggcagaggagctggccagtagcctgtcgggaaggaacgcactccaggacgagaagcgccgcctggaggcccggatcgcccagctggaggaggagctggaggaggagcagggcaacatggaggccatgagcgaccgggtccgcaaagccacacagcaggccgagcagctcagcaacgagctggccacagagcgcagcacggcccagaagaatgagagtgcccggcagcagctcgagcggcagaacaaggagctccggagcaagctccacgagatggagggggccgtcaagtccaagttcaagtccaccatcgcggcgctggaggccaagattgcacagctggaggagcaggtcgagcaggaggccagagagaaacaggcagccaccaagtcgctgaagcagaaagacaagaagctgaaggaaatcttgctgcaggtggaggacgagcgcaagatggccgagcagtacaaggagcaggcagagaaaggcaatgccagggtcaagcagctcaagaggcagctggaggaggcagaggaggagtcccagcgcatcaacgccaaccgcaggaagctgcagcgggagctggatgaggccacggagagcaacgaggccatgggccgtgaggtgaacgcactcaagagcaagctcagagggccccccccacaggaaacttcgcagtgatgc

SEQ ID NO: 146907 - DNA, 2454 bp, Homo sapiens
ccgcgcgtcgtgcccgaccagagaagcaagttcgagaacgaggagttttttaggaagctgagccgcgagtgtgagattaagtacacgggcttcagggaccggccccacgaggaacgccaggcacgcttccagaacgcctgccgcgacggccgctcggaaatcgcttttgtggccacaggaaccaatctgtctctccaattttttccggccagctggcagggagaacagcgacaaacacctagccgagagtatgtcgacttagaaagagaagcaggcaaggtatatttgaaggctcccatgattctgaatggagtctgtgttatctggaaaggctggattgatctccaaagactggatggtatgggctgtctggagtttgatgaggagcgagcccagcaggaggatgcattagcacaacaggcctttgaagaggctcggagaaggacacgcgaatttgaagatagagacaggtctcatcgggaggaaatggagaatgaagttgagagcgtcacagggatgcttaacgaggccgaggggaaggccattaagctggccaaggacgtggcgtccctcagttcccagctccaggacacccaggagttgcttcaagaagaaacccggcagaagctcaacgtgtctacgaagctgcgccagctggaggaggagcggaacagcctgcaagaccagctggacgaggagatggaggccaagcagaacctggagcgccacatctccactctcaacatccagctctccgactcgaagaagaagctgcaggactttgccagcaccgtggaagctctggaagaggggaagaagaggttccagaaggagatcgagaacctcacccagcagtacgaggagaaggcggccgcttatgataaactggaaaagaccaagaacaggcttcagcaggagctggacgacctggttgttgatttggacaaccagcggcaactcgtgtccaacctggaaaagaagcagaggaaatttgatcagttgttagccgaggagaaaaacatctcttccaaatacgcggatgagagggacagagctgaggcagaagccagggagaaggaaaccaaggccctgtccctggctcgggcccttgaagaggccttggaagccaaagaggaactcgagcggaccaacaaaatgctcaaagccgaaatggaagacctggtcagctccaaggatgacgtgggcaagaacgtccatgagctggagaagtccaagcgggccctggagacccagatggaggagatgaagacgcagctggaagagctggaggacgagctgcaagcctcggaggacgccaaactgcggctggaagtcaacatgcaggcgctcaagggccagttcgaaagggatctccaagcccgggacgagcagaatgaggagaagaggaggcaactgcagagacagcttcacgagtatgagacggaactggaagacgagcgaaacgaacgtgccctggcagctgcagcaaagaagaagctggaaggggacctgaaagacctggagcttcaggccgactctgccatcaaggggagggaggaagccatcaagcagctacgcaaactgcaggctcagatgaaggactttcaaagagagctggaagatgcccgtgcctccagagatgagatctttgccacagccaaagagaatgagaagaaagccaagagcttggaagcagacctcatgcagctacaagaggacctcgccgccgctgagagggctcgcaaacaagcggacctcgagaaggaggaactggcagaggagctggccagtagcctgtcgggaaggaacgcactccaggacgagaagcgccgcctggaggcccggatcgcccagctggaggaggagctggaggaggagcagggcaacatggaggccatgagcgaccgggtccgcaaagccacacagcaggccgagcagctcagcaacgagctggccacagagcgcagcacggcccagaagaatgagagtgcccggcagcagctcgagcggcagaacaaggagctccggagcaagctccacgagatggagggggccgtcaagtccaagttcaagtccaccatcgcggcgctggaggccaagattgcacagctggaggagcaggtcgagcaggaggccagagagaaacaggcagccaccaagtcgctgaagcagaaagacaagaagctgaaggaaatcttgctgcaggtggaggacgagcgcaagatggccgagcagtacaaggagcaggcagagaaaggcaatgccagggtcaagcagctcaagaggcagctggaggaggcagaggaggagtcccagcgcatcaacgccaaccgcaggaagctgcagcgggagctggatgaggccacggagagcaacgaggccatgggccgtgaggtgaacgcactcaagagcaagctcagagggccccccccacaggaaacttcgcagtgatgc

SEQ ID NO: 146908 - DNA, 2661 bp, Homo sapiens
ccgcgcgtcgtgcccgaccagagaagcaagttcgagaacgaggagttttttaggaagctgagccgcgagtgtgagattaagtacacgggcttcagggaccggccccacgaggaacgccaggcacgcttccagaacgcctgccgcgacggccgctcggaaatcgcttttgtggccacaggaaccaatctgtctctccaattttttccggccagctggcagggagaacagcgacaaacacctagccgagagtatgtcgacttagaaagagaagcaggcaaggtatatttgaaggctcccatgattctgaatggagtctgtgttatctggaaaggctggattgatctccaaagactggatggtatgggctgtctggagtttgatgaggagcgagcccagcaggaggatgcattagcacaacaggcctttgaagaggctcggagaaggacacgcgaatttgaagatagagacaggtctcatcgggaggaaatggaggccaaggcgaacctagacaagaataagcagacgctggagaaagagaacgcagacctggccggggagctgcgggtcctgggccaggccaagcaggaggtggaacataagaagaagaagctggaggcgcaggtgcaggagctgcagtccaagtgcagcgatggggagcgggcccgggcggagctcaatgacaaagtccacaagctgcagaatgaagttgagagcgtcacagggatgcttaacgaggccgaggggaaggccattaagctggccaaggacgtggcgtccctcagttcccagctccaggacacccaggagttgcttcaagaagaaacccggcagaagctcaacgtgtctacgaagctgcgccagctggaggaggagcggaacagcctgcaagaccagctggacgaggagatggaggccaagcagaacctggagcgccacatctccactctcaacatccagctctccgactcgaagaagaagctgcaggactttgccagcaccgtggaagctctggaagaggggaagaagaggttccagaaggagatcgagaacctcacccagcagtacgaggagaaggcggccgcttatgataaactggaaaagaccaagaacaggcttcagcaggagctggacgacctggttgttgatttggacaaccagcggcaactcgtgtccaacctggaaaagaagcagaggaaatttgatcagttgttagccgaggagaaaaacatctcttccaaatacgcggatgagagggacagagctgaggcagaagccagggagaaggaaaccaaggccctgtccctggctcgggcccttgaagaggccttggaagccaaagaggaactcgagcggaccaacaaaatgctcaaagccgaaatggaagacctggtcagctccaaggatgacgtgggcaagaacgtccatgagctggagaagtccaagcgggccctggagacccagatggaggagatgaagacgcagctggaagagctggaggacgagctgcaagcctcggaggacgccaaactgcggctggaagtcaacatgcaggcgctcaagggccagttcgaaagggatctccaagcccgggacgagcagaatgaggagaagaggaggcaactgcagagacagcttcacgagtatgagacggaactggaagacgagcgaaacgaacgtgccctggcagctgcagcaaagaagaagctggaaggggacctgaaagacctggagcttcaggccgactctgccatcaaggggagggaggaagccatcaagcagctacgcaaactgcaggctcagatgaaggactttcaaagagagctggaagatgcccgtgcctccagagatgagatctttgccacagccaaagagaatgagaagaaagccaagagcttggaagcagacctcatgcagctacaagaggacctcgccgccgctgagagggctcgcaaacaagcggacctcgagaaggaggaactggcagaggagctggccagtagcctgtcgggaaggaacgcactccaggacgagaagcgccgcctggaggcccggatcgcccagctggaggaggagctggaggaggagcagggcaacatggaggccatgagcgaccgggtccgcaaagccacacagcaggccgagcagctcagcaacgagctggccacagagcgcagcacggcccagaagaatgagagtgcccggcagcagctcgagcggcagaacaaggagctccggagcaagctccacgagatggagggggccgtcaagtccaagttcaagtccaccatcgcggcgctggaggccaagattgcacagctggaggagcaggtcgagcaggaggccagagagaaacaggcagccaccaagtcgctgaagcagaaagacaagaagctgaaggaaatcttgctgcaggtggaggacgagcgcaagatggccgagcagtacaaggagcaggcagagaaaggcaatgccagggtcaagcagctcaagaggcagctggaggaggcagaggaggagtcccagcgcatcaacgccaaccgcaggaagctgcagcgggagctggatgaggccacggagagcaacgaggccatgggccgtgaggtgaacgcactcaagagcaagctcagagggccccccccacaggaaacttcgcagtgatgc

SEQ ID NO: 146909 - DNA, 1107 bp, Homo sapiens
atgagtggacccggattcagggcaaatccaggtgccttgcacaccaagaggcctcaagtggtcaccaaatatgaaccctgcaaggaaaacagatgcatgtggggaagacacccatccaagtcttttaggagtccccttctccagacctcctctaggtatcctcaggtttgccctccagaacccccggagccctggaaaggaatcagagatgctaccacctcccgcctgggtatatttgaaggctcccatgattctgaatggagtcgtgttatctggaaaggctggattgatctccaaagactggatggtatgggtgtctggagtttgatgaggagcgagcccagtcctggccctggtaggcccatccacaatgctaggagggaaggcgacctagctgcagggagttgggaaacgtggccttgggagcagatggagactctcctggcagcatctatacccgaagatggaagctgcggtcccaaagggtaccggccccgccacctcaggagccgaagatgccgagcctgtgctgcagaaacaccagcaccactttctccgggcggccaagtcagagccctcgtacgaagaagcagcgcccacgatgaggcgcctcccgggaaccagaccatcacctggacgaagaaggccgggatcgagcggggcggaagtcgaagccagcatcgaaacgctcgtaattacatcgactggacaccgttctttatgacctggtcgctggccggaagtatccgcgcattctggaagatgaagtgggcatccgtccggcaccgggctatccggctgcccggaacatacggaaaaagccaccatctgggagctgctggaagtggaaaacacactggcatgaaactcacagaatctttcgccatgtgggcccgggcatccggttccggggttgtacttcagccacccggacagcaagtactacctgtagcacaaattcagcgcgatcaggttgaagattatgcccgcccggagcgtcgaaaaaaagccgctcgccttttgcgcggggatcggcgttacgcactggtacagagcagtaatgccaccaccatgctggtgacctcgtttgcgctcaggatctggtag

SEQ ID NO: 146910 - DNA, 591 bp, Homo sapiens
atggggttttgccatgttgaccagaccggcctcgagctcctgactcagcctctgcttgcccttatcggcgctgcgctggagggcgggcgcgcgggcggcgccgcggatttggctcctgatttcgggcgtcttgccttgcagattaagtacacgggcttcagggaccggccccacgagaacgccaggcacgcttccagaacgcctgccgcgacggccgctcggaaacttttttccggccagctggcagggagaacagcgacaaaacctagccgagagtatgtcgacttagaaagagaagcaggcaagctgaacatccccaaaggccctgcaggggatgagacgcccagtagcctgtcctccatgatgatcgtcctgtcctctgactcagggcctgctgtgttggcgatacccaacctggtaacacccccccgctacactcccatggtgccctgtgggggccaccatcaggcccagaggaagaggcctctttgtactccaccaccctcctccatacaacagggctccatgagcgtcaagtccatgccgacccctgtcgcagcccacaagtccttcacgtctgctctttgctga

SEQ ID NO: 146911 - DNA, 2950 bp, Homo sapiens
ggcctcaagggcgggaagatgccgcgcgtcgtgcccgaccagagaagcaagttcgagaacgaggagttttttaggaagctgagccgcgagtgtgagattaagtacacgggcttcagggaccggccccacgaggaacgccaggcacgcttccagaacgcctgccgcgacggccgctcggaaatcgcttttgtggccacaggaaccaatctgtctctccaattttttccggccagctggcagggtagatcagcgacaaacacctatccgagagtatgtcgacttagaaagagaagcaggcacggtatatttgaaggctcccatgattctgaatggagtctgtgctatctggaaaggctggattgatctccaaagactgcatggtatgggctgtctggagtttgatgaggagcgagcccagcaggaggatgcattaacacaacaggcctttgaagaggctcggagaatgacacgcgaatttgaagatagagacaggtctcatcggcaggaaatggaggcgagagtttcacagctgctggcagtaactggcaagaaaacaactagaccctaggcctggttccaatttaggtggtggtgatgacctcaaacttcgttaattaatagcacagcagatgtgtgctgcccatcttttacatacacattgctttctaagtttggcagaaataattgattaaaagaccagaaactgtgataactggaggtactacggtctatttcttcaaccttaggcagtaatagacatcacaaactgccatggttttgcactatgattataatacctggcatttctaaatttttttaagccatgtagccagtaataatttgaagttttttttctatgcaagcttaccttgttggcattattttagggagttgaaactatcaactgtaaagctccttttcttccactttaatttaaaagttcatgtcatttaaaaacaagtcaagaaattaaaattgtatcagagggttttctctaatcattttttctatttttttttttgtacttctaaacgtttgggttatacagcttcattttagatgaccattcttattttttggtttgcttgccccatttccttttgggtttttatagcctatagcattttaaaactgctgatgttgtttgcattatttacaggctaaaaacttaataccataaagctgtctgccacagccttctgacaaagtttacagttattaaagttgcagcctccttttaaatgctagtaatcagcactctttcttttttttttttttaatagagacagggtctcgcagtgttgcccaggctggtctcgaactcctggcatcaagcgatcctcctgccttagcctcccagagtactgggattacaggctctttctttttaaacataaaagttttaaattggtattaactctgtactctggccctagattgttttaggcttctgttctgtaatcatgagtttggttggagatattctccatagatgatcttctactgaaatgcctaaagaagtcacaggctggcttctgttttattcagggatttttttaaaaagtcaatcagaaaagggatactggagcttcttcatgtatgtaacagcatattaaactggagacagtgatgaatccagctaccaaagggtaatattgtaattaaaatcatggttaaagatagctgcttttatgtgtattttatattgcatgcttttgtaaaaacatgctgggtgatgaaagattagttttagagagaaaatgttcatctgtgcagaggatgcattttcttccattaattctggaaaaaacgttcacagttatatatatggtattttgccaaagggctatttaaaggaccctttggaaaggaattaaggtaagaatattttttaaataggcttactgtcaaattgcaactttttttttagatacagagtggaaaacagtgctaaagtccatttggcacctccttacaaataattgtgcaagggtcacatttaattaaatggttactacatttcctgaattttttggaaaatgtattttatccattaaatggcattattttcaaagggtgaaaaactgacacagtcaattcagaaaatggactgaagtctgaataaggtcattgcatttaaaaagcatataactgtacttgactgatgagggaggtgttactttcattgtatataggtcttatttcataaacagatatcctgtatcaaataaaagtatttgttatatatttgaacgttatgcatggaaacggagtgtgtttaaattgttacaaacaataatgcgtcattaaaggccatgctgatcttgcataactataagtactatgaatgaatttggttggttttggtgttgtacagctcacatgtttacacactcagtgccctaatttcccctgagggaatcgctttttaagtgatccttacagtggtgttttatgttactttattacagagctccttggttttttacttctgcacttaaatttttttaaataacatgatgatgggaccattttcctctaatggtctagctaagggcttttcggtccacccagtaaataagatcaaatggctccttaaaaggttccctgttaccatccctaaaggtaaaatactggattttcctgtcatttggcacccatgctgcttctgtctgtcttaatgctggcattaagatcatgagccctttttctccagtagtacaggctttgaaaactactttctattaagttattgatgcaatttgatattttttcgataatctatatttaaacaaaattacatcattgcatcatctttttctaaatccatctccattaaaacttgccttaagctaccagattgcttttgccaccattggccatactgtgtgtttgtttgtttaatttactttcacaataaacttctgtgtagtaaaaaaaaaaaaaaaaa

SEQ ID NO: 146912 - DNA, 438 bp, Homo sapiens
  misc_feature (1)...(438): n = a,t,c or g
aaaagacccggggaggttatttttttaaccggatcccctttttttttaaaaaaaacagctattttttcctaaccgattcaagcaggcctttcccttttaaaaacagctggaaaaaaaggtcctgaggggtccccccccgttttttattccccccttaaccctggggcggnnnnnnnnnnnncccccttggtttaaccattttttcccgttttccccgtgaacccccttttttgggggtagggcctacgcctcnnnnnnnnnnnnnnnggcttgcctgaccccttacagaggacttaatgcaatgcctattcgggcaataaatgaatacttgatgcattcatacaggcaagaatcccagcatcccagagaagctctgtctgcgctgcaaaaccatggctgcagacatcagggaagctggtgcagtcgaacgcgtgggtc

SEQ ID NO: 146913 - DNA, 671 bp, Homo sapiens
ttgctgcgaatggagaacatctcaggcagccctgatgctccaccgtccttgcagagagaagcttgctcagagtggttactgaaaacaggaacctgcccttctgcaagccctgtgccttcctcgttcctagcagaggaagtatgcggccagtttagcaactgcagttcttctgtgtagcatgggctgcttctccacaaccgcgagaggcccggctgcctgtttattctggagcagcagcagttgacagacggagaggcagtgactctgcacccagcaatccctctgcagacagctcccacaggagtcatgcccagtgtgtgaaggctctgggcatcaccagcggccccagggaaaaagaaagaaatgggaaacagcatgaaatccacccctgcgcctgccgagaggcccctgcccaacccggaaggactggatagcgacttccttgccgtgctaagtgactacccgtctcctgacatcaaccccccgatattccgccgaggggagaaactgcgtgtgatttctgatgaaaggggctggtggaaagcctatttctcttagcactggtcgagagagttacatacctgcaatatgtgtggccagaagttaccatggctggctgttaagagggcccggccaaaaacatggccgaggagctgctgcagctgccagac

SEQ ID NO: 146914 - DNA, 3415 bp, Homo sapiens
  misc_feature (1)...(3415): n = a,t,c or g
ctgtgtccatttgaaggctaaagaaactgcagctcagaccagttcagcaactctcctacatcgtgtggctaaagctaagaattgtgacccatttttctgaatccaggtccccgcgatgccctgggttcagaccctaacaccctcccgtccctgagtgctggggatttaaggcagcagtgcctcctttcaggaaatcacacacacactggaaactcctgcatacttctcttactataatctgtcaccaaagactggatattcctgtgctggggctcgtgccagcgcctcgggctgccaggtgctgctttccaactcccacatgggctgccctccccctactgctacccacagggcccccactccacctgctcccagacgaggccaactcctggccaagcttaggggcacagcggaggcgctctgtttctgatttttctcgccttccttggagatgcctgtgcttggaagggaaggcagaacattgcatcttggaacaaatctgcttttgatcatgcaaatgaatgcctggataatgtaggcagactgtcaatttcaccagttagaaagaaagagaaaagggggagaaattccccatgacagcgactgatgaagaatttcaatagaaagctgctacttcagaaaataagatcatttgctgcgaatggagaacatctcaggcagccctgatgctccaccggctctgggcatcaccagcggccccagggaaaaagaaagaaatgggaaacagcatgaaatccacccctgcgcctgccgagaggcccctgcccaacccggagggactggatagcgacttccttgccgtgctaagtgactacccgtctcctgacatcagccccccgatattccgccgaggggagaaactgcgtgtgatttctgatgaagggggctggtggaaagctatttctctttagcactggtcgagagagttacatccctggggatatgtgtggccagagtttaaccatgggctgggctgtttgagggcctgggcagagacaaggccgaggagctgctgcagctgccagacacaaaggtcggctccttcatgattcagagagagtgagaccaagaaagggttttactcactgtcggtgagacacaggcaggtaaaggcnttaccgcattttccgtctgcccaacaactggtactacatttccccgaggctcaccttccagtgcctgggaggacctgggtgaaccactattctgaggtggctgatggcctgtgctgtgtgctcaccacgccctgccttgacacaaagcacggcttgccccagcagttgagggcctgcagctcacctgtcaccttgcgtcagaagactgtggactggaggagagtgtccagactgcaggaggaccccgagggaacagagaacccgcttggggtagtcgagtcccttttcagctatggccttcgagagagcattgcctcttacctgtccctgaccagtgaggacatctcctcctttgatcgaaagaagaaaagcatctccctgatgtatggtggcagcaagagaaagagctcattcttctcatcacccccttactttgaggactagccaagaacagacacaatggttcatgcccataaggaacagaagttccaactattgcctgggatcttgcgaaaagcgaggttccctgatccctgggagcctcacgtattttagaagccaagagaagccacatggagactcaaattcgcatcttctctatccacatcatgaccaaaggaacccctccctggtgactgatcacggctgaggcatcacgaaacattggatcatgacatgtccggcgaagcttgggaacagcccagcatgtatgtatgcacacattgtgtgtgtgggaaggacacagccactctcacaagaaagggcaccacgactgctctccaaggaactggacctgtccagacagttacactccaaggtcattggagagaacttctgtatgggcaagcctgagagggagaggaaacaaaagctgtgtcctggcagaaggtctgggtttgccaaaaagggtgccccctgaaatggaaactacttttaaactaaatcccattagggaccttcttggtaatgctttccctctcttttttaaaaggaacttcgtgaacacctaaaacatttagccccaaaggaccttccttagcccttcaattgggagaatacctttggtctgctccctgcacccaaagcccatatgggtggaagtcaagttggcctccctggttctgcagagggcccagaagaatgagagagaggaagactgctggcagggaaatcgaggaggcgagactagaactgcaccagcttccctgatgtctgcagccatggctttgcagcgcagacagagcttctctgggatgctgggattcttgcctgtatgaatgcatcaagtattcatttattgcccgaataggcattgcattaagtcctctgtaaggtgtccaggcaagccaaaaaaaaaaaaaaaagatgcgtaaatcctaacccccaacagaggtgttcacagtgtagacagggaaaaaatgtataaacaaatgtgtaaaaagagaaatcagctcatggcttaggatggaattagagacaggtgagggacactcaggagctcattttccagctgctcttcagagtggaagggctggctggatcgggtaggtaagaatagctggattttttagaaaagaaatggatacagtctaaagaattaactcacccggtactttattctaagaagggtctggcatccatatgaggaaaaatgctcagctccaggaaagatggggagtccaagtggattaatgatgtcatgcataattttaagagacaagggagaaaacacaatgtatagccagagaaggagaagctcccattccaaatcctactaggaagagagtgggctgcagatgaatctgtgactcatgtttccctgtttcaaagggatcctggggaaggaggggaacatgcttgcagtatctctccctgtctgtctgctcacataagcattccgtccatctgagctcatcgtgctactggtatgtgtatgtgcagttacacagttttctgtatcatagattctagtgtgtttatacaaggagacatctgtggtttccccaaccgttccaaaaggctatttcaaaggaaccagccaacgtatgagaaatgaatgtaacactgtggacattgacttcccgcataaggcagggtgaccccctgaactccagatgtctgcacagtatcttatgtgttgttttccgttgtgacgaatgtgattggaacatttgggggagcacccagagggatttctcagtgggaagcattacactttgctaaatcatgtatttattcctgattaaaacaaacctaataaatatttaacccttggcaaa

SEQ ID NO: 146915 - DNA, 485 bp, Homo sapiens; identical to SEQ ID NO: 145933
  misc_feature (1)...(485): n = a,t,c or g

SEQ ID NO: 146916 - DNA, 654 bp, Homo sapiens; identical to SEQ ID NO: 144884
  misc_feature (1)...(654): n = a,t,c or g

SEQ ID NO: 146917 - DNA, 764 bp, Homo sapiens
  misc_feature (1)...(764): n = a,t,c or g
atcgagaccatattccatgtggnggaattccacagactcagagagaacccaccatggtgctcgtctcctgcccgacaagaccaaagcccaacgccccccgcggctaaagctcggcgccaacgcctggcgagtatggcttcggaggcccctggaaagggatgttcctgtctttccccaacccacccaagacctacttccggcaatttcgaccctgagccaacggttttgcccaaggttaaaggggccacgggcaaagaaaggtggccgaacgcgctgacccaaagcccttgccgcaacgtggacgaacatgccccaaacggcgttgtccgcccctgaagcgaccctgcacggtgcacaagctttcgggtggacccggtcaacttcaagcttcctaagccacttgcctgcttggttgaccctggcccgcccaccttccccggccgagtttcaccccctgcggttgcacgccttccctggaacaaagttcctgggctttttgttgaagcaccgttgcttgaaccttccaaatacccgttaaagcttggaagccttcgggttggccatgcttctttgcccctttggggcttccccccagcccctcctcccctttcctgcacccgtacccccgtggtctttgaaataaagtcttgagtgggcggcaaaaaaaaactgaacatctccttcccagccactgggtgccagaaactcattggagtggacgatgaacgccaaattcggatcttttagagaagcgatgggcccag

SEQ ID NO: 146918 - DNA, 337 bp, Homo sapiens
gcttgaataagaaaaacaaattcttcctcctaagccatggcatatcagttatacagaaatactactttgggaaacagtcttcaggagagcctagatgagctcatacaggtgggagactgaattaaaaatcaaacatttttatcttgatgggtttacagtaattcttgtcatatcacttaggcaaagagatatgaggtaaaatatcttggactatttgacccagcaagtcagtaacactgattaaattacctcaaattcttgtttattacactgtcctgacaacaggacacaaaacatgattgaatgatatcattaaatatagctaaatctgggtaca

SEQ ID NO: 146919 - DNA, 1149 bp, Homo sapiens
gaccagctttttgtgcatgacaagaaagaatacagtaggaagggcatgagtatcagagccatggagtctagacagatggagttcctgcttctcttccatcttgttcagaacttactttctatggagcctagctgatgacagctaaatagtataattaagaagctcttgtttatttgcatttttgaccaaaagtgtaagttggattagaactaggcattttataatccagtactggtgaatgtaccatttttatgatcaagtactggtgagttgttgattgcacaaaacaaaatatgtaaataattttaaatacctgcttcaaaactaccagccctttatatttaccaacagatgaattttacatcatcagattaagataatagctctatactttaccctttaatgacttaagcaaggttgagggtcaaaggaacttttttttttttttttttttttcaggcagcgctaacggcaggcaaaggggggaaatggtatgatggcctcaggatttggaagatacgccacgaaagcgacgtagggagggacaaggaggccaaggggatgaaggggaggagaagggtaaaggagaggcgggagagcagtggagaggggtgaaagtaaagatacgagagtatattaagagctccagagtcttgggttcagctctgtagtttctgtggctactgaagaggtggtcaggaacataggaaccccctgctgggctcctggtcacttctgtctgctccatggcaggaaaccttcagcacaggacatcaaggcaagcttgaataagaaaatcaatttcttcttcctaagccatatcatatcagttatacagaagcactactttgggacacagtcttcaggagagcctagatgagctcataaaatctcaggcagttcactcaacttgcccttcaagttttacttcagtttgattaaggctataaagtcatcattggctcagaggattaggaacagagttgatttcaggggctctctaaatacatacagattgtgccatatgccacgcatggtggctcatgcccgtcatcccagcactttgggaggtgaaggcaggaggattgcttgacgcgaggagttcaagaccagccttaacaacataggaagacactgtctctacaaaaa

SEQ ID NO: 146920 - DNA, 822 bp, Homo sapiens
  misc_feature (1)...(822): n = a,t,c or g
cggccgcgtcgacctcggctttaacagagtgctaagcgatgacttcgcaacatgtggcagctggaacgcaacagtagagacccatcatcaacaccttccaccaatactctgtgaagctgggccaccccagacaccctgaaaccagggggaattcaaagagctggtgcgaaaagatttgggccaaaattttctcaagaaggagaataagaatgaaaaggtcatagaacaccattcatgaggacctggacacaaaatgcagcccaaccagttaagtttcgaggagttcatcatgctgatggcgagggctaaacctggggccctccccacgagaagaatgcacgagggtgacaaggggccctggccaccaccccataagccaggcctcggggagggcaccccccctagaccacagtggccaagatcaccagtggccacggcccacggccacaagtcatggtggccacggccacaggccactaatcatggaggccaggccaccctgcctctacccaaaccagggccccggggcctgttatgtcaaactgtcttggctgtggggctagggggctggggccaaataaagtctcttcctccnnnnnnnnnnnnnnnnnggttaacccggccgcaattcccaaatttataaacggaaaatcctgaaaacccccgaaggttcatttaaattgggcatggggccccatctaattttttttaattaaaacatggtttggccttttttaatgaaacaatactccttaaagttaaaatctggcccatgaaccctttgatttataaaattttttaaaggactaaaataaaggcccc

SEQ ID NO: 146921 - DNA, 419 bp, Homo sapiens; identical to SEQ ID NO: 130808
  misc_feature (1)...(419): n = a,t,c or g

SEQ ID NO: 146922 - DNA, 612 bp, Homo sapiens
tcatccacatgcaggcgtccattttccgttgactgaaacagaaatgttagagttgagaattttagttgaaaagaagtacaacgtaaaagcagctgtttctaaggaagtttctgagttacctttgaattcaataagttggcagaaaacagtgtcttctttagaaatagttaacatctgttggttgacctggtgccacgttctgtactctaagcaccgaaaggcaagcaaacacttgagagttgtttgacaaaaataaacatcctgtcgtctcagtgggcgcctaacgaacccgggatacggtctgttcctagtccgctccggaaatgcaacgcgtacgggctggccgcgtaatcgtgacgacagcgcgccagcgccggctgccggacgccctaggcttccgcgagatcttctccagcgaggagcagctggcaagactgcgggctgacgccaacccaaattcagatgcaaagccgtggccaacgggaaggtgaggttttcccaaggttgcccagttgcccggtcactaaattctgagcagctgcgggagctctctggctcccaggacaatctcgctccgtcgtttctctgcctctgcggcgcgagtgcgttttt

SEQ ID NO: 146923 - DNA, 1053 bp, Homo sapiens
atgcaagaaaacagcattgccatccaacattcgttcagcatcaggctgagcatgcgcactaatcacctactgcacaaggtggctgttaactttcacattagtcttcttctaaatgctaaaggcatgagaaacttagtaaagaagtatgaaccacccagatctgaagaagttgctgttctgaaacagaagttggagcgatgtcattctgctgagcttgcacttaacgtaatcacatctccgccgacagaaataaagggacgaaagagcggccagctgccggacccacatgtcttaacctacttttcttcccatacttacatggtacatatgctcacttgtgcatttttggcctgcaaagtagatgaattcaatgtatctagtcctcagtttgttggaaacctccgggagagtcctcttggacaggagaaggcacttgaacagatactggaatatgaactacttcttatacagcaacttaatttccaccttattgtccacaatccttacagaccatttgagggcttcctcatcgacttaaagcatggatacaacctgtgggtctggcctggtcatctagggacgagtttcaaacttcagcgggcatcatcggtatctggagaaatggttatgaccctcggtcttctgagcagctggaattacaggcattctccatctcctattgctgcaagaacactgatattagtggctaaatctgtgcagaacttagcaaatcttgtggaatttggagctaagggtagtgatgcccaacttatttattttgaaagcgaaaaacgagctaccaaaccaaaaggattaatagatctcagtgtatgttctgtctatgtcgttcatgatagtctctttggcagaggcatgaggaattcaaagtggctgggcagcagtttttataatttatttttcaatggaacacttcatgaatctgctgtcatccttgcacaagggcctgctatctctctgggtcgtccactttccgcttgtggtgctgagtgtggccggtccccgggggtcccggcattcactgtgcagttctga

SEQ ID NO: 146924 - DNA, 750 bp, Homo sapiens
ttcctcactggaggagtctggtgagaccatgccaacattactaacagtgaactattacaaaatttcctggtttatcttttgtaatccacatgggtaaaaggaggagaacattttcttaaagggaggtaagaggtaaacaatactggttatgcttcagtgttatccttaccacactttttttccttcttaggaagaatggactgatgacgacctggtagaatctctctaaccatttgaagttgatttctcaatgctaactaatcaagagaagtaggaagcatatcaaacgtttaactttatttaaaaagtataatgtgaaaacataaaatatattaaaacttttctattgttttctttccctttcacagtaactttatgtaaaataaaccatcttcaaaagagctagaatagcacctgttttgaatattcttattccatcgtgactaatatcaaattaaagctgcaactcatttgcctaattttttaagcaaaatatgataggcaaacctatgctttttttaaaaaaaggcaccacaaaaaacaaaacttagtagccagctttaaaagtgttaaggaatgtgttttgccctctagaaacctttataaatggctttttgaatgccatcctgatatatttagctatttgtccattactattaaactgcagaaggtatttcaactgttacatggtactgaaagccagtcgtctgggtaatgaatattatttttctttagttacccgaaaacatt

SEQ ID NO: 146925 - DNA, 1442 bp, Homo sapiens
acgccagcttgggacgaggctacgaacccgggatacggtctgttcctagtccgctccggaaatgcaactgcgtacgggctggccgcgtaatcgtgacgacagcgcgccagcgccggctagccggacgccctaagcttctgcgagatcttcggtgggggtacgggtgttttacgccaggacgctgatgcgtttgggttctcgtctgcagaccctctggacctggtcacgattccataatgtaccacaacagtagtcagaagcggcactggaccttctccagcgaggagcagctggcaagactgcgggctgacgccaaccgcaaaattcagatgcaaaacccgggcccaccggaaaggtttttccaaatgatccagtctttcttgagcctcatgaaggaaatgacactctgcaaatactatgagaaaagggtaattgaaattctgttcggtgtttaagccagcaatgccaagatctgttgtggggtacgggcttgtatgtatttcaaacgtttttatcttaataactcagtaatgggaatatcaccccaggctaaataatgctccacttgtgcatttttggcctgcaaagtagatgaattcaatgtatctagtcctcagtttgttgggaaacctcccgggagagtcctcttggaccaggagaaggcacttgaacagatactggaatatgaactacttccttataccagcaactttaatttccaccttattggtccacaatccttaccagaccatttgagggcttcctcattcgacttaaggacccgctcatcccatattggagaatccagagattttgaggaaaaacagctgaatgactttcttaatagaattgcattgacggatgcttactttttatacacaccttcccaaaattgccctgactgccattttatctagtgcctccagggctggaattactatggaaagttatttatcagagagtctgatgctgaaagagaacagaacttgcctgtcacagttactagatataatgaaaagcgtgagaaactttagtaaagaagtatgaacccacccagatctgaagaagttgctgttctgaaacagaagttggagcgatgtcattctgctgagcttgcacttaacgtaatcacgaagaagaggaaaggctatgaagatgatgattacgtctcaaagaaatccaaacatgaggaggaagaatggactgatgacggacctggtagaatctctctaaccatttgaagttgatttctcaatgcttcctacttctcttgattagttagcattgagaaataggaagcatatcaaacgtttaactttatttaaaaagtataatgtgaaaacataaaatatattaaaacttttctattgttttctttccctttcacagtaactttatgtaaaataaaccatcttcaaaagagatagaatagcaaaaaaaaa

SEQ ID NO: 146926 - DNA, 1731 bp, Homo sapiens
ggaaataaatgagaagcttctatccttgatttggggaagacattccttaacttaggctgtgcagcctcccgcccctgcatggcccaggcgggacagctgggctcgctcttttctgtccgattcctgctgtgttttgccctctctggcctgagacgtgctcctggcgacttcttcctcagagccctctcttttctgtcctctctgtctcacagcctcgactcctaagcccctccctcctcctggctcctcttccctgtcctgtctgggccatgtgggggacaggaggctttcctctccctggaccccctggccagcctcgggtgcggggcccgacagcagctcgagggactccttgctgccgcccttcctgagtgaccaggcacagcacgtgcacgccctggggaacttctacctcttctgccaggccacaggtcctgcagacattcgctttgtctgggagaagaatgggcgagctctggagacctgtgtccctgtgcagacccatgcactgcccgatggcagggcccatgcactcagctggctgcaggacgccatcagggaaagcgctgagtatcagctgctcatgtcctctcctcagcagggaacaagacttcgaatgtgcaggctgctgtgatgagacctgaagtgacccaccacgagaggtggaccagagagctctctgcctggaggagctgtggctggggagcacgaccggatgatgcagagctggaggaaggcgtgggaaagctgtagcaaggacaccctgttagccaccagggaaggagtccctgacaccgaccttcaaccccaacaagaccctgttgccactgaccacagccacccccggagaaggcctggtcccccacaactgtgaactgtcttgcccaagcctgctctgaacacagccattgggccaccacctgatgggcagaggcgggacagtggagaagcctggaacccaagtgggcctgtgtacaggaacttaagacttaaaaaattaggtgcttacctgggacagtaagttctgtctgggcacaagcaggtaaccagggatggctaacaggcttttgatagctgctcgtgaactaaaaccagcagggtgtgtgcaggttcctccttctacggtcaggccagcaggctctgaaggctgaatcctacaccgtcccagtgactccccttgacagagtgcccccaccccctaatagcccaacagggttaagcatggcccagccacagatcgctgcttttaattggatgcaaatcaagcctgctgccttcctccctcccctgcagacttagcccaaggaactcccaagatgcatgactgggacaagaaaaggtgagactcccacatggaaatgccttgccctaaaccttgaatgactgtgagatgcgatctgggagtgcatctgtcaagtctttgtgttttccttcactaacctcagaatactgggctctattttatcaagcgctgcagtttcatgcctctgtcccgtcaatgctcagcttctgcaacaggacaccaaacttgatgcagaaagccaaataggtcaattatgcaaatctcctggtgccatattaaatttcttgacgatggaatgagtctcatgagtgttttgttctacctgctttcaagtctctaattattaaagctgtatctctgaagactgtgtcactgtgtgtgtgaacttgtcctaaagctactcagcctttaatcttacacacacgtct

SEQ ID NO: 146927 - DNA, 1340 bp, Homo sapiens
tgacctcaatacccagcttggcacgagggagagcgagctgagtggttgtgtggtcgcgtctcggaaaccggtagcgcttgcagcatggctgaccaactcaactcaaggagcagattgcagaattcaaagaagctttttcactaatttgacaaagatggtgatggaactataacaaccaagggaatttgggaactgtaaatgagatcctcttgggcagtaatcccactgaagcggagttacaggacatgattcaatgaagtagatgctgatggtaatggcacaattgacttcccctgaatttctgacaatgatggcaagaaaaatgaaaagacacagacagtgaaggaaggaaattaggaggaagcattcccgtgtgtttggattaagggtgggcaatggcttatatttagttgcttgcaggaactttcgccatgtggatggacaaaccttgggaggaggaagtttaccagattgaagaagtttgatggaaatgattccaggggaagccagatattggatggtgattggtccagttaaactatggaagagttttggtaccaattgattgaccagccaagttgaagaccctgttacagaatgtgttaaatttccttgtacaaaattgtttatttgccttttctttgtttgtaacttatctgtaaaaggtttctcccctactgtcaaaaaaaaaatatgcatgtatagtaatttaggacttcattcctccatgttttccttccctaatcttactgtcattgtccctaaaacccctattaaggaaaaatggatcaaagtaaccatgttgccatgtggccttacctctgggatatatccctaagccccctcctgcacatcctaaacctaagatggagttgggtcaaaatgaggggaaacatctggggttatgcctttttttaaagtagttttcctttagggaactgtcagcatgttgttgttgaaagtgtggagttgtaactctgcgttggactatggacagtcgactatggacactcaacaatatgtactttaaaagttgcactattgcaaaacgggtgtattatccaggtactccgtacactatttttttggtactgctgggtcctgtaccagaaacattttcttttattgttacttgctttttaaactttgtttagccacttacttaaaagatctgcttatggcacaatttgcctcaaaatccattccaagttggtatatttggttttccaataaaaaaattactttttaggcccggcctgaccaaaaaaaatttatattaataaaagggggggcctttttaaagattccttgaggggcccaaaattacgggtgagtgaaaa

SEQ ID NO: 146928 - DNA, 2079 bp, Homo sapiens
  misc_feature (1)...(2079): n = a,t,c or g
ccgctgcgctcctcctccctccttccgtcctccgcgccttccgtcggtcggtccttgcttcctgcttcgcctccgcgcctcgcgctatgggacacgagcgccccgatgcgccagcaccacctgaggatccacgaatccgtcccagctgatggaagaggatcaggagctggagaggaaagcaatagaagaactgcttaaggaggcaaaacgtgggaaaactagagctgaaacaatgggacccatgggttggatgaagtgtcctcttgctagcaccaataaaagatttctaattaacacaattaaaaacacattgccctctcataaagagcaagaccatgaacaaaaagagggcgataagggaaccagcccaagagccagggccccagaaagaagaaaacccgaagaaacacagaagcccatcctttacaagcacaagctttccggggctcgaggttcccgccagttactccccgcccacgaaagcggagcagccaggacaagtacgaaaagcggtccaaccggcggtgaggctggaacccagggccagccagccctgcgggccctcccgtgcctccttcgggggtgctggtgtcccggagaaggcctgagcctggccagggcaaaccacctgagagtgactttgaccattaggtcctttgttgtttttaaagaggctgctggccacaggcaaaaaaaaaatgacctagcaactcttgaggaaacaagtgcaaaggaggatgtcttggcaagtttaagcgtacttctgcagtgtagtagacttacatattgttgtttatcttgtttggaagtgtgtttcaaaataaacatgtctagaatttaaagttttcagaggttgtttaaaactggttccaattttttggtcatttctcagaaaaataaaatacttataaatcctatattttactttttgttggtattacttttaaaatttaaaaatcatcaggccagtgacgggtatttatgaaaagctgtagccctccaaggtctgggaatttatcgagaagctctttgatagctctgcatttgttttcccttaggtgaacaatgtaggaaatcgtgcaaagtggctttgaatttaatgctccacttcagttaccagaggttaaaaatgggttttgttgtttcctgtgcattctcaaactcatttattagatagaacaatctttctatatttaatttttttaatatataggtcttaagtgggtgctttaaaaaggaaccctcacaagttaaaaattaagggttgtttcagtgctagatcttgccagcttaaagacttgtgatacccacctatatagtatagttgttccagaaatcttcattttaaatagaagtgtttacaatgccttttttcccccagtattggttttcaatacctgttttcatatacaattacaaacctttcaaacctgtattccttctttatactcaggaaaatgtcaccaagcaccctcctccccagttcacaaaaggaagaagatggaagattctgtctccctgcttccccttcccccagttttccaaagtgtttggaggcatatgccgggctgttcctcaggttcatcaccatggccacatccctggttccctacttcctggcagccaagaaagggctnttcttggctgccaggaaaagcccttttctacatgcttagaggggaaatacatcccaaaaagttggcaattggagtgttagaaacctaggaatagaccctctccggcccaccgagctgcctgtgtcacgcccctcagccctgcctagggagtgacaaaccccaagtcattctttgatccaaacccttctcccaccccagatcccagttgactcatcctgtgactttgtaaccacacttcattcctttcaaacacagaggaggaattattgcttcatctgactttatttcaaatctagttatgtattgggcctaaattatttgtggcaaatttggaaatgttttttatttaaatattagaaatagcacaaagtcatggagtttttaaaaattgttataattaagtaaaaataaagctgaattgtgtcaaaaaaaaaaaaaaaaa

SEQ ID NO: 146929 - DNA, 382 bp, Homo sapiens
  misc_feature (1)...(382): n = a,t,c or g
tgaaangtgaantttccccaggtgaaggtccccaactccttccgggtcctcgggccgcacccanggggcctgctgtggcctgaaaacccgaatggaaacaaacgcaacctacgtgcgaatttagtgtctggaaaattctaaaagatctgcaagcatgacaggccccgtttctggatcattcatccactgggtgctgttcagtgggttctccagcatgtcttcaaatgctagcaatgttttcgggttggtcaggcccagctgcaccaccgggttatccaggatggccgcggattctgctggttgttgttcactctgagggcatctatcacctctttctcgtcgaaccccatctccatcagggaaantgnagcccgagcatcag

SEQ ID NO: 146930 - DNA, 1803 bp, Homo sapiens
  misc_feature (1)...(1803): n = a,t,c or g
ccgcctccccgcccgccttcccggtgaccttcaggggcccgggtggcgggcgcaggcccctgcggcggcggcgggatgttcgtgcaggaggagaagatcttcgcgggcaaggtgcgtgcggctgcacatctgcgcgtccgacggcgccgagtggctggaggaggccaccgaggacacctcggtggagaagctcaaggagcgctgcctcaagcactgtgctcatgggagcttaaaagatcccaaaagtataacccatcataaattaatccacgctgcctcagagagggtgctgagtgatgccaggaccatcctggaagagaacatccaggaccaagatgtcctattattgataaaaaaagcgtgctccattcaccacttcccaagatggctgatgtctcagcagaagaaaagaaaaaaacaagaccagaaagctccagataaagagggcatactggggggcaacggcaaacttgccctctaacaaattggaccgggccgcggtccagaccaacatgagagacttccagacagaactccggaagatactggtgtctctcatcgaggtggccgcagaagctgttagcgcttgaacccagatgcggtgggaattgtttaaggaaggcgaatgcaattgctgggacgaggacggagggatgagcgtgtgggacgaggcttgccctgcggccttccaacgggagatggggcttttccgggagaacagagccaccaaggcccttcagctgaaccacatgtcgggtgcctcaggccattggaagttggctaatttgaacacgccagaagacccgaccatagacacgcctctttcctgggccaagctcncccagaggcccaagggggccacagcagctgcctccgaggctgccgcgggagccagcgccaccgatgaggaggccagagatgagctgacggaaatcttcaagaagatccggaggaaaagggagtttcgggctgatgctcgggccgtcatttccctgatggagatggggttcgacgagaaagaggtgatagatgccctcagagtgaacaacaaccagcagaatgccgcgtgcgagtggctgctgggggaccggaagcccctctccggaggagctggacaagggcatcgaccccgacaggtcctcttctttcaggccatctgggatacccggtgggtgcagctgggcctgaccaacccgaaaacattgctagcatttgaagacatgctggagaacccactgaacagcacccagtggatgaatgatccagaaacgggggcctgtcatgctgcagatctctagaatcttccagacactaaatcgcacgtaggtggcgttgttccacttcggctattcaggccacagcagccccctaggtgcggccacgagaccgggcaggagtggaccttcacctggaaaactcaccttcagccgcctaagccccccggactgtttggaggtgcctgcagctgctccctgcctctctgatcctaattgccttaataaactttgggtgacgggtaagtgtgtaaaggcccgtatttttaagcatctggacaggtgttttacaaaaaagtggttgtcgcactgggaagtggagtgatggcctcgtctccagtgctcctcttgggctcttgagttgctgcttgaattgccgtgtagacatttgctttggagagtccacttgtatttggacggaggtaggtttcaacccagagtttaatgtcaagcatgcttaatttaactagtcaactcacagatgaaatttctctcaataaagtcccttttcctaaaaaaaaaaaaaaaa

SEQ ID NO: 146931 - DNA, 424 bp, Homo sapiens
  misc_feature (1)...(424): n = a,t,c or g
ccgacttctggagagagatgatgcgggcgagctggttggtgagacaggacagccggcaccagcgaatcagacttccacatttggaagcaattgtgagtgggcgtggcccatagaccaagatcactgataagaaatgttctcgacagcaaggtaggagccaatcccaccagcattgactcagtcgtaattgggaaggaccaagaggtgaagctgcagcctggccaggttctccacatggcgaatgaactttatccatatattgtatagttcgaggaagaggcaaagaaccctggcctggaaacacacaggaagagaaagagatcacgcaacagcgattctatagaaagggatgctgctcatgaagctgaggctgggacagggctggaacctgggagcaactctggccaatgctctgtgcccctan

SEQ ID NO: 146932 - DNA, 2132 bp, Homo sapiens
acatgagtacccgttcggatttcgcggaccgacccacgcgtccgccgacttctggaggtaaggcggtcgtcagcctatctcttctgctggctgggctcaatgccgcggagtgatgatgcggctgtgctggttggtgagacaggacagccggcaccagcgaatcaaacttccacatttggaagcagttgtgattgggcgtggcccagaaaccaagatctctgataaaaaatgttctcgacacgcaagtacagttgaaagcagagtgtaacaagggatatgtcaaggtaaagcaggtaggagtcaatcccaccagcattgactcagtcgtaattgggaaggaccaagaggtgaagctgcagcctggccaggttctccacatggtgaatgaactttatccatatattgttaggagttttgaggaaggaggccaaagaaccctgggcctgggaaacacacagggaaggaggaaagagttccaggcaccagtgattctatagaaagggatgctgcttcaggaagctgaggctggggacagggctggaacctgggagcaactctggccaatgctctgtgcccctaaagaagggaaaagatgcacctattcaaaaaggattccctggggccattggagtcaaggcttgaagatttctatgcaggaccccaaaatgcaggtttacaaagatggagcaggttggttgtgataaaggataaatacccaaaggcccgttaccattggctggtcttaccgtggacctccatttccagtctgaaggctgtggccaggggaacaccttgaactccttaagcatatgcacactttcggggaaaaggtgattgttagattttgctgggtccagcaaactccgttttccgattgggctaccacgcccattccggagtatgagcccatgtacatctttcatgtggatcagcccaggaattttgaattctcctttgcccttaaaaacaaaaaaacattggaattctttcaatacagaatactttcctagaatcacaagctgtgaatcgaagatggtacaagaggctggtaagaagtaactgtcccgaagatgggatgccctgagctccttgaagctgcccccttcgttgtcatgagtgcccagcagctgctgccttcccattcctcagctgaaagaacatcttcagggaaggcactgggacacagtgattctggcagagcctggagcttgctgctgtgggtgtgggcccactgggaggcaaactgctgggccacctattctggggttgcttgcgaacttctactgatttcctaaattacggcatgcagctttttcacaaatttattctattattgagtggccacaatgtagagtggctcaaagtacttcaggattaggaatttgggtttgtcatagatgtattctctggtgagggtggctgggatatacctgacccaaccatccttcagaaggacccatgtcagggtctgaccattgggagcaaagccatggtcacacctggacctaatgcagaagtatgggaagcattggggctggttatacatttctgtttcttaggatttatcctccgcctctgtagggcatgggacaaccttttaatcaggaggcatctaggagtggcctcttgttttatccctgaaggatacttgatggggtcttggtttttctggttagtctgttttgtaatattcttttcccttccttccatggggaggccttagtttgtcccagtcccttcccatgcccttctatcccagattaccctaaatgttccccttcctcaggaattcctgtcctcatcagttccttcacagtgagaaaagaggcctagatgatggtgtggggggttgggagttttccttcctaatacccgagggttccctggctgtgaggaaacagcccacatgttcgtcatgattgagctgtgaagtccttcttggacctgttgtctgaaaataaagttaatttgtttgaggcatctctcttaagtaggtggaaactattgaagttcagcttacaatcacagcataggttctgatgcatggaaaaggtggttggtgaatgaaaaagttgcgtagagccactactttctttttccctgagaataaatttggataaagcaaaaaaaaa

SEQ ID NO: 146933 - DNA, 418 bp, Homo sapiens
  misc_feature (1)...(418): n = a,t,c or g
ggccacgagcaaggaccgagacgtttgctaggccgcccttccccactgttaccaaacatgaaantgctcgccagcaaactgtgctactcctgaccatctgcagccttgaagtantttccagaccgtgactgactatggcaaggacctgttggagaagntcaagagcccagagcttcagccgaggccaagtcttactttgaaaagtcaaaggagcagctgacacccctgatcaagaaggctggaacggaactggttaacttcttgagctatttcgtggaacttggaacacagcctgccacccagtgaagtgtccagaccattgtcttccaaccccagctggcctctagaacacccactggccagtcctagagctcctgtccctacccactctttgctacaataaatgctgaatgaatcc

SEQ ID NO: 146934 - DNA, 717 bp, Homo sapiens
gtaacatagatgtcgactgactgacacccagggcagagacgctggctaggccgccctcccccactgttacccaaacatgaaaactgctccgcaagcaaactgtgcctactccctcacccatctgcaagcccttgaaaggaagctttgggttcgggaagacaaggcaaaagggagcccatgtgtggaagagcccctggtttcctcagtaccttcccagaccgtgactgacctatggcaaggaccctgatggagaaggtcaaagagccccagagctttcaggccgaggcccaagtcttactttgaaaagtcaaaggagcagctgacacccctgatcaagaaggctggaacggaactggttaacttcttgagctatttcgtggaacttggaacgacagcctgccacccagtggaagtgtccagaccattgtcttccaaccccagctggcctctaggaacacccactgggccagtcctagagctcctcctttgaaaagtcaaaggagcagctgacacccctgatcaagaaggctggaacggaactggttaacttcttgagctatttcgtggaacttggaacacagcctgccacccagtgaagtgtccagaccattgtcttccaaccccagctggcctctagaacacccactggccagtcctagagctcctgtccctacccactctttgctacaataaatgctgaatgaatccaaaaaaaaa

SEQ ID NO: 146935 - DNA, 1466 bp, Homo sapiens
  misc_feature (1)...(1466): n = a,t,c or g
ctgctgtctgccctctctggtcaccctgcctagctagaggatctgagactactcaccccataacctcaaaaacctcttcatgaggatggtaagtcacctgaatcctgaagtgaattactcgctattccattggaactcatataggacaccagaatctagacctccagagaacagcaggacccatcttcagaaaataagaagcatttgttccctgagcctgttgaatcaaagtgcaatttctattctttttggaatgttaaaaagtgaccccagccatgaggaccctcgccatccttgctgccattctcctggtggccctgcaggcccaggctgagccactccaggcaagagctgatgaggttgctgcagccccggagcagattgcagcggacatcccagaagtggttgattcctttgcatgggatgaaagagctcctcttcaggtttcagggaagtcctctcctgtttgtgcacggctgctcttgctacaggagacccgggacagaggactgctgtttgccctccctcttcactctgcctaccttgaggatctgctcaggcagagccacttcaggcaagagctgatgaagctgcagcccaggagcagcctggagcagatgatcaggaaatggctcatgcctttacatggcatgaaagtgccgctcttccgctttcagcctgataaaatcattgtcctctccaccctgattcctacaggagactactcaccccataacctcaaaaacctcttcatgaggatggtgacccccagcccatgaggaccctcgccactccttgctgccaattctcccctggtgggccctgcaggccccaggcttgagccgcgtccccaggaaagagctgatgagcgttgctgcagcccccggagcagattgcagcgggacatccccagaagtgggttgtttccccttgcatgggaccaaaagcttggctcccaaagcatcccaggctcaagggaaaaccatggactgctattgcagaaataccagcgtgcattgcagggagaacgttcgctatgggaacctgcattttaccaggggaagactttgggcattcctgctgctgagcttgcagaaaaagaaaaatgagctccaaatttgactttgagagctacagggaattgcctattactcctgtaccttcttgttaaatttcctttcctaatctcaaataaatgccttgttacaagnnnnnnnnnnnnnnnnnnggtcaacccggccgcaatttccaaatttataaatggaaaatcctgaaaacccccggagggtccttttaagggggcattgggccccatttaaatttttttaatttaaaacacggttgggcctttttttagggaccaaacccccttaaagtcaattttgggcagggaccctcggtttaaaaatttttaagggccaaaataggcgccattttttttggcccaaaattttaggaaaaaaata

SEQ ID NO: 146936 - DNA, 463 bp, Homo sapiens
gcggccgcggcgggccagcggcggagccgtgtagcggagaagctccccctccctgcttcccttggccgagccgggggcgcgcgcgcacgcggccgtccagagcgggctccccacccctcgactcctgcgacccgcaccgcacccccacccgggcccggaggatgatgaagctcaagtcgaaccagacccgcacctacgacggcgacggctacaagaagcaggcatcatattttgaaacattgaggcaaggctactcagccaacaatggcaccccagtcgtggccaccacatactcggtttctgctcagagctcgatgtcaggcatcagatgactgaagacttcctgtaagagaaatggaaattggaaactagactgaagtgcaaatcttccctctcaccctggctctttccacttctcacaggcctcctctttcaaataaggcatggtgggcagcaaagaaag

SEQ ID NO: 146937 - DNA, 1309 bp, Homo sapiens
gcggccgcggcgggccagcggcggagccgtgtagcggagaagctccccctccctgcttcccttggccgagcgcgggggcgcgcgcgcacgcggccgtccagagcgggctccccacccctcgactcctgcgacccgcaccgcacccccaccctgggcccggaggatgatgaagctcaagtcgaaccagacccgcacctacgacggcgacggctacaagaagcgggccgcatgcctgtgtttccgcagcgagagcgaggagggaggtgctactcgtgagcaagtagtcgcccatccagacagatggattgtcccctggaaggaaggcatggaagcccgaaggaaggaagccaagtgtggcaagcaagttcgtgaagtctgtgaaggaaggcttggagtaaaagggacatttgggaagattagttggaattttttgagaaccaggagaggaagcacaaggacgtatgtctaatgtgctcattgtcactgaaagtgctggaagactgggaagattcagttaacattggaaggaagagggaatggtttaaaatagaagacgccataaaagtgctgcagtatcacaaacccgtgcaggcatcatattttgaaacattgaggcaaggctactcagccaacaatggcacccccagtcgtgggccaccacatactcggtttctggcttcagagcttcgatgttcagggcattcagatggacttgaaggactttcctgttaaggaggaaatgggaaattgggaaaactagactgaagtgcaaaatcttccctctcaccctggctcttttccacttctcacaggcctcctctttcaaataaggcatggtgggcagcaaagaaagggtgtaattgaaaaatgttgcctgtttgggtgttaaagtgaatggggctttttccttcctgtttttattgagggtgggggttgggtgtgtaatttgtaagtacttttgtgcatgatctgtccctccctcttcccacccctgcagtcctctgaagagaggccaacagccttccccctgcccttgggattccgaagtggttcctggtttgtccctaatccctggcgccctggcaaaaccggttttcctttggatttttaattttttttttttattaaaagataccagtatgaggatgaaaacttcccaataatttgtcctataatgtgctgtacagttcagtagagtggttcactttcactgcagtataacaattgatctacacattatatatcggacatataatatgtaaataaatgacttctagaaagagaaatttgtttaatttttcaaggtttt

SEQ ID NO: 146938 - DNA, 446 bp, Homo sapiens
gcaccatatcatttgtgcagtataaagaagccctaaaaaccctgggtctatgcactgaagatgaagatttacaagatgatggacataaaataactttggataaattcaaggaggaagtatgtatacatccagcttctctacaagcatttgccagaaaattttaaataaggagaaacaaagctgctgctccaactgaagtaaatggtctcgtaacgtcagcagcaacggcaagccgaactggacagggacatcactgcctgctctgactgagatggcaaggacaaccatctggaaaaaacacatttttaccaaaaaattttcatcagtttctatttttcaagtttttaaatcattttaaatttgaggaagtgttctgtcctagggcattttggataagaaaaaatatacagcctaacattaaaagctctatcagaaaataaaaaaaa

SEQ ID NO: 146939 - DNA, 826 bp, Homo sapiens
  misc_feature (1)...(826): n = a,t,c or g
gccntaagcctggatcgcggacagtgacgttggtccacacctcacctgccctctctgccctgctacatgccccaggcttgccctgaaccgtgagctctagaaattccaggtccgggtcgcagccacagggcagtcaggcgtgtcacgtgaccgcgccgggtagagggagacagagtcgcacggctgagacgccaggcagtcgcctagcaacagcgggacgcggagcgatggagaccagcagcagggagctccaagccgcggagtatttggaaaagcatcagatcaaggaggtggttagctacctcaccagcgccctccttttccttcggccggccctaaaaaccctgggtctatgcactgaagatgaagatttacaagatgatggacataaaataactttggataaattcaaggaggaagtgaacaagaggatgaaggaaatatggtcagcattttaataacaccataaatccaagataataaatgtatacatccagcttctctacaagcatttgccagaaaattttaaataaggagaaacaaagctgctgctccaactgaagtaaatggtctcgtaacgtcagcagcaacgggcaagccgaactggacagggacatcactgcctgctctgactgagatggcaaggacaaccatctggaaaaaacacatttttaccaaaaaattttcatcagtttctatttttcaagtttttaaatcattttaaatttgaggaagtgttctgtcctagggcattttggataagaaaaaatatacagcctaacattaaaagctctatcagaaaaaaaaaaaaaaaaaaaaaaagatt

SEQ ID NO: 146940 - DNA, 2674 bp, Homo sapiens
  misc_feature (1)...(2674): n = a,t,c or g
ttggaagtaaacaagtcagtgaaggtacagataatggtgatctcccttcttatgtgtctgcattcatagaaaaggaagttggaaatgaccttaaatctttaaagaaacttgataaactcatagaacagaggacagtaagtaaaatgcagttagaagaacaggtacttacaatttcatcagaaattcctaaaagaattcgaagtgccttaaaaaatgcagaagaatcaaagcaatttcttaatcagtttctggagcaggaaactcatctcttcagcgccattaacagccatttgctgactgcgcaaccttggatggacgatcttggaaccatgattagccagattgaagagatcgaacgtcatcttgcttaccttaaatggatttcacaaattgaagaactaagtgataacattcagcaatatctgatgaccaataatgtaccggaggcagcctccactctagtgtctatggcagaacttgacattaaacttcaggaatcatcttgtactcatcttcttggtttcatgagagccacagttaaattctggcataaaattctcaaggacaagcttacaagtgattttgaggaaattttagcacagcttcattggccattcatcgcaccccctcaatcacaaactgttggcttaagtcgacctgccagcgccccggagatatacagttacctggagacactgttttgtcagcttttgaaactacaaacctcacatgaattacttactgagccaaagcaactcccagaaaaatactctcttcctgcctccccttctgtcattctgcccatccaggttatgctgactcctcttcagaagaggttcaggtatcacttcagagggaaccggcagactaatgtgttaagcaagccagaatggtacttggctcaagtacttatgtggattggaaaccatactgaatttctggatgagaagattcagccaatattagacaaagtaggctctttggtaaacgcaaggcttgaattttctcggggccttatgatgctggttcttgagaagttagccactgatattccttggctgctatatgatgacaatctcttctgtcatttggtggatgaagtactcttgtttgaaagggagctacacagtgttcatggctatcctggcacttttgctagttgtatgcatattctatcagaggaaacctgttttcagagatggttgacggtggagagaaaatttgctcttcaaaaaaatggactcaatgctttcctcagaagctgcctgggtatcgcaatataaggatatcactgacgtggatgaaatgaaagttccagattgtgcagaaacttttatgactctactcttggttataactgacaggtataaaaatcttcccacagcttcccgaaagcttcagttcctggagttacagaaggacttagtagatgattttaggatactgattaacacaaagtgatgaaagaagagactagagcttcccttggctttcgatactgtgcaattcttaatgctgtgaactacatctcaacagtacgagccagattgggctgacaatgttttctttctacaacttcaacacggctgcactggaggtgtttgcacgagaataatactctgagtaaattgcagctaggacagctagcctctatggagagctctgtctttgatgacatgattaacctctttagaacgtttaaagcatgatatgttgacccgtcaagtagaccacgtttttagagaagttaaagatgctgcaaaattgtataaaaaagaaagatggttgtccttgccatctcagtcagagcaggcagtgatgtccctgtccagttcggcttgcccgtatgctgctgacgttacgagaccatttacttcagttggagcagcagctttgtttctccttatttaaaattttctggcaaatgcttgtagagaagctggatgtatacatctaccaagaaataattcttgctaatcacttcaatgaaggaggagcagcccagctgcagtttgatatgactcggaatcttttccctttggtttctcactattgcaagagaccagaaaattattttaaacatataaaagaagcctgtattgttttgaatttgaacgtcggttctgcacttactgctggaaaggatgtactgccagtccagcttcagggcagcttccctgccaccngccggccattaaatgaagttggaattttaccaaactggcctccaaccaggatgttgagattctacttaatttgaggaccaaattggcctaatactggaaaataatgtctttcagaaaaaggtttctttggtttttgtttctaagaaagaggaagccaattggatttcaagttatatgatgaaattctgaattaatgaaactggaaaaactttatagaattacttattatcttggatttatggtgttattaaaatgctgaccatatttccttcatcctcttgttcctaaggaaacaaaaacagaaaacgaaacgaatgaaaactcgaattctatttacaagtataaatgctgagtattgtctgttgaagacaagagcagagactcttacaattctaaccaactttcaatttcctgtgctaattaagggaaattctgttgtggataatcaaacatagccaataaatttttttaaaactcccaaaaaaaaa

SEQ ID NO: 146941 - DNA, 479 bp, Homo sapiens
cactttggttccagcatcctggtccagcaaagaagccaatcagcccaaaatgatacctggaggcttatcaagaggccaaacccgccactccagaaatcccaggagattgttgataaggttaaaccacagcttgaagaaaaaaacaaatgagacttatggaaaattggaagctgtgcagtataaaactcaagttgttgctggaacaaattactacgattaaggtacgagcaggtgataataaatatatgcacttgaaagtattcaaaaagtcttcccggacaaaatgaggacttggtacttactggataccaggttgacaaaaacaagggatgacgagctgaccgggcttttagcagcatgtacccaaagtgttctgatttccttcaactggctactggagtcatgatcctttgctgataaatataaccatcaataaagaagcattcttttccaaagaaaaaaaaaaaaaaaaagtaaac

SEQ ID NO: 146942 - DNA, 1149 bp, Homo sapiens
  misc_feature (1)...(1149): n = a,t,c or g
atggggtttcaccatgttggccaggctggtcttgaactcctgancctcaggaaaatgtttataggaggccttagctgggacactacaaagaaagatcggaaggactacttttccaaatttggtgaagttgtagactgcactctgaagttagatcctatcacagggcgatcaaggggttttggctttgtgctatttaaagaatcggagagtgtagataaggtcatggatcaaaaagaacataaattgaatgggaaggtgattgatcctaaaagggccaaagccatgaaaacaaaagagccggttaaaaaaatttttgttggtggcctttctccagatacacctgaagagaaaataagggagtactttggtggttttggtgaggtggaatccatagagctccccatggacaacaagaccaataagaggcgtgggttctgctttattacctttaaggaagaagaaccagtgaagaagataatggaaaagaaataccacaatgttggtcttagtaaatgtgaaataaaagtagccatgtcgaaggaacaatatcagcaacagcaacagtggggatctagaggaggatttgcaggaagagctcgtggaagaggtggtggccccagtcaaaactggaaccagggatatagtaactattggaatcaaggctatggcaactatggatataacagccaaggttacggtggttatggaggatatgactacactggttacaacaactactatggatatggtgattatagcacgggaacttcattgcaggccctgtgtcgcgctgacttcacgattctcacaggcccgctcaatgcggacagggtacgagatgctcacgctctcgaatgctgccgtttgttgagaatacagtgtgggtgtggaacacctgtccaggtgccagttcatgctgacagttttgaaaggaggacaggcaaggtgcacatttttgagaatgtgttgctaagggccactaaatccaaccttcctcggtcctccttgtggtctaggaggaaaactggtgcttctgctgctgtgtcgactcaaggagaagtcctgagaatagcctggaagcctaaggctgtagaacttattgtcgttcctcaggccacttacaccttaaccaaatatgaagaaaattga

SEQ ID NO: 146943 - DNA, 391 bp, Homo sapiens
  misc_feature (1)...(391): n = a,t,c or g
cggcacgagggaggatatgactacactggttacaacaactactatggatatggtgattatagcaaccagcagagtggttatgggaaggtatccaggcgaggtggtcatcaaaatagctacaaaccatactaaattattccatttgcaacttatccccaacagcgggaacttcattgcaggccctgtgtcgcgctgacttcacgattctcacaggcccgctcaatgcggacagggtacgagatgctcacgctctcgaatgctgccgtttggtggtgaagcagtattttccaatttgaagattcatttgaaggtggctcctgccacctgctaatagcagttcaaactaaattttttatcaagtccctgaatggaagtatgacgttgggtcccn

SEQ ID NO: 146944 - DNA, 1721 bp, Homo sapiens
  misc_feature (1)...(1721): n = a,t,c or g
gaggcgagagcggccgccgctggtgcttattcttttttagtgcagcgggagagagcgggagtgtgcgccgcgcgagagtgggaggcgaagggggcaggccagggagaggcgcaggagcctttgcagccacgcgcgcgccttccctgtcttgtgtgcttcgcgaggtagagcgggcgcgcggcagcgcggggattactttgctgctagtttcggttcgcggcaggcgggtgtagtctcggcggcagcggcggagacactagcactatgtcggaggagcagttcggcggggacggggcggcggcagcggcaacggcggcggtaggcggctcggcgggcgagcaggagggagccatggtggcggcgacacagggggcagcggcggcggcgggaagcggagccgggaccgggggcggaaccgcgtctggaggcaccgaagggggcagcgccgagtcggagggggcgaagattgacgccagtaagaacgaggaggatgaaggccattcaaactcctccccacgacactctgaagcagcgacggcacagcgggaagaatggaaaatgtttataggaggccttagctgggacactacaaagaaagatctgaaggactacttttccaaatttggtgaagttgtagactgcactctgaagttagatcctatcacagggcgatcaaggggttttggctttgtgctatttaaagaatcggagagtgtagataaggtcatggatcaaaaagaacataaattgaatgggaaggtgattgatcctaaaagggccaaagccatgaaaacaaaagagccggttaaaaaaatttttgttggtggcctttctccagatacacctgaagagaaaataagggagtactttggtggttttggtgaggtggaatccatagagctccccatggacaacaagaccaataagaggcgtgggttctgctttattacctttaaggaagaagaaccagtgaagaagataatggaaaagaaataccacaatgttggtcttagtaaatgtgaaataaaagtagccatgtcgaaggaacaatatcagcaacagcaacagtggggatctagaggaggatttgcaggaagagctcgtggaagaggtggtggccccagtcaaaactggaaccagggatatagtaactattggaatcaaggctatggcaactatggatatagcagcccaaggttacggtggttatggaggatatgactacactggttaccaacaactacgtatggatatggtgattatagcaaccanccagagtggttatgggaaggtatcccaggcgaggtggtcatcaaaaatagctacaaaccccatactaaattattcccatttgcaacttattccccaacaggtggtgaagcagtattttccgaatttgaagattcaatttgaaagtggctcctgcactagctgctaatagcagttcaaactaaattttttgtatcaagtccctgaatggaagtatgaccgttgggtccctctgaagtttaattctgagtttttcttaaaaagaaattggccttcattggttttaattctaaattgccatgcttcagaatcaatttgtgttttatgccctttcccccagtattgtagagcaagtcttgtgttaaaagcccagtgtgacagtgtcatgatgtagtagtgtcttactggttttttaataaatccttttgtataaaacaaaaaaaaaaaaaaag

SEQ ID NO: 146945 - DNA, 1659 bp, Homo sapiens
gaggcgagagcggccgccgctggtgcttattcttttttagtgcagcgggagagagcgggagtgtgcgccgcgcgagagtgggaggcgaagggggcaggccagggagaggcgcaggagcctttgcagccacgcgcgcgccttccctgtcttgtgtgcttcgcgaggtagagcgggcgcgcggcagcgcggggattactttgctgctagtttcggttcgcggcaggcgggtgtagtctcggcggcagcggcggagacactagcactatgtcggaggagcagttcggcggggacggggcggcggcagcggcaacggcggcggtaggcggctcggcgggcgagcaggagggagccatggtggcggcgacacagggggcagcggcggcggcgggaagcggagccgggaccgggggcggaaccgcgtctggaggcaccgaagggggcagcgccgagtcggagggggcgaagattgacgccagtaagaacgaggaggatgaaggccattcaaactcctccccacgacactctgaagcagcgacggcacagcgggaagaatggaaaatgtttataggaggccttagctgggacactacaaagaaagatctgaaggactacttttccaaatttggtgaagttgtagactgcactctgaagttagatcctatcacagggcgatcaaggggttttggctttgtgctatttaaagaatcggagagtgtagataaggtcatggatcaaaaagaacataaattgaatgggaaggtgattgatcctaaaagggccaaagccatgaaaacaaaagagccggttaaaaaaatttttgttggtggcctttctccagatacacctgaagagaaaataagggagtactttggtggttttggtgagtgggatcccatagagctcccccatggacaaacaagaccaaataagaggcgtgggttctgctttattaccttttaaggaagaagaaccagtgaagaagataatggaaaagaaataccacaatgttggtcttagtaaatgtgaattaaaaggtagcccatgtcgaaggaacaatatcagcaaccagccaacagtgggattctagaggaggatgtgcaggaagagcctcgtggaagaggtggtgaccaggcagagtggttatgggaaaggtatccaggcgaggtgggccatcaaaaatagctacaaaccatatctaaattattccatttgcaacttatccccaacagcgggaacttcattgcaggccctgtgtcgcgctgacttcagattctcacaggcccgctcaatgcggacagggtaacgagatgctccacgctctcgaatgctgccgtttggtggtgaagcagtattttcccaatttgaagattcatttgaaggtggctcctgccacctgctaatagcagttcaaactaaattttttgtatcaagtccctgaatggaagtatgacgttgggtccctctgaagtttaattctgagttctcattaaaagaaatttgctttcattgttttatttcttaattgctatgcttcagaatcaatttgtgtgttatgccctttcccccagtattgtagagcaagtcttgtgttaaaagcccagtgtgacagtgtcatgatgtagtagtgtcttactggttttttaataaatccttttgtat

SEQ ID NO: 146946 - DNA, 1951 bp, Homo sapiens
  misc_feature (1)...(1951): n = a,t,c or g
aaaacaatgcttaatttaagagtttcacagcacccagaagtgcttaccatattataacatagtgactttcaaagatatgtaacacaggtgctcttaagcttttgcctttttgtcctattattaacaagtcagtaaagttaacaggtaaagtactgctaatgggtacaaattaaggaattgcagcaaaaaagtattgcctactaactctgacattataccttgtttgtacccgccagcgggaacttcattgcaggccctgtgtcgcgctgacttcacgattctcacaggcccgctcaatgcggacaagggtaccgaagaatgctcacgctcctccgaatgctgccgtttggtatggtctcttccaacatcctgtatcagcattataaaataaaatgggtactttcaagctcttgcctttcactttatttctttgctttttaaaaactatttgtaatgtaattttgaatgcatttttttacagggcccagtaatgggttaaatacggtcagcttactgaataattttaactatttattcttctaaggatacagcttgtctctggattttccagtcttaattttaatacttttattaatctattttaatgcttgcttttcccattttatagacgttgtaagcagtaattgcaagaagttcttggagctgaattcctgttgtgacaacttcctataattacagtagataactttttcttttagtcgtatataacttttctataacttgtgatggacaagagatatgcttatccaataaaataagcttaaatattagatgctcttgggtcaaaatgtccttttaccaaattgacctttttatgagttctttgggtaaatactttaaagctttttatattttaaagaatacttgtaaaagcatatcacatcttaaaccagtggtgcacatgtggatttacagctcatggactctactgttcagctttaatttataaaacatatcacacatttaatgttatacagtatttacatatagtgggacataggggataactcagttttatgtaaaatttttgttaagtgttgtaggccngccccagagggacttccaattttttcttctttggcctccaggtggtgaagccagtattttccaatttgaaggattccatttgaaaggggctcctgccacctgctaatagcagttcaaactaaattttttgtatcaagtccctgaatggaagtatgacgttgggtccctctgaagtttaattctgagttctcattaaaagaaatttgctttcattgttttatttcttaattgctatgcttcagaatcaatttgtgttttatgccctttcccccagtattgtagagcaagtcttgtgttaaaagcccagtgtgacagtgtcatgatgtagtagtgtcttactggtttttttaataaatccttttgtataaaaatgtattggctcttttatcatcagaataggaaaaattgtcatggattcaagttattaaaagcataagtttggaagacaggcttgccgaaattgaggaccatgattaaaattgccagtgaagtttgaaatgtttttagccaaaatcctaatttttgcccataatgtgtcctccctgtccaaattgggaatgacttaatgtcaatttgtttgttggttgttttaataatacttccttatgtagccattaagatttatatgaatattttcccaaatgcccagtttttgcttaatatgtattgtgctttttagaacaaatctggataaatgtgcaaaagtacccctttgcacagatagttaatgttttatgcttccattaaataaaaaggacttaaaatctgttaattataatagaaatgcggctagttcagagagatttttagagctgtggtggacttcatagatgaattcaagtgttgagggaggattaaagaaatatataccgtgaaaaaaaaa

SEQ ID NO: 146947 - DNA, 307 bp, Homo sapiens
gcagcttcccgggcagacactctctccctcaggaagaggtgccgccgagtcaagcgcggggcagtgtgagcgccccgaggtgctttctcagttgaggagaggtggggttacagggcacaggtgacagggccggagaaagatggagcagcccggggcggcggcgtcgggagcgggaggcggcagcgaggaacccggtgggggccggagcaacaagcggagcgcggggaaccgggccgccaatgaagaggaaacgaaaaacaaacccaaattgcgtgaccgaattacaagttttagaaaatctactgtc

SEQ ID NO: 146948 - DNA, 4606 bp, Homo sapiens
  misc_feature (1)...(4606): n = a,t,c or g
gcggggcactttgaagaatcacgtgtgttgaggccctcttaaagagataggcacctacttttccctccaccctaaacaccgccctgagggcggcggcgaccgtggtaattgcaactgctcaggggcagggcttgccccagcgccgagtagtggcaacggcgtggttgcgtcgggggtgcctgggagcctggagtcccgggggcctgaaatcggcagcttcccgggcagacactctctccctcaggaagaggtgccgccgagtcagcgcggggcagtgtgagcgccccgaggtgctttctcagttgaggagaggtggggttacagggcacaggtgacagggccggagaaagatggagcagcccggggcggcggcgtcgggagcgggaggcggcagcgaggaacccggtgggggccggagcaacaagcggagcgcggggaaccgggccgccaatgaagaggaaacgaaaaacaaacccaaattgaacattcaaataaaaactttggcagatgatgtgcgtgaccgaattacaagttttagaaaatctactgtcaaaaaagaaaaacctcttattcaacatcctattgattctcaagtcgcgatgagtgagtttcctgcagctcagccattatatgatgaacgatctttgaatttgtcagaaaaggaagtattggatctctttgaaaaaatgatggaggacatgaaccttaacgaagagaaaaaagctcctttacgaaacaaagactttaccaccaaacgtgagatggttgtccagtatatttctgccactgccaaatctatagttggaagtaaagttacgggtgggctgaaaaacagcaaacatgaatgcaccctgtcttcacaagaatatgttcatgaattacgatcgggtatatcagatgagaaaccttcttaattgcctagaatccctcagggtttctttaaccagcaatccggtcagctgggttaacaactttggccatgaaggtcttggactcttattggatgagctggaaaagcttctggacaaaaaacagcaagaaaatattgacaagaagaatcagtataaacttattcaatgcctcaaagcatttatgaataataagtttggattacaaaggattctaggagatgaaagaagtcttttactattggcaagagcaattgaccccaaacaacccaacatgatgactgaaatagtaaaaatactttctgctatttgcattgttggagaagagaacattctagataaacttttaggggctataacaacagcagcagaaagaaataacagggaacgattttcaccaattgtggaaggtttagaaaatcaggaagccttgcaattacaggtggcctgcatgcagtttataaatgcccttgtcacttctccttatgagcttgattttcgaatacatttaaggaatgaattcctccgttcaggactaaaaacaatgttaccagatctaaaagaaaaagagaatgatgagcttgatattcagttgaaagtatttgatgaaaacaaagaagatgacctaactgaattatcacaccgtctcaatgacattcgagcagaaatggatgatatgaatgaagtctaccatcttctatataatatgctgaaggacactgctgctgaaaattacttcttatctattctacaacattttttgcttatcagaaatgattattatatcaggccacaatattataaaataattgaggaatgtgtttcacagatagtgctacactgcagtggtatggatccagacttcaaatacaggcaaagattagacatcgatttaactcatctgatagattcttgtgtgaacaaggcgaaagttgaagaaagtgaacaaaaagctgcagagttttcaaagaagttcgatgaagaattcacagctcgacaggaagctcaagcagagcttcaaaaaagagatgagaaaatcaaagaacttgaagcagaaatccagcaacttcgaacccaggcacaagtactctcaagttcatcaggaattccaggtcctcctgcagcacctccattgccaggtgtagggccgcctccaccaccacccgcgccacctctacccggaggagctcctcttcctcctccaccacctcctttacctggaatgatggggataccaccaccacccccaccaccacttttatttgggggacctcctccaccaccaccccttggaggagttcctcctcccccaggaatatcacttaatctaccttatggaatgaagcagaaaaaaatgtataatacctgaagtgtccatgaagagaatcaattggccaaagattgaacccccagaattatctgagaactgtttctggttaagagtcaaagaagacaagtttgagaatccagatctctttgccaaattggcattgaattttgctactcagataaaagttcaaaagaacgcagaagcattagaagaaaagaagactgggcctacaaagaagaaagtgaaagaactgagaattttggatcccaaaacagctcagaatctgtccatctttctgggatcatatcgcatgccatatgaagacataagaaacgttattctggaggttaatgaagacatgctgagtgaggctttaattcagaaccttgtgaaacatcttcctgagcagaagatactcaacgaattagcagagcttaagaatgaatatgatgacctctgtgagcctgaacaatttggagttgtgatgagctctgtgaaaatgttacagcctcgtctcagtagtatcctgttcaagctcacatttgaagaacacataaacaacatcaaaccaagcatcatagcagtaactcttgcctgtgaagaactgaagaaaagtgaaagctttaacagacttttagagttagttcttcttgttggaaactacatgaactcaggctcaagaaatgcccagtctttgggatttaagatcaacttcctttgtaagatcagagatactaaatcagcggatcaaaaaacaacccttttgcattttattgccgacatttgtgaggaaaaatatcgagatatcctaaaatttcctgaagaactggaacacgtagaaagtgccngccaaagtttcagctcaaattctcaagagcagctcttgcatcagtggaacatcagattgttcatctggaacgtgacctcatgagattcccccacgcagaaaatcaacacgatacgtttgtggaaaagatgaccagctttactaagactgtccgagaacagtatgaaaaactctccaccatgcacaacaacatgatgaagctctatgagaatcttggagaatacttcatttttgactcaaagacagtgagcatagaagagttctttggtgatctcaacaacttccgaacttcgttttctggaagcagtgagagaaaacaataagagaagagaaatggaagagaagaccaggagggcaaaacttgcaaaagagaaagctgaacaagaaaagttagaacgccagaagaaaaagaaacaactcattgatataaacaaagagggtgatgagactggtgtgatggataatcttctagaagccctacaatcaggtgcagcattcagagaccgtcgaaagcggattccaaggaatccagataacagacgagtacctttggaaaggtcacgctctcgccacaatggagctatctcatctaagtgattcctgatgccaaagaatatgaaaatatttaagtaaaaacaaaatgatgcattttgagaaggaacaaagtgtgcactcagcggctggaaaggaaataagtgcatttctgcaaagatcaagataagctggatgaagtagtgtgcatttgtaatactattgcaagactcctcccacaattattctaatctgaacacagttatcaggattacaaaatgtgttccattttagtgtaaagatgtgtatcatttgtaattgtgtgtgacctgactgtgatgatggaagtgtaagaaattgaagagttctaaggctttcaaaaacactcagtccaaaaatttaaaatcttaaatgtgtaagtcaccccccccaaaaacaaaagagaagaaaaagaatagaaagaattatccagtgtcagcttccaatccctagtacatatataatagaaaagggccaagaaaaatatgcatcttgatttggagagaggctaatattatgcacactgtaagagaagccattttggaaattcacgaaagtactgctccaccccagttgagttatttaggaattttatctcaagtgaaagctgatgggattcatctgctttggctggaaattaaacttattcattagtctaggctaggcatttcaggcatggatattggcaaggcactttcttcattggctaaaaaataaataaacccaagttttaacccgattcagttagggaaagtgatttaaactttatttaaagaggtattttctaattatgcacagatatctactttatacaaatactttatatggctatttttgagaaaaccctcacattttaatgtttatgctaggggatgaacctggaaaattctattacgtttatttaggatttcaaagggcaaatattgattccctatggctctgtgggttatt

SEQ ID NO: 146949 - DNA, 611 bp, Homo sapiens; identical to SEQ ID NO: 145358

SEQ ID NO: 146950 - DNA, 662 bp, Homo sapiens
aggcctagaattcggcacgagccacagactcagagagaacccaccatggtgcttgtctcctgcccgacaagaccaacgtcaaggccggcttggggtaaggtcggcgcgcacgctggcgagtatggtgcggaggccctggagaggatgttcctgtccttccccaccaaccaagacctacttcccgcacttcgaccttgagccacgggttttgcccaggttaaaggggccacggcaaagaaggtggccgaacgcgctgaccaaagccgtggcgcaccgtggacggacatgcccaaacggcgctgtccgccctgagcggacctgcaacggcgcacaagctttcgggtgggacccggttcaactttcaagctcctaaagccactggcctgcttggttgaccctggcccggcccaccttccccggccgagtttcaacccctggcggttgcaaggcttccttgggacaaagtttcttgggtttcttgttgaagcaccgttgcttgaaccttccaaataacctttaaaggttggaagcctcgggtgggccatgctttctttgccccttggggcttccccccagcccctcctcccctttcctgcacccgtacccccgtgggtcttttgaataaaagtcttgagtgggcggcaaaaaaaaaaaaaaaaaaa

SEQ ID NO: 146951 - DNA, 444 bp, Homo sapiens
agaaatttacaatacaatagatgctggagtaaatgttacatattatcatcatctgattcatcttcttccttcagagattccttagcatatttctctgcttcttctcttatatcttttggaacaatttcatgtcttccattagttaattcaccaacccagctgagttctagttcaaaagctttatccttaacttcgtcatgtactatgtaaattatttttgcaacttctttaacgatatcacggcaggtcatttctttcatctgaagcttctctatttccgtctttgcagcttgcctggctttgccgatggcacagccccaataaccctgcagccaaaaggtctaacagcactgtagagtgtatatgcatgcacatacatggccactctgtctgcaagatgttttagtggaatgttgtagccaaagttagatctgaagttggaag

SEQ ID NO: 146952 - DNA, 508 bp, Homo sapiens
agttataagacaaaaatttaatgaaaattggacagtatgtataatccagggctaaatagttacattggactggagtagaaatttaaaatacaatagatgctggagtaaatgttacatattatcatcatctgattcatcttcttccttcagagattcattcaccaacccagctgagttctagttcaaaagctttatccttaacttcgtcatgtactatgtaaattatttttgcaacttctttaacgatatcacggcaggtcatttctttcatctgaagcttctctatttccgtctttgcagcttgcctggctttgccgatggcacagccccaataaccgtatgaaacacctgatgggtcaatcatgtagagttgcgcaccgtcattcacactgtaagaccctaacatgaaactgcagccaaaaggtctaacagcactgtagagtgtatatgcatgcacatacatggccactctgtctggcagatgatttagtggaatgttgtagccaaa

SEQ ID NO: 146953 - DNA, 550 bp, Homo sapiens; identical to SEQ ID NO: 146296

SEQ ID NO: 146954 - DNA, 532 bp, Homo sapiens
atttgtcgggagagtagatgtttcattttatttcagtccctgtgtaatttgtcttctctaatgttaaatactatgtagaatgtgtctgtgtaattttatagatacttttattatggatggacattctaatttgtactgactttgggtctgtgaactacttcaatgtttggaggttaccaaaatcttacctttcccttttctattctagaatttacatagtacatgacgaagttaaggataaagcttttgaactagaactcagctgggttggtgaattaactaatggaagacatgaaattgttcctaaagatataagagaagaagcagagaaatatgctaaggaatctctgaaggaagaagatgaatcagatgatgataatatgtaacatttactccagcatctattgtattttaaatttctactccagtccaatgtaactatttagccctggattatacatactgtccaattttcattaaatttttgtcttaaaaaaaaaaaaaaaaaaaaaaaaaaaagtcgtatcgatgt

SEQ ID NO: 146955 - DNA, 1666 bp, Homo sapiens
ttttgaagacggagtcttgctctgtcaccccaggctggagggcagtggcacccatctctgctcactgcaacctctgccctcccagggttcaagcgatcctcctgcctccgcctccccaagtagctgggattacaggaacatgccaccataccctggctacttttgtatttttggcttcaccaataatacagagacgggttttcaccaggctagtttcaaactcttgaactcacgtgatctgcctactttggcccccgtaaagtgctgggattacaggcatgaacactgcaccaggcctcttaagtatatattctatcaaagatacagtcattgcatgttagagcaacatttgcttaattaactttgcttgggtatcttattctgaaactgttcattcagttacaagtagaggaatttaacccacttaaattccaggttgttgtagcttaacttgcccacaggtgtggcatataacaattttaaaaatcaattttaaacacctgttttctcttaacaggaatctctgaaggaagaagatgaatcagatgatgataatatgtaacatttactccagcatctattgtattttaaatttctactccagtccaatgtaactatttagccctggattatacatacgtgtccaattttcattaaatttttgtcttataactattgaagtttggttaatatctgctttacaaaattggtgggggggaatgaggacatttactcagtattaaaatatagatttatgactactgaaaaattccctggttaaaatgctgcagaattaattccaagactgtagattaattcaaagccccatcttcatcactcaactagaatttacagatcatattctcctgggcttttgtacaaaaagcacctaccaacttagtggacaaataactgatacggtttcccactttcatatgaagtaactggtggtcatcagtcactgttaatctttagatgtgatacagatgacagatgtttcagttttggataatttttcaaaaactgacccttcctcaaaaaagacccttcaatacatgagtcaaggatgtttttgcttttttcctttattgtggtgaggggcggatttaaggatcagtagagtccctattctgtcactaaagagatttcttgatctctaaagattaaaataaaaataccaacatcagacagctttcatgttaaaaatcagaatttatgttaaagtgctctgtaaacagaactgttactaagtggaataaacagtactgtggccgataagaataacttgaagctgaaaagcagtactcacagcaggaacaatttgaactcaggccatgtatacacaccctctagtggactcatgccagtgtcactccattgaagtgttgtgctttcctaagaaggtaatctagccactgaatttgggtgcagggtatcgctggactttgagcatttgtgtagtttaaatagcaaatcattatacctgagtattaatagctaactactacacaaacaactcaaaaccagtaatgtcatgtcattaccatggcttcttttatgtaacattatctgctacattttaccactcaaaatatatttaaaatatgtattttaaaatatattagagcatatggctcaagcaatcctcccacctcagcttggtaac

SEQ ID NO: 146956 - DNA, 957 bp, Homo sapiens
  misc_feature (1)...(957): n = a,t,c or g
tttttttcctcatttttttttttcttagctataagacaaaaatttaatgaaaattggtcagtatgtataatccagggctaaatagttacattggactggaggtagaaatttaaaatgcaatagatgctggagtgtaaatggttacatattatcatcatctgattcatcttcttcccttcagagattccttagcatatttctctgcttcgtctcttagagtcttttgggaagaatttcatgtctggccatgagttaattcaccaaccccagctgtagttctagttcaaaagctttatccttaacttcgtcatgtactatgtaaattatttttgcaacttctttaacgatatcacgggcagggtcatttctttcatctgaaggcttctctatttccgtctttggcaggcttgcccgggnctttgcgggatggcacagccccaattaaccggtatggaaacacctggatggggtcaatcatggtagagttgtcgcaccgtgcattcacactgtaaggaccctaacatggaaactggcagccaaaagggtctaacagcactggtagagtggtatatggcatggcaccatacatgggccactctgtctgcaagatgttttagtggaatggtgtagcccaaagttagatctgaagttggaagcttcttctcttgctatgtctgctaaagaacgagcatctgccaacaaaacctgctactggccattccaacattgccgatcaaacattaaaaaagtctttttgtttggaacccttctttcataaagtttagaaaggacttatttttcttaccccaagaacaaccccatctttgcatctgattccaatagctgtactactattttccacagccttcatagcatattcaacttgaaaaactcttccgtcaggagagaatgtagaggctgacaggtcatacccagtgccgattgagctcatcgtgc

SEQ ID NO: 146957 - DNA, 452 bp, Homo sapiens
  misc_feature (1)...(452): n = a,t,c or g
actattacattttttgtcactttagtctttttgcatcactttaatggacacagtttttttattcagcctggattacagagcaagtcaagttgattgaattgttggcaattagctggcttttgtgatggttccttggataagtctatgaaatcgcccaggatcttaaagtgtcaaagagtttgaattagataatctctaagatttgtttagcccttcctttgttccccaaatttcatacacttaatttctagttgcttaaagaaaaatactttgttgtgaggttatagttgtgaggttataggtgagaaattaaaaagaaatatttgttgccgggtgtggtggctcatgcctgtaagcccagcactttgggaggccgaggtgggcagataatttnaggtcaggagttcgagacccagcctgaccaatatggcaaaaccctgtttcttctaaaa

SEQ ID NO: 146958 - DNA, 789 bp, Homo sapiens
  misc_feature (1)...(789): n = a,t,c or g
aattttgccctcgaggccaagaattcggcgagggcaataagctcctacgtccagacgcccatgggtcatttcaccagaggaggaccaaggcttactatcacaagcctgtggggcaaaggtgaatgtggaaagatgctggaggagaaacccctgggaaaggctccctggttgtctaccccatggaccccagaggttctttgacagctttggcaacctgtcctctgccttttgcccatcatggccaacccccaaagtcaaggcacatggcaaagaaggtgctgactttccttgggagatgcccataaaagcacctgggatgatctcaaggggcaccttttgcccaagcctgaagtgaacttgcactgttgacaagcctgcaatgtgggatcctgagaacttcaaagctcctggggaaatgtgcttggtgacccgttttgggcaatccctttttcggcaaaagaatttcacccctgaaggttgcagggcttccctgggcaagaaagatggtgaattgcagttggccagttgccctggtccttcccagattaccactgaagcctcttggcccatgaattcagaagctttcaaggataaggcttttattcttgcaagcaattacaaataataaatctatttctgctaagagatcaccaaannnnnatnntnnnnnnncccccggattttttatttagcgggccgcacctttttccccttttagggggggtaaatttatattgggccttgggccggggttttcaaaagcggggggannnnnnnnnnaaagagccc

SEQ ID NO: 146959 - DNA, 2090 bp, Homo sapiens
ggagctgagccatacgttcctggcggaagggcgggcctgctaatcctttcttttattttgcttatctgctttataggggattgcaggccaggcccactgacaggagcaccttgagaaccacctgaacacaacagaatgaaggtgccctaaagtggaaagacgcttctggcccctgggccgatttgggaagggcccaggatactcacggcggctgaagggcaatgtgaagagtgactgcaagtcctggcattttctgtggggtcagcaaatgcccctttattttaaatgattccagacatctgggcagcatagcttggtcaccatcactcacgcttgatcctgctgttgagctgctcctgactcctgattacctcactcctgttgggaaggccatcgcatgctcctagagctccagagttccctgtaggtctctaccatcaggtcgcctctgggagaacgattcatcttcacgctctagaaacctcctgttgcggaatttgctggctttagtagaaaaagatatgtcagggatttagaaatcgtattgaactctcctggacttctgctccatgatttcattttgctttcacgaaccagcgatccctaccttggggtgggaaattcaattgtaggcagcaaataactcaaccctcctgtaacccctgaggattataacgaccccatgacccccgatgacagccagcagtttggtgactagagttttttgagcctgccattctcagtagcagctttggtctggagatggaacgtggagcagggaatctgacagccacgtttctcgtgatcacgtggactggagttgtttttgttatctggggtggaaaattgcaatgatcaagtttcttttttattttttttttacttagaaaagcaaatattgtgtttttgtaataaatcccttcgcagcaaaattgcggaggatcattcatccactagggccccacctgaggcacagcgctgactcatcacggtggtaccagtaggtcagccatctggaaacagaagtgggcccttaattgggccaaaatgtggtaagactcgctggcctcaggcagggccaggccagttccatcacttctctgcacacctattcccagattccatccagagcaaagctgatgtttatcgtctcattgtacttaggctttcgtactttaaaaaattatgactttttaaaaataagccttcagcagacagaagtgaagaaatttagcctgggttgcctcagcaacaaaagtctgcggttcctaagagccacatgttggggaagtggggtgacccaaacttggttacctaaggtgaattgttcagaccctcagccttacaagcaagagctcatgcagatccacagagccatgcacatcctgtcttcctgaccttcctcaggtgggcaccacctgtcggccccatgggacctgctgtatcggtgtcatgtgggaggtctgatgaatcctttaaaacctaactgtgatgtcgtaaatgtaactgtggctacctttatatctacttgaaggggcagcgtctgcatccgagggggaaatttcaacctggaaacaaccatcgttttagttgcactcagtctgtccatatggacattacacatggaagtggaatgttttccttatgttttccagggtctacaatgttttagtacatgtaaataaggaaaaaatttggataaatatgggtaaattaagttatagcgtgtcaatttgattcttaattttgctggtctccttggttaatttaaattttccctaaatgctcccacatctaagggttcccttcccaagggtgggtggggaacaccttgcagacgtgtgtgcaccagggacacacccgcgggcccaggcagccacaccgaggaaagcacacatctccacttgatgggcagccaccctacttttccagtttaacctcttttactctttaattctggatttactgtgatgatttaataaagtggaaacacagcacttcagtgctatatgtttctctcattctcattatagtttataagaaaataaagttcaccctggcatctaatatacaaaaaaaaaaaaaagatt

SEQ ID NO: 146960 - DNA, 1605 bp, Homo sapiens
atgtgggaaagtttggaacttcctagagacttgttgaatggctttgaccaaaagcctgatagcaatatggacaataacgtccaggctgaggtggtctcagatggagaagaggaacttgttgggaactggagaagtcctcacaagttgagagagtgtctccccctcatcattttcctaaggaacagacttaagtatgccctgacaggagatgaagtaaagatttgcatgcaggggttcattaaggttgatggcaaggtacgaactgatataacctaccctgctggattcatggatgtcatcagcattgacaagacgggagataatttccatctgatctatgacaccaagggtcgctttgctgtacatcgtattacacccgaggaggctaagtacaaattgggtaaagtgagaaaaatctttgtgggcacaaaaggaatccctcatctggtgactcatgatgctcacagcatccgctaccttgatcccctcatcaaggagcaagccccaggccccgctcgcaactggggcaatgccagcagctttcctcgatcagatgggaagcccacagtcctctctctcagagcagccaccacagggagcacaggactggacttactctgcctcaacaaattaatgctaaaagaaggagaagaccctaaaagggttgcaaccgggatctggggcctgctgcctccaggaacagtgggattagtcctagggtggtctagcctatctagtaaaggaattaatgtgctcaccgtggtaattgatagtgattatcacagagagatattggttatgatggactgtaaaggtctgcatattcttccccctggatcaaagatagctcagttactgattttatcatactgggtccccagtctctatggaaaggaaagggggaagggaagttttgggagcacaggagccacaggagtatattggaatcaattaatcactgatcaaggacccatgaagaaattggaaataagaattttactggcttactgggcacaggggcagacatttcaatcattagtgatcaaaactggccagaaacttggctttggatatttaacccctgcagcaaaaagggaaattgaggaaatagaacaagccgtctctcaggggcagctagatcgcattgatccacgttattcaatccaattgttttatctttctcaccaaacactcccctacagggttaataggacagatggcccccgggctatgcttcctagaatgggttttttgccacataccgggactaaaacactatctccctatagtcagttacttactaaagtcatctattcaggccacaaacaatgcaatcagtcactaggttatgaccctgatgtcatcaggattcctttaagtaaaaagcaattcaaagcagtattgccagtatctattaatctgcaaatagctttctctgattacacaggacaaatagagcacatacttcctgctgataaactcctttatttcttatctcataccctggtaatcttacccacaaaaatagttcactcccccatacctaatgctttaacactgtttactgatggttctggtaaacatggaaaagcagcagtctggtag

SEQ ID NO: 146961 - DNA, 4152 bp, Homo sapiens
ttgttgaagtccgaagaggattcctcatataaacctgtgaagaaagcttgtactcaacttgttgataacctagttgagcacattcttaaatatgaggaatctctagctgactctgacaataaaggtgtgaattctggaagattggtagcttgcataaccactttgttcttattcagcaaaataagaccccagctcatggttaaacatgcaatgactatgcaaccataccttaccactaaatgtagtacgcaaaatgatttcatggttatctgcaatgttgcaaaaatcctagagctagttgtaccactgatggagcatccaagtgaaacttttcttgccactattgaggaagatctaatgaagctcatcatcaaatatggcatgactgtagtgcaacattgtgtgagctgtcttggagctgttgtaaataaagtgacacaaaattttaaatttgtgtgggcttgtttcaatagatactatggtgccatttcaaaattaaaaagtcaacaccaagaggacccaaataacacttcacttctaacaaacaaaccagcacttcttagatcccttttcaccgttggagcactatgtcggcattttgattttgatctggaagattttaaaggcaacagcaaggttaacataaaagataaagtacttgaactattgatgtattttacaaaacactcagatgaagaagtacaaacaaaagctatcattggtctaggatttgcctttattcagcatccaagtctaatgttcgagcaagaagtgaagaatctatataataatattttatctgataagaactcctcagtcaatttaaaaatacaagtgttaaaaaacctccagacctacctacaagaagaagatacacgtatgcagcaggcagatagagactggaagaaagttgcaaaacaggaagacttaaaagaaatgggtgatgtttcctcagggatgagtagttccatcatgcagctttatctcaaacaggtgcttgaggcattttttcacacccagtcaagtgtacgccactttgccctaaatgtcattgcattgactctaaatcaaggtcttattcatccagttcagtgtgtgccatatttaattgctatgggcacagacccagaacctgctatgcggaacaaggctgatcagcaacttgtggaaatagacaaaaaatatgctggattcattcatatgaaagcagtggctggtatgaagatgtcttaccaggtacaacaggcaatcaacacatgcctaaaagatcctgtaaggggtttcagacaagacgagtcctctagcgctttgtgttcacacctttactccatgatccgtggaaaccgccaacacagacgagcctttcttatttctttactcaacctctttgatgacacagcatctatggtaaaggacaaaaggaaagagagaaaatcatcacctagtaaggaaaatgagtcaagcgacagtgaagaagaagtttccaggcctcggaagtcacggaaacgtgtagattcagattcagattcagattcagaagacgatataaattcagtgatgaaatgtttgccagaaaattcagctcctttaatcgaatttgcaaatgtgtcccagggtattttattacttctcatgttaaaacaacatttgaagaatctttgtggattttctgatagtaaaattcagaagtactctccatctgaatctgcaaaagtatatgataaagcgataaaccgaaaaacaggagttcattttcatccaaaacaaacactggacttcctgcggagtgacatggctaattccaaaatcacagaagaggtgaaaaggagtatagtaaaacagtatctagatttcaaacttctcatggaacatctggaccctgatgaagaagaagaagaaggggaggtttcagctagcacaaatgctcggaacaaagcaattacctcactgcttggaggaggcagccctaaaaataatacagcagcagagacagaagatgatgaaagtgatggggaggatagaggaggaggcacttcagggtcattgagaaggtcaaaacgaaattcagactctacggagttggcagcacagatgaatgaaagtgttgacgtcatggatgtcatcgctatttgctgtccaaagtacaaagatcgaccacaaattgcaagagtagtgcagaaaaccagcagtggcttcagtgttcagtggatggcaggctcctacagtggctcctggactgaggctaagcgccgtgatggccgcaaactggtgccttggtactcagctcccaacaaagaattgagtatggcatcaagccaggatgcggggatagctctagttgaagagctagattcagagaaaatggaagaatccaagctcagaagtctccatgaagtgggagagcaagaagccacatccataggaaaagggggagagtactacatcaagagaacaccctgcaggacaaaagaatctgaacaacagccttcagccctagaccttccctctgacagagcctacccaaatgagaaggaatcagaaaaccaactctgtcctcacaagttgagagagtgtctccccctcatcattttcctaaggaacagacttaagtatgccctgacaggagatgaagtaaagatttgcatgcaggggttcattaaggttgatggcaaggtacgaactgatataacctaccctgctggattcatggatgtcatcagcattgacaagacgggagataatttccatctgatctatgacaccaagggtcgctttgctgtacatcgtattacacccgaggaggctaagtacaaattgggtaaagtgagaaaaatctttgtgggcacaaaaggaatccctcatctggtgactcatgatgctcacagcatccgctaccttgatcccctcatcaaggagcaagccccaggccccgctcgcaactggggcaatgccagcagctttcctcgatcagatgggaagcccacagtcctctctctcagagcagccaccacagggagcacaggactggacttactctgcctcaacaaattaatgctaaaagaaggagaagaccctaaaagggttgcaaccgggatctggggcctgctgcctccaggaacagtgggattagtcctagggtggtctagcctatctagtaaaggaattaatgtgctcaccgtggtaattgatagtgattatcacagagagatattggttatgatggactgtaaaggtctgcatattcttccccctggatcaaagatagctcagttactgattttatcatactgggtccccagtctctatggaaaggaaagggggaagggaagttttgggagcacaggagccacaggagtatattggaatcaattaatcactgatcaaggacccatgaagaaattggaaataagaattttactggcttactgggcacaggggcagacatttcaatcattagtgatcaaaactggccagaaacttggctttggatatttaacccctgcagcaaaaagggaaattgaggaaatagaacaagccgtctctcaggggcagctagatcgcattgatccacgttattcaatccaattgttttatctttctcaccaaacactcccctacagggttaataggacagatggcccccgggctatgcttcctagaatgggttttttgccacataccgggactaaaacactatctccctatagtcagttacttactaaagtcatctattcaggccacaaacaatgcaatcagtcactaggttatgaccctgatgtcatcaggattcctttaagtaaaaagcaattcaaagcagtattgccagtatctattaatctgcaaatagctttctctgattacacaggacaaatagagcacatacttcctgctgataaactcctttatttcttatctcataccctggtaatcttacccacaaaaatagttcactcccccatacctaatgctttaacactgtttactgatggttctggtaaacatggaaaagcagcagtctggatccaacctggtaccggagatgaaggaactgaccctacaggatccacagccccagacgatgaggcttccatggatgacacaagccccggacgtcacctgggggatgctgaagaggacaactcaggaggctga

SEQ ID NO: 146962 - DNA, 1031 bp, Homo sapiens
ctgggcggacagctgaaaatccggcgcgcgcagtctccagccccaaatttctacgcgcaccggaagacggaggtcctctttccttgcctaacgcagccatggctcgtggtcccaagaagcatctgccagcgggtggcagctcactaagcattggatgctggataaattgaccggtgtgtttgctcctcgtccatccaccggtccccacaagttagagagagtgtctccccctcatcattttccctgaggaacagacttaagtatgcccatgacaggagatgaagtaaagaagatttgcatgcagcggttcattaaaatccgatggcaaggtcccgaacttgatataaccctacccctgcctggatttcatgggatgtcatcagcatttgacaagaccggggaagagaatttcccgtcttgatctattgacaaccaagggtccgcttttgctggtacatccgtatttaaccaccctggaggaaggccaaagtacaagtttggtgccaaaagtgaagaaaagatcttttgtggggcacaaaaagggaatcccctcatcctgggtgactccatgattgccccgcaccatccggctaccccggatccccctccatcaagggttgaatgattaccattcagatttgatttagagactggcaaagattacttgatttcatcaaagttcgacactgggtaaccctgtgtaatggtgactggggaggtgcttaacctaggaagaaattgggtgttgatcaccaaccagagagaggcaccctggatcttttgacccgtggtttcacgtggaaagatgccaatggcaaccagctttgccactcgactttccaacatttttgttattggcaagggcaacaaaccatggatttctcttccccgaggaaagggtatccgcctcaccattgctgaagagagagacaaaagactggcggccaaacagagcagtgggtgaaatgggtccctgggtgacatgtcagatctttgtacgtaattaaaaatattgtggcaggattaatagc

SEQ ID NO: 146963 - DNA, 770 bp, Homo sapiens
ccactgaagcgctcagatggctgtaacgacggccgacccacgcgtccgcccacgcgtccggacacaactgtgttcactagcatcgctcatacagacactattggtgcacctgactcctgaggagaagtctgccgttactgccctgtggggcaaggtgaacgtggatgaaagttggtggtaaggccctgggcaggctgctggtggtctacccttggacccagaggttcctttgagtccctttggggatctgtccactccgaatgctgttatggccaaccctaaggtgaaggctcattcgcaagaaaattgctcggtgcccttttagtggtgggcctggctcacctgggacaacctcaagggcacctttgctcacactgaagtgagcttgcactgtgacaagctgcacgtgggatcctgagaactttcaggctcctggggcaacgtgcctggtcttgtgtgcttgggccaatcacttttggcaaaagaatttcaccccaccagttgcaggcttgcctattcagaaagttggtggctggttgtggctaatgccctggcccacaagtaatcacttaagcctcgctttccttgctggtccaatttccaattaaaaggttcctttggttccctaagtccaaatacttaaactggggggatattattgaaagggccttgagcatctggattctgcctaataaaaaacatttattttcatcgcatacaagaataaaacaagcgcggccgattaagaggatacttcaggggcgcaagat

SEQ ID NO: 146964 - DNA, 1121 bp, Homo sapiens
cgcgtgcaatttgtccctttgaggacttctgacgagcggcggcgctcacctttctcctagccgggtgacccaggggatttattatatgtcggctttatctgagatgccaaagccacccgattattcagagctgagcgactctttaacgcttgccgtgggaacaggaagattttcgggaccattgcacagagcatggagaatgatgagacttccgtcagcggatgggatggattggagtgggattgtatctgttagccagtgcagcagcattttactatgtttttgaaatcagtgagacttacaacaggctggccttgggaacacattcaacagcaccctgaggagccccttgaaggaaccacatgggacacactccttgaaagctcaattactctccttgcctttttggggtgtgggacagttattttttctgggtaccttactttacagatgttttttgtttccctatactcttgttacaaggagcttgatccccaaaacagtgggggctactgttatccatcccctatatggctttgggcagtttattttggcaatcgccaccacgcatttttgtcaaggcttctaattcagattcagcagacttacaactgattgacacggtaaaatcagtcacccgtttttttcccctacggattacaaaaactggccagtcctaatatggagtctgatcacaagacctgccagtttccttcacagatcctcaggaagttgtcgtggggcagagggccttttaaaaaaccatggtgattaggggagcctatcctttatcctgaataataaccgaatttttaggtacaaacctgagatagagtacctacaaaatcatgttgatgacttcagattttggaagttaaatcatgtctgttatttgcattctttagaaacttgactaagtacctgaattcatatttctattcttactgtgcaacatagtgatgattcagaaatttttcctttggggaaaaaaatgaatatgaacatttccattgtgttaagtgtaaaaaggtccagacatgatcataaaatttaaattttatacaattaaaaaaaaaaaaaaaaaaaaaaaaaaaaaaaaaaaaaaaaaaaaaaaaaaaaaa

SEQ ID NO: 146965 - DNA, 392 bp, Homo sapiens
tggttttcaggactgaagcttcaagatggctgaccaggaccctgcgggcatgagccccctccagcaaatggtggcctcaggcaccggggctgtggttacctctctcttcatgacacccctggacgtggtgaaggttcgcctgcagtctcagcggccctccatggccagcggatgccttcgtgaagatcgtgaggcacgagggcaccaggaccctctggagcggcctccccgccaccctggtgatgactgtgccagctaccgccatctacttcactgcctatgaccaactgaaggccttcctgtgtggtcgagccctgacctctgacctctacgcacccatggtggctggcgcgctggcccgccgtgagcatagacttgggcctttgacctcc

SEQ ID NO: 146966 - DNA, 725 bp, Homo sapiens
cgcttcactggcaccatggatgccttcgtgaagatcgtgaggcacgagggcaccaggaccctctggagcggcctccccgccaccctggtgatgactgtgccagctaccgccatctacttcactgcctatgaccaactgaaggccttcctgtgtggtcgagccctgacctctgacctctacgcacccatggctggctggcgcgctggcccgccgtgagcatagtcttgggcctttgacctccctctgtccccacctcggcccaaacccagtcagtcccagctcccagccccaacctctgccagcctagggataggggggtgttctaggtccccagacctgggacagcaggtaggtgatgccatgtaagacctgtgatctcacttctccccattgtcacccccaatccccacacagtgggcaccgtgactgtgatcagccccctggagcttatgcggacaaagctgcaggctcagcatgtgtcgtaccgggagctgggtgcctgtgttcgaactgcagtggctcagggtggctggcgctcactgtggctgggctggggccccactgcccttcgagatgtgcccttctcagccctggactggttcaactatgagctggtgaagagctgctcaatgggctcaggccgaaggaccatacttctgtgggcatgagtttgtggctggtggcatctcaaggacggtggctgcagagctgactctaccctatga

SEQ ID NO: 146967 - DNA, 1758 bp, Homo sapiens
  misc_feature (1)...(1758): n = a,t,c or g
tgcgagcgcgcgcggaccgcgcacaggcggcggagccggtatgggcccgcctggccctgggcgccgcgccgcagcgagcacctacctagagccaggactgaagcttcaagatggctgaccaggaccctgcgggcatcagccccctccagcaaatggtggcctcaggcaccggggctgtggttacctctctcttcatgacacccctggacgtggggaaggttcgcctgcagtctcacgcggccctccatggccagcgagctgatgccttcctccagactgtgggagcctctcctataccaaattgccctcctctctccaatccacagggaagtgcctcctgtattgcaatggtgtcctgggagcctctgtacctgttgcccaaatggtgcccgctgtgccacctggttttcaagaccctacccgcttcactggcaccatggattgctttcgtgaagatcggtgaggcacgaggggcacccaggaccctctggagcggcctccccgccaccctggtgatgactgtgccagctaccgccatctacttcactgcctatgaccaactgaaggccttcctgtgtggtcgagccctgacctctgacctctacgcacccatggtggctggcgcgctggcccgcctgggacccgttgaactgtggatcagccccctgggagctttatgcggnaacaaagcttgcagggttcagcatgttgttcgtaaccgggagcttgggtgcctgtgttcgaactgcagtggctcaaggtggctggcgctcactgtggctgggctggggccccactgcccttcgagatgtgcccttctcagtgcatcccccaccccaagccctggtactggttcaaactatgagcttggtgaggagctggctcaaatgggctcaggccgaaagaaccagacttctgtggggcatgagctttgtgggctggtggcatctcaaggacggtgggctgcagtgctgactctaccctttggacgtggtaaagacccaacggcagggtcgctctgggagcattgggaggctgtgaaaagtgaacccccctgcaatgtggactccaccctggctgctgcctgcggaggatccggggccgagtcgggcaccaaagggactcttttgcaggcttcctttcctcggatcaatcaaaggctgccccccttcctgtgcccatcatgattcagcaccttattgagtttcggcaaaaagctttctttccaagaggcttgaacccaggaaccggctttctgggcgggcttgaaaaggggccaaaggaaggcaaggaccccgtctcttcccaacgggaatgggggagagggcaaggaggagaccccagccaaagtgccttttcctcagcactgagggaggggggcttgttttcccttcccctcccggcgaccaagctcccagggcagggctgtccctctgggcggcccagcacttcctccagacacaacttcttcctgctgctcccagtcgtggggatcatcacttacccaccccccaagttcaagaccaaatcttccgagctgccccctttcgtgtttccctgtggtttgctgtaagctgggcatgtctccaggaaccaagaagccctcagcctggagtagactccctgacccttgttaattccttaagcctaaagatgaggaacttcaaaaaaaacaaaaaacatttgagggggggccccgcacccacaatcccccttatggggagcgaataacaatcaacggcccgcggtttaacaacg

SEQ ID NO: 146968 - DNA, 2220 bp, Homo sapiens
  misc_feature (1)...(2220): n = a,t,c or g
cagccagtgatgagtgaagaagaatctgaccagtatcttgcagtgttgacgtttcccagatgtgtgcttgtgatgatacacacacatgcacaggttctcaaccacgtgtgtatatatgtatgtgtgcatatgtctgtagctgtatataaagcgcatgtagagctacagatccagatacacacacttgtgtatatatgtacatacagacatactgaagggattagtacaatttctccaaagtactgtacctatcttcagcaagaatgcaaaagaaaatattttcaatatatatacctggaacagattttaataattatcagagtaataccattaatggacaaattgactgcaatgtaatactagctggtatgtttcataaatgtcaagctgtggaccaacatatatagccttttattatttttctcttcttttaagtcagtctgttataaatttttttttagtcccataagcagtagactcccacagaaaatttcttcaaaattttttggtgttccaatgaatctgggatgtaaactctgaatgtatttataactatttatttctgggatggtcattatcttgtagccaaatttgacaatataaagtaaggagcaaagttacagggccagtttttacttgtttgccctgaggggaaaaatccttttaaaaaaaatttctggtttttattggatttttgtattttaaatttcaaatatttttctacatcaaacctagcaaaaatggagatgacggtttctgatttataataaatactagacagttttcaggctcctgttagacaaacacattgatgaagaaattagtcttaataggattgtaggctgtgtagaaaagttggaaatatagcacttcatggagtcttgttttgaagatgacagttttcctgtaaccacagcttgggaaactatgccaatgggtctagattcccccagagctcacatgataggatatagttagtgatgacattttgctcttcttgtgggaacacacacttcaaggaggagatagtgactttgagataggaacaagttaaaatgccattgtgagcctggcctgcgtgcggtgaggaggccccgccaagagactggtggacatctgactgtgggatgtgctctcaagtaggacgtcatcaggacagattctgaataggcatcatgagagtgctggtcagaaacggctgccacnnnnnnnnnnnnnnnnnnnnnnnnnnnnnnaaggaaggaacaatagctaggtaagatttttatcagctttctctgtctgaatccagtttttcctctgtcagtcctggaagcttgaatagaattatattgttgaagccttcaggtcacaaactgtcttttgtaacctcctgtccctcctaaaacacgccatacccctgcagtcaaatccacattagtaatctgatttgctgaacagtcctgcccctgcctgctcctcgtttccccacatgtcctgcatccttccccccactggagtgatttccagtgaatcagacagggaaggatgtgtaggatcactactgcattgcaatacccctgttatcctcagcaaccaaaacccacatttcatacatccctttgtgtactccaggataaagactgatgtttactctctgggcactgttgtaagataggttttgtcagagcataatcattgtctgccaaagtgtttggtgccgaggaagattattgctaattttgtgaaataaagagtctagccctctccttttaatgaacttaaactctcgctggcatctgtagtatcattgggagcttaggcgcacatggaaatgagagcccggggcatggaattttaatgtttttctaacaactgtggagatttgagggaatgtgtggtgaatgtaaaatacctagtttacttgccagtctcttgtgtaaattacagtaaaacaaagtaaatgaaatttaaacaaaaaataaatttgatcacaaaatgccacttgtgtgcttgagtggttgtttccctgagccatgtctggtttgaaacacctcagaccactactctgtttttcatgaattctgtaattcgcagcactaccagtctgggaaaattattttgttttaattgcaaattcttattcttgaaatgtacctgtgccacactaagtggttacgtttgatttcttaagtaattttctgtctttaaaagctaagcagtaaactaaaggattataaa

SEQ ID NO: 146969 - DNA, 923 bp, Homo sapiens
gcacgagaaacaccctcggctgggaagtcagttcgttctctcctctcctctcttcttgtttgaacatggtgcggactaaagcagacagtgttccaggcactacaggaaaaagtggtggctgctcgagcccccagaaaggggctttggttcttccacctctgcccacctaattcgaccatcagtttccatcgaggaaagcctgaaaaataaatatgccaggagggaacccccgttttgcgtgcgccccaactccccaagtgggcaaaaagggaaattggagaattctttagggttgtcccctaaagattctgaaaaagagaatcagatttcctgaagagggcaggaagcagtgggcttagggaaaaggcaaaggaggaaaagcatgttccttttgcaacctggattcacacaattgatggaaaaaggattaggaacttttcttcatttcatctttggattaacgtctcctttgttttaccctgggtattctaggaaggtaaaatttaccataaatggggtttggttccaattaggctttggttgaacagggcatttaattaaaaaaatttagggtttaaaatttaagatgttccaaaagtagttgtgaaatttgagaatttgtaagacctaattatggtaaccttagcctagtattcaatataatgccattgtttggtttccttttacccaaattaagtgtcctatttcttgcctaaaatcaagtcattgcattgtgttctaattaccaagtatgttgtatttgagatttgcttagattgttgtactgctgccggggtttattggtgtttgattattggaatggtgccatattgtcactccttctacttgctttaaaaagcagagttagatttttgcacattaaaaaattcactattaattaaaaaaaaaaaaaaaaaaagatt

SEQ ID NO: 146970 - DNA, 476 bp, Homo sapiens
  misc_feature (1)...(476): n = a,t,c or g
tagtgccattggtanttaataagccattggtatagcaacctaaaaaccttggctgtgatgacaccaggatgtgtttatggaattgctgcaggaaaacacaattggcagctgacatcctctggctcacagcaccagcttctccaagagacttaaggctggggtgtgtagcggaggtatttcttgccagatgggagctctttggtgaagactcctttcgggaaaagttttttggcttcttcttcagggatggttggcaacccttttttctgctgtcagctggagagagatgactaccctgagaatctcatcaaagttcctgccagtggtagctggggtagaggatagacagcttcagcttcttatcaggaccaaaaacaaacaccacacgagctngtcacaggcattccctttttcatccttcttctgctgggatcccagnatgccccaacagggtgggccaagctncccgattccta

SEQ ID NO: 146971 - DNA, 957 bp, Homo sapiens
ggcacgagagaacttccattccagtgagtggagacaaacagtaaacaagtttattaagtgggtgataacaggtgctacagggaagaatcaagcacagatggggagaataacagcacaggggtgggagagtgactgtcaaggaatgcctgtctatgaagggacctttggagaaaaacacagagaagatgtgaccaaggcatgtatacttgtgagggacgagcactataggcagaaggagcagttagtgcaagaaactgggcctacaagtgagcttggcatgttggaggaatacaaggaaagctagcatgctttgagaagaagctgcagaaggtggggtgagggacaagagatgagaggaggcaggattccatcacacagggcttgcaagccatgatactcagaattaaatggaaagtgtggtggccagctgttactgggtttaaaacaggactgtttcttgttaagatgggggaactgctttcctgccaaaagtgccaaagatcaacttgggaaaacaaaatcctcacagaggggagagtaaagaacacttgattagtcttcattaggcacctgttagctactttttctaaagttaattcctggaaggcctttgaagcttcactatgagattgaatttcaccattctcaatgtctttcaataggatggggatagtgtgatggtccttccaaccatccctggaagaagaagccaaaaaacttttcccgaaaggagtttttcaccaaagagctcccttttggcaagaaatacctccgctacacaccccagccttaagtctcttggagaagttggtgctgtgagccagaggatgtcagctgccaattgtgttttcctgcagcaattccataaacacatcctggtgtcatcacagccaaggtttttaggttgctataccaatggcttattaaatgaaaatggccctaaaaaaaaaaaaaaaa

SEQ ID NO: 146972 - DNA, 1692 bp, Homo sapiens
atgcccggaggtctgcttctcggggacgtggctcccaactttgaggccaataccaccgtcggccgcatccgtttccacgactttctgggagactcatggggccattctttctcccaacccctgggggctttaccccatggtgtgcacccagaagctttgcaagagctgcaaagctggcaccagattttgccaagaggaaatgttaagttgattgccctttcaatagcagtgtttgaggaccatctttgcctgaaagcaaggatatccatgtctaccattgtgaaagagccccacagaaaagttacctttttcccatcatcgatgataggaatcgggagcttgccaatcctgttggggcatgctggattccagcagagaaggatgaaaaagggcatgccctgtgacagcctccgtgtggtgttttgtttttggtccctgataaagaaagctgaaagctgtctatccctcctaccccagctacccactggcagggaactttgaatgaagattcctcagggtagtccatcttctctcccagctgacagccagaaaaaaagggttgcccacccccagttgatctggaaggatggggattagtgtgatggtccttcccaacccatcccctgaagaagaagcccaaaaaactttttcccgaaaaggagtctttcacccaaaaggagctccccaatctggcgaagaaatacctcccgctacacaccccagccttaagtctcttggagaagctggtgctgtgagccagaggatgtcagctgccaattgtgttttcctgcagcaattccataaacacatcctgggtgtcattcacaggccaaggttttttaaggttgctaataccaatggcttattaaatgaaaatgggcactaaaagtttcttggagattctttatactcctctggccttcagcaaatccaattccattcatacaatcagcactctgctgggttctgtttggaaatatgttctgtatttaaaactcaaatcttgttgggatctctggcagggcttgtggaccaatgaagtcaatatttgttgatgggttggacaaagccttgcttcactccatcagagaatgactatcaatttttttttaactgtcctatcacgtcctctccctggtcaacccattttgaagagttggcagaacttgaagttcaacttcctctggtaaatatccaagtataaagcccaggaacttctagaataacccagatgcgctttaattttttttaatatgttttgatcacagaacttctagaataacccagatgctctttcatattcttttaatacatcttgatcacagctggggggaaaaaaagctttttaattctgtaccttcctagtagataagtgaagagcagggaaagagacctttaaatattttgctataaaaaaatttgtgataagtttctatcaaaatggggagattgcagaaaaggcttcccttggctcccaaggaggtgtagcaggtgtgagcaatattagtgccatgtgcctttcacacagggtttgcatttatcagtctgttttccgatgatgtgtacatgaaagagtacaccatgtgaagagaagagagaatgattgaaaatgttttagtatagaactcttcttgcagtgggttgctattttctagattttactttttagggaacaaaataaaatcctttgtt

SEQ ID NO: 146973 - DNA, 654 bp, Homo sapiens; identical to SEQ ID NO: 144884
  misc_feature (1)...(654): n = a,t,c or g

SEQ ID NO: 146974 - DNA, 656 bp, Homo sapiens
actcttctggtcccacaagactcagagagaacccacccatggttgctgtctcctgccgacaaagaccaacgtcaaggccggcttggggtaaggtcggcgcgcacgctgtgcgcagtatgtgtgcggaggccctggagaggatgttcctgtccttccccaccaccaagacctacttcccgcacttcgaacctgagccacggtttctgcccaggttaaaggggccacgggcaagaaggtggccgacgcgctgaccaaacgccgtggcgcaccgttggacgacatgcccaacgcgcttgttcggcccttgaagcgaccttgcacgcgcacaagctttcgggtgggacccggttcaacttcaaagctcctaaagccactggcctgcttggttgaccctggcccggcccaccttccccggccgagttcaacccctggcggttgcaacgtcttccctgggacaaagtttcctgggctttttgttgaagcaccgttgcttgaaccttccaaattaccgttaaagcttggaagccttcggttggccattgtttttttgcccctttggggcttccccccagcccctcctcccctttcctgcacccgtacccccgtggtctttgaaataaagtcttgagtgggcggcaaaaaaaaaaaaaaaaaaa

SEQ ID NO: 146975 - DNA, 1263 bp, Homo sapiens
ggctttttaaatgacccaggcgtgggtaaagcatcggtccaggcatcggtggcggggacaggcctaggcagcccgggccacccagactggcccctaatgagctcccaagtggcctgtggggacttggcctcagttttgccagctgtgaactgggaccgtcgctgctaaggccatggacaccttcagcaccaagagcctggctctgcaggcgcagaagaagctcctgagtaagatggcgtccaaggcagtggtggccgtgctggtggatgacaccagcagtgaggtgctggatgagctgtaccgcgccaccagggagttcacgcgcagccgcaaggaggcccagaagatgctcaagaacctggtcaaggtggccctgaagctgggactgctgctgcgtggggaccagctgggcggtgaggagctggcgctgctgcggcgcttccgccaccgggcgcgctgcctggccatgacggccgtcagcttccaccaggtggacttcaccttcgaccggcgcgtgctggccgccgggctgctcgagtgccgcgacctgctgcaccaggccgtgggtcccctctctgatctccaagtcccacggccgcatcaaccatcgtgttcggccacctagccgactgcgacttcctggctgcgctctacggccccgccgagccctaccgctcccacctgcgcaggatctgcgagggcctgggccggatgctggacgagggcagcctctgaaccccggcgccgcccaaccgcgcccctcgcgccttttggggctctcctgctgggcgcgggtggggtttgtgggtttttttccacctcttttctcccaatcggactccggccaaactcccctagacagatgggtgacctgtctcctttgagaggatgctgaggcatctgtagcagctgtttcaaacaccaatgtcacctctcctcctggcccccgcccaatggggagaggaattcggggccctactctggggaccacctttcacccgtttgtactttctgggccacgccgacccctgggtcgcttgatgtaaaagccaaaagctgctgcctcccacttggatcatgtcgcctgggattttcatccctcgcacaaggactaggggttcacacggtgaactgggggaagggaagtgttagggggcaagtcgcggcacccccccttccataaactcacgtcctaacccccaggacctcagaagatgatctgatttggaaataggatcattacagatggaattagttcaaaaa

SEQ ID NO: 146976 - DNA, 467 bp, Homo sapiens
ggcacgagcgcatgtggggtcgcctccctgtctgtggtggactgtgtcccagcccctttttcccagcaacagcccctgccggaaggagagcgaactctggggggccggcacagactgcggacacgggctagggccctgcaccctgcccccgcctgcttctgccatgcgtccctgtgtgtctgcatgtggcggtgtcctggtgtgcgggctcctctgtgagcaccagagcgactccatccactgtctgtgtcatctgtgtctgtgcaaatgtaattacttgtgcatcagagccgcctccagccaacacctgaaatgtcactgggttggggggaataaaacctgttttggacctgatgatctctttgggggaagaagtgagcccacatttgagaccctttccggagagccagccactccagcagatgggaagactggctcgtgcaccggaccggaaagataccagatgc

SEQ ID NO: 146977 - DNA, 1484 bp, Homo sapiens
gattactagttagcaaatgagggggtaaatattccagtggatacaagcttggactcttttcttgaagctttctttctatcagaagcatttgctgatattgctgacattgaaacattaaaagaaaatttgagaagcaatgggcatcctgaagctgcaagtatttctcattgtgctctctgttgcattgaaccatctgaaagctacacccattgaaagtcatcaggtggaaaagcggaaatgcaacactgccacatgtgcaacgcagcgcctggcaaattttttaggttcactccagcaacaacttgggtggcattctctcatctaccaacgtgggatccaatacatatggcaagaggaatgcagtagaggttttaaagagagagccactgaattacttgcccctttagaggacaatgtaactctatagttattgttttatgttctagtgatttcctggtataatttaacagtgcccttttcatctccagtgtgaatatatggtctgtgtgtctgatgtttgttgctaggacatataccttctcaaaagattgttttatatgtagtactaactaaggtcccataataaaaagatagtatcttttaaaatgaaatgtttttgctatagatttgtattttaaaacataagaacgtcattttgggacctatatctcagtggcacaggtttaagaacgaaggagaaaaaggtagtttgaaccttggtaaattgtaaacagctaataatgaagttattcttgacatgagaaaatcagtaattgggaccaggcgcggtggtttttgcctgtaatcccagcactttgagaggcagaggtgggcggataacttgaggtcagggagttggagaccagcctgaccaacatggtgaaaccctgtctctactaaaaatacaaaaattagccgggggtggtgacatgtgcctgtaattcccagttaactcaggaggctaagggcagggagattcgcttaaacccaggaggcggaggttgcagtgagccgagattgcaccactgcaactccagcctgggtgacaagagtgagactctgtctcaaaaaaaagaaagaaaattagtaattgtaagtacccctgataagcaaattagtaattgtcaatacccctgttaagcaattcctttttgcagtatatttctgaaatgacagaatgctgttttaaaaacaaagaaataaaatcctgctcctgactcggtcaaaatattttttaaagtctattgtttgttgtgcttgctgggtactaagaggctatttaaaagtataaaactgctttgtatccatgagggtttcattgtgtgttagcagcagtgagcttctattaaatgtatatgtcatttattttgtttaagtggctttcagcaaacctcagtcatattcttatgcagggtattgcgaaacaacttgtgttctattaatcgtgtcttcaattaaaagaccacagacttctggaaaaaaaa

SEQ ID NO: 146978 - DNA, 422 bp, Homo sapiens
  misc_feature (1)...(422): n = a,t,c or g
gaagggtgaacatggcgtgaagttcaggggctcgtcgaaagaagggcatcaagctgtcctgaagagctttctatatgctggacgcgcggtgaagtggtcctgcatgacatccagcatgtgcgtctgctgccggtcgttctccagcagggagtcgatcggtcnccattcatccagaagtagaagggcgagttggttcagaactcctcaagctggcgccaccaggctgagccattcgcagacgcgtgcgtagaacttcatgcaggtctgtttcaggcagggcttcactcttcccaagggccatcatggtctcattgccactctgggagctcctcagttgtatatgttcctggttcttagggcatctctttttctctggctttctnnnttcncgcgttctcncaagcttnntnnaanccggaacc

SEQ ID NO: 146979 - DNA, 1894 bp, Homo sapiens
ctgcgaaccctctctactctccgaagggaattgtccttcctggcttccactacttccacccctgaatgcacaggcagcccggcccaagtctcccactagggatgcagatggattcggtgtgaagggctggctgctgttgcctccggctcttgaaagtcaagttcagaggcgtgcaaagactccagaattggaggcatgatgaagactctgctgctgtttgtggggctgctgctgacctgggagagtgggcaggtcctgggggaccagacggtctcagacaatgagctccaggaaatgtccaatcagggaagtaagtacgtcaataaggaaattcaaaatgctgtcaacggggtgaaacagataaagaggtgtcatataaaaaacttacgaagagcgcaagacactgctcagcaacctagaagtaagccaagaagaagaaagaggatgccctaaatgagaccagggaatcagagacaaagctgaaggagctcccaggagtgtgcaatgagaccatgatggccctctgggaagagtgtaagccctgcctgaaacagacctgcatgaagttctacgcacgcgtctgcagaagtggctcaggcctggttggccgccagctttgaggagttcctgaaccaagagctcgcccttctacttctgggatgaatggtgaccgcattcgacttccttgctggaggaacgaccggcaaaaagacgcacatgcttggatgtcatgcaggaccacttcagccgcgcgtccagcattcatagacgagctctttccagggacaggttcttcacccgggagccccagggataccttaccactaccttgccctttcagccttgcccccaccggaggccttcacttcttctttcccaagtcccgcaatcgtcccgcagcttgatgccccttctcttcggaccaagcccctgaacttccacgccatgttccagcccttccttgagatgattacacgagggttcagcagggccatgggacatccatttccacagcccggccttccagcacccgccaacagaattcatacgagaaggcgaccgatgaccgggactgctgtgccggggagatcccgccacaactccacggggctgccttgcggattgaaggaccaagtggtgacaaagtggccgggaagatcttgttttgtgggattgtttccaccaacaacccctcccagggtgaagcttgcggcggggagttcgaacggaattccctccagggttcgattgagagggtttgaacaggggtaattacaaacgtagcttggttaaaagttcctaaccagtgggaagattgctcaacacctcctccttgctggagcagctgaaacgagcagttttaactggggtgtcccgggttggcaaacctcaccgcaagggcgaaggaccagttacttatctgcggggtcaccacggtgggctttcccacacttcttgacttgggacgtttccttccggtgttcactgaggttggttcgtgaaagctctttggattttggttcccttcattgtgacggttccttttagaagttttcaggaaggaaccttaaattttatgggagaccttggcgtagaaagcgttgtaggattaccgcaaaaagcaccgggaggagtgagatgtggatgttgcttttgcaccttacgggggcatcttgagtccagctccccccaagatgagctgcagccccccagagagagctctgcacgtcaccaagtaaaccaggccccagcctccaggcccccaactccgcccagcctctccccgctctggatcctgcactctaacactcgactctgctgctcatgggaagaacagaattgctcctgcatgcaactaattcaataaaactgtcttgtgagctgatcgcttgga

SEQ ID NO: 146980 - DNA, 383 bp, Homo sapiens; identical to SEQ ID NO: 145432

SEQ ID NO: 146981 - DNA, 1097 bp, Homo sapiens
atgccgcacgagcccgcccctcagcgggagctgtggggcagaggcgatgctgtggttggtcagtccagtaagaagccagcagggctgggtgctggggcttcttctcctgaaggggctgcaagagggaaggcttagccatgtcgtctttgatcagaagggtgatcagcaccgcgaaagccccaggggcccattggaccccctacagtccaagctgtattagtcgaacaggacccatttacatttccgggaccagataggccatggaccccttccaagttggaccagcttgtgtccaggaggggtagcaggaagaagcttaaacaagctccttaaaaacatgggtgaaattcctgaaagcctgccaggctgtgactttcactaacgtggtgaaaacaacttgttcttctgggcttgacataaatgaccttcaattactgttcaatgaaattctacaaacagtttttccaaggagtaattttcctgctagagctgcttacccaagttggctgcttttaccccaaaagggcagccgaatttgaaattgaagccagtagctatccaaggaccactgacaacggcatcactataagtgggcccagtgctgtgtagtctggaattgttaacattttaattttttacaattgatgtaacatcttaattaaccttttaattttcacaattgatgacagtgtgagtttgatgaaaatatctgaagctattatggaaataccatgtaatagggggagttggaccatggaatattagagaaggaatccagttacttttttaaattacacctgtgtgcacctgtattactgaatataggaaagagatacccattacatagttactcagtaaacaaaagagaaataccaggtaggaaagaagagttactatttctgagaaataatcaagaacatatttaatttaaactaatgatgtgaactatttagttttgatgtccgttatgtgattctgcttttacttgagtaaaattaaagtgtttaaatttgagatcaaggagaagatagtggaacaaaatgttatatagataatatttttctaatggaaataaaataggcagatttcaaaaaaaa

SEQ ID NO: 146982 - DNA, 2401 bp, Homo sapiens
  misc_feature (1)...(2401): n = a,t,c or g
cggcacgagactggaagaggtcccagcgtgagtgtcgcttgctggcatctgtccttctggccagcctgtggtctggccaagtgatgtaaccctcctctccagcctgtgcacaggcagcctgggaacagctccatccccacccctcagctataaatagggcatcgtgacccggccaggggaagaagctgccgttgttctgggtactacagcagaatggtatgcgagaagctagcaccccagtctgagatggcttctgccggttgtgagcctgagggccaccatcctctgcctcctggcctgggctggcctggctgcaggtgaccgggtgtacatacaccccttccacctcgtcatccacaatgagagtacctgtgagcagctggcagaggccaatgccgggaagcccaaagaccccaccttcatacctgctccaattcaggccaagacatcccctgtggatgaaaaggccctacaggaccagctggtgctagtcgctgcaaaacttgacaccgaagacaagttgagggccgcaatggttcgggatgctggccaacttttttggggtttccgtattatatgggcatgcacagtgaggctatggggcgtgggtccatgggggccaccgtcctctccccaacggctgtctttggcaccctggcctctctctatctgggagccttggaccacacagctgacaggctacaggcaatcctgggtgttccttggaaggacaagaactgcacctcccggctggatgcgcacaaggtcctgtctgccctggcaggctgtaacaggcctgctagtggccccaggcagggctgataagcaggccccagctgctggctgtccacggtggtgggcgtgttcacagccccaggcctgcacctgaagcagccgtttgtgcagggcctggctctctatacccctgtggtcctcccacgctctctggacttcacagaactggatgttgctgctgagactattgatcaggctcatgcaggctgtgacaggatggaagactggctgctccctgacgggagccaaggcggacagcaccctggctttcaacacctacgtccacttccaagggaagatgaagggcttctccctgctggccgagccccagggagttctgggtggacaacagcacctcagtgtctgttcccatgctctctgggcatgggcaccttccagcactggagtgacatccagggacaacttctcggtgactcaagtgcccttcactgatatgcgcctttctgctgctgatccagcctcactatgcctctgacctgggacaaggttgagggtctcactttccagcaaaacttccttcaactggatgaggaaactgttttccccggaccatccacctgaccatgccccaactggtgctgcaaggatcttatggacctgcaggacctgcttcgcccaggctcgagctgcccgccatttttgcacaccgagctgaacctgggaagaatttnaggcaattgaccgcatcagggtgggggaggtgttgaacagcatttttttttgagcttgaagcggatgagagagagcccacagagtctacccaacagcttaacaagccttgaggtcttggagggtacccttgacccgcccattccctgtttgctgtgtatgaatcaaggcgccactgcccttgcactttcctggggccgcgtgggcaaacccgcttgagcacagcattgagggccaggggccccagaaacacagtgcctgggcaaggcctcctgccccctggccttttgaggcaaaaggcccagcagccagataaccaacccgggacaaaatcagcggatgtgtcancccccaagtctccccacccttttccttcctaatgagtcgacttttgagcctggaaagccagcccgtttctccttgggtctaagtgtgcctgcatggaagtgagcaagtagaaagcctgcagcggcacaaatgcacctccccagttttgctggggtttatttttagagaaatggggggtgggggaggcaaagaacccagtgtttagccgcggggacctactgttcccaaaaagaattcccaacccgacccagcttgtttgtgaaacaaaaaaagtgttccccttttcaagtttgagaacaaaaattggggttttaaaattaaagtataccattttttgcatttgcttcggtttgtatttagtgtcttgaatgtaagaacatgacctccgtgtagtgtctgtaataccttagttttttccacagatgcttgtgatttttgaacaatacgtgaaagatgcaagcacctgaatttctgtttgaatgcgggaaccttagctggttatttctcccttgtgttagtaataaacgtcttgccacaataagcctccaaaaaaaaaaaaaaagaaaaa

SEQ ID NO: 146983 - DNA, 405 bp, Homo sapiens
tcaggggttttaagcaccagccctggctacccagcctcccttgtccctacctagaggcacaggcccagcctacctgaactccctcacactgatgctccagacctggctcctggacagcaaacttctctcttccaatgtcctcttgcctcatttccatttccttcacatctgtctcctacttactggttccttctctaaatctgtattttcattcctgggtgttatgtctccccccatctctctcagcccctatgtcccacccaggacaaagcactcttagttggactggcagagaggagctgagccaatggcgggagtgcgctgatggtgctagtagcaccctgaccacaaccagacagaagagccctccagagtagtcccttagccaaccggtcccgctcgtaa

SEQ ID NO: 146984 - DNA, 2162 bp, Homo sapiens
acgcacagcttggatcgagggtgatcttgggggaggaagaggatgttactagagtcagatgatttgctgtattctcctgaaaggtcgtaggctgacaggcgctcacattccttggctgcctcggttctgagggcagctaaggagctgtttattcctcaagtcatgctccccgatctccttcctctaccactctgtccccaggagtttaattacaggcttgaggagaagaaaggaagaaaagatatcttgatgctttgaaaactgtgttggcagtgtggcatgactgtttaaagtagataaaaccttgtcattttaccccatccctgcatgactgtgaagctggcgaggaaggaggaagaagggcaagttcagatgcaggctgggtggctgggacaggttggctaagggactactctggagggctcttctgcctggcattgcccacttcggcccagccacgtgtttgcagcgaccagagtccctgcaaaggtgtggctggctgtggtcagggtgctactagcaccatcagcgcactcccgccattggctcagctcctctctgccagtccaactaagagtgctttgtcctgggtgggacataggggctgagagagatggggggagacataacacccaggaatgaaaatacagatttaagagaaggaaccagtaaagtaggagacagatgtgaaggaaatggaaatgaggcaagaggacattggaagagagaagtttgctgtcccaggagccaggtctggagcatcagtgtgagggagttcaggtaggctgggcctgtgcctctaggtagggacaagggaggctgggtagccagggctggtgcttaaaacccctgaggccatgagctcattggctgcctttgtagcatcctgtcttcttctgtgctgcctggtttgatctcatctcacctggattcaaagggtaaggtgggcatgggtcttgggcctgacacccaccaaggatgacctgtggactgccatcggatgctgaacagggagatgaaaggaggtcctcttaccatacccctctgccaaccccccagtaggccactgtttcttgactttgttttccagaatattccagaaatccaaaggggctgtttgcttgaacagtcttgcaggaccagttgacagcacctacctgtttgttcccaaggcatacaaaggaggcctcaacgctcatgcttctctaatcaagccctaccaagacagacagaaagacagacagaaaaaaggaaggggtagaggagaaggttgaagctgtggagctagactctgcttcacttcctgaagcttcaacttcatgtcgaagattcactgggacccaattcctgcattgttaatatttgtgaggaaaagtgaaacaagtgatctggttttagcccagatgatgaaagtggatatggcacattttcacacacgtgagataattacagcttgccccacaacactgggtgttggagaaagggagagatagtcataagtggaagaaaaagccaagcatagtgagtgggaaagagagtgagagcctgaggcaggctgcttgacgagccccaggcagcccacaagtttcttcgtggggagatgggagggcagagcccaggggttagggggacagagctgctgggggccttttccttgcctggggaatctgttccccaggaagagcttccccactccccttccccccaaatttggaaaaaaccgttacatttcaaagcctgttgggccccctgaaaatccctaaagaacctgggttaaaagaaattaaactcactaatgtcaaaaagtcaaaaaccctcccctaggggttgcccccgggaagtccaggttccacggggtacaagaagatgaatcctcagatgttcactcaaccttgagccggtcaattctctggtggaagggcttgccctggggtttctcttactcaatcccctggagtgtaagcatttggattgtgtcacagattaccttttcaccttttctttctttttttttctttttttcaatatcagtgcccacaccttagtgagtattgagttttagagctttcgcttgatgggtttgaccaaaagacttcttttgtatccttttgttgtcctatgatgtaaataaaagcctcgatttatgtaaaaaaaaaaaaaaa

SEQ ID NO: 146985 - DNA, 386 bp, Homo sapiens
caccctccccatattatttttcctttaatagaagagcgaggcttgctcaccagtccagctcaggggttttgttgtttttaaagtgaccttcataaagaagagaagagagccaagtttaagcatgagcccatgaggctgcttctaaaaaggcagggacctgtttgcagacaagatgcaagaacacagcctgcagtgattcacagctttgtttcaacccacaaaccagaaaattagctcttgggtctgtgggcccaaagtgaactttaaagcaataaagactggaagcaggtctgggaaggcaatacaaaatgtggagagttgaaaaggaggcagagctggcaggaatgggtagggagagtgtttggtaaatagcacctttctcgtgc

SEQ ID NO: 146986 - DNA, 2861 bp, Homo sapiens
  misc_feature (1)...(2861): n = a,t,c or g
cgcacgcgtgcgtccacgcgtccgagcagagactatggtaacgctgtcttgtggacccgcacttcccacccgagacctctcactgagcccgagccgcgcgcgacaatgagccacgggaagggaaccgacatgctcccggagatcgccgcccccggtgggcttcctctccagcctcctgaggacccggggctgcgtgagcgagcagaggcttaaggtcttcagcggggcgctccaggaggcacatcacagagcactacaaccaccactggtttcccgaaaagccggtccagggggtccgggctaccgctgcattcgcatcaaaccacaaagatgaccccaatcatcagcagggtggccagccaagatgggactcagccaggcccaactggcaccagctgctgccccagcgagctgaccctgtgggtggaccccctatgaggtgtccctaccgcattggggaggacggctccatctgcgtcttgtacgagggaggccccactggccgcctcctgtggggcttccttcaccttgcaaggaaccaagttgcttgctggggccggagcagcccctccaaagaactacgtgatggcagtctccagctaggccctttccggccccccgccctgggcgccgccgtgctcatgctgccgtgacaacaggccaccacatacctcaacctggggaactgtatttttaaatgaagagctatttatatatattatttttttttaagaaaggaggaaaagaacccaaaagttttttttaagaaaaaaaatccttcaagggagctgcttggaagtggcctccccaggtgcctttggagaaaactgttgcgtgcttgagtctgtgagccagtgtctgcctataggagggggagctgttagggggtagacctagccaaggagaagtgggagacgtttggctagcaccccaggaagatgtgagagggagcaagcaaggttagcaactgtgaacagagaggtcgggatttgccctgggggaggaagagaggccaagttcagagctctctgtctcccccagccagacacctgcatccctggctcctctattactcaggggcattcatgctgggacttaaacaatactatgttatcttttcttttatttttctaatgaggtcctggggcagagagtgaaagaggcctcgggtgattcctactgtcctaagctgcttttcttgaaatcatgacttgtttctaattctaccctcagggggcctgtagatgttgctttccagccaggaatctaaagctttgggttttctgccgctgggaggagggacctggaggttattggggttaggatggaagggaactctgcacaaaacctttgctttgctagtgctgctttgtgtgtatgtgtggcaaataatttgggggtgatttgcaatgaaattatcccagccacagagtatccactggggatgttttttggccaaaactcttccttttggaaccacatgaaagtcttgatgctcgctgccatgatccctttgagaggtggctcaaaagctacagggaactccagggtcctttattactgccttcttttcaaaagcacaactctcctcttaaccctcccctcccccttcccttctgggtcgggtcataggagcttaccgtgttttctaggacaaggagttctcagtcactgtgcaatatgccccctggctcccaggagggtctggaggaaaactggctatcagaacctcatgatgccctggtgggcatagggaaccatctctcatgctctccttgggatgatggctggctagtcagccttgcatgtattccttgcctgaatgggagagtgccccatggtctgcaagactacgtggtattcttgtagggccgacactaaataaaagccaaaccttgggcactgttttttctccctggtgctcaagagcacctgtggggaaaggttgctgtctgtctcagtacaatccaaatttgtccgtagacttgtgcaatatatacctgttgtgggttggagaaaagtggaaagctacactgggaagaaactcccttccttcaatttctcagtgacattgatgaggggtcctcaaaagacctcgagtttccccaaacccgaatcaccttaagaaggacagggctagggcatttggccaggatggccaccctcctgctgttgccccttagtgaggaatcttcaccccacttcctctacccccaggttctcctccccacagccagtcccctttcctggatttctaaactgctcaattttgactcaaaggtgctatttacccaaacactctccctaccccatccctgcccagctctgccctcctttcaactctccacattttgtattgcccttcccagaccctgcttcccagtctttattgctttaaaagttccaccttggggcccccacagacccccaagagcctaattttcctggtttgtggggttgaaaaaccaaagcctgtgaaatccacctgccaggctgtgttccttgccatccttgtcctgcaaaacaggtcccctgccctttttaagaagcagcgctcgatggtctcgatgcttaatcactgtctctcttctcgttctttatggatgttcgactttaaaaacgacgaaaacccctgaggctgggactgttggaggcagggcctgtnctgctcctatttaaggtaaaaaattaaaataggtaggtaggtatgtttgtaaggctattctggacaggaaaaggacaaaggttactaattgtatggatagtgttttttatatggaagaatgtacagcttatggacaaatgtacacctttttgttactttaataaaaatgtagtaggataaaaaaaaaaaaaaaaaa

SEQ ID NO: 146987 - DNA, 423 bp, Homo sapiens
  misc_feature (1)...(423): n = a,t,c or g
tgacgtttcggacgagnnnnattgtaatcgaagcctcttaaaatggcagatgacttggacttcgagacaggagatgcaggggcctcagccaccttcccaatgcagtgctcagcattacgtaagaatggctttgtggtgctcaaaggccggccatgtaagatcgtctagatgtctacttcgaagactggcaagcacggccacgccaaggtccatctggttggtattgacatctttactgggaagaaatatgaagatatctgcccgtcaactcataatatggatgtccccaacatcaaaaggaatgacttccagctgattggcatccaggatgggtacctatcactgccccaggaaagcggtggtggcatcagagatcctctgaacctgcagaggccccctccccgagcctggcctggctctggc

SEQ ID NO: 146988 - DNA, 933 bp, Homo sapiens
atggaaattattgaagtaaccgaggagattcatgtgaaggtggttattgaggggccagacgccacccaggaggtggatgaggtcccagaggaccaacagctgcaggaggtggatgaggtcccagaagacctacagctgcagggtgtggatgaagtcccagaggaccaacagctgcaggaggtgaatgaggtcccggaagaccaacagctgcaaaaggtggatgaggtcccggaggaccaccagctgcaggaggtggatgaggttccggaggaccaccagcttcgagaggtggatgaggtcccggaggaccgacagctgcaggaggagctggataaggccccagagaacaatcgagtggaggaggtggttaagttttcaggggactctctagtgcaggaggtggctgagttcccagaggacagtcgagtggaggtggttgaattcccagaggactctccagtggaggagtttgttgaggtcccagaaaaccttcagatggagggagtgtttgagttcccagacaacacccagtgctcagcattacgtaagaatggctttgtggtgctcaaaggctggccatgtaagatcgtggagatgtctgcttcgaagactggcaagcacggccacgccaaggtccatctggttggtattgacatctttactgggaagaaatatgaagatatctgcccgtcaactcataatatggatgtccccaacatcagaaggaatgacttccagctgattggcatccaggatgggtacctatcactgctccaggacagcggggaggtaccagaggaccttcgtctccctgagggagaccttggcaaggagactgagcagaagtacgactgtggagaagagatcctgatcacggtgctgtctgccatgacagaggaggcagctgttgcaatcaaggccatggcaaaataa

SEQ ID NO: 146989 - DNA, 1501 bp, Homo sapiens
ggtcagtggggagtcggcgcctgcgtactaagacccgtgtgcagcagcggcggcggcggtagaggcggcggcggcggcggcagcgggctcggaggcagcggttgggctcgcggcgagcggcacggggtcgagtcagtgcgttcgcgcgagttggaatcgaagcctcttaaaatcggcaagatgacttggacttcgagacaggagatgcaaggggcctcagccaccttcccaatgccagtgctcagcattacgtaagaatggctttgtggtgctcaaaggccggccatgtaagatcgtcgagatgtctacttcgaagactgggcaagcacggccacgccaaaggtccatctggttggtattgacatctttactgggaaggaaatatgaaagatatctgcccgtcaactcatgattatggatgttccccaacatcaaaaggaattgacttccagctgattggcatccagggatggggtaccctatcacttgctccagggacagcggggaggtacgagaggaccttccgtctcccctgagggagacctttggcaaggagattgagcagaagtacgactgtggagaagagatcctgatcccgggtgctgtctgccaatgacagaggaggcagcttgttgcaatcaaggcccatggcaaaataactggctccccaggggtggcggtggtggcaagcaagtgatccttctgaacctgcagaggccccctccccgagcctgggcctgggctctggccgggtcctaagctggactcctccgtacacaatttatttgaccgttttattttggttttccccaccccctcaatctgttcggggagccccttgcccttcacctagcttccctttgccagggagcgagcagaagctgtgcgccttggtgaagctgccctcctcttctcccctcacactacagccctggagggggagaagggggtgggtgcttgcttgtgggtttagtctttttttttttttttttttttttttttaattcaatcgggaatcaaaaagcgggggattttgagcaaagggcccttgtcccctccccagtaagccttgtacaggccccctgtggcttattcccttttaccctggagcaccaaccccaaacagactgggggaccagcccccctcgcctggcctgtggctctcccccaaaaccctttagatggggagggaagaggaggagaggggaggggacctgccccctcctcaggcatctgggagggccctgcccccatgggctttacccttccctgcgggctgctctccccgacacatttgttaaaatcaaacctgaataaaactacaagtttaatatgaaaaaaaaaaaaaaagaaagaaagacgtgtaaaatgccaagaactctaggaaacagggacaaaaacacttcaaagagaaagttcatgcacttgtttctgaccacccagggcacccttcagcacacgctgtctggagtggcctgaagcaaggagtgtcttggtcgac

SEQ ID NO: 146990 - DNA, 1805 bp, Homo sapiens
  misc_feature (1)...(1805): n = a,t,c or g
tagtcttgctgtgttgcccaggctggacctgaactcctgggcttgagcaagtcttcccctcagcctctggagtagctgggcctacagtgtgtgctgccacacccagctaatacagtctttctactcccgctctctattccccagtttcttgcccagaggcaacccttgccagtctgtttatccctccagatacagtctctgatagtaaacttttctttctcttacacaaatgatagtagtcacatacactacacacactgtgccacgtttaaaaagaaaaaaaacaattctcggctgggcgcggtgggcattgcctggtaaattcccaggcactttggggagggccaaggtggggtgaatcacctgaagttcaggagttcggggatcagcttgggccgacatgggtgaaggccccatntgttattaaaaanttcaaaanaaaaatgnaggccgggcattggttggttgggaacgtggcacagtgtgtgtagtgtatgtgactactatcatttgtgtaagagaaagaaaagtttactatcagagactgtatctggagggataaacagactggcaagggttgcctctgggcaagaaactggggaatagagagcgggagtagaaagactgtattagctgggtgtggcagcacacactgtatgcccagctactccagaggctgaggggaagacttgctcaagcccaggagttcaggtccagcctgggcaacacagcaagactaaataaaaaacaactttcttttccaagaataccctttttgtaacttttgaattccgtattttttaatggtctatggtctacaaacactcatgtgcaaacacattacacgcagaataagggatcacctgcacgaagctatgaactatttcctcatcccttctagccccttcctagaggcgaaccctccgcccccaaccccaggcactatctgtcctgcttgcacccacctccacccagggctggccaacaattagcctgtttcctctccattccaccccttttccccaaccttcccatcccaccacagaaaaaggattactgggtcctgctttccttaggcgcccctaaatttaaagggtatctggttctatgttgcatgcttcaggaaccctgtaggaaacaaccaggcaaatccactggttggatacgcaattacccctcttggatgcatctggcaacaagcactccccagcttcgaaggggcagcaaagaagttcacaattacaagaccatggggtcacgaccacagaagcgatatgaaacaggtcccgggacacagggaggggcagaaagaattcttttgagtaagcctggaaggtggaggggctcaccaggccaagagcaggtgctaggccttcagtaggaacagtgcggagccaaggcacagaggccaaggggagcgagctgtagctgtgatggtgggcagctggaaggccgcacgtataatcaacaggggacccacatcaaaggggagatcttagccaaaaccagcacataggggccttcaattccatgaagaatttagatgttatccagtgagccatgggaagccattgaagcgttttatctagggtagttaagtgggcccagattttcattttaagaaatcattctatagaaggaatctcaaacctcacctgactgcttttctccccccagggttctaagctttacttaaaagcccatataaaaaagtatagatttgcttcctacagacttgaaccatgccctaaggatttaattctaaggggcctgtgaagtttacctactttactcatttttctaaa

SEQ ID NO: 146991 - DNA, 433 bp, Homo sapiens
  misc_feature (1)...(433): n = a,t,c or g
ctatccctctgaggtttgcaaattaggatggagaagccccttagaaatgggcacgtgaactgagctctccttttataagagtggannnnnnnnnnnnnnnngnnnnnnnnnnnnnnnnnnnnnnnnnnnnnnnnnnnnnnnnnnnnnnnnnnnnnnnnnnnnnnnnnnnnnnnnnnnnnnnnnnnnnnnnnnnnnnnnnnnnnnnnnnnnnnnnnnnnnnnnnnnnnnnnnnnnnnnnnnnnnnnnnatgagtggaattttagtgttaaatctcttcctgactctgggttcagtaggtccctcctcttctgttaccctcctggttctctctgttcaccaactacctgcatgtgccaaactagaaaaaggaaataatttacacccctgccccaacagctccttccctcctagggacttctgtgtccacccccca

SEQ ID NO: 146992 - DNA, 1147 bp, Homo sapiens
atgggccaagttgggcccccagccttgctgcctctctacttccagtggtatattttctattttgttatccagcgaaagaagtgggtggacttggcctggatgattaccttctacgtccgcttcttcctcacttatgtgccactattggggctgaaagccttcctgggccttttcttcatagtcaggttcctggaaagcaactggtttgtgtgggtgacacagatgaaccatattcccatgcacattgatcatgaccggaacatggactgggtttccacccagctccaggccacatgcaatgtccacaagtctgccttcaatgactggttcagtggacacctcaacttccagattgagcaccatctttttcccacgatgcctcgacacaattaccacaaagtggctcccctggtgcagtccttgtgtgccaagcatggcatagagtaccagtccaagcccctgctgtcagccttcgccgacatcatccacatgttctccaggctcatccgtgttgtagcaaggggtgcctctgccaactggtggaatcatcgccacttccagcaccacgccaagcctaacatcttccacaaggatcccgatgtgaacatgctgcacgtgtttgttctgggcgaatggcagcccatcgagaaagagctgacagatgagttccgggagctgcgggccacagtggagcggatggggctcatgaaggccaaccatgtcttcttcctgctgtacctgctgcacatcttgctgctggatggtgcagcctggctcaccctttgggtctttgggacgtcctttttgcccttcctcctctgtgcggtgctgctcagtgcagttcaggcccaggctggctggctgcagcatgactttgggcacctgtcggtcttcagcacctcaaagtggaaccatctgctacatcattttgtgattggccacctgaagggggcccccgccagttggtggaaccacatgcacttccagcaccatgccaagcccaacttgcttccgcaaagacccagacatcaacatgcatcccttcttctttgccttggggaagatcctctctgtggaggcacctcattttgcaaaggatccagcggatgaccagaaggatccaaatgatgagatagcctatccttga

SEQ ID NO: 146993 - DNA, 2084 bp, Homo sapiens
  misc_feature (1)...(2084): n = a,t,c or g
atgggaacgcgcgctgcgaggcccgccggtctgccctgcggtgctgaaaacccggcgcgcaggcggctggctctgggcgcgcgccagcaaatccactcctggagcccgcggaccccgagcacgcgcctgacagcccctgctggcccggcgcgcggcgtcgccaggccagctatggcccccgacccggtggccgccgagaccgcggctcagggacctaccccgcgctacttcacctgggacgaggtggcccagcgctcagggtgcgaggagcggtggctagtgatcgacccgtaaggtgtacaacaatcaacgagttcacccgccggcatccagggggctcccgggtcatcagccactacgccgggcaggatgccacggatccctttgtggccttccacatcaacaagggccttgtgaagaagtatatgaactctctcctgattggagaactgtctccagagcagcccagctttgagcccaccaagaataaagagctgacagatgagttccgggagctgcgggccacagtggagcggatggggctcatgaaggccaaccatgtcttcttcctgctgtacctgctgcacatcttgctgctggatggtgcagcctggctcaccctttgggtctttgggacgtcctttttgcccttcctcctctgtgcggtgctgctcagtgcagttcaaggcccagagctggctggctgcagcatgactttgggcgacctgtcggtcttcagcacctcgaaagtggaaccatctgctacgatcattttgtgattggccacctgaagggggcccccgccagttggcggaaccacatgcacttccagcaccatgccaagcccaactgcttccgcaaagacccagacatcaacatgcatcccttcttctttgccttggggaagatcctctctgtggagcttgggaaaccggaagaaaaaattttatgccgtacaaccaccagcacaaatacttcttcctaattgggcccccagccttgctgcctctctacttccagtggtatattttctattttgttatccagcgaaagaagtgggtggacttggcctggatgattaccttctacgtccgcttcttcctcacttatgtgccactattggggctgaaagccttcctggggccttttcttcatagtcaggttcctgggaaagcaactggtttgtgtgggtgacacagatgaaccatattcccatgcacattgatcatgaccggaacatgggactggggtttccacccagctccagggncacatgcaatgtccacaagtcttgcctttcaatgactgggtttcagtgggacaacttcaacttccagattgagcaccatctttttcccacgatgcctcgacacaattaccacaaagtggcctcccctggtgcagtccttgtgtgccaagcatggcatagagtaccagtccaagcccctgctgtcagccttcgccggacatcatccactcactaaaggagtcaggggcagctctggctagatgcctatcttcaccaataacaacagccaccctgcccagtctggaagaaggaggagggaagactttggagccaaggcagaggggagctttagggacaatgcccactatagtttaatactcagagggggttgggtttggggacataaagcctctgactcaaactcctcccttttatcttcctagcccacagttcctaaagaccccaaagtggggggtggaacacagaaagtcccctaggagggaaggagctgttggggcaggggtgtaaaattatttcctttttctagtttgggcacatggccaggtagttggtgaacagaagagaaccagggagggtaacagaaagaggagggacctactgaacccagagtcaggaagagatttaacacttaaaattccacttcatgccgggcgtggtggcacgcgcctgtaatcccagctacccaggaggctgaggcaggagaatcgcttgaaccggggaggtggaggttgcagtgagctgagatcacgccattgtactccagcctgggcgacagagcacgactccatttcaaaaaaaaaaaaaaaagtcgagc

SEQ ID NO: 146994 - DNA, 3090 bp, Homo sapiens
tcagtggttctgggagttggtggattctggcttggcccctgtgagccccctggtggtggtatcatccggagaggcttctcgggtaccccattgctgccacgctgccgagccgccttgtgttgcctggagaggtcgagcccagtacccagtggtgttcaccattgaggcttgagccccagttccaccttctaccgcttcagcacctccggcgcgacagctcctcgctgtcgcctccactcccggccctgggccggacccggggcagacgctcctcggcgcccgctcacggggacgagtcctgctccctgcttcccagacccctttctctggcgcatggagaacctgggggtcggcgaagggcagaggcttgcagcaggttgagtcgctctcgcggccgccacagcatgacagagccccgaagcacctcggccagcgccgcccatgccgcggctttctgctgcttctgctgctgcaggcctccgcggccgcggcccttggccccacctcctccttgaccatgtcgatgatctcgtcggggatgcgcaggtattgatggtgctgccgcggatgtagcactcgggcatccgccagaacttgtcccgtcccggacgtgcagatgacttctcgcaggttaatgttcatccagttgtcgcagtcaccaggtgtccattgtacgtctccccatttttcagctccaccaacatggtgccggcggggaccgggctcgccggccacttcgccgccgccgctgcacacgctcccggcggtcgtcgccgcgccgcgcgcactaaggcgagcggctgaccgggggcgaggccgggggcttgacaggggcgtggcctgcgcggccgagaggctgcagcggcagcagctgtcgcgccagtcgcaacaaagcaggtccgaggcacagcccgatcccgccatggagcagccgaggaagcggtggtagtgacgggtacgctggctgatgggggcagctcttaaaaaacgatgtcggatccacatctcttcctggatggtaacaccggagcacacatctgttgagtgtttgtaccccagcgctctgaatcccccaacaacccatgcatagtacgtgtagttattcttgtgcccacttaacgaataggaaacttgtaggaaggggtacagtgcagcctcgctgtcatctctcgcagctctcaggtggactggggcactggctgtgtttctcttccgaggaggtgcaggtgggtttaagggctggggagctccggggctcggggccatctggggtgtctcttgcaaagctgggtgaggaggacccgggtcacagaacttggtaacatcacggacaattgctgccacagtgagtctagacagaccccccagagagcgcattatccccatgctgtcatctggggccatgacactcccactctcctctcttccaggagctgaaaagctaggccttggcgacagcgtggacctgcatgtgtacgagattcggttgagtaccaaacagtccagagactcatccccgcccacgttgggcctggatgtgtcggtgaccatctgcaggatgccggcaggtagggccttacccttgttcatcccactggtgctcggctgctggctggccacaaacatgttctcatagtcgggagtggaggggcaggatggcacggccattggggcttgggggcgctccggctgccgtaccgtggctgcaagcctaaacgggcttgggcccatccttttgggtcccactgccaccttttgcctctgcgatgctggaaaagcgacggcgcccagaggctgcgtctggcccacctggacacgggggccgcagcggccacggccagcaccgtccgagcgctgctggggtcgctggcgttcctctggctctgcacccagcgactcgggggaagaggaactggtgttcctggaggtggtggcaaaggacaatctgtcattcacggatcccatggacacctcgtccaggttctcaaacttggactcatccggtgacagaatctcacagccatgaccacagacccgatgagcaaaaggacaccagcaaacacacgaccaccaccacactcgggttcctgtgtaactacggggcccagtgtcacctggcatcagccggccccgcgccaaggcgcgtctagggggcgctcgctgcgcgcagatgtgcgggccgctctcagacacccgctctctgctccctccaacaagggaggagctgctcgcgcagcaggctgccgtggacgccagctccgtgttctgactcttgagggtcttcactttctttccaggcgcgagatgcgctccagcttgcgcttgcggcacttgtgatgctgcgatgcggttgcgcagccgcttgcgctccgccttgatgcgctcctgcttgtccatgtcgatgggcgacaacggtggtgctctcgccgaagcttggattttgagggatgcataggaatcctccagcatcgataagggctttggggagggtggttctgggaagaggaagtagggatattgagactgctgggggtcagcagaaacaagggaatggggttcaaatcccagtacagaaatcctatttcctctgaatggcttgggccagacgctggtctggatcgtcggagccacggccactacccagtgaccaattcctgtccctttttgtgtgtctgtgagcgctggagaggcaggcacttctgtgggtaaacgggagcgcgtgtttgcacacacgcgggcttgcccttgctgagttgggtagctctgcggggtgagacacccaatgtcactgcctgaggctttaggggctatccgcagtcgttccagcagcggggtacacttttgctgtgtgggcgctatgttgagtgtcgctgcgaatgtgtgtggctgggtgtacaacaagtgggtggccggctccatttgaggtgagtgaacgtgtgtgtgcacgcgccgtgtgcagccgcgatcagctgtgcgtccctgggtggccgtccgggatctgacccgcgagtgtgtagccgcgcccccaccccccgcggcgggcactgccgtgcgcgctccggcggcgggacccacccgcgcgcccgccat

SEQ ID NO: 146995 - DNA, 1540 bp, Homo sapiens
aagcttggcacgagggaattccctgctctgcttttctgctcgttgctggcatagaaacatctagaacagaaagtatccactctggggcagatgggagagctggaaaagtagattcaagatgccttttagtcttggaagtttcttccaggaagcaagaccagctggtatgtttacacctgcactccagtgccctggggaggtgaccaggtggagggggatggctcatggaaatctgtcccgcacagctggcccccttttggctgccactgtctagactgttggcctttgacctctctgccttcccttgtggcggtctgaacctagaacggtcccttttgggagacagcttggacaaaagccctattctccgcagccccagcctctattcttgagggcttttggggagcttgcgttgacggccagcatggggtgctgatcatggtcaaggagggcaggtctttgccaggttgccccatgcagccacccatcctcagcatcctaacttgagggggcaggagagggctttgtttttataatatggattaaatttcccttccctgggcacaagtgcctcatgagggcccggggctgctggatgggagggaaagcatccccgtttttgcagtgaggaggccggccgacggctgggggttccacttagacccttgggcagaatggctgtttgaggggcaggcgttgcccagttgcccacgtctgggaaagttaatttcccgggttgaacgttgaacatacctgctgagagactctgtcccctggtttccaggacagttgtcacaagctgagtggggggggactcccaggacttgagggacccagtcccaccccaaactgctccccctcccccaaattccctttctcctcctgctctttctccccgctgtgcctcccccagttacccacagaagtgcctgcctctccagtgctcacagaacacacaaaaagggacaggaattggtcactgggtagtggccgtggctcctgacgatccagaccagcgtctggcccaagccattcagaggtggggtctggggcctgggggttttgtgtcgtgacactttgtctcaaggagattccacatagggatttgaattaggctttctgcttgccaaggcctgtggcaatctgaaacctggctgagggccgggcaaacctcccctgaagcctttggaagccgagttcactctctgcctgcccaaggggatgcaccggcttggttctgggggctcctctaacatctcagggtttttatcttgtcttaaatttcatttcttaggaaaaaacccttccctgccaaaggtgactgtgttttctgccgccgaaggagggcccggtccctccaggctcagtggtggcttctccctgacccccgccctagaacttttgccagtgccttttctgaaactcctgtgtcccgggccccccaggcggagaaggatatgccggattctgcctggggctgggctctaggagaccccaaatttgacaccacagaaagcaaataaaacaaatagaaatacga

SEQ ID NO: 146996 - DNA, 461 bp, Homo sapiens
ttttttttcagttgtttgtttcctttaattaacatctaaaatagattatacatcttctataattataatatggaaatgtatatgagcaaaatatataaattttttggtgactgcttagggaagaatgatgtcagtgaagttcatccaaggtcttaagcagcagcatctatgcagccagggcgtggtcagcgtttggggacagaggtaaatatcccgcaatccatgcatctctttgatttcttcttttagtgcctgaaatgtcagtgacttttatagctgtagctcgtggaaaacttttctttgagaatttgggtcactctgagctccccctcagtcttgagtggcaaacatccgatggtgaagtggaagcccgcggatcccgcggaggagaggcgctgccgcggccgggctccatgcagccatgcccggccgacgtgacccgccgcccgcccacgcgtccg

SEQ ID NO: 146997 - DNA, 568 bp, Homo sapiens
  misc_feature (1)...(568): n = a,t,c or g
ggcacgagagtgacctcgggcggcgggtcacgtcggccgggcatggctgcatggagcccggccgcggcagcgcctctcctccgcgggatccgcgggcttccacttcaccatcggatgtttgccactcagactgagggggagctcagagtgacccaaaattctcaaaagaaaagtttccccgaggctacagcttataaaagtcactgacatttcaggaggttgtggggcggatgtatgaaattaaaattgaatcagaagaatttaaggagaagagaactgtccagcagcaccagatggngtaatcaggcactaaaagaagaaatcaaagagatgcatggtttgcggatatttacctctgtccccaaacgctgaccacgccctggctgcatagatgctgctgctttaagaccttgggatggaacttcactgacatcattcttccctaagcagtcaccaaaaaatttatatattttgctcatatacatttccatattataattatagaagatgtataatctatttagatgttaattaaaggaaacaaacaactgaaaaaaaaaaaaaaaaa

SEQ ID NO: 146998 - DNA, 1110 bp, Homo sapiens
atgagggatattttgcagaagtatgtgtcagatgatgaaattttcttcaaacaagaagaaataaggatccattcacatggattctcacagaggctaaaaaacttgcctaaggttgcacacctagcaggtggtaacattcctggacaatgtcttcaccagtccttgaggaaaacaagagcaatggcactcaataatactgtcagctgccccagaaatgttgtgtacaatattggtgggttcttggtctcgctgacttcaagaatgaagccgcggaccctcgtgttgagtgttacagttcttaaagatggtgtgtccggagtctgtgccttcagatgttcagatgtgtccagagtttcttccttctggtgggttcgtggtctcgctgacttcaggagtgaagctgcagaccttcggggactgaagctgcagacctttgtggtgagtgttacacctcataaaggcagtgtggacccaaagagtgaccagcagcgagatttattgcaaagagtgaaagaacaaaacttccgcaatgtgaaaggggacccagcagccttagcccatgaggacgatgtgaacgggactgagtcaggagctccccggaagcatggagaccgtgaactggatgacgttgttatcaccaacccccacattgaggccattctggagaacaaagactggatcgaagatgcctcgggtctcatgtcccactgcattgccatcttgaagatttgtcacactctgacagagaagcttgttgccatgacaatgggctctggggccaagatgaagacttcagccattgtcagcgacatgattgtggtggccaagtggaacagccccagggtagatgatgttgtgaagtcgatgtaccctccgttggaccccaagctcctggacacagggacgactaccctgctcctgtctgtcagtcgcctggtgctggtgacaaggaatgcctgccatctgacggggggcctggagtggattgaccagtcactatcagctgctgaggagcatttggaagtccttcgagaagtagccctagcttttgagccagataaaggcctcccaggccctgaaggcttcctgcaggagcagtctgcaatttag

SEQ ID NO: 146999 - DNA, 1233 bp, Homo sapiens; identical to SEQ ID NO: 138284

SEQ ID NO: 147000 - DNA, 1061 bp, Homo sapiens
atggtgtgtccggagtctgtgccttcagatgttcagatgtgtccagagtttcttccttctggtgggttcgtggtctcgctgacttcaggagtgaagctgcagaccttcggggtgagtgttacagctcttaaaggtggtgcatctggagttgtttgtttctcttgtctgaagttgttcgtccctcccggtgggttcgtggtctcgctggcttcaggactgaagctgcagacctttgtggtgagtgttacacctcataagggcagtgtggacccaaagagtgaccagcagcgagatttattgcaaagagtgaaagaacaaaacttccgcaatgtgaaaggggacccagcagccttagcccatgaggacgatgtgaacgggactgagtcaggagctccccggaagcatggagaccgtgaactggatgacgttgttatcaccaacccccacattgaggccattctggagaacaaagactggatcgaagatgcctcgggtctcatgtcccactgcattgccatcttgaagatttgtcacactctgacagagaagcttgttgccatgacaatgggctctggggccaagatgaagacttcagccattgtcagcgacatgattgtggtggccaagtggaacagccccagggtagatgatgttgtgaagtcgatgtaccctccgttggaccccaagctcctggacacagggacgactaccctgctcctgtctgtcagtcgcctggtgctggtgacaaggaatgcctgccatctgacggggggcctggagtggattgaccagtcactatcagctgctgaggagcatttggaagtccttcgagaagtagccctagcttttgagccagataaaggcctcccaggccctgaaggcttcctgcaggagcagtctgcaatttagcgcctacagaccagcagctagtcctgaagacccctgccgccatcactgggtggctcagattagccttccactttttcctgtagaattagttgttctccacggctcaagagttcagctgtgtgtgcatagtaaagcaggagatctctgtcaaa

SEQ ID NO: 147001 - DNA, 1637 bp, Homo sapiens
ggcaggcccgcgcccgcgcccggactttgccatcggcggggcagtcgcgggatgcgcccgggagccacagcctgaggccctcaggtctctgcaggtgtcgtggaggaacctagcacctgccatcctcttccccaatttgccacttccagcagctttagcccatgaggaggatgtgaccgggactgagtcaggagccctctggaagcatggagactgtggtgattgttgccataggtgtcctggccaccatctttctggcttcgtttgcagccttggtgctggtttgcaggcagcgctaactgccgggccgcgagacctggctgcagcgctatgattctaagcccattgtgggacctcattggtgccatgggagacccagtctgagccctcttgagttagaactgggacgatgtcgttatcaccaacccccacattgaggccattctgggagaatggaagactggatcgaagatgcctcgggtctcatgtcccacttgcattgccatccttgaagatttgtcacactctgacagaagaagcttgtttgccatgacaatggggctctgggggccaagatgaagacttcagccagtgtcagcgacatcattgtggtggccaagcggatcagccccagggtggatgatgttgtgaagtcgatgtaccctccgttggaccccaaactcctgggacgcacggacggactgccctgctcctgtctgtcaagtcacctggtgctggtgacaaggaatgcctgccatcttgacgggaaggcctggactggatttgaccagtctctgtccggctgctgaggagcatttggaagtccttcgagaagcagccctaagcttctgagccagataaaggcctcccaggcccttgaagctttcctgcaggagccagttctgcaatttagtgcctacaggccagcagcttagccatgaaaggcccctgcccccaatccctggatggctcagcttagccttctacttttccctatagagttagttgttctccacggctggagagttcagctgtgtgtgcatagtaaagcaggagatccccgttcagttttatggcctcttttgcagttgcaaactgtgggctggtgagtgggcagtctaatactacagtttaggggagatggccattcactctctggcaagagggagttattggaaaactggtggaactggtcagcctttatttagctcaccttagtgttttcaagaaaattgagccaccgtctaagaaatcaagaggttttcacattaaaattagaaatttctgggcctctctccaattggtcagaaatgtgttggcaattctgatctgcattttcaggagagggcccaaccaattgaaactaagtaggggtttcttcttttggcaagacttgtactctctcacctggcctgtttcatttatttgtattatctgcctggtccctgaggggtttgggtctctcctcatcccttgcaggtttgggtttgaagctgaggaactacaaagttgatgatttcttttttatctttatgcctgcaattttaccgagcgtgagcgaggggggggatagtaaatttatacttatgtttcaaaaaaaaatcatcaactttgtagttcctcagcttcagtcgacg

SEQ ID NO: 147002 - DNA, 485 bp, Homo sapiens
ggcacgaggggggaaaggaaggctggcttggcgagagggcaggtttgcgggctttcgcccccttttccaaagaccaacaaagagtccttccccaactcccaactcaaccccttttggaactatgtgtggcgcatccttgtcgctcgtgtccttctcatgcccggcgacgcgtctttgtggtaacgccctgctgccatctcttttcttctctatgcgaggatttggactggcagtgagaataagagacaacgattcacgtctactttctaggatgacttccatgtgctccatctcgcgcgtccctgagcatgttgaatttccaaatcctaaataagccgcgcggtgtagtttgtattatgttgcgtttctctttctgctttcctcgccctttctccatcatcctttaggctctacagagtgaaggtttaaatccaaggtcatggcaaaacatctgaagttcatcgccaggactgtgatggcacagg

SEQ ID NO: 147003 - DNA, 456 bp, Homo sapiens
  misc_feature (1)...(456): n = a,t,c or g
acaaacatggnaaagggctcgccaagantcaacttccttgaatgcgaaaaaaaatcggggcaaaacccgtgggcagggctgctgaggccctggtgggtgggacaccccagtgcgaaacccctcatcccagttttctcctccatctcttttcctttgtacaatccccatttccctattnccattctctgcaataaactcaaatcacatgtctgcaagaaggcctccaaatatacaaacaatcccattagtcagcagtggaccctgtcttttattaagtgaaagaagaaactgagtctgaaagtactctaggagtagaatggtatttgccagggactggaggagggggcagtgaggagttattgtttaatgggtacagagtttcagtttgggcagatgaaaaagttcaggagtttgagaccagcttggtccgatgtggtgaaaccccatctctactaa

SEQ ID NO: 147004 - DNA, 1639 bp, Homo sapiens
  misc_feature (1)...(1639): n = a,t,c or g
cgccccctgaacccctggnnttagtagacactagtccagagcggtggaattcgtgaggagttgtgcagggtatggagaaaggaaggctggcttggcgagagggcaggtttgcgggctttcgcccccttttccaaagaccaacaaagagtccttccccaactcccaactcaaccccttttggaaactatgtgtgggggttgggaccctgtggcgcatccttgtcgctcggtgtccttctcatgcccggcgacgcgtctttgtggtaacgccctgctgccatctcttttcttctctatgcgaggatttggactggcagtgagaataagagacaacgattcacgtctactttctagggatgacttccatgtgctccatctcgcgcgtccctgagcatgttgaatttccaaatcctaaataaagccgcgcgttgttagttttgtatttatgttggcgtttctcttttctgcttttcctcggcccttttctccatcatccttttaggctcttacagagtgaaggttttaaatccaaggtccatgggcaaaaacttctgaagttccatcgcccccggactgtgatggtaccaggaagggaaacgtggaaaccgccatacaggacccctaaacagaatcctcacctatggatgggcctcattgaggacaattaagcatcggcggttattatgagaagcccatgccgccggcgagcagagggaaagctatgaaaaggtgcccggcgggatctacaacatggaaatgggctccgcaagattcaactttcttgatgcggaaagaatcgggcagaatccgtgggcagggcttgcttgaggccctgtggggtgggacaccaaggtgccgaaacccctcatccaagttttctcctccatctcttttctttggttaacaaattcccattttccctaattaacccatttctcttgcaataaactccaaatcacatggtctgcaagaaggcctccaaatatacaaacaatcccattagtcagcagtggaccctgtcttttattaagtgaaagaagaaactgagtctgaaagtactctaggagtagaatggtatttgccagggactggaggagggggcagtgaggagttattgtttaatgggtacaaagtttcaagtttgggcaaaatgcaaaagttcaggagacgatgcccctggcatgggtggctcacgcctgttatccccaaaactttgggaggctgagccgggcgggctcacttgagccccaggagtttgagcccagcttggccaatgtggtgaaacccccatctctactaaaaatacaaaaaaaaaattggccgggccgtggtggtgcacgcctgtaatcccagatacttgggtggctgaggcaggagaattgcttgaactggggaggcagaggttgcagtgagccaagatcatgccactgcactccaacctgggcgacagagtgagactccatctcaaaacgaaaaaaacggagatggatgatgaatggtgatggcgggttgctcaaaaagttgaatgtacttaatgccacttgaactatacccttaaatggtcacgatggtaaattttgtgttttacttacaataaaaacttttttgaaagtcaaaaaaaaaaaaaaaaaaaaaaaaaa

SEQ ID NO: 147005 - DNA, 483 bp, Homo sapiens
cagacactacacatctgtcctccacagaggctttttgtgtgttttatcatctaaaaacacagaatttcaaagactcggcatgttgtccattgctagaacaaccgaatatagtacacgaccttcctgcagcagttctaagctactgtcaagtatggaaaatcccagcaattctgtacttgtgttatactgatgtgatgaaattagacctaatcacagtggaagcttttaagcctatactttctaccagaagcttgaagggtttggttaagaatattccccaaagcactgagatactaaagaaattgatgacaacaaatgagattcagagtaacatttatacatgatcttaaacattgttttgtagtgtatattacttgtccattcctttaaggggagcagcctgcactcttttgtagattacttttgggggatatattttgagaatgatgaaacggaataaaattgtaaaaaactaaaaaaaaa

SEQ ID NO: 147006 - DNA, 1362 bp, Homo sapiens
atggcggccacgttcttcggagaggtggtgaaggcgccgtgccgagctgggactgaggacgaagaggaggaggaggaggggcggagggagacgcccgaggacagggaggtgaggcaccgggataagggcagcgcgctcaccgcagctggaaggtgcgcgggcctggcagccgcgacggcgcctaaggccggggctccgcggtcttccgagtggcccccgcggttgccgccgctccttggctctgcttgggccctgggtctccgtgaagccgcggcgtccagcggcgccagccccagggacttatcttccgaagaggaaaggtttatgaaacctaaagtaacaatgatagcttggaatcaaaatgatagcattgttgtcacagctgtgaatgatcatgtcctcaaagtgtggaattcttacactggacaactgcttcataacttaatgggacatgctgatgaagtatttgttctggagacacatccctttgattccagaattatgttatctgcaggacatgatggcagcatatttatatgggatattacaaaaggtaccaagatgaaacattattttaatatgattgaaggacaaggacatggagctgtgtttgactgtaagttttcacaggatggacagcattttgcctgtacagattctcatgggcaccttctgatatttggttttggatgcagcaaaccatatgaaaagattcctgatcagatgttcttccatactgactatcgaccacttattagagattctaataattatgtcttagatgagcaaactcagcaggctcctcatcttatgcctccaccattcttggtagatgtagatggaaatcctcatccaaccaagtatcagagattagtaccaggccgagaaaattctgcagatgaacatttgattccacagctgggctatgtggcaacaagtgatggagaggtgattgaacaaattataagcctgcaaaccaatgataatgatgaacgcagcccagaatcgagtattcttgatggaatgataagacagttgcagcagcagcaagatcagagaatgggagcagatcaggatactattccaagaggactttcaaatggtgaagaaacaccccggagaggttttagaaggctgagcttagacattcagtcccctccaaatattggtctgcgtcgtagtggacaagttgaaggtgttcgtcagatgcatcaaaacgctccacgcagtcagattgctacagaacgtgacctgcaggcttggaaacgaagagtggttgtaccagagaatattccccaaagcactgagatactaaagaaattgatgacaacaaatgagattcagagtaacatttatacatga

SEQ ID NO: 147007 - DNA, 1625 bp, Homo sapiens
ctcgcgcaagcggcgtgcggtcccgcggcgctgcagttgtgtccagccggtcacggggcggctatggcggccacgttcttcggagaggtggtgaaggcgccgtgccgatgctgggactgaggacgaagaggaggaggaggaggggcggagggagacgcccgaggacagggaggtgcgtctgcagctggcgcggaagagggaagtgcggctccttcgaagacaaacaaaaacatctttggaagtttctttgctagaaaaatatccgtgctccaagtttataattgctataggaaataatgcagtagcatttctgtcatcatttgttatgaattcaggagtctgggaggaagttggttgtgctaaactctggaatgaatggtgtagaacaacagacactacacatctgtcctccacagaggctttttgtgtgttttatcatctaaaatccaatccctcggtttttctctgtcagtgcagttgctatgttgcagaagatcaacagtatcagtggctggaaaaggttttttggctcttgtccaaggaagaacatgcagataactattctcacatgtcgacattgtacccgatattaaaacctcagaatccaccggcagccttccttctcctttcctgagagccctaaaaacccagaattttcaaagactcggcgtgttgtccattgctagaacaaccgaatatagtacacgaccttcctgcagcagttctaagctactgtcaagtatggaaaatcccggcaattctgtacttgtgttatactgatgtgataggattagactttattcacagtggaagcttttaagcctatactttcctacagaaagcttgaagggtttggtttaagaatattccccaaagcactgagatactaaatgaaattgatgacaacaaatgagattcagagtaacatttatacatgatcttaaacattgttttggtagtgtatattacttgtccattccctttaagggggaagcagcctgcactcctttttgtagattacttttagttttttacaattttattccgtttcatcattctcaaaatatatcccccaaaagtaatctacaaaagagtgcaggctgctccccttaaaggaatggacaagtaatatacactacaaaacaatgtttaagatcatgtataaatgttactctgaatctcatttgttgtcatcaatttctttagtatctcagtgctttggggaatattctgaaaggagagaaaaaagtgaatacagtgagaccccagggattcaggcagaggcaacacccctccctccacgaccaacaatctccacactcgagacttaaaaacagccatgggacaggcgtggcctttactctccttctcaacgaaaaggcaagtgggaaagtcagttcaacaggccctttccctgccacactcgccgatgatctcctggcctccgatggtctcctggcctctggaggaagtctatgctctaacccgcccgaccttccccacaagatgtcttcctcccctctccaccaacaccacactcctcacggctctcctcacactttcccactctgctcacactgcttccctctgcacacttctacccaagattcatccatctttcaaat

SEQ ID NO: 147008 - DNA, 385 bp, Homo sapiens
atgtgtgacttcatgaacctcagcctggcggactgccttctggtcaacctggcctacaagtcctccgtataaaggctggtggtgggagaatgctatcgctgccctgtttcggagacacattcccgtcagctggctgatccgcgctaccctgagtgagtcggaaaacttcgaagcagctgttggcaagttggccaagactccccttattgctgatgtttattacattgttggtggcacgtccccccgggagggggtggtcatcacgaggaacagagatggcccagcagacatttggcctctagatcctttgaatggagcgtggttccgagttgagacaaattacgaccactggaagccagcacccaaggaagatgaccggagaaca

SEQ ID NO: 147009 - DNA, 1949 bp, Homo sapiens
  misc_feature (1)...(1949): n = a,t,c or g
agcggccgctggagcccgagccatgcggaccgcggaccgggaggcgcgcccggggcttccgtccctgctgctgctgctgctggccggggcganggctgtcagccgcctcgcccccagcagcgccgcgcttcaacgtgagcctggactcggtccccgagctgcgctggctgcccgtgctgcggcactacgacttggacttggtgcgcgccgcgatggcgcaagtcatcggggacagagtccccaagtgggtgcacgtgttaatcggaaaagtggtcctggagctggagcgcttcctgccccagcccttcaccggcgagatccgcggcatgtgtgacttcatgaacctcagcctggcggactgccttctggtcaacctggcctacgagtcctccgtgttctgcaccagtattgtggctcaagactccagaggccacatttaccatggtcggaatttggattatccttttgggaatgtcttacgcaagctgacagtggatgtgcaattcttaaagaatggggcagattgcattcacaggaactacttttattggctatgtaggattatggactggcccagagcccacacaagtttacagtttctggtgatgaacgagataaaggctggtggtgggagaatgctatcgctgccctgtttcggagacacattcccgtcagctggctgatccgcgctaccctgagtgagtcggaaaacttcgaagcagctgttggcaagttggccaagactccccttatttgctgatgttaattacattgctggtggcacgtgcccccgggagggggtggtggtcacgaggaacagagatggcccagcagacatttggcctcttagatcctttgaatggagcgtggttccgagttgagacagattacgaccactggaagccagcacccaaggaagatgaccggagaacatctgcccatcaaggcccttaatgctacaggacaagcaaacctcaagctggaggcacttttccagattttgacggtggttccagtttataacaacctcacaatttatactacggcaatgagcgccggtagcccatacaagtacatgactaggatcagaaacccgagttagaaagtaagtcagcagaagagcgagttcgcccgtgctgtgaaagatgattttttaaaaaatgaaattcttgaagagctgcaccttaaaaaataagacaaagtgaaagtattggattatgttacaaacaatgcaggctccttcctcatttaactttacaaccttgcgaggtgggtccaggagatttggagtttgtggtaaagccagtaatgggcattgtcctgcattcccttcccttcatggtttgcctcgatcctctctaagcttctatcctgggcctgaataactcaaagataattggtctcagagatcaagccatatcctcaggccttatttccatcttctcatgattctgccatcatacctttgccttctccgctaatgaaaatgaagctgggcaagaccactgttcattgtgaagtgcttcctgaaagagcctaaggaaaaaaggctcatctgaaaggaaatgggaggaactctattttcggaaccaagcctgtttggaatgtgtgttagtctggatctttggatcatgtgtttccatgtaatgggggagtctccgttttttataatgtttctaacgttttattgaaaaacctatggccctccttctttctcaatagctactttcttactgctttttgaaaataatatgcaaccaaattatttcttattgtcacataattaagtaataaaatgtcaaaagaaatgttggcaaggagaataaaaaacctatggccctgcttctttctcaatagctactttcttactgctttgtgaaaataatatgcaaccattttattacttaattatgtgacattaagaaataatttggttgcatattattttc

SEQ ID NO: 147010 - DNA, 367 bp, Homo sapiens
aggaagcccagtacatttttagttggtcgcggcttgggctccgctttggggaggggcagcaggtttattcactggatctctgaatacccaggccccctccaccatggccagccggggtgggggccggggtcgtggccggggccagttgaccttcaacgtggaggccgtgggcattgggaaaggggatgctttgcccccacccaccctgcagccttctccactcttccctattggcggcgtctaccccgggagctaaagatccgagtgcggaagctacagaaggaacggattacaattctgctccccaagaggccccctaagaccacagaagataaggaggaaacaatacagaaactagaggtgagga

SEQ ID NO: 147011 - DNA, 436 bp, Homo sapiens
gtccagtgtggtgccgtgtcgacttgaggaagcccagtacatttcaagttggtcgcggcttgggctccgctttggggaggggcagcagcccttggagttgcgcccagtacctttgccctcaggcgaggaaggggaatatgtcctggcactgaagcaagagctacgaggagccatgaggcagctcccctacttcatccggccagctgtccccaagagagatgtggagcgctattcagacaaatatcagatgtcaggtccgattgacaatgccatcgattggaaccctgattggcggcgtctaccccgggagctaaagatccgagtgcggaagctacagaaggaacggattacaattctgctccccaagaggccccctaagaccacagaagataaggaggaaacaatacagaaactacagaccctggagaagaaggaa

SEQ ID NO: 147012 - DNA, 872 bp, Homo sapiens
gggtaacgatttcgtggtttgggctccgctttggggaggggcagcaggtttattcactggatctctgaatacccaggccccctccaccatggccagccggggtgggggccggggtcgtggccggggccagttgaccttcaacgtggaggccgtgggcattgggaaaggggatgctttgcccccacccaccctgcagccttctccactcttccctgtgagtctctccactcccttcccagactctcatgtgcccctggctgactgtacatgattctgaattcctcctggaccatcataaaaccatcctcgctttggccctctctctatactcccaatgcacagggatgttttgcaggcaaagaagtgtccacctttacttctccccagctttcagaataatatgttactccctcgattgtcatttggccctctgctcagtgggagtgttagactaaattgggaggaggggtcttcctaaatttgtactagcattttctccctgaactgaccactgcccctgcctctttagcccttggagttccgcccagtacctttgccctcaggcgaggaaggggaatatgtcctggcactgaagcaagagctacgaggagccatgaggcagctcccctacttcatccggccagctgtccccaagagagatgtggagcgttattcagacaaacatctcaattgtatgaagggagaaaggagaattgaaagaagaactggggttgttagagctgagatgactgtacacatacccctgcccaatttatatagctctttgtggagataattaggggtgggagcagtttgaaggagtaagcctggttttatacttttaaataaagtgtttttatctgtcaaaaaaa

SEQ ID NO: 147013 - DNA, 1218 bp, Homo sapiens
gggcgggcttagaacgccaccgacttgaggaagcccagtacatttcaagttggtcgcggcttgggctccgctttggggaggggcagcaggtttattcactggatctctgaatacccaggccccctccaccatggccagccggggtgggggccggggtcgtggccggggccagttgaccttcaacgtggaggccgtgggcattgggaaaggggatgctttgcccccacccaccctgcagccttctccactcttccctcccttggagttccgcccagtaccttttgccctcaggcgagggaaggggaatatgtcctgggcattgaagcaagagctacgaggagccatgaggcagctcccctacttcatccggccagctgtccccaagagagatgtggagcgttattcaaacaaatatcagatgtcaggtccgattgacaatgccatcgattggaaccctgattggcggcgtctaccccgggagctaaagatccgagtgcggaagctacagaaggaacggattacaattctgctccccaagaggccccctatgaccacagaagataaggaggaaacaatacagaaactagagaccctgggagatgaaaagagaagaagtaacttcagaggaggatgaggagaaagaagaagaagaagagaaggaagaggaggaagaagaagagtatgatgaagaagaacatgaagaggaaactgattacatcatgtcatattttgacaatggagaggactttggtggtgacagtgatgaccaatatgggaccgaggcctatatactgaagaaggacctctggacccctcgtgtctttcctttaggatacagagagtaactgtaccctattatttgtttccttcagacaagcaaatcatttgggtcagagttccatataatcctgtctgttcccctggagatgggaatagaggatgatgacagtttattttctacacttcccctccttccacatttgtatcacctttgctatcttggggaaagtgcaaaggacaaacatctcaattgtatgaagggagaaaggagaattgaaaggaaggacctgggggttgttagagctgagatgactgtacacatacccctgcccaattttatatagctcctttgtggagataattaggggtgggagcagtttgaaggagtaagcctggttttatacttttaaataaagtgtttttatctgtcaaaaaaaa

SEQ ID NO: 147014 - DNA, 441 bp, Homo sapiens
  misc_feature (1)...(441): n = a,t,c or g
tgacgtcccgtttgctggtggaaccacgcgnnnnnnnnnnnnnnnnnnnnnnnnnnnnnnnnnnnnnnnnnnnnnnnnnnnnnnnnnnnnnnnnnnnnnnnnnnnnnnnnnnnnnnnnnnnnnnnnnnnnnnnnnnggacaggctgctttggtttgtgacctccaggcaggacggccatcctctccagaatgaagatcttcttgccagtgctgctggctgcccttctgggtgtggagcgagccagctcgctgatgtgcttctcctgcttgaaccagaagagcaatctgtactgcctgaagccgaccatctgctccgaccaggacaactactgcgtgactgtgtctgctagtgccggcattgtgaatctcgtgacatttggccacagcctgagcaagacctgtttcccgggctgccccattccagaaagcggcaatgttggt

SEQ ID NO: 147015 - DNA, 1229 bp, Homo sapiens
  misc_feature (1)...(1229): n = a,t,c or g
agtcattttcccgggtcgacgatttcgtggagctcggccaggctggctggtacctgcgtccgcccggcgagcaggacaggctgctttggtttgtgacctccagggnaggacggccatcctctccagaatgaagatcttcttgccagtgctgctggctgcccttctgggtgtggagcgagccagctcgctgagtgtgcttctcctgcttgaaccagaagagcaatctgtacttgcctgaagccgaccatctgctccgaccagggacaactacttgcgtgactgtgtctgctagttgccggcattggggaatctcgtgacatttgggccacagcctggagcaagacctgtttcccctgccttgccccattcccagaagggcgttcaatgttgggtgtgggcttccatggggcattcagctttttgccagagctttctggtggcaattttcagttgcgggccgatggcgggcttgcggggcaagcgttcacccctgctgggtgcccgggcttgctgcttgagccttgctggccgggccctgctggcggtttgggcccctggaccgcccagaaccctgttcccccgatcccccagctcaggaaggaaagcccagccctttctggatcccacagtgtatgggagcccctgactcctcacgtgcgctgatctgtgcccttggtcccaggtcagggccnaccccctgcacctccacctgccccagcccctgcctctgccccaagtggcgcangcgtgccctcactttctcggggtggatgatgtgaccttcccttgggggaactccggaaaagggaacaagggttcccctggaaaccttacggtcccaaacatcaaggaccaaagtccccatggaacatgctgaacagggtcccccagggaanaccgtgtcaagtagggatgtgtgccctggctgtgtacgtgggttgtgcagtgcacgtgaagagcacgtggcggcttctgggggcccatgtttggggaggggaggtgtgccagcagccctggagagcctcagtccctgtagccccctgccctggcacaagctgcatgcacttcaagggcagcctttgggggttggggtttctgccacttccgggtctaggccctgccccaaatccagccatgtcctgccccagcccacccccacattggaagccctcctgcttgctttggtgcctcaaataaatacagatgtcccccaaaaaaaaaaaaaaaaa

SEQ ID NO: 147016 - DNA, 432 bp, Homo sapiens
gggccgcccccctcccgatgtggaggttatgacctccctcaaggtggacaacctgacctaccacacctcgcccgacgtgtacatcccgcgggaccgctacaccaaggagtcccgctgcttcgccttcgttcgctttcacgacaagcgcgacgctgaggacgctatggatgccatggacggggccgtgctggacgcagcgagctgcggttgcaaatggcgcgctacggccgcaccccggactcacaccacagccgccggggaccgccaccccgcagttacgggtgcgttggctacggacgccggagccgcagccctaggctgcgtcgcatgcctgatcccggagtcggagccgttccaggtctcgcagccgatctcgctacagccgctcgaagtctcggtcacgcactcgttctcgatctcggtcgacctcca

SEQ ID NO: 147017 - DNA, 2038 bp, Homo sapiens
  misc_feature (1)...(2038): n = a,t,c or g
ggcaggatcttccaacaagagcaggagagagaagaaaacatttacattctataacatgattataagaattgagatagatgaaatgaaaaacaacatctttgaacaattacagttgacagaacagctttcccttattctacttgctttaaataactcatatctgtaaacttgaacaccaactctggctgatttaacagtcttaatcccttgattttccatactgaacatcacccaatatatagtgaagatcaaaggcgacttcttccaccaagctctgtgtccagctgtgtttctgaggtcatacgtgtccctcacggacaccagatcagatacttcggtagtcagagccgcgggctacaaaggcggcagcttcccattccacagtgaagaaaaaaattgttccaaaaaacccaaatatcaccatgaccaggagttgccagtgaaggagaaggtagttgctgtagaaaaatgccacggctgcgcaaatagactgaacaaacttgaagatggcaaatgctggggcgctgtcttcagaatacagaaagcccaagatactaagcagctgggtattaaagcagctgtctccaaggcccaacagaaaactgcagagaatggcaacttctttgctggatttgatgtaagcactgctgtcagttcctttaacaggagcaatcggggcatctccaggcatgttgagaaatattagataaaaagctatgaagtgcaccaggatgcccaacagcacaactggatttctaccaaaacgattgttcttgctcagcaggccgaagaggcttccacctaaaatttctccaatgccgatgaaaatgccagaaagtccaataaggcttttctcttctgctccaaatttatttgtagcaccaatacaggttccatatacaccagagaagaaagttaattccagacctgtataagcagttgtaatactaagaaggagcatctccttggtgacacataacttaaaagactttttaaaagcatctactgcctttgtcagattgttctgggcagactcgttgacttccatgtcctggtcatcagaagactcatcttctcctaggacattttcagaatctggtttccgaatgagaaagaatagaactgtccccacaaggctaatcaccgttagggcaataaacactgttcttcggtcactctctgatatctgagttttcccttgccaggcaaaatatatgtagagatttccaaagaacaagctagactgcagaagtgcccagaaaatcccactgtttctcccaatgctgtgctcatccgaattgattgtcaggcagtttccttgtgctgtccaaagcacagcagcagcaattccaatgaaaacagaggctgtgtagaaggaccacgggaaaggctggatgaaaacggcaatgtacatgctgtaaaataaaccactggcaaacatagagagttgaggtcctacaatggcaaccactgacggtgtaatcaaatttgaagcagagaacactccatagataatagccatgctggtatatccactgccgtgaaaatctgtcctatttaagctcctgatgacagtttgcgccacatttccacaagtttgaaaggcagtgaacataaacataaaggcaactcctaaaataatgatgttgaaaagctttttagattccggggacattttggctcagctctgccggaggcagcagcccagggcagtcagctctcctcggggcgaagccactgacaatccgcacctcgcccgacacgctgaggcgcgtcttcgagaagtacgggcgcgtcggcgacgtgtacatcccgcgggatcgctacaccaaggagtcccgcggcttcgccttcgttcgctttcacgacaagcgcgacgctgaggacgctatggatgccatggacggggccgtgctggacggccgcgagctgcgggtgcaaatggcgcgctacggccgccccccggactcacaccacagccgccggggaccgccaccccgcaggtacggnggcggtggctacngacgccngagccgca

SEQ ID NO: 147018 - DNA, 621 bp, Homo sapiens
tctgcaattccggttccgcactcgttctcgatctcggtcgacctccaagtccagatccgcacgatggttcaagtccaagtcctcgtcggtctccagatctcgttcgcggtccaggtcccggtctcggtccaggagtcctcccccagtgtccaagagggaatccacatccaggtcgcgatcgaagagtccccccaagtctcctgaagaggaaggagcggtgtcctcttaagaaaatggtaatgtctgggaatccgagacacataaccctaattcataaatgggatttggggtaggtctttttgagtcgtgttaatgtaagaatgactcctatcattacgagtgctgctcggaggttactcacctttgggagtaatactgaagagaggggtctgcagaaaggatgtgcatgaagcttacataataatggctgcttcgtaaactgtttgagacctattaatgaaaatgactatttcttgctgtttttatccaacgtctgcattttccccctttaaagctgcggtctcctgtttgataaaagaatattggccagtattgcagattttaactgattcggctgatcctccagggaccagtttctgtgggcgtgtattggagcaggtg

SEQ ID NO: 147019 - DNA, 714 bp, Homo sapiens
tctttcccttacctttcttcaccttggttatttggccaggaatacgtaaattcaaacttgtacatgctgatggtagcctttgtgaaattttcctaattgggccttttaaaaacatggctgggtggaacatttctgtaccctactggtttgaccagagccttagtaagtacgtgcctgaaactgaaaccatgtgcactttaatggaaggtaagctgaacttctttcttttcaaacctagatgtatcggcaagcagtgtaaacggaggacttggggaaaaaggaccacatagtccatccgaagaagaagtccttggaacaagcaacttggctatttgaaaaggttattttggtaacattttgtctaactttttacttggtttaagctttgcctcagttgggcaaacttcattttatgtgccattttgttgctgttattcaaatttcttgtaatttagtgaggggaacgaccttcagatttcattatttggatttggatatttgaggtaaaatttcattttggtaaataggggctgactttttttgtttgaaattaaacagattcggtaacctaatttgtggcctcctgacttttaaggaaaacgtgtgcagccattacacacagcctaaagctggtccaagagattgactcggcattgccttcattccttaaaattaaaaacctacaaaagttggtgtaaaaaaaaaaaaaaaaaa

SEQ ID NO: 147020 - DNA, 616 bp, Homo sapiens
tcgcagcctatctgtaagacccgctgaagtccggtccccgcaatcgttcttgaactcggtggactcccagtcccagatccggcacgaaggtccaagtccaagtccttgtcggtctccagatctcgttcgcggtccaggtcccggttctcggtccagggagtccctccccccagtgtccaagagggaatccaaaatccaggtcgcgatgggggaaaaaagggaggggtcccccccaagttctccctgaagaggaaggagcgggtgtcctcttaagaaaatgatgtatcgggcaagcagtgtaaacggaggacttggggaaaaaggaccacatagtcccatcgaagaagagtccttggaacaagcaactggctattgaaaaggttattttgtaacatttgtctaactttttacttgtttaagctttgcctcagttggcaaactttcattttatgtgccattttgttgctgttattcaaatttcttgtaattttagtggaggtgaacgactttcagatttccattattggatttggatatttgaaggtaaaatttcattttgttatatagtgctgactttttttggtttgaaattaaacagattggtaacctaaaaaaa

SEQ ID NO: 147021 - DNA, 2058 bp, Homo sapiens
  misc_feature (1)...(2058): n = a,t,c or g
cctgcggagcccgtccgtgctgttctgcggcaaggctttcccagtgtccccacgcggaaggcaactgcctgagaggcgcggcgtcgcaccgcccagagctgaggaagccggcgccagttcgcggggctccgggccgccactcagagctatgagctacggccgcccccctcccgatgtggagggtatgacctccctcaaggtggacaacctgaccntacccgcacctcgcccgacacgcttgaaggcgccgtcttcgagaaagtacgggcgcgtcggcgacgttgtacatccccgcgggattcgttacaccaaaggaagttcccgcggcttcgccttcgttcgctttcacgacaagcgcgacgctgaggacgctatggatgccatggacggggccgtgctggacggcggcgagctgcgggtgcaaatggcgcgctacggccgccccccggactcacaccacagccgccggggaccgccaccccgcaggtacggggggcggttggctacggacgccggagccgcagccctaggcggcgtcgccgcagccgatcccggagtcggagccgttccaggtctcgcagccgatctcgctacagccgctcgaagtctcggtcccgcactcgttctcgatctcggtcgacctccaagtccagatccgcacgaaggtccaagtccaagtactcatcggtctccagatctcgttcgcggagacaggtgcaggtgtgggtacaggagtcctcccccagtgtccaagagggaatccaaatccaggtcgcgatcgaagagttcccccaagtcttcttgaagaggaaggagcggtgtcctcttaagaaaatgctgcggtctcctgtttgataaaagaatattggccagtattgcagattttaactgatttggctgatcctccagggaccagtttctgtgggcgtgtattggagcagatgtatcggcaagcagtgtaaacggaggacttggggaaaaaggaccacatagtccatcgaagaagagtccttggaacaagcaactggctattgaaaaggttattttgtaacatttgtctaactttttacttgtttaagctttgcctcagttggcaaacttcattttatgtgccattttgttgctgttattcaaatttcttgtaatttagtgaggtgaacgacttcagatttcattattggatttggatatttgaggtaaaatttcattttgttatatagtgctgactttttttgtttgaaattaaacagattggtaacctaatttgtggcctcctgacttttaaggaaaaccgtgtgcagccattacacacagcctaaagctgtcaagagattgactccggcattgccttcattcccttaaaattaaaaacctacaaaaggttggtgtaaaatttggaatatgttaatttaaccttcagatctaaaatgggtaatctgaacccaaatttgatattaagccttttcaaggtaaaaaacctgattttttgaaaaggattgtttatcaaacacaattctaatctcttctcttatgtatttttggtgccactagggcgcagttgtgtaagcagttgagtaaatgctgggttagctgttaaagggtggccgtgttgccaagtgccagagtgcctgggctggtttccctgttttcctcccccgattggctccctgtgtaaaagatgcccttgtccgtgccagaaacaaaatggctgtcccagtttattaaaaatgccctgacaacttgcacttcccagtcaccccgggccttgccatattaaattaacggagcattccagtgagcacatctaggctggatggattaaatacacctttttttccctcttcccccttaaaaatgggtaaattttgttcatactctacatggtatgaacttaaccttgcaaaattctatagtagcaaatgggttgtcattttgcaagtactttttaccatggtgtatcttctttgcttatgaatattctggtattataaccgattgtttctgtagtttaattaaaacaattttcttggtgttagcttttctcagaaaaaaaaaaaa

SEQ ID NO: 147022 - DNA, 344 bp, Homo sapiens
cgtggtagagcatctaaagagtgttcaggacttagcgcccatcttgtaatccattgtggagaaaaaccttacaaatgtaatgagtgtacaagaacttcaggcacaaattttccctcactcaacagagaagtcatactgcagaaaaaccttacacacgtaatgaatgtggcaaggtctttggtcaattgctcggcatcaaataattcatagtacagagaagccttacaaatgtaacaaacgttgaaagcatttagcaagcattcaggacttatggcccatcttttaatcgatcgcccagagaaactttgccactatagttaattggaaaaggtcttcctcgtgcc

SEQ ID NO: 147023 - DNA, 1183 bp, Homo sapiens
acaacatatggcaggatcctgctcttctgtcccctgtagcgggttgtcccgtgttccccttaaggaagaaatcacagtttttgtcctcctggtgcttccggctggaggttcacctgctagtccctgatcctctttgcttagtgatgcacatgagtctactcatccccccaccactcccagcccccacttttttaagaataagaggtgataggcagttcggcggtcccgcgggtctgtctcttgcttcaaaaaagtgtttggacggaacagatccgggggactctcttcccagcctccgaccgccctccgatttccctctccgcttgcaaacctccgggaccatcttctcggccatcttcctgcattctgggacctgccagcaccgtttttgtggttagctctttcttgccaacccaaccatgagtctccaggattcgtcagaatatttccacccgacgttgaaggcaagcctgtctaacagccctggtcaaatttgtacctgcagggcctcccaccacctacctctctctggggtttctattttcggaccgcggatggatgtgggctctggaaaggcgttgagccaatttctttcggcgaattgggccgagggaggaagccccgaggagctacgagcgttcttcctgaaagatgcaaaaacccagcgtgggcggaccgcgctcgtcttccaggacatcaaagaaagccaagttgaaagatgaagtggggtaaaacccccagacgcccatgaaaaactgcccatggcccctggagaaaaaagctgaacccaggccctttttgggatcttcaatgcccctggggttctgcccgcacggacccccatgctcctgtgacttccctggagactcacttccctagatgagggaagtgaagcttatcaagaagatgggtgaccacctgaccaacctcccacagggctgggtgacccggaggctgggctgggcgagtatctcttcgaaaggctcactctcaagcacgactaagagccttctgaagcccagcgacttctgaagggccccttgcaaagtaatacgggcttctgcctaagcctctccctaccagccaatagggaggctttcttaactattcctaacaaggccttgggaccaaatgggaaataaagctttttgatggcaaaaaaaaacctcgtggccgaattctt

SEQ ID NO: 147024 - DNA, 1948 bp, Homo sapiens
ccagcctcggagggagggattagaagccgctagactttttttcctcccctctcagtagcacggagtccgaattaattggatttcattcactggggaggaacaaaaactatctgggcagcttcattgagagagattcattgacactaagagccagcgctgcagctggtgcagagagaacctccggctttgacttctgtctcgtctgccccaaggccgctagcctcggcttgggaaggcgaggcggaattaaaccccgctccgagagcgcacgttcgcgcgcggtgcgtcggccattgcctgccccgaggggcgtctggtaggcaccccgccctctcccgcagctcgacccccatgatagatacgctcagacccgtgcccttcgcgtcggaaatggcgatcagcaagacggtggcgtggctcaacgagcagctggagctgggcaacgagcggctgctgctgatggactgccggccgcaggagctatacgagtcgtcgcacatcgagtcggccatcaacgtggccatcccgggcatcatgctgcggcgcctgcagaagggtaacctgccggtgcgcgcgctcttcacgcgcggcgaggaccgggaccgcttcacccggcgctgtggcaccgacacagtggtgctctacgacgagagcagcagcgactggaacgagaatacgggcggcgagtcgttgctcgggctgctgctcaagaagctcaaggacgagggctgccgggcgttctacctggaagatgaagcccggggcaagaactgtggtgtcttggtacattgcttggctggcattagccgctcagtcactgtgactgtggcttaccttatgcagaagctcaatctgtcgatgaacgatgcctatgacattgtcaaaatgaaaaaatccaacatatcccctaacttcaacttcatgggtcagctgctggacttcgagaggacgctgggactcagcagcccatgtgacaacagggttccagcacagcagctgtattttaccaccccttccaaccagaatgtataccaggtggactctctgcaatctacgtgaaagaccccacacccctccttgctggaatgtgtctggcccttcagcagtttctcttggcagcatcagctgggctgctttctttgtgtgtggccccaggtgtcaaaatgacaccagctgtctgtactagacaaggttaccaagtgcggaattggttaatactaacagagagatttgctccattctctttggaataacaggacatgctgtatagatacaggcagtaggtttgctctgtacccatgtgtacagcctacccatgcagggactgggattcgaggacttccaggcgcatagggtagaaccaaatgatagggtaggagcatgtgttctttagggccttgtaaggctgtttccttttgcatctggaactgactatataattgtcttcaagtgaagactaattcaattttgcatatagaggagccaaagagagatttcagctctgtatttgtggtatcagtgttggaaaagagaaatctgatactccatttggattattgtaaatatttgatcttgaatcacttgacagtgtttgtttgaattgtgtttgttttttcctttgatgggcttaaaagaaattatccaaagggagaaagagcagtatgccacttcttaaaacagaacaaaacaaaaaaagaaaattgtgctctgttgtaatccaaaggggagatttgcagcatgcttgactttaccaattctgatgacatctttacggacactattatcactaagaccttgttatggcgaagtctttagtctttttcatgtattttcctcatgattttttctctttatgtagtttgagtatgccttacctttgtaaatatttttgcttgtgttgtcgcaaaggggataatctgggaaagacaccaaatcatgggctcacttt

SEQ ID NO: 147025 - DNA, 392 bp, Homo sapiens
tttcgtcctcatgagctttagatatagcctcccaaccatggctgtgcttagcttcctatctagcttctttaggtagaggctgataggaagggggcctagggaatgaccccatgacaactgactgcagtatggctgcctagttgttcaaatgatagtcaccaagttcctaggctttagggagcttctgtgaggcccaaatcattcagagttccaaagggctgttcagtaggggcagttgctgaacaccagacaaggtagttggtagtacttggcaaagttcaaagtgggatccttaaaacagaacaaaacaaaaaaagaaaattgtgctcttttctaatccaaagggtatatttgcagcatgcttgactttaccaactgtgaagacatctctg

SEQ ID NO: 147026 - DNA, 927 bp, Homo sapiens
atgagtaaggtggtaaatatgaaaaacacaattaagcacgatgacacaactaaactggccccaaagaagttcacttcctcactcttatccctcctagaggcaaactgggagagggaggtgggtcaggggaaaggggaagggtgtgaagaagcaaggaggagaggcagaagacatatatatggtgcaggtctacagaagaagagagatgaagcccggggcaagaactgtggtgtcttggtacattgcttggctggcattagccgctcagtcactgtgactgtggcttaccttatgcagaagctcaatctgtcgatgaacgatgcctatgacattgtcaaaatgaaaaaatccaacatatcccctaacttcaacttcatgggtcagctgctggacttcgagaggacgctgggactcagcagcccatgtgacaacagggttccagcacagcagctgtattttaccaccccttccaaccagaatgtataccagggaatggtcggcaatgatgccatcatccttttcctggatcacgtctgcactcggagtccttggtcttctaagcacgagggttccaaccaagcgcccaccggccaccggcaccccaaaaacaacgacagggatgaagcccggggcaagaactgtggtgtcttggtacattgcttggctggcattagccgctcagtcactgtgactgtggcttaccttatgcagaagctcaatctgtcgatgaacgatgcctatgacattgtcaaaatgaaaaaatccaacatatcccctaacttcaacttcatgggtcagctgctggacttcgagaggacgctgggactcagcagcccatgtgacaacagggttccagcacagcagctgtattttaccaccccttccaaccagaatgtataccaggtggactctctgcaatctacgtga

SEQ ID NO: 147027 - DNA, 1386 bp, Homo sapiens
atgcccgtgggtgcggggcgtcgggcgaagggagaccccgcgaccttaggcgccctcgcggtgttcacggtaggcgcaaagcgcagcaagggacactccccaaagccgcaccccgccggacggctgcccccgcttccgcctctcaggcagcgctcgacccccatgatagatacgctcagacccgtgcccttcgcgtcggaaatggcgatcagcaagacggtggcgtggctcaacgagcagctggagctgggcaacgagcggctgctgctgatggactgccggccgcaggagctatacgagtcgtcgcacatcgagtcggccatcaacgtggccatcccgggcatcatgctgcggcgcctgcagaagggtaacctgccggtgcgcgcgctcttcacgcgcggcgaggaccgggaccgcttcacccggcgctgtggcaccgacacagtggtgctctacgacgagagcagcagcgactggaacgagaatacgggcggcgagtcggtgctcgggctgctgctcaagaagctcaaggacgagggctgccgggcgttctacctggaaggtggcttcagtaagttccaagccgagttctccctgcattgcgagaccaatctagacggctcgtgtagcagcagctcgccgccgttgccagtgctggggctcgggggcctgcggatcagctctgactcttcctcggacatcgagtctgaccttgaccgagaccccaatagtgcaacagactcggatggtagtccgctgtccaacagccagccttccttcccagtggagatcttgcccttcctctacttgggctgtgccaaagactccaccaacttggacgtgttggaggaattccgcggatcctctccctatatgatcttatttcattatggtgaaagttggaacctcttacgtgccgatcaacgtctcattttcgccaaaagttggcccagggcttcccggtatcaacagggacaccaggatttatttattctgcgaagtgatcttccgtcacaggtatttattcgcgataagctcatggagcggcgtaaccgtcgcacaggaaggacagagaaagcgcggatctgggaagtgacggacagaacggtcaggacctggattggggaggcggttgccgccgctgctgctgacggtgtgacgttctctgttccggtcacaccacatacgttccgccattcctatgcgatgcacatgctgtatgccggtataccgctgaaagttctgcaaagcctgatgggacataagtccatcagttcaacggaagtctacacgaaggtttttgcgctggatgtggctgcccggcaccgggtgcagtttgcgatgccggagtctgatgcggttgcgatgctgaaacaattatcctga

SEQ ID NO: 147028 - DNA, 2917 bp, Homo sapiens
  misc_feature (1)...(2917): n = a,t,c or g
tcccgggtcgacgccttcgtggtgtgcgaggctgagtccaagagatagcaaatcgagtcttaatataatccggggagaaatacgcccgggtagatttgaggcgcagccttggagggagggattagaagccgctagactttttttcctcccctctcagtagcacggagtccgaattaattggatttcattcactgggggaggaacaaaaactatctgggcagcttcattgagagagattcattgacactaagagcccagcggctggcagctgggtgcagagacgaacctccaggctttacttctgtcttcgtctgccccaaggccgctagccttcggcttggggtaaggcgaggcgggaattaaaccccgctccgagagcggcagcttccgcgcgcggtgcgctcgggcctatgcctgccccgaggggcgtctggtaggcaccccgccctctcccgcagctcgacccccatgatagatacggttcagacccgtggcccttcgcgttcggaaatggcgatcagaaagacggtggcggaggctcaacgagcagctggagctgggcaacgagcggctgctggtgatggactgccggccgcaggagctatacgagtcgtcgcacatcgaggtcggccatcaacgggggccatcccgggcataatggctgcggagccctgcagaaaggtaaacctgcccggtggcgcgcgcttctttaacgcgcggcgaggaccgggaccgcttcacccggcgctgtggcaccgacacagtggtgctctacgacgagagcagcagcgactggaacgagaatacgggcggcgagtcgttgctcgggctgctgctcaagaagctcaaggacgagggctgccgggcgttctacctggaaggtggcttcagtaagttccaagccgagttctccctgcattgcgagaccaatctagacggctcgtgtagcagcagctcgccgccgttgccagtgctggggctcgggggcctgcggatcagctctgactcttcctcggacatcgagtctgaccttgaccgagaccccaatagtgcaacagactcggatggtagtccgctgtccaacagccagccttccttcccagtggaagntcttgcccttccctcctacttgggctgtgcccaaagactccaccaacttggacgtgttggaggaattcggcatcaagtacatcttgaacgtcacccccaatttgccgaatctctttgagaacgcaggagagtttaaatacaagcaaatccccatctcggatcactggagccaaaacctgtcccagtttttccctgaggccatttctttcatagatgaagcccggggcaagaactgtggtgtcttggtacattgcttggctggcattagccgctcagtcactgtgactgtggcttaccttatgcagaagctcaatctgtcgatgaacgatgcctatgacattgtcaaaaatgaaaaaatccaacatatcccctgaacttcaacttcatggggtcagctgctgggactttcgaggagggacgctggggactcagcaggcccatgtggacaacagggttccaggcacagcaggctgtatttttaccacccctttccaaccaggaatgttttaccagggtgggattttttgcaatctacgtggaaagaccccacacccttccttgctgggatgtgtctggcccttcagcagtttctcttggcagcatcagctggggctgctttctttgtgtgtggccccaggtgtcaaaatgacaccaagctgtctgtactaagacaaggttaccaagtgcgggaattgggttaatactaaccaggggagatttgctcccattctctttggggattaacagggacatgctgtatagatacaggcagtaggtttgctctgtaccccatgtgtacagccctacccatgcagggacctgggattccgagggacttccccccagcgcataggggtaggaaccaaatgataggggtagggagcatgtgttcttttaggggcccttgtaaaggctgtttcccttttggcatcctggaactgacctatataattgtccttcaatgaagactaattcaattttggcatataggaggagcccaaagaagagatttccagctcctggaatttggtgggtatcagttttggaaaagagaaatctgatactccatttggattattgtaaatatttgatcttgaattcacttgacagtgtttgtttgaattgtgtttgttttacccctttgaatgggccttaaaagaaattatcccaaagggagaaagagcagtatgcccacttccttaaaacagaacaaaacaaaaaaaagaaaattgtgctcttttctaatccaaagggtatatttgcagcatgcttgactttaccaattctgatgacatctttacggacactattatcactagagcccttgttatggcgaagtctttagtctttttcatgtatttccctccatgatttttacacattaatgtagtttgactatgcccttaccctttgtaaatatttttggccttgtgttgtccgcaaaggggataatcctgggaaagaccccccaaatccatgggcctcactttaaaaaaagaaagaataaaaaaacccttcagctgtgcctaaacagtatattacctctgtataaaatttttcagggaagtgtcnccctcaaatgcaatactttgggttggtttctttcctttaaaaaaatttgtataaaactggaagtgtgtgtgtgtgagcatgggtacccatttgataagagaaatgcatttgattgtgaagaagggagagttaaattctccattatgttcgtggtgtaaagtttagagctggaatttattataagaatgtaaaaccttaaattattaataaataactattttggctattgaaaaaa

SEQ ID NO: 147029 - DNA, 4084 bp, Homo sapiens
  misc_feature (1)...(4084): n = a,t,c or g
attcccgggtcgacgatttcgtgtcgcctcctccggctgaggaggctccccgagcgggggtgtagtggggaggaggggggtcggccgccgcagccatggaggccaactggaccgcgttcctgttccaggcccatgaagcttcccatcaccaacagcaggcagcacagaacagcttgctgcccctcctgagctctgccgtggagccccctgatcagaaaccattgcttccaataccaataactcagaaacctcagggtgcaccagaaacattaaaggatgccattgggattaaaaaagaaaaacccaaaacttcatttgtgtgcacttactgcagtaaagctttcagggacagctatcacctgaggcgccacgaatcctgccacacagggatcaagttggtgtcccggccaaagaaaacccccaccacggtggttccccttatctctaccatcgctggggacagcagccgaacttcgttggtctcgaccattgcaggcatcttgtcaacagtcactacatcttcctcgggcaccaaccccagtagcagtgccagcaccacagctatgccagtgacccagtctgtcaagaaacccaggtaaggcctgtaagaagaaccatgcttgtgagatgtgtgggaaggccttccgagatgtgtaccatctcaatcgacacaagctctcccattcagatgagaaaccctttgagtgtcctatttgtaatcagcgcttcaagaggaaggaccggatgacttaccatgtgaggtctcatgaaggaggcatcaccaaaccctatacttgcagtgtttgtgggaaaggcttctcaaggcctgaccacttaagctgtcatgtaaaacatgtccattcaacagaaagacccttcaaatgccaaacgtgcactgctgcctttgccaccaaagacagactgcggacacacatggtgcgccatgaaggcaaggtatcatgtaacatctgtgggaagctcctgagtgcagcatacatcaccagccacttaaagactcatgggcagagccaaagtatcaactgtaatacatgtaaacaaggcatcagtaaaacatgcatgagtgaagagaccagtaaccaaaagcagcagcagcagcagcagcagcaacaacaacaacaaacacatgtgacaaagctggccaggggaagcaagtagaaacactgagaactgtgggaagaagctgttaaagcaaggaagaaagaagctgctaacctgtgccaaacctccacggctgctacgacacctgtgactctcactactccattcagtataacatcctctgtgtcgtctgggactatgtcaaacccagtcacagtggcagctgcaatgagcatgagaagtccagtaaatgtttcaagtgcagttaacataaccagcccaatgaacatagggcatcctgtaactataaccagtccattatccatgacctctcctttaacactcactaccccagtcaacctccccacccccgtcactgccccagtgaatatagcacaccctgtcaccatcacatctccaatgaatctacccacacctatgacattagccgcccctctcaatatagcaatgagacctgtagagagcatgcctttcttgccccaagctttgcctacatcacccgccttggtaaacagtattataaaatcaaaatatggggtaaaagtaaatttttaccagcaactttaactttttagtttgatttaaagcaaaaaagttaaaccatggaaatttggggagatttttattacatttagttaattaagagtgtgggtagcattttttctcccaatttggctggggattattccaaagtagggtgtgtatgtaacttatcactggaccactttagtttaatcagaaattccttttagctgacaaccatggcttaaacaggatagtagttggccaagatgaaatgcccagaattaaaaccaatcataagtagaacccacttcaaaataaaaaaacagcattactatttctaatcccaaggaatcactttattgtaaacactagcagaactcttctccctatacaaggtggatggctgatttttaacctgaaattttaaatccccagattgagagctagtgtagaaatgtctggggttatttgtttttatgagtaaatacatgcattgtcataataaaatgcatttcagagaatatgcattttacctttgggaatatgttaatttcaggcagcattccctatgggaaaggtgataccagctctgatatgcaaagcatatgataatttatcattctaacttcaacgtataatagggattgtgacctgatatttggagatgtaaatattgctcagcatattaatcccgatggaatatagcattgtagttgactttttnnnnnnnnnnnnnntttaaaaaaaatctacaaattgggttttgctaagaaaagcctcaactgacagaggagaagtcaagtgtgtggacaggcaagctcctaataaacagagtccagtgggattcctatttaggagccaaggagtactttggaacagtacaaatatattgctttaaattggaagacgctggaggcactgggatgtgatatgcccctctctctcccaatcagagcctgttgatattacaacagggacagatgtgttagttgctcactagagtttatgtcttatattaaattgtatacagtttttattctaaccactaactaggtagtgtatgcccccttcagaacatgcagagtgtatctttttttaaatttctccttccgtttcttaagtattgcgcagatttgttcaactttgtaaatatggacatcactttttttttctttgagaaaacacttgtatcagctttgtgggtgttttcagggagacagctgtctggcattccctgtaggaaacccagcaatggattatggcacgttgaggacatgtggctttttatttacttaggcaaggatattttatcctctgtaacataaagtaggaaacccaaaaggctagggggaaacaggatactctttacaccatcatgccacgcgattgtttttaaagcattgcgtgtaaaaaaaaaattaactaaaccaagatgctgtgattttttaaagttgcaaatatgttttttggtttttttcattttttaaatcattgcagttaagatttatatggttattagttgtgttaatcttgcaaaatgtttgcaggactgactatcaaactggatgatttccatttataccctacgtgtgtcagttcaagcatcaaaataccttgcatctgagacagacttcctacatcagggacaggtatctgtgtgtcattatacaaaacagttctagggggttgaactacatagtaaaaaaaataaaataaatagtacttagtgtaaaataattttataaatgatcttttgtactttagggacattaaattgttacaacttttgtatatattaaaagcttaggggaactttctgtttaggcgggaagggcaacacattcctacacttttaatgtatatgtttgttataatgtccatgtaaaacatgccctatgtttgtgccttttaaattagtttgtcctccaataaacaaaaatgttagagaaaaatatgtagcctatgactttgtttacaactgttccttatcccacagtacaaaaatggtttgtttttaatatgtagagcattatgtgtggactacttggaaggacttcgtgtagggaaagccccaagaatgaccttgctgaggccctggattgggagggcacagtgggccacatttggaggaagttcacatttcctggcatgcagacccaaaactgggttcttggctcctgcctgctgggatcggttatctctggtggggctggcagtcataattcacaattcagacagcccaggcttcctccacagtggtccaaggagcagtcctcagtgggggcaggtgtgggccctacccctaagctagaatgtggttgtcagaaccctgaaagtattagttctaaaaaaaaaaagatatatactagaagtaattgttttatcaattcattgtataataaacaggagtgagactaca

SEQ ID NO: 147030 - DNA, 2246 bp, Homo sapiens
  misc_feature (1)...(2246): n = a,t,c or g
gccggacttccttggtctacgattacccgctcaggcggcggtggctgagaaggcagcggggcggcggcggcttttgttttggctgtggaggccgcagtccgggtcctggcttcggcctcagccccaccgtggtgacgcttgctgaactgctggtgctcctggccgctctcctggccacggtctcgggctatttcgttagcatcgacgcccatgctgaagagtgcttctttgagcgggtcacctcgggcaccaagatgggcctcatcttcgaggtggcggagggcggcttcctggacatctgacgtggagattacaggaccagataacattggaattttacctacgagactctacaatctatctggcaaatacacatttgctgctcacatggatggaacatacaaattttggttttagtaacccggatgtccaccatgactccaaaaataagtgatgttcacgattggatattggggaggctccaaaaaggacaagatatcggaaacagaagctcaccagaacaagctaagaagaaatgatcaatgagctagcagtggcgattgacagctgtaaagcaccgaacacggaatacatggaagtccgggagagaatacacagagccattcaacggacaacacaaaacagcagagtggtcctttggtccttctttgaagctcttgttgcttgttgccatgacatttggggacagatctactacctggaaggagatttttttgaagtccggaggagttgttttaaaaagcctcttcctggatgatccccaactcagaattcacttgtttacccaaacaccttgggtcataaataatgtcattagtttctccatttttattttctgaactggtacattcacaacttatgtttctttgagattaatagatattgggggaaaaacgcctttttagggaaaattatagtgaaaatttgacagttgattggcataaatttccttgtttggaatgctgcctccattatatagggtccttccagggaactcaaacactgtaagtgaaaatatggggagtatagttttttattatttccctcttttccttttgtttttcataatataatggcaggttgttcaggaaaatccagcacaaagccctgatagtacttttactaaaaatgactggcattctttgggattcccttcagtctatggttcaagtcactaaaggttccatttttgttgagtccctatggggaaacagcagtatgaatcttgacggtttctgcccgtcctaatggcagagctctctgacttgggtgtatgctgccaggctgggtactttcatactttgttttcttgttttgctttaaaacctacgactcagcatacattttcccacatacatttttacatttgtaccttaggactcagtcatctccaacttaaaattgatgacaccaagcagctaataacccatttctggggtttctggcctaaaccccctaaattgtctggttaaagccaattctctggggtgtcccagtggagtgggtggcttttttttctttccacattggcacattcacttctcccactcttggcatgtaagaaataagcatttacataattggaaaaatctggatttctgatgccaaagggttaaagcttcttgggatttcatttcattgatatacagccactattttatttttgatcagtggcctttgggccactgttcagggtactgaccatcagtgtcagcattagggttttggtttttgtttcttttgggtctttcttttttgggcacatgtgaatcttgttttgtgtcaaaatggaaattactttctcttgttctctgatgatggggtttaaaattaaaagagcatccggttttgggtatggggggatgatcccggggnttatgttgtgactggatacatattagttacttgtgcttttttttttttttttttggatctttggcaagggcaaaactacaagtaacgagttttatataattaatttaaatttgttacaggttttcatgttcaggataaaccatacttccaccttgggtgagaacacttgcaacagtttattaatgaggtgactttcaccttaggacaactgttgcatgccaagttttttgtgtgtgtgaaacacttcaaaactgatttaaaagatgtaaatttaaaattggttgtatctaatatgccccaggttcggtaaataaacaattctttttaaaaacaaaaaaaaaaaaaaagcg

SEQ ID NO: 147031 - DNA, 425 bp, Homo sapiens
ctcatccagcgtggtggaattccatcccaaagatctaccagttctcttctgacaaagccatgccatcctgaaatgatggtcctctggggctggaggcagggctcgagccaggcctctgttggggcagggaggtgcctgattgagtctgctctgacctctcactctccccttcttctccaggctgctgctcctgctgccctgtgggctgtgccaagtgtgcccagggctgcatctgcaaagggacgtcagacaagtgcagctgctgtgcctgatgccaggacagctgtgctctcagatgtaaatagagcaacctatataaacctggattttttttttttttttttttggacaaccctgacccgtttgctacatctttttttctatgaaatatgtgaatggcaataaattcatctagcctaaaaaaa

SEQ ID NO: 147032 - DNA, 412 bp, Homo sapiens
taattccggccgcttttcatctgtcccgctgcgttgttttcctcttggatcgggaactcctggttgccccttgccctcgaaattggaccccacaaatggtctctgggtgcctattggctcctggtgcctgtgccggctcctggcaaatcgcaatagagtcgcaaatcgcaccgtcctgacacagacgagctgctgctcctgtctgccctgtgggctgtgcagtagctttgcccagggctgcatctgcaaagggacgtcagacaagtgcagctgctgtgcctgatgccaggacagctgtgctctcagatgtaaatagaggcaacctatataaacctggatttttttttgtacaaccctgacccgtttgctacatctttttttctatgaaatatgtgaatggcaataaattcat

SEQ ID NO: 147033 - DNA, 381 bp, Homo sapiens
  misc_feature (1)...(381): n = a,t,c or g
caccgcccccccnnnnnnnnnnnntctnnnnnnnnnnnnnnnnnnnnnnnnnnnnnnnnnnnnnnnntnnnnnnnnnnttntnnnntatgtccacatatgtattgtattatcacagatgcaactgatttatcatagagcactcagaaaacatggaaaagtatttttaaaaatcgaataatcctattcaagtcaaccagtgttaaccccggtgtgcttcctttcaccaaatcgcactggctcctggactcttttcctatcttcaccacgaactgctgcttgctcgcttgctcctcagtcctagcttcatcaaacactggttcctggaatcctgtctgctgctgtcttcctagattcactgaatccacttctgtgtagcacct

SEQ ID NO: 147034 - DNA, 2002 bp, Homo sapiens
  misc_feature (1)...(2002): n = a,t,c or g
atgttttaccatttggttcccgatgggaagaagccaggggcaaccctcaaagccaccagtgctccaaaaggaaaggccaacgggggccgccaggcgcatgcgcccccgaggtgggcgagcgccggtgatgtcacgcatagcgccatctccgagctccgagagtctgcgacagcagctgccagtgcgtcatcagagagcgccggaagcggtccgagaatgaagagtgtgatctaccatgcattgtctcagaaagaggcgaatgactccgatgtccagccttcaggagcacagcgggccgaggccttcgtgagggccttcctgaagcgcagcacgccccgcatgagcccgcaggcccgcgaggaccagctgcagcgcaaggcggtggtcctcggagtacttcacccgccacaagcgcaaggagaagaagaagaaagccaaaggcctctctgccaggcaaaggagggagctgcggctctttgacattaaaccagagcagcagagatacagccttttcctccctctccatgaactttgggaaacagtacatcagggacctgtgcagtggggctcaagccagacaacgcagccacagatgattcaggccaagctcttaaagggcagatctttcacgggggcttatttatttcagtgacaaaattccaaatggcccctcttaatgttgggtattacaggaaatcctttctaccaggaaaccaaagcacatttttcaaaatttatcacccaaaggaagacccgccttgaaagttatccccccaagcctaaactgccgtgttccactgtggaaacccgatggctttattncccctacatttacggggagcaaattccccagcctcggtcaagtgaaccgggtctgcgaagaagttccaaagcgaagggaaccgattgaccctgtgaattcctttgcccgtcctaaggccagtttgtttatggaccagcctgaaaaactggaccactccccctaaaatgtcccaccctttcagtgaagagatagttaagcccaattcccatttatagacccaccctcccagcccagtgacgctccgagttgaggatgttgaacaacaatgggaaggtcgcagcgtactaagtgaagaagtcagaggaccagaggaatttctctttctaggagattttcattttgtgtgaactcccatggggaggaacaggatggccagaaagccccccggggttaacactggttgacttgaataggattattcgatttttaaaaatacttttccatgttttctgagtgctctatgataaatcagttgcatctgtgataatacaatacatatgtggacataaacagggatcaaataaaggaggtattgctgcagtccagccaggttgaaagggaaggggggtccccaaaggtccattggatggcaggtgtctacagaggcacgcctttgggtggaactctgacccacctaaggtttactttgctatttcaggaaggttgaagaggattgaagggtgagttgctaagtgacttagggtttattcacttcaggaatcatagctggggtggaccccaggagcagagtactgcatgcagctgtgcccatgcatggttgccccagcgtagtgagatgggacctgccgcagcatgcccactcctgagctgccaggctgagccatggaggactgaaaggaggtcgcccggcatcacctcccgaggtgagacctgctgcaaaagccaagccagcagcattgacgccctttgatatcttcgccatttttgctgctgaaagacttggcttttcagtctgaccctggccctctgtgaccatgtgtctgtaaagccagtgggtcaggcccttccatgcagggccagaggaaaagcgggcccagggctgcagtgagagcggggcaggggaccagcctaccagatggggttgggaaacatgggcttcagaaggaccaactacccccttnccttttgagggagcaaagtcttttgccgatccagcaa

SEQ ID NO: 147035 - DNA, 699 bp, Homo sapiens
  misc_feature (1)...(699): n = a,t,c or g
ccccgactcttctggtccccacagactcagagagaacccaccatggtgcttgtctcctgccgacaagaccaacgtcataggccgcctgggggtaaggtcggcgcgcacgctgtgcgcagtatgtgtgcggaggccctggagaggatgttcctgtccttccccaccaccaagacctacttcccgcacttcgacctgagccacgggttttgcccaggtttaagggccacgggcaagaaggtggacgacagcgctgaccaaacgccgtggcgcaccgttggacgacatgcccaacgcgcttgttcggcccttgaagcgaccttgcacgcgcacaagctttcgggtgggacccggttcaacttcaaagctcctaaagccactggcctgcttggttgaccctgggcccggcccaccttccccggccgagtttcaccccttgcggtgcaacgtcttccctggggacaaagtttcctgggtttcttgttgaagcaccgttgcttgaaccttccaaataacctttaaaggttggaagccttcggttgggcaatgtttctttggccctttgggcctcccccaagcccctcctcccctttcctgcacccgtacccccgtggtcttttgaataaaattttgaattgggggggcaaaaaaaaaaaaaaaaaaaagatctttnaatttaagggggcggaaagtttatttcaa

SEQ ID NO: 147036 - DNA, 1542 bp, Homo sapiens
ctaggctggtaagggccgggaaggcgcgaacctgttcgcaggaaaagcaggcgagtgtgcttgggcaatgctcagtaccttgaggcctggcttgaccactgctgcagctcggcgagccaagaacgccctgtcgcccacgacacgtgcgtaggcgcaagctggaaagtgcaagtcctgtggcttccagaggcagggaggcatggtgccggttatctttaggtcctcgagcgtcagttccttgagcgggagtacgctagcacacgcagggcgcctaccagtagctgagcaggacctgtgcggctcccactgtgagccgccgcacgcggagagccttgaccgttcagcatactgccgcgggtcggcgtccgcatcgacgcgctttagaaacgctctaggttgagaccgccggcatggatctccacctctactgcagacacaactggaaggcttcggaccagtcgggctgaggttcggagaagttgcagaccagcggaaatcttcatcgtccagctcacaaggttctggcgtggtcgcaggacgtgcaccagcggcagcagcagcagcaacaagcaggacgcgcgctttgtcaacgtccatgggttggtttctttctggggcttttccatcagttctcttcctctttctctttgctggcaatctcagctcgtaccttttctttttcctccttcgtgcagctgggtcttcatcctcatgtactcccttggcatctatggtgacgtgacttagaaggtggtgcagaggtaggtgcagccctggggtcatgagaagtttcctgaagtcttcattggtgagttttgatctggaattggcgacttcgatattaacaaggatgcggcggccgcagcaagtcgaggagtcggggcaaagctgggcccttgaagagctgttgctggagagcatacacacgatcctggagctgggcctcttcctgatgccttccagggcttgcagccctgactgctgcaggaagacctgaacagccattacgctcaccacgttgatactggcaacagcagtgaggttgttgaggagccaaaggccctcagggagcagctgggctgtttctggaaaaagaactgcagaaggataaataaggctgccaaacacgctcatctctgagctgcatttgccctcccacagtctccactgctcctcagttagcaggttgcttagacatcgaagcacggggcatgccagcggagaaggtttgctgtgtttcagggtgctgcaagcctcgacgaaggctgaccgagccccctctctctccttttcctctgtcccccgctgggcttgccgcagaactgctgcacctgcctcccgctcccgccggcggcgccgtagctcctcaccccgcagaccgtgggcctgaggcggccctgccgtcggctccacatggggagcaggaggaggaaagccgaaggaaacagcagccacaacgcggcggtcagagtttaggttatctctcttattccctgaacaattgctgttatcctgttctttttcaaggtgcccggatttcat

SEQ ID NO: 147037 - DNA, 547 bp, Homo sapiens
ccggcccaagcaagtcgaggagtcggggcaaagctgggcctgcgtgagattcgcatccacttatgtcagcgctcgcccggcaagccagggcgtcagggacttcattgagaaacgtacgttgaagctgaagaaggcgaatcccgacctacccatccctaatccgcgaatgctccgatgtgcagcccaagctctgggcccgctacgcctccagggtgcagaatagttaaagacacctccctctctctcttcagcatttggccaagagacgaatgtccctttgaacaacttcagtgctgatcaggtaaccagagccctggagaacgttctaagtggtaaagcctgaagcctccactgaggattaagagcaacagccccagagcctgggctctgctggacttagtataatgtgaaaaaaatgtgttctcctattcctcataaagcttgtgctgtaaaatactttctcagggtgttcttgtcctcatctaccctctaccccttactgtgcaaccactgaggcaaagtagcttaatataaaaataaaacttta

SEQ ID NO: 147038 - DNA, 1789 bp, Homo sapiens
agaccggggcacttggcctgaagacctggaattggcgacttcgatattaacaaggatggcggcggccgcagcaacgtcgaggagtcggggcaaaagctgggcctgcgtgagattcgcatccactttatgtccagcgcttcgcccggcaagccaggggcgtcaggggactttcattgagaaacggctacgtggagctgaaagaaggcgaaatcccggacctaccccaccctaaatccgcgaaatgctccggatgtgcaagccccaaagctcttgggccccgctaacgcattttgggcaaagagacggaatgtccctttgaacaacttcagtgctgatcaggtaaccacgagccctgggagaacggttctaagtggtaaaagcctgaaagcctccacttgaggattaagagcaacaagccccatgaagcctgggctctgcttgggacttaagtataattgtgaaaaaaaatgtgttcttcctatttccttcattaaagctttgttgctgtaaaatactttctcagggtggtccttgtcctcaatctaaccctctaaccccttaactggtgcaacaactgagggaaaagtagcttaatataaaaattaaacttttattctggcctcatcaaaagctaccagctgctgaagcaaacatgaagggtggcgggggggcagggattctagggccccagagtaagtagaccacactgaggtcccttttgggtcctcctgcctggatagtcttagagtgaaaggggaggagctgggacccaaaggtcttgggcttaggtgtgggagcagagaacatgagacctcattatggtcctaaatctccaaaggctctactggacaaacaagcttgatgttaagagagaggggaatgagtgacattgagaaacaagatcacccttgaagagctgtctgctggagagcaacccacacgatcctgggagctgggcctcttcctgatgcctttccagggcttgcagccctgactgctgcaggaagacctgaacagcctctggctgatacaggaacagcagatgcagcagctccaaactctggcctactacttcagtgtcagaaaaggttagtgtgtgcagcaaggcgggaagcaggggccctggccacagccgctggcagtaagcaggacccttttctgcaacattgcacagaactgtgagcaccattacgctcaccacgttagatactggcaacagctgtaagagaggctcaatcagatccagggagagcaaggaggtacagaaactaggactgtttgcagtgaggttgttgaggagccaaaggccctcagggagcagactgggctgtttctggaaaaagaactgcagaaggataaataaggctgccacaacacgctcatctctgagctgcatttgccctccccacagtctccactgctgcctcagtttagcaggttgctttagaacatcgaaagccacggggcatgcccagctgcaaagacaaattggggggtcaggtgtaagaaggaagaggttacctgcattccagagtatcaagaaacatctcccagaatttcacctgacatcttcacctaccagctccagtcctgcatcctcggttttctggacagccccagccaagtccaacagcagcaaccccagagtagacagagccccatggccaatgagcagaggattgctgacctggctgggcaacaggaagcaagcagtccctaggtatatagtcaattccacctttaagaagagaagcagttgcctaggcgtggtgcttatgcctgtaatccc

SEQ ID NO: 147039 - DNA, 505 bp, Homo sapiens
ttgtgacctagcctcccaaagagtaaaattcaagtaaaagaacagctgtcaattgataataagatgtatcatgtaagaagatatataaattggcggggcacagtggctcacgcctataatcccagcactttcggaggccaaggcaagaagatcgcttgagcttaagagtttcagaccagcctgggcaacacagtgagaccctgtctcaaaaaaaaaagaaaaaaaaagaaaaaaaaaaaaaggccaggcgcagtggctcacgcctgtaatcccaacactttgggaggccgaggtgggcggatcacctgaggtcaggagttcgagaccagcctgaccaacatggtgaaaccccatctctactaaaaatacataaattccccgggcatggtggtgtgcgcctgaggcaggagaatcgctggaacccgggaggcagaggctgcagtgagctgagatcgcaccactgcactccagtctgggtgacagagaaagactctgtctcaaaaaa

SEQ ID NO: 147040 - DNA, 1791 bp, Homo sapiens
atgcctgtaatcccagctactcaggaggctgaggcagaagaatcgctcgatcctgggaggcggaggttgcgaaccattggaaagttggagccatcctacgtgatccgcaagtttctggatgcccagcgcattcacaacctgactgcctacctgcagaccctgcaccgacaatccctggccaatgccgaccataccaccctgctcctcaactgctataccaagctcaaggacagctcgaagctggaggagttcatcaagaaaaagagtgagagtgaagtccactttgatgtggagacagccatcaaggtcctccggcaggctggctactactcccatgccctgtatctggcggagaaccatgcacatcatgagtggtacctgaagatccagctagaagacattaagaattatcaggaagcccttcgatacatcggcaagctgccttttgagcaggcagagagcaacatgaagcgctacggcaagatcctcatgcaccacataccagagcagacaactcagttgctgaagggactttgtactgattatcggcccagcctcgaaggccgcagcgatagggaggccccaggctgcagggccaactctgaggagttcatccccatctttgccaataacccgcgagagctgaaagccttcctagagcacatgagtgaagtgcagccagactcaccccaggggatctacgacacactccttgagctgcgactgcagaactgggcccacgagaaggatccacaggtcaaagagaagcttcacgcagaggccatttccctgctgaagagtggtcgcttctgtgacgtctttgacaaggccctggtcctgtgccagatgcacgacttccaggatggtgtcctttacctttatgagcaggggaagctgttccagcagatcatgcactaccacatgcagcacgagcagtaccggcaggtcatcagcgtgtgtgagcgccatggggagcaggacccctccttgtgggagcaggccctcagctacttcgctcgcaaggaggaggactgcaaggagtatgtggcagctgtcctcaagcatatcgagaacaagaacctcatgccacctcttctaggtacttgggaagacagatgggatgagctgcgggtgcggcggtaccgagaggagaccacccgtatccgccaggagatccaagagctcaaggccagtcctaagattttccaaaagaccaagtgcagcatctgtaacagtgccttggagttgccctcagtccacttcctgtgtggccactccttccaccaacactgctttgagagttactcggaaagtgatgctgactgccccacctgcctccctgaaaaccggaaggtcatggatatgatccgggcccaggaacagaaacgagatctccatgatcaattccagcatcagccgcctaaggacgacaagaagaagaaggacgctggaaagtcggccaagaaagacaaagacccagtgaacaaatccgggggcaaggccaaaaagaagaagtggtccaaaggcaaagttcgggacaagctcaataacttagtcttgtttgacaaagctacctatgataaactctgtaaggaagttcccaactataaacttataaccccagctgtggtctctgagagactgaagattcgaggctccctggccagggcagcccttcaggagctccttagtaaaggacttatcaaactggtttcaaagcacagagctcaagtaatttacaccagaaataccaagggtggagatgctccagctgctggtgaagatgcatga

SEQ ID NO: 147041 - DNA, 460 bp, Homo sapiens
  misc_feature (1)...(460): n = a,t,c or g
cccacgcgtacgaaggacttatcaaactggtttcaaagcacagagctcaagtaatttacaccagagataccaagggtggagatgctccagctgctggtgaagatgcatgaataggtccaaccagctgtacatttggaaaaataaaactttattaaatcagaacnnnnnnnnnnnnnnnnnnnnnnnnngaaaaaaaaatnnnnnnnnnnnnnnnnnnnnnnnnnnnntaaaaatatnnnnnnnnnnnnnnnntntnnnnnnnnnnncttttaaaaatatcccggggggggccaaaatattcggggggagggaaataaannnnnnnnnnnnnnnggggggtttaaataatcctcccggggggtgtttgggaaaacaaccttttttnnnnnnnnnnaaagcagtcccccctccctcacaaatacttgttttcctaaaagaataaaaaggtttgtggggaggt

SEQ ID NO: 147042 - DNA, 423 bp, Homo sapiens
cagtctaattcaggggtaaatgagttaggtatgtaaggaaaaaaggaggatgagttaagttctaaggccaaggtgaaaggagcccccttttagatttccaacaggaaaagtctgaaatctcagcacaagaatgatcaaagatgcacagtttggtaagttgtttttctgggcagggtggggaaaatgtaagttgttgacctgtgttagaattaactataacacgaagaattaaagagtgggccctattacctattgacatttcgtgactgttttctccatttctgggcccttgtatccaaaaggtagcccttaattttatgtaaacctctgcacccacttgaaaggcactaagcaaaagaaatatttgtcttgttaataaaaatagaaatatcaaaatcccatatcctaaaaaaaaaaaaaaaa

SEQ ID NO: 147043 - DNA, 499 bp, Homo sapiens
  misc_feature (1)...(499): n = a,t,c or g
gagaagacgacagaagggcagggatattctccagaacagaacctaggatgcttggtgcaatcatccctccccacccagaatcagcttcagttccaaatttgaatgtttccggtttattttagaaaaaaatggctttttccctttttgtccctctcctccagaagattccccaagtacacagcactgaataagaatgaatgaatctggccaggtgcggtggctcactcctgtaatctcagcattttgggaggcagaggcaggcagatcccntgaggtcaggggttcgagatcagcctggccaacatggcaaaatcacatctctactaaaaatacaaaaattagccaggcgtggtggtgcatgcctgtagtcccagctactcaggaggctgaggcaggagaatcgcttgaacccaggaggcggaggttgcagtgagccgagatcatgccattgcactccagcctgggagacagagcaagactctatctcaaaaataaaaaa

SEQ ID NO: 147044 - DNA, 1179 bp, Homo sapiens
atggcctgggcagggtcggagcccaggcgggtccgccggctcggctcgactgcgagcgagggagagaaacaaggcgtgaaggaggggcctctcccggccgccgccgccgccgccgccgccgccgccgccgccgccgccggctatccgggcggagggaggagcggccgtggggaggggagtgggcggcgccgggagtgcgcgggacgcgccccttcagagcgcgcgagcccggggcgggcggggcgcgtcccggaggcggaccggcttactggtaagctcggggaagcggccggccgcggccggactgggcagcgacgatccccgggccaccggcttcgagcagctcgcgtgcccacagctcccggaaagccgcggccaggtttctgtgcccgtcttccccgcccctacgccggggcggggcggggccaggctggggcggggtcggcggaacctttgggcctgcgccctctgctggagaaacggggaaaggagcggcggggggttggggatcctaagattttccaaaagaccaagtgcagcatctgtaacagtgccttggagttgccctcagtccacttcctgtgtggccactccttccaccaacactgctttgagagttactcggaaagtgatgctgactgccccacctgcctccctgaaaaccggaaggtcatggatatgatccgggcccaggaacagaaacgagatctccatgatcaattccagcatcaggaagaaaacagcccaaagatgagagtgattcgcgtgggtacccgcaagagccagcttgctcgcatacagacggacagtgtggtggcaacattgaaagcctcgtaccctggcctgcagtttgaaatcattgctatgtccaccacaggggacaagattcttgatactgcactctctaagggattcactcaggctctttctgtccggcagattggagagaaaagcctgtttaccaaggagcttgaacatgccctggagaagaatgaagtggacctggttgttcactccttgaaggacctgcccactgtgcttcctcctggcttcaccatcggagccatctgcaagcgggaaaaccctcatgatgctgttgtctttcacccaaaatttgttgggaagaccctagaaaccctgccagagaagagggttggtccccctgggacaatttcctga

SEQ ID NO: 147045 - DNA, 495 bp, Homo sapiens
atcttgacgaggctgcggtgtctgctgctattctccgagcttcgcaatggtaagcttcaggggtgtgaagtcgccggcgttcttgggtttgaggactcagtggggagagccttcggcgggagcgctccttggcctgccggcctcggttgcagggcgggcgcggttattgcttggcccatgtgctctggtggtggagtttgcgggggctgggggcgcagtattaggggactttggcgctatttgaggacctggttgcattcccgctgccctcctacagccgcctaaggacgacaagaagaagaaggacgctggaaagtcggccaagaaagacaaagacccagtgaacaaatccgggggcaaggccaaaaagaaggtagaaataagacctctctgaaagagactaggggtaactctctcgtaaccctctagtaatagggaacttggataagtaagtggttttcaggtgtagaattctagaggcaaaatgggagagtt

SEQ ID NO: 147046 - DNA, 1420 bp, Homo sapiens
  misc_feature (1)...(1420): n = a,t,c or g
gttgtgtctggggccggattatacccatgccttccggtttcaggnaggcaggtggggcagtcagcatcactttccgagtaactctcaaagcagtgttggtggaaggagtggccacacaggaagtggactgagggcaactccaaggcactgttacagatgctgcacttggtcttttggaaaatcttaggactggccttgagctcttggatctcctggcggatacgggtggtctcctctcggtaccgccgcacccgcagctcatcctgtgcaatctgctggctctgtttctgtagtttttggaccaggtagtccctgatgacggagagtgtggctgtggagttgtgggccagggtctgcaccactagaagaggtggcatgaggttcttgttctcgatatgcttgaggacagctgccacatactccttgcagtcctcctccttgcgagcgaagtagctgagggcctgctcccacaaggaggggtcctgctccccatggcgctcacacacgctgatgacctgccggtactgctcgtgctgcatgtggtagtgcatgatctgctggaacagcttcccctgctcataaaggtaaaggacaccatcctggaagtcgtgcatctggcacaggaccagggccttgtcaaagacgtcgcagaagcgaccactcttcagcagggaaatggcctctgcgtgaagcttctctttgacctgtggatccttctcgtgggcccagttctgcagtcgcagctcaaggagtgtgtcgtagatcccctggggtgagtctggctgcacttcactcatgtgctctaggaaggctttcagctctcgcggggtttattggcaaagatggggatgaaactcctcagagttggccctgcaagcctggggcctccctatcgctgcggccttcgaggctgggccgataatcaagtacaaagtcccttcagcaactgagttgtctgctctggtatgtggtgcatgaggatcttgccgtagcgcttcatgttgctctctgcctgctcaaaaggcagcttgccgatgtatcgaagggcttcctgataattcttaatgtcttctagctggatcttcaggtaccactcatgatgtgcatggttctccgccagatacagggcatgggagtagtagccagcctgccggaggaccttgatggctgtctccacatcaaagtggacttcactctcactctttttcttgatgaactcctccagcttcgagctgtccttgagcttggtatagcagttgaggagcagggtggtatggtcggcattggccagggattgtcggtgcagggtctgcaggtaggcagtcaggttgtgaatgcgctgggcatccagaaacttgcggatcacgtaggatggctccaactttccaatggttgtgggattacaggcatgtgtcaccat

SEQ ID NO: 147047 - DNA, 861 bp, Homo sapiens
aacaccgacacgtttttggccttcaaacaggggccgagccccactagatcagttaaaaataacacagcaggcacagcggcagacacttcgcacaacagacccattttcatgatcctaatgggaaaaagaacgagtggtgacgggaagataaactctcacattttgactctagaaatctacacctgaaaaaccacttactatacaagttacctattactagagggttacgagagagttacccctagtctctttcagagaggtcttatttctaccttctttttggccttgcccccggatttgttcactgggtctttgtctttcttggccgactttccagcgtccttcttcttcttgtcgtccttaggcggcattgcgaagctcggagaatagcagcagacaccgcagcctcgtcaagatgtcggacaaaaaagccaaagacccagtgaacataatccggggggcaagggccaaaaaggaagaattggtccaaaggcaaaagttccgggacaagcttcaataactttagtcttgtttgacaaagctacctatgataaactctgtaaggaagttcccaactatacacctaataaccccagctgtgggctctgagagacttgaagattcgaggctccctgggccagggcaagccctttcaggagctccttagttaaaggatttattccaaactggttttcaaagcacagagcttcaagttattttacaccaggaattaccaagggtggaagatgctcccagcttgctgggtgaagattgcatgaataggtccaacccacctgtacatttggaaaaataaaactttattaaatcaaaaaaaaaaaaaaaaaaaaaaaaaatttcatt

SEQ ID NO: 147048 - DNA, 800 bp, Homo sapiens
  misc_feature (1)...(800): n = a,t,c or g
aattttgccctcgaggccaagaattcggcgagggcaataagctcctagtcccagacgcccatggggtcatttcacagaggaggaccaaggctactatcaaaaaacctgtggggcaaaggtgaaatgtggaaagatgctggaggaaaaaacccctgggaaaggctcccctggttgtcctaccccatgggaccccagaggttctttgaccagcttttggcaaacctgtccctctgccctctgcccatcatgggcaaccccccaaaagtcaaaggcacatggccaagaaaggtgctgacttcccttgggagatgcccataaaagcacctgggatgatctcaaggggcaccttttgcccaagcctgaagtgaacttgcactgttgacaagcctgcaatgtgggatcctgagaacttcaaagctcctggggaaatgttgctggtgacccgttttgggcaatcccattttcggcaaaagaatttcacccctggaggttgcagggcttcctggggcagaaagatgggtgacttggagttggccagtgcccttgttccttccagataccactgaagctcaattgcccatgaatgcagagcttttcaaggataaggcttttattcttgcaagcaattacaaataataaatctatttctgctaagagatcaccaaannnnnatnntnnnnnnncccccggattttttatttagcgggccgcacctttttccccttttagggggggtaaatttatattgggccttgggccggggttttcaaaagcggggggannnnnnnnnnaaagagccc

SEQ ID NO: 147049 - DNA, 348 bp, Homo sapiens
acagacctctgcttggagtatttaggatgactgctgtgaaatggagaacagtttcatcaggaccaaaaaacctcactgggcctttccagagaactgcagacctcactgtcagggtctttctgatgacgcctgtctgtgtgcatcatgtttctgagaccacagtttacctcaggcaaggaaacaggctccaagaggctgaggactttgcccaggatgacatagccaatggacaagcagtgtctgtcagctgtgaaggcttcactcttattgtccttctaccttgaatagaagttttcctgataagaataaacgaggaaaaggtccttgcctcctggaagaacaaaaaaa

SEQ ID NO: 147050 - DNA, 5424 bp, Homo sapiens
gtggagggcatgacctgccagtcctgtgtcagctccattgaaggcaaggtccggaaactgcaaggagtagtgagagtcaaagtctcactcagcaaccaagaggccgtcatcacttatcagccttatctcattcagcccgaagacctcagggaccatgtaaatgacatgggatttgaagctgccatcaagagcaaagtggctcccttaagcctgggaccaattgatattgagcggttacaaagcactaacccaaagagacctttatcttctgctaaccagaattttaataattctgagaccttggggcaccaaggaagccatgtggtcaccctccaactgagaatagatggaatgcattgtaagtcttgcgtcttgaatattgaagaaaatattggccagctcctaggggttcaaagtattcaagtgtccttggagaacaaaactgcccaagtaaagtatgacccttcttgtaccagcccagtggctctgcagagggctatcgaggcacttccacctgggaattttaaagtttctcttcctgatggagccgaagggagtgggacagatcacaggtcttccagttctcattcccctggctccccaccgagaaaccaggtccagggcacatgcagtaccactctgattgccattgccggcatgacctgtgcatcctgtgtccattccattgaaggcatgatctcccaactggaaggggtgcagcaaatatcggtgtctttggccgaagggactgcaacagttctttataatccctctgtaattagcccagaagaactcagagctgctatagaagacatgggatttgaggcttcagtcgtttctgaaagctgttctactaaccctcttggaaaccacagtgctgggaattccatggtgcaaactacagatggtacacctacatctgtgcaggaagtggctccccacactgggaggctccctgcaaaccatgccccgggacatctttggcaaagtccccacaatcaaccagaggcagtgggcaccgcaggaagtgcttctttacagattcaaagggcatgacctgttgcatcctgtgtgtctaacatagaaaggaatctgcagaaagaagctggtgttctctccgtgttggttgccttgatggcaggaaaggcagagatcaagtatgacccagaggtcatccagcccctcgagatagctcagttcatccaggacctgggttttgaggcagcagtcatggaggactacgcaggctccgatggcaacattgagctgacaatcacagggatgacctgcgcgtcctgtgtccacaacatagagtccaaactcacgaggacaaatggcatcacttatgcctccgttgcccttgccaccagcaaagcccttgttaagtttgacccggaaattatcggtccacgggatattatcaaaattattgagagcaaaacctcagaagccctggctaaactcatgtctctccaagccacagaagccaccgttgtgacccttggtgaggacaatttaatcatcagggaggagcaagtccccatggagctggtgcagcggggcgatatcgtcaaggtggtccctgggggaaagtttccagtggatgggaaagtcctggaaggcaataccatggctgatgagtccctcatcacaggagaagccatgccagtcactaagaaacccggaagcactgtaattgcgaggtctataaatgcacatggctctgtgctcattaaagctacccacgtgggcaatgacaccactttggctcagattgtgaaactggtggaagaggctcagatgtcaaagaaccccaacaagcacatctcccagacagaggtgatcatccggtttgctttccagacgtccatcacggtgctgtgcattgcctgcccctgctccctggggctggccacgcccacggctgtcatggtgggcaccggggtggccgcgcagaacggcatcctcatcaagggaggcaagcccctggagatggcgcacaagataaagactgtgatgtttgacaagactggcaccattacccatggcgtccccagggtcatgcgggtgctcctgctgggggatgtggccacactgcccctcaggaaggttctggctgtggtggggactgcggaggccagcagtgaacaccccttgggcgtggcagtcaccaaatactgtaaagaggaacttggaacagagaccttgggatactgcacggacttccaggcagtgccaggctgtggaattgggtgcaaagtcagcaacgtggaaggcatcctggcccacagtgagcgccctttgagtgcaccggccagtcacctgaatgaggctggcagccttcccgcagaaaaagatgcagtcccccagaccttctctgtgctgattggaaaccgtgagtggctgaggcgcaacggtttaaccatttctagcgatgtcagcgacgctatgacagaccacgagatgaaaggacagacagccatcctggtggctattgacggtgtgctctgtgggatgatcgcaatcgcagacgctgtcaagcaggaggctgccctggctgtgcacacgctgcagagcatgggtgtggacgtggttctgatcacgggggacaaccggaagacagccagagctattgccacccaggttggcatcaacaaagtctttgcagaggtgctgccttcgcacaaggtggccaaggtccaggagctccagaataaagggaagaaagtcgccatggtgggggatggggtcaatgactccccggccttggcccaggcagacatgggtgtggccattggcaccggcacggatgtggccatcgaggcagccgacgtcgtccttatcagaaatgatttgctggatgtggtggctagcattcacctttccaagaggactgtccgaaggatacgcatcaacctggtcctggcactgatttataacctggttgggatacccattgcagcaggtgtcttcatgcccatcggcattgtgctgcagccctggatgggctcagcggccatggcagcctcctctgtgtctgtggtgctctcatccctgcagctcaagtgctataagaagcctgacctggagaggtatgaggcacaggcgcatggccacatgaagcccctgacggcatcccaggtcagtgtgcacataggcatggatgacaggtggcgggactcccccagggccacaccatgggaccaggtcagctatgtcagccaggtgtcgctgtcctccctgacgtccgacaagccatctcggcacagcgctgcagcagacgatgatggggacaagtggtctctgctcctgaatggcagggatgaggagcagtacatctgatgacttcaggcaggcgggccggggcagggacttgcctccactcaccacaagctgagcaggacagccagcagcaggatgggctgagctagcctccagctttggggacttccgctccctggatatgtccagtcatcctgccctgcagcacgcggccttgtctgggtgcagctgggcttggcctggagaggacggccctgcctgcctcttggcctcacgggaccgtcagcatgggctttgtcttggactctagtccttggctggactgtagaaggtgagaggcgagtcaccctcctcacagacctctgcttggagtatttaggatgactgctgtgaaatggagaacagtttcatcaggaccaaaaaccttaatctggccttttccagaaaattggaaacctcactgtcagggtctttctgatgacgcctgtctgtgtgcatcatgtttctgagaccacagtttacctcaggtgtgcctgttgctttcttcctgcatagtctgttcctttcttcgtacatagtctgttccttttctctcctgtgtgcttgtcagtggggacccctcgcaaccctgcctgtcacctgggagggtgggaccaatgtccttgtggtctttgctgctgctctcaggcgcttctccaatgctctggagtgtgcatttcagcttgaacctgcttcctggctcacacatccccagccagggagcttgccacactcttcttcaagttgaggagagttcttttttgcttaaagcccccttctccatggagtgttggcttctcaatagagtgttgttgctgaccagctggagtgagggcctcagagcctgacctgagagtccgtactcggcttcctgtggggtgtaggttctcgcgattcaggacgtccttccatatccctgcccagcctgtggtgcttgaaacgtttgccccatgggaaacgtatgtgtgcaggagcctccctgcacggcccaaggggcttcgttttcagtcttctgactgtcacctcgtggggttcagtagagaattcaattactagcgcctggccttgtgtggcttggaggaaatggtactgcccaaataggaggaaaacacagcctccctgagcctgcattctgcacgctgcccaggggcttcagaaaaggagtggccacagcaccccgaagggagcatctatttacctggcagtggctctcagagcagcagaacgggttcagttttagactctgaagttggttgtgattgacagaaccctttgggagcaaactagtagagttggattaaattctgggtgaaacccttttctcccacacaaaatagttttagtgatttttttcattgtccattacttgccaggggcagttttagcagcacttttgatagattacgtctaatcctcccaaccaaccagcagggtagctattactgtccacattttacaggcaaggaaacaggctccaagaggctgaggactttgcccaggatgacatagccaatggacaagcagtgtctgtcagctgtgaaggcttcactcttattgtccttctaccttgaatagaagttttcctgataagaataaacgaggaaaaggtccttgcctcctggaagaacaaatctaccaggtgatctattcattgtttcaactcagaatgcacttgattcaggaggtcatctgaccttcaccttggatggttagtttcactttttacatatagtttttgcagggttttattttataaaatccaagcgcgctgttgattgtgttttccttgttttcagccccccgactccagcccgcagcacatttccgctgtccgtcagtaattgtgtcctctctttatgcttgcttggggaatgttgttttctgactaggctgatcattatctaaagaatctaattctgttgatttttaaaacttttaggaccataaacgttgtgttcatatatggacatggaaatatttatataattttatagaaaataaccttttagatggtcaaagtgtaaggagtttttttgtcagataatcatttctacttcaaaaacatttcatgcaatattagaataaagttcctgtcattcctct

SEQ ID NO: 147051 - DNA, 6687 bp, Homo sapiens
ttcccggacccctgtttgctttagagccgagccgcgccgcgccgatgccctcacactctgcgcctcctctcccgggactttaacaccacgctctcctccaccgaccaggtgaccttttgctctgagccagatcagagaagaattcggtgtccgtgcgggacgatgcctgagcaggagagacagatcacagccagagaaggggccagtcggaaaatcttatctaagctttctttgcctacccgtgcctgggaaccagcaatgaagaagagttttgcttttgacaatgttggctatgaaggtggtctggatggcctgggcccttcttctcaggtggccaccagcacagtcaggatcttgggcatgacttgccagtcatgtgtgaagtccattgaggacaggatttccaatttgaaaggcatcatcagcatgaaggtttccctggaacaagacagtgccactgtgaaatatgtgccatcggttgtgtgcctgcaacaggtttgccatcaaattggggacatgggcttcgaggccagcattgcagaaggaaaggcagcctcctggccctcaaggtccttgcctgcccaggaggctgtggtcaagctccgggtggagggcatgacctgccagtcctgtgtcagctccattgaaggcaaggtccggaaactgcaaggagtagtgagagtcaaagtctcactcagcaaccaagaggccgtcatcacttatcagccttatctcattcagcccgaagacctcagggaccatgtaaatgacatgggatttgaagctgccatcaagagcaaagtggctcccttaagcctgggaccaattgatattgagcggttacaaagcactaacccaaagagacctttatcttctgctaaccagaattttaataattctgagaccttggggcaccaaggaagccatgtggtcaccctccaactgagaatagatggaatgcattgtaagtcttgcgtcttgaatattgaagaaaatattggccagctcctaggggttcaaagtattcaagtgtccttggagaacaaaactgcccaagtaaagtatgacccttcttgtaccagcccagtggctctgcagagggctatcgaggcacttccacctgggaattttaaagtttctcttcctgatggagccgaagggagtgggacagatcacaggtcttccagttctcattcccctgggctcccccaccgagagaaccaggtccagggcacatgcagtaccactctgattgccattgccggcatgacctgtgcatcctgtgtccattccattgaaggcatgatctcccaactggaaggggtgcagcaaatatcggtgtctttggccgaagggactgcaacagttctttataatcccgctgtaattagcccagaagaactcagagctgctatagaagacatgggatttgaggcttcagtcgtttctgaaagctgttctactaaccctcttggaaaccacagtgctgggaattccatggtgcaaactacagatggtacacctacatctctgcaggaggtggctccccacactgggaggctccctgcaaaccatgccccggacatcttggcaaagtccccacaatcaaccagagcagtggcaccgcagaagtgcttcttacagatcaaaggcatgacctgtgcatcctgtgtgtctaacatagaaaggaatctgcagaaagaagctggtgttctctccgagttggttgccttgatggcaggaaaggcagagatcaagtatgacccagaggtcatccagcccctcgagatagctcagttcatccattacctgggttttgaggcagcagtcatggaggactacgcaggctccgatggcaacattgagctgacaatcatagggatgacctgcgcgtcctgtgtccacaacatagagtccaaactcacgaggacaaatggcatcacttatgcctccgttgcccttgccaccagcaaagcccttgttaagtttgacccggaaattatcggtccacgggatattatcataattattgagaaattgggctttcatgcttccctgggcccagaggaacccaacgctcatcacttggaccacaaaatggaaataaagctgtggaagaagtctttccttgtgcatctggtgtttggcatccctgtcatggccttaatgatctatatgctgatacccagcaacgagccccaccagtccatggtcctggaccacaacatcattccaggactgtccattctaaatctcatcttctttatcttgtgtacctttgtccagctcctcggtgggtggtacttctacgttcaggcctacaaatctctgggacacaggtcagccaacatggacgtgctcatcgtcctggccacaagcattgcttatgtttattctctggtcatcctggtggttgctgtggctgagaaggcggagaggagccctgtgacgttcttcgacacgccccccatgctctttgtgttcattgccctgggccggtggctggaacacttggcaaagagcaaaacctcagaagccctggctaaactcatgtctctccaagccacagaagccaccgttgtgacccttggtgaggacaatttaatcatcagggaggagcaagtccccatggagctggtgcagcagcggtgcgcgatatgtaagggtggtccctgggggaaagtttccagtggatgggaaagtcctggaaggcaataccatggctgatgagtccctcatcacaggagaagccatgccagtcactaagaaacccggaagcactgtaattgcgaggtctataaatgcacatggctctgtgctcattaaagctacccacgtgggcaatgacaccactttggctcagattgtgaaactggtggaagaggctcagatgtcaaaggcacccattcagcagctggctgaccggtttagtggatattttgtcccatttatcatcatcatgtcaactttgacgttggtggtatggattgtaatcggttttatcgattttggtgttgttcagaaatactttcctaaccccaacaagcacatctcccagacagaggtgatcatccggtttgctttccagacgtccatcacggtgctgtgcattgcctgcccctgctccctggggctggccacgcccacggctgtcatggtgggcaccggggtggccgcgcagaacggcatcctcatcaagggaggcaagcccctggagatggcgcacaagataaagactgtgatgtttgacaagactggcaccattacccatggcgtccccagggtcatgcgggtgctcctgctgggggatgtggccacactgcccctcaggaaggttctggctgtggtggggactgcggaggccagcagtgaacaccccttgggcgtggcagtcaccaaatactgtaaagaggaacttggaacagagaccttgggatactgcacggacttccaggcagtgccaggctgtggaattgggtgcaaagtcagcaacgtggaaggcatcctggcccacagtgagcgccctttgagtgcaccggccagtcacctgaatgaggctggcagccttcccgcagaaaaagatgcagtcccccagaccttctctgtgctgattggaaaccgtgagtggctgaggcgcaacggtttaaccatttctagcgatgtcagcgacgctatgacagaccacgagatgaaaggacagacagccatcctggtggctattgacggtgtgctctgtgggatgatcgcaatcgcagacgctgtcaagcaggaggctgccctggctgtgcacacgctgcagagcatgggtgtggacgtggttctgatcacgggggacaaccggaagacagccagagctattgccacccaggttggcatcaacaaagtctttgcagaggtgctgccttcgcacaaggtggccaaggtccaggagctccagaataaagggaagaaagtcgccatggtgggggatggggtcaatgactccccggccttggcccaggcagacatgggtgtggccattggcaccggcacggatgtggccatcgaggcagccgacgtcgtccttatcagaaatgatttgctggatgtggtggctagcattcacctttccaagaggactgtccgaaggatacgcatcaacctggtcctggcactgatttataacctggttgggatacccattgcagcaggtgtcttcatgcccatcggcattgtgctgcagccctggatgggctcagcggccatggcagcctcctctgtgtctgtggtgctctcatccctgcagctcaagtgctataagaagcctgacctggagaggtatgaggcacaggcgcatggccacatgaagcccctgacggcatcccaggtcagtgtgcacataggcatggatgacaggtggcgggactcccccagggccacaccatgggaccaggtcagctatgtcagccaggtgtcgctgtcctccctgacgtccgacaagccatctcggcacagcgctgcagcagacgatgatggggacaagtggtctctgctcctgaatggcagggatgaggagcagtacatctgatgacttcaggcaggcggcccggggcagggacttgcctccactcaccacaagctgagcaggacagccagcagcaggatgggctgagctagcctccagctttggggacttccgctccctggatatgtccagtcatcctgccctgcagcacgcggccttgtctgggtgcagctgggcttggcctggagaggacggccctgcctgcctcttggcctcacgggaccgtcagcatgggctttgtcttggactctagtccttggctggactgtagaaggtgagaggcgagtcaccctcctcacagacctctgcttggagtatttaggatgactgctgtgaaatggagaacagtttcatcaggaccaaaaaacctcactgggcctttccagagaactgcagacctcactgtcagggtctttctgatgacgcctgtctgtgtgcatcatgtttctgagaccacagtttacctcaggtgtgcctgttgctttcttcctgcatagtctgttcctttcttcgtacatagtctgttccttttctctcctgtgtgcttgtcagtggggacccctcgcaaccctgcctgtcacctgggagggtgggaccaatgtccttgtggtctttgctgctgctctcaggcgcttctccaatgctctggagtgtgcatttcagcttgaacctgcttcctggctcacacatccccagccagggagcttgccacactcttcttcaagttgaggagagttcttttttgcttaaagcccccttctccatggagtgttgggcttctcaatagagtgttgttgctgaccagctggagtgagggcctcagagcctgacctgagagtccgtactcggcttcctgttggggtgtaggttctcgcgattcagggacgttccttccatatccctgcccagcctgtggtgcttgaaacgtttgccccatgggaaacgtatgtgttgcaggagcctccctgcacggcccaaggggcttcgttttcagtcttctgactgtcacctcgtggggttcagtagagaattcatgtgactagcgcctggccttgtgtggcttggaggaaatggtactgcccaaataggaggaaaacacagcctccctgagcctgcattctgcacgctgcccaggggctttcagaaaaggagtggccacagcaccccgaagggagcatctatttacctggcagtggctctcagagcagcagaacgggttcagttttagactctgaagttggttgtgattgacagaaccctttgggagcaaactagttagagttggattaaaattctggggtgaaacctttttcttcccacacaaattagtttttagtgattttttttcaattggtccattaatttgccaggggcagttttttagcagcacttttgatagattacggcctaaccctcccaaccaaccagcagggtagctattactgtccacattttacaggcaaggaaacaggctccaagaggctgaggactttgcccaggatgacatagccaatggacaagcagtgtctgtcagctgtgaaggcttcactcttattgtccttctaccttgaatagaagttttcctgataagaataaacgaggaaaaggtccttgcctcctggaagaacaaatctaccaggtgatctattcattgtttcaactcagaatgcacttgattcaggaggtcatcctgaccttcaccttggatggttagtttcactttttacatatagttttttgcagggttttcattttataaaatcccaagcgcgctggtttgattggtggttttccctggttttcaggccccccgactccaggcccggagcacatttccgctgtccgtcagtaaattgtgtcctctcatttatgcttgcttggggaatgttgttttctgactaggctggattcaatatctaaagaatctaattctgttgatttttaaaacttttaggaccataaacgttgtgttcatatatggacatggaaatatttatataattttatagaaaataaccttttagatggtcaaagtgtaaggagtttttttgtcagataatcatttctacttcaaaaacatttcatgcaatattagaataaagttcctgtcattcctctaaaaa

SEQ ID NO: 147052 - DNA, 503 bp, Homo sapiens
  misc_feature (1)...(503): n = a,t,c or g
tgcgggcnnnnnnaataatgatttcatcgtcatcggcaccggcaccgaattcggaattccagggccgacccacgcgtacgaaaaaacaactattatctatgacgattataattgcctttagcaacaggaacttgaaactgagaaccagaatcttcagctgacagttttatgacaaacgcaaattagaagccatgttgcaaggcatggtgacagaaacgacaatgaagtgggagaaagaatgtgagcgtagagtggcagccaaacagctggagatgcagaataaactctgggttaaagatgaaaagctgaaacaactgaaggctattgttactgaacctaaaactgagaagccagagagaccctctcgggagcgagatcgagataaagttactcaaagatctgtttctccatcacctgtgcctttactctttcaacctgtatagaacgcaccaccaattcgtctccgacacagacgatcacgctctgttggagacagatgggtg

SEQ ID NO: 147053 - DNA, 479 bp, Homo sapiens
tataaaacaaggggtggtggacaatctgttcagtttactgatattgagactttaaagcaagaatcaccaaatgggtaagtaaccatcaaaaatctctgtataaaagttggtcattttcttagctgctcattttggaggaacagaatagcctgtgaaatgtatcattaattctccaaagggatgtagatagtattcccctacttctaatatttttcctcttcttagatggaaaaataattgttgcatcatgtttcccctttttcagtagtcgaaaacgaagatcttccacagtagcacctgcccaaccagatggtgcagagtctgaatggaccgatgtagaaacaagggtaggggaaaaattaaatatttgtctgcctactaaaattaggtttgtcatgttttaaactccacagctctagatttttatgctctttgaaaatgctgaggtataatctcacattgccagtgcaccatgtagg

SEQ ID NO: 147054 - DNA, 3298 bp, Homo sapiens
ttcgtgatggattcagtactcctcaaccactcttcctaatgattggaacaaaagaaaaaaaaaagaaaaaaaagccatgttgtcagcgagagctaagacaccccggaaacctaccgtgaaaaaagggtcccaaacgaaccttaaagacccagttggggtatactgtagggtgcgcccactgggctttcctgatcaagagtgttgcatagaagtgatcaataatacaactgttcagcttcatactcctgagggctacagactcaaccgaaatggagactataaggagactcagtattcatttaaacaagtatttggcactcacaccacccagaaggaactctttgatgttgtggctaatcccttggtcaatgacctcattcatggcaaaaatggtcttctttttacatatggtgtgacgggaagtggaaaaactcacacaatgactggttctccaggggaaggagggctgcttcctcgttgtttggacatgatctttaacagtatagggtcatttcaagctaaacgatatgttttcaaatctaatgataggaatagtatggatatacagtgtgaggttgatgccttattagaacgtcagaaaagagaagctatgcccaatccaaagacttcttctagcaaacgacaagtagatccagagtttgcagatatgataactgtacaagaattctgcaaagcagaagaggttgatgaagatagtgtctatggtgtatttgtctcttatattgaaatatataataattacatatatgatctattggaagaggtgccgtttgatcccataaacccaaacctccacaatctaaattgcttcgtgaagattaagaaccataacatgtatgttgcaggatgtacagaagttgaagtgaaatctactgaggaggcttttgaagttttctggagaggccagaaaaagagacgtattgctaatacccatttgaatcgtgagtccagccgttcccatagcgtgttcaacattaaattagttcaggctcccttggatgcagatggagacaatgtcttacaggaaaaagaacaaatcactataagtcagttgtccttggtagatcttgctggaagtgaaagaactaaccggaccagagcagaagggaacagattacgtgaagctggtaatattaatcagtcactaatgacgctaagaacatgtatggatgtcctaagagagaaccaaatgtatggaactaacaagatggttccatatcgagattcaaagttaaccccatctgttcaagaactactttgatggggaaggaaaagtgcggatgatcgtgtgtgtgaaccccaaggctgaagattatgaagagaacttgcaagtcatgagatttgcggaagttactcaagaagttgaagtagcaagacctgtagacaaggcaatatgtgtgtttaacgcctcggaggagatacagaaaccagcctcgaggtcccacttggaaatgaaccattggttactgacgtggttttgcagagttttccacctttgccgtcatgcgaaattttggatatcaacgatgagcagacacttccaaggctgattgaagccttagagaaacgacataacttacgacaaatgatgattgatgagtttaacaaacaatctaatgcttttaaagctttgttacaagaatttgacaatgctgttttaagtaaagaaaaccacatgcaagggaaactaaatgaaaaggagaagatgatctcaggacagaaattggaaatagaacgactggaaaagaaaaacaaaactttagaatataagattgagattttagagaaaacaactactatctatgaggaagataaacgcaatttgcaacaggaacttgaaactcagaaccagaaacttcagcgacagttttctgagaaacgcagattagaagccaggttgcaaggcatggtgacagaaacgacaatgaagtgggagaaagaatgtgagcgtagagtggcagccaaacagctggagatgcagaataaactctgggttaaagatgaaaagctgaaacaactgaaggctattgttactgaacctaaaactgagaagccagagagaccctctcgggagcgagatcgagaaaaagttactcaaagatctgtttctccatcacctgtgcctttactctttcaacctgatcagaacgcaccaccaattcgtctccgacacagacgatcacgctctgcaggagacagatgggtagatcataagcccgcctctaacatgcaaactgaaacagtcatgcagccacatgtccctcatgccatcacagtatctgttgcaaatgaaaaggcactagctaagtgtgagaagtacatgctgacccaccaggaactagcctccgatggggagattgaaactaaactaattaagggtgatatttataaaacaaggggtggtggacaatctgttcagtttactgatattgagactttaaagcaagaatcaccaaatggtagtcgaaaacgaagatcttccacagtagcacctgcccaaccagatggtgcagagtctggaatgggaccgatgtaggaaacaaggtgttctgtgggctgtgggagatgaggagcaggttcccagctggggacctggatatcagcatcacggcacaacccaagcgcaaaaagccatgaaactgacagtcccagtactgaaagaacattttcatttgtgtggatgatttctcgaaagccatgccagaagcagtcttccaggtcatcttgtagaactccagctttggttgaaaatcacgaacctcagctacatcatacactgaccccagagcaaagctttccctatgggtcccaaaagacaactagtattcaacgaaaacgtgtatagtgtatgttttgcccatatctaatattaatagcagaggaagactccgggtttcatcactggtatgaattcctttataatgttttttttaaaatatatttcatgtatacttataaactaattccacacaagtgtttgtcttagatgattaaggaagactatatctagatcatgtccgatttgtgtattgtgacgtctccagccctggtctgaatttcgtaaggttttatagacgagatgcggctatggagtagctgcaagaatgcactttagaactatttgacaattcagactttcaaaataaagatgtaaatgactggccaataataaccattttaggaaggtgttttgaattcccctatgtatatattcactttgtgacatttagatatgccaaaagaattaaactcaaaagcactaagaaatacaaaaaaa

SEQ ID NO: 147055 - DNA, 349 bp, Homo sapiens
ggcacgagggacatgctgatccttctgcctggaatttccttgtcggcctggggaactcctcgctctgcaagactccgctcaaaacagcaccttcgacaagactgccctgccccttccctgccttgccccatgtccccctcccttgggtccccagagccacgcacatccaaccctgcttcccacacacggggccgtgcgcgcctttcttcaccactgacctccttcaagggcagcgactgtctttatctctgcataccccgctgcaccctgtgcctgcccactgggcacttccagcacggcgtgcgctcgcaaggctgactgaccggcccaacgcgcgcctcaccccacg

SEQ ID NO: 147056 - DNA, 384 bp, Homo sapiens
  misc_feature (1)...(384): n = a,t,c or g
ngcccttcctcagcgtggtgtcatcacaggtggcaggccatgggcgcatctttcagtgcacttatctgatgaatgactgccaaacaaagcagccatgctggtcaggggcaacatggccacacccctggatgcaggtaaaggggacccctgcactccgtgctcatcctcagactctatctgaaagcaggctgcctgagggcactcggggctccaggcctgaagactgccccaaaccccaacctgctgacccgccatctctagggacacatatgtccccctccctggcagctttcacctactcagcaaaaaatgtccccaacctttgcagcagctaagggggcttctcagggcctgatgtgggcacatgcagttctctctcgtgcc

SEQ ID NO: 147057 - DNA, 1506 bp, Homo sapiens; identical to SEQ ID NO: 146311

SEQ ID NO: 147058 - DNA, 2438 bp, Homo sapiens
  misc_feature (1)...(2438): n = a,t,c or g
aatccgcgtcgacgacttcgtggccgctgccgggcatcggcttccagtccgcggagggtgaggcggcgtggacagcggccccggcacccagcgccccgccgcccgcaagccgcgcgcccgtccgccgcgccccgagcccgccgcttcctatctcagcgccctgccgccgccgccgcggcccagcgagcggccctgatgcaggccatcaagtgtgctggtggttggaaagccgaagctgtaggtaaaacttgcctactgatcagttacacaagccaatgccatttcctggagaatatatccctactgtctttgacaatttattctgcccaatgttatggtagatggcaaaaccggtgaaatctgggcttatgggatacaaggtggacagaaagattatgacagagttacgcccccctatccctatccggcaaggcagatgtgttcttattttggttttccctttgtgagtcctgcatccatttgaaaatgtccgtgcaaagtggtatcctgaacgtgcgggcaccactgtcccaaccactccaaatcatcctagtgggaacttaaacttgatcttagggatgataaagaccacggatcgagaaactgaaggagaagaagctgactctccatcacctatccgcagggtctagcccatggctaaggagattggtgctgtaaaatacctgggagtgctcggcgctcacacagcgaggcctcaagacagtgtttgacgaagcgatccgagcaagtcctctgcccgcctcccgtgaaagaaagaggaagagaaaattgcctgcctgttgtaaatgtctcagccccctcgttcttgggtcctgtccctttggaacctttgtaacgctttgctcaaaaaaaaaaaaaaaaaaaaaacaaaaaaaaaaaaacaacggtggagccttcgcactcaatgccaactttttgttacagattaatttttccataaaaccattttttgaaccaatcagtaattttaaggttttgtttgttctaaatgtaagagttcagactcacattctattaaaatttagccctaaaatgacaagccttcttaaagccttatttttcaaaagcgccccccccattcttggttcagattaagagttgccaaaataccttctggaactacactgcattgttgtgccgagaacaccgagcactgaactttgcaaaagaccttcggtttttgagaaagacggtagcttctgcagtttagggaggtgcagacactttgctcctcctatgtagttctcaggatgcgtaaagcaggaacagcctcccgaatggaggcgttggccattggaacttcaccagtgagttaggcaggcacgtgtttcccgacattaaccttgtactgtaatggagtgagcgtanacgcctccagctctttgggatcagtctttgtggatttcatagcggagttttctgaccagcttttgcgggagattttgaacagaactggctatttcctctaatgaagaattctggtttagctgtggggtgtgccgggtgggggtgtggtggtggatcaaaggacaaagacagtaattttggaacaaaataccgaagtgggaagatttaccactaccattggtacaagggaatgaaagtggtcacgggggtaaaaactcctaaaagggttaatttcctgtcaaatgcagtagatgaatgaaagaaaggtttggtattatcaaggaaatggtttcttaagccttttcctttctcttacaccctgccatgcctcccccaaattggggcatttaattcatctttaaactggttgttctgttagtcgctaacttagtaaaggtgcctttccctaaaagaaccccttctgactgagcaatatgcctccttgtattataaaatctttctggataatgcattagaaggttttttttgtcgattagtaaaaagtgctttcccatgttacctttattcagaagctaataaggggctttcccttagttttctagtaactagggtgtaaaaaatcatgtgttgccagcctttataggttttttaaaaatattttagataattctttaaactatgaacccttccttaaccatcactgtcttgccaggattaccgacactggtcacttgaccaatactgaccctcttaccctcggccaaggcgaacacacgcctcctggtagtcgccttggcctattaatgttcctttggggtctgtgagggttctgtaaaactgtgctaggtgctggacgatgtttctgttacaacttaactcactggcgagaatacagcgtggggacccttcagccactacaacagaattttttaaattgacagttgcagaattgtggagtgtttttacattgatcttttgctaatgcaattagccattatgttttgcatgtatgacttaataaatccttgaatcataaaaaaaaaaaaaaa

SEQ ID NO: 147059 - DNA, 723 bp, Homo sapiens
  misc_feature (1)...(723): n = a,t,c or g
aattttgccctcgaggccaagaattcggcgagggcaataagctcctagtcccagacgcccatggggtcatttcacagaggaggaccaaggcttactatccacaagcctgtggggcaaggttgaatgtggaaaaatgctggaaggaaaaaacccctgggaaaggctccctggttgtctaccccatggaccccagaggttctttgacgagctttggcaaccctgtcctctgccttttgcccatcatgggcaaacccccaaagtcaaggcacatggcaaagaaggtgctgactttccttgggagatgccaacaaagcaccctggatgatctcaaagggcaccttttgcccaagcctgaagtgaactgcactgttgacaagcctgcaatgtgggatcctgagaacttcaaagctcctggggaaatgttgctggtgacccgttttgggcaatcccattttcggcaaaagaattcancccctgaaggttgcagggcttcctgggcagaaagatgggtgacttggagttggccagtgcccttgttccttccagataccactgaagcctcttggcccatgaattcagaagctttcaaggataaggcttttattcttgcaagcaattacaaataataaatctatttctgctaagagatcacacatgattttcttcagctcttttttttacatctttttaaatatatgagccacaaagggtttatattgagaa

SEQ ID NO: 147060 - DNA, 920 bp, Homo sapiens
  misc_feature (1)...(920): n = a,t,c or g
aagatctttttttttttttttttgcgaagtgggctcgtgggttggcagtatgagagttgtaatggcccgactgttgagtgagggggagcagtgtatcccaacggcttgcgctgcctttgcgcagcagcccggcgggcggccacgtcgcggcctggctggggtaggagagggcggtccccagtgcagttgggtgaactaccgttgcacactggagtttctggtgtctttgcttggaactgacctagctcgtggcagggggaactcggctancgggccccacagcccctgctgactcaaaacaactgagttgtaagacgttcatcgccgtgttatccttgagtaaagaagcgggcttttgcaatgttgtccaaggctgggtctctacttcctggggctcaagcagtccctccgtgcctcagttcttcccaaagttgctggaatttacagggaaatgaacttctggaaagccccagcccaggggacaaatgcacccttccacagagaattctgccacttaatctggagttgaaggtcttaagggtttggaaatcttcccccttcatgggaagagaagctttggtatgggctgtccatgcttagacaggtgaattcctggcaactttgaaccttcaaggctggggagaggtggagagccatgccttgttctccttccttgctatgggaatttgctgacacaatatcttcccgcctggtgctgggcatatccttaggaactttacaacttttcctgtaataatcctgtgtgagcaagttgtcaaccttatttggggggaaaatgcctgaaaattagggggcacttcaagtatgatagcttctatcttcctatatttgtcttatatacaagtatttgcttttatcaaaataattccgaataaagcgattttaaagtaaagaagaaa

SEQ ID NO: 147061 - DNA, 350 bp, Homo sapiens
  misc_feature (1)...(350): n = a,t,c or g
nnnnnnnnnnnnnnnnnnnnnnnnnnnnnnngcacttccgggtttaataagccacatcctcagttgagcctggggtgaaatgtgagatcctgactctgtgcagtagtattagtgggtgggccaggggctgtgaataacattatcctcagtacagctgcaattccagggcccctctaccacaaagatggcttaagcaaaggcagccagatggaagtatgatatccaacaggaaggaagtaggcaggggtcactaaagtggctggtggataggaggctaccccaggggttcagctgtccttcaggtaatcagcttacccccaagaaggactgagaggaatatgagtaggaca

SEQ ID NO: 147062 - DNA, 1101 bp, Homo sapiens
gactggaatatcggtgacagcatttgcgcaggctctttgccaaagtccgagggccacataagaaaactcccactacagacctgtaggaacagaacaatagtaagggctagaatgcagcaatgacagatctcccaaaggaggttttctgtttcagacctgtcacgatgtcagtggccttgtcaaagtttaatgctgcatgaccaacctggattcagaggaataaaagttagaaaaaccaagtcctaggctgggccactttgcctaattcctccatctcctgttccagggaagtcaacaggttgttgaaccaggaaaaggcacctgtctccctgcagatccagtagaaatagatctgaaatcagcaagagagaacatagccttattaggtgaccttaaaagtggatttcaagatagaagcaaagggggtgaccccaattcctgctccaaccagcacagccacttcatactggaaaacatcctcactggctgtgccaaagggaccatccacttcaatcctggcagaagacagaagataacgggcaactgaagactcccctccacctgtccagtcccctgctgctcggatatgaatggagaagaaatcttcctctggagcagaggtcaaagtaaaaggatgccattccaggagagagattgaggggcaattaacaaagatatactgccccacttccatgctgaagccacgcttgttcatctgcaattccaaaactttggatgggtgcataacaacctgtgaatgaagcacatagaccaaagaaagcaaactctaatgacgacaaaaatttagttctgtagtccggtagaagataactcttatcacagcaagaggaaagtgcatattctttaccttggtaatcacaaccttctgctgggagcggtaaaaccggaggatcctttcacagatataaagaatgaccggtgcaaggatccacttccaagactgcacagagacagggttaagaatgagattacacactaatttcttgtagatcaggagttcaagaccagcctggccaacatggtgaaaccccatctctgctaaaaatacaaaaattagccgagtgtggtggtgggtgcctg

SEQ ID NO: 147063 - DNA, 2127 bp, Homo sapiens
gcgagggccagtcatggcggagtcctggtctggtcagtgttcttgcaggctctgccggccacggtgctgggcgcgctgggcagcgagttcttgcgggagtgggaggcgcaggacatgcgcgtgaccctcttcaagctgctgctgctgtggttggtgttaagtctcctgggcatccagctggcgtgggggttctacgggaatacagtgaccgggttgtatcaccgtccaggtctgggtggtcagaatggatccacgcctgatggctccacgcatttcccttccgtgggaaatggcagccaaacgaacctctcaaaaaccccacagagaataagggaaggcagcagagggtctccaagggcatccactgggtctgctggcttctacactgggttctgctactccccagacctcagggacaacctgccgggggttcagggttggtagcagggagtacccagttgcctacagggctgggcctcattctgccatcttaagcctgctccctcacccaggcactgggcaagtgaagagtttgcctgtactcttatctgggtgccttaaggagagagattgtgttcttcctctctcaggggtgataactcaggaagcctctgggttgggaagaccatcagttcttttgtcttaggtttcttttcctgtccctcttccatccccaagatgtgaccccataaaaatttttcctgagttggccaggcatggtggctcacgcctgtaatcccaacactttgggaggctgaggcgggcggatcacgaggtcaggagttcgagaccagcctgaccaacatggtgaaaaccccatctctactaaggatacaaaaattagccgggtgtggtggcacacaccagtaagtcccagctgctcaggaggctgaggcaggagatttgcttgaacctgggaggcagaggttgcaagttaggccgggattgcgccgtttgtactccagcctgggcaagcagagcaagacccatctcaaaaaaaaaatttttttcctgagaggaagcctgaggttgaccagctctggggtttgtaaggcaggtctgttttctcctaggccctgagttttctgaatctctggttttgctttgttggcaaggagccagggaatcctgacctgagccagaccttaagctctatggttatttagctggccattcaggtataaggcagggtggtgtacctgctggcactatccagatggaggcaccaaacacccacatacctggcccaaccagacttctcccgtgagccaggcaaaggaaattgtcatctgccaactgtcctactcatattcctctcagtccttctttgggggtaagctgattacctgaaggacagctgaacccctggggtagcctcctatccaccactgcttaagtgcctatgggaatgtgggtctgcaccttgtcccctcataggatggtaccaagcatttagtgcacaagtggccccatcatagcctgcagcctcatcatttcccatctgggacctgggtacaaaattcacgtcacagggctcaagctcctcccccactagcattcttctctacccttcaagaacccaggcaagcccttgccatgtcaaccaataggcccagggggagtttcccaaagattgtgggtggcaaatgccccctattagaaacacccagtaccctgaaagcactggtagccctggacctgccttccttccctcggggccatacttcctgtttccaatctgctgggccaccagcccacttttagtgaccccctgcctacttcccttcctgttggatatcatacttcccatctggctgcctttgcttaaacccccatttttgtggtagaggggccctggaattgcagctgtactgaggatgatgttattcaccagcccctggcccacccactaatactactgcacagagtcaggatctcacatttcaccccaggctcaactgaggatgtggcttattaaacacggaagtgcaaaaaaaaaaaaaaaagggggggcccttttaaaagaaccaattttaacgccccggggcgggaaagttaattttttttttttggggccccaaaattaaattccggggccgggtttttaacacggtgggaagggaaaac

SEQ ID NO: 147064 - DNA, 356 bp, Homo sapiens
  misc_feature (1)...(356): n = a,t,c or g
cacagagtgtcatgggtgacagtttcatggatgaagtagctccacgcctggcttctgtggacagcagattcttttccttctcacaaggggctcatataaaatttggnnnnnnnnnnnnnnnnnnnnnnnnnnnnnnnnnnnnnnnnnnnnnnnnnnnnnnnnnnnnnnnnnnnnnnnnnnnnnnnnnnnnnnnnnnnnnnnnnnnnnnnnnnnnnnnnnnnnnnnnnnnnnnnnnnnnnnnnnnnnnnnnnnnnnnnnnnnnnnnnnnnnnnnnnnnnnnnnnnnnnnnnnnnnnnnnnnnnnnnnnnnnnnnnnnnnnnnnnnnnnnnnnnnnnnnnnnnnnnnnnnnnnnnnng

SEQ ID NO: 147065 - DNA, 1282 bp, Homo sapiens
  misc_feature (1)...(1282): n = a,t,c or g
ttttttttttttaaaattagaaaacaaaactttatttgatgaaatctttttaaaagttccagtatgaagtaacaaaatcaacaacctacaaatctctttcagtcctttgcatttcaagcaaaatattctcttcagaaaaatgaccatttcataatatatatccccttctcgtaggctaggcatgtacgagtgaacaaacggatataaaattcaagaaaaaaatgaaaatattttaaaaataaaaatctgaaccttttccttgaggtgtattgcgatatggttaccaacacattcagcaccttgtaatccccaagttacctgatttggaggccngggaccaggaccctaaaattaaagaacaagagatcctagtcatttgtggagtcacaggttgggcagcagaagaaaaaccgacagcaactagaggagctcaaatacatgaaattcacacttctgaaatatttaatactcacttcaaacagctaattgtctatatgatttttaaaaaggaaacagctcagagtctggaatatgggtagttgtcctctgagtgacttgggcatttcttatgcatcttcagtacttgttatcaacatatgactccatactgagaaagcaatcaaatatcaggagatctcatttcacagataaccttgggtatagaaacttaaggtgccaattgttcttttactttacccctaaggcaaacgtcatctagacctataaaagtctttcgagacctaaggttcttgtcaatatttgattattacaaaccacatcaagaaattttaaaaatctgaatcaatgcactaagtcacccatttgcaccaaaaaaaaaggatccgtctttttttttttttttttttttgagacagagtcttgccctgttgcccaggctggagtgcagtggcgcgatctccgctcactgcaagctccacctcccgggttcacgccattctcctacctcagcctctcgagtagctaggactacaggtgcccaccactacacccggctaattttttgtatgtttagtagagacggggtttcaccatgttagccaggatggtctcgatctccaggatcagtttcttgagtcttttctcttttgcctcttagtcagaatcctaagaacataaccagggaaacaaatgagggcaagcaagatcctgctattaaatcaaaggaactactaggactcatggaaataattttaaatgcggtgtttaaccatggaggtggaaaactaggaaatttgacagccccaatttttttttaagggca

SEQ ID NO: 147066 - DNA, 2182 bp, Homo sapiens
ttttttttttgcagggcagggaaaacacagaactttatttcaacagtcattaggttccaccacacaacagggacaccatgggattgttttttcatttaataaatacaaatgaataaaaatactttattttgtcaagagactgcctctcctccctctcccgatctcacagaagcctccaggcaattgtgtgcccctccagggcctgcacccacagaccccgtctacttgcacaaatgactcttctttacagagagggctccatctcatttgcctgcaaatacaacttaggtataataccgctcctttcccccatctccttccaaatacgagttcttgccctgcgttccatttttttttttttttttttttttgagacagagtctcacttctgttgcccaggctggagtgcagtggcgcgaatctcagctcaactgccaaagtccgcctcctgggttcacgccattctcctgcctcagtcttcagagtagctgggactaacaggcgcccgccacccacgcccggctaattttttgtaatttttagtggagaccagggtttcactgttagccaggatggtcgcgatctcctgacctcatgatcccgcccggcctcagtctcccaaagtgctggggattgcagccgtgaagcaacagcacccagcctcccaaatttttaaatgagccccttgtgagaaggaaaaagaatctgctgtcccacagaaagcccaggcgtgggagctacttcaaccagaaacttgtcaccccatgaacactctgtgtggggttcagtcacacagaccaacgattccattatggaagggagggaagaaaggatcacatcaaatctactgtatggcttcataagaccatcccctatttcaaaaatagatattcgctatttaaatgccgccccgtgttgcgacaggcctgatatttgcttctgcatgtggcagatctgttattgcttacactgtggcctcctggcctgtgctgctcagctggccctgttagagaacatgggaaccacatcaaaatcctaagtcacaaaacaagggctctgtccccsawgtcsctgcccaggggcccacatgcccacctccacagcccagtcaagtgtggggataaggcactcctctgtgctctgagctaagatatggtagagtcccttctgaattttgagttgcaaagaatgattttgtgctaataaattcccagtgcatccaaaatgtacaaaaaccctagaatttccagtttttagattgaaaaaaaaaatttttttctgtagatccagaagaaactttcattgaaactttaaagacctcacctgcacctgctctagtaatgcactagttactaatatacaaacgtaaatctttgatgagtatggtcgggaaaaaactgtctgtccttgtgatcagcaataaatttcttttttctttttgagactgagtctcgctctgttcgcccaggctggagtgcagtggcatgatctccgctcactgcaagctccacctcccgggttcacgccattctcctgccccagcctcccgagtagctggtactacaggcacccgccaccacgcccggctaattttttttttttttttttttttttttttttttttagtagagacggggtttcaccgtgttagcgaggatgatctcgatttcctgacttcaggtgatctgcccaccttgacctcccaaagtgctgggattccaggcatgagccactgtgcctggcgtatagatggtatttgaagcaagagactggcctgggactgagctccaaggccctgcaagtttgaggagtccagtagaagagaaggacataggaaaggagcctggaagaacaaccaactgaggcaggagaatggcgtgaacccgggaggcggagcttgcagtgagccgagatcgggccactgcactccagcctgggcgacagagcaagactctgtctcaaaaaaaaaaaaaataataaaaaagaaagcagacgtgctgccttgctcatcatcgtttttatgctgctgtcggtgtggggcaagccacatacactgccctccatctcccttagtggacaaggagactctgagcttgttcgtttcttttttgtttgtttgttttgtttttgagacagagtctccctctgtcgtccaagctgcagtgcaatggcatgatcttgg

SEQ ID NO: 147067 - DNA, 632 bp, Homo sapiens
tttttttttttttttttccgggtctacacacagggactttattactctatggatgctggtgaactgccctccccaaccagcttcacgggggcaggcatctctgtccatcccatgcctttgggtcacagggggcagcaagaccaaaaagaccacagccaggccctgggttcagcttcagagccctgggttcagcttcagagccatcacccgctgcctcccccaaccccccaatctcctgagggaggagaattccttagggaacaaagacccaaacccctttccttcaagcctctgcttcacccaagggggcccctgtgccctgccgccccgaagctccctccctggccctgccccctcagggttccccagttccctcaccctctgcctccttcaggcaggaaaagggacagggagagaggaatggaggagggagagggaggctgggccgcaggagagagaagaggggggaaggaggagacattagggagaggccccttcacacagagagagaggccgagaaatcagggagaaggggggggctgaggtgagacctgagaaggaaagtgaaatttgggggaaaaggagttggaaaggaataggaaggcgttgggaagttcagacaagggaggcgc

SEQ ID NO: 147068 - DNA, 2443 bp, Homo sapiens
ctcaaaataagttgtccattgcttatcctattatacttggatattccgtttacccttggcattgctgatcttcagtactgactccttgaccattttcagttaatgcatacaatcccatttgtctgtgatctcaggacaaagaatttccttactcggtacgttgaagttaggggattgtcaatttgaagagctttctaatcaagaagcattatttgcccacaatttgagttacttatcatttttctcgaatcccctgcccttaaaaggaagaaacccatttctctgtcatttgcttcttgtaagtcacaagtcccaatttttgagtagtgatcttttctttgtgtactgtgttggccaccctaaaactctttgcattgagtaaaattctaattgccaataatcctacccattggattagacagcactctgaaccccatttgcattcagcagggggtcgcagacaacccgtcttttgttggacagttaaaatgctcagtcccaattgtcatagctttgcctgttaaacaaaggcaccctactgcgctttttgctgtgcttctggagaatcctgctgttcttggacaattaaagaacaaagtagtaattgctaattgtctcacccattaatcatgaagactcccagtcgcccttgcatttgccttgaggcagcgctgactacctgagatttaagagtttcttaaattattgagtaaaatcccaattatccatagttctgttagttacactatggcctttgcaaacatctttgcataacagcagtgggactgactcattcttagagccccttcccttggaatattaatggatacaatagtaattattcatggttctgcgtaacagagaagacccacttatgtgtatgcctttatcattgctcctagatagtgtgaactacctaccaccttgcattaatatgtaaaacactaattgcccatagtcccactcattagtctaggatgtcctctttgccattgctgctgagttctgactacccaagtttccttctcttaaacaggtgatatgcataattgcatatattcatggttctgtgcaataaaaatggattctcaccccatcccaccttctgtgggatgtttgctaacgagtgcagattattcaataacagctcttgaacagttagatttgcacagttgcaattgtccagagtcctgtccattagaaagggactctgtatcctatttgcacgctacaatgtgggctgatcacccaaggactcttcttgtgcattgatgttcataattgtatttgtccacgatcttgtggcactaacccttccactccctttgtattccaggcagggggacccttacttactcaaggacctctgtactaggacagtttatgtgcacaatcctaattgattagaactgagtcttttatatcaaggtccctgcatcatctttgctttacatcaagagggagctggttacctaatgcccctcctccagaaattattgatgtgcaaaatgcaatttccctatctgctgttagtctggggtctcatcccctcatattccttttgtcttacagcagggggtacttgggactgttaatgcgcataattgcaattatggtcttttccattaaattaagatcccaactgctcacaccctcttagcattacagtagagggtgctaatcacaaggacatttcttttgtactgttaatgtgctacttgcatttgtccctcttcctgtgcactaaagaccccactcacttccctaagtgttcagcagtgggatgacctctagtcaaggacctttgcactagggatagttaatgtggaaccatgggcaactggattcacaacaatgtcttttcaggttcaggatccattttatcctccttgttttacaggcaaggggattattaaattaacctatgttacctttccctggggactatgaatgtgcaaaattcccaaaggttcatgggtctctccccttttaaaccctaaaatccctaccccccctttaaccattaataggaaaggggatgctgggaaacccccagagtcccttcctccttggggacctccttaaatgtgtatttccctaattatccccatgacctccttaatgtggcatatttttcaaattgcccctaattggatttcaaattgtcctaagacatttcaaaatgtcctaattgattaagaactgagtcttttatatcaagcctaatatcctaggcttttatatcaaggctaatatcttggacttctcaggcatcataggaggggggtactgattttcctaaagtctttcttgaatttctattatgcaaaattgccctgaggccgggtgtggtggctcacacctgtaatcccaagcactttgggaggctgaggtgggaagatcccttactgccaggagtttgagaccagcctggccaacatta

SEQ ID NO: 147069 - DNA, 472 bp, Homo sapiens
gaaagaatagaatacacacgattataaaatactacgacatgcgttaaaggactacagactcagagttacaaaacttctccagatggaaataccaccaaacaaacaaataaagtaaaacacacacatactatcatatagatatagaatgctccacccgcagtgagtaccaccgccataagaaacaagttctcaaaaaatggtgaacaacgcttcatagagccctatacaaataggcccaatattcactctataaaactttagcgaactattcaacaatatgctagtagttccaaaaatctagaaattaaagatttttcatggaaaaagctgcaataatttttagaaaacagaaacaagcatgaatgtttccaactgtttccaaaagtaaatgttggggcctcttgacaaattttagtatcataggttttgttgttttaccttatcttgttcaagctgttcaattaagttcttt

SEQ ID NO: 147070 - DNA, 1168 bp, Homo sapiens
tttttttttttttttttttcaattgttagaagcggcacaattaggtgcccatggaaaacgcattcccaaaataaaaacccaaaatgttgttaataaatcgacaatgaatgccgttgataccttcatgctctttgaagacaggatgctccggctttgaagcgctacatttctacattgctaacctacaggaacctatgttgaggtggtcccaccgaaatacacggctaatagttcatctctttcctccaggaaccttcaggtttttttttgtttgtttttttttttgagacggagtctcgctctgtcgcccaggttggagtgcagtggcgcgatggaaccttcaggttttactaagcatccttaccctaattatctaaatctttgagacgtaaattatttgatgtggctaaaaatcctcctgctagaatttaagtccaatcctttaatgggcggatactcaaattccttaacgaaactgatcactgagctaggccgacacaagtcctgccaaattgtccgcagaaacgttaagaaaagctgtcataaggccagcttgaaagacatcataaaaggccttcgctgtcctttgagttaattatctaacacccgaagagagtgccagttctagttagaatccgcgcgtcaggttctccaacagtcagaagggcttgtgtgagggcagggaagattttaaaccccgtttcaggccccctccctaggctgtaggaaaccaccctctctgaagcccggcgggggaggagtgctgcagccagctgccgagggagcgctctgcggcgaggccgtttccctgagtcacggagagggcgggaggctgcgcccgtctgcccccgccacgtcctcctgtgaggggctcagtcgaaacaggcagcggtcgcagggaaacgaagcggcacccgtcatgcctcaaggtggcccaaaagcctcttcactcccaggagacgccgcatttccttaaaacgagctctccatttctggcagcaatcagccgacccttccccatcagtatcacgtgcacctggaagtacgtgggtgggacctaaagcgcccacggaagtgacgtcggtcgccccgagtcgcatgatgtggcaaaatgaaaaaaaaaaagtggggggagaaagacaagactggcgaaagtgatgagtctaaa

SEQ ID NO: 147071 - DNA, 722 bp, Homo sapiens
gtttgttaaatggaaagatttgaggccggcctctcccacatttctccatggctttgcccttaatgttgctctcactgtggagactgttgtctcctgggatccaggtcttggggtttggtcgggggaggaagctgcggggccttgggaccctgggggagatgtgtgtgcgctgggggtgagttcccagatagagcttccctcccagtggaccctgccttagccaagttggaatgttcccacaagttcccaacccctaaggatttccacccccgggacagaagtccaagtagattccttttgtaaatcattggccagaaaagagcacaaccactgctctttttccactattttacagctatttttgccgtcccctgaatgtacatcaatttcccatgcagcaatggattgtctcagcctatgggcttttcatagatgcaacttttcctttagggttttgtaaagaagttttggaaagttcttcaatagcagcagtttggggacatcacgtgtagccctgtcgatatttcctgaatggatttcattcctttctcagtcttgaccattcccttacccaacccccaccccaacacagtcaaaaccttttcgagcagcagctaggaaggtgagtggcctcccaccatgagactcactttggggaatctatgctttagttggggcatattcctgccctagcctcatctctgcatttggcctcattctgc

SEQ ID NO: 147072 - DNA, 1099 bp, Homo sapiens
agcaggtggagaggacgtgcggatgtgggggtgttgtctgcggaaccagccaccttgaaagatccatgttcttagagcctcagctgctaatattgttgagtgctttctggaaaagctgatttgttgctatgttttcaccccagtggcatggcgcagttgaagtctttgtggacatatctttgtggctactgtggctgcgctgtggtcacctgaggatgtggttcaggtggggtctccagaaggctgcttgcccccagagagccatctcttccatttttgattcattcctgagaatggcttaagtcctgagaatctgcaaagtctctgaagagaactctctcttcccactaagtgatataacctacttggccagcattccaaataagactcagactcactgccctgagcctgcacagaagccaagttgcaaggcccaatgattctggccaaaatgtaaaccccaccctccctgctgtcattgggctctccctccaggctgctgctgggcatgtcatagatgggatgaatgaccatctggggtatggtgggctgaactccacaaggtcgttggaatgaattttgaaacttctcagaaattaatctgaaatggcaggcagtaagtgcagcagaatctggcaggactgatatttgtgcagtgggcctgccacacaccctctgcctaggaggctgtatgccagagctcatctctagcaaggaatttatcttcaggtgaagaagagaggaagccaggatccccactgagcaccctcctgccagaaggccaaggacccaatgtttgaacgtgtttccagatgtcatgtgtttagtttttatatgtgtgtacataattatatatagagatagacttgtgtatacaccttcccacaaacacatcctcacggagatacatgtgctcaatgtatattcttgtttctcctgctctcaagttggaacttgcattgtgataagttttggaaattcaaaagtactgcaacgtgttgaaataagaaatacttaatattgtcaaataacttgtgattgtcttgccatcaataaaataatgcatagttgtgttaaactccaaaaaaaaaaaaaaaaa

SEQ ID NO: 147073 - DNA, 362 bp, Homo sapiens
cttaaggagttcatcttggctgggcgtggtggctggttttcaaaccaatcaatgaacccgtaagcctctttggtatatataacaatgaaaaaattcattaagccatgaaatctagaaataagtcatatttctgagttgataaaatgcttttctgaacatacattttaggtatctggcacaattaaccaaatgtctgcccatttttgtgtagctttcatacagtacagatttcattgatgtcgctcccacatctgagtattaaaaacatttgacattgttcttctcagtcctcacaacacccctgtgaggtaggtggtattgaccccattccacagatggggaggtctaggcacggaaaggtt

SEQ ID NO: 147074 - DNA, 3597 bp, Homo sapiens
ggcacgagcggcgccgccgcccgctagtccgccgcccggcgccatggcgggctgcgcggcgcgggctccgccgggctctgaggcgcgtctcagcctcgccaccttcctgctgggcgcctcggtgctcgcgctgccgctgctcacgcgcgccggcctgcagggccgcaccgggctggcgctctacgtggccgggctcaacgcgctgctgctgctgctctatcggccgcctcgctaccagatagccatccgagcttgtttcctggggtttgtgttcggctgcggcacgctgctaagttttagccagtcttcttggagtcactttggctggtacatgtgctccctgtcattgttccactattctgaatacttggtgacagcagtcaataatcccaaaagtctgtccttggattcctttctcctgaatcacagcctggagtatacagtagctgctctttcttcttggttagagttcacacttgaaaatatcttttggccagaactgaagcagattacctggctcagtgtcacagggctgctgatggtggtcttcggagaatgtctgaggaaggcggccatgtttacagctggctccaatttcaaccacgtggtacagaatgaaaaatcagatacacatactctggtgaccagtggagtgtacgcttggtttcggcatccttcttacgtcgggtggttttactggagtattggaactcaggtgatgctgtgtaaccccatctgcggcgtcagctatgccctgacagtgtggcgattcttccgcgatcgaacagaagaagaagaaatctcactaattcacttttttggagaggagtacctggagtataagaagagggtgcccacgggcctgcctttcataaagggggtcaaggtggacctgtgacgggcagtggccccggtgaccttggggcctccgaccctgtgcagcctgggacaaaactgtttccggttggccgctgccacatggattttcttaatcgttttatgtcattagtcactcttctggaatgtcactcaagaccaagcggtcagaaggcctgaggacccaaggccccactggagcagtctgtccttatgccgaatcaaggcggaacatgggtgaaagacgagtaaggggcaaatcacagcaatattccacagcgccctccagagttacctggggaggaccgaggccacacgccactgcccccgaggccagagtgtaagtaaaggataaccaggactcgctgggagagatggactctgtcctcagcaacactccacagcagaaaggggtagcaggtaccccttcttatcagcggtaaaaatgcatttacaacctttcatttaaccgaaaaacacagaccgctttaacctctttatttctgtcccccactgcatgaacatctatacaattttaaaaatacttcctcataggatgctttggcccttcatctatttaatcatagctacatacctatttttttataagtagcagtacacattcaaaggggtattcctagctcaatgcttggtgttctagttcaacttttatcctgcagcaagtaagcctagataactctacacgatttggctgagtggctttgtgtgaccgtggccccaggccaaggggaccatggccctggctggctttcccccgggggtctcagctcctgttgtcagtgataggcggctcaaaggagcatcagtttcttttgatccaagaagtgcttactgaatgcctgccctgtgcgtggccttaaacattgagaagtgctgctctccgtttatttgggatttgattctcattttaccatagcttatattctcaatttcaatgccagtctcagaactcttgttttctgtgttctgttctcaaaattacattgtccctcatgtcatttcaaactgttttccaaagggatttgagcatatacaactacaaatccaagcagattgactctcaaaaataatcttaaatactgcaaatagtcccaactaagattcagtcagtatgtttgttttgcaagtttgggagagtaagttggctttgagtcacacatcgaagctttaagaggtgagacgctggcttcattctggactagacaggaacttggcctcagcgtgagatcctgccatgcagtgttgcggtggcactgaagaagtgtgaatgtgaaggcggcgtcggcgcggggccagagcaccactctgctgccccaccacgcggcctgtgaggagccactaaacctttccgtgcctagacctccccatctgtggaatggggtcaataccacctacctcacaggggtgttgtgaggactgagaagaacaatgtcaaatgtttttaatactcagatgtgggagcgacatcaatgaaatctgtactgtatgaaagctacacaaaaatgggcagacatttggttaattgtgccagatacctaaaatgtatgttcagaaaagcattttatcaactcagaaatatgacttatttctagattcatggcttaatgaattttttcattgttatatataccaaagaggcttacgggttcattgattggtttgaaaaccagacagacggccgggcacgcctgtaatcccaaagtgctgggattgcagcgtgagccaccacgcccagccaagatgaactccttaaggacaggatttggtaagtgattgacttctttttagttccatgatcttgagattatttttagctttataaatttagcagtggcagggcccgtggagaatcaggttaatgaggtaaaggctttctgggtatttgctgccaaggccacatcaccaattttctcgatttaaaaaactgtcaagagatttatttttccattgcaggttttaaagtggagattctgaagtggaaaataggtactgtcagaacaaagctacctggaaacagcatagagtgaagcctttcgtgagggcttgcaggccgctgctgagtggcagtttacagaagaggtcgcggggtgagcctcttagcaggacagaaaacaaggcagcagcgcacctgccaccccttcacgagctgctccttgagcctaaaaagtaggctttattcatcccttctgttcatttaccaacctgggggattgatacgaccggggaaaatgttcctaaaccaggaagctgcgttagccgatcaggctttgtaagatctcgccaacagctagctgcttaggagtacccccacgatacgcacagcacaccactgtcccttcactgcactttcttcctgccttaggtagttgggcttgcccaccctagtttgcttttgtagtggtttggcaaggttagaaggcctcggcctctctgtcatgctgggaagtgcctactctctgggccactgctgcagaggccgtggcacttgtcatgggtttggaagacccagccatctgcagcagaggcagcctatcccattgcaaggagaggaactgaacggagtaattattctactcttctttttacataaatgtttatttaaatattctaaattggattttcattcacagatactgattattctttccagttcttaaataaaactgcacttgatttcactcaaaaaaaaaaaaaaaaaaa

SEQ ID NO: 147075 - DNA, 404 bp, Homo sapiens
  misc_feature (1)...(404): n = a,t,c or g
gtggaatttgctgccctaggcgtggtctaaaggacaagtttagaaatgattcaactcaagttcctaaacagagtaagtgccagttgatgtcccnccgtggatcctttactccagaaaaattgtaatgatggctcggcccccgccttggctagagtcccactgcacgcgtgtcgtgagggccgatgggcaagtccgtccnnnnnnnnnnnnnnnnnnnnnnnnnnnnnnnnnnnnnnnnnnnnnnnnnnnnnnnnnnnnnnnnnnnnnnnnnnnnnnnnnnnnnnnnnnnnnnnnnnnnnnnnnnnnnnnnnnnnnnnnnnnnnnnnnnnnnnnnnnnnnnnnnnnnnnnnnnnnnnnnnnnnnnnnnnnnnnnnnnnnnnnnnnnnnnncagcggacgcgtggg

SEQ ID NO: 147076 - DNA, 2572 bp, Homo sapiens
atgctttttttctttgtttttttgagtgaaatcaagggcagtttttatttaagaactggaaaggattatcagtatctgtgaaaggaaattccaaattttgaattatttaaattaaaccatttatgtaaaaagaagagtagaataattactccgttcagttcctctccttgcaatggggataggctgcctctgctgcagatggctgggtcttccaaacccatgacaagtgccacggcctctgccagcagtggccccagagagtagggcactttcccaggcatgacagagaggcccgaggccttctaaaccttgccaaaccccactacaaaagcaaaactaggggtggggcaagccccaacttaccctaagggcaggaagaaagttgcagtgaaggggacagttggtgttgctgtgcctaatccgtggggggtactcctaaagcagctaagctgtttgggcgagttttttacaaagcctgattcgggctaacgcagcttcctgggtttaggaacattttccccggtccgtatcaatcccccaggtttggtaaatgaacagaagggatgaataaagcctactttttaggctcaaggagcagctccgtgaaggggtggcaggtgcgtggctggccttgttttctgtcctggctaagaggctcaccccgcgacctcttctgtaaactgccactcagcatgcggcctgcaagccctcacggaaaggcttcactctatgctgtttccaggtagctttgttctgacagtacctattttccacttcagaatctccactttaaaacctgcaatggaaaaataaatctcttgacagttttttaaatcgagaaaattggtgatgtggccttggcagcaaatacccagaaagcctttacctcattaacctgattctccacgggccctgccggtgctaaatttataaagctaaaaataatctcaagatcatggaactaaaaagaagtcaatcacttaccaaatcctgtccttaaggagttcatcttggctgggcgtggtggctcacgcctgcaatcccagcactttgggaggccgaggcgcgtggatcacttgaggtcaggagttcgagaccagcctggccatcacggtgaaaccccgtctctactaaaaatacaaaaaaattagctgggcatggtggcccaacttagagcaggggaaagaacttttccctcaaagagccggggcaggatgccagaatctaactacatcctctcccggtttgcagttctaggaagtggaatttgctgccctaggcgtggtctaaaggacaagtttagaaatgattcaactcaagttcctaaacagagtaagtgccagttgatgtcccaccgtggatcctttactccagaaaaattgtaatgatggctcggccaccgccttggctagagtcccactgcacgcgtgtcgtgagggccgatgggcaagtccgtccggttttttttgttgttgttgttgttttttgagatggagtctcgccctgttgcccagactgaagtgcaaaggcccgatctcaactcactgcaacctccgcctcccgggttcaaaggattctcctgtctcagcctcctgagtagctgggattacaggcgcccgccaccacgctcagctaattttttttgtatttttagtagagacagggtttcaccaggttggccaggctggtcttgaactcctgacctcaggtgatccacccgcctcggcctcccaaagtgctgggattacaggcgtgagccaccgcgcccggccgtctgtctggttttcaaaccaatcaatgaacccgtaagcctctttggtatatataacaatgaaaaaattcattaagccatgaaatctagaaataagtcatatttctggagttgataaaatgcttttctggaacatacattttaggtatctggcacaattaaccaaatgtctgcccatttttgtgtagctttcatacagtacagatttcattgatgtcgctcccacatctgagtattaaaaacatttgacattgttcttctcagtcctcacaacacccctgtgaggtaggtggtattgacccccatttccacagatggggacggtctagggcacggaaaggtttagtgggctcctcacaggtccgcgtgggtgggggcagcagagtgggtgctctggcccccgcgccgcacgccgcctttcacatttcacacttctttcagtgccaccggaaacactggcatgggcagggattctcaccgcttgagggccaaggttcctggtctaagtcccagaatgaaagccaggcgtctcacctctttaaagccttcgatggtgtgactccaaagccaacttactctcccaaactttgcaaaacaaacatactgacttgaatcttaagttggggactaattggcagtatttaagattatttttgagagtcaatctgcttggatttgtagttgtatatgctcaagtccctttggcaggcagtttgaactgacatgagggccaatgtaattttgagaccagaaaacagaaagctacagatctgagcctggcattgaaattgagaatataag

SEQ ID NO: 147077 - DNA, 676 bp, Homo sapiens
gtgaatagcaagtggttaattctgtgatgtggtgagatccagtaggaagagtgggtagaggagtgatttctaacctttttgtaatctttagaaggtgataaaagctatggctatctctctccagaaaaatgcacgtttgccacatatacatagggtgtatgtatagttaggggggaaatattttactaatcctgcgaggtccgtggttaaggactccaggtttagagtggaagttaatagggtcaaatccacaatgctgggaaacaccatcatttaaggcagtgttactgaatatatgagctgagttattatgcctgtgtcaaaattacgtgggctgcttgttaaaaaaaatacaggttcctgggactcatccaaggttaatgaattacgctctctttgggcgggatttgggactctacatttttgaactgcctcaagtgctttgtaagtgtgccttaaaaatttgagatcccactgacataaagggaaagcagaagaagaggaatctgtgacagaggcagagagggacttgcctgagttaagaggaacccagaggccggcgcggtggctcacacctgtaatcccagcactttgggaggccgaggtgggtggatctcttgagctcatgagtttgataccagcatgggcaacatgacataaccccatctctacaaaa

SEQ ID NO: 147078 - DNA, 447 bp, Homo sapiens
cttagattcagtgaaatacagtaattcattcaagtatgagagtatctttacagacattttaaaaataagttatttttatatgctaatattctatgttcaagtggaatttggagacactatgttctaattttaagaactgtttcagagttattagattagtagtagggctgtagatggggtctttccaggtccttcgactacctcagtaacacaggctgggtctgagtcttgctggatattagctcttttgcttttgtgactggccccctgatacatggtacggggggtctctctgcatttgatcttcactgcgaggcactatcattttatagggattaggactacttgcgttgatcgttcccctatgttttagcatttctggtttctgatgtctgtccgtttatgtctctgtattcttgctattcagagtgagttctggtatcgccc

SEQ ID NO: 147079 - DNA, 2468 bp, Homo sapiens
gcacgagctagtctcgcgtttttttttttttttttttttttttgggtcatatacatatttatatatatctcatgtacaaagttacattctgaaccccagggatcccataatggaaattaaatactgaaataactacattgctaaaatgagctctttgctccatagaaatgaagctcagcctctaagagacagcaagtgggacattctagaacccatttttcagattatagaggcaagtaaaattctgatagaatgtcttggacaaaaaaacgaatttggaacataaaaatggttaagatatattcaaatagagaaaatgtctgacaaaattaataaaacttaatcttttaagagaaaagacagacatttagtgttacagaatagcataaccctgttagaaaagcatttatgatttccacatttaattttctcttctactcttcccatgttacaaagtgggaccaaatgagtccctttctgaacatgatcaattaagaagagccctaaatctggttgagtccctttggtaacggtcataatactcacaaggaaattaattatcaggttccatggcatttgcaagacacatgttctttaggacagttaatattatgacacatctgttttattttgttactaaggcagcctatgttaaagggtctcgtctcaaatgtaggaagacctttacaagaaatgaacaatacagtaactgaaagaattgattttaacctttttctatgcaaaacacaatctggaaaagttatgtgctgcatattggtgctcaaaatgttttatactctccacaagctgcaattaagagattcattcctatttttaaaatttagatccacatgggttagagaaaaatactctcaaaagtgagttcctagagaatattatccctttgcctcacagagattttaaaccctgccatttaaagaagtaagtgttaaggttgaggccatatgcatattgtccgcttttgccagatcagccaatggttgaacactgggcaatttcaatatggttccaacccttgccacatgactcaagtgtaaaaaaaagggaggaaaccttgcaagtatttccttatttcttaccaataggggggtacactttttttggtacagtggagatccaacccaaagtacgcaagcctcttctctcccctgatggtgggtagctacaggcagttacattcctttgctgcttgtgagaagcttacattttggcattttcttccaaaaattaccacgttgaccaaagtaaacattacaagaatatgaacttgttattgggggaaaggggaagtgaagcaatctgtagaaaatatttaactgaaattacaaacataaggacaagcctttaaagcaaattatacaggcatttttgtcctctctctggtccctgcagttaattaacagggccacagataatctgacatctttagataaaacaactacacacctatattacttaagttaaagccagtaagttcaaaaaaagcaattacaaccatttgacatgtttgtatttttcatctctaactcctgtatgtcctgaattacagttcagtcatacaaacatgggctgaacaacagcaaatgggatctgactctgggatgtttacttcttgggattaaaattcccaaacactttggtgtctctttcttgtgaatctatacaacatttccaataaatgtttaataatgattttttaaaagatattgccaaaaatggctcagatttaagatgaaataaaaacatagcaaacaagctatggaaaagtagcctacattttggtgccctgcaaaaaagtgactaagtagctcaagcaaaaaattattcttttaatacagcttttaccaaaacagttttaatacatgagtggctacaattttattgtgtacacaatgtgcttatagtcacatgtggcccaatggatccaaaatgcctcctctggctcatgaaatcccatgtacttcacaatcttagcctaatcggtgtatatgcataaaagcccacttggtatactttttaacagacatcctttgtataatagtcccagaaaaaaaaaatccagtggtacttaagaatgtttagacaatttgacatctacgtttgctttcttttcttttcagtagtccttctgatgattgggggccttttatcccataggttaatacctgtaaaacagtacataaaattacatttagctttgcttcggaccggcgcgggggctcacgcctgcaattcaagcacttcgggaggccaaggcgggtagatcatccgaggtcaggagttcgagaccagcctcctgggctcaagcaatccatctgcctcagcctcccaaagtgctgggactacaggcgtgagccaccatgcccaacctattttttttttttaatgggcattgtgaatgaaaatatgtaatgtcaacctttactttatggtatcttaggtttgtc

SEQ ID NO: 147080 - DNA, 438 bp, Homo sapiens
ggtggccagagatataaatgattaacacaaaagatggatcataatcaagtcaaatttaaaagtaccacattttatagtatcttaggaaaatctgtactatcgttaagtaggcctgaatatatttcagggaaaagtgacacgtactcagaaaacatttatccattatcaataaagtcagaaatagaaccaatagaaacaaggtgcttgaacagatctaatgcatctttggtccaaaaataatatggtcacaagactggattatggtggctgccatgaaaatgttacacacactttgctgacagagcccatggattccatgtagtattttcctactaaaatttctgcccaaatcaatgcctcctgagtgatgtaagcagccaaatacatgctactgagtcaatcaaacttagtaaataacacctttccgaggaaactatg

SEQ ID NO: 147081 - DNA, 1746 bp, Homo sapiens
ggagcccggcgagggcgccggtgctttgttctgtctgaggccaggaagtttgaccgcgctgccatgccgaaccgtaaggccagccggaatgcttactatttcttcgtgcaggagaagatccccgtaactacggcgacgaggcctgcctgtggctcgcgttgctgatgccatcccttactgctccgcagactgggcgcttctgagggaggaagaaaaggagaaatacgcagaaatggcttcgagaatggagggccgctcagggaaaggaccctgggccctcagagaagcagaaacctgttttcacaccactgaggaggccaggcatgcttgtaccaaagcagaatgtttcacctccagatatgtcagctttgtctttaaaaggtgatcaagctctccttggaggcattttttattttttgaacatttttagccatggcgagctacctcctcattgtgaacagcgcttcctcccttgtgaaattggctgtgttaagtattctctccaagaaggtattatggcagatttccacagttttataaatcctggtgaaattccacgaggattttgatttcattgtcaggctgcaagtgattctagtcacaagattcctatttcaaattttgaacgtgggcataaccaagcaactgtgttacaaaacctttatagatttattcatcccaacccagggaactggccacctatctactgcaagtctgatgatagaaccagagtcgactggtgtttgaagcatatggcaaaggcatcagaaatcaggcaagatctacaacttctcactgtagaggaccttgtagtggggatctaccaacaaaaatttctcaaggagccctctaagacttggattcgaagcctcctagatgtggccatgtgggattattctagcaacacaaggtgcaagtggcatgaagaaaatgatattctcttctgtgctttagctgtttgcaagaagattgcgtactgcatcagtaattctctggccactctctttggaatccagctcacagaggctcatgtaccactacaagattatgaggccagcaatagtgtgacacccaaaatggttgtattggatgcagggcgttaccagaagctaagggttgggagttcaggattctctcatttcaactcttctaatgaggaacaaagatcaaacacacccattggtgactacccatctagggcaaaaatttctggccaaaacagcagcgttcggggaagaggaattaccccgcccttactagagagcatttccaattcttccagcaatatccacaaattctccaactgtgacacttcactctcaccttacatgtcccaaaaagatggatacaaatctttctcttccttatcttaatgatggtactcttttcaatttctgaaaacagtaaccaggcccaacttccctccttactacagtcatattaaacagatcacatcaatgacaaaatgtcactactataaaaactacttaatttgtaaggaaattgtttcatagatttaaaaaaattgtggttggagagcatcttggcatttgtgctttttttcttgagggattgttctgcttcctggctgtatgatgggtatatcattaaagtttggagtcctatatgaacaaaactgacatttttagagttgtacttttgggaatgttatagattgatcattctttctcctgataataaaggtattgaatatctgttatgaaaggttaaaaaaaaaaaaaaaaa

SEQ ID NO: 147082 - DNA, 1851 bp, Homo sapiens
  misc_feature (1)...(1851): n = a,t,c or g
tttcatcttcagtgtctgggatcgtgggcaacagagcagatcgcgttaagccccaaaatttttgaggtgacatgtcttttttggtggccgtaaacttccatccaatatggcttgcacagatcttacactgggcaacagtccaggcatacctaagaaattaaggaaagatatcagctaaggaaacatttctgtactccaagcctatcatataaacctatcatgaagacagactttagaggcaaattctaaggattagagattctaagttgagatttgatccatacagttccctgaaacctaaaaacatttctaaaaacattttttaattttgtaatatgtatgacttttatgctcttaagccatgtttacatttttcttctactgcatagaaataaagagtaatcttatgaatttctttatagaaattgctggttgccaagaccacattctaacttgtactggcaccacattctaacttgtactggcttttcctttgttgtattgcagtcaagttagaaaacagcaattacctgcagaaataatgcacttctgtctgagttaaactggatgggccaggaaggacacgtctcaaaaaaataaatatttaaaaactactattctaaaataagaacgattgtcagataatgcaaccagaaatacaaaccatggtattttgttcttaagataaaccatgtaattgcaactgtttccttatttttttccctaggtataccatgccacatttatttatagtaacaaatgtattctagttttagtcctcacatagggggccaagtaagatagggcaatccaagagacatagtcctaaccccagagtagcatgtaatcccttcttagcatccctctttgaaaactgaagatagtacagctgagggaactgaacaggttcccaggatcatagagaatcattaagctgaagcaaacaaagaaacaaacaaaaggcaaactagaagaaaagcaggattcaatgggttctgcaccttcttagtctatcattgctttgtaaacattctccggttttacattactacagaatatggtccagatataaagttctactgggtcataagacagctgattttcagaattacatgactgactagaaaaaaacaattttggatttaactggatacagtaatctgaggacaactgcagttgtcaaccttttcttcctttcattcaatgataaaagatacaaaaaagtgcaacagatgtttctagctatttgtggaatgaaggacatttaaataaattttttttttttttaaataatagacagattctcactctgtcacccaggctggactgcagtggcacaatctcggctcactgcaacactcttgccttccaggttcaagagattcttgtgcctcagcctcccgagcagctgggagtacagacccctgcccccatacccggctaatttttgtagcaaattactcatttgtctgtctactttttattataaagattgtggcaactctgcttaggactctggatttttctgccccaattaaggtaaaaaaagnnnnnnnnnngcacccaccaccataatattacccaggaaaccagctgtgttctgtaaaaggccggcctatcaaattcaagttgcaagccttatacacagtaagggtctcatgcacatatccatgaggattcacataagctgccatcggcccacataaggataaactaaaacaaagaatcaacatggagaacacgtcaaaacgagaagtctaattttattaaatgcttaaaattttattgaagttcaccaagaaatgagggatgagctatacagtttttaatccttcagttttatataaaaca

SEQ ID NO: 147083 - DNA, 1827 bp, Homo sapiens
tttttttttttttttttaggacaacgtttgtttgtttttattttaaaaagtcaccatattaataaaaatgctacaaaacccagaataaatatcttcaagttacaaaagcaaaacaggtctagaaaagttggctgtaaaaaggcaacagagaggacagacccaaaagataaatgtctgcttgcttgggtggggctggtgctcaaggagggacagttgttggccctctcccccgaccatgccttagaagcatctccgccaaggccaagtgaatcaggcctggggtgataacggaaaaaagttccatgcctgcaggcttcggttctgccatcactcaccgagcttcctgggtctgtgttccccttccccagccccactgttacccgtaaaaaatgaggagccccagccggggtgaagtaatgcagaggcttggcttcagagccagcccaatctgcgtttctggctcaagttcctgctgtgtgagcttggcaggcacgccccctctgggttccaggtttcttcctctgtgaagtaggggtgcgaatgtgtaccctgccgggtagtggagcgggttggctgagacagtgcatgcaccactgcacactgccgagtcagtcctaggtgatggctccccgcaggccacctttgggtgttgctagcacagcctggcatagagcagagtaaaggtggctcaggaaaccaaggcacagcctgtgaccaccaggggcacacctgtctccagcctctggctagatgccatccagaaagctaagcctccattaatcagggagcccccaggggcttctccacagttagctggagatgagggccatcagcacctttcacactcaccccccaacgatgtttgtccctgcagcccctaccgccccctcccctatccatgggaagaatcctgcctccttggtggagacctgaggattgaatgcctggcacggaacaagagctcaataaaagtcattctgcccacggacatcggcacattgggagcagctggcagcacccgagcacagctcgacctgtttgaatggtgaaatgccccacagtgagggagggagcttcctggcacctccacctggggaggaggcacccagagtgagtgagttccaggcaaggaggctgccccactcaagggccaggccagcagccccggaaaggcggaagcatccccatcccctcgtgccaggccatggagggctgagagagggacaagtcggaaccattttaaagctcagccccagcccttgaccctccccagacacccatcctgggatggggctgtcactggagctcctgggaggcctgcgccaggtgccggctcccgccagcagatggcaacggctgtcacggcctcttcgctggtgctgcctgtagtgctgacgtcccggctcctgactacacacgtgttgtctacggcgtaggccctcaggacgtgggaggtcccagggagggcactgcagccagtcagggtccagccctcctcgcaggccacggtcacctgctcctgaggggccgggattccatgctccttgactttgcattccagacctggggcatggcagcaggaagcgtggatgctggcctccctgtggcccacgcactggttgggctgacctcgtggcctcagcacaggcggcttgtgggtgccaaggtcctccacctcccagtgggagctgcagcctgtgaggacgtggccctgttggtggcagtggacacgggtccccatgctggcctcagctggtggagctgtgtggacgctgcagttggcctggggtagcaggcagcacctggcaatggcgtagacaccctcac

SEQ ID NO: 147084 - DNA, 1948 bp, Homo sapiens
ttttttatgagtaaatatttcataaacattttattccaatcatatatgtacgaacacatatgtactgagtcatgacataaattttacaattctctagggcaaaacattgctctaaagaaaagcatacttggccgatcagtcccttgagaagacttttgtttttgattttttgttcacttctgagcaatgactctacatcctggagtacacggaagccctctctcctcaacttgatagcagtgctctttagcacagccagttcccggctcaggctgttttctggagggatgtgtcctccctcttgcagccctgtgaactaactgaaaggacagctgcagcggttgcatctgaacctgcagcggaggcagctcaggtcctgcctacagcatggcacatgtgatgccaggggctttccaccatgatttttcactgacatgatttcctttcattcaccggtagctctgccttacctggtagagctcaagctcttagcacagaacacagggggctgagtaaaggcttctaaatacatgcatttcacaataagcacattcattttgctataagccataaatattacactcaaaatataacagtttctaacaaaataaaaagtttacccattttcttcatacttaagaactacaaaagtactatacaaacgctttatttacattaaatcacaataggtacataaaaagttgaggcactggtatctgtggctaatggtagataatcccagcccatatagtaaagggtataccattaccctactaattgtgagctgtggcaaaatagccatcttaatattatatatcccatatattcagtcccaattatgacttttttctaaaataataatagaacatgatgcccagggaaaaagaaaatacttaataactttcccaagtgctagtaaaaaacacattggtatacacctgatttgaggggcagacatgattcagcctatgagccattaggagagcgaagcaaagcttttttaaactggaaggacactcatgctgattcggtacagactcttcatctttcatactgggaaacaatgctcaccggggcaagtgtcacatcattatgtaatatagtaagaaagatgtcccaggtctcctattaacaaacctagaatcttttctaattcataacagaggtttatactataaatacaatcatattcttgaaagatcaaatcaaatatcaagaaaaacagatccatgacaatactttagacttcaaaaaatcctaaagcaataatttaataaaaatatatgtcaacaactgtgttcaagataatagaatcagtgtggaatccagtgccgtaaacagtgatggcagcagtttactggtgcagtaattcatttatatgcttatgtggtactctgtgtattggttgcgttttcatctgtatcacttgggctaaatttcttccataaaaatttctcatttgatttccaaagagaacgttgctggctcttctctccttttaaagggtgctgctagaggtgctttttcacacagagtctctattactgccaagtctgtgagtttactaagactctcatcattctgctcattcaagatgtcccagaaatcttttggtctctgttttgctttttccatgggccctgaaagaactttctttggcagttgtgtgggactgttcccatgacttttaaaaaggtcatcaagaatagaggtatcaccaagtaagcttatcacagaagtattttccagcactggattttctatctttttgttttccaatttgagaaggggttcttttcttgaaatgcccgttcttgtgaggtcctgttggtctttcatggtattttctaaccttctctcacgtgtttcagactcactgttcagagaacgggatgtcacagtatcttcggatgcctggctgtttttcccactgtcaatctcttgagta

SEQ ID NO: 147085 - DNA, 667 bp, Homo sapiens
acgatccttcctcaaagcatggttgctgagtacccagagttgcgaggagttttttaactgatttagccaggtggcaatcatgagtgaatggatgaagaaaggccccttataatggcaagattacatttacaaagaggtccgagtgacagccagtgagaagaatgagtataaaggatgggttttaactacagacccagtctctgccaatattgtccttgtgaacttccttgaagatggcagcatgtctgtgaccggaattatgggacatgctgtgcagactgttgaaactatgaatgaaggggaccatagagtgagggagaagctgatgcatttgttcacgtctggagactgcaaagcatacagcccagaggattctgtaagagagaaagaacagccttaaataaatggctttagaaggacccacatccccatcactgaacagggagacgctccaaggactctctgtgtggctggggtcctgactatagacccaccatatggtccagaaaattgcagcagctctaatgagattattctgtcgcgtgttcaggatcttattgaaggacatcttacagcttcccaatgagaggccaggaagtgtgaacatactcatagaaaaagactatattttatccctcaaataaatgttttaaatgtaaatgtaaaa

SEQ ID NO: 147086 - DNA, 785 bp, Homo sapiens
ctgttagtaaaacaaggtagactccaatttccacattcatgactgtgtgcccttagcctcttcatttctgctgctctgccatcagccctttgtgtgataaacctttgctccctttgaccttacttcactctgggttttcatcgtgttttcaaatggcctttacatacataaacaactgctcaacctcatgcaaagaaccacaaactcaaagtaagacaccacgtgcattttacaggtgaggaaagatcaaaaagttagatggcgcaaggtgctggcaaagcgtaaagcagcagaccctgcgaggactatgaattggtacctcctctttggatggcaatgtggaagccatctaacacaatttaaaatgcaggcaccctttgagccaaccactgctcctctacaaattgattctgtgatattcctgctcatttgtaggagtgtttgttgtagcgttgtctttagcagtgagactagaaactgcttaaacgtacctccatagagggctggttaagtaaattaagggcacatacagaggaaaattatgcagccataaagaatgatgtgggctggcatgaaatatctccaagataaacttcaaagtccaaaaaggaacatgcacaacagagcagttagtgtgtgctgttgcatgtgtattagaaaacacatggttgggtgcagtggctcacgcctgtaatcccagcactctagaaggctgagacaggaggatggcttgagcccaggagttcgagaccagcctgggcaacacagagagacctcatatctac

SEQ ID NO: 147087 - DNA, 960 bp, Homo sapiens
  misc_feature (1)...(960): n = a,t,c or g
ccccttggggaaaggaaagttcactgggcaaagtgcccaacttactacaggaacccctagaggccttatcctggcaaagggtagtcatgcaaccttgcaaaaacatagaatcaatcacactcttacacacaaaaatcccttccttgaggaattttgggaatctccgccttccctaaatttagcgttaattaaaggcttaaatggcttttgcctgggaacagagaaacttttcgagcagatgacctatggggggttgaagaaagtgaagtgcccgattggctattttgccttgcagagctgggaatttcaccccccaccccccaccctgtttctctccttacctttggcaatcctttggcctggtggggaaaacagaggccccagggtgagtactaagacgggtataaagaccaggtggcctgctccttttctggggcccctaagcaacaggttgggtaacccccaacccaacaacccagctcctgctgctgtcccaagtcttgggctgggnccctggtaaagaggaagaggcttgccgtggggctgggccaagccccgctgtgcactttggaccccagtttccttgccaagcacggnttgctaacagactgcccacttgaggttgccgcttgcaggcactccccagagctagcncatggaaggagctggcccttcaacaccatccacctccacaactgcctccctggccagctgccccaccccagtgcccaggtgggagagggagcgagaacagcccagccccttcccaggtggcagtcgggaagggtttttgtttttgtttctgttgccgatttgtgtaaaataattagtctttttggaaaaaaaaataatgtaaagatgttttgtataaactctgaattattttcctggtgcttttttcttagaaaaaaatgagaactaaaaaaaaaaaattaaccccatggaaaaaaaaaaaaaaaa

SEQ ID NO: 147088 - DNA, 435 bp, Homo sapiens
ataatttagagaaagaacagtggaatagaaagtgccttgatcctaaaccaagagatccgtgttcaaatcccagcactacgccttactatgtaatctttttcattttagttttcccattaataatatttaattcgcacaattagaatgaagattaatataacgaatgaaaagcgcttgggctactataggactcagtaaatgctgctgtactctcctctcaccaccttttggcttcagtctcctctggagtaaaatgacgacgacccctgctcagagatcagggtaggctagatggttggcagctggatcgtggaggctggcctaaacaaggaagtcatggaaaggatcttaaagcagaaaaatgctggcagccacgaggcctgaggcgcctcaggcgtatcgaggactttgaactttgaggacgcatgcgcgcgc

SEQ ID NO: 147089 - DNA, 997 bp, Homo sapiens
taggatccccaaccgcctgcgaaacccaagccgccgcgtaggagcgtgcgtatcgggccctcttctcccacctgttcggccagcctccacgatccagctgccaaccatctagcctaccctgatctctgagcaggggtcgtcgtcattttactccagaggagactgaagccaaaagactccccatccccaggatgtcaacctcagtccctcaaggccatacctgggacccaacgggtgaaagaaagacgatgaggaggaggacccgctggaccagctgatctcccgctctggctgtgcttgcctcccactttgcagtgcagggagtgcatgggcccagcaccagggacttggcgggcaatgccagccacaggttgcagggcgtttcaagggtttgcattgagtttaacaggcagggcgagggcgggcaagaggagtttcagaggaggcaaggaacaagccggtgcccccacccactgagaccccccaacccaccctatccccccagtagatgggccctgcccaagacccagcaccccagcaagattatagagggaagaaatccctaaatgcctggtgtgggaggtcctaaaacatgggggagagtttttgggatcctggagttgagagcccatgggtttgggacatgactggcacaaacagctgtcatatgttcatggtcagatgtcatacattctcagcccgtcttgtctcccccagtatttaccaggaaaacaaatgaatgtgttaagggatgctcccccaccccacatcttaagtcagtgtgccaagtactgagatgattttaggggacatttatattaaaataaaatttacaatctaatggtaaattgattacctaattagtgcctttctctttcatcacttgttctggatgtttcaatcagtttagtggaaggaaaaataaatggggaaactttttattcaaaaggtttttctttggtttttttgaaaccgggctttgttgcccagcttgagg

SEQ ID NO: 147090 - DNA, 367 bp, Homo sapiens
tctggctcttcctggagaccgggcagctccccaaagacaggagcacagatcagagaagctaggagagctccagcaggggcacagaggattgggggcaggaggagtctggaacacagccttcatgccccctgaccccaggccgaccctccccacaccctagggtaccccagtcgtatcctctgtccgcatgtgtggccaggcctgacaaacacctgcagatggctgctgccccaacctgggacacggggtcgaaggggcctgtacactctgtcatttcctttctagcccctgcatctccaacaagtccaaggtgacagctggtgctaggggcgtggggttaataaatggcttatccttctctccaaaa

SEQ ID NO: 147091 - DNA, 516 bp, Homo sapiens
aggctctgtggtcagctacggggtgacgagagtggagtcggagaaatgcaacaacctctggctcttcctggagaccgggcagctccccaaagacaggagcacagatcagagaagctaggagagctccagcaggggcacagaggattgggggcaggaggagtctggaacacagccttcatgccccctgaccccaggcggaccctccccacaccttagggtaccccagttgtatcctctgtccgcatgtgtggccaggcctgacaaacacctgcagatggctgctgcccctggggtggtgtttctcctatagggtattgggatgcatgttctgcactgccagcagagagggtgtgtctgggggccaccacctatgggacacggggtcgaaggggcctgtacactctgtcatttcctttttagcccctgcatctccaacaagtccaaggtgacagctggtgctaggggcgtggggttaataaatggcttatccttctctcccaaaaaaaaaaaaaaaaa

SEQ ID NO: 147092 - DNA, 917 bp, Homo sapiens
gtggacgacgccgtggctgccaagcacccgccagggtgtgcccagaggagggacaggagaggcggtgaaggaagagggcaggggatcgagccttcacccgcctctgccaccccagggactcggggagtatgccgcatgccagtcacacgccttcatgaagggcgttttcaccttcgtcaaaggcaccggcatggcctttggcttgcagatgttcattcagaggaagtttccataccctttgcagtggagcctcctagtggccgtggttgcaggctctgtggtcagctacggggtgacgaagagtggagtcggagaaatgcaacaacctctggctcttcctgggagaccgggcagctccccaaagacacggagcacagatcagagaagcttaggagagctccagcaggggcacaagaaggatttggggggcaggaggagtcttggaacacagccttcatgcccccctgaccccaggccgaccctccccgacacccttagggtaccccccagtccgtatccctctgtcccgcatgtgtgggccagggcttgacaaacacctggcagatgggttgctgccccaaccctgggacctgccccaggaggtttgggagcagaaaggggctctccctggggtggtgtttctcctctagggtattgggatgcatgttctgcactgccagcagagagggtgtgtctgggggccaaccacctatgggacacgggggtcgaaggggcctgtacactctgtcatttcctttctagcccctgcatctccaacaagtccaaggtgacacatggtgcaaggggcgtggggttaataaatggcttatccttctctccacccaagtttccacctgaccaggtgaaaaacaaatcagaagggtaagatgatgaccggtcaaaaaaaaaaaaaaaaa

SEQ ID NO: 147093 - DNA, 1639 bp, Homo sapiens
  misc_feature (1)...(1639): n = a,t,c or g
tttttttttttttttaattacttctttttattagacagttcaaattaagcttgaagaacaggaagcaatacaactcaactattgaaatacaaataggttgagcttaatttattcaacaaaatttacccaatatatcagtgtacaaagcatgctgctgggctcgggcatcaggcgtggcacagcaaacaagacagactgactcaaccctcaggggggcttacattctaatgcagaaagcaggataatttcagtttgggatacataatacaaattatcaaaggcaaggcgccaaagtattttttaaaaataagggggtttggggaggcccaagatccttgccctattcttgttaggaagggctccctttaggggaaagttaccagtttgagccccaatccttaagggatgcttaggatattccgtaagggtcagtgggaaaaaatccagtgggttctcactggtgggtcagtggggttattggtggtttcataataactggggactactcccagcactgagtggatgcagccagggagaacgatgtcctgcagtgtgtggggttagtgcccanacaacgaagaattattctgtaccctgtacgactgtcctaaatgccctggctgggacatttaaggtaaggacctaacaagcttgtcccgaagagagtaactcatttgttttcctcctgagacaatctgtaatttgtcttgtcctattatccttaagtaaggtaatttcgctctttcttttccccatatacagattatgtacatagtctgttttgtctttaccctaacactggttttcattctagtgtcccccacccgtctagtttcattttcctgtacttgtttacaggaagtagcctctaatcggctcttaaatccaaacctactcattacaaggaagagtaaacatctgtctgtttcaaacaagcgtagtcatgcctgagcgtttacataatgaaattcatcttcttttcattataaatttcttcttttctatttctccttaataagagagttagggcattaaattggatttttttaagaaattcatgtgtgtaaagtagattgtattatctatgagtcatttcaggtcagcaaagagaatgttacaaaatatctgctctgaaaaagggtgaaatagatctgatagggtttggtggttgtcacccgtgaactgggcgtgggggtgggggcgcctacctagcatttagtatgtgagagcccaagtatgccagaacatcttgcaatacattgggacagttcctcacaataagaaattactctgcaccctatacgaattttgaatgtctcactagacattcatgtatgacctatagctccgtctgcaagaatatatcctcattttctccacttccgacaactggtacattttcctgcatagtatccttatttcaataaagggttaattcgttctttccccctatataccaataaggaatggtcatatgccaagaagttattgtatccctagtttttattctaatgcccactggatatcccggcctttacaatttccccacatatgatctgatctcctaccttctaagttcaaattgatgcattataaatagttgtaagcatctgactccttcattaggtcttcagttaca

SEQ ID NO: 147094 - DNA, 1471 bp, Homo sapiens
  misc_feature (1)...(1471): n = a,t,c or g
ctgcagcacgagttccgactgggcggtgggctgaaccctgggcttgtccgtgccctggccatcagccccagtggccgtagtgtcgtggccggcttctcctcaggcttcatggtgctcctggacacccgcacggccctggttctgcgaggctggccagcccacgagggggacattctgcagatcaaggcggtggagggcagcgtcctgggtcagctcctcctctgaccattccttgactgtctggaaggagctggagcagaagcccacccattcactacaagtcagcatccgaccccattccacaccttttgacctgttacgggcagcgaggtggtcactgggcaccgtgttccaacaagactggtgtctgctccctgcttgagccaccctcgcagggccaccacgaagctcagcttttnagaacttcccgcggcacgttcaccagcctgggcctttgcttgcccactaaacgccacctcctgctgggctcagacaacggggttatccgcctcctggcaatagacttgaggcaaggaactgggcccgggcaaagggtgggaagacatctgcggggcgcgtgttcactcaaccctaattccctgagcagcagctccctccagggaggccctgggtcccacgccctgggtgcccacatggcctgccaactagggcctgcaaatggagtgggggagtcctggcccctgaatcaccagagccaccaagcctgccagaggggtctcattcatggcttggggacacagggctcctagcaagcaggaagttaagagcaggaggaagcgttgctaccttcacttctccccagctctgccctctgggtccacatgaggacagggaagctcgggaaggggaagggagactggcccctgcccagccggtctctagcccctcagcccccgctgggcactctctgtcccatccctctaggacagggaagctggccctggtcccagggcactgatggtgcttggattccagcctaaggaaggctggccgtggtcccaggaattaaaggcttgggtctggggtttaagtggcccacccatcccagcccctggcccagtgtgggaccgggacgggaaggaaagaaaggaggcctaggaagcagggggaaaaaggtgcacttgggccagtggcgcctgcccaggagtgaagtcccatgcgttgtctgccccaccccctacccacagtgtttgtgccttcagctgagggggtcagcctctgggccctgaaacccctgctggggctcccacgaccctgagagaaggggtgagaagaatcatctctgcacctcgggtctctgccagaggaagacttaagcatccctgcgacctcacattcttagacagagatgaggtcccaggggttggccccatgcatgccttcttcacaatttgcaatagactgtaaaataggaccaataaatcctttggaagagccaaaaaaaaaaaaa

SEQ ID NO: 147095 - DNA, 619 bp, Homo sapiens
ggcacgaggagaaatatggtaaaactataaccaagagaaaggtaaagaaaaattttaggatagttttggtttggtttggttttcctttctgaacaggaaaagggattatataggggacatccaggaggcctcagagcacaggcaaattcgtatttcttaaactagttactaagtggacagatatttgctctgttattttgtctacactacatgtaatgaatgctatttatatctatttattattccgtaacaactatgtgcgtgcgtcctttgacccagcaaattctatttctaaaattttggttcacggaaataaaagcactcgtacatagactaaatgtacaaactaatggtataatttgtggtgggagaaatgaagtgaatgctcataaataagggaatgggtgaatatattttggaacatccatacagaggagtattatactgtcattaaaaagaattgagtttgccagacatggtggctgacaactgtaatcccagaactttgggaggctgatgtaggaggatctcttgagcccaggagttcaaagttacggtgagcaatgatcttgccactgtacaccagcctagatcacaaagcaagactgtctctttaaaa

SEQ ID NO: 147096 - DNA, 637 bp, Homo sapiens
ttgtccttataagcctcagattgctgatcttttaaatggggggcagtcatagtcttcctaatgattataagttactaaaatttactgagtccctgtcatgtaccaaatgctgtattaaagactttgcatatgccatttaattttcactagcgagtctcctacttgttttttttattttggaaagagtttaatatattctctattgttaaagtgcaccagatagctggacttctgaaacaacaattatgcttctgcataataagctttttctacattttttctgttcatgttgcttgttcctctgatttacctggaatcaatgaatcgtgaaaaacagagagattctttaagcacctggtaaatttcaaggtcccacattagaaaatgagcaatcatcaataatattgatggggggtgaaaatatgacattgagactttcggggtaatgtgcccgagtttactttcatagtttactagggctcaggtttcatgccgaaggattatttgaaaggactcactcacctgacatgattttcctgattttaaattcggaacactctcaaaggcataaacagatcacctccagcaacattgtaaaaaaatactcacagtttaaaaaaaaaaaagtaacttgtgg

SEQ ID NO: 147097 - DNA, 1806 bp, Homo sapiens
ccttctcaaggattactcttaatctttaatggcagctgcattctcaacttaatacaacattcaacaaataaaaaagacaactgcttctgagcccaatattatacattaggtaaggaacacgatactcctcattactgttctgtctcaggatataagtttgcaaattcttctcctgatctcagtcaacataaaagcagaattacagtttagagtgggcaatgagaaagatggaatcaaaatagacacagggaaggccataaagagttcgcaagcataaatgcctgatagcaaaaacgatcacagaagattccaaaaccacaatcctgcacaaaggccatctcaatcttacacaaaaaatacttctgcaatgcctgccgagcacctgcctgtccaacctgggactggtgtcacctttgttactgatccttgtagtcaaaaataattatctcaaaacaattatgtaaccctcctcatttttcctttaaagacctttgtcttcctctatctcccaggatacacacagttaactatcgcatgcattttctcattgcagtgctctattcctgaataaatgccattttcttttagagagcctctctctgttcgttatttaagttgacagcaacaaacagtttaggtttttggcaacaaatcaccaatatttacttaaaaacaaacaaaacacttacaacacaggtaggaacaacaggttattttggaaagagtttaatactattctctattgttaaggtgctaccagatgctggacttctgaaacaacaattatgcttctgcataatagctttttctacatatttctgttcatgttgcttgttcctctgatttacctggaatcaatgaatcacgttccaagcatcgtcctaggcactgaggatacagcagtgaataaaactgagtgctgggtaggaagtcaataaccaagctagtaaataactgtatattgtcaagcactggtaagtacaagggagagcagagcaagcaatgggcctgatgaggcttgctttgtctcctctgcactcccacactgctttgtatctgcttctcatttctcacaatgggttccagccttggggcaccaggtctccctggacattccgcgctggcactgcgcctagcacccagcggctgctcaggaaacgtttgtcgaacgaacgaattcacttcttagttccccattcaacaaacctttcctgatcctaggcccaacaggttaaaaggctggagggccaacgaggctggaaactcagaggcggccgggggcggtggctcacgcctgtaatcccagcactttaagaggccgaggcaggaggatcccttgaagccaggagttcgagaccagcctgggcaaaaaagtgagacatcgaccccccgcccccgccgccaattccgtctctacaaaaaggaagaaaaaaaaaaaaacccagaggaaatcccacaggcaaaagcgctctctaagttttaaaaatgaacactgttctagaaaaataatcgcgcgccggaggcggaagccccagagcctcagctcccaggtggaggctgagccagggaaagtccagcagccaaggctacggcccgagcgctggaaccccggtcaggctccggctccccgcccctacgatctgcatgcggccgcggcgctccgaaggcgcccgggggcgctcacttaagctgggagagtcgtattcccgcccggcatagcacctctaccttccaagagaccagcacgacaagcgcgcgcccaccgcattgccatggcaattcggccgccgctgacacaaaaaaaaa

SEQ ID NO: 147098 - DNA, 482 bp, Homo sapiens; identical to SEQ ID NO: 146605
  misc_feature (1)...(482): n = a,t,c or g

SEQ ID NO: 147099 - DNA, 567 bp, Homo sapiens; identical to SEQ ID NO: 146606
  misc_feature (1)...(567): n = a,t,c or g

SEQ ID NO: 147100 - DNA, 2847 bp, Homo sapiens
acagctttttttttttttttttttcccaatttaaaaaagcctttattcatacttaaataacagcatacatgataatttgatgagtaaatcaaactatataattttaaaatttgcatattttaaagttttatcagttacttacagactgtttgcaaaatagagggaggatcactcataatcttacatagcactgtcagcagtctgcctgtcctgtgccccaatccgaaatggattgaacactagatatgccatgtctcaatgtcatccgtaatatttcccgtttcccccaagtcttcacctgtcccccatctaccccagatccatttgggaaaatgttaaatgtgcagtcctaaagcgcttgcccgcagggtcgcgatgtctgcccaggtactgctggctgggctctagacaccagcagcagtgataagaaacaaagcagaggagacagttaaatggtagagaagagaagggggagcagaggtggtaggccgggaacaggggaataagtatggttctccccgcacgtgcccatgtgcgcacacaccgaaggcccatttaaagggaagcggttaggtatgaggttgtgtttgctgaattagtggttggtttttgctgtctatctagattagcagctgcttgccagctcctcgtctaagaggctttctttgctgcccacctttcactggtttgtggaaaagcttctggcccccataagactgttgaaaaatccccaggagaaaattccctaatttagcggatcccgtttgaatgcattcttacaggactgcatatgtacaaaagaagaattggcttcattggccccacatagatgtcacgtgagagtgaaaaaacctggggtataaatatcaaaggaacccctatctgctggtttgctgaggagcccacttccagcagaaccttctctgtccttctgagtctgtagagggcgcttatgtcactggaatcctagtctggcatggggcaggcagaggagcaggagcccccagtgggttcagatcttctgaaaacttgaggttagcggatctgccctttgagggtctcagaatgcatatgggcatgaagttcgtgtttatccaagggtgttgcttgggtgagcgatggaagtgcacttgcatgtgtatgtactctcacgccctcgtggactgggaaggcgccgtagcacaggttagattccctgctttcagggagcctggttcatttttgtcctcgttgtatatagagcttgaacttggtgttccccaggtccagtaccactgccgttgctgcctgccttctgtttcactgctgttttctgagtgcctcgtgtgcagcctgtccttcagccctccctgaagctctgctgaccagctgtgttcccagctccttttcacgtgctctttagccagccttaccctgcattgtacttacttgggtcaggtgcccctgctagactcttaagcccctagggggcagggatctgggggcgtcatccacctctgcagccctagcttctggtatagcatgtgataggacatagcatgtgatggggcttctcggataagaaagggatgagtccatctgttcaccagtaactattaggggatgggggatttgtgtttaaaggtggggcaaaggagagagtgattcaaagtaatggattacttcagtgaacctataggttccttagtaggagagagagattattctgggcaagaggtcccgcccttggtctgccagcatttccccagaactaccggcttgtgttttggtgttagtttcttcctcctacagtgctgactttctcaagtaactttcagctattgttggacattcttgatcaggggatagttagtaaactgcagtcagtgggccacatctggcccactgcctgttgataatagagttttattggaacacagttatacccattttttaatgtatttgtgtgtggctgttttgtgctagcgtgacagagttgagtaggtgtggtagagacttttggccacaaagcctaaaatatttactacctggcccttttaaagataagttactaaccctctagtaactgtcagcccattgttttgtggtgattgtctgatgtggtcaagaggcggtgcatgcataaaaagttttaaaggcctggctcgggaactttgggtaacatcatcaaggtactttgagatcttttcctcatctgtgagatgggcattaaaaacaacacctgtctcgcgggaggtcttgcgcactgctagtggacgtacattgcggatgtcagagcaggccctagtttggccggggacattattgccgccgttctgtttctcaggaggaggaagccaagaatctggtgagcgaagccatcgcagctggcatcttcaacgacctgggctccggaagcaacattgacctctgcgtcatcagcaagaacaagctggattttctccgcccatacacagtgcccaacaagaaggggaccaggtgagtgaaggagacgaagttcttcctgggtcccctggcgtcgtggccacccttggtatctccatggcatctggatggagttttcctggttctttccacattaagtacatccagtgttcccaaatcaacctcccacacagaccttcggcttgttacttgctttatgacagtgggctgctgtcaggtgtaggaaagtgatttaatttgatgggagaggtggagggtggcccaggaaagagccctaggctgggaggtggggccggagaggtttggatcatctgctgtcctttctcaagtgtcttaaagaatcccctgatttctgggagaaggtgcatttttcagggcagccccagcactttccctcagagt

SEQ ID NO: 147101 - DNA, 1074 bp, Homo sapiens
  misc_feature (1)...(1074): n = a,t,c or g
gctttcttgggaagatggcggctgtgtcggtgtatgctccaccagttggaggcttctcttttgataactgccgcaggaatgccgtcttggaagccgattttgcaaagaggggatacaagctttccaaggccccgaaaaactggcacgaccatcgctggggtggtctataaggatggcatagttcttggagcagatacaagagcaactgaagggatggttgttgctgacaagaactgttcaaaaatacacttcatatctcctaatatttattgttgtggtgctggggacagctgcagacacagccatgacaaacccagctcatttcttccaaacctgaagctccactccctcttccactggccgttcttcccagagttcgtgacagccaaatcggatgctgaagcagatgcttttcaggtatcaaggttacattggtgcagccctagttttagggggagtagatgttactggacctcacctctacaagcatctatccctcatggatcaactgataaggtgcccttatgtcacccatgggtttctggctccattggccagcaatggctgtatttggaagataagtttaggccaagaccatggaggaggaggaagcccaagaatctggtgagcgaaaanggnnccccccaatttnntcngcccagctggngcatcttcaacggacctgggctcccggaagcaaacattgacctctgcgtcatcagcaagaaacaagcttggattttctccgcccaatacacagttgcccaacaagaaggggaccaggcttggttggccggtacaggtgtgagaaagggcactactgcagtcctcactgagaaaattccactcctctggagcacttgagggtgctggaaagaaacacgtccaaacacatcggacaccttcctggaatggcatcagctggcgctggctgggcccgcggtttctggaacggtggtgacgcattcacggcccagctaagacactcactgctggctaagtgtttgccgaatgaaactcaactcaataaaaaacaaaaaccaaattgggcagctgaaaaaaaaaaaaaaaaaa

SEQ ID NO: 147102 - DNA, 630 bp, Homo sapiens
agcaggaaccactgcacctggccaggacctatttttattgtagactttactgaatatacataattctgagtgcagatatgaaagctagtactattcctgcaaaaaatgcccaaagcccaagatgccgatgaagtgaaatttccacctacagatttgttgatggaagggccctaagtttttccctcgttcacctatcatgttttgccctagtgatggtcctgcttttgtatggcaaagtcacatatagcaagtattcttttctacactgttcgttgtgtaagggaattccctttgcaaagaccatgtatcccaattcttgcctagattatgagcaattttgaattagtgaaagttttattttcaaatagtaaatatagccagttgccctgcatcaccttagtgctgatcatgctaattatggtgcccatcttagagcttaaaaaatatatatgggctcagttgtagaaaaaaaaagaaaggagctgttaaaaaaattattttagtccaggcatggtggctcatgcctgtaatcacagtgctttgggaggcggaggtggggggattgcttgaggccaggggtttgagaccaaccagggcaacatggtgagaaccagtctctataaaaaaaaa

SEQ ID NO: 147103 - DNA, 942 bp, Homo sapiens
  misc_feature (1)...(942): n = a,t,c or g
cttttttttaccagccatgtttctaacaattacattggcttgctgattatacacaggggtgacgtttaaatcataaacatgtctaagaattttcttatgtttagcattcaaacaagggccgtcctaaacagctaaataagcctcatcctcacagaagcgaaagcttctagatgggcttggtgttgttcatcaacgaggttttatcaggatagtgggcaattctggtgaatgacggactgagcccctcttgaggaactgggatgtgtctgcttggggctgcatgccatttcccacccagtgcttaccatgctgctagcagcaatttaggggtcgactcaccttaggcagttgcatggagcagctgttttcttcccaaagcaagttggggacttgggaatttggccatataatcacacagtttaggacagcctcggncatttatatatgaatcctcagaattttaggtacacccatttcttttcccgtaaataaaatttctttcctgccttttaagtgtcttttccctgattcctacatagaaaatttgatgaatatttaccagcccattaaaaagaatgaaatccatgtccctttgcagtaaccatggatgcacctggagaccattattttaagcgaactaatacaggaacagaaaaccaaaaagcacaagttctcacttatacgtggtagctaaacattgactacataaagatgggaacgatagacagtggggaatgcttgagagagagggtgggggaggcattgattggaagactaactgttgggtactgtgcttactaccttggtgatgggatccttcgtacaccaagcctcagcaacacacaacctacccgtgtaacaaacctgcacatatatctcctgaacctaagataaaagtagaaaagaagaaaaatgtaaaaaacatttgcttaagtaagaaca

SEQ ID NO: 147104 - DNA, 504 bp, Homo sapiens
tttttttttttttttttcagcttcggaatgtgacaatttatttggcgttgatacaatattgaagagcagcagaacaaacgtacaagacagagtaatcggcacagacccacccctcccccggaaccgccgaatccagaatggagcccaaacccacacccccaactaagcgtcttctccacagggggaggggcagggtggactgggggacctgccccccatgctggggcggcacctccgttttccatctcctgccaaccccactcttttcccatctttgaccactggaggcaaagtttagccagctgggagctggatggttgaaccacatacaaaggcaacaacacttcattttaaaaatgagagaaaaaagagacagtgcccctccccaaatatagagctatatatgtatattttatatatatagaattcattcgtgcacaattcattaaatgaacgtctcaaaaattaaaaaaattataagatacgtatttctttaggcctttg

SEQ ID NO: 147105 - DNA, 1181 bp, Homo sapiens
tcgatacgactttttttttttttttttttttttttgtttttcagcttcggaatgtgacaatttaatttggggggtaaaagaggcttttcacccccctttcctggcggttgatacaatattgaagagcagcaggaacaaacgtacaagacagagtaatcggcacagacccacccctcccccggaaccgccgaatccagaatggagcccaaacccacacccccaactaagcgtcttcctcccacagggggagggggcaggggtgggacctggggggaccctggccccccatgctggggcgggcaccctcccgttttcccatctccctgcccaacccccactcttttccccatctttgacccactgggagggcaaagtttagcccagctggggagctggatggttgaacccacattacaaagggcaacaacactttcatttttaaaaatggggagaaaaaaggagacagttgcccctccccaaatataggagctattatatgtatattttatatatatagaattcattccgtgcacaattcattaaatgaacgtctcaaaaattaaaaaaattataagatacgtatttctttaggcctttgtgtttttaaattaaaaccaacaaaaagaagtctccctctccactccacccagcagcaagggcagccgggaacgctttcgctccagctacctggcctcccgcaagagggttccccccatggagacccgttaagtctctcttttgcctggcttgacttaccttgcataccagtagggcaactcactgcctggaagtgaggcaactgactccctcccaaagattgccagggggcggaggagggaacccacgaaggccctgggtagggggcatctttggccccccactaacccatctcccctatttctgcatccctggtgaccgtcagcaagagatgagtcggggagaccctctccctggagttctagcccctaattctgggctttctatatgagaggacatgcagatagggaagaaactaaaacctttcaatgtcttcctttttttctttaaaagtgtttcctcaaaccatccccgtcccaaagaggccgccttgggcaagtgcatgggagcccggaagtggaactgacccaggtggggctccactgtcctgtgtgggcgaagtgcaaaaaaagaaagaaaaaaga

SEQ ID NO: 147106 - DNA, 392 bp, Homo sapiens
  misc_feature (1)...(392): n = a,t,c or g
caatcagagagagaaaaggaaaaggaancancgtccaacatttggcatttggttttatccacaggttttcccagagctcctcttggaattgaaagcaaaatatattggcaaacactgcttctcaatacacagcctaccagacactgggcctctgcctggctgccctttcccccaggcagagcggccttgggcataataccaggcaacctgccagccccagagcagaaaccctgctgggatcccttccttcatcaaccttggtgtggaggatgctcaatagcgcttccacctccccctccccagcccctagctacatctctccacccttccctggacagtcctacttcccagctcacccacccaccagcagcttaagtctgggtgggatctat

SEQ ID NO: 147107 - DNA, 2433 bp, Homo sapiens
  misc_feature (1)...(2433): n = a,t,c or g
tttttttttttttttttttcttctcaaacagtttaatagcaaataaacgggggaaggtaccacacttggcagatacaaaatgactttttgtccatgtgtctgtgcaattaaaacagatttaggttccccattgggacaaaaggaaaaacacacaaaaaaaggaaggagattcctttgaaacacatactcccttgcctccaaacttataacaatttttttttctttttaaattcactacacaaactctgtgaattaggtaagaaaagcgacaagggctctcccttgccctttttttaaacccattaaagtaaaatcccataattttcctacagagtacaacacaagttcacacaaaaaagacattttcttttgccaaatcaaaacaggaaagaaaggaaaagctcaaacaagataaaggaaaagcatttctacggctgaatcacgactgagttgattgaatcccgttgttgctgcagaacagactgtgcgtttggtcatagtgggcaattttttttttctcttcacattgtgaaatcactttacattgttttctagtagaaaaggcaaaaaaactgtacaaaacccctagtgttaaatacaacgtttgtaccaataaaaaactcacacaggtttgtctccaaaatgtaaagtttcttttttttttttctttttaaattattcacaaaaagcagctgcgaaatcagaaaggcagctgccgcatccagggtctcaaatccattaaaaccaccacagaacaattaaaacaatcagagagagaaaaggaaaaggaaagcaacgtccaaacatttggcaatttggttttatccacaggttttcccagagctcctcttggaattgaaagcaaaatattattgccaaacactgcttcttcaaatacacaggaaagggganccctcagtgcctcctgccaaacagaggcggctctgtgcaagtcagactgtggggtgcaacagcaagtctctcaggctgggggtttctggcctctttccatccaattcaccccttcccaggaaaattcagcagcctaccagacacttggggcctctgcctgggctgccctttcccccaggcagagcggccttgggcataatacccaggcaccctgccagccccagagctagaaaccctgctgggatcccttccttcatcaaccttggtgtggaggatgctcaatagcgcttccacctccccctccccagcccctagctacatctctccacccttccctggacagtcctacttcccagctcacccacccaccagcagcttaagtctgggtgggatctatcatcagctcctccccctgtaacctcttccctccacagatccaccctgtgctcctctcctcacctctccccctccactcacattcttactcaagtctccaagaccctgaggctggatggtgccacaagagaggagggtcagtttccttcaggaaaacaaaaaaattggcttgcttggcacccagggacagtagctgtttggctctccacccaattaaaaaaacaaatccctgccctttcccccaccccactagctaagcaagagcagagctgtgatgaagagccagtgccgggtggctggtgcccagggctgtaaacagtgtgaagactgtagtattgtgcttgtcacctaggaaaagcgccagcaggtgaattgccgcttggtgtgcagatggcctcctacgggtgattgggagcgccctccttcctccaggtgctcactgcccctaatgtgctaaattaggccttcttacccacctgctgccaccttctaggctctaccctctgcttctcgtgtctctccaggcccccttcccaccctctctgagcaaagcagcccagcctcccggaagccccccggtaggaccttggaggcccaccacgaagtgacagtctaagtgcaccaggcaaacgctctaagggcaatagaggagaaagttgccacttcaaaattaaacaatacaatcttgaaaaaaataatcaaccctacaacaattttaaaaccggcttctttgaaaccccttttaaatcgatcagtttttgcacaaacttatagaaaacagagaggtgaaggtgatatatacgaaggtgtgaagaaacagcaggaaacatgcaaaacttttttttgggcataatcttagtaggaaaggaaaaaattcaaaacaaaaacacaaaaacaatacaaaaacaaaaacaacaacaaaaaaatcaaagcatcacattttgctgtggagactgttggaacaagcatggggctgaggggaaggggcaggcgggatatccaggactccccagagtcgctccagggaagaaccacaaaagaaaaagaaaaagaaaaagggctggctggggccaaagtgcagcctgcgttcaaaaaggaaagggggttcaggtgctctccgcagtt

SEQ ID NO: 147108 - DNA, 1549 bp, Homo sapiens
gcaatgctttggcccagtcgctggcctgaggcttacctctcggcactggcattgggctccccagccggaactggttaccaaggacaaggacactctgacattcggcttgatccatgtccaggtgcaactgtgtgtacaccagggatctgtttggaaacaaccccttgagctgccaggctcaagaaatcatggactcacagggtcctgtgtggttacatcttggaaaaaatgcagatgtatttcactctccccggtcagctctgcatcaggtgttttctgagcaaaccaagggggtttatagtcatctgtcgcattgcctcgagttgcagtaattgaaaaaatgctcaaattcttagccatggctggcctttgctgagctggggactcaggtgtttaaagagtttgtgctatagctaggtgtggatagcttctgatccctgggttctgggagactgcaggtgccgcacattgtcaagttagaaatactccaggtgggtgttagcactgtggtggtctctggtccacagccttaggtaaacaacttatattctgaggtcaaagaaaaaaggagagggaatgcagccttgtgggggagaagcggggcagagggttctctaatctaatcaggacaggacaggtttcacatacaattgtcccagttcgcatcccagccctgggggcactttttcttgctttcctttccagaggcctggggctctgaattaacactttggctttttctccatttcacgctgatttgggcaaaaggccagagatggggccttccttcccggggggaggtgtgatgtagttatcacattcaggacccttgttgatttatcatctattatttgaatgcaggtgaacactcggtaaaaggggtgctttagcaacaaaaacaaaaccaccaccaccccagagaaaaccatgtactaattgggagttgggtacccccatttcacaggttcccaggtcccctggcttttgggtggattttcaaaatattagagcccttttcttggccagttacatccaagtttaaaattatcagcgaaatggtccatgtttttccaattacctgctgacacggttctaagctaagtgaaggggaagatctgagagcgtgctgtttgtggctgttgatgcatattcgtgatgtaacaggtcctggggcctcactttaccccatttgtaaaatggggctaatgtcacctgcctcttacctacctcagagggatttggtgaagcaaactgttaatcttcgaaaacgaccatttcacttcttggatatcaagtgctaacccagtatgttcttcttttttatgtaagggacagctttctccacagagtcggtagaccaggggttacgtgactggggaaaatctcacatctccttgtctgaaaacatttcccctgctgttctctttctaacatgttgtggtaaatctgttcagatactgctcatctgactgttttgtacatgtgacaattgccttaaaacctagcacagtcctcagaaatgaataccgtgtttccactggaaaaaaaa

SEQ ID NO: 147109 - DNA, 1807 bp, Homo sapiens
  misc_feature (1)...(1807): n = a,t,c or g
ggtacccccattcacaggttcccaggtcccctggctttggctgatttcaaaatatagagccctttcttgccagtacatccaagtttacaattatcagcgaaatgggccatgtttttccaattacctgctgacacggctctaagctaagtgaaggggaagatctgagagcgtgctgattgtggctgttgatgcatattcgtgatgtaacaggtcctggggcctcactttaaccccatttgtaaaatggggataatgtcaacctgccctcctaaccctaccctcaagagggatttgggtgaaaagcaaaactggttaaatctttcgaaaaacgacccatttccaccttccttggataatcaaagtgcctaaccccagtatgttccttccttttttaatgtaagggacagctttgtagaaaggactgctctgtggagcagagtcctttctgctggtgaggacagcaattttctgaggcagggcttttgctctctatgtgcattagggacttttatcatggcccttgttcctgtgtgtagttacttggacagcactcaaatgccgcctcttcctaatgtccttcaagtttttcatggaactagcaaccccaccttccaccatggttctgggcgcctgattttgctgtgactcccagacccaagccactgtttgatgccaccctgtaacaggccattaaagctccccagtgttcagcctcctttcactcccttgttttccctgttgctatgtgtcacctggggccctacagacaggggcacacgcttatggatgtgtgtaccattggagatgagaatgggtagatgggaacggagaccatcaagccacaccccctttcttaaaaactgggggacatgagcctgaggcaggaaaggggttgaaggaagagccatnggggacacagagttgaacccagccaggggaaaagccccagctctctttaaaccagctaagccattccagtctcctgtgaagccaaaagggaccaggaaccgtgcaaaggaaactggaaacttttccccgctgggtagagcatgttgctgatactcttctgttttcaagggaaacaatcacattgtttgattccaaatggtaaatgaacactcactattctttcaggcttcagtaaatctttttttctttccttcatatatatatacacaacacacacacacatatgtatatctattacacactgtgtgtttgtgtgtgttgtgtatatggcatgtgtgtgtgtgcgtgtgtgtatagttttagctccaagcccaagcaagtttgtgtttggatagaggggaatcttaactattaactacaagttgtatgtctgtggtatcttgattttccccattcctaaagatgaaatttcacaaagcccataaaagcgtgaaaattanaagcctggaccttaaagactcattggcccgacccatcctgtgtcctggccgtggcccctggcagtaagaagcgtgtcctgggtcctggagaagggtgccttcccgagagtgtgcaggtggccccttcccccttgggaggcgagaagagagaatgtgctgtctatctctcctggttttcagtcccacagagtcggtagccccaggggttacgtgactggggaaaatctcacgatctccttgtctgaaaacatttcccctgctgttctctttctaacatgttgtggtaaatctgttcagatactgctcatctgactgttttgtacatggggacaattgccttaaaacctagcacaagtcctcagaaatgaataaccgtgtttccactggaaaaaaaaaaa

SEQ ID NO: 147110 - DNA, 459 bp, Homo sapiens
gtcgctttatttgcagtgtgttgagggactggtgtatccactggaatagttggtactcttggatgtgttttctcaccaagatgagcaaagaaaggtttgcacagaggagtgtgaatgtgtgtttgttgctggctgaatggcaatagatgtctaaggtggattcagtgtctggcacactgagacacctccaagaatgagattgatgcatcaggttcagtttaacctggaatatctgactacccctgaatccacccagaaagggggcccaacacccttgtgcatttatgggtatgttttttttaagtcagattatttgtattctttatctctctttttttttaggtttttgtatttttcttctctgctttaatatttaatgctcgtgaactttctttttcgaatgttgttttctttatttatgtcgttttgttatctattctttattattctataataacg

SEQ ID NO: 147111 - DNA, 1008 bp, Homo sapiens
attaaatgccaccctctccccaggaatgacagtgagaagcaaagattactctacagctccacaaagatttttcataacaactgtccctgaaaagtagtattgaatatatgatgagctcgttatttaatggctgattcatttgaaccatccacttataaattagtcttttccgtaattggtatatttaacaaaatgggaatttacttaaagattgtgtgtttgcacacatggggtgttatatctattgccatttatttattcatttaacattaaattccatgggctgctttggaagatttctgctcaggtacctcctgttcaaacttcttaagataatttatcacctagttataattgaaatggaatcaagtcttttataattttgaatcacattcatctctagcatctaattgtgcatgtggttacctgctgctttgcacacttttctctgccatgtatctctgtatcttgttctcaaagcctcattccagtctgttcttaaatgccagcttctcagagaagccttcctgactctccggtctaaagtagcagcaccccatctatcactctataatcttatcttggtttggtttcctttactgcacttcttaatatttggaaattatgttttaaaaaatgatttcctatctgttttccttatgacaatggaagctccatgaagcggagatttgggttcatggagcccataaggcctcagcccataggagaaacagacaagttgtactggggattaaattccattaaattttccattaaattcatatctcgggtggatcataccttgcacatagtaggcacttgataaatatttgttgaataaattggtaatttgatattcacaggctttgtgagattggtggaaaggaaactgtattgtaaagatggccaggcatggtggctcatgcctgtaatcccagcactttaggaggctgagttggtgatccagcctaggctacggagagagaccccatctcttaaaaaaaaaaa

SEQ ID NO: 147112 - DNA, 1610 bp, Homo sapiens
cagggctgtttgacagtgtgcgtctttccaatcccatgttcctccattcgtgtgtctgttataaaactgagtgaaggctgctatgacctgtgttcactctggttacagggaggtgcaaaccattctgtctcccagcctttcttctctctttgtgtgctcccagcacttccttcttttctaacatggcctgggagagagtctctctctccttgtctctgtctcttaataatagtttttaacgtgggacatctcttccttgggtacagtggtttttaaatcctgaggaaggaaccaagtcaggttttttaaagcagactaaaaggcatggaaattggcttttcaggaggaatgtatatcatcgggaaaagttcgggggcagagtgggggaatcaggctttattcaaaagaaacagttgaaaacatgggactttttctacccaatggcccatttcacgacttcctctgagactaattggggaaacggggaaattcttgggaattttttttttaaggaaacttttttgtgttttttttaattttagggtcacttatttagtggaaacctcattttagatctgacattggtagatagatggatttaggcaaatatgatgcgtttgtggggaatccacgtggttgacgttagaacctcccttctgcagactgttgcctgtcatctaagcgaattggaaatgctgagcttccataagtcagctgagttttaaaggtaaacgttatggctgaagtagtaaagcacctgaccacaaaacctcttgtaaaaacagccctgagtagggtatttccaggggctccacaaaggttgcttatggggaatcctgaggctggcttttcaccattctcaaggaaggcctaaggaagttatattattttaatcagggtaggacaaaacagttcaaagcataaggtccatgggtgggtggaaaatggatgcaagtgattctaagtttgtggatttgtggatagcagaagggatcgggacctcttggaggaaccctgggtaccaagctcccaggcccttcctccatcatggatgctggggtgaccttgggaagtcaccacctcttcccaagcctgtttcccatatcacagatgtggggccatggcttcggatgatggtctccacgggtctttcccacctctggtgagtcccaagtcagggtcaatccagccaaggaccccatcctcctgcccctggggtccagcctcctcagaccccaccccccccagcatctcttaaaggcaaaagccttcaccttcaaggggcttgctcagaaggaggagcacctttcagcattgagttgtttgctggaagatcgtaataagctgtgttcccctgggaagtggtgctttacttagccctgtggacaacttctctatgcatctgtgtgagcagatgatcattgtattaccttttatcggtagtaagcttggaaaaataatttaagaatacaatggagaaactgtaaataagtatctatgtaaatttgtttaaaataaactgaatgtatttaatggtccatttatatgttcttttatgtaacatgtagtttaataaagttcctgtttatgagacccaaaaaaaaaaaaaa

SEQ ID NO: 147113 - DNA, 659 bp, Homo sapiens
  misc_feature (1)...(659): n = a,t,c or g
ttttaaagaactttggaaaaactccggtcatatcttttaccatttgtctatttgatagtaatgcagaaaaaagtccctaaagaccctgtgttccaaaatttaccaagattgacatttctattagacatccttaacctaagtgttttaattagattattagactataataaggatgaaattgctgtctgtaattttgttgaggttttattgttaatataataaaagctcaactgtacaaaattaagctaaatgttatccagtcagaaacatcagcccgtgagccaccgcgcccagcctacatttataattttcattctcttttacctataaaattcagtgtattagtttcattacataggagaaattatatttctaaacattttatgatgtttaaaaacaaaacaggctgttgtnnnnnnnnnnnnnnnnnnnccttctgaatatactttaggtttcaaaaacccaaaaataaaattaacctttaacgggggcaactccatgtccggggtccacttttgaacagggtttataacgtttctgtttctttagtaatgattaaggattcctcaggaaattcggaatgttgcctggcctatctggaaatttaaagtccctaggagctttgccttatcgggaaggaagcctggcctgatttttaa

SEQ ID NO: 147114 - DNA, 1026 bp, Homo sapiens
  misc_feature (1)...(1026): n = a,t,c or g
aggtgctatataagtgtgaaatatcattcatttataaatgagatgccttctaactttccatattgacttatgtatttggccccacattatatttaagtcttttttcttgcaacgtagcccattttttgaaagcaaaacatttctgaaattaggacatgggttttttgtttatttttaggataggtcacttaatataggaggatgttttctcatgtacttgctatttgcaagctcacgcttcatttggttctttatgttaaatacgaataagtaacctcaaatcaagctaaatgtaattaagaattttcagcaactatattcaagagtttgatttttaaaatctttctttctttttaataagaaagatgacctacaaatcagcggtatttgtttgtcctcagacgccgtagttgaagaaagatattagagtatacacagaactggagccataccattgggctaattttttacattaaggtnccagaagtctgagccacagcatgaatgcttctgcctgaccaggacccacaaggcagcagaagttagggataaatggagatagcccatgagtagaactgctgtagggcttcaggaggctacgcaggacctgatcaactgcaaagtttccaaaggtaaaggattaaaaaactttcagacggttcttacttcttacccggtgtttcacaaatagcctgaggatccaactatttttaaagcaaattggggccagacggtggtgcctcacgcctgcagtctcaccatttggggagacctaaggtgggggtgtttcaccatgttggccaggatggtctcgatctcctgaccctcgtgatccacccgccttcagccttcccagaagtgctgggatttacaggccgtgagccaccgcggcccagcctacatttataattttcattctcttttacctataaaattcagtgtattagtttcattacataggagaaattatatttctaaacattttatgatgtttaaaaacaaaacaggctgttgtaaaaaaaaaaa

SEQ ID NO: 147115 - DNA, 912 bp, Homo sapiens
accatgtgagtaaagtttgttttttttttttttttttgatatataatttttttttgtaaacactttaaagacagacccacaatgcctttcaaagatgaaaaagaaaatgccctttccctcctgggctgaggggtgaggggaaggatagcagttaattcattcttctctcaaacttgctctcatccaaatttggtgtcctccagggagtaaagggagaaccatgatctggaaagtcagtgcaaaaggggtgcccctgttcccgctggtgtcccaagctcagctctgccccagggtccggtgagcctcctccctggagcaggggcgctctgtccctttgagaggagtcagcaagcaagcccgcaggtcagtccgcagggtgttccggacaagatctgttcacttcaaaccacgagtctatgcagcttttgtgatagatgcacaggcatgggcagcctggctatcgtgtcccccctgcagcagctcctccacggcagatcacacagctcaccctgcgtctttagtcacgcacatcatccgttgtaggagacggcgaggtttgctcaaacacattataaagtgcatttccatctcgtcagaagccacagacttggagcaaatggggcacttgaaaccactatgcgagctgaaccacctgggtgcgatgtgcagaggtagagcatccgccagcgaggctcgggagcccaggtacagcatcccgtctctatggtgaccgccgcccgtctcctggtaaccattgccatgggcataggtggagtcggacgcagaccctccgccgccgggcgccctctcggagtcgccggtgccccgggaggcgggggtgtagaggccaaagggcacccccccggccgtgctggggtccatgcccatgcctggaattccaccgcactaccg

SEQ ID NO: 147116 - DNA, 1367 bp, Homo sapiens
cagatgcttccagaagcacctactctgtgcaagggcattcacaacaggccagtgggcaaacgtgagccagggccagcggagaaacactaaagaagactcggtggttcaacagcctgggtctacagcgcgggacccgtctggggtgaagaccttggggctgttgtgagtcggtggcaggaacgtgggctctagactgtgcattcaggctctcctacttggcagaatgatcttggggaaacgacttcatctgaacttcagatatttcacatgtgaagcggggacaaaaccatgcagctcagaggtccctgtgggggctgggggagctgccctgcaggtcttggcacatgcacagcaggctccccatagctttgtcaccacaaagggcactgttctattcacagcacctcctgcttctgcctggcaactgtgtctccctgtgctatatttaattccaccagcaaagctggccgaggcagggcccagccctgaaggagatctccttgcctgacccctgggacctgggaaatggaggcttcatgtgcccgccttggcttttaaagcctgctggctttggcagtgccatgggtgagccgagcagctgtgaggtgggtggggcagggctgtagcccacggccgggtgctattccaggctctaggggctggtgctcatccccacccccagcgacttccgtcctacctgggcatgctgcagccctctgccggctgtggtgtcctctgaatttggacccaggttgcctgctcttgttgtgggggtgggattggggctgtctgtgtttcccaggtggagctcatgtttgtgatcctctatctggacagctctccagaatcctgtgttgcccccctgttcctgccctttcctgggatgggaagagaaggtgagggagcccggcgagcaggttcctacccctcctcctgcctaagggccctagcacgcctttgatgaggttccccggaccgtgagacccctcacaaagacccaacccattccctctaatagcccatttaacggtactgcagttccatgggaaaatgtcctcattcttaggagatagatgcctggattatataggtgaatgccttcaagaaatgtgtaatttaattccaaatagttccccccaaaatacacaaagcaaataaggccaaaatgttcattgttgaatctgcagtggctggtatttcagtgaacagtgtacttgttctttcaacttttctgtatgtttggaatttttcttaataaaagattgtgggaaatggtcatttgctgagcgcctcctagttgccaggcactggagggcgcatcaaagaagagtcctacccaggagggagagcgcagctgctgcaggatt

SEQ ID NO: 147117 - DNA, 447 bp, Homo sapiens
gaatatgagtgtaataaagattttcaaaagaatcactgtcagtcattacaagagcttgggattttctggcaccattatttgaaattttaccatggttatgtatacagatcacatactacggaatgctcatctgatgacttacactagtggacggaggctctcggtgcccaagattgcctgccatattactgaccacagcctgactcacacttgctatatgccctacctccgtgactgatactagactatgttttcccagggttttcactatgccccctatctacacctgcatacttgagagcaccctttcgagtgcctcctggctggcaggactttcacggatgccctctttgagccaacctactatccgacccttacccttctcaccccgagtcactggcaagacggccctcccctgactggctctcaaatgcctggctagtcacc

SEQ ID NO: 147118 - DNA, 539 bp, Homo sapiens
tgcccgcctcggcctcccaaagtgctttttttgtgtttttgtttttaagacagcatctcgctctgtctcccaggctggagtgcagaggtgcgatcataactcactgcagccttgacctcccgggctcaagcgatcctcattagcctcgcgagtagcctggaccacaggctcacaccaccatgcccagctaatttggctgtgtatttttaaacaatactttgtgagtagtggcttttacttgctactggtggctctttggtggggtggctgatccaggtggttgggaggggcctggagagcaggaataaatcgccttggaacactcgggtgttttgggggaatggtcttacccagggcctgggggttcttcggactcagtggcaatctgttcaagtggtggggttgcctgtccccactagaaaaggtcatggtgaaaatgcagcccatcctggtgctgggggcatcccactcccagagattggggcagaccagggctgtggcccttttcgccttgcctttcttcccctttccgggggctg

SEQ ID NO: 147119 - DNA, 409 bp, Homo sapiens
cattaaacatcaatgaagagaactgagaagccagataactgtatgcaattaagaaatacaagcaaaaccgccatgaacaaagtcagacagattgacaaacctggaaaaagctgcagtttcatcaaagatgagctaattttcctagtactcaaaaacactcaacagattaactagaaaaagccagtgatccaataggaaaaacatggtaaagaatatgaatagacagttactagaaaggattttatgcacatgaaaaaaatgctcggacatggtggctcacacctataatcccaacactttcggaagcttaaggtgggaagatggcttgagccaggagtttgagaccagcctgggcaacaataagagaccccatttctgcaaaaagtaaaaaaaaaaaaaaaaaaagtcg

SEQ ID NO: 147120 - DNA, 2027 bp, Homo sapiens
  misc_feature (1)...(2027): n = a,t,c or g
tttttttgttgttttgttggcattgggcagctttcatctgggtttaatttttttccaaataaaagtaacatgtttgaaatgtctgcaggaagatgccaccatcagacaggttagctggggcatatatattacaatgtaaccctgtggaggtcgtggggccggagcgggaagatgctccccagaatcgggttcaggtcagacatgggtgtgtggcctggcccctccttgccccccccccaccccgacacctgcagggtgagggactgacctctgcaaggaaacgagtcctccgcctgggggtcacgtctggtctgtgaagaactgattcccacaacccgcccgggcccccccaaagggaacagacggagccacgggccaggccgccagcactggagcacagagctcagcaataaccagggccaggcttaggggggcacaggggggctggctgccatcaataagtttagacatacatcgcaccttgccgtcctcacgcagggagcccctgggcactgctcatgtgctgcctgggccctgctgctcagaacaccaagggctcccagtgagggcctggggaattgcctgggcacactggggccaggcacagggtctgttctgaattccagggaagatgaagaagacccaacctctatccagctcaagcccaagaacaaggcagacagagctgtggacagcacccgaccacagacacggttctgcctgctgctggagtgagaggcctggtttctgaggctgcagcatggcactggcattgcctgtgctacagaatggggaactcctgcgagtctcacaaatcacagggagaatttccagttcacacaaccccaagggccctgtgtgcagagcggcccttcacacggcgcacagcagcattcaacagagctgggcaagggaaggggagagagagtcaaggattgaaatgaagggacttcaaaaagaaggaacaaactaaaaaccccaacccacacacaatactggttaataagccaagcgactcctaacacacacactccttaaattaataaagttgacaggtccccggctggccccgcaagaccaccgcaagagggggtcccgccaccagagggggtcgccgcctgccactgcacggctttcctccctctatctacaggacaaacaaaacacgggagaggggaaaaagcccacattttcttcttgataaatgctgttcaaaaacccatgaaggtctcaaagtgacatggtggtttaaaaaaaatcctaaatgatcaccagatggttgctttctataatttttcctttgttctgtttgaactgggctaagtaagcacagttagaccctgctgttcacttgaccacgtcctaaacccgggacaagtgagcactcattcatgcacaagcagacccggaggcatgggctggggcagcaacaactgggttgcccgcagcgcccctgcctgcaggctcatgctggaggcccacggaacccaggcggcacagggcagattctgtttgtcaagcgccccacaagccttgcccagattgtcaagctcagcagcgagaatggttttgacgaggaggatgggaaacagcatctgctctgggaagccgctctggcctgggggagagttggggagagggtgcgctttgcttgcagctgcttgccttagggaggctcctctttggccagggnttctgcctccctgcaccctgagggaccattcgggtgcctcagggatgcccttccctcccaggggcactgacagcactggctgaaaggtctgaagagccagaggaggagccctgctggctggcccaggatggggcaaggagggagggaaagccaggggatggggagggacatgagatggagtttaaggcacacagcgagcgatggaggagggaggtgctggcctctcccctctgaattaactcccccaggagctcagctctggcctcagtttggtgaggttcagaagactcccagcaataaaaagtatttcttggatgatcaagtcctcccttac

SEQ ID NO: 147121 - DNA, 2382 bp, Homo sapiens; identical to SEQ ID NO: 130885

SEQ ID NO: 147122 - DNA, 1469 bp, Homo sapiens
ctctgaagctacagtgggaagttataaggggttgctgttttgacaggtgtgagccctccctcccagccttcctgccctcccctttccctccgtacacggcagagtgaattattccagctaatagcagttccctgtagagcagagcctgctgtgtgcttgagaacaacaggtagggcagagatgaggcagcggttaatatcttagttctcttttattcaagttatgattaagtaagggcaaaggacccttttggaagccctaccaatcacgtttgacgaaagcgtgtttagtatgtaggcgaggactacttaaaatatatatactacaaattatgtacacacacagagtggccagaagctgaaaattggtttcccctgttaaattttgctagtcgtcttgcagaccaaaagaagtgaattccccaagtccatttgccaaactccatttactaggaatccccaatggtcccactgtcagaagacaaaatggaaattattgagatggtgctggatttggttaggaagtattgcaccttgaccttaaatccctgtatccccttcattccaaagaaaataccatatttgatgacctgctgcgtgcccagcctgtgtaagtggaagctggtgattcaaatgtttctgccccatgtgaaggctgacatcctagcggggaagaaggatgatacacaagtgaactaataggcaagataatctcaggtcaggaggtagtggtgggggcctggtgtgaagatctgggatgagggcccaggaagagcagaggtcgggaggggaagggctgaggctgagagggttcaggaaatgctgggagaatagtggggtttaaacagggtcggcgaggagaggatgctcacagctggagtcagaggggtaggcaggagtttgttttttatttgaagagcacgaggaattggtgacaggctgtacatacctcctcttcatcagagcatgacaaatgtgaaccatcttgatgatttgagattcttactctataggttgatacagtattacagtatgagtagatatacttatgacacaggcaggatgggcataaataatacctacctccttgcacccaatattcccagacccttatggctgatggctgtagtctctcagctgtgactgctctgcagggacctccatctctcacccgtcagacagcgactgaaggtggcttacagagcatgaaggacggcgtgtgagttggccagctctgtgtgcagaagctgtttcccaaaaccatttgtgtgtttaggtcttggttctggatgagagctgtcgtggaagctggcccccttctgtttgtgaaaaagaaagcagcatgggtctgatggtcaccagtttcgaagcccctctcagcacctgctttaagggagtgcaccgtgttgttgggcttgttttgggagaggggatcccctggagggagttgttcaggaccttccacagtgg

SEQ ID NO: 147123 - DNA, 1680 bp, Homo sapiens
  misc_feature (1)...(1680): n = a,t,c or g
cagtaaaatagctctgttggtacatttaaaataagagaacaggcatcaactattctttgaattgataccaactgtcttctttttatttatttttgagacagggtctcactccgtcactctgcaggaatgcagtggtgtgatcatggttcactgcaccttgacctcctgggctcaagcatcttccccactcagcctcccaacagcatgagccaccatgcctggctaacaaattgataccaactatcactcttctcagctacctaaaaaggtggccttcacaagttttaagaacattaaatgacaatattggcacataatcaatattttatcattttatatttggaaaaaaacgggaagctggggtaaaccagtttctaaataaagctaatgaaactttaattcattcaaacactatggtagttatgttgatgataagtaaacattattatttatttatactgtttcctgaggtgatccagaaactccggttattatagtagacttgctactatatacatttactatccctgcaaatgtgctttggaaataataacaaaaattttaaggtagacccatgtgtaatttaacatgctttctctgttacaaaagctatctttaggaaattcttaagtatcaaaaatccaatttattccattttcagaagacaaggaaaaagcactcataaactctaggccataaaaaaataggtttcataagtagctcctttaacatgaagaaaatgacaataaaaatatcttacttgcatgttacttctggaataatgtcaaaaatctatgtagatctttccattttaaatgatgttaaaatagtgtccagcactgtgactgaccccatagcaagtaggggtacctatcccaaatatttgtcctttgaaacaagaaacaagtgacccacccgatgaaaagtgcatgccctcttaacagtatctttctgtaagaaaaattaggtgatcctatatttacatttgggccagtggggggatgaaaactgctcttacccaagatggctgacttgaataaagacagtcaatatttttcaaaaaattcactgctctggtactgagatctcccatgataacagattacagttaaacagaaaatgctgtgaaataccttttacagaacacagcctgactttgcagattaacttaaagatatatttcttgattatttcactgttaaaaatcaagaaaaacactactaacatttcaacatcttaaaaatagaatttatgcaatgacatttttaagctctgcattttgtatactattaccgtctttaattacagttatgttcatccatatatcaaaaggcagcactggtaaccttgataacattatatatgcttatgtgtttaagacagtcttgattaaatatttccataccttatctgcagccactattcttatcctttcttcccaggaggagaatgaagtgggactaggcatttacctggcacttgcctgcactatcattcattggcactaatgattaggatgcttgaaccatgcagttttgtttctatttcaacaatatgacactgaagtagccattatcttttgatatttaagcctaagtaatagtatattcttcatgccaagttttgacagctcaataatttgtattctagaggggnaaaatgatatttttgctattattt

SEQ ID NO: 147124 - DNA, 601 bp, Homo sapiens
ggcacgaggtgattttggtagctccagaaggggctccagcatctggagaaagaattctaggaagaggattccatgtcatccgcctttaagtctcggaagtaagcatgaagaatcccagtggtgaggaggaaaggctgaggagtcagaaaaagctcctacaagaagatggaacagctcctacaaggaggtggctgtgggaggaagtagccgcctggggcagttttcaggctttggagaaggaaagcagcttctctgttgaggaatattctgcaagtaggtgatccactttgaaagctggttactattccttccttctaggcctgacggaggggaaggagggcagccgagattgctctgctcccatgaggcaaattcggtcaccaaaacaaaaaaacagcttcttatgtagaaagcaggggaattagcctagttttcggatattcacccagtattctagctttttaaagaacagcctgaagaggctgggtgcagtggctcatgtgtgtaacctcagcactatgggaggttgaggcgggaggactgcctgagcccaggagtttgagaccagcctggtcaatgtagtgagacccccatctctaca

SEQ ID NO: 147125 - DNA, 1125 bp, Homo sapiens
  misc_feature (1)...(1125): n = a,t,c or g
tttttttttttttttttgtggataaatatattagcaaataaatatatttcttaacatagtgctctgattcaagcgtctgtctggttcagatataaatacccatgtgggtacctaggtgctagtctccccactaactgagggaaaaaaggttcccaggtggggtcctctgcccactttgccaccacattcacaattccaaatggggataatgcctgaggggccaagagtgggtcaggctgccctgggggtgaatgtcaccctggatgagggcccatcagctcttgtccactcagtgagggccagacttgtgctcttaatccactctcctgtgggtcccctggccctgattggcttatactggggaagctggggcctctgggctgttccaaacccaaggggtcacactttgcttttcctttggttgtccccattttccatccttgctctaagacaaaacttttcccacgagaagaactctttgttgtccgcngctcagctgtaattctgccttttctaccttcattccatccttcctctgccccagatgaagtccagcagaaattcctcctttctacctctctgggactctgagacaggaaatcttcaaggaggagtttttccctccccactattcttattctcaacccccagaggaaccaaaggctgctgtaccccaccctccagggaacagaactcccacactatagtgggaaagcttccagggaccccctccttttagtgctcagggctcacctatgcctactggtccttttggcaaaaaaggaaaatgatagagccagggttgcccctgatgtagcagccttactgtggaggggccaaagctggtgttcagagctcacccaaggagggaggtgataaggtgtcatgcgttctgctgaacccactggctggtatgaacatgaggcttggggtgagggaaaccaagtaggggttggagaaggagcagcacctttgtaacacctggctacccatagctagctttctgccctcaaaaactcagccttcaagggatccagcccacacacgccacaggcagcagctggttgcctggctggacatggattgaattccaccacatggactatggtctacgaggtctcgagt

SEQ ID NO: 147126 - DNA, 889 bp, Homo sapiens
  misc_feature (1)...(889): n = a,t,c or g
ggaattaaaggttttggggacttgagatgttttgtttgagctaattactgaatgatgccctgcctgagacagagacagagacagagagagagagagagaaagagagagagagagagagaacatatgagaacacagagaaaacaactaaaatgatggataactcgctttaaaaacaattcctcaaagcgtcagagaactgagaaaaacagtaagaaaccaccagtcccacaccgtggtgcaggacacagcaatgggaaactgaattgtttcagaccagccgcctcctgagagcaaccatcagaactgggagagcgctgcacgggaaccgtcccggggncacttggggagctctgagggagccttcttgaggcctcggggctctgcagggacaagccgggagggggcggggcccgctttggggcggcgactccacacccctgcagcgtatcccagccacacaagacatggcgacactctgctgcgttcgttcctcacactgtggccacaggacagaagtcgaggctcaggcggggggcctggtaaagacttttgggttttttctggggacccccaaagttctatccccctaaagcaaaggtaacccagcaacagaattgtctttgtggggactgaaagcccagccttaaatcaccctcaagccctgagagaattaaggtgagccgctcaccgggacacctgtggacagaaaagtacaccttcccctggaggaaggtaaaacaaaacaaaaacagacagaagtcctcactgcacggtgctggaatggatccgggtcaggaaaaattattacaaagtgcatgatggggacattcacaatttggaatatgccttgtacattgtgcaacaaaattctaccaatgataaactccag

SEQ ID NO: 147127 - DNA, 513 bp, Homo sapiens
atactaatacaacacgatatactataggggatcctgccctccaggacatgaattcgagacgagcccactcacacacctacggacacacgctactctgggaggggatttgcgacttaaccaggcccccaaagctgggctcctgtagggagaaagaatgtccacggccacatccaagccttgatcgctagtcctccgggttctgggatcctgctggaagaggggagcttatgcaatgggagatgccacaaccctgcagcccccaaccacttccaaaaccttgcagaagcagcatctaggaaggcagtggggcgcctaccaatatgtgctcactttcctcttcatgggccctttcttctcccttcttgtctttgtcctcctcttcacgtcactctggcccttctctgttttttacttggtgtggctctatgtggactgggacacacccaaccaaggtgagctccggatgggggcccaggtagccagagatggtggggacatggggggtgaggggag

SEQ ID NO: 147128 - DNA, 444 bp, Homo sapiens
  misc_feature (1)...(444): n = a,t,c or g
agcggncggcgccgggcccggcaccgggccgggactgggggaggcagggtctcttgcaacgtgtgagctgcctcttgccaagagtgagtggcaaaagaaactaaccccggagcagttctacgtcacaagagaaaagggaacggaaccgcctttcagtgggatctacctgaataacaaggaagcaggaatgtatcattgcgtgtgctgcgacagtccactcttcagtgtgaagctcatctaggtcacgtgtttcctgatggacctgggcccaatggtcagaggttttgcatcaacagtgtggctttgaagttcaaaccaaggaaacactgaccatcttcaagagtcccgttcccttgccaccccttcacgtgcaccctcaatttccacaattcacttgaatgacttgttttatttgcaataaaactgggctgaatttgcaaaaaa

SEQ ID NO: 147129 - DNA, 731 bp, Homo sapiens
acttcctccgagcattagtatttcgttttgatttctccccttttgacattttcaacacatgggtttgatctgtgttacctaatatgcaacacagttcacaaaacaccatgtgtttttagatccttgtgggatatccagaaagaagtctttagcatcaaaggatcaagaagtccttccccttcgaaaggcaatggcttcgatagtgaaggtccagtgaggacgattccggggggactgactgtcgaataactgggcatgggttctggcagaggagagtgggaccggatcctgctgcctggaacaacacatcggggcacctcttggcatgttaatgacagtgtcattagcagctgtagtatagtttatgtcttccacagttctgagaaaaagtactgctctggcactgggtggccttcgttttctgaggctcatggtacgtctggctctgatgaaagccacacagggatcctgagacgtctggatacctcgttaggatcagctcgcacagaggttgtctgcaagcagtgtgaagctcatctaggtcacgtgtttcatgatggacctgggcccaatggtcagaggttttgcatcaacagtgtggctttgaagttcaaaccaaggaaacactgaccatcttcaagagtcccgttcccttgccaccccttcacgtgcaccctcaatttccacaattcacttgaatgacttgttttatttgcaataaaactgggctg

SEQ ID NO: 147130 - DNA, 904 bp, Homo sapiens
atgggagcaggggcagagacgggcagagggcagagggcggcagcgccggagcggcgtcatggccggctcctctggttgctccggggcctgaccctcggaactgcgcctcggcgggcggtgcggggccaagcgggcggcggcgggcccggcaccgggccgggactgggggaggcagggtctcttgcaacgtgtgagctgcctcttgccaagaagtgagtggcaaaagaaactaaccccggagcagtttctacgtcacaagagaaaagggaacggaaccgccttttcagtgggatctaacctgaataacaaggaagcaggaatgtatcattgcgtgtgctgcgacagtcccactcttcagttctgagaaaaaagtactgctctggccactgggtggccttcgttttccgaggctcatggtacgtctggctctgatgaaaagccacacagggaatcctgagacgtctggatacctcgtttaggatcagcatcgcacagaggttgtctgcaaagcaagtgtgaaagctccatcttaggtcacgtgtttccatgatggaccttgggcccaatggtcagaggtttttgcatcaaccagtgttggctttggaagttcaaacccaagggaaaccactggaccatctttcaagagtccgcgttcccttgccacccctttcacgtggcaccctcaattttccacaattcacttgaatgacttggtttttatttgcaataaaactgggctgaatttgctgctgtctccagcgagtcattgcttctcttaatttatttacctggaatcaacttaatcctgtgtgttaggctgttcttgtgttgctataaagaagtacctgatcaggatctgggagaatttgaaaaaacaagaaaaactagaaaaataaacaaaatt

SEQ ID NO: 147131 - DNA, 1119 bp, Homo sapiens
taggccagtgcggtggaattcctaaagtaaaatgatcaataatgttttgtagcattaatgaaattattttcaagaaatgtgtccaggggtagcacttggctatgttgacgaggcctttggtaactcagagagctcttggccctgatggggacttgcccttacgctttcttttatcaggctctgagttcacacggagcctctggcactttccctgctgtcttgggagaaaggaaactggttgccgcggcaggttggtgggaatctgttgctgggaaccaggctgggaaccgacctggtagtgaacaggggcccagtggggcaggggcttggggcatgtttgttggtctatggggtttgtttcctgggaggaatgttcagggaatggtctttcccaagctggcttggtgctgaagctcctaattatcctccacagcaccgtccaaaaaggcctaacccccaggtggggaggaatgctgaacacccagctcccaggtggagttggtggtccttaatttccgaagatgccaggggcaaccctgtgaccctttgaaggcaagagccctgcaccccagctgttcccgtgccagccgtgggcaggggctgcacacggaggggcaggcgggcccagttcagggtccgtgccaggccctcctcagtgccctgtgaaggccctccctgtcctccgtgccggctgggccacccagccaccagggagtttcctatggccaacccctagtgattaattaaaggaaccactgtccagttttatgaacccatatgcctcaaatgaaattcctactttaggaggaaaggattggaacagccatgtccacaaggcctgttaattaacagagagacccttattggatggagatcacatcctgttaaatagaataccctcaactctacgttgttttacttggagataaataatagtttcaagtttttgtttgtttgttttacctaattacctgaaagcaaataccaaaggctgatgtctgtatatggggcaaagggtcagtatatttttcagtgtttttttttctaccagctattttgcatttaaagtgaacattgtgtttggaataaatactcttaaaaaataaaaaaaaaaaaaaa

SEQ ID NO: 147132 - DNA, 866 bp, Homo sapiens
aatagttatattttttaatagaggtacatcactatttaaatttttggaagcccatttgcacatctctaaaaccactgcaaaatgggtccatattggaataggtccaatatgggtccaattggaataagccatactggaatagggtgggcccctaatcccatacgactggtgaacttaaaaaaagatggcctcacccaaggagctgctgcccacacggggctgctggacaaggtgcagagagatgtggcagggaaaggggaccagaagacaccagtgatctgctaaataaatgacaatggtgacgtcgcttccccagtggccctgcagagtgtggggcggcagtggctggcctttagggggcagcagggtgcaggggaaggagcaggcctttgaagtcacgagatgctgggttaaagtcctagttctgctgttcactagctgtgggccttggcaagcaacttcacttttctgagcttcaatttctgcttctgaaaaatggtgatgaccctttggtcatacggcaaggattgtggcaactgaggctaagacctggagcagggcagctgctctcaagaaacagttgctactgttaccattccacctatgtggatgccacaaagtatcctgggaagaagtgggctttggagagagaaaaaatggggtttgatacctgatttcaccatttgtaacctgtgtggcaagttatttagtgtcagttttctcaactgtaaaagggaataataatcccaaatttgcacagtggttttgaggactaaatgacataagttcttgggctggtcaaactcaattcccatgccatgttcttctcagtgttgacctggtgactgttcagaggacatcagggt

SEQ ID NO: 147133 - DNA, 518 bp, Homo sapiens
taaggggagttaacggggccagtttagagtaaggcagctgaggcaccttgggtgcacaatttaaggaagagcctctcttgcctcccctagtcccctgtcctggaagctgggagagctggtctttaggggctcactgtggcacccaaattgcggcccacccatgggtgaaccgggcttccctatgaacactgagaaggcccttgtggttcccacacacactctgaacacaggaaggaagaggaggcatagactttgggccatggtggccccaactgctccctagttcaccttccccaggcttgtgaagccctgccacccctccccaagcctgggttcctcctcttccctcttcttcttcctctcctgccctgattctatcaggacccaacaggaaacctgaacccccacctggcatccctccccagttctaccttcaaacctctctctgaaggcagatgcaggcgccctttaatgactctggccgatgtattctgtgaggccatgagggaaatcctggg

SEQ ID NO: 147134 - DNA, 687 bp, Homo sapiens
tgatgtccccacagttatagggtgatgtccccacagttatagggtgatgtccccacagttacaggtgaatgtccccccagttatagggcgatgtcccccagttataggtgaatgtctccccagttatagggtaagtccccacagttatagggtgacgtccatcagttatagggcaatgtccccccagttactgggctgtgtcccccaattacagggcaatgtcccctcatagtgtctcccagttatacagtattgtccccccattataaggtagtatccccagttactagatagtgtcccccagtaacaggataatgtcccccaattgcagggcaatgtcccccattatagtgtccccaagctataagctggagtcccccagtaacaggataataggatagtgttccccagtacagggcagtggtccccagttactcactagtggtcccctagtaacagggcagtgtccacccagatacagcctagtgtccctcagttacacaatagtgtgtcccccagtggtaggacagtctactactgagtcctcctggcatgagtcgagctgagattaggatagggtaatgacccttcagttttggggaagggaccatagctcggccagtgagaagcttccagctccgtctggccatatccaggctgctgagggtcctgggctctgtccttaaa

SEQ ID NO: 147135 - DNA, 651 bp, Homo sapiens
ggcacgagacttaatagtcaattaatgagcgcttttagccatatatttgctactggtctctgaatgctgccagatttacagctctattaaaagttacataatcactttaatgattggtttgcatccccttgtttgacactgttaacagaatctctgtttctaagatgaaaggctggtctttctcatgtgtaacactagacaataatagatgatgtgttacactagtgtgtaacactagtgagcccttcttggtcaacttttaagtttgtgttataatagcatattttgaggaaacccccattcctcatattttgtgaaaaaaaaacaaaacattgccatatgatgggggataaaatctaacccaccaattagtgtggtagaagaagctaagaaagcaaataattaaatatccagatgatgaacacgctatttttatttatttattaaaaaaagattaaagttctctagctatttaacttaaggaattatttttaacaaaattgtatttattgtttaaaaggtaacacattcaaggccagttgtggtggcctatgcctgtaatttcagcactttgggaggcttaggagggaggactgcttgatcccaggagtttgagaccagcctgggcaacatagtaaggcccatctctac

SEQ ID NO: 147136 - DNA, 604 bp, Homo sapiens
  misc_feature (1)...(604): n = a,t,c or g
taatctcttactgtggctcataaaatccctgtaaggcacttaactccatttttcagggcgtgtaaactcgaggctcttggcacaaacatgctctcgcccccacagtccaccgcgcagggttgtggggagggaaagctggaactcaggcttccccaggcgccgctgacaatgtgcctcctccatattgaacatctggtttttgtggatggaaggcaggcactgatttcccaacaagtaaaaaaccctgccctttcctaccccaccctaacccccccctgcctccttgcaagtggcaaaaaggactgtccctatttgtaatttcccactctttaatatgtaaagtaggaatgcagctgcctagggggtctcaggtcaggctcttgctaaccaaaatccaaatccaccggctttctctgggcagggcagagcngggggcatgtaatctatggctgcttaagggagcggctttctggtgaggggagcagcctgcagtctgctttaattgtggataaaccatgcacgccggatactccaggtgggaagaggaaaatcctagatttgggtatgagacacatggggattagtggcagataaataaaattct

SEQ ID NO: 147137 - DNA, 289 bp, Homo sapiens
  misc_feature (1)...(289): n = a,t,c or g
gtaaatcttaatatttatgtatgtattttattattaccggttttccatttatgatggtaatattgtttcttctaagaatatttatttttccttctaaatattgagnnnnnnnnnnnnnnnnnnnnnnnnnnnnnnnnnnnnnnnnnnnnnnnnnnnnnnnnnnnnnnnnnnnnnnnnnnnnnnnnnnnnnnnnnnnnnnnnnnnnnnnnnnnnnnnnnnnnnnnnnnnnnnnnnnnnnnnnntcctacctgtctctccccctagtctttggtaacctttgttatactgg

SEQ ID NO: 147138 - DNA, 417 bp, Homo sapiens
tatatatatatatatatatatatatatatatatatatatatatatatatatatatatatatatatatatatatataatcttgaccagtcctggtcatttgctcccctccttgtctgtggaccatgataagcccaagtagtgacttcagagctgggtaacagaaattaaagtgaaaagacctttacgtggagaatttgcatgcgtaatataggaaggtgttctttaggtatgttacaggattactttaaaccatttgactttcgctccaaagttatgttggtagtatagcaaattatgatgaatagctttaattgtatgtttaaaagtctcatatgttcacatgcttaaatctgggtatcagaatttaagcaattcttgaaatgtattgtctccttaatatactaattacaaagcaaa

SEQ ID NO: 147139 - DNA, 363 bp, Homo sapiens
cttgccctgattgaaggctttgcccacatgctggaaggccccctcccaggaaaagtactctcgaaccagcgtctgggtctcctcgctgccaggatccagtttccgccatgtgtatgactcgtagtccacctgccaatctggactcagcggaaaggcaagctcctggcctcggaagacccagactccagaaatggagctgctatgttgtgcaaccatcgacactatccatttctagaactttttcgtcatcccaaacagacgctctgtattcataaaaaaataacttcctacctgtctctccccctagtctttggtaacctttgttatactggtaaactttgttgtgctctctgtctgtgtgaa

SEQ ID NO: 147140 - DNA, 1533 bp, Homo sapiens
caatgtgagaagtggaaaatagtatttaattgtagtttggatttgtatttctattgggttgtatacttactgattaataataagagctctttacatattaaggaaattaacccttttcaaatacattcctatttctcactaatctttaagttttattgtaatattttgctctttagtttatatatatatgtatatatatatatatgtatatatatatatatacatatatatatacatatatatatactaattttcttttatggttcctggattttgtgagtagtttgaaaaggctaatccagctgaagattttgttgttgttgttaaaccccatgttttctcctaactctttttatttttattttggaggactctatctagacttaattttagcataacaagtgacagggttagttagcctgttgtccttacaccattttctggctaatacagctatttaactattgatctgtctattcacgtgccagttcctaatggttttacatagtgtaatctgcacttcaaaatagcgaagggaagccctacctcattattctacttttccagaattctcctggctattccaggctgcatgtttaccttaaccttccctgtgatgtcttcatgccgttgtcttcttatgcaagaataaggtacgtctttccatccactcacgtctatttaatttgactttgcattacacaggaaagctgggtcttgggtctgtctacctcggtatctagttgtcctcactgccccctagccgaccccaccccatctgactgactaccccatcacagagtacttttatttacgttttgctctgcctaatggttacttgatactgtcacgccgacagtgtccagttcagtggtctttgcagttggaaatgctcccgtacacactgtcttgttaaaaatgccagtaagttcatacaaacccagcttgcacccaaggttcacattcagagagcgtaggggctgggggatggggttgtttttccaaggtttcttgccactgtgtgggaaggcttctttcccactgggaagttctgtgtaccccggaatgtcggagtggagtcctgttctagtgtccagcacctgaccctgtgcccaacccctcaacagcctattcctgctgtccacagcctgctggaactttttacaaaatatgttgccatgctggaccctgggcactggacataagccccctggcagcctttttcatgtcacccaaaggggtaattgtcctactggtggtctgtaagatgagttagggtgacttgctaatagacattgtaaatcttaatatttatgtatgtattttattattaccggttttcccattttatgatggtaatattgtttcttctaagaatatttatttttccttctaaatattgagataaaattcatgccttttgaaaatgttcctattcagtggcttttagtatatttgctatgttgtgcaaccatcgacactatccatttctagaactttttcgtcatcccaaacagacgctctgtattcata

SEQ ID NO: 147141 - DNA, 2258 bp, Homo sapiens
tcatcccagcagcttcgggctctcggttgtggtttttacacctatgacaaatgacatggccaaacacaccataatgtctgaaggtacaggtagccctaagcgcctgctcgtcacggaagagactgtcttgagagcacaggtctgttgcagcgtgggaaagcctgcgttaccactgcgcaatggctagactgaaacgtgcggctttgcagtggatctccctgctcttctgagggagagggatttgaatcttgttgctttagtagcatcttctggaaggaggtcgtttacgtaaattctgttccaaagctctgtcgtaacttgcttctaaaatgaggttgatactaaacctctgtagaggcgcaggatgcaaccgacaggctgtggccggacagctgctgcccagcacatggagcctgcacgcgcacggtttggccaaagaagcccccatacttcccggtgaaaaagatggagtcttgctctgttgcccaggctggagtacaatgatgtgttctcagctcactgcaacctccctctcccaggttcaagtgatctcctgcctcagcctctggagtagctgggattacagatttccagaagctgttctgtcaataacaaagtctcagagaaagaccgcttaaaccgacatcactaataccattcttgagtccaatttgaaaaactagggtcaaggtctgcagaggcatttgaaagggacaaggaaaccacccttgattacccatcgtgttgaggggaaaatgctctatttcaccattcctcagcttctgcttctgggttcagagttctctctatattggagggtgttccaaagctagagtgggctttatccacttttattaacacatctgaatgtgaaggtcaagagaggaaagtgatatgtcctaagtcagagtagagtcaacaagaaaataagacaaacagcgactgagcccctggtgtatacttggcattggccagctactggggatatggagatgaagaaaacataacccttcttcaaggagcccaacctaccaaggtagacagacatatagacaaatagatacttgcatagaataaaagaggaaagaggggatcaggtgtgaccatgtgtaactaaggtaccctataaaccctcctggcaacagatcatattgccctttatagtggggatggtaatcccatctgaattccacaggtactttgcagtcataccacacccatgtgtctgtcggtcctgactgtaccatttataaacagcttcactttcagcagttctcagccctcttaagctagggtcattgtcagtagggatactgcttcataagcaccaagcacgaacaccaaaggagaccatatggggtgaaagcaaccagcactgccctggcgctttcataaggttcttaagagtttttatctttttactttccagtcctaaacacagcactggcctggctttttggtttttggttggcttggtttgtttttttccttacccgtgtttcacccaaacttgtggtcccaaataggctttggggctgatgccaaaaatatcctatgtgggaagagaagagttgttcctcatggagggccttcagatgagtgcctatagactctcctaggcaactcccaagaggcttcctcaagcagggtgggcagtgagagctgcgtatggaatcaatggacaaactgacagggactgctttgaaagacagtactcagttgagtatatatattctcgctctaagggctaaaagtttataatcagcccttaaacactctgtgatgggatctctaggatcatcttttgaagtaaactatattttacaatgtgatataaatcaagtgagttttttttttaattaggaattcccgtaagtataaagccattttaagatgtacattttagagactagctattgttaagtggtctgttacatttgtgtaaaccataaagatctttccagaggaagcaagtctctcataccagaatttgaaaccactagccccaggcttgagtaacctagatcacatgaagctgacttcctctgaggagtctaggacctcagatataggtgggagcacacaatcacccttctggaaacagctaagacttgtggctcaggcgtttgaccttgctgacaaaggaagaggtcagggttgacgagagctccaggaaagaatgacagcgcctctggaaggcaggaagaaagttactgtaatactttatccttagggtggaacaagaggctggggaaagc

SEQ ID NO: 147142 - DNA, 682 bp, Homo sapiens
gaggctgcctctaggcaacacccagggggtcaaagaagacagacgcagagagcatgagctgctggtcacctctctatccccagagcatcgtagatgcttgataaatgtgttaaaaatggatgacagtttcaggaatagatttaggagtaaataagagatgggcttgaaatttttctagaaattctgaaaaataggtgccgagggaagtgcagtgccagtgagctgcagagtttgttcagcctgtgctttctgccagaggtaattgacatttctcctcactacgaatgcaagctcgacctccctcctttcgcccttatctagtcctgcacccaaaaaactgctggatttttatcttaataaacgactcttggatggttcttttctttgaagcttctctgcccactgttcctagtttggtgcaaacaaccatctttttgcttggaatactccagcagcccctcactgacctgccctcatctacctctactcctttctaatctcttcacctctcagcagtctgagtggtctttagaaaattcctatcatggccgggcatggtggctcacacctgtaatctcaacacttggggaggctgaggtgggaggactgcctgagcccaggagttcgacaccagcctgggcaacatagtgagaccctgtctacaaaaaaaaaaaagtcgacg

SEQ ID NO: 147143 - DNA, 476 bp, Homo sapiens
cttaatgcagggtcagcaaacttttcctgtaaaaggccagataggaagtatttttggctttttgggctgtttgcttttgctactactactgtgggaatgaccatggtcatggctgtgttccagcacaacttgatttaccaagacaagcctgtacccagccggctcagcccacagcactgtcctatgaaccttcgtgcacggcattctccacctcagtatctgctttcggggaacccaacctgcgacagtgcttctgtgtgttttcagtcctgcaggtttgaactctgactttggagacttttccagttatctcgtggaatgacagattgtgcctgtatgatatcaggcacaattaatgcaaattaggcagacctatttattctagatgtgaatttgctatttattttaaatgttgattttatgtgttatgtgcctctgaacttattgccaaataaaagtttaggttgtaaaaaaaa

SEQ ID NO: 147144 - DNA, 2198 bp, Homo sapiens
  misc_feature (1)...(2198): n = a,t,c or g
cgtgcccagcctattcatgactcaactgggatctggcacactgcactgggtgttttgttctctgatgtgcacattgatgaatgcatattggtacaagggaaatgaatctgttttcagccatttaaaaaattgtgttgtaaaggcaaacaaaaatagcttgaacatttaaaaattactgtttaatattgtttgactgattttctaagaattatgtgaacaatgatgagtccagggcagcagcaatcacaaatatgacagtccagcaaggcccatggaggtccctttggaagggacttgcacagctgattttctttttccagtgttgtttttacgggtgaaacgtggcttttgaaatactttagttgtttggcttagagctcccactttccccctaacatagtgcctggtctgttttttaaaacattttacccttcggcactattttctgctattcccattaatattatgtaacataaaccacttgctactgatttgggcatattacagactacaattactagttgctttgaatgcattggcactcttaattattgcaaaggagaattgaaaagtagtcttgtggtcctagttaatttaagctttgggcaaactaagtggcttttcttctgtcctcttctcaaaaggccttttaaagcagcagagactggggctaaatactggaactgaattccacttttctgcctgctcatttgctgccaaagaccacttggggctccttgtctagaatgctctaagacgaaatttggccagacacagggttccttgattgttctgttcaacctaatagagaacctacattttgccttcttaatatcgactttctttttgtaccaggtttttctttctttcttttttgcccttagggagcttagctcaaaagttcagcttaacctttggacactactaggtgtccattaggtaacagtaatcctttgacactactagtgtccatttagggaggcttaggctcaaagttcaggctaacctttggacactgctagtgcgttcaaggaaagggtagggaatgaagtacccttaatgcagggtcagcaaacttttcctgtaaaaggccagataggaagtatttttggctttttgggctgtttgcttttgctactactactgtggggaatgaccatggtcatgggctgtgttccagccacaacttgatttacccaaggacaagctgtggggctgtatttgggtcctcaggctgttggcttgctagcccctgctcttaatgggatgtgtttggccggcaatggccaagattcccttgctgagaacatgcagatgaataaccttatagctgggatgcagagaggagaaagttctgtaggtaataagtgcactgtattccctctgagctacttcctgggcatagttacatgtatggccagtgtgtgtacttgagccatcaggtcagnancacttgttgaatatccctctcattgcattagtttgtaattgtgctagtgctgggtgctgagctcagctgcccggatgacctttccagactgaaggacatactcccctaacagctgggagtgctgctggctgggccatttacttccagcccttatggaggagtttcccctggcttgaagaggccctggcctgcccccagatcatacccccttcctgccctgtaacccttaccggctccatatggggtacaaaggtctggcctccctaaccccaaacttgggaaaaaccctctggggcccatccccagctcccagaagcccccttgtgggggtccagtgaaaacctccattgtggcccacaattacagccccagtgccctctccctgacaagcctgttaccccagccgggctcagccccacaggcactgtccctatgaaccttccctgcacgcccattctcccacctcagtatcctgcctttcggggaaccccaacctgcgaacagtgccttctgtgtgttttcagtccctgccaggtttgaactctgactttggagacttttcccagttatcctcgtggaatgacagattgtgcctgtatgatatcaggcacaattaatgcaaattaggtcagacctatttattcctagatgtgaatttgctatttattttaaatgttgattttatgtgttatgtgactctgaacttattgccaaataaaagtttgaattgtaaaaaaaaaaaaaaaaa

SEQ ID NO: 147145 - DNA, 441 bp, Homo sapiens
atttcctttctcattttctttgtgcttctcagaggaaattaaaggtacatgtataataagttaccctgcatagtctagtcattttatttagtgcacatatatgtaggattaaattgaatataacaatcaacttacaaatgtactctgttgtacatccaaacttccatcttgacgttacaataccaaaaattgtggttgcactttgttttagaaagaaatatgcatttttttgctttatgcagcagaaatatagaatgtaatctgaaataatacattatatttttattctgtcagtagtcttaaatgtgaatgaaataaacagtattattcaaatgtattgacagacgtattttgatgtaggatctaggggaaccttctcaattaatttatttctgtgcagtctatgctgctagttccacaagaaagaggcctaaaatatta

SEQ ID NO: 147146 - DNA, 686 bp, Homo sapiens
cgcttcagtggctcccggtcaaattagcaagcaagagaagtcacaagaaaaaatacttgatgcttgtgaaagatgaagcaccgggaacagatgtgctctcctattttcactccgctgtggacacgagtcttacaaataatgcatttcctatagggcagtgatcagagagatgatgaagaatttgggacaaaaattaagtggtgtatgccaccacgaacacgcttcaggaaactgcaaaggagctgctttattttgacccaataatggggattcctgcaggaaggctttgccagacaccagatagaccatgcttccgggtctcagaaacagaggcagggtgcagccacctagtctacattttaaaagctaaaaccagtagcctcccattactctactgtggcaaatgtgagcaccaacactataaattaaaaatgtcactgaaccagttataataatctgctaaataatttgaagaacattgagaccttcaggaaagagctcagcagcctgagtcatctctgcaatagaggacaaggtatacttaagagtctcatcgcttggctgggtgcagcagctcatgctggtaatcccagcactttgggaggccgaggcaggaggattgcttgagcccaggagttcaagaccagcctgggtaacatactgagacctgtctctccaaaaaaaaa

SEQ ID NO: 147147 - DNA, 603 bp, Homo sapiens
tgacatcaagactgactcatgctgccctggttggttttggcactctccctgtgccatcctgccatcactgaaagcacaggagtaaaacaatggcctctaataacagaccatggtcagctacctgcattatcacaacctgacatcacagccttaaataactcctgtaatttccatctgtctcttgctttcatgtgtgttagaaaaacagccaatctctttataaaacagccctataatcatacgtactcttcatcttctaagtgtccatgcagcttgaatcattgcacacagtcttctatgagttatgaaaataaataaaaccccctcttttccccattttatggttgtgaaactgacacagataacacaaaagggtagattagggaaagccatatcccctctgccacccacctccaatactgatccagctttcctggatcaggccagtagggcgttgaggcttcttactagaaattattgataaggccgagggtggtgctcatgcctgtaatcccagtgcttttggaggtcaagatgggaggactacttaaggccaggagttcaagaccagcctgagcaatgtgacaagaccccatctctaca

SEQ ID NO: 147148 - DNA, 407 bp, Homo sapiens
cctgaacaagttttatggcagacaaaagtgacctattctggaaaaaaaaaaaaaaaagccacaaaaaggccaggcgcagtggctcacacctgtagtcccagcactttgggaggctgaggcgggtggatcacctgaggtcaggagttcaagaccagcctggccaacatggtgaaaccctgtctctactgaaaatatgaaatttagctgggagtgatggcaggtgcctgtgatcccggctgcttgggagactgaggcaggagaatcacttgaactcgggaggcagaggttgcagtgagccgagatcacgcccctgcactccagcctaggagacagagtaagactcttgtctcaaaaaaaaaaaaaaaaaaagccccaaaagacccccccattaaagcattttcatagtg

SEQ ID NO: 147149 - DNA, 1006 bp, Homo sapiens
ttgccaagcagcaagaatgttcgtgcttttttccagagaggggaaccccactggtttttgtggaaacaatggaaacttacagatgcctgcctgggatgatgaggcacattcagaacaaatgctttttttttttttgagacagagtctcgctctgacgcccaggctggagtgcagtggcgcgatctcggctcactgcaaccaatcacctccgaggttcaagtgattctcttgccttagcctctcgagtagctgggattacaggcgcatgccaccaggcccagctaattatttatttcttttgtattttttagtagagacggggtttcaccatgttggccaggctggtctcgaactcctgacctcaagtgatcagcccgcctcagcctcccaaagtgctggggattacaggcgtgagccaccacacctgacccataggtcttcaataaatatttaatggaaggttccacaagtcaccctgtgatcaacagtacccgtatgggacaaagctgcaaggtcaagatggttcattatggctgtgttcaccatagcaaactggaaagaatctagatatccaacagtgagggttaagcaacatggtgcatctgtggatagaacaccacccagccgcccggagcagggactgtcattcagggaggctaaggagagaggcttgcttgggatatagaaagatatcctgacattggccaggcatggtggctcacgcctgtaatcctggcactttgggaggctgaggcaggcgaattacctgaggtcaggagttcaagaccagcctggccaacatggtgaaactctgtctctactaaaaatacaaaaaattagctgggtgcagtggcacgtgcctgtaatcccagctactcgggaggctgaggaaggagaatcacttgaacccaggaggcgggggttgcggtgagcagagatcacgccactgcactccagcctgggcgacagagtgagacttcatctcaaaaaaaaaaaaaaaaaaaaa

SEQ ID NO: 147150 - DNA, 1019 bp, Homo sapiens
tttttttttttcttgtgcaaatataaagaggtttattcattctgtcattaggatacaaaatagaacatgtaaaaggcacccctcccgtcgaccccacagttcagtgtgaacaccgagcgctcgtccagggaaggctgccatgcacggcgtggctgcccggttgaaggcagccggcttgagccagcctcaggtctcgaacatggcacagctggtgcacagcacttttctcgtacatgtcactgcagctgcgacagcgtcagggaggggagagaaaagctgctgtcaggggctgaattgtgtccaccaccccccaccattcaaacgtcaaagtcctgaacccagaacaccttcagggacatgaccttatctgggagacaggatcactgcggggcatcatcagtctagatgacggcactgacatgggggccctaaggcaacgcgaccagcgtcctataaagactgcgtgaagagaaggacacagagaaaggaagacgacatgaagatacagggagggggcagctgtctacagggaacaccaaagataaccagcagatgccaggagagaggccaggacaggttttccattgcagcctcagaaggaaccagccctgccagccacccttccttctcagacttctggtctccaaaaagccaacgtggcagtaccttctttgctgtctatgcccactgggtctgcgaactcagttacagcagccctagctgattcccactgccgatcaattccacatggggcccaacctgggtttccagtaggatagaagctctccaaagaaacctccagatgacctgccagaattcaccgaaccacaatggtttacactgaagcacatcaaacagtgcttttctgatatatcaagactaagggtagggccgggcatggtggctcacgcgtatggtgtggcttacctcagcactttgggaggctgaggccggaggatcacctgaggtcaggagttcgagaccagcctggccaacatggtgaaactctgtctctacta

SEQ ID NO: 147151 - DNA, 964 bp, Homo sapiens
ttttttttttttttttttatgagtaaagttaaactttactttacagtaaattttttttctatatacaaagaattacagtacattgtttatggggactcctaacacagggctcccctctttttcactaggagtttcacttacagctgacaatctatgggggcggggggcgggggggcgcggcaaaaaagcaatgatggaccttggctgatccccccgacccctttcttaacaatataggtaggatgtctactcgtcaggcttgccctctttgcccaaagacctaggagggcgctctgccatgagctgcttgtgtgctgccctccccaccttcagcacactcatctacacacaccacaggtagcacccacctcggatgaggaccgccttgctctgggcctgccccaacctggggaagttggaaaacataggaaccatttatttcgtgcttctactctctgtgcccatgtcttgtccacgaaactttgctgaacttccaggaccttacacctgaagccccacaataacctgatgttttgaaagccatgggaaagcagctctagagaaggaaccacataagcagaaacagcgcatgttaaactcgaaacacttcttccgaggttgtggatttctagtttaattctttccacttccttagaaaatactacccttaatcttcataagcagtagaggggcttccatgagtggaagaggtagagaggggcagaagggagctgaggaagacccaacaaccagagctctctaacaacctgctccaggcagcgtggacggaggctatggacaaggtggccccagccctgagaaactcaatggccaccttcacctggatataggatctcttccacctctggattgcactgggccactccagggttgggtgcaggcttcactgaggatcttccttctccccacttttaacaaagcctcaaacttttctacataaaat

SEQ ID NO: 147152 - DNA, 867 bp, Homo sapiens
aaaaaaacaaaaacagaacaacaacaacaacaaaaacaaaccactttccaatacttgcaccttagttccagcccttttccttgttagccatacctatgatgggacatcatctaagatgtaattgagggccagacaccttactggatttcatccccagacagaggtaattcctttcttctctgagcttgtgcaaccctttatctaggcctttcttaccacttactgcttagctaactaacatcagctattcatttgcaagccttggttctcctctattactctaagtttcagatgattctctttctcccctacaaagttctctgcccatagggtatacttcataatttctatgttgacttagtcaacagagaccaaccccatatataaacataactaatttatatattcataaacagagcacagtttctgcttggtttcctttgattcttgtttgtcctttgatcttcagccatcagacctgggtagggagccagtgccccaccggatttctttgtctggttccactggggcgtaatgagtaccctttatccccttccatctcattaggcagaattcttcccctagatcctgggaatgggttatggaggcaagttttaagacctctagcaactgccctagcttactttagccaagatggagtaatttacagcccattaggcccttaaaatttggcttgcttctgtgttctcctggagtttcccagctcattctaaagaggtttcaggaggctgggtgcagtagctaacatctgtaatcccaacactttgggaggccaagacgggtggatcacttcaggtcgggagttcgagaccagcctgggcaacatggtgaaaccctgtatctact

SEQ ID NO: 147153 - DNA, 561 bp, Homo sapiens
ggtcagtagagaaattatggtttatgatggtaggcagctccttcttccccctcaagccacgacactgaatttagcctcagtttgttgttgccattcagtctagctagagcttacaaaaaatacaaaacccccaaatttggattcaaatttcaattcttgtacccatcaccagacacacccccacatggtgattactaatgattattaaaatactctttgggcccagtatgcaaaaaggacatctttttcctgggaccagcacaatctttagcctgtaggagaagcctctgtttaatgcagagctgtggaaggtttacaattaaatgatgggaggtggtattatattcatttattgaaaaggaagccttgtgggattaagcttagaggaaagaatttttgttgttgctgttcagcccagtctttttcataaaaaatgcttgtggcagggtacagtggctcacaccagtaatcccagcactttgggaggccaaggcaggagcgtagcttgaccccaggagttcaagaccagcctgggtaacatagtgagaccctgtctctaaa

SEQ ID NO: 147154 - DNA, 1064 bp, Homo sapiens
gctgtgttgcctaggctagcctcaaactcctgggctcaagcagttctcccacctcatcctcccgagtagctgggactaccaggtgcatgcgacccagcccagctcagtatggttttaatggtaaatatttcactaagcccagtacttattttttacacagtagttggtaattcacagaaggtagcaaacagaccacttgtaacaatccaagatacagttttactgagcttatattcatatactgaataataattattaagctatatacttacagaaaagagggatatggaaaatattaatcaagtatgacctctactgggtaacttttatgcactgtcaacaagagatctaagatttttattgagctcctaccataaagacacatcatttcaattcaaccatcagtagcctctactttttaaaaaaatatttttatttttttagtggcttgaaacagcaacagtcattattatctctcatggttcatgtgggttggtgtttgggaagtattcagtggggtggttctgggttggggtgtccccgtgatgttgcagtccgatggtagctggaaactgccagtccatctccacgagcttcttccattccacatgtcctggtacccgccacaggatgatccaaatatctggagtctgaaacagctggggctccctgggtgccctcccctcctatctctgtgtgatgtctcctacatggtctcttctgcatgacggcttcatggtagctggacttcttacatggtggctcaaggtgtcaaagacacatgtccccaggagagaaagacagaaccctaggctgaaggaatattacctttttctaactcagaaatcacagtgtcactttgccgattcgttataagtatatatctaagatcaacccaccctggaaggaaatgacagcctctattttaaaattaccttgttggaggctctcagattaggaccctagtgatgttcaacatgcctccgaatatctcttggaaatgtcaattctgcccatacaatgtctgtaatcaagcgaaagcgtggtcgacacaggaattccgg

SEQ ID NO: 147155 - DNA, 366 bp, Homo sapiens
ccccaccagcgggcactggcccacagccacggccggggggccatctagctggagagagaagggacagcaactccatccgctcctgcaactgccggacgtgtgcctctaggtcccggttccgagcctctgcctcgcgtagttgactgtggggaggtaaggacggaacaaatcaggattcccacctgcccaaggcctttgccctggaggctctcgcctgaccacttggcacctttccttccatggcttgtttctccttcaccagcgctcagctcaaagatcgacttctcagatccccagcaacacacacacccttacttaatgccccactgtaactacagagaccgtcccatgtctgaagtaacctcg

SEQ ID NO: 147156 - DNA, 603 bp, Homo sapiens
ctcccttccctacctccctcagccccatcccttggagtttggtcctctaaatctacacagggaccagagggctggtgctcaaacactaacacaacctatgtccctctgctgctcaaaatccctccagctccctaatgccctcacggacaaaaggccttgctgggttttgtttcctgctggcctctccagccttctcaggaatgattcagccaaactacctttcaggaacaaatcaggattcccacctgcccaaggcctttgccctggaggctctcgcctgaccacttggcacctttccttccatggcttgtttctccttcaccagcgctcagctcaaagatcgacttctcagatccccagcaacacacacacccttacttaatgccccactgtaactacagagaccgtcccatgtctgaagtaacctcgtctctccgtggtttctgtctgcttctgttcaggaagtccctagagggctctacagtgcacgccacccgggaagccctcaccttttctctcccaattgtccctgacggaccccctcccctccaccaacttactgtttcatcctgtggggacaccgagggctccaggctgggcgct

SEQ ID NO: 147157 - DNA, 1983 bp, Homo sapiens
atgaacgtgaggatgaatcaggcagtgccaccaactgctcgctgggtcctgcccttcccaggagaagagaaagtccaccaggagagacgtgacccacgcgtcctgctggcgggctccggcatgacgggtgacttcttccgagtctggcttctgcagcacacagggcttcgccagcacccagctcctgcagcatgggcagctcctgtgacagcaggcgcccgcagcctgcaaagcgtctccagtgccgccgcctcagtgaacctcaaccagcggcacctagcagctttctctgccaccctcttcaggcgctctggagacctgacgatggcgtcgggcccgggctcccaggaacgggaagggctcctgatagtgaagctggaggaggactgcgcctggagccaggagctgcccccacctgacccaggaccgagccccgaggcctcccacttgcgcttcagacggttccgcttccaagaggcagctggtccccgggaagccctcagccggctccaagagctttgccatgggtggcttcggcctgagatgcgcacgaaggagcagatcttggagctgctggtgttagagcagttcctgaccatcctgccccaggagatccagagcagggtgcaggagctgcatccggagagcggcgaagaagcggtgacccttgtggaggatatgcagagagagcttgggagactgagacaacaggtcacaaaccatgggcggggaacagaagtgcttttggaggagcctttgcctctggaaacagcacgagagtcaccgagcttcaagctggagccaatggagactgagcgaagccctggccccaggctgcaggagctgctaggccccagcccccaaagggacccccaggctgtaaaggagaggggggctaaaggagatcttgtgctgtttcagttgcctgagagcttagaggacgtggcaatgtacatctcccaggaggagtgggggcatcaggatcctagtaagagggccctctccagggacacggtgcaggagagttatgagaatgtggactcactggagtatgaatgcaccaatttactcctttccttacgtatgaacatgcatgtcatttctagtttttgtcactacaaagaattctacaagaaatttgtagacatcagattcacagatgagattgtgaaggtcaaaggggctaagacagtgcctgtccctgaaaagtggaccactcctcaagagataaaacaaaagatccaactcctccaccagaagtcagagtttgtggagaagagcacaaagtacttctcagaaaccctgcgttcagaaatggaaatgttcaatgttccggagctgattggcgctcaggcacatgctggtggggagaaccctgtagggatgttgcccatggacccctacctaggtattcaaattttctttgcagttaatgtgattctggatgcagaaaccgcttaccccaacctcatcttctctgatgatctgaagagtgttagacttggaaacaagtgggagaggctgcctgatggcccgcaaagatttgacagctgtatcattgttctgggctctccgagtttcctctctggccgccgttactgggaggtggaggttggagacaagacagcatggatcctgggagcctgcaagacatccataagcaggaaagggaacatgactctgtcgccagagaatggctactgggtggtgataatgatgaaggaaaatgagtaccaggcgtccagcgttcccccgacccgcctgctaataaaggagcctcccaagcgtgtgggcatcttcgtggactacagagttggaagcatctccttttacaatgtgacagccagatcccacatctatacattcgccagctgctctttctctgggccccttcaacctatcttcagccctgggacacgtgatggagggaagaacacagctcctcttgactatctgtccagtggtgctacagggcctgactga

SEQ ID NO: 147158 - DNA, 1563 bp, Homo sapiens
ggcgtcatacacctgcacccgggagaaaggcgaggctctgcatctagatttacctcgttctcttttgtctccgcttttttttcacatttccttgcgaccctggcccttgagcgacaaaaaggggaagccaaggctggcccgagagaacggagagggcacatggcccctagccacaagtgagagggcttctgctccagcctagccgaagggatgcgctctggagtccggcccatctaggatccttctgccacggtctttcttgtgcccaactataggtggagactggacctcagaagagggagtgggtgcccccgagaactcacagctagcggacagtggaaagggcaggagccggaccaaggtgaggacagtggaactgaaggccgctggttacctctcctgccctccgctggccacagtggagaagacagcccctccctcctgctctgacctgacagtgttcatccatcgccctgtattagcgaagaacaacatcaagctggctagcaaggaactgtatacagggtccagctgggtatcacacttgattcttacccaaagcttagatgtgatccagctcagtatcacaaagcagaacgaaaaggatgtgtttgggctgagaggccatacattggtaagtggcacatgaactgtattttctattgagcattgctggctatatggcaaatttgcataaaattatattgaaattgaacacagctcctgcagcatgggcagctcctgtgacagcaggcgcccgcagcctgcaaagcgtctccagtgccgccgcctcagtgaacctcaaccagcggcacctagcagctttctctgccaccctcttcaggtagttctgtagcagcgcgtttctcatgagacacttccctgtgagcagctttttctacccttgaggatggatttccagcaaattctgcccatgtggtaccacagccacttctctgccattcagtgaaactgccgttgtgccctcttcaaggtctggatctaagcccagggaccaggaaacctcttgcttgagtgctggaactcaggccagaaggtatggctgctgctatgtgctgtgaccagagaatcagagttctctttacttcttaccagccaacctcttgaaaatgcctttttgtttttttgtttttttttgagacggagtctcgctctgttgcccaggcagtgcagtggcacaactgcaacctccagcctcctgagttcaaagtgattctcctgcattcagcctcacaagtaggtgggattgcaggcgtgtgccaccacgcccagctaatttttgtatttttagtagtgaccggggtttctccatgttggtcaggttggtctcaaactctcgacctcaggtgatccacctgtctcagcctcccaaagtgctgggattacaggtggagactggacctcagaagagggagtgggtgccccgagaactcacagctagcggacagtggaaagggcaggagccggaccaaggtgaggacagtggaactgaaggccgctggttacctctcctgccctccgctggccacagtggagaagaca

SEQ ID NO: 147159 - DNA, 501 bp, Homo sapiens
  misc_feature (1)...(501): n = a,t,c or g
ngtcaggctggtcttgaactcctgacctcaggtgatccacctgcctcagcctcccaaagtgctgggattacaggtgtgagccaccgtgcctgacctgtgtgattgttaacatccccatctcccaccaaacactggacttccctccttgggcctgtgtctctcttttctgttcatgccatctccctcagcacccagcatagtgccagtgcttcacgggtgctgggttcatatttgtcaagctgatgtttatcacacacttttaaagggttttttgtttttgtttttgagacagagtcccactctgtcacccaggctggagtgcagtggcacaatcttaactcactccaacctccgcctccagggttcaagcgatcctgctgccttagcctcccaagaagctggtctcaaactcctggtctcaagtgatccgcccacctcagcctcccnaagnnnttccgcggcncttgcntgtcaaactggggtctcattnnnccggccggc

SEQ ID NO: 147160 - DNA, 431 bp, Homo sapiens
gtcgaccacaactcctggctccacctctgagaagatgaagttgatgcacttgttcctgtttctcccacaaattaaactaaaaccctggaccttacatgtaaaacaagcagcagatgattctaaaacaagaaaagaaggcagattggctatgaaccctgggacctaagaaatgatatgatgctgagttccctagatgttcatttggtctcatatatccaagactttcagttaaagaagctagcaggctgagcgcagtggctcacacttgtaatcccagtactttgggaggccaaggcaggtggatcacctgaggtcaggagttcgagatcagcctggccaacatggtgaaactccatctctactagaaatatagaaattagctgtaatcccagctactcaggagtctgaggcaggagaacccacttgaaccc

SEQ ID NO: 147161 - DNA, 452 bp, Homo sapiens
aacaaaaattagccgggtgtggtggcgtgcgcctgtaatcctagctactcgggaggctgaggtgggagaattgcttgaacccagcactccatcctggacaacagagtaagactccatctcaaaaaaaaaaaaaaaaaaaaacagtacttgaaaaaagtacatttgccaggcgcagtggctcaccctataatcccagcactttgggaggccagggcgggtggatcacctgaggtcaagagttcgagaccagcctggccaacatggcgaaactctgtctctactaaaaatacaaaaattagccgggcatggtaccgcatgcctgtaatcccagttattagggaggctgaggcagaagacttgcttgagcccagggggcggaggttgccgtgagccaagatcacgccactgcactccagcctgggcgacagagcaaggctccatctcaaaaaaaa

SEQ ID NO: 147162 - DNA, 1491 bp, Homo sapiens
cgagactccatctcaaaaacaaaacaaataaacgaacaaaaaaacccacaacgtattattttcttgtttacgaggtttcttgtctctctggctccaccagaagaggagcagggacccttcttgctgttgttcattgctgcatcccccacaccgagagcagagcctggcatgggcagaaagtcctcagtcgatatttggtggccccaagcgaatgaagcatccaagaagggaaagctgggggctccccactgcacttgccacctgagtcacattttcagaagcctctggaaagtcgtgcacagcccaggagtgttgagcaatttcggtttcctctgaggttgaaggacccaggcgtgtcagccctgctccagacaccttgggcatggaggagagtgtcgtacggccctcagtgtttgtggtggatggacagaccgacatcccattcacgaggctgggacgaagccaccggagacagtcgtgcagtgtggcccgggtgggtctgggtctcttgctgttgctgatgggggctgggctggccgtccaaggctggttcctcctgcagctgcactggcgtctaggagagatggtcacccgcctgcctgacggacctgcaggctcctgggagcagctgatacaagagcgaaggtctcacgaggtcaacccagcagcgcatctcacaggggccaactccagcttgaccggcagcggggggccgctgttatgggagactcagctgggcctggccttcctgaggggcctcagctaccacgatggggcccttgtggtcaccaaagctggctactactacatctactccaaggtgcagctgggcggtgtgggctgcccgctgggcctggccagcaccatcacccacggcctctacaagcgcacaccccgctaccccgaggagctggagctgttggtcagccagcagtcaccctgcggacgggccaccagcagctcccgggtctggtgggacagcagcttcctgggtggtgtggtacacctggaggctggggagaaggtggtcgtccgtgtgctggatgaacgcctggttcgactgcgtgatggtacccggtcttacttcggggctttcatggtgtgaaggaaggagcgtggtgcattggacatgggtctgacacgtggagaactcagagggtgcctcaggggaaagaaaactcacgaagcagaggctgggcgtggtggctctcgcctgtaatcccagcactttgggaggccaaggcaggcggatcacctgaggtcaggagttcgagaccagcctggctaacatggcaaaaccccatctctactaaaaatacaaaaattagccggacgtggtggtgcctgcctgtaatccagctactcaggaggctgaggcaggataattttgcttaaacccgggaggcggaggttgcagtgagccgagatcacaccactgcactccaacctgggaaacgcagtgagactgtgcctcaaaaaaaaaaaaaaaaa

SEQ ID NO: 147163 - DNA, 576 bp, Homo sapiens
tgtggaaccatttatcttaaaacattgaggtgcagttttcatacaccaaaaccttctatctttttaagaactgtctgtatggtttattgcccagttaatgggttttgatagtccatgttatctcaagtaagtgtcttgtcttagaaatatgtgtgtataggctgggtgcggtggctcatgcctgtaatcccagcactttgggaggccaaggcaggtggatcacctgaggtcaggagtttgagaccagcctgaccaacatggtgaaatccagtctctacttaaaatacaaaaattagccaggcgtggtggcgtgcatttgtaatcccagctacacaggaggctgaggcaggagaattgcttgaacctggggggcggaggttgcaatgagccaaggtcgcgccattgcactccagcctgggcgacagagtgacccttctcaaaaaacaaaaacaaaaacaaaaagaacagataagaaatacgtgtgtatatattctattttgtgtgttttcattccccttatttcattcagtcttccaaatgaaatgtttttaattttgatgaaaaaaaaaaaaaaaa

SEQ ID NO: 147164 - DNA, 500 bp, Homo sapiens
tgggtccgtggtcgtttgtttctccaaggtttgaaaagcagctggcctgcaagctccgtctggtgggccggccccctttgccagtacccgctgtaggaattggccccagttccacttgcaccaagccatgaagaatatcctcgccaagaccttcgcttgatgatgaccttttgaagaaaccctattttctctttaagaaaatggccattaaggccgggtggggtggcacatgcctgtaatcccagcactttgggaggccaaggctggtggatcacctgaggtcaggagttcgagaccagcctggccaacacggtgaaaccccgcctctactaaaaatacaaaaaatagccgggtgtggtggtgggcacctgtgatcccagcttcctgggaggctgaggcaagagaatcgcttgaatctgggaggcggaggttgcagtgagccaggatcacaccattgctgtccagcctgggtgacagagcaagactgcgtttcaaaaaaa

SEQ ID NO: 147165 - DNA, 772 bp, Homo sapiens
tgactcaaaatggatagcctgaggaccattatgtttcaataagaataagatagttcagtcccgcacaaaatctatacttgtattattctgctgtcagacacgatcaggcctagaaatagacacctatttcccagaagggaatactaccagcccagagtctgggccactagaccagactctgagtttcttagaacataggagccactggaggcccaggttgccccaagtgatttcctgagggtctcctctgccctgaagacatcaattagggaaagcaatgtataaacataccttatagccaatggaaaatggaaagcaaaaaccccttaaaatgtcctccagcttcttgggaaaactgtgtacttcccaaggaaaacatgttttgttttgtttcagagatctccaagacatagacccgccctacctgcttacatggaaggacaggtgggtggctgccacagaggtgtgtatgtgacaagtagggagcttcagggaggaggaggccttgactctgcagtgagacagtgagggttcacagccaaactgggggcagtggagtaaacaaaaatccttacaaagcatcacagaaaaaaaaatagaacaaataaaacatcactggttcagaacaactaaggctttagtataattttaaaaaattaaaagtaggccaggtgcactaatcccagcactttgggaggccaaggcaggtggatcacctgaggtcaggagttcgagaacagcctggccaacatggcgaaaaaccgtctctact

SEQ ID NO: 147166 - DNA, 15490 bp, Homo sapiens
  misc_feature (1)...(15490): n = a,t,c or g
tttttttttttttctgaaaagatacaaagttttattaaataaacctggaatcaacagtattattacataaattagacagcagtaaaattttcctagggcatatgtacaaatcacagtgatttccattgtgcaacaaacagacaggattaaaaataggcactcccctccccgaccccccatgagaaggggtcaccccgcggggttcccagttctggctcgccaaggggtgcacaaacctgccaaggcactctgcctgtgtgcgcggcatccagcggcagtgacaggggccccagaagcacgttggcaacatggtgaggctgcccagtgttcagcgcaaagaaagaattcagctacgacagttgagcagagctcaacagccatctcagagcacaaggactgtggaaaggcttcaagtctcatctgctaaaacacaattgtaatgccttttacatacagaacagacgtgtccaccatggaagatcaaactaagcctcaacagaacttcccaacacacgataatttacagaaaaaccatgacagagcatccctgctattaggaagggactgttctgcggggtgcaaggccataaggtttgcaaagcaaacttgattatgaaaaggcttggtgaaaatacagcccctcaccttcaccaagacacacacacacacacacacacacacacacacacacacaccccgcaaagaaactatccaaatgcattaagacacctgttcgtgtgcttttcttcttgcttttcttaagtgaatcccatccgtttaacttagactaattagaaggcctgcttgcctccatcagcaacagaaaaacagtgcatacgactcctccaatgtgtgtaaaatgcatgctaggtagcttgaaggaaaaacgagagcaacccgggcaccccatttcaaatctctacaactggagaaatcaaaggctgcaaggactgtgtagacctgatgcaaagttaactggctgcaaaaatacaacccaagccagtgctgtcttgcaccctgttcactcagtagctggagcaatgaatgattgtgacattctggtggggtatttgtgcagcctgaggtgcacctggctacagagtggagccttggggtctttaacagtattaagccatagttcacagttacaatggtccaaagaattacaggccatgtaggtcaaacacagaaatggcgaacacatcccaaaccactcaactgtttagttccactggtgattttttttaatggacagtgatttcaaatgatttggtgtttttgttcttgtttttgctttttcttcaaagcaaacaaatgatttggtctttaagtatggacagaaagaaacaaaacgctgaatgggaaattcagtaacaagtgattgtgcagttgtttgatgggcatggagagggagtggggctgagctgcattttgaggggatgaagcgcgcaatcttaccccactgctggggggtttctgcttcttattctatcatgctgacagcaaatataatttgcccatcgctggctatagatatgtttaggctaagcaggatttagacttctgttgcgaaggaattagaagaattcagtagagacagtgtatactatttggttgtgactttatttccttcctggctttatcaatgcctatgaaagcaggccggtggcatttcccttcagaaaaacaagacttgccccaatacacttcttcttgtaacatatccatgtcctattctcttagagtattccaatttaagaaaatattgccaactcgtaaaattacatgaagcaaagtaaatttgtaatgtttttctgatacaaatgttgtgattatggtaatgaattttcctccacattttgcgcagtgattgtttgtcatgatcatccatacggacattccgcaccgtgattgtttcgtgatcatccatgcggacatttcgcaccgtgattgtttcgtgatcgtccatgcggacattttggaatgcccacccgggtcagctatttgtattttttttatttttatgttttgagacggagtcttgctctgtggcccaggctggagtgcagtggcacgatctcggctcactgcagcctctgcctcccgggttcaagcgattctcctgcctcagcctcccgagtagccaggattacaggtgcccgccaccacacctaatttttgtattttagtagagacgggggttttgccatgttggccaggctggtctcgaactcctgacctcaggtgatccacctgcctcggcctcccaaagtgctgggattacaggcgtgagccaccatgcctggccaggtaaactattttaaaattatacagtgattgctccatgtttatagctcattttgattaaattaacctctacatgacattgggccatttaaactatgaccccgccatgggcagttaccaggtagcttgtgtcacttcaaatgctgaaatgtgtgtgatggtccaaagtgggtttcacaccatcacacgttcttggaatcgcttctaatttctcatttgttctgtatggctggaggctgatcacgacgtctgtaaagaacaaggtcaccaatgtgcttgcatatttcattttcctgcatatcagttcacaattaaggcatttcaggctttcctgatgctaattctcatctgagtatgaaatcctggataataaaacagacaacctaaaaataggcatatggactcatggatttatgtactttttaaagtgtgctcaagtgtttcatttatggttttattaataatttttaaagtagaatgttcaatattattactatgatttatttttatagtcagcaaacatgagacttaaaagcttttccttctagctccacatgtcggtgcacagtgtaaccttttcttaaaaaaatatggaatgctgcatgaatctgcagatcttcctcgcgcagggggccatgctaatctcctctgtgtcattccaattttagtatacctgctgccgaagtcagcaccagtttcaccttttcacattcacggtaaaactgatgggaaaccgcacgctaaatgtttaggcagcgatggccctcaactgttaatcccaacaggatggtgagtgagaagcacaggctgaaaatagagttgtctaaaacatttccacatttcaccatctgaacatcattttccactgagttattaattgtaaagagtttattctgctgaacctactaattattctcacctactgagttgacctccacgtgaagaaaaggtcactgatgaaaaagggtggctatgttctgtttctgtaatttcactgttttaacatctttttttttatatagagatggggtctcgctatgctgcccaggtcagtctcgaactcctaggctcaatcttcctgcctcagcttcccaaagtcccagggttacaggagtgcaccaccgcacccagcttcactgtcttttaaagccttaaggtggacgttctcttcaatccatcttcaaaagcacaaagccattgccttcttttttttttttttttttttggacagggtctcactctgtcacccaggctggaatgcagtggtgtgatctcggatcactgcggcctggacctccccaggctcaagtgatcctctcatctcagcctcctgagtagctgagacctaactcacgtgccaccatgcccggctaatttttttgtattttgtagagatgaggtctcaccacgtttcccagactggtctccaactcctgggctcaagcaatccacccacctcagcctcccaaaatgctgggactacaggcgtgagccactgtgcacagccaataactacttgttaagtgaatgaagaggtaggagctgggctctaagtggccactggacttgctgattagaagggagtgatgccataaaccacagccactttcaggacagcagcctgcctcctctcctcctacccctatcctgtccaacacctaagcatagtagtaccactgggagtctgtctcctcaaaagcaagaatgttcaggtacacatgtgtgagttcacctcctaactataggggagaaagcctgtctttatgtataagtctcattcacccattttgaccaaaacccttcagagggagatgctgtcattatgatgggtacctcttcaagactacgcaacagtaacagagcctataaaagctacacagaggccgggtgcggtgtggtggctcatgcctgtaatcccagcactttgggaggccaaggcaggtggatcacctgaggtcgaggagttcgagaccagcctggccaacatggtgaaaccccgtctctaccaaaaaaaaaaaaaaatacagaaattagccgggcttggcgcaccctcgacccagctactctggagcctaaggcaggagaatcccttagaacccgggaggcggaggttgcagtgagctgagattgcgccacttgaacttccagcctgggcgaccaagagcaagacgctgtcttcaaaaaaaaagagagagagagagagtgaaacagaagaaaataagtgatggcaaagatgtggagaaactggagcccctgtgtgctgctggtgggaatgtgaagcgatgcagcccctgtgagaattaggatggtggttcctcaaaaaaaattaaacacaggataaccacatggtcccgcagttccacttctgggtaggtacccaaaataacaaagcagggtctcaagcagatatttgtacacccttgttcatagcaacattattcacaaaccaaaagttagaagaagtcccgatatccatgaatggataagcaaaatgtatgaacacacactggactatgattcagccataaaaagaaaataaattctgatacacgttacaacacggatgaagcccgaagacattatgctaagtgaagaagccagacacaaaaggacaccgggattttgtaaagctcccaggtgattttaaggcttagcctcttcctgtcccttccctcccctccccttcctgctgggcttagcccagctccactccaaacaagcttcccaaggccaccagtaggcctgaaggggcagctttcatcagatgaactgcacgggacacaatgcactcggaaggtttcttagggagcctccatcttgtttcagcaggatgggctgaattcacccttcccagtctgcagctccatacccggccagcctccctgctgaccagatgcccttctccctatcaaatccagagaggctttgggaagctgcagaaaaaaggaggagtctggaatcacagaccccggggttgggaacatctccctcccaggtcccttctgggactgtctcccccatatgctttctgcaagacaccccagggtacaccacaggacctcgctgtacctgtgcaagatgtctccaatgtcctaggagaaaaaagaaggaaactgtcggttaccaggctcctagtggctgggctgactcctggcctctacttctgggctcctggacttttagctccccgctgcacttaccagggctccctgccctagggtgtcagtggaagtggagcacctttcttcaagtctaattctaaccacgggaattcaggcatcccaggtggcgaggcctgcaatggaacggccctcaagccctgctgatcccttctgggaaatggcagagatcccctggataccaggccaccctgggctcctgagagacctcatcaaaggggtctgggcacaagaggcactgtgggtcaccaagaccaagtcctatcctaggccttagggcttcacccacttgttccagcacggctgatggcagagctgggagcctgaggcatcctgataggcacaggggacccaagaaagccgggcccaggcacacccacctgcagaagttcccattctgactggcactccttggcctccagttccccaatcagcgcatcgagcagggcgatgtcctgggatacgcgggtgtcatatgccttcctgatctgcccaaccatctggcccacgtcctccagtgaggccacaaagaaatgctcttgctgctccaggaagtagtacacctgctccagcttcctctgcacccgctgcttcagcgcttcagtttgtttctggggagcagaggacagggaggtatgggggtctgtgctgtgggtggacgtggatgtccaggaacccccagaagcccacctcctggaggtggataagaggtgggcttatgctgcctcttcaaggcctagattccagagcaggaggcgatattgtctggaaccttccagaaaagactgagcatggctggggctagctctgggaaaatgtccttaaacctggtgttaaggtttaactgtgtcccttccaaaatttacacgttgaagccctaacccccagtactcagcatgtgatcttatttggagataagagttcttgcagatgtaattagttaagatgtggtcctactgggattgggtgggtccctaatccaatataaatgttgtcttataaaatggggaaatttgggctgggtgcattggctcatgtctgtaatcccagcactttgggaggctgagttgggcagatcacttgagatcaggagttcgagaccagcctggccaacatggggaaactctgtctttactaaaaatacaaaaagtagccgggcatggtggcaggcacctgtaatcccagctactcaggagtctgaggcagaagaatctcttgaaccccaggaggcagaagttgcagtgagccgagatcacgccattgcacttccagccggggcaacaagagcaaaacttcatctcaaaaaaaaaaaaaaaaaaaaaagagaaagaaagaaagaaaaaaaaggccgggtgtggtagctcacgcctgtaatcccagcactctgggaggccaaggcaggtggatcacctgaggtcaggagttcaagaccagccgggccaacatggcgaaacaccatctctactaaaaaaaatacaaaaataaattagctgggtgtgtggtagcacacgcctgtaatcctcagctacttggggggactgaggcaggagaattgcattgaacctcggaggtggaggttggagcaagccaagatcgtgccactgtactccagcctgggtgacagagcgagactccatcttggaaacaaaacaaaaaaacagagagtaaattatgaagttaaaaatgtacatctggccgggcgcggtggctcccgcctgtaatcccagcactttgggaggccgaggcggatggatcacctgaggtcaggagttcgagaccagcctggccaacatggtgaaactccgtctctactaaaaaatattaaaaaaattaggccgggcgtggtggcaggcgcctgtaatcccagctactcgggaggctgaggtaggagaatcacctgaaccctgggaggcaanagttttgcagccgagccgagatcgcgccactgcactacaacctgggcgtccagagcgagactccgtcacaaaaaaagaaagtggcgttctcctcccttttcctcaatcccatctttctgcagtagtcaccggcataggttgctctctaccatcttctggtgagtatgagaaagcatgacaggatcctcagaggtgacccctgcctgctgggggtggtctccctctacagggatgagcttacccttggctgctggttaccctctgtcccctgagaggaggtggccatccctgctgccctgtgaaccacagcagaatctcggggacccctgctcactcttcccaccttcctcccagggacggatgggccatcagccacctctgaccttaccagaaagctcactgccttctcctccccataggatcgctgctcctcccctgattttctcagcttcttcagatgctccagctgcttctgaattttcttctggaaaaacagcacttgttgaaaagcttgaatttggctcctgccatctttagctggtgccaactctggaggggaacatctccttctggtagcaaggctgagggtgctgctgccagcggcatggggaggggtgctcaggaaagaggagggaggaatggctgaattgccaaaggcagcagagctgagaggcacttcctctgagcctctggattcagccatacctgaagccagctccccctggatctctgagcaacataaacctgtagctcccctctttgctggactggtttatattgtgttcttgccatttccagcccaagaatgctggttaatgcaccaacaacccagagttgttgggaaaatgaagtaaggcccagtgtgtccaagtgcctggcagagaagagcccacaggcagggagtgcctaccttgtgttccagggcgacctcctcaatggggcgcacccggtggccttggtgctcctgactcagactgcagatgaggcagatgggctcatcgtgatcctcacagaagagcagctggacctgcttcaggtggcgcttacactgtggcaggggctgggggcttaggcttcccgggctcttcctttcatgggagtcctggcaccgggggcagccaggtgagcggctgcctgaggcctgggggtgcccagaaactgcctcggggaagctgcaggaatcacgcacacaggtaccgtcaactgggtctccttcctgggcgtggcagcggggactcgcagccgtgtctggtggccttcctggggacatgcagtggaaaaaccccctgaatggcaaacccaagttgcttacacagaggtatcacaaagcacagcggacacagcccttgcctgagatgtgcgagttctcagttagactctgcccacttcctagcttgtcctcccccgacttccatccagtgaggaagcaaacaggccactgggcctgagagctaagggccagacctcagacattcctgagccttggaattcttgggcatttatcctaaagaaagacccatggccttgtgctgttcctcctgcacagacatagatctagcaggtgatgccaaggaaagagacattctgaccagtgttcctttgccacttgaacccatccctggctgcccataacgtgagtggaggcttccaggggatggtgacttgtgtacctcgctcctagctggatcccagcccctagcagagtacctggcaaatgcaagcatttggaaaatgagtattgaatgaaggaataaatagaccactgctcacatatgagttcaataaccattaaatgaaagcaaagaaggggctgggtggtggctcatgcctataatcccagtgctttgggaggccaaggtgggaggactgcttaagctcaggagtttgagaccagcctgggcaacatggcaagagcccacctctacaaaaaattaaaaaattagccaggtgtggtggtgcacacctctaatcccagctacttgggaggctgagacaggaggattgcttgaacctaggaggttgatgctgcaccactgcactccagcctgggcaacagagtaagatcatgaagaaaaagaaaaagcaaagaaggggggcattatagggctaaagactggaactcatcatgaagacctaacagttatgaatagctctactccaagactctaattgcaacttcataagcagacatgccacgagatacaagaagaaatagaaacacaaggccgagcgcagtggctcatgcctgtaatcccagcactttgggaaggccgaggcaggtggatcacctgaggtcaggagtttgagaccagcctggccaacatggtgaaaccccgtctctactaaaaaatacaaaaaattagccagggcatgggtggcgggcacctgtaatcccagggtactcgggaggctgaaggcatggagaatcgcttgaacctggccagcagaggttgcagcgagccgaccactgcatgccactgtactccaggctgggtgaccaagagagactccatctcaaaaaaaaaaaaaacaaaaaaagaaatagaaacacactcaatcctttagcccctgctacctcctcccacctcacagtgtcccagaaattcacagcacatctgtaaatgagactgctagtagtcaccagaaattactctccctccttctctcgtgatagaattaattgtccacgtttccctgtttccctgcctcccattgccccccaaatgccctgcatttctcagcctcctttgcagttaggtgtggctatttgacaataatatgaccaaagggatgtaaatggaggtgtcacaagcagcttctagaaacttctagagctttcccgagggatactgttcccctctgttcctccatcttgctgcctggcatgaggacgtcaccttctgagagcagaagcttgaggacaaacttggtgggacagagcaacagcaggaccccagggtcctggcccacggatctgcctgggaccgcctgtgtatcatttatgtgaaggaggcacaaacttcttttctgttgaggttactgttatttgggtgtttctattattcacaaccaaacataattttaatgactacctcagcagtagatagttaggactttagccaataggcttttctttctgctgagagaaaggcaatggtagaatctcaaccccatgatgatgcattgctgtgaggttattgtgagagggagtatttttaaccagtcttccccagattttctacctggtgtccataaaccccttggattctaaagatggtcttcagagtgtccaagaactacctgaaatttgatgtgacatttgtgaagctgtgcatatatgcatttttcagggtctaagcctgcatcagattaacgaagcggccctagaagacacccaggaatcccaatgatataaatacagtggggacctggtgcagtggtgcacacctgtaatcccagcagtttcggaggcaaagatgggaggattgtttgagatcaggagttcgagaccaacctgggcaacatagcaagaccccatatctaaaaaaaaaaaaaaattaaaaaaaatacagtagggataaaagaaaattaggggggaaatacttcagtacttttcaggtcactattcctaaggatgctaggttttccagatcccagggtcctttctcactggaagacccagggacttctggatttgaagactcatgcagcataccacatcctttcccctcccaggtctcaggggtccctggactcccaattcttttttttttttttttttgagacagagttttgctcttgttgcccaggctggagtgcagggatgcaatcttggctcactgcaacctccgcctcctgggttcaagtgattctcctgcctcagccttccaagtagttgagattacaagcacccattatcacacccagctaattttttttgtatttttagtagagatggtgtttcaccatgttggccaggctgttcttgaactcctcacctcaggtgatccgcccccattggcctcccaaagtgctgggattacaggtatgagccaccgcacccggcctggacccccaattctatttctcctccttgagtgctgtgatttctcctctccagccaacaatgcattggaaagtgtgttccataggctgggtgtagtgactcacacctgaaatcctagcacttttagaggctaaggcgggggatcgcttgagcccaagagttcaaaaccagcctgggcaacatagacagtcctcgtaactacaaaaaatacaaaaaaaaaaaaaaaaattaaccaggtgtggtggtgagcacctatagtctcagctacttggaaggctgaggtgggaggatcgcttgagcctaggaggttgaggctgcagtaaactgtgctcacactactgcactccagcatgggagacagactgagactctgtctcaaaaaaaaaaaggaggaaaaaaaaggaaagtgtgtttctgaatgctgcccccaccacgagcatggaattgtcacctggatagcctcggtaccctctaaactggtggcatttttcttttacagtttttttttagtctctttacctatagggacagctgcttaaaaaaatccagatggcctggagcctcctgatcccttgccaaaaaccagaggaagttaagatcagagcaaaaccagtgcaaactggaagaggtgacttccagttaccttaggatcatttacacatggttataagctaaagggtcctcccctaaagaagatggagaagggtttgtttgaatgcgatgtaggaagaagcatgctggggacagcgcctgcacatatggaaccctgccctgggcctgcttacctatctcccttcccctccctggactctaaaatcgccctgcctcccatccctggcaagcagacgcctgcagaggtgagctccccttctccattctttggccactgataacacctgattgcctttttcaatcggacattctttctttctttttttttccccccaaaatgtttaagagacagggtcttgctctgttgcccaggccggagtgcagtggcacatcctcagctcactgcagcctggaactccctggctcaagcaatcctcctgcctcagcttcctgagtggctagaattacaggcgtgtgccaccatacccagctaattttttttttagttttgtagaagtgagtctggctacgttgctcaggctggtgtgcagtggcatgatcctcagctcactgtagcctggaactccgtctgctcaagtgaacccgagcagctgggactacaggcgcgtgccactattgtattttgtagagatggggtctcactgtgttgcctaggctagtatggaactcctggggtcaagagatcctcccgtgcaggcctctcaaagctctgggattacaggcgagagctaccacgccctgcccaacctttgggtttttatttttttaatttcgtttatagagatggcgggggtctcactacattcaccaggctggtctcaaagtcttggcctccagcaatcctcccgccctggcctcccaaagcgctgggattacaggcatgagctatcgtgcccggccagccattctttctctgcagccgatataaagttggaaagaacacaatttaccggtgaccgaatgttctggatttccagggccttccttcaggtccgcagatgcccctccatccggagtgggccttgcccggggttctgttgccgagtccagattcgcagctgtcttttcctctagagtcaggagaatttctggatttgcgggcgccttctcccctgtagaaatggtgacctcaaggcttctaggtcgcatctttcccgagggcaggtacacttcgaagggcctgcactccttctgccccggggcgccccccgccagcccctgcagcctccccgcggagctggcgtttctgcgcagccggacctcggcctggcccccctctagcgccctgcaggggccggggcttctcccgcccggcagggccgggctccgggtccgaggcttgccctgcgcgtccaggccctccgaggccttctctctgcgtttgctcaggggcttcctcgacagccccctcccggcctcgggctggctgcaccgcaggctggcagctccgcccccgtacggccgagggccgttcccctcgttcccctcggggtggtctggagtcttcaggctcctgggcttgttctcccccagggagctggacgctgcggaatcatctgtgccgttttcttgtgtggaatattctggaaggacaaccagatgcaaaatgatgaagctgtcccacgtttagggcccaagattcagggcagaggagagagaatccccttggatattaaagtttagaaattgaggaaaacaacgggccgggcgcggtggctcatgcctgtattcccggcactctgggaggccaaggcaggagggtcacctgaggtcagcagttcgagatcagcctggccaacatggtgaaaccccgtctctactaaaaatacaaaaattagcccggtgtggtagtgggtgcctgtaatcccagcttctccagaggccaaggtgggaggatcatttgaggtcaggagttcgagaccagcctggccaacatggcaaaaccccgttcctactaaaaataagaaactcagccagacgcggtggtgcgcacctgtagtcccagctactcgggaggctgaggcatgagaatcgcttgagcccgggatgtggaggttgcagngagctgagatcgggccactgcactccagcctgagtgacagagcaagactccatctcaaaaacaaaagttcaggactncccagactagacaatggcagtcaattaccattcagtaagaacatgcttgatgttgctatgtatttctctctctcttattttattttttgagacaggatcttgctctgttgccctgatgtgatctcagctcactgcaacctctgcctcccaggctcaagcaatcctctcacctcagcctgttttctgttttttcaatagctgaaaatacaggtgtgtgctaccacgcctggctcatttttttgtatttttggtagagacagggtttcaccatgttgcccaagctggtctcaaactcctgagctctagcaatccacccaccttagcctcccaaagtgctgagattatttataagtgtgagccaccatgcctagcctatatttctcaaatagtacttttcaaacgttttaagcaggacaactgtttcaaataagatcttacacaggtcagcaaaacccagattatacgctttaaaaataaaaataagccgggcacggtggcctatgtctgaaatcccagcactttgggaggctgaggcgggaggatcacttgaggtcaggagttcgagaccagcctggccaacatggtgaacagcactgagaagattctataccaaccccgttcatatgattgcatagcaatccctttttgctaacctagagatgtttgtctgacatgagtattaatcataaatgtagtgaagaagtctcaaagaacaggtgttccagctcctgcctttcgtgaccctgacctgcttcttaaaaaacccattaggagcctgaaggaagtttactaacccagttccaaaggccagagtgaagaaagggacgttcctgaactaaagtcatctggattttggtagacctgagactcccaatccccaggtcagagtgagctgctctgagctcctggtcccctttcccacaaagcagccagcactcagcactggatgaggaggaggcctgggcccgcttaccctgaatggctgccctgtggagctcctcggccagcaggcgctggttgatggcccgcaggacctgcagggtgagctgcacggcgtactcttccccatagtaggtgaccagcagagtggccatcttcaccggcctggctctctggatctggctccgggggatcctggagtgctccttctgcacactggtgttctgcagcttgaacttgaacttctcgaagtcatagggcaccagctcctccagggtggacagcagatggtcactaggggtcttagccat

SEQ ID NO: 147167 - DNA, 448 bp, Homo sapiens
  misc_feature (1)...(448): n = a,t,c or g
taagatcacagaagaaatgacgcagctgctctgaatttcccaagggccaaggagcctccaccttaagcccttgagatccacccagggcaaggggatactggctggaagtcacatgagattgacagaaatggtaaccactgggagagggtagggccggagcccatgttatttaagtcccttagttccatgtttcctaaaatgtgagtgaatggcgatatcaaaatgatttcaagtggatccagatacatggctttttatcctagaagttacattatttatttttatggctatcttctatttatggcaagtgttgctggttttccattttactgcagtgagataatgttccctttttcaaggctcgtacggaatttttggcatagagggtcgtattccttatagtgagttgtanaggttntcaatnngtcaaacggtatcaattcaatcc

SEQ ID NO: 147168 - DNA, 685 bp, Homo sapiens
  misc_feature (1)...(685): n = a,t,c or g
ggattgaattttgggggcccttaaaaaaaactttacccctgcaagcccggggacgtaaaactggttcctttaaaacgggcgccccnnnnnnnnnnnattttttgttatagaaatctgtttaatcggtttaggaatgtgtacactctggctctgcaaggtttccataaaggcaacttttccatgttttaaaaaatagatttggtataaagatttatatattcataaataggtggcatgaaaaattaccaaatgcaaatcggaatacttgcgctgactgaagcccctgttcaccccaagtccaggccctgcaggggttccgaggggtctctgctggaaggaggccccaactccgggcagcctcttaggggaagaggaaactgaattaaatgtgtattaggggccccctccaggctccttaaggccagcgtcgcactgggccccacccgagggcctcaggcccacctctcctctgtttgtggccgccacctccaccattggcccccttcctgtacttgtgaccctgggcccccacctgtccccactctttgggcaatttatcaacaaaggaagagatgacactgttctccttccgccccagagcccgggctgccgggagagcttagcctgccaaggggaggaaacaagccggctttgttttgtctcacacacttccccgtcttcactc

SEQ ID NO: 147169 - DNA, 512 bp, Homo sapiens; identical to SEQ ID NO: 7147

SEQ ID NO: 147170 - DNA, 911 bp, Homo sapiens
aagatgtctttatggttgaaatactctacttcttcagtgtaattctgtgtataggcagtattgaaattatttgtcccttcagtgttactatatttactcaaatatgtgtgcagtgagggaagtagattgttatttgaaaaagataaaacattggtataaggcaggggctggcaaaatactgcctgtggccaaatcctgcccaccaccggtttttgtaaataaacttctcttggaatatagccacatccattaatttatgtgttttctggccgcattcacaatacaacatcagagctgaaacagagcccttatgtcccgtgaagccaattttctctctggacctttacagaaaaagtgctgaccccagagataaggtaaccttataaattgttgattacacacacacacacacacacacacacacacacacacacacacacacacacacaatttaacaaactaccctgactttttataccttctggttacatttccaggtgatattgtgattcaagagagtgcattcattttctttactaagtctccaaagcactgtggtctaggagcagcaataaggaatgcatagagagttgagacggttgattttgttgttaagtgtgggttatttaaatgtgaatgtgaatttacatgtgtggcaatcagtaagctgcagatagacttctatgcagtctatgatgtcttttggagaccctgttgtgagctgtagcggtaataagagagccaggcatggtagtgtttttgctcctgaaactgctatgtgatctttaagtacatagtagtaagagcctatcaaactgagcttagactgttggttcattattgtgtttgtacaacttccttttttataacgaagcaggagacactttaatccttttaagtgttctaagagg

SEQ ID NO: 147171 - DNA, 751 bp, Homo sapiens
tgcttggggtgacagtaatgaaggagtgttgatatctatatgctcaaagactgtaaattccttctttaattttactggtagtagccaaggcctgtgcaattcggctttcacccaatagcgcacactgccatgtcggccttcgaatgaggtagcgagtggtgtctgtggaagctcgaagctgaatgcatattcatgccttcctgaatgaatagtgtggaagccttcttctggaattatcatcatctctttcgtgcccaattaagatgtctttatggttgaaatactctacttcttcagtgtaattctgtgtataggcagtattggagccggcgtttctagattcagtccagcgtactttcgcatgtcctcttgcatgaattttaagagattttactctgatttccccagtaacttctaaatttacccttcctgagacggtatccccactagaatacacagggacattgctgtcattaagacagtcaaagcttattgtcaaactcttcacctttcccagcaccatgtttataacaaaatctataaaaatataatgtaagacaaaaaagtcaagatcgcatataaaatgtgatcttcacttaacactgatcgatatttttgccgtgcaaaatgcttgcaggccggatcagtgattctctacaaatagttcattgagatttcttaaaaagtcagggcagcagaggctgctgctccgcgctcccgctcgtctcagtggtctccttacaaagaccgg

SEQ ID NO: 147172 - DNA, 1096 bp, Homo sapiens
agaatgataacagttttggtcttcttttttatcaaccatgcttttattttacttgaatctcgtgccaattgctttgtaatattaaagtaggatttacacaagtggaatttagaaaagatgataatctatcaaatctgtcaataccaattagaatgtaataaagaaattaggatagtggaggtttgagcaagtaaaggctcacccaaattcaaagccaatacttgatgctgagaggggatattttctggaaggtaatttttaaaaattaaagtcacaattataaattgtatatttcctaataaaagaaatctcaactcatggggacactttggaatttaaaacactattgttcctcattcagtgatggaccaggtcaaaacgtttcagaaaagaaagcctttaaagaagaatcctgggcacagaaaaggtccatttagacattgccttcttcccccatctctaatgcctcttttcaaatctctgacttgcacatgaagtaacagtgaggtgtcctgtgcagcagtcgcaattttttgacttgtcaaattgaagaaattcaattatgtagccagagcttagatcactgacatgtatactgggcataagcttttttttgtttgtttttaattttattagaagtggggatctcattttggttgcccatgctggtctcaaacacctgtcttcaagtgatcctcctgcctcagcagcatcagtttaatatctagataaaatctgatgtatgtaattttacttttaagggtttttttccaaacagacgtcctgacaatgttgtttcctattccttgaacattcacctgacgcttatatactgtcattacttttatctgtcaactgatgtcagctactcaatttacacattacttttgtgcatttcatcctgtttctcagtttgacattgtcattcaaattcagagtttgacactgaaaccctgggcatggtggctcacacctgtaatcccagcacttcgggagactgcggtaagcagatcatttgaacccaggagtttgggactagccttggcaacatggtgaaaccccatctctaccaaaaaaaaaaaaaaaaaagtcgacg

SEQ ID NO: 147173 - DNA, 773 bp, Homo sapiens
  misc_feature (1)...(773): n = a,t,c or g
acccacttatggggnaaattgtgggacaaattcttcctttgggaatctcgatatttttatctagaaagtgagagaaatggttgcaagactaaacacataattggtaaagaatcaacagtcaacacaaaagttagccaagcatggttgggcatgcctgtaatcccagctacttgagaggctgagggaggagaatcacttgaacgcaggaggtggaggttgcagtgagctgagatgacggccctgcactccagcctgggcaacagagactgttgattctttaccaattatgtgtttagtcttgcaaccatttctctcactttctagataaaaatatcgagattccccaagggaagaattgtcccacaatttccccatagtgtttgctgtctcctctgttgcaatgagccaatatactcaggtttgaactaataggtttgttcctgatggttacacactggagcacatcagcaccatagagaagatggatgccgttctaattctttgttatttgccttaaacttttctcccatctcccctcccaaaagcatatagaatcttctccctcttcctattagtttgaaacttcatgatctatttccatccaccatgctgggtactcagtgtgctctttcaatatgggaatttgtattttggaggtatcattccaaagatgtttatgcatatacaattaaaggtatatatttatttcctgcaactaccatcacccttttgatacacttaaaactgtataataaaccatcccaagctgtcga

SEQ ID NO: 147174 - DNA, 478 bp, Homo sapiens
tatgcactaaatgtgatttgtttagaaggtaaaattcttgcattactatattatgatttctttagaatgtataatttttgcattacatttattgtaacatttcaaagtttataaactgtcatggagattaatacagatgatgaatttgttttctgtaactcccttctgaagtacatattatcctcacattataaattaggcaactgaggttctaccaagatatttgaatttactaaggtttactcagccaataaagtaatttaaattttatatgtaactttagaggaaaacatattaatagaaaatgattatttaagaaaaaattcttgaactaggctttgattaaagagatcattgcaggctgggcacagtggctcatgcctataatcccagcattttaggaggccaaggcaggaggatcgcttgagaccagcagctcgagaccagcataggcaacacagtgagaccctgtctctac

SEQ ID NO: 147175 - DNA, 864 bp, Homo sapiens
tcggtacgaaacaagagtctttatgaagaactgcttcaggcaagagatccagggaaatttgtgattcttcactaccattactggctcttccatggaaaagcatgaaaagatctgcttgataggttgagaagaaaacaaaacatgttatagggtgaaaaagagtagttagtatatctgtgaagtaaacttattcctactcaatccacttcctgtgggtaaataatctgacctcccagagagctgctcaacatacagcaaatcacttgtgtaaaagaaatattcaatatttttaccatgctttctatgtatacaaaataggatgttgagtgcacatgtattcacagtttaagaaagggttaaatacaaaattagctgggcgtgggtggcgcacgcctattagttccagctacttgggactacacgcttgtgtgccaccacacctgcatacatatatgtatacacttgaactcctgggcctcggtctcccaaaatgctgggattcctggtgtgagccactgtgctcggccgattataaatattgtagcatgaaagaatataaactgtatatgtggtaaacattcttcttggccaatgcttaagtaaaatacctctactgatttttaaaaaacacagtatctcaatattgaaaagataactgtgtgattatggacaagttctttatagattgcaaaataaaacacaaaggtacacagaggtatgttgtaaaatgaaaataatcaagataagtggatacttttaccaatatatttcatcccacttttgtttttcagaaaaggttactcatacatttaagatttctctataatatctaacatagtaatttaaaaaatctgtcatcccatg

SEQ ID NO: 147176 - DNA, 955 bp, Homo sapiens
attacgccaagcttggcacgagggtgaaaatccctagaaagcaatagccttcgaggtaccttgcactgaatttcccaccccagcccttccacccgatgggaggctgtaacttgggcactggggtgactttttccatgcccttgtcatctccagggtgggaggcaggccccacttcccctcccctatcccccacttcccattgttgttgccccacccctaatctccagactgaacccagatggagatctgagtgccaaaacaattcttgatgtaactttgtacatatcttctactaccgttgggggctcttggggttagaggtgggggcggctctgtgggccattgctcccctccacctctcaaaagaccttacagtatttcacagtatctctacccgcacgcgagtattacagtatctagctggaatatccccctacagccccccaggaccctatgaggaagggaaggagccagggagagtgaagtaaggtctgggactggggaggtgggatctgaatgaactcatttgcatatcatttgcatcctccgcttggcagccgctttctacaaactcattcactgggagtctgggtcccaatcagccgggtccaggactcctctcacacagacacatctccgggaggctgggcctcctgaaaagtgtttgcttggggtgtctgtgtaacaacccctccctattcatatttcttggggaccccctacccagccagccagggtgatctgaaaggtatactttgctagctcagtgagctagttcactcaccatgttggtgagcagagagccacacctttccccattttaccctggggaaactcactccaccatctttgccatctcttgaaagtcccttctgcaatctgacctcaatcttttgtgctgcagtttgtccagaggggacacagatgtggggtcagggatgaggattattgaaaa

SEQ ID NO: 147177 - DNA, 878 bp, Homo sapiens
  misc_feature (1)...(878): n = a,t,c or g
caaacnccagtcagggccctgtaaaaaaaaggcaccccatttcccttttatcaagcttttcggggtatgctgtcggccctccacaatgtggttcaaaaaccaggaaaaagtgtcttaactggaggccttaatgcgttgaatttcatcggcaaaaaaccacataatgtcctgccaaaaagtgaccgcgttttaaccgggacaaagcggccatgggagagacctgttcccttgtctcagatgttaaggggaagctaaggagaaggagaagcagagactggcaccagcagctcacgatggaggagaacccgcgcactaccgggatgctgtttgatgaatatcaaggcttgtcaccccctggaagccctggaaattctgtccaatgaaagcgaaagcaaggttcagtcatttttagcatcacttgatggagagaagctggaactcttaaaaaaatgacctaatttccattaaagacatctttgcagccaaagaattagagaatgaagaaaatcaagaagaacaaggcttagaagaaaagggagaagaatttgctcgcatgcttacagagcttctctttgaattacatgtggcggccacacctgacaaactcaataaggccatgaagagggctcatgactgggtggaagaggatcaaaccgtggtgtcagtagatgtggcaaaaagtgtccgaagaagaaacaaagaaggaagaaaaggaagagaaatctcaagaccctcaagaagacaaaaaggaggaaaagaaaactaagaccatagaggaagtatacatgtcgtccattgaaagtctggcggaggtaacagcgcgctgtattgagcagcttcataaagtagcagaattaattcttcatggacaagaagag

SEQ ID NO: 147178 - DNA, 634 bp, Homo sapiens
aatataataattcctttccctttggttagatacccaatagtggaattgctggatcaaatggtaattctatttttagttctttgaaaaattgccatagagtttacactaacttccattctgaaatgggcatttttgaatgaaaaatttaaagactggtttagaagagcacttcaggtgaaagaatataaacttcagcttaatatatcacatatatagtatagataaaataatttgttgtgtagtataatgaggaatgtggttataaatatactattttaagtggatttatacgttgtatttgttctgcttataatgggaaaaaaagtctttacatataaaaatagtggcaaattccatttgtattttttaatctctgaaatttgggaagcagaaaatatcaaacgaagaaagaaaccagagtctcaacctgctggacactattggaagtccatcatttaacatgtttttagtatatacttttagcaggagacatctctgagtcaactgtgttgaggtgccaccacagcgagtttaggcactcagatccctgcatactcatcacattgggccataatggcaaatagaaatttttgttttgttttcgatgtttgctttttctttcacatataaaaag

SEQ ID NO: 147179 - DNA, 1421 bp, Homo sapiens
  misc_feature (1)...(1421): n = a,t,c or g
cccttgcttctccatctaagccttaatgaaaattgaagctttgcccaaacccngccacctttctcagccgatggggcacaattacccgcttntttagccnagtactgtgtctgcagaaatgnccaggaaccaggcagcntaatttgggaactggcccagaccaatcagaagcncacctggacaggccagttgtccttggggaacagcccagtgcccagcgtgaggttgccagtattctttgtagaaaatcaagtgcttgccaataaaccaactggctgcaacctgtagaaggggacaattagtgcccctacagcaatttaatgaactattagacccaccctctggatcccgggaggtcttgatcacagctggtagaggtggcccactcactgttcctatgtcttttaggttaacagttctttacataacagtgaagagtccctggtgcctcaggaaaagcaagatcaacctaccaaggaagagttgatggagtcataattttcctacttaacacccactgcaaatttaaatatgtgttctagggctgtttgttaattctattatggtctttactaattgtgattcccagttctgggtgaataaaaagtttttgttttaatgtaattgtgatcaacactatgcttgaagacatagacaaagctatttctaccaccatgatgtttacaaaatatctggtatttacgcctatatggccattaaaaaaactagatttgtggataacaaaccaccaagttttaattgtttttatttaataagggagaaataagacagaaaaagagaattaatactctttttcccagactgagaggcgggcttctaagtaaaggtatgtgaaaaactgagtaggaggcttgtagtactaaaatgaacctcccaaaatttattcttttctctgaggatttatctcagcttctctgtgtaattggatattaacacatcttaaattttttaaagagatggggtctcgctgtgttgctcaggctggagtgcagtggttactcacaggtgcagtcatggcacactgtaacctcaaactactaggctcaagcaatcctcttgcctcagcccactgagtagctggggctatatgcatgtacgaccactggcatgcttaaatcttctaaggagcaacacatgtctctactcatttactaccattagatattagatgagtcatttactaatgactgctcatggtgtctctttattctggatatcagatccattacagcacgccacactaggatttctgcgccacactacgggggggtggtcgttgttggtaggtgtgttcaccacgcaggcccatctttggaaaaccgcattaagtgtggggacgtctgggtttctccgtggtcctggcgtggccttcgttggttaatccgttcgggccctcgacg

SEQ ID NO: 147180 - DNA, 936 bp, Homo sapiens
tgtggagcaaatatatacatatacatgtacattgttagagttcaagtgaatatacagtttttaagtgtgtaaataaatttcatagcactacaaaaatacaagtcatctgagagacgtttacagtggtccccaaaactataggagagaataaaataaaatagctataggtaattaaaagctaattagataaatcaagtcacagtttcatccttcagattaaggtgctccaatataatccataccacagcaaacaaaatcctgaagaattctgctgccaatcatcttgcctcttaacctcaatataacaagaacatacataaaagagattaccgatttagtaaatgctatcatctcataccccattcacaccactggcctgtggatattcttcccctgggagagatgtcaagatttaatgagattctatcatagcctgtagaaaaaatgagcaacatggaaacattccaattccagtcttaggtgagttccaatgaaattacctgaagaactgaactagtgcttttagttaaggggaaaagtgccctagcttttaaaaaatatgtctataaatctagttttaaaaacatagcaattggctgcatgtggtggctcatgcctataatctcagcattttgagaggccgaggtgagaggactgcttaaacccaggagttcaagaccagcctgaacaaaatagggagacccccatctctacaaaaataattttaaaaagctgggcatggtggcatatacctgtggttccaggtacctggagggctgacgtaggaggattgcctgagcccagcaggcccaaagctacagtgagctgtgattgtgccactgcactccagcctgggcgaaggagagcaagactctgtctcaaaaataaatacataaaatacagcgtccaaaagtgtgtcatcttctttctcttcaa

SEQ ID NO: 147181 - DNA, 670 bp, Homo sapiens
  misc_feature (1)...(670): n = a,t,c or g
ttggggttttaccagttttatttctagactttcatgtnngtctttttgtcttctgctggaaacatgccggttacatgttggtgctgggaagcgccgcgatgcaaccagaaatgcacagacccagccgcccgccgcccagaccctcagacttgcgcgtcacaggacagactccgctgtgccccgtgcacttgccaccagcctttggnctctcgatacacacaacatccaggacttgtgcccttgccccatcacgacagacaaagcgtccctcaaggcccccgcgtggttcagacagacgccgcagccagnatggttgaggtaagcgtgancgttgttctggaggggtggggcnnaccaacaacaaggagaatgaagctttcccttctgggtatcaaaatgctccggagaggagggactgtcaggggagcacctggggccggctccgcccttcgctgcgggtggcggtggcgcccgcctgcctggcgccctcagatgtccacgtcccgcacgtcggtgggtgtgcaagccaggtccacctcctcctccccgntaccctnctcntcgggcggnctttgggtccatgttctgctgggnctggcgcagcttgactcccagcagggcttcgatctgctcctggcaggccggaggaantccgggtcaaacttgatca

SEQ ID NO: 147182 - DNA, 676 bp, Homo sapiens
  misc_feature (1)...(676): n = a,t,c or g
tactaccgcgtcacaggtttcctctccagagtgatcaagtgtgacccagactgctnccgggcctgccaggagcagatcgaagccctgctggagtcaagcctgcgccaggcccagcagaacatggaccccaaggccgccgaggagcaggaagagaaggaggagtaggtggacctggtttgcacacccaccgacgtgcgggacgtggacatctgagggcgccaggcaggcgggagccaccgccacccgcagcgagggcggagccggccacaggtgctccactgacagtccctcctctccggagcattttgataccagaagggaaagcttcattctccttgttgttggttgttttttcctttgctctttcccccttccatctctgacttaagcaaaagaaaaagattacccaaaaactgtctttaaaagagagagagagaaaaaaaaaatagtatttgcataaccctgagcggtgggggaggagggacagcggagtctgtcctgtgacgcgcaagtctgagggtctgggcggcgggcggctgggtctgtgcatttctggttgcaccgcggcgcttcccagcaccaacatgtaaccggcatgtttccagcagaagacaaaaagacaaacatgaaagtctagaaataaaaatggtaaccccccaaaaaaaaaaaaaaaaaa

SEQ ID NO: 147183 - DNA, 390 bp, Homo sapiens
tttttttttttttttggggttttaccagttttatttctagactttcatgtttgtctttttgtcttctgctggaaacatgccggttacatgttggtgctgggaagcgccgcggtgcaaccagaaatgcacagacccagccgcccgccgcccagacccatatgaagaagaacacaaaccaagtagctgtggtttgaacctgacgtgagctggctgcagggccgttgggtagaaaaccagcatttcattaacagggtccttacaaaattagaaagagtttaaaatagaatatattatggcacttcttcgtcctctcctttaagaagcggatcggaaggagtgggaccaggtgccttttcccgacccttgtacccttgcttgggccccccaaac

SEQ ID NO: 147184 - DNA, 938 bp, Homo sapiens
  misc_feature (1)...(938): n = a,t,c or g
atgttaaatctgntaatggataagtgttctgtttgttattgtttggtaaattcaccataatggctaattaaaagagactcaaatttcaatgaagccagctcacagtgctgtgtgcnccggtcacctagcaagctgccgaacaaaagaatttgcaccccgctgcgggcccacgtggttggggccctgccctggcagggtcatcctgtgctcgaaggccatctcgggcacaggcccaccccgccccacccctccagaacacggctcacgcttacctcaaccatcctggctgcggcgtctgtctgaaccacgcgggggccttgagggacgctttgtctgtcgtgatggggcaagggcacaagtcctggatgttgtgtgtatcgagaggccaaaggctggtggcaagtgcacggggcacagcggagtctgtcctgtgacgcgcaagtctaatcacagtctgtgtgcccggtcacctacaagctgccgaccaaaagaatttgcacccgctgcgggcccacgtggtggggccctgcctggcagggtcatcctgtgctcgaaggccatctcgggcacaggcccaccccgccccacccctccagaacacggctcacgcttacctcaaccatcctggctgcggcgtctgtctgaaccacgcgggggccttgagggacgctttgtctgtcgtgatggggcaagggcacaagtcctggatgttgtgtgtatcgagaggccaaaggctggtggcaagtgcacggggcacagcggagtctgtcctgtgacgcgcaagtctgagggtctgggcggcgggcggctgggtctgtgcatttctggttgcaccgcggcgcttcccagcaccaacatgtaaccggcatgtttccagcagaagacaaaaagacaaacatgaaagtctagaaataaaactggtaaaaccccaaaaaaaa

SEQ ID NO: 147185 - DNA, 439 bp, Homo sapiens
  misc_feature (1)...(439): n = a,t,c or g
nnnnnnnnnnnnnnnnnnnnnnnnnnngggggggnaaccagttttatttctagactttcatgtttggctttttgtcttctgctggaaacatgccggttacatgttggtgctgggaagcgccgcggtgcaaccagaaatgcacagacccagccgcccgccgcccaattacatagccaagatgtgcaaattgtctattttgtcactaagttttttaaaggaaggggcaggggataagaattcatcggaaccgaacttaggttgagtaccctaattttccttgcacccatgcctgtccaatcagatgactctgggaaacgccaaacaggctgaatcaatgtctttgtgtggtttttttcttccagattgtttttttctcacctataaaaggatctatctttaaaaataaactgtattaaatctgtaacatcaaaggcagaag

SEQ ID NO: 147186 - DNA, 478 bp, Homo sapiens
  misc_feature (1)...(478): n = a,t,c or g
taattacgcatagtggtgatttaaggagactccgattctcaatgaagccagctcacagtgctgtgtgccccggtcacctagcaagctgcgaaacaaaagaatttgcaccccgctgcgggcccacgtggttggggccctgccctggcagggtcatcctgtgctcggaggccatntcgggaacaggcccaccccgccccacccctccagaacacggctcacgcttacctcaaccatcctggntgcggcgtctgtctgaaccacgcgggggccttgagggacgctttgtctgtcgtgatggggcaagggcacaagtcctggatgttgtgtgtatcgagaggccaaaggctggtggcaagtgcacggggcacagcggagtctgtcctgtgacgcgcaagtctgagggtcttccagcagaagacaaaaagacaaacatgaaagtctagaaataaaactggtaaaaccccaaaaaaaaaaaaaa

SEQ ID NO: 147187 - DNA, 5121 bp, Homo sapiens
  misc_feature (1)...(5121): n = a,t,c or g
gcagtagcagcgagcagcatgagtccgcacgctccggcgagtggcagaagagcgcgaggaagcgcggggcagcagaagcgagagccgagcgcggacccagccaggacccacagccctccccatgctgcccaggaagagccccagccatggaacaccagctcctgtgctgcgaagtggaaaccatccgccgcgcgtacccctgatgccaacctcctcaacgaccgggtgctgcgggccatgctgaaggcggaggagacctgcgcgccctcggtgtcctacttcaaatgtgtgcagaaggaaggtcctgccgtccatgcggaagatcgtcgccacctggatgctggaggtctgcgaggaacagaagtgcgaggaggaggtcttcccgctggccatgaactacctggaccgcttcctgtcgctggagcccgtgaaaaagagccgcctgcagctgctgggggccacttgcatgtttgtggcttctagattgaaggagaccatccccttgacgccgaagaagctgtgcatctacaccgcaaactccatccgggcccgaggagctgctgcaaatggagctgctcctggtgaacaagctcaagtggaacctggccgcaatgaccccgcacgatttcattgaccacttcttctccaaaaatgccagaggcggaggagaacaaacagatcatccgcaaccacgcgcagacctttggttcccttctgtcccacagatgtaatgttcatttccaatccgccctccatggtggcagcggggagcgtggtggccgcagtgcaaggcctgaacctgaggagccccaccaacttcctgtcctactaccgcctcacacgcttcctctccagagtgatcaagtgtgacccagactgcctccgggcctgccaggagcagatcgaagccctgctgggagtcaagcctgcgccaggcccagcagaacatggaccccaaggccgccgaggaggaggaagaggaggaggaggaggtggacctggcttgccacacccaccgacgtgcgggacgtggacatctgagggcgccaggcaggcgggcgccaccgccacccgcagcgaagggcggagccggccccaggtgctcccctgacagtccctcctctccggagcattttgatacccagaagggaaagcttcattctccttgttgttggttgttttttcctttgctctttcccccttccatctctgacttaagcaaaagaaaaagattacccaaaaactgtctttaaaagagagagagagaaaaaaaaaatagtatttgcataaccctgagcggtgggggaggagggttgtgctacagatgatagaggattttatacccgcaataatcaactcgtttttatattaatgtacttgtttctctgttgtaagaataggcattaacacaaaggaggcgtctcgggagaggattaggttccatcctttacgtgtttaaaaaaaagcataaaaacattttaaaaacatagaaaaattcagcaaaccatttttaaagtagaagagggttttaggtagaaaaacatattcttgtgcttttcctgataaagcacagctgtagtggggttctaggcatctctgtactttgcttgctcatatgcatgtagtcactttataagtcattgtatgttattatattccgtaggtagatgtgtaacctcttcaccttattcatggctgaagtcacctcttggttacagtagcgtagcgtggccgtgtgcatgtcctttgcgcctgtgaccaccaccccaacaaaccatccagtgacaaaccatcccagtggagggtttgtcgggcaccagccagcgtacaggggtccgggaaaaggccacctgtcccactcctacgatacgctactataaagagaagccgaaatagtgacataatatattctatttttatactcttcctatttttgtagtgacctgtttatgagatgctggttttctacccaacggccctgcagccagctcacgtccaggttcaacccacagctacttggtttgtgttcttcttcatattctaaaaccattccattttcaagcactttcagtccaataggtgtaggaaatagcgctgtttttgttgtgtgttgcagggagggcagtttttctaatgggattggtttggggaatatccatgtacttgtttgcaagcaggacttttgaggccaagtgtgggccactgtggtggcagtggaggtggggtgtttgggaggctgcgtgccagtcaagaagaaaaaggtttgcattctcacattgcccaggatgataagttcctttccttttctttaaagaagttgaagtttacgaatcctttggtgccaactggtgtttgaaagtagggacctcagaggtttacctagagaacaggtggtttttaagggttatcttagatgtttcacaccggaaggtgtttaaacactaaaatatataatttatagttaaggctaaaaagtatatttatttgcagaggatgttcataaggccagtatgatttataaatgcaatctcccctttgatttaaacacacagatacacacacacacacacacacacacacacaaaccttctgcctttgatgttacagatttaatacagtttatttttaaaagatagatcctttttataggtgagaaaaaaacaatctggaagaaaaaaaaccacaccaagacattgattcagcctgtttggcgttttcccagaggtcatctgattggacagggcatgggtgcaaggaaaattagggtactcaacctaagttcggttccgatgaattcttatcccctgccccttcctttaaaaaacttagtggacaaaataggcaatttgcacatcttgggctatggtaattccttggtaatttttatttaggaagtggttggaaggggagggtggccaagagtggtgggaggctgnacggtgtgaggggaggacaggccggggagggagggtggtgagggagggaggctccccgagggggaaggggcggtgcccacaccgggggacaggccgcagctccattttcttattgcgctgctaccgttgacttccaggcacggtttggaaatattcacatcgcttctgtgtatctctttcacattgtttgctgctattggaggatcagttttttgttttacaatgtcatatactgccatgtactagttttagttttctcttagaacattgtattacagatgccttttttgtagttttttttttttttttatgtgatcaattttgacttaatgtgattactgctctattcccaaaaaggttgctggtttcacaatacctccatgcttcacttagcccatggtggaccccagcggcaagggttctgcctgcttttggcgggccagaccacgcgggcgcgatcccacacaggctgggcgggggccggccccgaggccgcgtgcgtgagaaccgcgccggtgtccccagagaccgaggctgtgtccctcttctcttccctgcgcctgtgatgctgggcacttcatctgatcgggggcgtagcatcatagtagtttttacagctgtgttatactttgcgtgtagctatggaagttgcataattattattattattattataacaagtgtgtcttacgtgccacccgggcgttgtacctgtaggactctcattcgggatgattgaaatagcttctggaatttgttcaagttttggggtatgtttaatctgttatgtactagtgttctgtttgttattgttttgttaaatacacccataatgctaatttaaagagactccaaatctcaaatgagcacagctcacagtgctgtcgtgccccggttaccttagcaagctgcccaacccaaaagaatttgcacccccgctgcgggcccacggtggttcggggcctgccctggcagggtcatcctgtgctcggaggccatcttcgggcacaggcccaccccgccccaacccctcccagaacaacgggtcacgcttacctcaaaccatcctggctgcggcgtctgtctgaaccacgcgggggccttgaagggacgctttgtctgtcgtgatggggcaagggcacaaagtcctggaatgtttgtgtgtatcgaaaaggccaaaggctggtggcaagtgcacggggcacaagcggagtctgtcctgtgacgcgcaagtctgaagggtctgggcggcgggcggctgggtctgtgcatttcttggtttgcaccgcggcgcttcccagcaccaacatgtaaccggcatgtttccagcagaagacaaaaagacaaacatgaaagtctagaaataaaactggtaaaaccccaaaaaaaaaaaaaaaagggcgtagcatcatagtagtttttacagctgtgttatwctttgcgtgtagctatggaagttgcataattattattattattattataacaagtgtgtcttacgtgccaccacggcgttgtacctgtaggactctcattcgggatgattggaatagcttctggaatttgttcaagttttgggtatgtttaatctgttatgtactagtgttctgtttgttattgttttgttaattacaccataatgctaatttaaagagactccaaatctcaatgaagccagctcacagtgctgtgtgccccggtcacctagcaagctgccgaaccaaaagaatttgcaccccgctgcgggcccacgtggttggggccctgccctggcagggtcatcctgtgctcggaggccatctcgggcacaggcccaccccgccccacccctccagaacacggctcacgcttacctcaaccatcctggctgcggcgtctgtctgaaccacgcgggggccttgagggacgctttgtctgtcgtgatggggcaagggcacaagtcctggatgttgtgtgtytcgagaggccaaaggctggtggcaagtgcacggggcacagcggagtctgtcctgtgacgcgcaagtctgagggtctgggcggcgggcggctgggtctgtgcatttctggttgcaccgcggcgcttcccagcaccaacatgtaaccggcatgtttccagcagaagacaaaaagacaaacatgaaagtctagaaataaaactggtaaaaccccaaaaaaaaaaaaaaaa

SEQ ID NO: 147188 - DNA, 1043 bp, Homo sapiens
gccatggcaatgacagaggctgtattttactgaagtggagggaagaggtgaatgcaaatgcctagggcctaagtatacaggaaggtgtagggagaggtaagcagtgtgtatgtggaggagatagcagacgtaagcagagagaaatcagagagcttagttcttcctctggggcgcactttgtggttaattaggacatgcaaatgagctagaagctcatttaatatcctccctgacatgtagccccaccccaccctgccccacttccctggcaggtacaagggccacctgattggcccaggtatctgtggaaggttccacctgcttctttgtggcccaggggaacagaaaagagtccctgctgggcatggctagtgggggccggcctgggtctccctcctcccttttctcttcccaacctttcagacttggggacctctcttttccctcttcctcagacacttcccttgtgccccgcccctcagggtgatcttctgaaacccaaacttggcccaaaaaaaggtggctctgtcctctccacatccccatcttccttccctaggggccttgttgggggagaggctcctcccaatctttccccaagtcacacccatttgggttctaacgtgtgttggacaaaaaagcaagagcacacccttttggtccccaccttctcccagagcagccagaaccccccccttccaagtccttcccccatcggtgcagttaaggcactttttgccagcaccatgggatgagcactagacttggagttaagatttgagagccccctctgtcactgtggaagcttgagcatgttgcttgatctctctgaaccttgtgtttctcatctgtgaaaggtgataatgtggggctgctgtgagatttaaaggacataatgcacctacggtccaagcactgcctggaatacagcagaagctcagcagatactggacaacccatccccttagtagaggcactaaccatgtgacccaaggcaaaagtgcttaagaaaaagtgctttctctgaaaaaaaaaaaaaaaaa

SEQ ID NO: 147189 - DNA, 579 bp, Homo sapiens
gccagaaggtgcagctccagcagcaatggcagtgacggcgttggcggcgcggacgtggcttggcgtgtggggcgtgaggaccatgcaagccccggggcttcggctcggatcagtcccgagaatgtcgacccggggcgcgggcttccatccgggaagcccggtggggccttcggaaagagagagcaggctgaagaggaacgatatttccgacattacaggttatgctttgagatctctttggggtgaaggattgaaattaaaccctgagccaccgtgtccttgtagaagcacagagtagagaacaactggcagctttgaaaaaacaccatgaagaagaaatccgttcatcataaagaaggagattgagcgtctgcagaaaagaaatttgagccgccataaagcagaaagattcaaaattgctaaaacattgatgattaagtgcacaccgtgtgccatagaatggcacatggtcatttgcccacttctggtgtagacatggttcctggtttaactaatatttgtcctgtgtgctactaacagatttataataaattgtcatccgttgaactgtgaaaaaaa

SEQ ID NO: 147190 - DNA, 1921 bp, Homo sapiens
  misc_feature (1)...(1921): n = a,t,c or g
cgagagactgcttgctgcggcagagacgccagaggtgcagctccagcagcaatggcagtgacggcgttggcggcgcggacgtggcttggcgtgtggggcgtgaggaccatgcaagcccgaggcttcggctcggatcagtccgagaatgtcgaccggggcgcgggctccatccgggaagccggtggggccttcggaaagagagagcaggctgaagaggaacgatatttccggtgaggctcaccgggtcccaagtccagccctggatctcccaatggccttccaatccttaaactgccaatcgccccacccgttcctacctggtgccttgggcgccccatcccccaacagaactcccgggccccaatccagtataccctaacccttgatgtcccgaccgttgccacgtatagggcactcccagttacctgcacaacagtttcaggcccccaaaccgtttccaccggcgggtctccaaaacaacccacggctcaactcctcctttatcattaccatctcccgcgtggagttctcctcaggtcgtgcgaaacacccccagattcttcgcacagtgtctagatccgaccgcccaacgtttgcctcccagcctgactccctcggcccttacccacctgtcaccccctctacgctctccttcctcgccagcacgccttagctttgcaagcctgcatgcattcaggcttctcaggtgtttctagacccccgactccgcaagagtgaggatgatgggagctggtcatgggagctacttatggttggacaccatcttctaaaggcttttgccctactcagcccaacctagacctgtagatttccctctcctgctttaggagtatggagtgggctgggcctccctttgccagccttgagttatctttaactgacttctgtccactctggagagcagtgaggaattaatcttgcttttgcttgtcctttggcctttcacttctgccttctgtttgagaattttgcaccatggacacctgccatgaccgtgatagagagccaaggtacagccgttaggaggactatctaattgagcccctacatttttgtagttaaggaaaactgaggcctaaatgtgaccaaaccaacattgtaatccagttcccttcttggaacctaaattgaactgccaagtactgcgcatgcaagagaccctttattggccttacagtgggccattcatttctataggcaaagaaagctctagacagattggaataggaaatggatatttgccttttagctacacccctttgtctgtcttcctcattttgttcctttttttttccctaaaggggagtcaagttccctgggttgttcccctcataaggtattagggacttgtgtcacatctctctggagttttctattttaaagaggaatctgaaagcaataagctctttggtcttcttaagatggctacacctcaatttaagatggggtattctttcactagttgaggagtagaagaggatgacccagcctagactccccatggaattgggactccctattccttggcttagacattacgggttatgcctttgagatcctctttggggtgaaggattgaaattaaaccctgagcccaccgtgtccttgtagagcccagagtagagaacaactggcagcttttaaaaacaccccatgaagaagaaatcgttcatcataagaaggagattgagcgtctgcagaaagaaattgagcgccataagcagaagatcgaaaatgctaaaacatgatgattaatgtgcacaaccgntggccatagaatggcacatgtcattgcccacttctgtgtagacatggttctggtttaactaatatttgtctgtgtgctactaacagattataataaattgtcatcagtgaaaaaaaaaaaaaaaaaagtttt

SEQ ID NO: 147191 - DNA, 555 bp, Homo sapiens
cattagcgcgtaacgagagactgcttgctggcggcagagacgccagaggtgcagctccagccagccaatggccagtgacggccgttggccggcgcggaacgtggcttggccgtgtgggggcgtgaggaccatgccaagccccgaggcttcggctcggatcagtccgagaattttccaaccgggccccgggccccccatccgggaaagccggtggggccctcggaaagagagagcaggctgaagaggaacgatatttccgagcacagagtagagaacaacttggcagctttgaaaaaacaccatgaagaagaaatccgttcatcataagaaggagatttgagcgtcttgcagaaaagaaatttgagcgccataagcagaagattcaaaatgctaaaacattgatgatttaagttgcacacccgtgtgccatagaatggcacatgttcattgcccacttctgtgtaagacatgggttctggttttaactaatatttgtctgtgtggctactaacagattataaataaattgtccatcagtgaaaaaaaaaaaaaaaa

SEQ ID NO: 147192 - DNA, 428 bp, Homo sapiens
  misc_feature (1)...(428): n = a,t,c or g
gacttctccagatactcggcacggagcctcagaaggcagtcattgtcctggtggaaaacttctactaatatgtgtctaagtacagcctggtcaagaacaagatgagcaagagcagcttccgcgagatgctccagaaagagctgaaccacatgctgtcggacacagggaaccggaaggctgcggataagctcatccagaacctggatgccaatcatgatgggcgcatcagcttcgatgagtactggaccttgataggcggcatcaccggccccatcgccaaactcatccatgagcaggagcagcagagcagcagctagagacccctttggccacacnnnnnnnnnnnnnnnnnnnnnnnnnnnnnnnnnnnnnnnnnnnnnnnnnnnnnnnnnnnnnnnnnnnnnnnnnnnnnnnnnnnnnnnnnnnng

SEQ ID NO: 147193 - DNA, 860 bp, Homo sapiens
gccaagtcaagaaggagctcagccactatctccccaccgagccagctcagcgggcagggctgggagggagtgggacagattctgggagtgcagcggggaggagtcccggctgggctgagcgcagggagctgctacggcagtgccagagcccaggccccagagccctgctggagaggaggcagactgaggcagcaggccccgccagcaggcgaagcagggagatgtcagactgctacacggagctggagaaggcagtcattgtcctggtggaaaacttctacaaatatgtgtctaagtacagcctgggtcaagaacaagatcagcaagagcagcttcccgcgagatgctcccagaaagagctggaaccacatgctgtcgcattgctgaccctgcttcctccccaggacacaggggaaccggaaaggctgcggattaagctcatccacgaaccctggattgccaatcactgatggggcgcatcagctttcgatgagtacttggaccttgatagggcggcatcaccggccccatcgccaaattcatccatgaggcagggagcaggcaggagcaggcagttaggaggacccttttggccacacctttccaggcactggcctgattgccccgccctgggtgctctccccaggctccctcctcagcctcctgcccacccagggccctttactctcttcttccttcaagaccttcctctgacccttgctgaactggggtccctttgtgagtgtctcagtctagaggtacctccctccctggggggtctcagctcctggagtcgcaggcccttggggcccctctgtgagatctcaatgctgtctgggggaccctaaagagttttctca

SEQ ID NO: 147194 - DNA, 877 bp, Homo sapiens
  misc_feature (1)...(877): n = a,t,c or g
caaaacacaagacccgggggaaaaaattttcaaaaaccacacccgggagcaaaacttttcaaccgccaagggtattccggttgtttttccccctttaccccttaaaaatttttattttccctaaaagccttaaaaatgctggagggagggtgggcccaattaggtcccccccccaaaaaaaaggttcttttccaaaaaatcccaaggtaggtttttaaaaggccccccttaagggaaaaaattttaacttgccaagcccccgtaaaacttgggcccccccaagggttctttaaaaagggccccccnnnnnnnnnnnnnngccttcctggtgatcagggagtgtgtccaacgtagccccctggcctgtgcaagccctgactccctcatggtgcctcggagagtggggagcatattgggctggggtaagcactagacccaagtagactggacacaaagggctcgcccagggccctggcgccacccccaccccttcccaccagatgatgatagcctctgtggttgtacatcccacttgcccccacacggagactgactctaaaacccttcatccaatggtgctaacccccggctttcccctgccccacctcacccacccagagaagcacagaccccgccaggggcaggggcccaccgcacacccttgtcccgggcctgtctgggactggccttcccggctcagccagtgaggctcagaagggacacaaagagggatggaagaaaagaacaaagagaaactgttcctcccacccccttccctgatgccaggggcaccagactgattctgaggcacaaataaaagaggcttcataccgaaaaaaaaaaaaaaaaaaaaaaaaaaaaaaagtcgtatcgatgt

SEQ ID NO: 147195 - DNA, 354 bp, Homo sapiens
  misc_feature (1)...(354): n = a,t,c or g
cggcttcattgaggacaaagttcaagatggggttnacaggcctctttcccggaggacctcgcntggggcaaggttctcaaggccaagatggagccttaaaaggagcatgggggtagctctgaggtgcctttgtctgatgaccgggtgaatgtncagctgggagtcactggctggtcagattcacgttggcagcacctgacangatgtggctacaaatgaccagagcggttctgtcgtcaaacttggacccgtacgtctgtcgccgtagggccaggggtaggagttctccttctgggccatccttaganannaagggggaggagagctggggtccaaggcactgctactctcccg

SEQ ID NO: 147196 - DNA, 681 bp, Homo sapiens
  misc_feature (1)...(681): n = a,t,c or g
tttttttttttttttttcaggatatgggttgggaatcatggcctgaaggccaggccctgcctgctcagtcccagatatcatttgtatgtgacgagccctgcagaggtcctcaccagctgggagtcactggctggtcagattcacgttggcagcacctgacaggatgtggctacaaatgaccagagcgggttctgtcgtcaaacttgggacccgtactttggagcataacggggaagaaagtgcttaaaggattgctcattgcaggatctcaagtttcccagcaggaactcgccatgcgnggtcatgggggcgcagggacggagggaagggccttaccgtctgtcggccgtaggcacggggtaggagttctccttctgggccatccttagagagaaagggggaggagagctgggcggagaagggaaacagccgtgagaagcagagaaaaagagagagagagggaggggttggaccgatcgagccggaagcgctagcccgagctggtaaaagggagcaggtcagcacactagccccaatctgggcgctggtctcaccgcccccgccctgctatcgtccctacctccttccagccctgcgacgtgcgcgcaggccagcccaacggaccctctgatctacctgatcatctgcccactcgccggcgcaaggcctgcgacaggaggc

SEQ ID NO: 147197 - DNA, 769 bp, Homo sapiens
  misc_feature (1)...(769): n = a,t,c or g
gagtgtcccttcagccagtctcagagctctttggcaattcaactgacccttgtccttcagtccagacaatgccccagggcccacctgcattcaaactcggactgttctccttcccacccctattatcttttcaactttatggacagtacatgcaattttctcattcattttctcatttaacatctaacagcttcatgannnnnnnnnnnnnnnnnnnnnnnnnncaaggctttaagaggatagggaccctaatcggctaaggcagaattaggatttgaacccagatccccatgatgccagaatctaagccttgaccaaatatgtgttactattacttttgttgttggtggtggtctgggtaactccaaccctctgctcgttggccttgtcacctcagtgctgattttgcagatgaagagactaaggttccgaggtgctagagcacagtggttaggaacacacactctatagccagagtgcctgggtttgagcctcgttctgccgtttactagccgtatggccttgggcaaacttgcttaacttctctttgcctcaagttcctcttctcttgggttgttaggagaatgaatgaggtgatatccacagtgtccaacaccctgtcaagcggccagggtgtggtgggattcacacctggcaatcccagcacttttgggaggccgaggcaggtggatcatttgaggtcaggagttcgagaccagtctggccaacatggcgaaacctcatttctaccaaaaaaaaaaaaaaaaaa

SEQ ID NO: 147198 - DNA, 2220 bp, Homo sapiens
tttttttttttctccttctgccaaaacaaactttattgcaccaaaaaggaaaacaaaaaaaaacaaaaaaacttcatttatatacagtcagatataaagacatctctttgactcctgtgcatatatttcctcaactcaagattagggcataaaagtcaggctgctatgccagacatgctctgccctatggcagggcacaaggagaggattgtcacttgaaagtgggaacacttaaatggatgacagacaacactggacccacagaccaagagcattcttctaagccctgggagtagctcgaggaatgggaaggagggaaattgggaagcagggtccccttttcgaatcttcaatgtgaaagaagacccagcctcttcatcaagggtatcccaagataaacttccgttccccaagcccaccaatccctgtcccagttcctttgcttcctgccctccccaaatagggacattctccttttgtgcccagcccccctttgcaaaagatccctcccaaggggagtccccatgatcccacaaggcagagaccttccatagcagagggcagggcaggtacacaactatcctctcccttatggatggctgggacactgactgaggccctgcatcacaagaatcgccaatacccactggggagccataaccaattaaatctgggaagtacggggagaacattttcaaaaagggggaaggatgggattccctttgatgcccaggggttacaggggcaccttaaaggcacatttttttttttctgagcccaaccagctaaaggatcactgcagcttaaatacaggatagagaagcaacaaagcccaggcaaatacccattcagagacagtgacaagagcatgctgggggcacgggggaggcggaaggaagagaaagaaggggaggagcctccagagtcccagccccaaccccctctgccattggctaacccttgctccccacaaattccctgggggttgtaagtggaggaggtactgacagggctggggtgaaaattacacaaggacagcccaaacaaattacaaccaagggactaggcatcagtcttccccctttctttccacccccaaggaaaaattacccttatttgtgactagtatttatggaaaatcttgttaaggagacttattctattgtaggtgggctcttaatcccattattacacagcagctgccctgtgttggggaactttttcaaaatcaagtgcattgccggggaaacaaacaagtattttcaaccttccttacggtgcccatgcaggcttttacccaagaccttggttaagtccccagtcacatttactttctgtcttacatcctagaaaagggtgaggaaagaggggaggggagaaaggtgctcaggtgcctaggttaaagcttactggatcagcagccctagactcccaccactgttcccttctctttggtcctgtcctagaacagtgaactaataaattaaggaaaaacaaaattaatgctggcctgtgggaaataatgggggaaggaaggcaaggaggaaaaggggcattgggaagccctgcttcaagactgaaagacagacaaatagacaaccacccagactgcttaaagtgtcacagacagcccccaccccaagctccccttcccaggtatccccataaatcatttgggcacactccctcttggaattgcaatttccatcttccacttatccctaaggagctggccctgtggagaggtgtgttggttgttttgtttttgccaaaggccctcgctctaggtgctcctgtaaaaggtaccttggcccctgatacgggatgaatggatgaacgaagccccagatgctccagtgccgaggaggtcagaccgggaacaggcccccactcccacaccctgggatcggagcttgcttggttcttgccatcttgcaggatgacttcgagtctggagggagatacacagtgcctctccatccctggggtggggggaagggattctgctgggactcttgagtgggggaaggggagatgggagcagggtctaaaccctcaggctcccatgaaggtctgtctctgtcccagatgaactgctatcagagtccatttctgcattctcattatggagcctctccagcactttctgacgtatcagtcccaggcgcatcaagagggactggtagtcaaagtggccccgcttctctccaaaagggtcct

SEQ ID NO: 147199 - DNA, 787 bp, Homo sapiens
tttgcggggggggtttgttttaaactattaatccctgccgcaaagccccaagccaacaacaaaaatagtttatacccggggataatagctgctatttagaattgccatctttcctgcttttaggtggagtgttttttcagttgagtgttcttaagatgggcgttgccaacgagaaagacagcagaaagaactttccttggtatccctcttcacagctttgaagaaaaaagaatacattttttagaaataagtgactgatagctccaatctattacacacttcaaatatcaaagcatatgctgagagagaggcgcagaagatgttttgatggaggttaacgccttttttggaataagccaatataggctactaagaagataattccttggcaagataaaactatcatctcttctgaaatggcattttttaattcttaagaatgtagtagattttccaataaaagtagggaacaaggaaatatcctaacaattttcaagttagtttttaatgtcatatccaggaacacattaaaggtggtcttactaggtcttgacacaagctgtactggagcttgattaaaatgaacattttctttaccaagactagattttttttttctaaaggctagaaaaccaagaataaagaataccaagaataggccgggtgtggtggctcatgcctgtaatcccagcactttgaggggccaaggcaggcggatcacatgagttcaggagtttgagaccagcctggccaatatggtgaaacaccatctctactaaaaaaaaaa

SEQ ID NO: 147200 - DNA, 1712 bp, Homo sapiens
  misc_feature (1)...(1712): n = a,t,c or g
ggcacgagtgccattgggccccccatggacatgggagggccttggggtcagcacttggacaccctagtgggatgggggagtgagaggcctccatgggtcttcactgctgcttggggccctccgatgctgctcaggatacagaggcaaggcagaagcctggagtgggcggggagcagggcctcactgaggatgaggcgtgggggcggccttaaaaaccaacagtggctcctttgagagtctggtgagggtcactcactccattcttgctggaccaggaattgtcctcttgttctgcgctgttgagagggtctgatttgggggagtgacagtgttggggggcgatgaggtctcctgggctcttgcagtgagccttgtgagcaagctgaccctgtggaggtgagacactctggattggaccagggcggacatgcctcacatcatttgtagaggggacgcaacatctctgcaggtggcccaaatggacaactcccttcctagtgtctgtcaagaatggtttgcctttggtagcagggagaggtggaggattgcctatgagaaacagcggcagccccccaacaagaccatccatctcggtgtctgtcttggtctgatacgtcggaccaggccatgggctgaaggaagaaaggctcaatgctgacatcgcaacagcccctgaaaaggccagagcccccccattcctaggcaggcctgtcttgctcgccccttgcatctgggaaagcagtgggcagggtgggctagactcttcccccaggatcctcacagtgggccctgtgggccctggctgctccctcccaaaggtcagaggcaaattggtgaccaagtgaatgtaccagagcgggcaatggcattacatgactgctaacagaaacatggcaacaaccatttcttctccaaggaacataaatagaagatgtgcagaccggcaggggctagtggcagggggctggctgtgccattggttttgatgcctcctcagcctttgggcaagccccaaggctggggccccaaaaaaaaacgagggctgataaggtgacctggagtgagggcggtgcttcgcccacccctcaggaaccatacttccangcgctctgcctctgcacattgctcaccaacacacagggtagaaaaccactagctcttcctggagagaacagaacatgcagcctccaccacgtccccagaaacagccgcagacttgagctcactacatcaagaacaccacaccgctgctccaaggaacaggctacaagcacagagacagaggcatacagagacaaagagagaaagagacgcaacatggcagcagacactgctttttttttattaaacattaaaaaaaaggtcaaaatccaagcaaacttgaacccgagaatgtacacagaagtaggaaacacagagaacagagctgtcccagccagccaagcgagcgatgctctttttgggagaacgttttcatagacggaagtagattccatgggcctccaagacaatagaatcctctctccattcctcgccatatgggttttgttttttaagtcatttggtttggggaggaccttgttttttttctgttttgatatttttattttttctgcagtcaccggctcccaacataatctgcaccaactggagatcagaaaccaaaaaaaaaaaaaaaaaatttttagccgcaccaaaaaaaaaaaaaaaaa

SEQ ID NO: 147201 - DNA, 506 bp, Homo sapiens
acttgctcctgtccttggcttgcccctctaaccctccaaaagaactgtcctccccattgtcatatcctttccctgctacgaaagacaaaacaaaatgatgccccaaagaaaagtcccagaggctctctcccagcagtcagtgggatgaagcaagacactgttaccttgggtaggatggagaagccacccaggtccataccacagaggccacagtgggatggagaagccaccaggtccataccacggaggccacgtgtgccaccagtggagccaaaccctggccatggctggcaaaactcaccaccaggcgagaccagagcatattatctaccagtaatccccgaggtccaacgccattcaagtcaggcagctgactccactgtcctgggagtgctggaatctccacaccacttaaaatgaaaaaggaaatcagaaataataaggcattagacgtttgattcttttatttccatatgcaatgtaatgtttaggcacgctgcttggga

SEQ ID NO: 147202 - DNA, 2352 bp, Homo sapiens
ctttttttttttttttttagaaacaaagaatcaggctttatttttgttattttgaatacaggtattgtgcattcgtaaaccactctgttagtctcataattcagtagtggccaacacacagaaaattaaaagtagaaacaaaatgagggcacacttgctcctgtccgttggcttggcccctccaacctccaaaagaactgtcctccccattgtcatatcctttccctgctacgaaagacaaaacaaaatgatgccccaaagaaaagtccccaaaggctcttctcccaccagtcagtgggatgaagcaagacacttgttaccttgggtaggatcggagaagccaccaggtccattaccacagaggccacagtgggatggagaagccaccaggtccattaccacggagggccacgtgtgccaccagtggagcacaaaccctgggccatggctggcaaaaactcaccacccaggcgaagaccagagcatattatctaccagtaatccccgaaggtccaacgccattcaagtcaggcagccctgaggcaagcaggaggagccctgtccctctgggggtgcctgccttcccagaggaggcccccaaggacagtctcttccagagaggggcctcacccgggaaagggggttccctgaggaggcgtgcaaaggtcaaagggaccccaccccttgcccacctgtccccagggccttacctgcctgactcccactgaccccgggagtgcctggaatcctcccacacccacttaaaatgaaaaaggaaattcagaaataataaggcattagacgtttggattcttttatttcccatatgccaatgtaatgtttaggcacgctgcttgggatgctacttcgtaaaaaaattgttggccatttttcagaatatccttttggttttaaatactggtcaggaaaaacaaatgatgtaaaaatacgtgaataattttctatctccagaaatgaaaaacctgatttgcatctaaaagtgcaagagggtgaagtaatttacccctttcaccagacgatatgggcaatatacaatatattgcttgaagctgtttgagaaggctgtgatgtatttttgtattgacatagaaaattataaattacattgaattagtatccataatcactatatatatacacaaaccagttctaaaaaaatacactggtttaaatttatgagtgaaaacctcacaaggtaccagtaaacaattagcatgcttcggtgccagatttgatttcctacttttaaaatactagcctgtaaaatggaacgcactctaattccattagcagcacgagcattttcaactgacttgcctaataggatttattttaggtctgttaaatatgcagattgctctgaaatgttcattggtgatgcttgttaacaaggtaaattttggtgaatgggttaaaaggcagatgaactaccaaatgaaacaaaaaaacaaacaaaaacaaaagccaaaaaaaaaaaaaaaaaaaatcccaaaacacaagccatataccctccaaatagtatagtgtttcccttgtagagaataatcgtttccgagcaaacagagacttgaccggaacatatggctttacgataacatcaatttatcaactatgatgtagcaataaatactttacttaatctctaccaatagacttacatttttgatccgttttaaacaatacagaaaacaattaccaatcaaaaactggttataaaaagaacaccaaatatttcttattcaaaatcacttttgtaagttagaacaaccaaaataacacttagagggcattttcattctacaactccttgtcggcctggaggaaaaatgaattcataattttgtacaaggtgaaaaatgtatgaaaaccgcctaatactttggtcacactaataattgtcaaagttatgtttcaaatacaatagatctgtgtattcacttttataaaactattcttacagccattttaactatagtattactactattattacatgggtggcaagatcttatttcacaggctacccattatttagaacaatacaatataaacatacgcaaaaattcttggtatttgtcaatgtgcaatatttttacacttctgaatttctctgtacaatgtcttagaatctagaatataaaggttgctggtcctgatcccttgcagagtgagtgcagcagtgacagcttggtgggctccagctgacccctccagagcccctgagtggtggcggtctgcagtcctcagtcagcagcagcagacgtcacccgtcatacagggccattcactgaagtgtcacctggtgcgcttggttggccagtcctctgctcg

SEQ ID NO: 147203 - DNA, 730 bp, Homo sapiens
cacccctgcgttcacgagccgatgagtttcgagtggccgtggcagtatcgcttcccacccttctttacgtgaggctcagaccccaagaagcacggctgggcctccctcccctcccccggaccctgggctcagccctgatgcttcatatggggagggggagaaaagacccgtcggccaacaccctcagtcccttactttcttcctgaaatgcgtcccgggcaagtgctgcctcccgccctctaattctgcgccccactcccttcacccggcaggttacaaccgaatgtggacactcggcagaagcagctggccgcctgggtgctcgctggtcctgtccttctgccgcctggcacaaacagtccagcattgacggtgatgggaagcttcagggagagcccgctctttcaacaacgttcaagctacagcgagaacgttcctgttggagttcgatccagattgtattaagaggaactggaggaagaaagggaacctcgagtggtttggataagagcaagtccagcttcctgattcatgtgggcggaagccagaaagaatgggggaaactcatctatcagtgggtttccagggagtgggccagaacaattccgtctttaccctgtattgaactgactaatgggggaagacacagaggattgagggatttccacgggttggatgaagccactctacttgcgggctctgcaaggccttaacagcaggagccacaagg

SEQ ID NO: 147204 - DNA, 1709 bp, Homo sapiens
gttcagtctcaactatgtgtccaagaccttatcctgagagtcttcatggaataatctagaaagggctgtagaagcaatcaaactctaaactgcgctctagactttgtcaatactttgcttcgtaagaattagggattttcatatcagagtgataccatgttgcaatctctttagagaagagagagcctagcagggaataggctagtggaagaaaaacatacttgagatggttacccattggtccctgcaggcatctgggccacccttttcctgtaggtatatattctgccgttgtgaaacaactaatattattagatgtcagcaaactataatcagaaataatttttaattatagtggcaacttggattaatgaagctctcatatacaacctcacaaacaaaaaggaaactttattacgtggaaataggtagcatatgtcattgggtttaaaagcaacatgcctgcaaaacatatgataaaaaatacctctgtaagggtttttatttgtccaccttcgatggaaggtaaacatggctgatcccagccaagatgaaacaatagccctttgtctcctcagaacaacctatctccaactctttgtccactgttcttaccccaattaaaacaagaaagcatgtgctaatccttttttaatttttatcaacctgccttggccttcctttcactgtactccattattccttctgtggatgttctaccttcttcaccttttgagaccagggtgagttgggagcagtttgcctaccttcttttagaatctggggcttatcttttagtacaagccattgaataagcctcttccttttttttgctcaaacattccacatccttgtggattcccctgcattgtttgttttatataacatttgatatttgttggagcttgtatatgaacataattttctttagaggtagtcactgttctctccagtatgacccaggtttcttgactctgagtaatgcaccttctataactatctaaatttctactgaagctttttggattatgagtatgctgacttttcacgattggctggtgcatgtttagacttaaatgtcatatccttcatgtctcaaagccaaaatagtaacatctcatctcagaacagagctgtgaccacatgccaatatatgtgtcacaaagtctacatatgttacattccttggaagtctccttaaatgtttcacaaaatgtcaacaagcttgttttgttattgatatttccgagattgggcacatttaagacagtaaacgggaaaaggtggtgaaaaatgcctataagaagatggctgtaccctggagaattgaaaaaatggagaatccggacatggtttgaaaaaatccatgaagggtatatataaaggatgccatgtgtaggagcccattaaaattccataacagtatgtgccccttcagccgttttaatccttatgaagtggttaagagataagtccttcggagttggacaaaaggatttgaatttaggttctgtggattattatgggtccttgataaattctcatagcctttttttttgttcatctctaaaataggaatataggattacctaccacattgactcgtaaggactatatgagaccatgtatatagaatgtttaactatagtaccaggctttacaaagaactcaataaatgtttaccattattgaaaaaaaaaaaaaaaaaa

SEQ ID NO: 147205 - DNA, 472 bp, Homo sapiens
gttttacctatgggtgtttcattaaaccagaaggcagaagagacatacttggctgcaaggcttgtttctttgcttcctcttgagtacttctgcaaaaatattacctgggacctctttgtgccatgttgtgaccaacactgtcattcctgatagggagggaaaatgtgattaaattccccacagtttaatttgaaatgctatattaaaagatttgggctagaattctcttctggtcttcgttttgatagtgaagtatactggcacatacttaaaagttagctcaatcaaaatgcttcataaatcccagctttcgttactcttcaaggaaaagatgccagtttacttctctttaaataatgtgtttagtctgggcatggtgctcatgcctataatcccaacactttgggaggccgaggcaggaggattgcttgaagccaggagttcaataccagactagacaactaaaaccctg

SEQ ID NO: 147206 - DNA, 1466 bp, Homo sapiens
atttatagatttgggatttgcgggccgggttggcccaaccctcagaaaaaattcatgtccattttcttttaatggaagcccggatgccaacttaacttttttatggtttttgggccataaatcggccttttgccttaaggtttccccaaagaaaatgtcatacatgtgtaaagacctttcacataagataaacattgaagctatttgtgatatagcatccaaaaattattcagttctctagtgtcaaagtttagccgtttgttttttttttttttttgttttttgcggctgtaatgtgcgaatgatgtgttttattttccttggatgcttaacattactaacaattgcaaaaataatactgaggagcactactttgcattgtttgttagttggagttttggatactgatcataaatcatgaatctggcgtattaatgcttaacttcagcgcttttgggttgtgtgtatgtgtattttttctccccccaccccgcccttttttttttaagaataaggacaagtgcttacaatctgctcaagcaattgtttttcagatattggaattcagcaaagagtgacctctctggccattctaaaactttaatgttgtgtcctaaatctggtggaggaaaagcatgcgctgttgaaccaagctgctcactggacacatatttgtgtccccaggagattatttgtcaggcactgttttttatttgtttgtttgttcatttattgttgttttactgctattggcgtggacatgaattgtgatacagctattgcccataatttaatgtgaaattaatcatgatgaattctatagcatgctactgaaatgccaaattcagctattttctttctcttctaaaatggaagtttcagttttccatatcagatgtatataagtggaattataacacaatcctatcactgacagtaatcctcagtcaccttaaataatcagtgctcacagtgctgcttacagttcatttagttggcacatataaacctgtacccacacaagactgaccaaaaattttctttgcacatttttcctttctcatagtttttttctatatttcgttaagcaaaggaaggttaatatgcctatttttcctgttaggcttttagaaattattttccatgacttttgttcttataataggttagacagtttatttttcaaaggtaaaaattgtgtttctatgcattaatgtgattgaactacaaaaacagagtgcaatatgttcaaaaaatactcaactaaactttccccctgtcatatcactgcaaaagtcgtcttttaaacagagccataaagaaatttttttcaaatttctttattgcacaggcttttttcagttttacctttctgggattgaacaatgttcctttcataatgccaaagcattcccttccccagaaaaatctccttggacaactggtttaaaaacgttattaagtca

SEQ ID NO: 147207 - DNA, 950 bp, Homo sapiens
cccacgcgtccgcccattgtctgttttttttgtttatttatttacttattaagacagcatcttgctcctcacccaagctggaatgcagtggtgtgaactgggctcactgcagccctagaccctgctgggcctcaaggaaaccctccctgcccccagccctcctcagatggctgtgacctacaggtgggcaacactatgccctggctaatttttaaatttttttgcagagatggggttccccactatgttgatcaggctggtctcaaactcctcggttcaagcaattcgcccaccttggcctcccaaagtgctgggattacaggggagccactgcactggccttcattgtctttttgctgcacaacctaaaaaaccagtgaccctgtattggatctcgcctgcagttgctgtattgatttgggcccaggcagtgtttttaagtgataagaattagtgatgaagatctaaagggatattttgcaccaaaatccaggtttctggcatctcttgaaaaatccaaagatttcgcaagttcacctaggctctcagaaagtcgcagttgttgggagttgggccggagccagaactcccaacttactgtggtccggccactcatcccatcagctcctgaccaagcatgagtagccattcatcatggcttgcttttagtgtttttggtgtttatcttaaagtacagcaaagaagaaagggaagtatttcttgaacccatgtctgtgtcaaaacagtccttgcatctttcctgtctttaggtacgcaccatctttgctgtctttaagtatgtgccatcatgggcagagggggctaggccaggaacacctggtgttagatttgtagccagtggcaaccgtacccatctgtatccccaagttctacacggaatccctccagcacttcacgactccattatccagctaccactaattcctttg

SEQ ID NO: 147208 - DNA, 1045 bp, Homo sapiens
gtcgcactttggggtttcactaatttctccttcggaaagggtttgctcaatggcattcaggacaaatctttaaacagttcaagaattttcctaaactaatttcctacagagctgccccacaactggaggatggtgtgtgatttcccatttttttcccaaatgtaaacttcgaccatcagaataacacatggaacgtcttctatctttcctgtctctgcaactcacaacactgccaactttcccaggggttttccttccccaaaccctcaactcctggcttttagattcctttccgtattttcaattaagacatctcctaaacaatgacagtctttttgtgaattaggcattaaacgattgcattgcagttttccttctgcagctcttaagaagtcatcctttctttcacactttatgtttaaatctggtgaaattttaaagacactgccaaaggttttctgcattttgaccaccagcagaaaatccttgacccctgcctgccagggtccagagccaggtttgggacctatcctgaatgcccacacgttccttcagttacagaagcacaagaaacaggactgtcagttcccagctttgggttccattttcactttctgacttattttttgcttttggaatatttttattttcattaaggtacattatatttgcatttggatcttcatcagaagtagcattgccaagcgatgaggaactttttatataagagcagaattcagagacatcatatttatcatagccttgatgcatatgcaaatctgggtcatgacgcaaaagatcctttcttttcactggatttttaggaggcttcacttcttccagtttgccatttgaactgaaataacctgaacccagtcttcggatgctcggaatggaaggtgtcatctcagggacttcaggcagctcgggaataggactgaggaggggcttcttagaagcaatgtctctttccccatataaagatttctgaacacttttctttccctttcctttcttctttctgcaactttttaaaacctgactc

SEQ ID NO: 147209 - DNA, 111 bp, Homo sapiens
gatcctttgaggttgccttccctgatgctgcggagaaaatgaagaagtcattacacagcttaaagaaggggtgctactctagggtctgcgacctcccgctggactgcccag

SEQ ID NO: 147210 - DNA, 143 bp, Homo sapiens
cacgccaacactgtcgcactcgctgtgcgagggccccgaggactcctcctgcgaacttccaggaataggtgactcctcctttggcagctggaagtttacgatgcaagaaaacatagcctggcgccccgagtcactgtcacatc

SEQ ID NO: 147211 - DNA, 1288 bp, Homo sapiens
ctgggttcccacctaacttgcactgggatagctatgcctatcactgtcattatgcgggccatattcatctgggcatgtgtgggcttgctgcacctcctcctacctgagttagtagtgaccaccttcggagatgaaacaatctagagttgaaatatattctttattttcaggatggaaataggatggggaatgtaggaaagatacctttgtttagttgccactgcagtaccatcgaaagaacatccacgccaacactgtcgcactcgctgatgcgagggccccgaggactgcaagcaggaacagattgctgggcgtcagagcctcgggcctggccagcagctcgcccaggctgggcctccagggctcgatcagctcggcatcccgcgggcgcccagcgcagcacgttcccggaacgaggcctgcaactctgtctccgcccgcgggggcgggcccgtcacgttaagaaagaagtagagccggggccagggggcgctgggtcttgcttgatcacgcaggagaacgtcccgcggtgcgtgagctgagccggccggatccgcgccaggtatccttcggcccgcggaatatctcggaaataggacaagtcctgagtccggagacctcctcctgcgaacttccaggaataggtgatctcctcctttggcagctggaagtttacgatgcaagaaaacatagcctggtcggcccggagtcactgtcacatcgtgaactgggcagtccagcgggaggtcgcagaccctagagtagcacccgctgcagaggaaacgccgggcgaactcctggagaccgcagggaagggatgcaagcctgggcttctttaagctgtgtaatgaccttcttcattttctccgcagcatcagggaaggcaacctcaaaggatccctgggcagcagccagctcctgcagggcatgggtcatctgggtgaaggtgtcatgcaggtggcttctctcatcatagtctggcggtgagggagggagcaggggctgggggaggcagctccccgcaacaccatgtccctaatgcgaacattctgtttctgagtctctgccctcccaagtctgtatcctcccctctctgactctttgccccacagtcgctatgcttcctgagtccctcccaagtctctatcctcacctctctgtgagtctctatcctccctgagtctctgcccccgaccagtcgctatcctgcttcccctagtctctgcctcatctctataaacacatctctgggtttccatcctctttgagtctccgtcttccaccctct

SEQ ID NO: 147212 - DNA, 516 bp, Homo sapiens
gtaatcttagtgcactacaacctcaaactcctgggctcaagtgatcctcctgcatcaccttcctgtgtagctgggactacagccctgcaccactgtgacagcttccacacagtgtggaagaactgtgtgtggaagctgtctggcttccatggctttgaagccgaatgttgtgcaagtgttgaagcagaatgttgaattagtgaatctagttactttttttaaaattttctctttcctcctctctcttttctttcatctcctcccacttattatttaaagtagcagatttcttgctgaaaagcatttagataagcaaaaccaatttgttgtagaatacagttaaaggatgtcagctgatggtgctggctgtttttccagaggcctcacagaatggtattggcttgttgataagagagttatgagtccaggactcagccttataggctcagaaacccaactgttgacagtataataaccacaaatctattcctgatatgagggaccctcaaattaacc

SEQ ID NO: 147213 - DNA, 347 bp, Homo sapiens
  misc_feature (1)...(347): n = a,t,c or g
cggggggggcccccccgtaattccaccccttttgggggccaaagggggcaatttttttagggtttggggtttagacccaacccggccacaaaggggaaacccctttttttcccaaaaccccaaaaatttccccggaaaggtggtgggggcccccaattcccgcttcttggggggttaaggccgggaaattgttttaaccccggggggaaaggttcccattaatttggtttnnnnnnnnnnnntcccacctgggggcaaaaaggggattttttttcnnnnnnnnnnnnnnnnnnnnngaactggggcaacagagaagtggggaattgttaataactacagagtttcag

SEQ ID NO: 147214 - DNA, 569 bp, Homo sapiens
catttttgtagatggggtctcactatgtgcccagactggtcttgaactcttgggctcaagcaatccccccacctcagtctcccaaagtgctaggattacaggtatgagctacttaccctggctgattctgtatatttttttttaaatcaccaaacttcctctgttgacgttttaaaagtaatgttatttatctttacaatatcagttggtcagaattgatgatgcttcttgtttgtatggatttttagtagtattgctaaggcatctcgggtttattagttgggaaccactgaaagggatatgatttagcctttactttcttagtttaatgacaaatatttctattatccaagggggcaaattcagtgccacatcacactttttcttttaaatcttaaaattacctcagatttttttttttgttttaagaaaactggaatgcaattatatattaaataaattttaactgccatcttgttgcatgtgtctgtttcatgtgagtgaatagtgtatcacttcagaaaaaccttgttcttttttttgatggactattaagtattttttcaact

SEQ ID NO: 147215 - DNA, 1661 bp, Homo sapiens
caaaagatacagaaactaaattctgaaattatacaatgatataaagtgtccaaatttcccattctaacagcaatttaaaatccaaattttcacaaggcaggaaatgcttcagttatcatctaagtggagttgttttattccatattactctcagaattctgtgaatcagactgaatcacacacatgtacttccatccaatagttttcctccctgtaataagtgtattggaaatgtttcccttaatacgattaaaccatgattttagggtacagcacatcacaactgtttattcaccttaaaaaaaatgtctgtagtggtaacatttcaagaaatgaaaaagggaacagtttggggatcccgcagtttcctccccctatcctccttccagcctacatttaccaagcatttgacccaaacaaaaattagtaaacagttaactagtatttaataaaaaacttaaaatatttaacatataatactcactttaaaaaaacattcattcctacaaaccctataaaagacagaaacatatatctgttcacagtatgtgtattctgtaaaacagtaattcactataatgcaattttgaaagtaaaaaaaggtaatttcctagtgttataaggaccttgacttatggccagctaatgaaagagaagaaaccctaacatccttattaggaaagttaagtattttgaaatgatttattttacctttcaacatacttttaagatggtactatcttaaatctaggatgtctatctatccaggccaatcttttgcaagcaattctgaatttaaacgtatttaagaaaaagccgtgctcttttttgagaaaataacaggataaaacaaacgccaggaagggcatcaatcacataacacctacccctccacaacaatgaaaggtttctttttcgtgttgtctcccgctactcacaatgttattcatatttttcctaaatattgtgttggaaggaaaaattaaatacaaggaaacactagcttatgatatattaggacaattggggaaaaggcatttgggaatcaaactgggagaagaatgttttaccaaaaatggtatgaaacccattattcagtgttctcttctatgagcaattgcaagaacgctaataataatgataaacctaacagttaacttttccgcgattataaatgaaaattgtactaccacctagagatattttgatcttttataatacacaactggaatgtttaggaaaatagttcggaagctgaaagttacccatttaaaatggaataattcttaacggaagtacacctttaaatgtataaggaaattcaacaacttaagtgagccattcaatcacgtgtgcaaagtattttagtcttaagggcaacacataggatctatgttgttagctttttttttttttaaagttctgattggctactgtaaaggcaatcttaaaagatgcatgtaaatataatataaatcaactttcttatcaattagacattttccccactcacatctcttagtttttagggtattcagtcccagcaaccaaaaaaaaaaaatggaaaaccatatttggttctggcctaaggtccaaccagtttttttttaataaaacctttggaggaccggttttaacggttttttaggccctaacccaaa

SEQ ID NO: 147216 - DNA, 1107 bp, Homo sapiens
aagatctgttactgccataaaccttggtgttgaaaatacattacatatgaaaacgtttaaccatggcatattctagtataaatgacggggaaactataattcttagaggaaaattataaggtgaaattttcctgtttctccccctttgaagaactcaagaaaaaaggaagattgaactaataaaattttatttcttaaatataaattggacctaaaatattttctcaaactaattcatgaaacagcaacttttaccaatacctttgtatactctcaggtctcattcaggataaataaaattttaaaatcctttcatagttctattataaataagtaggtaattttgatatattgtacatacacacgtgtgtgtgtgtgtgtgtgtgtgtgtgtgtgtgtgtgtgtgtatttgtgtgcctctggtcaactctaaggatgacagacactgtgtaacaacacctgggtcaactcttttaatttatatacaaagcaaagaacaacattaatggagatgcacaatgattattcaaacaagctatatatatgtacaaaggcaaacagacacataacagtctctgcagactgattgtatatagtaagaaaagatcaaaagactttaaaacctaaatgacttttgacatacaaactcttcttgagaatgtttgttgtaaatggtttcaaaaatacaaattatagccaatcaaaacattgctttggttggtgcatttaagtatccaactcaaaaagcatatcaaatattttgggtactaggcagtttccaaagtagccatggtagtattacctggttaaaaagggttcctgttttccattaaacagtacctaagtggaagggatcctgccagattcccaaactggaataagcctcctatcatattctgaaacaagaattagaatgacttgagaacgggcaaataacaaagcaaaccaatataattatatggtcattctgaccccagctcttatacaaattatacatgtatttttgtgtatgtttgtgagagttgtatgtatgtgaatgtgtgtgagtgtgtattcacatacacatatatactggaacctatagtagaaaaggaaactagtagggcc

SEQ ID NO: 147217 - DNA, 465 bp, Homo sapiens
  misc_feature (1)...(465): n = a,t,c or g
agaacccttcatcttcacatttggtttttagcccatctacctcatctagaaggagagcaattagtgagacaggatcttgatgctggtgtaagtgaacattcaggtgattggttggatcaggattcagtttcagatcagtttagtgtagaatttgaagttgaatctctcgactcagaagattatagccttagtgaagaaggacaagaactctcagatgaagatgatgaggtatatcaagttactgtgtatcaggcaggggagagtgatacagattcatttgaagaagatcctgaaatttccttagctgactattggaagtgcacttcatgcaatgaaatgaatcccccccttccatcacattgcaacagatgttgggcccatcgtaagaattggcttcctgaagataaagggaaagataaaggncgaaatcgtcgccccagcaattcatgccggttaagggnctct

SEQ ID NO: 147218 - DNA, 1787 bp, Homo sapiens; identical to SEQ ID NO: 144180

SEQ ID NO: 147219 - DNA, 1553 bp, Homo sapiens; identical to SEQ ID NO: 144181

SEQ ID NO: 147220 - DNA, 1131 bp, Homo sapiens; identical to SEQ ID NO: 124786

SEQ ID NO: 147221 - DNA, 813 bp, Homo sapiens
atgggccctccgccggtgaatgtgctaggctctccgggggtgccccggagttgggtccccatcccaaagaccccatccgctccttcagctgaagagggctttgatgttcctgattgtaaaaaaactatagtgaatgattccagagagtcatgtgttgaggaaaatgatgataaaattacacaagcttcacaatcacaagaaagtgaagactattctcagccatcaacttctagtagcattatttatagcagccaagaagatgtgaaagagtttgaaagggaagaaacccaagacaaagaagagagtgtggaatctagtttgccccttaatgccattgaaccttgtgtgatttgtcaaggccagtatattatgactaaacgattatatgatgagaagcaacaacatattgtatattgttcaaatgatcttctaggagatttgtttggcgtgccaagcttctctgtgaaagagcacagtcaggcaccgtgtatgaaatctaacaatgcgctcatcgtcatcctcggcaccgtcaccctggatgctgtaggcataggcttggttatgccggtactgccgggcctcttgcgggatatcgtccattccgacagcatcgccagtcactatggcgtgctgctagcgctatatgcgttgatgcaatttctatgcgcacccgttctcggagcactgtccgaccgctttggccgccgcccagtcctgctcgcttcgctacttggagccactatcgactacgcgatcatggcgaccacacccgtcctgtggatctacccactagtcaattcaccatcttgttga

SEQ ID NO: 147222 - DNA, 1862 bp, Homo sapiens
gcaccgcgcgagcttggctgcttctggggcctgtgtggccctgtgtgtcggaaagatggagcaagaagccgagcccgaggggcggccgcgacccctctgaccgagatcctgctgctttcgcagccaggagcaccgtccctccccggattagtgcgtacgagcgcccagtgccctggcccggagagtggaatgatccccgaggcccagggcgtcgtgcttccgcagtagtcagtccccgtgaaggaaactggggagtcttgagggacccccgactccaagcgcgaaaaccccggatggtgaggagcaggcaaatgtgcaataccaacatgtctgtacctactgatggtgctgtaaccacctcacagattccagcttcggaacaagagaccctggttagaccaaagccattgcttttgaagttattaaagtctgttggtgcacaaaaagacacttatactatgaaagaggttcttgatgctggtgtaagtgaacattcaggtgattggttggatcaggattcagtttcagatcagtttagtgtagaatttgaagttgaatctctcgactcagaagattatagccttagtgaagaaggacaagaactctcagatgaagatgatgaggtatatcaagttactgtgtatcaggcaggggagagtgatacagattcatttgaagaagatcctgaaatttccttagctgactattggaaatgcacttcatgcaatgaaatgaatcccccccttccatcacattgcaacagatgttgggcccttcgtgagaattggcttcctgaagataaagggaaagataaaggggaaatctctgagaaagccaaactggaaaactcaacacaagctgaagagggctttgatgttcctgattgtaaaaaaactatagtgaatgattccagagagtcatgtgttgaggaaaatgatgataaaattacacaagcttcacaatcacaagaaagtgaagactattctcagccatcaacttctagtagcattatttatagcagccaagaagatgtgaaagagtttgaaagggaagaaacccaagacaaagaagagagtgtggaatctagtttgccccttaatgccattgaaccttgtgtgatttgtcaaggtcgacctaaaaatggttgcattgtccatggcaaaacaggacatcttatggcctgctttacatgtgcaaagaagctaaagaaaaggaataagccctgcccagtatgtagacaaccaattcaaatgattgtgctaacttatttcccctagttgacctgtctataagagaattatatatttctaactatataaccctaggaatttagacaacctgaaatttattcacatatatcaaagtgagaaaatgcctcaattcacatagatttcttctctttagtataattgacctactttggtagtggaatagtgaatacttactataatttgacttgaatatgtagctcatcctttacaccaactcctaattttaaataatttctactctgtcttaaatgagaagtacttggttttttttttcttaaatatgtatatgacatttaaatgtaacttattattttttttgagaccgagtcttgctctgttacccaggctggagtgcagtgggtgatcttggctcactgcaagctctgccctccccgggttcgcaccattctcctgcctcagcctcccaattagcttggcctacagtcatctgccaccacacctggctaattttttgtacttttagtagagacagggtttcaccgtgttagccaggatggtctcgatctcctgacctcgtgatccgcccacctcggcctcccaaagtgctgggattacaggcatgagccaccg

SEQ ID NO: 147223 - DNA, 1603 bp, Homo sapiens
gcaccgcgcgagcttggctgcttctggggcctgtgtggccctgtgtgtcggaaagatggagcaagaagccgagcccgaggggcggccgcgacccctctgaccgagatcctgctgctttcgcagccaggagcaccgtccctccccggattagtgcgtacgagcgcccagtgccctggcccggagagtggaatgatccccgaggcccagggcgtcgtgcttccgcagtagtcagtccccgtgaaggaaactggggagtcttgagggacccccgactccaagcgcgaaaaccccggatggtgaggagcaggcaaatgtgcaataccaacatgtctgtacctactgatggtgctgtaaccacctcacagattccagcttcggaacaagagaccctggttagacaagaaagtgaagactattctcagccatcaacttctagtagcattatttatagcagccaagaagatgtgaaagagtttgaaagggaagaagcgcccagacaaagaagagagtgtggaatctagtttgccccttaatgccattgaaccttgtgtgatttgtcaaggtcgacctaaaaatggttgcattgtccatggcaaaacaggacatcttatggcctgctttacatgtgccaagaagctaaagaaaaggaataagccctgcccagtatgtagacaaccaattcaaatgattgtgctaacttatttcccctagttgacctgtctataagagaattatatatttctaactatataaccctaggaattgagacaacctgaaatttattcacatatatcaaaatgagaaaatgcctcaattcacatagatttcttctctttagtataattgacctactttggtagtggaatagtgaatacttactataatttgacttgaatatgtagctcatcctttacaccaactcctaattttaaataatttctactctgtcttaaatgagaagtacttggttttttttttcttaaatatgtatatgacatttaaatgtaacttattattttttttgagaccgagtcttgctctgttacccaggctggagtgcagtgggtgatcttggctcactgcaagctctgccctccccgggttcgcaccattctcctgcctcagcctcccaattagcttggcctacagtcatctgccaccacacctggctaattttttgtacttttagtagagacagggtttcaccgtgttagccaggatggtctcgatctcctgacctcgtgatccgcccacctcggcctcccaaagtgctgggattacaggcatgagccactgcgcccagccggtctttttaaacattccccaggactgtacagccaacccatactcacctgacatttgggaactcccccccacggccataactgatctgcagaggtaagaccaagagcaagaatgggggattcacatctaaggtctggtgatggctgatgaaggaagaagaatcagcgaacaaaagcctctaggtctttcttaccacaaacacctctctgcccacctgctttgaaaggggcagaagtatagtgggcgaggctgcccacctgctacagtgaagggatctggagaaatactcacactttga

SEQ ID NO: 147224 - DNA, 2393 bp, Homo sapiens
gcaccgcgcgagcttggctgcttctggggcctgtgtggccctgtgtgtcggaaagatggagcaagaagccgagcccgaggggcggccgcgacccctctgaccgagatcctgctgctttcgcagccaggagcaccgtccctccccggattagtgcgtacgagcgcccagtgccctggcccggagagtggaatgatccccgaggcccagggcgtcgtgcttccgcagtagtcagtccccgtgaaggaaactggggagtcttgagggacccccgactcccaaccgccgaaaaccccggaaggtgaggaaccgggcaatgtgccaataccaaaatgtctgtacctactgatggtgcctgtaaccacctcacagattcccagcttccggaacaagagacccgggttaggaccaaagccattgctttttgaagttattaaagtctgttgggtgcacaaaaagacacttattactatggaaagaggttcttttttatccttggccagtatatttatggactaaacgattattattgattgaggaagccaccacctatttgtagaattggttcaaatgatcttctaggagatttgtttggcgtgccaagcttctctgtgaaagagcacaggaaaatatataccatgatctacaggaacttggtagtagtcaatcagcaggaatcatcggactcaggtacatctgtgagtgagaacaggtgtcaccttgaaggtgggagtgatcaaaaggaccttgtacaagagcttcaggaagagaaaccttcatcttcacatttggtttctagaccatctacctcatctagaaggagagcaattagtgagacagaagaaaattcagatgaattatctggtgaacgacaaagaaaacgccacaaatctgatagtatttccctttcctttgatgaaagcctggctctgtgtgtaataagggagatatgttgtgaaagaagcagtagcagtgaatctacagggacgccatcgaatccggatcttgatgctggtgtaagtgaacattcaggtgattggttggatcaggattcagtttcagatcagtttagtgtagaatttgaagttgaatctctcgactcagaagattatagccttagtgaagaaggacaagaactctcagatgaagatgatgaggtatatcaagttactgtgtatcaggcaggggagagtgatacagattcatttgaagaagatcctgaaatttccttagctgactattggaaatgcacttcatgcaatgaaatgaatcccccccttccatcacattgcaacagatgttgggcccttcgtgagaattggcttcctgaagataaagggaaagataaaggggaaatctctgagaaagccaaactggaaaactcaacacaagctgaagagggctttgatgttcctgattgtaaaaaaactatagtgaatgattccagagagtcatgtgttgaggaaaatgatgataaaattacacaagcttcacaatcacaagaaagtgaagactattctcagccatcaacttctagtagcattatttatagcagccaagaagatgtgaaagagtttgaaagggaagaaacccaagacaaagaagagagtgtggaatctagtttgccccttaatgccattgaaccttgtgtgatttgtcaaggtcgacctaaaaatggttgcattgtccatggcaaaacaggacatcttatggcctgctttacatgtgcaaagaagctaaagaaaaggaataagccctgcccagtatgtagacaaccaattcaaatgattgtgctaacttatttcccctagttgacctgtctataagagaattatatatttctaactatataaccctaggaatttagacaacctgaaatttattcacatatatcaaagtgagaaaatgcctcaattcacatagatttcttctctttagtataattgacctactttggtagtggaatagtgaatacttactataatttgacttgaatatgtagctcatcctttacaccaactcctaattttaaataatttctactctgtcttaaatgagaagtacttggttttttttttcttaaatatgtatatgacatttaaatgtaacttattattttttttgagaccgagtcttgctctgttacccaggctggagtgcagtgggtgatcttggctcactgcaagctctgccctccccgggttcgcaccattctcctgcctcagcctcccaattagcttggcctacagtcatctgccaccacacctggctaattttttgtacttttagtagagacagggtttcaccgtgttagccaggatggtctcgatctcctgacctcgtgatccgcccacctcggcctcccaaagtgctgggattacaggcatgagccaccg

SEQ ID NO: 147225 - DNA, 2518 bp, Homo sapiens
  misc_feature (1)...(2518): n = a,t,c or g
gcaccgcgcgagcttggctgcttctggggcctgtgtggccctgtgtgtcggaaagatggagcaagaagccgagcccgaggggcggccgcgacccctctgaccgagatcctgctgctttcgcagccaggagcaccgtccctccccggattagtgcgtacgagcgcccagtgccctggcccggagagtggaatgatccccgaggcccagggcgtcgtgcttccgcagtagtcagtccccgtgaaggaaactggggagtcttgagggacccccgactccaagcgcgaaaaccccggatggtgaggagcaggcaaatgtgcaataccaacatgtctgtacctactgatggtgctgtaaccacctcacagattccagcttcggaacaagagaccctggttagaccaaagccattgcttttgaagttattaaagtctgttggtgcacaaaaagacacttatactatgaaagaggttcttttttatcttggccagtatattatgactaaacgattatatgatgagaagcaacaacatattgtaaatgattgtgctaacttatttcccctagttgacctgtctataagagaattatatatttctaactatataaccctaggaatttagacaacctgaaatttattcacatatatcaaagtgagaaaatgcctcaattcacatagatttcttctctttagtataattgacctactttggtagtggaatagtcaatacttactataatttgacttgaatatgtagctcatcctttacaccaactcctaattttaaataatttctactctgtcttaaatgagaagtacttggtttttttttttcttaaatatgtatatgacatttaaatgtaacttattattttttttgagaccgagtcttgctctgttacccaggctggagtgcagtggcgtgatcttggctcactgcaagctctgccctccccgggttcgcaccattctcctgcctcagcttcctgattagttgggaccacaggcgcccgccaccatacccggctaatttttttttttttttttttttttttttggatttttagtagagacagggtttcaccgtgttagccaggatagtctcgatctcctgacctcgtgatcctcccgcctcggcctcccaaagtgctgggattacaggcatgagccaccgcgcccagcagaagaaggcatttagaatcagaactcagtgttttgaaacagcactcaaatcttagaaaattaacttcactgattcctggaaaatgcttacgttttaaaacaccaactttattcaaatactaaccccatctggacattaagaaacaagcaaaatagaagtaaatgttttattcttccaactaaattccagtactacaagggcagtaaaacaatgatacactggaaaaaaaaaaaatgcagcaataaacatttggtaaaaaggacgggtggaataaattaaactcccaaaaaaaaaaaaaatcatacaaacccattctggaaaccccaagaagtcctggaatacagaaatgccctcctccttcactatttccacaggaaagccactgcaggcctatttgcctttaatattgtcctgggggattacattcctaaaattaggtaactgggttacagctcggttgtagtgcacaattaaaatcacactaacttcatctgaagtgtcattctacagttttatttacacaaccagtgaagggcatgttctagaataccagctttaatccttttcaaacattaatataagaagccaaattgtaatgggtaccagcaaaatgnggcccactgggtattaatacagggtagcaaaggtccacatccagggtggtactgacatcaggggaaatttccaaaaccagttgccggctgcctaggagtgggttgcccactgacggaaagctggaaataaccctgtattcaccagaagggggtattggcattgctgcatgtcataattgggacctctggcaaccaactcaaccagggaacaagccagcccacaaatgccaggatacgtgattccatgaaaccatagcctagccagcctgttctcccatatcggtcgcattatttgaatcatgcgtaaacttccacaaaacgccatccatattgttcctgccaagttttgtgttccaatatttccttccatattccttcctcgaactttcctcttcacgttcctttcaacaaacgttccacagatcatccccaacctgcccgtagaggtaaaataggggctgttctttttttaatggtgaggatgctggcagatgaaggtccctgggtgaagctggtccactgaggagaaatgcgatgtggctgtgcatcagaagtacaacacggatctgtctgttggaaactcgtttctaaatgtcttctcttctgcattcgtttatactcttgttttatgttgtacagaatttgttctgtggtgaggcgggaggagacgtcgccgaagggggatggctccattcggagatacttctgcggcgaggcggccgc

SEQ ID NO: 147226 - DNA, 990 bp, Homo sapiens
ttaactgccagactggaggctggcgtgcagcgcggctcgccgaagaatgacagctctggaactaggctccctctgcagctccatgcggcaatcctggaagtctgacttcaaatctcccagctgcaggctgcaaacaagccaggactctcgcagaagggactcgggctgtgcaggaggctgctgccgaccaggcctctggcaggacatttggggaatgcactttgacccagcagttccacttctaggacgtttgcgaatgaacttgcacagctcgagcttgtttttgtctcggaccaagatggcctcatttccatactgtgagtaccacatgcttcggctcctgctcaggtacgtcccaggtggcaccgactccaacttctgctgttgctgctgccagatgagcaaggaggtgtccctgtaccggaggcgggcgtagccttcagacaaggccttctctgccagggggacacggccactcatcccctcccccgtcccgctggactcctgggaaccctgctgttctgagacggcccacgcgcacctggggatccagcaccagcgtttgttcaggtctcgtctctccccaaaggtgctgcgctcgtcgtgggcctcggagatgcgggcagcggcgcgacgcactgcggggctcccagggcggggccaggggccgctgggccgtgtctccatggcagcgccgcaggcctggcgagccgagcgcagaggctgggcaggcgtgtgcgacgagcccaagccatcgatcgctccgcgaggaggggctgggcccgccccgaataggaaagggttgtgggcgtcccactccttctcttcatcctcctccagctcctcctccacgtcttcctccagctcctgctcctctttcttttccagtacctcctcagccccttctcctctgccagcccctcctcccacctccgctcccagcccctcctcctttcccagcccctcaccatccagcccctcctcctccat

SEQ ID NO: 147227 - DNA, 2314 bp, Homo sapiens
  misc_feature (1)...(2314): n = a,t,c or g
ttttttttttttttgagttttcagccagtttgttaaactttgaaataagttttgtttataataaaaatatgagatggatttgaaagcttccattttttaaagttaccctcgtttttcaaaggtattttctaaacagatctttaatggactatttaaaccgaatttaaggaattcacacacgacagttgacaggtcttcacgcaggctcggttggtaacgtgctgccagcacagggctgggtgatacgtacaccctaagccgggggtgcctggggctggggggcgctccttgcaatgcccctccaagccacagggcagtgaaggtgctgcctgtgtgagccgtcgggggagcggccggctgtgggggcagcgcagcagcgaagcatccgtggggcctttccttctcggctggttctctgtgacggtggcgtcggctcgcctctgctcctttcatctaagaaagaagccacttgaccctgacagcccacggcggggtaacactgagcagctgcattggtgctgtcacttttttaaggctttctgtccagactttcaacactgggtttcttttcagaagtttcgaaggattaatgactttcttcaacgcccttgctggcgggctgagggtgacagtcacgtccgtttcttctgtattagaaggctgcggtgattcaattagattgtcccactgctgagacctgtaggggcagcttctaacatgcttttttcaaggggagaggagtagtgacaagtcgtgtgtcggaattggatttgagaacactctgaatgaccccctgggaggcccgagggggccaggctttcgggcgtgaactgaactccagacccctctttgtgttgggcagtgtcatcttgcttacaaactgtaagacacatttttttgtgtgtttgtttttggtggtggtcttttgcagcactcacgncctctggacagtctttttgggaaaagagtaaccacccccacaataacagaaatttgtcaccatccaagagtagccactgtttccttaatactggcataatgcttccaggaagtttttcttttttatatttaaaatgttacttttctgtatgatgtgcatgccaagtttacccgtaacttttccttaaactttttagtgcccgtttcctagtatattcctgtaaatgtcagttacgtgaaagagtgagtccaatgtaagtagtttagcttgtttattgcaatgctggcctcaacacaacagaataaaaggtggtagaaagtactctttgatgtttctggtaatcatggacccttctcctggggcatttgttttgttttcataataaaaagcaaaaaaaaaaaaaagactgttttttttttgcattttcctgtgctttctgtgggggctcccagcctctctcctggagcctggaaatgtctggaagcacctggtctggaacagccttcactggtccacagcaagggtgctgagctccccacacttgacatcctgtaactcttggcaaaaacacccagagcatccaaaaggggccccaaaaaaccatttaaaggcaggatgcagtggctcgtgcctgtgatcacagcactttgggaggctgaggcaggaggatggcctgaggcagggagtttgaggctgcagtaagccatgattgcatcactgcactccagcctgggacaaacatctcttaaaaaatagtaataattcaaaccattaagtagctcttgtcctgagccctggcaggatgaagggagcatcatttcttgcctcactaggaagccacaatcccctttactgacagttcattggttccctggaacaagctgccctcttcgaggcagcgcaggttctgtgctcttctagtcaacctggccgcttgtcccctccctctgcacctcagtctatcctgaagtggcttgtgatgcgctcagtctaatggaaatgcaaataaaatcccaaaagcagattttcatagtgaggtttaactgccagactggaggctggcgtgcagcgcggctcgccgaagaatgacagctctggaactaggcctggaagagacatgccaggggagaaggttctggctgggcccacgtctaggcctgaggacctgtccagcccgaccccagatggggtcagggggcacggtgacactcctggccagactgtgacccttctcatccagaccagcctccttgaggacggacatggggccttgtccgccccaggcagatggtgtcttcctgcagcctaagcggcttagtgccagctccttgtgcgtggcccacacgccctgaccactgcagagactggcccttg

SEQ ID NO: 147228 - DNA, 603 bp, Homo sapiens
cccacgcgtccgcccacgcgtccgcccacgcgtccgcccacgcgtccggtgaaaactgagactcagattgtatgtctctaaggaacaacataattagtaacagatcaagacacttaaaactttccctacaaaacctccctgccttgactttctctttctctttgcagatttctaggccgcttctgctcagggtcttcattttcttccatatttgttttatttcatttttcttttctatagttcatgttttctttttccttggaaactcaaaaatttaaacacacgtcgtgtgtgtgtgtgtgtgtgtgtgtctgtgtgtgtgtgacttaaagaatcttaagctttggcattaaatagtcctcgattcaaatctaagctcaacatctgattaacttcattttcctatctgaaaaatggagataacattagaattgtgtaagtattgaatgaaacaatgtatggaaagctcttatggttcttgtcacctaagaagtacttaataaatgataaatatttttaaataaataatattataaccaactcccaggatgattcctcttcagccatcctgtcagaggtaaatggtaaaataaacccccagaa

SEQ ID NO: 147229 - DNA, 1228 bp, Homo sapiens
ttttttttttttttttttctgcctcatcaaaatttattaagttgtacatatacagtatattatcagaacaacaccaaagtggctacacttgacagattctcctaaaggggacataattttcctagagattatttattccccttgataaaagttgtaatgatttgtgaaagctttgaaagacaagcttggaggggccacagcattgacctatcaagggcaaggagctataaatgccatgcacgcagggcccagaaagcagcatagccgcaggaggctgtggcagccccgtttctgctgtgagcaaacagtgctatgaggagaccaacacaaagaggaaggtgcttcctctccaggggtagggtctttgggttcacattcagaaacacaagacaccacacccaagagaagaaaggaaaacaaaactccctacagggtctgggctccctccaagagacggggccagtgtggccaaaagagggcacggagttgagatgtggaagtttgcttggtgaggacacccacttcccttcaagcttgctcaaggcaccagactagctcctgtaagtaccaagagcaagaacacaacactctagagaaaagggcagagctggcgcttggtttggtcttcactaccagggaagtattatctgcggttctaattcaacctggtgaaatccaccccagaggggtcccaaattgcttgtgaggctgatgagttgaggacactgccctccctcttctacccagtctggctctacaacgacagggaaggaggaagtgaagagctcatctgggtcagatgttgccttggcactctacaatgattatttctccctgttctgttcctcctctgtgtccaaaattaagagagaaccgcagctgtacaaacagactgaaagggagactggccacacctgagttccggagtcttcctcggaaggaaaccatctttgtcagattcttgccaaccttttgggcagagtcacctttccaaatcaggccttttcagtttgatgtttccaaaggacccagcttacactaactccccattttaaatatcccttttaactcctaaagtttgcataagatgattttttcaatatatttgactcatactggttgttacataggacctttcatgtgagatcatagggaagaaaaaaaaactacagcgccataggcatctctcaggcatctcccccgtaagcttctctctcatttgttgaga

SEQ ID NO: 147230 - DNA, 2463 bp, Homo sapiens
  misc_feature (1)...(2463): n = a,t,c or g
tttttttttttttttttttaacattaattttttttttattaagaagacagatattttatagtacttcttttttttctttttttttttttgtaaaaaatggtatacatgaaccaatacaaaatgcgaatgggaacatatggatatgggagtttctctacactgtaacattgtccatggtacacccttaaaaacaggaacctgggccttacaagaggggggaaaaataagacgtccgtgtgactaaagaacaagcttatttgggcatcaattatacatccttcattattttatatttcccttaaaaaaaacacaaaaaacaagtttgttctttcttcactctaaaaaaaggtgatcaacctggtacaaggtaatactcaacaatacatttccaaacagtgccactgtataacttaagaaaaaatacataaaccaatatacaactaaaatccataatttacctgtttttgactttgttttattattattttttaccaatgtgtgggggcctacacttttgcaatctacctgagacggaaaacaccaatcgcaacacatgaacctgagacatgtcaacattgtaagccataaagttacatcaggaacactgcactactgtacacttttcaaaacagaaagatgggaggtcccaaaaatgagatgccaattctgtgagcaatggtgtgattttttttttttgtttttgtttttgtttttctttttttctaaaaaggaacaactgaaaaaaaaacctttcaacaacatgctaaatgattctcaccctttgatatgattatacgtatggtcgggaatgggtggctaagggctcggaatagagctgcagattataaaattcatttgaaaaagggatgttcattgtggctttttgtcttggttaagtgcctagggataggggaggggtaaataaaatgctgctcgataacggattttcttttacataccagtccgttcccaaaagggcccccatattgcaatgggttctattcaaagggttaaaataaaggacaaggaaaaataaacatgttttccaaataaccaaggggtttgacactttttccccccccttaaataaatcagcattaagtttttccacataatgttaaccattggtaaaaatggcaccttggcaaaatccaaaattactccactggaaaatgtaatagaatatatatttatatatatatatagatctatcttttttgatgccatctttccatagggaactgttagctgaagtttggagtcttacctaaacatatggtaagagtgtagtktcgtktccgtcaggactacgtctagatttcctagacgtttcagtgaaaatcccccacacttctttcctttaaaaacatgtaaaagggtaaacgtgaactccctccaaccttttccccgaggctccccccacctaagatatgttccaaggtccactgattttaagtagctatgcactatggctgcccatcatgcgaggatcagtaatttttggcagatggttccttaaggctgaggaagagaggccaaggctagtgtatgaaaggtaaaaagataaaaagcactcacatttgagttttgattaagtaamctgaaaaatccgtacatgctgtttttccacctyctgctctgacctatcgagaactgagagcgacagcagaccagtgtgagaacaataccagcccttcttttgtacctcctgcctttgtcaagccaaatctgaaggaatgaaagtttcacacagattcgagttgggaaatcccagcatgacaaatatctgtaatatacagtacatggcagggccacatcctactgcccttccctaactaagccacaaaggaaaaaaaaaaaaaatccaactctgtccccattccagtcaattcgccacaaacagacgaacttgctttttccctacaaattaagtgaagaagtaaggccgattggcaagcgtgggatggaatcgttgggagcagaggcgaccagagcagacctgtatttcccccctccctacttcccctcctgtgggcaactcaaaattggncccaccttatataaaaggaacagaccctcacctgtcaggtctgtttagggccatgggaaaaaggaggagtcctttctgcccccaaacctttcctggacagcgtagggtatctatactgagccgtctacagatacagaattaaagacagtgaaattcaatctcattgtgacacaccgtcacttgcagataaccctgtacagtaatgtagttccacagcaaacagaacattttctgaatcacagtctaattttctagtcttcactgctctaagtatttgaaacatgggcagcagcaaagagttttcattgtttgttcacccaaatctttacgacaacagagaagaatgcattatggatacactaaattctgaactatgaaatctaagctgtgctggttctccttttatgaaactg

SEQ ID NO: 147231 - DNA, 406 bp, Homo sapiens
  misc_feature (1)...(406): n = a,t,c or g
nttacagctacagaatattcagagcaggaggcaggaggcccctcatttgacattctgtgggcattatgggtttttttgctggcgtttttgnnnnnnnnnnaaaggcaaaggggtctgaagagatggagccaagacattcagaggctagatttggaattttcaggctggcatgcagaggaaaaggaaggagttagtgattagttgataacttgctaaaagaagccagagaaaggatggtgggggcagatctgggtgggtgggtcagtgggcacttcctataactttcaggggatatgcaggcaggagagtggatagctctcacagctaaaccagatctagaaaggctcctaactcctctgtggccatcttagcccagctccctgtctgactgatctgaggttgggag

SEQ ID NO: 147232 - DNA, 3317 bp, Homo sapiens
ttttctgtgtatgatatatatttatatatataattgctctcatattattttacttaatcctctttttacagtagatctgacacaggcattaaataactgcagagagagaccatggtagggcgggtgcaggaaaacatgaggggcccgaagggaagaaacacagatccagctagagaaaaagggyaggggtccacctgtgggtggagtgtggaggctgcagcattaaaaaaaggaaaaaggaggttagagaggatgaggacgtgaagggatgctggaggacaaagggttaaaatgcctctacagctacagaatattcagagcaggaggcaggaggcccctcatttgacattctatggggcattatggggtttttttgtttttgtttttgttttttttttaaaggcaaaggggtctgaagagatggagccaagacattcagaggctagatttggaattttcaaggctggcatgcagaggaaaaggtaggagttagtgattagttgataacttgtctaaaagaagccagagaaaggatggtgggggcagatctgggctcaggggaaggaggtggaatagtccccaaagccatgccgatgtttcccaaggtggcccactgtgtggacggagcccagaatggccgacccctcccccagagctccctggggaagtgggaactttgaaggatattctggggaaggcgaatgggggaagggagccatccattaaaaacaaagttggatatttcagcctagggttcaaccccgcccctcttgggtagcagctaattgggtgacagatcttgcctaggaagaaactgaaggccgggcgcggtggctcacgcctgtaaatcccaacactttgggaggccgaggcaggtggatcacctgaggtcgggagttcgagaccagcctgaccaacaaggagaaacccccatctctactaaaaaatgcaaaaaaaaaaaaaaaaagaaagaaagaaattaagccgggcatggtggcaacatgcctgtagtccccagctactcgggaacctgaggcgggagaatcgcttgaacctgggatgcggaagttgcagtgagctgagattgcaccattgcactccagcctgggcaacaagagcgaaactccatctcaaaaaaacaaagaaagaaactgctgaagtcgggggctgctagaggattttcaggaagggtcaacacaggccttacttccagtcccttcatttccccaagctcacagagtcaccagagggtgagaagcagaacgtgccagcaaagagggaaaaggccacagaaccaccttgtcctcaattacaaaggggtgcatttcagaggagggaatagggatggagaggaggagaagacctgcccaggagccagataaattcaaagtcaccaagatggcgactgtgtagacagggagaaagtatgagagatcaagggacggtggctagagcttaggaatggaaggagggagtgccacattcatctctggaagcaaaggggtcaaatgagactgcgtgtgcacgtttgtgtgtgtgtgtggcggggggtgtaggtgggtgggtgggtcagtgggcacttccgataactctcaggggatatgcaggcaggagagtggatagctctcacagctaaaccagaactagaaaggctcctaactcctctgtggccatcttagcccagctccctgtctgactgatctgaggttgggagaagttggtgggaaaggcgagtgacggaaccgcaatggacttcaggctgggttgagaagtcaaggaaaaggatgtgaggctcagacaagtcatagctctgttatcaaaaatacctttggggtgggtgagggagggatcaggcagggtcagggacattccaggagcatccacaggagagagatggggtgggaggaaggggcctcaggttttgttgatgcggagtttgaaggccacgcggccggcgaacttgtctcgctcatcgtctgtggcgatgttggcggcgttgatgcgacattctacattcacctccacgttgggggtcacattcaggaacttcacagccaccaggggctgtgtgtagttcacgtggaactttttgccatagtaggggaagtacatgaggtcgatgttgccgttggcggggaacatgacgaagttgccgagattctcagcatcttcatctcgcttcccagcacaggtaacattcatgctctggtttgctcctgcatagaagttgatgacccggttcatcttgatgaagacacagggctgcccagtgctgtaaccatagtgggtggagtccccaatgccggagcagttgcccagctgggtccggttgaattggcaggccagtttggggtagttgaggactccattatctggctgttcgtaatagcgcccagggcggcagacatcattcttttgggcttgcatagagtcgttgtaaggctccaagaacttgttgagcttctgaacatgctggtcccagctttcagtgtcactgacattgacaatgacatcaaggttctcagtcttggggcgaatcatcaagcccggtgtggccagtcggtcctggtacttgggggtatggtcggagacagtctgcagcatcacccacatggtgagggtgaacatggcggtggggaacccataaaaaacgaggtagaagaggaggataaaggcccagctggtcccggtgcggcccataaactggtgcgtcctcgggttccacacgaactccttccactcctcaaccacctgcccgcagctcttcttctctttctggatgaccatcttggtggcgcggggcgagtccgggcgcggggcggggggttgcggagaagcgggggcgccgcgcactgaagccctccacacacccaaaagcacggggagcgaaggcggcgcgggcaaaggagacccccctcagatatgcagctgctgcagattccggggtgcacgaccacgcgctgcggggtgctggcagcgcggcggaagatgcaccgatcctaggccccccaactgcgatgaaaaggggtgctgtcagagcaggggagaataacaagaggaaggggtatgaatgcagcttcaccccccgccaaaccgtctagaaacaaaacgaaatggggtgcaaaaacagacggctacaaaaaccgagcagaacgcagaaaaaaagcggggtacaaaaaggcagagagaggtgggggagggggccgccccgaaatccaagatgcaaagaagctgtggaacgaagctcaaggctcgctccgccaagcggagaccactgcaccggtggtggctcagccgcgggggtggggcggggacgc

SEQ ID NO: 147233 - DNA, 2316 bp, Homo sapiens
  misc_feature (1)...(2316): n = a,t,c or g
agaaacagtaacaggatattcagataatatgcctacaacccagttcccttcccctgtcccctgtacaaaggtgccgcccaagggaaatttaaacccacagggaaatgttattcatgttaaaacaatctattcaggactcaaaactacaaatcaaagaaaatttgaaaaacctttccaataagtttcagtgatttacattctttattagtaagcagacatttcaaactttttgattacatacatcatgcaaaatgactgacctcacagatggttgtctgttcattgtgacatctttttttgagatgattataaatttaagatgactgcagtagtaaaaataattcatgaaaatgactctcaatgaagcaaaacactacatagcacacacggaatactgttcatccctccngggggtgtttaattctctccctaatggtaaatctcctatcttgggaagacttatttatatccaaaaatgggcagttgtttttgtatgtgcatctatagggcactcaactgataaaaacaagaaaatttcaaataattttacaagggattgggttatttttcctgttttgttaatcccaaaacaggacaatgccctttgatttaaaatgttcatttcttttaagaaagcattttcttcagaagatgattttgacccatgaaaaggttgttttacccctggtaatctttttgaaatggggctggctgttaaacattatccaagttcttttcagtaagtgaaaaggagtagggcttattttgagaagaattcttctaaattatggcactgagaaaaacttctctgcagtggtgggctcaccactttcatcctgtggtagttctggtagcactcccagtgtgaaaaccctagcacaggtaaattcacctctttgaaataaacagtgacccctggagaaaggtgaaattccaaaatctagtacccatattcaagtcatctggcagagaagcaggcataaaagagttttcctaggtacttgaggtgctgctgtaacaaatacctaaaagtagaaaagtggctctggaattgggcagtaggtggaggctggaagaattctgaggagcatgccagaaaagaagctaaactgccttaaacagactgttagtagaaatatggaatgttaatgctagggcggccttgaagaaaggagcataatagagaatacctcgattgccatagaatatctaaatcatcatgaatagactgttggtaaaaaatgaggaatatgttactggagaagtggaggaaaggagtccttgttacatagtggcgaaaagctaagctgagttgtgtcctgccgttatgtgtaaagcagaacttttaagtgatgacttcaatatttagctgaggatatttccaagcaagctgtggaaggtacagcctgctgtcttcttgctgattatagtaaaatgtggaaagaggtagattgagggaagacctgttaaatataaagaaaccaggacttgatgatttgggaaattcgcggcctattcaaatggcaaaagccagtcaaaataagattccccgtcagggcagcctttactgtagagaaagtgatgaagatatggctgtataaccttctggtaatacttcagaaacctcaaaaggtttgaatatcaggtcacacacaagactctttgaagatattaagggtgtgaatcatagatcctctcagctatttcagaaaaagcccaaaaacagagacaggattttccaggaaagatacgtgaggagcctcctatctaaatgagtgcatccctgtgacatatgtaaaagacccacaagtttcttgacaacgttatagcagcagaagcaccaccatttttaacagaaagctttagagaatataaaagaagaacaaactgataagttgatactcagctgcaaacgtgtgctaccttttgtgaaaaagtaaagatgactctgagacagtcaacaagcccagagaacagcagtgagctgaagattactcccaggccttgaaacttaaagaagggtgcctcgctggttttgtaaattgattggtgctgatggctcctttttccatctgtttctgctttttgaacaggaacgtgtgtaactattattgtgtgcctgtcaagccatcatacttgggaacagataacttgttttctaggttcacaagtgcacagttggaattatgtcccagaaatcacacacagatcctctcccaaacttaatttagatggctacaatgtcacctttgagacttttgagttggtgagactcagaaaaaatttggattagagttagcgtataatgacgagggt

SEQ ID NO: 147234 - DNA, 3118 bp, Homo sapiens
tttttttttttcacacttccacatctatacaactttattaacaaggtaaaatacatgccagcatgttttatatatgggcaaggacattcctatgataatgaatggcacattatcatctaacaattgacctttatcaaatatatgttttcatatgactatttgaagaattaaataataaacaactaataaatgctaaaataacatttaacagcagttaaaaatataaaagccattcagtttagtatttacgataagctggaatcattcaaatacaacttattaaaaaaaatactattcctcttctacaggccaaatggttcattagaaaacactgtggcaataataactggctcctgcccttaccccagttccatccctcaaaggggcagtggagctaaggtagttgcttcttggtaccagtctaccaattatacacaggatgatcatataacttatcctcccaaattagaacacttttgagagtacggatgaggcactattaagctgagaaaaccaggaataaccaggactcttttgagcaaacgtaaggatatatattaccttagttaagtatggtatcacattcactatcattactttttgcacttcttgaaatagtacatactagatgaaaaaaattatatttaatgaaggaactctgaatttttctccaattggatattttgaactccacttttcctgttaggagaggttttactggaaataatattgttttagcaggtaaaaatctgtgaacaacttagaaggcatgtctaaaatgaaatatatcttatagactcaaaataggctaaagattagtattttttccattaagcagagattttcattttaaccaaatgtaatgggatttgtattttaatctaagtttgtaaaatctgtcctgcatacgctatatagaaaagtgttgtttttgccttaaaattcagtttattgcataaatacatgaaaatggattatcctagccatgactagcttattcatttacaatagaaataatttgaaattttttttgtattacctccccaaccccccgttccacactccaaaaatgtttaggatacccctaacaagagttttggatttttccaatcctttaagggccagagtgccaaagatggatccaagccatccccccaaaacacaacagccagcctgttccaagcctcacaggaaatgaagtatgccaggattttatatatcctgaaggggaacattcaagttccttgaaaataacattcctgattccccctgccttacatgatgagatttaaggcctacccattgaattatgcccaattatagaggattcagtaatatgtatacttgaaccttacagatttggggggaaaagtcaaaacaaaaagtgaagttttgatgctggatcaaaagtaacatgtatccatattcagaaaacaagcacatatacccctaaaagccaaaatgaaattttagtaagtccgatgtttgatagcctaagcttccctagtaattatttaattacccatgtagcaaagccttaatttcatttaaaaattattgaaagaataaagtacaggtctataagaaattaatatgaaagagatccagcatgagtttgaatatgttattagtacagtttaattttaattaacttccaaattaggcaactaaactaaatattttttctttaccccatgctactgtcttacttcaaggggtgtaacacaggtactttaatacaacaataaaaattttaatataacaataaaaattctacgcaggaaagtaaactgaatgagacaaaacaaaaaataggctatattagcaaaacaaaactgttttatttatcaaagacaatgaaaaaattagaaaatacagaagaggttataaagcataataaattttattttttggaaatggaaaaatgtccctgaatagttagatgtaccttttagtagtaatgtctaataataaataagaaatcaattttataaggtccatatagctgtattaaataatttttaagtttaaaagataaaataccatcatttttaaatgttggtattcaaaaccaaaagatataaccgaaaggaaaaacagatgagacataaaatgatttgcaagatggggatatatagtagtttatgaatgtaaattaaattccagttataatagtggctacacactctcactacacacacagaccccacagtcctatatgccacaaacacatttccataacttggaaaatggagtattttggcatatctcagttcaggatatgttttttacaagttaatcctaaagtcataaagccaggaagcctattcatagtacaagattttatttgctaagctttacaaattaaactctaaaaaattattacaatgatactgaaagatattttattggccttttaaaagacaaacacaaatgagaattatcttatttagaaaattaactttgaaaattatcttaaatgaaataaatataatatctaatacaatctcttcctgcaagatctcttaagatgggcaatcctaaaaatgcagcttcccatctgaaaatccctaaaactaggtatgtcccttaaaataaaatttatttttcttataaagggacatttgggtttcccacattttcttaaaatttgtcctaaaacaaattctatctttaacactcacgtttcttaatatatatatgtgtgtgtgtatatatatgtgtatacatatacacatatatattaggttcaacttattttaaaattaggtgaaggctatctggacacaatttctaagaaaacattgcagaaagtaagttatgcatggttatttacaggaagagttttcctaaataataatgtaaatatcatgttcaaaaatctgacaaatcctttctaataatcagcactgcaggtttcaatacaccttatataacaaaagatgtttcatgtgtagaactgccagatgagtctaagagccagaaactaaatcatttgacatggttaagaatttcatttttattatactaaatgtcaggtcagaagtcaatggcatttacaagctggaagactgtttatccactcaactctttcaattatatcaaacactgattaacc

SEQ ID NO: 147235 - DNA, 3528 bp, Homo sapiens
  misc_feature (1)...(3528): n = a,t,c or g
aatgtgtggagcgattggttacatgggaacaagtgcctttgtccgaaaaatctatactaatgtgaaaattgactagagacccaagaaaacctggaactttggatcaatttctttttcataggggtggaacttgcacagcaaaaacaaacaaacgcaagaagagatttgggctttaacacactgggtactttgtgggtctctctttcgtcggtggcttaaagtaacatctatttccattgatcctaggatcttcctgactgctttcatccaactgttcacagcaaatgcttggattttatgcagtaggcattactacagtacatggctaatcttcccaaaaactagctcattaaagatgaaatagaccagctctcttcagtgaagaggacaaatagtttatttaaagcatttgttcccataaaataaatagaggggaaacttgggatgctaaaattacatgaataggaatcttcctgggcacttagtgtttccgatgttattggaaaaatggatgttccagaaagattacttttttcctcttatttttactgcccattgtcgacctattgtgggggacatttttatatattggaatctggggttcttttttgaccttttttttttcccccaatcccaacagcatcccttttttttaaaagagaggattagggaaatattaaatccctgccatgtaatatatcctgctgtcatccttagttgggacccaacttccccatttatttatccttaaaactatacagttacatccttaattcccatcccaaagaagatacagtttgaagacagaagtgtactctctacaatgcaatttactgtacagttagaaagcagagtgttaaatggagaagatacttgtttttattaaacattttgagatttagataaactacattttaactgaktgtctaaagtgattatcttttttccccccaagttagtcttaaatcttttgggtttgaatgaaggttttacataagaaattattaaaaaccaaggggggtgggtaataaatgtatataccattaaataatggaaccgtaggtgtagattcccaaatgcatttggatgtacagatcgactacagagtacttttttcttatgatgattggtgtagaaatgtgtgatttgggtgggcttttacatcttgcctaccattgcatggaaacattgggggtttcttcaaaatgtgtgtgtcatacttcttttgggagggggagttgttttcttctgtttattttctggagagctcctacaggaagccaaatttgtaatttagagacacttaattttgttaatcctgtctgggacaccttaagtaacatctaaaagcattattgctttagaatgttcaaataaaatttcctgaccaaattgttttgtggaaattagatgtgtttgcaatttgaagatatctttctgtccagaaggcaaaattaccgaatgccatttttaaaagtatgctataaactatgcctactttcataccaggggacccctattttaaaatctccagagttggttacatcttgattatccagccccatccataaagtgaatgacaaaccctttgaatgaaattgtggcacaaaatctgttcaggttggtgtaccgtgtaaagtggggatggggtaaaagtggttaacgtactgttggatcaacaaataaaggttacagttttgtaagagaagtgatttgaatacatttttctggaactattcataatatgaagttttcctagaaccactgagtttctagtttaatagtttgctatgcaaatgaccacctaaaacaatactttatattgttatttttagaaagactcaaaacacctgtatttaaaccttaatatgaaaatcatgcaattaatagttacacaagatgttttcattacaaaatatgtacctatatattgatggactctacatcctatattgtgacatgtaagtcctttaaaaggtgaaaagtatgatttcttaccacttaagtatgattgatatgatccaacaaattttgatccagaagctgtaggtaaatcctcttctgaagccaaaatggtatattaaatataatttattggtacttccattttctcttccttcttacttgcctttaagatcttataaaaaagaaactaaaagttaatatttagttgcctatattatgtaaccttttaactatatataaagtacttttttggtttctttctcaccacttttattcaaaagtacttttaacataccaatacatagtctgtctgatgggagtataaattggacagtaaggttttgtcttaataaaatgaaatttgtttctcatgatatgaatcttgcaggtaagatgtagggtttattgaaaatgtgtgggttaaatgctttcaggtacaccaattctttctactaaattgagctctatttgaagttctttggaatctgtggtgaaaaataattttctggatttcccaaatacattaagggcattaaatggaatattaatccacctttaaagtccttttaggaaaagggacttggtattgggtttttggctgccatagaggggttgaataagtgtatgtatgtgtgtgcgtgtgtgtgtgtcttcttaaagaagatgtaattcacaaatagtttagctccctagcgctcagttgtagaatagaaaattagaacattattccaagttaattgaaaggtganggttttttatacccccactaatgctgtgtatctgtctttcgtttgttaacattatttgcttaatttctttcaactcacactttggataatactatcaaaaactaaggctaaacattccttgtgtatctttaaggcatgcttctcctggaaatttaactacattagtagttgacatttgtatacatatatcctaatacaagagtaggataaggtggaaatgtaatggcctgagggatggtgaagcattcttttagtatttttcatcatgttgggctcctagattgtactggggttgcccataaatcaaaccccatactcttaggaattcattatattatgggtgatatccgaacctagtgaatgggtatgcttggggtgttttccattgagagcgggtgggacctctttattaaagttggttgctgcaaaatccagttcttccaaaagccactttatttagggtttattcacaagtcatatccattttggtacagtgtttgtttcctaatatttattaaccaccttatacccaaatgtcttgcaaagaaatgttattaaaaccttgaatttttacaaatgtaaaaaacaaaaagtgtattaatgtatttgttcaggaaaagctacataccgaagggcttttgtatatgaattctgtggtggggagacccatttgtaatttatatggcagttccatctgggttttaagtttagatttcaccgtgtcttagtgcttcattctattggtttattggaacatgtaataaataggagtagtgatgtattaaaacccaaaaaaaagaaccaaaaaaaaaaa

SEQ ID NO: 147236 - DNA, 2441 bp, Homo sapiens
tttttttttttttttagatattaaaattagtttatttttctacttaacttttaataaatgagaagaaacacagtagtctgtctcatatagaacatttataatacataacaatccataaagcctcatggtgaggtaggaacagctttggaaaataacacacagtcatgaaaacatacaaaaagttaggtaaaatgttgcagcactaaagatattttatctgcatctgtatttaatgagatgataactgcatttaactgggcccacatctgggcccaaaggacagggcaacagaaggacacaaaacaacacaacatataaggttttcataatcacagaatatactggatacactttcattgtggctggtttcagggcaggaaccataactggggcaatttgtggtctttttatatatatatataaccacatattaattgtatgttacattccctccagcatctttttgccaaagacactgggaccataaaatttttggtttaaaagtttaaattgaataacatacaaaaggctcttgtgccagtgaaaatgactgctaaatattccagagcttgttagtaaaacaaaatagcattaccacatagtatcggtagagctacatcaaaatagtgctattataatcccaatttcagagacgtgaaacactgtatgacacagtttcaattttaaaaatgacaaacaaaaaacccctacaccttcccaagagttttaacactgtttatgacttaactgaaactcagtattaaaataaatatttttatattgtagaattactctccatatttgtgtgaacatcttaagacagcaggttaatgacatttttatcattcaaatgatatctgcttatacacagtaaaaatcttcaactcaacaccagttaacatacggaaatacttccacattaggttccaataggtccttttccctcaaaaactgtcaaaaattcaaaattaacttaaggatgttaataagacacaaacggttaacacagccttctacctactgtgattttccaaggtgcatttgatggacatttttcctattcaagttacataccttagaaattacaacatactgaactctaaaatgttaacacacatacagcaaagtttttgaggattctgttttttaggttttagtccatagttttacaatgcagacatccttcagaaaaaactaagcaatcataaaagctaaaaggtgacaatggagaattaaatctctcatcactaaggctgcatttggcttggaaaaatttcttggttctaattcaggcacatgcagcacctccttttcactaaactgagacaacagacaagtttctaaacccatattctaccctgatcttgctcaaatataaaagagccagcaggagagatgcaactcctaaaagtagatgcagtgttataaaatagcatatttaaatattgggtttaagtctcctaataattcagagtatttccctcattttctttcagaaaggaataagctattttgagaaagacacttaaatcctacaatatttaaatacaaaagcatggtctttttttaaaagataatgctaatatagctacaatgggttagaaagtgcattgtaaagaaataaataattctctgctaaaactcaaaaggtgagtccagtgccccactgtttctgcccgacagtcatttggaaaaaagaaaatcctatggtacccacccattatatataagcctacttaaaaattatgaaaagtgaaataactcaaacctaaaggctgttatcttcaaagcacttttgaaaaacaaacaaacatagcccttgtcctatgcttatataccattttttaaaatcctcattcagttgatgtcttgtacttaggtgtcatgccatctttaagacacagacctcaagtagagcatttgtaaagaaaacctcattgaatgtaatatattttatcagttatctttgtatcattgctgaaatgtttatgtaacaaattgatatctgaataaaatgttctgtaaagtattaaatcaggaatgtacatgatacagtacaattcacagctttctcttcttgttcgcccagatgagatccctcaatttgatgtttaaaaaaaaccacccaaaccttttcgcaaaattcaaggtaactatcagtttaggaattgaattacacaatatcagataagaatattaaaagatcaagatgtattgcaaactggcaggttatggttttggcccattatagtaaatgtgaacttacaaactgtgttcctaaaattaccatattttcactggaaaaaatcagctgttcttaaataggcccatcgccagcaataggcttatactaggaaaaacacacaccacaaaagatcatccctttaaaaagtaactgtcaaatcctaacactttttcctcttacaacccattaaacaatg

SEQ ID NO: 147237 - DNA, 1599 bp, Homo sapiens
tgaaaaacaaaaggacaaaactctctctacacaaggaaatggcagtaaagaacttacagaaagaattctcacaggatcattaacaaagacaaaaacacagtaagagaactgaagcagctgctaatccctaggtagtttaccaggtggaaaagcaagcacagggaagggcacacatttgaaaggccagaggaaccccgaaccccacccaccgcccatgcatctccctgccgcccacggagatgcctccggttcaagacaaaaatcctttagcatgcttagctgtttcttgtaggtcacacagaacttgtttgtgataactgatttttttttttaactacaatatgtaaggaaggaatcaatgctgaagggaaagatggagagaattggcatttcatgcttcataactttgtctcctgttagctgcaatttacacattgctctaagccttcatttttcttttttcttcatcttttatttttccatttaataaatgacagattatttgctccctatttgctataaagtttcagaagataatgagtatgaaacctagcaggcatcaataaacactgtcttatattgtgaccaattttgtctatttcagagaaagtgatgagaggagggaggaagcatcactaagacaaagctgtaatgaagtttgaactcttctgcgcctatgtaccttccatctttaactttctctgtgtctctgggctaagagaacacaaaccttagtctataaaaaataccctccaaattatttcacataggtacccttcccttgaaaacacaggaaggaagaggaagaaacaggctcagttaggcctttttgggggccttctgccctgattttcattaaactcacaacccaatttcatttggctcccagagttcctttttaaaagcttctgggaaatgaatctactttctaggctggtttcagggttaatcttcaccaggtaaagttactggaacaaaggaacataatagctaatacccgtgaaaaaattcttttgctccctttaatttttaatggaagccccttctagaaatgattctgaattcctacactgagatgggttttataaattcaaatccagaacaaactaaaaaaggaatgtccaagctgggtgtggtgacacatgcctgtcatctcagctactcaggagggtgaggtgggaagatcgcttcagcctaggagtttgaggtcagcctgggcaacgtagtgagactccatctctttaaaaaaaaaaaaaaaaaaagcgggggtgggggtgggctggggtgttagcctgtaatcccagcactttgggaggaggctgaggtgagaggaggattgctggagacccggagttcaagactagcctgagcaatgtagtgagaccctgtctctacttaggaaaaaaaatattaaagaaatgtccacagtgtaaaaaggatcaagtttcagtgcgatgtcactgagtagctaaaacagtatgggagaataatcatgattcattctttagttgaggaccacagagaaacagaagaggggaaggctggaaacccatatgctgctgcttttaatctgtcttggttacagataccccattccag

SEQ ID NO: 147238 - DNA, 594 bp, Homo sapiens
cgtacgcgtgggtaaatctgctggaagtgcgctattaagcttttattgcttggagccctcaggaaactaattgttctgaataaccacattttccaaatgattactagctcatccttttaagcaatgaaacttttaaaaggtctttatcaaaaatttttcataaatgttacattcttaaatggtatatgataaataatcatcttttttgttggtttatttttttattttttattttattttattttttgagacggagtctcgctctgtctccaggctggagtacagtggcgcaatctcggctcactgctgcctccgcttcctgggttcaagtgattcttcctgcctcagctactcagaaggctgaggtgggagtattgatcgagcccaggaggtcaaggctgcagcgagctgtcgcaccactgcactctagcctgggcaacagcaagaccctcgtctcaaaaaaagaaaaaaaaaaagtacaatttttgtattgattatgtattccttaagtaggagtggaataaaagtattttaccgtggattggcttctgtgaaggaaagaagtgaatattagtagatatttggaaaaaaaaa

SEQ ID NO: 147239 - DNA, 2405 bp, Homo sapiens
  misc_feature (1)...(2405): n = a,t,c or g
cctttaataagctctttaaatagttgaatcattaacaacctggtgggaggcaagtcatttaattgaaccactaggaagggtattttcttttctttttctgccaactttttggcggcatttgaaaaagctgatataaaaggctctgagatgttattttcagttattccataggcaagcctttttacagagcatatgtctccagttggcagcttgagatatttccgagcatccggttctagctaccagagcctcccaatgcttaatgcacagtactgtagactggccatcacccctctccttggaaaatgccactgtgctgtttgaaaaaaagcagccttttagggctacagtcttttatatatacaaaaacagccaactcccctgaagactaaggctaggataggctgcagctattatgtaaattgtatatttttatggaacttttggaaggcacacacttcctgtttccctctgtgtagctttgtgggggatttcatgtatatatgctgtctggaaaggaatccagaggttgggagtgcccaataggacaatggaaaacaaatgccttgttactacagggcagcctctgaagggtgaccaggttaactgtcttcactgtgaccagtcggagtccctgcttgcttgtgaagaaggggcttttgtaccttgttgggagatgccacctcagaagttcacactgtgcagggaaaaaggttttattctctcctggcatacattaggaatgtcaggatgcctgcatcccatgtgggaccagggatgggcctcttaaaaattggtgggcagggggtttgcttatgagttttctctggaaaccgattttactcctgggatgtattgaatgccccttgagctttatgagatacgagtccacatggataaaaatgttagagagtgggagttctacagaggattccagggaagaggccatgtctgtggcagttcctagtttccagacaggtgagaagcttccagggactactggctaccttggacaagctggggtaaaatagttatccattcntggggtaactggttgaaactctgacttttggacaagtaattcctggggttctgtctttggtagcatcaccagggatatttgggtgggacagacagaagacacacagctgcctgttctctcctgcccattcatgtttcggcccacttagatgaagctgttactcagcaattttagggaatgttaacccttctcagaactggccattttcaggggaagcttggagagagcaatagtatggtgagccccttagagatgagcgcctactccttcttggcgaatgctgccttcagatgcttaccaagtggtcactgcatctagtaagattatatttccaagtacacttccttaagggcagaaacaccatcctatcaggtttgggtcaagtcccttcttcaatgaagggaagtcatggggaattcctgaaaattttcttccttcttgcagacagttggatgagtcccttaagagaaggcatccagagacataaactaaaactggaatatcatcccatatttgatttttaaggaatttgactctaaaactctgtgcaagaatcttgtgttggggattgtatcttgacattcctgttgtgttatttttcttaactggagtgtgtgctgcctttcaggtacaatttttgtgtaataaaagccagtgcattaagtttatatagactactttctatgcaagactgagatatggaatagataggaagagatatgtactgctgggtacatggacagtaagtgtgttttcagatggagtaccagcaccgaaaatgggttgagggaggatgggttgtatgtatgtttctgcccactaattttggaggcagccatgattattaattaaatcgtccacagcccaagttattaacccccaagaattggtatgagtttccatgtgtaaatagccttcaaatggaataaggccatgaattgctggagtggacccatttatcctcaaatattcctatgtccacttcctcatttaaaagactcttgttatgaactattagaaactttaggcaaaattcaaaagtatttgcggcaaaataaaggcctattcctactcttatttaaagtgaaacactgtatacttgtttctctccaaagcggaaattaagtatttataatttcaattgcctcgataagtttccaagtcacttgaaatctgctgaaggttttacttgtattgttggcacaacttttaagataattttagtctcaatagtcaaattttatcaactgaataaaaatttaactgggtcaagaaaacacctctttgaaaatccactgtctctgtgtgtctcgagctgttctttagagcgcaataaagatggctgacgcagtctccaaacccc

SEQ ID NO: 147240 - DNA, 1553 bp, Homo sapiens
ttttgttttgaaacaggtctctattctctagagatttttaattctgggatctccaaaaccgtgttgattgagcctcagtttattactttccaggggtaggggataggggaaaatctatatttttgtacagtttattttttaataccataaagccttaggacaaaaggggtggttagctctgcttttagaattaactgagatgatttttaccagtgtgattttcatatctgtgttggattacttgttacatcagtcatgatgatatttggttggcaaagagttcgcttgatttttttctgtcaaagtatttttaatattttggtaaacactcttccatgaggcctcatcttgtgaagttgaaattacagcattatttttattagagaaaacaagtgaaaatgagaaaaagtccttcaagctttggagttagttaatgctcagcctgtaaaacgattactaacaaataatcccagaggaaactgggttctggtctgggccaattttaaaatatgccattttgggcaaatcttctcatttctgggtacctcaacgtaatccctgatgaaaataaaactctgagatcgagttcgccctccctgacagggagttgtaaataccaggtacttttgagagctttctaacttaacgtgattttttttccatcagtaaaatgtccatctctgttttaaaacatgattttaattaaaaaattcactctttaataaacaaggcgtttgacaccctccaaagaagtctgcctgaaggccctgccgactcttaattgttattatgtaacatcctttaaagggctaaagtatgaaggtcaagcgggaactgaagcagcagtcaagtcttgtgatgccgggaggaagcgtccagtgaatctctagtctcttattttccaaagtggcagcgagaggagggcggctctgggcgttaaggtgttggccagtttaaaaccgctctgtgctcccagggagcttctgttcctaaggcttcccaagtcaaggcaggaggaaacggtcagggctttgagagctgagcagcggtgaggtgggaaaagaccgagggcaggggtttggaaataccgcatcctgtgcttacacacaaagaaaatgctcactttgggatggggcacttagcagtgtcggcgggtgccaaggggcaaacgactagaactgggagtgcattcttccacagggtgacaggctcctcttcttccttcggccagcgccacaagcagcgggttcctggctgatcggagggtgggaacggggctgcggaccccgttgcgctccaggaggagcgccggcccttacctcgcccgtccggcttcatcagcagcgcgtggcccaccagtgggtaggcgcgggccaccgtggggatgggccgcatctgctgccatttccgcgcgtagctcgccaccctctgcagcaggctcaggaccagactggcgccggccagggaaacggcactcgccgcgccccacagcagcagcttctgcacacacgagccccagccagagccccgccatcgccccggctggcggccgc

SEQ ID NO: 147241 - DNA, 638 bp, Homo sapiens
ccattccaggttccagcatgccttgcctctgcttgctcgggctgcctacgcactagctacatacacctctagcttcatgtttcatgttggagtgtggggagaaaactgggttcttagcattagagagggaagtggcaggtggcagatacaagcttaagctctgacctgggtgcacctcagctctgtgtccttttttttccctgacctgaagctgacccccagcagaagtcccccagccaacccctccacccaacaacccccccaccctccccatcctgcccccaagccatagtgggaagctgggaggattgcagcatcttagttgccttccaaggctggttcctggaagccgctgcttgtaaaccccaaggccaagctttggtcccacgtagggagaatggaaggtgacttgcaatgtcccttgtgcctttggctccatctccccattctgtggttctttgggggttcctgcttccctcaaactgaacactctcctgtccaatcacctgatggcttaattattgcctggaattgcccggcctccgatgctggaatcaaagattgccttccgaagtatttttgttaagatggcaataaaaagaaatcaatctcactctttgaacacaaaaaaaaaaaaa

SEQ ID NO: 147242 - DNA, 2014 bp, Homo sapiens
aaattcaaaaacaaaagcgaaacctttattcttttggcttgattgtaatgtggtttaccgttctttatggtaacagcattttcctgcatgcatttcaccaacacactacaagtcaatagcttcagtataaagaatctacatttattgttgcttgtgaaacacaaagtattttgctgtaactggtaatataacttcactacctggttttgtgggagaggaaaaaaaagctgggatcccatattatatctgatacagttctagtgccatatgggtcaataagatctatctgtgtaaacaaacattggaaaagactgatgattactgaataaaaagactaggtggaaacattggattcaagcaatgccaagagtatcagctgattttttttttctttaagcctctttcaatgataaggcattactattgaaagcaaataaacattgaactcagtttgagatttgtttcacattgaaatgtgtgcaagtttacagtactaataaaaaagcagaaacctacactgcatcctagtccttgcttcttattttgtgaagtgcttcaatttaaaagtgctaggaacagaaactaacaatagtgactgtgacatccacctgaagatacttttaatttctcattttacgtacaaaaggctgaaaaataaaataaaatgaactttttacagtatttatattttcttagaaaactctaaccatatattttaaacagatttaagcagcttgcaacatgtttgtacagtcgggcttttcatcattgagtgttcaattaaggttggaagaataaaaagcaagaagctcttccttgtttgctgcaacctattgcttaatgacatgaagaatgaggtcttggtagaacaatttgcttcactttaccactgatatatggcttcccatattagacttctgaacagtggaaggaataagatacagcagcataggcaagataaacatgcagcagtgacagcttcaaactataatggaaccaattacatcatattacctgttgaaagcttgcaaactatacttactgtggtacatatttgatgcaataagtagtgtgcttaaatcatcatttttgtttgctcaaacatgcaccactgggtaaaattactaactatttacaaagcagacttttattttttaaattgacatatactatgtcaaccttaccaagagcagaagatggctaaacaatactgcaggataaagcagaatcaactttataaagtggtggtggggatgttttttggtcaattcaggcttcttagaaaggactgataggatatttttttattttatggccaaagggacactttatccaaaaatgtgatagtcatgctgctgggcctgtgaatgacaatgtaattggtatgtgtatatctctgtgtgtgcatgtgtgtatacatatatatgtatatccacgcacatatacatatatacatatatacatgtacatttaatgggttatgtaaaaataaaacaactctttaatgcttgtgattctatggaacatttacaggcacattaaattttttctggatgagacaccttaaaaatacgaatagctatttaagcacctcaaaaatctaaaaacatcctgaaacaagaagtaaactcttcccttttgtgatgtgatttttttatgtgtgaatgagaattgcagcatgcttccatttaaaatatatccagttatacaatacaatagagaaatgtagaattccctccctttaatccctctccccaaacacaaacccatttacaaaaatagtcacatataatagtaaacaacctgtgaattaaaaagaaaagtgataaattcacagcacacgttttgtaaaaatatggcaggtgtggcagttaaaacataaacactggtgacaattactattatcaagtgtcacatgttgaatttacataaaaatttaacttccctcccccctttaaattggttcctatcgtctgagtagccattacgcctctgctcttcacggacgcgtggg

SEQ ID NO: 147243 - DNA, 980 bp, Homo sapiens
tttttttttttttttttttgtatgtgtgtcatttcaaacaaaaatagccctgaagcaaccctagttttcctgtggaacagttaatgcgtgccaaagtactgatgtggtagctctcccaaaattccctcatgttattcatgaaccttaaaaccttggaaaagaaagattgtaaacagatgcaccattggggtctacagtccccacctactgatttctttttctgataccagttgcagacaataatttatatggcttgctatgactaaatgtttctgaaggaaatatttgggtaaaactttgccatgaactgcaacatgggcctctgaattcctctcctttcctaattttattgtcacattctgagaaaataaacagggcatctattatgctaaagagaaagtataaactcataaacaactacattctatctgcctttaaccccccaccaggcaaaatacacacacacacacacatacacacacacacacacacacacacacacacagaatctcaaaaagtaaagtctacctgagaaataacatgaatcttcccccaacagtacacaaatctttgccagagagaagaacactgctattttctttcacattcagagtgagaattttcttgccccaacttgctttcctttcattttaatttgacagttcctcaagctaatccaccatggcccccacataaacaagaagagttcttgatgctgtgaagtgagagaaaaataacatgagtcattttctgttgcctccacatctgatagaattggaggagcctttactttgggatatgaatacaatcaatcttttctagcctggaaaaggaagtatcctaagaaaggctaaactctcagagaaggggcagatggtgagaaagcattgaaataagttcttgttgtgcctgttaacatatcaggtcaaactttctctacctggtgagttattccccaaatgatatctctgaaatcctta

SEQ ID NO: 147244 - DNA, 1323 bp, Homo sapiens
cttcctttccctaaaatggaaaaatgtgctttaaaaaggaaattctgcctctgtccctcctgctgaaatggatgcaatctcaagtgcccaatcccacccagggcagcggcaatttccccacctgccaaggcttcccaggcttgggcaaagagatggcacccaaaggcatgctgtgtgtgggcagtgagctcgagtgggcacagcccaatgcctgcccctggaccgcaggtctgggttttaggaaagggctgaaatcgggggaggtgtgaaagctgggcaaggtggcccacgttccttattgtcagccagctcgcactcttgcccctagactagccttgtctgaaggcagcttcagagccacttgcccaggctgagaactatccgggctcaggtgctctcctatctgctgcccccctcggtccccccctgccctgcccctctgccccctgaagacaaagttacctaaatgttgaaaaacccaaacttatcctgggagtggtttttgaccctcccatccctcctgcaaaagtggccctaaaccccttatggggtgccccactcctggtggagggcaggtggatgagtggattgtaatttataataaaatatatggcagaaacacaggccttaggagattgcacaggcccctatatcagttcaagtgacatgggacagcaccacgcagggacgcgccaccgcgtttagcaggtcaggcgtcttcatgcacaaaggctaaacttgttgctttaaccttttctgaacaaattttaaacattctggcaaatgtcaagttttgaagtttttcctgtgggttctggcctctttcatatgcaaaaataattctttttcttcaagtacatccagggtagaaaatgaaatctgacttttcctcggtccagtgtgttacctcctatagacatggacccagccactcagcaaactgcctgacacctaagctgctgtcactgctgaagggcacaaccccctggtacccagaccctgtgaggctgtcacctcagtaagggcacctctgcgggccccgggacagccttctctaagggctagctcacctgctttctagataaggaatctactggcttaaataaacatgttccactagacaccattctcaatttagagtgtatctaaaatgtcatctgtgctggcctctgtttttgaacaagctaaaaaccaaaaatgcccttaagtgtaataagtctgttgactgcctctgaaaagaatcttaaataacactgtactttaagggttcatttgcaagaggaatagccaatttgaagttctgcaaatttaagaaaaacagcg

SEQ ID NO: 147245 - DNA, 1746 bp, Homo sapiens
  misc_feature (1)...(1746): n = a,t,c or g
catgtgtattaaaaaganactggcaggccgggtncggtggctcatgcctgtaatcccagcactttaggaggccgaggcaggtgcatcacctgaggtcaggagttcgagaccagcctggccaacatggtgaaatgccgtctctactaaaaatacaaaaattagctgggcatggtgccacacacctgtaatcccagctacttggtaggctgaggcaggagaatcacttgaacctgggaggcagaggttgcagtgagcccgagattgtgccactacacttcagcctgggcaaacagagcgaggctctatcttaaaaaaaaaggaaagacactggcttcaaatatacaatctggtagaggaattaatatacgattagagaacaagtttaccaccctataccacaaaacactctcatgggtgtcaattctgaatataaggtttgaaatctcttaagcttttaaaaatacacataacatttaaggcttacaaaaaggtttactaacatattttataaaaatgatgccatgtatcctccaggttaagaaatggtatcactactgtgaaggtgagtggttgcggggtaaaaaaaaagaaagaatggcatcacataccagctcctgtaatatcataatcctatcaagtacggatttgcaaaaattttcactttagatatgaggtaattaatatgttttctccacaccctgtcctcacttatcaggtaaaaagaattttactcctttaagattaaaaaacaagcatgccttcattaaaagagattaatagaaaaaaatcatcacggcttcttgatttataagtggccccttaagtcttttattctactgcatttacaaactgttcttcttgaagtttcagtttaaagtcctctctgattccttccagtaactctggtttaaaaataacatccagtgcccgtcattgccagagctttggccgtccgcagagtgtagaacttagcttcctgtgacccagcagcttcagtgtactgttcagtatgattcaaggcattagatccaatgtgaaaatatggatgaattccagggaaccacaaaactaacatttccaaaatccgtagatcctgaagggccattcaacattgtatcttctgaaatgaactctattcctagctttcttccattttccatataggctttccataggctcttattgggaagaacattgtaataatcatgtgctccacctttaatttccactgtgcaccctgaagccaaagctgcagctctgaagcaatcttctgcctttttggtcaaaacttgaaagtctttcattgagggtgcacggaaagtaatagattaattcagaataagagggaatgatattgggttttacaccacccattttttaattatacccatgaactctcccaggttggtttcatttgctgtctgaacacagacagattgttataggcccagcacagcagcatctaatgcatttaatcctttccaggggataagaagcagaatgagatgcttttccatagtatttcacagtcacatcatgttcagccatatctggtagataagcagcattctcttgtgatgggtgggccataaaaacaacatcaagatttgtaaaagcccctgcttcaattaaatcaattttgccaccaccatcttcttctgcaggggttcccaggacaactaccttcacgggcggaggcggcctggggaggccctctaaggcccccctcacgcccagcgcggccgc

SEQ ID NO: 147246 - DNA, 371 bp, Homo sapiens
  misc_feature (1)...(371): n = a,t,c or g
cagcatcgggggcctgcaaatctagtgccgaatgactatgtccagattggtgacgatgggtgttgctgtttttcttgtcgtttgtgaacgctgtgatgctgtgtgcccaagtgggcagtcaccacccagcccttccttgggcgtctcccccagagtgctgtcgggaccacatctgtcctcaccctgtgggaccgcctggccctccctccctagcccttccagcctgggnnnnnnnnnnnnnnnnnnnnnnnnnnnnnnnnnnnnnnnnnnnnnnnnnnnnnnnntacctctcatgcgtgttttaccttttgatgttcagagtggctcactggctgagagtccttatctcggagagagggagaggttggttt

SEQ ID NO: 147247 - DNA, 901 bp, Homo sapiens
tccacccgctgcccctccccgtccctgtcccccagcatcgggggcctgcaaatctagtgccgaaatctagtgccgaatgactatgtccagattggtgacgatgggtgttgctgttttttttgtcgtttgtgaacgcatgtgatgctgtgtgcccaagtgggcagtcaccacccagcccttccttgggcgtctcccccagagtgctgtcgggaccacatctgtcctcaccctgtgggaccgcctggccctccctccctagcccttccagcctgggacacacacacacacacacacacacacacacacacacacgcacgcacacgcgcaacgcacacggcacacatcttaccttctcatgcggtgttttacccttttgatgttcagagtggctcactggctgggagtccttaccctcggggaggagggggaggttggttccttgggggggcaaaaaaaggcagggaatgccctggagggtaaatgggggggccacccatgaccccttcttctttccagaaacagctgcttctccccccatcccagggtcccacccccaaacccccagaaggtggcccttgtttacagtgaggactcggccactgtgtctctgtttcctgaaatataaactgtagcgaccccagactgtagagatttttatgtgtttggatacatctgctgtgtggaaaaaaaaaaaaaactacaaaaaccctaattttgtacatactgtatttttactattgaactgtattctagtggctgttcatgctccaagactttagttaccgagacatgaatactatccatgtaataaagcacttgcctggaataaaatataaaactgaaataaacctgcactgaaacctgagatggagctgccaaaaaaaaaaaaaaaaaaaaaaaa

SEQ ID NO: 147248 - DNA, 1003 bp, Homo sapiens
agaagctttgtcaatggggcattcatccaacccaggtgacctacaatagcagtgacgtttgatgggagagaaatgggtagtctatagacacatttgtacaaacgacctactgtgtggaaagctttaggctacatgatgcgggcgctctcctccccactctcattccccacaatgaggcagtatagcgggtgggtcaccaccccccctctgtaaggcacccgcatcaggggcatcctggttggcttcgggatccagttcagctccatctctggagttcttgcgtggcatttccaccagggggagcccctgcaggtcttcctccctctgaccaagatccggggcctcctctggccatctcaccaacccattggcctcctccatgtggccagccctgtaagaccatcgcggctcatggcaacggacacaccagaactggaggcagatgaaggccaagacggctgtgaagcaggccagcagaatggccatcagcacccaaagggagatctgggggtctaccagggagcttccaggagccagcggactcttatccagggtgtggaacatggtgcagtagtgcctgtaagggaaggcagccttcttacagctgatgcacaggaagtagagagtggaaggggcaagatgttccagcaccacggagctgatcgttcgaggcaccttctcctccgtggtggaagctgtagcgaagatagccagagaagatgctgttccagttgggcctgtacataatatggtaatagtcctccaggcagggctccgaggacgaccaggagatgatggctcctgtataagaaatgttccccacctcgatgttcatgccgattttgatgcgggcagcgagtctggttagagctctgccctccgaggtgcagtagactatagctgagagattggggccttcatactcctgtgctgtggtcgctcggtggtgtctctctgcgtgcgcgtgggtcggcccgagaaattccgggccggtactcacgct

SEQ ID NO: 147249 - DNA, 2239 bp, Homo sapiens
  misc_feature (1)...(2239): n = a,t,c or g
aagaaatcagaaaatcgaccacagtggtagccacctggcctaatgctgtgtttttgtacctgacaggggtcactcattttaggcacaactccttcattctttgtgaaattagtgagtttccttctacccgtcaccagattcaatatgttctattaatacaccgataaccacaggggaagggcacttgtcgctctcccacctggttaccacagtctccatgggtcttttgccgtgaccacaaataaaggaaacactcatcactagtatctaagtcgggctttacagtaactatgcaccttctgtgtgcttcacctcactctctacttcaaacagcccatggagggaggtattattatactccttatgttgacagtgaagaatctgaggcccaaagaggttggggacttgagtaaagtcacacagcccttgagaggcaggtccagggttccattcctgctcgatccagttacaagcccttgtgttttccattatgtttagtgcctctttgctaacagcaacatctgcaagatttgtgttggttttgatggagaactctagctcatccacatgctagtgcacaagtggtggaggggccacctcagcaggtgggttctgaatgcagccaaggctgtccccgcaatgggtgagactcgctccatctgcccgccctcagagcaggtgcctaagtcctccctggcactggcaggccttacctcacgctgctaaattaaagccctcccattcctcttgggtaagaggacttcctacatatgtactaactgatccccagcaaggaaataaaatgttaggctttaaaaatccctactttgtcatatcagactatattctaaaactatatttgagcgaaacctgtcattgcgtctaatttcaaatatacagaatctccttaagagctgttgccttatttttttgtaaagcctctctgacatcaaatggggagaaatggtggcacctccagacaccctgaaactacacaccatttcttccctgctcagcttctgctcaggagttctgtgagctatggggaaggccattggttgtattttgctacttttactttcagcctcctctggctgtagagccatttaatgttattgtcatatgctgctgggtgagggtaaaggtgggtccgggtgcctttcccagggggttaagaagggatgttcaaagggccgatttcagcaggagttcagagggcttattgatgggatgggtgagagattttgacaaccaccagagcacatgtgctcttgaccccttttccgggggcattggttccctgctggtaccgggcggttcagaccttcaaataggttgctttcaaaagagctttcaggcacttattgagaattaatgtttaaacagacataatagcctaggatgaactcccaagagatctattaaaatcttgtgggctgaataaatatctcgtgcaggactgtgcaacagtagcccagagcatcctgcctgtgggcatccacctcccaggtgagggcagtgggaagctggcccgacggcagccagaacttgtttctcacctcccaccagcaaccccccacccaactctgggccccaggcacacgaagcacaagtctcaggggaccattcccacattgggggatcctgagggagcccatcaccgcctcttgcatacaacctgtccactaggvaggcacagccmaadtgtkggaaaaaatgtatggtcttgccttccacctgtaaaaactgcacatattgcaagccatttgcactctggaactgcatgccgtgaaaactcctaatggtgtggacttagtttgaatttgaaatcacgccgcatgcacaaagggacaggcccaggcccgmcctcaggtcatccgcccgctggctgcagagcatccctgggagccaaggcgaggcccgtggagcctgagctttgtgtagctcgagctttgtgtagctcgtgcacttattatgcaccacctcccttcagtcaccactcctcttcctccgccatcctcatttatactgattgcacaccccccgctcaaacaacaatgtccttattatgatgaccatctcgtagtggtacattccattcctatttaaggttaagcccaaagcccacttttgggaattttcttcgactgttccggagaaaagttgtgttaagcggcctggngtaacttttgnggtttggnctagatagggttggtnttccctctatgggtatgggaga

SEQ ID NO: 147250 - DNA, 503 bp, Homo sapiens
ccacgaggtggccatctgggcaggctcaggcagtctggcggccgggtgagtcccgcaccaggtacacgcactcgtgcaagcacacgtgtgacggcaggtctgccttcctccatcggaaaggaacgtagcgtctcttcgcaccccccaccccaggcgcggggcgcaaaagtcacaggaagggccgccagggcggcagagtccatcggaattgaaatcccgttactggtgtgtagagaattctacgtgggtgtcaagagcccctcagggcacgggctggcccgggtgggccctgcctttcccccaccaaggctaggggtggcttggcccctaggagtggagaactggcccaggccaatggggcaaggcggcggggaagtgagactcccccattctccgcttgaaatcccattcaaggaaactcactacgagtgaatacagattgaaatggaaactgggatcgctcgaagtctcttgattttaaaaagaaaaaaagttggcggccg

SEQ ID NO: 147251 - DNA, 1726 bp, Homo sapiens
  misc_feature (1)...(1726): n = a,t,c or g
ttttttttttgaaagggaaacaaaatggtgctttattttattttatttattttaaaaaggcgctacagtggcaggacgctgctggggatggggacacacagtgtaagtggtagattttccaagacttcccctccctattgtcctccgagttcctctcttcctggtcctatcagtagcataggattcaacaaaagccttcatggaatgcctctttatttctgaaaaggcaacttctacccctccctttcccatttccaagacttggaaatccttcataagctatctcacttccatgtttgaaccagggaccactggattgtaagtctgaaaatctggggtgtcctaccccataaccagggccaaggatattctgcccccaatggctaaagtctctggaatatttgcctttctggtaccattcaatatatttgggggggatnatatacatctatatacatctttctatatatatattatctctgtttctttcttcttagataaacctttcatatatgtcatatcctaatttcccaagcctccccacttcttgtttgcgagcctaagcaagactcaagagtttcatgaattcaactgggtcccctcagcatcaattctttcctcatcctcctcacccccgggtatcttcccccccatcagttgtttcgccccgtccttctgaaaatctcccccctttttaacacctgtgccctaccgaaatctcccctttttaacaactgtgccctaacaactctgctgatattcccaagtcccacagttgggtatgggggccccatttcctcacccagaccctggctgccttcctaaagctcggccctattgccctaaaagaggatttccaggtccagaggagacagactatagtcctaaagaaccatttagagttaaggtagggggtagttgttcccctgtagggggcttgtgggagaagatgccagatcgcattaataggacagtgtgatttaaagtgcaacttaaagcaaagcctgggtaataatggaggagattccaaaagggtaagtcagaaaatgttttcttctcactgtttcatccaagagtctagaggcttgagtctgggggcttagaatagacagcaggggaatgggaagaaagcatagcatggccaaatcaaccagatggaggttaacttgccaatggataggaaggtatagacacacacacacacacacacacacacacacacacacacacacacacacagcagtacatcttgtccctacacactgaaaagaaataaggtaaagtcctaatgttgaaataaagttgaagaaacgccagaaagctggcctcttggcccttctgttcccctgtttccagatttttccaagtttttgtggttccttgtttttatgcccaactagaaggtaatggtggggtttactgtagatggacaccgaagggtctttgttttcaagatatcgttagttgagttcgaggagagatcaatataacaagaccttgtgcaattatagttggtggtgatcatgggtctagcctcaaaattttgtgtttctctgcaaggctctgtacatagatgcatgtatatattctgtagcttgtaacaattggctgagaccaccttaaactgcaacttgacttatagtgggactatgcagtaccactatgtgaggcttccttggtaccaaagtgagaccagaaagcactctagggatttggggctttggcc

SEQ ID NO: 147252 - DNA, 649 bp, Homo sapiens
tttttttctccattgcacttttatttgaatgtaatatttgggacatattattcaaaagggccaatatttcccaatttaatctgaggtcataataaaacaagcaacaaaacagtgtttgggatttcagtttctcacccttatcatcaagactcactgcctcccatcatcaatatttattgagcatttacagtgtactaggcacaatagaacatacagaaaacattgtccctgctcttgaggagcttacactggcccttttgaagccacaatgtaccaaaagtactatgccaaacacttataacttgtataaaaattccacatccccatattggccacctcaagatgaaaccggataactccctaaatgttaactggctctactcccctaatattaaccttaaaaaccacatgggaaatatagaatttcaattggaggtaccataaccctgtcataaatcgtaaccaaaaaactatttgtgggacagcatggatgacaattggtccactgtgtaaattttagattgaggcagccaaatttggaagcgcggttaattttcccctctttctccgattgagttgggtctcctgggtatccgatgtccacaatgtcaagtgtgtctcgcgaattcgcttatttagtgggctgtct

SEQ ID NO: 147253 - DNA, 3240 bp, Homo sapiens
  misc_feature (1)...(3240): n = a,t,c or g
ggggcggctgtagcctgtgagcagcgagatccagggacagagtctcagcctcgccgctgttgccgccgccgccgcccagagactgctgagcccgtccgtccgccgccaccacccactccggacacagaacatccagtcatggataaaaatgagctggttcagaaggccaaactggccgagcaggctgagcgatatgatgacatggcagcctgcatgaagtctgtaactgagcaaggagctgaattatccaatgaggagaggaatcttctctcagttgcttataaaaatgttgtaggagcccgtaggtcatcttggagggtcgtctcaagtattgaaacaaagacggaaagtgctgagaacaaaacagcagatggctcgagaatacagagagaaaattgagacggagctaagagatatctgcaatgatgtactgtctcttttggagaagttcttgatcccccaatgcttcacaagcagagagcaaagtcttctatttgaaaatgaaaggagattactacccgttacttggctgaggttgccgctggtgatggcaagaaaagggattgtccgattcagtcacaacaagcataccaagaagctttttgaaatcagcaaaaaggaaatgcaaccaacacatcctatcagactgggtctgggcccttaacttctctgtgttctattatgagattctgaactccccagagaaagcctgctctctttgcaaagacagcttttgatgaggccatggctgaacctgataccttaagtgagagagtcatacaaagacagcacgcctaataatgcaattactgagagacaacttgacattgtggacatcggatacccaaggagacgaagctgaagcaggagaaggaggggaaaattaaccggccttccaacttttgtctgcctcattctaaaatttacacagtagaccatttgtcatccatgctgtcccacaaatagttttttgtttacgatttatgacaggtttatgttacttctatttgaatttctatatttcccatgtggtttttatgtttaatattaggggagtagagccagttaacatttagggagttatctgttttcatcttgaggttggccaatagggggcagtgtgtatattcaaccaagctatcaggcgtgtggcttagacacttttggtacattgtgggcttcaaaaagggccaagtgtaaaactgctccaatgtctaagcaaagaaaaactgcctaacatactggtttggtcccggccggggaataaaagggatccatgggtccccatccccggtgtaggttattgtgggtactttaaggttttggagcacttacaaggctgtgggtagaattcatacccccatgggataccacatattaacaccatgtatatctgtggaatactcaatgtgtacacctttgactacagctgccagaagtgttcctttagacaaagttgtgaccccattttactctggataagggcaggaaccggttcacattcccatttatttgtaaagttacccgcgggtagctttcattattttggccccaccccattttattggtatttaaatgttttaggcaacctaaagaacaaatgtaaaagtaaagatgcaggaaaaatgaattgcttggtattccattccttcatgtatatcaagcacagcagtaaaacaacaacaacaaaaaaaaaacatgtatttaaccttttttttaggaatttttgcttttggtgatttttttttttttttttttgaaacttgcctaacatgcatgtgctgtaaaaatagttaacagggaaataacttgagatgatggctagctttgtttaatgtcttatgaaattttcatgaacaatccaagcataattgttaagaacacgtgtattaaaattcatggtaagtgggaaataaaaagttttatgaatggacttttcaactactttctctacagcttttcatgtaaattagtcttggttctgaaacttctctaaaggaaattgtacattttttgaaatttattccttattccctcttgggcagctaatgggctcttaccaagtttaaacacaaaatttatcataacaaaaatactactaatataactaccggtttccatgtcccatgatcccctctcttcctccccacccctgaaaaaaatgagttcctattttttctgggagagggggggattgattaagaaaaaaatgttagggggttccattttaaaattttggcatatggccatttttctaaccttaggaagccaacaatgttgcttgggcccatcatgacatttgggtagcaattaactgtaaaggttttgtgccttccaaatcacacttttttgggtttttaaagaatttcttgatactcttataagaccngcctccaatttggacccttaattctttcaatttttcaaggtgcacaaagattaccttcctggttttaggccttctgtcttgtcaccaacccattcttaacttggtggcccatgtaacttggaaaaaaggccgcatgaatcttttcgggctcccactcaggtgtctaaggcacccctgcttcctttggctggcatccccacagacttattttcccctccatcctaatttactgcagcaattcttctccttagttgatgagactggggttatctcccctttaaaaccctaacctatcctggaatggtctgtcattgtctgcctttaaaatcctttcctcttttctttcctcctctattctctaaataatggatggggcctaagttataccccccaaagcctcacctttaccaaaatatttcccctcagtacctttgccagaaaaccccccaaacaaaaatgcccattttaaaaaagggtgtattttttccttttagaatgtaagctcctcaagagtcagggacaaatgttttctgtatgttcctattgtgccctagtacactgtaaatgctcaataaatattgatgatgggaggccagtgagtccttgatgataagggtgagaaactgaaatcccaaacactgttttgttgcttgttttattatgacctcaggattaaattgggaaatattggcccttttgaataaatgtcccaaatattacattcagataaaagtgcaatgggggaagggagagagggggggagaacagaaagaaagttttggcccatgggggggcgtgttacaatgtgtggcggggccgggagtttagtcgatagagagggctcccccgcg

SEQ ID NO: 147254 - DNA, 636 bp, Homo sapiens
ttctagatcgcgagcggccgcccgcgatctcgaactagtcaatgaatgtaatgaaattttgcagtatacatttctcatgcatttttttctataattgtagttataaaagtattttctttcttattaaattgttaaagatattggaaatataagccaaaaatactttaaataagagtttaatttctcttgattgcatatgacaaacagtatttgtgaaactgtgtgtatacacacatatatataactgagtatatatgcttatacacatataagctccgttatctgtttattaaatatacgcatatatataagcacatatactcagttatatatatgtacatttagttatatacataacagaaaagtatgatttttaatccattgtatcttccaaagctaaagcattattaggtaaaaagaatttttgaaaatttgttgaaatttgcagtaaaattggatatttaaaagttgtaatattttagtcagtcaattctaataatgagcaactatgaaatactataattataaaattctgtattgtagttgattaggaaggtataacattttactatagctatttttaaagtttctctactattttttctataaggatgtatacaaataaaagatgatttg

SEQ ID NO: 147255 - DNA, 2177 bp, Homo sapiens
ttttttttttttttttgaagaaaaaaaaaatattaaacccaggtccattttattaataatatgatctataatctcttgacattacaagtagtttttacagttaaatttcacactgaagacaaacactgtttggcttagggagcagaaagctgagtaacttacatcctttatatcagacactatattttaacagtttaagaaaaccttttacactttctggatttaagcatcaatatgtaagttgtttcctttacaggaaactgaaattagtaagaattaagtgaatatactgacagatggctcatttgggaacatgaaacctagagcaaagccaagcttctataactcataaagtcaaaggtaaaacattctggatttcttcaaaacctaaatgggcacttgttattttccacttttcttcaaccatggagctaagcccctaactaaaatcaaagttggataaagattaagtgggtaaacaaaaaaattattaaagctgtccttaactcctgtctgagtgttttttaagatatagatatgctttccacagcattccattttggctgcctcaagcaccagcacatgcagtttgtgaatcaatctgtagtaactgtgttctagcatttatacagaatggaagttcaaccaaacccagccccatatgaacagccaagggaacacacttcagtgtaggactacagagcttctctgataagctaccagttaagttgtagctataaaggaatatgacaaaggaaagtctgggtgctaacatgcagaaaggcattttcaaaaatgcaagctaggacttagcagttactaatagactattctagtgggggaaaaggtttccttgcaaccatctgtatctggtataccatacacaccgatggaagctcatcctttattgcaattttgttttcaaaatacatcaacacaggcaaactagaaggctcccaacttcataaataacttttaagtaatagtactacaatatgtaagcacttttaggaagaaaactcctacttccttagaagaaataatataatcctcttttctttgtgtaaaatgatgggcacaataaacatgtggtttccacaattcttactaagctaaaaacagtctcaaagttaccttatcataagaactaaattcacttatgcactactagaaattgtcaccaaacattaaggcaacagtttctctaagggtctataaagcctgttcatattgagtctttagtattcaatgccatttctcactagcggcaagttactattcccactgaaaccccaacccaaatgtgacattaccaaatttaagtaaattattgcaactatgactaatttaagaaagtcagtgttatgcagtactgaaaaccaaataggcaacaagtttttgaaattaaaaataaacattaaaaatgagttaagaagtgtcatgtaaacagtgttctcctgacttaacttttatgaagccattttcagatattatagaaataagaggcatggtttaagtgcttctgtgcatattcatgaactcagtccttcacagataccaagtctatactgaggcacctcccagaaggtatgtgaaagtgggggctgggggtagggggaggctttctgatttactaaatcagagtgaaacagtactgatcaatattcttgtgtttcaaaatgatttcggtagaaatgattccacctacaaaatgcagtcaccattataaaatcaaggttggggagtcctgcatatacttggaaaaagaaaaacaaagacataaatcatgaatttccataaggttcatgtagaatagtgaacataataatttcaggtgttacatttacagtttcctaatatcaagtatggatttctgaggttgctgaaattgaactccctgggaaagaatgttataacaatcacatgcaaaggaatggatcttcttattaacctgttttattttttaaaaattactcagaaacatatacatatatatatatatatacacacacacacacgcatacatatatatatatatatatatatacttccagtgagacattagtaccttctttaattttatattttgatcaccaattaaagaaattaccttcgggaacagatgcattttataaagctgagatttttataattctagaggcaacttcctcatcaag

SEQ ID NO: 147256 - DNA, 1402 bp, Homo sapiens
  misc_feature (1)...(1402): n = a,t,c or g
ccantgttggaccctttggtttgggcccatatatccacctgttaatagggaaaatccccatgaagaggaaatggccctagtgcccccccaactcctcccaaatgtcctaagttaagtagttaccagcctgattttttaatgaatgccataattggaatgtggagccctctgaggttgtgatagcttgtacatgaatttcaaatgtcattcctaaagaatgaggggtgggagggatttatagttagaaacgacagtccgaggaaggggtattttcttgttgtcagggctggaatgaatcactgctgctcaagtcaaaggttcttgaatatccttagtttttgcatttcccctccttttcctttgacctttatttatttaattatgtatttatttatttatttatatacttttgctccattcagtcacaaacacaaagcaaagcagagcgcgcatatatatatatatatctgtatatgtgttgtaggcaaaacactgtgaatttcacaacaaccaccaccaagcaactattttgccatcttaacatacatctcaggagacgaaatgagaaaagatggggatgtcattttttagtctatgcgtttgaggccaggtccatgtttatttatttctttagtctatgcattaatgaaaatgatcctgagtggaggttagctgaacgttcaatgtactggagcaagcatcataaaagctgctagtagccatgtgtttgaacaggaaaaatattacagaaaatgaaatgtaaaggcctatatcttgcagcttgtatatcttactattgcttaaaaaatgtataaagcagctggaaatgttttaaatacaaggtctttgaattaaatgtggattttaaatatgtaatcccttgacaaatgaccaaattatggtgaaactaatgcctcccccgcgttcctttgaatcattaccctatgaccttaacaaatcctgccccggagatgtggacattcctgcatttgccttcctgtatcctggagagatgtttgtatatatcccaggccgtaatacacacacatttcccatatctctctacagatatatttccccttcaatcgtgaccctggtatttggaactctccttttcatttggctcatcttccgttttaatgtgatgtctctgtgctaatacttaccagttcttgttttgcaatctgttttgaggtccattgctttactaagacccactgcatcttggctgatttcaaagtgacaccgtgaatacagtgtttaaaaaaaaaaaaaagttttgtttgtaaatcatgtgaccagcttctctcaacctgacatggaaagtctcttgtactacagtgtatttaataaaaatgatgtcttacaataaataacatactccaaaaaaaaaaaaaaaaaa

SEQ ID NO: 147257 - DNA, 1085 bp, Homo sapiens
gcggccgcggggcccttgcagctgcagctgccctcggcgctcacgctgctgccgccctccttcacctcgctgtgtctgcccgcgcagaactggtgcgccaagtgcaatgcctccttccgcatgacctccgacctggtgtaccatatgaggtcgcaccacaaaaaggagtatgcgatggagcccttggtgaagcggcggcgagaggagaaactcaagtgccccatctgcaatgagtccttcagggagcgccaccacctctccaggcacatgacctcgcataattgactcggaaaggaccccagctttccacgcgcgcgcaagcacagttaagccacctgcaggaataaacacgcgagaacatccaccgcttccttgcaccccgaaaccctgcacaaagacacatacattcaccgcccccccgcccccccaacgctgcacacacacgtcctctcctcccaggaacctcattcaaatatttacccgggacacacaccccccccccacacacacacacagacacactcacacacaagagccaggatggtggagttttgattgggtgggttgtttgagggggttttcttttgaatgcacgcattttcactttccccaaaacaaaggtacattttttaaaatgtcatatattgcaacatattgatgcatttgccatacgtttctacttaaattattaagcacttacgatttagatgtaataattatatgtaagggcaaaatttattttagatataaagtaaaggaggagggtgagatgcctttcctgcatttccttgatgacagtttgtgttcctacaaaaataaacaaaatgaataaaaagggatcaccattcaatttgagttccccagggggaagtgcatgtataatgaaatgataatggacttcaatgaagaatgtcatcaattatgtacatatgtattttcttttaatacaaagtgtaattttgtgccagtgaaatggagtctgaatagttatgtgtttcttttatccctggaaatatttattaaactttatagtttatccgagtatgttggatgctttgacaataaatgactattttcttcaaagc

SEQ ID NO: 147258 - DNA, 2518 bp, Homo sapiens
tttttttttaaaagtataaataaacagttaacagtttattgtatcagaaaataatttaggaaaatgaaaataaaaccagttttggtatacatgggtgagggggcgggggaataaagttctaaaacattcaatgcaaaacctgtgaaaaaagaggccatgtggccgttgctgtttaatttcttgtcctgtggttcagcttcaggtttgtggaatttctagttccatgggtgagctgaggaggaggaggggacaatggggctccatctttaaataaatgcaatgaggacctggggtgaattcaaggggttatttggaacggcactagggaggcatccacacgggacctggggtccttctattttctcaggattctgtggacttctttaggacaggatgccccatgggggaaaatcccagtcaatagtttggggtgttttcactgagtatcctgtttattccataccaatgcccagatacggcccaatggccaatgcttgatgttgtgaaagtcaaacatccaaatggttgaccaccttttccacttaatcgtagacactctaatgatcaatgggaagtttagtgcatgacaagttcagctggcaaagatgcatttcaaagctaatcagacttcataaaacatacattagagccagacttgtccctggtgctaaccatggcgagatctctgtgacttgtccccactcattcagcctttcgtgaacagtttctacagaattaaacaactggaaggttccagacatttcccttctgtttggttattggtattttctaaatggtttgtagtaaacatgtgttccttttgagaaaataatgtaacagactctaaaaatgttatcaatgcatggcctcaagcttcattcaatgtccagttcaatactttctgggtctaactcacattcccggggctcctgatctgcaaatgtgtggagcaacctgatcttgatcctggcttttagtcccactcacctctcaacaatccgggtaccaaaagtcagttagtaaaggtcattgataaggtcattaaagttcacgtgaggctttgctgtcattctcctttccatttaaatcattttagctggagggtaaccccctctctgggctccagcacctgccatcctgtttctccaggaaagaaagagaggaaatgatccaaattgggatgccagaagaggaaattaaacaaaaaacaaaaacaaaaacaaaaacaaaaacaaaaaaacagaaacacttctgagaagaccagtatttggtgctgcaaactaggcacatgtttctgccaaatctcaatgtttcatatcgacacactgtttgaaggagcagaaactgatgtggactttgttcttccatcttcacaccaagcaacatgacatgtgacagatcctgagacgtctgctgaacctctgtgtgtcacctcaggctgggaattcatctttaaggatcacagttatcatcagttgactgataactaactttgctagggcctttcaccctctggcttcagaggaagcaacgcaaacgctagtgaaaaacaagaaacagaacaaaacacatctgcggatagattgtggcagttaaattcaaggagggtgtgggcaaacaccccctctggcacgccagcgggcttttcaaaaccagttgccccgcttgtcttccagccccttaactgggagaattgtgcttgtatgtggaagtgacaccgtatctaagagcaccttagagaatcctgctcctcacagtttctagggtcccattcatgttgactggctgcatacgcaataaagaaactcccatgtggttttgtaggccttaagtggtaggcagtcacataacttgatattagaaatccacatgtatgtgagagaaataatagagaatggtgtttccaccccagaatagactgcggaggcaacaggagagggttcccctgggagcagcagctgctgccctatagaaaaccttgtcaagagccatgccatcagcttgctcctatgcccatacatggctctcggcagcctgagacttcagcaaagccctttctcccttctgccccaggtgagtcctccaaaggttgggaaaattagggttggggtgtccacagtgggtttccgaattttccccttttggcttgggatgactgaagagtgaacaagaatgggatgattctgttaggaaatgagacactggcccggggattggtacaatggtgttcacccctgcagttccctgtacaatgatttcaaacaatgatactagggctcctcaaagtgtcccctatgctgtggctgtaagtcttcatcgtacataatggtgccgaaaacaaaacaaaacaaaacaaaacaaaaaacagagcttacgactgcgtagtgttcttgctcctcccatggccaaagctatccccaattttctaggggcaaggacttgcccaacccagtaagactagagtgaactgccagtttgccaacccagaagctatcaacatcaacactaagaaattttg

SEQ ID NO: 147259 - DNA, 1846 bp, Homo sapiens
ttttatcattgcacatccagatactgttttaggtgagctgagctatttcgttactgagaaaatgataagtatccatttagaatgttcatgtaatgtttggagagttttgtattatggattcaacttatatataatatatataaggtacataatatgcaattatatatcttgatatatattatatataaaataatatacctaagtgtttttttaaactatgggagtgtattataaaatcaataataatatgcaaacagttgtgcctgtgtatttgaactacatacaggtatgttgttattaacagatatatttaacatttatttactatgggagccatttcctaattgaattgcgtaattactagaccagaatgcatatgctactatacattgatttactgcctgtttttacactgccattacctttcatgttatccatgatgttgaacatgggaggcatttttaatggaccaaatttttagaaaaattagtttttggatttttttttaagttctgtatactgttttgaatgaactttatttgcagctattctgggatgtcagtttaataattcaggtactgaattttattgcttgctaattgtgcctttccgttgctaaattaaggaaatgctatgtgtactgtggatgtaaaaataaggacattaactttatcttaagttacatataatcaagcaaatattttaaaaaatgtatgtcagggtgacaggcataaaagtaaattacccttaactctttagcctttatttagaaagaaatgtgggaatgggctaaactttctcaccaatttattagaaagctaaatgggtaaatacttccctttttgtagatatttttctgtgcattgtaagttataggagcaggacatatttttttgtacattgtcttgattgtttatactgcaggtaggtatttccagtgaatggaaacgttgaaatttatagatgggacaatgcacatacttcatatgtaaacaaagcatttttctaaataatttgggaaaggattggatttagcaccgttaacttttaatacccatttattgggctatttaaggtaaattattaaaacctaaaattagtatccgtattttagatcctattattttttcaactttctattattttcacagtggaaaatttgcgtatagtattaaactattcttttttctgtctacctttatattttgaagtgtggttgtacttacgttaatagtaagtgtatttgtagaaagtttttcataaagaagagattaactttccatataaataaataccaggtatggaaattactggttttagtggcatatccgtatggattatccaggaactatcacttcaggatgtttctattttggggcacccttaactatttgagccccatatttttataattcctgattgagaatttaaggggccatggtaatttttaccccaaaacctgaaagcctggtaattttaaagtaaagccaacctaaatttacccctttaccttattaggttaaaaggaaacccaaggcatgtaggaaaatattggtacgttggaaaaatgtgaaaagagctttactttcaaaatgtatgtttaatgaattgaattttagggaccgtttcccataatttgggcctatgctatcctgttgatttttatgtctagcttaaaaggtatttgaaaatgttccatttgtgttttaataatttttggcccttgaacagctcttatgcctaaggtattttaaaataaaagccaaattgaagattaacaaaaataaagaaacaaaaaaaagctggggggggccttttaaaaaaacccttgggggggcccagtttg

SEQ ID NO: 147260 - DNA, 622 bp, Homo sapiens
tggattttgtttctcataatacagaatatatagtggctaccttgtatcttggtctgggattctctctctgaggaccccggattttactttctctttgggaggggcgctggggacatacatctcttcaatccaggcttcctccgcatcctcccatcttggccccatttctgccacgtcaggacacttcctggggagtctcacctttcaaaatggacaccggtggccccatccattgctcaatggtacagagtgtggggtcagtccaccacccttgacctcccggcaggcaaaggtgaggaggcggacccaaagcagtaccagcaggacttgttgccagtgataccaaaacagacttttccccaaccagtgcttcacatgtctgctggtgtggctttgggattctcctgccccacccccccgtccatggcagccccctccccaaggctttgctcacacctgagacaggaaggaggaaggggatccaataggaatatgggccccggaggggaagtcatgcacccccaagccaccaccccccagccttccacgcacatctcctggctggaagagagccctccaaaaaggggacacaggctgccccggcccctcaactgcatccaca

SEQ ID NO: 147261 - DNA, 984 bp, Homo sapiens
atgaaatgttcaattatattaaaacaaacaggcatgagctactgcgcttggccaatatattttgaaagagtgtagatatgaactaaaaccttgctaatccttaagcctaataattcttgaccaagggtaaccctgggtttatccctagatttgtttagaatgctttgtaatttactttgcattcttaatttgaaattagacccaattctggcctctttggaccatctgagaattaaaagtctaagtactgcttcctagggagttcatgctagctggggaaagctttatgtgttacctgatagaatcaaagctaagctcttagcttgcattcccagcattactgatcagttctcctagctataaaatttaaaagaaactatagctttaaccatgtttctaacttatactaacaaaccatggcacagtgtgtagtaaattcctcttataattccaactaatttgccattgtaaataagtaaatatttggcttttcaaataatttcatagcagctgggcttatctgtagaatcctagcttttcttcactcttgattctaggctgttccaggaagaaaataattagggattaatacctaaaataattctccttctcaataatgtcactttgggactgatagcattatttgcattttaaaacaaaggctgggtgcagtggcttatgcctgtactctcagcactttgggaggctgaggtgggaggatcgcttgagctcaggagtttgaggccagcctggggaacatagtgagaccctgtctttacatttaaaaaaaaaaaaaaagaataaaaatgggaagttagcagtcaaaataaaattaggtcccttttaggggcattacctcttgtaaagggtaggtttcaggaccgggtgctatggcttatgcctgaaacaccaacactttgggaggccatgatacgaggatcacttgaggccagtccaggcaacagagtgaaaccctgtctctac

SEQ ID NO: 147262 - DNA, 669 bp, Homo sapiens
tttttttttttttttttaaaagaacaagtctccgtttattaaacatgtttttttctgtttcaccacacactccaaaaaaaaaggaaatggggctgggagtggagaaaaggggacagtgaggggggatagataaggctgggagtggggtggggggatgggactgaaggggaactgtccatacaagagaaagaggagtagagtctaggagagtctcaataccaaacgcaaaaggatgaagggggcaaggctgggtaggggacagcagtcagggaagagggggtgccaaggaggggcttctcccctcccatggcctacccaccccaaaccccatccatcctacctcccctatcccgccagaaaactatgtacagagaaacaccgaaaaatcgtggagctggcgggagggagggaggtggaaggagattgggagggggaggatgagagggaagcccagccctgtcctacctcccccaggggacagagtcatggaagggggccccccaacacccctcctccaacacaggtccccccaccctgggggagagagacatggcttttcctagagtaagttcccccctccccctggcagtagaccccaaaaagagagaaggaaggggcagaggggaatgtgtgtcagagtaggccagatcaactagcctgtcctcccaa

SEQ ID NO: 147263 - DNA, 1427 bp, Homo sapiens
aaacatgaaatgattccaaaatggaatttctgtgttacagaatttactagaaaagtgctgtgaaagtataatgaaaaataaagtgatcccttgaaataatgtggatagaacaagcttttgaatatttacatggattaatgaattatttgccaaattctcctgaagttatacctagttcccattaaattaatggacaccgtgtatatgagcatatacctttctttagaactatgttttgtgataagtccatttttactcacaggaatttacttaaacttgtacatatattaattatatatactaaatgacaatgcccttatctgaaacaaatccatcgaataatatcaaaacgttataagtccttctttaaaaagtaaaaagtaaaaaacaacgtcagttacatcatttacatttggtatcccacctaaatagagacacagcttttgaaatctacaatattttacattttggtcatcatttaatgctatttgcatttctctttaacattttaatagtatttgtgatatatcatgtttaactgaaagctttgggttatatattttaaaggaatatcttactttttgactaaatagttctgtaagggcgtaatatttgaaaaattagcttgttacctgaagcaactatcctccttaatcattttaaaataatgggtaaagatgcatctttgtaaatatattctgaaaacttggttagtgtattagaaacagacaccagaaattaaaaaaattatttctaggactggcatacactacagtgaattacttcaaatgttactctagagcatttttaaaaatacgcagaatcctgctgttctctgtgagatgatccctttttccgatgatgaaattaaacacgtttaaaaagtcttttaaatattatatatagcattccagaattgatgaattataaaacattccagatccttctgtttgggtaaaaatctatcttttagtttgtgatagtaaaataagcaatctaccagccagggttgaaatatatagtattttaactactgttctatatatttcaaaattcatgttttctatctgtcctagagaaacttagccttctatgaagtgaatcagttaatgatattattgctttggagataaaattggcctcagagtatgatagcctgtaagtaaatgcttcattacccacatatccctacccaccccccccaaaaaaacctaccagtagtctagtacagtagtgagcaatcttaaattaaaagctattgttcacacagagcagaggaagataattttcatgttaaagcagttttcaacatcaaacatctaaggagttataaactataaatgaattacctttaaaccctggtcttcacagttacattgctttctgaatgctttttggggtgacattatgctaccacatttttaaac

SEQ ID NO: 147264 - DNA, 451 bp, Homo sapiens
ttttttttttttcattaaacaaacatttattgagtgctttctaggtgccaggccgaagccaggcatgttaatacaaaaattccaacacaatccttgccctcaagtctaagttgagatttgacagagaaagtaccctttctctgtgaccaaaagaaaggaggaatcagagtggcaatggagagccactgcatctctggatacaggaggctgggacccagaatgcaagaaggcaagtgatgagaccagagaggtgagcagggacaaggacaccatgagtctcacaagccatgctgaggggtccagactttatcctgagggcagcccggagccaaggaaggttttaggccagagagtgacttgatcaactatgcaatgcattttaggaagatagctctggccacatgatagagaagcagtaggaggctgtcacgataatccaggtgaaagctga

SEQ ID NO: 147265 - DNA, 485 bp, Homo sapiens
  misc_feature (1)...(485): n = a,t,c or g
gcacagacnattgacgccttgcggaatggcacgaccgtcttgagagactcatggcgtccttggccctgctcacctctctggtctcatcacttgcctttttgcattctgggacctagcctcctgtatacagagatgcagtggctctacattgccactctgattcctcctttcttttggacacagagaaagggcactttctctggcaaatctcaacttatacttgacttcctccaaggagctttggctatactctctcctcccgacccccaccctggcatactacacagatcactctgggctcacttgcctgcctaaagggcatctccccagtagactgttagctccttgagggcaaggattgtgttggaatttttgtattaacagtgcctggcttgnnnnnnnnnnnnnnnnnnnnnnnnnnnnnnnnnnnnnnnnnnnnnaaaaaatnnnnnnnnnnncctcgaggtctccggtatctaaacccc

SEQ ID NO: 147266 - DNA, 2790 bp, Homo sapiens
gtcgtcagaagatatactgacccccatgcaggcaggatgtggggggcaagatcagaagagtcaggccctggggcctctatgccaggtggggaccagaagtcgggaaggcacctaccacctgccctggcttttttcccctcaactttggagccccatcccacccctccttggggggctcagcttggctcagatctgatgcttcaagaggctgtaacctcagagggcaccaaggagggtggcagagcctgcttagccaggaggccgaggtcccctcaagtcctcccctgtcccttccaaaggtgggtccaggaggttctggccccgctggggcaggcagggcagggtctgtgaagcttaagagcagatggtgacaagttctctgggcaggtggccatggggaggggccatggcttggcatgtccaacagaaatagtttttgctgttgaacggtgatttctgtccaagtgcagatttccgtttgaataaagcttcgctttctaggtggcactgtttgccttaataccctgacagttcatcttcctttcttcctgctaaccttctgctctggactggactcacttttctgctccagggactccttttctgggtttgggtcttgcccttcccaagggactgttcttgtggcccttaatgggaagggggcaggggtgaggagctgagcctgctcaaggagtgggaagtggggctataggcagcctctctgatgcactctcttccatctctttccccaaggctccgtgactgtcaaactgggagtaggagaggggacaatttaggactgggctagattttcagaagaacatcttacaatattcctatttataaatctttcctctggggaaaagggagtggtttctggctgaatactatcttaggctcaaggagaaacaaaataaaaattagcttccaggcagcctgtttttaaagaaatgggactaatgggagaagctgtttgtcactctaagagcatccaagccctggcccgtctgtgcactcttggctcctggggagatatatctgccttctaagaaggcaggccaggtcttgggcacagacctgcatttgttgaccttgcactccaactatagtgccttgcaagtgctcaacagtacatattggaatgaagtccctatgagagccatttctggccatgttctatacctcaaagtgaggctggcaggtacagagatgaactgtacacatgtgatacatttaagccactggaaaaacccctgtgcttgaaaatatttcctctatatcatgcctggagttccatcatagcccttcatttccttggctttagcatttaccttctcttaagaataccagctttcccctttccctgagaggaagagcacatgttgggtctcctcttagtgtgaacgaggattgccagggcccttttctcctatggcacaccagggatagacaagggcaggggatactgggcagcctgcatcatccctcccattggggctgacagctgggccctactttcctccctctggctgcttgggtcccttcaccttggatggatgtgggctttcgccccctccactctacttgccagtgtttttcccagggggtttgcttaaatccagcagacccctttcctgtcttaattagatcttgggcagcaatttgacatggctgatcaccccttgcttcttggatggcacttccctggcacctctgtggctagttgtcctacctccctggctgttcctttcaggcttccgtgcaggcttctccacttgcccatgcacagtagggtctttcagggttctgctgtgggctccctagggaagcccatccatctggatggtttcaaggactggtgaggaagtttacgaattgacctccagccccaacagtccttcctgatcaccgtgaaccactagttttgctgccctctagggtgcacagacaattcaggtccatgggcccagatgggtacttgctgtcttctgcaaacctgcccctttctggggtactttcccttgaccccgagatcactcaggagccagacagggaactttattctattcctgtttttctctttctgcccaccacatccaatctctcaaaacggtcaggtctaccttaacatctacttgatttgagccactcccactgtcatcagctttcacctgggattatcgtgacagcctcctacttgcttctcttattcatgtgggccagagctatcttcctaaaatgcattgcatacgttgatcaagtcactctctggcctaaaaccttccttggctccctgctgccctcaaggataaagtctgggaccccctcagcatggcttggtgaaaactccatggtgtccttgtccccctgcctaaccctcctcctggtcctcaataaacttgcccttcttggcaattctggggtccccagcccttcctgtatcccaagagaatgcagtggctctcccattgcccactctggattcctcctttcttttgggtcacagaggaaaggggtactttctcttgtcaaatctcaacttaggacttgacttccctccaagggagcttttggctatactctctcctcccgacccccaccctggcatactacacagatcactctgggctcacttgcctgcctaatggtcatctccccagtagactgtaagctccttgagggcaaggattgtgttggaattttttgtattaatcagtgcctggctttgtgcctgggaccttaggaagcactcaataaatgtttgtttaatgaaaaaaaaaaaaaaaaaaa

SEQ ID NO: 147267 - DNA, 1057 bp, Homo sapiens
ttttctcaaaaattgaaattttataaaaaggcatttttctcttatatccataaaatgatataatttttgcaagtatagaaatgtgtcataaattataatgttccttaattacagctcaatgcaacttggtactttcttccctccctaaaaaacgagagagaaccaaaaaataatatatatatatatataactgtatatatatatttatataatatagacaaacaaaatatgaaaaaaaatcatttcctctttggtataaaaatcagactctcaccttgagagacacacagacagacatgatactgggtttgtaaactgtgtggccaaaagggatttccctgccaagacttcccctctcccattcccggcccagcctgcccccacgtcgctgcagcccatcctgttcctttggggctcccatatggaacatttaaaatccccctagccactcccagctacaaaccattcctgaagaatcccccgacccactatcaaagaagaggaaaggattcttctcaaggctgattaggtagcgactaacttgggaaatgccttatttagggaatagcttcataggtgtggatgaagtaaaggacaggctgtggccaaactctgacagtgtcccatccagaccaagccaggcactggcctgggcctggttttgcccttatcctcctctactacccggcacaaggattccaccacctcttgccagaggctgggcctgaggggcggggctccttgcttactgaagaagggagcagagaggccaattcccgttccagcctcatctcagctgcacagcttccccctgcagcccctccacagggccttggggtgtagatgcaagaaagctccagatggggaggcaaagggaggtcaaaagggagtctgccaataaacttgggtttaaactcaaaattaaagaaaactacgcctccctgagctgggtgtggtcgtcacgcctgtaatctcagcactttgggaggttgaggtgggcaggtcaggaggtcaggaattcaagactagcctggccaacatggtgaaacatctctac

SEQ ID NO: 147268 - DNA, 2372 bp, Homo sapiens
ttttgctacagtctttagactaagcatgcaagacatacgactaagtgcaactcgagtgaaatgtttttttttttaaattttaatcattccctaaaggtttgaactgaggtatgcgtactaacagtttctcatgctgttatctttactcatgtctagctacacatgctgagaatgaactaatctaccagatttttatcctcttttgaataccaaactaaccagcaaccactcagtttagaagcacagggcccccttcccatgaccctgtctggctactgcctgcacatcatgaagctgcctggaaaagtttttttttttttttttttttttttttttttttttttttttaaagtcttgcgtgacccacagacctgcccctttataccggaaagccaggagtgaagcttccaaaagtaactgcccggagaagtttttgtacccaagcttatgagtggatgggagtgttacttagtctttaaatgaaaaatgctgaccaaagcaataatcggaaaaaaaggaaaaattaaaaataaaaacaaactgaaggatatatgcccaagataaacccaaaattaaatacagtggaacacagcacagttccttaaacaaaagtgggcatacaatcctaaaaatatctctttttctagaaatactattatgtaatctcagttcaattatggaagcttttctgtcctgactctaaactgtctcctttattggatactctaattgcaggggcatacattcatttttttttttttgagatgggactcccttccttctgtagctcctttaatattgggacctatttttatctgctgtagccccataaaatctctttaagagaatgaggtttggtctctgtagaggtacacaaactgaaaaaggaaaaataactactagaaaaaagtaacaactttggctccattatctacttggtcttctaaatttacgatgaaggagcagttctctttctcaggttgcaatagcctatcgcttgtcatttgcctctaaattcttttgcctcctttgatcaacaataagaggatatttggcttcatcagataaagcataaaacagagaacataatttacctttgtgtaatatctttgggaattttagaaaaaaggtacaaagaaagaatataaattaagctttcgaaaggctctcggaactaaaaaaaactacagtcctatataaataaatggacaggaaagtgggtgcagagctgaaagtgtggaggggttcgtaaggactgaggttgtactggacctgtaaccatcacatttctgcataccatgtttgggacccccccaaagcccagggcctacgatgatatcttctatgagtttttgtgaatactgggttggtgaatataatattgcataacaaaactggcagtacccaaatttgccatatttggaaattaacacttttagcatttgctgaactcagccctagttaactcccttaacaagttcaatctgaaatcgaatttgcattcaaacagtttaatgcccaccaagtaggtctgaactaatgtataaacttcagcgccgccgccgccacccctactttcagggcagctgctcggggaagcccggtttttttttttggccattttgcaaacaaaaccaacccacacccgttatcgcagagcacccaaggcccatggcaacttggttccacaagggagagccttccaaggccatattgtcagtctaattaatatgagctttttttttttttttcagtgctgcctatgtttccttgtgctggtagaatgtggtggcatttattaatggttgctgcaaaaaaaaaaaaagaaaagaaaaaaaaaaaagaaaatccgaaacacccctcccccgaaccacccccaatactgctgcgtggaatgaatcggcattgttcctagagtttgtctctcttttttttttctgtcattcattctctttctggcaggacgtcacgtctgtgtgagaggcccttcatgtgtagagtgcagcatttgggacctttttgaaaaagaccaaaacggaatgttttctgactttagagaaacgtggtgatgtctgaaggaagatggaatgagtgacagaaagctacaaacgagaaatgacattcagctttgtttaataaaaacacctattaacattgatcacaaggtacagaaaactttaagcctgcaagaggccatcggcccaaatggaggcctgaggtcagaacttaaaatggtatagtggaaggaaaaaaaaaaaaaaaaaaaaggcagtacattaaaaagtttgggataattattttttaacccctccccccaatacacacacaaaggccttccccatcccaactggaagcaaaaaaaaaaaaaaaaa

SEQ ID NO: 147269 - DNA, 1462 bp, Homo sapiens
  misc_feature (1)...(1462): n = a,t,c or g
ttttcctcctcaatttgaagttcaagatgtttttctcttccagggagattttttcgactgacatctttaacttaccttccaatcatattactaacgtagccttcttcctagattttttaattgtttgatcatgagcgaacacttctactctctgtgatagatttgcaaacagaggaaataacgcatcctcgtgtccctcttcttggtgttccacaggccatgtgtgccctagccctcgttcatgcaaggtctgtgtagggaaggtggacttcagctcagcaacagcatcccttcccacagggatcaggtgggtggcttgagataccccttccatggggcaccacccattcagtgagacggggaagccctgggtgggagggagaacacctccacatgtcttctactctctccataggatggaatgagtgtcccagtcccaggagtatccatttcccactgtgtagcccagtactctggtctcactgtctctgctgaatcctgtctcactgtgcatattattgtggtttgtatcagtcagtaaaccaatgtgagtcttcctctcttgcattcttaggttcatagttttgtgtgtctcctgtaatgacccttctctttccctttccaactcctgaaagattgccactatttcctctggaactttgtttcgttaccagcaaaatcctcgacatccatacccgtttcctgggctttccctctcctttcctctgaatgggtagtcttttatattcagctgtccacttggacatcaaaataggacattttggaactcaatttgcctaaaacttacccacaaatttctccccaagtctctccctaactggcaacaacaaaaaccacaggcttctccgtgtcactgggatgggcaactccattcttttgattgcttaagccagggcatccgattgagtactttcttgattttctccagcccacatgcgagtccatcgggcaagccctgttggtcctaccttcagaatatgtccggggttcagttgtcctggccaccctgctgctgtaaccatggtcagaactccatcctgcccctctggattatgactttcgtttcctcacagtggtcctgcttgggctctaagcccttccactcccattctctctacagcagctgggctgattcctttagcacccaaggatatgttggcatcacagtgacttacataccatcacaaagacctcccattcaacttagagtgaaagtcagaatcctcacagtgaatccccaggccctagaggatgtgaacccccaggccctagaggatctgaacccccatccctcctctgattatctctcccacccccacttccctttgcattctgctccagctgccctggcctcatggctgggtttccaccaaagcaggcactttccatcacagggccattttccccgtctgtggctttgtggcttggacattgccntttt

SEQ ID NO: 147270 - DNA, 327 bp, Homo sapiens
caggaggcttcaggccaaggttacaaagtcatctgctggagagggactggcattgcaaaggatccaaggccccaaaaagccaccagggagtgaaggagaactggcctagtcagagccaagggtacctgggttggggttaagggttaggggttaggagttagggtttggggctagggtttagcgctggggttagggttaggcttagggttagggtgggagtgaccctatattgtagtgacacaatattgctcaatttcctcaacaaagaaaggacatgccttttagattaagccaagactgccatcacagtgccggtgctcagcaagc

SEQ ID NO: 147271 - DNA, 290 bp, Homo sapiens
  misc_feature (1)...(290): n = a,t,c or g
cggagtctttgttaagaatcgatcttcgtccagctaacaaacttgctaaaggaaataggttattcatgagatttgctacaaaagccccaggtctaggatccatccaggactgagtgtgtaagtatgtaatgtttccttagtcccccttaagctgaaactacttctatcctcccatgttttccaagaatataggtttacnnnnnnnnnnnnnnnnnnnnnnnnnnnnnnnnnnnnnnnnnnnnnnnnnnnnnnnnnnnnnnnnnnnnnttgagacaggcgtgccacagaag

SEQ ID NO: 147272 - DNA, 766 bp, Homo sapiens
aggggtgtgtgtatgtatgtatgtatgtatatgtattagacacatatacacatattgggttttttaatcatttgagagatagttgaagataaaaacccatcacccctaaatggattccaaagaataagaacattggtttatacatagcacacttaacaaaatcaagaaatttaacattaatacagtactgttacctaatccgcagacgaatttcaaattttgtcaggtgttccaataatgtcctttatatattccccgcccagccccaggtctaggatccatccaggactgagtgtgtaagtatgtaatgtttccttagtcccccttaagctgaaactacttctatcctcccatgttttccaagaatataggtttactattttatacaatgtccctcagtttgggtttgtctgatgattcctcctgattgaatttgggttgtgcatttgagacaggcgtgccacagaagcgatgtcatgtcatttccagagcatcatgtcaggaggccctggatacttactcgtcccagtcctagggacgttcactttattcacttggcttaagctaatcatcactagcttcttcaactgtaaagctgctcttcttccatttgtaatctcaacatcggtgggctggctggttcaccgtcgatcctgcctgtaattgcaacactttgggatgctgaggcagaaggatcacttgagcccaggagttcgagaccaggctaggcaacatagcaagacctcatccctatattaaaaaaaaa

SEQ ID NO: 147273 - DNA, 722 bp, Homo sapiens
ggtttgatgtactaaaaaaagttacttcattactttactgttgcttctatatgatgtaaactttaaaaattaaggctcaaattttagaaatacacagaggacaaacatacactctaaaacatgtttatttcagtctaaacaaatgttttgtttatggatattagtgtttttgagaaatcactcagaaaatgttacttcatggccttgcaatgcttgatgttagtttagcacatacaagtgcacttttatacccattgtttaggaggttttatttttaaaattttcttttggataatctcaaaacaataaaggcatttagtgagtacaaatttggaaatcccattttatttttatatctattttcattgtttatcttattgtttgagacagaaattgttaccatgtgatgatgatttccctgttgtgttactggtacaaatatctgcctaattgtaaaattatgaatataaaattttaatattgtataataatctttcttggaggatttttttgttgttgttcacagcacatactgaatgtatttctctgtttggcttctttctttgaatgaatgatctcccagctttaaaaaatattactggggctgggtgcagtggcttatgcttgtaatcccagcactttgggagtatgaggtgggagaatcacttgaggcaagaagttcaagaccagcctggggaacatagtgagagcccatctctgca

SEQ ID NO: 147274 - DNA, 533 bp, Homo sapiens
gttttcataccagaaaaaggaatgatgtcctaaagggcacggtggggagagcaggtcgagtgatgataaacacaacaacaaaacgttaagtatcattgagccattcctctgaattactgagcaagtgccctactcactgtgtagtggaaactttggccagctgagaaggcagctaacccttttcaggccagtaggataaaggttggataaggaaataatcaagtcaaagacttaatctacctccccaaggaacctatattatgagttaagacagttttcttatctggattggatccattgagtctaaatgagaataacatggttctaattatgacaagcatagtaattttctcacatccattacattttagatttgagactttgattggtgagtggccatttttaaatattctgttaggccaggtgtgatggctcacgcctttaatcccaggactttgggaagccaaggtgggaggatcgcttgagcccaggagtttgagaacagcctgggaaacatagcaagaccttgactc

SEQ ID NO: 147275 - DNA, 699 bp, Homo sapiens
ttttttttttttttttttctatatagagacgaggtctcactcgtgttgcccagcctggtatcgaacctctgggctcaagcgatcctcccgcttcggcctcccgaagtactgggattacaagcgtgagccaccgcgccctgcccagtggaatactttcaacggggcttctgcattgacttcccatcttccaacccatccacaaactgcagccaaaatgatgttactacagtaacaacttggagaaagcagtgtggcttaatctggaaggagcagaagctgtggagtccaaaggacccgtgttcctatccttgttgtgccacttgacacgtttagcacaagggtccccacagtgttagttcaccgtctccagcaatcactatgactccctggagggctgtcaaacgaaacaaaggcgcaaactgagacaattccattgtttacgtaactttcgccaaatcggctccttcctacgaaatatccagctcatagagcaggctgagatgctttgttgctttaattctctttaagagtcacagctgtccattttccacgtgcggctgaagaatggatttcagagcgctctccctccggccgtgttcacctagtaaccccagcttcgggataaggacctgcagcccgggcgcgacccggaaagggaatccgcccttttcgcctccttcgcgccaatcgcctggagtt

SEQ ID NO: 147276 - DNA, 764 bp, Homo sapiens
ttttttttttaatttcaaagatacatgaaaatcgttttatttatttaacaaacacaaacaattgaacaaacaatggaagcaagtccttttgcctaaaggaacacagagggtcatgcggatgttgctcctccaaggatttcggtgttccccaacggctagttttgggtctagttcttctggaagatcttattcttggggagctacaggttctggcgtttggggctctttcaggttctatctccattttcccctcaattcctccccattctgctataataaaaaaaaattctcacctccggaagatcccgcctgtgcctccccgccagcctttcaggagggtctggacgtctggtccacccgctccccgggcttctttccccagcttttgcttttcccctcccctggctccccgccctccgggcctcaggacccgaccaccgcccagctgagcccccgcggctccacagagcagaaggtgcactggaggccctgcccgttgcccgccccgcggggtgccgagaagtcaacctgaataaacgccttgtaaaaagaacttcctaatggaaaaaatatcttatgatttccattctcaacgctcttcagaggactaaaagataaaggccatgatggattcattcaacaagtcctaatcctgcgccctggtgtgtgccagaccctgctccccgcgaggggatccacgagcgaccctcaccactatccctgccctggtggaccctccgtgcgggacacagcatccgacgaaa

SEQ ID NO: 147277 - DNA, 2067 bp, Homo sapiens
  misc_feature (1)...(2067): n = a,t,c or g
ttttttttttttcgctgacagatggatgcatgtctttatttaattcgttcattccaggttcatcccacatcttcacatctcaccctcccaccgtcaaaacatggtcccatgtaacaacagggggccaaaaacaacaggcttgcccacagtctccatcaccccctaccccacgggnacactgtgggggacaacggtaccttggttngaaagccaccaggtttcaaacacttttaggggcacaactctcttcaaactgggaaaccacgaggccacttacgtaggaacaggctgtcagggagtttcaacctgggggcaacatttgggggtacgtccctgggagccccaagtttccctcagagcaggtgaaaactcctgcatctgagcccttctttctatccaatcacttgaaacgttccatagaaagaagaaagaaaaaagaactcccttcttgaaatgcgaataccaagatttcgcacgaccaacacttccacctgttgaaataaacagtccacaaaattaaggcatttgggggcaattagagggaagtaaagcatttactaaaagttacaatatcatatcaaaagtgttcattatgcttttgaaggctcttaactaggcacaagggcagaaacagtcacggtcccggccactgcaggcaaacacgtgttgattaccaaagcagaaagggaaacagagagctggtggtgagcattctcttcagcagctcccccaggcacccaggcccccctccaagtcatgcctcacatgccccaacagcaaagagaagcagtgggagctgagcagacactgcagggcagggcagggcactgctggctaaattacagcagcaactgtacacacgaaacagcttcttcataaacaccattctcaaactggatttatgcacattcatacactacctagtatatctaagagatcttgaaatcaaagcaacataaaaaagagagactcgcctgcaatgccaggcacttgagcaacgacatgtcaaggcaacagaaattccccctcctgccccgactcacttctccatcccactgtctgctgagaatttctagtatgtatgccacacatcactgtacacttcaaaatctgcacattcctctccgtggaaattctcctgggatgtgaatcccaccccacttgccatccatgttacaacatctaaaactgtttcattccacactgaagaggttcgggtttggagcgttcattccacactgaagaggttcgggtttggagcgggaggaggggagtgaggcataagtgagaaaggaggtcacatggcccaaacaggtacttccaggaggccaatcccagccggtagggatccaggccccgggaggccaggcctgcttgccgagtaccgacggccaggtgaggaggcagaagctgtagccccagagccagaagacccacactagtgtcatcaccaacatacaggggggccacaggctcccagtgcccaggttaaggtgcagtcctcaccgagaaggccacatcagcttcctgtgagtgtgtccccatggatcccagggggttgcagaggccccatcaccacgggtgttggcacttcctaaaaccgcacgcagcgatctccagactcgttcttggccatgaagcagcagaaatgctgcagtgctgcctgccagcgtacaggctgttcaagaacccaagaggaatttctcaccaatacgtaaacatgcaccacagctagactgcggttccgtgactttgggatttcagagacaggcgaacttaagaagaaattctggggctgacaaacagcaaccaacattttgttttgcaaccaagagcatttcaaaaagcaaaaatattgccctctacttttaccttcattacataaaaggaaattttatcatccaaataaggaagaaaataacttcagaataaagaacaatcctttaagttgaacaaatgtgacttcatcaattatttaccatgctgttctcatacgcctcacctgcatagagcgctctgtccccagtgctatgctgtgggccacaaggacactggcccatcggggtc

SEQ ID NO: 147278 - DNA, 236 bp, Homo sapiens; identical to SEQ ID NO: 106842

SEQ ID NO: 147279 - DNA, 2154 bp, Homo sapiens
aaatacctactagaaaatgtaaaataaatcagtgaatgttaagagtatagttagatatgtgaagtgtatgagattatgacaaggatacactcatgttccaggagcaggaagtgaacctgggtctcctgtaagacagaagatgaagatgagcccaggctaacttagcacagatcttggctgagatcatcaatgtgacgtctaatgtacctgcactagacagagaataaagttcaccagacattactctggtcagctaaccagataaagaattgttgaaggaccccaactgtgcctcctgccacaggacaaccagcaagttctatgctgagccttagcctcccaggttataagctccctgcaggctcctcctctccagagccaggatggagaggcactgggctgtcccaaagcaggcttggatgtgccaacgtacagttgctccttctgtaattcttgcactaaaactccattaaagaccatcaatgagccaaatagtgtgctagccattgaggatggagttcttagctacttaatgattcttttcttctgggaaaatcttctagtgaataattttttaaaagcttcttttaaacttgctcagtaaaacatttgccatacattaactctccatttctggcattaacttcatttgctggaaagaaattattttgttaatgaaccaaacccagccattaagttatgtgaattcaccttctctagacacattgaggtatggcagagaagacacatattccctggcctagagtgggctgacaatattgctgcctcccctaaattgactcaatcttgagaaccacatactgcagtgacagttgatcatggatcagaaatattcctttttctcctagaggaaatccctcatggcattatcattccttaaaggacaatgagatgtccctccgctcaaatcctaaagccccctgatgaaagatttggctctgatttgctgccaacttattggtaagtgctgaatgagttactgtgctttggcatagcttctacatcacagcaaggtgccttctcagaggggaaaagccaagctccaggacaagggagtgctgttagcccaagggggaaggaggcttattaggatacatagggccgttaaggcacaggggctgttacacaggttcctttattggcctctgcatgagaggcctaggaattcggatgttagaagctaggaatcatggctctgagcgccttgcatacaggagatactcactgatactaaatcaaggcatgtaaacaatactgggtaaatcatacctaccagaataaagagtaacattcagagcttttcttttatctgttattttaaatgttactccatatttcaaaagtctgcacgtatgaaattgtgtcttatttctggtttttagagcctaagaaagatactcattcttaattcctatttatcatctgaaaaccaaatgaatttttgaaataaatgttttaccagcatttctgacctggtctggcctgatctctgtgttgggcaagagagggtacaatttgagcagttctcctgagttagactcggctcaaagtctctcttttaaagtgaaaagccacctttctcattgcttttttcataggtggaagaatcagatttcaagagactgaagttcattctgtttcattagggattagactaaaatggacaaacagtggaagaaatccattttccagaagcagctctgccctgtatgtcccagtcaacccacatggatggtctttgtgaaaagtttttaacttcctgcagagttaccgagtgctcagcgattgagctttgacccacacccgtgtttgttcctagtctgttccccagccataagcatctcccacaagccctctgtggcttgtgtggcctgatgtccatggccaccaagggcctctcaccatacacttctccactcaacctttggagagacacggaccaccaaaggcttgatttttcttcatcctacattatattcaaaacaaacaggctgggtgccgtagctcacacctgtgatcccagcaccttgggaggatgagctgggaagatcgtttgaggctaggagtttgagaccagcccgtgcaaaaaacgagacctcgtgtctaaaataatttttaaaaaagagcaaaaaa

SEQ ID NO: 147280 - DNA, 2019 bp, Homo sapiens
cgatggctcacacctgtaatcccaaagtgctgggattacaggcgtgagccactgcgcccccgcccaggagctcttttcttatgacatataaattatgacatttatattctttatatgactttatgttctcttcttatgacattaaaattctttaagtagtttttttggtccaataaactagacgttgtataatctaaattgagcccttgtatatctaaaactgatgagttgtttctaaattgttgattgtccatttacttgcctttggtattaagataatgcaagtaaagtttagtaagtcattggataatgaaatgattatgtttctgaagaccatattatatttttaatttttagaggaatcatgccatcccccaaaaaatcaagaaatatttgaattttaaattataagttcatttgttaaaagacatttttacaaatgtctgaaaatcttaaaatactttacatctacctttaagtagtagaatacagagctgtaaatttccatgccttttttcctgatattaagttttatagtaaaaaagcaactagtgattgcacaaagaatataaaaatccactctttttacaaaggtgtgaatttaaataacgttattgattggaatatgaaaatagaccaatcatttaagagctttttagcaaatgattcaattcttactctttttctcccaagattgaaaagcataatgtatttctctaaagtaggaatctagagagcccctgtgagtggacaaatgtcagtaacacttgaacacatggagaagataagtgttatgttgtggataatttaaagttaaatttggctttttggggtaggagacctaaatagatgggatttttaaatagatgatatatagatgacaattgcaattgtcattttaattattttccctacagtaaagaacctagctctgagcagtgaaattgtaaatggcactttaaaggaagtaagccgttatctgttctctagtggagcgatctccaactgttttgggcactagggacgggtttttgtgggatgaaaatttttccacgggactgggggtttagggggatggtttcaggatgattcaagtacattacatttatcattagattctcataaggagcatgcaacctagatctcttgcacgtgcggttcacagcaggattcgagctcctttgagaatctaatgccatggctgatctaacaggaaactggagcttcaggccagtaatgcttggcaccgccccccaccttctatgcagcccggttcgtggcctggggactggggacccctgctctagtcagtaataaggtacttgtgccagaatataaatcaacacattgcttcctttatcaaagaagtcttgttatttaaaaaaagtccaactgagcccagtatgattagtgatgtaattgattttccattctggcacaagcctctttcattctggacagctcacaaatagttaatggaccatgctttgaatagccttcctctaagcaacatttataaatactgatattttagaactgtttacatttcttctgtttatttttgaattttcagtttgatatcttgtccttattcattgttgtataaacaactgtactttaatttcaagtagtattaaaagtatttcacttcagtttggggggattattatcaatttataattttataaaagtattttaaagaataattgtaaattttccataaattacaacttcctgccatcttttattaaataataatcttgcttaaggcatatagacagacattattatgagtattccagtaaaaaaaatctacatcaacttgaccattctggctaaaaattaaaaagcacttttttatatctgtggttgtcatttgtttcaaagcatttctaaatttattgttcttaaaagtatgtctgcatgttctagcctttgacctaggtcatctatgaaccctcttagtgtctaataaacatatctataaaggcatataaatctgaaaaaaaaaaaaaaaaa

SEQ ID NO: 147281 - DNA, 1048 bp, Homo sapiens
  misc_feature (1)...(1048): n = a,t,c or g
ggaaaccgctcccgagcacggcgactagcgtcgtctcccggcagtgcagctgccgcttaccgccgccctctgcccgccggcccgtctgtctacccccagcatgagcggccctgcgcgtctacagcacgtcgggcaacgggtttccgggaaatcaaagtccccagcaagagcgaggtgacccgaatcctggatgggaagcgcatccaataccagctagtggacatctcccaggacaacgccctgagggatgagatgcgagccttggcagagcaaccccaaggccaccccaccccagatttgtcaacgggggaccagtactgtggggactatgagcttctttcgtggaggctgtggaaacaaaacaacgctgcaggagtttcctgaaagctgggcttgaagtcaagccctgtcccagagtttccccttgctgggactcccatcaccaacactcccccccagcctttcaacctggccaatgaaaggaccttttgaccaacttcccttgtcatttcctaaacctaaactttaggagtcccttcccccaaatgcaagggccacttctcctcccatcctctctaaaatggtaagtcccctcttccttccatctaaaggcaacattccttaacccatttagtctcagaaaattgtttttaaggcaacaggccccaaatgctgggttgcccccagccaagcattggggccgccatcctgcctggcactggctggatgggcacctctgttggttccattcagccagagctctgccaaaggccccgcagtccctctcccaaggaggaccctagaggcaattaaatgatgtcctgttccattggcnnnnnnnnnnnnnnnnnnnnnnnnnnggggggggccctttaaaaagaacccttggggggcccaattttaccgggggaaggaaaggaaaaagttttccccttaaggggggcgtaataaaacccaaccggggaatttttggaaaaaaaccttattttgggggggggacaaaatgggcccaacccccccccaaaatttaaacccttaggggaaaaaa

SEQ ID NO: 147282 - DNA, 489 bp, Homo sapiens; identical to SEQ ID NO: 145357

SEQ ID NO: 147283 - DNA, 500 bp, Homo sapiens
ccaagaattcggcacgagccacagactcagagagaacccgaccatggtgctgtgtcctgccgacaagaccaacgtcaaggccgcctggggtaaggtcggcgcgcacgctggcgagtatggtgcggaggccctggagaggatgttcctgtcctttcccaccaccaagacctacttcccgcacttcgacctgagccacggctctgcccaggttaagggccacggcaagaaggtggccgacgcgctgaccaacgccgtggcgcacgtggacgacatgcccaacgcgctgtccgccctgagcgacctgcacgcgcacaagcttcgggtggaccgcggtcaacttcaagctcctaagccactgtctgctggtgacccttggcgcgccacctccccgccgagttcacccctgcggtgcacgcgctccctgggacaagttcctggcttctgtgagcaccgggcgtgcctctccaaataccgttaagctggagcctcggtagccgttc

SEQ ID NO: 147284 - DNA, 215 bp, Homo sapiens
gggcgttgggaacggttgtaggacgtggctctttattctggtcctcgcggaggtgatccaggcgttctccgccccggagaatgcagtgcgcatggacgaggctcgggataacgcctgcaacgacatgggtaagatgctgcaattcgtgctgcccgtggccacgcagatccagcaggaggttatcaaagcctatggcttcagctgcgacggggaag

SEQ ID NO: 147285 - DNA, 481 bp, Homo sapiens
ggaacggttgtaggacgtggctctttattcgtgagttttccatttacctccgctgaacctagagcttcagacgccctatggcgtccgcctcgacccatccggcggccttgagcgctgagcaagcaaaggtggtcctcgcggaggtgatccaggcgttctccgccccggagaatgcagtgcgcatggacgaggctccgggataacgcctgcaacgacatgggtgtccttaagtttggttcgcttggtcaagtcctacgaagcccagggatccttgagattcgccagcctgttcaggcaagcttgaaggcgttgttttcttgcccgcccatggacccttgccaccccatggggcctgatgctggtgtacacggtggccgcctcctgagagttggccctcccttgtgccactgccaggggaggaaaggccttgatgttccagacaataataaatgcgcctgtgacttaaaaaaaaaaaaaaaaa

SEQ ID NO: 147286 - DNA, 997 bp, Homo sapiens
tttgaatgacttaagtaagttccttagaatattatttttcctactgaaagttaccacatgcgtcgttgtttatacagtaataggaacaagaaaaaagtcacctaagctcaccctcatcaattgtggagttcctttatatcccatcttctctccaaacacatacgcagcagtgttacagctcttttagaatttgtctagtaggctttctggctttttaccggaaagcccctcttatgatgtttgttgccaatgatagattgttttcactgtgcaaaaattatgggtagttttggtggtcttgatgcagttgtaagcttggggtatgaaggtttgggccacgcctgggcgcttccggctgcgccggatagctgtttcctttccgctcccaggggcgttgggaacggttgtaggacgtggctctttattcagtgagttttccatttaccatccgctgaacctagagcttcagacgcccttatggcgtccgcctcgaccccaaaccggcggcctttgagcgctgagcaagcaaaaggtggtcctcgcggaggtgatccaaggcgtttctccgccccggagaattgcagttgcgcatgggacgaaggctcggggataacgcctgcaaacgacaatgggtaagatgctgcaatttcgtgctgccccgtggccacgccaagatcccagcaggaggttatcaaaagcctatggctttcagcttccgacgggggaaggtgttccttaaagttttgctccgatttggtcaagttcctacgaagccccaggattcctgagattcgccaagccttgtcaggcaagcttgaaggcgcttgtttctgccggccatgaaccctgccaaccccatggggcctgcttgttggtggcagcgtggccgcctcctgagagttggccctcccttgtgccactgccaggggaggaaaggccttgatgttccagacaataataaatgcgcctgtgaccaaaaaaaaaaaagtcgtatcga

SEQ ID NO: 147287 - DNA, 814 bp, Homo sapiens
  misc_feature (1)...(814): n = a,t,c or g
tggaaactgcagggtttgtattaacacgacttccaaattacatacaatatagttcaaacacatttttttggtacgaaatcacacaaatgaaacacacaacagtacattttcctttcaactacgtcattaccattcttcacacagatcctgaaaaagttaccacagcagttaacgcgaagtgaacaaaggggtggaacatattaaaataaaaaactacatgctgtttctttttaaaggcctacatttttctatataccttttaaaatcagtaaaataaaaccaagcaaaatatcaacatgaagacctccttctcttttagttggttagaagtcaaaggaaaaagcaagtactcagaagtgtctcactaaaatacctgttccgtccgccaatcttaaagatttcctaccaaaacatgacacagaaaagagagagttgagacattaaaagcattttctagccaaggcaggttacaatgtgtgaggcaaacggccttttccagccatatgctaccagcagaaggtatacctggggatccaatatgaatcagtgagttccgctttagttccagtacacaaaccacgggcttatgcacctcagaagttaggcatttaaaaaaaattaaataggttgcaaaaaaaccttacataaaatccttaggatttaatattaagtcaaggctaaatgcctttggagaattcatatttaagaatgtccaaaataacactccattcacaaactttaaaaatagctgaaaagttaactgaaatgcncttaaatacactaagtatctagctctcctagtcgtctggactag

SEQ ID NO: 147288 - DNA, 1826 bp, Homo sapiens
  misc_feature (1)...(1826): n = a,t,c or g
tttttttttttttttttatatttttggaaactgcagggttttattaacacgatttccaaattacatacaatatagttcaaacacatttttttggtacgaaatcacacaaatgaaacacacaacagtacattttcctttcaactacgtcattaccattctttcacacagatccttgaaaaagttaccacagcagtttaacgccgaagtgaaccaaagggttggaacagggcaacggcatttccccccaaggtagggtgtggttgtgtctgggagaaaacagggatgggagatcaaaacccagaggaaacggcantcccgtcatctctccatgtctcaatttcccaacgctctcccaggtcaacacaggcttcgcccccaaccagaggccacccggtgcagccccgcagagtgtacacgccattcaaggccgggaggccccgtcggcaaaagcaagtaacacacggtcagacggccgccaccctccaagtggagtgagccacgctaccaactaacacttgaacttcaaccacaagagctccctgcgaaaaccagaggggcgggaaacaaagaagcgggtggttaagggccacgaaaccgcacactgcggaacgccggccatctttgaatcgcccactcactcctacagagccaaactgcaaaacaacagaattaaaaagttactctctccaatcaaagacctggaggaataaatcgtgagtgaagacctgtcgaagcaaaggttgataggtgatggagaggtgatggagtggtaaacacagtgtgaaaatcgtcagcaccttcccacccagcccacgtggaagttcctcaaggctgaagccggaagccagagtggccaggaaatacggcccctcaccccagttgaagcccaggaggtggagggagaggaagcatggaaagcccagggagatgggaaggtctgagaaaagtgagtccttggaatgggacaggagcctaccagtgttaagaatggtagatgggtttagcccaggaaagcaaaacagaaatggacagagagggagagcccagagcatggcatggtgaggtgatcccattactaaatgaacagtagcaagaaagcgggcacgtggagcaaaacagaatcagctcagacatgaaaaaggtcacactctgtgctttgctgctgtggtacctgaaaattaaacagtggaattaaagccccagagttcaaatcctcacagaggaacaccacccggatccccacgcctgtgaaaagcaaagctggattaatagaaacgagcggtggctttttttgcctcttcggctcagggcacccctgtgtgctgtgcgcgcgttattgaaaatgttacccacctaagaaaagactacagaacgcatacagctagaacgcatacagcttacacagtccttgcaaaacccagcttccgccacgggtgcccttaaaatgaaaagcagtttaaaagaaaatcatgctaaaagaatgcatgaggtctactttctagagtatattaaattattaaatacagaatacattacaatagtacctgtctgcctatccactctatggaacatattaaaataaaaaactacatgctgtttctttttaaaggcctacatttttctatataccttttaaaatcagtaaaataaaaccaagcaaaatatcaacatgaaggcctccttctcttttagttggttagaagtcaaaggaaaaagcaagtactcagaagtgtctcactaaaatacctgttccgtccgccaatcttaaagatttcctccggagacatgacacagaaaaaagagagttgagacattaaaagcatttt

SEQ ID NO: 147289 - DNA, 968 bp, Homo sapiens
tttcgaggaggtttacatttctgaggagtgatactgaaccatttgagcttaaatgagtacctgattttgcagccattaaaatgagtcaataactatgtggaaatatagaaaaatattttataatataatactaagaaagaggacagtaggccataaagtgttaagccagtgttatgcctatgtcctatataaataagccatgggcccattaaaaatagcaaactgaaaacagttccatgtgtggggggccaagtttagaagtaattttaatgtatcctaagaagtgatttcctttattgttgtactcaggtacgaagactaaaaatccaggatgaatcccagaaaattaacacaaaaaagtatgtattaggctacttcctgtcatagtgaaattaaacactcaaagtaatgtgaatctcaggctggggcgtgggcggctcatgcctgtaatcccagcactttggcaggacaaggcaggaggatcacttgaacctaggagttcgagaccagcctgggcaacacagcgagaacaaagtctctattaaaaaaaaaaaaaggaatgtaatttcaatcrtttttcttgatatatggcttgagaatgataatgtaaaaggaattcttctcttacttcaataaaatggggtttaaaccataaccttaaattccagttaaatatcacaatattgaatacctatagttgactttgggatggggactttttccaagtcattaagagtgtttgtttaaggtgatctcattgatggtagttttcagccgtctcaaaaactgcaagctaatcagtcagacattctttaatgaccccaattttttccctttaattgttaccatgttttctatttttactgatttttgctaaagcatgtaagagtgaatttattatagcagtaatcttgtgtttctcctgatgtgcaataaatcaataattccccagccaaaaagaaaaaaaa

SEQ ID NO: 147290 - DNA, 570 bp, Homo sapiens
ggcacgaggggggggcatcaagtaggaagctttatcttatgattcactataaattgcaagatgttctggaatgatgatacatcagcagtttataagtcataatttttgttttaatttgctagacatctgttagcttcgatggcaaccatatgggaatctaaattgcgttttgaattacagggagatggtaggaagaaagctaaatatggttatgaaagtgtcatatgggaaaagtgtaagaaaggtataaagtggggaaagtaattgaatataggcttgcttagtgtggccactccctctgtggggcagtatgaaggcgcagaagcattctcacttgatatactccgcagattgaaatgaagccaagtggcgagaagttggaaaaccaaatcatgtttcaaccaccataaacttgccaaaatgttgcactcatttagatgggtcactttgttttaagtgtccacaggtaataaggtagtccctgggcaaaaggtgaaagcaatctgcatttttaacagaacttttcactaaatgatgtttttcttgtaagcaccccaaagagtcttccaa

SEQ ID NO: 147291 - DNA, 412 bp, Homo sapiens
  misc_feature (1)...(412): n = a,t,c or g
ttcagcatttattgtagcaaagagtgggtagggacaggagctctaggactggccagtgggtgttctagaggccagctgctcctttgacttttcaaagtaagacctggataggtgaggggattagagtttaatctgagggaccctaggcactggcaggggccttggtggtggtgggaggtcagagcagactgactcaggtccccaaactctagtgcctggtccatcgcatggcaaagcccctaggtaggaatagagtcaagacctttgctaggtagagggacagactctagagactgaaattgaaggcccagttcttactnttcctctctatctaaggagacgtgtngggatctttggggtnatgaaatacttttttctctggcaatttaagccnaatctgccccaattcccc

SEQ ID NO: 147292 - DNA, 478 bp, Homo sapiens
gacagagacgctggctaggccgccctccccacttgttaccaacatgaagctgctcgcagaaacctgtgctactcctcaccatctgcagccttgaaggagctttggttcggagacaggcaaaggagccatgtgtggagagcctggtttctcagtacttccagaccgtgactgactatggcaaggacctgatggagaaggtcaagagcccagagcttcaggccgaggcaaagtcttactttgaaaagtcaaaggagcagcttgacacccctgattcaagaaggcttgggaacgggaacttggtttaacttctttgagctattttccgtgggaactttgggaaccacagcctggccacccagttgaagttgttcccaggaccatttgtctttccaacccccagctgggccttttaggaacaacccattgggccagttcttaggaggttgcttgtttccttaacccatttttttggttaaca

SEQ ID NO: 147293 - DNA, 800 bp, Homo sapiens
  misc_feature (1)...(800): n = a,t,c or g
agagagccaggttggaatgggcagcaggtagggagatccctggggaggagctgaagcccatttggcttcagtgtcccccaaacccccaccaccctcttcctaggcccgcccctccccccactgttacccaaacatgaaaacctgctcggcaagaaactgtgcctactccctcaccccatcttgaaagccttgaaaggaagctttgggttcgggaagacaaggcaaaagggagcccatgtgtggaagagcccctggtttcctcaagtacttcccagacccgtgactgacctatggccaaggaccctgatggagaaggtcaaagagccccagagctttcaggcncagaggccaagtcttactttgaaaagtcaaaggagcagctgacacccctggatcaagaaggctgggaacgggaactggttaacttcttggagctatttcgtgggaactttggggaacacagccttgccacccagttgaaggtgttccaggaccatttggtctttccaacccccaggctggggcttttagggaacaacccactgggccagttccttagagctcctcctttgaaaagtcaaaggagcagctgacacccctgatcaagaaggctggaacggaactggttaacttcttgagctatttcgtggaacttggaacacagcctgccacccagtgaagtgtccagaccattgtcttccaaccccagctggcctctagaacacccactggccagtcctagagctcctgtccctacccactctttgctacaataaatgctgaatgaatccaaaaaaaaa

SEQ ID NO: 147294 - DNA, 392 bp, Homo sapiens
ggcacgagctcgtgccgcaccctcaagagtgtgggtgagacatatacagcctgttagacctgaaggcagatggctcttcttaaggccaataaggatctcatttccgcaggattgaaggagttcagcgttctgctgaatcagcaggtcttcaatgatcctctcgtctctgaagaagacatggcgactgtggtggagcacagcatgaactagtacatgagctattactcgctgcaagccacaggtgagccccaagatctgagaccatgctgctcatgtgctttgctatgatccgatcgctttggtaaatcttaagcgtcttcaatcacaggttcttcactgcagcgtctgcacctctatgtatctcgcgccttgctcgatattatatctcgctg

SEQ ID NO: 147295 - DNA, 1505 bp, Homo sapiens
ctgggtggaatcgcagtggctgaaaaactgtggcggcccctgcaaggagacccaggcttccctggcttccgagggcccatggtgggcatccaccattcacagcaaggttgggggatgctcagtgcctgggagccatcagtctggaaggcttcctgcaactggcttcttcctgatgccccacctattcctcgcaaagcaaccttggaggcagtaatgcctggcacccagctcttcacagccatgtcagcgtcaggagtgacctcaaaggctctggtactcttccatccaaccccacccgtgtcccactcccagcctaggccctccccaggagtctcctggtgaccggaagcctctttctgatcttcttcactgggatgctggccctttggctgagcaatatccctcaccaggtgccggcaatggatacagatggaagcatccacagagcggccatccagacagtggaggaaaatctggatggattcctttctggtttgggagcggggaaggcttcctgagcaccatgcaaagccaagatcattgctctcactacttacaaactgaaatcttctggctgcagagggcagagtgaccccattgaccaggtcacagatgcatttatgctgtgacagagatgtccctccgggccagggcagcgcagcatgctcctgacacagcttggccaggtgtgctacaccaaggccagaaagagccgctgaagtggcttggacatgggccatgccagctgcacgtggaaggccattcctcccggcactcatttccagtgtttcatatctgcttgtccaaaggcttcccagtcttgggccccaggccaggggggtctggaggaaggcttgcaccacagggtcctccaccaggccatggaactggaagctgaaggcccacacaaggccactgcaactctgctgtgaggacggctggctgattatcaggcccagaatcacgggcttagaaacattaacaggaagtacggtaccgaaaagtggaaactttaaggtgcttattattttcctcctgccttgttcctgtatgtgccgcttcaccggtatcacgtcctgggtgtcgcttcctccgttcttcgttgcactggccaacgggacgcttagtctttcggcaacggggtgaaaccttccttgtgcctgaaaaaacggtacttcgcggtgtggcttcggcgcctgcgcaaaaggccgcggggcgcactccagttcccggcaggccccgcgacgcgcgtttgcgtgctgacgcacgcagttagtcgtgctgacgtgcagcgcggcccaggcggggtgcgagtggcgcagtcggagcccgttgcggcccccggcctggttttcctttcttaaggagtggggggatttttgtgtgaggtggtatggaagtgtgggtgaatggttaagctgaagaattaagtgcaggtcaaaaacatgctgggaggtgaagtatatgacgattatccaaggttcatgtgtgtttctgatgtgcat

SEQ ID NO: 147296 - DNA, 706 bp, Homo sapiens
ggcacgaggcatctcctcttcaggcatatctctgcctgaaatattttcctgccaagtgtaatcttaggaccacatctgaaatctgtgttatgtatgggtttagttattttatttgttatttcccaataatgatagcctttgcaaaaaccatccatcagaaagaggacataccttaaccatggagcccttggtactttcctcttcataccacagtatggcttgtgattccccaaggaaaaagttgtgtaataaccttaacaaagcagccttcagttccttccctggtaaaccctgtggccccgtgggaaccatgtgtttttgatcccagccgtttccctctgcccaccctggaatccttgagataagtgtgtgggtccagtgtgcatgtgtgccccatacatgcttataggaaggtcagtgttgtgaggggaatcaggaagtctcttttttatttttaaatgaaatcaagtaaaacttaaccttggcttcaaaaatatctctcaaatactgtaaacaatacctttggatactttttagaaagagattatggccaggcgtagtggctcacgtctgtaatcccagaactttgggaggccgaggtgggcagaccacctgaactcaggaatttgagaccatcctgggcaacatggtgaaacccatctctactaaataccaaaaaaaaaaaaaaaaaaaaagggcggccgct

SEQ ID NO: 147297 - DNA, 1632 bp, Homo sapiens
ttagagtcacaagccatcaaggggcagaccaagatttgggacctgttctgtgtgctcccaaagtccgtgctcttacctcaacgctgttgcccctctgcttcaaattaggcagaaacaagcttataaaatggaagtctcccatggtcccatgtttacaaacatgtattcagcacccgagcactcaatgcaatgcccaagaacaatggtccagtcacaggctggtcacatagaactagtcctcctaataggatgaatcaggcaagaccacatttaatatcttgtcagttatttattatgtgtcattctaaaagactagcacatttacagcatacatggctttgaatgacctaagacatatataaaacagtaactgtatgtttatatatatatagtaatactgcccaaaacaaataaataaaggtatcataatcgcactaagcttggcaaattacaattgtgtagggaaaaaacttgtatgatacaatatttttacatctttaaagggaaactaaaggcaactggtgctctgtagggagcctctgacaggaatccaccattacattccccagttttcccataagaatcctcttttcctttttaaaaatgggggagggcatcataagggaacactgggaccggaacctctggttttacggggtaacctgttaaaactggccttccctggcacctctggaaaaccccaaaggttcctacaggaggagaggagctggcttgccctctggtgcccacacacccctcaccctggcagggcactgggaagcgtgtgatgcctgccggaagccccaggaatgatgccttccagagagaatactgaaacctggaaaccttttctatagcatttgcccaagtcttacagttttatggtgacccattacatagagcaaaaattgggaaaataattcatataaaggtgtcacatgcaaaactgctgacagatgatcaacatttgctatattccctttgatgagtgcagatatttaatgctctccagacaaaaaagatctgaaaactatgtgggtaatatttatttttaaaaagcaaggagatttttttaaaagttaaaatgagaaaagacagaactaaaaatttacaaattaaatgagatggtggagaggtgaaagggtaaatcagccatattgaaaacaaactgtctgtgaacagaaattgacacttaaaaaggagaatctgataccagcagcagccaacctgtgcagtgggtttggcgggcaggagcttctctgcttcctgcctgccacagtgaactcagctttgagggagcagcagagagcttcgtccttcattaaagtgtccttcacagacattttcctccctgcaggcatcgggagacagcaggcgctgcttgcatgctgacttctgagtaggaggggggtctggaaggtcatccaagttcccacccctaccctgatgcccacccccctcttgttgttccctgccaataagcagtcctcccccatgcctcagcacccctggcccaagtttgttacatgtttctaaaggaaccagaagaatctctaggcttttagacaaaagaatttctaagaggttcacaaatcattaggatcagcatcattaatatgtgccatatgtatt

SEQ ID NO: 147298 - DNA, 7648 bp, Homo sapiens
atgaaaaggatggtttcttggagcttccacaaacttaaaaccatgaaacatctattattgctactattgtgtgtttttctagttaagtcccaaggtgtcaacgacaatgaggaggtgaattttttaaagcattattatattattagtagtattattaatataagatgtaacataatcatattatgtgcttattttaatgaaattagcattgcttatagttatgaaatggaattgttaacctctgacttattgtatttaaagaatgtttcatagtatttcttatataaaaacaaagtaatttcttgttttctagtttatcacctttgttttcttaagatgaggatggcttagctaatgtaagatgtgtttttctcacttgctattctgagtactgtgattttcatttacttctagcaatacaggattacaattaagaggacaagatctgaaaatctcacaaactataaaataataaaagagcagaattttaagataaaagaaactggtggtaggtagattgttctttggtgaaggaaggtaatatatattgttactgagattactatttataaaaattataactaagcctaaaagcaaaatacatcaagtgtaatgatagaaaatgaaatattgcttttttcagatgaaaagttcaaattagagttagtgtgtattgttattattaatagttatgaaacacggttcagtctaatttatttatttgtagaacagtttgtcctcaactattatttttgctgacttattgctgttaatttgcagttactaaaaatacagaaatgcatttaggacaatggatatttaagaaatttaaattttatcatcaaacgtatcatggccaaatttcttacatatagcatagtatcattaaactagaaataagaatacacaataatatttaaatgaagtgattcatttcggatcattattgagtttcaagggaacttgagtgttgtacttatcagactctacatgtaagaacatatagttaatctggttgtgtgtgtaaaaacatatggttaatctggttaagtctggttaatcatattaggtaagaaaaatgtaaagaatgtgtaagacgaaatttttgtaaagtactctgcaaagcactttcacatttctgcttatcaactaaacctcacagagatagtttaatagtttaggctttaaaatggattttgattattcaacaagtggccttcataatttctttaagtgtttttctttaagtatatactttctttaaatattttttaaaatttccttttctctagtaaagccagaccatccatgctacctctctagtggcactctgaaataaaaagaaaatagttttctctgttataattgtatttgtaataagcagatgaatcacatttcttaaaatttgttttagagagggtaagctctgactaggaccatgacttcaatgtgaaatatgtatatatcctccgaatctttacatattaagaatgtatatagtcaactggttaaacaggaaaatctggaacagcctggctgggttttaatcttagcaccatcctactaaatgttaaataatattataatctaatgaataaatgacaatgcaattccaaatagagttcatctgatgacttctagactcacaaaattgcaagagagctcagttgttgctcagttgttccaaatcatgtcgtttgttaatttgtaattaagctccaaaggatgtatagctactgacaaaaaaaaaaatgagaatgtagttaatccaaatcaaaactttcctattgcaatgcgtattttctgcttcattatcctttaatataatattttaagttagcaagtaattttaattacaatgcacaagccttgagaattattttaaatataagaaaatcataatgtttgataaagaaatcatgtaagaaatttcaagataatggtttaacaaataattttgttgatagaagataagactaaaagtgaaattcgaagtggagaggacacttaaactgtagtacttgttatgtgtgattccagtaaaaatagtaatgagcacttattattgccaagtactgttctgagggtaccatatgcaataagttatttaatccttacaataatcttgtaaggcagattcaaactatcattacacttattttacagatgagaaaactggggcacagataaagcaacttgcccaaggtctcatagctgtaagtcaaccctacggtcaagacctacaagtagccgagctccagagtacattatgagggtcaaagattgtcttattacaaataaattccaagtagaatcaacctttaataagtctttaatgtctcttaaatatgtttatataggagtctaatcaccaattcacaaaaatgaaagtagggaaatgattaacaataatcataggaatctaacaatccaagtggcttgagaatattcattcttcttgacagtatagattctttacaatttcgtaagttccaatgtatgttttaggaatatgaggtcattactattcataatctgatacagctttatcctaaggcctctctttaaaaactacactgcatcatagcttttttgtgcagttggtctttctactgttactgaacagtaagcaacctacagattcactatcaccaaccagccagttgatggatcttaagcaaattatcaagcttgtgataacctaaattataaaatgagggtgttggaatagttacattccaaatcttctataacactctgtattatatttctgcctcattccttgtagggtttcttcagtgcccgtggtcatcgaccccttgacaagaagagagaagaggctcccagcctgaggcctgccccaccgcccatcagtggaggtggctatcgggctcgtccagccaaagcagctgccactcaaaagaaagtagaaagaaaagcccctgatgctggaggctgtcttcacgctgacccagacctggtgggtgcactgatgtttcttgcagtggtggctctctcatgcagagaaagcctgtagtcatggcagtctgctaatgtttcactgacccacattaccatcactgttattttgtttgtttattttggaaataaaattcaaaacataaacatattgggcctttggtttaggctttctttcttgttttctttggtctgggcccaaaatttcaaattaggatatgtgggtgccacctttccatttgtattttgccactgcctttgtttagttggtaaaattttcatagcccaattatattttttctggggtaagtaatattttaaatctctatgagagtatgatgatgactttcgaatttctggtcttacagaaaaccaaataataaatttttatgttggctaatcgtatcgctgaattttcctatgtgctattttaagaaatgtccatgacccaaatccttcatctaatgcctgctattttctttgtttttagggggtgttgtgtcctacaggatgtcagttgcaagaggctttgctacaacaggaaaggccaatcagaaatagtgttgatgagttaaataacaatgtggaagctgtttcccagacctcctcttcttcctttcagtacatgtatttgctgaaagacctgtggcaaaagaggcagaagcaagtaaaaggtagatatccttgtgctttccattcgattttcagctataaaattggaaccgttagactgccacgagaatgcatggttgtgagaagattaacatttctgggttagtgaatagcattcatacgcttttgggcaccttcccctgcaacttgccagataagcactattcagctcttattcccagtctgacatcagcaagtgtgattttctatgaaaaattctactatgactccttattttaagtatacaagaaacttgtgactcagaagataatatttacagagtggaaaaaaacccctagcatttatagttttaacatttgaggttttgaatgagagagttatccataatatattcaattgtgttgtggataatgacacctaacctgtgaatcttgaggtcagaatgttgagtgctgttgacttggtggtcaggaaacagctagtgcgtgagcctggcacaggcatctcagtgagtagcatacccacagttggaaatttttcaaagaaatcaaaggaatcatgacatcttataaatttcaaggttctgctatacttatgtgaaatggataaataaatcaagcatatccactctgtaagattgaacttctcagatggaagaccccaatactgctttctcctcttttccctcaccaaagaaataaacaacctatttcatttattactggacacaatctttagcgtatacctatggtaaattactagtatggtggttaggatttatgttaatttgtatatgtcatgcgccaaatcatttccactaaatatgactatatatcataactgcttggtgatagctcagtgtttaatagtttattctcagaaaatcaaaattgtatagttaaatacattagttttatgaggcaaaaatgctaactatttctacataatttcatttttccagataatgaaaatgtagtcaatgagtactcctcagaactggaaaagcaccaattatatatagatgagactgtgaatagcaatatcccaactaaccttcgtgtgcttcgttcaatcctggaaaacctgagaagcaaaatacaaaagttagaatctgatgtctcagctcaaatggaatattgtcgcaccccatgcactgtcagttgcaatattcctgtggtgtctggcaaaggtaactgattcataaacatatttttagagagttccagaagaactcacacaccaaaaataagagaacaacaacaacaacaaaaatgctaagtggattttcccaacagatcataatgacattacagtacatcataaaaatatccttagccagttgtgttttggactggcctggtgcatttgctggttttgatgagcaggatggggcacaggtagtcccaggggtggctgatgtgtgcatctgcgtactggcttgaacagatggcagaaccacagatagatgtagaagtttctccattttgtgtgttctgggagctcatggatattccaggacacaaaaggtggagaagagctttgttcatcctcttagcagataaacgtcctcaaaactgggttggacttactaaagtaaaatgaaaatctaatatttgttatattattttcaaaggtctataataacacactccttagtaacttatgtaatgttattttaaagaattggtgactaaatacaaagtaattatgtcataaacccctgaacataatgttgtcttacatttgcagaatgtgaggaaattatcaggaaaggaggtgaaacatctgaaatgtatctcattcaacctgacagttctgtcaaaccgtatagagtatactgtgacatgaatacagaaaatggaggtaagctttcgacagttgttgacctgttgatctgtaattatttggataccgtaaaatgccaggaaacaaggccaggtgtggtggctcatacctgtaattccagcaccttgggaggccaaagtgggctgatagcttgagcctaggagtttgaaactagcctgggcaacataatgagaccctaactctacaaaaaaaaaaaaaataccaaaaaaaaaaaaaaaatcagctgtgttggtagtatgtgcctgtagtcccagctatccaggaggctgagatgggagatcacctgagcccacaacctggagtcttgatcatgctactgaactgtagcctgggcaacagaggatagtgagatcctgtctcaaaaaaaaaaattaattaaaaagccaggaaacaagacttagctctaacatctaacatagctgacaaaggagtaatttgatgtggaattcaacctgatatttaaaagttataaaatatctataattcacaatttggggtaagataaagcacttgcagtttccaaagattttacaagtttacctctcatatttatttccttattgtgtctattttagagcaccaaatatatactaaatggaatggacaggggattcagatattattttcaaagtgacattatttgctgttggttaatatatgctctttttgtttctgtcaaccaaaggatggacagtgattcagaaccgtcaagacggtagtgttgactttggcaggaaatgggatccatataaacagggatttggaaatgttgcaaccaacacagatgggaagaattactgtggcctaccaggtaacgaacaggcatgcaaaataaaatcattctatttgaaatgggattttttttaattaaaaaacattcattgttggaagcctgttttaggcagttaagaggagtttcctgacaaaaatgtggaagctaaagataagggaagaaaggcagtttttagtttcccaaaattttatttttggtgagagattttattttgtttttcttttaggtgaatattggcttggaaatgataaaattagccagcttaccaggatgggacccacagaacttttgatagaaatggaggactggaaaggagacaaagtaaaggctcactatggaggattcactgtacagaatgaagccaacaaataccagatctcagtgaaccaaatatagaggaaccagccggtaatgccctcatggatggagcatcctcacctgatggggagaaaacagggaccatgacccattccacaacggccatggttccttccagccaccgtatgaccagagaccaatgacggctggtatgtgtggcactctttgctcctgctttaaaaatcacactaatatcattactcagaatcattaacaatatttttaatagctaccacttcctgggcacttactgtcagccactgtcctaagctctttatgcatcactcgaaagcatttcaactataaggtagacattcttattctcattttacagatgagatttagagagattacgtgatttgtccaatgtcacacaactacccagagataaaactagaatttgagcacagttactttctgaataatgagcatttagataaatacctatatctctatattctaaagtgtgtgtgaaaactttcattttcatttccagggttctctgatactaagggttgtaaaagctattattccagtataaagtaacaaacacagtccctagatggattgccacaaaggcccagttatctctctttcttgctatagggcacaggaggtctttggtgtattagtgtgactctatgtatagcacccaaaggaaagactactgtgcacacgagtgtagcagtcttttatgggtaatctgcaaaacgtaacttgaccaccgtagttctgtttctaataacgccaaacacattttctttcaggttaacatcagatcccagaaaacagtgttctaaagaagacggtggtggatggtggtataatagatgtcatgcagccaatccaaacggcagatactactggggtggacagtacacctgggacatggcaaagcatggcacagatgatggtgtagtatggatgaattggaaggggtcatggtactcaatgaggaagatgagtatgaagatcaggcccttcttcccacagcaatag

SEQ ID NO: 147299 - DNA, 961 bp, Homo sapiens
  misc_feature (1)...(961): n = a,t,c or g
ccaggnaattcggccacgagcccaaacccactccaccttgactaaccagacaaccttgagccaaaccatttgacccaaataaaagtataggcgatagaaattgaaacctggcgcaattagatatagtaccgcaagggaaagatgaaaaattatgaaccaagcataatatagcaagggactaacccctataccgttctgcataatgaattacactagaaataacttttgcaaggcagagccaaagctaaaggaccccccgaaaaccagacggggcttaccttaggaccggcttaaaagagcaccacccggtctatgtggcaaaattggtgggaggatttatagggtagaggcgacaaaccctacccgagccctggtgatagctggtttgtccaagattgaatcttagttcaacttttaaatttgcccacaggaaccctcttaaatcccctttgtaaatttaaactgttagtcccaaagagggaccagctctttgggacactaggaaaaaacccttgtagagaggagtaaaaaattttaacacccattaggtagggccttaaaaggcaggccacccaatttaagggaaagcgttcaagcctcaacaccccactaccctaaaaaattcccaaaccattttacctggaccccctcacaccccaattggggccaatcctatcaccctattaggagggcctaattgtttagtataagtaaccatgaaaacattctccctccggcataaggcctgcggtcaggttaaaaacactgaactgacaatttaacagcccaatatcttcaatccaaccaacaagtcattattaccctcactgtcaacccaacacaggcatgctcataaggaaaggttaaaaaaagtaaaaggaactcggcaaatcttaccccgcctgtttaccaaaaacatcacctctagcatcaccagtattagagcaccgccttcccagtg

SEQ ID NO: 147300 - DNA, 351 bp, Homo sapiens
ggcacgagaggacaacactgcctaagctagcctgcctgatgttaccaacatgaagctgcgcgcagcaactgtgctactacttaccatctgcagccttgaaggagctttgaataggacacaggccacggacccatgctcggaaaacctgtgtagtcagtacttccagaccgtgactgactatggcaaggacctgatggagaaggacatgagcccagagcttcaggccgaggccaagtcttactttgaaaattcaaaggagcagctgacacccctgatcacgaaggctgtaacgtaactgggtaacttcttgagctatttcgtgtaacttggtatacaacctgccagccagtg

SEQ ID NO: 147301 - DNA, 468 bp, Homo sapiens
gtagcatagatgtcgactgacagacaccaaggacagagacgctggctaggccgccctccccactgttaccaacatgaagctgctcgcagcaactgtgctactcctcaccatctgcagccttgaagtacttcccagaccgtgactgactatggcaaggaccttgatggagaaggtcaagagccccagagcttcaggccgaggccaagtcttactttgaaaagtcaaaggagcagctgacacccctgatcaagaaggctggaacggaactggttaacttcttgagctatttcgtgggaacttgggaacacagcctgccacccagtgaaagtgtccagaccatttgtctttcccaaccccagctgggccttttaggaacacccactgggccagttcctaggagctcctgtccctacccactctttggttacaataaatgctgaatgaatccaaaaaaaaaaaaaaaaagcg

SEQ ID NO: 147302 - DNA, 2231 bp, Homo sapiens
cctgattctgccccgccctgtcctcctctactgctttattctttctcagaggtttgtggtttaggggaaagagactgggctctacagacctgaccctgcacaagccatttaatctcactcagcctcagtttctccattggtatgaaatgggggaaagtcatattgatcctaaaatgttgaagcctgagtctggacgcagtaaaagcttgtttccctctgctgctttcttagatctgcaatcgtctttcctcccttctttccttgtagtttttcccccaccactctctggcagctgccgctccttatccctgccttctggcaccaatcccctcctacagctcgtccccctccctccatccatccttctgcccctgtctactgtcttgttctgaagggctactaagggttaaggatcccaaagcttgcagagactgaccctgtttaagctttctatcctgttttctgagtgtgaggcagggaatggggctggggcggggggtgggctgtgtgttcagcagataaattagtgctccagcccttaggatctggggagctccagagcttgccctaaaattgggatcaattccctgttcattttggggcattggggctagtgtgattcctgcagttcccccatggcaccatgacactgactagatatgctttctccaaattgtccgcagaccctttcatccttcctctattttctatgagaattggaaggcagcagggctgatgaatggatgtactccttggtttcattatgtgagtggggagttgggaagggcaactagagagagaggatgggaggggtgtcttgcattttagtccagacactgcttggctcgctccccgagtcctcctgtttctgacttcctgcataactgtgagctgaagggtttcctcatctccccatcttaccccatcatactgatttctttcttgggcactggtgctacttggtgccaagaatcatgttgtttgggatggagatgcctgcctcttgtctgtgtgtgttgtacttatatgtctatatggatgagcctggcatgaacagcagtgtgcctgggtcatttggacaaatctcctcccaccccccaatccactgcaactctgctgttcacacattacccttggcatgggggtggtgggggggcagggacacactgaggcaatgaaaaatgtagaataaaaatgagtccaccccctactggatttgggggctccaacggctggtccgtgcttttaggagcgaagtttaatgtttgcaccaggcttcctgtagggagatccctccccaaagcagctggcgccaaggcttgggggcgtcctactgagctgggttcctgctccttcttgggctccatgaaggaagtaagaggctagttgagagcctcccttggcccctttccagtgcctccccgcctggcttcaaatttatgagcattgccctcatcgtcctttcttgttccaggggtcagtggccctcttcctaaggaggcctcctgcttgccatgggccaaaaggcacggggtgggttttttctctccctaccctcaggattggacctcttggcttctgctggattggggatctgggaatagggactggagcaagtgtgcagatagcatgatgtctacactgccagagagaccgtgaggatgaaattaatagtggggcctttgtgagctagaggctgggagtgtctattccgggtttttgttcttggaggactatgaaagtgaaggaccaggacatgaccgatggagattaagaaaaaccccagcttgattgtgaatggacatccttgacccctcccctggaatgaacgcccagctctgggggccagagggaggaggagaggggaaggggctccctcaacaagcccttagtcttccccattctttaagatagcatcctttcacaggagtcaccctcctctgccccagagctgtcctcaaagcatcccagtgaacactggaagaggctttctagaaagggaagaaattgtccctctgaggccgccgtggtgtgacctgccagagacttcctgcctgggaactcatcgtgttgaacttgggacagaagcagaggaggctgcctgctgtgatacccccttaccttcccccagtgccttcttccagaatatctgcactgtcttcctgaatcctggttagtcactgtggttcatcaaattaaaactggtttgtgcaaaaaaaaaaaaaaaaaaa

SEQ ID NO: 147303 - DNA, 948 bp, Homo sapiens
gaaatgttcagcctatttaatttccacgtttgcctaatgcatgtgctctatctctggatttacagttatcgtccattatgagctgggaatttctagaggacctctgtgtgtgtgttagtgtagcacttagcacaatgtcataaataaataggcttttaatcatgctgatgatattgatcacactcacgatgtctgggagagaaggtgttggctgtgctgctcagtggtcttgatttcttagaactggagcatgaacaacatgctcgaaatgcgaagtaatgaactggaacggtggagaaggtcataaaaagcctacctggaggaggatagtgacggcactgtcacaaatgctttatatgtattatttaattcttgcagttccctcctgcggtaggtccaattattatcctcatgttcgagtgaaggaaactcaagcagggtgaggttaggttaataacttgctaaagtcacatggcaagtaagtgtggagccgggatttgaacccagtcatcctggctcggggtccaatgccctggctggccctggatgccgctggggggccctctgtagggctgacttgccctcctgagaagccccttccttagcttacggccacatagccctctggtagtcctcatcaccagctctgctcttaatttggccattttccgccttaggattggagtgaatcatccttcaaagacagagccacgttctgcactgtgttaagcatagtccgtggctcacagttcatgcgtgagccacacacacatgcacactttgttgggaagaagagcaacaataaattgcttatttagaaatgggcgaggccaggtgcagtggctcacatctgcagtcccagcactaaggaaggcagatgtgggaggatagcttgagcccaggagttcaagacctgcctgggcaacatagcaagtcccagttctccac

SEQ ID NO: 147304 - DNA, 391 bp, Homo sapiens
tttttttttaaagccttgtttgcaaactgttgcaacttctggcggctgcaacttctggcctcaagcaatcttcctgtcttggcctcccaatagcataagctaccgcacccagcccacaattttctttcagtacaatataaacatcttgcaagcgctagcttgatttacactttttgcctgtaatcccagcagtttgggaggctgaggctagtggatcatgtggccgagatcgcgtcactgcactccagtctagcaacagagcgataccttgtttcttacttaaaaaaaaaaaaagacctcatttgttaactgttaaacagaaaacaagaaattccctatacctgtatgcattatagagcaaataagagcatcaaaaacaatcttagaaatc

SEQ ID NO: 147305 - DNA, 1837 bp, Homo sapiens
aagtaagaaacaaggtatcgctctgttgctagactggagcagaactccatctcgagaaaaaaaaaaaaatctattatctgatcaatgttcctttgtaggtgacctttctctgaaagatttctaagattgtttttgatgctcttatttgctctataatgcatacaggtatagggaatttcttgttttctgtttaacagttaacaaatgaggtcttttttttttttttaagtaagaaacaaggtatcgctctgttgctagactggagtgcagtgacgcgatctcggccacatgatccactagcctcagcctcccaaactgctgggattacaggcaccactgcgcccggcctcatttatttctttaattctaggaaacagtatttttttttaatccagtgtattcgcttggtttttctagctttattactgctttgtttccaacatgctgttatatagtggtgacaaaacaaacaagatgctcaatctcatgggaaattatgagggcagacaggattaggcaacagtggggaatattttgccagggggagaggggagacccatacattctagggtggaaatgtgaggctaaggacccaaattaggcaaggcagcttatccatggcacggtatctgaggtgaggggaacacaggcttaaacggtcaattcccaaaccaataaccggaattgatccaatggatggaatttaatctcaggggttgctgggatgcctctcttcagggtctggcttcagggcctcaattttccaatcttggtcccccaagaaaaaggttaaacctgtcttgtgctgagtaggtgtaatattccagtacgggcttctcttgcgccctagtgctagtacgaacagaaatcaatgaaaaatgtagaaacaaggttggagtacaataggaacaggaaaaagcaaagcttcttgccacgccatgctcccaaatgtgcctgtgtctgattctcagcactaactactcatgtgagacatctcaacttgataaaacattaaaatggatttttgtctcataccattcaaataccccagacagaataattttagtgttcagtggcacttccaaatcctaactcaagtacagttaataaatggtagagacttaagaagaggccaagatatacatgtaactggatctggtctcacgagggattctcttacgatgtatttcatctacagtaaaagaaatcatcttattaacattccccaaacttcattacttaacacacctatcatagtttttgctatgcagaattaatccatggtaatacggattatgaaagtgaatcaccctgagatggggttattaactaaaagggcaaagagaagcttaaatgaaatgcttaatgtggatggtaaaagtggtggatatatactgggcgcagtggctcacacctgtaatcccagcgctttgggaggccgaggtgggtggatcacctgaggtcaggagttcaagaccagcctgagcaacatggagaaaccccttctctactaaaaaaaaaaaaaaaaaaaaaaaaaatacgaaattagccaggcaatggtggtgcatgcctgtaatcccagctactcaggaggctgaggcaggagaatcacttgaacctgggaggtggaggttgcagtgagccgagattctgccattgcactccagcctgggcaacaagagtgaaactgtgtctcaaaaaaaaaaaaaaaaaaaaaattattgtgctttggccaggcgcggtgctcacgcctgtaatcccagcactttgggaggccaaggtgggcggatcacctgaggtcgggagttcaagaccagcctgaccaacatggagaaat

SEQ ID NO: 147306 - DNA, 260 bp, Homo sapiens
  misc_feature (1)...(260): n = a,t,c or g
atcccttcatacttgaacgttttctaattgcttacttattgtattctggggtatgncgtaagtacagagaagccntcacctcagatggnagcttttaaaagattttttttttntctctcaacaccatgattcctttaacgacatgttgccctaagcagaaagtgcctttcaggatctatttttggaggtttattacgtatgtctggttctcaattccaacagtttaatgaagatctaaataaaatgctaggttctacctt

SEQ ID NO: 147307 - DNA, 388 bp, Homo sapiens
ggggaggaggaaatcccttcatacttgaacgttttctaattgcttatttattgtattctggggtatggcgtaagtacagagaagccatcacctcagatggcagcttttaaaagatttttttttttctctcaacttgggttagacctacagggggtctggctggtgttaacagaagggagggcagagctggtgcggctggccatggagaaagctgacttggctggtgtggtacagagaagccagcttgtttacatgcttattccatgactgcttgccctaagcagaaagtgcctttcaggatctatttttggaggtttattacgtatgtctggttctcaattccaacagtttaatgaagatctaaataaaatgctaggttataccttaa

SEQ ID NO: 147308 - DNA, 2196 bp, Homo sapiens
gccctcaaccttagttgaaaacttaaaaatggcattgaatggctgctgcaataaggacacatgaattttggcttaagtggactaggaggactaaatcttgcttaggcttttaaaaaatgcccacccactgggtctagggattgaggttattttcctgaattatggctaattatggattacaattcaaggttaaagatacacatatagtattctcaggttattcatatgatagcattttttaagagccaaagtctcagtcacccaggctagagtgcagtggcttgataatggttcgctacagcctccaacttctatgttaaagtgatcctcctacctcagcctttcaaagtgttgggattataggcacgtacctatggccccaaggcactttaacaaatgagtaacagacacagttaaggtagaacctaggcattttatttagatcttcattaaactgttggaattgagaaccagacatacgtaataaacctccaaaaaatagatcctgaaaggcactttcttgcttagggcaagccagtcatggaataagccatgtaaacaagctggcttttttgtacccacaccacccaagtcaggctttttccatggccagccgcaccagctctgccctcccttttgttaacaccagccaaaccccctgtagggtcttaacccaaggtttttttgtagggacaccttggcctacggtttttctgtaggacaccttggcctacctgggggaatgctgggaaacatgttgttaaagggaatcatgggtgttgagagaaaaaaaaaaaaaatcttttttaaaaggctgccatctgagggtgatgggctttctctggtactttacgccaatacccccagaattacaataaataaggcaattagaaaacgtttcaagtatgaagggcaagtatgaagggatttcctccctccccggccaaaagcactgctctcttgaaggaagctgggtttctctgtaagctacaccacctagcattttatttagatcttcattaaactgttggaattgagaaccagacatacgtaataaacctccaaaaatagatcctgaaaggcactttctgcttagggcaagcagtcatggaataagcatgtaaacaagctggcttctctgtaccacaccagccaagtcagctttctccatggccagccgcaccagctctgccctcccttctgttaacaccagccagaccccctgtaggtctaacccaaggtttttctgtaggacaccttggcctacctgggaattctgggaaaccatttgttaaaggaatcatggtgttgagagaaaaaaaaaaaaatcttttaaaagctgcccatctgaggtgatggcttctctgtactttacgccatacccccagaatacaataaataagcaaattagaaaacgttcaagtatgaagggatttcctcctcccccgccaaaaggcactgcctctctgaaggaagctggtttctctgtagctacacccagctgttcagaaagctcattggacctggttttgaaaataaaacaaagttaaaacccctggggaggagttaattgtgccagtgtgggagtactcaggctttctttataaagaaaaaaaaaagttatctggtaccaaagtgtgcaacctacagaccctcaggtactgcccctgtgacttaacctgtatgaacatccacaaggctgcccaagtgccctgtttttcctagaactaggagttggtgaggtttggctagtgctgaaaccatgcataggattggtttactaaattaaaaccttattacgtacgtcctccaaaagacagctgaaagtggagagattttgatttggtgctgttagaggtggcaattaagagcataagcaccagggagatggtttaatggtaactgccttttttgatgtcaggctggagctccaactgggaaacttgcgttacatgcaagattgattggatagggaacactccctgacaaagagctacataattagaaatggatcaagttacagggaggataaggggaaggcttcacattcataatagagctcaagacattacaaattcatgctgacaggaaatgtggcattgccagacagaggctataagtggaactacaagtactttacgtgcacatcacaaggacattttcagcatctggtggggaaagtcaatgcctcgtgcc

SEQ ID NO: 147309 - DNA, 760 bp, Homo sapiens
  misc_feature (1)...(760): n = a,t,c or g
ccggctgggttttaactcccggggtcaaaccctttggccccctcaggtttcccaaaaaatggggtttccgggtttaacccctgccccccaccctttgatcaaggtccctaatccggtttgaccccccatttttaaggaatttgtcccttgtccaaaatgttgccaaaatttccccccaattgtccccttccttccctttggtggggggttttttggtttggtggtggttttttggggggnnnnnnnnnnnnnnnnngccatggacatgtttttagtacttatgtagtagtcagatgtattactcattttttctgtgctctggatcttatgctttgaatggctttttgtgaattccaatattttaaaaataatttacccctagcttcagttcttacatttaaatatttgttccttctggaattttagtgaatgtggacaaggttatgcttcagttgccttaactagttgccttggcatcattaataagtgttcttttcctctactgatttgaaatgccatttttaatgtattccctaacatatttgggtctgtttctggatcctctaacccactgttctagagagaaaggtgatcgttttagattatttgtctctctgtaatctaaaatccaaggtacacgctgggcacagtggctcacacgtgtaatcctagcactttcggaggctgaggcacgtggaacagttgaggacagaagttcgagaccagcctgaccaacatggcgaaactctgtttctactaa

SEQ ID NO: 147310 - DNA, 1694 bp, Homo sapiens
tcatcttctactcatgcttggcacgaggggcacacacaccttgaatctgcaccctctggagggcatctgtactcctgtgcaaaatgcccagtccagagacaaaacctcagactttgtgcacctagggttccttctcagcagcggagactgttctttgagttgccttgaagtggaggccgagcggctgcgggcccttcgcctccctgcggctgaccttgatgtagctttaagtcacactagactgcagaggggtccgaggccagaaacccctgtcctgcatcagactttcattcccaagttcttaggctttgttactgatacctcaattcggaagttttagttctgagaaaggcaagtcagcgttcttgaaatgcctgactggtagatatgcaactctggcctccagtcttccatgaaaataaatgctgccttggacccccacctcagaccacacactgacggccggctccggcggtgcccacccctcaggctgggccgggcacccaaggactggccacagccagctctgtcagcatgttgtgctcggacaagctgtttccttcttctgaccaacccagggtgtgacctggggatgcagagctttctgttttgggtgttgggagaagcagcaggaaggagtcgccagatgatcaagctccccctttgcctgtcatctgtgaattgagcttcgccagggtgggtggggcacctggggagccattgcagaggcctgtggtgctgagttagactccaggtactttgtggtcaaaggaaatcgcctagctccaggctgtgttaggacagtattagcatgaaggctgtgcgaccatcatgcctgctgatccttgaggcaggcctggtccagaaaactctgggtcagtgactgcgcagggccagccgctaccaggacggccctgaaacaggacacatctgttttttgtccctcaccctgggcaggccgcgtcacaatcacagtcctcctcctccccaccctgacagtctgagcgcagggcttgaattgttagtcccaactctggccaaagatacttttttccagagacagaggccaggaggcagtgaggggagccccgcggggagggcggcggcgacttgccacagcccttccagcctgtcttgctggccgccctggttcatatttgagtttaattgtactgaccctggacccagataagcagcaactttgtgtctttgggggtcaccagaaccattttggggcagtttaatgtggtaccaaacttgaaaataggagcctatttaatagatgggagccagcccttagtgccttccatagaaagcaatgccctattttttaaagttacaaaccgcagatatcctacataggatatgcttttgcttgaggaagttaggtctgtgggtaggacccagaaacccacaaatttgacttttttttcttagggaaattttttctatttgccggtaattttggttatttggtaaataatgtacatctgttgatttctggagtgtctgttattcaatgatgtatatactcccacagctcgcatgaaggaacagcctctattgatacttggttgtaaagtgaagtaagattggagggtggatggctgtcagagctcttgcagatactgtgttcactaaatgaaaatgcacatgtattgttaaaaaaaaaaaaaaaaaagacrcggcacgag

SEQ ID NO: 147311 - DNA, 754 bp, Homo sapiens
ttgtcacagtaaacacagaagacaaaaacccagaatgaggacactaccagtaaaaatcttttaaaggatgagaagctgagcagtggggggtatggctgtagttgcagctactgaggatattgagggtgggagtttcccttgaagccatgagtttcaagcaatcatgcctgtgaatagctactacactccagcctgggtcacgtagcaaggctgccaactctacaaaatatgaaaacattagccagggatggcagtgtgtgctttcagtcccatctacttgggaggctgaggcaggaggatcatggatgcagtaagccatgactgcaccactgcactccagcctgggtgacagagcaagaccccattctcttaaaaacagaaattgggatacctgtatgttcattcaagagataacccaagtaatgtgtattaaagacattttaggggcaaataaggatacttgaataaagttataccaggcttaggatctatttaacatcttagacgtaagggtcattgttatatgcaagatgtcttattacatgaatgttggactttaagaactatgcacattcacacatccaaaaacaaaatacttctaagatgagtcatcactgactgacatgaactacaatttttgaggttttggttttttaatataaaagttggagaattatgaggagccacatctatgatggcaaaaacactatactcaaaaggtgtaagaaaactcagtttgcttattcctcgtgcc

SEQ ID NO: 147312 - DNA, 797 bp, Homo sapiens
ttttttttttataaagacgaatatttctttctttaatagttaacctttgttgaaaaccaccaataaatatcacttacattagggaggcaccatggtaaaattaatgtctacttcttatatttaaaaatgcagggataatatttctgttgcacctttgtatcagtagtcaactgtagtgactgtctttctggccacagcagaagaaaaactgagggagataaagtcagaaaggagaagcaagaggcatgagcttggtgcaagacatgtgaaactaccttgaaaacatttcctattctcttgtttacaaaaaaacaggcaggtcacatcacaccattaatgcttcctttccttattttacatactgtagtcactccttattttaaccttgaggctgattaaaaaaagattttaggagaagggtaaagaactaaacttcaacatgcctttaaaaacaaaacaaataaacctgacaggttcaaggtctctcacatttcctcccttgcaacatctcttggctgttagcaggacacagatacacagggaagggagccgagctggctacagcagttactaagctgccgagagaggggacgggaatccttccattgactactcgataagccaagcccaaaataacatcccaacattgcacatgtggttatctgtactgatggaagttttatttcaaatgtaataatactcttcaatagatggggtaaaataaagattgttttcctccccactccccaaccccccagccaaatgaaatggctttggttatgtttctttctcgtgcc

SEQ ID NO: 147313 - DNA, 2245 bp, Homo sapiens
  misc_feature (1)...(2245): n = a,t,c or g
gtgactgtttgctcttctgctttctggaatgcagatgacagtatggaaagaaagaataatgattctatctaataggaaaggatttcttctttcttttttaaagagtgggtggattttctcccttttgttttgcttttattttcatgctactaacatatcttcagaaggaaatggcaactagtagatcagtaaaattacgaaaacgatgcctgcaaaatttgaaggaatgcaattctgatttgccatttatcagggaaaactgaaagcatttttcttataactttttttctttttctttttttttggaggggggaggcagggtcttgctctgtccctcaggctggagcttagctcagtgcagcctccaactcctgggctcaagcaatcctcccactttagcctcctgagtagctgggactacaggcgtgtgccagcgcgcctggctaattttaaaatttttttgtagagacagagtctccctctgttgcccaggctggtctggaaactcctagcttcaaatgatcctctcacctcggcctcccaaaatcctgggattccaggcgtcagccactgctctcggccctcttacaccattttgtttgattgtctagtccctgtttctttttctttctaatccttattcatttaagcaaaaccatacattatcttttccagtcctttcttgtattcttactggtttttttaaaataactttttgccttaatagctcattgtcactaaataacttctgtgttctcccaggggcagtgttataacagaaggggcaatggaaaacattggacatgaccatgagtgcttcctttccttaactctctaggtttgtagtctgttttaaattaggattagttcctgcattctgaaatacattggcctagaacattttatcccagggcatttttgaatagaaaacagttgcgtgcttttattgaagatttgttaataataatcactcatagtaccttgatatgttagtatttttctttttccttttagtatgtttcaagtgcaggtaatcgtacttgtctatccagtttttaatgtatgataccgagttgcttacacgatgcatggctaaacttgttaatttagttttctccttagagactttgaggacccttaagagacaagattgagaaagagccatgtggcttggctctagaaacgtcattatcattaggaccatcagattttagattaagctgctattgaattaataaaatcccaatgaagcagagttataagggatagatttatagctggcagaagtggtatcaaaggagaaaaacagtgaaaaagccaatttcactgggttcgttcaatccagcttgttggctaatattagttacccttgttttaatgacagagagtggctgggaatctggtagctaggggaggggcaacactgttagatgtgagggaaaggaagtgccaaaaaatgccctgggacagatggcttgtccccaagggcccaggacacacactttaaaatccaacattcacctaagcaagtaattcttaaagatcttacagaaacgcacagtcaatcatgtttataaaggaaggctgaggggagagaggaggcctggggctcagcacagaagaggcctaggacctgaagagactccagcgagtctcgggaagcccaggggacctgtcaccatctgggcacttcccaggctcaatgctcagccagagtttgctggtggacctcaggattcgaagtgtgcaacaagacggattgcagcttgctgttcagggcggccccgtgcaggagcacccaggctcacccctcaggcatctccggacttggagggcccagcaagaaggtccagcaacttaactcttaaaacgcattgtttcggatcatattgatcatctttccctttttccattttgtccatttcactgtaatgaacttgaaatcagttttgaaatcctatttgtaaagtgtttccttgtccgtgaaggcaccctgcccatgttctgttgccgttttccctcggcanccgtgtagggtcttcagcttccctgggttttcaccccttccggtcaggcactgtggggtcgctgagggccatgtgggtccatttcacgctcttgctgcgatgatggtcagtagctgatctgttatggcattcacttcccagattaattttccgtgtttgaagtatgtgcatatgtgctttacagaataaaacatctgaatttaaaaaaaaaaaaaaaa

SEQ ID NO: 147314 - DNA, 537 bp, Homo sapiens
tcaagtttataagatagttcccattacatataacattacggtcacggattctacagccacaaatgcccgcagtcacataaatatatccaatccaatcaatgccttttcctgctaacagaggcatctgaagttcagagggagagtcgcaaatcaaacaaaagcccagatgggcatctaaatctggagcaggtgtccattcttctggacactaccgagcctccccaggggcactggacagggtgatgctaaggcacagtcagttttacattcgaaagtcaagccacctcctcaacccaagacacacctcactccagatctactactagagagagccctcaccgtgacattacagacccatcctgtagaacccacagtgcctggccaggcatggtggctcatgcctgtaatcccagctaatcaggaggctgaggtaggagaatcgcttgaacctgggaggcggaggttgcagtgagccgagatcatgccactgtactccagcctgggtgacagagcgagactccatctcaacaacaacaa

SEQ ID NO: 147315 - DNA, 1000 bp, Homo sapiens
atctcccaagggcacggagagggctctctctagtagtagatctggagtgaggtgtgtcttgggttgaggaggtggcttgactttcgaatgtaaaactgactgtgccttagcatcaccctgtccagtgcccctggggcagctggcagtgtccagaaaaatggacacctgctccagatttagatgcccatctgggcttttgtttgatttgcggcgttcctgtcttctgtaaagctagtgagttgtcccaagagactgatgccacagcttgttcgcagtttacacaaactcagctttaaaattccaaatagaatctgacttgcaaactctagctgcagcatgtggagcttctagatgtttactaccttgaatggttgtcagtgtcactgaaccacagggggagaggagtatggggtagagcaatggtctgggccaagggaatggtgaagcttaggggtcttcctctggactcctttaccccctcaaaggaggcaagttaagggtccctcttaagcagggctcctattccttacccactaaattgggtttcctttttcatcccagaagttagaactcccccagatattcacactataggatctgaattcccgagattcttaaaatatcttaaacccacaagagagaaaatcctagttcctgccctcagccccccagtccagccaggcccatctgtccccttccctctccctctgagtcaggacagctctgggcaagcaaaggctccttggcctagttccctaatgcactgaccaggagccctcccattaaggacgacttctactcaaaaatgcgactctccctctgaacaaacttcagatgcctctggttagcaggaaaaggcctttaatggaatgggatatatttaatgtgactgcgggcatttgtggctgtagaatcccgtgacccgtaatgttatatgtaatgggaactattcttataaacttgaaaaaaataaagtttttattttctaaaaaaaaaaaaa

SEQ ID NO: 147316 - DNA, 1182 bp, Homo sapiens
  misc_feature (1)...(1182): n = a,t,c or g
ttcagtgcacatgactgggtgataagatttcttccacatctgtcctcctgcccttcctcagcagcatccttccccggttagacctcatccttccttaatggacccgcccttttccttccctgttcctctgaggctttatatcttagaacctcctctttgttaatagaacaattcattacaaacattgctctatattgagttttgtatgattncatgcctttggcaatcaaggcaaagtgtggtcaagcaggcaggaaaaatcaaaaacagcatcactaattggaaacaggctgttgttgaacgtgatctctgtggtccccaaaccatggtaaccccttctctgtgccatcaaccccaggcctgaatctctgttatctttttcagggatcatacagtaattcggtcaatttgttggaatcttgtgttgtttcttcttttttttcttggtcacctgtactgctctgtcttccaacctcggaaccagaatcaaaaatatatatcatccgtaagtacctttgtcgggagctgttgcaacttttcccatttcctgaggaagatccagttccccagagaggataactttgtcctccattgttttcatggtagaatttaaattcagcttccatctccttttcaaattcatcttcactagatgattcactttctccggtaagacattctctgatgagttttcgtttttggtcaggagttccatgttaaaagcacatccacttcagtcctcagagcttccgtcactctgctactaaggtgtagagacaggtttcgatctcattgcttttgaagatttacacgcggtcccccgtgattccggaatatccctcttcctacaggcgacatcggctccgcctccccccgggactgcgcgaccccatcaggaaagccctttggcttcgcacaagtaacaggcacgacaggctcccgagccgctagggtatgcgtaggctcggcaggcgcaacgaatggaggcgaccaaagccaggcctcgacccaaatcctcgggggccagggtggggcgggagcccacctgctcaaagccggctcctcgtcgctaggctcttcaaccgcgtaggggtagtagtcatccgtaagccggttcatggtggcctgcagcggcctacgccgtccgcaagcacctcgcagcgtgtctgtttactctgcaag

SEQ ID NO: 147317 - DNA, 5678 bp, Homo sapiens
attcaccaagtttcacgcatctgctggcctccccctgtatttcctctaagccccagcctcagtttctctttctgcccacatactggccacacaattctcagccccctcctctccatctgtggtctgtgtgtatctttctctctgccctttttttttttttagacggagtctggctctgtcacccaggctagagtgcagtggcacgatcttggctcactgcaacctctgcctcttgggttcaagcgattctgctgcctcagtagctgggattacaggctcacaccaccacacccggctaatttttgtatttttagtagagacgagctttcaccatgttggccaggcaggtctcaaactcctgaccaagtgatccacccgccggcctcccaaagtgctgagattacaggcctgagccaccatgcccggcctctgcccctctttcttttttagggggcagggaaaggtctcaccctgtcacccgccatcacagctcactgcagcctccacctcctggactcaagtgataagtgatcctcccgcctcagcctttccagtagctgagactacaggcgcataccactaggattaatttgggggggggtggtgtgtgtggagaatggggtctggctttgttggccaggctgatgtggaattcctgggctcaagcgatactcccaccttggcctcctgagtagctgagactactggctagcaccaccacacccagctttttattattatttgtagagacaaggtctcaatatgttgcccaggctagtctcaaacccctgggctcaagagatcctccgccatcggcctcccaaagtgctgggattccaggcatggggctccgagcccggcctgcccaacttaataatacttgttcctcagagttgcaactccaaatgacctgagattggtgcctttattctaagctatttttattttttttctgctgtcattattctcccccttctctcctccagtcttatctgatatctgcctccttcccacccaccctgcaccccatcccacccctctgtctctccctgttctcctcaggagactctggcttcctgttttcctccacttctatcttttatctctccctcctacggtttcttttctttctccccggcctgcttgtttctcccccaacccccttcatctggatttcttccttctgccattcagtttggtttgagctctctgcttctccggttccctctgagctagctgtcccttcacccactgtgaactgggtttccctgcccaaccctcattctctttctttctttctttttttttttttgagacagagtcttgctctgttgcccagcctggagtgcagtggtgcaatcttggttcactgcaacctccacttcccagattcaagcaattctcctgcctcagcctccagagtagctgggattacaggcgtgtcccaccacacccgactaatttttgtatttttggtagagacaaggcttcggcattgttggccaggcaggtctcgaactcctgacctcaagtaatctgcctgcctcaccctcccaaagtgctgggattacaggcatgagccacctcacccggaccatccctcattctccatcctttcctccagttgtgatgtctacccctcatgtttcccaacaagcctactgggtgctgaatccaggctgggaagagaagggagcggctcttctgtcggagtctgcaccaggcccatgctgagacgagagctggcgctcagagaggggaagcttggatggaagcccaggagccgccggcactctcttcccctcccaccccctcagttctcagagacggggaggagggttcccaccaacgggggacaggctgagacttgagcttgtatctcctgggccagctgcaacatctgcttgtccctctgcccatcttggctcctgcacaccctgaacttggtgctttccctggcactgctctgatcacccacgtggaggcagcacccctcccctggagatgactcaccagggctgagtgaggaggggaagggtcagtgtgctcacaggcagggggcctggtctgctgggcctgctgctgattcaccgtatgtccaggagctggagcagcaccctctcagagcctcagtttccccagatgtcaatgagagaatcagcatcagccacatctcccacctgaagaatcgaaccttgagttctcacctttaagaattttttttttttttgagacagtgccttgctcagtcgaccacgctggagtgcagtagcacgatcatcaatcactgcagcctccaactcaagcaaccctcctgcctcaacctcctgagtagctggggccacaggcacccaccaccatgcctggctaattctttcttttttgagatggagtctcactctgtcgcccaggctggagtgcagtggcaccatcttggctcaccgcaaccctgccccccgggttcaagcaattctcctgcctcagcctcctgagtagctagaattacaggcgcacaccaccacaccaggctaatttttgtatttttagtagaaacgaggtttcaccacggtggtcaggttggtctcaaactcctgacatcaggtgatccacccgcctcggcctcccaaagcactgggattacaggagtgagccaccatgcctggccatattttaaacttttttgtagagatggggtcttactatgttgcccaggctgatctcaaactcttgggctcaagcagatcctcctgccaaagcttcccaaagtagttggattacaggtgtgagccaccacgccccaccaacctatgaagatgtctaagcagacagggtgccctacctcaccacatccccagtcagatccagaggtgggacaaggatgggaaggaggttccagaacaaaggctggcagggagtcgtatgggacaggagctgacccagcaaccatccacagagacatcctggagcctgggaaggagaaggacaaagagcccccttttttaaattttttttatgtttttgagacggagtctcactctgtcacccaagctggagtgcagtagcacaatcttggctcactgcaacctccacctcatgggttcaaacgactctcctgcctcagcctcctgagtagctgggaccacaggtgcacaccaccatgcctggataatttttgaatttttggtagagacggagtttcaccatgttggccaggcaggtctcgaactcctgacctcaagtgtccgcccaccttggcctcccaaagttctgggaatacaggcttgagccactgcaaccagccagtagcccccatctttgcccctcgctgagccctactggatgttcttggttatgcgacagtttccccatctattaaagagaaacccctatagcagaggggaggatgaggttggaaaagcaggagcattgttatgctattcttgtggggtctgggaagcagacatctgggtggatgtttggggggtgctgggcttagttggggaagtaggggggccccctggggcttacagggactggaagctctgagctggccagagggatgttgcaatcctgccagggtcttgtctatgctgtccttttcacaaccatccccctactgccaggctgacacgtggttgcgggggcacaaggccagccaacctagagtctgaggctaggcggaggacaccctccccaccagctgccagggtcactggcggtcaaaggcagctggtggggaaggcattggactccagccttgggggacggatgtagtgatggtgggaagcaggcttggtgccaggaggggcgtcagagggtgaataagagcagatagagtgtttgggggaggtagccaaccaaagggggtgaggcccggtggaagggaagaagggacatacacgcagagctttgcagctgagggttttaattttttgagatggggtctctgtcccaccaggctggagtgcagtggcacaatcacagctcactgcagcctcgaactcctgggctcaagcaatcttcctacctcagcctcttgagtagctgggactacagcatgcgccaccacgctcggctaatttttgaattttttgtagagatgaggtctccctatattgcccaggctggtctcgaactcccacgctcaagtgatcctccctcttcagcttcccaaagtgctgggattacatgcatgatccaccatgcctggctaatgcaggtgaggtttttgcagtgtcatccagctaaggcgacccgttcccctcccaaaaaagggagactgagaaccatgaagttaagagcccagagaatatcacggtggtctggggtgcttcaagggctggtctggaataaattggaggtggcacgcagggtaggagcgccgggccaactgggagacccagcaacataaaggaaaagttgttggggctgaggaggcttgctgagagaggggaagtgagggaaagaggtgatctagggacacggtgtgaatgagggggggatgagatcacagggttattactgggagacccctgagggaaggtggccacagggacaggacaaggctgtcttcttaagggaggagaccacccctcatattgtcttatgcccaatttctgcctccaaagaaagaaaaagtaaaaactaaaaggcagaaatgaaatccacaagcagacagcccgcgccacaccctgggcctggtggttaaagattgacccctgacctaatccgttaggttatctatagattacagacattgtatagaaaagcactgtgaaaatccctattctgttttgttccgatctaattaccggtgcatgcagcccccagtcacgcatcccctgcttgttcaatcgatcacgaccctctcacgtgcacccacttagagttgtgagcccttaaaaggaacagggattgctcactcggggagctcggctcttgagacaggaatcttgcccattccccgaacgaataaaccccttccttcgttaactcagcgtctgaggaattttgtctgcggctcctcctgctacattctgagtggggaaagggactaaggtggtctgaggaccccacagagtcaggaagattgagaggtgagagtgctgaacggggaggggctttggggctaagggaagtgcccgggaccccacctgaccccaacgctcacgggacaggggcagaggagaaaaacgtgggtggacagagggaggcaggcggtcaggggaaggctcaggaggagggagatcaacatcaacctgccccgccccctccccagcctgataaaggtcctgcgggcaggacaggacctcccaaccaagccctccagcaaggattcaggttggtgctgagtgcctgggagggacacccgcctacactctgcaagaaactcaaaaagggagatgaggggatcgtgggagggaagtagggagggaggagggtgccactgatcccctgaacccctgcctctgcctccagagtgcccctccggcctcgccatgaggctcttcctgtcgctcccggtcctggtggtggttctgtcgatcgtcttggaagggattggttttcacagacatttccgacagcgaaggagaaccctcagactgactcatgaggacctcaagggtgacattccaggaggggcctctgaaattcccagcaccccaccgcctgtactg

SEQ ID NO: 147318 - DNA, 799 bp, Homo sapiens
ggcacgagaaggaacagggattgctcactcggggagctcggctcttgagacaggaatcttgcccattccccgaacgaataaaccccttccttaactcagcgtctgaggaattttgtctgcggctcctcctgctacattctgagtggggaaagggactaaggtggtctgaggaccccacagagtcaggaagattgagagagtgcccctccggcctcgccatgaggctcttcctgtcgctcccggtcctggtggtggttctgtcgatcgtcttggaaggcccagccccagcccaggggaccccagacgtctccagtgccttggataagctgaaggagtttggaaacacactggacggacaaggctcgggaactcatcagccgcatcaaacagagtgaactttctgcccaagatgcgggtgcccctccggcctcgccatgaggctcttcctgtcgctcccggtcctggtggtggttctgtcgatcgtcttggaaggcccagccccagcctagggggctccagaagtctccaacccctttgatggcctggaggagttaggaaagaccctggaggactacactcgggaattcatcaaccgcatcacacagagtgaacttcctgccaagatgtgggattggttttcagagacatttcggaaagtgaaggagaaactcaagactgactcatgaggacctgaagggtgacatcccaggaggggcctctgaaatttccaacaccccagcgcctgtactgaggacgccctccatgtgtgtccaatgtggtcacacgcccaggtgtgacc

SEQ ID NO: 147319 - DNA, 336 bp, Homo sapiens
ctcccaaagcgttggaattcctgccatgagccactggtgccacttttctccccacttctagtcaacgctgtactaggagttctaggcagtaaataaggaaaaaaaattaaagacaatgagattggagaagaaataaaattgtccttatttgcatatgaaatgatcctatttgtagttctattatgaaatccttattcttaacctaagaatttcacagtaaaactactataccaaagtttaaggaagtaatcggatacaagattaaaatcaactatatatctatatactagcaataaactgaaattaagagaactctattctgaatagcctcgtgcc

SEQ ID NO: 147320 - DNA, 529 bp, Homo sapiens
ggcacgagcctggagcctcctgctttggagtggttcttcaatactgctgctgcttacgcgccgggaaactgggaaggctggtgagcgagaaggcaaggtaaggtctctgatttacgggggcatgccagttaatcctcctgaatgaggaagaaatgaaaggaagaggagcttgagagtcccttggctttgtcctctgagatgaggctttttaaaatgaaccaggagtctggctggccagttttgcaaacttcttgttcagaagaaccccttagaggcagctgaacatatagggcacattttcaaaagctgggaaagacagacccctttcacctatccctagagaaagatggtatggagcaaggcaggaggagttaaaaccagcttcctggcccagagaggtggcttacacctgtaatcccaacactttgggaagccagggcatgaggattgtttgagcccaggagtttgtaacttgtgaccatcctgggcaacatagtgagaccctgtctctacaaaaaaaaaaaaaaaa

SEQ ID NO: 147321 - DNA, 1050 bp, Homo sapiens
ttagctgcttgcctctgtgcgtaaccgcacgcccacggccgtgatgagggcggcccccttgccgctgccatcctcagacaggaggaaggacacgttacattttggtgacagttccttcaccgtctggtgcatgattctggagaagtgtggatgaagcttgtagagtgtcccgtccactcccacagtcacattcagacggtccagtcctctgttctcgcggatcttatccacaaccgcagccatgcctgcgccacacagctgtgcggccctcctggacaccaccccgcacactgtcttgacgaggatactgtcatcgcaggtgctattcagacctagctgctggaggatagcccggacctggagcagtgctaatcggtcactctcgatctgagagagaaacttggtctcaaagatgccccgggtcttcagcgtctcagagatctgccctcggaagaggaatcccttcttggtgaagtcgattaagatgttgcggacgatttcacccaggtacataccactgatcatcttctcatacctgggctccagccaggaaagcactaacccgtagcccctggaaagccgcaggctggccaggagctctggtggctgggctggaatcacaggcactcccatgaacattttcacagggccagatcctgggccatctgagaggtctgcacaacccagggtgtgggacagcacctgctgccttaagagcaactgctggttccggaaggtcaaggccaccacgccaccaatgagctccatgatgaggcagatcccaaggatgtacatgaatgcttggagaaggtacaggttgtcacggagggacgccagcacaccaatgaaggagaccatgaacatgacgacgcccaggaggatgaggatgatggctggagccaggaaggcactttcaagggttttatatttctgccgctcaacctctgcatagatgcccacagacaggaccagggccccaatcagacctgtaatcccagcactttgggaggccgaggcgggcagatcacgaggccaggagatcgagaccat

SEQ ID NO: 147322 - DNA, 777 bp, Homo sapiens
tgacttcaataccctggaagaatatatgataaatgtattcagattctattagttttatttgtaagcagattctaaacaaagaggatgaatttgggcacatatacacatgcacaaatgaaatggttcaacatcctaaatggatatgacacaaaaattacccactatgaagaatccaagaggctactccttatgcaaagcaaacaaaactttttaccttatgatttcaaaacataccagtttaattttctggttaaaaactgtttttaaaaaacagtactagggttcaagttttctagtctcggcatggaactaatgccaggggacctattttgaatttagggaaagagacaaaatgggtgtgatttcgtgcttcatttacatcatggtttttttggagggttaggtgaatatcttccatttcaagactttttatttaggcccaggcgcggtggctcacacctgtaatcccagcactttaggaggctgaggcgggcagatcacttgaggtcaggagttcaagaccagcctggccaacatgatggaacctcatctctactaaaaatacaaaaattagctgggtgtagtggtgcacatctgtaatcccagcactttgggaggctgaggcgggcagatcacgaggtcaggagatcgagaccatcctgggctaacacagtgaaaccccatctctacttaaaaatacaaaaaaaattagccgggcgtgggtgggcaggtgctgccagccccagctacttcggggaggcttgaggccaagaggat

SEQ ID NO: 147323 - DNA, 637 bp, Homo sapiens
tttttttttttataggggttctcactctgttgcccaggctggagtgtagtggtgcaatcacagctcactgcagtcttgaccttctgggcccaggtgtttataccacttaaacactgcaagtacttgggatcacaggtgtatgccaccatggccagctaatttatttttattttttatagagacagagtctcccgtatgttgcccaagctagctcaatgcactttaagataacaaagagcagaattttatcagataaatttaacagagattaaaataatttttaaaagtcaagcagaaattcaggagttgaaaaacttaattgacaaactaaaaatgcatcagtttctcaatagcagaatggatcaagcagaagaaagaattaatgagcttgaaaacaggctctatgaaaattcagtcacagcagaaaaaacaaaaaaataaaaaggaatgatgcatacctacaagatctagaaaataacctcaaaaggacaaatctaagttattggccttaaagagaatggagagacagagagagagagagaaaaagagagagagagagagagagagagagagagagagaggcagcggcagggaaggagggagggagatcagggtagatgatttactcaaaaaaaaa

SEQ ID NO: 147324 - DNA, 2117 bp, Homo sapiens
  misc_feature (1)...(2117): n = a,t,c or g
tggcaagttgactttattcttcaattattatcattatattattgttttttaatattttattttcttgactaggtattaagcttttgtaattatttttcagtagtcccaccacttcataggtggaaggagtttggggttcttcctggtgcaggggctgaaataacccagatgcccccaccctgccacatactagatgcagcccatagttggcccccctagcttccagcagtccactatctgccagaggagcaagggtgccttagaccgaagccaggggaagaagcatcttcataaaaaactttcaagatccaaacattaatttgttccttatttattctgaagaagttgaggcaaatcagtattccccaaggatggcgacaagggcagcccaagcagggcttagggatatcccagcctaccaatatgctcattcgactaacctagggaggggtgagttgggccctggctcttccttttttctggacctcagtttcctcagtgagctggtaagaatgcactaaccttttgatttgataagttataaattctgtggttctgatcattggtccagaggggagataggttcctgtgatttttccttcttctctatagaataaatgaaatcttgttactagaacaagaaatgtcagatggccaaaaacaagatgaccagatttgatctcagcctggatgaccctacaggtcgtgctatggatatgggagtcctcatggggttaaagccagggaaggagagtgggggaaagaggancccacccccactctgttctttcatatttggcatttcatgtttaacctccggctgggaaaataggaaagcattcccttaggagatgagggttaaaaggaaagttttcaggtttcaacagggggaagaaaatggagatttaatcctaaaactgtgactttggggaggtcagtcatttacagttagtcctgtgtctttcgacttctgtgattattaaccccactcactaccctgtttcagatgcatttggaataccaaagattaaatccttggacataagatctcatttgcagaaagcaggattaaagaccatcagaaggaaattatttaggattgtaatgacacaggacaactgtgtagaaaactgttgtgaccaaaaatagaattaccttctagtttttgcttgttctcatttgaaaggagaaaattccactttgtttaagcatttcaagcttttatgtatccatcccatctaaaaactcttcaaactccacttggttcagtctgaaatgcaggctccctgtccaagtgccttggagaactcacaggcaggcacgccttaatcaaaggttttaccaggcccttggacactatggggaggagggcaagagtacaccaatttggttaaaaggcaagaaaccacagtgtctcttcactagtcatttaggaacatgggtatcatccaagactactctaccctgcaacattgaactcccaagagcaaatccacattcctcttgagttctgcaaggttctgtgtaaatagggcagctggtcgtctatgccgttagaatccccatgatctgaggacccattcatgggaagcttgctaaaatagcctagtctgggggagtcttcccataaaagttttggcatgggagcaaaccaaaccaggacttaaactagggtttgggttcctttcagccctctaaaaggcataggggctttaggcctgccaggcttccttggggcttttctctgtgtgtgtagttttgtaaacactattagcatctgttaaagatcccagtgtccatggaaacatttcccacatgccgtgactctggactatatcagttttttggaaagcaggggttcctctgccttgctaacaaagcccacgttggaccaagtctgaatgtctttcctttacacctatgtttttaaataagtcaaacttcaagaaacgaatctaaacaagtttctgttgcatatgtggtttgtgaacttgtatttgtatttagtagggcttctatattgcatttaacttggtttttggtaactcctgattcttcctttttcgggatactattgatgaataaagaaattaaagtgataaaaaaaaaaaaaaaaa

SEQ ID NO: 147325 - DNA, 437 bp, Homo sapiens
  misc_feature (1)...(437): n = a,t,c or g
accatccacagactgaacccccatgccaggccgtgggagcacagctcaacgtggcttttcaaagaggtactcaagatctggggcacgcagtctctgctctttgtttttgtttttagcaaagtctctcagcagggccatgacttcattttcaaatatttctggggctggtttagcttctaagaagaatgcagttttccaacattcccctctttctgctctcatagagcaggcgggctcttttggtttctatggattcatcagttctctcctgccatggaggcaaagggatttcaatcatgtccttttgggaatctgttgggctgtcacctctgtagaagcgtctgaatgatgtcacactgagcaaaggagacaatagctgtgccttgacagagcaagcatcagnacgaagtcgagaacactgtagacaccgccatttt

SEQ ID NO: 147326 - DNA, 390 bp, Homo sapiens
acaatgtgactcattctcatacttttttgttcagctctgagcctcaaaagtgatttgtcagcagcgctggcatgcaggctttgcctggctgctatctctagaggcaagtctgccacgagagggcactgcaggcgaagcagttgtgcttgctcattgcctcagcccaagtgtactcaaagaaaagaggcagccagctgtgcgtgctgtacggaaagcctcccgccctccctgaatccttcaaaggcacagcaggcagaatgagggccacaggcaggagtggtgtgggcacactgcttaggagtcaacatcttcatcattgggctttctttaaaacgtgcactttgtaatttgaaagagaattattaaagcatactgaaaaaaggaaattta

SEQ ID NO: 147327 - DNA, 1338 bp, Homo sapiens
ccgtggctgccgtggtcggatggccgggcggctaggagttcccggaagtgcccgcgcagccggtttccggtgcaggtggggaaaatggcggtgtctacagtggtctcgacttcgtcgcctgatgcttgctctgtcaaggcacaggctacttgtctcctttgctcagtgtgacatcattcagacgcttctacagaggtgacagcccaacagattcccaaaaggacatgattgaaatccctttgcctccatggcaggagagaactgatgaatccatagaaaccctcacgagcccggctgctctatgagagcaagaaagagggggaaatgttggaaaactgccaattcttcttatgtctttttgctaaagaacatctgcaagcacattgacagaaaagcagctgaacctctatggaccgcctgattaacgagcctagtaatgactgggatatttactactggggccacagaagctaaaccagccccagaaatatttggaaaatgaagtcatgggccctgctggagagactttgcttaaaaacaaaaacaaagaggcagagattgcgtggccccagtttttggagtacctctttggaaaagccacgttggagctgtgctccacggcctgggcatgggggttcagtctgtggatggtaactacttatgatggacgttagccttgcttccggcttcttaggatgcccagctgcccttaccccagaccactggtcctgccttcaagtggatgggacataaccctctcctagggacattacatgttaaatggcacaatgtggacttcattctccataacttttttggttccaggctctggaggccttcaaaagtggatttgttcagcagcgcttggccatggcaggctttgcctgggctggctattctcttaggagggcaagtcctgccccacgaagaagggcaactgcaaggcgaaagcaagttgtgccttgcctccattgccctcaagccccaagtgttacttcaaaggaaaaggagggcagcccagctgtgccgtgctgtacgggaaaagcctcccgcccgtccctgcagctcccccgccctcagtggccccagggctttgttgaagtggaactcccccacttcccaaccctggtatggtctacctctgcgaagggaagctgatcccagcctcctgagctgaatccttcaaaggcacagcaggcagaatgagggccacaggcaggagtggtgtgggcacactgcttagcgagtcaacattttcattcattgggctttctttaaaacgtgccctttgtaatttgaaagagaattattaaagcatcctgaaaaaaggaaatttaa

SEQ ID NO: 147328 - DNA, 438 bp, Homo sapiens
  misc_feature (1)...(438): n = a,t,c or g
tggnattcantgtggcgaccttccnccccttatagggtgcacggctcccacaggggtaggtgtgccaagtcctgagtttggcagtgccttcctttgtaccctctccctaacactctcagagcagttgccttcagattcctagcaattgggtacgctttcccactttcctgtctctgtgcattatggatcttcccacagaatctcacctcgttggtgaccgactatgcagcagaaccctctgctggattcagcgagagctgtcagtgcttgagcagagttttgaaatcacacacacacacacacacacacacacacacacacacagacaaataacaaattattgtgggtctcattttgaccacccaaactaatacattgtagtgatcaacagtgtgacctttgaagtgagacagatctaagttagaattctccatttgc

SEQ ID NO: 147329 - DNA, 2124 bp, Homo sapiens
ttttttaaaatgaagatctcaatgtttatttattacaataaaaagtaaaatcacagggctattttaaaactaatgtaaccgttcttttaaaaaaagaaactatttaaacaagaaaatgatttttaaaaattctaagtaagaaatctagtacaagcaaagatgacattttaaagtatcatcaatgaatttccacacagcctttccatcacaataatataaatttataccttcaatcttatgcagcaacaaaaacacagtgagaaagacagcaattgcttctgaaagaaaatcaaagaagcctatagtggtgaattttttctaaaggatcctagggagtggaataaggcctgcttctccatgggttgacaatggtttggctgtgaagggaatggcagcctcctttcctctgattttttttaccgatggcacacacttcaggggtgggcctgtttcctggtccctgctgtggcatcttcttttgtcactctggatttcagtgtggcgacttctcccttatacggagcacgcttcacacgggtaggtgtgcatgtctcggcctcgctgctttattcgtttgtaaatatattcagcaaatggttttcgaggaataaacttcccatctcctgccgtgacactgaacactccggcttcatataccactttgcctcttgaaatagtcacaaggggcaccccgtggcaaaccatgccctcgaaaatgttgaagttaacagcctgatgatgagtttttgctgagatagtccttgtgccttttgggtcccaaataacaatgtcagcatctgatcctacagctattcttccttttcttggatagagattaaaaattttggctgcatttgtgctggtaactgccacaaatctgttttcatccattttaccactatgcacgcctttttcccatattacggacatccgatcttcaacaccattcaccccattggggatcttggtaaaatcatccttcccaagagctttctggcaggtgttgaaagtgcagttatcagtccctgttgtggttagatcatcattagccaacagattcatgaggaagtcgggtgttgaggggtctggtcgcaaaggtggacccatgacatggtgggctgcatggtgccattctttattccagtagtgagtgccatctgtgccaagactggctgctatgggttcaccatagaccaccttcccatctctccttgcatccgctatcaccttagctgcagacttgctcatcacatgcacaatgtagagaggacagttcacagcgctggctatggtgatggctctcagcgtggcctctgcctccactgcctctgggcggcacagctcgtggccctcagggcctgttatccccagagccaacatcttctttgctccctctgcaattaagtctccattttccgcatggacctgggcaattgctccaatttccttgcaccgagagaaggcttcgtacagctccaggtctgtcaccatgtacagatctttataggccataaacatcttgaaagagttaacacctttatcttgcacaaggattttcatttcttctttaacctggtcactccaccacgtcactgccacatgaaggctgtagtcgcagcaaactttgggatcagcccagcttcgccaggtctcgaaggcctcaatgagggagccacctttctgaggaatggcgaaatcaataatcatggtggtgcctcctgagagagcagccttggtgccctggtggaagtcgtcgatggaccgcgagcccatgaaggggaactgcatgtgcgtgtgtgtgtcgatgcctccgggcaggacgagcttgccggcggcgtcgaggacccgcagccccgcaggagcgcccccgggaggcagcaggtcgtgcccgagtgcccgcaccacgccgtcctccaccagcacgtcggccacctccgagaagtcatcgttgaccacgcgacccccgcggatcaggagccgcgagggcgccgccatagcgaggggcgcgcggggtcctactcggcccgggctgcgcgcaggggctgggttgggcgggccgggcgggcttggggtgccctcctgcaaggtccccaccgacagcccccgagctctgcctcaggctgc

SEQ ID NO: 147330 - DNA, 1314 bp, Homo sapiens
ggattatatcccctaaaagcaaccttttaatcaattttcatttattctaaattttagaacaccgttgtatttacaatatgaagattcatttctccagataaggtcctaattcatttgtaaattttgaccatgaaattatactccctgtcttaagtagttccctctgtatgttatcagcctccttagtgcaacttgctcatagttgattatccaaggctgtattgaatgtttcctaacatcttaaagaatgactctctagcaagcccaaggccttctacaatctggaaggcttatctaaatgttctgctttgatcaatcttcccttggctcaattgtccttgagtcttggatcactgtgaagcctctgaccttgatctcttcaacccttatgaggagagatgataatttcatatgctgtcatgcaggaagacttttcttgcttacagtcccttaccgatggcacacactttcaggggtggccctgtttcctggtccctgctgtggcatcttcttttgtcactctggatttcagtgtggccgacttctcccttatagggtgcacgctccacaggggtaggtgtgcaagtctgaaagagaacatttcatttctctcgtgtggtttattttcaggagttcaaagttaagtgtagctccctttatgaattgcgagagctttaaaaaaagaatcttataaatttatcacgtgcctcgccatccccttggcctttcacagaaattcctggcaaccttgagaatctggattgtcccactttttgtgggtattaatctgcctcagacagaggcccagggacactcactggggcctctgccatatcctcacgcccttctgagtccccacaagtgtctcctgctgtcctttcccaacatccgaccttttccttcctagtttcagcccctacctcaccctgagtttgcagtgccttcctttgtaccctctccctaacactcctcagagcagttgccttcagattcctagcaattgggtacgctttcccactttcctgtctctgtgcattatggatcttcccacagaatcctcacctcgttggtgaccgactatgcagcagaaccctctgctggattcagcgagagctgtcagtgcttgagcagagttttgaaatcacacacacacacacacacacacacacacacacacacagacaaataacaaattattgtgggtctcattttgaccacccaaactaatacattgtagtgatcaacagtgtgacctttgaagtgagacagatctaagttagaattctcccatttgccgatttactacacatagga

SEQ ID NO: 147331 - DNA, 1199 bp, Homo sapiens
ttttgtattttaggtagatatggggtcccaccgtgttagccaggatggtctcgaactcatgaccccgtgatccgcccgcctcagcctcccaaagtgctgggattacaggcgtgacacaccgcgcctggcccttcttgtacttttaaatctacctgtcccactgggagccagccatgttggacactgccttctcaggtcctatttctgctcttagggttcatgtgtgacttaaggcatagaaatgtgcctctatctttctgctgtgggaaagaaaattgtttgacaaatgtccttccttagggagataaatgacaaaataaaatcgatcattccgggggcccttaatacttctttccaaaacttgaggaaataccagttaatagggggttctccaggacatggggaataaggatgaaggaggttgaaacaaacgtaggaaagccctgttttcaaagcatggcattgatgccatcattgacttgacttgtcataattaatatgtgtccccattcataatcaacttgttaaaaggcaacataagccaagcatttttttatgccaaagtcatatatcttcttgatctgcctgacacaatatgtatgtgtgcatgtgtgtgtatatttatatatgtggctgtgtatatatatgtatatgtataaataaattcactttgcacagaaccaattatttttgttcactgactgttcaatattataggactggggtttctcttctcagctagagtctatttcttaaagaccagctcctctacgtctgcatgtgtgtgtatcactcacactaccacaatacaaattagacaaaatagatgcttaatggtgtaattcactttacaatggcactattattacagcattactctattttccattactaccgcatattagaatcggcttccaacatgtttgagtgaagaaataaaacaacctaatcacaatgccaattaattctgtaaaagtcatgcagtatatcaaaactaaaacatttcacagccatctcagaaagacaggattccatacttgcttcactatttttagccagctatgcctctactccttgaatactttgacctatcctagtccagttataagccaaaatcgataaaagaccctaagcaagtttaattgattctctaagaaaggatattataatccatcagcacaccctcaccttgtgctgac

SEQ ID NO: 147332 - DNA, 1404 bp, Homo sapiens
gggggttctgttccaagctgtgggggctttgttcttttgctcttcgaactaaatcttgctgctgcttactctttgggccttcgctacctttacgacctgtaacactcactgccaaggtgtgtagcttcactcctcaagtcagcgagaccaccaacccaccgggaggagctaacagctgtgctacccaccacctgtaagagctgtaacactcgctgcgaaggtcggccccctcacggggaggaagaaacaactcccgaccccccacctgtaagagcttaaccctcactgtgaaggtcggcggcctcacggggaggaagaaacagctcccgacgcgccacctgtaagagctttattggctcactgtgaaggtctgcggcctcaccgggaggaagaaacagctcccgacgcgccacctgtaagagctcactgagaaggtctccggcttcactcctgaagtcaggcaagaccacgaacccgccagaaggaagaaactccggacgtatctgaacatcagaaggaaccaattccggacacactgtttgcagggaggtgtagacgctgatcaccgtttccagtcattttaaaaattcaggttttatttatttactttttacagtagataggcccttcgggggttcaccccgccttcgccacagcccgcccagtgctcgcctctcttgctgcctcagagctccgcctttccttcccctcgcacacagccccgcccgctcccagcctggccccttgggttttccactgggggaagcacccccctccccggggggcccagggcacccaacacctgcttgcagaaccctgctttctgggatgcgcttctcattaccgggcaggttaagcatgttccgtacatttagcagtggtttttacttcttttccaggaagttatctggtgaatattttttgactccttttatcttagtttctcttgggcgtttcgctgccttctagtattttttttttaataggggaggcaggccttgttctgggctcagctttcccccgtttgttgttcgtctttggactttgccgtgtggggcctcctgacaatgacctccttaatcctttatgtcgtggaatgtgtcaatcctgactttatattttttgggtcttgtatcacagttcaaatggcctccccagaacaagatgatcttttctatactttaatgggttgatgaactttagacccggacaggcatttgaagacagtcatgaatttaagtataaatattagaaataggccaggctatagatagctcacacctgtaatcctagcattttggagaaccaaggtgggcaaatcccttgagctcaggtgtttgaaaccagcctagaccacacaccaagaccctgtatttacccacccaaaaaaaaaaaaaaaaaacc

SEQ ID NO: 147333 - DNA, 417 bp, Homo sapiens
  misc_feature (1)...(417): n = a,t,c or g
ttgacgacctgacgagacgctccgcacggnccaggagctgtgatgtggctgtggtctaggggaaatctgcctttcccatggagttgcgcagcacaaccgtggctccaattgccagaaggctctttttaatgctgaaccaaaatgtgccnnnnnnnnnnnnnnnggaaaggggggtaaattttggtgcccccggcgggggggaaggggcccaatttaatttaatggaacccagggcctccaggggcaaggggatttcccggcctaacccccccaagaggggggaaaaaggggcgggcgcaaccccccccagaaaatttggttttttaagaaaaaacggggtttcccattgtccaaagggggggtttaaaacccccccctggccccccaaaagggggggaataacgggggggacccccg

SEQ ID NO: 147334 - DNA, 1048 bp, Homo sapiens
  misc_feature (1)...(1048): n = a,t,c or g
gaatgccctgtcgccaattcgcgccagtctttcttgagctactctttcataatggaaatgaacttagtatcttgagagcttataacttggaaaatttaaatgagataatgcaggtgcaactgtgtgtccacaagtatggacatcaaatctgtgggaaaagaacaggtttgtattttcaggaaggagagaataacagtcttatagacagagggcacagctaagcacagctgccactgcaggagacaggccccatgtcaggatgccatagtgctgtggggagcacagtattacccagtgggtagggcttctgtcttccctgggagcagggatggtatcttagtcaatttttttcccttgagatgaggtctgtgcctgatgtacaacggatactccataaatgtttgacaaaccaacgaagaatgaaaaaaagcctagtcagactcccatcctaagtaggaactatctctttaacattcttgactcactatcactttacctcaaattgaacagattccatgacggaacttcattcttcacaaactagccagtgacatgtgggacagctctggccagggctctgggactgcagtgtacttgcgctctgcacggtccaggagctgtgatgttggctgtggtctaggggaatcctgcctgccccatggagttgcgcagcacaaccctggcttcaattgccagaaggctctttttaatgctgaaccaaaatgtgccnnnnnnnnnnnnnnnngaaaagggagttcccttttgggcccccggccgggaggcaagggccccaatcaaacaaaagggaacccccggcccccagggtaaagggaatcccccccccacccccccccaagacgggggaaaaagaggatggcccaaccaccccaattaatttgggattttnnnnnnnnnnnngggttccccctgtgacagggggggggtataaacccccaccccgaccccccaaagggggggaaaaaacggggggaacccccggaacccaccacagggccctctaaaagaggaaaaaaacagggctttggtg

SEQ ID NO: 147335 - DNA, 851 bp, Homo sapiens
ccagcctaggcaacagagcaagactccatctctaaaaaactaaaaacattagccagttgtagtggcacacacctatagttgcagctacatgggaggccagggcaagaggatcgcctgagcctaggagtttgaggcctgcagtgagcctacagactgcacccactgcactccagcccagtagattagaaatgtttgtgagaaggtacccttaatggatgggcaagatggaacagcagcctatagtaaatattccatagcagcactcctagaaataaaaactagatcttatgtggcagggcctgtgaaaatgccttttgtcaaaatttaaaattacagattaacacctatgaggctgacaggccacaggggttcacgcctgatgaaggccataaaccctgctctcaagtagctcacatcccagtgaaaggctcaaaccacaaacagggaagtacgtgagattaattcgttcaaggatcaaacaaatgacctcttttcacccgatgtccacatttccattaaatagtttgtagcagtgatactataaaatgtgagctttaaagaactctggtaacattttcaatctcttcctttctccgtactcttctatttccccccaatttctccaatccactcctaattttcacttgtatctttcttctacaaaaaacctaaatatgccaattttactcttcttccttccagttagtaaaatcacaatttgaaacaaaattataagttgtcacccaatatgaaaaatatgaaattcctgatgattcaagtagttttgatctataaaagcagcaattcctcgtgccaagcaaggcgtaatgatggtcataactgatggctcc

SEQ ID NO: 147336 - DNA, 1009 bp, Homo sapiens
  misc_feature (1)...(1009): n = a,t,c or g
aggcggatgggtctcctgagggtcaggagtctgagactaatctgggccacataagggaaccctgtattttccagaaattaaaaaaataggcccccatggtgggctgtgcccccaagttttaggtacttggtagggtgaggggggagggtccccttaacctaaggaggtcaggggttccattaaccaaaatcccccccctgttctcccgcctggggggccccattaaaccctttgtcaaaaaataagttttaaaaagtttgggnnnnnnnnnnnnncctcagaataagatgagagtaactagaattactatagtaaggggaccagaagaatggaagacctgggccaggaaaacttattttttttctttttgcttatataattttggtatatatccaatagtatcattaccggagaataagtgagccagagctagcaatcaataggatcttgatttttccatgtccccacaagtcatacgaaatctgctattgtttttttaaaatcatagtattaaatttgacatattttaaactcataacattcataaagcttttgtcaagaaataaagcttcaagttaatgttatttctggagttatgagtatatactcaagatctttttaaattcattattcacataggtcttattaacatgtcttgtatgcctagtttcctccaaaacaaaacctaacattactaaacagcacactaagattaaattcccccaaagcagccgggcgcggtggctcacgcctgtgatcccaaaattttgggaggcttaggcgggtggatcgcctgaggttaggagtttgagaccagctgctggtctcgaattcctggtctctcacctcggcccccgaaagtgctgggattacaggcacaagccaccgtgcctggcctgattcacagtttttcctttttgtttctggtttttacattaagttcgatgctaatatttaaatgaaacgattttacataaagtctcaaattgcagcttctcttgctttactg

SEQ ID NO: 147337 - DNA, 1490 bp, Homo sapiens
gctttttagcttagtatatctgtcatgaatttgtaggatgttccattgcatcagaaaacggacagtgatttgattactttctaatgccacagatgcagattacatgtagttattgagaatcctttcgaattcagtggcttaatcatgaatgtctaaatattgttgacattaggatgatacatgtaaattaaagttacatttgtttagcatagacaagcttaacattgtagatgtttctcttcaaaaatcatcttaaacatttgcatttggaattgtgttaaatagaatgtgtgaaacactgtattagtaaacttcatcacctttctacttccttatagatcgaacttttcagtttttgtagttcccaaacagttgctcaatttagagcaaattaatttaacacctgccaaaaaaaggctgctgttggcttatcagttgtctttaaattcaaatgctcatgtgacttttatcacatcaaaaaatatttcattaatgattcacctttagctctgaaaattaccgcgtttagtaattatagtgggcttataaaaacatgcaactctttttgatagttatttgagaattttggtgaaaaatatttagctgagggcagtatagaacttataaaccaatatattgatatttttaaaacatttttacatataagtaaactgccatctttgagcataactacatttaaaaataaagctgcatatttttaaatcaagtgtttaacaagaatttatattttttattttttaaaattaaaaataatttatatttcctctgttgcatgaggattctcatctgtgcttataatggttagagattttatttgtgtggaatgaagtgaggcttgtagtcatggttctagtgtttcagtttgccaagtctgtttactgcagtgaaattcatcaaatgtttcagtgtggttttctgtagcctatcatttactggctatttttttatgtacacctttaggattttctgcctactctatccagttgtccaaatgatatcctacattttacaaatgccctttcagtttctattttctttttccattaaattgccctcatgtcctaatgtgcagtttgtaagtgtgtgtgtgtgtgtctgtgtgtgtgtgaatttgattttcaagagtgctagacttccaatttgagagattaaataatttaattcaggcaaacatttttcattggaatttcacagttcattgtaatgaaaatgttaatcctggatgacctttgacatacagtaatgaatcttggatattaatgaatttgttagtagcatcttgatgtgtgttttaatgagttattttcaaagttgtgcattaaaccaaagttggcatactggaagtgtttatatcaagttccatttggctactgatggacaaaaaatagaaatgccttcctatggagagtatttttcctttaaaaaattaaaaaggttaattattttgactaaaaaaaaaaaaaaaaaaa

SEQ ID NO: 147338 - DNA, 400 bp, Homo sapiens
  misc_feature (1)...(400): n = a,t,c or g
agcggaaaccccggcaatttncaaangcccctacccacctangaacaacctttcccctncccttaaacacccccaatccacccatcaaaactcatttccccaaggactgtatttcccttaaaaaggttgttggcacagaatcctgggggtaatgcaaatcctttgggtaggtagttaagattgtggcttggaaaagcttccctaaatagggcttagaggactgtccacctcatctttcatattttgctgctaacaatctaatacttcagatgcagaaccttcagtgttttagggcctttgagctgctgacacacaatagtgcatcagagctgcctctcagtgctccggttacctacacagaagatgactgaaggaatgaaatgacgagttaattcccagg

SEQ ID NO: 147339 - DNA, 3662 bp, Homo sapiens
cgcttttttttttttttttgaagcgtacaagctattatatattttcataatatagaactttaaagtatagtaatcaacagtggcaaaatatttctgtctctgacattattatttgtgagatccaacctgtaattgagatcagagaaaacagtatgggaaaacaaatccatgagaacaggataaaaatatcatgaacagcaaaatatgtctgagtatttaaaactgtatagaaaaaataaattagatgaacaattgtgtaaatataaattaaaaaaagatgacatttcttaataaataaagtttactatttacatttttatatattgccaaaagatttaacttagatccataaaaacacataaacagaaaaaaaaataggagcagcaaatttatgcgcgtgaggtacagaaaaaggattggaattgtgtttagtttttggtgtttagattattttctttggggctttcttctttttctttttttttttcttttttacaatatggccagtagaattcttatgagaacagcttttaagcacttcaatggagtgtcatttttttggtagcttccagaaggtgccaaacaggtttcaacatcatattaattagaaatacccataataattataacaacaataaaaaggtataatatggtacataaatatgggaagagcagtttggtaaatatgaatacattttctctaggacgaggatcacagttttattttgtaaatattacatttaaggtatatatatacacacatatatggtacaactattatatacatgtggcatattatatggtaaatttatatttatatataatatctttatataggataggatatcctggcagacagggttattggattataggagaccccaagaaaagccaactcaaataattggttccaaagtttccccctcactgactgcctggtgtgtagtttaaagaagccccccatttggtttgcacctccagaatgcccttatccttccttttaatgggaacacttgatggtgggaattttaagtctgagaaagtgaggtgcccttctgaaagaagagatttttagagactcccttcccctataagttggaaatgacccagaagtcttaagtagacgacagttagctgactttgacattgtaggacgtaatcagcttttaaccaaattatagaactggtaaagggtaagatcaaatttgccaaaaaaataaaatattctccaatacaggtctctcttttaaggtggactaccaattcaggagctccggcttaatcccttggaaataatcaaaacaagccactcccctgtcttgtcctttcctaaaaaaaggccgatgggccctgtgcaatccttgaataaataaaccccatgggactttgtgtccaagcgttggcccctcacagccccacctaaaacctccagggccctccaaaatctccctgcccccccccactgtgaggtaggtatatagtattatcccccatttggccagcctagagaaactgatgccaaatgtaagaggcaattggaataacttgttccaagaatcactgaagcaaactgcctgccccggagtcaaaaattcctaacttcctgtacatacagggacataatttctcttttggctattatacatttcttttaaaaagccaagtgattggtaggaatttggcaaaagttggaataagttacaaagaacaggcttttattcatttggctatttggttcttatgtttcttgtttacttcgtttgatttgtttctcaaaactcactcagtgggattacctgtctgtcatgtagcagctttttaaaaaactggactgtgcagtgtggttctgagtgcagtctttataaagcccagtgctgtactggtaaatataaacattttataacgtgaaaagcacaacgacacaatatgtccccttaatagctggaaaaaccaatataagccctcccactccctactaccactgattgccaccaaacaaataaacaaaatggccccacccccaccccaacaacaacaataacacatcaagggggaaaatgtccatattcccccgggaccctacccacaatgtacagaaaataacagacagtgttatcaaatccccactctatgtccttcctagggaaatctttatgtttgtgtctacctactgagtctgtagaataaacaatttcctttaggaaacataaaaataggttttttattcttagtttttaatcatgcatttttatttccttttaatctctttgtcttctattatctctatctgtacagctttgtcaccatttttttttattttctcacttgaagtagttccagaaaaaaacacaaaacctcaaaactgttaacttgaccttataatttcctttctctttctttctttctttctttttctttctttcacacagggtaaggacctataacaacaaattggacaattacaaccaaggtttaaatcgaaccggggggaggggagggtaggctggaaatctggtctcaaagggattatttttcaaccaaatagtatttaaggcattggcccaggatggggaataagacccaagagaacccgtcctaggcaagtgaactcaaatgtgttgaaagcccaggagtggcaagctgaataccctggcatttttcaaaggccctacccatcctatgaacaatctttccccttcccttaaacacccccaaatccacccatcaaaacctcatttcccccaaggaactgtaattccccttaaaaaggtttgttgggccacaagaaatcctggggggtaaatgccaaatccctttggggtagggtaggttaaggattgtgggccttggggaaaagctttcccctaaaataggggccttaagaggactgtcccacctcatcctttccatattttgcctgcctaacaatcctaatacttcagatgcagaacctcccagtgtttatagggcctttgaactgctgaacacacaaaagtgcctcaagagctgccctcctcagtgctccggtcacctacacagaagatgactgaaggaattgaaatgacgaagttaaatcccccgggaagaaaatgaaactggggaaacaaaatgcattgcccccaaaattgagctgacccctccctcccaacctaaggtttgaaaaaagaccccctattaaaagaatacccttccccatgtggggcacgaggttggcccacccaatcaaagtagccctcttttgccctaatatcccttggcaaatataaatttgttagcaacaggtctgaatgaaagagactgggtgggtcttgattcagaagagctgaattcactctgtgatgtctgaagatacaagtcagcctcccaggaatctttgcttagctggatagtgtgaaaatagatgatgatgggagtgaagatagaaagaggataaggactgatttgagggaagctggtaaggttcttctgtggctcctgaaatcacatcattagtaatgtcatctttgggtcttcagagctttttgtattacctatgggtataattaagcaactgggagggttgatactgttacatttcttagcttgtaccttctaaggtagttaacaccacacaggctgataactcagggcaagagagaggcctggagagttgacaagagtgt

SEQ ID NO: 147340 - DNA, 410 bp, Homo sapiens
tttttaactaaaaagtaaactttaatgtcgaaagtgcaaacttggggaaggcagaaaacatcacacacaaggctgtcacttcacacttggaaggttgcacagcggccgggcagaggcgctcctcacttgccagacggggtggcggccaggcagaggtgctcctcactttccacacggtgtgtgtgttgtcatcatgtttcaccccaaccaaaccttgggtgggcagcctctgtaggggaccactcacagctggcctgtagtcacggtcccctgcagagcccttcctaaggtccacctgggctgagactcagaatggacgttcaaaacaaagagatggagctgtgagtgacaccgggccccacgggccgtctgtcaaccaggccttggccctagtccatcgggcactcacc

SEQ ID NO: 147341 - DNA, 1752 bp, Homo sapiens
  misc_feature (1)...(1752): n = a,t,c or g
gcgagtcggagcatccagctgggagccagtgagggtgtggcctccaggaggctgcggaacctgggaactctgcggagacctcgcttggtccttgctttcacaggaaaagcaccagaaagccctagccctgtgggaatcagccctgagggggttccagaagcggcgactagataaagtccgacggaaaaaggaggaaaaggcggcagacaggctggagcaggagttgctccgagacacggtgaagtttggtgaggttgtcctgcagcccccagagctgactgccaggccccagaggagcgtaagcaaggaccagcctggcaggagatcgcagatgctgcggatgcttctgagccccggtggtgtgtcccagcctctgaccgcctccctggcccgccagcggattgtggaggaggagagagagcgggccgtgcaggcctacagagcgttgaagcagcggcagcagcagctgcacggggagcgaccccacctcacttcccggaagaagccagagccgcagctgtgatggagagacacccggggcctggccacgctctggggcaactggcaccaggagctgctacacctgggtaggagagaggcaggccatgccagcagtgtggggtgaggcctccagctacttgttcacacgttgggcactagtgggtccacatcttgcagggggtgagtgcccgatggactatggccaaggcctggttgacagacggcccgtggggcccggtgtcactcacagctccatctctttgttttgaacgtccattctgagtctcagcccaggtggaccttaggaagggctggatccctgtccctgaacaccaaataccgagacagctgatgaggctggctcagtgtgtgacggaggcccccgggagtcagcagagccgagcgtacagtgcacatcaggcagagcaggccacgggcagggacgacgcatcgggacagggctctgcaggggaccgtgactacaggccagctgtgagtggtcccctacagaggctgcccacccaaggtttggttggggtgaaacatgatgacaacacatacacttaagaaggtgggaaccgggggccgggcgcggtgggctcacacctgtaatgccagcactttgggaggctgaggctggtggatcacctgaggtcaggagttcgaaaccagcctggccaacatggtgaaactgcatctctactaaaaatacacgaagaaaaaaaaaacagttgggaacagagttgtcaccttacctaacagggcttctgagagagccgggaggcccaaagtggctggaagaaggttaaggaaaaattcctgtcttgggctcaaggtcacagagtggggcccagggggaggttcctgctgagggcagggcctttgccaaggccttcaagtctcccagtgcccaaaggaggaaatgcccaaggctgtcaagcatttccagatgagatcagtcggggagaaactttaaaccccaagtcacacatccaacaatggaagtccgacagcccagcaccatcttgggaactgagaagcacctctgcccggcccccacaccgtgtgggaaagtgaggagcacctctgnctgggccgccaccccgtctgggcaagtgaggagcgcctctgcccggccgctgtgcaaccttccaagtgtgaagtgacagccttgtgtgtgatgttttcttgcctttccccaagtttgcactttcgacatttaaagttttacttttttagttaaaaaaaaaa

SEQ ID NO: 147342 - DNA, 393 bp, Homo sapiens
  misc_feature (1)...(393): n = a,t,c or g
cgtcatgcgaattaaaaaattctaacttcccaactgttcaatggttcaaaaagcaattaaatgtgaccattcagttttacgnnnnnnnnnnnnnnnnnnnnnnnnnnnnnnnnnnnnnnntcgagaactgtgacaaaaggattcaccagattaatcgtgtgactgtgttataaaagataatgaaatctcaaacctgaggtgtcctattcaagtattaaaaaaatgcgtaacatcgtatgatcccattcgattttcatcatcataagcaatcattctctgaactgcaggttctggagtcagtgaaattaatgcctggggcacaaaatattctacaaaaatcggtttgtcctttctagcagggcagtcgcttgctccttatttcttttaaaaaac

SEQ ID NO: 147343 - DNA, 446 bp, Homo sapiens
  misc_feature (1)...(446): n = a,t,c or g
gctgttgtagatctgccatgacgccgtggatcgaccgcgatttgccgggtcgacccacgcgtccggaacctgcagttcagagaatgatttcttatgatgataaaaatcgaatgggatcagacgatgtttgcatttttttaatacttgaataggacacctcaagtttgagatttcattttcttttagaacacagtcacaagattaatctggtgaatccttttgtcacagttctcnnnnnnnnnnnnnnnnnnnnnnnnnnnnnnnnnnnnnnnnnnnnnaaactggtcacatttaattgctttttggaccattgaatagttgggaagtaagaattttttaattggcatgagacggttcctcaactgttaaattaaccaactttgacctgtctttagaaaaaggcttatttgtatgattttgggctaactccccggggaccatattaa

SEQ ID NO: 147344 - DNA, 369 bp, Homo sapiens
  misc_feature (1)...(369): n = a,t,c or g
cccggggagttagcccaaaatcatacaaataagcctttttctaaagacaggtcaaagttggttaatttaacagttgaggaaccgtctcatgccaattaaaaaattcttacttcccaactattcaatggtccaaaaagcaattaaatgtgaccagtttnnnnnnnnnnnnnnnnnnnnnnnnnnnnnnnnnnnnnnnnnnnnngagaactgtgacaaaaggattcaccagattaatcttgtgactgtgttctaaaagaaaatgaaatctcaaacttgaggtgtcctattcaagtattaaaaaaatgcaaacatcgtctgatcccattcgatttttatcatcataagaaatcattctctgaactgcaggtt

SEQ ID NO: 147345 - DNA, 1744 bp, Homo sapiens
  misc_feature (1)...(1744): n = a,t,c or g
cctccctccgtgagccaaacttacggctgggaagataggctccacttacattcactggatagtatactcccacacggagtattcataaatgcggagcctgtgattgcacgccttgctgccaacaactaggaatacccatgccccactgtgttcacaaggcaaaactcatgaagccaaccagacctactgctctccattctacttttacctgagccaaacagtatatgctgcagagagaacaagttttttggagagagtaaaaaactctgtttacatatgcctcctccgtgaggaggagcgacaatgtataaaactgactgcttctcgccagcctcagacaagaagagtgagttgctggtactcgctactcttttacttcttttgtaaagtattgactcttggaaggctacagtatacaaagtctcaacatgttttttaaaagaaataaggagcaagcgactgccctgctagaaatcacaaaccgatttgtgtagaatattttgtgccccaggcattaatttcactgactccagaacctgcagttcagagaatgatttcttatgatgataaaaatcgaatgggatcagacgatgtttgcatttttttaatacttgaataggacacctcaagtttgagatttcattttcttttagaacacagtcacaagattaatcctggtgaatcccttttgtcacagttctccgttgtgtgtgtgcgcgtctcccgtgtgtgtgtgtgtgcatgtgcatgtgtgtaaaactggaatggtcccatttaaattgccttttggaccattgaataagttgggaaagtaaagaatttttttaattggcatgagacggttcctcaactgttaaattaaccaactttgacctgtcctttagaaaaaaggcttaatttgtaatgattttnggggctaactccccggggggaccatattaaaatggaccaaaaatggctcccttggggtgacacacccctgacaaagtattttgctgtttacggaacataaacgcccacattcttaatatcctaatatttttgacccagtgatgttttatggctgtcatctggaaccctaggggaaggcagtgttcagagggaaaccttgggtgttcacatgtgtctttggccaaaaggggttaccatgatcgagggtcatgtgaccaaaagatgctccagagaagcttgdagaatttgttttcaagttgggaggagggttggagatacaaaaatcactctgctctacaggactcttcagctgtctatgcaagaaattccgttttctctttcagcacctggaaagaccacagccagccccactgaggcgataggtgattccactaagcacaagaggaatgttttcctaaagcaaggcgtcccttgcctctcaaacaaatggccctccaagtttgttaagggtttctattcctgcaacttgtggtatcaaaaccacttcctggaattgtcaaagcactgcccaaaataaatgtttttccccccttctaagaaaaaaaaaatgacagtgctcatatttgacacttgtgtattggactctcttttgaatgaataaaaaggaaaaggggttttggtgtaattcctgatggggggcgtgttgttttttcatgcccatggtttgtgaattttaattgtggtttcccatttcgttgttgtaactgggcagaaattaaaaaagaaaaatcaataaaaatccaaagaaatggttaaaaaaaaaaaaaaaaaa

SEQ ID NO: 147346 - DNA, 892 bp, Homo sapiens
  misc_feature (1)...(892): n = a,t,c or g
ttgtgacctgttcacgcaggggaaacttgaacattcgcaggtatgtgaagatcatgattcataagcattttctccctgcaagcaaaacagtttattttggtgtgaactcatgtggttttatgaaatctatgttgccagttgatttttctgccccctgttactgtagaacaggcgttgacaaactgtagcataaatggttgcttgattttgtaaacaaagttttactacaatacagacatatccatttgtttacagattgtctgtgggttgcccggggacttattaagggacagagtttagttgtttacaacagagactatatgggtcccttaaagccctaaactatttattatttagccctttaagaaaaagtttgccaactcctactataggcaaactaaacttcaaattgtatttagaaataaacttgccagaaccacagttgttttgcaaatagggcttctaaagagaaacccaggaaagtcaagacctgtgtcataatgctgacctagcaagtaaatatttgcaatatgcatagtggtatgattgattactaatacaaggttactgaaatttgggggggggnaaaaaanaangnctgtaaatggcagtccagcttctttatcttttcttttctttcattcatttattctctgtctttcacactgactctcatttctctttctcttttttgctttctcactgggtgtaggcgttcattcagtggtaggatgttattactattattggattctctaaaggttttataggctgggcgtggtagctcacacatgtaatctgaacactttgggaggccgaggtgtgaggatcgctggaggccaggagtgcctaaccagcttgggcaatatagtgaggccccattaaaaaaaaa

SEQ ID NO: 147347 - DNA, 15999 bp, Homo sapiens
  misc_feature (1)...(15999): n = a,t,c or g
gcacaatgaagtgggtaacctttatttcccttctttttctctttagctcggcttattccaggggtgtgtttcgtcgagatgcacgtaagaaatccatttttctattgttcaacttttattctattttcccactaaaataaagttttagtaaactctgcatctttaaagacttattttggcatttatttctaaaatggcatcgtattttgtatttgtgaagtcttacaaggttatcttattaataaaattcaaacatcctaggtaaaaaaaaaaaaaggtcagaattgtttagtgactgtaattttcttttgcgcactaaggaaagtgcaaagtaacttagagtgactgaaacttcacagaatagggttgaagattgaattcataactatcccaaagacctatccattgcactatgctttatttaaaaaccacaaaccctgtgctgttgatctcataaatagaacttgtatttatatttattttcattttagtctgtcttcttggttgctgttgatagacactaaaagagtattagatattatctaagtttgaatataaggctataaatatttaataatttttaaaatagtattcttggtaattgaattattcttctgtttaaaggcagaagaaataattgaacatcatcctgagtttttctgtaggaatcagagcccaatattttgaaacaaatgcataatctaagtcaaatggaaagaaatataaaaagtaacattattacttcttgttttcttcagtatttaacaatccttttttttcttcccttgcccagacaagagtgaggttgctcatcggtttaaagatttgggagaagaaaatttcaaagccttgtaagttaaaatattgatgaatcaaatttaatgtttctaatagtgttgtttattattctaaagtgcttatatttccttgtcatcagggttcagattctaaaacagtgctgcctcgtagagttttctgcgttgaggaagatattctgtatctgggctatccactaaggtcgtcactggtcacatggctattgagtacttcaaatatgaccagtgcaactgagaaacaaaaacttaaattgtatttaattgtagttaatttgaatgtatatagtcacatgtggctaatggctactgtattggacagtacagctctggaacttgcttggtggaaaggactttaatataggtttcctttggtggcttacccactaaatcttctttacatagcaagcattcctgtgcttagttgggaatatttaatttttttttttttttaagacagggtctcgctctgtcgcccaggctggagtgcagtggcgcaatctcggctcactgcaaactccgctcccgggttcacgccattctcctgcctcagcctcccgagtagctgggactacaggcgcccgccatcacgcccggctaatcttttgtatttttagtagagatggggtttcaccgtgtgccaggatggtctcaatctcctgacatcgtgatctgcccacctcggcctcccaaagtgctgggattacaggagtgagtcaccgcgcccggcctatttaaatgttttttaatctagtaaaaaatgagaaaattgtttttttaaaagtctacctaatcctacaggctaattaaagacgtgtgtggggatcaggtgcggtggttcacacctgtaatcccagcactttggaaggctgatgcaggaggattgcttgagcccaggagtacaagaccagcctgggcaagtctctttaaaaaaaacaaaacaaacaaacaaaaaaattaggcatggtggcacatgcctgtagtcctagctacttaggaggctgacgtaggaggatcgtttggacctgagaggtcaaggctacagtgagccatgattgtgccactgcactccagcctgggtgacagagtgagactctgtctcaaaaaagaaaaaggaaatctgtggggtttgttttagttttaagtaattctaaggactttaaaaatgcctagtcttgacaattagatctatttggcatacaatttgcttgcttaatctatgtgtgtgcatagatctactgacacacgcatacatataaacattagggaactaccattctctttgcgtaggaagccacatatgcctatctaggcctcagatcatacctgatatgaataggctttctggataatggtgaagaagatgtataaaagatagaacctatacccatacatgatttgttctctagcgtagcaacctgttacatattaaagttttattatactacatttttctacatcctttgtttcagggtgttgattgcctttgctcagtatcttcagcagtgtccatttgaagatcatgtaaaaattagtgaatgaagtaactgaatttgcaaaaacatgtgttgctgatgagtcagctgaaaattgtgacaaatcacttgtaagtacattctaattgtggagattctttcttctgtttgaagtaatcccaagcatttcaaaggaattttttttaagttttctcaattattattaagtgtcctgatttgtaagaaacactaaaaagttgctcatagactgataagccattgtttcttttgtgatagagatgctttagctatgtccacagttttaaaatcatttctttattgagaccaaacacaacagtcatggtgtatttaaatggcaatttgtcatttataaacacctctttttaaaatttgaggtttggtttctttttgtagaggctaatagggatatgatagcatgtatttatttatttatttatcttattttattatagtaagaacccttaacatgagatctaccctgttatatttttaagtgtacaatccattattgttaactacgggtacactgttgtatagcttactcatcttgctgtattaaaactttgtgcccattgattagtaacccctcgtttcgtcctcccccagccactggcaaccagcattatactctttgattctatgagtttgactactttagctaccttatataagtggtattatgtactgtttatctttttatgactgacttatttcccttagcatagtgcattcaaagtccaaccatgttgttgcctattgcagaatttccttcttttcaaggctgaataatattccagtgcatgtgtgtaccacattttctttatccattaatttgttgattgatagacatttaggttggttttctacatcttgactatcatgaatagtgttgcaatgaacacaggagagctactatctcttagagatgatatcatggtttttatcatcagaaaacacccactgatttctatgctaattttgttacctgggtggaataatagtacagctatatattcctcattttagatatctttgtatttctacatacaataaaaaagcagagtacttagtcatgttgaagaactttaaacttttagtatttccagatcaatcttcaaaacaaggacaggtttatctttctctcaccactcaatctatatatacctcttgtgggcaaggccagtttttatcactggagcctttcccctttttattatgtacctctccctcacagcagagtcaggactttaactttacacaatactatggctctacatatgaaatcttaaaaatacataaaaattaataaattcbgtctagagtagtatattttccctggggttacgattactttcataataaaaattagagataaggaaaggactcatttattggaaagtgattttaggtaacatttctggaagaaaaatctctatatcttaatagtcacttaatctatgatggattgtgttactcctcagttttcaatggcatatattaaaacatggccctctaaaaagggggcaaatgaaatgagaaactctctgaatgtttttctcccctaggtgaattcacctgctgcttagaagcttattttctcttgatttctgttataatgattgctcttaccctttagttttaagtttcaaaataggagtcatataactttccttaaagctattgactgtctttttgtcctgttttattcaccatgagttatagtgtgacagttaattcttatgaaaattatatagagatggttaaatcatcagaaactgtaaaccaacgattgggaggggaagcggatttttaaatgatttcctgaccaagcttaaccagtatattaaatcctttgtactgttctttggctataaagaaaaaaggtactgtccagcaactgaaacctagctttcttccatttagcataccctttttggagacaaattatgcacagttgcaactcttcgtgaaacctatggtgaaatggctgactgctgtgcaaaacaagaacctgagagaaatgaatgcttcttgcaacacaaagatgacaacccaaacctcccccgattggtgagaccagaggttgatgtgatgtgcactgcttttcatgacaatggagagacatttttgaaaaagtaagtaatcagatgtttatagttcaaaattaaaaagcatggagtaactccataggccaacactctataaaaattaccataacaaaaatattttcaacattaagacttggaagttttgttatgatgattttttaaagaagtagtatttgataccacaaaattctacacagcaaaaaatatgatcaaagatattttgaagtttattgaaacaggatacaatctttctcaaaaatttaagatagacaaattctttaatgtattccgcagatatgtatatatggttgttataattgatttcgttttagtcagcaacattatattgccaaaatttaaccatttatgcacacacacacacacacacacacacttaacccttttttccacatacttaaagaatgacagagacaagaccatcatgtgcaaattgagcttaattggttaattagatatctttggaatttggaggttctggggagaatgtcgattacaattatttctgtaatattgtctgctatagaaaagtgactgtttttcttttttaaaatttagatacttatatgaaattgccagaagacatccttacttttatgccccggaactccttttctttgctaaaaggtataaagctgcttttacagaatgttgccaagctgctgataaagctgcctgcctgttgccaaaggtattatgcacacgaatagaaaaaaagagtttattatccaacctgattttgtccattttgtggctagatttagggaccctgagtgtctgatacaaactttcccacatggtcaaaaaagccttccttttatctgtcttgaaaatctttcatctttgaaggcctacactctcgtttcttcttttaagatttgccaatgctgatctgtcagaggtaatcactgtgcatgtgtttaaagatttcaccactttttctgctggtgatcactatagtgaaatactgaaacttgtttgtcaaattgcacagcaaggggacacagttcttgtttatcttttcatgataatttttagtagggagggaattcaaagtagagaattttactgcatctagatgcctgagttcatgcattcattccataaatatatattatggaatgctttattttcttttctgaggagtttactgatgttggtggaggagagactgaaatgaattatacacaaaatttaaaaattagcaaaattgcagcccctgggatattagcgtactctttctctgacttttctcccacttttaaggctctttttcctggcaatgtttccagttggtttctaactacatagggaattccgctgtgaccagaatgatcgaatgatctttccttttcttagagagcaaaatcattattcgctaaagggagtacttgggaatttaggcataaattatgccttcaaaatttaatttggcacagtctcatctgagcttatggaggggtgtttcatgtagaatttttcttctaattttcatcaaattattcctttttgtagctcgatgaacttcgggatgaagggaaggcttcgtctgccaaacagagactcaagtgtgccagtctccaaaaatttggagaaagagctttcaaagcatggtaaatacttttaaacatagttggcatctttataacgatgtaaatgataatgcttcagtgacaaattgtacatttttctgtattttgcaaagtgctgtcaaatacatttctttggttgtctaacaggtagcactctaatagaggtcaaaatcagaatatcaatgacaatttgacattatttttaatcttttcttttctaaatagttgaataatttagaggacgctgtcctttttgtcctaaaaaaagggacacatatttaagttctatttatttataaaatcttggactcttattctaatggttcattatttttatagagctgtaggcatggttctttatttaattttttaaagttatttttaatttttgtggatatagagtaggtatacatatttacggggtatatgagatattttgatctaagtatacaacatatataatccctttatttaattttatcttccccccaatgatctaaaactatttgcttgtccttttctgtcttatagttaaattcagtcaccaactaagttgaagttacttcttatttttgcatagctccagctctgatcttcatctcatgtttttgcctgagcctctgttttcatattacttagttggttctgggagcatactttaatagccgagtcaagaaaaatactagctgccccgtcacccacactcctcacctgctagtcaacagcaaatcaacacaacaggaaataaaatgaaaataatagacattatgtatgctctctagaaactgtcaattgaactgtatttgctcatcattcctaccatctacaccaccaaaatcaacccaatttatgaaaaaaaaaccgccccaccatacaattctacacagataaacaggctatgattggttttgggaaagcagtcacctttacctgatttaggcaactgtgaaatgactagagaatgccgaaaattagacgtttacatcttgtcatagactttgcagatagtgctggatctttctttttataagtaagatcaataaaaactccctcattctgtagaagttatgatttcttttctaagagacctttagaagtcagaaaaaatgtgtttcccttgcgaaaaaagataactggagtttgtgtagtacttcccagattataaaatgcttttgtatgtattatctaatttaatcctcaaaacttcttcaatttagcatgttgtcatgacactgcagaggctgaagctcagagacgctgagccctctgctaacaagtcctactgctaacaagtgataaagcccgagctggaagtcacatctggactccaaacctgatgcttctcagcctgttgccccttttagagttcctttttaatttctgcttttatgacttgctagatttctacctaccacacacactcttaaatggataattctgccctcaggataagtgattaccatttggttcacaactcgaactaatgaattttaaaaattatttctgtatgtccattttgaattttcttatgagaaatagtatttgcctagtgttttcatataaaatctcgcatgataataccattttgattggcgattttctttttagggcagtagctcgcctgagccagagatttcccaaagctgagtttgcagaagtttccaagttagtgacagatcttaccaaagtccacacggaatgctgccatggagatctgcttgaatgtgctgatgacagggtaaagagtcgtcgatatgctttttggtagcttgcatgctcaagttggtagaatggatgcgtttggtatcattggtgatagctgacagtgggttggattgtcttctgtgctttcgtctgtcctatcttcaatctttccctgcctatggtggtggtacctttctgtttttaacctgctataaattaccagataaacccattcactgatttgtaactcctttcagtcatgctctaactgtaaatgaaggcttaaactgaagtagaacagttacaaggttttacttggcagaacatcttgcaaggtagatgtctaagaagatttttttttctttttttaagacagagtttcgctcttgtttcccaggctggggtgcaatggtgtgatcttggctcagcgcaacctctgcctcctgggttcaagtgattttcatgcctcagcctcccaagtagctgggattacaggcatgcgccaccacacctggctaattttgtatttttagtagaggcggggtttcaccatattgtccagactggtctcgaactcctgacctcaggtgatccacccgccttggcctcccaaagtgctgggattacaggcatgagccaccttgcccagcctaagaagattttttgagggaggtaggtggacttggagaaggtcactacttgaagagatttttggaaatgatgtatttttcttctctatattccttccctaaattcactctgtttgttagatgtgcaaatatttggaatgatatctcttttctcaaaacttataatattttctttctccctttcttcaagattaaacttatgggcaaatactagaatcctaatctctcatggcactttctggaaaatttaaggcggttattttatatatgtaagcagggcctatgactatgatcttgattcatttttcaaaaatcttctatattttatttagttatttggtttcaaaaggcctgcacttaattttgggggattatttggaaaaccagcattgagttttaatgaaaaaaacttaaatgccctaacagtagaaatataaaattaataaataactgagctgagcacctgctactgattagtctattttacttccgtgggaatgtttttgtagtcctatctccatctccaggtttaggagcaaacagagtatgttcatagaaggaatatgtgtatggtcttagaatacaatgaacatgttctgccaacttaataaaggtctgaggagaaagtgtagcaatgtcccttcgtgttgaacaatttccaccaacttacttataggcgccccttgccccgtatatctgtgaaaatcaagattcgctctccagtaaactgaaggaatgctgtgaaaaacctctgttggaaaaatcccactgcattgccgaagtggaaaatgatgagatgcctgctgacttgccttcattagctgctgattttgttgaaagtaaggatgtttgcaaaaactatgctcaggcaaacgatgtcttcctgggcatgtacgtagataagaaattattcttttatagctttggcatgacctcacaacttaggaggatagcctaggcttttctgtggagttcctacaatttccctgctgcccacaatgtttcttcctccttccctttcccacgctttcccaatttttgacatcgttaattcgttgaatacattgtcataacataatacatgttcacggcaaagctcaacattccttactccttaggggtatttctgaaaatacgtctagaaacattttgtgtatatataaattatgtatacttcagtcattcattccaagtgtatttcttgaacatctataatatatgtgtgtgactatgtattgcctgtctatctaactaatctaatctaatctagtctatctatctactctatgcaatgatagcaaagaagtataaaaagaaatatagagtctgacacaggtgctttatatttggtgaaaagaccagaagttcagtatcctggcaatatggtaggcaactcaattacaaaataaatgtttacgtattgtcagaagttgtggtgataaactgcatttttgttgttggattatgataatgcactaaataatatttcctaaaattatgtaccctacaagatttcactcatacagagaagaaagagaatattttaagaacatatctctgcccatctatttatcagaatccttttgagatgtagtttaaatcaaacaacctgttaataaaaataacaagtatcattcatcaaagacttcatatgtgccaagcagtgtgtgttttgtgtagattatgtcatatagttctcataatccaccttccgagacagatactatttattttttgagacagagttttactcttgttgcccaggctggagtgcaatggtgccatctcggctcactataaccttcgcctcccaggttcaagcgattctcctgcctcagcctcctgggattacaggcatgcaccaccatgcctggctaattttgtatttttactagagatggggtttcaccatgttggtcagactggtctcaaactcctgacctctggtgatatgcctgcctcagcctcctaaagtgctgggattacaggcatgagccactgtgcccagccgacagatactattattatttccattctaccgagaaggagactaaggctctgatcatttaaataagttgcctaaggtgatgcagtgatataagtagcagagctaggaattgagccttggtaactttaactctggaccccaagtccttagctactaagctttactgcatggggtttagtcaaattaagacttttggaatatgcgttacttttgagattagctttgtgatattttttgtgctcatttgtccaacaaagtctattttattttcatcttaattcgctttttgtatgaatatccaagaaggcatcctgattactctgtcgtgctgctgctgagacttgccaagacatatgaaaccactctagagaagtgctgtgccggtgcagatcctcatgaatgctatgccaaagtggtaggtttattgttcgcaaaaaatgtagttctttgactgatgattccaataatgagaaagaaaaataatgcaagaatgtaaaatgatatacagtgcaatttagatcttttcttgagatcgtttcaattctggaatcttaaacatgaaagaaaaagtagccttagaatgattaacaaaatttagactagttagaatagaaagatctgaatagagcaatctctacacacttttgatctttttttctctttttcacaatcctgagaacaaaaaaaaattaaatttaaatgttaattagaagatatttaacttagatgtaaagtgagttaacctgattccaggattcatcacgtactagaattagtatcttatggtaaattatagaacctatccctttagaatattttcaaatctttttgaggatgtttaggaatagttttacaagaaattaagttaggagaggaaatctgttctggaggatttttagggttcccactagcatatgtaatggtttctgaactattcagaatcagagaaaactcatttttcctgctttcaagaagctactgtatgccaggcaccatgcacaaacaatgaccaacgtaaaatctctcattttggagagcctggaatctaactggaaaggtgaactaataataatactatgtacaatcatagccatcatttattaaacttttcttctatgcaaggcactgtttaatttccttagcttacctggtttacagagcagctctatgagatgagtgccatctttgcccctattttagggataaggattccgaaatgtggagatggtaagtcaaattgcacaactgaagcatgacttacatgacttggctcaaatactggtcattgaactccagagcctgaatattcttaaccacttacatgatgcaagctgaccaaataaatagttcgaatgtattgtgacagagcggcattgatattcatctattcatgtggctttgagtaggaagaagaaaggatatcattctgaccagagcggtgaaaaacaacctgcatctgatcctgaggcataatactattaacacaattcttttatgtttcagttcgatgaatttaaacctcttgtggaagagcctcagaaatttaatcaaacaaaattgtgagctttttgagcagcttggagagtacaaattccagaatgcgtaagtaatttttattgactgattttttttatcaatttgtaattatttaagacttaatatagagccacctagcatagaacttttcagaatgaaaatacattgcatatttctaatcactctttgtcaagaaagataggagaggagagataaaatagttgatggggtggagaggtctatatttgwatgtagtctaaaaattgttctcttaagattggaagtatgtaggctgggagggtaaataccaaatcttggtatatcagaactgagcatgtcccttgacggttaagaaatagttaatgggcaaatagagcatggcaatattttgtagagcagcaagtagtaggccttgaatagatgtcgctcaaaaagtaatatgtaagctgaacacaaaaatgtaacaaatgaatttagatacatatttgaatattaaattcaggttgtttgggagatgcacctagtctttgatggttaaacctttccctccatagaagagacagagacagaatggcttgctggactaatgtcccaattcaatagagtcttatctacgaaggttaaaaacaagaagagacatattatacagtagatatttcttgtgtggctcatacacatggtgctcttctgattatggattttagagataataacagtgaacaagacatagtttctttcctcgagtagattaaagtcctacattgacttttaatggtgactggcattcttaatacatgattattatatattaggtactatgtcacattaattataatactttactatttttaatttaacccttgaactatccctattgagtcagatatatttccttccattttctacttgtatctttcaagtttagcatatgctgatacatatgaagctctctccaggttttattgaaagaagaaattaatcaatttattactgtccctgaattaggcaactcactttcccaagattatgcccgtggtacaggtggaactcaaagccaagtttaactagttgttcaggagaatgttttctaccctccactaacccactactctgcagatggagataatatgatgaatggaacatagcaacatcttagttgattccggccaagtgttctctgttttatctactatgttagacagtttcttgccttgctgaaaacacatgacttctttttttcaggctattagttcgttacaccaagaaagtaccccaagtgtcaactccaactcttgtagaggtctcaagaaacctaggaaaagtcagcagcaaatgttgtaaacatcctgaagcaaaaagaatgccctgtgcagaagactatgtgagtctttaaaaacatataataaattaataatgaaaaaattttccctttagatattgctaatgctacctttcataagcagaaggaagtaatgtgtgtgtgtgcatgttttgtgcatgtgtgtgtgcatgcacgtgtgtgtatgtgtgatattggcagtcaaggccccgaggatgataattttttttttttttttgagacggagtctcgctttgttgtccaggctggagtgcagtggtgccatctcggctcactgcaacctccgcctcccaagttcaagccattctcctgcctcagcctcccaagtagctgggactacaggtgcatgccaccatgcctggctaattttttgtatttttagtagaaaattttcagcttcacctcttttgaatttctgctctcctgcctgttctttagctatccgtggtcctgaaccagtttatgtgtgttgcatgagaaaacgcccagtaaagtgacagagtcacccaaatgcctgcacagaaccctgggtgaaacaggccgacccatgcttttcagcctcnggaagtcgatggaaacataccgttccccaaagagtttaatggctgaaaacatttcacccttcccatggcagatatatggcacacctttcctgagaaaggagagacaaatcaaagaaacaaacgtgaggagtatttcattactgcatgtgtttgtagtcttgatagcaagaactgtcaattcaagctagcaactttttcctgaagtagtgattatatttcttagaggaaagtattggagtgttgcccttattatgctgataagagtacccagaataaaatgaataactttttaaagataaaatcctctgttataatattgctaaaattattcagagtaatattgtggattaaagccacaatagaataacatgttagaccatattcagtagaaaaagatgaccaattaactgataaatttgtgcacatggcaaattagttaatgggaaccataggagaatttatttctagatgtaaataattattttaagtttgccctatggtggccccacacatgagacaaacccccaagatgtgacttttgagaatgagacttggataaaaaacatgtagaaatgcaagccctgaagctcaactccctattgctatcacaggggttataattgcataaaatttagctatagaaagttgctgtcatctcttgtgggctgtactcctcgtctaggcttaagagtaatattgcaaaacctgtcatgcccacaccaatctctccctggcattgttgtctttgcagatgtcagtgaacgcgacccagcagctcccatgagtttgcatagccttattttctatagcctccccactattagctttgaagggagcaaagtttaagaaccaaatataaagtttctcatctttatagatgagacccattttaaataaagtccaagataattaaatttttaaggatcatttttagctctttaatagcaataaaactcaatatgacataatatggcacttccaaaatctgaataatatataattgcaatgacatacttcttttcagagatttactgaaaagaaatttgttgacactacataacgtgatgagtggtttatactgattgtttcagttggtcttcccaccaactccatgaaagtggattttattatcctcatcatgcagatgagaatattgagacttatagcggtatgcctgagccccaaagtactcagagttgcctggctccaagatttataatcttaaatgatgggactaccatccttactctctccatttttctatacgtgagtaatggtttttctgcctttttttttactttttccattcaacctcaggggacttgtggggctcgtgaaccccaaccccagggcaaaaaaagagcacccgaaaactgttatggatgatttcgcagcttttgtagagaagtgctgcaaggctgacgataaggagacctgctttgccgaggaggtactacagttctcttcattttaatatgtccagtattcatttttgcatgtttggttaggctagggcttacggatttatatatcaaaggaggctttgtacatgtgggcccgggatcttattttacacacaattgtcttacaaaatgactaaaacagcactttgtttttatctcctgctctattgtgccatactgttgaatgtttataatgcatgttctgtttccaaatttgtgatgcttatgaatattaataggaatatttgtaaggcctgaaatattttgatcatgaaatcaaaatattaatttatttaaacatttacttgaaatgtggtggtttgtgatttagttgattttataggctagtgggagaatttacattcaaatgtctaaatcacttaaaatttccctttatggcctgacagtaacttttttttattcatttggggacaactatgtccgtgagcttccatccagagattatagtagtaaattgtaattaaaggctatgatgcacgtgaaatcactttgcaatcatcaatagcttcataaatgttaattttgtatcctaatagtaatgctaatattttcctaacatctgtcatgtctttgtgttcagggtcaaaaacttgttgctgcaagtcaagctgccttaggcttataac

SEQ ID NO: 147348 - DNA, 2231 bp, Homo sapiens
  misc_feature (1)...(2231): n = a,t,c or g
tttttttttttttttttttgtgtttaagagtttattaggataggcacataacagaaagctccaaaggacaacaaagctgcaccttcctaaaggctgaccctcaaagcaccattttgttagaactcagaggagaagctcgatctctgagccttccctcctcacagtttgggaaacatgcacaggatgaaggtaaatcctgcatagaaatcttgtaattccagaattagtcaaacaaaatttgaaatacacacatttaaaaatacttacattcntccattttagcgttccatgaagtgattacttgacatttacaattacatcttgacattcacagagcaacgcctttggcaggggatctaattccaagcttaagcccaaatctatgcaaaggaccttcagctccagaggaatagtggggcaaaaatctggctgaaaaggaactgcttgccaccttggcagataagagcaacagcacaataaaggggattcccagagctttctacctaaaaatagaagggcattatctacaagaacagacccaaaacacaatttatttttaaacaagccccttcagtgaagtcatttgtcctcaggaatcctagtatgaaaatagtgtctttgattagtgaatatatggagaattcggattatcatctctatttttagttgagaaaatgcacaaaccatatagatttaaaccatgggttttgcagccgaagtagagacagatgttttctgggatcatatctcagattcccaagctaaagctattgttcaaggtgatggaaatatgtagggggcattaaaccattttgcagctgctagaaagctgtgttttcctgttttcctgatttagacaatggagaagctaagaagagaaataataggaaaggctttcctatgttagttttaaaaagactgtgttatttttaaatccaattttttttgtccaaacctccatctcctgttctccctagttttccacagaaatatttaacaggaataaaggttgaaaacaaaagtacctaatgatcatctcccatccatcgaaagattgcctcagggataagacactcaaacaagggcttgtgatgaggatggaaaagacaaagcaacttgaagagaaaaaaaaaattcttttaaactcagttcatcctgcaaaatggacataacacatgcatataaaggtttgactttttaattccacttttttgcctgatcgcaggggaagatgggcatgtgggctgggcccttcctgaagccttgctccctccaccactgggcttaacagacaggcctccaggtggccttgcaaaggcccgaacagtggaccgccagccccacttcccccacacccttaaatccagagcctccatgcagttcatcccccacattaccccaaacataacgtccgtaagtgcctacacgtagatgtggttgcatcatgatgctatggcaatgcgtatgtcgcttaggtgtgtgggccaccgaaggcagagcccagatgtggttggtcttgcctggaagccaagctgttgagcaggggtgtagtccctctacagaggatgctcaccaagttctaatgcattgtcgataactgtccctgccctggtttttgtgcattcctcagattatctgtggtaagtgtcctcctgcatcctttctcaagtgacaaagaagaaagaaagagcagtgatggcacctgaaattcaggaatgagtaggcatggcgagctgggtgtgtgagatgttctctctttacattgtctgctttgagatgtgggatgaggggagggagagagttggtcctgaatatattcagttttttccaagagtctcccagaattattgacctatttggacaacaaatcttccattgtcttggtgtcccatctcccaaagtgaaaacttcccccgtccccatggcccctggcttgttctgctgctgaacaggtcaccctgggcagaaacactgtgtctagcgagaagttagcaggtggcagggtgcacctctccccatactgtgacccttggattccccactgtgccacgcccgagcaagctggggcccctcaggacaaggacgatttgttaatggcctcttggccggtgggcatttgtttacccactactgtagccccaagatcccccaaacaagaatttccatgcttcaaagtaacagcaaaaataaacaggagaataaagcacgtgtttgagcccagtggtttccat

SEQ ID NO: 147349 - DNA, 1089 bp, Homo sapiens
tcatgggccaggtccagggtccctatgctgcaggcagcctagggacttggtgccctgcatcccagctgctccagccatggctgaaaggggccaaggtacagctcgggccgtggcctcaaagggtgcaagacccaagccttggcagcttccacatggtgttgggctggggccccactcagtggagctgtgagaagaggaccactgtcctccagaccccagagtgatggatacaccgacaacttgcactgtgtgcctggaaagcaacagacactcagcgtcagctttttgggctgaataacgttctgttgtcgagggccgtcctgtgcatagtaggatgtttcgcagcgtccctggcttctccccactagatgcagtatctgtcccgtttgtgaaaagcaaaactgtctctccagacatcgccaaatgttccttcagggcaaaacccaaccaccactcctccactattgagaaccactgactcaaagagaagcaaaagaatgctgccttcaagctgaggggaagactgaactgtccgtttctttctgctctaaagtgtcctctggagaggacgctggcggagctggtgctctcgtggtggcaggccaccaccctgtggaggtgtccatgcattgcaagtgctcgcaagctccaggaacaaacgcatccgcgcagccgtctggggtttgtcccgtcgctgccaaccctctcgctgagtccccgccctcgccgataagagcccacacactggcgacttccctctctgtcgcccctccgtgaagtcagacccactctgcgggccaagaaaggtgaccgggcttccttccggcttgctaagcagaggccggaagcggtggtttttagcggctctctgggtagcagggtggtgtgatagcggcagcgaggggctcggagaggtgctcggattctcgtagctgtgccgggtgagtggcgctcgcgttcgggcgcgtgagacccatcccggggacccgtctccgcgggggcagctggagggcggcggggctcctggcgccggtagcgcacctgggcaggtgtgccagccaggtccccggttctgggatccgaggccat

SEQ ID NO: 147350 - DNA, 981 bp, Homo sapiens
tttcgtgcgcctgcgcttgacgccccgcgcggggtctgggtctccgcctgagggccccggagcagtgcgcgtatcccgggagcggatcttgatgctagctctgtgtgcagtgtaattttatgaagagtcccgccccctccatacgggaggaaacgtgtgtccctggggccctcagccaagcctccactatctttttggcccagacggatttcccaggtcacaagtggctggagacttcctcttgaaaaacatttgccgtcgtttttccctggcagagcccctttgaccctggctaacaaggacagcctgacttggatcccactatgcaggaaggaaggcgactcttccccgcacctcttgctacgattaggacttgcgacttggtgaaaacaggaatcaaaacttgggcctatttctcctgaggtctgcttgcctagaacaattcgtaacgatgaatcttattaaaaagagaaagtcctccccgactttatctttttccgcccagaatccgataaggaagacttgttctggccccctcagctctctgacctcatctaccagaggagagagtgggatcctctaacactcgagccgtcatcccagcactaggggacagtgaccagtgtggctcccgtggccagaacccttctgaagtttgggttgccctgtggtcttcgccttcaaagcaggccgccacttgaatccttctggaacggacagtgttgctgtaaacgccgcggaatagtatcttctaagtattcgtagcttctttcttgagggatctcgggaacgttccgtgtattaaccactaacgtattccaaagttaacttcgtggtaaagtcgctggggaaaaaaataactgctccagttccacaggtgattgaaacaaacgtgatttgtttcccaaacttccttgatggtaaagaatgacttggggtactaattaaaaataaaaataattgcgtcatttccaacctact

SEQ ID NO: 147351 - DNA, 1557 bp, Homo sapiens
tttaattcccgggaccacccacgcgtccgcggacgcgtgggctgggcggcggcggcggtggcgttcatggaacgccaagaggagtctctgtccgcgcggccggccctggagaccgaggggctgcgcttcctgcacaccacggtgggctccctgctggccacctatggctggtacatcgtcttcagctgcatccttctctacgtggtctttcagaagctttccgcccggctaagagccttgaggcagaggcagctggaccgagctgcggctgctgtggaacctgatgttgttgttaaacgacaagaagctttagcagctgctcgactgaaaatgcaagaagaactaaatgcgcaagttgaaaagcataaggaaaaactgaaacaacttgaagaagaaaaaaggagacagaagattgaaatgtgggacagcatgcaagaaggaaaaagttacaaaggaaatgcaaagaagccccagggaggaagacagtcctgggccttccacttcatctgtcctgaaacggaaatccgggcagaaagcctttgcgggagaggaggttataacccgttgtctggtgaaggaggcggactttgctcctgggagacctgggacgcagaggcccgtcatctgggcggatgaggctaagaatcttgttagtgtcacttttgacattagcaagatgaacccttaaccctcgattcaattgccttacgcacgcttttcacagtgactagccaaggggaggtggggttgattttctgtttcctaactacacctgcatatgttcagggcttccagttcagcaaaaggtatagatgttgcctctaggcatctaggtcattggtcacattctacttggagacagtgattgccattcattgatttcatcggttaattgctagttggtaggtaaaggcctctagatgattagcaatcttgataaaagaggcctagtaatgttcttttgaggttagaaatcccttgctgcctaggacagtctctgtgacaggttgcgttgaatgatgtcttccttatcaatggtgagcccaccagtgaggattactgatgtggacagttgatggggtttgtttctgtatatttatttttatgtacagaactttgtaaaaacgaaactatttaaaaaacaagaataacatttttagcatctttattcaaggagattttatggacttcaattttgtctatcaaacattaaatagctttttattacaacctccaactattacttatttctctatttattattactcacccaaaataagtctggcaagtggcagacagctgccgtgattttgaaagttgacagactccttggggttcatccacaaaattgggtgcttggagtcgagttgccgaattactgggataaagaaacatcgtgcctcaaggttcctcataggctgaccaggtttctacgtgacctctcagttattcccttacgccatgactcatcttttacgctcttgtccagaggcactatcagcagttttggataaagagccaaacagtaaatattttagactttacaggcaatgtatt

SEQ ID NO: 147352 - DNA, 1077 bp, Homo sapiens
atggtgaattttccaactgatggagtccaggaaagggataatagtgagcagaggggagataatcactggaatgccaagaaggaaaaatcaactcgatttggcagattactgggggagaggtctgctccagctcagccacctgctgaagggacagaagggactgccccaggtgggggtccccctggccctcctcctaacatgaccagtaacagacgactacagcaaacccaggcacaagtggaggaggtggtggacatcatacgtgtgaacgtggacaaggtcctggagagggaccagaagctgtcagagctggatgaccgagctgatgccttgcaggcaggagcatcacaatttgagagcagtgctgccaagctaaagaggaagtattggtggaaaaactgcaagatgatgatcatgctgggagccatctgtgccatcatcgtggtagttattgtaaggcgggactgaagagctggaagaaagcagtcagtaccctcccaacggcccccctcgaaggtctccactctcctctgggctcctccttgcctaatgcagggggtcaccgctggagaagaaccaccactgtcctcgatgtgtcccaagcctggagcgaatccgtcctcttggctctcccagccctatcacaggaatcattcctgggtttctgtccctctgaggctcaccaggtgtagttggccttgttctttgggggtattagcccttctactttctttctcacccaccctgtaccctcttctgtgtgtctctgctatccccctttcctcccaccacccatgtgcatgagcaaatgtgcaacaaaacccgtgggactttgcagtcaaatgaagctgagcttcccacatcccggttcttcggtttgccatgagacgatgtggggtttccactgtgtgtctgtcatcacctctttgtctttttttcctaaccctgatctcatacttgtatagagtaataacaacagttgtacttccaccaaaggcatgtggcatatttaccaatgtcatgtattctgaacaaaggcaaaaaatacaaattcctaccattaaaaaaaaaaaaaaa

SEQ ID NO: 147353 - DNA, 1950 bp, Homo sapiens
tctcttttccgtctgggacttcctgattcctgtgtccagtctacttttttacttgagaatgtaccaccccttccctgttgtccattgccatccacattcatgtcctctgccctctgtttgctctctcaacacacttccccacccaccgtcctccattccagcccaggcttctccatcacccattcctcctttttcgttgcgttcatttgcactctgtccctcaacactagaaatgctgctcgtggcacaatctaagtcattacccgaagagcaacagctggcgcctcctccctgcctgctttttctgtactctcaagttcccccaaagccccaaagagttggaggccaagggaaggggcagggaggggagtggctgaggcgaagtacccatgaagctgcccagacttgggaggagaagagtatcggtgcccatggtgacttctagaaaacctggccactggtaggagctagggaggggctgggaagatggcagctcactcagtactgcctggtcatgtggagctttccttcctggaccaggcctgaagagggtcctgggggtggaccaaaagtccaacttggtttcagtgcagtacccttttcgaaagtaaaaaacttgttttttgtagttatttctaatctgttcgtccaggattttccgtgtctttggggatcttacaactttactttgttctccagaggcctggagaacacttagggattgtgaaaatagcaggacttgtttccatcctagaagcagtcccatgtgcttctagctggaaggagctttctcttctttacattttctacagcattctgtatgagggcaccaaataaatccatctagctggtagttttatctagccaaataatttaacctagctcccagttaattgttggcataaagagagagattgcctgtttagttatagagaaacagtgagtcaagtgcttaattttgaaagtaacaagctcagagggaaggccacttcttgccctcgtttaaaggagggtcctgttcctctcttcctgttgatgaaaggagcgtgagggtgttagcagtgtgagatctttgggacacccatgggaatcctttcctccacaccacccgttgcacttgccaaagacagggatgaggcaagtggttcttcctggaggcccggccgattcctcaggatgcagagaagtcatgtagacccaccagccccaccttggggggcaggcgttgccagcctagtgtcaggtgtgcttgtgtattgctggtgctgtcatggggccctctccttgagagccgcctctctgttcttcctgtagtatattcccctttgaaccaccctttcctgtctgaattctactttgcctcctttctcttcctcctctttgcatggtttgtgtgtatagacagtgggaacctgaggatggggatcttgctcagcctatcttcgggggcaattgctgagcttcagggatggggctatttaatgtggggataagcccagggtgcaagggggaggaggggcaggctgggagcagagcggagaatgcccatggccctttattccttcttccctcggtccacgaacaggaagaggctgaggccatgctgggcagggtctggatgcccactttccatgcagcagcatttcattgctcaaaaccatcctttctttgcttttcgcccttgtttcccacattcccttcggtcctgcccaagggcggggacttgaagagctggaagaaagcagtcagtgaccctcccaacggccccccttcgaaggtcttccactcttcctctgggctcctccttggcctaaatggcaggggggtcaacgcttgagaaagaaccaccactgtgctcgatgtgtcccaagcctgggagcgaatccggtcctcttggctctcccagccctatcacaggaatcattcctggggtctgtccctctgaggcta

SEQ ID NO: 147354 - DNA, 534 bp, Homo sapiens; identical to SEQ ID NO: 144862

SEQ ID NO: 147355 - DNA, 611 bp, Homo sapiens; identical to SEQ ID NO: 145358

SEQ ID NO: 147356 - DNA, 675 bp, Homo sapiens
  misc_feature (1)...(675): n = a,t,c or g
atcgagaccatattccatgtggnggaattccacagactcagagagaacccaccatggtgcttgtctcctgcccgacaagaccaaagcccaacgccccccgcggctaaagctcggggcgcacgcctggcgagtatggtggcgagcccctggagaggatgttcctgtccttccccaccaccaaagacttacttcccgcacttcgaccttgagccacggtttctgcccaaggttaaagggcccacggcaaagaaggtggccgaacgcgctgaccaaacgccgtggcgcaacgtggacggacatgccccaaacggcgctgtccgcccctgagcggacctgcaacggcgcacaagctttcgggtgggacccggttcaactttcaagctcctaaagccacttgccttgcttgggtgaaccttgggccgcccaccttccccggccgagttcaacccctggcggttgcaaggcttccctggggacaaagtttcctgggctttttgttgaagcaccgttgcttgaaccttccaaattaccgttaaagcttggaagccttcgggttggccattgtttttttgcccctttggggcttccccccagcccctcctccccttcctgcacccgtacccccgtggtctttgaataaagtcttgagtgggcggcaaaaaaaaaaaaaaaaaa

SEQ ID NO: 147357 - DNA, 463 bp, Homo sapiens
ggcacgagccaaaacacaaatctagaattgcaaagccagcctttatttccctggcaggcagccttgccacaaggcacagaggcagttctgaatcattctctcaattcaccagtggtgacatccttcagtccctcacatctctgacagagtgggagagaatggatatttggctgaccttggtgagacctggagctgcctctttcttcactaggggatcaccacggctctagggcattctaggatgaggtcagaccccttggccattggtgttatttattgtatagcttcagactgggattccagaacttaccattgaaaacagagcttttaggccaggtgtgagtggctcacacctgtaatcccagcactttgggaggccgaggcaggtggatcgcattgagctcaggagttcgagagcagcactgggcaacatggtgaaagcccgtctctaccgataaataca

SEQ ID NO: 147358 - DNA, 980 bp, Homo sapiens
cccgtgcagtggggaattgatactgtggttttcaatgtcacccacactgcagcacggccacagtcaccatcccgatttttgctacaaatgaaaattactttataatgagctccttaacacttttctttaaacctgtgtttggaagacttgcgttggtagtggccctgtgcccaatacctgtgaaatcacagcaccgatgagctggttccaatttttaaaatatatacatgcagtactttcatgactattcaaagaaaaacaattccttccatttgccacctgagatgaccaccagtggtgtgaactacctcctgcccccatccgcagtcccaggatcctgggacagggcttatgaacacaaccactgtagtcagctcacctgatccacagcctggcacccccactgtctggctagggagcctcgaatgggtcccaaggccaccctgctcctcagttacatcatctgcatagtagtggtggttgtgaggaattcaggagctgcagcataagggctcggcaggtcctaagtgcacagtaaatgccagtgattcttaagagtctgagctcccattgtagaggcaagtaagctgaggttcagagacagaaaatgacttgcccaagatcaccccagctgggaagtgacagtgcccagggttggagccctggttgagcctggttccacaggccagagctcattctgccctctccctggaagacctcccaccctgtccccatgcctctgcttctccctcaccccaattaattccccgctgccttctaggataagtgtgagccactggagaagcagcacgagaaggagaggaaacaggaggagggggaatcctaagcaggacacagccttggatcaggacagagacttgggggccatccttgccctccaaccccgacatgtgtacctcagctttttccctcacttgcatcaataaagcttctgtgtttggaacagctaaaaaaaaaaa

SEQ ID NO: 147359 - DNA, 813 bp, Homo sapiens
ctcctgtctcaaatggggccttctggggttttacaatctggacctcttccctctgttgaagcccaaatccaattgtgtgcccaacctagtaccgttgcccatcaccaacgccaccctgaaccggatcactggcaagtggttttatatcgcatcggcctttcgaacgagggagtacaataagtcggttcaggagatccaagcaaccttcttttaccttcaccccccaaacaaagacagaggaacacggatcttttcctcagagagtaccaagaccccgacaggacccagtgcatcctataaacacccaccctaccctgaaatgtcccagcgggaaaaatgggacccatcttccaaaataccgtgggaaggcccaagagcatttccgcctcaccttgcctgaaaccctcagggacacccaagaccctacatgctttgctttttgaccgtgaacggatgagaagaacttggggcttgtcttgtcttatgctgacaagcccagagacgacccaaggagcaacttgggagagttctacgaagctctcgactgcttgcgcattcccaagtcagatgtcgtgtacacccggattgaaaaaggataagtgtgagccactggagaagcagcacgagaaggagaggaaacaggaggagggggaatcctagccaggacacagccttggatcaggacagagacttgggggccatcctgcccttcccaacccgacatgttgttacctcagctttttcccttcactttgcattcaataaagctttctgtgtttgggaacagctaaaaaaaaaaaaaaaaaaagtttt

SEQ ID NO: 147360 - DNA, 552 bp, Homo sapiens
ttagacacagagcgttcgttgactcgtctgggcgttagtgttaatattctgtacttgaagcaagcccaccaagcggctgaactgggtggataatggaaaatgtccagcgtgagccactgcgcctggccatgaaggtttttcgatgctaaacttcattgggaaaaccagcaaaggctggctggaggacacgggaatattctcttctctggacaccaggggagcggactccctgagaatggctgctgaccgtccgttgttttctgccgagctgagctcatattcataattactagcatctcgtttgggtaccctctcgctctggcagctgggaactggcagaaagagaaaaggcggcaatgggtcagcctcatcctggaaggtggcaatagcggaggatgcaagcacactggcgtgctcagaaaatgtgtccaacatatgcacattcacatagccagacacgagaaaccgaatcagctcaatctttctctcatggtagttatgggaagttacatgcaaagcagaaagatttaggaacagagtgattatcaaaat

SEQ ID NO: 147361 - DNA, 4825 bp, Homo sapiens
aaaaaatctctatttttaattatatttctcctttagaaaaaaaatacttcatggtccctctaaaataaatggccagacctcagtttaggcccttgtatttatgactctggtagaggtcttcagactccaggtcatagtccagtcagtatttgcatttgggttctcatgaaaactttgtgactctcttttagcacaagtagcccatggtttttcttccaaatcaagtattttacttctcccttgagtccccatgctttgtctccctcctgctgctattgcccggtgaatgggatggtagagagggagaaatgttcattgcacacataatgtcaagccagggttggggacttggcaaacgaagcttgcactgagtggtggtgagttttgctttattactgtgccaaaaatcaccttggggaagtttatggatatgtatggcaaacttattacccttcttgcaagctgcacattaaggtacttgtaagtgtttatgcttttgtgtgtaactgtttgccttttctaactgcttttcttgttactgaaaatataattctactagttttatcacattaagaggctctccatgcacaaaatgcattgatgtagccgtaaagtaacagcatttgtacattttctatctcctgatggcaggggtgcctttgtcaccgttttggaaaggtttgcagttttgtttctgctttcaagcgcaaatatgtagcttgctttcagcttcacaaaaatctcctcaaactgtaaaacatacaaaatggccgtggttatcatccagggcttagttgggagtatttgcatttttatttttattcaaaacaaatataattggtgggggactgggccagtaataatgtgtgggcgtctttaaggccaagagtaattttttaaatttaaaaatggaaaattttaagaggtagcccattaaacaagctactgagttggagaattaggggatgacctgtggtggtttgtcgctaaagaggcaaacagtagggtccagggcggccggggcacgtaggagcagttaggcatgatccatgggttattccttacttcatgaacagtgttcggcgcacctcattatctgtggcatttgtttttcctggggcagtcctgttcagccagtttaatccgaccagctcttagggaagttaaatacagatttttttctttccctttttttttttttattaaagattttatactacatcttgttaaagtcctatgaatgtgtgtgtgtgtgtgcgtattaaaactgctttttctcagtttgaacatgtgtttggtaatatttgtttgggagttggggaggctaagttatctggaatgccctgttccctcagcccaccccagtccccggggcttttaaacatttcttcttgctttggattgtccagttttttagcttgatgtctcctgtttctggaaaacataaagccaccattgtacacagttcacttttatataacccagttaattgctgtatactttggcaatcgggaattcagtaatctcattcttacctcattcactatggttccattccaccattcattctaacaattgagtctcaactacatactaggcactctttttaggattcagtaaggatttgatggtgaacaacatagagaactcatgaatcttacctcctggtatccaggttaaaatactttctgttcttgggcaaagagaattagaaacaaatacccttaacctgactcccttgttcttgagcccaggaccaagaaagaagaagctgtacaatgcagaagcagggcttgagatcacctccaacctgccaagcagatagagatctgggtatgccaacttgggaggcagaggttgaaacctcataggaggaactttggagctcatagaaggccttggcattgtcagaggccttgagttccaaaaccatgccagtatttctgccttctgacaggctggctagaaagagactaaatgggagcatttttctctgacagtggggcggagggatgaggggatgacagcccaggaagaagcagagacattgcccataagtacttactagagggcaggccagcacagctttatgcaagttaagggccttgaccttgccccaaggcctgacctcagatcccagattcatcatactagccttttgatctttgccaaattacttaaactcactgtttcctcatctgttgaataatggtgtctacctcagggtttgtgaggactaagcgagctaatgcatgaaaagtgcctagtacagtgcctggcatatagcaagaactcagcaaatgcttgctgctctaacgaggcgtttctctgatgacagatttgatcttaagcagacacctcagggtgtactgacatctgagcaaaccatatctccaaaaattatagttgtaagtgtgccctatttctttggataccgggagctggagcttctctgtccagctatctctgctgattttttttaattaaaattttcactttttaaaagccagcatgctaaagctgagaaattggtgatgggtggtggttttccagcatttgtgggaatgtcctgacactccctttcccttactaaccattccctaggctggagtcaagagagggcaaaccagaaggcccagctttgggtctgactccaagacgactggctgggaggaaaactaaacaggcttctgaggcacagtggaatagtgagacttccgcattgttgcactggtgacagcccctacagaagaagcacctcagctgtatatatagccaaaataaagaccacaccacctaaagggaaagtgctgggcaaaccagagatggagatggcaaagcaggaacagaaatgctgccacattgaacagtaagcaggacaacttgactaggccagagttctcttgcttcagggaacctgctcaagtttcaggaattcatacccacccccttcacctaggatccctgctacagtaagtaactgttctgtgcaaagtggagctaaactctggtgtgtaagtggctgacaatcactgctgaagacggccagcactaccctcagccactttcttacagcaaagttggggaaaatagactagcaaaaacaaaactcatacttttctgtgtgtgtgaagttctccagaaggtttccaaatggaatcctctcacagccaccctgcgaagcagccagggtagtgaccttatggatgagtgacagcctgttcaaagaatgacctgcctgtgtcccaggatgcagatttatggctgggttagggttaatttctttagttgatttccagttttcttttccactgtctgtcagtattcccccgttcttattttaccagctggatttgcagagagacatactgtcaatcaaaagggcttcctatgggcagctccattaattgcttttacatctgatactctcattaggtttagagattttactgggaggctagcagaaggaaatggattgtggtctgctatcaaaagtactgaagtaactgcccagtgatcattgaaatcacacattttgctcatttaacaatgtctgagtttgccatcagcacctcagaggagcaaagcttggttcataaagtgaagttgagtgatactgagcctaccacactggcctactcgccacctccagagctatctgaagtcagcactgcaggttctgtgaacatttgggaagctgtgcctcttagccccctgggcccctacagtttaattgctctcctatctgctactgaaggaccagcagtcttcctaccctgcctccactgttaccaccaacccactttttgataaggactgcagatttatctttcttagccctgccttgactggtcttcccacctcagacgtccttactcagtccatcatctctttcaggattttcttctgtggtctttttcaaactactagctgacttttcccttttatttcccactaggaacccctccccgcccccccccccccagccatttcatcaaatcaaactcactgccctctttcatgccccttccttagttccccaacacaagcctgtgcataagcttgaacatttctacctttgccaatggtatttccccttctggcttaccctgcttcctccttctcagacttttccagtcttgattgtcctctccataaacacaagaatgaacttcaaggcaagttacttaatgtcttagagcctgtttccccatccataaaatggggctataaattcctcaggatgggatgagggtacaaataaaaaatgaagcaggatattctttgtaaaagtgtgtgtacattttttattgtgtttctccccagctaccttccctctccccgccacacacatcctatttgcagagtgttgggggaggtggaactgtgatgtgggccctgctgtctagcagtctgcagtcacacacagccatccaaactacgagattgtatatgattcagtgccaaactgtgagctttggggaatccagaaagaaggatgaagcctttcccaagtttcctttagttaaatgtgccacttgaatcctgttctgactcctaggcacatgcaagagtcaatcacatatgttcctgtggcctttatcattttggtccatctcttgagcccacatgaatactgtcatggatggaggaggaaggaccaggctgggtcagggcctgaatgcaggttttgtttggactataggggctaagttcactttaataggctgtgacctattaaagaaggcaggaaccaagtttgcacagaaggaccatcctagttgagttaaaggagttggggagttgattgtgaggggtttcctag

SEQ ID NO: 147362 - DNA, 475 bp, Homo sapiens
  misc_feature (1)...(475): n = a,t,c or g
gtgttgtgtgaaatcaaagaaaaaacaggatacaaagttgtgttcggcacagagtactctcctctgcttctacctccgggaaccccgttaccccccagcccacacaccaccaccccagttttgggtggggagaaggcaaaggctgggctagctggatgatgcctttttatctggttaaagaagagtcaccaggcaggaaatgatggtagagagatggaagactacaaaacccttgccaaattctgcactttttgttagtttgtttgcactgcggaaggatgaagacagtgagacagttactgagaccatcggctgctgtggacatcacagtgggagcagtctactgggtggnaagggtgctgtcaggtcttggggaccttagtaggagacaagtanaattatgatgcagtggaaaagctcctttgaaaaacagtgatgggacacagtgtatgcaatcctgtgggcttttgctgan

SEQ ID NO: 147363 - DNA, 1314 bp, Homo sapiens
atgtggctgtgggaggaccagggcggcctcctgggccctttctccttcctgctgctagtgctgctgctggtgacgcggagcccggtcaatgcctgcctcctcaccggcagcctcttcgttctactgcgcgtcttcagctttgagccggtgccctcttgcagggccctgcaggtgctcaagccccgggaccgcatttctgccatcgcccaccgtggcggcagccacgacgcgcccgagaacacgctggcggccattcggcagggttccccgatcttctcaggacggccttcccacttcctcattcgtccacaaggcacactcccggcccttgatcgctcccagtgtctagggatctccggacttgaggttttatatttacagaagacagcagatatgtatatagtttctgtgcgcctgacgctaaggttacatacagccaggaacaaggcagctaagaatggagcaacaggcgtggagttggacattgagtttacttctgacgggattcctgtcttaatgcacgataacacagtagataggacgactgatgggactgggcgattgtgtgatttgacatttgaacaaattaggaagctgaatcctgcagcaaaccacagactcaggaatgatttccctgatgaaaagatccctaccctaagggaagctgttgcagagtgcctaaaccataacctcacaatcttctttgatgtcaaaggccatgcacacaaggctactgaggctctaaagaaaatgtatatggaatttcctcaactgtataataatagtgtggtctgttctttcttgccagaagttatctacaagatgagacaaacagatcgggatgtaataacagcattaactcacagaccttggagcctaagccatacaggagatgggaaaccacgctatgatactttctggaaacattttatatttgttatgatggacattttgctcgattggagcatgcataatatcttgtggtacctgtgtggaatttcagctttcctcatgcaaaaggattttgtatccccggcctacttgaagaagtggtcagctaaaggaatccaggttgttggttggactgttaatacctttgatgaaaagagttactacgaatcccatcttggttccagctatatcactgacagcatgcttaccgcttctcacctttcaaccccatctgtggcctttgtccaggcccacagcttagccatggcttccctcctgcatccctgccgtgggttgctggcctcacacttgcagcagctggacagtgattttagaaggccaccagtccccatagctatgtga

SEQ ID NO: 147364 - DNA, 2251 bp, Homo sapiens
ctgccatgcgttatctacaagttgatcacacagatcgggatgtaataacagcattaactcacagaccttggagcctaagccatacaggagatgggaaaccacgctatgatactttctggaaacattttatatttgttatgatggacattttgctcgattggagcatgcataatatcttgtggtacctgtgtggaatttcagctttcctcatgcaaaaggtattttggtatcccccggcctacttgaagaagtggtcagctaaaggaatccaggttgttggttggactgttaatacctttgatgaaaagagttactacgaatcccatcttggttccagctatatcactgacagcatggtagaagactgcgaacctcacttctagactttcacggtgggacgaaacgggttcagaaactgcccaggggcctcatacagggatatcaaaatatccctttgtgctagcccaggccctgggggaatcaggtgactcacaccaaatgccaattagttgggtcactggcatttttacctgaacccaaaagctaaaacccccggtgttgcccacccatgcacccagggcatgcccagagttcaacactgttgctccttgaaaatctgggtctgaaaaaaacgcacaagagcccctgccctgcccctagctgaggcacacagggagacccagtgaggataagcacagattgaattgtacaatttgcagatgcagatgtaaatgcatggggacatgcatggattaacttcagagttggacatttttaaaactttgccacaatttatttcaaatatttgtactcaactatggtaacaatgactggacacatcaaaccttgtggccatactaattagtactattaacagggagcactaaaggaaaactgtgtgccaagcatcatatcctaaggcatacggaatttggggaagccaccatgcaatccagtgaggcttcagtgtacagcaaccaaaatggtagggaggtcttgaagccaatgagggatttatagcatcttgaatagagagctgcaaacccaccagggggccagagttgcacttttcccaggctttttaggaagctctgcaaccagatgtgatctgaatcataggcaattaggaactgggaagaaacttcccaaaaaatatcttaggtttgtccctcattttacaaatgaggaaactaaactctgtggaagggaaggggttgcctcaaaagtcacagcttagctgggcacagtggctcatgccgataatcccagcaattcagaaagctgaggcaggatggattacttgaggccagacttgggcaatatagcaagaccccatctctaaaaaattaggcatggtggtgcatgcctgtattcccagctactcagggaggttgaggttgggaggatcacttgagcccagaagttcaaggcttgcaatgaggccattgattacaccacgggcactacaaccttggtgggcacagttgaggaaccttgactcttaaaaaaaaaaaaaaaaaaaaaaaaaaaaagataactagaacttctagaacatcttgtttacagttagccagaaactatacaagtggtttaacatgcattatcttactcaatccatacaaaagtcttatggaggtgttagcactctttctacctgatgaagaactgaggtacttcataaaaccacttaccccaaggtgtcttgagtctggtacaactggcattcaaatctaggtcagtctgcccccagagccactacccttacccctcactgaattctgcctttaaaatgttgagccccatgaccccaaaactgctcttttccaattggaacttcccaggggattttattgtgaacttacatagcaacattaaaaatgaaagttggaattggttttaaatggcaacgccgtcttgtctcctctaggcttaccgcttctcacctttcaacccccatctgtgggcctttgtccaggcccacaggcttaggccatggcttccctcctgcatccctgccgtggggttgctgggcctcacacttgcagcagctggacagtgattttagaagggccaccagtccccatagctatgtgacaatgagaagcaaacttttttgtgacagattgtattggcataggcatgatagatggggattggtacgttttgaatcagcatttgcaaaaaaattgtcttgaattttaaaataaacaacaaagatttgttcattgagtgcaaaaaaaaaaaaaaaaaa

SEQ ID NO: 147365 - DNA, 1560 bp, Homo sapiens
atgatctccatcgtctgggtcctgtccttcaccatctcctgcccactcctcttcggactcaataacgcaggttattggggtacaggtagcatttggttacataagctgcctgccgacactacggccactgtcgaggacatgctgccttctgtcaccaccgtcaccactaactctgacactatcaccgaaacctttgccactgctcagaacagccccaccagtgagaccaccaccctgacctccagtattgccccgccggccacggccacgcctgactcaaactctgtaccggctggccaggccaccccttccaaggggcccagcgcctctgccccctccccggccccagcttcagcccccaaggtcgcccccctcgttgacctgagcgacaccccgacctcaacccctgccgctagcaatttgtcttctagtgtcctggctaaccaaggggctgtcctcagcccaagcgcccctgctggtgtcggggaggcctctaaggctcctccggccagcaagcccacccctgcaccagtccccaccccgactggggcagccagtcctctagcagcagcggctgcccctgccacagaagcccctcaggccaagcaggaggctcccagcaccaaaggcccggacccggagcccacccagcccggagccgcgaagagcccggccgaggcagccacagcccttgctagcccgaagagcgaggctgcctccgtcagcaccacaaacccttcccagggcgaggacggggatcctctagagtcgaactgcgggtttatgcaacctaaccccctcatttctgatctaattaatgttgctatcttgtctttttatgccaagaaggcctctgacagcagggtaatttcagatattaaaaagaaaaatccaaatactataatcagttctttagctcaaattcgaagtgttactttagagccacacagagctgctggtgttctgagccggaccctttcttcctctctgaaaattgttgaggaggccttgcgagcaggagtggtaaagaaaatgatgaaattcctgaagtggcagagaaatgtggagggctctgagttcctgcccccctttgctctcttccacgcaagttcagctgaccgtcagcatcttctgaccaagctcaacttcaggtctactgccagacatgtggccacgggacacagagagatcatagcctcctatggacctgtttatgaaattccccttcacacgcacatggggtggctcatattaagactttgtctatacgacaccaaacatctggatgaaaatggaaaaaagaaaaagttgagcgttatgatgaagctgctcagctcggaggatgaggttctggtgggcaacgctgccctctgccttggtaactgcatggaggtgcccaacgttgcgtcttccctgctaaagacggaccttttgcaggtcttgttaaagcttgcaggcagtgacacacagaagacggccgtgcaggtgaacgcaggcattgctctggggaagctgtgcacagctgagcccaggtatgctgtggacacggagccaggctga

SEQ ID NO: 147366 - DNA, 1113 bp, Homo sapiens
ctaactcaagtcttcccagctcttccccatcgtgaaggtgctgctcactgactggacattgccaccagccacactgtagttcttcagggccaggttggcttttcccatgtgaaaatatgcttttgtgcatttttcatcacacttgagagcccactcacaatccaccagtgccttctcatagtcctcaagtttcatataagcctgggctcggttggtgtacagcactttcatgtccttcagcttctccaaaccctcactgtagcgcaggatagctgtttcataattgccttcagcaaatgcttcattccctttttcttttagggctgagtttatttcttctgcactcttcatagcagtttgtggaggactgatcatagtcttgttcaaggtggtcctgcattcatcctcctcctggtcttcctccataagcagtagtctcttttctgtctccaggacagctttctgttgcacaactgggtcatcagaattcatctcctgaattaaattggttagggacttgcagtccacaggtgaccctggtttagagtgaccctggggcaactggaagggagcgttgcctctgggctcagctgtgcacagcttccccagagcaatgcctgcgttcacctgcacggccgtcttctgtgtgtcactgcctgcaagctttaacaagacctgcaaaaggtccgtctttagcagggaagacgcaacgttgggcacctccatgcagttaccaaggcagagggcagcgttgcccaccagaacctcatcctccgagctgagcagcttcatcataacgctcaactctgcagggtatgcaacaggatccaggagaaaggcttgccgcttccatggtggagcctccttcagttcaccttctgtgcattccagggagttggtaagaagaacattagcaggctgcctctcctgggaagcctgcttcaggaatttcatcattttctttaccactcctgctcgcaaggcctcctcaacaattttcagagaggaagaaagggtccggctcagaacaccagcagctcttgtcaggattcctccatcctggctgtttagtaaagacaggcaccttctgctcacctccacagcccaaaccat

SEQ ID NO: 147367 - DNA, 798 bp, Homo sapiens
ttttttggatacatcttaggtttttattagcataggaacaacacacggtgtgcatctgtgtgttccccaaatgcacacaaaccctgtctctctcaagaatcactgatgtatttcatcgtagagttgagaatttctaggccatgaagctttctcagttgagcagcaaatctgggctcagctgtgcacagcttccccagagcaatgcctgcgttcacctgcacggccgtcttctgtgtgtcactgcctgcaagctttaacaagacctgcaaaaggtccgtctttagcagggaagacgcaacgttgggcacctccatgcagttaccaaggcagagggcagcgttgcccaccagaacctcatcctccgagctgagcagcttcatcataacgctcaactttttatccagtcttattacttcttcccgagcttcatgataactattcgtgcagatagctagtatctttatagcataacgtgatgcagtctcacctcctgtcttcaggaatttcatcattttctttaccactcctgctcgcacaggcctcctcaacaattttcagagaggaagaaagggtccggctcagaacaccagcagctcttgtcaggattcctccatcctggctgtttagtaaagacaggcaccttctgctcacctccacagcccaaacctcagagacaaagggagcctgaagacacaggttcatcatgagtcccaggagtgtgtagataacctctctgaacaggtccacatcctcctcacacctggccaccaggctcaagcagccatccccaaattcctc

SEQ ID NO: 147368 - DNA, 2896 bp, Homo sapiens
  misc_feature (1)...(2896): n = a,t,c or g
ctgtcacaaaaaagcacaatggtcctttttcctcaagctatggccataccccagcttcacaagagagagagagagagcgccagacacagacacaaagagagagannnnnnnnnnnnnnnnnnnnnnnnnnnnnnnnnnnnnnnnnnnngtgtatcactgaatgcttccctttaactcccaggaaaaaaataacttgaattatgattacagcatcttgatctggaacagtttacactcactctgccctaatatttttgcatactctgaaactcacaaatttaacatctgattaaggcttaatttaaagtggcattgccacctagcatcatgcaagcgtggacatcttcaagacacacagcatggtattcaactaaagacaatgacatgaagcctcagaattgtatttagcaggtactataattttataattaattttacaattcatgtagcaaatggaaaatcatacagagaggccaatgtatataaataagagtttatacagaaactgccaattcacaaaacagcactgcatggtttctatattgcaagcacaagaacatgggtcacatggttccactgtacaggtagaaacaagcccacagacaatacatagagtaccacctgaaacgaggcccttggaagctgctcagcttcttaggaaaatagaggaactttcaatgggtcataatacattttgattcaaaatgtcttctaaaatgttttcattgtggggaggaaatttaggggaggggccaaaaatccatctatggggacttctggaattcatttttgggttctttttcaattattttataaaaataaaataaaactagaaaaattgataaaactaagggttaaaangcccctcaatatgtaattaggtgaagtaatctgaagtgtaccagaggtaagaaaaagctggatttagatactacattcttttcctgtatttaatgagtaattagccactttgctgcacagaaacttataaattatacaatcaaaactttttaaaaaaaaataaaaaaacttgccttgccctcctaacaagttaataaaaaccatgaaattcaataccctttaaacaaactacattaaaaatcccactatcaaaactcaaggcccctggaatttcaaatgcaacgcccacccctcccatactgtaagggtttgaagtccacgcgtgtctgtttggctttgaagaggaactgggatggcagcccacagtgctccctctgcagccgttgcctctgtggagggagaggccattccttgccttgcaggatggtgggttgggggagaaagaggggagggccaagaggagccaccaagaagaacttccctaggtattttaaagaaataagtacatgggattacttcccccacttaaaaccaataaaatcaccccttgaacagggacaggtggtttcctccaggccattggcccaagaaactgctcaataccctggcttgaaaaagctagagataaaaactgcctgttaggttaagtcaaaactggtgtcctatgtgcacagctcaaggtgacaccacaccaaagtaggcggtttcccgaggaagtcacaaaacagagcaacagtaatgaagagcattccaaaataagggtcacaggactgaatagcaccttacagctgaggacttcacacacacacattctacaaagacatgattccaattccttttttaaaaaatctacttccattacaataaatattcttctcgagtgactatgagaacaagaccaccaggctttgctgatggtcatggtcaatgcataagagatgggtcttgcaccaatctcctgcaatcctggcagaggtggacttggtcagggtatgggagaaaccacacgactggaaccaagtgttttccgcaatgagaccgagtgcgtcccccgcggctccagactgcatggcatcacagtttacaagtccaggggctgaggagcggaaagaaagcttccaaggctggaggtccacgcctgccttgtggaatggcacaggcttagttccccagagaaacgcagccccaacatgattctgaaaggacactgaggaccggactttaaaggcacagagtctgagactgggtcttccagaacgcgatcaggctggcactgatggagacagaggaaggccttggcaccaccagcttcttgggacagagggacctgccgtctcccacccaagactgcgcgcacatctcccagagttcaaaggagccccggacccctactcgagcaccccgatctatgaagtcgcttgcactgtgccctgctggttggtgctgtggggtgttcttgggatcaactcactcattttaagcaccttggagctgcagaaagaactgaataaaaatggccccaacgtacagttcctggagacacttggggggaaaagaagttaaatatttgggtgttttaaggctttaacctcctgaaactactttaaatcccaagggaggttttaaataggagataactcagcctcttcctaccccccaaaagggggctgggggctgaggtgaggacttaaccctttaatcataccacccacagcatttaaaaacctaacaacacatctaacatttccacaccaaccaataagatagaaacgtgttaacaaaagcgccaggaatcttcagttctctcacttctgagtaaattctcacaaacgcgaagatggtgggagggcccagcgcagcattccggagatgcgcgtgcaggaagcttgcggtggatctgcgtgctgcagctcccatgactgagtcgaggggcgagcggctgtgcagtgtcccctcgaaacaccctggaccagattctgacagcccaaggccagcccagcggacccaagcagcctgtgccctgggccggacgaaa

SEQ ID NO: 147369 - DNA, 1068 bp, Homo sapiens
ttgtagtaacgtccctggcacctcttgtgggggttagctggtgcccagagcctggtaggcagcaggcctggtgtcatgggggctgctgataccacataacatcatctgggttacagggggaactctcttctcagctccctttgccagtcccaagcctggtggatctgcatctcacgcccactgcacaccgttcctctccatctgcccttccctcccaggcccccggtcgggggagcaggtgtggcaagtgttaggaactcccttctggtgacagctggtcttcctagagtgttgctggtaactatcgcctcttggtcttctgacatcattgccaggaacggggcactttttcgtcttgtagtttggccctcgggtttcctcactaggtattgtgtaactccctcaaaaaaaggtttatgaaatgctgaacctcaggtttcatagacgtctttgtacactaaaaatctagtggagggcagactgaaagggacagctgctaagacagggaagtggcaatggtaacagcagagtttatgggcacctcacaacctgaaggtggttcctaagtgccaaggcccatgtgcagaggtggccacgcctagtggaacagcccacagcccacatatcagttccccttgccccagctggaacacgggtgtctctgctgcctccatgcggctggcaccctgcccatccctccctgaccacagccttaaacggaggggagcagggaggctgcagagccttggggttttccctcctggtccaaggctgctttgtacaggcccatccttgccttcaacagcaatatgggcaccacttaagacctcagatataaaaggtgcattctctccttgggaaaggcttttgaaattattctgcaaagcagaaagaaaagcttcagcccctaccaagagcacctgcagcctggcactctcctcaagccgcatggcgatcgtattaattctcaagaaatttccaacaaataccacctggttaatgttctgagcacaccaaaaaaaggcaattagttttcatcttaatttctattttctcataaaagctacc

SEQ ID NO: 147370 - DNA, 1932 bp, Homo sapiens
tgccttgtagcattcaggtcaagcagcattgtacagggctatgaaagaaccaagaatgggctgcccttgggaaaagaggatctaggatccagttggtgcagcttatggcttgtccctgtgtgtatagttgttaaattattcttttatttttatttttaagaagttattctttagataataataggcatgtagcttaaaaggaaacctcaaaagacacaaaggatttgtctcattttaaattaaaaaaatactgtatcagcatcaagtaattaaacatttgttggaatatcataacttcttttttctttattgtatgttccctttcctgtgcttacgtattttcagaaattttagttggtgtgcataccacaatttgtattttatacttaaatatacatttcatggttgtatatttattctgcatccaagttrcttttcatatcaaataacagcagcttggbcatttgsgmtgcttgctcataactcgggcagtaagcatttttaagcatgaagttattctttggttgaattttattcttgatatggggcttaggagtgagatttctggtctacagaaaatgatcatgctcatgtakttttgacatttatcgtcatgatgctttgcacaagggctgcaccaatttagatcatctttagcggtgaatgagtggattaattttactacaactactgatggtggtggtggaatttcagttgcttttttttgcgaggttaataggtctaaaattttacttttgtttgatgactagtggtttgaatttttcgctgcctgttatattgcttgtatactttgcctgtttgtgtcactgtccttttggattggagtcatactgttttttttttgtttattttaacttatctgtataaaacattgtattcaaaactagttattgttggtcagatttaatacaaatgtttttcctaatctgttttcttctcctgtgacattatctagcatgctttgcagtgggtccagagttgtctggggatcaagtttaagtagccctggaccaactggactaaatttgatcagcagtcaaattgttgctaagagctatgcacatggtgctgtatttggggtagcttttatgagaaaatagaaattaagatgaaaactaattgcctttttttggtgtgctcagaacattaaccaggtggtatttgttggaaatttcttgagaattaatacgatcgccatgcggcttttggcatatgctttggattattggtccaaggggccagttgaaagcacttttttccggaaccacgagggttattttggagctgttggagcactccttgagctgttgaagatcccgtgatcattacctggggaggggttcctgaaaccttcccacaatgggatctgtggactttcatttttttaagagacttactcaatttccatgactgtacctaccctgaaacaaagtgagaaaggaccaggtgtatttttcctaagtcatccaagataaaatcctttaagaattcaggtctaaattaggcaaccaggaaggaaaaatatattaaagccaccaaaaaaagtggcacatgtccaggcagtgtgagggagtttgctgtatataagttgcctgctttgtaatttttgaaatctctgcatcacttcattgggaagtgccttctggaagagagctgctcctgtgttccagttggactgggttttgtgtcctgtttgaacttgctggaatgtaaggcaggctactatgcgttataatcgtaatcacaatttgtcaatatggtcttggcaatcatctgtgcattactctggtctgcattaagcctgtgtgtgaacttcctgtaaaacatgtcttcatctccaggttctgcaaaattaattgggcaggttaattgtgtacctgaaacttaacaagcagtttttggaagggcaaa

SEQ ID NO: 147371 - DNA, 1647 bp, Homo sapiens
ttttttttaaaatacatgcacacatatttttatttaacttaggccctgattattagtatataaaacagaaaaaccaagtgccttggtaatttacatatcttctccaaatctttaaagaaccaagctctaaaaaacacacgtaaagatatttaagtcataaaacacacacacacacacacacacacacacacacacacacactcaaactttaatgaccttcggggaccccataaccccaataatatatttaatagggtaagacctcattccatcaatatacaaaaaaaaaaaaaacaaaccagaaaaccaaaaaactaactttgattaaagacatggccccttagtaaggggcactttacaattagaaaggtttatcggtagcactttgaggtagcataattttgtaaagtcacaggggctgctctgcagtttctccctggatacaaaggtagaggcccatcagcctttgccccctgggaagaggaaggtgaaattatctgtactcattgcccagtgtcaggcctgaaccacaacttttctaccaaccccacccttggccatccctccttctacactttatgcgtcgggggtttagaacaacgtaaaggcattttgctgccttctttccctcttgggtacggcagcatcccaggctgtggagccagttgcctcttgccgcatgtgattcaccagcagggagacgcaatgcacccctgtggaaaagggaagctgggccatccacagcatgcctttttaaattgggctttaacatttcatttaagtaagagtgactcattccctgcaaggcttttaaagaggttcatttctgagtattctctcccacgattctgaccctagaaagcgctccctttctttccctccctgggtgtaatccattttggggttatccattaaagctttcctgggattttcccctggcaggagggtgaaacagaaaagcctttaaaaaatcccacacaaaacaataacaaaaaaccccaagtgcaagagcaatacccaagacagaccttcctttgggcaacgtaaaatgataccaagttaacggttcaggaaaacaactctcttttttaaaacaaaccagagcaaaccaaaaaaggaaatattcagttgagctctgcattttaaccacaaatatacagtcaaaagaggctaaggattaaagctgcaaaaatggtcccaacagcctcagacttttgctgcaggaaaattttttgcccaatggtcacagattaaagggatatctaatccccaagagcccttttgtcccaatatacttcctgtttgaaagtttaacccttccaagtaattgatatataagtgaataaaaatagcccatgtccaggccccaaagggcatgagatggaaatgagttgccacttaaaactgtcattcaatatcatagaaaatcctcaaaggctgcccagaaacagggccccaggcagtgctgaacatgccagccaccaagtcaactgccacccgacccaactgagcattaaacttcaagtatccaaggtgctacaatagctggtcctctaaagacctcaggctgactctcagaagcccccactccaccccaccccattatacaaaaagtaaaaacattgctcatggtcattacaaaatacg

SEQ ID NO: 147372 - DNA, 1913 bp, Homo sapiens
tttttttttttttttttgccagacaatctttttattgttcactgaaaaattgcaggtctgcaaagagtcaattgcattgtatattgaatgcaaggtctgatattgcaagtatatatgacatggtataacatataaaatattacatattttacacagtgacagtaccccgcctcttctaaacactaaaatttaatagaatgaagtaaaaagcctattaaataagaaacaaacactgcaatcataaacaaaatgcactaagcaaaatactttaaaattgttgtgtgtgacatctatcttgtctaccggggggttagggaatgggtgggagcccaggaaaaaaactgaggctaacaaaaacaggccaacaccctccggggaactctttcccctgggatccaggcccgctgggtgccccgtcacaaggctgcccccatctggatggacccagcccaggctttcaggggctgcctgagggcccacactggaatggctaacgcctggtctgggggctgggctgaggtgaatgggaggaagtacccaggtaggaataagcttctctccccaactgccttattctgcatcccatgcctatggatatgaacacctagtgtttctggtgtgaatctgccactctccacaaacattgaaatgtgattgagaagaaaatgttaacgctgggaacaaaagccattttctacgcagtctgcagatatcatcattaattcctttcatcccatgttttccattaagatggctctaaaagaggctgctgcctattatacagccagtccaggcaagcccaggatagaggtaacaaaatttctccagttataactagtaattcaaatgaatcaaaaataaatataggcttatactagagagcaacacagtctctattattcacatggtaatatattcaagaattgcaacaatattcacaattctctaaggtcaacatatttccctccaagcagaaaatccctgaatggaagggagtgtataacatcaataactcctgtttgtctcacataatatcagggctcagaaagctccattatagataacaaatgcaaaataaaaaaaaaaagcatttcaatatatgtacagcaacagaggaagactaggccctccctctggggcctccttggcataaggcaaagcatggcctatttgcgacaaacagtgtcctaagctgactctggaaaggctcatgttttacgataaatcagaattacaaagttccttcattcacaggtaacaaaggattattaaataatttcctgaactaagacaacagtctcaccatcaaagaaaattttcttctcatctgagtttttataaatgagattttacaatacccagcttttttagttaatatgaaaccatcggcgtacagagaacatcctcaaagctcaagatgagtaaagctaatattctcagattttccacgctctacagagcagcaaatattttatcagaatatccatttaacacagttttaagtccataataaccacctatgtatttttcttattcaaagaagaccatgttttgataagaataatcccagtttgatgagtatcctattccccttgatgttgtacaataaatgtcactgttgagtctctatatccttgactcttccagtcaaaggaaaatcctgtataaagctggaaaactgcaaactccagcggaagcactagtgttagtgctgaagtaaactttaggggaataacccacagtcgcttatcagactgtttacagcattgatagaagccctcctcttcttttatctctattatctctattttatctctaaacattctaatattttaaacatgggggttcactgatatcgataaaggtctagttcatgagtaaggttttggtctctggaatgatgtgtggctagc

SEQ ID NO: 147373 - DNA, 1659 bp, Homo sapiens
tttttttttttttttttgcaaatgacaaacaattcatttttaattaaatactaacaaggaaaaaaggcaccatggcccattcaagtattttgcataagatgtaacaaatattgtaaacaattaataggtggacaagagagaagaagatctgttttccgtgaacaatctcccaaataaaaagaaaattcacattgcccttggatcccagacacatacaaacgcacagtggacggtgtgagaggacccgttgggggggtgactttggaaaatgtgggcttggattctacagaacctctccttcgcaggctcccctggggaaaggggacctttccagttggcgttcccatggctttcttgggtgtcccagcagagctgtttatacacgtggttaacacaattactggctttggaactgggtccccagttttccaattgcaagtcctcccataccctctggtcaaataagaataaattaggaagtaggcagggagagacttccaataaagattggaaaggcgtattgcaggaggtggggaggggctattgcttcagggggaagggactatggcaatacaaaaaaacactccaaccagaaaatcagcaagtctcagaccttaagatctgcaaagtgtctcagaacttgggcaagaaaaaggcttttacttttatagggagaagcccagcaacggctgacaaggaatcatatggctagcaggcagttacaagattcgagccaggtgcccaggctaaggcttctagagacagggagacagggcacttaaatccctttgaggttttgttttagagatggctccaaggcccttaaaaaaaaattcttgggttgtaaaattggcaggaggttaatttccacttttaaaaagatttacctacatccccatctgcacaaagagcttgctaactcactaacccaaacttgagttaagcttccctcctccccaccagaccctggactttgggccatcctcagcctgagccagcaaacagcccctccacaaggagacaaaaaaaaaaaaaaaaaaaaaaggctgggcacaacgtcattccctgaacgtggttctttctagccatgtttacttcttccaataaaagaaaagtccccctctgcccgggctttgagacgcttgcagatcttgccatcggtcggtctgagccttttcactattcccataaggccccttcctctcccttttgcaatattccctttccccttctgcaatcatgcttaggaataaggtctctccttccctaagcccagatttatttgtatttgacacctcaaaacagcatactgggcactggaaagaaaaggggatgcataatggccagtcttcctcctgggcagcctccctgaacagagccaggagtgaagcattagtagaactggttgccgaaagtctatcaaattcccaaacattccaccatcttccagttccacagtaccactttatgggatggaggtgatatgaaaataataaaactaaacaaaacaaaaagcaagaaaacgacaacccaggtctctttctggtgtggttccagggagggtggactgcaggttcagatggctcatgcagtcactatggctgtggcgctgtcatttcagtgctatctacctcctgatgtgagggagaaaggctggag

SEQ ID NO: 147374 - DNA, 613 bp, Homo sapiens
caccaaaggcatgtggcatatttaccaatgtcatgtattctgaacaaaggcaaaaaatacaaattcctaccattaaactggcttggttgttgtttgggttggagtagctgtgggggcttggggaagggtgtcgtttctttctagtagtctcatgtcgctttaggtcagctgggctggcttacacgcgctgtgcggtcttcatggagatgggagctctgtgtgtcaagcacaggaagtggtctcccagcgttcagcctgaagcagcccaagtcctgtaggtgctggtaagaggaagtgaagacaggaagttgcgtgggcatctcacactggcaaacaagcacaggttccctcaggccgtcttccatctgcctcctgtgctccttcctaggtccttggcctgcttgtcctgtcccaggggatgtgcccagataaggctgtcagtgaacacccccttacccccttttccccatcatcctcacgtacagttttggtatgctgagttccaccgtattgattaggcacattttagaaacgaataaaaaggagaagtctctccttgcagctgagggagtgaggcatttgcaggtatcctgaacctcccagcagtcacccg

SEQ ID NO: 147375 - DNA, 949 bp, Homo sapiens
cactccttgccctcgttaaagagggtcctgttcctctcttcctgttgatgaaggagcgtgagggtgttagcagtgtgagatctttggacacccatggaatcctttcctccacaccacccgtgcacttgccaaagacagggatgaggcaagtggttcttcctggggcccggccgatcctcaggatgcagagaagtcatgtagacccaccagccccaccttggggggaggcgtgccagcctgtgtcaggtgtgcttgtgtattgctgtgctgtcatggggccctctccttgagagccgcctctctgttcttcctgtagtatattcccctttgaaccaccctttcctgtctgaattctactttgcctcctttctcttcctcctctttgcatggtttgtgtgtatagacagtgggaacctgaggatggggatcttgctcagcctatcttcgggggcaattgctgagcttcaaggatgggctaattaatgtggggataagcccaggtgcaaggggaggagggcaggctgggaacagagcggagaatgcccatggccctttattccttcttccctcggtccacgaacaggaagaggctgaggccatgctgggcagggtctggatgcccactttccatgcagcagcatttcattgctccaaaaccatcctttctttgcttttcgcccttgtttcccacattcccttcggtcctgcccaagggcggggacttgaagagctggaagaaagcagtcagtgaccctcccaacggccccccttcgaaggtcttccactcttcctctgggctcctccttggcctaaatggcaggggggtcaacgcttgagaaagaaccaccactgtcctcgatgtgtcccaaggcttggagcgaatccggtcctcttggctctcccagccctatcacaggaatcattcctggggtctgtccctctgaggcta

SEQ ID NO: 147376 - DNA, 2043 bp, Homo sapiens
  misc_feature (1)...(2043): n = a,t,c or g
atggtgaattttccaactgatggagtccaggaaagggataatagtgagcagaggggagataatcactggaatgccaagaaggaaaaatcaactcgatttggcagattactgggggagaggtctgctccagctcagccacctgctgaagggacagaagggactgccccaggtgggggtccccctggccctcctcctaacatgaccagtaacagacgactacagcaaacccaggcacaagtggaggaggtggtggacatcatacgtgtgaacgtggacaaggtcctggagagggaccagaagctgtcagagctggatgaccgagctgatgccttgcaggcaggagcatcacaatttgagagcagtgctgccaagctaaagaggaagtattggtggaaaaactgcaagatgatgatcatgctgggagccatctgtgccatcatcgtggtagttattgtaaggcgggactgaagagctggaagaaagcagtcagtaccctcccaacggcccccctcgaaggtctccactctcctctgggctcctccttgcctaatgcagggggtcaccgctggagaagaaccaccactgtcctcgatgtgtcccaagcctggagcgaatccgtcctcttggctctcccagccctatcacaggaatcattccctggggtttctgtcccctcctgaaggctcaccaggtgtaagttggcccttgttcctttgggggtaattaagcccttcctactttcctttcctcaccccaccctgtacccctccttcctgtgtgtctctgctatccccccttcccctccccacccaccccatgtgcatgagcaaatgtgcaaacaaaacccctgggactttgcagtccaaataaaagttgagcttccccacatccccgttccttcggtttgcccatgagacgatgtggggtttcccactgtcgtgtctgtcgatcacctctttgtctttttttcctaaccctgatctcatacttgtatagagtaataacaacagttgtacttccaccaaaggcatgtggcatatttaccacatgtcatgtatttctgaacaaagggaaagagatacaaattcctaccattaaactggcttggttgttgtttgggttggagtagcctgtgggggcttggggaagaggtgtcgcttctttctagtagtctcatgtcgctttagggtcagctgggctgggcttacacgcgctgtgcggtcttcatggagatggggagctctgtgtgtcagcacagggaagtgggtctcccagcgttcagnccctgaagcagcccaagtcctgttaggtgcttgcccgtctctaaaccccccagaaacatcagtgcaaagaaggaaagagactgctggcaaaagatgactcccaaaggctgttctccgctctggtgggacaaccctgggtgcctggccccaaggggctcctccagagagatgtgtgtgaccctggcaggtgtaaagtggcacctgcagagcccaggttctgcggtgagagaggaggagatgctgtaggtgcctgccaacgcttttgcctgaggcttggagaaggaggcaccagagacttgggcttggggatccacccagctcctctcgggtccacatcaccaccacatccagagggtaatagccagcaatgtcgcagatgagggtgggcagcagagcttcgtttgccaagctcagtcgtactttaggggaagcttggatgttgagctggatgatctgctgagctcggtacagagaggtggtgatctggcaaatgtaggtcccctcgtcccctgcccttgtgctgcagtcgccactccacactgatgaggtccaagcccggtgccatggagaagccacagtccaaggaggctgaggaccccagcaggaagctcagggattgggtctgtgtcatcacctggaactccactgcagttcgcacagtcccctgggggctcagtggcaagttcagcgtcgggtgccagagcgcctcattcttggcgaccctgggagtcttcatcaccaaggagatgctaggtctctc

SEQ ID NO: 147377 - DNA, 400 bp, Homo sapiens
ctgggcagaaaaagaagaaaatagaagacttaaacaacactataaaacccatatcaccctaaaccataccatagaaaatcccaccccaacaacccacagtataccatattattctcaagtgtaccatggagcccttccttcaacacagacccatatgcctaagtcataaaacaagtctcaattaattttaaaacattgaaacccatacaaagtatgttccccataacaatgaaatgaaattagaaatcaatttaaaaaaagcaatttggggaattcacaaatatgcaagtcaggtgctgtggttcatgccaatattcccaacactttgggaggccaaagtaggagaattcctggagcccaggagttcaagatcagtgtgggaaacatggcgagaccccat

SEQ ID NO: 147378 - DNA, 4969 bp, Homo sapiens
ctaggatgaaacacgaagtggtttattaatatgcctaattgatgatgatgcagcacgggcagccctggagactaaggcgaggtgccaacactgagagcatggccccagatttgcccgacggcgatcatgcctaccaggccttttactgttctccacctgtgcctttccttcttctcttgatatgtacacgagtgtgttcactgtggcatgtttcatcttatgaaaagcctccttgtgcccactgccaataaaaccaacggcatgttcatcgtcgccactgtcagacacccacaagacagagtcattcagagacaaggaattctggagctgactgctgccaccagaccgaacagaggcaaagaacaccttgtcattgcgttcacacaagaattttagtctttgagcccttttgtgcatgaacacaccatccaagtgaccagtttccacagatcggatctctatggccttctctccccagcccattgtctgattggatcgaatatatgctactgatgtaggcatctctccccactgtagaactacatccttggtgatccttccatatgtgtttacataaaccccctcatcttcatagcacaccagaagctccattccatctgtattggggaggatgatgattgcatggggtttgatgctacactggatatgtgttggtagataaatgtcatagactgatcctgaatccacatcaacagcatggaatccagcacaggatccatagatcactttcaacctctggccttcctcaacagtgagatccaccagtaatggcttatgtaccaattctccaaatgacttaaaggccataaatttgtgatatggctttggtgcccacgcatagacttccacagaactcttcaaagcaatcaccagaaatttgattctttcatattttacaactttataatgtacacatccttccaaatcccctacggttgtccatccctgcttcttctcaacttctggatcattgtgaagtattttatttcttaaccaggacaaatagtagacacgtaacttatcctttttgccagatattgtcaccaagacattcaagccctcaagtacgtccatttgttgaaatcgtcttcggttgataagaggatagaccttcccttggccacttctgtccagcagcatcaggccactctctgtacccactagcaaattcactccccataaggcagcacacagaatctcagagttaaacctcttcttgtatttacgaatctccggggtgtcactctgtggcctagtgttggtaggattcacattgaccactgagcctttccgggtaggatcttgccttatggcttctggtctcatcccatcacaggaaaatcccaccacagatgtcactgttgttccgctagatggagaaatctgtagtaatctggggtctataaaaggtgtaaaggaggaggaagatttgtgtttctggagtgtgctactagcggactgagtctcattagcagtgagcttgtcctggggtgtctgtggggacatggtgggtgtcggctggctggaggatggggaggaggaggtggaggaagtggaggaggaatggctttgctgtaagagatctggcaagaggtgaatgcgaccggcaaagccattgctctcatgatggctggcacgcttttggtcaactgtactctggcggacgattagagtgccctccttggatggggtcatggccggctcactttctacatcatcatggacaatcatggttttcacagattccgtttcaccattgctcaaattcagagatgacgctgctctggtgtcctctggtcctgaggtggactcgtcagccccttcctgctccacatcgtcgtcctcctcatccgtcgtccccgactcctcactggatgaggagtagtccgttactttgtgaggtggccgtacatcttccactgctcgaagctctttggccagtgcggtcagatcagcaggcttgaggggtctgaaaacttcctttttatcttcaggttttttcactgcattttccaggcgctgagatggagagccttcagacttggatgatgatctcactctgaagcgttccccggagccactctgagacccagggtgagacccgggctgggatcctgagttgctggaccctgaggagctgccactgccaggtctgggcaccagcttctccactctctcccacagaagcctgggctcaatactgctggtggagtttctctgtcctgcctggctattctgctgcccactgccctgcagtggggaatctcgacgggacagaacaggggagcgagatgttgttctcacaggaacccttggaggcacctcgtcactgtctgatctagaccaagccttttgggtagggtcaggcgcctctgacttagagtcagagctctgactgagcacctcactgcgggaaggtggacatgggtcctgtggctccgctggtctctgcagggcgggatgcacagactcggagttgccattggaaaaagactctgatcgggaaggcactggtggctccaatactctgcctgtctgcttagactgggcttcaggggagctgtggttagttttcctaaatctatcttccacctctcgcgctcggtcagcaggctcgtagtgggctttgggctcgggagcatggaagcttggcttgctcctttcctgctgcggtggtggcggctgctgcgagtgctgcgggtgcggcctcctatggtcatgctgtagagacaggagatatgcttgttcttgttgcaactgcctctggagcctctctgcctgccggtgctcctccatctcccgccatcggcactccagtaacatggcctgctcctggagcagctgctgctgaaggacttccaagtgccgctgctcctcttctagctgtcgcctgatatactcctgttctctttcaactctcctcttttcttcttctgcccgtctcctctcctcttcttctttgcgccttctctccaactcctctagacgcctcttttcttcttgttctctccttcgctgttcacgttcctgctgccttctagcttcccgctctctcctttgttgcataacactcctttcaacacagttgaagaaatcaggtattctttctttatttttggagactgactgttttccagtcatcctatatttctgtccacaaacttcccgggaatccttgtcatcttctttcttactttgctggaacacatcctccagcagcttctcttctagccgtcgcctctgttctttctgctgctcaatccgcttctgtctctctgccagcagttgccttttatattcttcctgctcccggagctgttgctcctgtagtaactgttgtctccgaagagcctcggaacgttccttgttctcctgctgcagtctcaggaaatctcggcgaagagtagactcaccaggcacgttcacaatggaacttggctctccttcctgttcaggcacttcctcctcttcttcctcactcccactgtactcatactcagtttcatctttctcgcctctcttcttcctggtacgatctatatgatccttaagctggattctaacttgcctttcatttggctgatcccttataaaaggatgtttcaaaagctgctctgtagagggccgctgcatgtaattcttcaccaggcacccttctataaaactaaaaaacttcttcgaccatttttttgacttcagccggggaggagggtttctgggaatgagaaacagtgctctcattggatgcatgtcacagagagggggagcaccttctgccatctcaatggctgtaatgccacaagaccaaagatcacttctgtaatcataggtggcatctgggttctcatcacaggcgatgacctcaggagccatccagtagggagtgcctatgaacgtatttctccgccccacagtcctgtccagctgagcactcacaccaaagtcaacagtctggaagcttctgtgaggcctggatctggctgcctccccagcttctccaacagtgaccagcagagggccttttgaatgaaccacaaccttcagtgctttcagagaacctaaagcacttggaacttctgctgatttttcagtgacttctgcatcccacccaattggatggtggtggtggtcaagtttcacctctgcattctcagtcagcaacacattctggcccttgatatcccggtgaatcacatgatgaatgtgaagatgtgccagtcccctcaggatttctctggagatgtaagcgatccagtcttctttgagtgtgttccctttggtgttcttcacaaggtctgtaatggacccagccccacagaactccataacaagccagagttggtcatcatgtcctggagggctctttttgatgaaagcaccataatatgttgcaatgtttctgtgatgagagtatttctttagcatatttatctccagtttgatttcttcctcttcatccttagaggactcatcctttgaagtgtgattataggacgtgatgcataggaggtaaaggcagacacggagagccgcagggatagtgcgaggggactgcccggccagctctcccactaactgtgacctcgggcaatgcactccacttctctgagcctcggtttgttcagacagtccatctcctctgtccttggactgagggtcctctcccctccttgctgctcgagggtcactgccagtttccctgcttgggccactgaaaccaatggtcagttgtgcagggaggcctacacatttcataaagctgtagtaagtcattttggtcttaaaacagttcattaacttgccattgtgttccttaatctttactccatctatctgcaagtacccagggacacgcacgcgtgctgtgaggaggtggactggaggctgcaggagtggctgaacgaaagacatgaaaagaaggcctcgagacactgctgatgtcctccgt

SEQ ID NO: 147379 - DNA, 1852 bp, Homo sapiens
  misc_feature (1)...(1852): n = a,t,c or g
gagcggggatgtcccaaaaaaatccacgcagaaaggggtgaaatttcaatcacttggtccatctttgggaaagccagcaagttttaagcacttagtaattccaatgaaacaccatggacatttttcaatgtgtagacatttgacttacagacatggagcttcaagtctttggataatgttaagaccattatgccacatcctttgttctctgccttcttccacttagcatcagtcattgagcatttattcaaagacatctgcccaccttttactgttctccacctgtgcctttccttcttctcttgatatgtacacgagtgtgttcactgtggcatgtttcatcttatgaaaagcctaaacatggatataaattacaagccggaatttaattccaactaaagtcctgtggcgatggaatccagcctacctcaaatccctttaaaggtaggattaatttttcaaccttctctaggttaactacaaaccagtaggcggctttggccttcagcactgctccaaacctcatacaaatgaaacatcccatttcccatcttcctttactttccccaaaaagtaagcttctcagcttgtctttacaggtatacacaaaaccaccagctgctgtgtctgcattcatgagtggatgtactggtctttacagatggtttgtagctcaaaggagggcctttttcaaaaagatggaaccaggaacaggaaactgacaagaggtcagagtggggtgccaagtgggatgggaagcaaacaggtacaaatgggctgctgtgtttaggtggggtgggagcagagggaaaatcccccattttctcaatatacaggaaaattacccacaaaggaaaaagatcaagcctaaaaaacagcaagtttcttttgatgactgaggttaaagcggcccataatgccagttatttcccactccagaactccgacaagaggaaagtaagatggcaggactgtgacatggagtcctgatcctttcctgagacggtaatatccttacgggagcttgagtgatgaccatgaagccatgaaacaaattctttctcaagacaatttattacaaattgtcaatgnattatattccataaagtaaaaattggtttaaaaaaacagagaaccaagagagcaagtgagaaaacgagaaaagccaggacttcgatattacacctaaaacacagaagatgcccactttatgaataagcagaattaactacattcttaaaatagttttagtgcattgcatttttagaaaagggaaactcccccacccccaagaaaaggttcctgcaacacttgaacagttttgtgtgactattctaatgtaaccaccctgtctgctaccaacccctctacatcgagaacaatgagatcttgtgtcatgggctgcagttgccccatcaacctctaatggtgaatctggtaaaaacaaagcattctggtttctaaacttgtaagtaaactgcatcagccttaaggctaatttcccatcttcatggacagttcttgtgcctgctgatttgtgacaataaaagtcaaacttcaatttggtcggtttggtattaagattaaatttaaccttaatggttttttcccaaaacaaataaactaaatcccctctccatgccttaagaacaatgaggtaggcaaaaaaaaaataaacatgtggtttgaatttttttctttcttctgcaagtgcagactgtggtaaaacttttgttgcacgtttaggtttaaacaaaaattaaacctttaactgaggcagtggtaatactgtcccccgacaaagttttggcccttatacaaaatgcacacgttttctttttctttctcgtgc

SEQ ID NO: 147380 - DNA, 2419 bp, Homo sapiens
  misc_feature (1)...(2419): n = a,t,c or g
tttttatacttatgattagttttattataaaggatacaaatcagctccacaagccaaggaagacacagggaaaggtctggaagggtcttgagcacagtgctcccatgccccctcttcgtggaattagggcacactgccctgcccggcatagccacagcttcaccacccaggaagctatgctgagctttagtgtccaaagtttttaattagggtttcattgatgtactgatttaaaagcacttggccagatgattaaactcagcctccagtcccccgccccataggtcagggtgactcaaagcctcaaaacctctaatcacatggtcaagtctgtcttggtgaccaggccccaagcttctgagtcatccccaccatttaagcataaagctcaaggtggtgatcccatgggcctcacaaattaacaaagacactcctattacccttgaaatggtcaaggactgaaagtctccctcccagggaaagcagggacaaaggccagttcaattctttagacaacctccaatccacacctcctgggaattcctaacccaattgaaacaaggataaaatccgtctgaacattgagggcccattgctggcctggactatttttgtttcttttttttttttaaagcttttttattatagacattttccaaacatatccaccagtaaaatcgaataatataatgaaccctcacacctccatccctagtaactgattatccgtgtgtggcttactctttgatcgagtactctcctgctttcccccttagcccccacagttaagactgtccccgcagcaaagccccagacaagactatcctatcggtctgaggaattccttatcaaaagcttccccgaagagggaactctatataggggcaggactaaagtgtgctgggctatagggtctgcaggaaatctcaacccttggggaggcccttggggtgggggcctggggcagggtccctggggcagtagccgttctgtaggtggggcgggctcatctgctggaacaacagtatggacgaaacaaatagcatttttgtacccgcactacaattgcaggagaacgccaaaacaccgcttttattgcattccaacccttcctaaggcacgtccagccagcccctggccttgtcctacagcccatgattatctcccttaaagagttaactcctaaaaaaatattaagctcaagaaataacagctcaaatactcctaactaatttaaaatcaatagtgagaggcagaatacgggtaaaagataacatattagtattattgatcacagatcaatttcagagtacttaaaacaggaataatcagctacccacatcttggaaaaatacaaagacttgatcctaacccttttatttatcattgccacacggactgagacaagtccccagtacctgggtctagggagagttatttaatgttggtgtttctgggaatttccngatacttccccagtgtatcagagtgttcccctcacacatgctagcaggcatctccccactaatggaatagcaagagtggtgaacagagcgatcctctactttctcatcatattctgcaaaatgagaagtcagatggatacaaaggttcctcccaactctaggactccagggttgtgtggcgggccctgcaaggcttaggttatgtaaggtctcaccattgcaaacagaatggttcaagacgagcaaggatgcactcctcaatttacaactccaaagcaccttgcacagagcttggctttggttacctacttgactctcttttaaacagagggtcttatgcttccctatcctgcagctgcaacatttgccagggaagtggcctccactgttgccctcatttctgccagaagagagccagagcaggagccatggatttatctctggcattctactcctccaagcccagctgtttcccaagtattaattggtttcagacaaggctttcgtttcagaaaatcaatgaagatgcttttgatcatcttcaaaagcagagaagaatcccccaaagaacttttccttcccaagtagtaaaggaataaaacttcctaaggaccacatatcaccctattgcagggatgtctttccctacaaagattattgctctcccgaggaactgaaaatccttgttaggagatgacaccgatcaggtatgtacctgcatgtcaggtgtgtagctgtcaggaatatcaagtgttctgagcctgcctagagtgccctagagttccagcacgaggcctgagatgcattacattctcaaatatccatatgaaaaggtctggggtctctagttccccaatggtgacttcttttcatattataggaagcctgacaggagctctcctctaagcaaagcccagagttggactcatttcactataagaggctaaattcct

SEQ ID NO: 147381 - DNA, 496 bp, Homo sapiens
ggcacgaggtggttttgtctgctgcgcccgctcttcgcgctctcggttcattttctgcagcgcagccggcaggatggcccacaagcagatctactactcggacaagtacttcgacgaacactacgagtaccggcatgttatgttacccagagaactttccaaacaagtacctaaaactcatctgatgtctgaagaggagtggaggagacttggtgtccaacagagtctaggctgggttcattacatgattcatgagccaggtaagctatgctatgttatagtaaagcagtaattgttgaaatattggtggttatggttgtcaaaattttaaaaatatcattgacatcaaatgatatctgaaagtaactgttctgataagtttttttttttaatgactaatttcttgactctggagagagttccaattttatggtaaataaaataccacagcagtgaaagtaacacattattctacttggaaaataatgtaagaagt

SEQ ID NO: 147382 - DNA, 653 bp, Homo sapiens
ggcacgagcggcgagttgttgcctgggctggacgtggttttgtctgctgcgcccgctcttcgcgctctcgtgtcattttctgcagcgcgccagcagggatggcccacaagcagatctaatactcgggacaagtacttcgaagaaacactacgagtaccggtttgttatgttaccccagagaactttccaaacaagtacctaaaactcatctgatgtctgaagaggagtggaggagaacttggtgtccaacagaagtcctaggctgggttcattaccatgattcatgagcccagaaccacatattcttctctttagaccgacctcttccgaaaagctcaacaaaaatgaagtttatctcggggatcgtcaaatcttgtttcaaatttaatgtatatgtggtatataaggtagtattccagtggaatacttggagaaatggttacaaatcttttcatccatacctgtgcatgagctgtattcttcacagcaacagagctcgagttaaatgcaactgcaagtaggttactgtaagatgtttaagataaaagttcttccagtcagttttttcccttaagtgcctgtggtgagtgtgctgaaacagtttacttttgttcaataaagtttgtatgttgcatttaaaaaaaaaaaaaaaa

SEQ ID NO: 147383 - DNA, 2315 bp, Homo sapiens
  misc_feature (1)...(2315): n = a,t,c or g
ccagnagcaaccctccaggccttggtgtggtatccaacatggtagccctccgtacccctgcttcctttttagcattccaaaggccactcagggccttcaaatttagccaatggtgaattattggatatagggacttttagagggatgcaggttgagtttgtaccataaccttagaggtgaaagtcccaggttctgacaccaggcgttagactttgaaaaactgtaaaaatgggctcactgaagcatgacagcatcaggacccctggagtggctttcaaaacttaaccttcttactgcaggctacttcctggaaatccctaggaacttaaccagctttcctgaaacactgccgccatccatgggagggtgaaagaggaaaaggggcctaagttaaaatcttggcttctactgtgggccgaacttcaggaggagccctaaagctaaagcccttggggcttgacagcttctaactttttcacctcctaaactacccactgtgccaatgagttgcccgagtgcccaaggatcagctgtgaacactcgggacccctggggtcaaagtccacaacacccacccactgaagtccccacatgaccatttcacatacacagtagatacagagaaactcaaagcagcaaagacacacacacatgaataaacaggctgttggttggaactccttggctctctgcatacaaaacactgtgacattacccatttgaactagcatttcccataagttaacatttaaaggaaccagccagtcccattcacccttcccctttcacctgggtataagacaaatgaaatcgtgggtgacccacagccagccaaaaatggtcctgacaatgaatatgccaataggctgggccatactggttgaagtttccaaatataattcccagcacacaggccaacccttaggccgttaaatatgaaatcaagatttggaccttgatgcgaacaaccttatcccttcacacaggtttcattcctattccctgatgcctcccttttgaagagtagttgagagtcatctagggctatgactaccactcgggtagcaggactcattcctttaataggatcagcagtgagttggggtacttgggaatggagccatcggggttagggaaagaggaatgccttaattcataagatattcactaatttttacataaagggaaaatacatttttcttcattttttcaaggcacttaataaaaacataaattggtgtgcatgcgtgcgtgcgtgcatgtgtgtatgtgtgtgtgcgtgcatgtgtgtatgcgtgtgtgcatatgtgtaagaacctaggtctctcaaggctgaagcagcatggttaagcattcttgtccacagtacttgcggacttctgggttagaatcagttcttgtacatcctagctctgactctcccgaaaaggttgaaatggtgtttgtaacccaaaggagaagtcggtgtttactagtctatttgagagacaaatgcatttcaaagggtctctgtctacactgctcagccttgggcccttcatatgatcacagaggttgggcttctctttccctcacatctgttctcccttcccgtccagtggtgaccagtttacaaataaactccgctgatgggggagaacataccaatagtctctatttttccctctattttcccctgcctctgagaaatatcacacaatgctgcttccaggggcttagagacctgaagaatatgtgtatgtgtgtatgtatatatgtatatgttttagaagaacatggaggagggaaaagaaaaggcaaaaccaccaccagaagccccacaagggaagccccaccaccagacactgtgggtctagaattagcgaatggctcctattcactcacaaagcactttaagcctcgtccaggcgcttctatggattttgacgtgtgaagtttcctttccagtttgttttaaatcgcatacaagaaagagctgttcatgctgaccctaaaatggcaattttcccctggataaggaaaagttaaaggcaacaacatcctacttaaatgctaggactggaaatgggcagcttgtagggttggctggcagaacctacaccacagtaaatcccttaagtcagaagacaatcagaggatgggataagctggacggcttttttgagttttatttgtaaagatggaaaggctgaaaaagacactttgcttttcaagtgttgattaggaaaggagaaaagcggagaattaatggatcactgctccacttctattcctggaaaagtcattctcctcttctgcctcctttgagttgctga

SEQ ID NO: 147384 - DNA, 288 bp, Homo sapiens
  misc_feature (1)...(288): n = a,t,c or g
ttttttttttttttttcggggttttaccagttttatttctagactttcatgtttgtctttttgtcttctgctggaaacatgccggttacatgttggtgctgggaagcgccgcggtgcaaccagaaatgcacagacccagccgcccgccgcccagaccctcagacttncgagtcacaggacagactccgctgtgccccgtgcacttgncaccagcctttgcctctcgatacacacaacagaacactagtacataacagattaaacataccccaaaaactttgaaccaaa

SEQ ID NO: 147385 - DNA, 306 bp, Homo sapiens
tttgcaccccgctgcgggcccacgtggttggggccctgccctggcagggtcatcctgtgctcggaggccatctcgggcacaggcccaccccgccccacccctccaaaggctggtggcaagtgcacggggcacagcggagtctgtcctgtgacgcgcaagtctgagggtctgggcggcgggcggctgggtctgtgcatttctggttgcaccgcggcgttcccagcaccaacatgtaaccggcatgtttccagcagaagacaaaaagacaaacatgaaagtctagaaataaaactggtaaaaccccaa

SEQ ID NO: 147386 - DNA, 357 bp, Homo sapiens
  misc_feature (1)...(357): n = a,t,c or g
nnnnnnnnnnnnnnnnnnnnnnggggttttaccagttttatttctagactttcatgtttgtctttttgtcttctgctggaaacatgccggttacatgttggtgctgggaagcgccgcggtgcaaccagaaatgcacagacccagccgccctaattttccttgcacccatgcctgtccaatcagatgactctgggaaacgccaaacaggctgaatcaatgtctttgtgtggttttttttcttccagattggttttttctcacctataaaaggatctatctttaaaaataaactgtattaaatctgtaacatcaaaggcagaaggtttgtgtgtgtgtgtgtgtgtgtgtgtgtatctg

SEQ ID NO: 147387 - DNA, 368 bp, Homo sapiens
ttttttttggggttttaccagttttatttctagactttcatgtttgtctttttgtcttctgctggaaacatgccggttacatgttggtgctgggaagcgccgcggtgcaaccagaaatgcacagacccagccgcccgccgcccagaccctcagacttgcgcgtcacaggacagactccgctgtgccccgtgcacttgccaccagcctttggcctctcgatacacacaagtccttgccccatcacgacagacaaagcgtccctcaaggcccccgcgtggttcagacagacgccgcagccaggatggttgaggtaagcgtgagccgtgttctggaggggtggggcggggtgggcctgtgcccgagatggc

SEQ ID NO: 147388 - DNA, 586 bp, Homo sapiens
tttttttttggggttttaccagttttatttctagactttcatgtttgtctttttgtcttctgctggaaacatgccggttacatgttggtgctgggaagcgccgcggtgcaaccagaaatgcacagacccagccgcccgccgcccagaccctcagacttgcgcgtcacaggacagactccgctgtgccccgtgcacttgccaccagcctttggcctctcgatacacacctcctcccgcctgtcctccctcacacgtcagcctccacactcttgccacctcccttcaacacttcctaaataaaaattacaagaattacatagccaagatgtgcaaattgtctattttgtcactaagttttttaaaggaaggggcaggggataagaattcatcggaaccgaacttaggttgagtaccctaattttccttgcacccatgcctgtccaatcagatgactctgggaaacgccaaacaggctgaatcaatgtctttgtgtggtttttttcttccagattgtttttttctcacctataaaaggatctatctttaaaaataaactgtattaaatctgtaacatcaaaggcagaag

SEQ ID NO: 147389 - DNA, 360 bp, Homo sapiens
tttttttttttttttggggttttaccagttttatttctagactttcatgtttgtctttttgtcttctgctggaaacatgccggttacatgttggtgctgggaagcgccgcggtgcaaccagaaatgcacagacccagccgcccgccgcccagaccctcagacttgcgcgtcacaggacagactccgctgtgccccgtgcacttgccaccagcctttggcctctcgatacacacaacatccaggacttgtgcccttgccccatcacgacagacaaagcgtcccgaatgagagtcctacaggtacaacgccgtggtggcacgtaagacacacttgttataataataataataataattatgc

SEQ ID NO: 147390 - DNA, 354 bp, Homo sapiens
  misc_feature (1)...(354): n = a,t,c or g
ggatgattggaanagccttcctggaatttgttccaagttttgggtatgtttaaactgttatgtactagtgttctgtttgttattgttttgttaattacnccataatgnctaatttaaagagactccaaatctcaatgaagccagctcacagcggagtctgtcctgtgacgcgcaantctgagggtctgggcggcgggcggctgggtctgtgcatttnctggttgcaacgcggcgcttcccagcaccaacatgtaaccggcatgtttccagcagaagacaaaaagacaaacatgaaagtctagaaataaaactggtaaaaccccnnnnnnnnnnnnnnnnnnnnnnnnnnnnnnn

SEQ ID NO: 147391 - DNA, 4365 bp, Homo sapiens
tactaaattcgctaacgctcgactttttttttttttttttcttggggttttaccagttttatttctggactttcatgtttgtctttttgtcttctgctggaaacatgccggttacatgttggtgctgggaagcgccgcggttgcaaccaagaaatgcacagacccagccgcccgccgcccagacccttcagacttgcgcgtcaacaggaaaagactccgcttgtgcccccgtgcaacttgcccacccaacctttggcctctcgaatacacacaaacattccaagggactttgtgccctttgccccattcacgacaggacaaaagcggtcccttcaaaggccccccgcgtggtttcagacagacggccggcagccagggatgggttgaaggtaaaccgtgaagccgtgttctggaaggggtggggccggggtgggccttgtgcccgagaatgggcctccgagaaccaggattgaccctggccaggggaggcccccaaaaccacggtgggcccgcacgcgggggtgcaaattcttttgggttcgggcagcttgcttaggtgaccggggcacgacagcactgtgagctgtgctcatttgagatttggagtctcttttaattagccattatgggtgtatttaacaaaacaataacaaacagaacactagtacataacagattaaacataccccaaaacttgaacaaattccagaagctatttcaatcatccggaattggagcccctacgggtacaactcgtgcgatcgaattagtacacactttttataatcataataataataataataattaggcaacttcaatagctacacgcaaaagaataacacagctgtaaaaaactactatgaatctacgcccccgatcagatgaagtgcccagcatcacaggcgcagggaagagaagagggacacagcctcggtctctggggacaccggcgcggttctcacgcacgcggcctcggggccggcccccggcccagcctgtgtggggatcgcgcccgcgtggtctggcccgccaaaagcaggcagaacccttgcccgctggggtccaccatgggctaagtgaagcatggaggtattgtgaaaccagcaacctttttgggaatagagcagtaatcacattaagtcaaaattgatcacataaaaaaaaaaaaaaaactacaaaaaaggcatctgtaatacaatgttctaagagaaaactaaaactagtacatggcagtatatgacattgtaaaacaaaaaactgatcctccaatagcagcaaacaatgtgaaagagatacacagaagcgatgtgaatatttccaaaccgtgcctggaagtcaacggtagcagcgcaataagaaaatggagctgcggcctgtccccggtgtgggcaccgccccttcccctcgggagcctcctcctcacacctcctcccgcctgtcctccctcacacgtcagcctccacactcttgccacctcccttcaacacttcctaaataaaaattacaagaattacatagccaagatgtgcaaattgtctattttgtcactaagttttttaaaggaaggggcaggggataagaattcatcggaaccgaacttaggttgagtaccctaattttccttgcacccatgcctgtccaatcagatgactctgggaaacgccaaacaggctgaatcaatgtctttgtgtggtttttttcttccagattgtttttttctcacctataaaaggatctatctttaaaaataaactgtattaaatctgtaacatcaaaggcagaaggtttgtgtgtgtgtgtgtgtgtgtgtgtgtatctgtgtgtttaaatcaaggggagattgcatttataaatcatactggccttatgaacatcctctgcaataaatatactttttagccttaactataaattatatattttagtgtttaaaaaccttccggtgtgaaacatctaagataacccttaaaaaccacctgttctctaggtaaacctctgaggtccctactttcaaacaccagttggcaccaaaggattcctaaacttcaacttctttaaagaaaaggaaaggaacttatcatcctggcaatgtgagaatgcaaacctttttcttcttgactggcacgcagcctcccaaacaccccacctccactgccaccacagtggcccacacttgcctcaaagtcctgcttgcaaacaagtacatggatattcccaaaccattccattagaaaactgccctccctgcacacacaacaaaaacagcgctatttcctacacctattggactgaaagtgcttggaaatggaatggttttagaatatgaagaagaacacaaaccaagtagctgtgggttgaacctggacgtgagctggctgcagggccgttgggtagaaaaccagcatctcataaacaggtcactacaaaaataggaagagtataaaaatagcgtgatattaggtcgctatgtcgtcttctctctatagtagcgtatcgtaggagtggggcaggtggccttttcccggacccctgtacgctggctggtgcccgacaaaccctccactgggatggtttgtcactggatggtttgttggggtggtggtcacaggcgcaaaggacatgcacacggccacgctacgctactgtaaccaagaggtgactttcagccatgaataaggtgaagaggttccacattctacctacggaatatattaccatacaatggactttataaagtgactacatgcatatgagcaagcaaagtacagagatgcctagaaccccacttacagctgtgctttatcaggaaaagcacaagaatatgtttttctacctaaaaccctcttctactttaaaaatggtttgctgaatttttctatgtttttaaaatgtttttatgctttttttttaaacacgtaaaggatggaacctaatcctctcccgagacgcctcctttgtgttaatgcctattcttacaacagagaaacaagtacattaatataaaaacgagttgattattggggtataaaatcctctatcatctgtagcacaaccctcctcccccaccgctcagggttatgcaaatactattttttttttctctctctctcttttaaagacagtttttgggtaatctttttcttttgcttaagtcagagatggaagggggaaagagcaaaggaaaaaacaaccaacaacaaggagaatgaagctttcccttctgggtatcaaaatgctcccggagaggaggggactgtcaggggagcacctggggccggctccgcccttcgctgcgggtggcggtggcgcccgcctgcctggcgccctcagatgtccacgtcccgcacgtcggtgggtgtgcaagccaggtccacctcctcctcctcctcttcctcctcctcggcggccttggggtccatgttctgctgggcctggcgcaggcttgactcccagcagggcttcgatctgctcctggcaggcccggaggcagtctgggtcacacttgatcactctggagaggaagcgtgtgaggcggtagtaggacaggaagttgttggggctcctcaggttcaggccttgcactgcggccaccacgctccccgctgccaccatggagggcggattggaaatgaacttcacatctgtggcacagagggcaacgaaggtctgcgcgtgtttgcggatgatctgtttgttctcctccgcctctggcattttggagaggaagtgttcaatgaaatcgtgcggggtcattgcggccaggttccacttgagcttgttcaccaggagcagctccatttgcagcagctcctcgggccggatggagttgtcggtgtagatgcacagcttctcggccgtcagggggatggtctccttcatcttagaggccacgaacatgcaagtggcccccagcagctgcaggcggctctttttcacgggctccagcgacaggaagcggtccaggtagttcatggccagcgggaagacctcctcctcgcacttctgttcctcgcagacctccagcatccaggtggcgacgatcttccgcatggacggcaggacctccttctgcacacatttgaagtaggacaccgagggcgcgcaggtctcctccgccttcagcatggcccgcagcacccggtcgttgaggaggttggcatcggggtacgcgcggcggatggtttccacttcgcagcacaggagctggtgttccatggctggggctcttcctgggcagctggggagggctgtgggtcctggctgggtccgcgctcggctctcgcttctgctgccccgcgctccctcgcgctcttctgcccctcgccggagcgtgcggactctgctgctcgctgctactgcgcc

SEQ ID NO: 147392 - DNA, 1517 bp, Homo sapiens
ttttttttttttttttttaagaattcattgtgtatttattattcacagttaatcactacctaccaaatgctatccgcagagttaaaggattaagtacataggtctttatttaaacactgatttttttttttaaatatatacaccacaaaaacttagttcagcaaggcttcatgatatacaccaattccaaaattaaaacaatcaaatgggtcagggtgtagaatgccagattccttttatcatctgcgagggaaaagagaagcagggttagggaaaaattaggggaaggcggggacaggctctgcccaggaagagctgcccgcctcctggcaacagcaaacgctccaggcctggggccctgttcattttctgggagtcggaggggagactccccatcggcccgctttgggaactgaaaaggcccaaaggctgttcaccagctccccggaagagaagggaggcaagtctttgttttttgtcgtggggaagggggtttggggtgggagaaaaaagatttacagcaacatcacccaacaggggacccagaagtggagagaaagacagaagagttctgccgaaggcctttggtcttcctgtctttcccaatcttgccttccccaactctccctgcttccctgggaccatcggtaggggtggggagcagcagtcaacacagcccactgggaagggaggcacaagcagcactccagcttcccagtgctgccctcacactcacctggacaggtcaggggaaaacaggatgaaaagccatggcccaaatctaaagagcaaagacaattgaaaaattgaattactctcactgtgtaaccccaagcataggaaatagtgaaaacctgctaaaaactggaggctgcgttccccaataattcctcctccgctctcctttgtctgggaacttgctggttcccaagggtgcaataatagggagggggcgggggccacaacccccgaaaacggtgaaggacaggcttccgacccccctgtaagccagatccagtgggatgtgggagagctgggcggtcaccttccctcttgccccaggtggcccatcacactcaacactgcacccctgggcaagcagttccctgaaaaccccaaggggctcacaacccttaaagctggagcttaaagcctcctggcttagtacaagcaggagaacgcctcaccttccactcctgctttgtctcctttgctctaccctggctcccctgcccggagggaaaaatatttacacagagtaggagacaaaattggctgaaaagctctggactgcctttaacttattttaaaacaaaacaaattaaaaaaaaaaaaaaaacaccactcagaagcaacccttgaaataaggaaaaaggcactatgaaaaaacaacatgctcgataatcccactggaagggccaacaaagtggaaagagacaggctttcaggtgggctttttttttttttttttgagacggaatctcgctctgtcacccaggctggagtacaatggcacg

SEQ ID NO: 147393 - DNA, 1423 bp, Homo sapiens
tttttttttttttttttttgggggaccgggggcacaatgcctcccaaagcccacaggggctttctttaatcagaaagaccattaaaacaaacgttcttcttttaatacagccattgaaaagatgacacattaagaaacatgtaaacactgcagctgcttaattacaagttgcactgcttgatttagtacctatggcactcccaggtttgggggaccttaagagaagggggacaggagcctccccctcactttcacaagttggatagagaaggccaagaatgtgggtaggagtaaggaaagagaaaaacaggaaggacctgggcttgtgcaacagcgcctgaggaggatttcaaaggcaaattctgttcttcttaggtttcttccaagaaggaaagggttttaagatgttagggaaggtttaggaaaatggaacgtgtttttgttcagttggggaaggcaaaggaatttgacaaaatgcctcctagttaggaatatcagctagggaaaagggaggggatacagagcctgacctcatggctcttgaaaaggcaaggaacccaagaactagcctccgatatccacttaagccccaaccttgatccatcaagggcagcgcatgggtgatcctgttcccatgaggattgtgtgtcgcacctgaacacaggacacagcgtgggggaaacaaccttgccttccttcggtttcatgtgccgccagtcgccctcctaggctacccgaaatgcctctccctccagtctcagctctgatccatgagccctgccaaaggcctgagactgcactgatctccaggaaaacagaagtcttcctttcccacactaactgaaaggtgacacaggaaccaactccttaactttccaaattactgagaactcagactgccaaataccgtacctcttggccagtggggcctgcttggtctttctataaagggaagggaggccaatgggagagtaatgcctgtcatttccaggggaagcagaaaaaggacagtaaacaactttactaccataggccccagcgcagagccgtagagggagaagtaccttcctctctagcataacaagaatattcacaagagtttttttatatgtgttttttaaacacacgataccaatggtcctaaacttgggtcagtcaactggtgaagatgacctatttggcaagcagaatgattcggaagtgtggcagcagtcttctgccgaggccctggtctcccctgtgtaacctatagggagaggggtaaaggggcttgggcattagtaagaacagccttgccaaaggttcgaaactaagccccaattcccagaaatgaaatggagagtgaaccctcgtctctcctcaccctccatttcatttctgggaattggggcttagtaagaacagccttgccaaaggttcgaaa

SEQ ID NO: 147394 - DNA, 450 bp, Homo sapiens
  misc_feature (1)...(450): n = a,t,c or g
ntttgaccngcgctttgacccagcgctgcaggaattcggcacgagtgggagtttcgtgaagctgagggtgagttcctgtgattcttgttcgcttcaacaaaaagtgggagaccaagtttttatagcaaaagaccaaattagctgtatagtcttgaatgcataaaaaaattaccctagctttcttaacacttaaggttttgtgaggattnnnnnnnnnnnnnnnnnnnnnnnnnnnnnnnnnnnnnnnnnnnnnnnnnnnnnngttattagtgcttcgtataacttgagaaatagagctgagctcattcccttcctgttgattcaaaaataatacctacatgaaaacatgattccaagttgattgaatgttgtaggaattactggtttagagtagcccagttctcggcctaccctgctggttgggatcttactgtattcttgaatgcactg

SEQ ID NO: 147395 - DNA, 3333 bp, Homo sapiens
  misc_feature (1)...(3333): n = a,t,c or g
tttttttttttttttttttcacacaagaaaagtttattgaaaaataaagttctccctaagttttctctacaacatgtggaaaacaaagcagtgctctctaatgccaggacagtacatttggacggcgacaccttgtttgcagaatcctgcattactttaacccccgaagtgaatccacacaaaatggggtgaacccaagaattggtttgagaacacagatggcaaacgggccatttagctttaaagaccgtcaaggtttgtgacagcaaactacaggtgggaaggggacgtcaccatctcctttgggcatcaacctattatgcttataaatacttgggttaggacaatgaggcaaaatggcttccccaagttcgctccctctcagctttgggcaggatgtggaagctgctctgagggttccctggacacgatgtccctgaggagggcgtgtaggaccctcccaggcaccacagatccctttgaggcacccaccccgtccccgccatcctccatcaacaggtggccctgccccacccacattaagcacaggggttctccaagcccgtgcgggtcacgggtggcatctgagggagtgtcttaaggctccacaaaatctgggctacagagatgctttgcagatgggaaattccagtcactgcatccacaggacgagactgctgatttggcggaacagaatccaaaggaatttgacgaagacaccaaactccagcaaattccacacctgcaatctatccagagttgtgccaagacagggcaggagataaggagatagataaaactttgaatccatccagggaagtaagaggctaaatcctctccccccaaaacaaaaagcaaaccgatatttaggtgatttgggaaaacattcagtcatgagcagccttctgggagctgttctgagaggccaaaatccctgccccattgcccccagctggcagggtggggttggttttctccaggaggcggccagggaataacctttaatttgatggaaacatgcagaactaaccagtctgggaattctgaatccctgaggaacaggaagggcccacccccagcctgtaggggcccggcaaagggacctgccctggggaatgtgtaagttcaattggtcattccttctcccttaacgcagaaaagcctctattattgcattcaaaggaatactgttaactttgactcaaggggtgcagtctgcccagagaaccccattttaatttctagcctcaaaaatgttccttgaggaaaacccttggaatgttcctgaaagacgtcagtggggtaaggtccagtatgtggctatgccaaaggtcacctttaccttttccagctggagttcataaattcttgcagccttgtttccttgggggctgaagtctggcatattttcaaaaccagtgcattcaagaaataacagtaagatccccaaccagcagggtaggcccgagaaactggggctactcctaaaacccagtaattccctacaacatttcaatcaacttgggaatccatgttttcatgtaggtattatttttgaatcaacaggaagggaatgagctcagctcctatttcctcaagttttacgaaacactaataacaatatttaacatttactagggcttactaatggccaagcactgtgctaaacactgaatcctcacgaaaaccctaagtgctaagaaagctagggtaatttttttctgcattcaagactctacagctaatttggtcttttgctataaaaacttgggtctccccactttttgttgaagcgaacaagaatccacaggaactcaccctcaggcttcacgaaactcccagcttccgtaaatgagcatgaatctatttatgtccatccgtctacctcacatgaagatgctctgcagctccacagggatggatgggattagaataaagccaatatggaaattaaaatacttttaaataaataaaataatccaggcttgggatagtaacacatacaacagagcctgtcgttaacaaaatagacttttctttttaaatcaagaatttttggccagaggtgagggtggcaatgtctaatatacacaagctaggtaaaccaccttggagaaatggggtggccaccgtggtctgccctaaaaggcacacacctacctacagacatacagtttcagtccaacacatcatactgatgtcaaccctgtcagtgagctgcactgggctccactcccaaagggggaagctcattattcacttttattaaatcttgcattcactaaagaaacaaaaaaggggtgcacgttctttccctttcatgatgctaaagtatttcttctccaagcagggccctgaactccttggatgcacccattcacatgattctgcctcagccacacctcagcaagtgcgtgggtggcagggaacacaggctggttgacacgttggcaaccagcagtcccaaggtagacccaaaggtatggcagaatccagccctttcttgaggttctcaaggcttcacaccctcctctgtgggtggaagtgcacatgcatacacgctatggcctggcgggggggttatagggagcgtctggtgtccagcttccaancagctacagtggctccaagaacatgtcctgtctcttagctggaggagtcttctattgtctcttcaatcagcatccggatttctcataaaccccaaagaaaaacgaataggcacatcaaggatacaaatatcactatagaaactgactaatatctccaaacgcacagcaaacacacaaaaaagcaaactgtaatgagcagtgacacaaacccagtccaaacaaaaatgaaaagcatctccatttatacatgtgcaaatcaaactgcatacacaaaataaatgcggtgtttaccagcattcaaagaagtctttttactcctcaaagtatctacctttcaatggaaagctttctcttttagtaaattagatgaatgttttccctcaagttttttaagagcttaggatcacaatggggaaaataatccaaaaaaacaggcaagatattatagcggggaaaaacattaatcataacttaggatttctctccccatggaactgttatcagctataaatcggtttaggattctatcaagatcagcaacggcaaaacctccgcaggcttccagcccacacaggggcaccttcctctcctcttccatgcagggcagttggaagccccctccccagtttcctctccaggatcactgactagacctgggccaagtctgaggaggcctgggagccagtacacattcaggggtcactgactcttcagataatgc

SEQ ID NO: 147396 - DNA, 459 bp, Homo sapiens
  misc_feature (1)...(459): n = a,t,c or g
aaataatgtattaaaatttacatcttaaaaaaatccagtacagtgcatgaagcatatttttaaagaagttggtgtcttacttggtcagaagtgctaaatctgctagtagaggtgcatgcctttcattgcttttcaaaacaatacagctgtgtttatttgtgaagttaaaatgcttttggagtttatttctcaaaattaaaatctggtcacatgagctttagtttgttttctggtttaaaaaataaaaaggtttctcttaacagtatttccagtgacaatgcaaggtaagtatatcaaaggaaatcaacagttgtgcttgggggctttttgttatgggatattgatttcttgttttttttccgtaacattgtctgctgcaatttaaataaaaattacgacattttaagatatttcatagacaaacctacnnnnnnnnnnnnnnnnnnnnnnnnnnnnnnn

SEQ ID NO: 147397 - DNA, 2834 bp, Homo sapiens
atagctgcgggtggctgtgctggtggcgttcaagatgtcgaccaagaatttccgagtcagtgacggggactggatttgccctgacaaaaaatgtggaaatgtaaactttgctagaagaaccagctgtaatcgatgtggtcgggagaaaacaactgaggccaagatgatgaaagctgggggcactgaaataggaaagacacttgcagaaaagagccgaggcctatttagtgctaatgactggcaatgtaaaacttgcagcaatgtgaattgggccagaagatcagagtgtaatatgtgtaatactccaaagtatgctaaattagaagaaagaacaggatatggtggtggttttaatgaaagagaaaatgttgaatatatagaaagagaagaatctgatggtgaatatgatgagtttggacgtaaaaagaaaaaatacagagggaaagcagttggtcctgcatctatattaaaggaagttgaagataaagaatcagagggagaagaagaggatgaggatgaagatctttctaaatataagttagatgaggatgaggatgaagatgacgctgatctctcaaaatataatcttgatgccagtgaagaagaagatagtaataaaaagaaatctaatagacgaagtcgctcaaagtctcgatcttcacattcacgatcttcatcacgctcatcctccccctcaagttcaaggtctaggtccaggtcccgttcaagaagttcttccagttcgcagtcaagatctcgttccagttccagagaacgttcgagatctcgtgggtcgaaatcaagatccagctccaggtcccacaggggctcttcttccccacgaaaaagatcttattcaagttcatcatcttctcctgagaggaacagaaagagaagtcgttctagatcttcttcatctggtgatcgcaaaaaaagacgaacaagatcacggtcacccgaaagacgccacaggtcatcatctggatcatcccattctggttcccgttcaagttcaaaaaaggaattaatgtattaaaatttacatcttaaaaaaatccagtacagtgcatgaagcatatttttaaagaagttggtgtcttacttggtcagaagtgctaaatctgctagtagaggtgcatgcctttcattgcttttcaaaacaatacagctgtgtttatttgtgaagttaaaagtaaatagcattttaagccataatgtcccaaaatagatgttctgtcattcattatttacaaccatttgcttcatttaaaaccatttcagctataacaaagtactttgcttcctaatttaaacccatttttgtcatttccaaatacatccttgccattggctaagacaggattacctaggcttgcctgaactttgggcatggaagaaagactggaaactagttggaaacaacatacttatggaaaagaaagtcagcctttatatgctgttaacagatgtcagagtgattctcaccaaaaaaagttaatctatgttgtacgcagccaactggtaaatgtctattttgaaattcccctatgctaaggggtgccttaggaatcattgtggtcccttttatccagctttacttttttgctccacatttaatgcaaaagaatcttgtgatgtctacaaggagagaagtgggatatattttcctttcctgacacataatttggggcaaaaaagaaagtcttaagagtttatcttttctctgctgatacggttgcttgataaagacatctcaaaatgtttaccaatgttttaagaagctttgtgtgatattcttccaaaatgtagttaccaaatataatatggtagaaaaggctaaatcatacttaatgagcaaattgaagtaagcttttaaagtatatttctcttttggtgaaaggccaatggagacattgtgaatttaagtgaacatttgcttcaagatgttaactataaacacactgcatacaattttcttctgaataacaaatgaatgcttattgctgcatgatgtaagcaaaagtcattatttttcctattcatttgaaataagttatggcttaaaatgcttttggagtttatttctcaaaattaaaatctggtcacatgagctttagtttgttttctggtttaaaaaataaaaaggtttctcttaacagtatttccagtgacaatgcaaggtaagtatatcaaaggaaatcaacagttgtgcttgggggctttttgttatgggatattgatttcttgttttttttccgtaacattgtctgctgcaatttaaataaaaattacgacattttaagatatttcatagacaaaccaaacaaaaatatatgtttttactttaaagtgaatgtttttctcttcagctgatctaaaaatgaaagcaagatatcttatgtagaaatattttgataatatttttacagtgagctttcccatgtttttatgtcttaagtttctttgctgcgtttatgtaggttgcacaagaacttttactcacttgtaattgtgcctcagactttttgaaagtctaccttctaaattgccccgacgatctagattctacatgttaccattggtttattcttgtgctttctgtatttaaaactttggctgtactaagcaaatgcaaggttataatttagctaatagtagtttacagacaattctgatgattatgatttcatttggtttaactaagctgtactagttcatttcataaggaaatgatactgtagacaaatgtaaataaagcctgtgagtcaagcatcaagtggtgtttgttagaaataaactagagatttttaaactctgaaaaaaaaaaaaaaaaa

SEQ ID NO: 147398 - DNA, 1117 bp, Homo sapiens
cgactttctacttttcaactttgaacttcaaaaaaacattactttgcttatcctttgtactttgatcaggttgtttaggaattgtagatcaaaccattctttgatcattttattgtttaaatttttagttccatttataatttttatagccaactctcggttatttctgtcttttgagattgcaattcagaagctgtatgtcgaagtaatttatgagttgacttttatacttagggcttctttaaatactaatagtcaaggaattctagaggcatctaataaaaaattaactttcaggatcattgggggaatctgtccctcattttaaatatggtggtaaatggcatttccacagcaaattgcttcatgccctttgtctataaggaaattattccttgtagctaatacatttttcattttgcagtccaaatcttttttgagaaaggcctatattaggttactttatctgtactgacacttttaatattggaagaatgcaactgtcatctgtccagccttttctgcaacaggctaattactcagtttcattaattttctctttgttcccaattatatagtcattttaatgggctttatttgtagtctttgcaaatttttcatattttattaagccttgtgaaaataaaggattatgtaaagtctattaaattgctgggttcagtggtaggattatctcatgattcctacttgtacagaatgattagtttggcctccttccacatttgggagtttagatggttaagaatttcacacagtcttgtttcccctgcatttgtttctttgtaaaaaaaaattactctgtttttgagtgggaattcattctgttgctttcttacccacttctgcaaatttttatcttagccacatataatccccctagtttgttgtcatctaaacttaatgaacatgttctctattccataagccaggtgattggtgaaaacactaaaccaaccctgagcccagggccaacacctacggaacaccactactttacccagacgccacaggtcatcatctggatcatcccattctggttccccttcaagttcaaaaaagaaataatgtattaaaatttacatcttaaaaaaatcca

SEQ ID NO: 147399 - DNA, 444 bp, Homo sapiens
  misc_feature (1)...(444): n = a,t,c or g
atttctaattaaaaagggatattaaataagtaccgtatataaaacactttctcttttctctgcctccacaatgggcacgtggatcctgccctgtctctctgtgcctcgggaagggaagggaaggaccaggggatggaggaaggtcaaccactcacacacacacaaccaggtctcctggggggacagaactagtggtttcaatggtgtgaggacataggtccttttaggctgcaccccaggaaggggagcaggaagaggatgagggcgagtcccaggaaggggangctgtcatgggctgcttcttcccaaactcctgggtcagagccggtgtcctcatccctgtacctgtgatctgtctttctgtccgtctgacctggggtagagaggctcagcgccagggctgggtttgtcggtgttcccaaaactgggtcatatttgccccca

SEQ ID NO: 147400 - DNA, 675 bp, Homo sapiens
atggcttttccagctccagccattatgttcatagtccagtcagcaggaaggaaaaaggtgagagagaagtggtcccaggctgcacccatggcagaaggaggagggcagaatcatcacgaagtggtgaagttcatggatgtctatcagcgcagctactgccatccaatcgagaccctggtggacatcttccaggagtaccctgatgagatcgagtacatcttcaagccatcctgtgtgcccctgatgcgatgcgggggctgctgcaatgacgagggcctggagtgtgtgcccactgaggagtccaacatcaccatgcagattatgcggatcaaacctcaccaaggccagcacataggagagatgagcttcctacagcacaacaaatgtgaatgcagaccaaagaaagatagagcaagacaagaaaaaaaatcagttcgaggaaagggaaaggggcaaaaacgaaagcgcaagaaatcccggtataagtcctggagcgtgtacgttgatgtgacaagccgaggcggtgagccgggcaggaggaaggagcctccctcagggtttcgggaaccagatctctcaccaggaaagactgatacagaacgatcgatacagaaaccacgctgccgccaccacaccatcaccatcgacagaacagtccttaatccagaaacctga

SEQ ID NO: 147401 - DNA, 1641 bp, Homo sapiens
atggactttctgctgtcttgggtgcattggagccttgccttgctgctctacctccaccatgccaagtggtcccaggctgcacctatggcagaaggaggagggcagaatcatcacgaagtggtgaagttcatggatgtctatcagcgcagctactgccatccaatcgagaccctggtggacatcttccaggagtaccctgatgagatcgagtacatcttcaagccatcctgtgtgcccctgatgcgatgcgggggctgctgcaatgacgagggcctggagtgtgtgcccactgaggagtccaacatcaccatgcagattatgcggatcaaacctcaccaaggccagcacataggagagatgagcttcctacagcacaacaaatgtgaatgcagaccaaagaaagatagagcaagacaagaaaatggatccgccctggcccagaagcgcgacaacgtgctgttccaggcagctaccgacgagcagccggccgtgatcaagacgctggagaagctggtcaacatcgagaccggcaccggtgacgccgagggcatcgccgctgcgggcaacttcctcgaggccgagctcaagaacctcggcttcacggtcacgcgaagcaagtcggccggcctggtggtgggcgacaacatcgtgggcaagatcaagggccgcggcggcaagaacctgctgctgatgtcgcacatggacaccgtctacctcaagggcattctcgcgaaggccccgttccgcgtcgaaggcgacaaggcctacggcccgggcatcgccgacgacaagggcggcaacgcggtcatcctgcacacgctcaagctgctgaaggaatacggcgtgcgcgactacggcaccatcaccgtgctgttcaataccgacgaggaaaagggttccttcggctcgcgcgacctgatccaggaagaagccaagctggccgactacgtgctctccttcgagcccaccagcgcaggcgacgaaaaactctcgctgggcacctcgggcatcgcctacgtgcaggtccaaatcaccggcaaggcctcgcatgccggcgccgcgcccgagctgggcgtgaacgcgctggtcgaggcttccgacctcgtgctgcgcacgatgaacatcgacgacaaggcgaagaacctgcgcttccaatggaccatcgccaaggccggccaagtctcgaacatcatccccgccagcgccacgctgaacgccgacgtgcgctacgcgcgcaacgaggacttcgacgccgccatgaagacgctggaagagcgcgcgcagcagaagaagctgcccgaggccgacgtgaaggtgatcgtcacgcgcggccgcccggccttcaatgccggcgaaggcggcaagaagctggtcgacaaggcggtggcctactacaaggaagccggcggcacgctgggcgtggaagagcgcaccggcggcggcaccgacgcggcctacgccgcgctctcaggcaagccagtgatcgagagcctgggcctgccgggcttcggctaccacagcgacaaggccgagtacgtggacatcagcgcgattccgcgccgcctgtacatggctgcgcgcctgatcatggatctgggcgccggcaaggaattccatcatcaccaccatcacgcttcctag

SEQ ID NO: 147402 - DNA, 464 bp, Homo sapiens
  misc_feature (1)...(464): n = a,t,c or g
ccgcggaaaggagccctcgagaccattcggccagngcggnggaattcattagagagttttatttctgggattcctgtagacacacccacccnnnnnnnnnnnnnnnnnnnnnnnnnnnnnnnnnnnnnnnnnnnnnnnnnnnnnnnnnnnnnnnnnnnnnnnnnnnnnnnnntctttttttaaattaacagtgctaatgttattggtgtcttcactggatgtatttgactgctgtggacttgagttgggaggggaatgttcccactcagatcctgacagggaagaggaggagatgagagactctggcatgatctttttttttgcccacttggtggggccagggtcctctcccctgcccaggaatgtgcaaggccagggcatgggggcaaatatgacccagttntgggaacaccgacnnnnnnnnnnnnnnnnngcggcccctcaagtttaaaggccccctttat

SEQ ID NO: 147403 - DNA, 2891 bp, Homo sapiens
tcgcggaggcttggggcagccgggtagctcggaggtcgtggcgctgggggctagcaccagcgctctgtcgggaggcgcagcggttaggtggaccggtcagcggactcaccggccagggcgctcggtgctggaatttgatattcattgatccgggttttatccctcttcttttttcttaaacatttttttttaaaactgtattgtttctcgttttaatttatttttgcttgccattccccacttgaatcgggccgacggcttggggagattgctctacttccccaaatcactgtggattttggaaaccagcagaaagaggaaagaggtagcaagagctccagagagaagtcgaggaagagagagacggggtcagagagagcgcgcgggcgtgcgagcagcgaaagcgacaggggcaaagtgagtgacctgcttttgggggtgaccgccggagcgcggcgtgagccctcccccttgggatcccgcagctgaccagtcgcgctgacggacagacagacagacaccgcccccagccccagctaccacctcctccccggccggcggcggacagtggacgcggcggcgagccgcgggcaggggccggagcccgcgcccggaggcggggtggagggggtcggggctcgcggcgtcgcactgaaacttttcgtccaacttctgggctgttctcgcttcggaggagccgtggtccgcgcgggggaagccgagccgagcggagccgcgagaagtgctagctcgggccgggaggagccgcagccggaggagggggaggaggaagaagagaaggaagaggagagggggccgcagtggcgactcggcgctcggaagccgggctcatggacgggtgaggcggcggtgtgcgcagacagtgctccagccgcgcgcgctccccaggccctggcccgggcctcgggccggggaggaagagtagctcgccgaggcgccgaggagagcgggccgccccacagcccgagccggagagggagcgcgagccgcgccggccccggtcgggcctccgaaaccatgaactttctgctgtcttgggtgcattggagccttgccttgctgctctacctccaccatgccaagtggtcccaggctgcacccatggcagaaggaggagggcagaatcatcacgaagtggtgaagttcatggatgtctatcagcgcagctactgccatccaatcgagaccctggtggacatcttccaggagtaccctgatgagatcgagtacatcttcaagccatcctgtgtgcccctgatgcgatgcgggggctgctgcaatgacgagggcctggagtgtgtgtgcccactgaggagtccaacatccccatgcagattatgcggatcaaacctcaccaaggccagcacataggagagatgagcttcctacagcccaacaaatgtgaatgcagaccaaagaaagatagagcaagacaagaaaaaaaatcagttcgaggaaagggaaaggggcaaaaacgaaagcgcaagaaatcccggtataagtcctggagcgttccctgtgggccttgctcagagcggagaaagcatttgtttgtacaagatccgcagacgtgtaaatgttcctgcaaaaacacagactcgcgttgcaaggcgaggcagcttgagttaaacgaacgtacttgcagatgtgacggatccgccctggcccagaagcgcgacaacgtgctgttccaggcagctaccgacgagcagccggccgtgatcaagacgctggagaagctggtcaacatcgagaccggcaccggtgacgccgagggcatcgccgctgcgggcaacttcctcgaggccgagctcaagaacctcggcttcacggtcacgcgaagcaagtcggccggcctggtggtgggcgacaacatcgtgggcaagatcaagggccgcggcggcaagaacctgctgctgatgtcgcacatggacaccgtctacctcaagggcattctcgcgaaggccccgttccgcgtcgaaggcgacaaggcctacggcccgggcatcgccgacgacaagggcggcaacgcggtcatcctgcacacgctcaagctgctgaaggaatacggcgtgcgcgactacggcaccatcaccgtgctgttcaataccgacgaggaaaagggttccttcggctcgcgcgacctgatccaggaagaagccaagctggccgactacgtgctctccttcgagcccaccagcgcaggcgacgaaaaactctcgctgggcacctcgggcatcgcctacgtgcaggtccaaatcaccggcaaggcctcgcatgccggcgccgcgcccgagctgggcgtgaacgcgctggtcgaggcttccgacctcgtgctgcgcacgatgaacatcgacgacaaggcgaagaacctgcgcttccaatggaccatcgccaaggccggccaagtctcgaacatcatccccgccagcgccacgctgaacgccgacgtgcgctacgcgcgcaacgaggacttcgacgccgccatgaagacgctggaagagcgcgcgcagcagaagaagctgcccgaggccgacgtgaaggtgatcgtcacgcgcggccgcccggccttcaatgccggcgaaggcggcaagaagctggtcgacaaggcggtggcctactacaaggaagccggcggcacgctgggcgtggaagagcgcaccggcggcggcaccgacgcggcctacgccgcgctctcaggcaagccagtgatcgagagcctgggcctgccgggcttcggctaccacagcgacaaggccgagtacgtggacatcagcgcgattccgcgccgcctgtacatggctgcgcgcctgatcatggatctgggcgccggcaaggaattccatcatcaccaccatcacgcttcctag

SEQ ID NO: 147404 - DNA, 3277 bp, Homo sapiens
aagagctccagagagaagtcgaggaagagagagacggggtcagagagagcgcgcgggcgtgcgagcagcgaaagcgacaggggcaaagtgagtgacctgcttttgggggtgaccgccggagcgcggcgtgagccctcccccttgggatcccgcagctgaccagtcgcgctgacggacagacagacagacaccgcccccagccccagttaccacctcctccccggccggcggcggacagtggacgcggcggcgagccgcgggcaggggccggagcccgcccccggaggcggggtggagggggtcggagctcgcggcgtcgcactgaaacttttcgtccaacttctgggctgttctcgcttcggaggagccgtggtccgcgcgggggaagccgagccgagcggagccgcgagaagtgctagctcgggccgggaggagccgcagccggaggagggggaggaggaagaagagaaggaagaggagagggggccgcagtggcgactcggcgctcggaagccgggctcatggacgggtgaggcggcggtgtgcgcagacagtgctccagcgcgcgcgctccccagccctggcccggcctcgggccgggaggaagagtagctcgccgaggcgccgaggagagcgggccgccccacagcccgagccggagagggacgcgagccggcccggccccggtcgggcctccgaaaccatgaactttctgctgtcttgggtgcattggagccttgccttgctgctctacctccaccatgccaagtggtcccaggctgcatgtcccatggcagaaggaggagggcagaatcatcacgaagtggtgaagttcatggatgtctatcagcgcagctactgccatccaatcgagaccctggtggacatcttccaggagtaccctgatgagatcgagtacatcttcaagccatcctgtgtgcccctgatgcgatgcgggggctgctccaatgacgagggcctggagtgtgtgcccactgaggagtccaacatcaccatgcagattatgcggatcaaacctcaccaaggccagcacataggagagatgagcttcctacagcacaacaaatgtgaatgcagaccaaagaaagatagagcaagacaagaaaatccctgtgggccttgctcagagcggagaaagcatttgtttgtacaagatccgcagacgtgtaaatgttcctgcaaaaacacacactcgcgttgcaaggcgaggcagcttgagttaaacgaacgtacttgcagatgtgacaagccgaggcggtgagccgggcaggaggaaggagcctccctcagggtttcgggaaccagatctctctccaggaaagactgatacagaacgatcgatacagaaaccacgctgccgccaccacaccatcaccatcgacagaacagtccttaatccagaaacctgaaatgaaggaagaggagactctgcgcagagcactttgggtccggagggcgagactccggcggaagcattcccgggcgggtgacccagcacggtccctcttggaattggattcgccattttatttttcttgctgctaaatcaccgagcccggaagattagagagttttatttctgggattcctgtagacacacccacccacatacatacatttatatatatatatattatatatatataaaaataaatatctctattttatatatataaaatatatatattctttttttaaattaacagtgctaatgttattggtgtcttcactggatgtatttgactgctgtggacttgagttgggaggggaatgttcccactcagatcctgacagggaagaggaggagatgagagactctggcatgatcttttttttgtcccacttggtggggccagggtcctgtgcccctgcccaggaatgtgcaaggccagggcatgggggcaaatatgacccagttttgggaacaccgacaaacccagccctggcgcatgagcctctctaccccaggtcagaccggacagaaagacagatcacaggtgcagggatgaggacaccggctctgaccaggagtttggggagcttcatggacattgctgtgctttgggggattcccttcaacatgctgcacgcgcatctcggccccccaggggcactgcctgggaagattcaggagcctgggcgggccttcgccttactcctcaccctgcttctgaagttgccccaggaaggccactggcaagatgtccccggcgaaagagaagagacacattgttggaagaagcagccccatgacagctccccttccctgggacttcgcccttcatcctctttcctgcgtccccttccctggggttgcagcctaaaaggacctatgtcctcacaccatttgaaaccactagttctgttccccccagggagacctgggttgtgtgtgttgttgagttggttgaactttccttccatcccctggtccttcccttcccttcccgaggcacacagagacagggcgaggatccacgtgcccattgtggaggcagagaaaagagaaagtgttttatatacggtacttatttaaatatccctttttaattaagaaattaaaaccagttaatttaatttaaagagtagggtttttttttcagtattcttgggttaatatttaatttcaactatttatgagatgtaatctttttgctctctcttgctctcttatttgtaccggcttttgcatataaaattcatgccccccatctctctctacctgatcggcgacagcctctaccttatctcgaccacactttcacttttgctaactacctaagctctgcccctcccccgatcccctggctccccagcacacattcctttgaaataaggtttcaatatacatctacatactatatatatatttggcaacttgtatttgtgtgtatatatatatatatatatgtttatgtatatatgtgattctgataaaatagacattgctattctgttttttatatgtaaaaacaaaacaagaaaaaatagagaattctacatactaaatctctctcctttttttaattttaatatttgttatcatttatttattggtgctactgtttatccgtaataattgtggggaaaagatattaacatcacgtctttgtctctagtgcagtttttcgagatattccgtagtacatatttatttttaaacaacgacaaagaaatacagatatatcttaaaaaaaaaaaaagcattttgtattaaagaatttaattctgaaaaaaaaaaaaaaaaaaacccaca

SEQ ID NO: 147405 - DNA, 518 bp, Homo sapiens
gtatcacttccattcctaatgaacaaaactggttctttcccaactgacttcctaattttgaaaacattctactattcttcctttcaaatcctctaaaacttagtgatcattgacattatatccaccattccttacagcccatgacaaaatacaatttttattatatctactgtataagctctattcaaaatgtcaggtgattccttttcagtgctatcactcgagtccaggcacttacaactttattcctgcacctcaaagatgttcttaatcttcctatacatttgcaaatctaatttttaattcaatttcaaggggtacaaagaaaaaagcattcaaagtagtgaaaaagtgaaaggtgggtatcaagctgagaagagagagagttttaaaagaagggaatgggaagggtgcgtggctcatgccagtaatcccagtatttggggaggagaaggcaggcatatcatttgagcccaagagctccagaccagccagggcaagagtgaaaccctgcctct

SEQ ID NO: 147406 - DNA, 1096 bp, Homo sapiens
atatattttaaaatgccagaacttgaagagggatcacaaacagcatagcattattgcctatgagtttcaaacatggtatttcatacaatgtggaaatatccaatccagcatccctcccctctcccccaaaacacacattacctccatggagatactatccagtgtttaaaatccccaagccttatggaagtacaaacttaattcctcagtacttttatacctaaattcaaagaatcctatgtaacactcatctggaaaaattcttaattccataatatcttggagataagcaacagtaaactgttagaaaacgttttaacattacatgatatttaaaaaatcaccataattaccataataaaccaataattatgctccctgctcacaaaaggcacctaccaattatgaacagaccatttttcataattatttaccactatgtggcataagggtttaggccatataaccccataaaaaatttgttaaaaggtcatggtttttccttcaaggcttaaaatccataaatgcctctaaccattaccaagtcagtaggcccaccacatgcatatactggacaaggtttgccacggccacaactccgaagtgggtacccagtcaccctggactggggtgcagtaacacaatcctgtgtgcagtacagaaagcccctcatcagctgtggcccagagaactgtattctaacagtctgtcagctcaagcttaatcaagttaggaaaactgctatttggttggaggatttccaagaaacagctgtacctgtgagaggcaggtattacctgaggggtggacgaggtacagacataaaacaggaagggttctaaatatatttgctggtcatttgaaactcaatggcacttgtttatatgagcaaaagccttcaacaccagttttctggccaagtttccctagaattttgccagccaaattaacttcctgatgttaactatttgattacaatatctcagttcccgacctaaactaatattgtctgttttcacatagctcttaaaaacatttttaaatctgacagcaaaggacagcacagtgatacctgggtgtgatatatatcagtcca

SEQ ID NO: 147407 - DNA, 1167 bp, Homo sapiens
agacgagccccatcaaactagttgggaagggccccagtgaccaagtgtataagcatcccttgaagagggattggggcaggggaggcagaaggggctctccagaccccttttccatgatgacccactccaagatattatgtgtaaattgtgttattatgtatatgggtaaagatgtacaaatatatgtcctctttgtagcagatatgattttatatttataatgtgcatcaacatgtgaaagcaatctaggtcactagcacagaggaagttgccaggaaggtggcttcagcacctccaggttggttctgggtgtcctgctgtgaggggtagaacgggaggctgctgaagtgagtagctgagcagctggagccatcccaagcatcagtgtctcagagtcctcctcgccccgtttcttcaccccgccccccaacccccagactttcctggagcatctgccctttgctcctagcagcctccccaggaagggactgcagaggcgggcaagccctctctatgtgtttttatctccaccttccccggaatctggggagggcttttgtttttacgttttcaagttcagcattgtattcggacagaagctgtgactgaagactcagtgccaaggaaaggggcttcttgtgtgtccctcgggtttggggctcttctcaaaaaaccaactactcccataaccccttactgttcaccttcaactcccccacacagctccatgaaaatgtgtgaaccccctgtttgaaattttggtatttggtaagtggagggtggggggatgggggccagcagctgtcatcccccccgggaaagccgaagcagtgtcccctggtgggttaaaaaccctcaagtcctctttgcccagtgaggcccccacccacatcggtgtgagttaggtttcctcatctggagctgtttcctcaggcattcttccccaaccctcttccttttccccttcggtgtgcctcagtggtctccttcatagagtgagagggcttgagaccctccctcaaccggactaattaaagaaagacacttgtgttcccaagtggtggttttatttttttagtttttatgtttgtatgggaaattgtggataaagtgaaaagaattgtaaataaatggtgtatttcctcctccaaaaaaaaaaaaaaaaaa

SEQ ID NO: 147408 - DNA, 948 bp, Homo sapiens
ggcacgagggtgaagaaactgcacaggactaactgggctgagacccagtggtaatgttttagggcctaaggagtgcctctaaaaatctagatggacaattttgactttgagaaaagagagggggaaatgaggaaaatgacttttctttattatattccagaagaaagaactttcatctttccctcatttttgctggattaaaacatctatctggaggcaggacaagtatggtcgttaaaaagatgcaggcagaaggcatatattggctcattcaaagtggggaactttggtggccaaacatacattgctaaggctattcctatatcagctggacacatataaaatgctgctaaagcttcattacaaacttatatcctttaattccagatgggggcaaagtatgtccaggggtgaggaacaattgaaacatttgggctggagtagattttgaaagtcagctctctgtgtgtgtgtgtgtgtgagtgtgcgcgtgtgtttgtgtgtgtgtgagagcgtgtgtttcttttaacgttttcagcctacagcatacagggttcatggtggcaagaagataacaagatttaaattatggccagtgactagtgctgcaagaagaacaactacctgcatttaatgggaaagcaaaatctcaggctttgagggaagttaacataggcttgattctgggtggaagcttggtgtgtagttatctggaggccaggctggagctctcagctcactatgggttcatctttattgtctcctttcatctcaacagctcctgggaaatgtgctggtgaccgttttggcaatccatttcggcaaagaattcacccctgaagtgcaggcttcctggcagaagatggtgactggagtggccagtgccctgtgcttcagataccactgagctcactggccatgatgcagagctatcaaggataggctctg

SEQ ID NO: 147409 - DNA, 660 bp, Homo sapiens
ggttctttccccagaggaggacaaggctactatcacaagcttgtgggccaaggtgaatgtggaaaaatgctggaaggaaaaaacccctgggaaaggcccccctggttgtcctacccccatgggaccccaagagggttcctttggaacagctttgggaaaaccttgtcccttctgcccttctggccccatccatgggcaaaaccccccaaaagtccaaggcaacattggcaaaaaaaggtgcctgaacttcccttggggaagatgcccataaaagcacccctggatgattctccaagggccaccttttgccccagcttgagtgaacttgcactgtgacaagcttgcatgtggatcctgagaacttcaaagctccctgggaaatgtgctggtgaccgttttggcaatccatttcggcaaagaattcacccctgaggtgcgaggcttcctggcagaagatggtgactggagtggcgcagtgccctggcgctccagataccactgagcctcactgcccatgattgcagagctttcaaggataggctttattctgcaagcaatacaaataataaatctattctgctatgagatcaaaatttaaaaataaaaagaaagggatttttattaagggggccgcggcctttttcctttttggggggggta

SEQ ID NO: 147410 - DNA, 1498 bp, Homo sapiens
ggtatatatataaaataacacagcagccctgcatgcctagccatgggaaagcacagcctccaaaggataaggaaagctttttgagtaaatacaacatcctaaagtgacaatctttgaaacaaggccgttcacctgttgccaagtcctgtccttccaggaccgggtgtcacagcctggatgttaacagtcgcgttctcagacccccgcctctgtatctgtctcccggttcaccagcaaacacttctctgagaaaccacctggggtgcagggcagatgccaccaactcagcaggtgtttctctcctgtgctaccaacctgggaaaaatggaggaaagcttgctttgggggctggaaggatggggtgtttaaaacatttgctcttctgcagtgcctttcaaaagctctatcaagagcccgaggccaaagaaaagatgtgtacccctctgtacactgagcaaatgtcctcccatattttgaaccaggtgggaaaagttaatgaaagccctacagtcaggaaatgtgactgcgaagcccccgctgccccagtgtttgcacaccactggcaactctcagaaacaatcagtcccattgcacgggaacacggggttttgaaacaaacagcagcctgtttttatttaaagtcgtgatcccttgcttatcgtagatttttttcataatttgattttggaaaatattgcacacaaatactactcgatccctgagtttgtgggcacttccttacattttgcacccatgaaaatgcctccaccgcctcccaggtcaaggctcccctggaatggggtgtttaagtgtcatttccagagacaagctggcagttggctcttgtgtcagagagaagcccacagtcacagtgacaccagcccgcactgtggaagggcttgctatgtgcagtgccctgagccaagtgttccacagacattatctcatttgaaccccatagcagccctgggaaggaggcattgggtgggggaaccaagttgtcctgggggagtcagtgccaagatgttgagccccggacgcggcctcgtcacttcacagccccgtgctcctcagctcccacccactgccgcttgacagtcgttttaatcactacctgggctgtggcgaacaatgccaggctctgatagatcctgctgtctcatttctcaacctagtttccctaacctaatatttcatggctatcgttaatgtgcgtttttcatcgagtaatttccacagcccgaacttgtaacacatcccaatgacaaacgtccccagttcggaagcccccgtcagtggcaatgtcacccttgctgctgcctcgacaccttccgacagcccattcagttttatgatcgccctgtcccagtgatcactactgaacctttaagaatccagatgcatttcaagtttaattgaattaaattcaaatgtataataaattccgcatgaatgctaaaaaaaaaaaaaaaaaaaaaaaaaaaaaaaaaaaaaaaaa

SEQ ID NO: 147411 - DNA, 1972 bp, Homo sapiens
ctctgttgagatatagagtttttcttccactcagactgatatagttatacattgttcttcatgtaaattcagcttaacctggttatctataatcttttattggcaaaagttaattctcagtactgcctatagagatacagtgtattttatgtacatacacaattaggtctaattcttgataattcaggttaaatttagtttggcattttcctaccacttactaaaaggtttacattaaatgactgatttaaatatataggtgcaatgttctatgtttattttaattgttatgacatttaagtagctaatataattgaccggtgctaaagtctcctgtttatccataaaatggggtacattatgggcagtgtaatacaagctttcttttcattgcctaggtactttaccagcagaccacagttttgccctgggtaggacccaaccctcagaacaaaatcatcattccttgtatttatatttgtatctgagatagtaaacaagatggctggccaggtcaacatggcaccttaacttatttttttaataggtaaaacttcttcaaaagtagcttgctttgtataagaactaagctatcagtatagatatagctatccttggagcttatgtttcagacaagaattatttactaaaataaataataaacaagataatgcattatacaatttgggcatttctcgtttctcaagtgtatgcatcatggtaaatataaactaaccacaagataggtagattgattcatttcattttaatctccttgtgtaattcagtacctccataattgttctaatcttcttcccactgtttacaaattaccagttaattaactcgtgaaagaaaaattcacatatcagaataaaaataaatgtatactcactttatcaaaatcaccactgctgtctttccttaatactagcagtggaaatgtaagtggcttactctacaaattttggtgctggcaaagtacataggcaaactggttggggagctgctctagttacattcctcccttcttattccctttttctcttcctccactttattgcataaccatattccctggtaccccaaagccattcctacccaccagttcctaatttgactcccacttgtaataactcctttaaaaaattccatgtttaaccatatgaccctggcttggcttactcatattctccctccctctccccttcctttctctctcttccagaagtcatttgcctggtttgaaatattttgtagggattgcttattatattattttagctgatgaacctcaggacaatgtctacacacacacacatacatacacgcacacaaaatctcagctgttgaagagtgggcttggaatcagacttctgtgtccagtaaaaaactcctgcactggaagtcattgtgacttgagtagttacagactgattccagtggaacttgattctaattttctttttgattctaattgaatgtgtctgcttaccttgtttccttttaattgataagctccaagtagttgctaatttttggaccaactttaaatggggtttcattcacttcttttacttaatgttttaagtaatagtacccaataaatttccattaaccctgttctccaaggggtttagctacccatttctgccatttttaatttttatttaattttatttgcttgagcacactgatcaaccactgaactgccttcttccattgtcctgcaatgatataagggttacatttttgtgtatatggctttcatagttgggatttcagagcactgataccagatattttcagtttgttctctgggggaatttcgatttgcatctatgtttttagctatctgtgataacttgttaaatattaaaacgatattttgcttctattggaacatttgtatactcgcaactacctttctgtaaacagctgcagtcacaaaataaaacactgaaagttttaa

SEQ ID NO: 147412 - DNA, 1883 bp, Homo sapiens
  misc_feature (1)...(1883): n = a,t,c or g
tttttttttttttttttgactgctacattttactttattttgttgtaaggaaaaccaattgactaagttgtccccaaaatgttagtgttcactgatcaaaaaggaaatgaggtcagaaggcaaacttttcactttttctcaaacaataaattgcaaagttatccacaggaaaaattgttaacaaacacatgcaaacacgggatggctttcaaacacacagagagcctaagcaagaagagtgagtactgaaggtcttacagaggtcagactgggagcactaccacaggaagtttgaatctatccacggcagctctttcctcccacagtccaggcttcaacacctctttcctattcccaaggtgggcttatcccatatggcagaaatcccagggcntgttcccatatacattgaattacttggcccagctggtggtttcacgagggcatctcccataaggccaaggccccggacttcaaattctggtacaggaaagtttcccgttgctgtcaaaaaaactctcggccccctctgcactaactttgctgctgaaagttatctggctcctctgcctttcaacttcctccagcttctgaccacttggcaacgcaccactgccagttcctctggggctctcaagaatcactggaagtacttctgcagctctcttggatgacctaggggtgcagcaaacaggcacaaagctctcctcccaggtccctggatttctttatttcttcccttccttctccttggtgtatttgtcctgtgagtgtctgactctatcactttcaaagctgtgctgtgatttgggtctttagatgaggcttcatgccctggcataagcaaagagcctgatacagagtggcctgcagggagcagcttttgaggtatttccagaagccccggaggtgctgcagcgaagtgggcaagcccagctttcttaaggactttttgaaccctgccttcaagcttcctgcctcccaatgtggggtaaaaacttgcctttttaaaactcttcggatcacatcagtgctgaacatcaaagccttcaagccaaacctgggaactgacccaggactctggaaattcctcatgtaaaataccgtatctgctccatggcttcccacgtcagggttcctgggcggggcaaccaggcgcctccatttgcctccgaattttctggaatcggattgcttgtttctgtcgtttcagggtgctgggggaagagaaccaatggcagaagccatgcgtggaagcagaatggatgtttgaagagcctcaggctaaatcatggagcgcccagccctcttctctttgatcgaaaggcaaaccgggcccatgttgccggctttagagctgctccgttacacccagaaagctaacacctagaacaattaactgcctgttaagcatgccgaactctctaaactgatgatgaaatacgtcactaattgaaaggaccagtggtcccaggggagctgaacacctgacgctgcgcccctaacaactgggtaagaagaaacaagggccgctgcgcaagcagcggcaggacacccggcgccaagggggcgcggcctggagcgccggggcacgaggccctgcttcaagctgagggcccggagagaagccggtacctctccacctcctgcagctcccgttcctccggctcccagtcggaatcggggtccggctaccggccaatagggcctgggcccgccaccccccgggtcgcgaacccacagcgagtgacgacggcgcaaacgcgcccgcccagcaagagactcagggtaaccgccatgtcgacgcaaaccagccttcagcagtcggctaccctcgtgccaagcttggcgtanaggtgttcaatacagtctcatttgccgtc

SEQ ID NO: 147413 - DNA, 1706 bp, Homo sapiens
  misc_feature (1)...(1706): n = a,t,c or g
ctcttatgtcttttacatagctaataatgttctctgtttatttctcatgaattcccattttgtggctaaagaccagacctttgcactatttcatcaagattattttattgaggtttggcttacatatagtagaggcaatacatagagatacgcaactttgtttttgcagctacaatacactttctcaatctcatatgtttttgtcttgtagagacagagacaagttcagcatgttgcagattgggaatagtgagctatgagaagagatttagagcctagatgagcttaggatagagagtgggctcattggcctaaataaaaagagaagaccagaagtctttgaggtctctgtctctattcatgcgcctcgtggaaaattaccttggtacaatggtagcctctaaatagactgcctcgcaagctattccagaggtcatggaacagaaagccttataaaccaaataaaaattctcaaaatacattggtttattgaaccaatttgcaatacacagtgaggaacaaggagaaagcaatgatagattaacactgttagtgtaacgtgccagtggagtggaaagaccgcaacacctgaatcctgggttttgtaatgtttttatgtcctgactcacattctgtcacatacgctttcccctaatagtcgggttacaaaaaggaccagagtggccgcttgagccagatgactcaatcagatgaaatgtgcctgaggccaacgatgtacacttgctctatagaagggtgtcaggggcaagtacacttcaccacagcaatagcttgcctattagtctgctgagcagtcatgaattttattgtatttcttggggtaaggacaggccagaatgagtgtcaccagtggggtaatttgaatcaacttctcacacattacttgaaggctttattatgtcttcatggcatactttagtgtatccatgaatattttgggtatcttttgtgggcttttcatatttttagtgcttcatgaatatttggtatctcttgctcctttctatctgtggtcacacatacacgctctattaactttgcctaataagtctcctaggttactaacttacttacctaaatgtaacacaatgaattccagctttctcatttgttctataccagaatgggaaatttccccaaatcagaaaatcacatcctaacaaagaagtctgtctaagacagtacatctcctgttgaacttgcatctttccacaggactttctgtttttagggatgagactattctctgcttcatcaaggaaagagaaatgttcagggttgtagggatggcacacttattagttctgcctgtctgaaaggttcctgcaggacagtttggtcagagctgcaattcttagtccatggtctaatgcttgagtatctcttctttccctttcctgtctcaggaatcagctgagaattcattccgattgtcatgcctctagccccttactgtgatttgttggttgcactttcatttgctttagttctagaatcacctgttgactcctcagacttcacctaactttgggaaactctcttttgggaggcttctcatttcccccctaaattctgtgctgcctgagccctaagaaatttttcccaccaacgaaattaattccagggtaagatcctaaaggttggctgggaatctaaggttggataatntaaaaccaataatccta

SEQ ID NO: 147414 - DNA, 451 bp, Homo sapiens
actgtgcctcagtgtgggttagggaacaattttgttattgtattaagtttattcagttaattcacttgaggaactaaccagtttttactttctgtctagaatgatgtacatgtagtagagtaagccataatgctcccaggaattccttggtgagtatggtgttcaggatgcaccacccaccacctctagataccttcaggcaacacagcccagttttaacctctagtatccatgaccaaactatccctgacacatgaggacaggggcctcttctggctgtcaggagcaaagccaagcctggtctcatttgcttccctgccaggctcatcgtgtgtataccacatttgtgccccactgacctgaaggttccatgtaactgtatacacatgaatacttaaatgccaacatttaaaataatttgataaagtctttgtagccactcagcaaaaaa

SEQ ID NO: 147415 - DNA, 1436 bp, Homo sapiens
aaaacttcttttttttttttttgagtggcttacaaagactttaatccaaattattttaaatgttggccatttaagtattccatgtgtatacagttacatggaaccttcaggtcagtggggcaccaaattgtggtatacacacgatgagccttgccaggggaagccaaatgagcaccaaggcttggagctaacagggatttaaaaaaaattgggatgtcttttctgaggggtctgagaaggaatagggcagaagaggaaacgggtcacttttagggcgtctggcttaacccacttgcctaggatctccaactgaaaagctccctttcccatccctcagggggaaggagtgcctgttttcaaacgggcatcccctactaacacatattacccccctttcccttaaaatcttggatgtgggcaaacacaccccaagaaaccccacagggaatatgtcccttaataaaatatgtttgttatccagagaaaaacaagggcacttttggggagccatttatggcttactcctactacatgtacatcattctagacaagaaagtaaaaactggttagttcctcaagtgaattaactggaataaccttaatacaataacaaaattgttccctaacccacactgaggcacagttaaagggaacatggtaggaggcacagaaggaggcacagaatgaggcacatctctgcgcgacacctggtccccaggtgcagttggaccccagcagggctcaaagcctgatgcctcccaggaagcctgacatctctcatgagcaaagccccctggccttggagcactggctccctccctccccataccctgaagtcaggtgaggggccgcagtgggaggcagtcctagagcagagctgggacacggtgggaattcttaagcagggtcaccaaagccacagagacctcaatctgtccaagctggcactgcagagtcagaggatgggcgccaagggaaagagatttcacattaagccgtgacaacatccgccgtcggctctgcgttgacattggccagggtcgtttctgagggcgctcgggcttcccactggaggcgaagctggaaccctgggccagctgctctgagcctcccaaagggctggctgagcctgccccctcccccaggctgctcctttggaatgtacccatctcacaacccacagcaaagccacaagttgcttctgacactattggaagctgggccccagggccacaggaatgggggcaggtcccttgggcggggtgaaccaggaagggaggaggctccttggcttcggcgcttaggagtccttatgggccattgttccatactctcactagcttaggcccagattaaataatcactaaactttgcattctacattacgtgagtccaaaaacaggattacctgcattgggtcctttatcatcttaaag

SEQ ID NO: 147416 - DNA, 1253 bp, Homo sapiens
ataaacctttcctgtacctgctttggtattagtgtgggttcttgttccattctgagaagctgattaaagctgtgcccaaagaagtgaactttggtttggttttgaatggggaaggttgccactgctgactatatcaagctattgagacagctgtctctggggcaggcctatctgataggaacaggaataaattgaccttgaaatacattgaacttattctgtttatgaaatctgtagtcatttttgacagctcagcaattaggattttttttccttgactgatttggtaggatgtggctttctgattttacagatccgctgttgtaccaggggtctaatcaggcctgtgtctgcctccttcttgaatagcccagtgaattcatctaaacagctgcacttagaattgtaatccagtggctctcactggtttcactgaggcagcttagagggaatgccttagtaaactgaactggagcagaatctagtttgattaggagctagattataatctaggttccaagtacagaatttggagctaaggactgtgactgaaatcattttcccatatgagcagaccctgtgtgtcaggcctgtttcccatatgagcagagcctgtgtgcaagtctgtttctggcatgtccctcattgaggaagggaagcaaaagctggttattgccaggcctattaacacttaatatgcaaattctatcatcctgaaactggggcatctgaggaaaaggtgaccttgctggatggctttatttgcatggctctgcctgtctgcagtggttgagtcctcatcacctggtatgtgtatgagcaaatgtgtgctgattgtgatgcccaggcagaaacactcttgaagactgctgcacgcatgctttaaaaatgaccaggcactcatcagagaagctgggagatctgactccagacggactgaagtcagagaagtcacatgagcacctaagattcaaataaatagcgtgagagtcctataacaacctccaaggagcaccgtcttacttggctcttgcgagctaagactgccataccttaaattaaggcctctctttaatacatatgtggaagactaggggatacttggccacctggtctcagagaatgcatatgagagtatcaggcattaccttattgtatttgtactacactcattgtacttttacattcctgaacactctctacttaccactgtgtcgaggatgcttttgttctgaaagaacagggagtctagg

SEQ ID NO: 147417 - DNA, 1852 bp, Homo sapiens
ttttttttttttttttttacacagaaaaaaaaaaatttaatattcaacatgcaaaacaacctttaaaagaaacatgaaatcataaagcaaagctaacagccaaccaacaaataccgcctagcaatgatttccactggatgtggaagagggttaataaagacgctgttggtaacgcgtacagaactatcactgggcaatcagcatactgaggctatccagtggaggccagcatcgtgtttttgctaaaatacatgttgtaggaagtcataattcatagtgaaggaatctcaacaggttttcttacagatttaattactctcacacaaataattcatttgggaaaccataaaagatacctattttacacctaaactgcctggggcttccagagcgggggactaaaggggcagggcggggaagaaagcgagcgtgtcgcgtgactctgtggggttgcagagtcactgttattttgatctgctgagctcaaggactggaaacggaataaaaacgcctactcgccttaggcaggataagaagttgtaaactcacccatcagcagctgcctccacttctgaggctccccctgcgggaggagctgtgaacccagccctgaggcctctcggtgtcccgaggagtgctccagggctcggagaaggggctcaggggtccttttgccactgaggatcaagccagccagtgaaaaagaaaaaacaaaagccccagcaggtgcccatcacccggctcccaggggtcatctgcagagtcacgtggcactctggccactgctgaagagctgctctcccctcgaagggcagtggctgccccctcccagaggctgccttcccattcaagctcaagggccacgtgccctttccttatctcgtggagtgtcccgtccctatccaggtggttgtttgtaaaacaaaagtacagtcattcctgcctttcctgatacagactagagcaagaggacaggaagaacccagtgggctgtcaagagacacttggtttttgaaacaggacatgaaagcaaatccccacctaaattcaaaaattgaggaaaacgtcagtgaaacctgttaagttcgctaaaaaagttggcagatgtttcgtatgtctttaaaggattttggccaacaacttaaaaccaccatattagggacatggccccaggcagtcattagaaatatactggctgccacagggcctttccctctgggacatcttttaatgaaaaaaaaaagttttactttgttccttcaaaaagtcttcctactaactagtctatttatgattaaaacagcaaaaacagatccctggtttgagtgcaggtacattctttgggggagggcacctcaggaacatgcatttatacccttcctgtgactccgtgtagagggaagactaactcacagtccataagaatccaaaagtgagcggcgacttcattcagcatcccactcctgcctccaagctgacttggctatatagtatctcgcgtcctttggtcctcttttgactacctgtcactcatgttttaaataatcttcttttgaaataataagccttagctgactttgcaggcaactaggcacttccagcaggacatgagaatgtaagatggccactaccggaacttacaggtgccaaaagaagaaagggtataaacggagaccacctatcactcatcagaacctaggatcatcacattcctttaaatggaaaagcccaccctacaactttctttttaatgttctaaaaagtgacacctaggtttcctcaacagaaagctgtgcttcaatcccaaatccccttgagaccaacatgccttaaagggggtttgggtttaaag

SEQ ID NO: 147418 - DNA, 1464 bp, Homo sapiens
atggcccccgctccgccccccgccgcctccttctcgccctccgaggtccagcggcgcctggcggccggcgcgtgctgggtccgccgcggggcccgcctctacgacctctccagcttcgtgcggcaccacccggggggcgagcagctgctgcgggccagggcgggccaggacatcagcgccgacctggacgggccgccgcacaggcactcggccaacgcgcgccgctggctggagcagtactacgtgggagagctccgcggggagcagcagacaggtgataagcatcccatgcgctctgaaacccaccacatcacagaaacagcccttgctggcgttaccaggaccttcgccttcctccacccggtgggctccatggagaacgagcctgtagcccttgaggaaactcagaagacagatcctgctatggaaccacggttcaaagtggtggattgggacaagaacacagccagtggctgcctgactccccgtgctgaagattggctgagcatccaccgagacaccctcatcctcactccgattgtgtgtggcagattggggcccaccagcatcacagatgagggcactgaggggctccgggaggaaaagatgcacgtccaggatctcacagctggtcaaaggcacagccaggctctaatggacctggtggactggcgaaagcctctcctgtggcaggtgggccacttgggagagaagtacgatgagtgggttcaccagccggtgaccaggcccatccgcctcttccactcagacctcattgagggcctctctaagactgtctggtacagtgtccccatcatctgggtgcccctggtgctgtatctcagctggtcctactaccgaacctttgcccagggcaacgtccgactcttcacgtcatttacaacagagtacacggtggcagtgcccaagtccatgttccccgggctcttcatgctggggacattcctctggagcctcatcgagtacctcatccaccgcttcctgttccacatgaagccccccagcgacagctattacctcatcatgctgcacttcgtcatgcacggccagcaccacaaggcacccttcgacggctcccgcctggtcttcccccctgtgccagcctccctggtgatcggcgtcttctacttgtgcatgcagctcatcctgcccgaggcagtagggggcactgtgtttgcggggggcctcctgggctacgtcctctatgacatgacccattactacctgcactttggctcgccgcacaagggctcctacctgtacagcctgaaggcccaccacgtcaagcaccactttgcacatcagaagtcaggagggtcacatccacttggtggccaggtggcccttggtgacccacttcttcctggagcgtccctgcctagagctcagcccacaggactgcttcaggccgtggccacaggtagcagccgcaaggggaaatga

SEQ ID NO: 147419 - DNA, 1552 bp, Homo sapiens
  misc_feature (1)...(1552): n = a,t,c or g
aacagtctctaatttgtcttgtgattttaaacttatgagtcaagaagggtctcttcctttatcattgccttttaggaaattttccacatctttcagtgtttgaacttacttgtgcttgagattctacagttttatggtaaagtttgcacgaacccttaggccagacttttctgatctcagagtcccttccaatcaatttgcagcttcacataagctgttgacctgatttctgacactgcttcagttgtaaattttatactgcttctgtataaaatgcctttcttctctatctgtgtatattttataagatgtccttcttagtgtgaaagaagggaaatgtggatcatcttgtggaagctaatcactggcaggagcctggatggctggcggaaagatatatgagaaagaaaaattatgaaggtagaacagagtgtaggaactgggaattggtttcatggtataggttttaaaatgagacaggctacccttcgggagtccacctctcttgaggcggtgagcagaagcttgtcctccatatttatacctagaagtgtggactgctggttcctgcacagactgccggttattcactaggaatatttccccaagcaccacagtataaaatactacagcactctgtgttaaagactaactgtctacatctccatatgttgtagtgttgtgaaaatgtgattttaaaaaattatcgccagttaaaactggctattcttttcctctatttcaaagtcatttttgttcagtggaatagagacagcaacatggtgttgacctctcaattaaaatacaattgacaccagtaaattttgccataaaaagttaaaatctcttgttcaaaatatgtgtatcttcttaatgtgttcatgttagagaaagtgtccccatctcactgccaaaaatgaaagaaaataattaaactctttaaatggattaaatgtaatggatttctactccgcagtgcataacagcacatatttttgacagatttattttttttagggcaattacctttcccttaaggtatctgatccagtatagtaaagaatcacttatatccagtaataggcacttgagagatagccaagtcaccaaggaaacttaattttccatttaaaattttattttgtgaattaaggtcaatcttaccaatccccagataactaccattttttttccatagatggcccagtgttttcaaccagagatttaaaatgggaatattaaaattatagtgattattcagganggcattttaatttaggaaagggagctggtttggttagttcactggatggacattttttggacaaacattttataccattatcacaataaccagacttgaaattttttttggagttccttcatgtagaatgaaaactgagttaaaagaaagtacgcatttaggtctggatgcagtggctcgtgcttgtgatcccagcactttgggaagctgaagcaggaggattgcttgagcccagaagttcaagactagcctgggcaacatagtgagactcggtctctaccaaaaaaa

SEQ ID NO: 147420 - DNA, 1419 bp, Homo sapiens
atggaaacccagaatcttgtgccacataccttcaattcaagatcaagccaaaaaaaaagatccacaaattattggtgtctgattaagtctgattgggaagaagaggaacaggagacacaagaatgtgtgcgtccagtggtccaatcctgcaggatgaatgaggacatgaagttctggcccgtgatggattggggtaatgtagaaccagaggttggcctgggagatgtcccaaacctctgggctttcccagaatttggtaccactggtgcactgacctatcctcatcctgccaatgtgaggaaacccagagagactagtcaaatcccctgcagagcagcaaccacgccagtggggctggctgtgaactttcactttggtgtgttctttgatttcatttgcttccagaactgtgaaacaatacgtttatattgttttaactacccagtttgtggtactttgttaaggcagctacaggaaattaatacagaagggttatgggaaaccaaaaagaaggtggtgaaacacccagggctggcaacaaagaaccgctgccatgccaggcctgaagcgtgtaggggaggagccttcactgaaacctgcagctgtggaagaggagttatagcttccagtgaaggaaggcactctcctccttccctccagtctcctgaaggagtcatgtcagccattgagttggtgcctgaacaccaaacagtgcctgtgtcaataggggtccctgccaccctcaggtgctccatgaaaggagaagcgatcggtaactactatatcaactggtacaggaagacccaaggtaacacaatgactttcatataccgagaaaaggacatctatggccctggtttcaaagacaatttccaaggtgacattgatattgcaaagaacctggctgtacttaagatacttgcaccatcagagagagatgaagggtcttactactgtgcctgtgacacccaccctgctgcagctctacttctgagcagctcaaaaaccactgaccaggcgcgcaaagtgtgcaagtttgtctcttccgttgtcatcgacttatcacttatacagaggcagcaatggggcttgagatctgacaaccacaattctctgcattcaaaagtgagcacacgggtaccagaaaacactgcggtggatgaaggcagctgtcaggagcaaagagctcaagcctgcactgccttggaacaggacatcagcaaaagacactctcaatctactcagaaggctgagaaaacaaaacctgcaggctttgagccaatttacaacagatgtgggtcacaacaaccaactacccaggaagcctccaccagaacgcagcgtgagaatcagcttcttagatattcccatacgtgtgatcccatcaatcatttaacaactgtcaaagagaaagactag

SEQ ID NO: 147421 - DNA, 521 bp, Homo sapiens
gcaattagttacgagacagcagcggcgtcgcggcccgcatccccgcggcggcggaaaggttaccgacccgccctggagtgctgcgtgcgctgcctgctcccgcctgaggaaaacactgcccatggcgcaaggccgggagcgcgactaaggcccccactccgccgagcggcgcgaccttgtccgagaggtgcggtgttcacggccccgcgaccgatctgggtcttgcggaacctcctgccccacgtcccctactaccttctctccctccggttccttatggcggctttccccgcaacttcgacctcttccccttagggcacagtgccttccctcatcctgcctccccgtgtgaccttccctgttcgcttcccatccccaggttccttgaccccgtccccagttgtctttcccactccttattctgcgaccctgaccctacgtcttttacccagcatcgtcccctgcacccttcatctcttccttctagctcaggattcccgctagtgatccgggtcttctga

SEQ ID NO: 147422 - DNA, 468 bp, Homo sapiens
atgggcgcgggttacggtctccggatacggttacacagcagcggcgtcgcggccgcagcccgtcggcggcggaaaggtaaccgacccgccctggggtgctgcgtgcgctgcctgctcccgcctgaggaaaacactgcccatggcgcaaggccgggagcgcgacgaaggcccccatcttcgccggcggcgcgtccttgtccgtgagatgggtgcaaggattccctaagcagaatgttcattttgtcaacgacaacaccatttgctacccttgtgggaattatgtaatattttattaagtattgaaacccaagaaaaagaactgtacttgcagtgtagttaatggggaattgtggggcgtcatggcaactaacatcccctgtgaagttgtggctttttctgaccggaagctaaaacctctcatctacgtatacagctttccaggattgaccagaaggaccaaattgaaag

SEQ ID NO: 147423 - DNA, 441 bp, Homo sapiens
gaaaatgtgggaggggagtaaagctgccaaagacccaggaaaagtgggaattttaaggagaaggaaatgatcaacagtatcaaatgctatcagctgattcaagtcagttgagaggatggccagggctgattggcaccactgtgtttaacaatgaagaggtcactggtggtcctactgagcgtgatttctgcagagcagtatatgtggaaggataacagaaaagcaaatgatgtgataaataaaaggcaagtttataccattagtggtagccgtagaggaatggaaggttgagggaaggtttcatttaaagatggtaaagaacacactggcctggtgcgtggctcatgcctgtaatcccaacactttgggaggctaaggtaggaggatcacttaaagccaagagttcgagagcagccaggacaacatagtgatacccttatt

SEQ ID NO: 147424 - DNA, 1679 bp, Homo sapiens
  misc_feature (1)...(1679): n = a,t,c or g
cttttttttttttttttttctgttatagattttatttgatactgtgaccgagtctacaaagttcagacccacatgtaacggatttttgcttcatggttgtcagagggctagtgtgcattatttctgaggattatatccaatgacacgacgcagaaaacacaaatgggacggacaaacggatggacataatcattaagaccagagactctaaaacgtgccctagtgtccacgtgatatgatctaaggcggggaccccttctaaggtggggacccgatgtgatctaaagccaaggtggcttccagccacaaggttgccgactgggctgtgtgcacatccaaggcgccaggggacggggaacccgctttgggaaccaacgccttgccctcccaaggggcggaccttccccatttcccgaccaggcctcttaaggtgtctgctcttcatgaagggaccaggtggcgacagggctgatggaagcagcggaggccagcggtggcactggacacgacccgatgccgcaggcggtggggaaacaaagtctgggcgaagtggctcctctttggctccttaacacttgtgcgtggagaggcaggggcaggcacgaggagggggaggtgcgaatggagcaccgttcatccggggattagccaacccgagtctcctccctccttggcagctccangaacattcccttctggccgacagccacagaaatgagtgcctgccaagacacatggaggagaaagaaaacaagacaccaaaaaaacccaaaaaacaaacaaaaaaaacctccctccccaggaacaaatagaactacctggaccaaggtcacaccagatccggaagacaccctgcaccctgcgccccagggaaaggaaaccacaggtcaacgtctggnctgctttgctcaagggaaactgccaccctgccctgagactccaactcactggccgttagtgtctttttttttttaagttttttttttctttttaataccccaaaccatcccattttcaaagcttttttttttttaaaaaaattgttttttgattaaaaaaaaaaaaaaacaaaaaactaaaactgccacaaatactgaagaggcaagctccaggcctggcctttccagctggaggctctgctctcccgtggaccgcaccgcagagcccagcccggcactgctgggtgaccgtcccatggctgggttcgccccggaccactctgctgaagtccaggtggggtttttaaatgcccggcggcatccgttaaaataggggacaaggggggaaaagggcagcccacctttccctgaacaccttccatctgggctgaactttcttgggaatgtataagttatctggatgaaggaggtgggagatggagaaaaataaataccaagaactaaagtgagggtcccaggacctctggtggcagctcagcccctggggcagagctggcctccagggaggagaccctgattatccaaatactgcgctcttgagacttgctctcctccacaagcacttgccctgggggacgtgagtctcagagggagaaaaggggccagccccacagataactgtcctcctcgctctggcctgactcacaagcggccccaggctcctgcccagccacgaggctgtcctggcttgtccgggagttctgggagaagctaggcctg

SEQ ID NO: 147425 - DNA, 1527 bp, Homo sapiens
  misc_feature (1)...(1527): n = a,t,c or g
cctcgagaccaatggacatctgtaggaattcggngacgtaacggaggcaggttggagccgctgccgtcgccatgacccgcggtaaccagcgtgagctcgcccgccagaagaatatgaaaaagcagagcgactcggttaagggaaagcgccgagatgacgggctttctgctgccgcccgcaagcagaggtagccccagggaggggagggaaagggacggtggagacctgggttagaccaagggttatagaaggaaagagagctacctcagggcttgaatgtggactagtcgtgaggagcagagtgcattgcttcctctagggttttatttcctccccaccctccaaattgttagctcacagccttacaggaaaggacgggggcgggcgcctgccctcagtctgatttctgagcgtccctgggtctgaccttaagggcaagggcagggagcttcacatttcaaatacagttgtggttacggcagcccagtacttttggccctccttgctgttcggttctcctcccttctcccaacctcctcactggtgttgctgggtgtggtcctcaatacagaatagagacccttgggcctgtgtcaccagacttctgaccccttgggcaacagccagatggagactggtcgccttttgagcctcagctctcttcctcttgttctcctagggtgggagtacagcagccaaacgctgaacttagtcccatccacttccatcttatcctttgtgcccttcatccccctgcatcttgtcctttttgccctctggtacctcccagtgccccatcatctctacccccagggactcgggagatcaatgcaagcagaagcagaaaaaaggcaaaacgagaagaaggaggaacccacgaagccacaaagctacttgggttcctccttcttgccctttcgccctgtgtgcctggaagccagtcccaccacggcttcgcttttcctcctgttagtgcttcacagggtcccaagcacccgatgggcattccctttggcccttgagtctgcaagcggggtccctttttgggtgctttcctttccccttcaaggtaagcctctcttcccccttggggccatttcccgggggggttaagggggttaaccttttcccagtgtttttttaattcctgtgggggctcaaccccaaagtatttaaaagtaagctttgtaattccttgagcgcctggtttgactggggacttggggggatggggttggaagaatgactgccctttcccaccaaaaaagggagaactctttagattcagattgtgggtatgtagacttaataagtgaaacatcacagaagaagcctttattatacaatgacaaccaaacaagtactccggatatgcagtagaggaatcctctaagaaccatagagacttcttttctgtgatttttgttccccacccttgaacaccatctctaggatggagttggcctaaaagtgaatgctgcaagatctggggttatgcctcttttcctcaatcttcctcaagttggg

SEQ ID NO: 147426 - DNA, 654 bp, Homo sapiens; identical to SEQ ID NO: 144884
  misc_feature (1)...(654): n = a,t,c or g

SEQ ID NO: 147427 - DNA, 702 bp, Homo sapiens
  misc_feature (1)...(702): n = a,t,c or g
atcgagaccatattccatgtggnggaattccacagactcagagagaacccacccatggttgctgtctcctgcccgacaaagaccaacgtcaaggcccgcctgggggtaaggtcggcgcgcacgctgtgcgcagtatgtgtgcggaggccctggagaggatgttcctgtccttccccaccaaccaagacctacttcccgcacttcgaccttgagccacgggttttgcccaggtttaaggggccacgggcaagaaggtggccgacgcgctgaccaacgccgtggcgcacgtggacgacatgcccaacgtcgctgtccgccctgagcgacctgcacgcgcacaagcttcgggtgggacccggtcaactttcaagctcctaagccactggcctgcttggttgaccctgggccgcccaccttccccggccgagttcaacccctggcggttgcacgccttccctggggacaaatttcctggggtttttgttgaagcaccgttgcttgaaccttccaaataacctttaaagcttggaagccttcggttggcaatgctttctttgccccttggggcttccccccagcccctcctcccctttcctgcacccgtacccccgtggtcttttgaataaaattttgaattgggggggcaaaaaaaaaaaaaaaaaaaagatctttnaatttaagggggcggaaagtttatttcaa

SEQ ID NO: 147428 - DNA, 790 bp, Homo sapiens
ttttttttttttttacagacacatctgttttacttccttgccctcaacctccacacatatggtattattatgagtgatgatgacgggtcccagagagaaatgacttggctgaagtgatgtggctagttagagctacatctgaaaacccagcagaagaatgcttcaccccaacacccattccaaaagcaaaacaattccaaaatgtccacaaccggctgcactcctgaaaagcaaggtgacatcgcagggtgccaaatgatgtggcatagagacagctgcttgtcctggatgctcttcttctgcacctgccacttctgaatctgcacatgcatcccatgacaccaccctccagccttcttccagccttctctcagactcttccggaatcctcactgaaaaggataacagaatgcagggaggggaaacagttcaattctttgcagaagaactaggaaaattactgacctaagctcctgaatgggcaggagccttatccagtttgtgccccattgtgcccagcagctagctgtccctgcaaagaacaatgtgcaggaagacttcagtggtcattggcctgggtgaagaatacgacccctgagaatgtgcctctgaaactgacctctgattcacacgctctcccagggagcactcagcaccgtaggcgtgttaccagttacttgaacctaaggagcaggcagcccacaactaaagtctccagaagagctctgagaaccaaaagggatgttgtcaaacctgcgccaacctacaaaggagcttgcagagaaacctg

SEQ ID NO: 147429 - DNA, 433 bp, Homo sapiens
tgtgggggagccaggccccgcttataggcgcgcggttttttttttttttttcctctgccccaggtgcatcaccttcccctcatgggccttctgcccgcttttgggcacccctagcggcctgaagcgcaccctggtctcgaaccaggaatgccagggtcacctgtgcccagcgcaagggctgatgggaagacacttttgtccgttggggacccaggctctgcttctccgtggtgcggtttttttttttttctgccacaggtgcctcacctcgccttcctcaaacctcaactgcccctcatgggatttctgcccgcttgtcttccgaggctgcggtgtggatctcgcactgcggccgcctcgccttggctggggagaacctcggtgggtaggattcagaggggcttttggtttaccattttccacagctgaaccc

SEQ ID NO: 147430 - DNA, 1659 bp, Homo sapiens; identical to SEQ ID NO: 119496

SEQ ID NO: 147431 - DNA, 1191 bp, Homo sapiens; identical to SEQ ID NO: 125108

SEQ ID NO: 147432 - DNA, 1767 bp, Homo sapiens
atggtaaagggatcaattcaacaagaagagctaactatcctaaatgtatatgcacccaatacaggagcacccagattcataaagcaagtcctgagtgacctacaaagagacttagactcccacacattaataatgggagactttaacaccccactgtcaacattagacagatcaacgagacagaaagtcaacaagaatacccaggaattgaactcagctctgcaccaagcggacctaatagacatctacagaactctccaccccaaatcaacagaatatacatttttttcagcaccacaccacaccgattccaaaattgaccacatagttggaagtaaagctctcctcagcaaatgtaaaagaacagaaattataacaaactatctctcagaccacagtgcaatcaaactagaacttaggattaagaatctcactcaaaactgctcaactacatggaaactgaacaacctgcttctgaatgactactgggtacataatgaaatgaaagcagaaataacgatattctttgaaaccaacgagaacaaagacacaacataccggaatctctgggatgcattcaaagcagtgtatagagggaaatttatagaactaaatgcccacaagagaaagcaggaaagatccaaaattgacaccctaacatcacaattaaaagaactagaaaagcaagagcaaacacattcaaaagctagcagaaggcaagaaataactaaaatcagagcagaactgaaggaaatagagacacaaaaaacccttcaaaaaattaatgaatccaggagctggttttttgaaaggatcaacaaaattgatagactgctagcaagattaataaagaaaaaaagagaaaagaatcaaatagacgcaataaaaaatgataaaggggatattaccaccgatcccacagaaatacaaactaccgtcagagaatactacaaacacctctacgcaaataaactagaaaatctagaagaaatggataaattcctcgacacatacactctcccaagactaaaccaggaagaagttgaatctctgaatagaccaatagcaggatctgaaattgtggcaataatcaatagcttaccaaccaaaaagagtccaggaccagacggattcacagccaattctaccagagctgataagcaacttcagcaaagtctcaggatacaaaatcaatgtaaaaaatcacaagcattcttatacaccaacaacagacaaacagagagccaaatcatgagtgaactcccattcacaattgcttcaaagagaataaaatacctaggaatccaacttacaagggatgtgaaggacctcttcaaggagaactacaaaccactgctcaaggaaataaaagaggatacaaagaaatggaagaacattccatgctcatgggtaggaagaatcaatatcgtgaaaatggccatactgcccaaggtaatttatagattcaatgccatccccatcaagctaccaatgcctttcttcacagaattggaaaaaactactttaaagttcatatggaaccaaaaaagagtccgcatcgccaagtcaatcctaagccaaaagaacaaagctggaggcgtcacactacctgacttcaaactatactacaaggctacagtaaccaaaacagcatggtactggtaccaaaacagcatggtactggtaccaaaacagagatatagatcaatggaacagaatagagccctcagaaataatgccgcatatctacaactatctgatctttga

SEQ ID NO: 147433 - DNA, 1452 bp, Homo sapiens; identical to SEQ ID NO: 126157

SEQ ID NO: 147434 - DNA, 1675 bp, Homo sapiens; identical to SEQ ID NO: 122733

SEQ ID NO: 147435 - DNA, 453 bp, Homo sapiens
tttatagataaacatatttttaatggaatacctttaaaaatgcaaatcaatgcacaaagaaaacgcccatgttgaacaaaatggtgacaattgtgccttctcttcaacaccaccccaccctccagaagtttccttcaagccgtaccttcaggtgaaggtcagcgcacactggccacccgggaccacattttccagaatcctttggcggtcccgcgatgctctcgtggtcagcagctctcattgggttgcagaggagaaacttgtccgtgtcactggggcatcttaacagtcggctcctaagcttggttgtgtgcgccgcacaccgtccgcgcacgcctgaggctgggatcccgcgctgcctcgccggcgatctgtctgaggtttcttcctcttggggtttcttcctgctggtggaccctccgcgaatcccggcctccggagaccgtcctggta

SEQ ID NO: 147436 - DNA, 2142 bp, Homo sapiens; identical to SEQ ID NO: 118316

SEQ ID NO: 147437 - DNA, 1260 bp, Homo sapiens; identical to SEQ ID NO: 119495

SEQ ID NO: 147438 - DNA, 1386 bp, Homo sapiens
atggataaattcctcgacacatacaccctcccaagactaaaccaggaagaagttgaatctctgaatagatcaataacaggctctgaaattgtagcaataatcaatagcttaccaaccaaaaaaagtccaggaccagatggattcacagccgaattctaccagaggtacaaggaggagctggtactattacttctgaaactattccagtcaatagaaaaagaagcaaccctccctaactcattttatgaggccagcatcatcctgataccaaagcctggcagagacacaacaaaaaaagagaattttagaccaatatccttgatgaacattgatgcaaaaatcctcagtaaaatactggcaaaccaaatccagcagcacatcaaaaagtttgtccaccatgatgaagtgggcttcatccccaggatgcaaggctggttcaatatacacaaatcaaaaaacgtaatccagtatataaacagaaccaaagacaaaaactacatgattatctcaatagatgcagaaaaggcctttgacaaaattcaacaactcttcatgctaaaaactctcagtaaattaggtattgatgggacgtatctcaaaataataagagctatctatgacaaacccacggtcaaaatcatactgaatgggcaaaaactggaagaattccctttgaaaactggcacaagacagggatgccctctctcaccactcctattcaacatagtgttggaagttctggccagggcaattaggcaggagaaggaaataaagggtattctattaggaaaagaggaagtcaaattgtccctgtttgcagatgacatgatcgtatatctagaaaaccccatcgtctcagcccaaaatctccttaagctgataagcaacttcagcaaagtctcaggatacaaaatcaatgtgcaaaaatcacaagcattcttatacaccaataacagacaaacagagagccaaatcatgagtgaactcccattcacaattgcttcaaagagaataaaatacctaggaatccaatttacaagggacgtgaaggacctcttcaaggagaactacaaaccactgctcaatgaaataaaagaggatacaaacaaatggaagaacattccatgctcatgggtaggaagaatcaatatcgtgaaaatggccatactgcccaagcctccgctgctgatacccaggcaaacagggtcgggagtggacctccagcaaactccaacagacctgcagctgagcgtcctgactgttagaaggaaaattaacaaacagaaaggacatccacaccaatacctcatctggacgtcaccatcatcaaagaccaaaggaaggcagctcctcgccagcaacagaacgaagctggatggagaatga

SEQ ID NO: 147439 - DNA, 500 bp, Homo sapiens
ggtgcgcgtcgggccactaggggtaccccaactcggacagaaggcccatgagttgaatttgaagtttgtgggaatagaggtgaggcaccaggggcagaaaaaaaaacaggagacctcgcctcaaacaagcggggcctgggtcccccatggatgaaagtgccttcccattatgctgtaccctgggcagagtggacagtgacgaccctggttcgagcccagggtgagcttcgggaccgcttgcggttaccagaaagcgaacaaatggtccatgagcggaaggtgaggcacctgaggcagagaaagtaaagaaacgcgccgccgagaagcagtgcctgggtccctcacggaggaaattgtcttctccttagcccgttcgcttggcactgaaggtccctggcgtcccctggtttgattcccagggtacgcctcgggccactagtgttaccccaaggtgggcagaaagcccataaggggaaggcgaggcacctggggcagagaaa

SEQ ID NO: 147440 - DNA, 2439 bp, Homo sapiens
atgttggaagttctggcctgggcagttaggcaggagaaggaaataaagggtattcaactaggaaaagaggaagtcaaattgtccctgtttgcagacaacatgactgtatatctggaaaaccccatcgtctcagcccaaaatctccttaagctgataagcaacttcagcaaagtctcaggatacaaagtcagtggacaaaaatcacaagcattattatacaccaataacagacaaacagagagccaaatcatgagtgaactcccattcacaattgcttcaaagagaataaaatacctaggaatccaccttacaagggatgtgaaggacctcttcaaggagaactacaaaccactgctcaaggaaataaaaaaggatacaaacaaatggaagaacattccatgctcatgggtaggaagaatcaatatcgtgaaaatggccatactgcccaaggacatcatccaggagaacttccccaatctagcaaggcaggccaacattcagattcaggaaatacggaaaacaccacaaagatattcctcgagaagagcaactccaagacacataattgtcagattcaccaaagttgaaatgaaggaaaaaatgttaagggccgccagagagaaagcatcacaccacacctattccaaaattgaccccatacttggaagtaaacctctcctcagcaaatgtaaaagaacagaaattataacaaactatctctcagaccacagtgcaatcaaactagaattcaggattaagaatctcactcaaaactgctcaactacgtggaaaccaaacaacctgctcctgaacgactactgggtacataacgaaatgaaggcagaaataaagatgttctttgaaaccaacgagaacaaagacacaacataccagaatctctgggacacattcaaagcagtgtgtagagggaaatttatagcaacaaatgcccataagaggaagcaggaaagatccaaagttgacaccctaacatcacagttaaaagaactagaaaagcaagagcaaacacattcaaaagctagcagaaggcaagaaataactaaaatcagagcagaactgaaggaaatagagacacagaaaacccttcaaaaaattaatgaatccaggagctggttttttgaaaggatcaacaaacttgacagacctctagcaagactagtaaagaaaaaaagagagaagaatcaaatagatgcaataaaaaatgataaaggggatatcaccaccaatcccacagaaatacaaactaccatcagagattattacaaacacctctatgcaaataaactagagaatctagaagaaatggataaattcctcgacacatacaccctcccaagactaaacaaggaagaagttgaatctctgaatagaccaataacaggctctgaaattgtggcaataatcaatagcttaccaatgaaaaagagtccaggaccagatggattcacagtcgaattctaccagaggtacaaggaggaactgctgataagcaacttcagcaaagtctcaggatacaaaatcaatgtacaaaaatcacaaccattcttatacaccaacaacagacaaacagagagccaaatcatgagtgaactcccattcacaattgcttcaaagataataaaatacctaggaatccaacttacaagggacgtgaaggaactcttcaaggagaactacaaaccactgctcaaggaaataaaagaggatacaaacaaatggaagaacattccatgctcatgggtaggaagaatcaatatcgtgaaaatggccatactgcccaaggctacagtaaccaaaacagcatggtactggtaccaaaacagagatatagatcaatggaacagaacggagccctcagaaataatgccgcatatctacaactatctgatctttgacaaatctgagaaaaacaagcaatggggaaagtattccctatttaataaatggtactgggaaaactggctagccatatgtagaaagctgaaactggatcccttccttacaccttatacaaaaattaattcaagaaggataaaagacttaaatgttagacctaaaaccataaaaaccctagaagaaaacctaggcattaccattcaggacataggcatgggcaaggacttcatgtctaaaacaccaaaagcaatggccccaaaagccaaaattgacaaatgggatctaattaaactaaagagcttctgcacagcaaaagagactaccatcagagtgaacaggcaacctacaaaatgggagaaaattttcgcagcctactcatctgacaaagggctaatatccagaatctacaatgaactcaaacaaatttacaagaaaaaaacaaacaaccccatcaaaaagtgggcaaaggacatgaacagacacttctcagaagaagacatttatgcagccaaagacatatga

SEQ ID NO: 147441 - DNA, 1890 bp, Homo sapiens
ttatttggttgtacagaagctttttagtctaattaagtcccatttgtctatttttgtttttgctgcatttgcttttgcagttttagtcagcaattttctgcctacgtcaatctcctgaagagctgttcctagatttttttctagattttttgtcatttcaggtcttatatttaagagttggggctgagaccagtcctggccagggcagttaccagaacggtctccggaggccaggatttgtggagggtccaccagcaggaagaaacccctggaggaaaacacctcagacagatcgccggggaggcagcacgggatcccagcctcaggtgtgcgctgagggtgtgcaggtgagtctctccaaaaatggtgcccttgtgatgtcaaggacaggtctgcctgtgtgcccgtgggctgctctctcaccggtggctcgtagtcgcggagagcagaacccggcaacttcagggcctgcgtctctctctctctcccttctcgctctttccgtcgacctctctttctctctctgtccgtctgtgtgtgcgtgtgccttgggacacatgtgccctgtgcgccagagggtgggcttcttgcacgtcggcctttcttctggtcagcctctccccgcgtctctgcctgggtcgtgtggccggttggcagtcgttttcccggcgattctggtttgggggtctgtgaaggctgcctgtgctcttgggggacgtcagtgccacgtgtggtcacacgggctccagctcggactcgcctctgtctgtctttgccggtgtcgccagaagccgcgtcgggatgccggagcccccgggccttggagatgaaggcaggccccgccgccccagtccccgcagccgccatgtcgccgccattttttaaagggtccgcagcctgactctgccgagtaaggggggtgcggcgggtgagtcggcctcgccagtgcgcatgcgcgaggccccagcccccggctttggtcacagtgaccgccaccgttgcccggggatgggtccctgagacttggcgaagtaggagcccaggacggtctccggaggccgggatgcgcggaggctccaccagcaggaagaaacgccaggaggaagaaacctgagacagatcgccggggacgcagcgcgggatcccagcctcaggcttgcgcggacggtgtgcgggtgagtctccccaaaagtggcgcccttgtgatgtcgaggacaggtctgcctgtgtgcccgtgggctgctctctctccggtggctcgtagtcgcggagatcagaacccggcaacttcaggagctgcctgggggtgggtgttacctgctgtatgtgtctctctctctctctcccttctcgctctttccttcgccctctctttctctctctgtccgtctgtgtgttcgtgtgccttgggacacgtgtgccctgtgcgccggagggtgggtttcttgcacgtcggcctttcttctggtcagcctctccccgcgtctctgcctgggtcgtgtggccggttggcagtcgttttcccggcggttccggtttggggctcacctcatcttcgggcttggtgaagggcaagtggcactgcaggaaatagtagccttgttctctgtcctcaagttgttccaagattgcagcccacaccagtgcttgggcttgtgagaatggagggctctccaacagttcagaaacaagcagtctgccacaggggtgagaggagcaaaagacacccccacctatgcttttccatggaacatcaagtccctcagagtataatctctgctggatttttgcttccttatttttctgtgttcaagtttcttcttgtggtgctctagcactcccgtcaatatagatattggaattaatgattatttatccataactttgctt

SEQ ID NO: 147442 - DNA, 2813 bp, Homo sapiens
atggggttacaatgcagtgaggcggaaaggctctcgccggggcacagaaacatccccagggccgcaaggcgtgctgtcgcctgcaaaggcactgacccacgagcccactgcctccctccttcctgggtggagcaggggcctgccttcatctccaaggcccgggggctccggcatctcgacgcggcttccggcgacacgggcaaagagagacagaggctagtccgagccggagccagtgtgaccacacgtggcactgacgtcccccaagagcacatgcaggtgcgcgtcgggccactaggggtaccccaactcggagagaaggaccatgagttgaatttgaagtttgtgggaatagaggtgaagcaccaggggcagaaaaaaaacaggagacctcgcctcagacaagcggggcctgggtcccccatggatgaaagtgccttcccattatgccgtacgctgggcagagtggacagtgacgaccctggtttgatcccagggtgcgcttcgggaccacttgcggtaccagaaagcgaacaaaaggtccatgagcggaagtccctgcactgggacctggggaccctggtgtccctggttcgagctcagggtgtgcctcagccgctaagtgcaccccaaggggagctttgggagcacaaagcccatgagggaagggtcagagaccagttagaagggttcagtgtggaaaacgggaaaccaaaagcccctctgaatcctacccaccgaggttctccccagccaaggcgaggcggccgcagtgcgagatccacaccgcagcctcggaagacaagcgggcagaaatcccatgaggggcagttgaggtttgaggaaggagaggggtaccccaagtcggacagaaggcccatgaggggaaggggtatcccaaagcgggcagaatgctcattaggggaaggtgagacacctggggcagagaaaaaaaaaaaccgcgccgcaaagaagcgggacctgggtcccccacggatgaaagtgtcttcccatcagcccctgccctgggccccatggaccctggcaaccctggttcgagccccaggtgcgcttcgcgcccgctagggttacccagaagccggcagaaggcccatgagaggaaggtaagacacctggggcaaaggaaaaaaaaaaaaccgcgctgcagagaagcggggcctggctcctccacggacgaaggtgccttcccatcagcccctgcgctgggccttggggaacctggtgtccctggctggaaaccagggtgcacctcggacccgctaggggtaccccaagggtggtcattaggccccagaatgacaccagtccccaggttaacaggaagcccccagtgggtacctaggccccagctggacatcaggcccaatgtggacaaacaggatcaagatggacatcaggactcaggtggacatctggtgacaggtggacaacaagcctggtggtcatcaggcctcagttcaacaccagtccctgagtggattcctcggctccaggtggacatccggtcttcagctgaacatcagaccccaggccttcacagacccccaaaccggaaccgccgggaaaacgattgccaactggccacaacacccaggcagagacgcggggagaggctgaccagaagaaaggccgacgtgcaagaaacccagcctccggcgcacagggaacatgtgtcccaaggcgcatgcacacacagacggacagagacagaaagagagggcgacggaaagagcgagaagggagagagagagagacagagacacatacagcaggtaacacccacccccaggcagcccctgaagctgccgggttctgctctccgcgacgacgagccaccgaccctggctgagcaacagaagaaaggagtactcagacacaaatatacaggggacatgaatgaaattggcaaacatcattctcagcaagctaacacaagaacagaaaaccaaacactgcatgctctcactcataagtgggagctgaacaatgagaatacatggacacaaggaggggaacatcacactccacagcctgtcagaggacaaacagagagccaaatcatgagtgaactcccattcacaattgcttcaaagagaataaaatacccaggaatccaacttacaagggacgtgaaggacctcttcaaggagaactacaaaccactgctcaaggaaataaaagaggatacaaacaaatggaagaacattccatgctcatgggtaggaagaatcaatattgtgaaaatggccatactgcccaagactcagcttcgcactccagggctgcgtaccaccagccactgtcatgttaaccccttcccaggccaatgtgtccttggtctggagcccaatctgctggacagcctgggaccgtccattttcggggtggtgggcaacctggtggccatcgtggtgctgtgcaagtcgcgcaaggaacagaaggagaccaccttctacacagttatgcggctggttgccaccgacctgttgttcactttgctggtgagccaggtgaccatcaccatgtacatgaagggcggaccgctgtttaaagactttggaccgcctaccgtcggttgtgtgcaggccatgaaaccacctggggggcagggctcccagagcacctacacagaactgctgttggtcacaggggagatgggcaaagggatccggcccacctatgctggcagcaagagcgccgcggagcgcctgaagagaggcaaatctggagattttctcaagcctctttatgaaaatggagagacctcacaagagatgctaatggacagctga

SEQ ID NO: 147443 - DNA, 2660 bp, Homo sapiens
agaaagcaggaaagatccaaaattggcaccctaacatcacaattaaaagaactagaaaagcaagagcaaacaacattcaaaagctagcagaaggcaagaaataactaaaatcagagcagaactgaaggaaatagagatacaaaaaacccttcaaaaaattaatgaatccaggagctggttttttgaaaggatcaacaaaattgatagaccactagcaagactaataaagaaaaaaagagagaagaatctaatagacgcaataaaaactgataaaggggatatcaccaccaatcccacagaaatacaaactaccatcagagaatactacaaacacctctacgcaaataaactagaaaatcgagaagaaatggataaattcctcgacacatacactctcccaagactaaacgaggaagaagtcgaatctctgaatacaccaataacaggctcagaaattgtagcaataatcaatagcttaccaaccaaaaagagtccaggaccagatggattcacagccgaattgtaccagaggtacaaggaggaactggtaccattccttctgaaactattccaatcaatagaaaaagagggaatcctccctaactcattttatgaggccagcatcattctgataccaaagccaggcagagacacaaccaaaaaagagaattttagaccaatatcgttgatgaacattgatgcaaaaatcctcaataaaatactggcaaaaggaatccagcagcacatcaaaaagcttatccaccatgatcaagtgggcttcatccctgggatgcaaggccggttcaatatacgcaaatcaataaatgtaatccagcatataaacagaaccaaagacaaaaaccacatgattatctcaatagatgcagaaaaagcctttgacaaaattcaacaaccctttatgctaaaaactctcaataaattaggtattgatgggacgtatttcaaaataataagagctatctatgacaaacccacagccagtatcatactgaatgggcaaaaactagaagcattccgtttgaaaactggcacaagacagggatgccctctctcaccactcctattcaacatagtgtttgaaattctggcccgggcaattaggcaggagaaggaaataaagggtattcaattaggaaaagaggaagtcaaattgtcccctctttgcagatgacatgattgtatatgtagaaaacccccttccgtctcagccccaaaatcttctttaaggctggttaagcaacttcagcaaaagtcttcaggttacaaaatatacaaaatcgatgtgcaaaaatcaccaagcattcctatacaccaacaacagacaaacagagagccaaatcatgagtgaactcccatttcacaattgcttccaagagaattaaatacctaggaatccaccttacaagggacgtgaaggacctccttcaaggagacctacaaaccactgctcaacgaaataaaaagaggacacaaacaaatggaagaacattccatgctcatgggtaggaagaatcaatattgtgaaaaatggccatactgcccaaggtaaatttatagattcaatgccatccccatcaagctaccaatgactgttttcacagaattggaaaaaaactactttaaagtacatatggaaccaaaaaaggagcctgcattgccaagtcaatcctaagccaaaagaacagagctggaggcatcacgctatctgacttcaaactgtactacaaggctacagtaaccaaaacagcatggtactggtaccaaaacagagatatagatcaatggaacaaaacagagccctcagaaataatgccacatatctacaactatctgatctttgacaaacctgagaaaaacaagcaatgggggaaaggattccctatttaataaatggtgctgggaaaactggctagccatatgtagaaagctgaaactggatcccttccttacaccttatacaaaaattaattcaagatggattaaagacttaaacgttagacctaaaaccataaaaaccctagaagaaaacctaggcattaccattcaggacataggcatgggcaaggacttcatgtctaaaacaccaaaagcaatggcaacaaaagacaaaattgacaaatgggatctaattaaactaaagagcttctacacagcaaaagaaactaccatcagactgaacaggcaacccacaaaatgggagaaaattttcgcaacctactcatctgacaaagggctaatatccagaatctacaatgaactcaaacaaatttacaagaaaaaaacaaacaaccccatcaaaaagtgggcgaaggacatgaacagacacttctcaaaagaagacatttatgcagccaaaaaaacacatgaaaaaatgctcatcatcactggccatcagagaaatgcaaatcaaaaccacaatgagatatcatctcacaccagttagaatggcaatcattaaaaagtcaggaaacaacaggtgctggagaggatgtggagaaataggaacacttttacactgttggttggactgtaaactagttcaaccattgtggaagtcagtgtggtgattcctcaggaatctagaactagaaataccatttgacccagccatcccatttactgggtatatacccaaatga

SEQ ID NO: 147444 - DNA, 483 bp, Homo sapiens
  misc_feature (1)...(483): n = a,t,c or g
gccaaggagaagcaagactggcatatgtgccccaacatcttctgagcgccacccttgcaacaaatacaggcgcctgcacagcctggcccacctgttcattaatgcactcaatttagtactgaatggtctttctcccagcccattcccagcccttcctatttcctttcctannnnnnnnnnctccccacactttcttgggactcccaccttggaaggaggaagcgctgacctgggttctctccagcccccaggtgcgccaggtcacccgtgccccttcattatggacctgggccctaccggaacccctgccccagttaccacaactcaggccggatgtcccgggccatgggctgagcatattaccagcccccaacccaaggaggaattggaccatactagggagcctcttagagtaattataaatagggaataacgaattatacacatatgtagtaaacatagtaattgtgaaaactaatacac

SEQ ID NO: 147445 - DNA, 718 bp, Homo sapiens
cggtagatacgacatatgtgatttatgttcttccgaagtgtatgtggttaagctcattagatcagtttatatagtaataagaagctgatcgtgtgatatatatatctcgacatggagacttagtgactagaaattataattagatgcattggtttagacagtctgtagaattatgaacacacgatgttctatttgtaatctggaagcataaggtagcgggtggtttgtgtgaggccaggagttcaatataagcttacgcatctcagcagtactcatctccacaaaaagtaaagttttaaaaaaggaattagcacacatataatgtgcatagaagagcccctgacatgcaggaggctctcagcaaaggtgactgtcaagtctcctaacagctccccacggcaaaggccatcctcctccccacccccagagacaagacggttgcttttcattgtaggtctttacttacattgaatttttttaaatgcacatataacttctatggaaactaaattataaagaggctcaggctcctagctagggtgccccatcaccagatcctagcctccagaggactgtggtctcagcgggagaaggaaatcaggccccctccctgctcagatccttgtgggagcagggtagggtgaaactgaaggtgggcacgggcagccggatgctggagttcctcctcagcccgtctcaatgcctgtattctgaattc

SEQ ID NO: 147446 - DNA, 497 bp, Homo sapiens
aatataaaacttagctggtatgttggcggcacctgtaatccagctactcaggaggtgaggcggagaatcgctgaactgggaggagagaggttccaggagccaagattatccactgcactccagccgggcaacaagagtgaactccgtctcaaaaaaaaaaaaagaaacagggccatctgtctttgaggcagagggatttacacccttgctaagacactaaagttttttgctaaggcactaaactttttaggcccttcccccagtattacacatgagagatgataatcaagcctttgttgcctgtgagtgaaaaggaatctaaaaatcactgaaataaataataatagtttttcaaggaatttcaaagaagttttttcacatgggaaaggactgctaggctggatgtggtggctcacacctgtaatcccagcaatttgggaggctgcagcaggaggaatgcttgaacccaggagttggagacagtgtgggcaacatag

SEQ ID NO: 147447 - DNA, 1495 bp, Homo sapiens
  misc_feature (1)...(1495): n = a,t,c or g
ttcgagactctagtccatgtggtggaattcgagacagcccagagaaggctttggagacccttgagtcggccagcgagcagggtttcttacttgagcgcctccacaaataaacgctcgcttcgctcctccgtcgcgtgcgtttccctgggataataagtgggaaagtggtggcttttatttttttgagacagggtctcaccgccgtcgcccaggccggatggagtgcagtggcgcgatcacggctcactgcagcctcgacttcccaggctcagagatgggtttcaccatgtttcccagccttgtctcaaactcctgacctcaagtnatccnccgtcttgggtcttcgaaagtgctgggacacagcgagtgagccaccgcatctggcccggaaagtgttttggagcgtagaaaaatgcaaattataagggctgccttgaaggatgcccgaagaacgccacagatttgccgcatcaggctcctatgcacgccggtaatttgatgtgttgagatgcactgcccagtgcgttgtttttactggaggagcttgtgtgcggagctccttgctagtgtatgtgttgggatgggagagaagtgcgggagaactatgagaatatggccccctgatcctcagggtcttaggaggtatggtcggagaggctaagctaaagtatgaaagcccgtgtgtaggcccttctgtgtagtgcagaaaaggtagaggtatgtgatttgaaagagtagggatgacatgggaggatgcgactcctgggttggatctataaaacttaatgtctttgggaacgaaagcacatgcaaccttttgaaaaatgggatggggttgataattgaaagaccattccagagaagaaacaccatggtgccaaaggctcaagaggcatactggaagtacaatgaaagagagcaatctaactgaaatgggaaaaaaagaaacaaagagtaaaaagtaaggatttgatggagaaagatggaatcggatttttaaatttttttatctacacaacaaaatttattatcttaacccatttttgagtgaataattcgttagtattaagtatatttacctcgtgcggcccagtctcccagaattcttttcaatcttgcaaaacaaaccccgaaccccattaaacaatttcctcattcgcccattttcccagcctagccttggtaacctccattctagttctgtctctgtgaatttgactgtgtaccccgtgtaagtggtatcatacagtatttgtatttttgtgactggcatatttccacatagcataatctccttgtggtttatccatcttgtagcatgtgtcagaatttccttcccttttaagactaaataatattccattgtgtgtatataccacttgtgttatttccaccttttggttattgtgaataatactgcttcaaacatgagtgtacagataactcttcaagatccttttagggtaatacagagatagtaagttaaaaaaaaaaa

SEQ ID NO: 147448 - DNA, 1509 bp, Homo sapiens
agtgcggtggaattcgtgggaggcaaatagaatgatttcggatcacctgctggagtctgaaaaaaaccgtgattcatctggaagatattacagggccagcttgccatattccaggcacacgttatcaagtttgggcctattgtggcctctgacttctctttcttcagccttttgaccacttattaattagtccatttgctagaagagtggtcaagggaaaaacgagagatgaaatttagttaagtctatgtgagcaagtgagagaaggttaggtaaggggagaggatggaatgcttgcctccaatgaactttggagcttgtatgtgagtcagattgctcccctattgctattatctattactcttgagagctggctgtcctttgaaagaaagaagtaatgttctttgaaagaaagaaaaatctcttgctgtgtcaaacctcaaaatgttgctattggggttagaaggcctcctctttatgctttttaatgctctttcaaacgtgttcttttagaccagttttctaataagctttgtaaaatgtactatccaaattagaagcggatttggaaatgcaaactaacgtgcacttagatatccaagtgggtgagcttagccactcttacccatgctctttccctggttttccctgggagacctgtcccgagatgatttccatataccagcatagaaaatcagaatcaagagcaaactctgagactggcacaatccaagaagatttcctggctctggcttttagtaatatcgagactccaactggccactgtactggactgtaatttataaatccagtagctacgcagggtggaggctgggctgaggattaccataatgaaatgtactaaatcttcatttaggtatgcaattgtgaagtgaaggcatctgctttctttacagtatcagagtccaagaacaggatgttcaccataggatgaaaagcctcatgacaaagggcagaactaacactccaaatttaatgtgtttaaattggtgggggcaccagcagaaaatacttctagctcagctttactcttcttccacactaggctgggcccagcaatacaggagaggatgaagggaggagctccaggaggcgagggaagagccctagcagggcggccatcacaaccactcactgagagttgcccttgcttaaaaatgtattttattttagccagtgggtcccttccctttctccctttccctctctactgcctcaagaacagatttgaggcccaggtgcggtgcctcacatctgtaatcccaacactttgggaggctgagatgggtggattgcttgagcccaggaagttcaagaccagcactgggcaacacagcgagaccccatctcttaacaaataacagacttgaggaacccctctaccttccataattcccctcaaacaccgccaactccaaacaatcactcaaacatgctcaacaaataagtatacaagcagaaacaataaaccaatctagattttaaaat

SEQ ID NO: 147449 - DNA, 397 bp, Homo sapiens
  misc_feature (1)...(397): n = a,t,c or g
cttcagccagaggtcaaatgttcaagggcatcagataattcacactggagagaaaccatttaaatgtgaggaatgtgggaaagaattcagttggagtgctggtctcagtgcccatcatagggtccacacaggagagaaaccctatacgtgtcagcagtgtgggaagggcttcagtcaggcctcacattttcacacacaccagagagtccacactggagagaggccttacatatgtgatgtctgttgtaagggcttcagtcagaggtcacatctcatctaccatcagagagtccacactggatggaatctgtagaaatgagaggtgtggttcagccttcagttagagctcacatctttgtctccgttgggaagtccatgctgatgattgcgaaaagcn

SEQ ID NO: 147450 - DNA, 4376 bp, Homo sapiens
  misc_feature (1)...(4376): n = a,t,c or g
atgagtgcagactggctgatcgggaaagcgaggagccgcggcggcgtggagccggcgggcccgggcgggggctccccggagccctaccaccccaccctgggcatctacgcccgctgcatccggaacccaggggtgcagcacttccagcgggacacgctgtgcgggccctacgccgagagcttcggcgagatcgccagcggcttctggcaggccacagctattttcctggctgtgggaatctttattctctgcatggtggccttggtgtccgtcttcaccatgtgtgtacagagcatcatgaagaaaagcatcttcaatgtctgtgggctgttgcaaggaattgcaggtctattccttatcctcggtttgatactctaccctgctggctggggttgccagaaggccatagactactgtggacattatgcatctgcctacaaacctggagactgctccttgggctgggccttttataccgccattgggggcacagtcctcactttcatctgtgctgtcttctctgcacaagcagaaattgcaacctctagtgacaaagtacaggaagaaattgaagaggggaaaaacctgatctgcctcctttagtttggaagagacaatgccattttctcccttgagtaatcttgtgaaacagtccacagtttcatcatttgagtcaagtggagaactaacctttacctaccaaagccacgttccacggcccgaggcttaaacaggaccaatgagaggccacatccagctacgcaaagttactggacatgcggtctgcagtgcacattataaggaatggaacatgaaaatagtatataatcctagacctggagttgccaagttctgtcagactccatctcccccaggttcaatgatggatgataatctaaatcattagggcagcagtttctctggtaacggaagagaccgtccgccagatctgcaggctgtttctgctccaacactgcttgcttgtgagcatctctgcctcagaatggggttttgggttggagttcttgttttcctctgttctttcaagttgtctccaacgaacagaaaactataaacttactgggggacaggatggtgtgctaaaagggcacagcaagacactgtctttttgcttagctgaccaaaggggtcagcagggatggcgtggagtcatgctgtggaacttattctaggctgaatcctagggtaaggtggatcaactgaactgtcactccagagattttagaaatttgagtaaagaaacaataaggacctatacaatcatatgagaacaaaaatatgaaatcttgctagtgaagacgtattttttcttcttcccagcagccaggctagcaccagttctggcccagtctcctcttcttctggagatcacatgtttttcttctaaggttaggattgtgctttgactgcgaaaggaaacctcactgtttcctccttccagggactgagggtctccaagctagctgtggcttatgcagatgttcactgggaggacctgccagaatctcggcacttggggggagacctttactcccagtttggtgaccatgctgtagtcagctctatttccaatcccgacagtagcagaatggcattctacaacaaaaagaagctagttatgggagttaagtttttgtagttactggtgttgatcctgaaagcagactgagataacattaaattgctgcaactgaagaactgcagccaagaccttaattccaggaaagcacagaggacaaagttaattcaaaaagaggcgctagatcaaggtcacagcacttccctacacctgtttacataaagaatcaaataccactatgaataaggattcaggggtttttaatctactttccataaattaccaatatcactgattcaggaagatagtatctcagaatgaccagagcagcacagaaacaagctactctgacattatgggagcttcaaaattgtatcatgatacagaaacactccttagcactttaagaaagtgagatggaactgccagatttctggaaggagaaaaagtgtaggtatttgggttcattaatctgctcacttgaggactttgttttgaaaaagtaccttctgtggacaaggtattgtgctaccagctatacaaccctgacttcagagtttgcaaccttgccctgagtgaatcatgttaaagctgtctgagtctaaagcaccgtatcttggtgcagaacagataattatagagagatggaatgggacaaccgcagttttactacattctggtgtttggcctatatgagaaaccatcttctcacagattaagggctaagggcaaaaggggtgggaggtgtggaactagccttaatgagtttcccattcctgaaccaaaattcaaagtgagtgagatgtaaatcctgtgattttggtgaagaaaaaaacgggtatcttcatagcagcctaggaaaccttaaccatatctctaacaccacacagaaagaggctggaggagccactggacaaagcttctgtctctgtgtgtacatttataatgttctaaccaagtctcaaaccttgatgaaaaacacaaaatttttccataaacttatcagaagactcacttttctttctttcttggatagagaaaccattttctgacactaggtttacaatctcagtgtccttacaagttaagtcctaagctcacaggatcctccgagcatgtccatcacctggctctttggctaaagggtggcagtgtacctcctagatcaacctggggaacagtcacaagggagtgtgacttcttggccataataaactcactcgatagtgtttatgttattaatctgaatgcaacagaagacaaaagcacaggcatgcacacacacacaaccccaaaccactaaaaactacctaaacgactgacttagtaaatagtaaaaaggtaatgttgggacttttaaaccttgaatccattagccaggcttgggaatgaaaggaccatctaaaatcatgctagtctaaaccatgctcttccacacagctgtttaaaaaccactgggtatgaggaatatgcctagaaagaaatgttaaaaatagattgttggctcacacttatttttcctaataaatagggcccattattactaccaggaaagtcttatttattttgcctgaaattggcttaaagaccagtctcatgacgggatgggatgggctgcgcttctcaatgaactctgaggcagaaatatttgccttgggattctgtgggattctttaaacctgtgtgctaataattcaaacaatgttgcattaattgtataagggtttttggtatagttttcaaacatctgtggtgtaatgatctttgttaaacatatattctgtaaagtgccatagtctttttttatgtgtagcatattttaaaaatatatatgtatatttatacatacacaagtttggtgtggaaagatgtgcaataacaaaggggtatgtatgttttgttgttttgttttggaaactggacaggagtcaaaacagggatgtttgtttctgttttggcaaaggagagttccacatttttgccttcatggcttattcagtaacccataattttaatgctacacaaatcttatgtgaagaaaagactggtatgaaatcatgttttcctgggtctagaataatcgctagtgttatgtcaaagttaagcccgcacgccaggccccagtaatgctagtctttccatgtgaaatgtgaagctgccatgttgccttttctcttagtaggataactagtagctggtaccataatcactgaggagctatttcttaacatgctttttatagacccatgctaatgctggacccagtatttaagggctaatctcacaccttccttagctgtaaggagtctggcttagaaacagacctcctctgtgccaataacttgtggcccactgggaaatcccctgggccgggcatttgtantttgggggttgcaatgactccccaagggccaaaaagagttaaaaggcacgacttgggagtttctttctgagactgtggttgaaactccttcacaaggctgagggggtcagtaggtgctctggagggactcgggcacaactttgatatcaacagccacttgagccaaatataaaattgtatttacagctgatggactcaatttgagccttcaaacttgtagttatcctattatattgtaaactaatacattgtctaagcattgatttggttcctgtgcatatgtatttacagctgatggactcaatttgagccttcaaacttgtagttatcctattatattgtaaactaatacattgtctagcattgatttggttcctgtgcatatgtattttc

SEQ ID NO: 147451 - DNA, 892 bp, Homo sapiens
tttcgtggctccgagccgagcgcgcggagcagctggggccggggcgcggatgctggaagttcacatcccgtcggtggggcccgaggccgaggggcccaggcagagcccggagaaaagccacatggtgttccgagtggaggtgctgtgcagtgggcgcagacacacggtgccaaggcgctacagcgagttccacgcgctgcacaagcggatcaagaagctgtacaaagtgcccgacttcccctcgaaacgcctgcccaactggaggaccagagggttggaacagcgccggcagggcttggaggcttacatccagggcatcctgtacctgaaccaggaggtgcccaaggagttactggaattcctgagacttcggcacttccccacagaccccaaggctagcaactggggcaccctgagggagttcctgcctggcgacagcagctcccagcagcaccagcggcctgtcctgagcttccatgtggatccctatgtttgcaacccctccccagagtcgctgcccaacgtggtggtgaatggtgtgctccagggcctctacagcttcagcatcagcccagataaagcccagccaaaggcggcctgtcgccctgctcctctgccaccgatgccctgatcagtccagaggcctttggctgcctcttaagaaagtcatgtgcctctgtcctatgaactccatataaggctgggtcctcctttggcctggacccaggacttaattacccagtgcccagttgtgccacattcccactcaaggctcagaacttggctcgcattggtagctggaggtggtagaatttgtatgctcttagagcccaacagccaaggcagggtcaagaagataagtaataaaagagtaagtcagccaggatgtatt

SEQ ID NO: 147452 - DNA, 881 bp, Homo sapiens
  misc_feature (1)...(881): n = a,t,c or g
tgtgatacatttgaaggcgtcggaaancccaggcccacctgagcctgctgccctgacccgtggccccagctgagcacgcaggctttttggggttttcccagggtcggcggcagagccctccctccagggcccattgtgttcctgcattcccccatggagcacacgccagacctgaggggtgggacggacacccccaggcatggccggctgtctcctctccctgccttgggaggccttgctgggctctagctgtcctccagcactttgggccctgggcccccagaggcagtcagtacctgggtggagctcagagtccccacctgtgctcttcacaaaaaccaccagcagatgagacccacgtgcgtccctctgggcgcctcaggccccaggatccaccatcaaggtttgcttgcctgtggaggtcgcctctccccaggggagcccccaagggcggtcgggatggtgggtttggcatccccaggcactgcctatccctttcccacactcgcatttggtgtggctggtggctggatgcccaaaaccgggtatcgggttgaagggtccaggtagtgccagcaggggttttcttttctccaggcctatggtcctgcccagcacgccatttcaattgagaaaattcaaagccaagtaccccgactacgaggtcacctgggctaacgacggctactgagcactcccagcccggggcctgctgcctccagcagccacttcagagcccccgccttttgccttgcactcctgtttgcagggctggccctgcctgctcctgcggcagcctctggtgacgtgctgtccaccaggccttggagacaggctagcctggccacagaattaaacgtgttgccacaaaaaaaaaaaaa

SEQ ID NO: 147453 - DNA, 1564 bp, Homo sapiens
acgccacgcgccctgccgtaccttcgcctccagccgctgctgtctgggccctgcaggagctgggaaaaaccgcagggaggtcttcaggccgatatgcaagtctcccagccgaaggggcaggggacctgaacaggggaagcagagcacctgggcctggccagagctgacacctggctaggagaggaaggaccaagggacggggcgttcccaggtgggagcctggagggcaaagcgtggtgcgagcagcctcgcgggccgcctaactgccccgttccaagggtgccaccggaccccgctggagaggaacttctccgttggctgatatcatcaccacccattgccgattccacgtttcctttaagcggggctggcggagccgcaaggcggcaaggaactggattgcgattggtcagcacgtgcctcggtccgcggtacaattggctgaggcgctgggccttgggaagcattccccgacgggattggtcgtcgctctcgcagagcccgcctcccgcagtacaagcggcccccggttggggttgggaaggaggggattccgggagaagaaacatggcggtggcggacctcgttctcattcctgatgtggacatcgactccgactgcgtcttcaagtatgtgctgatccgagtccactcggctccccgctccggggctccggctgcagagagcaaggagatcgtgcgcggctacaagtgggctgagtaccatgcggacatctacgacaaagtgtcgggcgacatgcagaagcaaggctgcgactgtgagtgtctgggcggcgggcgcatctcccaccagagtcaggacaagaagattcacgtgtacggctattccatggtgagccgcagccccgtcccgccctgccggaggccccagtaccagcttcgaggcccacctgagcctgctgccctgacccgtggccccagctgagcacgcaggcttcctggggttctcccagggtcggcggcagagccctccctccagggcccattgtgttcctgcattcccccatggagcacacgccagacctgaggggtgggacggacacccccaggcatggccggctgtctcctctccctgccttgggaggccttgctgggctctagctgtcctccagcactttgggccctgggcccccagaggcagtcagtacctgggtggagctcagagtccccacctgtgctcttcacaaaaaccaccagcagatgagacccacgtgcgtccctctgggcgcctcaggcccccaggatccaccatcaaggcctatggtcctgcccagcacgccatttcaactgagaaaatcaaagccaagttcccccgactacgaggtcacctgggctaacgacggctactgagcactcccagcccggggcctgctgcctccagcagccacttcagagcccccgcctttgcctgcactcctactatgagggctgaccctgcctgctcctgcggcagcctctggtgacgtgctgtccaccaggccttggagacaggctagcctggccacagaattaaacgtagttgcccccccaaaaaaaaaaaaaaa

SEQ ID NO: 147454 - DNA, 692 bp, Homo sapiens
  misc_feature (1)...(692): n = a,t,c or g
aatccgagnccccntngttttgagnanccctagtccagngnggnggaattcccgggaggaggaacatggcggtggcggacctcgatctcattcctgatgtcggacatcgactccgacggcgtcttcaagtatgtgctgatcccgagtccactcggcatccccgctccgggcatccggcctgcagagagcaaggagatcgtgcgcggctacaagtgggctgagtcaccatgcggacatctacgacaaaagtgtcggggcgacatgcagaaagcaagggctgcggactgtgagtgtnctgggcgggggccgcatctccccaccaagagtccaggacaagaaagattcaccgtgtactggctattccatgggcctatggtcctgcccaagaacgccaatttcaacttgagaaaatcaaaagccaagtacccccgacttacggaggtcaccttggggctaaaccgaccggctacttgagcactccccaagcccgggggccttgcttgcctccaagcaagccactttcaagaagcccccggccttttgcctgcaactccctcttgcagggctggccctggcttgctcctgcggcagccttctggggacgtgttgtcccccaggccttggagacaggtctagcctggccacagaattaaacgtgttgccacacctgccggcttctgaaaaaaaaaaaa

SEQ ID NO: 147455 - DNA, 1504 bp, Homo sapiens
ctagtttattgatggccatgcctcatcttgtctgtaattgttagatggtgctggactaaactttcagtaatatatacagggccacagatgataatgggactagttttacatctatacactataacttttagtgcaagtacttgaaacacacaaaaatcgaggcattttgctctgctgtccttgaatttgggcataaaatgctaaaaccactgctaattacagtaacccacttggaatctaaattgttacattaaaattagtttttaaagtgagcaggatccatattgctacattatagaaactaatacccttattaacagctccatcttctccattgtaatatttccttaaaaagaaaatttgcagacatggtctgaatgatttagagtgatgtgtaacagtttggacaggctggttgcacccctgaaagcctcctttgtcattgccagctaggatgtcatctgtttgaactggtctttttcgtgtttgcctagggtgagtagagagtggtgatttagtagagctgttggctgcttcctggctgctgtaggaagttagtttttctggctatatgtgtatgaggcgggaagcagattgttaggagtctttaaatattctaaattttacctctgagaaaactgggatgacttagagtgtagtaggtattgtggtttgtttttcccttcctttcctttaccaccccactcctcgccgccttctccttctctttgtcctcttacccatccctcccctttcctcctttgtctggattattagaagaggttgaattcagaaatgtgactaatttttacagattgtgtttttacagactagtttttagaaatgtgacagtttttacagattgactcccttcactgaagaaggaactttctttgtagtctagatttttttagttttatgatacatgtctagtgtagagaagttcagggaccataggactggaagagcttggtatacttacgtgctggtactgtttttttttatacttttctctatttttcttgtgccctaggtttttccttccagttgggttaaaaaaaaaaagttgttgaggaacattgatatggtgaaagagttgttttttatttccatatttatcattcaaaatagttttttgccatgtgtcatgtttctctgagtggggagagatagtagtcttgtgtatgtgtcaggaaaatattcataagatgtttccagaattcccagaaattaggactgttactagaattccccaagatgaattagcatgaaggctaatttgtcattaaaacattgatatccttcaaaattgaaaaaaaaatttagaagaaacatttaacaacataatcatttctgccatcaagtaaaaattaaaaagtacaacagtgttggccaggtgcagtggctcatacctgtaatcgcagcactttgggtggctgaggcaggtagattgcttgagctcactagtcagagacctgcctgggcaacatggcaaaaccccatc

SEQ ID NO: 147456 - DNA, 239 bp, Homo sapiens
gtggctcctgcgcctgcgccggctcctgcaagtgcaaaaagtgcaaatgcacctcctgcaagaagagtgagtgcggggccatctccaggaatctggggctgtggctaaggctgctgctcctgttgccccctgggctgtgccaagtgtgcccagggctgcatctgcaaaggggcgtcagagaagtgcagctgctgcgcctgatgtcgggacagccctgctgtcagatgaaaacagaatga

SEQ ID NO: 147457 - DNA, 384 bp, Homo sapiens
atgtgggaaagtgtggaacttcctagagacttgttgagtggctttgcccaaaatgctgatagcgatatggacaataaggtccaggtctctgatggagataaagaacttgttggaaactggagtaaagaaaaggagctgccaactgttgcgctccaccacgccctccacgtgttccactggctcttctcttctcgcttgggaactccagtctcacctcgggttgcaatggagcccaaatggtcctgcgaggctggctgctgttcctgctgccccgtgggctgtgccaagtgtgcccaggtgctgcgtctgcaaaggggcatcggagaagtgcagctgctgtgcctgatgtgggaacagctcttctcccagaattgtaacacttag

SEQ ID NO: 147458 - DNA, 2883 bp, Homo sapiens; identical to SEQ ID NO: 140161

SEQ ID NO: 147459 - DNA, 1540 bp, Homo sapiens
  misc_feature (1)...(1540): n = a,t,c or g
ctgactgcttgttcgtctcactggtgtgagctccagcatcccctttgctcgaaatggaccccaactgctcttgcgccactggtaagggaagctctgcgccctgggaatccccatttcccagccctattacagagggtctctgggtttcaggaagtcgcattttaagttctgagcgacggggactccagtacttcgttagatgctttcttcctgatcacgcccctgagagcattgccctcatccctgggcctctacgtcagagttaagaatactgaggctcaaggctgaactgctccacatcacccagttggtcatgggcctgctggctgggccccagatgctctgtccagggctctgagcaatcagtgtggttgggggtgctgggaaacattgaactctttcagagtttcagggacagaaggttctgggctcgcagttctcaatattcctgggttgtatgtggcacgtgggggaccttcctgggtggcggttaaaacagggagggttcttggccctttcccagcgttagtggagaggacatggggcttctgttcctctgtcctgagtgggaaaggagctctgagggctggccctgcacagaggagggggcactggagactcactgacccactgctgtaccttctgcatctcactcactgcccactgcgttttcctcttccttgtaggtggctcctgcacgtgcgccggctcctgcaagtgcaaagagtgcaaatgcacttcctgcaagaagagtgagtgcggggccatctccaggaatctggggctgtggctcaggttgggagggaactcaaggctggccctgagtgcatccttctggggacctgggctttatttgccctcattgccccgtgtcattccctctccaaggctttctgccctaaattcagatggggcaggacagcatttttctccgtgggacacaaaccccaacttgtaccccccctatgggtttcagaaacagagctgtgcccagacgaaaaaaaagcatccctctggggtctgggttcctgaagctcgaaccccaggcttgcctattaggggcaggggaggtgccccggtcaaagtcctactgcccacctctcactctccccttccttcccccaggctgctgttcctgttgaccccgtgggctgtagccaagtgtgccccagggtctgcgtctgcaaaggggcatcggagaagtgcagctgctgtgcctgatgtgggaaccagctcttctcccagatgtaaatagaacaacctgcacaaacctggatttttttaaaaatacaacactgagccaatttgctgcatttctttttatactaaatatgtgactgacaataaaaacaattttgactttnnnnnnnnnnnnnnggggggccccttttaaagaacccctaagggggcccaacctaaacggggattgaaaaacctgaacttcctccattttgggagccatacaaaacccagccttgggatgtttgaaaaggaacactacttctgggggggacaataatggcacaacctaccttaaaaa

SEQ ID NO: 147460 - DNA, 5359 bp, Homo sapiens
  misc_feature (1)...(5359): n = a,t,c or g
cagagcagggcgagagccgatcagcggatcaccgagtctcgccaggtggtggagctggcagtgaaggagcacaaggctgagattctcgctctgcagcaggctctcaaagagcagaagctgaaggccgagagcctctctgacaagctcaatgacctggagaagaagcatgctatgcttgaaatgaatgcccgaagcttacagcagaagctggagactgaacgagagctcaaacagaggcttctggaagagcaagccaaattacagcagcagatggacctgcagaaaaatcacattttccgtctgactcaaggactgcaagaagctctagatcgggctgatctactgaagacagaaagaagtgacttggagtatcagctggaaaacattcaggttctctattctcatgaaaaggtgaaaatggaaggcactatttctcaacaaaccaaactcattgattttctgcaagccaaaatggaccaacctgctaaaaagaaaaaggttcctctgcagtacaatgagctgaagctggccctggagaaggagaaagctcgctgtgcagagctagaggaagcccttcagaagacccgcatcgagctccggtccgcccgggaggaagctgcccaccgcaaagcaacggaccacccacacccatccacgccagccaccgcgaggcagcagatcgccatgtctgccatcgtgcggtcgccagagcaccagcccagtgccatgagcctgctggccccgccatccagccgcagaaaggagtcttcaactccagaggaatttagtcggcgtcttaaggaacgcatgcaccacaatattcctcaccgattcaacgtaggactgaacatgcgagccacaaagtgtgctgtgtgtctggataccgtgcactttggacgccaggcatccaaatgtctcgaatgtcaggtgatgtgtcaccccaagtgctccacgtgcttgccagccacctgcggcttgcctgctgaatatgccacacacttcaccgaggccttctgccgtgacaaaatgaactccccaggtctccagaccaaggagcccagcagcagcttgcacctggaagggtggatgaaggtgcccaggaataacaaacgaggacagcaaggctgggacaggaagtacattgtcctggagggatcaaaagtcctcatttatgacaatgaagccagagaagctggacagaggccggtggaagaatttgagctgtgccttcccgacggggatgtatctattcatggtgccgttggtgcttccgaactcgcaaatacagccaaagcagatgtcccatacatactgaagatggaatctcacccgcacaccacctgctggcccgggagaaccctctacttgctagctcccagcttccctgacaaacagcgctgggtcaccgccttagaatcagttgtcgcaggtgggagagtttctagggaaaaagcagaagctgatgctaaactgcttggaaactccctgctgaaactggaaggtgatgaccgtctagacatgaactgcacgctgcccttcagtgaccaggtggtgttggtgggcaccgaggaagggctctacgccctgaatgtcttgaaaaactccctaacccatgtcccaggaattggagcagtcttccaaatttatattatcaaggacctggagaagctactcatgatagcaggagaagagcgggcactgtgtcttgtggacgtgaagaaagtgaaacagtccctggcccagtcccacctgcctgcccagcccgacatctcacccaacatttttgaagctgtcaagggctgccacttgtttggggcaggcaagattgagaacgggctctgcatctgtgcagccatgcccagcaaagtcgtcattctccgctacaacgaaaacctcagcaaatactgcatccggaaagagatagagacctcagagccctgcagctgtatccacttcaccaattacagtatcctcattggaaccaataaattctacgaaatcgacatgaagcagtacacgctcgaggaattcctggataagaatgaccattccttggcacctgctgtgtttgccgcctcttccaacagcttccctgtctcaatcgtgcaggtgaacagcgcagggcagcgagaggagtacttgctgtgtttccacgaatttggagtgttcgtggattcttacggaagacgtagccgcacagacgatctcaagtggagtcgcttacctttggcctttgcctacagagaaccctatctgtttgtgacccacttcaactcactcgaagtaattgagatccaggcacgctcctcagcagggacccctgcccgagcgtacctggacatcccgaacccgcgctacctgggccctgccatttcctcaggagcgatttacttggcgtcctcataccaggataaattaagggtcatttgctgcaagggaaacctcgtgaaggagtccggcactgaacaccaccggggcccgtccacctcccgcagcagccccaacaagcgaggcccacccacgtacaacgagcacatcaccaagcgcgtggcctccagcccagcgccgcccgaaggccccagccacccgcgagagccaagcacaccccaccgctaccgcgaggggcggaccgagctgcgcagggacaagtctcctggccgccccctggagcgagagaagtcccccggccggatgctcagcacgcggagagagcggtcccccgggaggctgtttgaagacagcagcaggggccggctgcctgcgggagccgtgaggaccccgctgtcccaggtgaacaaggtctgggaccagtcttcagtataaatctcagccagaaaaaccaactcctcatcttgatctgcaggaaaacaccaaacacactatggaactctgctgatggggacccaagcgcccacgtgctcagccaccctctggctcagcggggcccagacccacctcggcacggacacccctgtctccaggaggggcaggtggctgaggctcttcggagctgtcagcgcccggtgcctgccctgggcacctccctgcagtcatctctttgcactttgttactctttcaaagcattcacaaacttttgtacctagctctagcctgtaccagttagttcatcaaaggaaaccaaccgggatgctaacaacaacatggttagaatcctaattagctactttaagatcctaggattggttggtttttcttttttttttctctttgtttctttcctttttttttttttttttttaagacaacagaattcttaatagatttgaatagcgacgtatttcctgttgtagtcatttttagctcgaccacatcatcaggtctttgccaccgaggcatagtgtagaacagtacccggtcagttggaccaacctcccacagaccaagtaggttcatccttgttcctgttcattctcatagatggccctgctttccccagggtgacatcgtagccaaatgtttactgttttcattgccttttatggccttgacgacttcccctcccaccagctgagtaatgtatggaggtcatcggggcctcagctcggaggcagtgacttggggccaagggacctcgagacgctttccttccccaccccccagcgtcatctccccagcctgctgttcccgctttccatataggtttgggccagggaaagcatggcaataggatttggttcgggagcccaagcactcctggggtcttgggggttcgggtgagggggacgggggcacccactttccttgtctgtgacggcgtgttgttccccactctgggaatggggaagaggcccgtcgggaagttctgcatggcagtttcactgcatgtgcttgcccccttgggtttgctctgccaatgtatttaataccatcccatagctcctgccaaatcgagaccctcttgacgacttgccgactaactggccaccacaagctgcagtcttttagcactgaacaaacaaaaaacaaaacgcttcaagccttacggaccagaggaagggttttcaggcaaaccaccaccttcccattcagtgttcccctccaaatttcacacttccctgcctgcagaggatgactctgttcacacccaatccagcgcggttctaccccacgaaactgtgactttccaaatgagcctttccctagggctagacctaagaccaggaagtttgagaaagcagccgcagctcaactcttccagctccgccagggttgggaagtccttaggtgcagtgcggctcccactgggtcttgcggaccatccatattagagtacggaaattcctgggcaactggttacagaaccaacctaggaggcttttgcagttgggcaagctaactcgcggccttatttcttgccttttaattttccccacaaggcatctgttgttttggggtcctccacgactcttaggcccgcctcaacaacccaggcacctcctaggtaggctcaaaggtagacccgtttccaccgcagcaggtgaacatgaccgtgttttcccctgtgtccacaagttcagatccctttccaagattgcaaccctggccctggcatccccagctcccttccctggctcgtgccttaaccctaagtgctttccttgtttgaaaacgcccctacaaaccctcccatgtggtaagcctcccttggcaaaatgtccctgcctgtggcgttttaatgtgttgccttggagtcctgtggggtcgtactcccctcccctcccgtcccccgggcagatttgattgaatgtttgcctgaagttttgtctcttggtcccacagtatttggaaaggtcactgaaaatgggtctttcagtcttggcatttcatttaggatctccatgagaaaatgggcttcttgagccctgaaaatgtatattgtgtgtctcatctgtgaactgctttctgctatatagaactagctcatgaagactgtacatatttacaagaaactttatattagtaacaccaaaaaagaggaaattgaaattgggtttctaccttttttattgtaaaaaggtgcatttttcaaccactttacttttgggtnttcaaatggtgggtaagttgtggacagccatcttcactggggggttggggagctcccgtgtgaccaccaagatgccagcaggatatacccgtaacaccgaaattgctgtcaaaagctttattagcatcaatcaagattctaggtctccaaaagtacaggctttttcttcattaccttttcttattcagaaccgaggaacgagaacacaaggaatgattcaagatgcgaccttgaagaggaatgaacttttgttgttgaacaattagtgaaataaagcaatgatctaaact

SEQ ID NO: 147461 - DNA, 302 bp, Homo sapiens
  misc_feature (1)...(302): n = a,t,c or g
cggcgcccgaaggccaggttcatgncgtcacactgaagtcccaggtcctcggaggtgtcgcgaaggatgcagtccacaagcacccacaggttggccgagtccagggcgctcgcgctgggcgtggcacagattgtcctgtgtgaacttggtccgggtctctggggtggaggcgctgcggggccgcttctcaaaactcttgcacaataggttgagggacttctctacaccaggaccanaganttattcgtttcttgccgctcttggaaacacccagaggacactggaaacatagccacagggac

SEQ ID NO: 147462 - DNA, 381 bp, Homo sapiens
cgcatttacagaagtttatacgagacctagtttccagggaagaactcactgattccgcgagggagatggcttaatggatgatggtcgtcagccttaaggatacttcagtcttaactgtgtgttacaaagtttgaaagggagggttccctatgaataagaagcacacttgaaagaacagccatctggtctaacctctcactggtgcttcagaggaggaaaaaaggtcacagctatgtttccagtgtcctctgggtgtttccaagagcaacaagaaacgaataaatctctggctgcataaggggagtgaacacaaagtacatttgaccacaaaatgactctttaaaagtcagaactacggtagcatgaagccaaacgagattg

SEQ ID NO: 147463 - DNA, 502 bp, Homo sapiens
tttcgtcagaggcggtcctgtagccgggccggcttggggcttggttctatgtccctgcgggtcggtgcaagggcgaagaggaacccgtgggcctcaggggatcccggggggccggaccagtgttccctagttgtgggagcagacgcgtgggcatattgcgggcgggcagggcctgaagtgcagctatgtttccagtgtcctctgggtgtttccaagagcaacaagaaacgaataaatctctggtgagttgtttatttgttcttcactttgttttacactgtattttctgagtttatgggtgtctgtgaattaaaaaggaaaagtggaaataagtaaaactcaggttgaaggaaatatacataaataagataaagctgacctgtagatataggcaggttataagagcttagagttgtctaagttgagtgcaaagtttcctctgatctttctgatgccgaaacaaaaaaggcagtcatgtttgttacgtgattggaatggaacc

SEQ ID NO: 147464 - DNA, 478 bp, Homo sapiens
tttcgtggcacccagaggcggtcctgtattcgggccttcttggggcttggttctatgtccctgcgggtcggtgcaagggcgaagaggaacccgtgggcctcaggggatcccggggggcccggaccagtgttccctagttgtgggagcagacgcgtgggcacattgcgggcgggcagggcctgaagtgcagctatgtttccagtgtcctctgggtgtttccaagagcaacaagaaacgaataaatctctggctgcataaggggagtgaacacaaagtacatttgaccacaaaatgactctttaaaagtcagaactacggtagcatgaagccaaacgaggtaatctacaataaaattttctatgcttcttttccttctttgctctctttctactctaataactgcgattcacacaggtaatgaagagtgtaattccttgatagaaacacagctccaagattaatcctttctttaacttat

SEQ ID NO: 147465 - DNA, 474 bp, Homo sapiens
tgttgggccagtgcaagcgcaggtacagaagggtctgggctatgtgcagaggtgcctccttgtcctgatggccctctttcagtgccgccacgttgtttctgatctgtgatttcccccagcatcttgtgcaggtggtgctgcagcttgtgccgcgtgtcctccagctcctcacagcggcgcccgaaggccaggttctacagcgtcacactggagtcccaggtcctcggaggtgtcgcgaaagatgcagtccaccagcacccacaggttggccgagtccaggtgctcgcgctgggagcggcacagattgtcctgcgtgaacttggtccaggtctccggggtggaggcgcagagatttattcgtttcttgttgctcttggaaacacccagaggacactggaaacatagccacagggacatagaaaaaagccccagggctgctcagctacacgaccgccgctacgagatggtcgatcc

SEQ ID NO: 147466 - DNA, 454 bp, Homo sapiens
acaaagcatattttagctctttaaatgaaagcttcattcagtcaatattggtcttcctgtagatgcatttatgaaaacaaaaccacaaaacatacagcttacccggcttcctcaaaaactcattgcacaaataggttgagggacttctctacacccaggacctattattaaaaccagtaagtcctcagtgaaaatcatttatatgcccggagtgtcatctgatgtgtctgttgtaggcagctgtggcagtggtgggtggtttagtgacacggaccctgcccacgtctgtccgtccatcagtgggctagtgtctctctggctgcacctgagaagggtcagagatttattcgtttcttgttgctcttggaaacacccagaggacactggaaacatagctatcagggacatagaaccaagccccaggcctgctcagctacacgaccgccgctgggat

SEQ ID NO: 147467 - DNA, 4247 bp, Homo sapiens
tttcgtccggaagtgcggatcccagcggcggccgtgtagctgagcagccctggggcttggttctatgtccctgtggctatgtttccagtgtcctctgggtgtttccaagagcaacaagaaacgaataaatctctggcaaaggcagctcgagcatctcatctgacgtgagttcaagtacagatcacacgcccactaaagcccagaagaatgtggctaccagcgaagactccgacctgagcatgcgcacactgagcacgcccagcccggccctgatatgtccaccgaatctcccaggatttcagaatggaaggggctcgtccacctcctcgtcctccatcaccggggagacggtggccatggtgcactccccgcccccgacccgcctcacacacccgctcattcggctcgcctccagaccccagaaggagcaggccagcatagaccggctcccggaccactccatggtgcagatcttctccttcctgcccaccaaccagctgtgccgctgcgcgcgagtgtgccgccgctggtacaacctggcctgggacccgcggctctggaggactatccgcctgacgggcgagaccatcaacgtggaccgcgccctcaaggtgctgacccgcagactctgccaggacacccccaacgtgtgtctcatgctggaaaccgtaactgtcagtggctgcaggcggctcacagaccgagggctgtacaccatcgcccagtgctgccccgaactgaggcgactggaagtctcaggctgttacaatatctccaacgaggccgtctttgatgtggtgtccctctgccctaatctggagcacctggatgtgtcaggatgctccaaagtgacctgcatcagcttgacccgggaggcctccattaaactgtcacccttgcatggcaaacagatttccatccgctacctggacatgacggactgcttcgtgctggaggacgaaggcctgcacaccatcgcggcgcactgcacgcagctcacccacctctacctgcgccgctgcgtccgcctgaccgacgaaggcctgcgctacctggtgatctactgcgcctccatcaaggagctgagcgtcagcgactgccgcttcgtcagcgacttcggcctgcgggagatcgccaagctggagtcccgcctgcggtacctgagcatcgcgcactgcggccgggtcaccgacgtgggcatccgctacgtggccaagtactgcagcaagctgcgctacctcaacgcgaggggctgcgagggcatcacggaccacggtgtggagtacctcgccaagaactgcaccaaactcaaatccctggatatcggcaaatgccctttggtatccgacacgggcctggagtgcctggccctgaactgcttcaacctcaagcggctcagcctcaagtcctgcgagagcatcaccggccagggcttgcagatcgtggccgccaactgctttgacctccagacgctgaatgtccaggactgcgaggtctccgtggaggccctgcgctttgtcaaacgccactgcaagcgctgcgtcatcgagcacaccaacccggctttcttctgaagggacagagttcatccggcgttgtattcacacaaacctgaacaaagcaaatttttttaaaagcagcgtatgtaagcaccgacacccactcaaaacagctctttcttccgggaaggttattaggaatctggcctttatttttcctcatttctcatgggcaacagaggccaaagaaacgaagcaagacaaacagcaaacaggcattttggtcaggtcatttgtaggcagtttctcttctcacaaaagatgtacttaagcaggctgatcgctgttccttgagcaaggcgcttactctcctccgctcaggcccccaaggccgccctttccctcgcacacaggccccacccccacagttccacgccccccccccaaggccacaccctccctccctagagcagcagcgaggatccatcatcagaatcacagtgctctccagacctcctctctaaactgcttcattgacctaagtcactctcttcaatcccacacccatggacattcttgtcaactcaataccatagcactttgcataggcaaaatacttttcaggcctttttaaaaaattcattacagcaaacagctggggaaggacatgcagtcctcccccagctctgtcaatgactatgaccttggccaaagcacttcactgctctgggctgcagcttccagcactgaatcagaggccacacagcccaaagattagcttcatgtccattatagcattgagggagcagagatacccatacacagaagcaccttggcatagagcacccaggcatcgacctcttccaggagaactgattctgtggatggatgtgatttcaggagattgtgcagtgccagcatcagtgcataaagggtcctgtatgtcctttggctgcaaatcacccacttccctgtgtttcagtgggagaatttcctctcccacctcctcacatcctcttttgccaggctggatgctgtcgtctctgtacacaaatactttctgcattcccccctccacaccatcctagcgaggcaccagcacacctaatcacagcaaagcccagatccccccattcagttgcttttactcagtctttttcaaatagggagtaaagggcccttgcaatttttaattaacaagcaagggcccaaggggaacacatgtcctcaaaagtttttctgatccctcgccttgcacacctggcatgcatcaggcacatctgtcctacagctggcagagacagatgcctcggttctttgtcattcagattgcatttgacctcttctcatctatttatttctttatacatccagacttcatcacatgaagcctatttggggttaagtttgtaagtgtttaattgtgcaaattgccaccctgtgtacctcctccatgtctgtctgcgtgttttccaccaaagaatgcaaagcagacttccaggtgtttaaattctgttcactcaacaatgccagatgaatggaagagggaacacactgagatgacttagactctggtccaccaaccagacccttgggaaaggaatacttaaaatcattacaaggtatgggattttaaatgggatggaaactttcaaattatcttatttggatagaagtctatattctagcctcatttgcatgaagtcagatagccagaagaaattccattgctggttttcacgaaattcacttgtcttttgctaataaacacatgggcccgttcccagattattctctagccaagccccacctttgttacgttgaaatccctcatttattttcttctcaaaatgcccattatccaaatgcaagaacctctgcatctccaagccagttatgctgaatttgtcaaaacttagacacccttgacaaactgcactcctactgtaggctcctgtggcatactgtcgtcttctgtgggggatggagaggttagtgtgatgagggtggtgtctgcccagggaggtttctttcaaacatcatggcctcccatccaatcaacatcatcaaattacatgtgtaatcaaggctctgtgccatgggggaaatgaatcatttacgctaggccaggatctagtgaaagccacagagtttaaaaccatgaaaagaagttgaaggcagcattcctcagctctgtgacttgtgaccctatttgaaagttttcaaggatttggggtgtcacaaaaggattgtccctaatccttgggccctgggggtcttccgagttgagctgggtttaaatactctgagaatgagcagggagaatccagagaatgaatccctgaaccgcatcaccctaaactgtccttcccaaacatgagacaaagcctgactgttcacactgattgccccagcacatacccgtcttgcccagtttcttcttttctccccagtctcctgttcatccattctgttcctcccttggggtggggaatctaatgatggaggttactgggggaaacagctccagcagattttttggagaccaaaaccaaaggtcttcactagggaaatttaacctggttttaaaacattggcttcccttcctgggctctgctaaattgaatggcttcattgtttgttgttgttggttttttaatttctaatgttcaaaattcactggcgtggctggttatgaatctagaaagcccttaatttactaccaagaaataaagcaatatgttcgta

SEQ ID NO: 147468 - DNA, 822 bp, Homo sapiens
ccgcctgccttttaattcagtgttcccatgagcgccaaggccccattattgcccccttgctcccactccatgctgcttctgggtgggacctaagatggcttgggagttgttgggttcctgcgatcagaagtctaccccaccacctcctcaggaaactgctgcctcccctaagaattttccttgccctggagtagggggccagagcactttgatttccagccatttactccaagtcctctccccagctaccaccagtcccttactctgttctcccccagtgaaaaagagtctgttgattttcctcaaaactgctttattaggaatgtaccagggattgagttaggggagttggacagccccggctcctataggagtcctacttctctccagcatcctgtgccatcctcttgacgtaatcgctgtacattgtgtacacagcacctgtgtgagagaaaagaaataatgccccttggcatcaaacccttcacccgtcctctggctctcaggcgtcccaggggttcacctctagctgctcccttgagagtccagcttcccgctcatctttctgccccaggtcccaacagctgcttcaagcatctgaccacacaacctggggaaaccacttatctgacagttcacgaaacactttcacatgtattgtgtatctgagaaacctcacagcagcctgcaaggtaggcaggccaggggtggttattgtcatgttacacatcaggaaactgaggctcagtgagaaagatttgtccactgtcacacagttagcaagtggctgtctgctttttaatctcaagaaaaaaagaaatt

SEQ ID NO: 147469 - DNA, 387 bp, Homo sapiens
gagctggggaagaggcagatgactgaggaatcagagttctgattgtgggagtgcctctctctaggacggggctgcagcataggagtctcagctgcttacatccaggtccaggattatgtctgctaacagacgctggtgggtaccacctgacgatgaagactgtgtgtctgagaagctcctgaggaagactcgggaatctccactggtgcctataggtcccccgcaacgcccaccccccgccaccagatgctgcataaaaccagctgtttatccagatgcccagcctgcctaggtaaggtatctctcatcaggggagtgctgtgcattgtggctgtggcccaggggctgtgttctctgcccacaggcttaagaggctgcttggtggta

SEQ ID NO: 147470 - DNA, 648 bp, Homo sapiens
  misc_feature (1)...(648): n = a,t,c or g
gaagaggcagatggtaggaaatggagacggagaaatggcactaatggcccagccacctgagatgggatacctgggagggacatcttttcaagtagaggctgtgttggggcatggtgagagagggtcttagcaggtaaccttcctttcctctccagactgaggaatcagagttctgattgtggagtgcctctctctaggacggggctgcagcataggagtctcagctgcttacatccaaggtccaggattatgtctgctaacagacgctggtgnggtacccacctgacgacgaagacttgtgtgtctgagaagcttcctaaggaagactcggggaattctccactggtgcctataggcttaggaggctgcttggtggtagcagcatacaggatttaccggctgaggtctcgtggttccaccaagatgtccatacacctgattcacacccgagtggcagcgcaggcctgtgcagtgggtgcaatcatgctaggtgctgtgtacacaatgtacaacgattacgtcaagaggatggcacaggatgctggagagaagtaggactcctataggagccggggctgtccaactcccctaactcaatccctggtacattcctaataaagcagttttgaggaaaaaaaaaaaaaaaaa

SEQ ID NO: 147471 - DNA, 539 bp, Homo sapiens
ctacaatacgtttagttactgtgacagagatggctaattgtctcctcaatatccatcctttttcatagtaatagaaatttctataacagaagtaaagactatacatttaagggatagtcatatgactaggttctgtctactgggatgggagcagaactttatgtgatgttttgggccatgactttaaaaggaaaagagcatgccttccttcttttcttctcttctttcttctggctggaaaataaatacaatgggtatggggctggacctgccatttcagatcctgaggattaaagctgcatgctgaggatgacagagtaggcaaggataaaaaggcacctaggtcctcagtactgtgatgggcaccatgtccgccctggatcctttagactcagattgtttcatgaaaaagaaataaggactgagcatggtcactcatacctgtaatcccagtagttagggaggccaaggcaggaggattgcttgagcccaggagtttgagaccaacttgggcaacatggcaagacccagtctctaca

SEQ ID NO: 147472 - DNA, 1137 bp, Homo sapiens; identical to SEQ ID NO: 120340

SEQ ID NO: 147473 - DNA, 1581 bp, Homo sapiens
ctagggttcgatgcagcgcggataaaccggcgcaggatcagcaaccggtttacggctgccgcgctggtaactggcaagacgcgcagcatccagcatgtcagcagcttcacggcggaactggtttaacagactgtttggtacaaacagcgcccccggcaaattaatttgcacatcgcgggcgtaatagagggtttgccccagttttgccagaccatccttcagattgttcattgctttttcggcgttattggcttcgtcgaactgcccgtccagcgtatgcgtgatgctgacaccctcttcactggtgagggtcagaatcagttgttcctgccagccgcccagttcaatgtctaccgccacccgacgttcgctggaggtttttgtcagtgcctgctgccagttatgatcaagattacggtttagtgggtgatgtggacgaattttgtgcaaatctgctggcatttcattgggccagacgcggtactgattttctccggttttctcgaccgtattggcacgaaaaccgacgacttcacgtttaatcaacacgttcaggccatcgccatttgccagtggctcggtaacggcaacatcgagatgatctttcgccactttcactacttcgcctaccggcaggccgataaatttcggcgaatcgaacgcgccaatatcgcctttacgggcattcacaaaataatctgtgctaccacggtggaaagtcttttccgtcgatggaacaaagaaatgttcagtacgacctgatgaagcgcgcgccagatcgccacgttcttcaataatggcatcaagcatctggcgataatgggcggtgatattcttcacgtagctcatatctttgtaacgcccttcaatcttgaaggagcgtacaccagcatcaatcagcgcgccgaggttggcagtctgatcgttatctttcatcgacagcagatgtttttcataggaaaccacccgcccctgatcgtctttcaatgtgtatggcaaacggcacgcctgcgagcaatcgccacggttggcgctacgcccctgaccgttagagatcagtacgccgttgtgacggtgacccacttcacccggacgtacgtcgtcgtagtggctgaaggtgtagtacagcagaccagcaccggaagtcatggtcatgaactcagaacggaagccaatcagaccacggcttgggatcacgtagtcgagacgtacgcggcctttaccgtctggattcatgtttttcaggtcgcctttacgttcgcccagcgcctgcattacagaaccctgatgctgttcttcaacgtccagagtcacgttttcatacggctcttgtttacgaccgtcgatttcacggaagataactttcggacgggataccgccagttcgaaaccttcacgacgcatgttttcgatcagaacagacaggtgcagttcgccacgaccagaaacgcggaacgcatcggcgtcttcggtttcttctacgcgcagaggaacgttgagtctgtagctagggttcgttccgatggactcagttaacaattcaatcttatcagataaatcttttcctttcacagtgaccat

SEQ ID NO: 147474 - DNA, 450 bp, Homo sapiens
gtctctaagtggcgcagtcgtaggaaagggagcaactccacgggggtcctcaaaagttaaaagtgtgcacgagaagtgtgtccctaccgcgccgcgtgcagcacagcctcttgccagatgttggcgatgtcagccacactgaatcttggtgtcagctcagccagacgttgggaagtaaaaggtgctggactgggtcagcttcaggctggtcaggtgctgctcaaaaatctcccgcctctcctgcagcgtggggagatcaatgaagacgtgccggtccagtcggcctggcctcatcagagcaccgtccaaaatgtcagctcggttcgtggacgccaggacgatgacatggtctgtggtacccatataaatccaaatctgccagaagctggttgagcgtttgctcctcctccgtgttggagaagccggacgaagtcctccgctatgtctata

SEQ ID NO: 147475 - DNA, 1664 bp, Homo sapiens
ttttttttttttttttttttttggtttcaccagcgtttaatgtgctctgatgttgaccgtccctctgagtgttctggggaggagggggtggggcggagggtcaggaaagcaggctcagcttccagggtcagggagttgtgggcccagaggggctgtcacagtggatgcaccttgccccctccctcgccagacccgagggtagggcagagtgcacctcctcgccagcctttgggctggcacccacagggaatggaggggaggggcaccattaccactggacccaccaagaccccgccgcctggggtgggctgtccacaggccctttccgcccagcagcagtgacgctcagggccttcccagctgtcagccactgcccattcctgcgcctctcgtgcacctccacatctggtttgaggtcaggtcatttcctgtctgtgggcccagctgctgtgacacccaaggggagggccggcgtccccgaagccaggtcagccgtgcacccggcagagccccgcagattggctccagcagagcttggggtggggggagctcggtgtcaccaacaggcccttgaggacactcgtgtggagaatccctgggacacgtggaggacccccaagtcctgagccccgtactccgtactgcagggagcaggccaggagccacgggccttggggcacagggtccttctcagggacaggttcaggcactggctggaacaggctggacccctcactgaatcctggtgtcagctctgccagacgctgggagtaaaaggtgctggactgggtcagcttcaggctcttcaggtgctgctcaaaaatctcccgcctctccactgccccctgctgccatgtggactggtgcaagttgaggacttcttgctggtctgctgcgggaaagtgagatccggacgcatctctgctaatctcgatgttgccgttaccgagccactggcaaatggcgatggcctgaacgtgttgattaaacgtgaagtcgtcggttttcgtgccaatacggtcgagaaaaccggagaaaatcagtaccgcgtcgctgcgcaggggctgatcacgctctgctgccagggcttcggcagtttgctcggctatcgtcttggcggtgtgatgatggaaaagatgttcgcttatcaggaaccggtaaacggactgactttcaactggtccgggatgtggactttcggcgcggtgatgattgccattatcgccgtgctgttcatgatttttttccgcgaatccgacaacgaaattacggctatcaaggtcgatgatcgcgatattgcgttgacacaaggggaagttaaatgaaaacagaacgtattctcggtgcttgcccccttggtccatcccgtcccccacctttagaggccttgtctcctcgcagctgcagagggaactcagagagactttgaaggcctcccacaccgggttcaggttgttcttcaccacctccgtcctgtacaccagctgcaagccctggtcgtcgttgaccctgtagagctccaggaaggggtcggacttgctgaagaggtcgtgtgccaaataccgcagacacgtgcacgtactcatggagagacagcccacacgcagacacgccaggcacccaagacacacaagcgcagacacaggccaccccaggggcaacat

SEQ ID NO: 147476 - DNA, 467 bp, Homo sapiens
cactttatatatgaattcttgaaataagtgcacgtatgtttcatgcttgcaaattgcatccaattagaatagcttattttaaaagctgttttagagaattcagaagtatagactcataaaatgtcaacttatcccctaatattccttttggtacatttagatttctaggtgctggttttgcttacattcactataaatcttaattgcaaagcatattcaagccaatgatcaatatcaaagaaaactattttttttatcctaaggcccatatgccaggaatccccctgttcccccaattctttatggcttcttcctcatatctgcttccaaatcaagaaatgattggaatctgggtgcagtcacctgcaccctgtggtcccagctgttctggaggctgaggcaggaggatcactccttgagcccaggagttcaagttcagactgggcaacatagcaagactttgcctg

SEQ ID NO: 147477 - DNA, 1932 bp, Homo sapiens
  misc_feature (1)...(1932): n = a,t,c or g
gatggttagtttcagaacaagttacagctgtaaacaaaagcacttagtatttsggatggcatgccaaakcctgtataaatstccttgtatcacatcacttctcaagtattrcttcattgggcttcatccttttagcagaactctttggtggtgggttagagarttagggagggtagggggagagtgtggaaataggtgcttccttttggctggcaaatgtctacatcttgaaacaaacagatgtacctaatgagcttctccattcactttgtaaaaataatttgtatgtgtaccatcttggtcctctcccctcccggtttgttaaaaaaatcaggatagcactcccaggccactttggtctcagtgtaagatccctatttaactatctgaaaggaaaatagagccaagacctctggtcttcaaatatatagggaattgcctttctttagtcttcagggactattgtgtggaaaacaagtaggggtgctaatgctcctaggaaggtagggggctttttatccttaaaaggggattatgtcccccagattattaggcacttttaggagggagaagccaagggtattgtagggtggtgtggctgggcccatcaagtgggagcacggaggaggaggatggggttaccctttgtggggaagaggaggaaaagtttccnccaggggcctcccactggcttaaagttttttttgtgagatgttgatctgtggcttcctggggttttgacttttaataggaattattctggcagccacatgtagtaatcctgggatgatcttgctgctcttatttctccttttgtgtgtgtgtcgtgtgtgtgtgtggctatgggttttcatttgtaactccatctgcttaggagagtgggctctctataagggaacctgctgtaaacttcattgcagcaaggatgtagagagaaataggacttaattccactaggggctctcatctcacaccttaaggaggagatttctagaaaaactgggccagattttctttgttctccatcattttaatgtggcaggctgttcagttttcttactcttacctatgtgatatttcttcgtaacgtgtccaaaaagaaaaaagacccaatcagtgtctcttgactttgttctttgatccctcagtttcttcttgatttcagcatgtgtcgggttcctaattttgggtatgagttagcaaatttaaccattgtgtttgtgccctacccagggggactccccacgtttctgacttgaagtagactgagaagaatccactgaggtgcttatctggcccagatttaagtagattctatttccttggttctcccctctcccctgaggaccctcttattttattgtccccctccttctaggttaaatcctccctttgatttggactttggttggaggaagggagggttgggaccagtagaattaagccaaagttccccaagtgccaaaattaccagtgtgttaagagtgtgggggggaaaattagtccttatttttcccctacaatgggattacaacactgtgaatttcaatccttcaacctgaagggccctgcagttctccctaaaacnaatttaagggttgtttgtttttctttaaccaaggtttaaggctagtgttaataaattaaaaaaaaattgcttgtctgtctacttcagctttgttttatgcccatttcatattgttgtctgtgttgtaattcataacttttgataccatttctgatgtgtaaaattgggttgtcttgtaaatatcttataaagaggttcaattgtaaataaactattgtgggctgttaatttttgaacttctgcttcaatttattatatttattggcaaacaaacaattctgcttgtatatttgaaacattggaaaaagaaatccattttctcaataaaaaagaataacacatta

SEQ ID NO: 147478 - DNA, 3003 bp, Homo sapiens
atggatgaatgtagaaaaaaggagcgcaagcctctcttcggcccggaaagatttaagttcgtgaatgcatacgcaagactcggaggtagttccggttccggcgtggccattttcgttggtggtgttcagttgtggcggttgctggtcagtaacagccaagatgctgcggaatctgctggccgttactgggtagatgtaaggagtggagaggctggggaagtgaccagagactcgtgggctcttcgtcagattgggcagaggacgataagcactgcttcccgcaggcattttaaaaataaagttccggagaagcaaaaactgttccaggaggatgatgaaattccactgtatctaaagggtggggtagctgatgccctcctgtatagagccaccatgattcttacagttggtgattctaatctcttttctgccgccttaaaccatcctacacactttggagtaggtaatctgtggtaccttcataaattcctttctatggccatccatctcagacccagagaaaaaaactgtgaagctttagatgtgactaggatagcgctgtcggacaagaaatctgagggctcggaaccgccgggagcccaggactcagagggtgaagagcggggcactgctactacggcgatcgccacctcacgccgaaggaatgctcgaagtatgcacacgttcccaaaagtagacctccttcaccgccggaggagcatacatcaccccgtggcagccgtccaccttctcaggcgtttcctgcccacgcctcggcggccgccaggtgctcctggagtgcagcgcctatcgccggggcgtgtgggggccacaccgagcaccagcttctccgacgccgggaagccgctgtcgccgccgctacctctccctgttgccgccgcctcagagacaactcgggaaacggcgtctagcttgcaccttgcccggagcggtgaagaatcctgggcgaggacagtttggacttgtaatagtgtagctccgggagaaagtcccctctccgactccctcccggtgcattggtggaggccctattcggggtctgtgagatctccgcggcggtttcccactcagatcctagacttgtggggatcagaaagcgtgggtcgccggactcgttcagcgagcggaacagttgacccaccttcagacttgaattttaaaattatagatgaaaatactgttcatatgtcatgggcaaaaccagttgatccaattgtgggttacagaataacggtggaccctacaacggatgggcctactaaagaatttaccctttcagctagtaccactgaaactttattgtcagaacttgtacctgaaacagagtatgtggtgacaataacttcatatgatgaagtagaagaaagtgtaccagttataggacaactaacaaaatgctctgtcagtgcctggactgatttggttttcctcgtggatggctcttggagtgtgggaagaaataatttcaagtacattttagacttcattgctgctcttgtgtctgcttttgacattggggaagagaagacaagagttggagttgttcaatacagctctgataccaggactgaatttaacttaaatcagtactaccaaagggatgaacttcttgctgcaataaaaaaaattccatataaaggtggcaacacaatgacaggggatgccattgattatttagttaaaaatactttcacggaatctgctggggcaagagttggctttcctaaagtggcaattattattacggatggaaaatcccaggatgaagtggaaattccagcaagagagcttcgtaatgttggagttgaagttttctccttggttgtgaaagatggagaaaacgaagaacttctccaagtcagttggcacatttcccatttcaatatgtccttatccttttgttttgaaggcattaaagctgcagatgcaaaagaactcaaacaaattgcctccacaccttcactgaaccatgttttcaatgtggccaactttgatgcaattgtggatattcagaatgagatcatctcccaggtgtgctcaggtgttgatgaacaacttggtgaattggttagtggagaagaagttgttgagcctccttcaaatttgattgccatggaagtctcttcaaaatatgttaagctaaattggaatccatctcctagtccagtgactggctacaaagtcatcctcacaccaatgactgcaggaagccgacagcacgctctgagtgtggggcctcagacaaccacgctcagtgttcgcgacctctcagcagacacagaataccagatcagtgtttccgccatgaagggaatgacatccagtgaacccatttcaataatggagaagactcagccaatgaaagttcaagtggaatgctcacgtggtgtggatataaaagccgatattgtgtttttggttgatggctcctatagcattgggattgcaaactttgttaaagttagagcctttttggaagttcttgtaaaaagttttgaaatttcaccaaatagggtccagattagtcttgtgcaatacagccgggatcctcatactgagttcactttgaaaaaattcaccaaagttgaagatataattgaagcaataaacaccttcccttacagaggaggatctacaaatactggcaaagcaatgacttatgtcagagagaaaatatttgtgcctagcaagggatcaagaagcaatgtgccaaaggtcatgattcttatcacggatgggaaatcatcagatgctttcagagatcctgcgataaaactgaggaattcagatgttgaaatctttgcagttggtgtgaaggatgccgttcgctcagaattggaagctattgcctctcctcctgcagagacccatgtgttcacagtggaagattttgatgcttttcagaggatatcttttgaactcacacagtctatctgccttagaattgagcaagaattggcagctataaagaagaaaggttag

SEQ ID NO: 147479 - DNA, 388 bp, Homo sapiens
tttcgtgttcagttgtggcggttgctggtcagtaacagccaagatgctgcggaatctgctggctcttcgtcagattgggcagaggacgataagcactgcttcccgcaggcattttaaaaataaagttccggagaagcaaaaactgttccaggtactgaagtattttataggagatgttacttgtaattattagattaccaaaaggtaagagttgggataaacaagtatgtgtataaattagatcatatgacaatataaacattacaaaaaaagtcaaggacatgtaccatagtgctaatagtggttgtctcttggggaaagacctggtggagcagagcaatttacctttataagtagtttgattatgagtgatttttgttttattatg

SEQ ID NO: 147480 - DNA, 703 bp, Homo sapiens
  misc_feature (1)...(703): n = a,t,c or g
tggagaggaggctgaggcaccacgacagaaaaccctcacctgggaggggtgccgaaggcggctaatgaagtcaccttgattcgtgtcctttttccctgaccttactttcccttccgtctattcctctcgccccaggccgttactgggtagatgtaaggagtggagaggcaggggaagtgaccagagactcgtgggttagacccgtcttgggttcttagtcaccacctctaaccctgtcggtcattgatgaggctcttcgtccagattgggccagaggaccgattaagccactgcttcccgcaggcatttttaaaaataaagttcccggagaagccaaaaactgttccccggaggatgatgaaattcccactgtatctaaagggtggggtaggctgatgccctcctgtatagagccaccnaccatgattcttacagttgggtggaacaagcatatgcccatattatgagctggctgtggcttcatttcccaagaaagcagggagttgacttcaggtcatccccagcaattcgctttggtttcagttttcatttcagctcttctatgggaccaagtaaatcctggataaaataaccggagctccttcctttgggggatccaataatttaatttggacttggtagtaacttgccacccaataaaagcagtctttaccatgaaaaaaaaaaagaaaaaagtcgacgc

SEQ ID NO: 147481 - DNA, 2364 bp, Homo sapiens
  misc_feature (1)...(2364): n = a,t,c or g
ctgacttttggctccctcgccctaagaggctcttcctctcttttgctcatccaccttcacaccacttctgagctgacctccaggaacagcttggctgttccaccagagcagagggaatcattgctggactggatttcttctggagggaagcaccatgaattaaaggtgccagagctccatgcatggaaaagtggcctgttggttcaacatggtttccttgtacttgatcctcctgaaatgagagattttcctgagatgactgagtatggagattaccaggcagatgataccgaaatgcttaaaggggctgtggctgaggctgtagcatctctgctggaggagagacactctgggaactgatttgacctcgaatgctcctaaaagagaacttgatagcctgacagcagagaagtattatttggttggggagtctgagaaagcctgggcttgtattatctgtcccaaaagggaagcctctttcatctcctggtgccttggttgactattttggaaataggcatatcaaggttcctgattcagcactttgctcttttaataacaaatcgtccaaagatctcaaagtaagggttttttttttttagcttccactcttccgcagacttggtcatcgacctatttttggttgaaggaatgaaaaggccaatggaccaagttttaacatatacaaattcgtgaattcttgttcattttgcattcctgcagtcagtgctaatccgtcgttcttaatcaggagttctgccaggtttaaggtcacctggcactcccagccaagtgggtgatgtatgcctcccactctctggcaaggttttcctcatttttatattcatttattcattcattcattcattcacctaactttgcatttaaatagctggcaccatcccgggccctgtgcggagattcggggaattacaaagatgaggataaaacattgtccctgcccccgggggctcacatgccactggaaacaacagactcttaaactaacaattcaagcaggcgccaagtgcttacgacagaggtgtgaataaaagcatcagggaaatcggatgggagaaccaccatttcacccaagggttcaggagggaggttttcaaaggaaaaggtgttcttgggaggcagtgtttttggcaggattgaggccagagtttcaccaagcagggcaagggcaagggaagggtgtttgcagagaggggaacagcatattgcaaaggcgtattcagtttcatgggcattcacatcttttcacttgggggaagccagttttccacagggcagcatcccaaggttcaattaaggccttatttaaccaagcaagcaaaatgcaaaccaaacccattattcatttattgggctttaagtatgcttttctncttgaaaacttttagcattggggtgcaaattatttcagtattggttctcggaggacccaaagggtttttaaggccgggggcacaaccaggaaaagtggctctctttgggaggggagaagggggctcccatattttcgttctctccccatgggggcactggacagaggaaatggaaatagttttattctgggaaattcccagagctattatttactccttaccaagggaagttacttcttgtaaaaacttttaagccatttatcaacaagttcttgttgactcagggcataatgagttcctgagcacatgcttttttgggggcgggggctttaggtagaagaatttcaaggaaaagaaattctcagtcagagcttcaagattgtaggaaactcagccagaagctggtaaaaaccattggggagccccggaggacaaggctgctgtcccagggccagaaggccatggaagaagtgccttccgtgggccgaccagtctgggaaatgaatcccatccatacatttagtgcccatagagtttaggtaacccgtccccgacaagtgtccatccacctttaacagaaaacaaggtcccagtaatagcaagtcctaggtaccacccctcacctttattaataaatggggtgttttttccataatttttacttgacgctcgagtaacccatgcaaattgttgtaatagcattaatgtatctacaataccctacaccctatcctatatataagcctcatggtagaaaacccatagcctaagtagcatcgcaggacttaagcgtacaaagtgatcttgttcacaagtaatctgttgacagtgccaattaaatgataaaaaaaaaaattaacatgtcacaatgtaacggatgaccatatgcacaattccatgaattaaatctgtttcctgtgttaagtcagtattcttaaataaaatttataattgaaacatgaaaaaaaaa

SEQ ID NO: 147482 - DNA, 1273 bp, Homo sapiens
ggggctttgcttatcacacgcattttatgtctggggatccggcgcggggggacctattattattgattcataaattgttcccaatttgaaacatttcttttattgaagaagttgaacttacagcagacagtgaaaggagttacagcactccaggacaaacacagacatataataatacataaaacaagtagcgggaaactggaagatgccagggagtcctcttataaaagcagggttcaccaaaaccaggaaggccaactggctccaggacagcgaaaggcacagtggctcctctgctcctctgccttctgcccccatttggaaatgggggacttaccaaatccagacttcaggggcaggcctagacttggatgcagccactgcaatcttgggttccatggtggcaattttgggcagacaagttgggttgaaagggtaagtttgttctcccagagattttcaatcaggggacgtgggcttcccagattgttaaaagatacccagctaagtcacaaggaagtggatgttttcaaatgctaagtgcccaccaaacaaaacattctcccccgggcccttcacccactcagagaacacccaacatacaaaaacaaaagtctgttccccatttcatcaataatggagttttaaggattttgtccatagtgtagaatattaagaatggatgaataaaaagtcaaaaaaggtgcagaggtcctataacatcagggtttattagtctagatattaataaattggaagggtttaaaaaaaaaaaaggctgttggccctacatatgacagtttcccattgtttcttagcttagtatatttattttccaacacaatgttagcaattcttacagcagttcttgcatttttccaataacatttttattaatcaaatggtatatatttttcactataacctattttcactgattaatacatttatcagtattttaatgtggcctaaaatatgctaaattctgtcacaataaatatgtttttccctccctggggagaaacacaagtaaaaaaaggaaaatattaagatgcattccactttttagttaaggaaaagttcagaaaactcccatctttttaaaaaagaatgaaaatatgatcctaagtaactcaggttagaaaaacagtaacagagccaggcgcaatggctcacgcctataatcccagcactttgggaagctgaggcaggaggatcacttgagcccaggagtctgagatcagcccaggcaacatagtgagaccatgtctct

SEQ ID NO: 147483 - DNA, 3088 bp, Homo sapiens
  misc_feature (1)...(3088): n = a,t,c or g
gctagacagctccggaattcctgggtcgacgatctcgtggcggcgccgctcatccccctctcccagcagattccttttgtaaattcgctcgatgaatcttattaccagcaggtcgatccggcatacacagggagggtgggggcgagtgaagctgcgctttttctaaagaagtctggcctctcggacattatccttgggaagatatgggacttggccgatccagaaggaaaagggttcttggacaaacagggtttctatgttgcactgagactggtggcctgtgcacagagaggccatgaagttaccttgagcaatctgaaattgaacatgccaccgcctaaatttcacgacaccagcagccctctgatgggcacaccgccctctgcagaagcccactgggctgggagggcggaagaaaaggccacatttgatgggatttttgaaagcctcttgcccatcaatggtttgctctctggagacaaagtcaagccagtcctcatgaactcaaagctgcctcttgatgtcctgggcagggtctgggacctcagtgacattgacaaggatgggcacttggttcgagatgagttcgctgtggccatgcacttggtgtaccgagccctggagaaggagcccgtgccctccgccctgcccccgtccctcatcccaccctccaagagaaagaagactgtgttccctggcgccgtccccgtcctgcctgccagccccccaccaaaagacagcctccgctccacgccgtcccacggcagcgtcagcagcctcaacagcacagggagcctgtcccccaagcacagcctcaagcaaacacagccaacagtgaactgggtggtgcccgtggcagacaagatgcgatttgatgagatattcctgaagaccgacctggacctggatggctacgtgagtggccaggaggtgaaggagatcttcatgcactcgggcctcacccagaaccttctagcacacatatgggccctggccgatacgaggcaaacggggaagttaagcaaagaccaattcgcgttagctatgtatttcattcagcagaaggtcagtaaaggcatcgaccctcctcaagtcctctcgccggacatggtcccgccttcggagagaggcacgcccggcccggacagttcaggctctctcggctccggggagtttactggcgtgaaggagcttgatgacatcagtcaagagattgcccagttacaaagagagaaatattcactggaacaagacattcgagaaaaggaagaggcaatcagacagaaaaccagcgaggtgcaggaattacaaaatgacctagaccgggaaacaagcagtttgcaggagctcgaggctcagaaacaggatgctcaagaccgcctggacgagatggaccagcagaaggccaagctccgagacatgctgagcgacgtccggcagaagtgccaggatgagactcagatgatctcatcactgaaaacgcaaatccaatctcaggaatctgacttaaagtcccaggaagacgatctgaaccgagccaagtcggagctgaaccgattgcagcaggaggaaacccagctggagcagagcattcaggctgggcgagtccagctggaaaccatcatcaagtccctgaagtcaacgcaagacgaaatcaaccaggcaaggagcaaactttcccagctgcatgaaagccgccaggaggcccacaggagcctggagcagtatgaccaggtgctcgatggagcccatggtgccagcctgaccgacctggccaacctgagcgaaggcgtctccctggcagagaggggcagttttggagccatggatgatcctttcaaaaataaagccttgttatttagcaacaacacgcaagagttgcatccggatcctttccagacagaagaccccttcaaatctgacccatttaaaggagctgaccccttcaaaggcgacccgttccagaatgacccctttgcagaacagcagacaacttcaacagatccatttggaggggaccctttcaaagaaagtgacccattccgtggctctgccactgacgacttcttcaagaaacagacaaagaatgacccatttacctcggatccattcacgaaaaacccttccttaccttcgaagctcgacccctttgaatccagtgatcccttttcatcctccagtgtctcctcaaaaggatcagatccctttggaaccttagatcccttcggaagtgggtccttcaatagtgctgaaggctttgccgacttcagccagatgtccaagcccccaccttctgggcctttcacctcctccttgggaggggcaggattctcagatgacccctttaaaagtaaacaggacactcctgctctgcctccgaagaaacctgctcctccacggcctaaaccgcccagcggtaaaagtacacctgtaagccagcttggttccgcagactttcccgaggcccccgatccattccagccactcggggctgacagcggcgacccgttccaaagtaaaaaggggtttggggacccgtttagtggaaaagacccatttgtcccctcctctgcagctaaaccttctaaggcctctgcctcgggctttgcagacttcacctctgtaagttgagtcctccgcctcccggtgtcctcaaacnctctcnanctttcaccctttaccaggcttatacagcttccctgggatttttgtctccttttaaaggcaaacctcccagcttctttagcctcttggtacctcacactctctgtccctcgcgttatttattctaccctgccacttctgtaagaaaaacagtttctcaatnnnnnnnnnnngagccgcagtttggatgctctatcataagggcacgttttcttccagcagggaggcgggacctatctgtccttcacggtagattcattgtattatttctgacgcaccgaggctgttgggttcactggtttttggaagccaaaatgtcaaacacttccgaagtatgaaaagaagattgcgaaagttacattagggttctgctgtccccaaaaagccctttgtgcacaagttctcacagtcccgccccatgcat

SEQ ID NO: 147484 - DNA, 468 bp, Homo sapiens
  misc_feature (1)...(468): n = a,t,c or g
cgcgtggnatctgaagcgtacacatcatccaccggnccggaantcccgggtcgaggggaggcaggagagactcaggccgagcacaacctgagcagtttgctggattctggcgccgaggaggacgtccccggcagtatttccgagtctgagagggaggaggagggagaggaggaggaggaggagcctcgcctgcccccatctgacctgggtggtgttccgtggaaggaggccgtgcggatccatgcccttctgaaagggaaaagtgaagaggagctagaggcctcaaagagctttgggcctgggaatgaaaaggaggaggaggaggaggaataatatgaagaggaggaggaggaggactatgactaggaggaggaagagtccagcgaacccccattggatgagaatgacctagaggaagatgtggtcttccaacccccccagatagaaggggaggccgtatatgatgcg

SEQ ID NO: 147485 - DNA, 436 bp, Homo sapiens
gcaggaggagcttaagcggctgcatcgagcccagatcatccagcggcagctgcagcaggtggaggagaggcagcggcggctggaggaaaggggcgtggctgtggagaaggcgctccggggcgaagcagactattggggagagtcttattacagtgacctcatcgacttgcatctgggtggtatgtatggcagcgcctgtgctgacactaaccccgctgacgccctttctccacccacgcttcccagtccctgctcacaaaaacaaggagaaatcaacccaataaccaaatggcaaaagcacagacccttttccagctcaaaacagagcagcgtgctgatctccccgctgcccacatgtgctccagaggaagatctgagcttgcttttgctgcctggggtcgtttttaattttttataataaaactttgcccaaccg

SEQ ID NO: 147486 - DNA, 4119 bp, Homo sapiens
atggttatggttcgttacagggaaagggtacagatgtcagtgagccaagggaagaagtacataggtagttccgagtctgagatggaggaggagggagaggaggaggaggaggagcctcgcctgcccccatctgacctgggtggtgttccgtggaaggaggccgtgcggatccatgcccttctgaaagggaaaagtgaagaggagctagaggcctcaaagagctttgggcctgggaatgaagaggaggaggaggaggaggaagaatatgaagaggaggaggaggaggactatgacgaggaggaggaagagtccagtgaagaaggggagtactgcccctgggacacagaactgcaaggccagtggcgccagctccctggcagccatccaaaatttgcctccaagagcatgtctcacagacaaaggtctgtgttttatggaactgtgctgacgggctctgcacacatctcactgggctactctccctggtcccagcctgcccagacagtcaggcgcaaagtaacatgtgagtcagaagaggttctggaggaagttggagaaggctccagaagtggcctcatggaatgcggccccatctatgccgcatatgttttactgcaagctcatctccagccaagacttggctccttctctgatgcaggaaacctatcgccagtgcagcagcagctccagctgcagaagatgcaaaccgaagtgccagcaaagtctatctctgtcctgtgtgagctggccggctggcggcagaatgacacaatctcttcccacctctctcgtcacctggccatcagctgggcgagtggtgccgggaaccagaggctccagcaggtcatgcacgcggcggatcctctggagatccaggctgacgtgcactggactcatatccgtgagagagaggaggaagagaggatggcgccggcctctgagtcctctgcttccggagaaggtttaacattcttggcctcggcccttggagtgtccgtgcagcctccaccacctatgaagacaccaaaaatccctccacgagttgtcagacactgctggaggaagggcagtgttatcgccaacagcaccactgtcctagcggtcacttctgggatgcggacatgggagctcgtggggcttcagcagcctgtccctgtgtcctcccggcacaggtgccgatgctgtaggatagcatttggcacggccagcaacgtgggccactctgccccattggatgagaatgacctagaggaagatgtggactcagaaccagccgagatagaaggggaggcagcagaggatggggacccaggggacactggtgctgagctggatgatgatcagcactggtctgacagcccgtcggatgctgacagagagctgcgtttgccgtgcccagctgagggggaagcagagctggagctgagggtgtcggaagatgaggagaagctgcccgcctcaccgaagcaccaagagagaggtccctcccaagccaccagccccatccggtctccccaggaatcagctcttctgttcattccagtccacagcccctcaacagaggggccccaactcccacctgtccctgccgccacccaggagaaatcacctgaggagcgccttttccctgagcctttgctccccaaagagaagcccaaagctgatgccccctcggatctgaaagctgtgcactctcccatccgatcacagccagtgaccctgccagaagctaggactcctgtctcaccagggagcccgcagccccagccacccgtggcggcctccacgcccccacccagcccactccccatctgctcccagccccagccttccaccgaggccactgtcccatcccctacccagtcccccatacgcttccagcctgccccggccaaaacatccaccccactggcccctctccctgtccaaagccaaagtgacaccaaggacagactgggcagcccccttgctgtggatgaggccctcagacggagcgacctggtggaggagttctggatgaagagtgcggagatccgccgcagcctcgggctcacacctgtggaccgcagcaaggggcccgagcccagcttccccacgcctgccttcaggccagtgtccctcaaatcctattccgttgaaaagtccccccaggatgagggactccaccttctcaagcctctgtccatccccaaaaggctgggcctgccaaagccggaaggcgagccgttgtccctgccaaccccccggtccccgtccgacagagagctacgcagcgcccaggaggagcgcagggagctgtccagcagctctggcctgggcctgcacgggagctcctccaacatgaagacactgggcagccagagcttcaacacctcggactccgccatgctcacgcccccctccagcccgcccccaccgccacccccgggcgaggagcccgccaccttgcggaggaagctcagggaggccgagcccaatgcctcggtggtcccgccgcccttgcccgccacctggatgcggcccccccgggagcctgctcagccccccagagaggaggtgcggaagtcgtttgtggagagcgtggaggagattccctttgctgatgatgtggaggacacctatgacgacaagactgaggactcaagcctgcaggagaaattcttcacgcccccgtcctgctggccgcgccccgagaagcctcgccacccgcccctggccaaggagaacgggaggctgcctgctctggaggggacgctgcagccacagaagagggggctgcccttggtgtccgcggaagccaaggagttggccgaggagcgcatgcgagccagggagaagtccgtgaagagccaggcgctgcgggacgccatggccaggcagctgagcaggatgcagcagatggagctggcctcaggcgcccccaggccccgcaaggcgtcctcagcaccctcccagggcaaggagcgccggcctgactcccccacacgccccactctcaggggctccgaggagcccaccctgaagcatgaagccaccagcgaggaggtcctctccccgccgtcggactcagggggcccagatggctctttcacttcatccgagggctccagtgggaagagcaagaagaggtcgtcactcttctccccccgcagaaacaagaaggagaagaagtccaaaggcgagggccggcccccggagaagcccagctccaacctcctagaagaagccgccgccaaacccaagtccctgtggaagtccgtcttctccgggtacaagaaggacaagaagaagaaggccgacgacaagtcctgccccagcaccccctccagcggggccacggtggactctggaaagcacagggtgcttcccgtcgtaagggcagagctgcagctccggcgccagctgagcttctccgaggactcagacctctccagcgacgatgtccttgagaagtcctcacagaagtcccggcgagaggcagggggctgtggctgtccagtccgtggacttgcactggattgggccattgcctcttctgttctcgatggcgctaggcgcaacagccctggccaggccacaacctctcttcttcctagcggccagcggctgcctctgcagaccccagagtcagtccagccaagaacctacacggaggaggaactgaatgccaagctgacccggcgtgtgcaaaaggcagctcggagacaggccaagcaggaggagcttaagcggctgcatcgagcccagatcatccagcggcagctgcagcaggtggaggagaggcagcggcggctggaggaaaggggcgtggctgtggagaaggcgctccggggcgaagcagagccctcaacaccgctggtcggggagcatgtggccaccctcggcacacacagatttccagagggcacccaggccctgtgtctgctgaaggctggtcacttagggcagggctggagaggctcagggtatgtgaccagccgacgtggagcagactccggggagtggctggcagggccctgtgctcgtgactgctgctcctggcagggaagccctggagaatgtggtgcgctcattcctgccattccatccagggaacctgcgcggctgcgctcagcatag

SEQ ID NO: 147487 - DNA, 3082 bp, Homo sapiens
ctgaagaggagctagaggcctcaaagagctttgggcctgggaatgaagaggaggagaaggaggagaaagaatatgaagaggaggaggaggaggactatgacgaggaggaggaagagtccagtgaagccgggaaccagaggctccagcaggtcatgcacgcggcggatcctctggagatccaggctgacgtgcactggactcatatccgtgagagagaggaggaagagaggatggcgccggcctctgagtcctctgcttccggagccccattggatgagaatgacctagaggaagatgtggactcagaaccagccgagatagaaggggaggcagcagagaatgggcacccaggggacactggtgctgagctggatgataatcagcactggtatgacagcccgtcggatgctgacagagagctgcgtttgccgtgcccagctgagggggaagcagagctggagctgagggtgtcggaagatgaggagaagctgcccgcctcaccgaagcaccaagagagaggtccctcccaagccaccagccccatccggtctccccaggaatcagctcttctgttcattccagtccacagcccctcaacagaggggccccaactcccacctgtccctgccgccacccaggagaaatcacctgaggagcgccttttccctgagcctttgctccccaaagagaagcccaaagctgatgccccctcggatctgaaagctgtgcactctcccatccgatcacagccagtgaccctgccagaagctaggactcctgtctcaccagggagcccgcagccccggccacccgtggcggcctccacgcccccacccagcccactccccatctgctcccagccccagccttccaccgaggccactgtcccatcccctacccagtcccccatacgcttccagcctgccccggccaaaacatccaccccactggcccctctccctgtccaaagccaaagtgacaccaaggacagactgggcagcccccttgctgtggatgaggccctcagacggagcgacctggtggaggagttctggatgaagagtgcggagatccgccgcagcctcgggctcacacctgtggaccgcagcaaggggcccgagcccagcttccccacgcctgccttcaggccagtgtccctcaaatcctattccgttgaaaagtccccccaggatgagggactccaccttctcaagcctctgtccatccccaaaaggctgggcctgccaaagccggaaggcgagccgttgtccctgccaaccccccggtccccgtccgacagagagctacgcagcgcccaggaggagcgcagggagctgtccagcagctctggcctgggcctgcacgggagctcctccaacatgaagacactgggcagccagagcttcaacacctcggactccgccatgctcacgcccccctccagcccgcccccaccgccacccccgggcgaggagcccgccaccttgcggaggaagctcagggaggccgagcccaatgcctcggtggtcccgccgcccttgcccgccacctggatgcggcccccccgggagcctgctcagccccccagagaggaggtgcggaagtcgtttgtggagagtgtggaggagattccctttgctgatgatgtggaggacacctatgacgacaagactgaggactcaagcctgcaggagaaattcttcacgcccccgtcctgctggccgcgccccgagaagcctcgccacccgcccctggccaaggagaacgggaggctgcctgctctggaggggacgctgcagccacagaagagggggctgcccttggtgtccgcggaagccaaggagttggccgaggagcgcatgcgagccagggagaagtccgtgaagagccaggcgctgcgggatgccatggccaggcagctgagcaggatgcagcagatggagctggcctcaggcgcccccaggccccgcaaggcgtcctcagcaccctcccagggcaaggagcgccggcctgactcccccacacgccccactctcaggggctccgaggagcccaccctgaagcatgaagccaccagcgaggaggtcctctccccgccgtcggactcagggggcccagatggctctttcacttcatccgagggctccagtgggaagagcaagaagaggtcgtcactcttctccccccgcagaaacaagaaggagaagaagtccaaaggcgagggccggcccccggagaagcccagctccaacctcctggaagaagccgccgccaaacccaagtccctgtggaagtccgtcttctccgggtacaagaaggacaagaagaagaaggccgacgacaagttcctgccccagcacccccttcagcggggccacggtggactctggaaagcacagggtgcttcccgtccgtaagggcagagctgcagctccggcgccagctgagcttctccgaggactcagacctctccagcgacgatgtccttgagaagtcctcacagaagtcccggcgagagccaagaacctacacggaggaggaactgaatgccaagctgacccggcgtgtgcaaaaggcagctcggagacaggccaagcaggaggagcttaagcggctgcatcgagcccagatcatccagcggcagctgcagcaggtggaggagaggcagcggcggctggaggaaaggggcgtggctgtggagaaggcgctccggggcgaagcaggcatgggcaagaaggacgaccccaagctgatgcaggagtggttcaagctagtgcaggagaagaacgccatggtgcgctacgagtcggagctgatgatctttgcccgggagctggagctggaagaccggcagagtcgactgcagcaggagctccgggaacgcatggcagtggaagatcaccttaagactgaggaggagctgtcagaagagaagcagattctcaatgagatgctggaggtggtggagcagagagactcactggtggcgctgctggaggagcagcggctccgggagagagaggaggacaaggacctggaggctgccatgctgtccaagggcttcagccttaactggtcctga

SEQ ID NO: 147488 - DNA, 4492 bp, Homo sapiens
atggttatggttcgttacagggaaagggtacagatgtcagtgagccaagggaagaagtacataggtagttccgagtctgagatggaggaggagggagaggaggaggaggaggagcctcgcctgcccccatctgacctgggtggtgttccgtggaaggaggccgtgcggatccatgcccttctgaaagggaaaagtgaagaggagctagaggcctcaaagagctttgggcctgggaatgaagaggaggaggaggaggaggaagaatatgaagaggaggaggaggaggactatgacgaggaggaggaagagtccagtgaagaaggggagtactgcccctgggacacagaactgcaaggccagtggcgccagctccctggcagccatccaaaatttgcctccaagagcatgtctcacagacaaaggtctgtgttttatggaactgtgctgacgggctctgcacacatctcactgggctactctccctggtcccagcctgcccagacagtcaggcgcaaagtaacatgtgagtcagaagaggttctggaggaagttggagaaggctccagaagtggcctcatggaatgcggccccatctatgccgcatatgttttactgcaagctcatctccagccaagacttggctccttctctgatgcaggaaacctatcgccagtgcagcagcagctccagctgcagaagatgcaaaccgaagtgccagcaaagtctatctctgtcctgtgtgagctggccggctggcggcagaatgacacaatctcttcccacctctctcgtcacctggccatcagctgggcgagtggtgccgggaaccagaggctccagcaggtcatgcacgcggcggatcctctggagatccaggctgacgtgcactggactcatatccgtgagagagaggaggaagagaggatggcgccggcctctgagtcctctgcttccggagaaggtttaacattcttggcctcggcccttggagtgtccgtgcagcctccaccacctatgaagacaccaaaaatccctccacgagttgtcagacactgctggaggaagggcagtgttatcgccaacagcaccactgtcctagcggtcacttctgggatgcggacatgggagctcgtggggcttcagcagcctgtccctgtgtcctcccggcacaggtgccgatgctgtaggatagcatttggcacggccagcaacgtgggccactctgccccattggatgagaatgacctagaggaagatgtggactcagaaccagccgagatagaaggggaggcagcagaggatggggacccaggggacactggtgctgagctggatgatgatcagcactggtctgacagcccgtcggatgctgacagagagctgcgtttgccgtgcccagctgagggggaagcagagctggagctgagggtgtcggaagatgaggagaagctgcccgcctcaccgaagcaccaagagagaggtccctcccaagccaccagccccatccggtctccccaggaatcagctcttctgttcattccagtccacagcccctcaacagaggggccccaactcccacctgtccctgccgccacccaggagaaatcacctgaggagcgccttttccctgagcctttgctccccaaagagaagcccaaagctgatgccccctcggatctgaaagctgtgcactctcccatccgatcacagccagtgaccctgccagaagctaggactcctgtctcaccagggagcccgcagccccagccacccgtggcggcctccacgcccccacccagcccactccccatctgctcccagccccagccttccaccgaggccactgtcccatcccctacccagtcccccatacgcttccagcctgccccggccaaaacatccaccccactggcccctctccctgtccaaagccaaagtgacaccaaggacagactgggcagcccccttgctgtggatgaggccctcagacggagcgacctggtggaggagttctggatgaagagtgcggagatccgccgcagcctcgggctcacacctgtggaccgcagcaaggggcccgagcccagcttccccacgcctgccttcaggccagtgtccctcaaatcctattccgttgaaaagtccccccaggatgagggactccaccttctcaagcctctgtccatccccaaaaggctgggcctgccaaagccggaaggcgagccgttgtccctgccaaccccccggtccccgtccgacagagagctacgcagcgcccaggaggagcgcagggagctgtccagcagctctggcctgggcctgcacgggagctcctccaacatgaagacactgggcagccagagcttcaacacctcggactccgccatgctcacgcccccctccagcccgcccccaccgccacccccgggcgaggagcccgccaccttgcggaggaagctcagggaggccgagcccaatgcctcggtggtcccgccgcccttgcccgccacctggatgcggcccccccgggagcctgctcagccccccagagaggaggtgcggaagtcgtttgtggagagcgtggaggagattccctttgctgatgatgtggaggacacctatgacgacaagactgaggactcaagcctgcaggagaaattcttcacgcccccgtcctgctggccgcgccccgagaagcctcgccacccgcccctggccaaggagaacgggaggctgcctgctctggaggggacgctgcagccacagaagagggggctgcccttggtgtccgcggaagccaaggagttggccgaggagcgcatgcgagccagggagaagtccgtgaagagccaggcgctgcgggacgccatggccaggcagctgagcaggatgcagcagatggagctggcctcaggcgcccccaggccccgcaaggcgtcctcagcaccctcccagggcaaggagcgccggcctgactcccccacacgccccactctcaggggctccgaggagcccaccctgaagcatgaagccaccagcgaggaggtcctctccccgccgtcggactcagggggcccagatggctctttcacttcatccgagggctccagtgggaagagcaagaagaggtcgtcactcttctccccccgcagaaacaagaaggagaagaagtccaaaggcgagggccggcccccggagaagcccagctccaacctcctagaagaagccgccgccaaacccaagtccctgtggaagtccgtcttctccgggtacaagaaggacaagaagaagaaggccgacgacaagtcctgccccagcaccccctccagcggggccacggtggactctggaaagcacagggtgcttcccgtcgtaagggcagagctgcagctccggcgccagctgagcttctccgaggactcagacctctccagcgacgatgtccttgagaagtcctcacagaagtcccggcgagaggcagggggctgtggctgtccagtccgtggacttgcactggattgggccattgcctcttctgttctcgatggcgctaggcgcaacagccctggccaggccacaacctctcttcttcctagcggccagcggctgcctctgcagaccccagagtcagtccagccaagaacctacacggaggaggaactgaatgccaagctgacccggcgtgtgcaaaaggcagctcggagacaggccaagcaggaggagcttaagcggctgcatcgagcccagatcatccagcggcagctgcagcaggtggaggagaggcagcggcggctggaggaaaggggcgtggctgtggagaaggcgctccggggcgaagcagagccctcaacaccgctggtcggggagcatgtggccaccctcggcacacacagatttccagagggcacccaggccctgtgtctgctgaaggctgactattggggagagtcttattacagtgacctcatcgacttgcatctgggtgtcccacgctcccacggacccacgcccttggagactccctcggtgtcccagggcttctggtgtgttcagagacctccacactcaacgaccactggtgctgcagaagggccggtgcttacattccaattaacagacgcttttcccatctaatgcctcttgccttctcctaacaccacctcgggagtgtttatgtctattctaagtgaatttcactgtgtgaaaaaattcacacctgttatccccagcaatttgggaggccaaggcaggtgtatcatttgagccccaggagtttgaaactagcctgggcaagatggtgaaaccccgtctctataaagaaattttaaaaattagctgggcatagtggcacgtgcctgtagttccatctactagggaggctagggtgggaggatcacatgagcccaggagtttgaggctgcagtgagctgtgatcgcagcactgcactccagtctgggcaacaaagcaaaaccctgtctcttaaaaaaaaaa

SEQ ID NO: 147489 - DNA, 402 bp, Homo sapiens; identical to SEQ ID NO: 137571

SEQ ID NO: 147490 - DNA, 478 bp, Homo sapiens
cggctccccattgacggcctcggaattgaccgcctgcggaattcgcacgagcccaatggtgcgcatgaatgtcctggcagatgctctcaagagtatcatctatgccgaagagagaggctgacgccaagtgcttattacgccgtgctccaaagtcatcgttcggtttcttactgtgatgatgaaacatggttacattggcgaatttgaaatcattgatgaccacagagctgggaaaattgttgtgaacctcacaggcgggctaaacaagtgtggggtgatcagccccagatttgacgtgcaactcatagacctggaaaaatggcggaataatctgcttgcatcccgccagaatggtttcattgtactgactacctcagctggcatcatggaccatgaagaagcatgacgaaaacacacaggagggaaaattctgggattctttttctagggatgtatacatatatttacaaataatatg

SEQ ID NO: 147491 - DNA, 771 bp, Homo sapiens
ggcacgaggcatctttccgcgccggtcgagtagcactctctgagagctccaatttcatccgtctgccatcggcgcacatcctgcaatctaagccacaatggtgcgccatgaatgtccttggcagatgcttctcaaggagtatccaacaattgcccgaaaaagaaggggcaaaaccccccggtgccttattagggcccgtgcttcccaaagtccatccgtcccggtttcctcacctgtgcatgatgaagacatggttagcattggcggaatttgaaatcattgatgacccacagagcttgggaaaattgttgtgaacctccacaggcaggcttaaacaaggtgtggggtgatcagccccagatttgaccgtgcaactcaaagaccctggaaaaaatggcatgaaataatcctgcttccaatccccgccaagtttggtttcaattgtacttgacaacctcagcttggcatcatgggaccatgaagaaagcaagaccgaaaacacaccaggaggggaaaatcctggggatttcttttttctaggggatgtaattacatatatttacaaattaaaatgcctcatgggactctgggtgcttccacttggtcgttttgagcctttacagcagtgtagccacagcttctgcggcagcatgcagttgcttcgtttatcggtgaatgcgattccctgaagtgactaatacagccaagggaaaaagttcttatgaaaccagtatgcctaagaaacagtcacccctgctgtctgccaaaacc

SEQ ID NO: 147492 - DNA, 2346 bp, Homo sapiens
  misc_feature (1)...(2346): n = a,t,c or g
ctgtaactataatacctcttaatttacctttttaaaagctgtgggtcagtcttgcactcccatcaacataccagtagaggtttgctgcaatttgccccgttaattatgcttgaagtttaagaaagctgagcagaggtgtctcatatttcccagcacatgattctgaacttgatgcttcatggaatgctgcatttatatgtaagtgacatttgaatactgtccttcctgctttatctgcatcatccacccacagaggaaatgcctctgtgcgagtgcaccgacagaaaactgtcagctctgctttctaaggaaccctgagtgaggggggtattaagcttctccagtgttttttgttgtctccaatcttaaacttaaattgagatctaaattattaaacgagtgtttgagcaaaataggtgacttgttttaaaaatatttaattccgatttggaaccctagatgtctatttgattttttaaaaaaccttaatgtaagatatgaccagttaaaacaaagcaattcttgaattatataactgtaaaagtgtgcagttaacatggctggatgtgaattttattctgagggtgatttgtgatcaagtttaatcacaaatctcttaatatttataaactacctgatgccaggagcttatggctttgcattgtgtctaatacattgatcccagtgttacgggattctcttgattcctggcaccaaaatcagattgttttcacagttatgattcccagtgggaggaaaaatgcctcaatatatttgtaaccttaagaagagtattttttttgttaatactaagatgtttcaaacttaggacatggattaggtcatacattcttcagggggttcaaattttcccttctacccattcaaatgttttaccaaccagcaaacttcaggcccgttccaccttttgttgggagaaaaaatagtagattttaatttgactcacacgtttgaagcattctgtgatcccctggttactgagttaaaaaataaaaaagtacgagttagacatatgaaatggttatgaacgcttttgtgctgctgatttttaatgctgtaaagttttcctgtgtttaaccttgttgaaaatgttttggcatctgtccaattaaggaaaaaaaaaatcactctatgttgccccactttaagagccctgtgtgcccaccctgtgttcctgtgattgcaatgtgagaccgaatgtaatatggaaaacctaccagtggggtgtggttgtgccctgagcacgtgtgtaaaggactggggaggcgtgtcttgaaaaagcaactgcagaaattccttatgatgattgtgtgcaagttagttaacatgaaccttcatttgtaaattttttaaaatttcttttataatatgctttccgcagtcctaactatggctgcgttttataaatagcctttttcccttctgttctgttcatgtagcacaggataaggcattgcacttgggtacccaggcttttacctcatttcaagtaaaatatgcttaacagagaggaaaaaaaatgtgggtttgggccttgctggctggttttgatttatgggaaatttggaaaaaaggataattaataatggcctgcaatgtgtcatatactcgcacaacttaaatagggtcatttttgtctgtggcatttttactgtttgtgaaagtatgaaacagatttgttaactgaactcttaaattatgtttttaaaatgtttgttatatttcttttcttttttcttttatattacggtgaagtgatgaaatttagaatgacctctaacactcctgtaattgtcttttaaaatactgatatttttatttgttaataatactttgccctcagaaagattctgataccctgccttgacaacaatgaaactttggggttgtttgggttaagaatccagggtgttcccccgggcagtcgggcttcttcagtcgctcccgggagggcaggtggggcactgcaggagggatcactgggaatccaggatcgagcggcagttcatggcacaagggccccgttggattttaaaatattggggatcttggctctgttagggggtgttcttaattcccctttacacaaggttggaagccaccaaactggaggaccttggattaccnttttttttaactgcatctgaaattatgttaagagtctttaacccatttgcattatctgcagaagagaaactcatgtcatgtttattacctatatggttgttttaattacatttgaataattatatttttccaaccactgattacttttcatgtacaatataaaataaagaaatttatctggaaataattaaattcctg

SEQ ID NO: 147493 - DNA, 422 bp, Homo sapiens
ggggggcataaacaggttctgaaaaggcttaaatctggttcatcagttcccatttcattccatttattaagaagttctttctgttctccaactggcctctttcgtgccagtgggatactcagttcagtgcacatactatttaaactcttcaaaattcttttttcccaacttccctgtgctttcctcatgtataccaaaggttctttaagatgttcaggaggtgcagcaggatgactaggtaaaggaaacccaggcctgccgttccagctgagagtacaaattggagcccttgagcttttggactatctgggcaataatgagagagaggtccgactcctcctgcaacatttcccctgccctagcccgccaagccgcggggacaggccgccggcgcggagcgaacgggctaccgggtcacgaaa

SEQ ID NO: 147494 - DNA, 2399 bp, Homo sapiens
tttcgtgagaagtgtcactggccctgagtgggacccggtagcccgttcgctccgcgccggcggcctgtccccgcggcttggcgggctagggcaggggaaatgttgcaggaggagtcggacctctctctcattattgcccagatagtccaaaagctcaagggctctaatttgtactctcagctggaacggcaggaagccaaatgagggagcagcaacatgtatatgagcttcctatggaattgtccttatgtgaagctttgaaggtgtacagccactctcccgggtcttcaggttcctaccatttccatttctgttaaagtggatctgcatatcttcagcttactaggtgacccggatgctgacatctgctgctgcagaaaggaagacttttcattgtaatttcgcttagacccttttatcagtggagctccagttttcttacctagctgtcacttttttaaatgcctctgggggttatttttgctttccttggcccccaccaatttatacatctccattttctgacctctggactaactggttgctcagcaaggttctgaaggagagtttcttgcattggacaggcccagtcttctcccatcattgccctgctgtgactccaaagaaaggagcttcttgctgacagtgccctgtggagcaaggctgtgtttcctaccccacacggtgctcagtgggtgccagccctcagtgtggcttggtgtttgcgtgcctaaagaagaatgctctttccttcctcactggtactgcctgctgttttctaagcattgctcctgcacagacatggagtgccagccacagcaaggctcttctgttcccatctgttgacaatgtcttgtggagcatttttgctgaggaaaaggtctcttgtcatcagaggagaaagggaaagagtacaaagccctaagtttattgtaagtgaaaactgagggaattcctgtcttctttaggagtaaaaattcaaagatctagataggtggaaatatcattcaaaatagtcacttgagctcacaaaaaaagcaaggaagaattctcatgtcctttgtcttccttctgtagccattaactgctgaatccatgtgaggaagacaggcttcccttccttccccctccttagtgattttttctttaacagcataagtaaagaggactttctggttcatttttgtttgttttgttttgttttgttttgtttacagatgaggtcttgctgtgttgcccaggctggagtgcggtggctattcacagatgctatcatagcacactacagcctccaactcttgggctcaagcatcacgcctagcagtttctggttcctttaacagcaaaaggaaagagaggttctgattcttacctcagggttttttggttgttcattgtttttgtttttgtttttgttttgacactgcagagcacaaggctaaaggttacagctgagatctttggaaccaaaggcagagcaagcagagcccgttgtctgggccccacaccactgcaggcaggtggatagaagtgcggcccctctcatagtatgcccataagtcagggcatagggcagaactacctgtcatgttgctacaccatcctgtcttctgcagcatctccttgcctgttttctttattagtccaaaggagaacaacagcaacaaaatctgttttttaaaatgtcttatatggaacatatatccaaatatccatgcgctgaaacccacataccatcacttgggcaattttttagaataaggaccccattattatctattgctataaacctagccagttctcttgctcttctgtattttcctatttccctgccatcatctgctatttctgccacttctcttagactccttgtctgcaaagcccaagctagaactcactgtctatgggcagaagggacatccagagcccattctgggagttttgttttttccttctggccagatggctttgtgtcctgtcttccttcctcctcatatttctgtttctcatttgtgttcagttttgtggcaggcattgcttaggcactgcttttgtggaccaggaaaagggccattaacagggtccggggatcatccattcttctggactctaggagggggacacttggacagtggacttggaaacatttggcatattcaggaatgcatgaggatttcaagagagcctacagtatgaaatcattttcacaaaataaggcagcttgcttctgaaatgctgtctttcccagtagctactcacctgcctctggtggctgggattcagatgccacaaaactgtcagtatctatagaccaggtctgtgccacctcctctctcctctgtgctcagtgaggaggcagtaaatgaagttacaggctagcacaatacctaattcatgtt

SEQ ID NO: 147495 - DNA, 570 bp, Homo sapiens
agaacgtgtttggggtgagtgggagtgaggggcaatgttactttttctccctgtagtttggagtccattatgagctgctgctttttcttctcatcttgtcatcttctggggatgtttgaaggctgagttccaacagaattcacaaagggaataaaacaggattgagattttgaggtgtgcacaaggtggtaagataaagggcatatgagcttcaaaactaatgctgttgcatacatgaagccttttgttttttgaggagctatttttgttattcttgtaacgctccaccttacatttccacaaagtggtcaactctgccttgcatcctaaaactttttgggcatctattttgaaaactataggagcctttggaaggcctcttatgtttggaggggaagggtgttgagattgtcaccatccttcaagctgagactcctggtgagcctttgccaccatgaaaaccacatagctgaccagggctgtgcttgaggtacagaggacacacattgtagacaggcctgtgtcatgtttccttacagtcgttttttacagagaaaaggggcattgttt

SEQ ID NO: 147496 - DNA, 403 bp, Homo sapiens
  misc_feature (1)...(403): n = a,t,c or g
acttcttgcctcctgcccaaccagacacctcaaactctgtcagtgccctggcattctggcagagaatcctcaccagttctcaccaaccttccccccaggcaagggcagctgccagcatggttgcagataacgaactaaggttgcctaaagggcagatctgccctctccatgtcttcgtcctggcaaacagggtcgtcttaaaattatgcgctaattctgtatgggagcactcaaaaggcattacttagagattgaaatttcaaactatctctagtttttcaatggaaatatatcagctagggaaaaaccatcaagctcattattattttttgatcttcagttgtatttttgtgaatattttaatacatctttttcaatttctgnnnnnnnnnnnnnnnnnnnn

SEQ ID NO: 147497 - DNA, 379 bp, Homo sapiens
cactcactcgaatgacacctggaggcctgttcctcccttaccactcccttccccagcccgactttttggcctcctgcccaaccagacacctcagcactcctttcctggttgcagataacgaactaaggttgcctaaagggcagatctgccctctccatgtcttcgtcctggcaaacagggtcgtcttaaaattatgcgctaattctgtatgggagcactcaaaaggcattacttagagattgaaatttcaaactatctctagtttttcaatggaaatatatcagctagggaaaaaccatcaagctcattattattttttgatcttcagttgtatttttgtgaatattttaatacatctttttcaatttctgaaaaaaaa

SEQ ID NO: 147498 - DNA, 1940 bp, Homo sapiens
ggggaacgaactatagttgcaccactgctgctggcaagaattaccttctttataaagcgtcagtcatgcttccagcaagaggcagcatcagtcatggctttataacagcttcatggggcctcaaagactggtgaggttaatgagagcctagattagacagtttggctgtccttccctaaaacttgttttctcctattcactactccccaccgcacttaaaatctatgagtttttactttttactgggaatggaaagtgtggtgaaaatcattcaacacttatgttgtcatttctcccattttctgaatttttttttaaatttccccccattttaaaattgttcgaaagcccacagttatggaaagaattactgtcctagatggtctgcagaacgtgtttggggtgagtgggagtgaggggcaatgttactttttctccctgtaggtttggagtccattatgagctgctgctttttcttctccacttgtccatcttctgggggatgtttgaagggctgagttccaccagaattcacaaagggaataaaaccaggattgagattttgaggtgtgcacaaggtgggtaaggataaaggggcatatggagcttccaaaactaaatgctgttgccatacatggaagccttttgtttttttgagggagctatttttgttattcttgtaacgctccaccttacatggccacgtccgtgtggagtccaacaggggatcaggtttgggtcaccacacatgtctgaaagctgggcagcgtctgctctgtgttctgtgtgggaatggagaaaaaaaccgcctgccctgctgcccttcccatgttccatagggcccagcccaagaagagtggacacacagttgctgggccctgaggacatttccacaaagtggttcaacttctggccttggcatcctaaaaactttttgggcatctattttgaaaactataggagcctttgggaaggccttcttatgtttgggaggggaagggtgttgagattgtcaccatccttcaagctgagactccctggtgagcctttgccaccatgaaaaaccacataggctgtaccaggggctgtgcttgaggtacagaggacacacatcgtagacaggcctgtgtcatgtttccttacagtcgtttttttacagagaaaagggggcattgttttttcactgctttctcgaacagttcctgtgaataaatgaaacatttcggagctccctgagagcaagagccttcacttcttcttgcggtgccgggaccatgtgttgggtgaagctgggtgctgttgggggccactcacttcgaatgacacctgggaggcctgttcctcccttaccactcccttccccagcccgacttcttggcctcctgcccaaccaagacacctcaaactctgtcagtgccctggcattctggcagagaatccttcaccagttctcaccaaccttcccccccagggcaagggccagctgcccagcatggtgctctgcccaggaacaggtttcccctgaaggaaagctgcctcacacctgaagatggagcctcctcagggcaggaccctcttcccccaagcccctgcaaaccccaccccctgcagccccttttggctcccccttttcccctgtgcctcagcactcctttccctggttgccagataacgaacctaaggttgccctaaagggccagatctgccctctcccatgtccttcgtccctggcaaacagggtcgtcttaaaattaggcgctaattctgtatgggggcactccaaagggcattacttaggagatggaaattccaaactatctctagtttttcaatggaaatatatcagctagggaaaaaccatcaagctcattattattttttgatcttccagttgtatttttgtgaatattttaatacatctttttcaatttctagaaaaa

SEQ ID NO: 147499 - DNA, 1840 bp, Homo sapiens
  misc_feature (1)...(1840): n = a,t,c or g
agattgcacaggaggaggcggtagcggaacctttctcctccgcctggttctcgcttccacccgggcccagttggggacggacgcactagaggcgacctaaacatggagacagcgggcgctgcaactgggcagccggcctctgggctggtaggctccggggtccacgaatgaccggcttttcctggttaaaggtggaattttccttggtaccgttgctgcagcgggaatgctagctggatttattacaacattatcattggctaaaaagaaaagccctgaatggttcaataagggaagtatggccacggctgcattaccggaaagcgggtccttcccttgccttgcgagcctctgggctggggctccctgtaatgcatggtgtggggttggttgtgaataacttcgcagtctggaaagctttaggaagttcacagtaatgaaccgactttccgaagtaaaaatgcaatcaatatttccaaccaattcccaaagaactcccgaatccggctgttgagtgggaggaaacattgaaatccaaatgagatgagcatgggatgaatttcaaaatgcttggttacagaaaaggggtggctctggagacacccaatgacagccaaaaggactgggactgatttctcccaggaacatggggcagattgctgactgaaccagtgcactggatagcattcagcctcatcacaggagaagtatgggtgtgcgtgctgggggagggtaaagttttcccacagttaagaagactatttaaaaatagtaattacaggaataacttccttatgtggaggggaccccataggaaatgattctgtttgtaacagttgaagcaaatttcatactaaaaaagtttataataaaagtatgataagaaaatatttataaaacagaccccctaatagcaatagtactgcactccgtctaattaaaggcctttcaagagcctttcttgtcaatatatcacacaacttggaagtcttattctgattagccagactacaaagtgacagtcacctggtaagtcctgtatggtaggaagtgggtgtggctctcgcggtcctccatgtggtctgtgctttacagccatcacacacatgctagttatttacctgatgcccttgcttgaaggccctataaattcttattacttaaaacaaaaagccagtaatggagttgtgatcaccccaaaagggcacagttggggctaaaataatggatgatatcagggggtaaacatattttttttgaggaagttgggtctgggatctctggaacactggacaatttggtccattttggtcttcagttggtncaaagtaaaaaaaggcccagttgtcacccgtcttcaaatatttttaacccagaaagtcaccctgagtacggagtccccaatataaagtatttggggaccaccctccccaacaaagctgttagggtaaattctgtgtgcacgccccaactccctcctgtcttcccacagtctcctacaaaaaaaaacagatggagaataatgtctacatgcaattgtttttactgcaattgtattttaaaatattttcaagagagagaaatactttaatatgtcaatatgtccagagaaaaaacctgtagttaaatatcagttgtgcaatttcttcctacttgcctaggctctaattagtcagcaatcaggtttaataaaggacatttgaaatttctgttatcatgaaaccttttattctaagggagatttttaaatgaaatgacaagaacttaatgtaatacttttctctagaccatgttaccctgttaaaattgctgtattgttaatgaaacaggtgtaatcagc

SEQ ID NO: 147500 - DNA, 1570 bp, Homo sapiens
atggtactcttagcttcggctgtgcatagactagtcagcttccgagatgtaactagagcagagcttgcaggaatccccaaagatcagccgaaatcaattattcaggccccacctgaggaaagggaatgtccatccccatgtgtgccagtatatctgtctttggtcagaataaggcaggaagcagagtcaggagcacccgaaaagtcaggcttggaagaaacctcggtttcttcatgttcccatggtggtgataattcaggggtttatgagattgcagagacaacatatgcagaaatgaaaacacatcagaaagacaatgagttgcttagtgttcatagacagaagctgtatgaggggcaacagcccatgctggtcatcatggatcccgacatgatcaaaacagtgttagtgaaagaatgttactctgtcttcacaaaccagatgcctttaggtccaatgggatttctgaaaagtgccttaagttttgctgaagatgaagaatggaagagaatacgaacattgctatctccagctttcaccagtgtaaaattcaaggaaatggtccccatcatttcccaatgtggagatatgttggtgagaagcctgaggcaggaagcagagaacagcaagtccatcaacttgaaagatttctttggggcctacaccatggatgtaatcactggcacattatttggagtgaacttggattctctcaacaatccacaagatccctttctgaaaaatatgaagaagcttttaaaattggattttttggatccctttttactcttaatatctctgtctgatctggagcttgtggcccagtcaattatcatcatttttgctgcctatgacacaactagcaccactctccccttcattatgtatgaactggccactcaccctgatgtccagcagaaactgcaggaggagattgacgcagttttacccaataaggcacctgtcacctacgatgccctggtacagatggagtaccttgacatggtggtgaatgaaacgctcagattattcccagttgttagtagagttacgagagtctgcaagaaagatattgaaatcaatggagtgttcattcccaaagggttagcagtgatggttccaatctatgctcttcaccatgacccaaagtactggacagagcctgagaagttctgccctgaaaggttcagtaagaagaacaaggacagcatagatctttacagatacataccttttggagctggaccccgaaactgcattggcatgaggtttgctctcacaaacataaaacttgctgtcattagagcactgcagaacttctccttcaaaccttgtaaagagactcagatcccactgaaattagacaatctaccaattcttcaaccagaaaaacctattgttctaaaagtgcacttaagagatgggattacaagtggaccctgactttccctaaggacttctactttggtcttcaagaaagctgtgcaccagaacaccagagatttcaacttagtcaataaaaccttgaaataaagatgggcttaatctaatgtaaaaaaaaaaaaaaaaa

SEQ ID NO: 147501 - DNA, 1429 bp, Homo sapiens
accaaggacccgtgtggaaggaggcggctccccctagcctgccctgacctacaggctaggtggtggtctccttgttttggtgtcaaggactcagtaaaagcatctatttttttagcacttaagctggcaaggcggtaggggcatgcactgttaggtggtggccacccccagggtcaggggaaaagaatgggtccatagagtgcccttgaagcagagaacagccccgagcagtgtgaggacagaggcatcccagcctcagccggtgggaacggctgccactcccccagagccctgccaccccatgtgttccttaggctggtggccaaggccatgtgtgagggaagaggggtacctctcttcccttgcttgctggcctgggggtattttccaaaacagcgcttttcgcacacatgcaggttgcaccgagaggtctggagctgtggctgagccacctctggtggatgttgagccaggaggttgggcaaaggccggatgctgatgccagcgctggaggtggtgatactgggggcggggaaggcctagaaatactttgagccatggccttgccagtgtcccgtgccctccagtgtcaaagatttggggcactgcccgtcgaaatggaaaggttggtgctcagcctctggagcctcacctgcagggcgtccccagctaacacccatccacgcaccacctccaggacgagaacccgttgatgtcaaaaccaagtgcccagtggaggcggtgaagctctcggaaatgctgccacctgtgtgaggccgggtctgaactcgagggagtcggagctcagctgtcggtttaaagagacactgaggggaccgggctgccgccctcagcctgcattcctgtgcgcaatcgattccgcaatgacagcaccttactccttcctgcggcaggctcacccctgcctgtgggatgttgtgagaggaacatgagccagacaaagacttggctcaagggctcccgtggaaacaaaccccaggaatgccacgggggaagctgggggaagccccccaccctggggcagccccagcaggcccgctgaaacaaacacccccagaagcccagcactgtggcagggtgcctggggagatgcccctctgagccttccctcccccctcagacctgaatgcacccccacagttgggggctgcccctgcccactcccctggtaatgcataaaaggggaggggaaggttcccctggggcttgagcctcccctctgtggaggtgaggaggggagattccgttcacatcccaggaggggcaaaatgactgatgtatttttatgtatctacacagagagtgcattttctctccaaagatgctgtctggttaacaaaggaataacttaagaaattgattgattatcttaataaactgtgcaaacccaaaaaaaaaaaaaaaaaaa

SEQ ID NO: 147502 - DNA, 2878 bp, Homo sapiens
  misc_feature (1)...(2878): n = a,t,c or g
ttctcaaggatactgtgaggagccttgcccagagcctggtcatggtaggagcatgtcagttcatccgcataaagaaacagactccaggccctagggctggctcaagggccagagaaaaagccaatggcaataagaccctctggagctttaaaccaaaccactgatgcccagggagccagccagccaacccttccctgctgcaagtgtgtgacgggacacacagatgcccctgcgcccggctcctctctatggaggtttaagcatctcttgagcagttacacatcacttgccccttcctctcaccttcccccatctgtgggatattggtgcaggattgtggcatctgtgcacgtgaatcacacaccccaggtgcaggggctgacatggagcactgtgtctgggcggagagcctcggcgtgccaggtgtgcatccaggcctcttctgctatcaggtgtttcccctcggcctaggcgggacccttctgcagctaggaaccccgtgcaggagtgcagctggcctctcccttcctcactgggtcacagacatgctttactcatgtccccttagagcctcatgctctggaggtgccttccccacccccaaacgcctcctggaaactgtggaaaactgtgtgaacctcaaaccttgtgggtgccctccctttttttcctcantttaaaaacaacaaaaataaaacactccttaaatcccactcccatacggaaagaaaccccatgaacaagaagcattgttggaaaactcaacaggacaccgttttctcgatgttggaattccttccccaagaatgttttcaggacagaacacttcattttgtggaagctgaaatcttcctgggctcccgatagaggagaatgatttgtcaagctgtgaacgtcaagctgaaaggccagtggaaagtgtatgccctgggaatagcctccctacatggcatcttcccacagctgcgggttcctgggggtgaaaccaggcatgctgcggaaggagcccaagaagcctagtctgtgggcctcaggtgagctgccaggagcctcagaactctcccagttaggtgccgaagcccgtgaagcccacaagggcccattggttcctacagagagagaggccccaagatttccaaaaaggcgaacactttgaaaatttttaggttagcctcccactgataaaaacagttctccttttatttatctcaatggataagtgcaatataactactaaaatgcacctcccctgactaggactcttgcatacagcagggtgatggtgagtggtggagaccatgggacacaggagttcttgcttaaaaccatcagggccaaggattatgtaagaatagggattatatttagaggaccttgaagaaacaaccatgcccggggcagaactgtccccagtggctgcaccatttccagaaatgtgaagcgggactccccgcttcagggtggagacaattcttttacctctgtattcccctcacttcatccaaaaccaggatgccccaaagaaggccaataaacacagttccccaggtggcaattaaagacaccgagtactggatgtctccctggcaggacccacatcacaggcataataaataagatgagtggaacttccttcccgaaggtcaaccctcagttcctcgaccaaccggaagtcttcagttctccccacactgacctggaagttataaacccacngttttctggagggtgccgccatagcccatatgaaggaggtacaaatgactgggtgagaaaaaaaagttatttcttcagccgaataaacagctttgagtggttgaaagtttacaatggggtttgtggacatgagattctgggtacaaagtgctgcagtagccggtgagcaaactcatgtgtggctccatctcggctccctgttcttcctcaggaatccacacagcttcccaaagcactgttgatgcaggaaatctaacctgcctattcagcccatccctctaaccacatccagctgcaggggctcaacaagctgctttcctagagtggtgaaacctgcgttcagtttgacatttctcctccatacgcagctgcctctggcttccacaatggtgatcagagtcccaggccccaggctggggccttcatggatgaaaagtgcccccctggcctgcaaatctggcctggtgagcctccagctaaaaaccaaatataagttgttttgccctgattcagggcttgttttgaaaaagtgagatttaactggcaaagagattttaaaaaaaaatcttaaatacatgtgtcaccttgacttaaaaaacacattgcagttgtgtgcggtgcctcacacatttcctcactgtgggggctggcttggaaactgtagcataagacaacctagaaacatatgaaaacactgtccgttcaatggcgacatcttcagacttcagtggtacgctcaccctcatctgttgtttagcacgcaggcgctgggcaggaaaataattaacaagccagtattttgctgcaaatgaatcaccaaattgctgcctatggaagtgtctcgggaaaggaagccttctttctggaacagtctcaaaacagatccaaaaggaaacctcccacccaatttactaaagtgcaaacgaagggaaaaccaggtccctgcactgaagtctagtggtctgccctggctaatagtcgccctggtgccagtgccatggtgcagtcactcagagagactctcttgatactggcccacattcacgttcacagtaacaacaaaggtgctgaatgagcagcctgtggttccacatccacctgtctcctccactgtggtcacgccccgcatgcctgtccctcttcctgcttgccactcagcgtg

SEQ ID NO: 147503 - DNA, 957 bp, Homo sapiens
tgctgtgatctggagctgctttgaccttgaaagcaggataacgcatgcacttacttacccccgcattacttgggtaccttaaggactagtggttcacaacttactttaggagcttttatttattctgtaacacgtgagatctggtaagacagtggggggtaaggaaaacagacaagaccatgactcttctttccctcttccccaaaacgtgcctcttggaataatcttcagtgtgccctccagcagagccgaaatcaggcaggcatagactccctcctctctcatcaaaccgcagaaatagagttccttcatcataaccgcaaagcttcctcctcccctttgcaccctgcctcagctgcattttcttgtcgcttctacaggggagtgcttgctgttctgggaagagtggggagaagcggtgggaatccttgagccacattgaaactgaggtcatcttcaggaaaaccatgtcttcctgaagttgaaagattcaggcacaccatacagccctttcctcatgaataagctggatctttactcatgggaaattgggagaggttaacccctcccaagtttatgtttgcaaattcatgtttatgggtccaggtgaaaaacttttctgaacacagcatgctacttctcttattacctctctctatttaaagaatggctaggctgagcatggtggctcacacctgtaatcccagcactttgggaggctgacatggcaggattgcctgagcccagcagttcatgactaagcaacatatggagattctgtctatataaaaaaaaaaaaaattaactgggtgtggaagtgcatacgtctagtcccaagctacttgggaggctgaggcaggaggagttggcggctgcagtgagacgtgattgtgccgctgtatccagcctgggtgacagaaaaagaagagacccttcctttaaaaaaaaaaaaaaaaa

SEQ ID NO: 147504 - DNA, 944 bp, Homo sapiens
gaagaccacacctcggtatcaattcagatataatttacggtcaacaaaaactcttaggagactttctcaggttccttgttaagccagttctacccctacctgccccaacccattgtgtgcgaggtttgggtactttctttttttttttttttttttgacacatccttgttcacaactttaaaaatattctttataaaaaagaaaaaaaggtcatcctgttatattctatccctgttgcatactgctgagatgttctgagattccaattttgttgccttggtgcctttctcagatcttcaacaatttggtaggcaagctcactataatttcttctaatgcagacataagtattaacactagaaacggaatgtaggccaggtgctgtggctcattcctgtaattccaacactttgggaggccaaggcaggaggagcttatcggaagttttgggaggccaaggcaggaggagcccagtagttcacggaccagcctgggcaacacagtgaaaatctttatataaaagaaattgaatgtaaaccagatgaccatctgacaagagatatttagaagaaacagctatttgggtcaagattagacttcataggttctaaggtttcttccaaactcctattaaaaaccttaaaactttaataattctttcacgccattagctacaaccaaatggatccaccagccttcacaagctatcccaacaaccgactgtcactagtgactcaagttccttcactaggtttcaagattatttttagggggtttagatggtacagaaagagacacataaagtagaatcatgtaaaaagaagtaaatcaggttcaatggattcccgttctccaatcgcctataattaaagccctcagtatgactttcaaatatttatattgtaataactttttttaaaacaaaggtatctggtcaaagaaga

SEQ ID NO: 147505 - DNA, 2282 bp, Homo sapiens
ttgacttctgtaacccccctagaaataacccttttccttatttgattttagtcatcaaacatagtatgatatgggaaaagtcagccatttaccagaaattatcttattttgattttaaaaactcatttctatatgtagttattgtaatgtctatttttttagacttaaagatttatagaagactatagttatctgatttgttattttgcatttttcattctgtaaatctttgcttatggcacattgtgctctctgttttccatggttttaatcatttatctcctcctattttgaggggacaacatgggtagttaaatctttgtcaatagtattggagataacactaactgctattatcataacatcttcatttttactgcatgccaaaaccaatgcctgccaaacaaaatcttagacatcccaatataatatgttagttatatttctattcacatcattattgaaaatacccagctcagtgcctggcttaataaatgtttaattcccttacctactcttgctctatttttttatttgaaatggagatgagcaaaataacacattcatgggctgaagcaattttttgggacatttcttgttaccaaaagatctataatcagggacattgtttatgtaagttgggacaaaaaaaattcttcccctttatgtccacccttcctatgattgcaagacaaaatttccctcctttacctcatccctataacatgggaggctgagaaaaatgaggggagatggaaccagatacaaggagatcccaataagagaagcttatttaaaatattgtgaaataaaggaagaaccaaagcatttttttaagtggggaatccttttgaacagttattatttatccatattattaacaacatcttttctgacaaaatccatcagatgaagtggtaaatggataatcctttttaatgggatctaaacctagaaaagtttcaccttacctgttcatggtccggtggttccagaagttgtgaaatggtgtgtggttttgctttccaagttcttctctgcctcctcttaattctctaattccatgtcttacagaagaatgagaaatttctttcttacttgagtatcatgctctaaaaaacttggcttcagtcacagaaacgctggctctcctgtgcttatattgaagccaactgcctttaattcttgggccctcttatatttttaaggtgcaaaatttgaagtctcagtcaccagacacaggttctatacaattaatgatgagctggagaattaatatgtaggctaatttttcaaaaggcattgaatatactttccgggaaagaaaacaggaaattaaatattgccacatcttgccagaatcccatctggacaccttaactttgtcaggtttcctacaacttggctaaatccaagttttattacattcttaaatcttccccagtttctttgggggctgggaaggatggcaacttcccttttaatgggaaactttgaaatcttggggtaagggagcagtggggggactaggggagaaggataaggaaataggaattatttgaaaagcccccaccggggaccttcctgggccaggaatatggcagagtaattcctgctgggctttcacctttgaaagtccctcgaaactatgcagatgaaactgagtctgtttttgatattgtcagatgtattctaccttggaagtcccaacacctaaactggaattcttgtatttacatctcctccactgtcccccacaccacccctcaattcctgctgcccctgctaatgttaagcatttttctcttgttatcatcaggttcacattaaaaacagatacttacaaactgacttgaagcacagatacttttacgaatgtgataaaatattttcttaagaaaaggaaagaggatgtggggtccaaataaaaccacccgcatggatgttgattggtgaatactggtgtaagaaaagggagctcaggaatttttattactgtatttgtaaatgagtttgaaggaatttgtaaatgcccactggtacatttttaaggtgacacatttgctccttataaagtaattaaccattacagggtaagcttaaatgacgtttgcccagtagttttactttatataatcaatattgatattgttgctgaactatgtaactttatgatgcatttttcagtcccttttcagagcaaatgcttttgcaatggtagtaatgtttagtttaaattgacttaataaattattacctgagcaaaaaaaaaaaaaaaaaaa

SEQ ID NO: 147506 - DNA, 411 bp, Homo sapiens
  misc_feature (1)...(411): n = a,t,c or g
gcgagcactataagacggcggtgtttccattcggtgatcagcactgaacacagaggactcaccatggagtttgggctgagctgggttttcctcgttgctcttttaagaggtggccagtgtcatgagcagctggtggagtctgggggaggcgtggtccagcctgggaggtccctaagactctcctgtgtagcgnctaaattcatgttcagtaannnnnnnnnnnnnnnnnnnnnnnnnnnnnnnnnnnnnnnnnnnnnnnnnnnnnnnnnnnnnnnnnnnnnnnnnnntgataaacactatgcagactctgtgaagggccgattcaccatctccagagacaattccaagaacacgctgtatctgcaaatgaacagcctgagcgccgaggacacggctgtatattactgtgcg

SEQ ID NO: 147507 - DNA, 419 bp, Homo sapiens
  misc_feature (1)...(419): n = a,t,c or g
tttccattcggtgatcagcactgaacacagaggactcaccatggagtttgggctgagctgggttttcctcgttgctcttttaagaggagtccagtgtcaggtgcagctggtggagtctgggggaggcgtggtccagcctgggaggtccctgagactctcctgtgnnnnnnnnnnnnnnnnnnnnnnnnnnnnnnnnnnnnnnnnnnnnnnnnnnnnnnnnnnnnnnnnnnnnnnnnnnnnnnnnnnnnnnncatatgatggaagtaataaatactatgcagactccgtgaagggccgattcaccatctccagagacaattccaagaacacgctgtatctgcnnnnnnnnnnnnnnnnnnnnnnnnnnnnnnnnnnnnnnnnnnnnnnncccgggcgattacgatattttgaccaggcgg

SEQ ID NO: 147508 - DNA, 382 bp, Homo sapiens
  misc_feature (1)...(382): n = a,t,c or g
tccaggtacccgacaaaagtttcnnnnnnnnnnnnnnnnnnnnnnnnnnnnnnnnnnnnnnnnnnnnnnnnnnnnnnnnnnnnnnnnnnnnnnnnnntctggagatggtgaatcggcccttcacggagtctgcatagtgttgattatatccatgatatgtaatannnnnnnnnnnnnnnnnnnnnnnnnnnnnnnnnnnnnnnnnnnnnnnnnnnnnnnnnnnnnnnnnnnnnnnnnnnnnnnnnncacaggagagtctcagggacctcccaggctagaccacgcctcccccagactccaccagttgcacctgacactggacacctcttaaaagagcaacgaggaaaacccagctcagcccaaactccatggtgagacgaaa

SEQ ID NO: 147509 - DNA, 1111 bp, Homo sapiens
atgagtgagataagcactctggcagtttctgaccagggtgtctccgtgtttgcaggtgtccagtgtgaggtgcagctggtggagtctgggggaggcttagtacagcctggagggtccctgagactctcctgtgcagcctctggattcaccttcagtagctactggatgcactgggtccgccaagctccagggaaggggctggtgtgggtctcacgtattaatagtgatgggagtagcacaagctacgcagactccatgaagggccaattcaccatctccagagacaatgctaagaacacgctgtatctgcaaatgaacagtctgagagctgaggacatggctgtgtattactgtactagagacacagtctcagatgcattacctgggaactcaggtgtggctctggctatggctcctgtggacctggcaggctgagggatctttctcattccctggtgcctgcatgcccctgctgtcttctatgcgtggatgcatttgggaaatgcaaggtggacactcatagtcgtttccttcaaatgggatactgttgtagagctgatcttgtgcttctcaccctgtcacagagcccccactctcacttgtggatttttgggagagctgaggatggacactttattggggcctgtgaagctctgccatgaatggcaatccgtgaggtcctggggtgggcacagcccagagcccaatggagctggcccaaaaggaaagacaggacggaattccccgggaagtccctacagctgcctgtcctacccatagagttcccattgtcttctcctctgcctaggattaaacccagaccgacccaagttcatcctaggacaatcttcctgaccctagagaagtgatgacaggctttaataacaccctgtagttatacatcagagcaacacctagattagtgtttgattgaataattgagactatgtcctagtcaagggtgacacacaaaatcaattattaccatgattaatattttatattgattaatattttaatactaatattaatcaatgcaatattgatttaatattaattaatattttatatttgacaatagaatcagactcatgttataaataattttgca

SEQ ID NO: 147510 - DNA, 683 bp, Homo sapiens
cgcaattcccgggtcgaccatttcgtagcactagaagtcggcggtgttttcattcggggatcagcactgaacacagaggactcaccatggagtttgggctgagctgggttttcctcgttgctcttttaagaggtgtccagtgtcaggtgcagctggtggagtcggggggaggcgtggaccagcctgcgacatccctgagactctactgttcagcctctgggtccctgagagtctcccttgcagtgtctagattcaccttcctcggctatgttacgccaggctccaggcaaggggctagattgggaggtaactatagaatatgatggaagtaataaatactatgcagactccgtgaagggccgattcaccatctccagagacaattccaagaacacgctgtatctgcaaatgaacagcctgagagctgaggacacggctgtgtattactgtgcaagagacacagtgaggggaagtcaatgtgagcccagacacaaacctcgctgcaggggcatctgagaccacgagggggtgtcctgggccctgtgaactgggctgctctccgtggcagcggctggtggtgctaaaggctgattttctctcagcatctggggctgattcatcaagtttcctcagagaacctttcagattaacaattctgtacttacgtttaatgtctctgaatg

SEQ ID NO: 147511 - DNA, 6590 bp, Homo sapiens
ttttcgtctatgtttctgatctgctttcaggaagaattattcatttttatcttcccaatctgaatgttttattgaatttttattttccaagttaataaaacctttggttattatcctgtctttgttttacagtgtcctgctcttgatgcgtggatgcagattttgtctctctgtggacgttaatgattgtggtctgaggggaagtcttttctgctccctgtgttgccctcattttctctgagttctctttattttggtggtctcagtctctatctttcacgttgtgaatttttctcaaatatatggtgatcctatggatctgttcatgttttaagagtgaggcatccaaaagctgattggaagttgtgtgtgccaactggtgagcttttccactagggtcaccaggtgggcacctggactcatcattggagaacactgcctgtcagtatttgcacgtgttttctctggggctcattctgtttcttgagagatattcccactactctccttcctgggaaacgggcatacacagggcttttagcctatgctgagtactcatgtggtttcaaaaatggtgtcccatctgggcagaagtccccatgagcacttggcttgactggcaaaggacaccttttgccccttcctccagacatacccagctctgagcttggacaatgctcgaggaacaatgaaaaggctagattttaactcctaattgccctctttagccaagtgcctctgtgcaatgcacaactgtaggaccatatccagagaccctggtctatactcagtgtgcccgagtcctgaccgctgagcaggcagcctcatcacccgtgagtatttagactttcattaagttgcttcaacctttgctgtgcctggtgtccctgagttggagctgctctgatttctccatggagtaggagcacagtggtcatctggctgcatgggaaggacaggggacctcagagccaataaatgccctggtcttcagccccatgtctcaccccatccctcctattccaatccccaagcctctcctggaggccacagggcatctctgctgaccactctgtggcctcccctctgcaggcatgtggttttaggatccccctccctgctcacttttccatcagttccattcctgcataaataggttgctagctcttgcttactgttctcttctgtattctgtgttcatggttgtattaatataactttcattcctctgctcctattttcatggggtttcatgagggaagaaacaggctcatgtgttcagtataccatcttgatccataaaccccatttgagttatctcacaggttgcttagggggcttgctgctctgactggtttgtgaacgtgccctgagtccagctgggactgcagcaacatccatcctgttgagctgtggtctgctaagtgattttgtgtaatgctgtgccaagtgcaggagagggatacatagcatggctaagctctgcttgaatgccatgattagttattaccttccttccttccccctggttttgctgcctattgtcagtaaatgatcttagatctcctgcctccccaaagatatagtctatgtggtggtctgggttctaggttttctttaccacccttgcttcacttaagaaacagaaaactggctaggcacagtagtggctcacacctataatcccagccctttgggaggccaaggcaggaggatcgcttgaggccaggaattcaagaccagcctgcacaacatagcaagactccatctctacaaaaagttaaatttaaattagtggtggcatgcacttatagtcccagctactcgggaggatgaggcaggagaattgtttgagcccatgactttgaggttactgtgagctgtgatcctgctattttactccacctgagtgacagagcgagacgctgtctcaaaaataaagaaacaagtagtccacacaggtgtttgccagcaaacaaacagcgcggattctctgttgaacgtggccaacattgcctcgtcgaagtttgtatcttgccatagttgatgatcaggtggtcggggcttcctggtcagacctgacctttgtggggagatgttctcccaccaaggctcagaagcaggacactcttgctgcccctcgggcagccacccagaacatgggcgtctccatttctgaggttcagcatagttccccccaccctcttcccatgcagtgcatgcctgctctttatcaggatggaacagagggaaggcagaggcactgggggcagcctgtgttgttgatctctgtaagtcacagactgttcgaaaacctcaggaattatgtaagcgttcagtgcctcatttaagagatgaaaaactgaagattagaaagaggaaacgactagtcgccctgctagttgatgacctccagatagccatcttcattcccagttaagtttactacaaaaccacagcctcagctgctgaagctaacctccctacccaccatcgctagggactcagaacaccatggagctcatctctccaacaaaagtcagaattagcaagtacagatgtgtcttacgaaaatgtcagaatccatcatggctgctttggtgaggagctgttctccttccgtggtcatgccattggaaggcagttgtatgacaagaatgctttcacatgagctccgattttcttaactctccagaaggacttcagaagcctctggagttttgagacgcggcctctctctcccttctgcttggagacaccttcctgggggtctccactgcattccccgccggtattcctctgtggagccttgcgccctcaggtcccagaaatgggctgtgtgggagcttccagtcagcctggtatctcgggaccttctcagccaggaaatgagactgcacaaagccctgtgaggcccagctgtgttatttctccttccccgacattgcataatcactgctgacacagcatttggggaagatttaacgtcttgggccagcagctgccatctggaaccatcaccacatagcaggttgttctgtcccatccaactgatgagggggctgccctaatgacaaggtccaggacctgggttgggtggtggaaggctgggagctggagtgggcattattgtgcttctgtgctgaaaattgctatggctcttttcccctaacagccagcgtgggagaaccaaacatgagacacaagcatccccttgagctccacagatcttgcgccttgctctcatcaggcatttccttggagaacagcagtcagcagctcatggaagtgagcccggtgcacagactttgcatggactttgcacaggttccatttccatcgtgtgcagacacctgtatctttgggctccacgtgagcacctgccctcttcactctgattttttttttaagagacagcatcttactctgtcaccgaggctggagtacagtggtgtgatcacagctcactgcagcctgaaactcctgggctcaggcaatcctcctgcctcagcctcccgagtggctggtagtacaggtgcatgccaccacgcccacctaatttttttatcttttatagatacaggtctcactgttgctcaggctggtctcgaactcctggcctcaggtgatcctcctgccttggcctaccaaaatgctgggattataggcatgaaccactgtgcctggccttcactctgatttttcttaagagtcctacaggaccttcaggtcttgtcacttctctaccattgtgtgtgaagacagggcatggggtgagcttggtcaggtgtgggtcaaaagcctggagactcagagctgctggttccccaagagcccacaaaagttatcagagtttctgagctgagtgttctgcagttgccagaccccacaatgctgggaatactggcttctttgtgtttagaacttgttctgagaaccttgatgagaacacatcaagcaagcagttcctcccagccagggctggagcaacatgccaaaaaacattcttgtctatgggaaaaagacaaccagtattttgtactgtttgaccaagttgtttttaaatatacacatgcctcaacaatccacggcctcaatcgcactgctaatttgtttaaatccctgacactcagatgtcaagaatagcttcatctagcagtgttctctttaaaggaacccttttttttgttttcattttaatcactgccttcttctctgggaggtattgtgggctagagaaagaagtcaggtttgggagtcagccagatttagattggagtcccagctctgtcaccagatctctgggtgatcttggcaaactaacttctgagcttctgtgcattataggcattcagcacatatttgttggatgaaaaatacttttcttgaaagtttatgaagttgtaggatgcccagcagcccccttttctctatttccttcctcttgaagcaagcgttgactatacctctttccctaacccttagtgtaccatagcttcttccaacctctctccaatccattacttttttctgagctaccctgtctcaaatctaactcaggcctttttgcaagaggaagtttaagccattgtttactcattaactcacttgacccttagaacaatcgtgggaggtgtttatttcggaaaggaagctaaagcacaggacagaaaaataaggtcatagcgtgaactagtaagtagcagaactgggaacataggactgttattttcaaacactctaaacttcactgcagttgcaaatttgcaaccaaaatggccgccttgaaagggtcttttgcagtaaaatctcagtgtccaacatcaaagacagttcttcagggcctccaattaactatacatcctgcccccagctgctcatctctgcacctctaacacgtacttcacagagtaggaaattgggctttctccttcaaaaagaaaagtagagaaggcctgagggcagtgtaattaaaatggagaagtagagaccacgaattacttggatgaattcataactggttggtctctgaggcagggattattatttttcctgtattttaagcttaaaagtagtgatttttgcattgttacaaaaaacaaaatagcaaaatatcatttgatacttgtattctgtttgcaatagctaccacttcctttagccccagcaaaaatcaataggtgtgtattctctacaagcccatgctgtgccacgaatgccaatattgctaaatgtcatgcaaggatttatacacttttttaaaggaaactctggaagtgcctgttgtctggagagttgacattgtccaaagcaggccaacactggtatgggtatggagaacccacgtcctacctgtgggtcacctgcagatgccgtgaaattaactctctgggttggaagtgagaagactttttttaaaagtcctttctaagtttagaaatccaaaggttacgaaggtagtttttatttatcttcaataagtggcctatttgcttaaagcaagtgtacctctgtatatcaagcccaaagcttaggggcagtgcttcttggctttagtatctgagaaaggtgcctttgggaagagtttgggtcagacagaaggtagtctgaatcttaaaggtttcagatgaatgtttgaagtagaacctgggaaatctgcttcctagggctgttagaaggaaattggtctccttaaattacgtcagcatctgaggcagtttcctaagggaatttcttttaaattcaaaagttcaactgcaggaataaatagctgtacaggactagatcttcccatccctcatcttttccccttccccgagtaacgactcaaaaaggcttctgaaattctactcataatcggagccgtttgcattccaacaaggatcccttaagccaaatgcctggtgtgtttgtgtagaatgtcccctggggtagggggcggtagctgtggggagggaatgtggtgcaggggacacctgcccctctgcccttgaaattgcaccataagatgctgcctatgtcactcacagtggtgctgatactatccgccaaagacaaattgtgaacacggaaaaatggtcgttccctactgtacatcctcaggacagacttaactaaacttggagacaggagattgttcagaccatattgtagtgggtggtgatcattgttttattttgggggagtctggtctattgagcagattgaatgtttccttattgtgcagggcttaattgactatgtctgaaagtttttactgagagctctaagaaaactattgaggaaaatgaaatgttattttgtagtacaaggattatttttgtctatttaggatatacatagctgtagctttgtaaaaaaaaaagatccttttataaccaatatatgaatgtgccgtcttacttattgattactgtaaattaagatataaatggctatttgcataatttatacctgtgggaattaactggagtatttgttatttgactgttttctattaaggaatattaggcttggtgctatgatgaatgatcttgtaaaatcatgtgtattcttaacaccatttttgaatataaatttcttgaactgac

SEQ ID NO: 147512 - DNA, 399 bp, Homo sapiens
  misc_feature (1)...(399): n = a,t,c or g
tttcgtgcggcaagatggcggcctgaacgcagttggcatttgcggaaactgaagattcaggtgccccagggactggaagaaattacagtgcctacttggaaagaagaagagatagcgacttgccccagtccaaccccagagcgggagctgtggctaaaggaagtggaggggccgtgggatgcggagagccgagggctaactcccggacagcggaacagagagagctgccgacaaacagacgagtccttctggccacatctctgagcctgcctccttcttgcttctcagcaggcggaggagccgtcacctcccagaatgactagtgccgcccctgctaagaaaccctaccgtaaggcaccaccagagcatcgggagctgcgtttggaaattcctggatcn

SEQ ID NO: 147513 - DNA, 558 bp, Homo sapiens
  misc_feature (1)...(558): n = a,t,c or g
cccgggtcgacgatttcgtcctgaacgcagctggcagcggcggaaagtcttatatcagcctttccacagctgttagcagcatccgccccaatttcagctgaagattcaggtgccccagggactgggaagaaattacagtgcctacttggaaagaagaagagatagcgacttgccccagtccaaccccagagcgggagctgtggctaaaggaagtggaggggccgtgggatgcggagagccgagggctaactcccggacagcggaacagagagagctgccgacaaacagacgcaggcggaggagccgtcacctcccagaatgactagtgccgcccctgctaagaaaccctaccgtaaggcaccaccagagcatcgggagctgcgtttggaaattcctggatcccggcttgagcaggaggaacccctgactgatgcagaaaggatgaagtgagtatctgctacctgagatactgccctgcctcaactctgtccctcttagctccaggctagactgttggacagntggactttcccttggattaggtagaaataaaggttg

SEQ ID NO: 147514 - DNA, 1038 bp, Homo sapiens
gttccagctcacgttccagggcctcagtgcgtctggtggcggaggccaggcgccggcgaagctcttcattctcctcctgtaagagcttcatcctttctgcatcagtcaggggttcctcctgctcaagccgggatccaggaatttccaaacgcagctcccgatgctctggtggtgccttacggtagggtttcttagcaggggcggcactagtcattctgggaggtgacggctcctccgcctgctgagaagcaagaaggaggcaggctcagagatgtggccagaaggactctggacgtctgtttgtcggcagctctctctgttccgctgtccgggagttagccctcggctctccgcatcccacggcccctccacttcctttagccacagctcccgctctggggttggactggggcaagtcgctatctcttcttctttccaagtaggcactgtaatttcttccagtccctggggcacctgaatcttcagctgaaattggggcagatgctgctaacagctgtggaaaggctgatctaagcctagaagagggtcatttgactggctttagttccctccttagcagatctgcccggcatcctccagatctctcttcctcactatcccactctactagaaagatccctttcccctctggccggccagatacagtcgggcctctatcccacgctccaggcttctttattcgcggctaagaaattttcctccaacttgtgactctgcttctccagggcctgcacaacacctacttctggctgccccgcccccaaatccccctcccctagggctaccactggaccatagggccccggtccgccccagctcctttttttcctctccgcctcggaccttactccattccatctcctcttttcaaccctggagccagtacccccttcgcccctactacaggctagggcccccgcaatcccccccaactctggcttccccgcccgactactccaaccccacaacaaacttaacacaagctgccagctgcgttcaggccgccatcttgccgaa

SEQ ID NO: 147515 - DNA, 363 bp, Homo sapiens
ctgtaaaagatgatccaaatgaccatgaacaaggcaaaagaggtcataaacccttccttcgtgagctcccacgtgccaccatattcttcctcatcaatctgtaggtaattgctgaagtagaggtacaggactcctgcattgatcaggcagaatctgagatgctcctgaggagtggtgcaccagacccaggagtgccactgtagggctgcttctttgctttagtcatcacacacacacacagctccagagcagcaatggcctttcctgtaacaggaaaaaaagcctcctgctattcccaagaaccctcgtaatggcaaaactccccaaatgacacccaggaccacagcaatgatctgtcggaac

SEQ ID NO: 147516 - DNA, 448 bp, Homo sapiens
tttcgtcgcgtggacccgaaagccgctgggaaaagtttacccaatgtccagcctagcccctaggcaccatgtcggacagtgatctaggtgaggacgaaggcctcctctccctggcgggcaaaaggaagcgcagggggaacctgcccaaggagtcggtgaagatcctccgggactggctgtacttgcaccgctacaacgcctacccctcagagcaggagaagctgagcctttctggacagaccaacctgtcagtgctgcaaatatgtaactggttcatcaatgcccggcggcggcttctcccagacatgcttcggaaggatggcaaagaccctaatcagtttaccatttcccgccgcgggggtaaggcctcagatgtggccctcccccgtggcagcagcccctcagtgctggctgtgtctgtcccagcccccaccaatgtgctctccct

SEQ ID NO: 147517 - DNA, 1330 bp, Homo sapiens
ccagccgcgagctgtcaggccgagtgtcaggccgggcaggtttacccaaggtccagcctagcccctaggcaccatgtcggacagtgatctaggtgaggacgaaggcctcctctccctggcgggcaaaaggaagcgcagggggaacctgcccaaggagtcggtgaagatcctccgggactggctgtacttgcaccgctacaacgcctacccctcagagcaggagaagctgagcctttctggacagaccaacctgtcagtgctgcaagatgaatttttagatgtgatctactggttccgacagatcattgctgtggtcctgggtgtcatttggggagttttgccattacgagggttcttgggaatagcagggtaagtcttgggtatcttatattttcatggtatcatttctttttaaatagaggctttttttcctgttacaggaaaggccattgctgctctggagctgtgtgtgtgtgtgatgactaaagcaaagaagcagccctacagtggcactcctgggtctggtgcaccactcctcaggagcatctcagattctgcttgatcaatgcaggagtcttgtaccttctacttcaaagcaattaacctacagattgatgaggaagaatatgggtgtgaacgtgggagctcacgaaggaagggtttatgacctcttttgccttgttcatgtgcttgtctcctcactaggtcatttggatcattctttaccactgccatcccattatgactgatgggtgtacagctccccaagtgctcccctatcccagtccaaaggaccctcttgattacaagcacaggaactttgatcgttgggggaaccccccagccccccctgggaactttggaagaccccgtgtttccccgggacccgcggaatccagtgtgttggggcatccagtgttttcctggcaagggtttgtgaccctgaaaactttttaaaaacccaccccacctttgggggaaggcatttcctgaatttatcccatcacccaaccattttctttcttgggataccattcaagttaacagctatttattttggccaagtggggagctgttcattttaattttggatggcacctctggggatttcaggatggaaacattaaattgtcttcctcgattctccgatcggggtgtagagtttttaaactatcaatggcatttcaaagtcttctgaaaacagcgatggctgtatgtgcggtggtccatagcacaagtacatgcagcattctaataacaggtttccattgtagaatgttttgcacatacttgaataaatcaaatctttaattgagaaaaaaaaaaaaaa

SEQ ID NO: 147518 - DNA, 936 bp, Homo sapiens
gtccatcttgctgctgtccactttgggttccatcttgggctccatcttgctctcacgattaaaagcttctttcctgctttccccattccgaccatcatttgcaccccggttctccccatgccggcctgcgcttcctccatgtctgttctccccgtgccgatggccatcagtatgacggctgctgctttctggatggcggtatccatctccatggcgaccaccatctccgtgacgtggactatcgctatgccgattgccagtctctccgtgactgtgacggctgctgccccggttctcagtatatctctctcttttcccgttgctgcccccagtcccttctcggctgttattccctgaagctgtgttgttgactccttgggctccggcagacgggtaggtcacaggggcaccactgatgttgccagtattgccaaagcctgggatgcccttggcggcactggtgacggggctgtcaggactgttatggccctgttgtgctgagttagttggaacagaattcaagctccctgcactagtccacctgccccactgcttcttcgcttctctcttggaaagtccagtctctcctcggcttgcaatggaacccaactgctcctgcgccgctggtgtctcctgcacctgcgctggttcctgcaagtgcaaagagtgcaaatgcacctcctgcaagaagagtgagtgctgctgctcctgctgccccgtgggttgttagcaagtgtgcccaggggttgtgtttgcaaaggggcgtcagagaagtgcagctgctgcgactgatgccaggacaacctttctcccagatgtaaacagagagacatgtacaaacccggaccttttatttataccaacttgaccctgatctacattccttatcctgtgaaatatgtgagtgataattaaacactttagacctgaaaaaaa

SEQ ID NO: 147519 - DNA, 1400 bp, Homo sapiens
cacctgccccactgcttcttcgcttctctcttggaaagtccagtctctcctcggcttgcaatggaccccaactgctcctgcgccgctggtaaggaacgccgggttccgtgcctggggatgctcgattcccagacaccatagagagtgttcctgggtttgagaaggtcgtattttgagatctcaactgtaggggactccttgacttagtccagtgctttcctcttggccaagatcctgagagcatttccttcctctctgtgcctctgtgtcagcgttgagggtactgaggctcaaggctgtcctgctccacgtcatgcggtttgtcccaggggctgttggctgagccccagtgctctgaccagggtttgagcagcaggattagatagggaggcaggggacattgcctctttcggggttcaggacagaaagtcgaagtcgccgtcttcccaggctgtgcctggagcctgggactttccttttggagtgcaaacaggaggctgcttggcctttcccagcattgaagggagaggacatggggcttctgttcctctgtcctgagtgggaaaggagctctgagggctggccctgcacagaggagggggcactgtagactcactgacccactgctgtacctcctgcaggtcactcgccgctcactggcttttttttctctttctcgcaggtgtctcctgcacctgcgctggttcctgcaagtgcaaagagtgcaaatgcacctcctgcaagaagagtgagtgtgaggccatctccaggaatctggggctgtggctcaggttgggagggaactcaaggctggccctgagtgcatccttctggggaactgggctttctttgccctcattgccccgtgtcattccctctccaggctttctgccctaaattcagatggggcaggacagcatttttcttcgtggggacacaaaccccaactgtaaccccctatgggtttcagaacagagctgtgccagacgaaaaaaagcatcctctgggtctggggttctgagctcgagccagggtttgctattaggggcaggggaggtgcccggtcaagtctactgccacctctcactctccccttcttccccaggctgctgttcctgctgcccgtgtgggctgtgccaaagtgtgcccagggctggcatctgcaaaggggcatcggagaagtgcagctgctgcgcctggatgtcgggacagccctgctcccaacgtacaaatagagttgacccgtaaaatccagggatttttttgttttttgctaacaatctttgaacccctttggctaacattcctttttttcttgtggaaatatgtgaataataatttaaacatttaggatttgaaaaaaaaaagtcgacgcggccgcaatttagtagtagtagtcg

SEQ ID NO: 147520 - DNA, 184 bp, Homo sapiens
ggatccctttgctattcaccgtcagcatatgagccgtatgttgtcaggtggctttggatatagccccttcctcagcatcacagatggcaacatgccagggaccaggcctgccagccgccggatgcagcagtcgggtggtttcatggacatgtttgggatgatgaatgacatgattggaaacatg

SEQ ID NO: 147521 - DNA, 462 bp, Homo sapiens
tcaagcaacaccatgaatggttggttctggattgacaaatgttctctgtggctctcccagtccctcccttacactcgagctactcaggttactattaaaatcccaccaaaccctgccactggcgtccgtcgggctttgtggattgattcagatttaaggtgcgcccctctaggccttagcactggaggtggaaagagcagaagaataaaacttggtcttggggtccccaaattcagagggagtgaccgcaacagagtgctgattggtgcattttacaatcctcttgctggctacagagcactgattggtgcattttacaatcctcttcctcctcacctgctgctacagctgctgctgtctgtggtgctgcttcaaccgctgctgtgctgcgggaaatgtaagctcaaggcccctgaaggcgaagaaacagagttctacgtgtcccccaaggctgcagtctga

SEQ ID NO: 147522 - DNA, 1420 bp, Homo sapiens
ggtcgacgatttcgtggggggcgtacggaggtggcagctgtgggaggaggcggcgtggaaggccgaggagctcaagcccggaccaatccccacgttccgggccgcgaccctgaccctgcagcgtaccgggaagcgaaaccggccggatgggccgctgagcccgaatcgggcactgtgtggagccccctggagctgagatcaggatgttccgcttcatgagggacgtggagcctgaggatcccatgttcctgatgtgagtattccctccccctcaagctctcccactccaggtctctgagcagttcaggcagacatcggggttcccattgctaggaatggttggaactggctggatacctagctcctacctagcaggaagtaggcatcggtgccactgttgctctgtgcgtatttttttgcagggtggtggagggattgacagtttggcgcttctgccatccatactatgtgctcactccacagggatccctttgctattcaccgtcagcatatgagccgtatgttgtcaggtggctttggatatagccccttcctcagcatcacagatggcaacatgccagggaccaggctggttggtgacgctttgcctggccttggataagaactcttgttttcaaattcccttgaggtctcttccaagaatcttttgcattttttctgataaatcaatcataaggaagtttctgaaattctctttcagaccctacaacccacaagttactgcaaagctggggcttctaccagaagtgagtgatttgaaattgaaaacagatttcggatctcacctgagtagctcgagtgtaagggagggactgggagagccacagagaacatttgtcaatccagaaccaaccattcatggtgttgcttgactggagggcagggaaggaaaggactagaagcaaggcgaaagcagatctttctgtagatacacacatataagtcttggatttgcattttagggtgaattgtaattagcttgagatgaccagggggcccacccaatgcaagcaactctggggaaaaacactttgtctacatctttaagtttcttttgtctattaaaatgttcaaggtttggaacttaacactacatgattctctcgggaactcaccagttctaaaatttccactccttcttttcacagggcagtgtaactttaactccctgtttcaactttgggtgtaaaatacaggctcacaagcacttttgctttgcagcggaagctaggaagaccctgctgtggaattttgcagaggggctgagcagtggtgggaaggaccagcggcccatgtaccatgttgggcccctgcattccaaggtgtctgcctagaaataaatgataggttatttaacatacttgtaacttccaacgacaacacttcaagactgcagatg

SEQ ID NO: 147523 - DNA, 990 bp, Homo sapiens
gttcgggctccgttggccgaggggggccgtacggaggtggcagctgtgggaggaggcggcgtggaaggccgagggagctcaagcccggaccaatccccacgtttcctgggccgcgaccgtgacgcgctgcagcgtacccgggaagcgaaacccggccggatgggccgctgagcccgaatcgggcactgtgtggagcccccctggagctgagatcaggatgttccgcttcatgagggacgtggagcctgaggatcccatgttcctgattggatccctttgctattcacccgtcagcatattgagccgtatgtttttcaggtggcttttggatattagcccctttcctcagcatcacagattggcaacattgccaggggaccaggccttgccagccgccggattgcagcaggctgggagctgttctcccctttttgggattgcttgggaattttcgggtggttttcatgggacatgttttggggattgatggaatgacatgatttgggaaacatggaacacatgacagctggaggcaattgccagaccttctcatcttccactgtcatctcctactccaatacgggtgatggtgcccccaaggtctaccaagagacatcagagatgcgctcggcaccaggcgggatccgggagacacggaggactgttcgggattcagacagtggactggaacagatgtccattgggcatcacatccgggacagggctcacatcctccagcgctcccgaaaccatcgcacgggggaccaggaggagcggcaggactatatcaacctggatgagagtgaggccgcagcgtttgatgacgagtggcggcgggagacctcccgattccggcagcagcgtcccctggagtttcggcggcttgagtcctcaggggctgggggacgaagggcggaggggcctccccgcctggccatccagggacctgaggactccccttcccgacagtcccgccgctatgactggtga

SEQ ID NO: 147524 - DNA, 437 bp, Homo sapiens
tttttttttaaatgtgtatatatgttatgcccttacgtgtatggaacgctccttgagaatggggactgttagtgtcttacatagatagtagcttgtgcatgaaaggcattcagtacatgattaaagattatgatgactgattttccaccacagaagccaaatggcacactgagtcataaaagtggtaggaggcgttggggtcagactatcttcaagtctggagatagctgggaagagttggaggactatgatttcggagcctcccattccaagaagccaagcatgggtgtttttaaagaaaaaaggaaaaaagattctccatttcggtaagatttcaaattcctcagaaaaatatttttgccatgcattaactttattttactcattaaatataaatgcatgtagaccctaaaagaagaaaagtttgcttaacaggc

SEQ ID NO: 147525 - DNA, 534 bp, Homo sapiens
ttttttttttttttttttcagggcccatacatagttttattggaacagtcacactcgtttattgattggctgtggctgctttcattctacaaaggcagaggtgaacagctgggacacagatggcctgagaagcctaaaatattcactatctggccctttacagaacaagtttgcagacttccagcttaatgtgtcaaagatttttacaaagtccaattacacaaagccaccactagtgggaggataaattggtgcatcctcttctgaaggcaatcacaattttaaatgctgagatgctctgactcagcatttaggaatgtaacctacagattcctttgcacatgttcacggggatttccatgaggatatttcttggtacaccatcctttgtaatatcaaaggcctcaggggatctgcccacctcagcctcccaaagtgttggggatcacaagcatgagccaccgctcccggctatcaaaggcattaaacaagacatatttctatcagtaggggaatagtaaactaaatagtaac

SEQ ID NO: 147526 - DNA, 501 bp, Homo sapiens
cagtcaggatatattccttcctttctcaaaaaagaagtgcagtcagctggccagaggatccacttagcacctctcaatgcaacggcttcagaatatacctggaacacaaaaactggtcgggggcagttttcaggacgtacttataatcctacagcaaaaaacctaaatattgtgaaccgtgcacagcccattccctcagtgcacgggaggacagactgggtggccaagtatggaggccaccggtaggagtctatggtgtgaaaccctacagcattgctccgtagagtacgtgcaagttccttgaccctgggaaatgtctacaaatgtctatttctactgagttctggaagaaatatgcaaaagtgggtacttggaagggcaaaaatcatcccctattttacttatttccaagaaatgcattttcttagcatcattgcccacagtgttgatatatgggtaggatgttacaaagtattgaataaactatttgccaaagtaaaa

SEQ ID NO: 147527 - DNA, 550 bp, Homo sapiens
agaaataaatttatctttaacatagagaatatcaaagttatgccacttgattttagtggacggcttgtgttttgatcttgaccagtacagttcccatgaattcaaggtgacaatcaagcccaatggcttgatgacttcaatagtaaccaagtcaaggttctcttggctggacatcattaagaaagttctggaaactgtgtttgtttgatgctggttcattggacttttcaaattgttttgtttctgtgtccctaccagacacaaagatgaaagtgtgccagcttggttcccccaagccagctcatgctgctgaccactgactcagctctgaccttcacatttgctctgaagcaagtgcgttcagctgctggggcagtgatatcacatagtacatatattatttccttagtttatttccaaactggtattttaaatagacacttcgaactttgggctactctgtttaaaatgtgccactttctggactgggaccttagtactgtaaattctttttaaagaataataatggttacccactgctgagaatttt

SEQ ID NO: 147528 - DNA, 2313 bp, Homo sapiens
atgggggagaagaggaagaaggagaagccctctccaactgcagcgacctgtggctcttcagatgcagcagaagggcactactggtccctggtccagctcagccctattgccacgggtccaaggcttcgtcagctggttgaaatgctgaaatgggatttgcctttgggccacctttgcctttcaggagatgaaacacacaagacgccggagcttcacaagggagcgaacgaggacgctcaggtgaaagtggaattccgcacacccccgtcccccccaacggcgccggactcccggcgcccggggacgccccctccttccaccacgcggtccctggagccttttaagagccctggtttgcagagtcggatcagaaagtgtgtgacgaaaactgtcccttttctgcaagcttggaatgaagttgccaaaatagccactcgcaaagagactgtgcacgcaggcttgggtcgaaagtcatcagtgactgaatgctctattgtgctgatagtgctggtgcagcttcagggtgtttataagaatggaagtgttgtttccttgcccgattccttcatgctatatctcatgaacctctgtaatcttgggggagagactatatttaatgatgacaaacctgtcaccagtgtagcaacaacagtggacatgaaaccagaaaacttgctttgtatgggtccagagcttgtgaaaattgctgattttggacttgcaagagaattaaggtcacagccaccatacactgattatgtatctaccagatggtatcgtgcccctgaagttttactgagatcttcagtttatagttctcccattgatgtgtgggctgttggaagtatcatggctgaactctatatgttaaggccacttttcccagggacaagtgaggtcgatgaaatctttaaaatttgccaagttttagggactcccaaaaaaagtgactggccagaaggataccagctggcatcctctatgaacttccgttttccccagtgtgttcctataaacttaaaaactcttattcccaatgccagtaatgaagctattcagctcatgaccgaaatgttgaattgggatccaaagaaacgaccgacagcaagccaggcattgaaacacccatattttcaagttggtcaggtattaggcccttcgtcaaatcatctggaatcaaaacagtctttaaataagcagctgcaaccattagaatcaaagccatctttagttgaggtagagcctaagcctctgccggatataatcgatcaggttgttggacaaccccagccaaaaactagccagcagccactgcagcccattcagccgccacagaacctgagcgtccagcaacctccaaagcaacagagtcaggagaaaccgccacaaacgctattcccgagcatcgtcaaaaacatgccaactaagccaaatggcacactgagtcataaaagtggtaggaggcgttggggtcagactatcttcaagtctggagatagctgggaagagttggaggactatgatttcggagcctcccattccaagaagccaagcatgggtgtttttaaagaaaaaaggaaaaaagattctccatttcggcttccagagccagtaccctcaggctccaaccactcgacaggggaaaacaagagcttacctgctgttacttccctaaaatctgattccgaattgtcaactgctccaacctctaaacagtactacttgaaacaatcaagatatcttccaggtgtgaatcccaagaaggtgtccttgatagccagtggaaaggaaataaacccccacacttggagcaaccagttattccccaagtcactgggacccgttggggcagaacttgctttcaaaaggagcaatgcagaagaaagcataattaaaccaatcgaaaaactatcatgcaatgaaacttttcctgaaaaattagaggacccacaagatttttctacagatggtgataggaggaaagaatatacctggaacacaaaaactggtcgggggcagttttcaggacgtacttataatcctacagcaaaaaacctaaatattgtgaaccgtgcacagcccattccctcagtgcatgggaggacagactgggtggccaagtatggaggccaccgacacaaagatgaagtgtgccagctggttcccccaagccagctcatgctgctgaccactgactcagctctgaccttcacatttgctctgaagcaaaacaagtttgcagacttccagcttaatgtgtcaaagatttttacaaagtccaattacacaaagccaccactagtgggaggataa

SEQ ID NO: 147529 - DNA, 1652 bp, Homo sapiens
  misc_feature (1)...(1652): n = a,t,c or g
gcggccgccaattttttttttttttttttttttcggttaaaaaggcccaaaactttatgggggtttttagggaaatataagatgcatgtaaacataaaatacaaaacaaaacccaaatccttacagtctagaagcatgccaagacagagcattttctgcagaccaaagagtcccgtcaaagtgataaaggacacctgggaaagtggcaggcccttggggctgggtcccttccccgaagggcactgcatttttgtgatgagattaaaaacaaaccaactccactattaaaaatgctaggaaacatgggagatagtttaggcaccaccattggattctgggaaatattttcaggcacttcaaatcggactggcactgaggtttaatggtcctttcctccagttttctctggctgagggagggaaagaagggaaacctggggaggaaggggctccctccctgacccccacagaggcccacttaaggagctgggagggggaattccatggaggaattctcccaagggtctgggagctccagagacatccaccagtccccacccagccatgcagtccacatggctcacgccttcagggattaactgaaagtcctgccttgccccgggagtcacttccctgcaagacctctgaagtaccctggtggggaaaccccatttccccatcctgtgtccttggatttaaagaaaacctgttgcaagataatggagttgtaaattcaaaggaggtggctgttttgctgttcttttctctgcagtaaactcttatggggagtgtgccttggttatatanggcaacgcaaaaatggtagggtatatccatggatgaatgttcatcacacccaatcctaattcatacccaggtggcaaggctcagcaaactgaacccaccacaggtgttcagagatacttgagaatgactggtaccaaacaagacggacaaaggaggttgccttcctcccagatgtgcccccaatggagtctgaaactctggttctaaatttgtggaggtgggtcccctactgtatgaacccattgtggtcaactgctctttggggccatacaacttgagagactggctttggattggacagtcgaaagggaagtgggcaaaaccagctgagaacccggggagctggatgcatatattctggaatcagggcctgcaaactcaaagattggtttgtggctggtgacttcatctctgctaaagtaaatcaatgaccattcaattgagaactgatggggacccagcgtgtggcccaatgagtggcagttttttcatagccagcttcttgtggccaaatttgggagggattttccaacctgctatgggtggaccctgggttgttaaatcactaaattccctttctacctgctctcttcttcctgaaacactcagagctgacttcttccttctttctaatcaacaaagacaaaactccaagccccttttcagccttcacacaatttttctttctagaagacatccgcttctggaagcctccttccctaatgaagggacagtaggccccagctaccccaaacatgcacatgctcttctcaccaacgtgcctctcacttgcctctaacgtgctcgagccatccttttgttctaaataatcctcatgccgaaatc

SEQ ID NO: 147530 - DNA, 603 bp, Homo sapiens
aaccacaacactactgcatggggatctaacacatcagaacagactcgcctaccaccttgtttcaaaggcttttagggaatctaagtggattcccctttacccatgcatttatttatcacttcgggaacctatacaagtaatcgtgcaggccttccagaagcctctttccaaacaggttctgctcactggggtgctggggaatcccactggcttggcaggggcaggggcgaactcgcctgtgtctcccggggtcctccagggagtggcgggggagggacactccgaaagcctcctgcccccagaccatggccgttcccaagtattccccaggtctcagccctcactcatcagcttagtgagatgcaaatctaaccctctccccataatctctaagcatctttttaccttttcaaggaaggatcaccggaacccatgacccagctgatctatcagatctcgaacatctgcactgagcccccctcccctttcattatagtaagaagagcattagactaggagtcaggagacccaagttccagctctccggttactggctataagagatggtcctccgtcccctctgtgcactcagacggggcagct

SEQ ID NO: 147531 - DNA, 681 bp, Homo sapiens
tttcgtgggagagaggcggtggcgacaccatgtcatctcccagtccgggctataggcggatggacacggacgtggtcaagctgtatccttcgtggaggggaattcgggctgtgtgtggggggcggtgtggggatgcccagggcacccccggaaccactgcaagggccctggggcactccaggccactgtccgagactcccctcctcccccagtgcctacggcggctccttggcacctcccaggggccgagagccttttcagctcgccttttctccgcagcaccccgaaatacgcgttgctgctcgctcttcctgtatccccagagcctgtgactttcctccgcgacgttttggactcccgagacggccttttttctttttgcacgaccagtcgcctcactctctaccaccgagcccatttttaagggtttctctctcctgtttgctcgctttggatttagggaatcaaggcagaaattccgagaggaaagccttttctccgtttcttgagatgcccccatttcctccaaccacaatgctgcttgaactggggtcactcaagcgacctcttttatccctaattcctttctatattaggaagagagtctcctgctcagggccccctcttctaagaaagagctctgtgtgttttcaatcagtccctcctgttaagctttctggg

SEQ ID NO: 147532 - DNA, 1953 bp, Homo sapiens
ggtaggtgaagatgaaatctgcaacctttctaagcacaatacacacacacacacaccaaaaaaataacccccccagaaacacaaccctcatatttaaagctcttaagttcagggtagcggtctcaaactgccaaacactaggatgaggatgtgactctgcatgtgttttggatgagaggaagcatcgtcccagtcacttttctcctcctgtgctgtcctttcaaaaacaggtctggatttcacgctctaccccaagaaaaagaactggttcagaaaacacttccccaagtttctccaacagaacactgtggctgcagggcctggtagtgtgaagggcagcaactgacatataaaaatgtacttaaaatcagagtcaaaaaatggttttaagttttaatactcttaattagctccctgctttatactgtaactccacagaagacatagggccacctaggattcacaggaaggagcagctctgattcttacatggctggctccgatgcccccacagcaggcctcttcctccccaagtttttcctctccatttcaaaaaagcactattttatcttcacatccaagagctggttggtttggtttgtttctttggaaaccaataaaagaagcaattttttcctgttctttttactcacatctacctatcagagcggctatttccttcgacagttcagtagcacacaggctgacttggccacatggactcatgaatgcatgcattcagaccgcatattgctaccaaatggaatgtgggaatatgctatgcacctcaggttgagaaatgaccaagaaatcaagatctaaagggtgatatataatatatatatatcaatgctattattcataaaaaccttgtttagtaataaaaaaaattgcctttggtttaaatatggaatattaatagtcttgcttcttcatggttaggaaataatagtctttctgaaaagcaggtgcttttttctactacaactccataatcctgggcctcatcttcggaaaagtcagacatagagctctccgatgagctgtccccggtaccctctacatgttctttcaggggcctcatacggtggcgtatttctggatgtactctttaattttctgccttgtattattctgtcggttggaggttacatggctgcagcgtcaccattgcgagctatctacggggttggcacagccgcaataactgacgtcagtaaggactccaaatataattggtaagatcaatagagagctgtcccaagtttggatttaattaacatcctagacacacagttccctgacgctttcatcaatgttggggatggaaaaatttaattcatgaatccttatagatggagattttgaaagggtatttatcaaggtaggtcccactctaactttccatactccgccttcatatgggtgttccttgtggtccataaaacttcactacaaattcattaagtcctcccaggatcgtaacctcatgtttactctcgatgagcttgaccacgtccgtgtccatccgcctcttgcccggactgggagatgacatggtgtcgccgccgcctctctcccttcctctgccggccgtctgtcacgggcccggggccccggctctgaggagcccgcggccgcgccggctcctcggtggaggtggcaacacccccgcggtcccggcggtcccgtcagccgccgccgccgccccccgcacgggggaacaccgggcactgtccggcggggtgggggtggggaccctgcggcgcccggctcgggctgcccctctccggctgtggttccgccgcggccctgccccggcgctcctctgcgccgcgcgacgctccctcctgcctgctgtggctcgctcgcctgctccccactcaccctctgaccggctcctagcagcctccactataagcggacgactcctgctcagtcggcctccctacc

SEQ ID NO: 147533 - DNA, 376 bp, Homo sapiens
  misc_feature (1)...(376): n = a,t,c or g
ttttttcatttatgaaacatttattgaattagacattctactaaccatttatttttacaaacagttaactaaacatcactggttttctttgataaatggtaatcttgcaaaggctcatttatagatacatcattatttcatgctgtataaaatnnnnnnnnnnnnnnnnnnnnnnnnnnnnnnnnnnnnnnnnnnnnnnnnnnnnnnnnnnttagcaagttaaggttaataagtacctgccccataggagagtggagtaaataaaacgatgtcactaaaggtgccatcttaataaaagctcaagaccagcagctggtgtaaacagtgctggcagtggaattcctgctcccaccccactgcagctgtccagggcgct

SEQ ID NO: 147534 - DNA, 854 bp, Homo sapiens
  misc_feature (1)...(854): n = a,t,c or g
ttaggaacttttctattttgtntatctaaaagacattcagatttttcaaggagtaaatgtttgcagaaaatatntggggtttatgttatagcagatttaggatatagatatatgaggagtttaggagtagaggtttaataggtagaagagaagcgacagagaaacagctttttctatagatgtctgtactgatatgtggttttaaggtatggtctatgatgtgttttgcagtggaacagattggttggtggtgaatgtgctaaattttatagtttggtttgagcaggtggtttctgattggttgtatcatgtatgacgtttggcaaagtgccatgtgggaaaggctggtcgcccccacccctaatccttatgcaaaatgggcctttccccagttgaattggggtccccatcttgtgtaaacacgtgggcctggccagaagaaggggaaagatggaagcccacccatcttgaaaaatgtcccaagtcccctaagtttcctgctggcattccacccccatggcaagctgcccagccttgtcctatgtcctgcagcctcaactttaacaggcctgcctctttgttagcaaatgatttggagccttcttttccattaaagaaaaaagcccttaccgaggactcccatacccttgctttctgccttaagtgatttcttcttaactcctatgtcaattttatacagcatgaaataatgatgtatctataaatgagcctttgcaagattaccatttatcaaagaaaaccagtgatgtttagttaactgtttgtaaaaataaatggttagtagaatgtctaattcaataaatgtttcataaatgaaaaaaaaaaaaaaaaaa

SEQ ID NO: 147535 - DNA, 1393 bp, Homo sapiens
ccagcccttgactctgagacacatttgaattttttctttcccatcaaatggcattaacaagattgggcaaagatgagtccctcaaatttctgtgttttttgtttgtttgtttgtttgttttttctttgggaactgaaagtcagaggcacgaacactaactcttagcatttttctgtagactttttcttctggcccttgtccctgccagcaaaacgccccttttctgatcattcgtgcgcagagggcctcccagtaatgccacgctctccatgctagagagccttctctttcctctgttgtttgaactgatgttctgtgtcttcacaccctggcatgacagttacgtgtggtcagcccgctccccaggcccgtccctgccgccgccaggagtgggctctaggcaggccgacaaggatacacctcccagagcttgtgatcttcattttctgacagccaaagtgtgaaggaacccagacttccccgagccacggtgttcagtcagcccacaggaatatgcaagacccatctccaaaagtttgtctttgattttttccaagcccttagccccataagctttgaatcctgtagttacagtggcataaaggactgacaaaacctggataaggaaaaaccttttttttctatgaattttttttgttttttaggggaaagggattctaagaatgtccatttaatgtactttgcatcatgtctcctagaaatacctttgtccatagtggtggtggagtctctctctctctctctctttttgtttgcttctgttttctttcttgtcttcattctttcttttcttttttatttctggtagcaggcctccatagaacaaatctaaaacacaaacccaccatagtaatggtaaggagagcttccagtggcacctcaaaacccacccttcgagatctgtcccaaagacagtctcagaaagctgcactgcccaccggctcagctttcattcaaaaaggcttccaaggccaattctgtcttgaagtcaatgcatgtatttactgtttgacagtaaacccgctctgccttctccacgtccaaggctgtgcattcgtctaattaggcgtcgtgtatgttttccttttattttttccaataaaaaagcagtgggggatggaaaattggctttggatatatagggcagggtaacattgaagctattccatagcacttaactgtagtgaatactgtgtcaccaattttgaaatcaatttaatgtttaatgcaaatccattacatggtgctattataggctgacaaaatgatttacacaaatgtgacaacttgggctcaattcactctgctttccaacagtgtaaatgcatagcagtgtttatctgcatgagaactatgcactaatctatctgaa

SEQ ID NO: 147536 - DNA, 1189 bp, Homo sapiens
cgctatgagagtagcggcgagcggctggcttgtcccgcccctgcccctgagagacagaaccgtggacagcaacatttcccacaggacacgaagtttgtcggcccttgccttggcagagctgagtaagaaaaatcaccaagaatattatttttggtatttggaattgaatttgccaggaatgcaagcactgctacctaactaaagaccttggctttggaaacatcttaccccttgggcagctcctcccagagtttagacttggcagcatcaaagacacaaccgcaagccaggcattttggagatcaaagatgggtagaaaagatgctgctactataaaacttcctgttgatcagtacagaaaacaaattggtaaacaggattataaaaaaactaaacctattttacgagcaaccaaattaaaagcagaagcaaagaaaacagcaataggcataaaggaagttggccttgtacttgcagctatattggcactactactggctttctatgctttcttttatctcagactcaccacggatgttgaccctgatctggaccaagatgaagattagctaagcaacaatcaatgcatgaaagagaaataactttacggaaagcaccttttgggaccaaaactttcaatactgaaactgtaacatctttaattctttctgctaatattttcagtttgcagacatatgatttttgatagttgcataggatgtcaggaaaagaaccttacctagcaatgcagtatagtatgtgctactggatacttttatatatctttctgctttgacagccaccctatacatggtacatttagatgaaatgggaaccaggatcctaaatttttcaaatgtcattgccgaatttatgtgtataattcccatcacttcctgatgagtaagtcctatttttggttcctatatacatccataagttagtatatattccttatttacagaaacatgcctcaaatcacattcagaaagaacaaaaagtcatgggaaattttttattttacaacaaagccctgctttctttctggacgtattttacatcattagagagactatctgcacatacatctaccataatctttttccttctttgccaactgttcagtgcacatgtgctgcatcagaaatggcacctggatgacagaagctcaaagagtcacatatgtctc

SEQ ID NO: 147537 - DNA, 1254 bp, Homo sapiens
ttagaacagtgcctggtacacagttggtattacagagttctcctcaccatcattgatcctcccagccaaggactctgcactgaagccagcaaagatgactgtgtggacagctccgatcctggcacaggccagcattgctgccacagccaatggggacacgggcatgtagatggcaacacggtccccacggtggactccatgcctcttcagcgtgttggccaggcggcacgtggtctccagtagttccggctgggcttccacagatggcaccgtactcccgggcataaggccacgggctgagagcacgcccacagactctccatggcagcccttgtccccaggccaccgcacgtggccttgcagctcatccctgttcaaaggcactaccccagggatgctggaatctgcaccaggcagaataccccttgaacattcgagggcacagtacctgtaggtgatcctcacttccgttccaggctcatcgcgctcccagatcaaagcaacgctctcgggggacttccgaacatgctggtccaagcagttgacctctggttctgcatttacaacttcctgacatcttgagttgatatgccacagggcaaaaagagctgcagagccttccttcccgtccacaggccccaggccccaggcccgcagcgaagaaataactggttccagctgccacgccgagtttcctcctccccaggtcgcccgccacagctctgtttgtttacgtgggcagggcttgtccccaggctgatccccgggcaccgcagcccgcagtgacaaccgccaccgctttgtttttccctccaccccggtatgggaacgggaaagtcccgactccggggcgctcgggtgtagcccgcggctccccgccggctcttgctcagcggcgctatgcacccggtaacgcaactcagagacatttaactggcctcccaggaaccagccgatcttgccagtgctgaagtcgcagtcccagacggtgtggtagggggtgtcccacacgagagtgtcccgcgccagaggcccccagaaggcggccggctcccgggctgcctgtgcactcagcgcgggatacgagcctggctgtgctgctgctgctgcaactgcgggagcgctgcccgagggtcccgaggccgccctgcgcggcgcgctcaccccgcacggcggccgcgcgggctgccccgagagccctcgcaggctgcccagcagcctcccgacgccgcggcccagggtgcgcgccgccat

SEQ ID NO: 147538 - DNA, 1373 bp, Homo sapiens
gaaatgaggaaatgcttgtaaggcactcagcgactttcttaacacattatacatccccagtcactgactatttgttatttattaatgaagcatgtggggaggctgtgaccttgtgcttggccttcggcagtgctgctgagagagctgagcttcatctgaactggaccacatgggcttgcatctgatcagcctgggataggtggggaataggcttcggagagcatgcaggtggctgaggttgctttcaaagctccacagtatcctgcccatcccacaactccaatagccagttgaggttatggtgtctgagactcactgggcagggtagacagagtgtctgtgcccttctgtgacttgcttctattgtgtaaaactgccttgcaaaaggttctttggagagccaggttctaaaagggattctttcccacctgtgaaatttggctctgtcctttgtagggctctgcagctctttttgccctgtggcatatcaactcaagatgtcaggaagttgtaaatgcagaaccagagggtaatgacatgtgttgctttcaaaacacacagctaagctctatttttaaaaccccaattttaagtgatgtttttcagtgtgtgtactcttaagcaagagtggtaaaatcctcttttgttaaccaagcattgagcactgggaaatttcttggatgccttttggagattaattgcaggaacagaggcccttttgctgtagttcctctgtgtttgctgtagtttcctctctgtggcatgcctctaatcgttcagaaggcaggacactgacagcggcaagacgctgtgcgcctgtgcttcattttcctcctagtgattccagtgattaaagtaacttttctaaggtttttcagggaactctacatgaaaaaggaacccctaatcttaggaggagggatcctcccgaggaatcccaagtcctcccccagctgtcaggggcacgacttactttaaataacagatgctttgggaaaattgtccaaaacaatttttgtgactgacgtaatatctcaaagccctgcccagggaagattgctattaaaagaaagtccattgtgggccaggcgccgtggctcatgcctggaatcccagtactttgggaggctgaggtgggcagatcgcttgagccccaggagtttgagaccagcctggcaacgtagtgagaaccccatctcaaaaaaaaaaaaaaaattagccgagcgtggtggtgcatacctgtagtcccagttacttggaaggctgaggtgggaggatcccttgagcccaggaggtggaggttgcagtgagctgagatcacgccagcgcactctagcctgggcaatggattaacccttctcaaaaaaaaaaaa

SEQ ID NO: 147539 - DNA, 475 bp, Homo sapiens
  misc_feature (1)...(475): n = a,t,c or g
aacagccatggctacgatgtcaccaaggtctttgggagcaagttcacacagatctcacccgtctggctgcagctgaagagacgtggccgtgagatgtttgaggtcacgggcctccacgacgtgaccaagggtggatgcgagctgtcaggaagcatgccaaggnctgcacatagtnctcggctcctgtttgaggactggacttacgatgatttccggaacgtcttagacagtgaggatgagatagaggagctgagcaagaccgtggtccaggtggcaaagaaccagcatttcgatggcttcgtggtggaggtctggaaccagctgctaaccagaagcgcgtgaccgaccagctgggcatgttcacgcacaaggagtttgagcagctggcccccgtgctggatggtttcagcctcatgacctacgactactctacagcgcatcagcctggccctaatgcacccctgtcctgggttng

SEQ ID NO: 147540 - DNA, 1524 bp, Homo sapiens
attcccgggtcgacgatttcgtggccgtccggcctccctgacatgcagatttccacccagaagacagagaaggagccagtggtcatggaatgggctggggtcaaagactgggtgcctggggagctgaggcagccaccgtttcagcctggccagccctctggaccccgaggttggaccctactgtgatttcacctaccatgcgtacactcttcaacctcctctggcttgccctgggcctgcagccctgttcacactaccctgtcaaagtcagatgccaaaaaaagccgcctcaaagacgctgctggagaagagtcagttttcagataagccggtgcaagaccggggttttggttgtgacggacctcaaagctgagagtgtggttctttgagcattcgcagctacttcttcgggcaaaggcccggggacagacactttgctggggatgtactggggctatgtcactccatggaacagccatggctaacggatgtcaccaaggtctttgggagcaagttcacacagatctcaccccgtctggctgcaacctgaagagacgtggccgtgagatgttttgaggtcacgggcctccacgacgtggaccaagggtggatgcgagctgtcaggaagcatgccaagggcctgcacatagtgcctcggctcctgtttgaggactggacttacgatgatttccggaacgtcttagacagtgaggatgagatagaggagctgagcaagaccgtggtccaaggtggcaaagaaccagcatttcgatggcttcgtggtggaggtctggaaccagctgctaagccaagaagcgcgttggggctcatccacatgctcacccactttggccgaggctctgcaccaggcccggctgctgggcctcctgggtcatcccgcctgccatcacccccgggaccgaccagctgggcatgttcacgcacaaggagttttgagcagctggcccccgtgcttggatggttttcagccttcattgaccttacggattacttttacagcgcattcagcctggccctaattgcacccctgtcctgggttcgagcctgcgtcccaggtcctggacccgaaagtccaaagtggcgaagcaaaatcctcctggggctcaaacttcttatggtatgggactacgcgacctccaaggatgcccgtgaagcctgttgtcggggggcaggtacatccaagacactgaaggaccacagggccccgggatgggtgtgtgggacagcccaggtctcagggcccttcttcgagtacaagaagagccgcagtgggaggcacgttggtcttctacccaaccctgaagtccctgcaggtgcggctggagctggcccgggagctgggcgttggggtctctatctgggagctgggccagggcctggactacttctacgacctgctctaggtggccatttgcggcctccgcggtggacgtgttcttttctgagcacatggagtgagtgagacaggtgtgaaatgacaggcctggcactccgtttgctgtg

SEQ ID NO: 147541 - DNA, 539 bp, Homo sapiens
tattaattcctgtaaatacccataaattaggtaaaatacaaaaactccagcaacacatatgaaaaactgagtaagtttgttaaacttgctgagattcatgccaagtaccacaacgtcgtcaactgacttgatgtgtggtgacattgtttgggttttggatggcacagtgatagaaatatatttcctggaattgttgaacttgagatccattgttattttgctgcattcaatgctttcagagttatttttgttggtttcctggactgttatgttctgtatgtcttttgcttgctgtgtcaagtccatgccattatgccttgattaactgcgctccggaatcaatcatggccccaaggccggtatgtcacccggaagggtgacggcaagctgcgtggcgtctgagctagacgagaggcatctcacccctcccctggtccgtcgccatcacctcctcttcctcctcctcctcgcccactcctgcactttccaccgcggcggtcgcctccccggaaagcactctcaacatcccaacttgcaag

SEQ ID NO: 147542 - DNA, 594 bp, Homo sapiens
taaacacggaacgaggaaacagttaactgtaaatacagtctagaggtatccaggtgactgacagttctccagagaccccgagaacagcgtaaaagaccccttgaggtcacctcacccctgcgagtccacggattgggacctgagggagttctcgccagcccgagggcgaaaaacgggcgaggaaggaacagatgctcctccctggaaaccgcccggccggtttccgctctttcaaaaaagggaatcacccgtttcttccatcccgacctcatccattcctcgaacgctccttctggatgaggaagatgggcagtgtcaaggttttctggaggagaggagatctgggtcccaaacacaggaaaggccccgaaggcacgcgtaccccaaggccggtatgtcacccggaagggtgacggcagcctgcgtggcgtctgagctagacggagcatctccccctcccctggtccgtcgccatcacctcctcttcctcctcctcctcgcccactcctgcactttccaccgcggcggtcgccatccccggaaagcactctcaactccggcgcccgcaggccacacgaaatcgtcgacccggaa

SEQ ID NO: 147543 - DNA, 954 bp, Homo sapiens
tcaccacggatttcagcagaggacctgattgacttgtgtgagctcacagtgacaggccacttcaaaacacccagcaagaaaacaaagtccagtaaaccaaagctcctggtggttgacatccggaatagtgaagactttattcgtggtcacatttcaggaagcatcaacattccattcagtgctgccttcactgcagaaggggagcttacccagggcccttacactgctatgctccagaacttcaaagggaaggtcattgttcatcgtggggcatgtgggcaaaacacacagctgagttttgcagctcaccttgtgaaggatggaaatatccaaggaatctgtgtttttagatggtgggctttaattaaaataaaggccaacaggccttcctcaccatcccatctccttcaaatatggaaggaaccaaggagtgtggactggccaaaacttagtgtgggcatccagcacccaacagcacaggttcttcatatccacgcccactctcagacaaaactagatggtcccagattgttggcatttcccgtaaagtttggtccacgagacattttttaaaaatcctccataaccccacatgttccagttatcccatggcaagaaacttgactcctacatgtattgcctgaaagaattttcctaacagtgaaatcctggatccatatatttttacccacactgcccacatgaaagccccaagaaattccagcctgacaagaccagatttagccattatccaagaaatcccatttgccctgaaaaagctgtcctccattgtacttgaacagacagtcctgtcgattgtgttatttagaaacatacactgaatgtgggctgaaatcatcatctttccataatgaaaactgagaaactattcacaatgcattccttataaataaatgtctacatttagtaactcatttcacccaaacaagaaaa

SEQ ID NO: 147544 - DNA, 1882 bp, Homo sapiens
  misc_feature (1)...(1882): n = a,t,c or g
tttttttttttttttttaactttaatcgcattttatttaacccaacacatatatttcaacatgtaatcaggtatcaaatatttttgacatattttacattttgtgtgctgtcttagaaatctgctgtgtattttacacttacattnacccantttcttccaaaactctggggagggaactttangggttccatattttcaaatcgagtcctatgtgactagtgacttcggtactagtagtccaggggctagagggaaaatgttcatacggtaagtagtaacagaggttccaagttgggagggtagggggtcaaactaggaggggggtcttgaatgcccacttaaaggaaagtggggaaagccctttggaagggatttttgaggttggatttgttaaaggttaatcctaggtggggttaaccacaggattaaagagacccacccttaaatgcccactggtagccaacccttccccttccatttccattgaagggctgttcccactctgtcacagccttatcactggtggtgcagactgcttttcccaagcatgtacttttggacccttaccaaccggggtctgggtaggtagtgaggactgagccaatccaggccagccagtatgccagatggctttccctcttcagatggacacactccttaaggcatggctgggcactaaaaaaggtccttttgaccaatgttggtgaaagctgagattccagccagagtatcaaacagtgcggattgatgtgcccacaggtacaatgtcaaagtatgactcagaggacaaattatcatagatccttctaataatagcatgtcccccaacaactggaattccttaagtattcttcaaaattctgaggtaaaatcactctcgctttaaaagataccaacttcaccccttcctctcttccccaaactccctcctgctcccttaagggatccatgcccagctagcaggtaaaaccagagactgacttgctgacatcttcccttaccttattccctcagggtatacatcctaggccaggggaaaatttaccaggaatgcatccccagcctggattttgggaagaatgagaaagttatctgagggctccccaagggcctcctgtgccataccatctttatcttcccaacttagaacttaaccaaattccagtctttttgtgtaatgaaaaaaggataagctgggcacagtggctcacacctgtaatcccggcactttgggagaccgaggcgggaggactgcttgagcccaggaacaagaccagcctgggcaacatagcgagaccttgtctctatacaaaaataaagaagaaaaaaggatgcaggaaattgacaataggatagccaacaccctcactaaagcatcaatttccatatgatgttaagtaccaggtagaaatctctctgactttaaggagctttggacacaaaaacttttccttaaacaagccatttattttctaaacatggacttccactagttgtgtaactctcctagaattctagccaatatttaaataattgtgaccacacttttgtatttcaacttaagtattttatattattaaaaactaccaattatcttaacaaacctgcacatggagggagaggtatatgaaactcagccccactaactagavccaaaatcctcctcaatgacacttaaggttgtaatactaaaaagtcccaatcaccctccccaggattctattaaagcaagctgtggttaacagacaagatgcctttttcgtcatcattttcaaaagcattgtcactttttttccaagacacaacttctttgaacctgtttcataacctatcatataaataccagcctcaatactgctatcaagattaaacaatgaaca

SEQ ID NO: 147545 - DNA, 3589 bp, Homo sapiens
tttcgtgccaggaggcaggggaggctcggcgaccctgtcaggcgctgcgggacgccgaggactggggcggcgtgctggagatccgcggccaaccgtggggtgctgctgtcgggactcataggtgtcgtctcctggaagaggcctctctcccttgtgataacctttttcatgctgctttctgcagtgtgtgtaatgctgaatttggctggttcaattctctcttgtcagaatgctcagctagtcaactccctagaaggctgccagttgattaagtttgacagtgtggaggtgtgtgtctgctgtgagctgcagcaccagtcgtccggctgcagcaacctcggggagacgctgaagctgaacccgctgcaggagaactgcaacgctgtgaggctgaccttgaaggatctcctcttcagcgtgtgtgccctcaacgtcctgtccactatcgtgtgtgcgctggccacagccatgtgctgtatgcagatggtctcctccgatgtcctgcagatgttccttccgcagaggtcacatcctgccaaccccacctgcgtgactcctcacggcaccgttctccaccagaccctggatttcgacgagttcatccccccactcccgcctccaccctattaccccccagagtacacctgcacaccgtccactgaggcccagaggggcctccacctggactttgctccgtctccattcggcactttgtatgacgtggccatcaatagccccggcctgctctatcctgctgagctcccccctccgtacgaggcggtggtgggccagccccctgccagccaggttacaagtataggtcagcaggtggccgagtccagctccggggacccaaacaccagtgctggcttcagcactccagtaccagctgacagcacaagcctcctggtgtccgagggcactgctacgccaggttccagcccatcccccgatggccctgtgggcgccccagcaccctccgaacctgcccttccccctggccgcgtgtctccagaggatcctggcatgggctcacaggtgcagccaggtcccgggcatgtgtcccgctccaccagcgaccccaccttgtgcacatctagcatggcaggcgatgcctcttcacacaggccgtcgtgtagccaggacctggaagcgggactgtctgaggctgtgcctgggagcgcttccatgtctcgctctgccacggctgcctgtcgggcccagctttcaccagcgggggacccagatacctggaaaactgaccaacggccaacaccagagcccttcccagcgacctccaaagagcggccacgctctttagtggacagcaaggcctatgcggacgccagggttttggtggccaagtttttggaacactcacactgtgccctccccaccgaggcacagcacatggtgggtgccatgcgcttggctgtcaccaacgaggagcgcctcgaggaggaggccgtcttcggcgctgatgttctggaccaggtatgaaggagccacatttctgaccgtggacaccaacgcctggcgccacagatgttcttggcagaagccatcatgcctgacaaagaggccttcaggcccagcttggcggaggataaatgtgggggggacacccaggatgatctgggggcggtgtgggcagggaactgttaccccctctctcgaggggagccgagcagtgtctctttggggattgcatttcctgcctagcccagtaattcggaaagatgactttcacgtccacagtgaactctctggttttatctgggcgtgcagcaccttgaactgaggcagtgttgcacaaatgtgaatacagcaacaggcgacacttacgtcacctaaagattcaaagtatctccaaaatcaggggccttccaaaggcagggagtcttccccatcccccatttaaacttagtgtttcagttgggacagaggggttgacatcgagttcatggaaacattttcttcatgtgggctcgatggctctattcttagggcgtttcatcacggtctgggcctatttcctgtgaaaggaaataggtagtgttagcacagatggcagcctgggcccaactttctgtccacagggctattgtgcaaacaaatgtgcagtgcgggcctctgccatagcccggccccccccagggaacaggccggtgttgcgggggttggaggaacccaccatctcttgggccttgagctcggcctccctccgtggggtgccttccccccctcctcttgggccccctttctccaggctcccatcctgtccctgggagcagttgtgtgatccgtaacaacaagtgccgattcccagctcctttgtgtctgagctcacttgattgagctcagcgggtcacagttcttgcaggagagaggccggtttctctgagaagtagcccttcctgattaaagcaggtccctttgacccagagctgacctttccccgggcatgcggcagcagacacacctgcgcaggaggatcataaaccacttacaaacccacgcgagaagggaagcagacacccaacgtgctgcttatgggagaagcagacacgcccagcttggggacagcctgggggaccttgggacttttttagcccccatcccttgttttcttgttggcatcagtggcagctgctcccaacaatggccgtggaacagcgccatccacgagaactttgtgcagtgatggaaatgcctgttcagggccactagcagccacagcccctgagctgcgttgggtgggccctgcggtgaacaaaacagcctagaggccaaggtctccccagagagcccatgagcctggcatgggggcacagggggaccagagggtgtcttccactcctgggtgccagggcagggggctcacgctgctgttccctcggctttgtggggcttgtccttgagctcccccaattccctaatgccactgtggccagtgtgctggggagcttctgtgtggctggaagctgggaagggggtgaggttccaatccaggtgcccagagccttcctccagtcctttatccctgccctgggggctgcggtgtgggactccttcagctgtggtcggctgaaaaggcttcgattgctttagagagctgaaaacacataagccaggccttttgatgacaacctgcacttttgcaggagagacgtactagagatgaatttttgagcactttattcagactataaaacaggaaatctctaattttcctcaagtgggggcttttgaattccctcaaggcaagtccctttgcaggtgaaattaattggtggattttcagaatggccgccctggagccgagctttcagccacgcctgacgccctggcctctgaatctccactgtctctgaggtgcgctggggccacaccgcaggggtttcacctgcttgggggggtccacactagggcttgggggttcacacagcattgtccctgggctgagcccttgggtgggctagagctgcagtcctcagacatggctgcaattccagcgaggccaagaccaccagccacccagtggacttcgggtctctggggtgttctcctcatgcagccggggcagagg

SEQ ID NO: 147546 - DNA, 394 bp, Homo sapiens
cccacgcgtccgcatctgcagaggtgaaccaggatgtgagccggcagctgcttcaggatgggtatcacctggatgagattccagatgacgaggacttggacctcatcccccctaagcccatggcctcttcaacatgctcctgctgctggtgctgtcttggggactcttcttcctgtaccctccagtagacattaccctccaaggttgcacctgtctaactatgacagggatcatagcaggttgcttaatgatacagcaggatcctggcttccagaatccctggacctggggcatccccaactggtccaaccgtccggaggtgaagtgcacatgtggaaagggatcaaatgtagcacagtgtaaagaaagacagcaacacaggtagagggaccca

SEQ ID NO: 147547 - DNA, 488 bp, Homo sapiens
  misc_feature (1)...(488): n = a,t,c or g
nagggnnnnnnattgattatgatatctctatcagtgtgcgtggaattcacttggacctcatcccccctaagcccatggcctcttcaacatgctcctgctgctggttgcacctgtctaactatgacagggatcatagcaggttgcttaatgatacagcaggatcctggcttccagaatccctggacctggggcatccccaactggtccaaccgtccggagctcaagaacatctccatccagaaccccttccccatctgcagagaccatgtccaggcctttcttgtgtctgcagaggtgaagtgcacatgtggaaagggatcaaatgtagcacagtgtaaagaaagacagcaacacaggtagagggacccagtgtgtgctgggaggtggctgtggaaggtgacagtttcctgaggagaggggtgtatccaggcttacctcccagcaggagtggtaccatatggtgtttatgtactactctatagaactct

SEQ ID NO: 147548 - DNA, 360 bp, Homo sapiens
tgcagagaccatgtccaggcctttcttgtgtctgcagaggtgaagtgcacatgtggaaagggatcaaatgtagcacagtgtaaagaaagacagcaacacaggtagagggacccagtgtgtgctgggaggtggctgtggaaggtaagtatagaccaaaataccaccaatgtgcccagggccaaactgccttaattctgagtgctgtgtgttctgcaggtgacagtttcctgaggagaggggtgtatccaggcttacctcccagcaggagtggtaccatatggtgtttatgtactactctatagaactcttggcttgcacttctacagctctgtacatttataagaataaatgcaatcacac

SEQ ID NO: 147549 - DNA, 2297 bp, Homo sapiens
agcactttatggtttattatagctggcaatccaaaaaagaaactgtttgagaccagttcgagaaattccatttgctctattcttcctagctctaagatggtttgcaggcttgaccttcaagacagcataaagtgagtccttttgtccctcttcaggttgcacctgtctaactatgacagggatcatagcaggttgcttaatgatacagcaggatcctggcttccagaatccctggacctggggcatccccaactggtccaaccgtccgggtgagtttagtgattctggtttgcccttccctagttagagaaaaactgctctgacatgttcatatttatttatttgtatttccttggtctgggtgagtttcttcacccagtctttgagctaaagattaggtcgaaggtactggggctggccccagaaagcctgcagtttttattattaccaagcagagggaagctacagggagcagtccggtgccttcctattgtttactttttaaacttttgaagaagtagcaatggactccgtgaaaattggggtatacagcttgtgttgggcctttgtcctaagactgaagcttacaagaccaggaagggtaagagagacctaagcccagctcctagacccttgcctgaggaaatcagtccaccagtgtagagggcctcccttcactccagcatggaccattctattgccagattcttctggtcacagcatgggccttactggatactcaggattgggctttaagcagacctctgggtgtgacacagcctcttttcagcccccagcccaaacagcagaaataggcataatttgtgctgtgacacccccctacccacaaattggagagtatatcttgctatactctataccaagcctctttctagaatttttccaacaggttttgttttgttttttggcttaactcagaaccatggtgagcgttctgctttgttttgttggagacagggtctctgtcacccaggctggagtgcagtggtgtaatcacagctcactgcagcctcaacctcccaggcccaagcagtcctcccacatggtgagcttttgaatggggcaaagacagggttcccagccccaatagtcgggattggggtatagggtctacatgggaaagtatccagtctcttgctttactcagtgtcctgggaccaccagaggcatgagagggacaacacactcttttcgctttaccacaaggggcgactagaatattgagcaagtctaataaaaagatacggccttatttgttatttgtctgacaaccatccttacgatggtaatcctgtgagtgcctgatggacatctatctttgtgtttttctcaaaccatggaaggttgagaggaatatacagtatctgggggctgacttactctactagctaggagcatcacagcagagagataggacagagaccagagtcatgccagcttggggtcttgggaagagaggcagatggttactctgttctggaatgggactctgcagctctatgcagtggccaacattctgagcactttgtcaaaatgcttgtagagctcaagaacgtctccatccagaaccccttccccatctgcagagaccatgtccaggcctttcttgtgtctgcagaggtgaagtgcacatgtggaaacgggatcaaatgtagcacacgtgtaaagaaagacagcaacacaggtagagggacccatgtgtgtgctgggaggtgggctgtgaaaggtaagtatagacctacatctctgttggggaggtggtcagggccagaaatggccctgggtgtttagccagcttctagggggtgaggggtggcaggaccccaaaacccaaggccccctctgcatcgttgttgtaataatccagctctggcatattccagcttgcaaactgtcccttgaaggaaggaggtttcctgagctggctgacccccatgtaaggagggtgtttaccttgtagaaaaagctgggagggaccctggtgggacagtgcagtgaggcagggtagaaatggtcagttgtttagggccagtggccaccataccaaaataccaccaatgtgcccagggccaaactgccttaattctgaagtgctgtgtgttctgcaggtgacagtttcctgaggagaagggggtgtatccaggctttacctccccagcaaggagtgggtaccatatggtgttttatgtactactcctataagaacttcttgggcttggacttctacagctctgtacatttataagaataaatgcaatcacactagttaaaaaaaa

SEQ ID NO: 147550 - DNA, 1800 bp, Homo sapiens
  misc_feature (1)...(1800): n = a,t,c or g
ttttttttttttttttcagtatagcaaataataaatttattaggtgcctacaagtacaaaattctggaaaccggttgaaggggattataaagatgtgtaaaagacaagccctgccctcaaagagcttaaaatctaggcaattagtcccccaaataagttgtcgatggcgctctaaagtgaccctcagccagagttcttgaaaatgttcatatccttcaaaattcttcccttgtcaaattaaaccagtggggaaagaggaacttttgtgggcattcaactgggtgaaccctgaactcctgccttgcaaagcatcttttctggctggttgcaccgttgtccgtccatccctcctccagcgtcggtttccctaactgggaccctttgttgggaggaggaatctccggtggcttccctggaacccttcaccagggggggtttccctggtttggggggagtgggggtgggctccagttggcagtttgggcccttgggaaaggaattgccagtcccgatttttcccttccagccaaatcgcctcttttgaattgtagttggatgcctaaaatgcctatgcttttgcaatctgggggttttaaagggtggggagtgagatggcaatattaaggaaggcagccccagacttttccccttactttaaacatttaataatagtgcacttattggattaataatctgtacagatatagagccaagttataaacctcttcctttttatttattttcttcacttagactgtattccacgtaaagtgtattttacaataagaagaaaaaagccttgaggtacaaaaccccaaaagaatatgctgcaggtataaatacaagtatatcttaaataataatctttatcatgctttatctatgtttgaaagcacagtggacatgtttccttaaatagaagggtatatacaacatacaatccttacaaatctggaagcccatcaaaattgaatatcccatgtatatcttcatgaggaacactgatatccaaaatactcaaattttaaaactctaatctgatgccctgccccaaaattcttcaaagaacctttgaaataacactgaaaatggtaactaaattataacaaaataaaaatccttcttacagctctcattcatacattattcacttttgatccatacacaataaatttactaatactgtctcttgagtcaatccttaccattacagtaaaacctgaataaagaccacccttctaaaggttctaaaaaacttcactggtttgggttggttttcttcttgttgcgttttactatgattacctattttccattaccacttaaatatattcccccgggcttcctaagggaaaaaaaaaaaaaaagaaatgtagggaaaaaataaaataagacaaaaagtccataaaacccagaaaaacctatttgctgataagaacaagccccaatgaataaacacatgtggctttcaggaatgccgttaacaaccaaaggcggggaaaaagccttttgtaggtgagttaaatttacagggatttccttgggacacacatagtttcctatattcccaaacatagtgtcttaaggcgtttctgttacaaacacaaaaatgcaaagaattctaacagggaaaaagtgttgatgcttgatttaagagtaagtgttatcgtgttcagtttttatatctcgacttnnnnnnnnnnnnnnnnnnnnnnnnnnnnnnncctgtggatcagagccagtaaggctggagggagcagttcatacctgaaataatccatactggttaaaactacatca

SEQ ID NO: 147551 - DNA, 513 bp, Homo sapiens
  misc_feature (1)...(513): n = a,t,c or g
cttgacatcgtgacattagcacgccagcttgccacgaggtaattttcgatgtcagagtagtgtcagtcgcccttttataccacagttttcccgttcgtgaatttttagtttaaacttacctctcaattagctgagtgcctcactcaagcgggctgtgtaagaagggnnnnnnnnnnnnnnnnnnnnnnnnnnnnnnnnnnnnnnnnnnnnnnnnnnnnnnnnnnnnnnnnnnnnnnnnnnnnnnnnnnnnnnnnnnnnnnnnnnnnnnnnnnnnnnnnnnnnnnnnnnnnnnnnntagcataaatgctattttaccttagctcatgtacacctgataatttctttctgtgctgccacacttgagtaggcgtagccttcttggggcactaactgttccactcccaattttgtaaatactactccactgactcttgcttattatttaggattatggagaagtctgaggccattctcagactctgtctcattctctttttgttccggtatattaag

SEQ ID NO: 147552 - DNA, 681 bp, Homo sapiens
gtaatttcctatgtcaaattagagtcagtcgcccttcaataccacagttttcccgttcgtaaatttttagtttaaacttacctctcaattagctgagtgcctcactcaagcaatcttttcaagaagggtagccgggcatggtggctcgtgtctgtaatgccagcactttgggaggccaaggcgggaggatcacttgaggtcaggagttgcactccagcctgggtgacagagcgaaacttcatctcaaaaaaaaaagggtagcataaatgctattttaccttagctcatgtacacctgataatttctttctgtgctgttcacacttgagtagggcgtccttctttggggggcactaactgtttccactcccaattttgtaaatactactccactgactcttgcttagtatttaggattatggagaagtctgaggccattctcagactctttctcattctctttttgttccgttatcattaatgtgttttctctgcctagttgtcattaattgtatacctaggaacatagtaataggctttccatctcaggaactgggttatttattttaggatccaaggaatattttattgtatttatgtgtctggattactgtttctgatccatttatcgtaagttttttgagaactctttattatatatatattttttatttttccctag

SEQ ID NO: 147553 - DNA, 464 bp, Homo sapiens
ctgaggttcctcaggacacacctttacaaaaagaagaactgcgtttcagaacgacatctacccactggtttcagctcctagagcaacaactgcagaatctccatggtccaaagtcctccaggaaagagaagaaaggggtgacgggggtgagggctgggaggcgaggtcaccagggtcccttccctggctcgggtgggggtggggggcgcaacccctcacggctcctccccaccaagccgtcgggaccccagcgggggcgcctcgcgttgggcgacagggacgcggggagagagcgacaagctggaagcaagggctgcctgcaaaactttcggtcctccagcggcaactctgcgggaaagaccacccttccttcggccccgcgtcgggcctatccccgtgtgccccgacccctgcgccacaggcttgggcggcgccgctgcatcccggctcgtgccgaattccgc

SEQ ID NO: 147554 - DNA, 534 bp, Homo sapiens
gcggagattgtgccactgcacttggacctggctgacacagcaagactatgtttaaaaaaaaagagagagaaaaaaaaacaagaaggaagagcaatggcgacactggatcgcaaagtgcccagtccggaggcgtttctgggcaaaccctggtcctcctggatcgacgccgccaaattacactgctccgacaatgtagatttagaagaggctggaaaagagggtggaaaaagcagggaggttatgaggcttaataaagaagatatgcacttatttggccattacccagcacatgacgacttctatctcgtagtgtgcagtgcctgtaaccaggtcgtcaagccacaggttttccagtcgcactgcggtaagtggacccctgcaccgtcggccacatctgcagctgccgccctggggacagtcgccttcccctgggctccccgacagggtctcgccatgtcttgtctcagcctgaggctgtgggtaaagtcttcctgggctgctgcctctgctcgcaggctgttttaagagctgtac

SEQ ID NO: 147555 - DNA, 623 bp, Homo sapiens
ggagatacgctctgcgcggggaacccgggggtccgggggccctaacttttgagttttgcacgccccgcagcctgagatgggaaggtagctcgtcgcgctccaaactcacctgcgtttcagaacgacatctacccactggtttcagctcctagagcaacaactgcagaatctccatggtccaaagtcctccagaacactcaatgtcggaacgttccgaagatgacgtcggagcgttctcgaatcccgtgtctctcggctgctgctgccgaaggaacagggaaaaagcaacaagaaggaagagcaatggcgacactggatcgcaaagtgcccagtccggaggcgtttctgggcaaaccctggtcctcctggatcgacgccgccaaattacactgctccgacaatgtagatttagaagaggctggaaaagagggtggaaaaagcagggaggttatgaggcttaataaagaagcatggaaatacggtacctgaaatgggacacactgagtagataggtcatcccagaccaagatatgcaagagaagccacaacctgctgcaattgggcatcaaacacatatggtcgtcataaataaatcatatcctgttctcattaaaaaaaaaaaa

SEQ ID NO: 147556 - DNA, 890 bp, Homo sapiens
tattgcaagcttgatgataaatgacacttgatacctggcctctgagtcaaagaacaacaaggtagggtgggaatggtaaagaatgcgagatgcaagtgtccaccttatctaatagtggtcactactatgaaccagcttagtaatcccataaataaatgtctcctttttttttattttaatgaagatgaggtctatgttgcccaggctagtctcgaactcctggactcaagtattccacctgcctcggcctcctagcttgtgctgggattacaggcgtgagtcaccaccccccggccaatgtctccatttttgagggcgctcaaagaagtaaaaatggtattctctgctctagaggaatttgcagaaggatatgaactgaaaaaaagaaagatgggttccagttctggctctacctccaattcttgtattatttatttaatctccacagaactcaatttctccctccgtaaaatatgaggggctagactaaggtaaacacttaatttcccttcttatacaaatttctggtggatcccgttttcctcggatcaagagttgtcgcttgatgaaggagctggggaatgaaggtgaggtgctggatagttaagcatgccttagaagaacaactctcaaattacttcttctttgcccttcttcctcctcctagttcaagttcctcctcctccaagtaaccctacccttactcatctcccttctaatggattcccacagcattcagtcagataagaattgtccagcacacaggctgggctctcttgcattggattcattaagcccatgaccccaccttttcttctctccctctggacttccagaaggctatgaccaaatgtgatatctctctgaatcaaccaatgcctatcataagg

SEQ ID NO: 147557 - DNA, 536 bp, Homo sapiens
ccagaaccatgtgccgagcccgctgcttttggagacacgcttcacatccactaccacgggaagcttggtagatggaccgtattattgaccacctcccctgacccagagacccctctggttatagaacttggcccaaaagcagttgatttccaggtctggagcagagtcttctcgacatgtgtgtgggagagaagcgaagggcaatcattccttctcacttggcctatggaaaacggggatttccaccatctgtcccagcggatgcagtggtgcagtatgacgtggagctgattgcactaatccgagccaactactggctaaagctggtgaagggcattttgcctctggtagggatggccatggtgccagccctcctgggcctcattgggtatcacctatacagaaaggccaatagacccaaagtctccaaaaagaagctcaaggaagagaaacgaaacaagagcaaaaagaaataataaataataaattttaaaaaaaaaaaaaaaaaaaaaaaactcgagggggggcccggtacc

SEQ ID NO: 147558 - DNA, 1410 bp, Homo sapiens
gttgctattaaaaatttccatggagtttatgagctctttatatcttttccatattggacagagcagttctctttgaggacactaggaacactgtggtcccagggaacagagagaacagctaggcaactaccaggaggctcactgctcaattaagcatccctcctcagaatcagggcaccatgagagccaaaacccataccttaaggacctagagatcctatgggaagactcaagaccaggtccttaaagtcagttaggacagcaagaggaggccaggggaagaggtgatccagggcctacaaccacccccatgccaggcaagatgcaattcacaatgcttttttcctcagccctttacctcattcccactttcaaaggcagtcacaaaacacaccagatgaagaatgcaaataagtttttttaaaatttattatttattatttctttttgctcttgtttcgtttctcttccttgagcttctttttggagactttgggtctattggcctttctgtataggtgatacccaatgaggcccaggaggcgtgtgcaccatggccatccctaccagaggcaaaatggcctttcccgagcttaagccagtagtgggtcggaataagtgcattcagttcccgttcatactgcaccactgcatccgctggagaggcagaggggttggagagggttaagactctctgcattttatccagggctcagaatctgaatgaaaatagggagcgtaggccacagcaaagccaacaacttatgaagcttgacaagatttaaatgtgggctttgaattcctttaagacaagagtagaggaggatttacgagcagagtccagtgataatcatgttgaccccaactacacatgtggcttgggtccagtgacaagtctttgaatgcaggaaaactttctgtgaatatgaaatgtacaggctcttctccatttgtaagtgggagaaccctctatactaactactaatttatcgtatttccaaataaccacacggatagagtctttgcagggctgaaattaaatggatttaaactagactttaaaaaatcaaccaaccaatgagcacattcaacgtgattatgagataacaggagtttcaacataagagctggaagaggaagaaggatgaggatgctgcttaagaagtaaaggggcaggtggaacagaaatgagtgggcagaagaggtacaaataagcagcactgggaatggggaggtaatagggctttgggtaaaagtttctccttggtccccctaccctccttccaggccttcctttaagctggaactaggataagaattaacgagcccagccaggcgcggtggctcatgcctgtaatccccgcactttcaaaagccaaggcaggcggatcacctgaggttgggagtttg

SEQ ID NO: 147559 - DNA, 2451 bp, Homo sapiens
  misc_feature (1)...(2451): n = a,t,c or g
gggcaatgaagagtgaaccccaatgaagagtgatcccaactttggaaactatctggtcattcatgaccttaaaaagctgccatggtggtcaaatggcatgtgtttgcacaaaaatgaccgatgtgtttaaccaaagctttgaaatgtgatgaagccaccaacataagcacttgcctaacagaaatcagtatttcttcctacttagaaggcttggggcccagggtaatgaggcaccagatgaagataagatctgcatcaaggaattaaatttccagtttgtccttggggttctttctggcttatgttttttcccccccatctggtaatagtcctcttctgaggattgaaagggagggcacaggaagtttgcggaggaaaggacccagttcccccagtctttgccaccattgcaccatggttgtctcggagtcccttcacctgacctttttagtcagctcagatatttttgtagtttgagaatagacctattcaagagctatcagggttaaaagctgcactgaccaaagctgtacttttaaaacacaacccctgggctagtgatgtctctacttgctctatgagccttttgccagcctcagaataggcgaggtaaccttgaatttcagggccctggaaactctagctgaaacctgcctttcctaatgctcacacaagcaccaggtaccctgagcttatactgagtccagtggttcctattttatgtgtgtgtgtatgtgtgtgtgttgagtaacatgaaacttgggcagtagcagagagcactgaagnttcacatgcaagttctaatctaaagttaagcagtctcttatttgtttcgggactctgatttgactctttttctgatgctttcggcatgtctgcagcctgttctcctagcctgctgcttggagtcaggttgagcatcagtgagatgaagacagtaccttttcctctcacattggcagaatagcacgcactagatgcctgaccttgagctctagtctcccctttaaatcttaccttggcagtaacacattattcctcattcaataatttcaatgctgaaactgaactctattactaatgccttccaatcagagttcctgatggggatgcctgtgggatggcccacnccctgggggccctggcagatggggtgagttgggtaaggaagatgatgccttagttcctgatagatgctacagatgtagtttggcatttcagtttttgtccagtttgattttcactggggtttgagttcacagcaagctgtgtatgaacttgtgttttgtggtgacacatttaattaatccaattgctaaaaccctgaatctgcttattcttcagcttcacctctgcactaaccccttacccttatggtacgtcaggattttaactagtactgctttgttgactttgggaaatggtgccactcaaaagcaacttcctaacttgaggaataactcctttgtagtttactttctggtactggttggtgccttgtattgggatacagctatattcttagctcaaatgtcctctttttgagagcaaagtagttatccaatggtgagacgaggaccctggacgctcatgagaggccattccttcctgggtgttcggaccagggctctgtgttcagggaaaaccttctgggtggactttgtaagaatccagtttccaaggttagatttcacatccttaatcctgcagaggctagaatttcacagctcgctttggaacatattccaattcagccagttaaaatcagagggccaagtcgtggggggagggggccggtgttgaggagaggtatttttaaagatctggcaacttttcaggattatttgtggagaactctaaggttaagatcaggaaataaaagactgtgtgtgtgtgtgtgtgtgcgtgtgtgtgttcaagtgcctaaatcttgtttacctatcactttaaaaaaataattgaagtgtaagctaaataaaatgccttggagtttttccctggggctagtgagagttggtgcaaattccttgtgtgtgtttgccataggaaggtgagatgaccctcctactaaagaggaagtagcccaaatacagatcctgtgggtgtttttaaaaaaacctcaaccctatctggtgttttattttaatggataaaaatgtaatttttcctaaggtagcaaccttatttcccaaattaatatagatgaaaaatagatacccaattagactaaaattggaaagctttttgttcctatatttgccatagccctttggaaatatttcttagtgcctaggaggtctggggattcctctttcgtggtggtcactaaccttacttgatgcagataaaatcacttgtcaatgcaaaatgtgttagaacttgataaagctttgagtttgagaaataaaggtatatttaaaatttaaataaaacttgtcatttatgctcaaa

SEQ ID NO: 147560 - DNA, 438 bp, Homo sapiens
  misc_feature (1)...(438): n = a,t,c or g
ccagggctgcatctgcaaagggacgtcagacaagtgcagctgctgtgcctgatgccaggacagctgtgctctcagatgtaaatagagcaacctatataaacctggannnnnnnnnnnnnnnnnnnnggaacaacccggcccggttggcaaaannnnnnnnnnaaaaaaaaatgggaagggcaataatttcttttcccctagccaagaaaagaagaaaaaaaaggggggcctagaaaagggtatcttggggggggcnnnnnnnnnnnngtgtttggagaaaacccccgccccctcaaaagaggttttttnnnnnnnnnnntgggggggtgttgggaaggcccctttctcttggggggggacaaaatgggagaccctccctttanaaaaaaaaaccgctggggggnnnnnnnnnnttttgggggggaaggggggatacct

SEQ ID NO: 147561 - DNA, 580 bp, Homo sapiens
tgttttcctcttgatcgggaactcctgcttctccttgcctcgaaatggaccccaactgctcctgctcgcctggtaagggacacctagctccgcgccttgggatgcccgtttcccagccacagtacagactcttcctgggtttgaagaagtcgcatttaaagttctgagctgaaggggctcctttatttcgttaggtgctttcttcccgatcacgtccctgagaccacttctcgcctccctgtgcctctaagttagagttgagggtactgaggcccaaggctgtcctgctccatgtcacccagttggtcagggggctgctggctgagacccaatgctctgaccaggctctgagcagtcaaggtggatgggaagcattggataggtggctcctgcgcctgcgccggctcctgcaagtgcaaaaagtgcaaatgcacctcctgcaagaagagctgctgctcctgttgccccctgggctgtgccaagtgtgcccagggctgcatctgcaaaggggcgtcagagaagtgcagctgctgtgcctgatgtcgggacagccctgctgtcagatgaaaacagaatgaca

SEQ ID NO: 147562 - DNA, 451 bp, Homo sapiens
gccaagaattcggcacgagaatctgtcccgctgcgtgttttcctcttgaatcgggaactcctggcttctccttggcctcgaaatggactcccaactgctcctgctcgcctgttggctcctggtgcctgtgccggctcctggcaaatcgcaatagagtcgcaaatcgcaccgtcctgacacagacgagctgctgctcctgtctgccctgtgggctgtgcagtagctttgcccaggggctgcatctgcaaagggacgtcagacaagtgcaggtctcgatgcctggatgccagggacagctgtgctcttcagatgtaaatagaggcaacctatattaaacctgggattttttttttttttttttttgtaacaaccctggacccgttttgctaacatctttttttctatggaaatatgtgaatggcaataaattcatctagactaaaaaaaaaaa

SEQ ID NO: 147563 - DNA, 1917 bp, Homo sapiens
atgaccttggaggccacacacctgctgttgagagttctgctggtgctcctggcctcaggcgggtccttattccaaagccccccagtcaagtccatcatcctgggtgtggcagtgaccgttgtgctgctgctgctgctgcttgccctcctcatcaaccggtacctccagaaagcccgaggaagagctaggaaaccctatactgaagatgtttctgttgacaaaaagactgaaacgtgggagtgggccagaggtgagggtgaatcttaccatgtttatgatgacgtccaaaaggagaagaccactgataggatgatcaggagttcaagcatgtgtgtgcacaaaataaacaccagtgtgagcatgtgtgcacaggagacacccaacagttccaagaaggctaaacttgggcagaaaattccagttcaagggaaagacgagatcttgcacaaggcactctgcttctgcccttggctggggaagggtggcatggagcctctccggctgctcatcttactctttgtcacagagctgtccggagcccacaacaccacagtgttccagggcgtggcgggccagtccctgcaggtgtcttgcccctatgactccatgaagcactgggggaggcgcaaggcctggtgccgccagctgggagagaagggcccatgccagcgtgtggtcagcacgcacaacttgtggctgctgtccttcctgaggaggtggaatgggagcacagccatcacagacgataccctgggtggcactctcaccattacgctgcggaatctacaaccccatgatgcgggtctctaccagtgccagagcctccatggcagtgaggctgacaccctcaggaaggtcctggtggaggtgctggcagaccccctggatcaccgggatgctggagatctctggttccccggggagtctgagagcttcgaggatgcccatgtggagcacagcatctccagtattagtttgagcaaccagtctgtggcgagtactattctgaacactggaaatacaacagtggacaaaagaggcaagagttgtgcccacacagagctcactttagtggaaggagaggagacagacaatgcacacagtaagaaggaaggaaaaagaggaaaaaaggcgaatgctgcatcagtgcccaggcaagcccaggagttgacatttctctgcccagccatgggcctcaccctgctcttgctgctgctcctgggactagaaggtcagggcatagttggcagcctccctgaggtgctgcaggcacccgtgggaagctccattctggtgcagtgccactacaggctccaggatgtcaaagctcagaaggtgtggtgccggttcttgccggaggggtgccagcccctggtgtcctcagctgtggatcgcagagctccagcgggcaggcgtacgtttctcacagacctgggtgggggcctgctgcaggtggaaatggttaccctgcaggaagaggatgctggcgagtatggctgcatggtggatggggccagggggccccagattttgcacagagtctctctgaacatactgcccccaggtgctgtggaggatgatgttcaggcaggcaggtggcgcgtagcatccagagatgatgtggcttgcggctcagaggaagaagaagagacccataagattggcagtctggctgagaacgcattctcagaccctgcaggcagtgccaaccctttggaacccagccaggatgagaagagcatccccttgatctggggtgctgtgctcctggtaggtctgctggtggcagcggtggtgctgtttgctgtgatggccaagaggaaacaagtgaccatccagttacttcaaggaaacaacccaactgctttggctaaaagcaaggaagaactttctatgccaaagagttaccaatactga

SEQ ID NO: 147564 - DNA, 1188 bp, Homo sapiens
  misc_feature (1)...(1188): n = a,t,c or g
acccacgcgtccggacatttctctgcccagccatgggcctcaccctgctcttgctgctggtcatgggactagaaggtcagggcatagttggcagcctccctgaggtgctgcaggcacccgtgggaagctccattctggtgcagtgccactacaggctccaggatgtcaaagctcagaaggtgtggtgccggttcttgccggaggggtgccagcccctggtgtcctcagctgtggatcgcagagctccagcgggcaggcgtacgtttctcacagacctgggtgggggcctgctgcaggtggaaatggttaccctgcaagaagaggatgctggcgagtatggctgcatggtggatggggccagggggccccagattttgcacagagtctctctgaacatactgcccccagaggaagaagaagagacccataagattggcagtctggctgagaacgcattctcagaccctgcaggcagtggccaccctttggaacccagccaggatgagaagagcatccccttgatctggggtgctgtgctcctggtaggtctgctggtggcagcggtggtgctgtttgctgtgatggccaagaggaaacaagaatccctcctcagtggtccaccacgtctgtgactctggaccggctgctgaattgcctttggatgtaccacacattatgcttgactcaccaccttcatttgacaataccacctacaccagcctacctcttgattccgcatcaggaaaaccttcactcccagctccatcctcattgccccctctacctcctaaggtcctggtctgctccaagcctgtgacatatgccacagtaatcttaccgggagggaacaagggtggagggacctcgtgtgggccagccccccccccccaaaagggaaaattcccancctaacaatcagactccatccagctaagctgctcatcacactttaaactcatgaggaccatccctaggggttctgtgcatccatccagccagctcatgccctaggatccttaggatatctgagcaaccagggactttaagatctaatccaatgtcctaactttactacgtaaagtggcggcttatacatttattgagaagtctttgggggagacctccctgcacccctttttccccactgctcttttaaccaataaaaacatctggcttaatgggcccccg

SEQ ID NO: 147565 - DNA, 2385 bp, Homo sapiens
cttacaactccgcgcggcctcggccccctgcgccgcccgccccacaacaaaactcagcgcagcgctcccgggcgcccggttcagagcgacctgcggctcagagcggaggggagactgaccggagcgcggatcgggacagcggccgggacagcggcgagacgcgcgtgtgtgagcgcgccggaccaagcgggcccagaagcgggtctgcagcccagagggcaccttctgcaaacatgtctgtggatcccctatccagcaaagctctaaagatcaagcgagagctgagcgagaacacgccgcacctgtcggacgaggcgctgatggggctgtcggtgcgcgagctgaaccggcatctgcgcgggctctccgccgaggaggtgacacggctcaagcagcggcgccgcacactcaaaaaccgtggctacgccgccagctgccgcgtgaagcgcgtgtgccagaaggaggagctgcagaagcagaagtcggagctggagcgcgaggtggacaagctggcgcgcgagaacgccgccatgcgcctggagctcgacgcgctgcgcggcaagtgcgaggcgctgcagggcttcgcgcgctccgtggccgccgcccgcgggcccgccacgctcgtggcgccggccagcgtcatcaccatcgtcaagtccaccccgggctcggggtctggccccgcccacggcccggaccccgcccacggcccggcctcctgctcctagtgcccgcccccgccatgcctcagccacgcccctccggcctcagctccctccccaaagtgcctgagcgccgcctctgtgcccaggtcccatttctctgcagcactggccccttggtgcacacacattcccttcgtgggccctgtcttcctcttgcagccccccaaactgggaccgaatgaccctgggaaggggaagttgggtaggttggggatggggcagaggtctggatctgggatcgcccttggctgaaagtttagcctttttagattgagagatacagagccggcttagagaacagctgttgggggagaagagggcacccctcatcttggaaactgctcttattgtgccaatatgccctccaaaccctcccaggattcaaagctaggtttggctgtctgtgacttacgggaccgtcctgctgagaaattgcactgaagagatgcccccacctctggttgggcctgggggtgcctggccttccgaaactaaaagagtgggtgggaagactagtgaaacccagttcacggatggggaaacaggcctgaggtcacatttcacttagtggttgtgttgggaccaaaacctgggtgtcctcactgctgccctgagtccagccatggttttcagggggacagtggacagggactcagaaatgtggtgggagggcctccctggcttgggagaccgctctctgcaagggagggggagagaagcagagggagagagaaggtgacacggatggaagagtgggaaggagctggcctggctcagccctaggctgtccctgcagccagggtgtccgggggctggccagtcagagaaagggggccatggactgctgtggcaaatagggagaccaggagacagaccctgcagtcctactacagtctggagtggggtcctaagaagaagggtcccacctcaacccctgtcagtgtccactgtggggtgggggctgacccctgcctttgattgtcattctcctggggaagcccagtctcagtcccctcccccaacactgtccacactgcccctccccactgtttatttattgcacggatctaagttattctccccagccagagcccgagcttctgctccctgggaaaagttggcgtattgggcctgagctgggctttatattttatatcttgcaaataaattacatttttatcttagatttagggaaagccggagagcaacaacaaaaaatgtttaagccggggcgcggtggctcacattctgtaatccccagcactttgggagtccaaggagggggatcgcttgagtcccaggagtttgagacccacccctggacaaacatggtgaaacccccgtctcctacaaaaaatacaaaaattagcccatgcatggtggcctcatgccctgtagtccccagcctacttgggaggctgaggcaggaggatcaccttaagcccagaaggcagaggttgtagtgagctgagatcgcacccactgcactccagcctgggcaacatagcaaaatcctgtctcaaaaaaaaaagttaaaaaatattgcccggctcctagaatttatttatttcctgacttacagcaagcgagttatcgtcttctgtattttgtagactttctaaataaagtcaaattctttctttttccacagaaaaaaaaa

SEQ ID NO: 147566 - DNA, 451 bp, Homo sapiens
gtccacccgcccgcctaggtccgcccgcccgccgagacccgcccgccgccgctgccatggccgaagtgcgcaaattcaccaaacggctcagcaagcctggcacggcggctgagctccggcagagcgtgtctgaggccgtgcggggctccgtggtgctggaaaaggccaaagttgttgagcccctggactatgagaatgttattgcccaatggaagatatatctatctcggtgataggtcgtcaacgcagaacggtgcagtctactgtaccagaagatgctgaaaagagggcccagagtttatttgttaaagagtgtattaaaacctatagcacagatttgcacgtggtaaactacaagtatgaggacttctctggggactttcgaatgttgccatgtaaatctttgagaccagaaaagattcctaatcatgtatttgagatagatgaagac

SEQ ID NO: 147567 - DNA, 484 bp, Homo sapiens
aaatgtactcacttcgcatacacaaccaaaccaaagaggcaaagcagcaacggtgacacctgcgctatggagactaacagatgtgaggttggtgacaaaatataaaatccattttgaaaggaacgttggaagctttgaaaactctatgaaaggaaattctatctatttctagggtcctggacatgatcctttgttgaatatgaacattgtttactaaaaatcgttaaccataaacaaccatatgcacaagattacataagaaagtctaacggaagtacttttttcccagggaattttctcagtgacgaatccacatcctgaaatttttctagttgccagaattgaaaaggtactacagggaaacattacacactgtgcagaaccctatatcaaaaattctgatccagtaaagacggcccagaaggtgcacaggacagctaaacaagtgtgtagccgccttggacaatacagaatgcccttcgct

SEQ ID NO: 147568 - DNA, 571 bp, Homo sapiens
  misc_feature (1)...(571): n = a,t,c or g
ggcagtgagtccacccgcccgccgaggtccgcccgcccgccgagacccgcccgccgccgctgccatggccgaagtgcgcaaattcaccaaacggctcagcaagcctggcacggcggctgagctccggcagagcgtgtctgaggccgtgcggggctccgtggtgctggaaaaggccaaagttgttgagcccctggactatgagaatgttattgcccaaagaaaaacccagatttacagcgaccccctccgagatctgcttatgttcccaatggaagatatatctatctcggtgataggtcgtcaacgcagaacggtgcagtctactgtaccagaagatgctgaaaagagggcccagagtttatttgttaaagagtgtattaaaacctattagcacagattggcacgtggtaaactacaagtatgaggacttctctggggactttcgaatgttgccatgtaaatctttgagaccagaaaagattcctaatcatgtatttgagatagatgaagactgtgaganagatgaggactcatcttctatatgttctcagaagggtggtgtgataaaaca

SEQ ID NO: 147569 - DNA, 2151 bp, Homo sapiens
atggggctggaggctgaagatggagaccagatcacaagggatctaataagccttgctgaacagtttgagctttattctacagactctggattttggggagaattagatgagatcatagatataaaacgcttaaccgagtatacagcaatgcttaatgaaaaggccaaagttgttgagcccctggactatgagaatgttattgcccaaagaaaaacccagatttacagcgaccccctccgagatctgcttatgttcccaatggaagatatatctatctcggtgataggtcgtcaacgcagaacggtgcagtctactgtaccagaagatgctgaaaagagggcccagagtttatttgttaaagagtgtattaaaacctatagcacagattggcacgtggtaaactacaagtatgaggacttctctggggactttcgaatgttgccatgtaaatctttgagaccagaaaagattcctaatcatgtatttgagatagatgaagactgtgagaaagatgaggactcatcttctttatgttctcagaagggtggtgtgataaaacaaggctggttgcataaagcaaatgtaaatagtaccatcacagtaaccatgaaggtattcaagagacgatatttttacttgacccaacttcctgacggttcatatattctcaattcctataaagatgagaaaaattcaaaagaatcgaaaggttgcatctacttggacgcctgcattgatgttgttcagtgccccaaaatgcgccgtcatgcttttgaactcaagatgttagataaatatagccattatctggctgctgaaactgagcaggaaatggaggaatggttgataactttgaaaaagattattcagatcaacaccgacagtttagttcaagaaaaaaaggagacggtagaaacagcacaagatgatgaaactagcagccaaggaaaagccgagaacatcatggcaagtttggaaaggagcatgcatccggaactgatgaagaggttggacttttcaggaattgaacctgatataaagccatttgaagaaaaatgcaataaacgtttcctggtgaattgccatgatttaactttcaatatcttgggccaaattggagacaatgcaaaaggaccacccacaaatagaggaatcatgtcttccaaaattgctgatagggcaaagcttttgtcaagtactttggtgttgactgttattagcgcttatgaaatgtatagtcaagttgagcccttttttatcaatcttgccttatttgatgtaaagaacaattgtaagatttcagcagactttcatgtagacctgaatcccccatctgtccgtgaaatgctgtggggctcttcaacccaactggccagtgacggtagcccaaagggctcttcacccgaatcttacattcatggaattgccgaatctcagttacgctacatacaacagggagaggaccagaagctgttgggacaaaaggtaaaacaaccccaaagagtgtcccccatcattggaatccctggtcagttagaaaatggacatctctgtgcctcagcatccttatctgcaagtggaggtggtgacagtacctgtctccaagggctgtggggaggcacaaataagggacagcccgggcagtctgccaacccgttcagcctcacagctcaaacagcatgttcccggcagtacccgaagccaggttctgtgaccttgggatgctttgttccactcgagaaatgtactcacttcgcatacacaaccaaaccaaagaggcaaagcagcaacggtgacacctgcgctatggagactaacagatgtgagacggcccagaaggtgcacaggacagctaaacaagtgtgtagccgccttggacaatacagaatgcccttcgcttgggctgccagacccattttcaaagatactcaaggctctcttgatctggatgggagattttctcctctgtataaacaagacagtagcaagctttcaagtgaagacattctcaagttgctctcagaatataagaagccagaaaagaccaaactgcagattattcctgggcagctaaacatcacagtagaatgtgttcctgtggatttatcaagtaagaacatattgcaaataaaccttaagcataatgtttga

SEQ ID NO: 147570 - DNA, 2179 bp, Homo sapiens
  misc_feature (1)...(2179): n = a,t,c or g
gggaggcaggtaatgaatgtttccagaatcagtcggatactcatagcaatttctggctatctttcaaatgttgaatttctggatgctgagagggactttgatttgatatcattaaatccaggacagtcccaagaagtgcttggagtctcggctctgacagcccaagaagggaaataacttgtattaaggaacaactatgagccaggccctgagctgtctcttagataataaaacagatggggagtggaagagtcatttgcttcaagttatacagctaggaaatactcaagccaaatcttgaacgcagctccccctaattctgtggacaggcactttgtaccacacaccatggtccacctaaaaacagaaggataaaaagacttcaggttttcccactgtgtgcttgaccatcccaatttatggaatcttcttccaaaatgacattttcacagttatagttaggggctcagaaatggctttgaggtagccttatttctcccctttagcagatgctttaagtacacattgctgacttgagcccacccccagggagttaggagaacatttcctttttcatgccatcttccataaaataaggtgtttcttggccttcaaagatataggaactttgncaggcagtagtaaaaagtagaagggtgtttctggctctctaactcaactttatttgaaaatgtctgcagcttcactcctgtagaaaaggaaatcttcatatgtttagtaaacttagccgccagtgtactctgtgagggatgtgggcaatttcaaagtccagtgaatctggactctcttactgattcctggttttagtgtgtgtgtcggggggagtttgtaacctatattataaaggacaagtgtggatatgtgtgtatatgtatatacaatacatacatgtccacacacacacacacacacaatatttgagagctaaggaaaactcaaagcagccccttcattatcttgcgtactacttcaaagatttctgtcagccctaattacaagtgtcaccatatagttgggggcttagggtactttgcttacagggaaggaggcaattccctaggcaaagggtcattaggcttcctagggcacttgaagtcaaagtgacagccctggaagggaaattggcactccagccctcctccagggtggtcttattaggtggggaaacttggatgcccagcccatttttggtgaacctgagagtcttaactactccagttagacctaagggcacaaatgcagaattcatgaccttgtagttgtgggcagggtctaggaagtcctctctccccaagtacgaaaatattctcttgcgcattcctgaaattccacattcatataatggctgtgcaatacatgcttctcaataagaaaattaactgcatgtttactgtgtgctgatcacatcagatttttatgtttaaaaaaatctcattatgggattgagtccagcccagctctaagagaaaaagaaggcccatatgggagacttcagtctcattattattgcctttatccagcagtgcttatgaagccccctaccctgtcccattccagaaaccataagactcaggcagttcttgattctggaggccctgccctggtaaagattaagatagtataatttggaactgagaacataccagaaacagcagaacgagggccaggagccagaaaaatgaaaaataaagtgggagacacttttatgatacattggtgccaaaaaaagcccacgggaacccatactggggcttgaatatgactttgaggggaccagcagattaaaaacttaaaggagggttaaaacctggacccagcctttcctacagtggacaggcccacactgccatgaaatggggagaacccaatggaatcccattgtccctctgccctattttccctgtgcacagtcacattccctccttaggaatcttcccccttccaccctttacattaaacaagggaacactgaatctttcaaggggaattacacgtttggggttaatgtttcaggtatatcatttttcatactggtaaattattttgtaggggaggatttactggctatcccgggggtgttcgggacttgggtgcccctgtggcatttgggggaatcaattaaactattactggaaatgccaaaaaaaaaaaaaaaaaa

SEQ ID NO: 147571 - DNA, 612 bp, Homo sapiens
tttttttttttttttttgcagtttaatgtttaatgcccaattatctcaatacaaggaggcttacatggtgctcataaagacacgaccaggcgaaaccaggccggcaggaaatgacccgcatgagtcccagcacggggaccatggttctctcggttccagctcaccctcgaaaagtgccacagcgaacggttcttcagctcaccccaaggagccagcaggctggccagagcgtgtggccaccatggtcactgaggatcctcgtgggagaataggggttctgggacctcaggatacaatcacaagaaccagaaagctgcttccaaacaaccccagaaggttttcacttcacatgcgctaagccacacaacacctggatgctggggcacccaaaccctttccctaaaactctgaacactgcagaatggaggttgagaacacttggggaggggagaaacaaagtcagaaccatcctaaagccagtttttcaagcttgaccacctccctcttcctccctgaaggcacaccagccgatcccattactgtggaaaagggacaccctctggtctattctaacacctttaatgggaaaggagttaggagcatgtccctggc

SEQ ID NO: 147572 - DNA, 537 bp, Homo sapiens
  misc_feature (1)...(537): n = a,t,c or g
cttttttgtgaaaagcccaggaataccccactttacttagaattccnnnnnnnnnnnncctttaataaggtactaggttttgacaagcttgcatcatgcgtgagtataagctagtcgttcttggctcaggaggcgttggaaagtctgctttggtaagtcattcttactttacctaagcctttcactccaagacgttctttttctgttgagttttaggttttgatgatttgtctttgttaagataaaattccttaatgactttagaagcaatataatatttttcttgtaattttattcaacttttaattatatctgggtggatcatattctctctggaacattgactccagaatgacacgagttatgctggaatacaatttgagctaagcacagagattgagagcgtacaaatacatgtctttttcattcgcatttcagagccagataggaataaattttggtctttttatttatttatttttttgagaccttgtctctaaccaccatcctgtgcctcccacccccgccaaaaaaaaa

SEQ ID NO: 147573 - DNA, 944 bp, Homo sapiens
gtaaaccagccggagcggcgcggcagcggcaggaccgccgtggcgcctagagtagcgacccggggggagcgcggggcgacgctggctgcagggacccggtgacagcgtgagaggttcgcagagtactaggttttgacaagcttgcatcatgcgtgagtataagcctagtcgttcttggctcaggaggcgttggaaagtctgctttgactgtacaatttgttcaaggaatttttgtagaaaaatacgattcctacgatagaagattccttatagaaagcaagttgaagtagatgcacaacagtgtatgcttgaaatcttgggatacctgccaggaacggagcaatttacaagcaatgagggatttatacatgaaaaatggacaaggatttgcattagtttattccatcacagcacagtccacatttaaccgatttacaagacctgagagaacagattcttcgagttaaagacactgatgatgttccaatgattcttgttggtaataagtgtgacttggaagatgaaagagttgtagggaagggacaaggtccaaatctagcaagacaatggaacaactgtgcattcttagaatcttctgcaaaatcaaaaataaatgttaatgagatcttttatgacctagtgcggcaaattaacagaaaaacttcagtgccctgggaaggctcgcaaaaagtcatcatgtcagctgctttaatatactaaatgcattgtagctctgagccaggtctgaagaactgttgcccaattcaacagtgccagcattccaactttgttaaacctaccaacatcttaaatggactttcctgtggtggtaccctttaagaggcggatgaaagctagctatatcagtttgcacattctaatcactttccagtatgagaagagagatttttacaattatataatagtcctagagtttgcagctg

SEQ ID NO: 147574 - DNA, 1450 bp, Homo sapiens
tttttttttttttttttttttttaactgaaaaacaaacacccttgagtttttcagttcaccttttgttaaggagcagagcctgcatatatatgtaaatgtctcaatgataaaaaaaaaaatgtaaacatggattggcattaatttgcaagcagaatcttaatagcctgatgggttttttgtttgtttttttcttctagatgtggttaaacgttcgttttcaccttacgatgggaacaactgtagtgcaggcggctctgcctctatttgccactcttgggccctcttgctattaaggggaaagggctttgaaggaggcacagcactgacagggctgtaaagatggaaggagctggtgatttttaccatgcgtagattcccaagagaacttgtactaaaaagcagaaagttacaaggaagcagaattaggccaacatttccagcaattaaaacaatgatggggaaactccaatccatgagggaggctggtcagtcacctcaagggtagtgggccttaaaggaagtcttgaagtgggcttgatgtccataacttctgagtctgtttccaaaagaaagactcttgttaatgctgttaccagagagtagagatttgaccagcctctccctaaaatgtaagcttctcaacaacagtacaggaagaagtgcaagagtagactagaacctttaaggaatttggggctggaaacggagctatgttgccatctgttgttgtaccaggtagattataagttctacatgcaccaagcccaaaacttaggacaggatgtccccaaaattaaggtactacagattaccaaatcagaaataaccagctggatttaggccagcttcacatttatttgggaaattaccctccctgattaacaggcttctgagttgtacgtgggagggacttaattgagactttgtaccaagacacccacgggggctttggggtccaggtgcccagtttggatattcgggaacagacacagataagtgtgttttcctcattaaggtggtgagagtgtgccttttggcattcagaaaagggtttagcccccccctaagagttggaaataaagattcccaactggaaatgttgcagaatccctacaaagtgtctcaaaaaaaagccattttaaaagaatattgttgctactgtttgcttttcaaataatctggagatcgttggctatggcaacgtgctgccacctaattagagaatgcctgtaaatgtaggctgaacacttctaacatgagaaaacctaagtatcctacagaggtttggtgtgttttgtttttgtgggtgtcgggggaagggggtggggaggcgtgtttttggccctgcaggttttctcgtgggaatgagttcactcagacaagctaggactgtggcttctttccctgttcatcacatagaacattttctcatcctatctttggttcctt

SEQ ID NO: 147575 - DNA, 789 bp, Homo sapiens
tgagttcttctgaacatactgcccggagaggaagaagaagagaccctttagattggcagtctggctgagaacgcattctgagaccctgcaggcagtgccaaccctttggaacccagccaggatgagaagagcatccccttgatctggggtgctgtgctcctggtaggtctgctggtggcagcggtggtgctgtttgctgtgatggccaagaggaaacaagaatccctcctcagtggtccaccacgtctgtgactctggaccggctgctgaattgcctttggatgtaccacacattatgcttgactcaccaccttcatttgacaataccacctacaccagcctacctcttgattccgcatcaggaaaaccttcactcccagctccatcctcattgccccctctacctcctaaggtcctggtctgctccaagcctgtgacatatgccacagtaatcttaccgggagggaacaagggtggagggacctcgtgtgggccaccccagaatccagctaacaatcagactccattcagctaagctgctcatcacactttaaactcatgaggaccatccctaggggttctgttcattcttccagcccgctcatgccctaagatccttaagatatctgagcaaccacggacttttagatcttatccagtgggctaactttactacgtaaagtggcggcttatacatttattgagaagtctttgggggagacctccctgcacccctttttccccactgctcttttaaccaataaaaacatctggcttaatgggcccccg

SEQ ID NO: 147576 - DNA, 700 bp, Homo sapiens
cggcacgaggctgtttgctgtgatggccaagaggaaacaagggaacaggcttggtgtctgtggccgattcctgagcagcagagtttcaggcatgaatccctcctcagtggtccaccacgtcagtgactctggaccggctgctgaattgcctttggatgtaccacacattaggcttgactcaccaccttcatttgacaataccacctacaccagcctacctcttgattccccatcaggaaaaccttcactcccagctccatcctcattgccccctctacctcctaaggtcctggtctgctccaagcctgtgacatatgccacagtaatcttcccgggagggaacaagggtggagggacctcgtgtgggccagccccccccccccaaaagggaaaattcccacctaacaatcagactcccatcccagctaagctgctcatcacactttaaactcatgaggaccatccctaggggttctgtgcatccatccagccagctcatgccctaggatccttaggatatctgagcaacccagggactttaagatctaatccaatgtcctaactttactagggaaagtgacgctcagacatgactgagatgtcttggggaagacctcccctgcacccaactcccccactggttcttctaccattacacactgggctaaactaaaccctaataatgatgtgtaaaaaaaaa

SEQ ID NO: 147577 - DNA, 679 bp, Homo sapiens
cgtcgactttttttttttttttttgcggctccttccagagcagggctaactcctacgcagtgtgcccagagtcagcctgttttttttcaatatcttcacgtcatccaatcttcttttcctttaaaaacctacttgtgggctggttgtggtggcttgcacctgtaatcccagcactttgcgaggtcaaggcaggaagattgctgaagcccagcagtttgagaccagcctgggcaacatagtgaaactgtcttcaaaaacaaaacaaaacaaacaaaaaaacccctacttataactgctgctaatcagagtgtattttcacggcaacttgaatctttgctcctaaaggctgtcctcaaaacctgaccaaatatactttacttaatgttaagtttgcctcagttttttcctttaggtcaacaataggtatgacccaagaaccctagaacttggtcataaagcttctggtgcccttgtcacttccctcctctattatttctgtggccctcatctcctttcccactgggattcccaggaaaaactttacaaatagagcagtgacagatgagttccccaagggcttgctttgaggtagaaaggaagagtggtttgaaattcccttaccttgtcattatcataagagtaattaagacattaactatataattgactctttaacatc

SEQ ID NO: 147578 - DNA, 1956 bp, Homo sapiens
cttccttgtccctgcctcactctgagagccttgggggtctccaccagtgcagacaagggctacagtctccagggccgggtcttgtccctcttctccgctggtccacgctggcagctcttggcttcgggcctgccttctgcctccctttggatactgtgtcttccagggatcagctgcttggcttctgctggaggtgcctccctgtgggggcgcagcctgcctcctgctctcagttcctcgccagaggctgctgcccttcctggctgggctcaggaggctccttgtagacatatgatggggagggggtgcccctacccacctccaagaggctacagacctgtggctggccatgtgagccctggcctttcaccgggttgctggtttcttttctggggggcccaaacttcttgaaagcacacagatgtgggtaagatgaaaaactgtggcccaacagggctctaaccctatggatggggggatttttatccaatactttggcctggtgtgcccacaggatgggaacagggaggcaccatcaacacttgacatgtgaatgagcttttctttgctcgaggtgttcaaagacaagtcctgtgtctacctgcgtcagcctgaaaatggaaatattggctggtgactcttgtcatttagggacttcatccccctcccctcagtctgatcttggctaaacaaaatccaggcgttaggtggaatcatatcataagtatccatgaataaaacgtcttgatctgcctcggagcggggagaaacaggccctccttgaccttgtgcaccccccacttttgtcctgggctgtgggtggccatccattttgagcacctctgccagggctgcagacctgggaggcgaagggagtgtggaagaggagggtgtaagggtcgacgcgtgctgaatgggaggtgcaggtcctcggtgcgttggcagaagaggcttctgggagtttcgaggccatacctccttttcaagagcttttggattttgggggcgacttccctggggttttagggggagtgtttcctgttcccctgttcaggttcaagccctgcggagccactccacccctcttccccttcccctgggatttcctgacatagatggtgtgttcatgtgcaggtgtgagtgtgctgtccttctgatctctgttgatcccgctttcctactgagagggtggtggagagggtggtggtctcttctcacctcagtttttctgacacagcgaattgagggctttggccaaggccagggtctctcaaacttgtccgccaagtaaaccatgatatatgtcttcccttccaccttaactttgccccaactcctggttttatcctaacatgggacgctcagatttcagagggaatacccagcaggggacagggtcagctctcaccagggagagtgaggccctggggtgcttgcttcggggttgcactggtgttgctggctcagctcttggtgcatgtttcagatatgtgtgtacacttctgactggtgatcaaggcccggcccacggccctgagcggctgcagcctgctgttgggacgatggtcaggtcccatgttgtccctgctgcctccctctggagtggccacttggcaatagcgcccatccacatctggaaagtcggagccgcagcctgctgcaccgtttccgctctgggatcttgtgagttacttttttaggctgtggtttggtgaaaggaaccaacacattaacgatttttcccccagaagccactgaataattctttttggtgtatttttgccttcctgttggctgtctggccttggagcaggtcgggagagtagagtacataatcagtgccacacagaggcagggcgtgtctgagagactaatgcctgtcctgcctctggcctgtgtcctgggtgtgtaccatacctgctgggccagtcccacacatttccaccctgcccctgg

SEQ ID NO: 147579 - DNA, 1873 bp, Homo sapiens
tcaggttcatattgctaaactgcccagcagggagggattttttcaattagtgttctcactggtgaggcaaacctgatgccttcccctcttcctcagaaccggctttatcacattgaaaacctttgctcctccgacggatcgagtctgctttccctctggatgtgagcattgctttgtctgctggtgactgaacatctctaccttgtgtcaattggccatttgtcgtgtgtgtgtgtgtgcgtgtgtgtgtgtgtgtgtgtgtgtatgattttctaattcctagtcatttttctattgattgttttgcaaaagccatttacatcttaaggatattgataatcttttgttatatttgatgcaaatatttttttccagtttataggttgccttttaattttgtgtttcaggtagataaaagttaaacgattttcttaggttagtttatcactgtggtttctgaacttgttatgtgtagatcttttccaccccaagagtacataaatattaatccatactttcttatggaacttgtatggtttcgttttttacatttaaaccttcttccccgtggtgtgtgttgtggaatctgtgtttgtgtgaggaggggcatggtgctctcagaacccacctcctgtggccagagagccctgtcctgtgagggtggttatcacagtggcagggttcaattcagaagaccttgagggcaggctgatgtttcctgaatgggcccctggttgttgcttgtccctgactctccatttccccatttgagtggatttggaccttaatagggcactggagctggttcgaatcctgactggactacttggcaactttatgtctgggagcaagttacttaacctccccaagcctgtgtctgtgaaatgcgggtaaatgaatgtagatgtttggcagcagctactccttgttgagctctcacagtgaactctcctgcctctgccctccttccccgcctcccctggtgcctagcgtcaggtctagccacttcctcctgggcccctctcccttttctgtggctggctgcctgcccgcctggcgctggacctttcatgtaacgggaatcagcatgtatattctggtctggtctgtttctacacttaattgttgtttccagagagtattctccctgtaccggcagagttcacaaacacatttgaagaggctttttctcaggattcttaaccttcccaaaggaagtcccatggatgggtttctagaagtctataaatgctctgaaattgtatttttctgtggaaagcataactttcatctgcttgttcgtgctcaaaaaagatcatgaatgaatgattgcatgattttatgccattgtgcttatactaaaggatatgtagcccatctcttgagctgttaaactgttttgactactttaaatcgtgcagctgtgagcatctctgtaaatttagtgtacacatgtatcccctggagtggcattgcctcggcagtgagcacttatggttttataactctcttcacagactcaaatgactcccagaaagctacacttcctgttgtgagtatatgatatccatttccctacatagccactaacatcaggtttttacaattttatttatttcttgctactttaagaaatttttgtggtgaaatacatataatagaagttgactatctgaatcatttttaagtatacattcagtagtgttaagtatgtcgccattgttgtacaaccaatctccagaactttttcatcttgcaaaacaaactctgtacccattaaataacattaaacattccattccctccagcctcagcaaccccattctactttctgtttctgtgagtttgactattccaagcacttcatatcagt

SEQ ID NO: 147580 - DNA, 392 bp, Homo sapiens
  misc_feature (1)...(392): n = a,t,c or g
aaaaacccccgggggtttttcaaattttccggttttaaattttggaattttgggggggttttacccccccccttttcggggtaaaattttttcccaattgcccaatttttttttcccccggtttttnnnnnnnnnnngnnnnnnnnnnnnnnnnnnaaaacaaagttttgctttttttgcccaggattgagtccaatggggcgattccgggttgatgcaacctttttttcctgggttcaaaggtttttcctgcctcagggttccgaataactggggtttcaggggccttcccccaagccggggtaannnnnnnnnnnnnnnnnnnnnnnnnnnnnnnnnnnnnnnnnnnnnnnnnnnnnnnnnnnnnnnnnnnnnnnnnnnnnnnnnnnnnn

SEQ ID NO: 147581 - DNA, 291 bp, Homo sapiens
tcttcaagcaatcactatgtcaacagacacaggtgtttcccttccttcatatgaggaagatcagggatcaaaactcattcgaaaagctaaagaggcaccattcgtacccgttgtttttggagacagtcccgctctgtcgcccaggctggagtgcagtggcaggatctcggctcactgcagcctctgcctcctgggttcaagtgattctcctacctcagcttcctgagtagctgggactactcccgccaccacaccaggctgatttaatgtgtttttagtagagacggggtt

SEQ ID NO: 147582 - DNA, 1117 bp, Homo sapiens
gacgaggagcccggctgagggaggatgcgccgctgacgcctgcgggagccgcgcgcctggggcgggaggatgctccagaggggcctctggccgtggcgcacgcggcgtgctgccgaccccgtggcacctggcgcccagcgcgccccgtggccgctgccgcctccgccccaggttttgcgtgtgaagctgtgtggaaatgtgaaatacgtaccagtcacaccaattatagtaccgtggtgccacctgatgaaataacagttatttatagacatggccttcccttggtaacacttaccttgccatctagaaaagaacgttgtcaattcggtagtcaaaccaatgttgtcaacaagttggttcattccttcaggacctacaaaatgaagataagggtatcaaaactgcagccatcttcacagcagatggcaacatgatttcagcttctaccttgatgggatattttgctaatgaatgattttaaacttgtcattaataaaatagcatatgatgtgcaagtgtccaaagagagaaaaaccaagtaatgagcacactgctgagatggaacacatgaaatccttggttcacagactatttacaatcttgcatttagaagagtctcagaaaaagagagagcaccatttactggagaaaattgaccacctgaaggaacagctgcagccccttgaacaggtgaaagctggaatagaagctcattcggaagccaaaaccagtggactcctgtgggctggattggcactgctgtccattcagggtggggcactggcctggctcacgtggattatacttactcagctgttaagagtaggcaatttcttcagttcttccacaagaaatcaaagcaacagcactttgatgtgcagcaatacaacaagttaaaagaagaccttgctaaggctaaagaatccctgaaacaggcgcgtcattctctctgtttgcaaatgcaagtagaagaactcaatgaaaagaattaatcttacagttttaaatgtcgtcagattttccattatgtattgattttgcaacttaggatgtttttgagtcccatggttcatttagattgtttaatctttgttattaaattcttgtaaaacagaaa

SEQ ID NO: 147583 - DNA, 983 bp, Homo sapiens
ggcacgagccgggggactgcgagccagggactcgggccgcggggcgggaagaagtggggcagcgcttggccaggccgaaaggactttgggggtgggggctgggagtccgtgtctcgaatgagggaggagaggtggagttgccggggctcatgcccggcctccagcatgggcggatgagaggagtcgggagccgaggcctagggtccttctggtgaggggagacggagccagcgaggagatggagcagaagcttgtggaggagattcttcaagcaatcactatgtcaacagacacaggtgtttccccttccttcatatgaggaagatcagggatcaaaactcattcgaaaagctaaagaggcaccattcgtacccgttggaatagcgggttttgcagcaattgttgcatatggattatataaactgaagagcaggggaaatactaaaatgtccattcatctgatccacatgcgtgtgggcagcccaaggcttttgttgtagggagcaatgactgttggtatgggctattccatgtatccgggaattctggggcaaaacctaaggccttaggaaggaaggagatgctgttcttgggtcttgttgggagggagcttgcttttagtttaggatgtctttatttatttaaagtttacccattatttgttgggaaattaaactaatttggtaatgggtttagatgggtaacatgggcatttttgaatattgggcttcctttccttgcaggcttgaattttgcttggtgaccgaattactagtgactagtttactaactaggtcattcaaggaagtccaagttaacttaaacaatgtcacctaaatgcacttgatggtgttgaaatgtccaccttcttaaatttttaagatgaacttagttctaaagaagataacaggccaatcctgaaggtactccctgtttgctgcagaatgtcagatattttggatgttgcataagagtcctatttg

SEQ ID NO: 147584 - DNA, 1943 bp, Homo sapiens
  misc_feature (1)...(1943): n = a,t,c or g
atgccggccacctgggaagactttaagcagataataaagtgtgaaataacagttatttatagacatggccttcccttggtaacacttaccttgccatctagaaaagaacgttgtcaattcgtagtcaaaccaatgttgtcaacagttggttcattccttcaggacctacaaaatgaagataagggtatcaaaactgcagccatcttcacagcagtttattcacctactgaaggacatctgggatacttccaagttttggcaattatgaatggagttgctataaatacacatgcgcaggcttttgtttgcacggagattcttcaagcaatcactatgtcagcagacacaggtgtttctcttccttcatatgaggaatatcagggatccaaacttattcgaaaagctaaagaggcaccattcgtacccattggaatagcaggttttgcagcagttgttgcatatggattacacaaactgaagagcaggggaaatactaaaatgtccattcatctgatccacatgcgtgtggtagcccaaggctttgttgtaggagcaatgactgttggttctcttaacagtgataatgaacaattacagctctcagaagggtatcaatctgagggacttctcatagcagagcctaattttatatggacttataaacccatggaggaggcacttagccgtgcaggaacaaatggcaagcctttagcccgatctggagcggcaaaggggtgcctcgctggatcaggagcacagtggacaccctgctggatccggaagaatgtaagtcagcagcgagtctgctacggcggcaaaacagcagtggtggacaaaaaaccaagtaatgagcacactgctgagatggaacacatgaaatccttggttcacagactatttacaatcttgcatttagaagagtctcagaaaaagagagagcaccatttactggagaaaattgaccacctgaaggaacagctgcagccccttgaacaggtgaaagctggaatagaagctcattcggaagccaaaaccagtggactcctgtgggctggattggcactgctgtccattcagggtggggcactggccctggctcacgtggtgtggtgtactccggggatatcatggagccaggttacataccttaatcacatttgcaaattctatggtcttttttgcatacttttatagtcactcggacagggattatacttactcagcntgtttaagagtaggcaaatttcttcagttcttccacaagaaatcaaagcaacagcactttgattgtgcagcaatacaacaagttaaaagaagaccttgctaaggctaaaagaatccctgaaacaaggcgcgtcaatccctctggtttgcaaatgcaagtaggaagaactcaatgaaaagaattaatcttacagttttaaatgtcgtcagwttttccattatggtattgattttgcaacttaggatgtttttgagtcccatggttcattttgattgtttaatctttgttattaaattcttgtaaaacagaagtattgtttgaagttctcaactgagatttttactttttggatttttatgacttgctaatgttagaaagggcttgtatgcgtctatcaaagcaacggtggctgctgttagctaaaaatccttgtcagcttgtcccacgtttattctctatgtggaggtgaaagggtctgtgcttggcattcacttccattcttagacttattttggaatcatccttttaaaaaaatcagagaccaggtcttgccaaatcaaactcctgggctcaagcaaccctcctgcctcaacctcccacggaatcgtcttggcattaacttctttttttaatatgcagtagttgggagtaagatctttttatcatttatcaaaaaggcataaatgttccaccaaccataaagtatagttggtacttt

SEQ ID NO: 147585 - DNA, 1082 bp, Homo sapiens
gcggccgccgccatgccgtcgtccccgctgcgggtggcggtggtgtgctcgagcaaccagaaccggagcatggaggcgcacaacatcctcagcaaacggggattcagcgtccgatcctttggaacagggactcacgtgaagcttccaggaccagctcccgacaagcccaatgtttatgatttcaaaaccacatatgaccagatgtacaatgatcttcttaggaaagacaaagaactgtatcccagcgggttgccctttaaaaaccccccgtgtggtcctccctgggaaggtgttacgtgtgggctcgggcacaggaggcgtgtcaccctgtgcagtgcaaacactggctcctctgtcttttgcgagagtttggtttctatttctggggtgcacgttgggttcgttccacgggttagttccagtgccacccatgggcagtaggcgtggtgaggcgcacagacacggtgtggggttcaccctgacgtggttcagcagagggtcttgacatagcgtagaccagggatgcttaggtgaggaggtggaacccacgaaatcccattgcttttcacactgcagggctgccccgttatttcctttgcaggttggtgtgcgtgcgtgtgtgcgtgcgtgcctgatacacatggagccgggctgcttcacacatctggtgaggtcgttagaaggtcagataaagaagagggcggagcttgcctaaccaagcctgttagaagaaataatgggagagaaccattccttccatttccaggaggacacagagcaggctaggtctgcccgcgaagactcctatagagagaagagtattcttaaactagattctgatggacgcaacaccagttgcataatggttatgacaatcagtgcccgggtttttgaccaggcatttcatggtcacccccacgctaatggaaagtttctggatcttattttgttatagtgagtgatttgtagttttcagaacggaagccaggccaaacgtattccaaatgaaaagagaataagtgtcaaatgctaaacccttttatcttccgtgttggcactgttgccatccccgccctctcccc

SEQ ID NO: 147586 - DNA, 670 bp, Homo sapiens
gcacgagccgcggtagggtgggaacccaagcgggagagccgcgggatttgcggccgccgccatgcccgtcgtccccgctgcgggtgagcggtggtggtgcctcgagcaaccagaacgcggagcatgggaggcgcacaacatacctcagccaaacggggattcagccgtccgatcctttggtaacagggactcacgtgaagcttccaggaccagctcccgacaagtcccaatgtttatgaatttcaaaaccacatatgaccagatgtacaatgatcttcttaggaaagacaaaagaactctttacacagaatgggattttacatattgctggacagaaataagagaatcaagccccgggccggaaagattccagaactgcaaagacctgtttgatctgatcctcactttgcgaagagagagtgtatgaccgggttggttggaagatctgaatttccagaggaacagggagacctgcccagccccgtgcacgtggtcaattgtggacatccaagacaaccacgaggaggccacccttgggggcgttttctcatctgtgaagctctgccagtgtatccagcacacggaatacatgcataacgagatcgacgagctgctgcaggagttcgaggagaagagtggccgcacctttctgcacaccgtctgcttctac

SEQ ID NO: 147587 - DNA, 497 bp, Homo sapiens; identical to SEQ ID NO: 128346

SEQ ID NO: 147588 - DNA, 423 bp, Homo sapiens; identical to SEQ ID NO: 128347

SEQ ID NO: 147589 - DNA, 474 bp, Homo sapiens
catcagctcgcctgcaagaatgttccatctcattggaacagcttctaggttaatcctccgtacagtcacgtactctcctgttggtttgtaccttgctagattcacagtcatcaggtcctcaaatcctttgcctatcacagtgagcagctcgtaacaccctccctctggcagaaagctactcatgacctcctgtttagagaaggatgctattgactctgagctcgcatcattggtttttctctgagtgtcacccggaggctgctctccaaatagttccaaatctcttaagccctcaacaatgaacttttccgagacccaccgaagaaatgacatgagttcctactgtgtaggcctacttcagtttcaaaaacttaaacctgttcctggagttagcaagcagccccgaccgtcttggctccgcctcctcagttttactgccgcgccgccgccagacgaaatcgtcgacccgggaat

SEQ ID NO: 147590 - DNA, 1473 bp, Homo sapiens; identical to SEQ ID NO: 128349

SEQ ID NO: 147591 - DNA, 970 bp, Homo sapiens; identical to SEQ ID NO: 128350

SEQ ID NO: 147592 - DNA, 479 bp, Homo sapiens
cggacgcgtgggcggacgcgtgggggagccaagatggtcggggctgtttgctaactccaggaacaggtttaagtttttgaaactgaagtaggtctacacagtaggaactcatgtcatttcttgtaagtaaaccagagcgaatcaggcggtgggtctcggaaaagttcattgttgagggcttaagagatttggaactatttggagagcagcctccgggtgacactcggagaaaaaccaatgatgcgagctcagagtcaatagcatccttctctaaacaggaggtcatgagtagctttctgccagagggagggtgttacgagctgctcactgtgatagggcaaaggattttagggacctgattgactgttgaatctagcaaggtacaaaccaaccggagaagacttgacttgtccgaaggattaacctagaagcttgttccaatggagatggtaacattcttgcagaaagaagctaagtaa

SEQ ID NO: 147593 - DNA, 2244 bp, Homo sapiens
  misc_feature (1)...(2244): n = a,t,c or g
aggtnncccgcccccccccattgagcnccntattgataagcgttacgcacgacgnaccggnccgnaattnnnnttcgacgatttcgtcagcaaccggtctggcggcgttgcggcagtttaactgaggaggcggagccaagacggtcggggctgcttgctaactccaggaacaggtttaagtttttgaaactgaagtaggtctacacagtacgaactcatgtcatttcttaccaatgatgcgagctcagagtcaatagcatccttctctaaacaggaggtcatgagtagctttctgccagagggagggtggtacgagctgctcactgtgataggcaaaggatttgaggacctgatgactgtgaatctagcaaggtacaaaccaacaggagagtacgtgactgtacggaggattaacctagaagcttgttccaatgagatggtaacattcttgcagggcgagctgcatgtctccaaactcttcaaccatcccaatatcgtgccatatcgagccacttttattgcagacaatgagctgtgggttgtcacatcattcatggcatacggttctgcaaaagatctcatctgtacacacttcatggatggcatgaatgagctggcgattgcttacatcctgcagggggtgctgaaggccctcgactacatccaccacatgggatatgtacacaggagtgtcaaagccagccacatcctgatctctgtggatgggaaggtctacctgtctggtttgcgcagcaacctcagcatgataagccatgggcagcggcagcgagtggtccacgattttcccaagtacagtgtcaaggttctgccgtggctcagccccgaggtcctccagcagaatctccagggttatgatgccaagtctgacatctacagtgtgggaatcacagcctgtgaactggccaacggccatgtcccctttaaggatatgcctgccacccagcccaggtcctggttctgtcctccccagatgctgctagagaaactgaacggcacagtgccctgcctgttggataccagcaccatccccgctgaggagctgaccatgagcccttcgcgctcagtggccaactctggcctgagtgacagcctgaccaccagcaccccccggccctccaacggtgactcgccctcccacccctaccaccgaaccttctccccccacttccaccactttgtggagcagtgccttcagcgcaacccggatgccaggcccagtgccagcaccctcctgaaccactctttcttcaagcagatcaagcgacgtgcctcagaggctttgcccgaattgcttcgtcctgtcacccccatcaccaattttgagggcagccagtctcaggaccacagtggaatctttggcctggtaacaaacctgggaagagctggaggtggacgattgggagttctgagccctctgcaaacctgtgcgcattctccagccagggatgcagaggccacccagaggccctttcctgagggcggncccacattcccgccctcctggggaagatttgggtaggaaaggacatttttttccagggaaagtttgattgcttgattgattggggaaagaaaatcctgggagagacatttcattgttccaaggtttttgagacacaagggaatctcaacaaccagggatcaggagggtccaaagccgacattcccagtcctgtgagctcaggtgacctcctccgcagaagagagatgctgctctsgcccrgggagctgaattccaagcccagggtttggctccttaaaacccgaggaaccgccaacctcttcccagtgcttgcgaccagcctcaatctatttaacttttgctctcaagatgcctcagatgctaaaggtcagtgaaaagggcaagtagtaagctgcctgcctcccttccctcagacctctccctcataattccaaagaagggcatttctgtctttttaagcacagactaaggctggaacagtccatccttatcccttttctgggcttgggccctgacacctaaagtctttccccacggtttatgtgtgtggcctcattccttttcccaccaagaattccatcttaggcgcctcctgaccagctgccctggtgctttctccaagggccatcagtgtcttgcctagcttgagggcttaagtccttatgctgtgttagtttcgttgtccagaacaaattaaaattttcagagacgctgaaaaaaaaaaaaaaaaaagtcgacgc

SEQ ID NO: 147594 - DNA, 492 bp, Homo sapiens
tgcgtgcacgaattcggcacgaggtacagtctctcctcctcttttttaatgggtttatgtaggcacgtttggaaaactcagcaagttatactagatttttacttctcttcatcctcagtatattctgttcatcatgttagaagccttacttaaagacagactttaccttagctatagttttatttgctcttatttggcttcctaaaactagcaaacctcagctctaaatcttttcttttttaatctaaccttgtaatctgtgtgcttatttggttttcaagtacccaaaatagaatgatgattgatattatttaatactggagtgcctctccagtattaaataaagatgtgctaagcattatctagagcaaagatttagcccatcctcccgaagagcccatgctcaacaaaaaacacagacctcagccgggcgcggtggcttatgcctgtaatcccagcactatcggaggccagggcgggcggatcacctgc

SEQ ID NO: 147595 - DNA, 662 bp, Homo sapiens
cttgggactcccatttggaggcctcgctgaccccctgataatatctgaacgactatccttcgctcaccattcccagggctcaaggcccaggaatgttccccagggaagatcagcaaacctctccgacctccatcctggcctcagcttccaccaaaggaccagaggataaccaggcacccacacagaggcagccgaccccaaaactgcctcagccccactgggccaggcctgcccatgcagagtgacccccagaggccacaccccagactcaccaaggaaatacacaatggggccctcctagaggatggggctccaacctcaagggacccctaagtccaaaagatcatagaagtcttaagtttcagcttaaaagtgcgtgtcaattttacacctatctctgccacacacctgtatttgatcttgaaagaaaaagtaaggcttcccagttccctggctggatttaaggaatgaagctctagctataacaaacgcccgagtgaactcggaggcttgtgctctgagctcaggcccacccctcgtccagacatgtgcatctccagctgaggctggcgaagaagcaaggtgagtttccagctggtgagggtgcatctgatacttactaaccacccgaggggatcttaactccagagattcccacgaaa

SEQ ID NO: 147596 - DNA, 1605 bp, Homo sapiens
ttaggcctccagataactgcgggcaggcctgccggatgtcaggccctccacaagaggtggaagagcagagtcttctctaaactcctccagggaaagggacactccctttcccggtctgctaagtagcgggtgttgttccttgatactttttgctactgctagaccatggtccacctggcaacgggcgtcttcccagacgctggcgtcaccgctagaccaaggagccctctggtggccatgcgtggactccgggaaggtactgctccctccctccaaattctgagcagtaaaatgccgccccggggcactggggaacagaaaggaatgagaccccaacaggcagaagccaagagagcggggaggagccatggcgttctgccccaggatgcaccacgcctggacgtgctcccccgactcccagtgccaggtgcccatatgccacacctcagggttgtcctctgttcgggtgagctgcggactaacgtggcccggcagcagaggccaccgtcttctgtcccgtggctccaggcctgcgcgctccaggtcctgcggcaggatgcggcccttcttgcgggctctgagcaggcggcgctcggcgcgggccgccttcttcctgcgcaggttctgccgccgccggtcctggcgctgctgcatcttctccaccacgccggccgtgcgcttctcccaccggcgctgccgctgcgccctgcgcttctccttgcgcttcagggcctcctgcagcaggcgttcgtcgtcacggatcttcacgccctccgccttgtagaggaggttggtccacttcatcttcgcctccagctcctgcgccttcccctcatcctggccgcgcagctcgtccagccggctctgccgtgcctgcaggcgctccagcagctgccggtagttcctcccggtcagcggcgtgaggttccccttcaccctctgcctcttctcttttctgcgctgcgccttgctggccggctcgtcttcgctcacctccaccttattgaagatcagcccgggcggctcccgcggctccgtgcaggccccctctggggttgcctccaccacctcctgggcctccgtggcctcctcagccttcctggccttctctttcgcccgcagctcctttcgcttcctcttcttccggtcccgttcctgctttctccgccgccttttctccaaggcggcaggggacagctccttggcactgccctggccccgggcctcctggatcttctcatgcagtcgctgtcgcagaacatccagagcaaagacagactcaggctcagtggccaggccatctgcagggttccctgctgagctggaagcccaagctgcttcctctttggctgcctcaggcctcctggccccagaggctgctggagatttctcccccaaggacttggccttgtgctcagcagccttctcttctcgcttccggaatttcttttgtgttttcttccttttcttttttgggggccctgcagtttctgagccttgagttttgccagcccgcgtgcgcgcctgctgttccggggccgaatgggagcagatcttcttggccaggctctgcaggtaggcgtccttggcgagtagagaggccat

SEQ ID NO: 147597 - DNA, 842 bp, Homo sapiens
aaacgctgggtcaccactagaccaaggagccctctggtggccctgtctgggcataacagaaggctcgcactcttgtcttctggtcacacctcactatgtccccccagctcctatctctgtatggcctggtttttccctaggctatgattatagagcaaggattattgtaatattggaataaaaagtaattgctacaaactactgattaatgatattcatatataatcatatctaagatctatatctggtataactattcttgttttatattttattatactggaacagctcgtgtcctctgtctcttgcctcggtgcctgggtggcttgccgcccacatctcccccctttttattaactagaatcgccatcgccatcattgcttgttgttgacttcggacttggtttcggactccttagaggcatctgcagactaaaaggagacaacataagcataccaatattaataatgccagtaacaacaatgatcctctgacgggtttgagccatttgaagggattaaaatcagggtaattgtttagttatgccttcaaaaatgtgtgagccagggaactgtgggataaatggggcttgtgaagcctccaaagatttgctctttaaggttgtggaaatatcccaagggttaaggttatcatcccaggctttttaatgtcttgagacattttcccagctatgttgatcttgattataagcataaggcgttatgcaataatcagaagtattccaatcacactgtaattgcatacggtgttgcaagttcataactctatctcccagccaggttacactttggcggaaatccataaactgataaccaaattt

SEQ ID NO: 147598 - DNA, 1775 bp, Homo sapiens
aagtattcttgtctgatattttattatactggagcagctcgtgtcctctgtctcttgcctcggcgcctgggtggcttgccgcccacaggtatttggtaacttccctttctcttacctagttttggtatcaaagctaagttcacgaatgaagtgttctctcaattgattctgttagaatttgtctacgtctggaattacctgttctctatatcgtggaacttccctgtaaaaccgtctaggggaacattcttaactactgactcaatttcatcagtgattacaactcaggctttctattacttttagtcaagttttggaagatttttcttccatttactttgagttgttccaacttaagctgcatgcttatttttctttagctttaaaaatacagacatacagcgtatgtgtgtataaatggcactatttatgctgtagatgcacatacatttaggggctatgtttttctttgtgctgctttagctctgttccacaaatcttaaattttttctttttgagacagtcttgctctgtctaaaaaacaaaaaaaaatagctcaaattttttttaatgacattgggatacggtcagataacgacactgattccttgaaatatcttaagacttcttttctggacaaaytcaggtggtcagtttccatccatgttccatatatgcatggaaagagtatgtattcttttcagatactgttgtgtctgtctctcagctcaagctcatgctcacctcycvatcctatctttcacagggctttttcatcgagttgcctctgtctggtaacagtcacaccagctcctgttcagttacagtctttgtctcgtaaccggagagtttcatcaaaaagaattttatttacagctttatcatccatatgccaactaaaattcacccccctgttttctttcaacctgcactcattttgattgcctggaactctggatttaattcttccatcccactttgtatcttgcattcacttcactctctctccagcttttattctttctttctctttccctaggtccaatgcacttgacccaactcacatgcgtgggactccgggaaggtactgctccctccctccaaattctgaggcagtaaaatgccgccccggggcactgggggaacagaaagggaatgaggaccccaacagggcaggaagccaaggagaagcgggggagggagcccatggcgtttctggcccaggatgcaccacgcctgggacgtgctcccccgaattcccagtgtccaggtggcccatatggccaaacctcagggttgtcctctgttcgggtgagctgcggactaacgtggcccggcagcagaggccaccgtcttctgtcccgtggctcctgcgaacacaggcagtggggaaccaggcagtgactgcccacccacaccgttcctcctccctgaccctgcaaacctcggggaagctttcaggcccgggaaagcagaccaggccccagtctccctcaccctttccctgggtctgaaggtcccggatcctgcgttcaaggatgacgctgaaactctctctttctcacatgggatctgtgatctgggccctcacaactcagcagagcaccactgtgtccccctcacatggagaggccgaggtctgtggagatcctgggacagagccagcgtcaaggactcagagggtgtcctggagtctcctaggacggaagacggcggccccaggtgggaaagactcagaccaggcctgcgcgctccaggtcctgcggcaggatgcg

SEQ ID NO: 147599 - DNA, 481 bp, Homo sapiens
  misc_feature (1)...(481): n = a,t,c or g
attccacgagctacagcaggtcagggggcccttaagaaccgtccttttgtctcctggaaatggaggtcaaggctggcactctgttctacgggggattggggggattaagcaaaggaggagtggcagatgaaaagcaaagtgccccaccccatcccacaactgggcctggaactagagaggaccacaaagtgcttgggccaagcatggcggatctcatcatttctctgtactgcagatcacaccaccttcacctccatcctcgcctctgactccaacacccgatgccgtaaaccctgagccaaacgtctactgtgttctaggccctggaaatgcagaaccgttcgttcctgggataatcacctaactgatgaatcacagagccaaaatgattagatttactgggtcatcattgagtttagcagttaggactgaaagacatgtangaatgttcagattatgacagactgatgatcctctgtan

SEQ ID NO: 147600 - DNA, 5637 bp, Homo sapiens
gaggccagggggctgaaggaccacctggtacccctcggagaacaggcaaaggaaacagaagaaagaagcgagctgcaggtcgaggggctcttagccgaggaggggacagtgccccactgagccctggggacaaggaagatgccagccaccaagaagcccttggcaatctgccctcaccaagtgagcacgcccacttcatcaaggaagttgaaatggaaaaagattatgtgttgtcaattcaggtgaaagtcaagaaacatcagtggaaacaaaaatcttccttttattgaaaccattctacactatggaacatttttataaatagtaccagcggcattgcatagctttattttgaagcaagaaagagacttcaaagatcagcttattcaaccctctataaaaggatttatagattccttttatttaatagggtgattttctcatgagttttcaccatgtttaaaagacactgtgccccactctcatcccaaggtctatggtcaacttgactcaatgctcataactttcctcgctgattcctgcttatcctgctcctccaagcacaactgcatttcccaaaggtagatccagtaagcaatactctcaaagcacccaccctatgcacaccagtttccctcaagggactcaaaaggaatcgaggtagacccttctcagaggctgtttaactacagacacatcaggatatgtactaatacccaaaaccaaaaccaccaccaatgactgcaatagattcactgtctagacccaaggtccaggcagtttcccttttttgcatttccccaacatataaagataatttccaacatatcagatgcacattcaccagggttatttctggaaggtgaaggggtcaggtgtagaagaggtggcaagaatgacaagtgtgtggaagaactgttggccttgagaccacagtgaactggtggaaggggacttgctaagtgtggccacaaggtggcagtcacctcctgaaaccccgtgtgaaacgtcagcggggttgagaaaggccacgtctccaagtttccaggagagccaaaccaggactcaggaaaaccggccagctgatttgtatgggagattgatttgtaaaagaacaacaacaacatatggcagcaaggaaatgcaaagcaaacatctacaaatatttgaatccacctgtccctcacctaccaacttccccctctaccactcataaagtggtaggactcctaatgccccgcttccttccacctgagaaccaaccagcaccctgatatttcaaagccagacctaaagaaccatggttgccaataacctcaatgccaaaccaaacaatcctaatcacatttttacttttcaaatccagtctcagagcagagctgtagattaagggacaaaaagtcattgtggaatcttttcaaatagctcttgtaaaagcatcagttgggaaagagtttatgagttcctctttgtcctctcctctggagaaaagacagaacatgcaagaacactagatacaccaagctatgggtgttgaaatagactagctggtgacctggatttgcaaataccctagggacatgaaaacattttttctttttctttttcttttttgtaacctccacccagaatttcaggaaaggtggggccacatgcccaggatatatggtattctactgcttgctttcttatcaccagaatactagtcaatctgatttcttagttccatgtcttttcttccaaggaggtagggcatggggttgggggacactttccaccttccttgcatctcactgtccactcttaaatttttattaagaaacctctgaaagattcaaaattcagttcagtttcaataatcccaaagaagttgggataatttgttttcacttgcttcaaacttgccacggctgcaggaggagtctcaggacctcagaggaatggggcagatgtgtgaagtctgggagtctgcctcccacccagatgccaggagctgcatactcagctctgcctcacttccctgatggtctgctttcatccaggttaccatgacagagagggtctatcctctaaagaaagctgagttacaggctggcccctggggttgttcctgtagcctctctttgaccacattcctgaagatgtttagctgaatgcctcctcaaacctttgcttcttccataacccaatcctacacatatgtgataaagctttcttcaacaatactgggtcatttggacactaccagtccagatgagaactcacagaccaaatgaaaactttcaaaagcaagcagggaaagtaactcctatatgctttaagatgatgtattggtgtagattcaggtccaatttgaaaaaatgtctctggttctttctaattgtatccactctggatttgtttatgccagttctacattcatcaagccttgagaaacaggtggaaagaagaaaaatataaaattaagaagaagctgatggatcattggagattcaaaacaagccttctaccggtggcaccacactgaaaggcagagacaaggcaggagcggccatgggagaggaagcagcattggcttctcacgttctggcctccagcctcccaccagagcttctgccattcacccacttaacttgaggagaaactaaggcaccaaggcctgtcactgcaccgaaaaccagaagcagaaggactttctttctttgctcaaccagttctgcctggatctgacttttgcgtcaccagtagtcacaagcctgatttgtcatctccagcattctgtttatttttttaaggtcaatctttgcctgaaacatgacttcattgcacctgcagcacttcattgtccaaatgtccttggcaaacctcacagtctttggacagtgttgcattttctccaaaggggaaatcctctctccttcctcaagcttaataaggctcttgcagtgcatccaaataacacagctcttgttcctcagacacactcagccccctctgataacttcataaaacagctccttattgtctgggccatgaagccaggctaatgctaaagttccagttcaaaaacatttaactctattatccttatgaggccagctctcctgggtactggcactcactcactggcaccatggattcaggtcaggtggtgcaaacatcttccctgagaagcaagccatacacccaacaggtctagaacacctaggtcacaagaaagggtttcagtccagatgcactgtcagtaagtgaacacaaggacaagaatgcatgaactgttattttcttcccatcactggtttagcagcccctagggagaccctgtgttgctctttaatattctgacatggagcactaatatgctcaacactgcctccaacaggcaaatgttggaaatacactttcagagctggatgggactcaagatcatctaatataatcctctcattttatttcctctcaaggaaaccaagggcaagaaagtttaggcaatttgctcacattcacacaggcaattagtaacagagctgagttcgggtctggtataggctttttaatttgattctccacaaatgaacactaagataaatagcatttattgcatacccactatttaccagatactgtgcaaagggctttacatatattactttactaaatcctcaccataaactttaagtcaggtttaaccattttatagaagagggaagggagggccaggaaggttaagtaacatgctcaaagtcacacagctactaaatagagccataatctgaacctttgtctaattttgaagcccttgatttttccacttcatgaggctgctctttatatttatttagctgagtgaccaccatcttggattttactaatattcttacaagggggctttgatgccacttcttctgacttttaagaaaaggaaattcttgcattatttttgccatgtactccaggggaccctcaatctcatcatcatggggaataagaaacattctgacatctctttccttttctttctttttaaatttggtagacgagggagagggtccccaacagaatgagagggggaagataagaaccagaacataaacccaataccccccaccccactcttttgggaacatcccaacattagaagagtgggatatccagtcatttttttcaagctggagcaggcagtgtagccaggattgaggaaggagaagccacagaataaacatggcacatgttctcagagcatcaattttactccagaatttgggaagaaaggattatattattagtgtattcaaaccagtatggatagcacaaatgcagatatcctataaattttgaggctaactccagcaggttgtagactgatttaggctacctccttccagactcccaggggtacaaacaccttcacagtcccctgcgggagtacatcagtggaaatatttggggaatgaggctagaaggcaggagatacattcagtttacttatccccctggtttcttttccccactccttacctgccccacatccctagtgggtgggaaggcatcagaagacagttggctacaatatcagctttctctgctactttggggaatttagaaggaaatcagtacttggcaacctggtatttttagctgccaggccaaaactccagacataaaccccttccctttaattgaatgatgtttatatataaaggaatagatctccccaagaaagaaccccagaacactggttccattccagtgtgggggctgcttgggcagcagtgacacctgtgcattagatgcaatagacacttcaattcctggcaaaaatgtcggccaacttaagtgctcctttaccaacttgcgggaggcccaggattcacaccatgggtcccacaggattcaaggttttaggattttattgtggagtttatttttgggttaacaccaccaggctcctccttccaatcattcacacacacacacacacacacacacacacacacacatgccacacacacaccatgcatgccacacataccacgaggtgcacatgcacaaacacacacatcctaatgattcccaacctcgaatactccctcaggcccatggggatgccccaagtaccctaagcaaatcactgtgacactgagggggtcattaactggggctccgagcagctgaaacccaccctggtggtctctagattgttgttctgagtaatcataaacaccaaatcctccaatccctttgaattttgagtttgtccattttaaccctttaacggcccttttcgggtaaaaataaccaaagccccaatttattgacctttgtagcctacaatgagccttgaaaaagcgccttaccttaaaagaaagactggaaggaagaaaaaaaaaaagaaaatggagtacatactcctcagacgatgcacactttaattagctaaaataaaaataaaaatgtacagaggaagggagaggaaaaaccaacttctctgatcctttcatggcactgtagctcaaagactggaatctctgcttgttaaccattgttaactagtatttttagtcctggttgcttttagcctctgtatagttccttttttaaacacattttctatacgttaataaaagatcctgaaag

SEQ ID NO: 147601 - DNA, 1203 bp, Homo sapiens
gcatcctgaatgcccaggagacgtttaagttatttatgaaaagatgtgtgtacagagaggaagagggagcaaatgccgttcggattatgtttcgattataaatgaatgatcacctcgaagtcactttagaacacatgttgagatggtgacatttcccagcctgcctgcccctctgcccaccccggtcacattgccctgagcttctttccatgacagcagctccgacgagccggcaggaaacttcaatgcccctgctgggctccatttccatgtaaatggcgccgttcatatttcacagggacgccgtgcatcctccgccgtgcgtccccggcacgtgtttgctgtgctctgtatctctgtttttcttcctgggaaggtcaacataacttgaaaatgtgtctttctgtgggcccatgggtccgctgtgatgacatttaggacctcatttgtgctatggacctttgggctcatggaaaacacaaattttaacattggccaggttctagttgattttaaaaccacaactgcccacttggtgaaaacgtgctctcgatgctgatttgtggtgtgctgcttgtccacagataaaccagtgccattagatggaaggcagaggatactgcgaccacccctggcagacggtggcgtagacaccaggtgcgccctctggggctcagagcaacggatggtcaagctgcgaacagtctcgtccggatgttggggaaaaagggcccctaggccgcgccctttgtgtcccctgtccttcctctcccacccacccaaaagcaaaagatggatttcccccattcactgcagtcatcctgacctcattttaatatcctgtggccaagtgaccaatgaaatgtccagaacctgccccaaaggataccccaagtgatccataccgatgatttgccatgatcgggtcctatttccaccccaatagtcacttgtgtgtccccccgaaattgggatgggtgagcacccttgtctgtggtgtaaacttcctgttatttaatctcccccacggtttcatttttctcttctgttaatacttagaactttctaagaaactccatgaaatgaggaaatactgtttctaataatatgaggaaagaagtaaaaatgttcattccaagtggcaagtcttattggacacattttaaataaaatcatgcatacctgaaaaaaaaaaaaaaaaaa

SEQ ID NO: 147602 - DNA, 1902 bp, Homo sapiens
  misc_feature (1)...(1902): n = a,t,c or g
agcggccgccctttttttttttttttgaatgatcattatctttattcatacacacttgcttccaaactacaattaatgtttctaacaaagacgtatcatgcaaacggagattagaggttatacaaacctgaaaaaaaaaagcaatgcagtaatttacacatccgtctcctctggctatataaccaaattggttgtttgacggttgaatggcctctacattttgtcagtaggtgcttatacagaaggaaaaaccctcaacctccgtctcttcctccaaacaaagtttggggcttatatgatgtttttcaattaatgatttaaaacgtgggtatgtccttcacacacacaaatcatgtaggcaaaagcaatggacttccaaatggctttcctggttttataaaagatatttctggaaagacccctaacagaaagggatgtgagggttaatttttaggaaaacctttagacttcaaaatagtaactgccttcatgattgattttggaatattcctagtaaaccaaacccttcaagaaaagaatgatattcttcccaggaagaatatcaacaaaagtctacaatcacaggaatggatactcctaaagttaagcagaggtgacaaagacacagtcgttttaatcagaaaaatgcaaagccaccttttatcttattttagaaaaaaaggttcttataaagtggacttgacacctattttctgaaaagccgagttctgtctactcgcgtaatgtggtaactatgaaacagacgtcaataggcaccgtttgctgctgcctcttatatcttgggagatcgaagtatttctgagttcgccagtgggcaaaatccttacagggcaatctctgaaatctttcacccaaagttgagagacctggggaccaggcgggtctgggcacagagcccaaggaagcatcctcctcttgccaaaagatggcccacagaagcctcacggagcaaggaaagggggtcccagaaacccctgggaatcctattccagggctgccctctggatgggggacaactaaaaatgtcttttcctgtggtttggaagtttctaaaccttaagcagttgtccccagtgtctattaaaaacttcgcagagcatcagtcggccaagttccacctgaacttgcagtcattcccacgtggactccataccctaggagcatgggaaaatctggcagtgggagatcaggtcgggggtgctcccagctgacccccggcctaagtccctccctacaagctcccagggcattggaaccttaggaaatcgtcagttgcctttgttcctaaaaactcatttttaaagaattattattaaagttctctataaaaaagtacaaatagcccagtatattcagttgctctactggaattaacaaataatttcttcctttaggttaagaaaaagtctttggaatttgggggcttttgtgtagggtcactgtaaggctgttggatggtctgagtgtgnacctccacggttattaactgtcacctgatcacataaatgggaggtcacaggggtcagaatccttcatactgttgaccttcccgaagaatccctgacactacggaattaacacaattgtggttgaccccatttctagatgatggccttcatccatgtgtgcgtcaggtaaccttcccaatttcctggatcttctagcagcagaaacaggtaacattccctggatctgctgcatcagcccaaatgggaggagacaggaatgttgaccgtccagtgtatttcacatgtagcccaagcagcttaaggaaaatgactttaaaaaaatattttggctgggcgtggtggctcatgcctgtaatcccagcactttgggaggccgaggcaggcagatcatgaggtcaggggttcaagacca

SEQ ID NO: 147603 - DNA, 1742 bp, Homo sapiens
agatcgtcagtgcctgagaaagaacattgacttactctatatcaattgaggggaaagcgcagtaccgtcatcttcaatgccttgtaagcataaaagagaataggctgcccatataagtcaaaggaaaatgagcccaggccttgctatgaagcagtgtgtgaatggacaatgttgaatgaatgtctggctcagtgatggagagccaggttcatctttgaaatctagggctctctcactcatgaagcagactcctagtcctggagtgactgtgtacgagagcgttggttgtgggtgctgtatgtgaaccgcatgcaagcttgatttcaccttcagggggctgataacctagtaaatcatcaaaatgagatcataagtgttaatgtacactggacatgaaaacaaagactggtttagcagcagacattggtttactctgcagcctgtgttatctgtttcccccatttccacctcctttcccccaacccaatccttttttttttcttttttgcttttcttttctttttttttagtttttatttactttacctagtatgcctttttttagttgcttctcaagtcagaaaacttttcacggaacggtttcccctgtgcatttgcaccaagatgaatgtttgatgctaatgaaaagctttccatatcatcaaaactaatttgtgtaggatttttgccatgaaaaaaaatccataaatttccccctcaaaataggactgtgttggcaggtacacaagttgcccctaatagtataaaaacagtaaaatgtgccttaaaaggcccatcccttttccattttccagagataacataaagatctttgccatgaggtaaatcctacagcatagttcatttttagattttgttgagtcctgtaaagaagaagaagaaaaaagtttcagttgtggtagaataccgtgctgtgtttaaatgttacttgttttcaaactttgttttctatgaaaatgatatggaaacttctaaaatggaatttggtgcatatgtactgctgaataaagaccgatgaagaggtttgagtagatgtacaaatcaagtaatggtttgaacacctttaataatatgcctaatctgttcaattgttttaggaatctttttatcttaggatgtagggccagccctggaaccaatctatttggagcccactttagggggaggaaactttgtatttttttaaaacttgcccttaaagttatggccagtgggggtttttattaattgggggataataccctcagttttgagggttatgcacactaaattaaatgtgaccataaattaatttgtaccaaaaaagaacccctttataagggtgggctcattgtaggggaaatccctgtgcccttccccctttgagccacaagtgttggccatgaaccaaccagtttggcctataagaaaccataccccagattaggcccacccttagccatcctatatcctaccttgtgtttaaaaatccaactggtaattcctgaaacactgtagaatggataaaaattattttgtgatcataactctttgttgaactagagtatttttggcagcattccttgtcatcagaaacatggttaaagtttaaaactagaagcagcagaaaactagcttgtaaaatttatccaagtagagtgcaggcttaggctgtcttggggaaataaacattaaaacttaaaaaaaaaaaaaaaaaaaaaaaactcgagggggggcccggt

SEQ ID NO: 147604 - DNA, 412 bp, Homo sapiens
tttcgtcatggcagcggaggagaaggaccctctgagctattttgcggcatacgggagcagcagctcaggctcctcggacgaggaggataacatcgagccggaggagacgagtcgcagaaccccggatccggcgaagtcggcgggcggctgtaggaacaaggcggagaagcggctcccgggacctgacgagctgtttaggagcgtgactcgcccggcctttctctacaatccgctcaacaaacagatagactgggagaggcacgtcgtcaaggcgcctgaggagcttctccctgagaccccttccctttgacgccgaagtgcctgcggtgctgcctccaagacagtgtctgctgcagcctcctgaaggggtcagccttggcgtagtatctctgagactggattcttctttgcc

SEQ ID NO: 147605 - DNA, 1448 bp, Homo sapiens
  misc_feature (1)...(1448): n = a,t,c or g
cctggggattgattcaatgctgtngcgcctgccgnaccggaccggaattcccgnnggacgatttcgtggaccctctgagctattttgcggcatacgggagcagcagctcaggctcctcggacgaggaggataacatcgagccggaggagacgagtcgcagaaccccggatccggcgaagtcggcgggcggctgtaggaacaaggcggagaagcggctcccgggacctgacgagctgtttaggagcgtgactcgcccggcctttctctacaatccgctcaacaaacagatagactgggagaggcacgtcgtcaaggcgcctgaggagcctccaaaggaattcaaaatatggaagtcaaattatgtaccacctcctgagacctacaccactgagaagaagcctccgcctccagagcttgacatggcaataaaatggtctaacatatatgaggacaatggtgatgatgctccacagaatgctaagaaagctaggcttctaccagaaggggaggagacgttggaatcagatgatgaaaaagatgagcatacttctaaaaagcgcaaagtagagccaggagaaccagcaaagaagaaaaagtagaaacaaatgaccagaatttctgtactgctaaacttgttgaaatgtttctttggacagattaagttgatattgtggggttattatgccacatctccatgaaaatgccataccgttaatgaacctaataagtattgccctcaagaactttcccactatagaattccttttttaattaaaaccatggaaggaatttaaacctcaactgggtgacttgtgattgtgaaattgataacaccttggaatgcattcttgctcctcacagaattggtgacatgctttgagagttttgtcacatgttgacatgccaatgttcttataaaccttttataaaggaatatatttttaaagtaaatatattgtaatgtactgtgaacttgtagggtgcttttcaacagtctttgtacagtgtaaatagatcatggaaataaaattacttattcaatattactattactgtataacatttgcatttgaatgtttgtatgtgacaagtgccctatttgtcgcgtgacggttttaagttgtaaggggaagtattaccatttacagagtgcctgctgtgttccaggtgctttgggcatatattttctctgatccttagacaacctagcgcacggtattattagtattctcattttataataaagagtgcttgagtagcttgtctgatgctacacagctaatgagtggatcatttggaatttaacttgggacacttgaacctcacaatcatcacattaaaccacctgttcaccagtcaaaatttagtcatctttcaggaatgacatcaattgtcatctcttccaggtacttttttctgttgtacctggagatccgttagtacagact

SEQ ID NO: 147606 - DNA, 1427 bp, Homo sapiens
tttttttttttttttttggccagaggctttgcagggtgatgtttatttgccaggttcagtaggcacacagttaacccaccgaccttcacacaccagagcagacccacaggcatgcagggagaagggctaggaccaccacggagtgccgagcaagggcgaggaccaatgtggctgcctatccaggctgtggtagggtctgacaaagggcacctgtcaggagccctccctcaggaaactggggagtttaaccctacttcctcatcccaaaaaaagcaactcaatgtggctctgaggtcacctgggcctctgatagaagttagctgtagaaagagggagttcctccttcatttccattgtttggaacttgaggcagaaaaatctgcccctgtaaaagggcaaaacctccaaatcagattatggagttatttgccattgcaggcaagccccctagggttggagaggacttgtggggctgagattgtaggaggtgggcatctaggaagagcaaggaggtatcagccctccctgtttggcccagggtaaggacccagtaaggctgggacactgggtgctgggcttgtactctgccctgccaggtctcattgccacgtcctaattgttcctcctttcccttagaggctcatgaggttcagggtacagggcagcccactgcaggactcggaaaggcaggaaataacccaaataacagggttttaggaaggacaaaaatggaagcttctgccctcctactcattctctccactcctgaggacctccgcagctagtgagcagtatccctagccatgtgccaagtctggacttaaacatactgccctacctttctgcatcctctataccagcctgtatctgctcctagagcagcccacacaccacaggcacacaccttcatgtgcaggagcctaagaaccgactgaacagggacctcgactggaggaccagctactccagggaaaggaccgacccaagtttagggacctgggagaagtgtgggacctgcagggacctgcctaggggaatggtgaggcaagaagggaaggggaaggagagcaggagccccctgagtatccctagagcagcatcccacaaggaacagaaactggtgaagctagcaaaagacagaaaagccacaaggaatccatgcaggggctggggccggccctgccactggcctgcccaccactcacacacatacacacaggagacgagactgctctcccgtgacccctagttatgccccactgggatgtgggggcatgggggagcgagggcatcatgccagtgactctatgtacagtgagaagcccctcatccactctcccaccctcctgcccatcccctgccccccctcaccaggctgcctactcagctggcctcctccctttgaggaattccaccgcactggacta

SEQ ID NO: 147607 - DNA, 1266 bp, Homo sapiens
atgcctccaggcgtcttctctggcttgaccctcctcaggctaaacttgaggagtaaccacttcacctccttgccagtgagtggagttttggaccagctgaagtcactcatccaaatcgacctgcatgacaatccttgggattgtacctgtgacattgtgggcatgaagctgtgggtggagcagctcaaagtgggcgtcctagtggacgaggtgatctgtaaggcgcccaaaaaattcgctgagaccgacatgcgctccattaagtcggagctgctgtgccctgactattcagatgtagtagtttccacgcccacaccctcctctatccaggtccctgcgaggaccagcgccgtgactcctgcggtccggcccaatagcaccggggcccccgcgagcttgggcgcaggcggaggggcgtcgtcggtgcccttgtctgtgttaattctcagcctcctgctggttttcatcatgtccgtcttcgtggccgccgggctcttcgtgctgaaacccatcgattattatggggaaatctgtgacaatgcatgtctctgtgaggaaaaggacggcattttaactgtgagctgtgaaaaccgggggatcatcagtctctctgaaattagccctccccgtttcccaatctaccacctcttgttgtccggaaaccttttgaaccgtctctatcccaatgagtttgtcaattacactggggcttcaattttgcatctaggtagcaatgttatccaggacattgagaccggggctttccatgggctacggggtttgaggagattgcatctaaacaataataaactggaacttctgcgagatgataccttccttggcttggagaacctccagtacctacaggtcgattacaactacatcagcgtcattgaacccaatgcttttgggaaactgcatttgttgcaggtgcttatcctcaatgacaatcttttgtccagtttacccaacaatcttttccgttttgtgcccttattgcacttggacctcccgcggaaccggctgaaacttctgccctacgtggggctcttgcagcacgggggtcctttagagtcgcacaaaacagggcattcaagccctcactttcgggacagcaggctacgggaaccggtgctctacagccccccgagtgctgtctttgtagaacccaaccggaacgaatatctggagttaaaagcaaaactaaacgttgagccggactacctcgaagtgctggaaaaacagaccacgtttagccagttctaa

SEQ ID NO: 147608 - DNA, 4597 bp, Homo sapiens
tgcctgatttaccgggccgacgatttcgtcttcaaggggacaaaatgagagcaagtaattaaagggggagggggtcatattgatggcggtgggagatgaaattgggatattaaacaactgacctaagtcgcttacagttcttcctcccacctttctattttgcctcttaatcagcccaggcgtcctttccctgagattaaaaaaaagagagaggggagcgttaacaattaaatgtaataagcaactccaaagatggggatgctgtcgaggtggtagttccgtgcaaaccttgctattaccgttgcaaatagacgcggagcccaaggaggtaaaatgcacacttgctgccccccagtaactttggaacaggaccttcacagaaaaatgcatagctggatgctgcagactctagcgtttgctgtaacatctctcgtcctttcgtgtgcagaaaccatcgattattatggggaaatctgtgacaatgcatgtccttgtgaggaaaaggacggcattttaactgtgagctgtgaaaaccgggggatcatcagtctctctgaaattagccctccccgtttcccaatctaccacctcttgttgtccggaaaccttttgaaccgtctctatcccaatgagtttgtcaattacactggggcttcaattttgcatctaggtagcaatgttatccaggacattgagaccggggctttccatgggctacggggtttgaggagattgcatctaaacaataataaactggaacttctgcgagatgataccttccttggcttggagaacctggagtacctacaggtcgattacaactacatcagcgtcattgaacccaatgcttttgggaaactgcatttgttgcaggtgcttatcctcaatgacaatcttttgtccagtttacccaacaatcttttccgttttgtgcccttaacgcacttggacctccgggggaaccggctgaaacttctgccctacgtggggctcttgcagcacatggataaagttgtggagctacagctggaggaaaacccttggaattgttcttgtgagctgatctctctaaaggattggttggacagcatctcctattcagccctggtgggggatgtagtttgtgagacccccttccgcttacacggaagggacttggacgaggtatccaagcaggaactttgcccaaggagacttatttctgactacgagatgaggccgcagacgcctttgagcaccacggggtatttacacaccaccccggcgtcagtgaattctgtggccacttcttcctctgctgtttacaaaccccctttgaagccccctaaggggactcgccaacccaacaagcccagggtgcgccccacctctcggcagccctctaaggacttgggctacagcaactatggccccagcatcgcctatcagaccaaatccccggtgcctttggagtgtcccaccgcgtgctcttgcaacctgcagatctctgatctgggcctcaacgtaaactgccaggagcgaaagatcgagagcatcgctgaactgcagcccaagccctacaatcccaagaaaatgtatctgacagagaactacatcgctgtcgtgcgcaggacagacttcctggaggccacggggctggacctcctgcacctggggaataaccgcatctcgatgatccaggaccgcgctttcggggatctcaccaacctgaggcgcctctacctgaatggcaacaggatcgagaggctgagcccggagttattctatggcctgcagagcctgcagtatctcttcctccagtacaatctcatccgcgagattcagtctggaacttttgacccggtcccaaacctccagctgctattcttgaataacaacctcctgcaggccatgccctcaggcgtcttctctggcttgaccctcctcaggctaaacctgaggagtaaccacttcacctccttgccagtgagtggagttttggaccagctgaagtcactcatccaaatcgacctgcatgacaatccttgggattgtacctgtgacattgtgggcatgaagctgtgggtggagcagctcaaagtgggcgtcctagtggacgaggtgatctgtaaggcgcccaaaaaattcgctgagaccgacatgcgctccattaagtcggagctgctgtgccctgactattcagatgtagtagtttccacgcccacaccctcctctatccaggtccctgcgaggaccagcgccgtgactcctgcggtccggttgaatagcaccggggcccccgcgagcttgggcgcaggcggaggggcgtcgtcggtgcccttgtctgtgttaattctcagcctcctgctggttttcatcatgtccgtcttcgtggccgccgggctcttcgtgctggtcatgaagcgcaggaagaagaaccagagcgaccacaccagcaccaacaactccgacgtgagctcctttaacatgcagtacagcgtgtacggcggcggcggcggcacgggcggccacccacacgcgcacgtgcatcaccgcgggcccgcgctgcccaaggtgaagacgcccgcgggccacgtgtatgaatacatcccccacccactgggccacatgtgcaaaaaccccatctaccgctcccgagagggcaactccgtagaggattacaaagacctgcacgagctcaaggtcacctacagcagcaaccaccacctgcagcagcagcagcagccgccgccgccaccgcagcagccacagcagcagcccccgccgcagctgcagctgcagcctggggaggaggagaggcgggaaagccaccacttgcggagccccgcctacagcgtcagcaccatcgagccccgggaggacctgctgtcgccggtgcaggacgccgaccgcttttacaggggcattttagaaccagacaaacactgctccaccacccccgccggcaatagcctcccggaatatcccaaattcccgtgcagccccgctgcttacactttctcccccaactatgacctgagacgcccccatcagtatttgcacccgggggcaggggacagcaggctacgggaaccggtgctctacagccccccgagtgctgtctttgtagaacccaaccggaacgaatatctggagttaaaagcaaaactaaacgttgagccggactacctcgaagtgctggaaaaacagaccacgtttagccagttctaaaagcaaagaaactctcttggagcttttgcatttaaaacaaacaagcaagcagacacacacagtgaacacatttgattaattgtgttgtttcaacgtttagggtgaagtgccttggcacgggatttctcagcttcggtggaagatacgaaaagggtgtgcaatttcctttaaaatttacacgtgggaaacatttgtgtaaactgggcacatcactttctcttcttgcgtgtggggcaggtgtggagaagggctttaaggaggccaatttgctgcgcgggtgacctgtgaaaggtcacagtcatttttgtagtggttggaagtgctaagaatggtggatgatggcagagcatagattctactcttcctcttttgcttcctccccctcccccgcccctgccccacctctctttctccccttttaagccatgggtgggtctaactggcttttgtggagaaattagcacaccccaactttaataggaaatttgttctctttttccgcccctctccttctctcctcccctcccctcccttctcattccttttctttgtttttaaaggatgtgtttgtatgcattctggacatttgaattaaaaaaaaagtattgtgatcctgtaaaggatcaccatagatgtggacaaatcattaaaattacagagctatatgatccataattgattagtcaaaataacttattgatgaaatatacaaatattttattgtagcacctatttttatatgcacatttagcattcctctttccttcactatttagcctatgattttgcagaggtgtcacactgtattaggatctgcatttctaaaactgacgtggtatcaggaaggcattttcaatcattcaaaatgtggagaaatttaatgggctaaatctttaaaagccaatgcaacccacccaattgaatctgcattttcttttaagaaaacagagctgattgtatcccaatgtattttaaaaaatagggcaattgattggggccattcccgagagaattgtttgcaagttttgggttttattagaaaatatttgaaagtatttttattaatgaaccaaaatgacatgttcatttgactactattgtagcccgattttcgattgtttaaccaaacccagttgcatttgtacagatccacgtgtactggcacctcagaagaccaaatcatggactgtacaagtctctatacaatgtctttatccctgtgggcagcaagcaatgatgataatgacaaacaggatatctgtaagatggggctactgttgttacagtctcatatgtatcccagcacatgtaattttttaaatagtttctgaataaacacttgataactatgtcaaaaaaaaaaaaaaaaaactcgagggggggcccg

SEQ ID NO: 147609 - DNA, 341 bp, Homo sapiens
  misc_feature (1)...(341): n = a,t,c or g
ctgcttgtgaatagctggagcaaacctggggctgacacgcgtaantagggctgcaaagcgagaagagagccggtggagtgtacttgtccctgacaggctgacctacctgagtctctgagcttttcagtccaaatctttgcaaggctcaaaatgccacagaacctctcctcttctccccactccccatggcaggggaccggaccatccctacatcgcaacatgctgttctctctncnctnnngttcggccccagaaatcacttcctaggacacccgaagctgcttgcccagggtcctagttgtcccttgctancttccaagaagaaagcatcccaaggggtt

SEQ ID NO: 147610 - DNA, 1613 bp, Homo sapiens
  misc_feature (1)...(1613): n = a,t,c or g
gcatgccaagagctagagcatgaaacagggccctttccaagtaggctctgggtgtcctaagccagcgtgtgccctctggtttagtgagtgtaatagagtccctggcacctttctttgcaaatgaaggctaacagaccagactgcagcaagttatcagattcctcaatcagatgcactaggagtgaggagcccagggatggagggggttcctgaagtattgcagttggctgtagtagctgagttcttttccatgttaacggaaactgtagccagttacagtttacttcaggaaaacggtagatcaatttcagccatgggtagtgctggtttnggcagggattggtaacggagagaacttgctcattcagccaaaactccaagccttgcctttttagggaggccacccagcagaggggacttggtcctaccttgtcttggtacttgtgtacatgccggtgacctgaggactccactcacactgggcgagcaaaaagggagcagtgattctcttttctctccccaccccctgccctttgtttaccaacaccagttttcccagggggtaacatgagttttctgaaatttttttaaaaaatgtttttggtttggtttttctggggactgataaagtgctataaaacaatgtccatacccttttcaagactccctttttagtcatctttcttgtgtgttttctgttcacagtatttgtgtgtgtgcttgttttgggcagctcattttgggctgtattattatattggagtggatgaattggatcctcttttttccctaaggggattatggaattgtttttcttgtgttattattctgcttgtggaataggctgggagccaaaccgggggggctggacacgcgtaagctagcggctgcaaagcgagaagatatgccggtggagtgtacttgtccctgacaggctggacctacctgagtctctgagcttttcagtcccaaatctttggcaaggctcaaaatgccacagaacctctcctcttctccccactcccccatgggcaggggaccgggaccatcccttacatgtaacatgctgtttcctccaggcccctcccatttgccatggcaaaaacagggtaccttttggggggcatggggggcattacatggggaagcttggtgtaaatcgacccaccctagcccttcctctctctcccctccccgtccctcccccccagaatcaccttcccctagggacaccccgaagcctgccttggccccaggggtcctgtttcccctgcctaactcccagaagaagcatccccagggctttgtgacaytctctaattcccttcccttctcgttaagaatcataattgtatagtagctttcagaccatacagtattcattgggttactccctattattatcaagtagctggaattgtgaaggtcggagtagttagatcttctagcttttattccttattttgtttggattactctccagtgtgtataaacttattgatcatgttgttggcttttataaactctaagcagaagtaggagctctgcctcagcctttgcacatggtaatgaagcactgtttttaaataaaagagagaaacaccattaaaaaa

SEQ ID NO: 147611 - DNA, 582 bp, Homo sapiens
atgtcgggctgggcggacgagcgcggcggcgagggcgacgggcgcatctacgtggggaaccttccgaccgacgtgcgcgagaaggacttggaggacctgttctacaagtacggccgcatccgcgagatcgagctcaagaaccggcacggcctcgtgcccttcgccttcgtgcgcttcgaggacccccgagatgcagaggatgctatttatggaagaaatggttatgattatggccagtgtcggcttcgtgtggagttccccaggacttatggaggtcggggcagctggcaggacctgaaggatcacatgcgagaagctggggatgtctgttatgctgatgtgcagaaggatggagtggggatggtcgagtatctcagaaaagaagacatggaatatgccctgcgtaaactggatgacaccaaattccgctctcatgagggtgaaacttcctacatccgagtttatcctgagagaagcaccagctatggctactcacggtctcggtctgggtcaaggggccgtgactctccataccaaagcaggggttccccacactacttctctcctttcaggccctactga

SEQ ID NO: 147612 - DNA, 486 bp, Homo sapiens
atggccagattccagatgtattctgaagagatgcagaggatgctatttatggaagaaatggttatgattatggccagtgtcggcttcgtgtggagttccccaggacttatggaggtcggggtgggtggccccgtggtgggaggaatgggcctcctacaagaagatctgatttccgagttcttgtttcagctggcaggactgaaggatcacatgcgagaagctggggatgtctgttatgctgatgtgcagaaggatggagtggggatggtcgagtatctcagaaaagaagacatggaatatgccctgcgtaaactggatgacaccaaattccgctctcatgagggtgaaacttcctacatccgagtttatcctgagagaagcaccagctatggctactcacggtctcggtctgggtcaaggggccgtgactctccataccaaagcaggggttccccacactacttctctcctttcaggccctactga

SEQ ID NO: 147613 - DNA, 441 bp, Homo sapiens
  misc_feature (1)...(441): n = a,t,c or g
tcatctagtcagtgcggtggaattcaatttgctatgcctaagtccttcagggtcatagctgaaagaagtatgcattcatggtacgtttgttttttaatatgctttattctgcatattagtatcacattacacagtttggtcatggtatttgtaacctggagagaatactagtgcagtcggtcttcataccaccccattcacaaccagcttaaatggcagtatccctctgtgaactcaactacccctcctgtgggtccaggctgagctctacaggtcagcctcttcatctcagcccttctaggtcctgctgtcagggctgagctgtcacttcacttttttcccagagtagtgcagcatcctctctgaaacctgagctatcatgacattnnnnnnnnnnnnnnnnnnnnnnnnnnnnnnnnnnnnnnnnnnnnnnnagagaca

SEQ ID NO: 147614 - DNA, 1987 bp, Homo sapiens
  misc_feature (1)...(1987): n = a,t,c or g
acaaagccatggaatttgctatgcctatttccttcagggtcatagctgaaagaagtatgcattcatggtacgtttgttttttaatatgctttattctgcatattagtatcacattacacagtttggtcatggtatttgtaacctggagagaatactagtgcagtcggtcttcataccaccccattcacaaccagcttaaatggcagtatccctctgtgaactcaactacccctcctgtgggtccaggctgagctctacaggtcagcctcttcatctcagcccttctaggtcctgctgtcagggctgagctgtcacttcactttttttcccagaggtagtgcaagcatcctctctgaaacctgaggctatcatggacattttcttttttaattttataatttttatatttctctaatttttggattttagaggacagagtcttcattattattgcccgagggctggaccttggaactccggggggcccaagcagtcctcccacctcagcctctccagtagttgggactgcaggcatggaaccactgtgccagggttaaaccgtaacattttcttgtggttgattatgtcacccttcagactcagtagttcttgatgtctttccttgtaggaaagcagctgctgttttggatctcagtttgattgaggtggtgactatccctttggtaccattgagaccagaaaccagaccaccaagtggacattggttttttctgggtatcctggcctgccttactatgaaaattacggatggttggggacacaggtctctgggctcatttctttttctgaggattcatataattgcctagtttttgggcttagaggttggtccttccctggtttaatgatgcttttgttcagactgtcctctaggacttgaatttgaagcagaaacagaacagcaacctgatcctcagttatactgcaaagcagggcctcagaaagggtaactccaattactgactttcacctaaggtgaaaaagcatccggcctcctttccccttgggcnatctttggaaccttcctgaaaaatggtggctgaaaggccagagggccctggggacaagcccagccctggacatgccctccctctgcctgccttattaattccttacctgaactactcttgggacctcgattccttcatgggcaaaatggtcacataatagcacccatcaccaaggactttgccaaggaatcttggagcaaggaggataacggtctaaagcatcttagctcaggtccttcacatctggaagggtaattaaaaataacaggcctagctccctccccatagatgcccccatcccaaagatgccatacatgaggtggcaggggattaaactatatgaccccctgagatcctttcccagttccttagctttgagggggatcaatggcagtaattcagatatattgtttatcatagttaattgagtatcaacatgtccaaaatgggcatttaatgtggtaccctgggcaaatggatataaacttaagccttaatttccctcatccttgaaatgggatagtaagagtacctaccctcataatgttatgaaagtttaatgagatagccctcatgccaggcacagagtacacagtaagtgctcaatacttaactattattgttagatgttggtttgcttattcttctggctctgatttttttcccctttactctttttgtttttgtttgcatttcagggtgaaacttcctacatccgagtttatcctgagagaagcaccagctatggctactcacggtctcggtctgggtcaaggggccgtgactctccataccaaagcaggggttccccacactacttctctcctttcaggccctactgagacaggtgatggggaattttttctttattttttaggtttaactgagctgctttgtgctcagaatctacattccagattgagggatttagtgtcntagggaaattttttttaatt

SEQ ID NO: 147615 - DNA, 1093 bp, Homo sapiens
atgtcgggctgggcggacgagcgcggcggcgagggcgacgggcgcatctacgtggggaaccttccgaccgacgtgcgcgagaaggacttggaggacctgttctacaagtacggccgcatccgcgagatcgagctcaagaaccggcacggcctcgtgcccttcgccttcgtgcgcttcgaggacccccgagatgcagaggatgctatttatggaagaaatggttatgattatggccagtgtcggcttcgtgtggagttccccaggacttatggaggtcggggtgggtggccccgtggtgggaggaatgggcctcctacaagaagatctgatttcccgagttcttgtttcaggaccttctccggtcaggcagctggcaggacctgaaggatcacatgcgagaaagctggggatgtctgttatgctgatgtgcacaaggatggagtgggggatggtcgagtatctcagaaaagaagacatggaaatatgccctgcgtaaactgggatgaccacccaaattccgctctcattgagggtgaaacttccctacatcgaaggtttatccctgagagaagcaaccagctaatggctacctcaccggtctcgggtctggggtcaaggggccgtgacctctccatacccaaagccaggggttccccacactacttctcctcctttccaggccctacttgaggacaggtgaatggggaattttttctttaattttttaggttaactgagcctgcttttgtgctcagaatctacattccagattgaggatttagtgtcttaggaaatttttttaattttttttttttttaaagaagaaaaatccactacataatttctaaccagggccatattagcagtgaaacattttaaaactgcaggaaattgtggttttgggttcagaaacaagttgtatatttttcacccctggattatggggaaaaaaatcagttctggtctttgtggggttcgctctactaatggagatcaacagttactgtgactgagtcggcccattctgtttagaaatatattttaaatgtttagtaaaaaaaaaaaaaaaaaaaaactcgagggggggcccggt

SEQ ID NO: 147616 - DNA, 779 bp, Homo sapiens
taatcattgagaaaaatctttattgattgactacaccatccacaagaaaaagaaacttaatttaagaagaatagttaacatgcttgcttgttattgaccagtggtaaacacacaaacacaaatatacagcagttctatgccacagagagttaagaatgagggaagagatgatatatgaggaggctgggaagaagaggaaaatgagagggtgaaaagagagggaaaacatgggagaaggtggggcttataggtgaagttgctctaaatgttggaaatcctggatcttcagatgtcagagtatgttaacactatcctttggcagatataatagctgtatagagcagaggctttcaaatgcatttcagcattagaactctatttttgacatgaaatctgctgtggattcttagagatgtagcacaaataaaatcaaagtagctctggttcaagaaaaattagggaggctcttgaccctccagccttccccactccatttacacctcagcccacacgtggttccccacttttgccatctcctgaggaaccccaaaggagcacagttagcaaaccacctacttagaatgcatttcttgtctggttttgttataggttttccaaattaattcttaaaataagagtatatttttctctaaaattgttaaagttcaatcatatgtgaaatagttatttcagtatagttttgtcatagcagtgcaatttagagcttcacaggtttctgttaatgatgtagtaatctgaagggaatctttagaaagaag

SEQ ID NO: 147617 - DNA, 2994 bp, Homo sapiens
aaagcatgctgcaagaaaattagttagttacttgtcatgctttgaaatctctggatgaaaggtgctttggaagcacaaaccattatcacttgtctcatagggattgtccccttgaacatccagcagtgttattttacagaagacaaattaactgaaggcttttcttttattacatctaaagagctctacataaacaggtaacattcaataggtaaacaatttttttccaatgcatgtaataaatattttcacttggtacttttaatacaaactgacattgtcctactaatacatttttaaaaagcccattttactggtttggcatgcgcgtatggaaattcctaagagagaaagttttaaggcaatgaatcacagatttaagttcatggaatttatggtaactttatctgtttatgtacattttcccctttgttaaacaattaacagcagcacactctggggaccaccagctattttccctctctttctgaaatctaagctttgtatttaattaaaaaacagaattcaacatctattgataaaacaaaattcttactaaaataatttcaaatgtgctttaaaaagtcctgaagatcttgaaagttttatgtgtttaaaattgaaattgtctaaaaaaaatgctctttccacattaatttagttaggatatattttcactccatttcagacacttgactcaaaggaaaatctgccaaagaatccgatttttcagagcttacgtgaatctttcctcagtaaagatacagaattgtgatcatgtctaaataattagtaaagcaattttaatgctcaaaatagmtcaaccaagtatggcatggttctggttcagattttttttttttaagatgtatccaataacactcacgaagtaattaaaagccactttaaccctgctagtcaaatagctattttatcaaagatgtgtgcatacagatgtatatatatatacsasasacacacacagtactgtacagaaacaaacatatgcatacctactatgaacggccaaggcaagggggatgatggcaacttgactagattctgagaactgctatttgtccacagatagcatgtcaatgttgggatgggttggggagtgagcgtaggctaagaaaaaaagagatgaagtgactatgtgcttttctttaaacttagtagttacagacatagtacaggactctactaataattagtagagatcatgaaagtctggttggatattgaccatgagaccaacagagtgacaactattacttaatgcaacattttggaaagtcaacaactgatggaaacaaactcctcacagggtagaacgaactaaaattaagacaactggaatggttagtttctcctgtggacacatgaccaaaaccactggaaaccaccgtatgtttatttctcccctattacctgttcttctccttaggttgggtataatgtgggacactgaggggaattaaccttttctacaactggaagaaagtagagggatacgttttcaactggatcattcaaacggtttgtaattcagcatcatacacaaagttactgatcagaattctgagaccactaacaatgacacataaaaaaacaggaagaaaactattcattttacctaagacagctgaattagtaaaaatgtttcctaaagcaatgtaaaaatcagaaaaaactccccacaattttagtaatttctaccccaacagaaatttagacacaaattatggtagtattagaaattagcctaaattaatacgacatttgctcactataatgccagattcatttaaaaaacattaactgtttcctggttaactgtacaatctgttttggttttttttttattgcaaattgttttatgactataactcagccatttgtgtgtggaatacacatgcgtaggggaagactatgaaactcacttgttactcaaacacacttgtttataaatacatatatacacacacacatatacatatccacacccaacttttttttttcccaaaattcaagtcaacaatttagtggcagagagatgctataaaaacattatttttagatgccacacaagtcatgagaaccattaattttatcatacaactgaagtacagccatcttgaattctacctggattaaagttgatcattttgttaccaatgcaaggtttaaaactacaagtgtatacacaaaggtggtcctcatcaactctgagaacattaatagttgcggtaggaaaatccagtctggaaaaccagcagtcattatgccccttatctcttctgttaaacctgcattctcaatcaactaaaaaatattttccacacctgagaacatcataccttctctgatgaggattttggaacattagtagaaccacttttccttccctccaactcatatttctctcctgaaaaacagttttcagtatatttacatgttccattatgaataagagtagatcagactgatccatgaattctaaaaaaaaaatgactttcctatgtcatacttgttaaaaggtgaagaaaaagataaacaaggcacgatacgctaagaaaataggtatactcagaaccaaacagtaaaaatgactaagggtcaaacacatcttgaatttcaactgtttatcaaatagtagacttctacaaaaatgtggtgcattgtactttccaaacaatttatttttaggataactgaccgtgtatctttcttttttaggtgatgtaacattacctctgtcagctgcacaaaacacctgacagagctttctaagctatttttacttcctactttggtatgaagatcttacatgaaaacttgttactctgtggccaaaaaaagcaggtattcacagacttggtttaaatacacaatactggcaatccagatttagaataaagaactagactaaagtgtattattcataggtcggctaagcctactccttacccagacagctttattccaatatct

SEQ ID NO: 147618 - DNA, 2302 bp, Homo sapiens
  misc_feature (1)...(2302): n = a,t,c or g
atcttttctaaagatgtgtagtttcttggaaaacagtgatatcacatgattaaaattacatttttatcaacataattgtctggaaaagataagcccctcaattttctaccagttgacttttatttattagattcagaaggggcagtattacacatcaccagctgcctttgtgaatggctcgctacacagccattggggtacaactgtgtgcatgggcagaaacagcaagtgccctcattgtggtcattgggtggggagtgccttttgtcaaggagtctgcaggaattggcttatttctgtatgccaaagtgatcaacacaccaaagtctctgccataaagaatgtggcttccttgcatcctccatcctgttactctgggcccagtaatttgatgtaactgtctgattgtactagagacaggagtatacccagcttattcataatcaagtaaagagactcagattagatttgattttttaaagcctcctctagaagccaatcgaggcagttaagaagtaataaagggaaaagggtttggtcacacaaccctaccattatctggagattacttcctgctgcactcctgtcttgccatgcacggtcttgccccctcacttatgctcagcctagcaggctacttcactttattgccttgaaagtgtcaggcctcctgggcgctctggaaaagacagggagccaggccctctcacccctactggtaacagggtcattgctggagtgcacaagagggaggtgatttgcatcatggtcatgctgcatgggcttcactgggatgctgttaaacaccagaggagccaacctatcagaatcccagcagcagaggaaaactcacattttacaggctttttacaatacagtggcgtaactctagggcatgattgatttcacatgcctgccatgaatgatttgtaagtaattatgtaggatccatcaaagcagtattgtaggctttttgaattgtcccagtggatccgggaccccatttcactgtctctcttgatcgtgttaatgatgcaatcagagttcaagacaggccccatgaagtctggactgcactgggatggagaaatgaatttcttcccactgtaaggaaacttctttctcattcgcagccaaggacggggagtgccacatgttcctctctttcactcctgagatacttgcttctgggaagcgggtgtcacttcctctctagtacctcttctcttctctggaagtgtgtgactatctcctagtgtttaaatttggcagttactcgccatgtatgtcagcatagaaaaggaaatgtttttaccttatctcctgtatgcatgatagaacttaaaagaaatgtgcatttgttttcatagccccagcagagaaaatcctcttcatagattaaatgtgctgctgtggacaggaggggaaaaaaaaaccctctacatattggaaaggcacccaattgtaatatctgacactgttaagganggcccaaaagagcaaagttgtagtcggagatgcagggtccnttgccccatgcccttccacagtgtttgttagtgagtccacggctgactttgcagtgataaagaaaagcatggagctgtgtctgcagacaaatggtggctgcatctgtaagtgggcttcagaggcagcagccctgggggaaaattgatggggtgtgggcagtgggacctgtgaagagggagaatctagccttcagcctgtccagtgttaaccactagaggaaacttgagctttattatccttttttaatgcctgttgaatttttagcatattgaaacattaggagcaaatactccaggggatttttcattaaacatccctcagataatttagctatatatccattagaaagggaaagctatcatttttaattttaaaactaaaacaaggccccaccctaataaactgtccacccaaagtcttccctttttttattgccatgtggtgccttgcaatttccataaaacattaattccacaatgggggtcagaatgtactcttgttgaaacacgttcgttgtaccattttatgttcatattatgtttgagagggtaaaaatgtatgagcagcttaactgaagtagaactattcatgatgcttttcacacattgtggcgataagatgtaaagttaagtttgtaattaatgttaatttctgtgcattttaatattcttttataattattaatgttaatttctgtgcattttaatattcttttataaatatgagcattttaataaattcatttttacagacaaaaaaaaaaaaaaaaaaa

SEQ ID NO: 147619 - DNA, 1290 bp, Homo sapiens
aatcttttttttttttttttttcatcaaacaaacaaatatttactcgtgggcccacatcgctaagcacctgcaggctgctctgccagtggtctgcacatgccacttgactgtgggaaatgcaatccccaacgtaaggtcagggctgacttgttattcacttaggactagtaaagccatgactcatgctttcaagacaaatcccaacatatgcccattcccagggaaagccagcatctgcacactgttgaaacacacccaccctcggccctcacaacaggccctgtgagggtaggctttcaggtgacctatggctttagagaaaaggagattgagggtcaaagaggcagaagggttaattaagtggcccctgggtctgccagatcctaaggctacacgctttctaacataaaacacagattcgcatcagacagctcaaggtccatcaacatgacgccgaaacaaggctcctgctcttcaaacgtggcatacaaacgaccgtaagatacaattatggtggttgttaacaggtccatgaagagcaaaataataatctcttagtaaaggttataaacatcaaggcttgtcattggttacaatttcattagctatccatccattcaacagaaaagaaacgtaagcgctaccactcgccaggcactgtgttgggcacccagcctgctgcatttgagcccaaatgttgtcagttggggggaggggtgggggaggcaacaatgcagtatctttgatggctggtgcctaatattttggggaaaaggacgccacccagaagggccttttgaaggcggacacaagtaggtgctgcaccacggccaaggcacagaggcaggaagcacacagcattcagaaagcacagccaggcgtttccagcctctcagaggtgagcgtgaacgcgtacccccggggggtccaggggcattgtccagcgagtcccccaaacccctagcatgacagttcctgcccaaattcctcctgtcccaccatatacccctccaggtttagagataaatgctctcccactcagctgcctgagtgaggctgtctccctggccttttctcctcactcccctggcacacccccggggacacgcacaccgccctttcatactagcagattaagatggggagacgccagggtcttcccacacgccatgtagtgtagctacggccatcctcctcagtagacgtgcccctatacagctgttacagctgtcgcaagcccgcgtaagtaagttcggatcgtgtagatcggcccgggaattccggaccgg

SEQ ID NO: 147620 - DNA, 1489 bp, Homo sapiens
ttctcctaccataattgtgaatgatttgtgagaagtgcaagccatgtttatcctgaatttttacttaataatttgtattactagtcatatgcatgtagctttctgtttacatcctatgccacatggtcttcatttatgccaggtaaactgtatttgaactatgtgcagctagctttgttttaatctgcttggcaaccagtgtagctgctgtaacaatctatcttattgttcaaatatataagagccaaactcttttccattccatctaaaatgttttcatttagtactcttctttcctcctactctatgaacttcaaaacaaaaacaaaactttgagagcagcacatgcatccaggtatttatagattattgccagtgtcttttctgctatgctataagcaagggagcttaggtgttattatttctttaatttatgcttgaatctgaaaaattatttctgacttactccatggcctccttataataagtagaagttttatatataattaattttcagcattgggcactgaattaggacagtcctcatctcattgcttggcccttcaagcaacctagctaaaaggtgctgatattttatttagtactgccaacttcaagtgatttagatatctatctatctatctagatttctgaaccaagatatatttatagttcacttttgggtttttatacccacggtaggattctgcattccagcattaaatctgcttcattttagaacctttataaaagcaatagctgggaatatactcccagttttaaaataaataaatgcctgattgatttaaagcaagtaggttatgctgaagtatataaatgaagttttatattctctcaaaaatggtattatctttctttatttgctagattcttacaaatcttttaagagggctgtaacagttgctgctagtattagggttccacatcattctaatgtatagtttcaagtcttaatagacaatctgaattccactacatttcttttggctcccaacattccttttagcttgaccaggctaatttaaaaatgtgtttggtgggaggcattaaccgtacttgttcaaatgctggcactgtgtgacatccatatgaattttggtatatatcaatcaatcaatcaatcaatcacattgcattcaatcaatcagctgtgattgattgattatgcttagaaatactatactatagtaactagatgcagtgtgaattttttccattaacaaacaaacaaacaagtcagtggcttaaatgtgattatggtcctgcaaggtgattcttgctaaaatatttaaacttttgttttgttttaactgaatcattttttaacttaaaaagctggaaaatatcaaatgctgttttttttttttttcattgtcaacagtggtgtgtcattttatgtatgttcctaatgcttatggaactcctccaaaataaagttactcaaagagagcaaaaaaaaaaaaaaaaa

SEQ ID NO: 147621 - DNA, 1643 bp, Homo sapiens
tttttatgcaattttttttaagcaatacctaacagtgactcctgcagtttaaagaaaaataagtattttaagttcccctgtattgctgaagtcaagtcttaattaaatctacttcatatctgcctttggcatttaaaaacctacataaagcaactgtctggccgatgattggagcttgaaaaaaactaccatgccagatctccaccccagaccaattaggtcagtatctctgggggtgctattcaagcaacaattatcttttatgttcctaagctcatcatgagttaaggtactgcctatagttgaatatccacctacctacaaaagttatcctgaataacttccctatatactctctttcaaggatggggtgttatacataggcaacaactgggaaaacaaggaaactgaggttttaaaacaaggaaatgtggggcaacagggagggatatggccataactaggaggggggaattgttcagggggccgggggccaattcaaatgttacattataaaatgtcccataacccttaagaaagttaactataaaaacaaagcaaaatgcttttagtcacatttatacttggttttcaataaaccacagaaattaagctggaaaaaaataggatacaacttataattagtgattatgcttaaagaacattaatattacagggaaatgaatgacaatgttccctagcaattggatgctgctgaaaggcagaatttggaattttttaatattttcccaaaaattgccctgaagtgcacacactgtgtcagaagggcaagacaaactttctttttccttagtgatatatgtttatacttctttgcaccaacccacgagcggctgggcattcattcccaagatgccactgcttacgcgaagcagcgtggtggtagtctaccaaaagtggggctatgaaacgtggcatgaaaatcagctgttctcacttcctactaaaaaatagttaactccatctcactaagcaagagactatctgccatcagaattcaagtcccagtgattagctattaatgcttaacaggatataaatgcacaaaccacacaatctgttgaaattttttttgtattgcgaaaaggaaaaggacacttcacatttttaaagtttattcatgaatggtttaatttccctttaaagctagaaaataaagatcatttaccttctgatcttcgtttttccaaatggtaataagcattgatccttccctctaataaaggtgaaatttttaaaatctcagtgaataggaatgtgcaaagctctaagaaaactattacttgaatgtctctaaagtggtagaagatcacaagttgggaataccctcaaaaactatatttttaccctactgttaaaacttgttttcaaagtggtgtaatctgaaagattacagttcaaaagtaattcccataccaaataatatcaactttaggtgaacatctaagtatttaagagtattatttttcttggctgggtgcggcagctcacacctgtaatcccagcactttgggaggccgaggcaggcggattcaggagtttgagcccagcctgaccaacatggtgaaaccttgtctctactaaaaatacaaaaattagccgggcttgttggctcacacctg

SEQ ID NO: 147622 - DNA, 1059 bp, Homo sapiens
gccaccttccctcccatctttggcagacagaagtctcagctctcactagagggaagacctgggcatcctgctggctcctctctccgtggggcctggagtctggtgctgttccccagccagcctggctgcagacctctctggctgataccgctcttcttctttaattggacttcatatcaagcctctgccttggtttctgagctatatgagggtggggaaggcacactcttttttcctttttccttaggttcccaatattatttggtggaaacgtgggctttctccaaaccaaggcctgagtttcctgtaagggtcctctgtttttgattcacccaaaagtctgcaaacccccagcatctctgctctggccagccctgaktctgaagcctgtgtctactaagagggatgcccagtgccccactgggcaggacgggaagcctagcctgggccccctctgtgcacacagttcaggcctgcccagcttcttatgggcaagccaccatcccactctcgtctccctgagctgtctggttctgcggacccaggaaaggccaggctggggccctgcttgtgtttatcctcgggctgctgtcttcccagcaggccccaggcaaggaggcttcccaactgctgctgctaccgggttctccacaccaactctcacggatgcacagatccctgtggtccgccatcgccgacacacacacacgtcgtaatgtggctaacgcttgactcacttaacactactcatggggcagggcggagggtggattgttgctttttgttttttgtaatttcctactagtatttgggtaactttgggggtggggagggcaatgtgggggcaggggaacatgtcattgtgatgacttttttgatattcattagaaacaatacatcctttctgagatatttacagtattattaaaaaatgaaaaaggttgtactgttttgcataatgaacatttttattgggcattcaaagggtgcaagattgtctgcttactcatttttaaaaattaaacaaatgaacaatcagtgtggctattcctagcaaaa

SEQ ID NO: 147623 - DNA, 2112 bp, Homo sapiens
aatgaagctagacaatttgatgtaaatttcaagggacaagacttgtgcctgatgtttgagccacacggcaagttcaccaaactgtcgaatgctgtaaccagagaccttcaaaccacaaaccagggtaaatgtgaatgtggcaaatgcacctgctatcctccaggagatcgccgggtgtatggcaagacttgtgagtgtgatgatcgccgctgtgaagacctcgatggtgtggtctgtggaggccacggcacatgttcctgtggtcgctgtgtttgtgagagaggatggtttggaaagctctgccaacatccgcggaagtgtaacatgacggaagaacaaagcaagaatctgtgtgaatcagcagatggcatattgtgctcggggaagggttcttgtcattgtgggaagtgcatttgttctgctgaagagtggtatatttctggggagttctgtgactgtgatgacagagactgcgacaaacatgatggtctcatttgtacagcaattttgatgacgtattcgctgatgcacagacattggaattcattacattatctagccatcgtaatacaaatgacctttggatttctctatcacggcgcttatcctcctattaaggatcagaaagttaaactttacggaccacacgcacttgtgcttttacttggcgtcaccccaggcttcgggaccgtttccccaacatcatgcaaagatggttctcggtacatggcaactagtgatgggaagaaaggaggaggaaaagcaaacattgcttggttaggtagtttgactcttttcgtcaacaatattaaggctttcatagcatctctttgggcattgccaattatcacttgtggcaatggccagcgtcataagatctgcctccatacgatcagctcagatgacatgactgtatatctagaaaaccccattgtctcagcccaaaatctccttaagctgataggcaacttcagcaaagtctcaggatacaaaatcaatgtgcaaaaatcacaagcattcttatacaccaataacagacaaacagagagccaaatcatgagtgaactcccattcacaattgcttcaaagagaataaaatacctaggaatccaacttacaagggacgtgaaggacctcttcaaggagaactacaaaccactgctcaaggaaataaaagaggatacaaacaaatggaagaacattccatgctcatgggtaggaagaatcaatatcatgaaaatggccatactgcccaaggtaatttatagatccaatgccatccccatcaagctaccaatgactttcttcacagaattggaaaaaactactttaaagttcatatggaaccaaaaaagagcccacatcgccaagtcaatcctaagccaaaagaacaaagctggaggcatcacgctacctgacttcaaactatactacaaggctacagtaaccaaaacagcatggtactggtaccaaaacagagatatagatcaatggaacagaacagagccctcagaaataacgctgcatatctacaactatctgatctttgacaaacctgagaaaaataagcaatggggaaaggattccacatttaataaatggtgctgggaaaactggccagccatatgtagaaagctgaaactggatcccttccttacaccttatacaaaaattaattcaagatggattaaagacttaaacgttagacctaaaaccataaaaaccctggaagaaaacctaggcattaccattcaggacataggcatgggcaaggacttcatgtctaaaacaccaaaagcaatggcaacaaaagccaaaactgacaaatggcatctaattaaactacagagcttctgcacagcaaaagacactaacatcagagtgaacaggcaacctacaaaatgggagaaaatttttgcaacctactcacctgacaaagggctaatatccagaatctacaatgaactcaaacaaatttacaagaaaaaaacaaacaaccccatcaacaagtgggcgaaggacatgagcagacacttctcaaaagaagacatttatgcagccaaaaagcacatgaaaaaatgctcaccatcactggccatcagagaaatgtaa

SEQ ID NO: 147624 - DNA, 1951 bp, Homo sapiens
aggaacaaaatgtttattttcttaatggtgaaactttgctttgtatgaaattcacattgaattatgyaagtgtacaataattgggycttcccttacatatttkcaggtaaatctacttatacacattagtttaggcaacctttaattatttagagctaaaaaaaaaaccactttttrttctaaaggtgaattactttgtaaaatcctagaataatgtagcaaaatcatttccgtattactttaagatgaaaatttttacttggaaattttattttaatgatgtaaatattctagtcatggcttaaactttataagtcaaatttccaaaaataaggaaaatatgcatccactgagttacttaaaaatttaatattgaaaattattttaagagaacatttaactgatcctgatttttatagtactaacaatgttctcataatgtaatagatttataaaaattgttatctctatcctgagattaaggagtgcaaccatgttgtagttctattattgagtacgtaaattgatagatctcttccgtaaaatgagggaaatataagtagtcaataaataatgtaggttatattctttcctcttcactacctaaacattttaagctgtgaacaacctattattattgttttgtagcaattttgatgacgtattcgctgatgcacagacattggaattcattacattatctagccatcgtaatacaaatgacctttggatttctctatcacggcgcttatcctcctattaaggatcagaaagttaaactttacggaccacgtacggtccctgtctcatattcttctttgttggtttctgtttaatactttaaagctgtaaaaaaaatttaaaaaattccttctgagctcccaggccatacaaaagcaacttaagggtggatttggctggcagctgggcagtactttgtcagcctcagctccactggaactgcccttgattctctatagctcatcacaaaacctcaggtatgtcttatttttcttataatcctctgtatgttattatcctttttattaacaccaccaactacaacaaaagtgctgctctttttcatagtctcatgtaagaagagtgtcaaaaatgtcctcggcatttgttttctcagaaaaagaatttagatattggagaaattatcataccataaaaagttcaaaatgtgattcatctaaaattttggacaaagatgaaaatatagtcagctctgttctagtgttcatttagttagaaaccatagtaccggaactgtattatagtagaagttaatggtacctaaactctaaggaatgctttttctttgaaaacagaaatagttttacttatttctgtccactatgtttgtgtgtatgtgtgtgtttgtgtgtgtatgtgtggttttgatgccagcaatgcaaacaccaatatatctattaagaagtgattgaatttagattggaaaaaataaaatagttacatgtaaagacataaactccttttcccttctttaaatgtgatttttcaacttcttatgatagaaacttccccttcttaaaaaacaagcaagggcaagaacaaactttaccttgtaatgggtgagagaaaataagcaaatctcattggcttcattccttgtttttaggaagttgcagtgggattaatgtcaattggaagggatgcagcaagtttagagaaggtgttggcactaacggctgcttgtttggcaaatcatcatcactgaggtattccacccagagactttttcaaaaaagtcaactaaagtgctaagtcataagaggagagccattatacccgttgtctttctgggctccttgagtttatctggattccaacagcacttggaaagtaccgccctccactacctcaaatgcaaacacaatctctgccagtagacattggaattagacttagtgaaaaccaggaa

SEQ ID NO: 147625 - DNA, 314 bp, Homo sapiens
atgccactgttcttttggattatcacctgaactatttaaaggaagtagaccagttgcgtttggagagattacaaattgatgagcagttgcgacagattggagctagttctagaccaccaccaaatcgtacagataaggaaaaaagctatgtgactgatgatggtcaaggaatgggtcgaggtagtagaccttacagaaatagggggcacggcagacgcggtcctggatatacttcagaatctgaccacagagacgaactcagtgattggtcattagctccaacagaggaagagagggagagcttcctgcgcaga

SEQ ID NO: 147626 - DNA, 340 bp, Homo sapiens
ctaggggtcgggcacgtctgccaaggcttttcgatcaatttgggggcccttgccgccggtacaccggcatggttccccacgttcctcggtccaacgggaggccccggtcttggcactggcgaacccagggtgtacatacggaacaaggttgctaacacgggggttcccggggctcccgggccttccattgggggggtaaccgcccctgctactgactactgccatcgtatagcgccgattttggcggcgcggcggcggcggcggcggcggcggcggcggcggcggcggcggcggcggggcggcggcggcggcgtcgccggcggcggcggcggcggcggcg

SEQ ID NO: 147627 - DNA, 3772 bp, Homo sapiens
gacggaggcgcccgtgccagggggcgtgcggcagcgcggcggcggcggcggccgcggcggcggcggaggcggcggcggcggcggcggcggcggcggaggcggcggcggcggcggcggcggcggcggctgggcctcgagcgcccgcagcccacctctcgggggcgggctcccggcgctagcagggctgaagagaagatggaggagctggtggtggaagtgcggggctccaatggcgctttctacaaggcatttgtaaaggatgttcatgaagattcaataacagttgcatttgaaaacaactggcagcctgataggcagattccatttcatgatgtcagattcccacctcctgtaggttataataaagatataaatgaaagtgatgaagttgaggtgtattccagagcaaatgaaaaagagccttgctgttggtggttagctaaagtgaggatgataaagggtgagttttatgtgatagaatatgcagcatgtgatgcaacttacaatgaaattgtcacaattgaacgtctaagatctgttaatcccaacaaacctgccacaaaagatactttccataagatcaagctggatgtgccagaagacttacggcaaatgtgtgccaaagaggcggcacataaggattttaaaaaggcagttggtgccttttctgtaacttatgatccagaaaattatcagcttgtcattttgtccatcaatgaagtcacctcaaagcgagcacatatgctgattgacatgcactttcggagtctgcgcactaagttgtctctgataatgagaaatgaagaagctagtaagcagctggagagttcaaggcagcttgcctcgagatttcatgaacagtttatcgtaagagaagatctgatgggtctagctattggtactcatggtgctaatattcagcaagctagaaaagtacctggggtcactgctattgatctagatgaagatacctgcacatttcatatttatggagaggatcaggatgcagtgaaaaaagctagaagctttctcgaatttgctgaagatgtaatacaagttccaaggaacttagtagtaataggaaaaaatggaaagctgattcaggagattgtggacaagtcaggagttgtgagggtgaggattgaggctgaaaatgagaaaaatgttccacaagaagaggaaattatgccaccaaattcccttccttccaataattcaagggttggacctaatgccccagaagaaaaaaaacatttagatataaaggaaaacagcacccatttttctcaacctaacagtacaaaagtccagaggggtatggtaccatttgtttttgtgggaacaaaggacagcatcgctaatgccactgttcttttggattatcacctgaactatttaaaggaagtagaccagttgcgtttggagagattacaaattgatgagcagttgcgacagattggagctagttctagaccaccaccaaatcgtacagataaggaaaaaagctatgtgactgatgatggtcaaggaatgggtcgaggtagtagaccttacagaaatagggggcacggcagacgcggtcctggatatacttcaggaactaattctgaagcatcaaatgcttctgaaacagaatctgaccacagagacgaactcagtgattggtcattagctccaacagaggaagagagggagagcttcctgcgcagaggagacggacggcggcgtggagggggaggaaaagggacaaggaggaagaggacgtggaggaggcttcaaaggaaacgacgatcactcccgaacagataatcgtccacgtaatccaagagaggctaaaggaagaacaacagatggatcccttcagaatacctccagtgaaggtagtcggctgcgcacgggtaaagatcgtaaccagaagaaagagaagccagacagcgtggatggtcagcaaccactcgtgaatggagtaccctaaactgcataattctgaagttatatttcctataccatttccgtaattcttattccatattagaaaactttgttaggccaaagacaaatagtaggcaagatggcacagggcatgaaatgaacacaaattatgctaagaattttttattttttggtattggccataagcaacaattttcagatttgcacaaaaagataccttaaaatttgaaacattgcttttaaaactacttagcacttcagggcagattttagttttattttctaaagtactgagcagtgatattctttgttaatttggaccattttcctgcattgggtgatcattcaccagtacattctcagtttttcttaatatatagcatttatggtaatcatattagacttctgttttcaatctcgtatagaagtcttcatgaaatgctatgtcatttcatgtcctgtgtcagtttatgttttggtccacttttccagtattttagtggaccctgaaatgtgtgtgatgtgacatttgtcattttcattagcaaaaaaagttgtatgatctgtgccttttttatatcttggcaggtaggaatattatatttggatgcagagttcagggaagataagttggaaacactaaatgttaaagatgtagcaaaccctgtcaaacattagtactttatagaagaatgcatgctttccatatttttttccttacataaacatcaggttaggcagtataaagaataggacttgtttttgtttttgttttgttgcactgaagtttgataaatagtgttattgagagagatgtgtaatttttctgtatagacaggagaagaaagaactatcttcatctgagagaggctaaaatgttttcagctaggaacaaatcttcctggtccaaagttagtaggatatgcctgctctttggcctgatgaccaattttaacttagagcttttttttttaattttgtctgccccaagttttgtgaaatttttcatattttaatttcaagcttattttggagagataggaaggtcatttccatgtatgcataataatcctgcaaagtacaggtactttgtctaagaaacattggaagcaggttaaatgttttgtaaactttgaaatatatggtctaatgtttaagcagaattggaaaagactacagatcggttaacaaataacaacttttttttctttttttcttttggtctttgaagtgctggggtttggctttgatatttgagtcttttttttttaagtgaaatttattgaggaaaaatatgtgaaggaccttcactctaagatgttatatttttcttaaaaagtaactcctagtaggggtaccactgaatctgtacagagccgtaaaaactgaagttctgcctctgatgtattttgtgagtttgtttctttgaattttcattttacagttacttttccttgcatacaaacaagcatataaaatggcaacaaactgcacatgatttcacaaatattaaaaagtcttttaaaaagtattgccaaacattaatgttgatttctaggttatttaatccggggtatgtaatagtattttttatacagaaaattggtaccttccacacatcatctgtaagctgtttggttttaaaacactgtagataattaaccaaggtagaatgaccttgtaatgtaactgctcttgggcaatattctctttacatattagcgacaacagattggattttatgttgacatttgtttggttatagtgcaatatattttgtatgcaagcagtttcaataaagtttgatcttcctctgcta

SEQ ID NO: 147628 - DNA, 4438 bp, Homo sapiens
acggcgagcgcgggcggcggcggtgacggaggcgccgctgccagggggcgtgcggcagcgcggcggcggcggcggcggcggcggcggcggaggcggcggcggcggcggcggcggcggcggaggcggcggcggcggcggcggcggcggcggctgggcctcgagcgcccgcagcccacctctcgggggcgggctcccggcgctagcagggctgaagagaagatggaggagctggtggtggaagtgcggggctccaatggcgctttctacaaggcatttgtaaaggatgttcatgaagattcaataacagttgcatttgaaaacaactggcagcctgataggcagattccatttcatgatgtcagattcccacctcctgtaggttataataaagatataaatgaaagtgatgaagttgaggtgtattccagagcaaatgaaaaagagccttgctgttggtggttagctaaagtgaggatgataaagggtgagttttatgtgatagaatatgcagcatgtgatgcaacttacaatgaaattgtcacaattgaacgtctaagatctgttaatcccaacaaacctgccacaaaagatactttccataagatcaagctggatgtgccagaagacttacggcaaatgtgtgccaaagaggcggcacataaggattttaaaaaggcagttggtgccttttctgtaacttatgatccagaaaattatcagcttgtcattttgtccatcaatgaagtcacctcaaagcgagcacatatgctgattgacatgcactttcggagtctgcgcactaagttgtctctgataatgagaaatgaagaagctagtaagcagctggagagttcaaggcagcttgcctcgagatttcatgaacagtttatcgtaagagaagatctgatgggtctagctattggtactcatggtgctaatattcagcaagctagaaaagtacctggggtcactgctattgatctagatgaagatacctgcacatttcatatttatggagaggatcaggatgcagtgaaaaaagctagaagctttctcgaatttgctgaagatgtaatacaagttccaaggaacttagtaggcaaagtaataggaaaaaatggaaagctgattcaggagattgtggacaagtcaggagttgtgagggtgaggattgaggctgaaaatgagaaaaatgttccacaagaagaggaaattatgccaccaaattcccttccttccaataattcaagggttggacctaatgccccagaagaaaaaaaacatttagatataaaggaaaacagcacccatttttctcaacctaacagtacaaaagtccagagggtgttagtggcttcatcagttgtagcaggggaatcccagaaacctgaactcaaggcttggcagggtatggtaccatttgtttttgtgggaacaaaggacagcatcgctaatgccactgttcttttggattatcacctgaactatttaaaggaagtagaccagttgcgtttggagagattacaaattgatgagcagttgcgacagattggagctagttctagaccaccaccaaatcgtacagataaggaaaaaagctatgtgactgatgatggtcaaggaatgggtcgaggtagtagaccttacagaaatagggggcacggcagacgcggtcctggatatacttcaggaactaattctgaagcatcaaatgcttctgaaacagaatctgaccacagagacgaactcagtgattggtcattagctccaacagaggaagagagggagagcttcctgcgcagaggagacggacggcggcgtggagggggaggaagaggacaaggaggaagaggacgtggaggaggcttcaaaggaaacgacgatcactcccgaacagataatcgtccacgtaatccaagagaggctaaaggaagaacaacagatggatcccttcagatcagagttgactgcaataatgaaaggagtgtccacactaaaacattacagaatacctccagtgaaggtagtcggctgcgcacgggtaaagatcgtaaccagaagaaagagaagccagacagcgtggatggtcagcaaccactcgtgaatggagtaccctaaactgcataattctgaagttatatttcctataccatttccgtaattcttattccatattagaaaactttgttaggccaaagacaaatagtaggcaagatggcacagggcatgaaatgaacacaaattatgctaagaattttttattttttggtattggccataagcaacaattttcagatttgcacaaaaagataccttaaaatttgaaacattgcttttaaaactacttagcacttcagggcagattttagttttattttctaaagtactgagcagtgatattctttgttaatttggaccattttcctgcattgggtgatcattcaccagtacattctcagtttttcttaatatatagcatttatggtaatcatattagacttctgttttcaatctcgtatagaagtcttcatgaaatgctatgtcatttcatgtcctgtgtcagtttatgttttggtccacttttccagtattttagtggaccctgaaatgtgtgtgatgtgacatttgtcattttcattagcaaaaaaagttgtatgatctgtgccttttttatatcttggcaggtaggaatattatatttggatgcagagttcagggaagataagttggaaacactaaatgttaaagatgtagcaaaccctgtcaaacattagtactttatagaagaatgcatgctttccatatttttttccttacataaacatcaggttaggcagtataaagaataggacttgtttttgtttttgttttgttgcactgaagtttgataaatagtgttattgagagagatgtgtaatttttctgtatagacaggagaagaaagaactatcttcatctgagagaggctaaaatgttttcagctaggaacaaatcttcctggtcgaaagttagtaggatatgcctgctctttggcctgatgaccaattttaacttagagcttttttttttaattttgtctgccccaagttttgggaaatttttcatattttaatttcaagcttattttggagagataggaaggtcatttccatgtatgcataataatcctgcaaagtacaggtactttgtctaaaaaacattggaagcaggttaaatgttttgtaaactttgaaatatatggtctaatgtttaagcagaattggaaaagactaagatcggttaacaaataacaactttttttttcttttttttcttttgttttttgaagtgttggggtttggttttgttttttgagtcttttttttttaagtgaaatttattgaggaaaaatatgtgaaggaccttcactctaagatgttatatttttcttaaaaagtaactcctagtaggggtaccactgaatctgtacagagccgtaaaaactgaagttctgcctctgatgtattttgtgagtttgtttctttgaattttcattttacagtttcttttccttgcatacaaacaagcatataaaatggcaccaacctgcacatgatttcaccataattaaaaagtcttttaaaaagtaatgccaaaccataaatgttgatttctagttatttattctgggaatgtatagtatttgaaaacagaaattggtaccttgcacacatcatctgtaagctgtttggttttaaaatactgtagataattaaccaaggtagaatgaccttgtaatggtactgttcttgggcaaaatttctctgtacatataagcgacaacagattgggatttttatgtgaccattgtttggttatagtgccaatatatttggtatgcaagcagtttcaataaagtttgatcttcctctgcgtaaattgatgttgatgcaatccttacaaatgattgcttttaaaattttaagctaggaaaagaaatctatagaaagtgtcctgttaccaaaatgtaactgttacccattgggaaatttcacagtcataggaagttagcctttatctacccaactttcaagaaggttctttaataaagcggaaaaactcgaaccaaatgggtacaaaacccacagtgtaccattaaaatatgcactaagtctcttttttacaaaggctgtattcagcaaggcgctaacttgcttaaatgtgaattactaacttctaaaactgtactttgattcacatgttttcaaatggagttggagttcgattcatattacaataatttgtgtgctaaccgatgtatgtttttcaggttcaaagtctatgatgtttttacaaatctatattaaagtttcaaaaattctgaagcattgtttatctagatgtaaatttttatttaaaaagttgcacccatccaaaaagcaaaaaaaaaaaaaaaaaa

SEQ ID NO: 147629 - DNA, 885 bp, Homo sapiens
tcgatacgacttttttttttttttttttttttgcagttctggtgatttctttgatgcgttataaacgccttgttgtagagtacaattcagagaataaatagaggcacacggctataacttccacccacaatctgctgttgaagagacattcaatgtgaggctagggagcttagaggtgggggacggtatttgggtaccagggtaacgggaggcctacgtaataaacttgcagagatccccatccagtaaaggtctgattgcggcctgacggtcaaggctcatgatagaagagctacagtgagccaaatgctcctttagttccccacagtcctagagtaggtccaattctaccaaaaccccaggggttccgggtgagtctgattttattggtccactggggaagaaacttggtgtccagccccaagcccatccgtattgaattcagttcactccatggtagtgcctgaagtggcctaaatattctaccccttttccctggagttagtcacaaatacaagtaataagattactgtttacatgagtttttttcttgattgtcccaaaaagggatcctgttccccatctaaggaaggagagaggcccacatggggattatctgctctaagttgatgaaagaagacagcctgtcttctaaagggaggaggaaataggcactctttaccgaatccttcacggggacataggcaggaatgaataccagtctgatcagaccaagtggaagcctgcagccatgattccaaccagcatgaggagtaacatatggaaaagctctgccagccaggcacagtggctcacacctgcaatcctagcactttggcaggcccaggcaggaggatcacttgagcccaggattttgagatgagc

SEQ ID NO: 147630 - DNA, 758 bp, Homo sapiens
tgagaaatcagagccgtgctcctgagcctcggtggggtgagaacgacagggccgacctcccagctgcaaacacaaggacactgagatgcacagaaaggagagtccacgttgaagaaacccacgttgaggggcctcttctccctccgttcccagctcggtgatggtgaagggtaaggaaatggatcctcccattgcaacattaaaccaggccaaacctgtatttttctcttccttcctttttcttgttttgtaattgatgtctcctcgggactactgataatgtcctagaaagaataaaataaagtttcccaaggctttgtgactcagagctctttggaggtgttcaccgaatgcacgggctgcccgggaggccttggccctccagggaaacccaccagaaagtccccagaagcggaacatgtagcaaggaggcttccccgagattctcccagagggagcacagccctgccaagttattggttttggacttccggcttccagagctacgagaaaataaatatttgttatttaagtcaccaggtttgtggcgattgttacggcagcctcaggaaactcctacaaggaagtgagttacgctcacggcagaaagtgctacagcaaaccaaggcagaacaaaaacagacgaaacctaatacagaccggactaagtagaagactgtgtgtttgggtggtgaatatacaaaaaacataaatataaattaaaccttagagaaactttgtcattttcttgtcatgtt

SEQ ID NO: 147631 - DNA, 615 bp, Homo sapiens
aatggctggtaagcaggccgtttcagcatcaggcaagtggctgatgggtattcgaaaatggtattacaatgctgcagaattcaataaactggggttaatgcgagatgatacaatatacgaggatgaagatgtaaaagaagccataagaagacttcctgagaacctttataatgacaggatgtttcgcattaagagggcactggacctgaacttgaagcatcagatcttgcctaaagagcagtggaccaaatatgaagaggtctttgctgttccagctctgcactctgcttcctacttagatgaaaagatcagcccattgagtgtccctccagatcccaagaagagcttctgtgaagcaaactctcacccctttgaactgcattcgaaacctaggcaaaggaaaatttctaccttgaaccgtatctgaaaggaggttattcgggaaagaaaagaaagagaagaatgggcaaagaagtaatcatgtagttgaagtctgtggatgcagctgttatgaagatggttaaacttgaaacaaacaattttaagaattatttggtctgaagatgttttactttaaataaatgtctattgtaatggaaaaaaaaaaaaaaaaaa

SEQ ID NO: 147632 - DNA, 522 bp, Homo sapiens
agaagagcttctgtgaagcaaactctcaccccttgaactgcattgaaactaggcaaaggcctgtggacattcatttctttttcttcccgaaaagacctccccccccctcataccccttcaaagccaaccctatccacacccctcaccccacagatttgaccattttaaaaagcagatagtcccttaggttgaagaatatgttttcctaaaattggaaattccaaaagtaattgccttttttccttgttattgaagaccctgttgagtgtttgggatatatcagtacgtgatggtaacatataatatttcattcattctttaggaaaatttctaccttgaaccgtatctgaaagaggttattcgggaaagaaaagaaagagaagaatgggcaaagaagtaatcatgtagttgaagtctgtggatgcagctgttatgaagatggttaaacttgaaacaaacaattttaagaattatttggtctgaagatgttttactttaaataaatgtctattgtaatggcaa

SEQ ID NO: 147633 - DNA, 900 bp, Homo sapiens
gcggccgcctactactactaaattcgcggccgctcgacaaatggctggtaagcaggccgtttaaagcacacaggcaaaggggttgaatggtttttcaaaaaatggtattaccaatgctgccaggattcaaaataaactggggttaatgccgagatgatacaatataccgaggatgaagatgtaaaaagaagcccataagaagacttccctgagaacctttataatgacaggatgtttcgccattaagaggggcactggaccctgaacttgaagcgatcagatcttgcctaaagagcagtggaccaatttttgaagagaaaaatttctacacttgaaccgtatctgaaagagggttattccgggaaagaaaagaaagagaacgaatgggcaaagaagtaatcatgtaagttgaagtctgtgggatgcagctgttattgaagatggttaaactttgaaaccaaacaatttttaagaaattatttgggtcttaagatggttttactttaaataaatgtcccattgtaatgggctggaggttttgaattccaaaccttatactgaataactactgaatccctttactgttaaatttttttccaaactttcaagatatatttagttgtgtttaactgctacttggagctcagaagccactttatcagttttcctcactggttggatagcctatcagtttatggaaggatataacttccgtaagttacatccttatggaagctactgaataaaagaagggggtatgcaccccctagtttgccaagattgagaaatagcctcttcactggtatgcaaacagatttgattttgcatcctatcatttaaaaaaaaattatgtctgcaccccaacataggcatacttaagtaatatacatactcctgtgc

SEQ ID NO: 147634 - DNA, 423 bp, Homo sapiens
  misc_feature (1)...(423): n = a,t,c or g
cttnnnnnnnnnnnnnnnnnnnnnnnnnnnnnnnnnnnnnnnctgacataaaaaatgtgtccatttgcattaacttgggcagatagcttgcagcaacaaagaaacacaagctttacaactcattttaaaataaaatcttttctatgtatcattccttagaaaagttctcttcttgttttaaacacattcctgataacttcttaaagatgaccaaaataaaacagaatatctacagagatcattttctgaattttttgtcattccaaggatancaacataaaaaaaataaaactggacagcatttcacatccaagtgcacagaaccatttttgcaagattaaataatgtaaacattgggaccagccaaatcagcgaagaatgccaacccctcaaaacacctggtgttgccgcttcattaagtcg

SEQ ID NO: 147635 - DNA, 1700 bp, Homo sapiens
tttcgtgacggctgcagagagagactgagacgcagggatggatgggagggggtacgcgggagaccgagggtggcagagaccgagacaaagctcccgagaggggagctgaagcgggagagacagagccgaggacgcgcgtttggggaggacgcataagccgccgaaacaataagggcgaccgacaccttacacagggagagacagagacctcgatcggttgccggccgtcgcgccgagggacgatggagggactgagaaaggcgaggctaagtcgagacgttgttattgaagatgataggattgatgacgtgctgaaaaatatgaccgacaaggcacctcctggtgtcgtaactcccccaaagacaatgagttaagggagagaataagaacggcggtaacagttattggcaaaaagcatgaaaagagaaagcactttgaaatttattactagcttgctacccaccgatgaaatcaacaacctgtatctgggtatcaggccgggagacagatgatggcgagaggaggaggaggaggaaggagaaggctctgggctcctctgcaaaaataaaaataaaaaaataaataaaattttaaaaataataaaaattcacttattattacacatataaaggaaattaaaaaagaagtctccagttggcagctattttgtccaaaatttattatccatttctttttatatacggtgaatattgcgccaaattatagatctggatttttgaacccacttaatgaaagcggccaaacaccaggtgttttgaggtggttggcaattccttcggctgatttggctgttccccaatgttctacattatttaatcttgcaaaaatggttctgatgcacttgggatgtgaaatgctgtcccgttttatttttttaatgttgttatccttggatgtacaaaaaattcagaaaatgatctctgtagatattctgttttattttgggtcatctttaggaagttatcagggaatgtgtttaaaacaagaagagaaccttctcctcagaggaattggataccataggaaaaggattttagttttaaaatgagttgttaagcttgtgtttctttgttgctgcaagctattctgccccaggttaatggcaaatggggccacattttttatgtcagaaaaacacacacacacacacacacacacacacacacacacacacacacacgaaaaacaaagaaaaaaaatgcttgagcctttttctaaacttcccccttgcagtctgttgtgtgaagcagcctgtttaatttcctctaatattaggtcagtttattctcttttaatggactgtaaaaaaatgtaatcacaagagtgcccaaatatcttgaaaatccaaaaaggcattttagtttccttctcctctgtgctctgagtcccacgtacagggaatgcttgggagtgtcttttyctgttatttataggggattctcttaagggcacaccagctggcctgtttttgccatgggtatttgcaaaaaatgccctcttgcgtgagggaaatcttttaccattttttgtttgcaactttggacctcaaagaggtttcccttcccttccccgttccctctytttcttaattcaatattctgtatgttgcaccttgaaccaacacaccagggctaattctccaatgtacaataaaagaattgttcctgtgtcaaaaaaaa

SEQ ID NO: 147636 - DNA, 1184 bp, Homo sapiens
cacacctcatacgcagccacatctgccctattctccatgctttccagcttgcctgcccttcctcatctctccctgcctgtgcagacctccacccttctttcctccacccctccatcccccaatgcttgtagaccttccattcattccgtctcatcgtgcgtggtctctgatcgtccatcacctgaccttctccaggactgtcttctcacccttccccactccctggtccccgggagcagctccttctgcccgactcactcacagtgcagggaaaggaggcagggaaaagaccaggattctgtgagttctgaggttgccacacacaaagaagctgtggtttctctgcctcggccactgatgagactaaaactggcttccccttggagacggcagatttcaggctgatccctgcttaagccctctcatccccacgctggtcctggtattgatacaagacccagctggtgacaaagcctccaatcctgggggtccacggagcctgggcctgacattcccagaacttaccgccaggtggcgccaggcccccacagtctgttgcccgtggtcttagcccccagttccactctggatgggcctgtgacaccccaaagagaagaaggggactctggatagggtccccacatccagggcgtgggggagaccattggcatttggggaaccattttccttcgaacggcttccccttgagctgagcatttctgtttgctgcagtaagacggggtcgccttttgcccataccgaaattttcttgaaattaaatcgcacacccccaccatttcctctccctggggatctggaggaacatcatacatagtaggtgaatcgttttgtagagtgaagaatgctaatgtaaagcaaatagtcacccacgttccttgtaaatccaaatgtttctatatttgtagctttgctttaaaatgggggtcggccccaacttgcatcctcctctttggcgggctggggagcggcccccagccgggacgggagggcagcgaccccgaggcctcgtggacgtgggagagagtgtggtgggaagtcttgagcggaggaggggattctgcgcgctttctttccacattccttctctttggaatccgccttcggtttcctgtccccccaccacccgcctgccccgcggaagaccgcccagtgagcccagcccc

SEQ ID NO: 147637 - DNA, 423 bp, Homo sapiens
gaccctttaatatatgaagatgcctgtttaaatatggtggtcctgtaacatttttccagcctcatgtgaaaatggaaaactagaacctgaactagtatcctacaacattgcccaaagccccagggtaaagctaaaagttgataagtagacaatttattgttttgtgtgtgtctgtgtgtgtgtgtgtgtgtgtgtgtgtgtgtgtatggcgtgtatatgtatatatcacaaagttgtattttaaatattttaaataccctttcttttaatttaagggatgtcaaataaatgaaaggagtttaaaaatagccaaaataaatgagctataaaggcccataacatactaaaacaggcagtttcaggtatgtaaggaaaggaacattatacttacctagaaagtgagatctaaaaaaaaaaaaaaaa

SEQ ID NO: 147638 - DNA, 1887 bp, Homo sapiens
ctcttcaaaggcccagtttcccctcacgcagcctccttaggtagcgtttccccataatcgtgggggttggaccccagagtcttccaaagaattttcactggttgcctgcatctttggctctgctgtgatctgattggaggagggacagtttctggtacccatcctcctgatttatacatatgcattttttcccctctggcctttagatggcctcagccccagccaccatatacccctgcaagtttgcactttaattgatggtagctcacctggggatacttggtttatggaaagttttgattgatttacttgccctcccaccgttctttttaattcaatgaaatctgaggttaatgcgaggttcgaggagaggttatagataaaactaccagtggcagctactcaagtcctatctccactgttagcttcctccaactctaaattattaacctataattcttgccaagctaaactattggactataggtttgcctttccctggagaattaaattgagcaattgaggagtgtctcaggatagcacaggcccaaggtaggggagtaaaaaggaggtcagggcaaaaagggaggagttttctgtcccttttcccagggtttcacactcaatttgatatccattaccatgtcttttctacttccttgtaaaataggtatgatctttattccccactggtaaagtctgttctatcctctgcctcccatcaggccctgtttctttgttcctttgttaatatcttgaatttagtccctccatccttaatccccccatccctcccccatcatgcaaccagtggtttaatccatgtaccaatagggggctagtaccacagaggcctcctgtgggtggccctcgtattcataccacctgttcctgtgggagaggggaatggaccgggcactggaagggtacctttacaactgggcttcattatttatcagggggaccttgggtcctttctaaatctctagtctctcttcatatccttcatcaggtgttttaaggatgtctctggagaagccatcaaggcaaaagagaactttaagttccctggttccaggcccggagttttgggggaaaggaaaggaaagggaaagggtcacagttgacctaggggttgggaacctttcctggcccttttggcttgcacacatgccttctatcccagaacagctgaggaaatctatggaagctgagattctggaagggacccagcttagggttcttccacttaaggcctcaattcccttccttttccaaggggcaagccttaagttcccatggccctgaaacacacacatttccccccttccttttcccagaagccacttgggccccccatagcacccagtgcatcctttttacaagtggaagaactaggatgggctttccaaaagtcttcttagaaatgaagttcttttcctctgtgcagctttcccccttgggagccaggagtggaagatgtttccattatccttgggccctgggaaaccacttccccccagggcttctccctccccccaccccccatagggaacagggatttgggcctttagccttcgtggggcctatcggcttgcctttccctctaatttcctaccaccttctttggccttcctttgagctgtgttgggggttgggggatccttagttttccttttgtttatttcccagctcatttttttcttctggtcagttttttttaaggggggggtgttgtggttttttgtttttgttttgcttctgagaaagcatttgcctttcttcctctcccaacgataacaatcgtgggtaacagaatgcgatctgctgatttaccgatgtatttaatgtaagtaaaaaaaggaaaaaaagaaaagggaaaaaaaa

SEQ ID NO: 147639 - DNA, 1322 bp, Homo sapiens
aaacggcagtcccgtgtatatttaacaatatatatttatatatattttctaaatcagtacattcagtttttaacttgtttttttcttcacaaacagaagaactcttacaatagtagactttctaaaataaatactattaaaatagagcttcaaaataaatattctatacaaaaaaaaccctgtggccaacttttgtggctggggtggaaatgggcttacagtgagggggaaatgaagttggggatgtggcggggtgggagcctcgagcttttctgttttgtaacatgaaacccaagctgtggggacagtaaggaaggagaaaggcaaggccaagacactgcacgcagtttacccacaggcaggaaaatgggcaaccgcaaggattcatccatcgactgttcacagttaaggcagagggggggcacaaaaattgctttgttcaaaggccttgaaccaggaagggctagttgaggctcgcaggatgccctagttgaatccgtaccagtgtagagctgtgctgccccacgccccgccagacacttcctgggacagcacagaaggagaacatgacgcttcaaggtgacagtcatccgggttctggtgcagatcaactttccacgtgtgccatcttggacaagtcattaatctaagctgggcctcactcgaggttatgattgcgattgacaggcttcaacaaggcttaaaaagaactagccatgtcttccatctcagctctgagggggtgcgtaccaaaggaccaaaggaagggattggtcttcacccccttcctgctcaggaaagccttagttgtgcccatctttttctctgggagggctttgcttaccccaagacccaagtttcccagggtgcttcgcggaagcgcttgtccttcattaacacgggcagccagagccccctaaaaaccgtccctggatccccaggtgcccctcgagttaagacagaacccccacctaccccaggtttacccaggggcgggaactaaccagcacttttcaaaaaaggtcaagccgaggcatcgtccagccaaacaggccattggtgacaggaaacacactcagccagaagcagctacacatgtgtgttgtgtctctgagtgctgggtccctcagtggctctcgactggccccagagccggggagggtccacaggcaagccagtttatccttctgtttgttgttgttgttgttgttgttgttgttgttttaatttttgccaagaagctgagaaaaacaatgctgagggattgctacacaaccaagctgggagaaccaaggatggttccttcgctcctttcccatgac

SEQ ID NO: 147640 - DNA, 2482 bp, Homo sapiens
gggggggggaggagtggtttttataagacgggcccccctcttaagttatatagtatattgtctattattcacggtgacattgttgaacatgtgaagagtatgtagtgtttgtttccctcactaatttatcatttaatataaatgctgacagaaagcagataaagaccttgtagacattttcatatatttacaatccaaaaggggaatcacctccttctacttgttaaaataaatcattttatctgcaactcatgggagccttaaacactaattaggagcaacatgaggctgagtcagtttccaaggtaataaaggaaatagcattttaacaaaatgggcatctttgatttaaacatgccccccaaatattccaaaattgagaaagatggccctaagtactctcaaaaatcggcaacaagtggggaacatggtacttatttaggacccagaggttctgctgccctaaacatcttcctactactatttctttttttccacccacacttggttttggaaagctgcttaaaaatcagaaatattaaacagattaaaaacaagagaaaaacggtctatttcaaatagggttctttttcctactccaaaagaactctcaggagataaggtcttcaaataagacttcacggtttgccagatcctaaggaattattccacagccctgtgaaatcccaatcccatttgtcttcaccattcccaacctatttgtcttcacttctctttttaaagttggaaacacttggaaaaagtaaaatttccacaaaattccagcaattaaaaaatcagctgtcactttaaggctcaatttttttttttccctgaacaggggggtggaggcaggcaagaaagaatagggagctgtggcaataaaaaaacaaaaaaatgcaagaaaactttaaaaaatggtaagtctaccactgatttataagagcaggagtataaattctatccaaaagtgtaagtgatttcacttacaacctgactcaaatctcatgggctcctttattaaccaagattatttttgtcttgttaaatatacctctgcagggcacaatcacttacaatcaatacgattggtaaattacacaagctctatcccaagcaaatatgcaccaatgttaaaaagttatttttttaaaaaaaaacaaaataaaacaaaataaaatccccccaaaaaggtgataatgactgcagaatgtctcggggagactgatatgagcctaaagaccaaattaccatagtcagagaaaaagggcagaaggggtaacaagtggaagactcctcaaactcgaagaggaatctcaaaactggaaaatgtttaagtgggtgaaaggttttgttcattaccttaattcactttttccattgttcttgtaccaaaaagtcatagattaatcataaagaaagataatgagacctgtggactaattaatcagtttaaaaaagatccttgtattcccaggaagcaggcaagaggaaaaaggatgaccaggggagaagtgtgaaaatttaggccaacgatccatctggaaaaaataactctcaagacagtgtcttagttgaatagaggatgtaaaaacgataagcaaaagctaaatgcctttaagtcagagaattattttatggggtagttcagatattataagaatgacagccaatcaatggagaaagattacacaaataaatggtgattaaaaaaaggcaaataataataataataataatagagcaaccaattattcacccaatagtttgtttccaatctttttcttgactctttcatacactcactggggtgggggaccacctgacagtttcccagtttataaggatgactctgagtgtacaccctaaaaatgggatgccaaagacttgtgagctctgtctgcttagagttagaacagaaacaaaaacaaatctgaaacagtaagacctcaatacaagaaaacaagtcaccttatctagtataaaataaacattaggataacaaactccacaggattttatttttctaaatacacatttttggacacgatattatgttgaggtttaagttcttcccccttattgtgccttattttcttgtgaaaataaagttcgttctctagggatgtttcagggataaagtttaggagaaattcagtgtttggctgaaaatccagaggctctgaaaacaaggattccagtggtgaggtaagtccctttattacaataagatttcaaagggctctttacccactttgttcagtgcagtattgaaaacatacctattaggaatagatttattattaaaaggtgttacttattcctggtggtgatagtcttactctttattaacactatagctagtattacttatcaattataatctattacttgtggaaagatctttagtgaacacagaaataaaatcttaaaaattcaaatcttaagatttacttgctacaattaatagtaccttttgaca

SEQ ID NO: 147641 - DNA, 1934 bp, Homo sapiens
gatcttagttcatctctttaggattgggagggtcaggaagaaaaagatctagctacgataatagacattctttacagatgcaaattttccccccacaaaaaacagctttgtgcagggccttttcaaaatatggcaaagaaacatgttttggggtaaaatatttttattttcttccttgtctcataacgttatgccagccagagtcaggctggaaagtaagtcacaatatatagggttaaatgaaacctatctgatgagaatttatgatttgtagggcatgactctccagaccccttaggatagggaatttggggcaaggataaaaaaaatcagggtttagtcctcaccacagtgtcaacttgctaatgtgatggaatggcagcaagatttcaaagaagattttgggggagagagcagggagtggctcagggaaagaagtggagtgttgagtcagttggcttaatgggaacctggtttgcccattttgaaaaccacaacggagaaataatcacccagatctactattttttcaccttaaaacatcctggggcccgtcatcttgcaccctggctctgcagggcaggattggaaggtctctggggggccccgctcctctgaaggatcacctgccccacctgtcacattcctccctggccaggcctcacactaaagagactcgcctggctccaccaacacccactccagactctgtaggggggtatcagcagaaattgaatctttagccccacagagaggctgtgacattcccactgccacttaagggttagggctagtcagagaatcatagaacgttaaagtgtgaaggaaccatcaggacagctcaagaagccgaaaccaagcaaatcagatggcccagggccacacagggaaggagtggaggggtccctgcgggagtgctgccccttccaggcctcctctgtcaccagaggagctggtcctgctgcttagagtcatattaaacctttggatggggtatgtaaggacactttcccctggaaaaatgctacgtcactcactttatatcctggccttaggccaactgagccttcaccccaccctccctgcctgagtcacctcaccaagcatcctctggtactgacgacgatgcttttggcctggttaccaagctttcctgaccacctgatggtagggcccctccacatgggctattcatcctcccagaagcaggtcctccagtgactgatctgcactaatgtgggcaaacagagggcatcctcctcctctctctgcttcttttctttgcaaaattagtgggacaaataggtacaagttgcatgaaaatgagatacagttcttcatttgccatccacaccaggagcaccaggtcccggagcccagctgtgcattagatgttgtctctgcagcacaaggtaggaggctgcaggatgtacctgagaaacgcaatcgcacaaagcaattgttcagcaccaaatatgggggacagaagagtgctaaggggagaagactccaaccataaataaataaaatggcagcaaattaggaaataacagaaaccatactgtctcatgacgtccattcacttgctcatcacagcctatccaaggctgctttcagagtttcagtgagttcttcactgttccctactcttgtaagctcttaaatatgcctgctcagctcctcttgcttctttgttttttaaaaacatactaaaggaactatttttgcagcaaaaccttcctcctcggataaaacttcacttcactggctctggcttttgaagccaggctttccctcctccaagccagcgcgcctcctttgaggtccctttcagtctggaggcctgtggtgatgtcagtgtgcctcagctgttttcaattaaacccctcgagctgagctgaataaatggcttcagcaagctgattttccaaaaa

SEQ ID NO: 147642 - DNA, 2531 bp, Homo sapiens
ttttttttttttttttacatataaaataagacatatttattaagctaaagaacaaattttatttttcattttccccaaacactaaaatagcacatggcatagtaattcagcacacagcataaactgatatatgcaatcgataatcccgaaaatgtttaagttccactttggggagtctttaaaaacttatgtcccctaaaaggacctttattaaagttatcaacagacgaccacagggagcaacccttgaaaaattttaggggtacagggatactgcaattcttaggaatctggggaaactttttatgtgggggaaattaactcgatttgcttctctgttaactgaggctacttttttctcgaggctccatttttgttttagggtaacactgctagggttctgagtttgagaagggatcttctaaaggtaaacttaatattgcaactttcaccacagggcctctgtctaaattgcatttcaagtggaaggaaaggggtatgagaagtgaaatcgaattttgctgcagaccaaaatcattctacaaaatgtagacatggtaacagcttaccacgaattcagcaagatttaacgccaagtacagtggtgtagactttacaagtatccacttccattgggtgatcagacaagtcaaaaggacacacaggatttgggacagtagccctttagaatggatgttgaagacagaacttcatggtaaatccgtatgttctaatctggtatttatacaggcttattgatccgtctcctgaaattgtttcccaattcttttatattgtcttttaaagcacaatttaacacatgccaaaaaagttccttccgcatcaactggctttgaatttaaactcaatttactttaagtctgccaggtcgtacaaaactacagcaggaacctaagggctgcacagtttgccaccccagacttaaagccgaaaagaaaccatcctaaagacaacccttaaaaattaaacctaatggtaatgttcctgccttgtaccttaactatggccataatgtatttgcctaattcaaaaggttgcagagccagtaaccccagtgttatctgcagaccatctgaggtgcttttaagcattttcttgaattctattgtttgctttgaaaacatgggctttaaacgatcaaggaaaatgcgttttgtctcctcactcaggagcacttcgggatacatgtgcagcgttgcagacaggatggagtgcaggcaagcgggttccaactcagagcccagacccttgggaaaagcacttggtgggtcatccttttaacttcccagcttccggcagtttttgatggccgtggcagtcgtgacacccgaggctctccctttggggcaactgtcctctgtggccgtcaagttgccctgggccctcctccccagccagtctcgctgcccccagagcttcaacacccactgcaggacacccgagcaaaacactctgttggagcagggaacaaacccacggctgtgctcggagtggctgctgaggctggatttcttcttactgattctctcacatatggaagcactgggccgccactgtgaagccagaggccagccccgctcgggatcctttctcatttccagtgataatgccctcactttgtgaatttccatcaaccacaggcttattcatccaggagggtgcatctgcaggccaagggccctccggcattcttttcttaaggctgcatgatagtttgtccgagtcacctcctccggcctgctgcacttgtgccaggcaggtgccgagggggccctcttctgtccctcatgcttcgtgttcttggatgcggtgggcctgaggtcacgccttcgtcagtctgggagggccttcaatggatctcaatatgaacctgcaggcggacgttgagcatcatggaagccacgatgtagaggtaggggaagttgatacgcagccgccaggccaggtcgaagaagatgagcagcgtgcgagtcagccccttgcagaagaccccataggagcgggcggcgcccgcgcgagagaggcggccagccaggatcgacaaaaccgccgccatatagagaccggcgctcccacagcccccccgcccgccctctccgcgccgcgtcgccccggcagctgaccctcgcctttccggaatgttcacattcttgatttcttaaactatttctgcagtggtcaaaaggctgataaatgggtttcaacatgttttcaaaatgtttcccatttttgatggccctgttcatccagcagtggtaacaaatattgttgttttcgcttttttgacatggccacaccctagcctctttgtcctcttctagctctgtttctccatcctgttcttgggacttagatgtgctgactagagctccatcttggcccatgaagaaggggttggggcaccaggcttcatggagaagagctatgtaccagcctggatgacttacctctggatttttacctgaggtcaggagttcgagatcagcctggccaacatgacgaaactccat

SEQ ID NO: 147643 - DNA, 1775 bp, Homo sapiens
  misc_feature (1)...(1775): n = a,t,c or g
agcagtgcattaattattttattaatttcttctttttacattatgggaaacattcatctatttacaatatttttttgttcacacacaatctaggtaaataagctagtgaagcttccaattcataaaggccataaaaatgttcccacccctccatctgaaggctttcaaatgaatcttttttttccaaaccaaaataatttttaaaaattacatttggggaattcaggatatgctagtgatttacattccagttatttaaaatatggcatctaggacatgttttaaaaaaggaaatgggtaaattcacaagggataagggcttaaatggaaagtgggtaatggcacagtaaaacattaaggaaacatctataaataacagaaatatattacaathaaattagttctatttaccatttcaaatattaaaaatctttaatccatttcttcatctctctttgcaaaaaggttatgtggaattgtatgggaaacatctgcaaaaaaatataataaaatacttaatttctttgaacgttttttggatgtgggagaacaaacttccttttgtaatcccccccctcccccaagaaaatgccccaacacctttataccaaagttaaacaaaataagtaatttttccagggtacatacattttccattacgaactaaaaaacatttctacaaattacatcaaaaagaacaatgtaacaaaggttatgctcatgaatgtcagtttcaggggtcaagcagcattgtgtggggtcatgttctaacaccaataattagctttttataaagtgtttgtacaatttaaattgtattttcaaggaaggcaaagatcatgatgccctgtaggccttgagctaaaagatttaaaattcttaccacaaatagcttatgaatatacaaatgccgttcacttagacaagataaataggccttctcttgtctctctttaaaatatcatgggctaaattagtttccaaagaaaatattgtaggatgatcttgagtcgtattagaaatctatttcttaatccaaatctccaactctacctcagggcacggagctgtaattgtgagcatgggtcttgggatgaacgctgcttctttcatattaatctgtgagttccaagtcattctcagtattgaatgtgaccataggctacccaagtggcagttggccctactcgatgcaagctttgtgtgacttttaattgctgctacaaggtaaagaaaaggtgtattctttttaaaactagcaaatacttgaagctcaaaatctctgtatgctccaatttcacaaagcacttttgagtgctttgntccacccctagttaaaaagttggttccgttggtttccaaaataaagtgaagtagccccttttccttgtaaacccacagcagtaaacatttgtgcccctgtttaataaaggtagctcaaagcatcgatggctctgagaggtagcgaattctctagtggttttagaatatgtccgtgaaaatatctgttgctagaacccatcacctctcttaatttcataagtaaaattaaattagcacctggctatgagagtgtattattttaaaaagcttctctggtgcaagcatgtttgatgtatgtttttaaaagtctttcgtttttaatttctaatgctttaggatgttagctggacataaaatgccattgatacttaagattgccacatcctaagtgtttaaactgtgacgagtaagggcatttaaagacaacttcagctagacaccgatcatactgc

SEQ ID NO: 147644 - DNA, 331 bp, Homo sapiens
  misc_feature (1)...(331): n = a,t,c or g
cttataaactgaagttttattacaagcaggaacaaagaatactggcttaaataaaaggtaggtgggagccccctcctctagccagcttcttcctcacctcccagggccactgcagtgatggcccagggccctgaggctggggtgaagctgtttctcccagaggcagaaacaccttgtcttccagctcctggcactgggtcccatattcagagctcagaggaaggggtgtggcttgtagaaaagaggtctataaaattgtgcaaaatacccagcattaataanacccgttncaagtattgccagcatgagcataacccacccatgccgggac

SEQ ID NO: 147645 - DNA, 493 bp, Homo sapiens
catcccctttgagtgtcagaagcactctgagccaaggggacagggggcacgtgcactggtcacgagaaaaccctgggctcccactggggctcagcccagcctcctatctttccttcttctatggacttcagacagccagtgtctggggactctgccactctacccccagccctacccaccagcccccaggtgaggcttccagctgggacctgcccagacaggctgagcctgggcgtggtgggtggggtgatggctctggggagcggctgccatcctacaagccacaccccctcctttgagctctgaatatgggacccagtgccaggagctggaaaacagcttcaccccagcctcagggccctgggccatcactgcagtggccctgggaggtgaggaagaagttggctagaggagggggctcccacctaccttttatttaagccagtattctttgttcctgcttgtaataaaacttcagtttataagaaaaaaa

SEQ ID NO: 147646 - DNA, 1498 bp, Homo sapiens
tttttttttttcttataaactgaagttttattacaagcaggaaccaaagaatactggcttaaataaaaggtaggtgggagccccctcctcttagccagcttcttcctcacctcccagggccactgcagtgatggcccagggccctgaggctgggggtgaaactgtttctcccaaaggggacccttctgcggctgccattcccagctgtctgtgaccactagcctctggagtgagaagggcaagatctggggacttcctatgtcactttccgaaggcttcagcccacttgaagggccaaggaggggggatggtggaacaatatctattttgataagaaactacagctcccagcagaggagaaacatcctctgagtttccggcccagactcaggccaaccttcacttgcctcttggcccaccctggcactttcttcttttttttcggaatgaagtcccccgttgggcaaaaccaccttggttttccagctccctggcactgggtccccatattcagagctcagaggagggggtgtggcttgtaggatggcagccgctccccagagccatcaccccacccaccacgcccaggctcagcctgtctgggcaaggtccccagctggaaaccctcaccctgggggctggtgggtagggctgggggtagagtggcagagtcccccagacactggctgtctgaagtccatagaagaaggaaagataggaggctgggatgagccccagtgggagcccagggttttctcgtgaccagtgcacgtgccccctgtccccttggctcagagtgcttctgacactcaaaggggatggggcagggggcagcccaggggatatgggagccagccacattcatacagggcacacatgaacacacacacacatgcacacacactctcactcattccagccagaaggtctcttggaataaacttattaaaaccaaccagccttcttgatagcccttctcctgcctctacactgacagtaatgtggctgaccttttctccttccatttaagaaagactatgtagtaaagaggtctataaaattgtgcaaaatacccagcattaataaacccgttccaagtattgccagcatgagcataacccacccatgccgggaacctggcttgggagagaagtgggaggggcaggctgggatcccttaaagagctctccatgggcaggggaaggaccaggctcccacttccactgtgctgcccaggaactgccacaggagctgagccggtggggccctggctggctgatttacctttgtctgatacaggctgcccccacccacccccatccctgccttctctactggagccccaactcaatcctattggccaactccataaaaaaaggggggaaaaccccaccaaaaatcccacagaataaagggaaattatcaccaagggaatgaaggagcccacagaccaaagcagcccatggaggcttcctctccacagccagctatccagagc

SEQ ID NO: 147647 - DNA, 957 bp, Homo sapiens
gaggtcgcgctgtccatgggcgtccttggcctgcgccacccagagatgataaatagccaaagacgtcaatgggcacccatggacatagtaacgcatagtaggaggctgaaaaactagaagcaatgacaatgtcaactattttgagcaaaaagaagcagtgtcttcggaacatttgatcataaaaccagaaattaaaggatgagaaaaacatttttctgaagcttatacttttacacattcctatagagagcatatttgtgtggatgggggtgggtaaacactcaacaaaaagtttctttaaaaagaagaaaccatcctggttcgacgtcctcgatgggtgccccactgctccccttcctgtgcctgtgacccttcccaaactgcccctgttgcttgcaggctcgccttgagctgaaaggcagccctcacatcccgtcggcacctccctggggccttctttacaccctggagaacttcacgagggaatctgtgtctgtaaccaccaaaggcttccctggtccagatgtagatactaaggctgacttggttattttaaagcctgcggacttactctgcccaaaaattatttaatccatggtaaaaataatttataattcttataaagtatccccttcataatataatgaatgttggtgctattacatttaagtgcacatgttcagtatacaagattatttaataataatgttttcaaatagttattgtcaaagctatttttcttatgtttatgaaagtgcttataaaattcatgttttatgaggctggagatgtatattttgtaatttcgattctgatatttgttaatattcgcttccaatgctggttttgtttgatgagactgacattgcctaatttcaagctttttgaatgtgtattctttcagggcaagtatgaaataactagtaaaaaaccctccaaatatgcttaacaataaaa

SEQ ID NO: 147648 - DNA, 1145 bp, Homo sapiens
atacctagttgatatccaagtattcttaattatgctaataatctcccttttctctattgtgttttttgaatctaggagccaggcttttagttaccctgtcttcttagttccttttaacatgataaaaatagattaatctgccatgaaaaagtgaaaataccaaatcttggtgtgtgatgagaaatgaactcatggaacagtactagacttgtgtatcagcacaacaccttagtatagatttatctgtgcctatttcctgggccatattttataatttgattcatattgtcctttgggaatccctgatccaataggattaatgtccttatgaaaagagactcaacagagcttgctctcattctccctctgccatgtaaggacacagtgagaggacagctgtctacaagccaagagaagaaacctgaatgaaacctatcttggtggtacttgatcttagactttccaatctccagaactgtgagaaataagtttcttttgtttgtttaatctaacccagactatggtattttaaggcagcccaaacagactaagaccagtcatttgtgtggatgattgatgtggcatgtggttgatgttttaggaaagggtgatattcaaggacgtggctgttgtcctcaccaaggaagagctggcactattggataaagcccagataaacctgtaccaagatgtgatgttggaaaacttcaggaacctcatgttatggattcccttgccagttagcttccagttgggttcagccaatggggaaagccagcaagagatccagggaagggacaagagtgaagtcagaatatttattcccccaggtttttccctagaggttgctgtggaatggctatattccatatccattgaccaaagagatgcacatcccaagactgaccctaagcttcgacccgaggaggcacagcgcaagtcgctgtcacgaaacgtgaagatgcactgttttgtcaaacccagggctgctccccaaaccgagcccacgctcgagcccacgctcttcccatcctatcccggcgtgcgtccagtaccatggcgcatgcgcaaggaggcctatggcctacaatccccagaaagccccgcgcgcagcagtggccattcgcaaggctaccctggtgaag

SEQ ID NO: 147649 - DNA, 510 bp, Homo sapiens
aactgtctggagtttctgtctgatggatggtgtgctttcatatgccactggcttccttggacatagatcagacaaaagccccgggatctgtttggtagcaggagaaatgaaggaagatgaaaaagcaggcagggaagggggtagtaaaggactgagagaggagggaggtggctggagaaggaaaaggaacattgctcgatgctcccatctggtggcggcctcaggaacccccggggaacctggaaggaggctctttgtgagacctgggcaaaggatggggcagctcgtcgatgatttttttgtgtttccaggcttcctgtgtgatcctggccctccggccgctagagagaggattgggaaaccccactgtcagctctgcatctgcccccactaccctcctctgccctattctgtccctgcccctccaagcttgaagaaggtccttgtggggcgtcctcatttcttcctcaaatataaggaggaagataccaattaaaaaatcatagtatc

SEQ ID NO: 147650 - DNA, 1180 bp, Homo sapiens
tttttttttttttttgtcctattacctcctctgagcgcaaatcactggctacaagggacttaccagtctggattcagcagtttcttttctaaaacccatttgggtgactcagcagccgcatctgctacctgattttatcctggagaatacagtgcaatatttctctttgattatttattcctcttgattgtggaattaatttgattgcttgctaatggtactagtagtactcctttcagaagaaaaaatggagcgatttaggtgaccaaatattacatacataaatagccacatgaagttttagacgtttggacttgaagcctcaaagatcaaccaaccagtccccttatttagtaaataaggaaattgaggctacacacagaaaattgtactacagattattactaataacccagcttgctaaattaggctatacctaggtaatctctagaagacaactctgacagactctttaatatttacccctggttggaacaatatttgaaatgtcccagatatttctatgctacttagatatttgtggcaaagcagaaagctttttgactgtgaaggcagaggtcagcactgggggaaacttgctggtggtctctcccacaaccttgcccagagtcctttccactaaggaggtgaagagaacagagaaagagatttccatttctgctgccagagctggtatttgcctgcctgattctctgtgtttcctgtttcaccgccaccctttcaggagagaactacaccagttcatcatgagggtcagggaagcaaaagctctcagatgtgtccagggcgttacttaagaaatgagtatgcagattctggaaggggtgtggaaaaggtgatcctttacccccacccaggaaaacctgcattgtgctagcatggaaaaatcatgggctttggaattaaacccatttggtggaattaaacccatttggtttcaaatcccagttatgacatctgttaactttgcaaactcacaaaaattatttgaaattatctgagttttcattttctcaccttccagaatggggataatgcctcctgcatcggttgttgtgaggtttcaatgagatgaaatatgggaaagaagaggtactcacctgatggtccctgctttcctctgctaggcctgagtaggaagtcgacgcggccgcgaatt

SEQ ID NO: 147651 - DNA, 601 bp, Homo sapiens
ggagaatcaaaacttgaggggaaccttgaaggatggggaatagtcaataaatcaggagaaaatagtgatggtgcagggcatttcaggatggcttctccaagattcattggactggttcggtaggagatgaggatattgataggatattggggtgggggcagggtggacacttcagaggaggttacagattgagctaagaagtggaggctggtctgtgcagcagtgttcaaggcgtggtaagaagagttgggaatctcccacggctggcagaacttgtgagcccccctgccctcaaaggactacgagacccctaatgagaagagagcttcctcccagtcctccttcctcttcctcctctccctccctctattcacccagcagctgtttactgagtccttcttttatagtgggcactgccctagcctctgggatgccaggttgctggcctttctgttaccagtgcacctatttgctctcgcctgggtacctacttttgcactggcttttcccgtcacttagaatgtatgtccctctggttttcacgtggctgacttcttgttggcgctcagctgaacatcacttgttcagagaagccttccct

SEQ ID NO: 147652 - DNA, 1207 bp, Homo sapiens
tgaggatctgtgaccccagccataaggagccttgccctccttgctgccattctcctggtggccctgcaggctcgggcggagccactccaggcaattgctgatgaggctacagcccaggagcagcctggagcagatgatcaggaagtggttgattcctttgcatgggatgaaagagctcctcttcaggtttcagggaagtcctctcctgtttgtgcacggctgctcttgctacaggagacccgggacagaggactgctgtttgccctccctcttcactctgcctaccttgaggatctgctcaggcagagccacttcaggcaagagctgatgaagctgcagcccaggagcagcctggagcagatgatcaggaaatggctcatgcctttacatggcatgaaagtgccgctcttccgctttcagcctgataaaatcattgtcctctccaccctgattcctacaggagactactcaccccataacctcaaaaacctcttcatgaggatggtgacccccagcccatgaggaccctcgccactccttgctgccaattctcccctggtgggccctgcaggccccaggcttgagccgcgtccccaggaaagagctgatgagcgttgctgcagcccccggagcagattgcagcgggacatccccagaagtgggttgtttccccttgcatgggaccaaaagcttggctcccaaagcatcccaggctcaagggaaaaccatggactgctattgcagaataccagcgtgcattgcaggaggaacgtcgcttatggaacctgcatcttaccaggggaagactttgggcattcctgctgctgagcttgcagaaaaagaaaaatgagctccaaatttgactttgagagctacagggaattgcctattactcctgtaccttcttgttaaatttcctttcctaatctcaaataaatgccttgttacaaaggccctatctcaaaaaaaaagccacccggcccgaaattccaaaattttgaatcggaaaacctggaaaaccccggagggtccttttaagggggcattgggccccatttaaatttttttaatttaaaacacggttgggcctttttttagggaccaaacccccttaaagtcaattttgggcagggaccctcggtttaaaaatttttaagggccaaaataggcgccattttttttggcccaaaattttaggaaaaaaata

SEQ ID NO: 147653 - DNA, 284 bp, Homo sapiens
  misc_feature (1)...(284): n = a,t,c or g
ctccttctccctccttctccctcctcttgcctccctccttctccctcctcttccctccctccttctccctcctcctccnnnnnnnnnnnnnnnnnnnnnnnnnnnnnnnnnnnnnnnnctccctccatgtacctccctacttatacatcctcctacctccctccaactccctcctcttccctccttctaccttctattacctacatccatctcccatcatcttcccactcacaatcttcctactacttccatacaagatcctagtaccccttgcagcataaaac

SEQ ID NO: 147654 - DNA, 534 bp, Homo sapiens; identical to SEQ ID NO: 144862

SEQ ID NO: 147655 - DNA, 654 bp, Homo sapiens; identical to SEQ ID NO: 144884
  misc_feature (1)...(654): n = a,t,c or g

SEQ ID NO: 147656 - DNA, 749 bp, Homo sapiens
  misc_feature (1)...(749): n = a,t,c or g
atcgagaccatattccatgtggnggaattccacagactcagagagaacccacccatggttgctgtctcctgccgacaaagaccaacgtcaagggcccgcctgggggtaaggtcggcgcgcacgctggcgcagtatggcttcggaggcccttggagaaggattttccttgtcctttccccaaccaccaaagacctactttcccgcaacttctgaccttgagccaacggcttctgcccaaggttaaagggccacgggcaaagaaaggtggccgaacgcgctgacccaaagcccttgccgcaacgtggacgaacatgccccaaacggcgttgtccgcccctgagcgaccctgcacggtgcacaagctttcgggtggacccggtcaactttcaagcttccttaagccactgccttgcttggtgaccctggccgcccacctccccgccgagttcaacccctgtggtgcactgcctccctgggacaagttcctggcttctgttatgcaccgtgctgacctccaaatacccgttaagctggagccctcgggtagccgttcctcctgcctccgctgggcctcccaacgcggcccccctcccttccttgcacccgtacccccgtggtctttgaaataaagtctgagtgggcggcaaaaaaaaactgaacatctccttcccagccactgggtgccagaaactcattggagtggacgatgaacgccaaattcggatcttttagagaagcgatgggcccag

SEQ ID NO: 147657 - DNA, 551 bp, Homo sapiens
tttttttttttttttttttgatcagtaattccttattgtttattctccttttacaaaaagacacttgggacaaataaatacaaagatggtatatatcatatttagcaatgggcaaatacacattttcttggtattctccacaagaataaactaataaaattttcacaggtatactcttctaccaatctcttaccctctaaaaaaaaaaaaaggcaattattttaattccctgtaatttttaacaatgaattctcaaaataagtaatctaggactattcagggaccaagacatctgaatcaacaagttaaaaaaaaaagtctgtgtatacacacacacacacacacacacacacacacacacacgatgttgcccagaagtctccaattaatgaagagtcttaaaagtttttcatttcatatagtttgcatgaatagagcctgttctattctaatctcaatggcaaataatataaaacagaaagctgaacacaacatgtgtgtgtgtgtgtgtgtgtctacttttctgtcctaagagaaaacattaaatacag

SEQ ID NO: 147658 - DNA, 700 bp, Homo sapiens
gagaagtgactgacggcctgcaccaacttagacggtcacagtcatgaaaagtgcacgggtgggattgcccgagttggccatgaattaccgtgatggatccatttggaaatgaagttggttgtgacatttcttcaagttttgtttcgcttgaagcttgactggtagatggagaattttggccttatgtatcttatgtgacttgcattacccagtccagtcctctgccattaatctaaggtccgcaatgtatcaggtattttactgagaatcttgcttacctaattctcacaaaaaaaaaaaaaccttgggagatgagggtggaaacaggatgagaggtcaggtgacttgtctgagggctgacggtttgtaattggaagagtcagggcctaaccactggtctctttgacacaaaaactcatgctcttagtggcaagcacagtgttctcaagattgggggaagccagggagggacagtgggttgtctgctactagtgggtcaaaattacatatttagtcatgaatggttcagcttttaccatttaaataacaaataaatgttctttctccataggcattaaagactattccaactggcccaccatcccgcaagtgtacctcaatggcgagtttgtagggggctgtgacattcttctgcagatgcaccagaatggggacttggtggaagaactgaaaaagctgg

SEQ ID NO: 147659 - DNA, 1102 bp, Homo sapiens
atgagcgggtccctcggccgagctgcggcggctctgctccgctgggggcgcggcgcgggcggcggtggcctttggggtccgggcgtgcgggcggcgggctcgggcgcgggcggcggcggctcggcggagcagttggacgcgctggtgaagaaggacaaggtggtggtcttcctcaaggggacgccggagcagccccagtgcggcttcagcaacgccgtggtgcagatcctgtgggtgcacggcgtccgcgactatgcggcctacgaagtgctggacgaccccgagctgcgacaaggcattaaagactattccaactggcccaccatcccgcaagtgtacctcaacggcgagtttgtgcggggctgtgacattcttttgcagatgcaccagaatgggggtctggtggaagaactgaaaaagctggggatccactccgcccttttagatgaaaagaaagaccaagcactccaagtgagggcggccaagtcctcgctgagcagagagggagccgttcatgtcagagacttcactgccagaaaagccttaacccattttggttttcactattgagaccgcaactgcttgcacttgattcatttttggttcatgagcagttggtgatttttagttggtctggtgtttcgggcctaagaatatcttattgctggacttaattacaaccacctgcactgtaatgattccaatggctgtattaatgatattgctgtaaccaaaattccattcttatattgtcacttattctttgcctggatccaggaggttaaataggagctttggaatcattattcatgacccctctggcaatggtggtcagtctccaaagagaggtatctccccccaaattttgtgtagcttcttttgttatggaaaatggtggacaaaaaaaagaaactgtgataactggggcgttgtttttttaaaataaactccagcacagggatgctgtgcatgcctgagttgattccgaagtgcatatctctctaaggatttggagtgcctgcagtgttttatgtgtgggaagtaagggagagtctcatattcttctattaaatttgccacaagaaaaaaaaaaaaaaaaaaa

SEQ ID NO: 147660 - DNA, 787 bp, Homo sapiens
tttttttttgacaaacctaggggttttcatttgaaggcagtggtttttaaacaaaagtattttcacaaaaggaatgagaacatctcagtattatatatttgatacaattcccaaataaattgtcacaataaaacaaggttgcttatgcagaacccttgaaatacaatgtatgtaaaaatatttttactactgtgctcaagaatagagattttgaggacaattcttacatatttaagaagcaaaaactttagttaatactcagactttatttaacatcagaaaatatgcaatgaagagaaaatctacaatttaaatcagcttgcagatacatttacttctggatcacaacttactcagcattagaaaattcacactggctgggcgtggtgactcaccctgtaatcctaacactttggaagtctgagggcaggaagaggccttgagtccaggaattccagaccagcgtgggcaacatagcgagacactatctctacaaaaaatttaaaaaattagccaggtgtggtggcgcacacttgtcccagctactcaggaggctaaggtggcagggtcctttgagaccagggtcctttgagccgaggctatagtatgccatgatcacgcctctaaatagacactgcattccaaactaggcaacataatggcatcctgtctctaaaataaataaataaataagaaaatatttggctgggcgcagtggctcacacctgtaaccccagcactttggaaggctgaggcaggcggatcacctgaggtcaggagttcgaga

SEQ ID NO: 147661 - DNA, 814 bp, Homo sapiens
  misc_feature (1)...(814): n = a,t,c or g
ccactgaagcgctcagatggctgtaacgacggccgacccacgcgtccgcccacgcgtccggacacaactgtgttcactagcatcgctcatacagacacgcatggtgcatctgactcctgtggagagagtctgccgttactgccctgtggggccaagcgtgaacctggatgaaagttggtggtaaggccctgggcaggctgctgggtggtcctaccctgggaccccaaaaggtcctttgaaaccctttgggggaatctgtcccaactccctgaatgctgttaatggggcaaacccctaaaggtgaaaggcctcaatggcaaaagaaaaagtgctcgggtgccctttaagtgaatggcccctggctcacctgggacaaccctcaaagggcaccctttgccccanactgaggtgagcttgcactgtgacaaagctgcaccgtggatccctgaagaacttcaggcgtcctggggcaaccgtgcttggtctgttgttgctgggcccattcacttttggcaaaagaatttcaaccccaccagttgcaggcttgcctattcaagaaaattggttggcttggtgttggctaaatgcccttggccccacaagtaatcacttaagcctcgcttttctttgctggtccaatttccaattaaaaggttcctttggttccctaagttccaactactaaactggggggatattattgaaagggccttgagcatcttggattttgcctaataaaaaaaatttatttttcatcgcatacaagaataaaacaagcgcggccgattaagaggatacttcaggggcgcaagat

SEQ ID NO: 147662 - DNA, 672 bp, Homo sapiens
atggggccgaagcggctgcggctgccgacattggcgatggactccccgaggcccttcgtcccactaactgcacacaggtggtccccggggccagagagccgccggcgctctctccccgaagaccacgccttcgcctccagccagtttgcttggggaatcagaaaggtgcccagggcccagaaaccattaagttttttccgacttcaaaaacacacaccggaggtgagtccgcgacccccctcctctaaaggtgcggcgatgcggcagcagccccatccctcgggctcgccccggcgctcccgcgggcgcgcacaccttcgccggcccgccgagtgtgaattcgaattcggcggtttcactaggcgcagctggagacgcagcggtgaaaagccacggcaagtgggtcgactcggacggataccggtgcggctgccccgggaggtgtcgcagttcggggactcccttcgcactggtcgcgaggcaggagggagcagggtgggaggcgagtcagaggagggtgacttacctgaagaatacaggttggtagcctgcacacctgaactcaacgctggcgggcgagaaaaccaagcagcgctacctccaagtaagggcgctcccctggagaaatgaatgcctggcgagcttctggagaacccactattagggctggac

SEQ ID NO: 147663 - DNA, 1586 bp, Homo sapiens
gaaagccttcgaaagcagctaggccaggaacctttcttttgacatgcacatgatggtgtccaagccagaacagtgggtaaagccaatggctgtagcaggagccaatcagtacacctttcatctcgaggctactgagaacccaggggctttgattaaagacattcgggagaatgggatgaaggttggccttgccatcaaaccaggaacctcagttgagtatttggcaccatgggctaatcagatagatatggccttggttatgacagtggaaccggggtttggagggcagaaattcatggaagatatgatgccaaaggttcactggttgaggacccagttcccatctttggatatataggtccgatggtggagtaggtcctgacactgtccataaatgtgcagaggcaggagctaacatgattgtgtctggcagtgctattatgaggagtgaagaccccagatctgtgatcaatctattaagaaatgtttgctccagaagctgctccagaaaccgttctccttgatcggtgaaaccattaaaggagcccagtgttccccgttccatggaatctccccttttacttgggaaaacaggaatattgactaccaaatcacaatgcaattgaagccgtactgcttttttgagcagttattcattccagtgattaaaactgattgtgcagaatattctaagaggtcagaaattggtgtgtataactacatttttagtgatgcaatttattgattagtgagtaagatactgtttttattgagagatttgatttttataaagtaaaaatacggctgcattagggttacaaacagaaaagtgtcttaatgtctaaggagggcatattagctacactacaaaaacaaattttttctgtacttctgaaaagaattttgttgtttctcagctgttttccaaaagcaaaggaagtctttatggtttttttctatttcatgttattgtgatttgtttataagtttgggtggggtgcataccatattcttggttcttaaaatctatcacttttcaccttacacttgatgtgtgaaaactataaaaacaatgtgtgaaacccaggggttctaaaatacaagcatagattttatcagggtgttttgtcaaagcaggttattcagtgattcctccccaccattcttaagaacgttaaataatgctgttgtgttagctctgagtagaaaggaaaaagtaaaacctctgtttggaggtaatattgggttgaattctgactgcccctttctagctggacctttaacaaatcacccaatcttttttgtgtttctctaaagtcatttatacattaaatgtaattatagcaactgtggggttctgttgagaattaagagctaacactatatatgtaaagtttccagtactagtcccagaatttagaatatgctcaacacaaagtaaacagcattatataagtttatatttttgtgagttataaagtactttgatatattctcattaaatctgtaaatcacctctataagtaagtggtaataataaagcagatatttttgtccccatttaaaaaaaaaaaaaaaaaaaaaaa

SEQ ID NO: 147664 - DNA, 1154 bp, Homo sapiens
ttatgcccagaggtagccaaattttttgtgtgaaaaatcagaccttggcgatgaccttaaacagcaggatatgaagaactcccacaagcttagcgttccaataatggaacactaggcataaatgggttaactgaagagaatatttgcagtgttaaccctataaaactcacctttataatttctgtgaggaatattgttagaaatgttgtcatacatgaagtgacactatctgtctggaaaaattttcctcagcctgtggttctcccacttctccctctttgttctagcaatgaatcacaaaacatgattgggtttccatccttgaatcagatcctaggaagatcagagttaaatttggacccaattttttagcttttctttttcaatttctttgcttccatatttaaatgtatcttaaaaacttttttaaagccacttcaaaaccattttgaaatgcaatgaagtataaagagccattctattttttgacacaaaaacgagaactcacttaattttgccgtagtttatggataatttcacatttttagcaataattgtcctttcacactcacaaattcatataaatataattcaaagaataaaagtgtttttttagtaactgtagaggcattggtgcatattgggaaaaaccttagtggacttgaggagtaaaggcttttaaaccttatctaaaggtcgcaaagataccatgtagattattaagagttggtttaccagaaaggtcaatgatttcttagacacatttaaaaatagtctgacatcctcatctgtgaacattttaaatttttcttattgaactagattgcttaagtctgcttaatctcaaagtggctctcatatgattgaaatgttgacagatgcaagggtagacactctagtccaggaattctgttttaggtttttctacattttcctttgaggcataacctaactgtttacttcttccaggcaggagctaacatgattgtgtctggcagtgctattatgaggagtgaagaccccagatctgtgatcaatctattaagaaatgtttgctcagaagctgctcagaaacgttctcttggatcggggaaaccataaggaggcccagtgttcctgttcatgaaatctcccttttactggaaaacaggaat

SEQ ID NO: 147665 - DNA, 1023 bp, Homo sapiens
  misc_feature (1)...(1023): n = a,t,c or g
agcccccccnattgaaaatcgagagtctatgccacgngcgggaattcgctatatttcatcttttatctttttctttgacatttaccaatcaccaagcatgcaccaaacactgctttaggcactggggacacaaaggggacagagccatcctcctttgacacctggtcttcagttctgtgcccaacgtatatagttttgacaatgaccaggttggactgtttaatgtctttcaacttaccacgtaatcctcttgtagggatcacatctttctttatgatattgtatttctctacctctaacagtaaaaattccattcaacccttaaagctcacttcaaattcttctttgagaagtttttcctttctccgcacccagaggtacatatttgaactctctttgtacttggagggcacttctttcgtggtagttcttttatttttattaatctctgtatccatagatagtcctccaacaaccaaaggttgggactctgtcttacatatctgggngccccctcatagtgcagtaataagtaagttgattatatccgagctatgtaaccttatattttttaatggttggatatcactgagttttttttttttaagaatttttttattgaggtaaacttcacataacataaaattaactattttaaagtgagaagttcagtgccacttagtattgttaacaatgttgcataaccaccacctttatttaaagttccaaaaaaaaatgttctcctctaaaaggaaacccccatcccattaagcagatactctccattccttccttcctccagcccccagcaaccaccaatctgctttctgtctatatggttttatctattcttgctattttatataaatcgaattgtatgagaccttttgtgtctggcttctttcacttagtacaagtttttgagatttatttacatagtagcatgtatcaacacttcatttttatggccaaataaaattgtattatgtgtttatagcacaatttaaaaaaaaaaaaaaaaaa

SEQ ID NO: 147666 - DNA, 904 bp, Homo sapiens
ccatttggtggagaatcttgggaaaatgaactagcaattattttcatactatctggatataaatggttcatccatgtttttttctgaggacacagaaaaggagccagggattcagaaggcaggtttgggaactagacttctaccagtttaggaagcagagccttttgtaattggttcctagcttttggtattcgaaatcaacctctgaagcaatttttcaaggcctagctgaaaagcaccagttgcctcttccactgctgttgccaaacgtctgactgcgatgacagcatccctgcggagctcattggcagtatcttgctgagcactggcctcctcaccaatagcaatcagcctgtccagtttttcttcctcccgctttgagagttctcgtgccaatcgcctgttttctgccaactcggctgcgatagtcctggccactgaccgccttctttcgccttgcccaccttgggaggggggcttcactgggtcaaggggcctattccccaccagaaacaaaaccaggttttcgaagaggagactggagtctgcggtgtggaggctaccccaggagtgctgcggttggtgctggtgcaggggctgggctccccggacacacccagtctggccatggggctgctctgacagggagcaactgcacctctgaaaaggctgtgggagctgctgtagctgggggtcccttgagagcaccctgcacccgaggattcatcccaggagtcctcaaggtcactggtttctcgtatccggtcactgattcttagctgactatcctcatctgatgccttaactgttttcaagataggctaatgatctactgcatgagtccttgttgattttagaatgacggttccctcttcccatggggcgtcagaggccaataagatct

SEQ ID NO: 147667 - DNA, 591 bp, Homo sapiens
tcggaccggcccggaattcccgggacgacgatttcgtcgcgacggtgcggctggcggacccgggctggcttgcggtgaaatcgaaactgagggaggaggcgccagcctctggcatcgtctgttatctgcgccggtctgaccccccctccgctgccgcggcagctcgctctctcccctcagcttaacgatgaagaggagaactgacccataatgcactagcccccatcaagaaacagagaaaaagagttgcagagcttgccctgagcctcagctccacgtccgatgatgaacctccttcctctgtcagtcatggagcaaaagcatcttactacaagccttagtgggtctgatagtgagaccgaggggaaacaacacagctctgactcttttgacgatgcattcaaagcagactctcttgtggaaggaacttcttctcgctattccatgtataattagcgtctcccagaagcttatgggccagatgggcttcagggaaggtgaaggattgggtaaatacagccagggtcggaaggacatcgttgaggcttccagtcagaaaggtcgaagaggcttgggtctgacactcccggt

SEQ ID NO: 147668 - DNA, 707 bp, Homo sapiens
caggcttatctggtgcaaagctgtggagtcctgggaattttagaccctttccaaaacggtgaaaaatgttaaaataccaaaagcttaagtattttttatgggacctaacatggggaactgtacatgaaggataaatagagattgtggttaaagtaagtggcataaagccacaaaaactcaaaaaacagagaaaagataacagaaaaaataataacggggaggtgggaatacttgaaagcctggaaaataacttgcaaaagaagatcagggatttattctcttcagagagtaatcagaaggttggtggacctaggtgattccagggagagctgagggtggagaatatgtgacatctacatactgactgtggaaatttgttcactgctagatcccagtgccctggaacagtgccctggcatacagtccatccttctcccactgattcaaaatatcacctttatcatgtgctagatctctgacatttacatattggtctatttagggactctctgttttgttattttaatgtctcatgtctattcctgtgccaatataacactttttaaattactacagctttaggtcaggcctggtggctcatgcctataattccagcactttgggaggctgacgtgggaggactgcttgaggccagcagtttgagaccagcctgggcaacatagcaagactctgtctctacaaaaaaa

SEQ ID NO: 147669 - DNA, 915 bp, Homo sapiens
tctttataaagtagactggcatctaagtaaaatgaccatttcttttatagaaatgatcaaaacagtggaacatctaaaattcaggaggccccaaaagggcattttcatagaaatgttaataacttacacattaactccagtcaataacaccgtgctacagtgtacagtttagttagactcaagagtgtaattggttcattattaaatttactcatctgtggtccaaaaaataacacaaattttaggtattttattataatccatctcataattgtgagaatactttctgacaaaggctttatcagtgtcacatttatgaaacaattttccctaaaagaaaataaaatcagggacaattttgagctattaaattaactggtttttcaaaacctcccaatggcatttgtggagatggcagagaagggagaaatgtattctaagtgaaataagtcatttcagttatcaagactgagttctaagttatctatttttactggtgcaaaaatgctatttaaagaaatccttactttacacaggagttgcacaattcaaattctgttgcaaaacagtgagatgtgcctcactataagagcatgtaagccctcccacccagcccccaaagaggaggaggaaatactaaatcaattaaaaattcaattgtcatctgttatcctcaaattatcgagatcaactaatgtaatttactataatggcaaagttttcctttataaaaataatagcttattcatatataattcttataccacaaagttagaggcagatgatttcaagatactgacatttgatatttctagaatattggtctaaatcataaagtattcttaatatatgtgacagttcaaatatttcatcaaatattcccacagtgagagatagtaaaaccggacgcgtggg

SEQ ID NO: 147670 - DNA, 458 bp, Homo sapiens
ttttagtcactattggtaggtgttttacaattcgcaaagcacttttttgagcatcattatcctcaagagaggtagtacagcataactgagatactttgggtttcaaaagtagcttcactacatactcgctgtgatcctgcataagttacttaacctctctgagcttcagtttccttatctgcaaaacaggcattatagtatcagctgggcaaggtggctcatgcctgtaatcccagcactttgggaagccaaggcgggaggactgcttgagcccaggagttcaagaccagcctgggcaatgtagcaagaccccatctctaaaagtaataataataataataataataaaacttaaaaatatatataataatatcacaatatatagggttgctatgaggaataacctgttatgcaatgtgtttaaaacagtacctgacacataagtgtacaataatagt

SEQ ID NO: 147671 - DNA, 449 bp, Homo sapiens
caatctaccatgtaaggacccaataactgctaattgggggtctgtgcaggactggagaaatgtcaaaaaagattattaggagaagtgtttggtttttatgatgagcaaaaagatcaaattcatctaatatgaagatcactgggcaactgctagttcggtcacctttttttaaagcttccagaagaaatgaaaggttttcagcaaagcttccaaaaactttatctccaactacattttccagatttaactgccttgtgatttcctttagggccgattttgtcattgatctgcagcagtccatttaagtgaacttgtaatacattttcactcacttcttctatttccatgagttctttcaaagcatgatttattaacctttgctgctgctgttgctgctgctgctgctgttgctgctgctgctgctactgctgctgctgctactgctgctg

SEQ ID NO: 147672 - DNA, 928 bp, Homo sapiens
  misc_feature (1)...(928): n = a,t,c or g
gcgcccccccattgagaccccactagtccagcgcggnggaattcgngagaggaggagagaaagaaaccaaaagcctcttagcagcaaagggtctgtgttgctgctgctgctgctgttgctgctgctgctgctactgctgctgctgctactgctgctgcttggccctggctggagacatctcactacacccaggagcagccacttccccagctctcctcctcctccttcgcctcctcctcctccactccccccctttattaccctttgtgtcatcctccacagctccagggaaggcactcaaaagtggggggcaggaaagacaattatcaacttcccggttttctatggatatgaagatttactcctagtcnatccagtgggacccccatgaagtcagccagaaagcctatatccaacttatgtacctttgcaaacttggctgggattttgactgtatgtgcaaaaacagattgtacttagcgattcattaaacatcttttgatcatctgctgtctgccaggcactgtgctaggcatctgaaaaacaaagatggtccctgcagtttaatgtgaagagctatcttaattgtattccacaagtgtattggtcgtatctttgttttggtgtttctacctaaataaattttatattaactaaatggatactgttaggtggaaaaaatcatgtttaagaaagatattgctgttattttattaaaatacaaatatataaagaaaaattttccacttaatactgtattctagggatttatattctgtatatagttaacacattttagacaatgaaaatagcctatgtggttgcctttgctggatttttattgctaaccgtaattcttttaagatgaccaacaatgttcattaagttatctcattaaatttttccaaaaaaaaaaaaaaagtcgacg

SEQ ID NO: 147673 - DNA, 1731 bp, Homo sapiens
ggtgctggttaggttttattttaacaggatgttttctcttatttttcaaaatatcagttatatcaatattagaagtgtaaacaggtacaaaatatacagtacatagaaacaattttcttaactagtctatcgcctaataaaagtatgcatgagggggctgaatgaatagggccctgcaaggttccctccgtctgcaggggaaacaagaggaccagtgggctgcttcaacaaaacagggaatgggatatttgtgtgggtagggaacagcactgtgggtcgaatcaagaaatctggggcccacctttatgatgttagatgctggaatgaacaagccactttggcccccaaaacccagccttcgtgagctgtgccctctggagagtgcacacatttaaggaggcctgggccacagggggaggcgggctgctacaagcagaagttcctttgaaggcctggtgactggactcttgtcggtgtgggacaaatattttaagagggaaaacctggaaatctctgttcacccacagtgatgttccagtagaatgaggcatctcgcctgttgctcttccccactcatggcacgcccacgtgtacccacagtgagaggctgaggtgtgtcccctctgagcagtttgcacctctaaaaagaaatccctgtcctgctgcttcccaaggtcacagtaatgatcaaatgagatgcattttgaaaataagaaactaccacacaaagtgaacaggagacagaagcatctcacggagtgggaggcagccccaggttggggtgggcggccaggctttgctcccagctctgctgagagctagacgtttgtggtgcagctccccagtttcagcttctccatcttcccagacctaacgctgggattttcagacaactcgtccttatgaggccagggagtcacacactaggggacaccaccaagtgcccttgggacgggtaccacagatggcccaaaatagagaaaagttggggccagcacttttggggggccttttcaggagaggctagctgggaaatgcaaccgctactcccggaggggtccttcctgctgcactgaggtgtgctccaagggacccaatggccctcactgcccaggggcttggtgggttaggccccatcaaagccaaattgggcagagcaggggcacacacaggacccccaatccccccagggaggtcagtgggccagggggtcccccaactggccaaccttcccaacacactatcagacttcagtgagatagtgacagaaatgcacggccctgaaaaccaaaagtacctacaaaatttaaatagccctattactattttccagctttttcctcaagaattaaaaaaaaacaaaaaacaaaaaacaaaacaggtttgcaattaaattacttaaaattctacggcggctcccatttcacagagaattctacttggtttagaggtggcagctgtcctggtggatagtttctctttctccagtgatcatcagttcagcaacttggacatttggttctccccgtcccgcgtctgcctgaagcttccacgccgccctgctgcctgcacacggggctttttacacgtgcggccggcaggggctatggggctggaggcgctcacatgtccccgccatcggtgggtcccaggacgctgaggccacaagtccagtcggtcacaaggtctgtggaggccaaaggtcctttggaggcggggctcttgaaggcc

SEQ ID NO: 147674 - DNA, 1363 bp, Homo sapiens
  misc_feature (1)...(1363): n = a,t,c or g
tgactttgacggacgtccgggggcgacccacgcgtccgcggacgcgtgggctgtgtcgctgtgtggtgagctctccaggccaggtgccgcgcggtctccacctctgcgaggaaaagatgctataaccacttgtagaatggcgggattgacctaccagattatgagcatgtagaagatgaaacttttcctcctttcccacctccagcctctccagagagacaagatggtgaaggaactgagcctgatgaaaagtcaggaaatggagcacctgtttcctgtacctccaaagaggacagttaaaagaaatatacccaagctggatgctcagagattaatttcagagagaggacttccagccttaaggcatgtatttgataaggcaaaattcaaaggtaaaggtcatgaggctgaagacttgaagatgctaatcagacacatggagcactggggacataggctattccctaaactgcagtttgaggattttattgacagagttgaatacctgggaagtaaaaaggaagttcagacctgtttaaaacgaattcgacttgatctccctattttacatgaagattttgttagcaataatgatgaagttgcggagaataatgaacatgatgtcacttctactgaattagatccctttctgacaaacttatctgaaagtgagatgtttgcttctgagttaagtagaagcctaacagaagagcaacaacaaagaattgagagaaataaacaactggccttggaaagaaggcaggcaaagctgcctnagtaatagtcagacccttgggaaatggatatggttaatgaattacacccagggcacaccacggttgaagaggttaatactgatgaggatcaaaaggaggagtcaaatggattaaacgaagacattctggacaatccatgtaatgatgctattgccaatactttaaatgaagaggaaacactgctggaccagtcttttaaaaatgtgcaacagcaacttgatgctacatccagaaatattactgcaagctagataagtttccattaagagaaaatgtatctgttaagtcatcgtcctgcaagcttggcgttactatgtattttttcttcttggagtgaaaatccttagatagtaaaactgttatagattattgtttaaaatctgataatctggtatttatttataattatgcttgtcactttagttaaatctatttgttctctttagtggttgtttttatataggtatttcttcataaaatgattaggaggtaataagcagtttctgctgctggtctgtcattgaatgccttgttttcactaagttgggagggtttggttctgttttttactgctccttgcaaagcag

SEQ ID NO: 147675 - DNA, 681 bp, Homo sapiens
tttttgagaaagggtctcactcttgcccagctagagtgcagtggcacaatcatagctcactgcggtcttgaactcctgggctcaagcaatcctcccatctcagccaccacgtagccagatcctccaagtagcccagctaattttttaacactttgtagagacgggcttgctatgttgcccactggtctcaaattcctggcttcaagcgaacttcccactttggcctcccaaagtactgggagtttacaggtatgagctactgcacctggcctaatcaactatttttgtacaaaggacaatttggggtttgttgctaatagttggtcactttaactggcatcaataggaacataggcataaaacacattaaacttctctagggcaataagcaaggtgtgttctttggggtatatctcaattctgacttttgaatggtcatcaccagtaatgattctggacttacattatacttctttttggggtattcaaaatatgaattttgggggtataaagtcaggccacaacagcttccaacttttctgatttctcttttggagaattcaaatcacaccaccagttccaccctaaaaaacatgttaaactccattccattagatattttatggatgccattacattgtcctaggcaccaagtttaaacagagattaaagggaagtctt

SEQ ID NO: 147676 - DNA, 624 bp, Homo sapiens; identical to SEQ ID NO: 144924

SEQ ID NO: 147677 - DNA, 778 bp, Homo sapiens
ccactgaagcgctcagatggctgtaacgacggccgacccacgcgtccgcccacgcgtccggacacaactgtgttcactagcatcgctcatacagacaccatggtgcacctgactcctgtggagagagtctgccgttactgccctgtggggcaaggtgaacgtggatgaaagttggtggtaaggccctgggcaggctgctggtggtctacccttggacccagaggttcctttgagtcctttggggatctgtccactcctgatgctgttatgggcaaccctaaggtgaaggctcattcgcaagaaagttctccgcggggcctttagtgatggcctggctcacctgggacaacctcaagggcacctttgctcacactgaggtgagcttgcactgtgacaaagctgcaccgtggatccctgaagaactttcaggctcctggggcaacgtgcttggtctgttgttgctgggcccattcacttttggcaaaagaatttcaaccccaccagttgcaggcttgcctaatcaagaaaattggttggcttggtgttggctaaatgcccttggccccacaagtaatcacttaagcctcgctttccttgctggtccaatttccaattaaaaggttcctttggttccctaagtccaactactaaactggggggatattattgaaagggccttgagcatctggattctgcctaataaaaaacatttattttcatcgcatacaagaataaaacaagcgcggccgattaagaggatacttcaggggcgcaagat

SEQ ID NO: 147678 - DNA, 3454 bp, Homo sapiens
  misc_feature (1)...(3454): n = a,t,c or g
gaactattgcctcatgctcagaaggccaagcactaggctcccatacaatacctacaagacagacactctgggagggagatttctcttttggagggagaccccaggtgctctcctctgggtgcccgagtgttggaatgggcggatgccaagacttcattctagctcttggtcagcagcagcactaagggtctctgagaagcatcagagatttcaccactgatgaactgccaggaggctagtgggggcggactgaggagacactgaaacaccgaagctgccgccaccaccggctgatgcaagttttattcgagacaatatacaaacaggccatggaaacaagggttttgatgctgggaccagtaacgtaaaacggaatacaaaaaataaaaaggcactaatctgttaagaaaagacactcgatggtattcttaagaatataagtcatttaatactgttaaattttaatagccacaaaataaaacaagctatggatcccccaaaaataattttaaaagcttacacaggaaaatattattgcctgaagtttatgatctttaagttacaggtccaaaagaagttttatgttgttgttgttgttgttgttgttgttgttttaaaacacacagtgaaggaccgtctaaggaaggcaaggccactgttcctcctgtaggggacaacggatcctggtctcagaggacctgtccttctgctcctttaggaaaacaggaaccaggcacagcgttccacaccgaacagcaggttactagggggccataggtcctccggttcggcagaggggtgggagttgagggcaggagcctcagtggggtgttccacaggaaaggcattagtcttagggtacttggggttaaaacaatcaagaattcattcatggtttaagaggttaataaccataatattaaaaggattaattataaacaccctggcaaaaaaaccacatcatccccttttcaaaaaataaaatgttcaataatccctctgagcaaaacatcacaaagaaccaatgncccatctgcctcaggcctggccttgtctgtaaacagctgtaaaaggaaaagctaagcacagcgcccggggaacacatgaagcctccccaggagggcacagctgtccctttccctttccagctttcccaaacatgaagcacagaaggtgtcctagtcctgggtgacccaaagtccctcaaacggcagcccggtcaacacatcgtcttcctcgttaaccatgtcatcaggtggttccacacagcacagacatggctgactccctgtaccgcaggtccttcccgggatacacaagtttttaaacccaatcaaatgcccctcctagtaccgtaaatttgtttcccttcccccggtgaaaaaacccatagtgagttaatttaacatcccaaatatttctttaaacatggtagagcagagcaagtagcagttatgaacaccccaccctctgggtcagatgtgcaactgctctatggagcacaacagtcttcccagaccagtggggaacccaggcacgaagctgagctgaggcagcagtgctgcattcatatgtttagtgtgaaaaaacagagtatcccctgccctcaattaaaaaaactgacaaggttgtaagtcccgttaagttttaacctaagttttgggccacacatcctggagtgccagaaactcaaagctcgcccttgttttgaagcctcctgaaatctcctggcagcccctggatgcccattttcatgggctgaagtaacgagctgattaattataaaaccaaaccacaggtatactcctaggtatatctgattctgaagtgcgcccacacaaggtgagtcggggtattggtcagtagacagggctgaaaaggaaaaccttgctttccccaaaaatggcccaagacttcttgcaactcctgaantcaaactgctgtaattcaaaggtgtcaaagccccttcaagctaaatctggttgaaaaaaggccctaagggtcgtgcccctccttgaacaaggcacacattcctccctctgttggaaactccactcatggctcaacatgggccgggatgaaccacgtcactggccaaagggcaaacactgtttctaggcagagtctggggactcttgtgatatgtctgccacttgtgggtttacgcccaggccttgaccccaaaattaagccaaccttgacacaccttaacccaggaagcggcaactgccgcagaccgtgcagagcaggaggcggtcaccgttctcactggccaaggaagggcttaatctccaaggcttttagaggaaaaccacagatgggaagccatggcgatagttttcccaaatgaccattaattctgtcttcaggaacactctcaagattcatgaatacagcagttatctgcctgatggaatactgatttaaagaaaaattgaaaaatggctgttctgctggttctgtctccagaatgcattgctctaaatctcaaaacctaggaacctccagacagggccacagtcacagcagatgatcagtaaatgaaagctactcagtaggctgctcgctacatttcctaggtctgctgtgttcactatgaagctgaggcttttctttaccagggtccacaagggagagcagactgaattgcacagggttcccagaattctagtctgctatgtgcagcagatgatggatgaaccacacgtatataccagttggcttgtatgaacaggcctcttttagctaacagggaaatgctttaacatcaatacactgataagtggttaatgataaactagttaatggtctccctagtcactaaaacactaagacatcaaaatacattaacgaaatttcccagaccttgcatttccctttgccttgggagcatcacagacacttacttagactgtgagaccagtatgagcagcacccaactttctctggcagcctgacgagattggnccctgggcacggaggtctgggcttcagtgagtggagttgaacgattcattaatgagtccaacgattctatgaacaacgccacttcttaaggaagtttaaagtcctggaaccttaaagggggtacattcaactggaaaagctgaaacagaaaactggcccaagtgccctcccaacccactgctcttatcactggcaaaacaaggtaagcaaaggtttcccctaaagtacccccaactctgatgctttttaaaacaaagtaatccaaggggctgtgcacatagcatggcacaccacaactgcattattttgtgtgttgtctgctacatggcaaaacaaggtactactggcaaccaagacaataaaggcctctgcttcagggttgttcttttcagattcctttagttacagcagcttcagtttagaagctcagaggcatgagtcattccttgcactatcataaaaacccaacctgctacttaacctgttt

SEQ ID NO: 147679 - DNA, 1931 bp, Homo sapiens
  misc_feature (1)...(1931): n = a,t,c or g
ttttttttttttatattaagcaaagaaagactaaatttattttaataaacattcagaggctgagggtggccaaattttcaagccagaccctcccaatgttaatacactgtgcaaagcttacaccatgaacaactgacccggaccactaccattccaatgggagcctctgccttacaataccaggttagatgtctgtgcccagaccccccaaattagttacaactaataatcttctttcaagagttttttttttcaatcttggagttaacaatctgacttatttttcttttatcaaagaagtaggaaaattacaataagaattctagagatctctataaattacagacctatgactcaaaatccttgaaacaatttctctaccgaacataagagttaaaaatagatttcagtaaaaccctatatgcgtcttatgtgtacacagtataggctatgaggaacagatcttattttgaggaactttaattgttacatttttgcaataattgaggcacaactaccctcctgcttttccaacatcttaataaaaaagacaataaggattaacagtgaaattaaaattaaaaaatacacaaagcctaaggttcttggagacaaaactgactatgagtctatgtgtgtagccaagttgggaaaggacagtttagaccttgcagagtttccttcttctccaattacaatgtgttacagaatttgggaagggggtgtctttaaaaacgttctaattcaccccgggtcatgaggggggagggagggagggaagtccaggcttcaggcaaggcccaagtgcctcggccaggggcgggtgggggtcagcgctgagcgggtcaagagcctgcgcccgggggccattccccctggcgcttttctatcgagttaaacggaccccacaatatctccttcctttcatgcttgtggtttgaaagtgacgagtaaatatgtcagactgtttaaaggaaaacaagcactcattgacaaggccggactactcaggaaggtgtttcaaacaactcccctgctacgcgaatcacatgcgctcgtgtcgccaacagcgccgcgaagaggctctcccggttggcggaggacccgcttgcacttcctctgggctctggattctaacacacacaggaggcacagcgaaagccgacccagaaggcaaacaaagctcaccacgctccggaccgggctgcgcgtcactgttgcagactgcaaatgggacctgagaccaccccgagggccccaccaggagctctctttctcctttaagacgtggtcatcggcactcatctcccggtcacatccgtgaggtctgtgaagagccacagaagcagtacaaaaacagctgacttctttatccagccaaaaaaggagccacaagcccagcaaacactgacacacagcctcgagcactgcgagagagagttccatgctgtctcccgatgagaacgctgtgccttaacagggtgaccccagaggcaaggtttccccctcncctccttcctgcttcctgcatctgccccaagggcttgcgtttaccgggtttgcggaaaacaagccaagggtgagctgcagaggggctcggggctcggggcagcacggcctcgggacgagggccctgggatatgtgactgagccacagcaacattcgggtgccaattaagaggacgcttttcattttcttgtaaatgctaggacacatcccaaaacacactaggcaggatttctcagttagagtgatacacagaggggaccagcttggaatgcaatgtattttaaacacagtgaaagccacctggcaggtagctggacaagtgagctgggcccaggactggccagctcgtatcaacattcacaggctcccgcgggctcccccaggacagcggcatccgagagtgtttactcttctgcaagca

SEQ ID NO: 147680 - DNA, 1509 bp, Homo sapiens
ccaatcaacatccaaccccaatcaacatccatccagatcaaatgcaataattttctttttaactcaacaactgatgttactgtcttcaattttaataattacacatatttgtatatttcagagaagtttttaatatttctctgtccactttttataagctttaaaatgattttctctgccttgagatttgcatcaagaaaaagcacctctcttcacctgaaagctttgaagactagagacacgctttacacgttttaacaagtatattgagtccacgtttggtagcatcagttgttgagttaaaaagaaaattattgcatttgatctggatggattttaaaagaatataatgttcaatattaaaaggataattcacatttgccaccataatgttcttttttatgtaaaaagaagaacttggagacattaacatgaaaaagtcttttatcattagctcatgtattttgagggaagagcagctgtcttattataatgttttttgacaaatcatattgtattcttttgtacaaaaaagaactacttgtattctagaagaaatatgaaatgcttaatttataagcgggctggagattttttccaatatttgtttcttttgaaaatgaaaggggatcatctattttagttttggggtctgggaactttttgaaaatttaatttgtgggaccaatgttttgtgaaatctaaagaggggcaggggttaaaataggggcttgaatttctcattctgtataggcccggcaaacttcccctgtggcagggcaagtttacatcacaaaatccaagaatggtttgcatcctaaatgctagtttgctttcagcccctaggttaacctcaggacttggtttgcatttataaaaggggtagaccagctgatatgttttcattggagataaatattgtcagcccccagaaaaggggttggtggtcacggtaaatggcatatttttttaagctttgttttatatttatttttcatttagtttttattggggaatggttttccaagaactcctcagttctggcctaggtgtttttgggggagccctgtttttccatagtgtaattcccatttaagaggttgtctaaaagtctttttaattaatagaaagattttaatatcccaagagtagtcaaattaaggatataaacgatataaactttccacaccttcctgtcgtgacagatgaaaagcacagaaaggacaacccttgaaattcatgttaacgttgggtcatttccaatattttgtacccgtttttaaattctgtttagtgtatttacttcattgtaaatatttttgagggtacctttgtattttgcttttgaccttgggttctgtgatttggatgtcaacaacttcccctaaaaagcaccagtgtgttaggttctaatgtcatgacccaatttgtgttattcatctttaatcctgttttcagtctctatgtgtacagcagtatttttaataaagaattacagagataaaaaaa

SEQ ID NO: 147681 - DNA, 1209 bp, Homo sapiens
atgactcgactactttccaaaggctccatctccaaatacaatcacattggagattgtgaagatggaaagggtccaacccctggaagagaatgtgggaaatgcagccaggccaagattcgagaggaacaagctattgctggtggcctctgtaattcagggactggggctgctcctgtgcttcacctacatctgcctgcacttctctgctcttcaggtggttgctttgggttagaaatgtttctccctgataaagttcagaactctttgggtgaaattaaagtaggcgactcggggagagggtgtgggggaagagagagagcaaaaggtgaaccacagttgtacagcttgctggtggttggggtcacattggactatcaatatccaggagatgttgagaaaaagaggggatcctttccaacaagtcatccagcaactctgggacagaaggaaagctgtgggaagaaaagcagggtgctggtttctaggacactaaacctcatggacaccagtcatattagatttagggcccaccctaatccagttgactgcatgttaactaattacatctatctacaaagaccctatttccaaataaagtcacattctgaggttccacatggacatgaagtttggagggacactattcaagccgctataaagcacttattcatcaacttattcagcaatgtttatggagcatcagttacctgtcaggcactgaggacacaaagatacccttcaccaggacaaatgtcaaatgggtttaaggtcgacagccccataccacatcctagtgagtcagaattagaggtatcacatcggtatcctcgaattcaaagtatcaaagtacaatttaccgaatataagaaggagaaaggtttcatcctcacttcccaaaaggaggatgaaatcatgaaggtgcagaacaactcagtcatcatcaactgtgatgggttttatctcatctccctgaagggctacttctcccaggaagtcaacattagccttcattaccagaaggatgaggagcccctcttccaactgaagaaggtcaggtctgtcaactccttgatggtggcctctctgacttacaaagacaaagtctacttgaatgtgaccactgacaatacctccctggatgacttccatgtgaatggcggagaactgattcttatccatcaaaatcctggtgaattctgtgtcctttga

SEQ ID NO: 147682 - DNA, 1825 bp, Homo sapiens
gatggctcaaggtctctggtgtcttttcttctaaaggccctaaattccatcatctttctggggaaaacttcagttttatcgcacgttccccttttccatatcttcatcttccctctacccagattgtgaagatggaaagggtccaacccctggaagagaatgtgggaaatgcagccaggccaagattcgagaggaacaagctattgctggtggcctggagaaaaataaatctatactctcttcgtgttcctttgttgatgcagaacagtgagcacaacaacacattgatcctctcctcatcacaccacactccatgggatgataaaacacaggacacatggctccattcaaggctaactgattgcacaacggctctgagcaggagagagcaaaaggtgaaccacagttgtacagcttgctggtggttggggtcacattggactatcaatatccaggagatgttgagaaaaagaggggatcctttccaacaagtcatccagcagctctgcctctatattcacatggccttctttcaaatgtgtatcttgtgtgtcttctccttctcttcaaggacaccagtcatattagatttagggcccaccctaatccagttgactgcatgttaactaattacatctatctacaaagaccctatttccaaataaagtcacattctgaggttccacatggacatgaagtttggagggacactattcaagccgctataaagcgccggtatagtgagtgcagagcccacttcctggtttcatgcttggtgagtatcatttgctcctgccacagatacccttcttaaatatgacttgcgaatttcatttgttcatgtttttttcctaagaatgtattggaaggttgttgcccaattctatgcttaggaattaattaaacaaattttcccctatcctccctagaatataagaaggagaaaggtttcatcctcacttcccaaaaggaggatgaaatcatgaaggtgcagaacaactcagtcatcatcaactgtgatgggttttatctcatctccctgaagggctacttctcccaggaagtcaacattagccttcattaccagaaggatgaggagcccctcttccaactgaagaagattgtgaagatggaaagggtccaacccctggaagagaatgtgggaaatgcagccaggccaagattcgagaggaacaagctattgctggtggcctctgtaattcagggactggggctgctcctgtgcttcacctacatctgcctgcacttctctgctcttcagacttcgctggtgatacctttgggtactggaaaacctgaggtaactagggactggagtggacccctaagtgtaccccagcagccttacggaaaagtggccagactgttagatggatgtccattcccatatctcctcactgggaagttaaatgaacatccacatgcagagatgagaaagaaccaaagcaagaaccctggtaactcaaatggccagaatgtcatatgtcctccaaacaaccacaccagttcttcaaaaagagttcttaaccaggctgaactggctggaatgacaaaaatagaattcagaatatggataggaacaaagattattgagattcagggggatagcaaaacccaatccaaggaaaataaaaatcacaacaaagccatacaggagctgaaggatgaagtatccagtataaaaaagatactaatgggtcggaccgagctgaatgacacaatacaagaatttcacgatgcaaccacaggtattaacagcagaataaaccaagctgaggaaagaatctcagaactagaagactga

SEQ ID NO: 147683 - DNA, 3495 bp, Homo sapiens
ggccctgggacctttgcctattttctgattgataggctttgttttgtctttacctccttctttctggggaaaacttcagttttatcgcacgttccccttttccatatcttcatcttccctctacccagattgtgaagatggaaagggtccaacccctggaagagaatgtgggaaatgcagccaggccaagattcgagaggaacaagctattgctggtggcctctgtaattcagggactggggctgctcctgtgcttcacctacatctgcctgcacttctctgctcttcaggtatcacatcggtatcctcgaattcaaagtatcaaagtacaatttaccgaatataagaaggagaaaggtttcatcctcacttcccaaaaggaggatgaaatcatgaaggtgcagaacaactcagtcatcatcaactgtgatgggttttatctcatctccctgaagggctacttctcccaggaagtcaacattagccttcattaccagaaggatgaggagcccctcttccaactgaagaaggtcaggtctgtcaactccttgatggtggcctctctgacttacaaagacaaagtctacttgaatgtgaccactgacaatacctccctggatgacttccatgtgaatggcggagaactgattcttatccatcaaaatcctggtgaattctgtgtcctttgaggggctgatggcaatatctaaaaccaggcaccagcatgaacaccaagctgggggtggacagggcatggattcttcattgcaagtgaaggagcctcccagctcagccacgtgggatgtgacaagaagcagatcctggccctcccgcccccacccctcagggatatttaaaacttattttatataccagttaatcttatttatccttatattttctaaattgcctagccgtcacaccccaagattgccttgagcctactaggcacctttgtgagaaagaaaaaatagatgcctcttcttcaagatgcattgtttctattggtcaggcaattgtcataataaacttatgtcattgaaaacggtacctgactaccatttgctggaaatttgacatgtgtgtggcattatcaaaatgaagaggagcaaggagtgaaggagtggggttatgaatctgccaaaggtggtatgaaccaacccctggaagccaaagcggcctctccaaggttaaattgattgcagtttgcatattgcctaaatttaaactttctcatttggtgggggttcaaaagaagaatcagcttgtgaaaaatcaggacttgaagagagccgtctaagaaataccacgtgctttttttctttaccattttgctttcccagcctccaaacatagttaatagaaatttcccttcaaagaactgtctggggatgtgatgctttgaaaaatctaatcagtgacttaagagagattttcttgtatacagggagagtgagataacttattgtgaagggttagctttactgtacaggatagcagggaactggacatctcagggtaaaagtcagtacggattttaatagcctggggaggaaaacacattctttgccacagacaggcaaagcaacacatgctcatcctcctgcctatgctgagatacgcactcagctccatgtcttgtacacacagaaacattgctggtttcaagaaatgaggtgatcctattatcaaattcaatctgatgtcaaatagcactaagaagttattgtgccttatgaaaaataatgatctctgtctagaaataccatagaccatatatagtctcacattgataattgaaactagaagggtctataatcagcctatgccagggcttcaatggaatagtatccccttatgtttagttgaaatgtccccttaacttgatataatgtgttatgcttatggcgctgtggacaatctgatttttcatgtcaactttccagatgatttgtaacttctctgtgccaaaccttttataaacataaatttttgagatatgtattttaaaattgtagcacatgtttccctgacattttcaatagaggatacaacatcacagaatctttctggatgattctgtgttatcaaggaattgtactgtgctacaattatctctagaatctccagaaaggtggagggctgttcgcccttacactaaatggtctcagttggatttttttttcctgttttctatttcctcttaagtacaccttcaactatattcccatccctctattttaatctgttatgaaggaaggtaaataaaaatgctaaataggaaggaaattgtagggtaaggtaagagggaatcaagttctgagtgtctgcccaaggcactcacaggaatcataatcatggctaaatatttatggagggcctactgtggaccacgcactgggctaaatacttacatttacaagaatcattctgagacagatattcaatgatatctggcttcactactcaaaagattgtgtgtgtgtttgagagtgtgtgcgtgcgcgtatttcactttctgttattgaccatgttctgcaaaattgcacgtactcagtgagtgatatccgaaaaagtaaacgtttatgactataggtaatatttaagaaaatgcatggttcatttttaagtttggaatttttatctatatttctcacagatgtgcagtgcacatgcaggcctaagtatatgttgtgtgtgttgtttgtctttgatgtcatggtcccctctcttaggtgctcactcgctttgggtgcacctggcctgctcttcccatgttggcctctgcaaccacacagggatatttctgctatgcaccagcctcactccaccttccttccatcaaaaatatgtgtgtgtgtctcagtccctgtaagtcatgtccttcacagggagaattaacccttcgatatacatggcagagttttgtgggaaaagaattgaatgaaaagtcaggagatcagaattttaaatttgacttagccactaactagccatgtaaccttgggaaagtcatttcccatttctgggtcttgcttttctttctgttaaatgagaggaatgttaaatatctaacagtttagaatcttatgcttacagtgttatctgtgaatgcacatattaaatgtctatgttcttgttgctatgagtcaaggagtgtaaccttctcctttactatgttgaatgtatttttttctggacaagcttacatcttcctcagccatctttgtgagtccttcaagagtcagttatcaattgttcagttagatattttcctatttagagaatgtcttaagggattcccaatcccgatccaaatcataatttgttcttaagtatactgggcaggtcccctattttaagtcataattttgtatttagtgctttcctggctctcagagagtattaatattgatattaataatatagttaatagtaatattgctatttacatggaaacaaataaaagatctcagaattcactaaaaaaaaaaa

SEQ ID NO: 147684 - DNA, 412 bp, Homo sapiens
  misc_feature (1)...(412): n = a,t,c or g
ctgggttnnnnnnnnnnnnnnnnnnnnnnnnnnnnnnnnnnnnnnnnnnnnnnnnnnnnnnnnnnnnnnnnnnnnnnnnnnnnnnnnnnnnnnnnnnnnnnnnnnnnnnnnnnnnnnnnnnaggaggaattagtggatcccctaacaacagtgagagagcaatgcgagcagttggagaaatgtgtaaaggcccgggagcggctagagctctgtgatgagcgtgtatcctctcgatcacatacagaagaggattgcacggaggagctctttgacttcttgcatgcgagggaccattgcgtggcccacaaactctttaacaacttgaaataaatgtgtggacttaattcaccccagtcttcatcatctgggcatcagaatatttccttatggntttggatgtaccatttggttg

SEQ ID NO: 147685 - DNA, 834 bp, Homo sapiens
gaggaagaggaagaggaggaattagtggatcccctaacaacagtgagagagcaatgcgagcagttggagaaatgtgtaaaggcccgggagcggctagagctctgtgatgagcgtgtatcctctcgatcacatacagaagaggattgcacggaggagctctttgacttcttgcatgcgagggaccattgcgtcctgggcttcagggcagagaagagggccgagtggatcgccttgccttacctcctcaggatctccggattcgtcccatgtctggctacggttctagattcaacacgagcagcaacagcggcacctaacccagttcaggatcaagaaggacttgtaagggtcactcagcggaaatccggcgatctggccggaagtgcggcacactcatcgtggtcgcgaacacatgctcagattggcatgtactaccagccgcaggcagagatggcggcgcccgaggcctggcgcgcccggagttgctggttctgtgaggtagcggcggcaacgaccatggaggccacgtcccgggaggcggcgccagcgaagagctcggcctcgggccccaacgctccccccgccctgttcgagctgtgcgggcgggcggtgagcgcccatatgggggttctggagagcggggtgtgggccctcccaggcccaatacttcaaagcatcctacctctgctcaatatatattacttggagaggattgaggaaactgccctcaagaaagctcctggttactaccattctactttctgtctctatgaatgtgactgctattctaggtacctcaccaaagtggaacaatacaatgtttgtcttccttga

SEQ ID NO: 147686 - DNA, 788 bp, Homo sapiens
  misc_feature (1)...(788): n = a,t,c or g
atcgatcactattccagngtggnggaattcgtccttcttgatcctgaactgggttaggtgccgctgttgctgctcgtgttgaatctagaaccgtagccagacatgggactggaggacgagcaaaagatgcttaccgaatccggagatcctgatgtggaggaagaggaagaggaggaattagtgataggactgaggcttccagtgcatactggcaaccttggaaggccaggaatgtgaaacttttccctactacttagcatccagaattgaatgggagacccgcattctgccatttctggcggccagtgtggctctgccagcatggccttctgcacggatccccccctaccaacagtgagagagcaatgccgagccagttgggagaaatgtgtaaaaggccccgggaaccggctagagctcctgtgatgaagcgtgtatccctctcgatcaccatacagaaggaggattgcaccggagggagctcttggacttccttggcatgcgaggggaccatttgcggttggcccacaaacttctttaaccaacttggaaataaatgtgtgggacttaagttgcaccccagtctttcatcatctgggggcattcaggaatatttcccttatgggtttttgggatgtacccatttgtgatcttatttgtggaacctgtaaggttcagcatgaacctcatgggtgttagcctaaagctgggtagcttctatgtaattcgcaatgattccatctaaataaaagttctatgatctgcaaaaaaaaaaaaaaagtcgacgc

SEQ ID NO: 147687 - DNA, 743 bp, Homo sapiens
tcattgcgtacaaggtctccaaaaaggaaaaaaggtctcttcgcgtctagtcctccgtcttggtcactagggttcttcggtgttaggacagaaagtttgcttctggctgtcacatgcaatattgttcttcaataaccccgaataacgcgcattgggaagtccacctcccctcccttccaatcacccccacccccccccgccaacaatcgcgactaatattaacaaaccttaaacttttccccacagcctcgcacccccaacgagggcatctagcgggggacagcgagggtggggggcagggggtcgcgagaaaagccccggaaagcacttaaaatgccacttttgattctgccctcgctgacaacagccgcaaggaccctctccctgtctattgacgcggggctgtgagcgtctggggtcccagcaagtgaggagagaagaggttcgcggggaggggggaggaggaggaagatcataaggcacccccagccacctccaccgcctaggcagcgacaaaactccccgccccctccccccaaaaagtcgccaagctctcactcgtccagagtccgaggtaaacaacgagcaccacaatggcactaggactttgggggaaaagaaacccagaaaccccgacaaaactgatcaggagtttcccgaaatgaaagaggggggcgggcagcgtcctctagagtcgccctggctttcggctgggcccccgggcaggatagagggcggccgct

SEQ ID NO: 147688 - DNA, 1589 bp, Homo sapiens
agtagagacagggtttcaccgtgctagccaggatggtctcaatttcctgacctcatgatccgccgtgcccggcccttatttcttaagaatagaaaactgtaggaatttgcatagtagatcacctggtgagacctcagttctatggtgagaaaaattctctataaaagctatatggtccatgatgtcatccaaccccacataagcatataaaatacatgataaggctctccaggaaaaaatattcacaagaaataatgacttctttcatcagcttaaaagtgggaagaacttatttgattaaaaccctgtttaaaatcgattgtcttgttagacttcccctatccataatgaaatcattacagggttctaatgtcaggtggaaaagtgttgactatggagttgtttagcctctgatcctaggataaaccaagcagttaaataatttccaaaagtacaaacagacattcccctcaagttatccgggcttctacaggtacttttcaagtgacccacaagccctatattttaaacagccacagaagtcagaaccaaattcaggtttccaacaaacactgtaaaatgctattcagcaaaagctgcagttccccgtggcagcttgtcaggtggtcagtcagtctcaattactctgggttcctctgcaattgctgtcatgaccgtgagcctctcacgttctacttggctgacagcccaggtctgaggaagtgagagccaacaatcgcttactcagcagcgcattgtgtcgcttcaggtattcaaaggagtctccttgcttttcaacaatttcttctaggcttgaaatagttctgaatccagtctccgaggtaatattgctggggtaagcatagattttttcttcttcaagtatatcaggctctggtttagctttattaaatctccggattttcactgtgtaaatgaggagacatatcagggaacagatgagttccagtgccaagatggccagaatgaggtcaagatacaatctgccaggctctgggaaggagtgctgcatgcacagtatgaggagaagcactgtgttgccagaggactgtatcatcaacgcaagtctccttgagatccccttgttggatcggtagatcaagttaataccctcggtttcctgattttgcctgtggtgaatactggatgttaccattcaaggaattaaatggagaatcccacaaaataactttccccaaggattataaccgtctgaactttcaaatgggtttgtgtaatttccctgggcacttgtcctcatttggattaggataagaacaaagcacacctgttaaaaatgctaaaacaacaaacacgagatgaataaaccacagaagattcactatgatgactgtaggaagaggatggaatcggggtctaaagtgagcttgtaatgagtggtgtgggagaagctgggcatccagaagtgggtcgtcttcaatactctgggtgatatccaaggaaccgtcctccatcctgccccccgccgccatttcccgacgccggagagccgaagccctggccagcccggcctctccacctggacctgtaagcctctggccgcgaaa

SEQ ID NO: 147689 - DNA, 1255 bp, Homo sapiens
ggcatataaaatgccagctcaaaatttaaaaagtaaaatgactatcaaagtgctgtaggtgttctaaatgcttaatctctattcctgtacttacatcgtcacgaactgctaacagcccacagaccacactttggcagcattggtctggggtcagccttccctaagttgaaaaaatcactcttctgtgaagaccttgtcacttttcaccacctccaaattcaagtcccaggtctcacagtttggtcctttggctatggctccagtgccacgtgctttggctccaacctgtctctgcagtccctcccctgcctctgccactcatggctgctgcctctgcacattctgtccactgtaatctggaaaatcctcccttaatccaaccaggcaaggtaaagtgatagccccgaaagattttttacctcttctagaaagccctctctgaacccaccaggcaaatttgggtcttctctcctctttactatttttgctcttgtcctttggattatagtggtaggtttttatagtgatctgtctcccccacctggctgtaccctgaactctataaaagctccttgagggcagccccagtatctgacacaaggattgattctctaacgtttgttgagcagatggagggatggatgagcagatggatggatagatggacaaacggatggatgaaagagcttccaggcttagctctcaggctgtaacgtaatctttgctgtacacaggccgtgaactgggtggttggccttgcccatgttcaaaatccatttctgttctaagactccagaatctgtcagggctgtcttgaaccgtgggtttccttgaggccctctagggtacgtagccaccacaaattccagccagaatcagtcctagcttaattcaactctccaaatttcaggggaattatcttccgtagagtccctccagagggaaatttgtattagtgacagtggcccaggatgctgtgtcctcatcttaggaatcttgcctctgcctggaatgtccttaactccctcttgccggcaatttcaccagatttttgatttcttatccagtctcacgggaagcctttccggcatctcccaccctaccgatcttcccgtatatctcgcctgctacactgtgagttcagacagcaccggattgaaaaattcatctataaaatgtcggcgtcctgcacagggccatcccatcactaagcgcgccacaaacgaattccaccacatggactacgatctacgat

SEQ ID NO: 147690 - DNA, 497 bp, Homo sapiens
  misc_feature (1)...(497): n = a,t,c or g
ggcacgagccttaatctagcagtaatttatcaaaaacccatatgataagagaattattttataatagtgttggtaaagaaaatctaaaatagaaaaaacatgccaacaattgattggctaatgaggtgggtgatgccagatgcaagactgctgggcctaccacaggagcaagagagaagccatgcattccatctcaaggcatctgtgagcccatgtagacaccatgagcaaagctcaccctcctgagttgaaaaaatttatagacaagaagttatcattgaaattaaatggtggcagacatgtccaaggaatattgtggggatttgatcccttaatgaatcttgtgatagataagtgtgtggagatggcaaccagcgggcaacagaagaatattggaatggtggtgatacgaagaaatagtatcatcatgttagaaaccttggaacaagaataaataatggctggtcagcagagaaattncacgtcccctcttcaaa

SEQ ID NO: 147691 - DNA, 443 bp, Homo sapiens
ccataaaaatgcttctacctctttttaccctgttaattctacttctgagagtttttcctaaagaaataattccaaataggaaaaagctaaaagcagaaaaatgttgcacatgccattatttatagctgtggaaagattggaggctgggcccagtggcttatgcttgtaatctcagcactttgtgaggccaagttgggaggattgcttgaacccaagagcttgagaccagcctgggaaacgtagtgagaccccatctcttaaaaaaaaaaaaaaaaattagctgagtgtggtggaacgtgcctgtagtcccagctacttgggaggctgaggtgggaggattgcttgagcccaggaggctgaggttacagccaggatcacaccactgcgctccagcctgggtgacagagtgaggctctgtttaaaaaaaaaaaaaaaagagagag

SEQ ID NO: 147692 - DNA, 431 bp, Homo sapiens
gtgtttgttccaagccgttcagtcatgccatgcgctgcctcggtagatggagtaatgtacaatgaactccatgagtctctccagggctgcctgcagcacgtcttttccaagtagcctatttggattcccatctcaaatgtcctggatgccagcatgtgccaatgactgtcaccttcatctcttcaaaagaaaagccatagccgaggactgtcccgcgacccccgtggatgcgtctaggtcatgtgattctgttttcatttctcatcccatccaatttgtccttttctcctgtcattttcttcctctgtggtcccttcaaagttgttataatttgtactgaacttcaaaatgtgtcccgttctccccagaccactctagccacagtatattgcaataaaattacttcttatatttgcaaaaaaaaaaaataa

SEQ ID NO: 147693 - DNA, 1787 bp, Homo sapiens
  misc_feature (1)...(1787): n = a,t,c or g
tttgattcgctctagactttttttttttttaatagggagggaaaaaatttgataattttcttttttctacatgcacttaaggactaaaacacaggttgggattaaattttattggcttcctttttccgcttttcttccccgcagagcctggatgggagaatgtccagggccagggaaacccacatttttttgtagggtgataactcaaatgaaaaattggtgcttattttttacactttctctcttgtggctctcattgtggtgctatctatctgttttaaggtctccttgaaggcgcaactggggtcccatggccatgcctcggttctccctgcttcctttatcctgttattgcctccacagtctgttgccaaggactctaagatcaatgcacgtcactttccttttccactgggcaggattagccaagcacactccctcctagcgctcttcccgccccggtgcgtccactcccgagggcttgttattgagggattgggttgttgcctaattgnattttgaaaacacacacaaagcaataaaaagcctccttccttgcattgtcctgtgggtgtgaccataagcagattatatttgggttcctgaatgtttgtggtgctaatttctgtgtttgttccaggccggttcagtcatgccatgcgctgcctcggtagaatggaagtaatgtacaatgaactccatgagtctctccaggggctgcctgcagcacgtcttttccaagtagcctatttgggattcccatctcaaaatgtcctgggatgcgagcgtcagtcattccagagctcgggggcgggtgaggtcccctttgggggaacccttttcctgggccatcgaggtcggggggctgccgtctgtgggcaggaaggacccgaggggcaagccaaggaaaggcgaatctcttcactgtgaaaaagttgcccgggttccagcgccttttccttctaccatgggaaatgcaggctgggccccttggggtgaagcctgccggggctctggtgctgtccccgacccccaccaccaccagaatgcaagttccagcttaggaagccacaaaacaagccaccccaggaggaacaaaaccccgccagggggggatttttccaaaatttcccctgggaaaagtaaagtctcgctctttgccaaagaaaaagtctggcttgggagagtctctggagccccaggatgcccagcatgtgcccaatgactgtcaccttccatctcttcaaaagaaaagccatagccgaggactgtcccggcgacccccgtggactgggtttaggtcatgtgattctgttttcatttctccatcccatcccaatttgtccttttctcctgtcattttcttcctctgtggtcccttcaaagttgttataatttgtactgaacttcaaaatggtgtcccgttctccccagaccactctagccacagtatattgcaataaaattactttcttatatttgcagaaattcttttggtgtaattttattttttcctctcaatatatataattggacaaacgctggcaaaaagaaaaaaatggtaagcaaaaaacccaagataaagtttcgaggacatcaggcctttttgaaatacaatgtcaaatgacacgattgtacgttttcakaaatatccgctaggacatgtccataagttttaactgtaatgcccaggaaaggatatcttaaaatattctaaacttgtgtaacaaaggaataattaactgtaacagtttttcaataaatcgagttgggtgtttccaccgtaa

SEQ ID NO: 147694 - DNA, 388 bp, Homo sapiens
  misc_feature (1)...(388): n = a,t,c or g
catccatgctcttgtataatcagagtcaagtatatttattttcatacctgttataactgctactggaaaggagaaatactgttgtcttattttccaagagatatacacagccttgttgattttagaatcattaaaatttttaaaattgcagaccatacaaaagtacacaataatgtaggcttgttcctcattccagagattacttcaaaattcgttcaacttaaggcctggcaaggtggttcatgcctgtaatcccagcactttgggaggccaaggtgggtggattgcttgagtccaggagttctagaccagcctggacaacnggtgnaactcgggtctactgaaatacaaaaactagcagggcatggtggtgttgccctagtctcaa

SEQ ID NO: 147695 - DNA, 448 bp, Homo sapiens
  misc_feature (1)...(448): n = a,t,c or g
ctattatacattatagtctattaatcatagtttaatgttgggtgcaattctaatgcattctacgtttttgaaaatctataatccatggaaggtccatgggttgatacctcatgtcaaaaatgtgtttactatgttgattgctggtccactttacttgtatatcagatatataagctatgaacacaactttgtattaaaagtatcttctgtctggnnnnnnnnnnnnnnnnnnnnnnnnnnnnnnnnnnnnnnnnnnnnnnnnnnnnnnnnnnnnnnnnnnnnnnnnnnnnnnnnnnnnnncaataaactagaccccatgtctctaaaaaatgtgaaaaacatcaagaggcttattcacnnnnnnnnnnnnnnnnnnnnnnnnnnnnnnnnnnnnnnnnnnnnnnnnnnnnnnnnnnnnnnnnnnnnnnnnnnnnnnnnnnnnnnnnnt

SEQ ID NO: 147696 - DNA, 738 bp, Homo sapiens
  misc_feature (1)...(738): n = a,t,c or g
tctcaaaacaaaaatcctaaccaaaaagttgtcattaaaaaaaaaaaaattcaggtagactgaatgtttttctgctctaaccttaaatgttattaggtttggtttttgtttctaagctacttcaagactacctgaggtaataatggtaaactttattattcagaattcgattaaactaacttcagcatttccacagttctattaaacaatgactgatgttcacaatgacaacctacctgagatggctgcaaggccctaatgttccattatacattatagtcttttcagcatagtttagtgttgagtgcaattctaatgcattctacgtttttgaaaatcgataatccatggaaggtccatgggttgatacctcaggtcaaaaatgtgtttactctgttgattgctgtttcactttacttgtatatcagatatataagctatgaacacaagtttgtagtaaaagtatcttctgtctgggcaatggctcacacctgtaattccaacactttggggggctcaggtgggaggatttctagtccccaggagtttgaggaccagcctgggcaataaactagaccccatggtctctaaaaaatgtaaaaaacatcaagaggctgagtcaggaggatcatttgagcttaggagttcaaggctgcngtaagttatgattgtgccactgcatttccagcctgggtgacaagagtgngaccctgacccanaaaagtatcttctgataag

SEQ ID NO: 147697 - DNA, 408 bp, Homo sapiens
tttttttttaaaaaccaaaaggcagaaaatagactttattccaagacagatttgtaaaagatgtttttaaagggaaaggcaagtcacgctactaaatcaaacattgttcacaatttctggatcttcctcccgagcactgtgttcaagctaagctttcctaagacgggcttctcaggcgagacgtgacaccagacaccgtcgcatgttacttggagagaacagagacgtgcgggccacagcggcccaccaaaggctgccatccaagctgagttccgcaggcctcacctgcagctggagagggaccttgccctgatcctcctggtaggtacccgctaagggattcaggacagagcgtcacactgcacgcagggtcctccgccaccaccatccaagaaccccggggggctg

SEQ ID NO: 147698 - DNA, 453 bp, Homo sapiens
  misc_feature (1)...(453): n = a,t,c or g
aaaaaccaaaaggcagaaaatagactttattccaagacagatttgtaaaagatgtttttaaagggaaaggcaagtcacgctactaaatcaaacattgttcacaatttctggatcttcctcctccgcctggcactgcagctgagccttggcggatatgctcggggccctcggcgcagaggaacttagcctcgattctcttcctgaggggcttcttaacttttccaagccaggcagtgagcgtggtgggaggctggggctggtgcctgcagctggagagggaccttgccctgatcctcctggtaggtacccgctaagggattcaggacagagcgtcacactgcacgcagggtcctccgccaccaccatccaagaaccccggggggctggccacgcgctggcctctngccaagagtgccagtggtcccgggaccgggccgcccaagcaggtgaagg

SEQ ID NO: 147699 - DNA, 465 bp, Homo sapiens
  misc_feature (1)...(465): n = a,t,c or g
tctcgcctgagaagcccgtcttaggaaagcttagcttgaacacagtgctcgggaggtttctgctctgtctgtcatggcagtctcttggtttgtgtctggccaaggccatgcgtgtgcctcatggcccttcctggccgcctgccacaccgcaagctcgctggggggacactagaagcaccgtggcctgggattccatctggagctgtccgcaggcaccagccccagcctcccaccacgctcantgcntggcttggaaaagttaagaagcccctcaggaagagaatcgaggccaagttcctctgcgccgagggccccgagcatatccgccaaggctcagctgcagtgccaggcggaggaggaagatccagaaattgtgaacaatgtttgatttagtagcgtgacttgcctttccctttaaaaacatcttttacaaatctgtcttggaataaagtctattttctgcca

SEQ ID NO: 147700 - DNA, 1261 bp, Homo sapiens
tttttttttttttttttcagagcttaaaaaccaaaaggcagaaaatagactttattccatgacagatttgtaaaagaatgtttttaaagggaaaggcaagtcaccgctactaaatcaaacattgttcacaatttctggatcttccatcctccgcctggcactgcagctcgagccttggcggatatgcctcggggccctcggcgcagagggaacttagcctcgattctcttcctgaggggcttcttaacttttccaagccagggcagtgagcgtggtggggaggctggggcttggtgccatgcggacagcttccagatgggaatcccagggccacggtgcttctagtgtccccccagcgagcttgcggttgtggcagggcggccagggaagggccattgaggcagggtgggcctgaattgaaaacccgaggggccgaagccagccttgacttccctcgccctaaactggggctcggtcccaaggcacacgcatggccttggcccagacacaaaccaagagactgccatgacagacagagcaagaaacctcccgaagcactgtgttcaagctaagctttcctaagacgcggcttctcaggcgacgacgtgacaccacgacaccgtacgcatgttactctggagagaacagaaaacgtgctgcggccacacgcggcccaccaaacggctgccactccaacgctgagcgtccgcaggcctcacctgcagctggagagggaccttgccctgatcctcctggtaggtacccgctaaagggattcaaggacagagcgtcacactgcacgcagggtcctccgccaccaccatccaagaaccccggggggctggccacgcggctggcctctgccaaggagtgccaagtggtctcccgggacggggccgcccaagcaggtgagggaggtttagatgaatgacttggccagggtcaccatgtggtccacgccacatgcctacgtccgcaggctccccaggcatcgtcgccctccatgggaaatactggtcctccaggcgaccgattcccaggcaccctcggatgttcttgccccatacaaacagctctcctttgttggtcagtgcagcaaagtggctgagtccacatcggatgcgggaagcctggatttttgggttgaactccgtcaagccaaacccaccgcgtggaatcatttcaggggcggcactaaacaaaaggttgagacctttcgccagccttccttagcgccaggctaagctatggaaatccaccg

SEQ ID NO: 147701 - DNA, 6058 bp, Homo sapiens
  misc_feature (1)...(6058): n = a,t,c or g
tctcaatataataatattctttattcctggacagctcggttaatgaaaaaatggacacagaaagtaataggagagcaaatcttgctctcccacaggagccttccagtgtgcctgcatttgaagtcttggaaatatctccccaggaagtatcttcaggcagactattgaagtcggcctcatccccaccactgcatacatggctgacagttttgaaaaaagagcaggagttcctgggggtgagtgagcctcctccaactttgactagagtaagggttgggtctagaaaagaatattgagttgcatcaactgttttcccacttggattcatgagaggtgttaggtcctttaaaaaacatggtagataaagagttgacactaactgggtccttttgggaagagccagaagcatttcctcataaagactttaaattgctaggacgagaatggccaacaggagtgaaggattcataactttatctttacttagatgtaaagaacaattactgatgttcaacatgactacatacataaaggcgcatggagaaaagtattggccttccatgcattaggtagtgcttgtatcaattcttatagtggctagggtatcctggaaaatcttacgtgtggatcatttctcaggacagtctaggacactaacgcagtttctcatgtttggcttctattattaaaaaatgatacaatctcgggaaaatttttttgattttcatgaaattcatgtgtttttctataggtaacacaaattctgactgctatgatatgcctttgttttggaacagttgtctgctctgtacttgatatttcacacattgagggagacattttttcatcatttaaagcaggttatccattctggggagccatatttgtgagtatatatctataattgtttctgaaataacactgaacataggtttttctctttctcagatctaaccagttgtttattcccagtattaagatgatatttataattcttaattataaatatatgtgagcatatataacatagatatgctcattaacaacaacaaaagattctttttacaattaacggtgggttaaacatttagcccacagttttatcccatgagaaacctgaatctaatacaagttaaatgacttgcctaagggccacttgactaatagtaattgaacctaaactttcagaatccaactccaggaacatacttctagcactattcatcaataaagttatatgataaatacatacaactttatctgtcaactaaaaataacaacagaggctgggcatggtggctcacacccgtaatcccagcactttgggaggctgaggcaggtggatcacctgaggtcaggagtttgagaccagcctgaccaacatggtgaaacctcatctctactaaatataaaaaattagctgagtgtgatagtgcatacctgtaattccagctacttgggaggctgaggcaggagaatcacttgaacccaggaggtggaggttgcagtgagctgagattgcgccattgcactccagcctgggcaataagtgcgaactctgtctcaaaataataataataataatagaaaataaagttgtcttcatgaaaaatgaggaaagagattgctggggtgagaaacattaagatcaatgggcatatggtgaccttctatgccctagaaactcttttanggtattttctcctggtatctcttttacncatcgttctatctggaaaaataggtggatgagtgagataataacggtatatactttttaaaggtctaattgacatatataaattgcaagtatttcagatgtcaatttgctaaccttgacacacatagacacacatgaaaacatcaccacattaatacaatgtatgtatccatcattccaaaagcttccctgtgtatctttgtaactctttcttcctccctccactccttgtcctctcgttcccaagaaaacattgatctgcttcctgtgaatataaattaacttacattttttagagctttatataagtatgttctctttactgtttgtcttccttcgctgcacagttattttgagattcttcaagttttttctttatatcgatacttcattcacaagaatatattttaattctagactatgtcacattgactttgtcgtctgctaaatccttagtgctcagatgacttgttcaggactctccttgaacctgtacctctgttanattgaaacttgtctctactgtctttttatttcaaacacagcttattaggtgtctctcaacccatcaaacncacaatctgagtctttaggagattgctttgaatttgtgctattgacttatatntatatnaaatntgtaaatgtttggtaaaaatatcatcatgtacnttttcataattacgctatntncacatgatatatgtcagactctggaaatatgcatgccacagacacgtgtttcttgcctaaaggggctgatggaagacncacatacnaatagacgattgcagtagaatgagagtggtggtctaancagtacatgtcctgatgttgctcggacagttactacnccaagagtaccccctgcattgtcagggttagcatctcctggaagcctcatgtaaatgaagaatttcatgctccatccaggacctaatgaataagaatctgcattttagcaagaccctcatatgattcatatacactttttttttttttttttagatggagtctcactcttgtcgcccaggctggagtgcaatggcatgatcttggctcactgcaacctctgcctcccgggttcaagtgattctcctgtctcagcctccctagtagctgggattacaggcacccaccaccatgcccagctaatgtttttttgtgtttttagtagagacgcggtttcaccatgttggccagggtggtctcaaactcctgacctcaggtgatccacctgcctcggcctcccaaagtgctgcgattacaggtgtgagccaccacacccgccttattcgtatacncatttaattctgagaagcactctatagaaaataagaataagaaaatattgggctcacaggtgacattaataagtaactttatcgagtaccccaaattttacctatgtttggaagatggggttaaaaggacacattgaaaacaagaactcattgtggcttttttttcctcctttttgaacagttttctatttctggaatgttgtcaattatatctgaaaggagaaatgcaacatatctggtgagttgcccgtttctgtctttgtccatccttgaaaagataagaagaacagagttttaagagtcttaagggaaacacatctttgtctcctatattacttgtgaatgtggatatatgattttgtttcaatctattttgtgtcctaaggctttttgcaacagaagttggatatatcattagaaacataaattgtaccatttaacatacatgaagtttatgtttaccttgacgttcttctaaaaagtgtcctacaccggcattgtccttgtaggcatattcacatgatcaaataaaataattagttttcaattaaggagaatatttgaggaaagaccgtacgtgttcatgtggttcctgaaggcagtccagtgagaaagtaatatatgcttcattaaacaatgcggacattttcagggtttccctttttaaccaaaatttggaagcaatgtggaatttactggatgcatccagccctgaaatgaagataggtttattgaatgtgccagcaagtgcaggcccaggtctgagtgttcttcattattatcaggtgagaggaagcctgggagcaaacactgccagcagcatagctgggggaacgggaattaccatcctgatcatcaacctgaagaagagcttggcctatatccacatccacagttgccagaaattttttgagaccaagtgctttatggcttccttttccactgtatgtatttttttttgtgtgggaagactaagattctgggtcctaatgtaagtaagaagccctcttctcctgttccatgaacaccatccttttctgtaacttctattacacagtatagtggttctgtaagttcacacagcccagggagatgctggctgcccactcccctcaacccaggcaaattcctcggggttaaagttatctactgcaagtgacgatctctgggtttttctgtgcctgtgtttgtgtgtgtgtgtgtgtgtgtgtgtgtgtgtatgtgtcactttaaaaggactggtcagatggtagggagatgaaaacaggagatgctataagaaaataaacttttggggcgaataccaatgtgactctttttgtttgtcatttgttgctgttcaataggaaattgtagtgatgatgctgtttctcaccattctgggacttggtagtgctgtgtcactcacaatctgtggagctggggaagaactcaaaggaaacaaggtagatagaagcccgatataaaatcttgaatgacaggttaacgaattggagctttattccttaaaatatggcctgggttttctgaaacatttcttccagaaaatagtttctccaagttttattactttggtttacaaatctcacatttaaatcacattttataccataagtagcacacatttcataatattcctctgaatgagggttgggataataggactgatatgttagaaatgccttaaagtgtgtggagcatgagagatggatgtacagaaggcttgtgaggaaaccacccaggtatctggccttgttttctgccccagaactagccgcctattcctgtttctgttttattcctttgtttcttgacttttcctttccaacttgctctaaaacctcagttttctttcctttctgattcatgactaccaaatgttttcacttgcctcacccgtccattacacctttgataagaaccaccagcaccttgtgctcatgtacttgcccatgtctgatggaagaaacatactctctccatctgtccactttcctgaggcattcaagtctagccaccttttaaaatcactctcctccaggctgggcacagtggctcacacctgtaatctcagcactttgggagtccaaggcaggtggatcaactgagatcaggagtttgagaccagcctggccaaatggcaaaaccaaatcttcttcaattataaccaaatcttaaaccaaatctctactaaaaaatacaacaaaacaaaacaacaacaacaaaaacagaaaaggaaacattagcccagcgtggtggcaggtacctgaggttccagatacttgggaggctgaagcaggagaatcgcttgagcccaagagatggaggttgcagtgagccgagatcatgccactgcaccacagccagggtgacagagccatacttcccagcacattgggaggccaaagctgaagaataatttgaggtgaggatttggagaccagcctggccaacatggtgaaactccgtctgtactaaaaatataaaacttagtggggcatggtggcacgcacgcctgtaatcccagctacttggaagggtgaggcaggagaatcgcttgaacccaggaggtggaggttgcagtgagccaagatcgtggccactgcactccagcctgggtgacatagtgagattctgtctcaaaaaaaataaaagaaatttaaaaaatcactctcttccaaagatagataaataagacagcagatatactaaggaataacctcaccaacttgtcattgactgacatgatttcttttggcccacttggccagctagtctggtttggttttctggaaatgaaagaaataatcagagtttaatgacagagagcgtgagacccagaaagacaaaagtagatgaggtaagtctcttgagcgagacttctagggatgggaaatttgtggtgattgatatgaaatgatttttcccttatcaggttccagaggatcgtgtttatgaagaattaaacatatattcagctacttacagtgagttggaagacccaggggaaatgtctcctcccattgatttataa

SEQ ID NO: 147702 - DNA, 2730 bp, Homo sapiens
gcggccgcggcgggccagcggcggagccgtgtagcggagaagctccccctccctgcttcccttggccgagcgcgggggcgcgcgcgcacgcggccgtccagagcgggctccccacccctcgactcctgcgacccgcaccgcacccccaccctgggcccggaggatgatgaagctcaggtcgaacaagacccgaacttacgaacggcgacggctacaaagaagcgggccgcatgcctgtgtttccgcagcgagagcgaggaggaggtgctactcgtgagcaagtagtcgcccatccagacagatggattgtcccctggaaggaaggcatggaagcccgaaggaaggaagccaagtgtggcaagcaagttcgtgaagtctgtgaaggaaggcttggagtaaaagggacatttgggaagattagttggaattttttgagaaccaggagaggaagcacaaggacgtatgtctaatgtgctcattgtcactgaaagtgctggaagactgggaagattcagttaacattggaaggaagagggaatggtttaaaatagaagacgccataaaagtgctgcagtatcacaaacccgtgcaggcatcatattttgaaacattgaggcaaggctactcagccaacaatggcacccccagtcgtgggccaccacatactcggtttctggcttcagagcttcgatgttcagggcattcagatggacttgaaggactttcctgttaaggaggaaatgggaaattgggaaaactagactgaagtgcaaaatcttccctctcaccctggctcttttccacttctcacaggcctcctctttcaaataaggcatggtgggcagcaaagaaagggtgtaattgaaaaatgttgcctgtttgggtgttaaagtgaatggggctttttccttcctgtttttattgagggtgggggttgggtgtgtaatttgtaagtacttttgtgcatgatctgtccctccctcttcccacccctgcagtcctctgaagagaggccaacagcctttcccctgccttgggattctgaagtgttcctgtttgtcttatcctgggccctggccagacgttttctttgatttttaatttttttttttttattaaaagataccagtatgaggatgaaaacttcccaataatttgtcctataatgtgctgtacagttcagtagagtggttcactttcactgcagtataacaattgatctacacattatatatcggacatataatatgtaaataaatgacttctagaaagagaaatttgtttaatttttcaaggtttttttctcttttaatttgggcatttctagaattgagagcctcacaattaacatacctttttgttttcgatgctagtggctgggcaggttgccctgtcctttctctatttcccagtcattgactgtagatatgggaagagtttagctaccttcatagtgctcccaggactcatggcckttccttctttaagctgtatttccctgcccagaaagaaacaggaagaaaccttttttttattttttttatttttttttaaccaagcaaggagcaaatggcctcagcccagatctgtaaaaacaatgatagaaattgaattctgccccacatgttgacagtagagttggaactggattcttgggattacttatctaaaaaactggagcatcaggtccatttctgttctgctggtttggaatcttttccgtaatgctatttattgccaacaatggcctctctttgtgtccatatatgccttacaccgtgctgacctgggtatcatccatgtgctctgaagcatccaactttacttgcccaggtgcatcaatgtagtcctgtccctgaactgagtaaccgtgttcctgaaaagtacactagggaaattcacctgcgctgccttgtcttggaattggcatggcacttggtgatttcacccatggagcatgctcagagctattaaattggtctcccatctcccaccaggatatgaaaggtccatatgggaggccacgtaatcacttattacagtggttacataatacactgggctcactgcagactctcttgttttttgatacagtttcgtgctggctgtcatttgccaattgtgttgtttagttcggaagtaagagggtcttgagattgaggggtagggagggctacactgactgatccgtggcttaagacaggagattatctctgtactccagtggcatctccttagcccaagatgtgaaaattaaaaatcatagttcgcctccattttaaaaaattctaattaaagcactcaaactttggaaaagctttttacttttccccctcccctaactaaaaagaaaatgtaatgtaccctcataaccctgtgtcaatttagtgttcagcaacttttgggaaacatcagttggtgaactttaaattttgcctgtcctactcactgggcacggtggctcacacctgtaatcccagcactttgggaggctgaggcaggtggatcacctgaggtcaggagtttgagaccagcctgaccaacatggtgaaaccccgtctctactaaaaatgcagaaattaggtgggcgcctgtaatcccagctacttgggaggctgaggcgagataatcgcttgaacctgggaggcagaggttgcagtgagccgagattgcacccactgtcgtccagcctgggtgataagagtgaaactccatctcaaaaaaaaaaaa

SEQ ID NO: 147703 - DNA, 1409 bp, Homo sapiens
gcacacacaacaatttatttatttgttcctatatatttaaagagatatgaggttctattctaatcgccacacctccaggttattctagcgtctcctcattcctatttttataaataccttctctaatggagaaatcttgctgtcatcattctcaacatatttatttgctcagtgttaccaatctctcaacaatgctgcccatctcctccccctgtgccttccacaccccaccctcagccctcttggtgccagcagacacaaagccacaactcctctcatcccacgaggcaagtctaactcctccactctggggaaggaaggcaggagagatacatgaaaagtcaaagggggggaatcaaaagaaagaggaatggaagtccacactgatttttttaaaataataaatcttttgattgccctaataaacatctcttggtgatgatatagtttatggatatggctagatgtttttttcaattttaggattttgcatctaaatctatgagactttggtctatagctttatgggtttttttgttgttttttttttaggttttgttatcaaggttgtactggcctcaaaaactgaattggaaaagttccatcttttttcttctagaaaagtttataaaagcctggtattatttcttaaatatttggaataacttcagtgaagccatctgttcccagagttttctttctaagcaagtttttgaatactccactcaggtattgtttgcagttgtgacaaggcacaaccaatctctaggtatgaccttgtttccagggcttttaaactggaagggcatgttcatgaaaggaccaaccccactgggcacttcctaagttctaatcaatttctcctttggtactgccaaaatgccaaaaccaaaaccaaaaatcctacttattatcttcctcaaattagcttttcaggctcctgcccctatgcagcatgaggacatctgggaaatttcttggaggaattatatgtgtttgaagcccctaatgtatccatttttttttaattgcagtcttgattgttctcctggtttctggtcccccccatgccttcccctgacccccagggtatggccctctgcctgaaccaagttcagtattcaggttcttccctatagccagaagtggaaagggtccccagagcaaagagctgcattctgtgcatgtgctttctgggatttaccactctctagaattttgctcctttagttctctttgcttctatagcaataagttgcatttaaatattttttgtaattttatagttgtcctcaatcagtccattctgctgccgactactataccttacccaatagcaaaatctattttttttttaaagtgtctgtcactcaggctggagtgcagtggcagagcgagactctgtctca

SEQ ID NO: 147704 - DNA, 2316 bp, Homo sapiens
  misc_feature (1)...(2316): n = a,t,c or g
gggggccccagtcactgagccgccgccgaggattcagcagcctcccccttgagccccctcgcttcccgacgttccgttcccccctgcccgccttctcccgccaccgccgccgccgccttccgcaggccgtttccaccgaggaaaaggaatcgtatcgtatgtccgctatccagaacctccactctttcggtaagctatgggaaaggtcgcgggcccgggtggggcagcggggccttccgggcccggagacgtgttccgggaagttgccaagcgctccgggccttcgtaagctcgggcaggggaaacttgaccagggtcgcagggcagcgggatcaaggcctgggccccggggtcggaccctgagcgcgaccggaaggagcaggcggtaggtcagcccttgggcgggcccggcgtctcagtggcgcatttactaatggctcctgggcctcctcgggccacacccgcccctcccgtcaccattgcgtcacgtccgttacgtcaccacccgttgtcacggatccggagggaaaggcggtgccagccctaagtggcaagcgggtgcaccaatgggggtgggaggcttagccccgcctcgggagctcgggttccggcgggttgcatcagctgggtggggcaccgcctggcagcccggactcccccgacatgtgatcggcttcccagggagggcgggaggcccgggcgttccccgagcctggggaagctggccgtcccggactgacctgctcggggagagccagcaaaggacacattcggcctggcccaagccctgacgatttcagtgttgttttctgcacgcgcaaaacacctggggaccgaggggatggcagtggcatcctatctttgacagctctgaacgagcttaacctttttttcagacccctttgctgatgcaagtaagggtgatgacctgcttcctgctggcactgaggattatatccatataagaattcaacagagaaacggcaggaagacccttactactgtccaagggatcgctgatgattacgataaaaagaaactagtgaaggcgtttaagaaagtaggtcttcagtgagattttgggaaggtcataatggatttgtccacaagggggtgccagctgtgttgtatgtattgttagcggaaggggtgataaatgcgttcatgctcttgctaggcctaattcgttttcctttgtgcttgcagaagtttggcctggcaatggtactgttaattggaggcatccgggaattatgggaggaagttaatttcaggttacagggtggacccaacgcaaggaacatatggccagtttccttgttggagattgggattgggctaagggacggttcaggttgaaggtttctggggtttttaagtggtttgtgggttcattgaaggtttaagtgaggatttatttcccttgcaatggagtagaatttcccttctctcccttggccacagggttaaaaacctcacagctttgtataatgtaaccatttgggggtccgctttttaacttgggactagtgtaactccttcatgcaataaactggaaagagccatgctgtctagtcctggaagtccctcattttaaacagaggtcaagcaataggcgcctgggcagtgtcaagcctgaaaccaaggcaataccgtcatgttttcagccnaggcccaggagccctaaggttacaaacaactatgggccgggaacctccttcaggttttccctctggcagagtttccctacccctaaggggattgtttaccacctggaacagtcctcggtgaattttgaggagggagagggtgggggttaagggcaggaaggcaccagctgttacttacttagaaggggagcttttgggtgggtagatccccctggtgtctccaacctgactaggtggacagagctcaaagaggccctcttaaccgctagcgaggtgataggacatctggcttgccacaaaaggtctgttcgaccagacatatcctagcttaaggggatgttccaaacatcagaatgtgaggccaacccttctatcagagttaaacttttgacaagggaacaaatctccaaactgatccgatcagtcgatgtagctagctgtagagcttgccaacttaattagcagcagcttgcccaatgccatgtgaagtaacaaactggtttttggtttttttttgccccttacagttttgaatgttatcgtgtaactgtatttaaacccttgatttaagataagaacttgttttcagaaataaaaaaaaaaaaaaaaaaaaaaaaaaaaaacctgcccgggcggccgctcgagc

SEQ ID NO: 147705 - DNA, 404 bp, Homo sapiens
agaggacaacgaggaggacgaggatgagcccacagagacagagacctccggggagcagctgggcattagtgataatggagggctctttgtgatggatgaggacgccaccctccaggaccttccccccttctgtgagtcaaaccccgagagtacagatgatggcagcctgagcgaggagacccccgccggcccccccacctgctcagtgcccccagcctcagccctacccacacagcagtacgccaagtccctgcctgtgtctgtgcccgtctggggcttcaaggagaagaggacagaggcgcggccatcagatgaggagaatgggccgccctcttcgcccgacctggaccgcatcgcggcgagcatgctcgcgctggtgctgcgagaggccgaggacacccagg

SEQ ID NO: 147706 - DNA, 1413 bp, Homo sapiens
  misc_feature (1)...(1413): n = a,t,c or g
ggctctttgtgatggatgaggacgccaccctccaggaccttccccccttctgtgagtcagaccccgagagtacagatggtgagtgtcccaggctgttcccctcccgacctgagggcatgcacacggccgacacaaaggcagggacagaagctgaagtccaccctctctttcagatggcagcctgagcgaggagacccccgccggcccccccacctgctcagtgcccccagcctcagccctacccacacagcagtacgccaagtccctgcctgtgtctgtgcccgtctggggcttcaaggagaagaggacagaggcgcggtcatcagatgaggagaatgggccgccctcttcgcccgacctgggaccgcatcgcggcgagcatgcgcgcgctngggtgctgcgagaggccgaggacacccaggtctttcggggacctgccacggccgcggctttaacaccagcgatttccagaagcttgaagcggaaatatttgaagttccaggggagggagcgccccgggccgcgttcgccccgtcccacactacgcccccgccccactcccggagcctgctaatctgaggccgatccgggaccggcctccttgcgtctcccattcccaagattgtcccgcctctgccaatccccgccgtccttcgcagcccacgacctgccgcgccgaggagcggcatctgtcccgtttcccgattgggtctgtcgtctctctccgcctagcgacagattccttctattaagggattggctcgctgagttctaaagctctaaatggggtcaactcctttgttttccgcctagggaacaaggggattttgcttcgcacggcattgggttccatcccctaagtcgctggacagctctttttttgaattggcttcaaatcctgtaaagggctttgaccagtctcttacatagtcaccgtccgcttttcctggagttctcccttcccaattgggctccagcttcctggggggcgtgggccaagccctcctcttcccagaatttgggcccgggcttttcaatttaacgttctttaacaatacgggggattgggggtcgttttttggcccacgtcccgacaacttgttccctggaccccctcagggatgggccccaaactgtccctgctttgggcacccccctttctttggttccatccatccccacaacagcctgccaatcgaagcccgtccctgcatcccaggatggtaaccagcttccggcccctcgccccccacctccacaggtgccttaaagggccctcgtccaccccagggtggggggcaggggccctcactctccggccctggtgtgggggagagagtgaggggttgggggatcggcagttgggaggggcgctctgagaataaaagagtttacctcttgagataaatgtga

SEQ ID NO: 147707 - DNA, 414 bp, Homo sapiens
gctccgatcctctagagcggccgcgacgttgacttcgaaattgtactccctgctgttccgcaggacctccaccttcgccctcaccatcatcgtgggcgtcatgttcttcgagcgcgccttcgatcaaggcgcggacgctatctacgaccacatcaacgagggggtgagggcctgtgccatccctgaccttggacccgcctgaggggtgacagtggagtataggtgggatgggactcagtatacttttaccaggaagggggtaaggggtaaaccgtcggcgtcttctgtctcgagaccgccgtctgaccccttggcttgatgtgaactctaaaacgttaagcgaggttaatatatttcattttgcaggggttgtaagtattgctgtgtgccaccctacatacccacttgcccatg

SEQ ID NO: 147708 - DNA, 672 bp, Homo sapiens
  misc_feature (1)...(672): n = a,t,c or g
ggcacgaggaaacatggcggccgcgacgttgacttcgaaattggactccctgctgttccgcaggacctccaccttcgccctcaccatcatcgtgggcgtcaatgttctttcgagcgcgccttcgaatcaaggcgcggacgcttatctnaccgaccacattcaacgagggggtgaggccctgtgccatccctgaccttgggacccgcctgaggggtgacagtggagtagagaagctgttttaaacacatcaagcacaagtatgagaacaatggggtccttgaagacccccatccaaggccaagaaggaccaggtccacccagcaagcttgttttgcccaagaagcttggaagcctcagctttgaaagatgatgctcaaggtactttttatgggaccaccattcgctgttggcaagaaacggctttactttacaaaacagagttctttaccttctggtggtgttttgaagtatgtttagttcagcatgcttcaaggaaattaaatgtgaattgcccttgagacctgcttctacattggttgctttgttaactctacctgatcttcacttgtcaagtaatttgagaccacttcaaagccctctgcaaacaccccaaaggcagaatctgctattttgagttttccattaacttccaaagaattctggttttcaaag

SEQ ID NO: 147709 - DNA, 1140 bp, Homo sapiens
caaaaaacccttcaaaaaatcaatgaatcccaggagctggtttttttttaaagatcaacaaaattgatagatcactagcaagacttaatgaagaaaagagagaagaatcaaatagatgcaataaaaaatgataaagggggtatcaccattgatcccacagaaatacaaactaccatcagagaatactataaatacctctacacaaataaactagaaaatctagaagaaatggataaattcctggacacatacaccttccaaagactaaaccaggaagaagtcgaatccctgaatagaccaataacaagttctgaaattgaggcagtaattaatagcctaccaaccaaaaaaagtccaggaccagacagattcacagccgaattctaccagaggctaaaacagtgccgaaaagcacatctagacccagtgtctctcacacaccggagcggccccggagcgcgggaggaccggctgagtgacagcggagacgcgtcccgaggttgttggaacctgtcacagcacgccgccgtcacgtcgcccgagtctgaggagcggcgcatcaggaccctcagctgcaggtctgttggagtttgccggaggtccactccagaccctgtttgcctgggtatcagcagtggaggctgcagaacagtgaatattggtgaacagcaaatgttgctgcccgatcgttcctctggaagttttgtctcagaggggtaccgtccgtgtgaggtgtctgcccctactggggggtgccctccagttaggtgtctgatgatcaacactgtgtccttaataggtgtcaagtttactgaagtgtttgattcaataaacatatctgaacatctagagcttgcatgcctgcaggatcacaactccttgctagcaagggaacaaaactggacagaggatgagtttgacgaattaacagaagtaggcttcagaaggtgggtaataacaaactcctctgagctaaagaagcatgttctagtcagatgcaaggaagctaagaaccttgaaaaaacattagaggaattgctaactagaattaccagtttagagaagaacataaatgacctgatggagctgaaaaacacaacacaagaacttcgtgaagcatacacaagtatcaatagctga

SEQ ID NO: 147710 - DNA, 531 bp, Homo sapiens
ttgcgcgaggaaaatgcgggactcccaggtcggtgctcggcccagacttatgcccgtgttttcacagcccacactcgtgcccgaagccccttaccacgccccgggctgtggtctgtgggctgtgggacgagctgcggcgcgggccatttctgagcagtggaggtttcaagtaaaccccactaaacaacccagttcccaaattctgtccatccaaaccctgtgcctgcctgttcctcgtggtaatagatgccatattatttcttttatttaaaagaaatgaatgtgactagtattgcattaagagctgaaacttgggcttttagctggcatggcatgttaaaagacctccgatgtggctggaagcttgtattaactggattcaagaagaaaataataatgttaacttgagtcacgcccacatgaataaacaagtgtttgagcagtggctccttactgatctgagggatttggagcatcctcttttacccgatggcattttagaaattccaaaaggagaattaaatggatttt

SEQ ID NO: 147711 - DNA, 2636 bp, Homo sapiens
atggataaattcctggacacatacaccctcccaagactaaaccaggaacaagtcgaatccctgaataaaccaataacaagttctgaaatagaggcaataattaatagcctaccaaccaaaaaagcccaggacgagatggattcacagccaaattctaccagagaaagcaatagcatcaacatcaacagaaaaaatgaccatgcaaaaactccacctgaaggtcaccaacagcaaagatcaaaggtagagaaatccacgaagataagcaaaaaacagagcaaaaagcctgaaaattccaaaaaccagaatgcctcttctcctccaaaggatcacaacttctcgccagcaagggaacaaaactggagagagaatgactttgacgaactgacagaagtaggcttcagaaggtgggtaataataaactcctctgagctaaaggagcgtgttgtaacccaatgcaaggaagctaagaaccttgaaaaagttgagcctgcagatgagaatgtaacccggccaacacctggactgcagccttatgtgatcctgagtggaggacccagccactctgtgtctggactcctgatcatggaaactgtaatagatgcatattatttcttttatttaaaagaaatgaatgtgactagtattgcattaagagctgaaacttggcttttagctgcatggcatgttaaagtacctccgatgtggctggaagcttgtattaactggattcaagaagaaaataataatgttaacttgagtcaggcccaaatgaataaacaagtgtttgagcagtggctccttactgatctgagggatttggagcatcctcttttacccgatggcattttagaaattccaaaaggagaattaaatggattttatgctctgcagattaattccttggttgatgtaagtcagcctgcatactcccagatacagaagttgagaggaaagaatacaacaaatgatctagttacagctgaagcacaagtaaccccaaaaccttgggaagcaaagccttcacgaatgttgatgctgcagctaactgatggaatcgtacaaatacagggaatggaatatcagcctattccaattcttcatagtgatcttcctccaggtacaaaaattttggatttatgggaaatatatctttccggtcttggtggttctcttattggaaaccaggaaaacgtggaaagtgttaggaggtgaaggtagatgctcttttagaagaattatggcccaagaaaaaaggtacttggcaagattaatagggggaacctggatacttggtagttttcaggtcataccaaacaattctaacgaaaacattcccagagttacagatgttctagatcctgcattaggtccttctgatgaagaactcttggcaagtcttgatgaaaatgatgagcttacagcaaataatgacacttcctcagaacgatgtttcaccacaggtagttcctcaaataccattcccacaagacagtcaagttttgagccagaatttgttatttctccaagaccaaaagaggaaccatcaaacctatctatacatgtaatggatggagaattagatgacttttcactggaggaggccttgcttttagaagaaactgtccagaaagaacagatggaaactaaggaattgcaaccattgacttttaacagaaatgccgatcgaagtatagagagattttcacataatcctaatactacgaataacttttctttgacttgcaaaaatggaaacaataattggagtgaaaaaaatgtatctgaacaaatgactaatgaagacaaatcatttggttgtccatctgttagagaccaaaacaggagtattttttcagttcattgtaatgtacccttagcccatgattttacaaataaagaaaagaacttagagacagataataaaataaaacaaaccagcagttcagatagccattccttaaataataaaatattaaatagagaggtggtcaactatgtacagaaaaggaattcacaaatttctaatgaaaatgattgtaatttacagagttgttctttaagatcatcagagaatagcattaatctttctattgccatggatttgtattctccaccctttgtctatttgtctgttctaatggccagcaaaccaaaggaagttacaacagtgaaagtgaaagcatttattgtaaccttaactgggaaatctctcaagttctggtggtatttgggagtataactgcaaaggtgtctgatggtactgcatatctaggatgtaggactttgtgggatggaaatacttactagcttgataggggttctcagtaccagaatggaaacagtcaaaaaaggatcctcttcaataccaaaagttcctggaagggttgcagaaatgtcaaagagatctaatagatttgtgctgtctaatgactatttcatttaatccttccttgtctaaagcaatggtactggcattacaagatgttaatatggaacaccttgagaatctaaagaagcggttaaataaataattaacctaaaatagtattagggacaattaaaaacaacaaggaaatatttagaatttgttcacaattttacttacgatactttgtgtaaaaaggaaaaaaaaa

SEQ ID NO: 147712 - DNA, 815 bp, Homo sapiens
agcagcattagctttctattgctgcagaacaaattaccacaaacttagctgcttaaaacaacacacacttattgtctcacaatgtttgtgggtcggaagtctaggcgtggcttagctgggtagtctgtttaggatctcagtgctggaaaaacgtgtctggccaggtgctcattgtagctttgacagggaagggatctgctcccaagcactctcaggttgttggcagaatttgtttccttatggctgtaggattcatggcaagttgcttcttccaaaaccagcattggagacagactagcaagatgggccctacactcttagataatcaaataaatgcaatcatgtgcctcgtgtcaccttttttgcattccattcattaagaacaagttgcagtacctacctacactcaaggaagggaggaattacacagaagtgtgaccacaggatgcagggctcatggaggcctccttaaagtcccccagccaaacctgaaaagtcaatcctggaccttatcatagtggctgtatagtttagaaggtttcttcagattggcattcctttgcctcatatcatcacttcaaaaccctataagggtttgttcctcggtcttgactttgtgtctttgaggattgctttgtttagtgtcacctgccttctttcaggaggttttgcctgacatctggtggtgaccgtggccaccaagtcaacccaaacactacctttaaggacgactgcagttctcttagggtctcctcaatctaaaattgtacctctttcaggccaaacacctattttcttcatttttttttttctca

SEQ ID NO: 147713 - DNA, 453 bp, Homo sapiens
tcggggtctggctcactccataaggtaaggtgccttttaccttatggtccttctttagcaggtaacaaaggagcatcagtggcaggctgccctggtggcatcacactggctagtgaggccgtgaatatcttgtcccccggcagggccgacagtttctatcacagaaaacagtgtgttcagtggtgaaaatcgttgcatgcatgttttcatctgagcgtgtccttctcgggtactccctatcagccagccctgcctgtagctgctgtatggtgattgcacttggacatcttttcacttgcagaggctacagctgcattgtcaggtctcccagccctgcagagagctcccttgactggttagcagtgtgttgtgttttccattcatttcagaagagctacattgtgtcactggacatttttaaaaactgtgatttttaataaaaatttaaaattt

SEQ ID NO: 147714 - DNA, 1272 bp, Homo sapiens
  misc_feature (1)...(1272): n = a,t,c or g
acaactgattgaccgatgaagaaagtgtacaaggatctntcaaatgtcacaagcgaaatacacaagatactcaacccatagcacagcacaaannnnnnnattgaaagcagtcgnacacctctcggaaccgcccggaaancccggggcgacccacgcgatacgatccacaatgggagggaacaagagggggttttggggcacacacactccctgcagaggaccaaaccaggagctccttgtggggtggacaatctcgctgagcctctctgcttggtggagcaggcacctgtgtgcagaattcccactgtggccagcacgaggaagtcttttctagtgaaaatgtgtcttgtggtcaggaataattatcctttcccctgtagccaccaaggagggcaaatagagaaaggtaacctaattgaaggattggtcatgtgaaaagggctacatttgggaagctgggaaaggcctccaggcttctagagcagctagcttgggctggattctcacacccaggctgccccttggattgttctacccaagcttttccctggggtctgggctcactccataaggtaaggtgccttttaccttatggtccttctttagcaggtaacaaaggagcatcaggggcaggctgcccctggtggcatcacactggcctagtgaggccccgtgaatatccttgtccccccccagcagggcccgacagtttcctatccacagaaaacaagtgtgttccagtggtgaaaaatccgttgcaatgccatgttttccatcctgagccgtgtcccttctccccatactcccctatcagcccagccctgccgtgtagctggctgtatgggtgattgcacttgggacatcagtcccaatgactgcaagtcggccctggattttcacttgcagaggctacagctgcattgtcaggtctcccgagccctgcagagagctccctccactggttagcagtgtgttgtgttttccattcatttcagaatagctacattgtgtcactggacatttttaaaaactgtgatttttaataaaaatttaaaatttgnnnnnnnnnnnnnnnnnnnnnnnnnnnnnnnnnnnnnnnnnnnnnnnnnnnnnnnnnnnnnntnnnnnnnnnnccccttaaaaaaaacccttggggggcccaaaataaaccgggggggggaaaaaaaattttctcccctaaagggggggataaaaaaaaccccccgggggtttttggaaaaaaaaccctctttgggggggggcccaattggg

SEQ ID NO: 147715 - DNA, 5445 bp, Homo sapiens
tcacatgagcaggacttcgctaaagcgtttgcagtatccagaaaggcttcctcctcgaggctcactttgctcctttctctggtttttggccttcaggaccataaggcccctttccaactggctggcattaaagatgggcccactctggcccgatcctggcaccagcaatgggatgttgacctgtctgctgagtcttggagcccaccactgggctgctggcttctcgagaaatattcggcatggctgtccgtgtgaaggattgccaggacccgtgtcctccgttgctcgcactggggtctctggtgtgaacacccccgacagcagccctccgcccactctgccccctgggagccctcgctggatcgtctcgtctcctgcagcagcactggcaggcgagggctctcgttcatattctcaggccgcaagtgcaatgcctgaggggatcaggcttttctactccaggcaaacctgccccatcttgtcgcttttaggacctcccacaacctggttccccacacatccatagttctgcctccccagcttctcctccccacttgtaaatagtatttattagcttgccgaggcttcctgctagcaaccacactgaagagatcgatgcctcctttcaagctagccaagttttctgcgagccttcagagctaggagggcaccctaggctctgggatcccgtgtctttccagacaatgttttgtttcctttcctttgttttttcttttaactggaataattaccattgaaaaagaagttcctttgagcatgtatgtgtctgcctctaggatgagctcagagcgagagatgacacaatgcctcactcaggccccgggctccctggccacaagctttttctatcctgttttcatgacagagaaggggaagccctgttctgacaacagacatttcagacaaccttgctggctttccacacctgcctggccccctcctccctccacacttccactttgtcctcctcgtccccctacctcaacaaagcagggtggggtaggtgacatttgtggtatccccacttttaacctttggtagtcaaggtttggctactttgcagctcgcccaaagagatacaacctaatccccaacctacttttagttttttttgtttttttttttatggttaaaagtaacttttgtagtttaaaaaaatctttcctctttcatataaataagaagtggaaattgcctttttattgtgtaatgtagaaaaccctcaagtgttttttccgagcttgggaaagattttgtgtaggaaatgtgcatagagtttgtattttatttttattagcagctgaaatgcctttggttttggcttctctctctccctctctctctctgtctctccttctctctctccccccaccacccacccccacacacgtcatctgcattgttattggagcctgtacttagagggattaagcccacaccctggcttccattccatatcaggtacaggatttgatgttattaacatttgtcgtcatacctcataagtcggtccctgccttgtctgtctaggcccatttggggctccctgtgagtgattcccctctctctgctatgctggagacggttccagcctggaaagcggccaagttcatcttctcactgtgagtggaagctggatcgggcccccgtagtcctggcagccctgttgtctggagggttcttgttgtccctcccattagccagggcggagactgtctgagctgtgcaggaggagggttgctagtaggttctgcttctgcttctctctgctccactgtctgcagcccagatcctgttgggcctggctggtgtctggtaaccatgggcctccactgacccatccctctcttttaaactgtcaggtcattatcaggcataggcagcctatagggcccaaagaaggcaaaaagataagatttactcaagtagcatttgggcaatgaggaaggaaaggtttcaaatttaggggcagaagtgagagaatgagccaacccatgtacctgctgcaactgaaccagactgggttttcaaggctcccagacgtagagtaggaaacgtgctcttctaaatgaggagggagaagataaaggaaacttctagcccctgtccttagtgctttgaggattttattttctcccttactacgcttgcttgacgtcactctctctcgacctccaaacagcaggactctttctctgggaaaccgtccttccaaaacggaatctatgtagacaatgggacattaggcagagagctcagatggcccttttaagggggctccaagaaccaacatcactgctcttttagataaacctctgccctccactccttgcttgagtgggttaaaggaactaacagttgtccctttaggaggacaaaatggggtcaagaggacacagaagagttgtatagcaccagattggttccaaataattaatggatgtgtgcacattttctgttcagggattaagaccagaatatcagtggatttgttttccccaccaagtggcctcttagactagtcattaacttatggttagctctaaagatttcaaatagtggcagacagtgtcttctgaatgtaagttttgagaaatacgagtctgtcagagcggccataagccataaagagtcaatctcttcattatatttttcatcatgtaaacaagtttcccatttccctttcttagattgcaccagtgaaggagatgttttgcaaagattcagagaactaatttttcactggataagacctgagtaacccagaccccccaccgtggttcttttcacagccctcgactttgcacttaaaaagggatattgtaaatgaaaggctgcagtgccagttttaagaaagaatttctgtgaagtgtgaggactctggagtctagctcacataaagagagtgttatataaaaatccgacagctgaactaggttgctcttttttggcagggagtggggatgagatttgacaccaatatgggcaaaattagataaccttttggttaatataaatgattttgatttggaggcctaatttgtagattgtgaaagcagcttttagtttaacttattcacagaccccttataattaccatgtttttttttttcttcctaaatctcttggttcagcttgtgaatcttacgtgcccgtaaagttggggatgttgaattggctcttctttgttctggcagtgagtcaagtgtccagcattttttcataagtgttttttaaaattgttctccagcattttatggctcctccctcccatgtcctcagacccagcaaaagcgtagaggcagaattagaggcctctccaggccagctcctctgcccacatgtcatacaaggtgtgaatttgagcacagtccagaaatggagacatcccacccccagttgaataatggcccattcatgccaaccttgccaacacggagagggcagagatgcactagaagaccttcatcctccccttcctctgccccaagtcactacagttggttctattgaagccagtctttaagaaacctgggttaaagacaccagcacttctgcttgctgggctggctggacctgtgaagccatgggcaggtagtgccctcttgagagtcattttatttggccaccttcaggtgacgactatccatagacacatgctaggataggccccgctgggagggcagttacaggagagagtaagtggtggtgacgtgagggctgtgaaggatccagagacaagacttagatgtttcgttcattcactcactcattcagttactcctaagactttttcagtttcataaggaaaaagtgttgcctgaggccctagggaatattggggaatagaagggattgagggaaacattaataatagtttattcaaaaaggacccaaatgcttatacttctctctcccttcttctctctctgacacacacacacacacacacacacacacacgtgcacattcctcccttacatgctcatttgtgccttaaatgtgccttataggtaaatccaggatgactgaggaatccctcgtcactgggagattttgtatatattcttttattattagattgagttgggtgtggggaaaaatttttttcctgaaggctcaaaagtggtttcctaaaagtgagccactatcagatttgcacatcaggagaaaagaaatagggttaccgtccattaggaaaatcccaagtttgcaggagtgcaatcacatcaaaaaaacaaccagccagggattaaaggtattataaatcctcataggcgggaacatttctcaggggcaaagggaacctgggcttcatttggaaggatttaatggttcccatggccttttgtgggtcaaacgggtcaggcactttaacacagggaaaaaactagggtgttgttttgttttgttattttgggacaacataaaattcagggaatgttttatttagccttggtttctaggaagggaaggggaaataatatttcttgagcatttactaggggtgttgcgtgctgtgctaacgtaaattttaagtctttcagtctttatagatacggaaaaccagggtgactctttaccacaggatgaataaagaactaagtaatatggggaaatgcagcaatttctggacttagctgagcccgattccttcctgtggagcacactgtaagcttttcaagttctctggggcaaagaattacagcacctgtcccctggcaatggccctgctgtgtgatgctcatcgcttcccttccgtgctgggagcagttcccccagggtgttccatcttcctatcctttttgttccaatcttctgtgagttccagctaagcaggctttacatctgggggaaagggaaaaccagggggttttaggctcctgttcctctggctcccccatcccttcggctcacccagcctgagtgaggaaccatgaacctttttggcacccatgtaccccatgggcttacactactttggaaaaatcacccttttccagataaaaccagtttatggaggttccataggggaaccacccagcacctctttgacaaaaactgtgagtggacccttttttaaaacaatgctgaagcagggccctggagcttataatccaacgggtgagctttaatgtctatggttgacagttaggttttgcctctcttttgtaacaggttaccgtagacccagcagtgtttaaatcctaaatacgttgtgagtctgttatctgtccctatcgcgttttttaaaccgcctttttattctttatcataaaataagtaaataccaaaaaaaaaaaaaaagctttgtaggacacttgtacttagtttgggaaaaaaaaataaattgaaattgttatgcttttgtatttccatttcttgcaaataaatattttttcttaaatagtaaaaaaaaaaaaa

SEQ ID NO: 147716 - DNA, 452 bp, Homo sapiens
  misc_feature (1)...(452): n = a,t,c or g
ttttttttaaacggtcaacacaagtttatttattctcacataacaatactgagtggatatttaggtcagtaaggcacagttctcctccacttaggaatctcccatcttcaggccttgccttctccagagcctggtcaccatctgcttccagttggcagaaggagtaacagcacaggggagcacctgttggaggtctgtatgggccaggcctggaaactgcacacctcttctggtcactttccgctcagcatcctgttatgttcttcttagcatcagactcgggctttttcctgtttattacctacttcgttttcctgaaagatccatgtgccggtaccatgtgttgttcctactgtttctccaaatgctagtagatttggcacatacctgtgtgcaattanatcgtgaatgaagaaccattgacagacgattagtcaaaagctcttgcaaag

SEQ ID NO: 147717 - DNA, 1103 bp, Homo sapiens
acatcgatacgacttttttttttttttttttttttttttttttaaacggtctacacaagttgatttattctcacatagcgaatactgagtggatatttaggtcagtaaggcacagttctcctccacttaggaatctcccatcttcaggccttgccttctccagagcctgggtcaccatctgcttccagttggcagaaggagtaacagcaacaggggagcacctgttggaaggtctgtaagggcccagggcccgggaaaactgcaacacctccttctggtcactttccgctccaaaatatgtcttaaacccatcttcctcagcccaggcacgggtggctcacgcctgtaatcccagtactttgggaggccaagggaggtgaatcacttgaactcagggggttggagagcagccggggcaatgttggagagacccaatctctcagcatcctgtttatgttcttcttagcatcagactcgggctttttcctgtttattacctacttcgttttcctgatagatccatgtgccggtaccatgtgttgttcctactgtttctccaatgtctagtagatttggcacatactgatgtgccaaattaaatacgtgaatgaaagaacccattgaacaagacgattagtcaaaaagctccttgcaaagcccctttgaataggttaatcgggtggaagagtagggagcaacaaaacctggggtccccattcctagcttgacccacttcctcggctgtgcaacaaactagtctaagctctcctgagcctcagttacctattttgcaaattagggatgggaacatccatacctcacgtacgccaaacgggctaccttgtaaagacgaaaggaggaaatgcaggaaataactccacgtaaggttaatgctccggtaaacagagctgctactgctattatatattctatacaatcctgcgcccttaacggagtggaccctttcagtgcttcagtcctgtcttctctctcctgggttgacctccacagatcctctcagaagagcgttttccaggcgtgaatctccgcagagtggagataaaggctgaggccccaacgcacgcgcactcacgcgagtccgg

SEQ ID NO: 147718 - DNA, 2004 bp, Homo sapiens
  misc_feature (1)...(2004): n = a,t,c or g
agggattnnnnnatctggagngactggagaactgtcncggaannccngggacgacccacgcggacggccaaccactcggggcgacctcgggtgcctcgctgaagatacagtcaagctcccaaccgctccagagcggccaggtgcttgcctctgctacacccactccatctgcaccccccacctcccagcaagagcttcaggccaaaatcctcagcctcttcaatagtggcacagtgacggccaatagcaagctctgcatccccctcggttgctgccggaaacaccccaaaccagaatttttccacaagcaagcaaacaagccaagcctcaacaaagatcacaggcttctggcaatcagcctccaagcattttgggacagggaggatctgctcagaacatggggccccagacctggggctccttaccaagggctttttggccagccttccagtcgcctggcacctgctagcaacatgactagccagaggcctgtgtctttcacaggtatcaactttgacaatccaagtgtacagaaggctctggataccctgatccagagtggccctgctctctcccacctggttagccagaccacagcacagatggggcagccacaggcccccatgggatcttaccagaggcattactgaagctaaatctttcaactctccccagtcccctcatcccctggcctcctcccacttacttgttctaaatagagctgtttggaggatgttctctgcgctcccaggccggcatcgagtgtcatcaatttctaccacctgctctctcttctgcccaaggctgtgttgcttattccttacaaagtttatactgcatttggggctgtatctttttttgttttttgttttgtagaaaataaatatctccgggggcagtacaggtgtctgggcttgtatttgatggggtttctccggtccctgtttctactggatttggagccaggcccagctagccaagtttggaatggcatttgtcatgtcagtagccaccacctttgttcattgtgaacctaccaaggctttccagcttcatacacattgaccagagctcaagctcctgcctgcaactcctgcctagagttgaagaaaagcaaactagccttggcaggcacagtgtcatcataccctcaccccatatgtttggggtctgcttgaggattcataaatcagccactctggattgttgaggaatggccatggcagccacagaaaaaagaatttttctctctgagccaaggttgtttttttgtttttttctcttttcttttttgttttcatttcattgggaagatctccaatgggactggaacagctccagttcaggcaggcagtttaccacaaaactgtggaatctggggccccaccactctttccctgtttaaccagtttctgttcaggcatccccctctccagcaacactttcatgaagttggttctgagactctggccgcgaacacccgtttcttcagtgatttgttttgggcttttggctcaaaaccccaggctcttgtttttgtctagactcttattctgtttcctgagcagcaggaggtagggaccactttgatgtcagacttctggtagctggacatgttctcgagatgggtggctgttccccgactttttgtacccaagagtgaaattgttnagaaaggagggtttcctggctgtggttcctaaatggagccccaggaaagttgccttctcccccagggttttgtgctcagtaagaaccctgtggatcacagtcttgaaggtcctctagcaggggtgagggagagcagcgacttcagctgagtccctgccgagtggttaagcaaacaatggtttcaaaattcaaggtccccaaatggcagcattttatgttctgacctgtttgtgttatatagtggtttttttttttcctctttggaactcttgtgttgttaataaaatgaaatgattactttttaattaaaatgaaaaaagtaaaaaaaaaaaa

SEQ ID NO: 147719 - DNA, 437 bp, Homo sapiens
  misc_feature (1)...(437): n = a,t,c or g
nnnnnnnnnnnnnnnnnnnnnnnnnnnnnnnnnnnnaggattaacatgatttatttcattatcagtcttacaggttgctgaggttgggcaaagcacggatagtaacttaaatccaaagcacttttgttgagtgacaacccgattagcaaggccctgttactgaaaagaggtgtctccccactcacccagctctgggcagagcagctgggctgggctggggctgagctaaccagaacctggaagtagggctcggggttttgggtgtggcccatccctggcttggccagcctcgtcagctttggtccaggttcctgaatggtgcctccctgcccaccttgtgttgggagcgtgaatttaagaggggaagagggcggacaggaagggagggtcagttattttacaagtttttaaaaagttacaggtaggttaactttgag

SEQ ID NO: 147720 - DNA, 636 bp, Homo sapiens
  misc_feature (1)...(636): n = a,t,c or g
nnnnnnnnnnnnnnnnnnnnnnnnnnnnnnnnnnnaggattaacatgatttatttcattatcagtcttacaggttgctgaggttgggtgacaacccgattagcaaggccctgttactgaacaaagggcagtggagggtgagcattaaaggggaagagggcggacaggaagggagggtcagttattttacaagtttttaaaaagttacaggtaggttaactttgagtaaaaaaaaaaaaaaaaaaaaatgtcacaaaacaaggatcaaacagagggcccgtttccctttccccttcccttttaggggcataagtgggggtgagaacactcatatgatggtgcaagactgcaaggcgccccccttccggctaccttgcgtgggcacaggtttgcctttcccgtagtaccccgggaagatggccctgacctccatgtttttggccagggtcaacatccagcgcccattgcccaaggaataaagcttgccccgggttatcttgcccaccttcttgccttgggtgcccccctttttctgccgcaaaaactctaaaaggtcaagggcccgtttgcacggcctttacgttagcttcaccacccagggttatttgggcgccccttcccccggggcaggttgtca

SEQ ID NO: 147721 - DNA, 377 bp, Homo sapiens
  misc_feature (1)...(377): n = a,t,c or g
tgccccctccccttaacaccaataactagggtaacagtttgataactagggaagaaagcagaacagttaagcagccgccanattcccgctggctgggggcctnactccaggaaggggctggactggctgtcctttcnagtggcctggctccgctgtgtggatgggnagatcggggccagaggcagaaccctggtgaggaagctccagtcctgctctctacccagcccatcttgcctccactgccctctgttcagtaacagggccttgctaatcgggttgtcactcaacaaaagtgctttggatttaagttactatcctggctttgcccaacctcagcaacctgtaagactgataatgaaataaatcatgttaatcct

SEQ ID NO: 147722 - DNA, 2776 bp, Homo sapiens
  misc_feature (1)...(2776): n = a,t,c or g
cttcttccgcaagatgtcatcctcaggggccaaggacaagcctgagctgcagtttcccttccttcaggatgaggacacagtggccacgctgctagagtgcaagacgctcttcatcttgcgcggcctgccaggaagcggcaagtccacgctggcacgggtcatcgtggacaagtaccgtgatggcaccaagatggtgtcggctgacgcttacaagatcacccccggcgctcgaggagccttctccgaggagtacaagcggctcgatgaggacctggctgcctactgccgccgccgggacatcagaattcttgtgcttgatgacaccaaccacgaacgggaacggctggagcagctctttgaaatggccgaccagtaccagtaccaggtggtgctggtggagcccaagacggcgtggcggctggactgtgcccagctcaaggagaagaaccagtggcagctgtcggctgatgacctgaagaagctgaagcctgggctggagaaggacttcctgccgctctacttcggctggttcctgaccaagaagagctctgagaccctccgcaaagccggccaggtcttcctggaagagctggggaaccacaaggccttcaagaaggagctgcgacaattcgtccctggggatgagcccagggagaagatggacttggtcacctactttggaaagagacccccaggcgtgctgcattgcacaaccaagttttgtgactacgggaaggctcccggggcagaggagtacgctcaacaagatgtgttaaagaaatcttactccaaggccttcacgctgaccatctctgccctctttgtgacacccaagacgactggggcccgggtggagttaagcgagcagcaactgcagttgtggccgagtgatgtggacaagctgtcacccactgacaacctgccgcgggggagccgcgcccacatcaccctcggctgtgcagctgacgtagaggccgtgcagacgggccttgacctcttagagattctgcggcaggagaaggggggcagccgaggcgaggaggtgggcgagctaagccggggcaagctctattccttgggcaatgggcgctggatgctgaccctggccaagaacatggaggtcagggccatcttcacggggtactacgggaaaggcaaacctgtgcccacgcaaggtagccggaaggggggcgccttgcagtcctgcaccatcatatgagtgttctcaccaccacttatgcccctagaagggaaggggagagggaaacgtgccctctgtttgatccttgttttgtgacatttttttttttttttttttttactcaaagttaacctacctgtaactttttaaaaacttgtaaaataactgaccctcccttcctgtccgccctcttcccctctaatgctcacgctcccaacacaaggtgggcagggaggcaccattcaggaaccctggaccaaagctgaccgaggctggggccaagccaggggatggggccacagccagaaccccgagccctacttccagggttctgggttagctcagccccagcccagcccagctgctctgcccagagctggggtgagtgggggagacacctcagagccccgcaaaacccacttgaccggagggcaaaagggcagtgggggcttgggggtagtttttccatggggtcacagaggaactaagtggtgggctctgagaagggggagggaccctctggggctttgattccatctccttgggcttttttctttgtttttaggaggaccagggggtcctgctatttcccaagctggagtgcagtggtgcgatcatggctcactgcagcctcgaactcctgggctcaagcaatcctcctgaagtgatcccatttcttaatcagtgttagccccaagaaggctggggctatttaccaggggtagaaaaagggagcttacctcccaacttttggtcctaagtccctgccccctccccttcacaccaataattaggtaacagtttgaataactagggaagaaagcaggaacagttaagcaagccgcccacatcccccgctggctggggggcctcaactcccaggaaagggctggaactggcttgtcctttcccagtgnccctggctccgctgtgtggatgggggagatcgggggccagagcaaaagggggaaaanaaccccnccccctttggggnggttgaaggaaagctccaagtcctgctctctaacccaagcccatcttgccctcccatgagtgccctctggaggccctctgggcctcccttctaacaggggctggtgggcacccaagagcccaatgggagtagaccccctggctggtaagggccaagtcccaccggttgccttctgggaaggggtttctaacacttaagttgtgtgctgtggttccctggnggtgccctccactgccctctgttcagtaacatgggccttgctaatcgggttgtcactcaacaaaagtgctttggatttaagttactatcctggctttgcccaacctcaagcaacctgtaagactgataatgaaataaatcgatgttaatcctaaaaaaaaaaatgaaggtcactgctttctatgaatatcaaatttgtaatgaaggaggtgcagacatgcaactgttttacaaccaggatgaatgctagatgtgtaacagcatatgattaaccctgcccaggccgtggaggaggcagacttctcagataaagttaatttgttggacccagattctaaaagtcacggtaagggaacagaaaa

SEQ ID NO: 147723 - DNA, 524 bp, Homo sapiens
tttcgtggagaggctccagacccgcacgccgcgcgcacagagctctcagcgccgctcccagccacagcctcccgcgcctcgctcagctccaacatggcaaaaatctccagccctacagagactgagcggtgcatcgagtccctgattgctgtcttccagaagtatgctggaaaggatggttataactacactctctccaagacagagttcctaagcttcatgaatacagaactagctgccttcacagaggtactggtccctgtctcccccacttccccaaactacccacaacatgaaacaaggaccctgggcaggaatggccgggaatggaagggaggcaggcaacttgacaccccacactcttggctttcatttttaacttcactctaagccaggagtttttccatttaggaagagagatatatgaaatggtatatgacgtaatggaattattttcaaatttcattattctaccccagaggttctatggcagccctgtccagtagaactttctgcagtggtgg

SEQ ID NO: 147724 - DNA, 654 bp, Homo sapiens
  misc_feature (1)...(654): n = a,t,c or g
ttcggcacggggaggagaggctccagacccgcacgctgcgcgcagcagagctctcagcgcgtgctcccagccacagcctcccagcgcctcgctcagctccaacatggcaaaaattctccagccctacagaagattgaacggtgcaatcgagtcccttgattgctgtcttcccagaagtatgctgggaaaggatggttataactacaactctctcccaagaccagagttccctaagctttcatgaatacagaactaagctgccttcacaaagaaccaggaaggaccctgggtgtccttggaccgcatggatggaagaaactgggacaccaaacagtgatgggtcagctaggatttcttcaggaatttctttaatctggattgggtgggccttagctatgggcttggcatggaacttccttccctcaagggctgttccctttcccaggaaggcgggacctggaggggaccccttggggcccgggggttttcaaaccccaccccctttttcctttccaggcctttctgttcttcatcttccacaggcccacccttcccttgaggcacattaaccacctnatggcaggcccaacctggccaatagtaaataaaagcaatggtcacttttttaaaacatgaaaaaaaaaaaaaaaaaaa

SEQ ID NO: 147725 - DNA, 1041 bp, Homo sapiens
gcaactgctggctcctttctgtagtcacacacctaatgctagtttagtgattcaaaatgcatcacatttttaggcaggacctagattttccctgtcaacctaagatgaaaataatttcagtgttgattcagaactgaacattaagtaggccctcgtcctgcagttggccacttgagtgttttgttttgtttttattttttaaggtgggcattttcctttaacctctactttttcaaaagcaacaaaggggcctcaacctgagtttcctatggggcctctcttctggcatccccaaaggcgggccaagagcaaatcctgggggggttaaggaaaaaagtgtaaactagggtaggattgttgatgctccaaaataaccatcttagcaatatcttggagctttgagaatagattttgtgggcttatttcttcttgcctcttccccatcctttcaagagagaacttatttttgaaaagtatctatatacacacacacacacacacacacacatattattatttaggtttttataccatactgtattggcgagaataccactatcattgtcctttacagtctatttcttcccccaagtcttggtctttttttattttctattttttcatgaaccacacaggagactttaacatcctgggtcttttctgtttcttctttgtttccccaagtttgtctgtccccctttgccttccctgagtgttggaacatcagggtagtaaaagggctaaaacggcaattttcttggcatgttcaatctattctttttctatgttcgactctgatgcagcgtgtttagcgtgtctagtagctggctactcctatttaaaaactctttctggtagaagacaacccacagacccttttcggatgaggtggtttctcattctacatcctctgatctctatagactgtaggatgctttgctttcaaagataactgggttagagggtggggtgtgcaataggtgatttatcatggtttttttcattatcaatattacatggatgattttctcagattcttct

SEQ ID NO: 147726 - DNA, 391 bp, Homo sapiens
tttatcctctgtttccatgtcaagtgaggaagaagatagatggatggatggatcaatagatggatactggatggacggatggatggatgcatggatggatcgatcgacggatgtaaccagtgtggctttccaacatcatagcattgctacataaaccactactgtcctggtgagcccacgaacagttcacaagcctctggactccctatcctcttatgctccgataggccttcaattctaacgatactcaaatcccatacaacacttccctttggatttacatgattgttctcaaacctggagagacattagaatcacctgaaagtcatttttataaaatgctgcagccttattactctcttgagattcggagatgaggttggaactcacg

SEQ ID NO: 147727 - DNA, 6795 bp, Homo sapiens
  misc_feature (1)...(6795): n = a,t,c or g
tcctaggcggcggccgcggcggcggaggcagcagcggcggcggcagtggcggcggcgaaggtggcggcggctcggccatgacgctcttttccccgccatttcggactggcagcgagcgcggcgcaggcactgaaggcggcggcggggccagaggctcagcggctcccaggtgcgggagagaggcctgctgaaaatgactgaatataaacttgtggtagttggagctggtggcgtaggcaagagtgccttgacgatacagctaattcagaatcattttgtggacgaatatgatccaacaatagaggattcctacaggaagcaagtagtaattgatggagaaacctgtctcttggatattctcgacacagcaggtcaagaggagtacagtgcaatgagggaccagtacatgaggactgacgagggctttctttgtgtatctgccatacataatactcaatcatatgaagatattcaccattatagagaacaaattaaaagagttaaggactctgaagatgtacctatggtcctagtaggagataaatgtgaattgcctcctaagacagtagacacaacacaggctcatgacttagcaagaagttatggaattccttttattgacacatcagcaaagacaagacagggtgttgatgatgccttctatacattagttcgagaaattcgaaaacataaagcaaagatgagcaaagacggtaaaaagaagaaaaagaagtcaaagacaaagtgtgtaattatgtaaatacaatttgtacttttttcttaaggcatactagtacaagtggtaatttttgtacattacactaaattattagcatttgttttagcattacctaatttttttcctgctccatgcagactgttagcttttaccttaaatgcttattttaaaatgacagtggaagtttttttttcctctaagtgccagtattcccagagttttggtttttgaactagcaatgccctgtgaaaaagaaactgaatacctaagatttctgtcttggggtttttggtgcatgcagttgattacttcttatttttcttaccaattgtgaatgttggtgtgaaacaaattaatgaagcttttgaatcatccctattctgtgttttatctagtcacataaatggattaattactaatttcagttgagaccttctaattggtttttactgaaacattgagggaacacaaatttatgggcttcctgatgatgattcttctaggcatcatgtcctatagtttgtcatccctgatgaatgtaaagttacactgttcacaaaggttttgtctcctttccactgctattagtcatggtcactctccccaaaatattatattttttctataaaaagaaaaaaatggaaaaaaattacaaggcaatggaaactattataaggccatttccttttcacattagataaattactataaagactcctaatagctttttcctgttaaggcagacccagtatgaaatggggattattatagcaaccattttggggctatatttacatgctactaaatttttataataattgaaaagattttaacaagtataaaaaaattctcataggaattaaatgtagtctccctgtgtcagactgctctttcatagtataactttaaatcttttcttcaacttgagtctttgaagatagttttaattctgcttgtgacattaaaagattatttgggccagttatagcttattaggtgttgaagagaccaaggttgcaaggccaggccctgtgtgaacctttgagctttcatagagagtttcacagcatggactgtgtgccccacggtcatccgagtggttgtacgatgcattggttagtcaaaaatggggagggactagggcagtttggatagctcaacaagatacaatctcactctgtggtggtcctgctgacaaatcaagagcattgcttttgtttcttaagaaaacaaactcttttttaaaaattacttttaaatattaactcaaaagttgagattttggggtggtggtgtgccaagacattaattttttttttaaacaatgaagtgaaaaagttttacaatctctaggtttggctagttctcttaacactggttaaattaacattgcataaacacttttcaagtctgatccatatttaataatgctttaaaataaaaataaaaacaatccttttgataaatttaaaatgttacttattttaaaataaatgaagtgagatggcatggtgaggtgaaagtatcactggactaggttgttggtgacttaggttctagataggtgtcttttaggactctgattttgaggacatcacttactatccatttcttcatgttaaaagaagtcatctcaaactcttagttttttttttttacaactatgtgatttatattccatttacataaggatacacttatttgtcaagctcagcacaatctgtaaatttttaacctatgttacaccatcttcagtgccagtcttgggcaaaattgtgcaagaggtgaagtttatatttgaatatccattctcgttttaggactcttcttccatattagtgtcatcttgcctccctaccttccacatgccccatgacttgatgcagttttaatacttgtaattcccctaaccataagatttactgctgctgtggatatctccatgaagttttcccactgagtcacatcagaaatgccctacatcttattttcctcaggggctcaagagaatctgacagataccataaagggatttgacctaattcactaattttcaggtgggtgggctgatgctttgaacatctctttgctgcccaatccattagcgacagtaggatttttcaaacctgggtatgaatagacagaaccctatccagtgggaaggagaatttaatcaaagatagtgctgaaagaattccttaggtaatctataactaggactactcctggtaacagtaatacattccattgttttagtaaccagaaatcttcatgcaatgaaaaatactttaattcatgaagcttacttttttttttttggtgtcagagtctcgctcttgtcacccaggctggaatgcagtggcgccatctcagctcactgcaaccttccatcttcccaggttcaagcgattctcgtgcctcggcctcctgagtagctgggattacaggcgtgtgccactacactcaactaatttttgtatttttaggagagacgggggtttcaccctgttaggccaggctggtctccgaaactccttgacctcaaagtatttcacccccccttggccctcataaacctgttttgcagaactcatttattcagcaaatatttattgagtgcctacccagatgccagtcaccgcacaaggcactgggtatatggtatccccaaacaagagacataatcccggtccttaggtagtgctagtgtggtctgtaatatcttactaaggcctttggtatacgacccagagataacacgatgcgtattttagttttgcaaagaaggggtttggtctctgtgccagctctataattgttttgctacgattccactgaaactcttcgatcaagctactttatgtaaatcacttcattgttttaaaggaataaacttgattatattgtttttttatttggcataactgtgattcttttaggacaattactgtacacattaaggtgtatgtcagatattccatattgacccaaatgtgtaatattccagttttctctgcataagtaattaaaatatacttaaaaattaatagttttatctgggtacaaataaacaggtgcctgaactagttcacagacaagggaaacttctatgtaaaaatcactatgatttctgaattgctatgtgaaactacagatctttggaacactgtttaggtagggtgttaagacttgacacagtacctcgtttctacacagagaaagaaatggccatacttcaggaactgcagtgcttatgaggggatatttaggcctcttgaatttttgatgtagatgggcatttttttaaggtagtggttaattacctttatgtgaactttgaatggtttaacaaaagatttgtttttgtagagattttaaagggggagaattctagaaataaatgttacctaattattacagccttaaagacaaaaatccttgttgaagtttttttaaaaaaagactaaattacatagacttaggcattaacatgtttgtggaagaatatagcagacgtatattgtatcatttgagtgaatgttcccaagtagggcattctagggctctatttaactgagtcacactgcatagggaatttaggaacctaacttttatagggttatcaaaactgttgtcaccattggcacaattttgtccctaatatatacataggaaactttgtggggcatgttaagttacagtttgcacaagttcatctcatttgtattccattgatttttttttttcttctaaacattttttcttcaaaacagtatatataactttttttaggggattttttttttaggacagcaaaaaactatctgaaggatttccatttgtcaaaaagtaatgatttcttggataattgtgtaggtaatgttttttaggaacccagcagttacccttaaaggctggaattttatatttaggtaacttctgtgttaatactgggataggcatggaattctgccattgagggaactggataggccgtccataaaatggaaactttcctttcctaaaggaaagatactcacatgagttctttgaggataggtcataactagattaagatctgtgttttagtttaatagtttgaagtgcctgtttgggataatggataggtaaatttagatgaatttaggggaaaaaaaagttatctgcagatatgttgagggcccatctctccccccacacccccacagagctaactgggttaccagngttttatccgaaagtttcccaattccactgtcttgtgttttccatgttgaaaatacttttgcaatttttcctttgagtgccaaatttcttactagtactatttcttaatgtaacatgtttacctggaatgtattttaactatttttgtatagtgtaaactgaaacatgcacattttgtacattgtgctttctttttgtgggacatatgcagtgtgatccagttgttttccatcatttggttgcgctgacctaggaatgttggtcaatatcaaacattaaaaatgaccgactcttttaattgaaattaacttttaaatgtttataggagtatgtgctgtgaagtgatctaaaatttgtaatatttttgtcatgaaactgtactactcctaattattgtaatgtaatcaaaatagttacagtgactatgagtgtgtatttattcatgcaaatttgaactgtttgccccgaaatggatatggaatactttataagccatagacactatagtataccagtgaatcttttatgcagcttgttagaagtatccttttattttctaaaaggtgctgtggatattatgtaaaggcgtgtttgcttaaacaattttccatatttagaagtagatgcaaaacaaatctgcctttatgacaaaaaaataggataacattatttatttatttccttttatcaaaggaaggtaattgatacacaacaggtgacttggttttaggcccaaaggtagcagcagcaacattaataatggaaataattgaatagttagttatgtatgttaatgccagtcaccagcaggctatttcaaggtcagaagtaatgactccatacatattatttatttctataactacatttaaatcattaccaggaactgtttgttttgtagtgaaccttgaggtatgtgctgttaatataccaaattggggtgaaaaaataaggggattcctttcaaaaggttaagaggaaggtaaggtgtggtaagaaattattttgcttattaaatgttcgggtaaatggcattctcttgtcagtaaaatggagaaataagctaaaaataattggctaagtcccattaaagttagaggattaagtgtattatattttcattcaaaattgggtgctcattaatttatgatcggtagtatagctaaattgctatgtttgtatcaaaattgagcataaagttgctgatactttctccgtatgaacagaagttgaaacctatttagttcagtagggcagctcagggattttttacacaacatgtatatcttcccccattttaaggttggaattaattttacaaacaatctggtaatacataaaacagctgggcaactgatagcttaaaattaaagtaggtaatgatcaattagttttgttggtgatcctgaaataatagcgttgtttccatagcctctgtatttccctaagggaagtacaaagcttcctagctctttcattacaaattcgccctgtgcaataagttctttgatcttctctggattcttcacatctttgtttttaaggaaaatgttcttcaaacgctttttaaaatagtctgctccttttggatagtctcgtccaagatacagcagatttttataaagttttagtacttctcctcttaaagaattggacattttcatttatcatgtaaattatccacttttatgcataacatacgcactttccggcacgccggagccgcaaaagcctcgaccgctacgactcctctgtccgtctactgcgaagcggggtggcgttgggggaggtgggcaacctgtcagtacagcggacgcgtggcgtctacc

SEQ ID NO: 147728 - DNA, 996 bp, Homo sapiens
cggcatttccggtcgacccacgcgtccggcaccttgatatgatatacctgtaggtataactaaacattctggacttggtgatttatgattttaaaggtgctttttaggcttggggcttgttataaacaaattctcagttggatatccaaaaacatacatgcatttgattattaaaaagcagctggaatggtacaacagtgtcttttcaagttaccggttaaactggttatagagctgctcaactacagtatgaaaatgagaacatcaaaagggcaaccaaatatttatttccttcaaagataggaattgtactaatgcactaaaaccccattttttgtagctttacagtagaggatcttaacctgtgagtcacaaaactttttgagaataagatgaatgctatgaatccatatctttttcagaaacatacatggaaatacagaactacacctgtaattacagagggcatatgaaccctagtttgataagccttgctttaaaggatgcagtgtgttctattaaatgtatttaatacaattgcagaaatggaaaatgtggacctccattaaacaaattttttagttcctaatgagataaacttgggaccaaaccgattcctcttgttttagtgctcaaaaatagtttcatttttaggtatttatgctttagtggcctttttttctacctttaaaattgtttaagttccaagtaattttatttttggatgttatatatattcttaacttttatctctacagatattttctggcaagtttctatacgaagtatgatccaactcacttcatcctaaacacagcttctctcctgagtgtactaattcccaaaatgccacaactacatggtgttcggatctttggaattaataagtattgaaatgttttgaaactgaaaaaaaattttacagctactgaatttcttataaggaaggagtggttagtaaactgcactgtttctgtgataatgtgaaatgagaag

SEQ ID NO: 147729 - DNA, 906 bp, Homo sapiens
  misc_feature (1)...(906): n = a,t,c or g
agtagtacctnccgagngttgattgacgtataccatctgttaaagtccaagcaacaggaacactgaagaagggactttaacaaatattatacataatctggggatgtacgtatttttgcatgcagtgaaaggaacacctttcgaaactccctgaccagggtaaaaggcaagggctccctaacctccattggggaacaactgggactatggagtaccgttttacatccttcacgggaagttttttcacaatttctccaataattctatattttctggcaagtttctatacgaagtatgatccaactcacttcatcctaaaccacagcttctcctcctgagtggtactaaattccccaaaatggccacaactacatggtgttcggatctttgggaattaaaaaagtattggaaaatgtttggaaactgaaaaaaaaattttaccagctactgaatttcttataaggaaggagtgggttagtaaactggccctgtttctctggataatgtggaaatgaggaggtatttacattgggagggcccaatggctgggtccttccaagtgcttgttttgaagtgcagatttccattaaatgatgccccctgtttaatacacctaggtacatttctgaagaggggctttataagcaggctgggcaggcccagcttataagtttaaagggcatcacagtgagggtgtagtagataaattcaaggaaataagagatttgtaagaaactaggaccagcttaacttataatgaatgggcattgtgttaagaaaagaacatttccagtcattcagctgtggttatttaaagcagacttacatgtaaaccggaatcctctctatacaagtttattaaagattattcttattaccgtaaaaaaaaaaaaaaaaaagtcgacc

SEQ ID NO: 147730 - DNA, 492 bp, Homo sapiens
aaaaaaaaagactttggacttgaaaccttccagaggaacactcacacaattcaagatagcgttctggagtcctctgaccctcattgatttaagcttgatttggctgacgataaaagacccgggccacgagcctctgggccagcctccagcctctctcggggcttgtttgctgacttgctgctgcacgtgggtatcacaagcaccaagtaaactatctccagggccagttcttttctctcccttccatttctaagtcaatagttgtctataattaaacatatttcagatttgttctgtgtccctgaagttccatattttatctttatgcttgagatatgttttagtgtctataatgttgtggtgggaatcatttcatttggtttaaaagagtttgccttggaaaaactgaattaaccttcataaatacattttgagagatttcagtgtgagtaattttctggacataatattattgtataaaatatcaaaatg

SEQ ID NO: 147731 - DNA, 493 bp, Homo sapiens
ccccgcacaacaatcttatatcagcacactcagagtccatgtcgcaaccctgaacttaaagcaaaggccattgtcgagctctgacaataaaagtctcaactggcagacattagcatgggccacgcacaacatcgcaccacataactcaaggctgctggccaatcctcacctgacagcacatgaaagagtgtgaccgcacttggctctcaaacacttgcccttttagcctattctcacaaaaatctctctatataaaattgatccttctatattctaaaaagatttaatttcaataaacaaacttttcttcccacagggcagctggtcacagcccacaatccattcctcacctctgctcacggtctgctatgtcactatttatgagggcagttgtgacctgctgtagcatttccaacacttcatcacatccagtcaggatttgggtggcaagagccaaaatcctcgtgccaagcttggcgtgatcatgcatagc

SEQ ID NO: 147732 - DNA, 2572 bp, Homo sapiens
ggcacgagttcagagagtagtacgtgctgtgtagataatgaaacagcatgatgtgctctgggttggggtgctggggaggattcttttttagattggcaaccagggcagacctctttgagtgggtaacgtttaactaagacctgaatgataggaaagagccagtctctggaaggtctagggatagagcattccaggtggaggtcttggacaccaggggtaggtctaatcttgggaaaggtcccatttaagcaaatgaagatgttgaccagcaaagagagagacaggaaggagggcagggactgtgctggcttcactcgccagcacagtgagcactttacacagagcctgagtgacagagcaagaccctgtctcaaaaaaaagaaacaaaaagaaacaaaccaggcttgtgttctgccaccaacactaaggaatcagaatcccaagaaggatggcagtgatggcgcgacctgcaaggaagtcaaggaaaaggttgaaaatggtgtatttgtagccaacccacttcaggaacgtacaattctaatgagaaaagagggcgaatctgccaaaagcattaatgagatgcttctaagtagactttctcggtatagagcctccccgtcagcaacgcttgctgccctgactggttccaccatctccaacacactgaaagaggatcaagcagcaaatactagctgtgggctgcctctaaaaatgctgcggaagacacccatatatacctgtggcacctacttggtgatgctggtgcctcctccagggggatcaggcagctctgccacccgatctctttttggtggaacaagtggtttgtcatctttaaaaatcttagcttccaagcttggtgtataatatttcggatggtcagtttacaagtcgtgcagatctcatagatgctgctggaagctcactggggcgtggtgctctcgtaccaggattgggagcgtgttatgacacagtgaacaacatgctatggacatgctcaaatgactatatcgatcagtggtgtaaccctgggaatcaagccttccattatgtctgccagagacttggagtcagtcacattatcactgagcccaaagaagaggctataaccacgaatgaggttataaaccaattattgcaccacgttggtgcgatgtgcatacaccaactcaatcttcttgccaccaaccccaatcttccaatcacaagtgtcttgggcaagcagcatccaattgaagcacatcatcttagcagtatttgtgacattatggagaaggccatggttaatggagatacctgtattatacgctgcattctcgttgtctttcagcaggggagcgcagctactcgtatacccttgaccgaagaccggtcctcctctatcggggatggtcgtcctcttcgaccgagcgcgcagcttcgggagggacgcacatggagcggagagagaaacagtggactctcccagctacgggatgtgatcctaaccaacctggctgaacagctccaaaacaaccgatttggcagtgatgaggatgatcattacagactaaatgatgaacttttacactacattctgaagattgttgtacgagaatcctgtatcttaatcaccaagtgccaaactgtctctaaagatgattttcaaaagctcctttcaactgtgcctgctgcatcctcctgcctgcgctatctgatggcagttcagaatcaccttctcagtaacactattttgattaaacctgatgagaatgatgacagtgacagctccttgcagggagagacattgaaggtacaggagctaaaagtcagtattttggctcttgccacccaaatcctgactggatgtgatgaagtgttggaaatgctacagcaggtcacaactgccctcataaatagtgacatagcagaccgtgagcagaggttaaaaggcttggaacaagttactaaggctactatgcttggtcaccttcttccagtgttactgacctccttgatgcatccaaatttacagactctgatcatggcggatgccctgatgcctcagctagtgcagctggtactctataccagccagataactgacagtagccctggaagacataatgatggttttgtgtttcagacggcgttgctgcttaaaacccagtgtccggtttttgctgaggtgggctgttccccgtgtggtgcaccagaccagaagtgcaggctgttccctgatgagagaatgttagaagagaaggaagagccaggatttctcactggtttaaagattcctgccccatgggctgctggaaagactgtggaaacagtccaccccgtcagagacaactataaatttaaagaaacggtccatatcccaggagctcgctgcctgtaccttagatttgatagcagatgctcttcgcaatatgactatgacaaatctaacagtatattttctgttttgaagttggtgatatatgcggggcctaacacaaacagtaggaaggttgctgaatatggaggcaacacactgggatatggcagccgtagtgtcttaggaactggttggccgaaagacttggtgaag

SEQ ID NO: 147733 - DNA, 118 bp, Homo sapiens
ctgggaaggggaaaatgctgaacaccattgtatagtttcttcaactgtcccagccatgttgtacatagatatgtcatgttattatatatataaatatatatataattttgtacgtttt

SEQ ID NO: 147734 - DNA, 1577 bp, Homo sapiens
gaaaaactccatactgttcattgtacaactaaaagtgaggagggctcgtggggggtgaacctctgctctgtaatactgggaaagtactacagaggggaaccatttgagggatacatgaggagagagtaaattgaggttcgaggattataaattcaggctctgagaaccttatacatatcacaatattgagaggtcaaacaaaaatacttaggaagctagccatggaagcttcttgcctctgacccaggccacgtttcccagcctacctctgggccttagctgctaaaaagcttctctggcagcggagctgcaggcctgaggaaacatgctcagtcatgcacatgtgttgacccatgtttcagatgcagtctgatgccaggtatattgttagggaaagaggaagaagggtaaactgagctagcccctggggctgagtactcctgcagggctggaggaacaggttcttagaagatgattcaccttggaggaagttggggaaagtggttagggagggagaggaggaagactgagaaatctctgcatccccagaactcagcaacccagctcttttatcatgaggagaggtagccatgcttgactcatggaacaggtggaggaaaggggttgcaggttgaccagcattcttcaatctagtttaccaccagctttggctagaattttattgaacgcaacttgctaagttatgacagagaggaccagggtgagaactaatgctcaagagagcaagattctgtaatcctcctggccctttcacatcacaaattctgatatgcccaaacattttggccccaatgagaatgactgatagacttgctgatgtgccatgtggggggaatgaaggtgtgtaatatgcctttctccctgactggcccattcagtgttcaggctgtcattcaaattgggatagggagaaagttgggtgaggaaggaatgggagagagcaggatccctgggactccctgggtccccaaaactccttgacttgttcactttgtaattgtatataatttttgtgtttcttgctccgatttcctcatgctgtcatccttaaagtccatctgggaaggggaaaatgctgaacaccattgtatagtttcttcaactgtcccagccatgttgtacatagatatgtcatgttattatatatataaatatatatataattttgtacgttttcttccatctccgatcttctcaaattctgtactttttttcttttctgtctgagctgccttctctatcattcagcttgagtcctcaagactacttggtcacaatgagtctgatttttaggaaggaataggaggagcagggaaatcagaaaaactgttggtctcactctgtctctctacctggtcatcttcaaggctaagaaaacaaacaagctacattctgtatttgccagtttccacagcatgaagtacatagcttccttagcaagggagtggtcattccaaaatccaaatgcaaattgctttgattaaacctagattattaaatccattcagaacagcatgtgtgtggtctggttctggcctccacacagtcaccacctc

SEQ ID NO: 147735 - DNA, 366 bp, Homo sapiens
  misc_feature (1)...(366): n = a,t,c or g
atgatacaagtttacggttcaggaaaacaacctactnnnnnnnnnnnnnnnnnnnnnnnnnnnnnnggaaatattcagttgagctctgcattttaaacacaaatatacagtcaaaagaggctaaggattaaagctgcaaaaatggtcccaacagcctcagacttttgctgcaggaaaattttttgcccaatggtcacagattaaagggatatctaatccccaagagcccttttgtcccaatattcttcctgtttgaaagtttaacccttacaagtaattgatatataagtgaataaaaatagcacatgtccaggcaaaaaagggcatgagctgggcctgagttgccacttaaaactgtctcgtgcc

SEQ ID NO: 147736 - DNA, 1788 bp, Homo sapiens
  misc_feature (1)...(1788): n = a,t,c or g
taaaatacatgcacacatatttttatttaacttaggccctgattattagtatataaaacagaaaaaccaagtgccttggtaatttacatatcttctccaaatctttaaagaaccaagctctaaaaaacacacgtaaagatatttaagtcataaaacacacacacacacacacacacacacacacacacacacactcaaactttaatgaccttcaggaaccataatccaataatatatttaataggtaagatctcattcatcaatatacaaaaaaaaaaaaaacaaaccagaaaaccaaaaaactaactttgattaaagacatggccccttagtaaggggcactttacaattagaaaggtttatcggtagcactttgaggtagcataattttgtaaagtcacaggggctgctctgcagttttctcctggatacaaaggtagaggcccatcagcctttgccccctggaagaggaaagtgaaattatctgtactcattgcccagtgtcaggcctgaaccacaacttttctaccaaccccacccttggccatccctccttctacactttatgcgtcgggggtttagaacaacgtaaaggcattttgctgccttctttcctcttggtacggcagcatcccaggctgtggagccagttgcctcttgccgcatgtgattcaccagcagggagacgcatgcaccctgtggaaagggaagctgggcatcacagcatgctttttaattggctttaacatttcattaagtaagagtgactcattcctgcaaggctttaaagaggttcatttctgagtattctctccacgattctgaccctagaaagcgctcctttttttccctccctgggtgtaatccattttggggttatccattaaagctttcctgggatttncccctggcaggagggtgaaacagaaaagcctttaaaaaatcccacacaaaacaataacaaaaaaccccaagtgcaagagcaatccaaagaccagacttcctttgtgcaagttaaaataatacaagtttcggtttcaggaaaacaactctcttttttaaaacaaaccagagcaaaccaaaaaaggaaatattcagttgagctctgcatttttaaacacaaatatacagtcaaaaggaggcttaagggatttaaagcttgcaaaaattggtcccaacagccttcagactttttgctgcaggaaaattttttgcccaatggtcacagattaaagggatatctaatccccaagagcccttttgtcccaatattcttcctgtttgaaagtttaacccttacaagtaattgatatataagtgaataaaaatagcacatgtccaggcaaaaaagggcatgagctgggcctgagttgccacttaaaactgtcattcaatatcatagaaaatcctcaaaggctgcccagaaacagggccccaggcactgctgaacatgccagccaccaagtcaactgccacccgacccaactgagcattaaacttcaagtatccaaggtgctacaatagctggtcctctaaagacctcaggctgactctcagaagcccccactccaccccaccccattatacaaaaagtaaaaacattgctcatggtcattacaaaatatgctacctcaaagtgctaccgataaacctttctaattgtaagtgcccttactaagggcacatgtcttaatcaaagttagttttttgttttctggtttgtttttttttttttgtatattgatgaatgagatcttacctattaaatatattattggaaaaaaaaaa

SEQ ID NO: 147737 - DNA, 297 bp, Homo sapiens
tgagatggagtctcactttgttgcccaggttagagtgcagtggtgcagtctcggctcactgcaacttctgcttccccaattcaagcgattctcctgaggtaacaacgcctactttccaaaaccatgcaagaagaaaatactgccagaatttagaatagatgcctaataaatattttttgaataagtagatgaacaaatgtaggaacaataaatgttacctaaacagagtgtgacaaccagtttgtcaacacactagtgatataaaagtttcctaattatgaaacatcttttacaggg

SEQ ID NO: 147738 - DNA, 546 bp, Homo sapiens
  misc_feature (1)...(546): n = a,t,c or g
tgagaaaacgccagtaagtgacagagtcaccaaatgctgcacagaatccttggtgaacaggcgaccatgcttttcagctctggaagtcgatgaaacatacgttcccaaagagtttaatgctgaaacattcaccttccatgcagacatatgcacactttctgagaaggagagacaaatcaagaaacaaactgcacttgttgagctcgtgaaacacaagcccaaggcaacaaaagagcaactgaaagctgttatgatgatttcgcagcttttgtaagaagtgctgcaaggctgacgataaggagacctgctttgccgaggagggtaaaaaacttgttgctgcaagtcaagctgccttaggcttataacatcacatttaaaagcatctcagcctaccatgagaataagagaaagaaaatgaagatcanaagcttattcattctgtnattcttttcgttgggtaaagccaacaccctgtctaaaaaacataaattccttaatcaatttggctcttttctctgagcttcattaataaaaaatggaaggaan

SEQ ID NO: 147739 - DNA, 529 bp, Homo sapiens
cacagagagaccacagcattgcaccaccacaccaccaccacagagtctgtggaagaggtggttcgagaggtgtgctctgaacaagccgagacggggccgtgccgagcaatgatctcccgctggtactttgatgtgactgaagggaagtgtgccccattcttttacggcggatgtggcggcaaccggaacaactttgacacagaagagtactgcatggccgtgtgtggcagcgccattcctacaacagcagccagtacccctgatgccgttgacaagtatctcgagacacctggggatgagaatgaacatgcccatttccagaaagccaaagagaggcttgaggccaagcaccgagagagaatgtcccaggtcatgagaataagagaaagaaaatgaagatcaaaagcttattcatctgtttttctttttcgttggtgtaaagccaacaccctgtctaaaaaacataaatttctttaatcattttgcctcttttctctgtgcttcaattaataaaaaatggaaagaatct

SEQ ID NO: 147740 - DNA, 2320 bp, Homo sapiens
agcttttctcttctgtcaaccccacacgcctttggcacaatgaagtgggtaacctttatttcccttctttttctctttagctcggcttattccaggggtgtgtttcgtcgagatgcacacaagagtgaggttgctcatcggtttaaagatttgggagaagaaaatttcaaagccttggtgttgattgcctttgctcagtatcttcagcagtgtccatttgaagatcatgtaaaattagtgaatgaagtaactgaatttgcaaaaacatgtgttgctgatgagtcagctgaaaattgtgacaaatcacttcataccctttttggagacaaattatgcacagttgcaactcttcgtgaaacctatggtgaaatggctgactgctgtgcaaaacaagaacctgggagaaatgaatgcttcttgcaacacaaagatgacaacccaaacctcccccgattggtgagaccagaggttgatgtgatgtgcactgcttttcatgacaatgaagagacatttttgaaaaaatacttatatgaaattgccagaagacatccttacttttatgccccggaactccttttctttgctaaaaggtataaagctgcttttacagaatgttgccaagctgctgataaagctgcctgcctgttgccaaagctcgatgaacttcgggatgaagggaaggcttcgtctgccaaacagagactcaagtgtgccagtctccaaaaatttggagaaagagctttcaaagcatgggcagtagctcgcctgagccagagatttcccaaagctgagtttgcagaagtttccaagttagtgacagatcttaccaaagtccacacggaatgctgccatggagatctgcttgaatgtgctgatgacagggcggaccttgccaagtatatctgtgaaaatcaagattcgatctccagtaaactgaaggaatgctgtgaaaaacctctgttggaaaaatcccactgcattgccgaagtggaaaatgatgagatgcctgctgacttgccttcattagctgctgattttgttgaaagtaaggatgtttgcaaaaactatgctgaggcaaaggatgtcttcttgggcatgtttttgtatgaatatgcaagaaggcatcctgattactctgtcgtgctgctgctgagacttgccaagacatatgaaaccactctagagaagtgctgtgccgctgcagatcctcatgaatgctatgccaaagtgttcgatgaatttaaacctcttgtggaagagcctcagaatttaatcaaacaaaattgtgagctttttgagcaagcttggagagtacaaattcccagaatgcggctattaggttcggttacaccaagaaaagtacccccaaggtgtcaactccaactcttgtagaggtctcaagaaacctaggaaaagtgggcagcaaatgttgtaaaacatcctgaagcaaaaagaatgccctgtgcaagaagactatctatccgtggtcctgaaccagtttatgtgtgttgcatgagaaaacgcccagtaagtatcaaagtccccaaatgcctgccacagaaccccctgggtgaaacaggccgccccatgcctttccagcctctgggaagtccgatgaaaaccataccgtccccccaaaggagtttaaatgcctgaaaccattccaccctccccatgccagataatatgccacacctttcctgagaagggaggagaccaaatccaaggaaacaaaactgccaccttggttgaggctccgtgaaaacacaaaccccaaagggcaaccaaaagagcaacctgaaagctgtttattggattgatttccgcagctttttgtagagaagtgcctgcaaggctgacgataagggagaccctgctttgcccgaggaggggtaaaaaaacttgttgctgcaagtcaagcctgcctaggcttataacatccacatttaaaagcatcctcagccctacccatgagaataagagaaagaaaatgaagatcaaaagcttattcatctgtttttctttttttcgttgggtgtaaagccaacaccctgtctaaaaaacataaatttctttaatcattttgcctcttttctctgttgcttccattaataaaaaatggaaaagaatctaatagagtggtacagcactgttatttttcaaagatgtgttgctatcctgaaaattctgtaggttctgtggaagttccagtgttctctcttattccacttcaggtagaggatttctagtttcttgtgggctaattaaataaatcattaatactcttctaagttatggattataaacattcaaaataata

SEQ ID NO: 147741 - DNA, 546 bp, Homo sapiens; identical to SEQ ID NO: 147738
  misc_feature (1)...(546): n = a,t,c or g

SEQ ID NO: 147742 - DNA, 529 bp, Homo sapiens; identical to SEQ ID NO: 147739

SEQ ID NO: 147743 - DNA, 2318 bp, Homo sapiens
agcttttctcttctgtcaaccccacacgcctttggcacaatgaagtgggtaacctttatttcccttctttttctctttagctcggcttattccaggggtgtgtttcgtcgagatgcacacaagagtgaggttgctcatcggtttaaagatttgggagaagaaaatttcaaagccttggtgttgattgcctttgctcagtatcttcagcagtgtccatttgaagatcatgtaaaattagtgaatgaagtaactgaatttgcaaaaacatgtgttgctgatgagtcagctgaaaattgtgacaaatcacttcataccctttttggagacaaattatgcacagttgcaactcttcgtgaaacctatggtgaaatggctgactgctgtgcaaaacaagaacctgggagaaatgaatgcttcttgcaacacaaagatgacaacccaaacctcccccgattggtgagaccagaggttgatgtgatgtgcactgcttttcatgacaatgaagagacatttttgaaaaaatacttatatgaaattgccagaagacatccttacttttatgccccggaactccttttctttgctaaaaggtataaagctgcttttacagaatgttgccaagctgctgataaagctgcctgcctgttgccaaagctcgatgaacttcgggatgaagggaaggcttcgtctgccaaacagagactcaagtgtgccagtctccaaaaatttggagaaagagctttcaaagcatgggcagtagctcgcctgagccagagatttcccaaagctgagtttgcagaagtttccaagttagtgacagatcttaccaaagtccacacggaatgctgccatggagatctgcttgaatgtgctgatgacagggcggaccttgccaagtatatctgtgaaaatcaagattcgatctccagtaaactgaaggaatgctgtgaaaaacctctgttggaaaaatcccactgcattgccgaagtggaaaatgatgagatgcctgctgacttgccttcattagctgctgattttgttgaaagtaaggatgtttgcaaaaactatgctgaggcaaaggatgtcttcttgggcatgtttttgtatgaatatgcaagaaggcatcctgattactctgtcgtgctgctgctgagacttgccaagacatatgaaaccactctagagaagtgctgtgccgctgcagatcctcatgaatgctatgccaaagtgttcgatgaatttaaacctcttgtggaagagcctcagaatttaatcaaacaaaattgtgagctttttgagcaagcttggagagtacaaattcccagaatgcggctattaggttcggttacaccaagaaaagtacccccaaggtgtcaactccaactcttgtagaggtctcaagaaacctaggaaaagtgggcagcaaatgttgtaaaacatcctgaagcaaaaagaatgccctgtgcaagaagactatctatccgtggtcctgaaccagtttatgtgtgttgcatgagaaaacgcccagtaagtatcaaagtccccaaatgcctgccacagaaccccctgggtgaaacaggccgacccatgcctttccagcctctgggaagtccgatgaaaaccataccgttcccccaaagagttttaatgcctgaaaccattacaccctccccatgccagataatatgccacacctttcctgagaagggaggagaccaaatccaagaaaccaaacctgccaccttgttggagcctccgtgaaaccacaaacccccaagggcaacaaaagagcaacctgaaagctgtttattggattgatttccgcagctttttgtagagaagtgcctgcaaggctgacgataagggagaccctgctttgcccgaggaggggtaaaaaaacttgttgctgcaagtcaagcctgcctaggcttataacatccacatttaaaagcatcctcagccctacccatgagaataagagaaagaaaatgaagatcaaaagcttattcatctgtttttctttttttcgttgggtgtaaagccaacaccctgtctaaaaaacataaatttctttaatcattttgcctcttttctctgttgcttccattaataaaaaatggaaaagaatctaatagagtggtacagcactgttatttttcaaagatgtgttgctatcctgaaaattctgtaggttctgtggaagttccagtgttctctcttattccacttcaggtagaggatttctagtttcttgtgggctaattaaataaatcattaatactcttctaagttatggattataaacattcaaaataata

SEQ ID NO: 147744 - DNA, 618 bp, Homo sapiens
tccccagagatagccctgggatccaggtgattcgagatgggctataggaaccaaggcctcccccagcgtgaaattaccaggtgtgagcggcgccaccccactgtggggaggcgggtcccacgggcactgggcacctggctgtgcctcattcctgagtctcccacagcctcacaccacagcaagagacaaggcggccctgattcacagcccagctatgccttgtgccaacgcagagccctgggcgcaggaaggggccattctgtgccttagcttcctcagccataaagtaggatagacggggacccggtgccctcctacaggcacagtggggagggaacacaccatcggggcgcaggacgcgaacgctccaagcctgtctgtcccggctgttcccactgcacgccagagagccagaggccttggggccaggtcactgcccagctcagagcccagggagccccgagcagtggccctgcacctcctgccacttctgggtgattctagaggagtcccgttacccagggcccctccggcctctccccaaggggcaccaaacggcccccgagaaagctcccaaactcaagaaatatgactcttcacagcctcatgggcctccct

SEQ ID NO: 147745 - DNA, 446 bp, Homo sapiens
ccctgttcttctttacctaactctatagcagtaattggtacatttcttccatcaaagtttcatatttttagcaaagtatcaagcctttccgtacggaaagctgcatccacaagattggagggaagcaggtttctgttgtaaaagaaagcattctgtcagtattcttttaaaacaattttttagagatgaggtccctgttgcccaggctggagtgcagtggtgtgattgcagctcactgcagccttgaacttttgggctcaagtgatcctcctgcctcagcctcccaaagtgttgggactacaggcgtgagccatggtacctgtcttcatcagtattcttaaaattcagtgtgcaaagtatctgctttgagatgtccacttctaaaaccctaacacagtgttctctctccacccctagctgacactgcaccttttgcttctcgtgcc

SEQ ID NO: 147746 - DNA, 724 bp, Homo sapiens
  misc_feature (1)...(724): n = a,t,c or g
taagatttgtttccttctcccccggccgccctttnnaccctccttttaaaaaatnttttttctgnngngggggttgggtgtgngggntttttttttnnncccccnnnnnnnnnnnnnnnnnnnnnnnnnnnnnnnnnnnnnnnnnnnnnnnnnnnnnnnnnnntnnnnnttntttagccagaaaggtaaaccttttttttacatacaaaagggtgccaantgagtccttcttcccccaactgggaagaggtatcctaaagtctacattggggttttcaaggggcctaggaaaatgggttcttctgagatcccatttcagaacccattttccattttctccaaagaaggctacttcctctgcagagaagattttcctaatggtgcacaaatatctctcctggaggaaccctttcaaatacacttgaaattgacattcatgtttaaaaatactacaaatttcattttcacagctgagctttgtgaccagtgccagggtttatgaaaccttatacatttnnnnnnnnnnnngtaaaaaaagaggcatttaacaataatcagacacatccacacattaaaactgatttccactgctgatttatacattatctagttgtttaaaaatcgcaatcaacatcccaacatctttttaagagtacaatgggcaaagatcaaaggcagatagataataatataatgaattagagcatgtaatcggacgcgtggg

SEQ ID NO: 147747 - DNA, 1358 bp, Homo sapiens
tttttttttttttttttagccaagaaaggtaagacattttattttacatacaaaaagggtgcaaactgagtcctttcctccccaaactggggaagaggtatacttaaaagatcacatttgtgttttccatggtgccctaggaaatgggctactctgagatcacatatcagaacccattttccattttctccaaagaaggctacttcctctgcagagaagattttcctaatgggtgcacaaatatctctcctggggagggaaccatttcaaatacacttgaaattgacattcatgtttaaaaatacttacaaatttcatttttcacagctgaggctttgtgaccagtgccagggggtttatggaaacattattacatccttaaaaaaaaaaaggtaaaaaaagaggcatttaacaataatcagacacatccacacattaaaactggatttccactgctggatttatacattatccagttggtttaaaaatcgcaatcaacatcccaacatctttttaagagtacaatgggcaaagatcaaagacagataaataataatataataaattagagcatgtaatacatcctatgggaattgctgaatcaacattattttccattggggggtatatatttttggtttatctttatcttttctgctggtattttttttctctgcttgataaaatggggctcattcctaaagccagcttgctgagacactaatttcagaagctcacttgtcacttgtttaacctctgagaaatactcaggaacacatggttccccagcagcttgggctgggtctttaatggaagtgaaatgcacatagatgaacacacgcactcacgtgcgcacacacaccacacacacacacagacacgcagtcacacacttccatctgtaaatatatttctccccaaaggaaatggctcatctttcctgaggacattcctaatagactgataaggcttctaaaaaagggcttttgggtgcaagggctggcctggggatttgggtctgggagctcatggaactgaaaatgtctcacctgtactgaaagagggggttgggttggggacattcagaacagctgtcctcttgtgggtgttactggaatggctgcaccacacccccacttattaccatgaataatcctctgctctgagaccttatagatggtgatggcactgggaaagtgattgtgaggagtaaaagaagaaaaataaaagaaattctgtctacagaacggaggtttctttgtaacatcaggtttggtaatcaaactagaaatacaaggaatacgtgttcactttttcccttgaaaggtgatttacaaataccggaagtgggttttctg

SEQ ID NO: 147748 - DNA, 853 bp, Homo sapiens
agtatttaaaaagcaaggccacaagaatcaattacctcaggcttcaggtatccaaagatggtatttcaaacactaagtctacttggccagaacaataagagtcagtatgagaaaaccctgtataatttgagaagagaaatacccactgtgttatgtaccagtggtatgtgtgtgtgtgtctgcgtgtctctctgcgtatgtgagagggattcacacaacatagcctgaattgaataaccaaagaaaatggttattaagaatgctatcggcttattagtatgtacttaaatcataaatgaggctgaaaatccttactccagcctattttagaattggctgggatcaattagtaacagcctcagccataaatgaagtcttacatttcctctgttccaaggaagaataaaaactctgtattctataatgaataataagaaatatgtaagtatgcagccaggtatgtcttagcattaaataaaagaaaaactgcaaggtaccactactggagaaacacttgttcaaggcttgctactgcctctaaggctgatgttaggttctaaaatcaacctgcaaagtaataatcacacatgtagtcaaataaaccatgaaaataatttgagtcactcaaaagtacatgcttttgtaaacatgactgtttacaaacacaccaactctccagaagtctcacatacttgcattccctccagcatttcatgattggctctttcttcagttacatcacacattaaataggtgcttagtgtttaggggccatgcttaaaacaccaaaaatgaagcaagtattctacctgctcccagcatataaaactgggataataatcgatctcgtgcc

SEQ ID NO: 147749 - DNA, 698 bp, Homo sapiens
  misc_feature (1)...(698): n = a,t,c or g
aatcatcantgaactcctgctcgtantccttcctcgactgganctgagccttcaacgttccgcancctggcccggcgctncttcagggagacagggtgtccaaatctatgggcaatcgccaacatgcgccgtggcttccctgtagcggatgtggatggtggagccatcctgcttcaccagcagcacggggtagagtcgtgcataagcctggcggtgcacacgagtgagtgaggccctgctgctgtcagctcgcccaggaggatgtgtgcaggcggcggagtgcaggtccggtggccttcacggtgctctgcctcagccggctgcagataaatgttcaagctctggtcagccgacagtgctgcagcagagtgccaacatgactgaggctggctgtgattgggcactgccgggccacaggagacattaccagagctggtgacccgtgccggggcaggatgagcctcggggcttcctcaggagccacaggctgtggtcagaggcgttctggccccctagccaggaagaggctgccaggccaagcaggctgcccacggccgccattcctccttacagccccagtggcacgtggaggtggtcagtacaggccctggcgtgcaaccagcacatggagcctggggctggtccaggagggtcttcggggaaagctccctacacctttcctgctagactgcggccgc

SEQ ID NO: 147750 - DNA, 1342 bp, Homo sapiens
  misc_feature (1)...(1342): n = a,t,c or g
gtacgcaagcttggagcctccagaccggccgcaggttggcgcctcgtgtgggccgggaacatatgtttgaggcgctgtacccccttctcccgcgggagtcgggagggagggaggcagggaaggggacagggggctgcacctgtgataagcccttgtccccatgcagtctagcaggaaaggagagggagctttccccgaagaccctcctggaccagccccaggctcctgtgctggtgaggccgagggagagggatgtgggcataggacacgtagcaggatttccattttagaggcagccggacctgtcttcaggtcccttccttggtgagagacaaggggtacgccagaggaagctgaagttccggcctctgtgcagcctcatctcctgggaatcttgagtattgaaaaactngggcttttactttcgcacaccttcagcacagactcccatgggaatccaggtcacagcaaagcagccctgggcctccattctcctttaagcaagcatgacaatcctcacttcactgagtttttattaaaactagcaatgaccttagaaagcaaggcatgacctcagctccacttttgaggctgcagtccattcagagaggtttcgcagactcggtaacggccagaacagacagcctgggccctgccgcaggctgactcagaatctttgggagtagtgaccaacttctgcttttggaaaaacctctacaggcggttctgagaagtccaagggttgctgggagaggttggttgcacgccaagggccttttaattgacccacctgcaacgtgccaattggcgcttttaggaggaaattcgcgcccttgggcagcctgcttggccggcctgaggcagagcacccgtgaaggccaccggacctgcactccgccgcctgcaacacatcctcctgggcgaagctgacagccagcagggccctcactcactcggtgtgcaaccgcccaggctttattgcacgactcttcccccgtgctgctgggtgaagcagggatgggttccaccattccacatccgctacaaggggagccacggcgcattgcttggcgaatgcccattagatttttggacaccctgtttttcttgagggagccgccggggccaggctgcgggaaggtttgagggtttaagtttccagttcgagggaaggattacggagcaggagctcagttgatgactttgcatgtggagcgctaccgacagttcttggaccaggaccaagaagtgaccgtggctccagccaccccgggacattgttaagatgggagggctgttcttaaatcactcgttcttgaagctgaaaaaaaaaaaaaaaaaa

SEQ ID NO: 147751 - DNA, 1133 bp, Homo sapiens
ggcacgagaatcagaatcctcctgctgtagtcacgcttacccttctaagcaggttccccaggattcagagagccccggatttctcctggactccatgtgcagatgcctagtatttccattctgaccgttgccctccttgttcttcttgcctccctagttctcctgtgcctcctgttggctctctttgcatctggcctcatccaccgagtctgtgtcaccacctggtatgttcttgacagctgggtaaggggtgtagcattctgttttttggcattggattcctactgtgatggtgccagagtttttccttccacacctacctctctctctgttacagcaaacaaattaacctaaacttaaacttggattctttcctagatgctagtgtcttccctaggaggcaccaggctggcagatgcccactggtgcccatgacctttctgtcttcaccatatagcttcatcttctccatggttggtctgtactacatcaacaagatctcctccaccctgtaccaggcagcagctccagtcctcacaccagccaaggtcacaggcaagagcaagaagagaaactgaccctgaatgttcaataaagttgattctttgtagaacattcagggtcagtttctcttcttcgctcttgacctgtgaccttggctggtgtgaggactggagctgctgcctggtacagggtggaggagatcttgttgatgtagtacagaccaaccatggagaagatgaagataccaggtggtgacacagactcggtggatgaggccagatgcaaagagagccaacaggaggcacaggagaatctcagggaagatctttgcttgggaatcctttgccaaagacaagattctccaagattattgaaggcagtgagcgagaacacgcagagagccggatcccaaaaggggcccccctggattggtgagccactccggtggaaggccagctgacggctgtacatcttgcatccccagccaaagagcagcaggggacaaggaagggaaggagagcgccagcgaggttgcccgtacccaccactggaaggggattggagaagggaccggagagtcaggctccgccttccttccggcaagctacgggcagattcagccgttccgg

SEQ ID NO: 147752 - DNA, 610 bp, Homo sapiens
ctccatggtcgtctcactatttcctaaaaagcccccgtgctgtataaatgctagggcatatgttattttatttacccctaacaataaagccttggcttgtgagtgatcagcattggctgcagcaccctgcctccaaccacctgaaggtgtttacagacggcctctgcctctgagtagctctggagtccgagccatgcacaggacatcaccaagcctcagcttcctcacgtatgaaaccaaagaaaacgccagcctcatgtcaccatacagctggagagtcacagagcaaaggtgccaggtccccgccattagctggcgctcaggaaatgctggctgcccctctcctgccccgtcccacagccttcacgcgagattggcccactactcacacacctctggcttcctggcacttctgtcaaaacctcacatctcttaggaagaaacttcaaatgtcatgttttttcctagtagatatcagctgtttcttaggatgagagtgtctcaaaaagtcctgtccttcacatcaacaacaattcttcgaagtaaggggggttcctccctttcttacccatctttctagttttatgattcaacaaccatttctcgtgcc

SEQ ID NO: 147753 - DNA, 1126 bp, Homo sapiens
  misc_feature (1)...(1126): n = a,t,c or g
gcgggtaaataaccccctttaaagggaaaaaacttgggccccattaaaaaaaatccnnnnnnnnnnnnnnnngaaaagggtttcccgctggcttcgctttgttcgccaggggttgtgttccagtggaaaaaatggggctcaatggaaccttcccctccgggggtcaagcataccttccccctaagcctcccaagtaattggatatccgggcctggggtaccccatannnnnnnnnnnnnnnnnnnnnnnnnnnnnnnnnnnnnnnnnnnnnnnnnnnnnnnnnnnnnnnnnnnnnnnnnnnnnnnnnnnnnnnnnnnnnnnnnnnnnnnnnnnnnnnnnnnnnnnnnnnnnnnnnnnnnnnaagctttggattatggccaatttcttggaatgagactctgtcccctgcctccaactttctgcatcccagcagctggcatcatcccatgtcccagagacttcccacatacttaatggggatcatctcaacctacctgttcttcagcatgatgctggggaggccaggctcagggtcagtgtgttggcctgcagcccgatgtgtgccctcctccctggatctcttccatctgggttgggacgaaggcgtgaaggtggtttggagtcatgagttcaggctgagacacctcagacctacctgacctgctgggggattcaccctgccagcctccgagatgcagtaggatgagaacacgcactctggggataggagcctggatgtgtgtgtgtctggaggttggccattcccatcttccagcgtgtctcgtgtgacagggaccagtgtggaagtgtctctgggttggcccttaggcataggccagtttgagaataggagacaggaggtgagaggtcgccataggtggggtttgcagagggtggtattagagctttgctgtctctctgatctttcttggccctatttgggggtgacttccaggatgacgcccttgctcctcctccacccccaaccctggcaggtcttcccatgtgtcctctgtagcagtctcagccacaccgtgcagtggaccactgcattggaggcatcctacctcttcttaaggacatggtcccttcaaggaccctggatgctgacctgtctcctcgtgcc

SEQ ID NO: 147754 - DNA, 438 bp, Homo sapiens
acatgatgacagcagcagagagagatgagactggataggttgcaagaactagatcaaggagagcccttctgcccatgattaggtttagatttcttccactggtggtatagagaatctcctgaattagttaagcaggaaattgatgggtgtggttttccagttcaaatgagtctgtatcttagagggaatgatccagttagaaactatttgaggacctttttgctaccatcgaagtttatgataatatctaaaaaccaccatctagcccctgttagacattcctatcactctgtgcatagttgtaagaacagaaaatggaggctgagcacagtggctcatgcctgccatctccacatcttgggaagctgaggcgggaggattgcttgaggccaggaatttgagaccagcctgggcaacatagtgtgacacatctctaca

SEQ ID NO: 147755 - DNA, 1444 bp, Homo sapiens
catatatatacatctggtgattttcaaactttttaaattccaccatgaagatgaaattataggatgtctgggatttccttggaatcccgtggggctgggagtaactataaatgaaaccaagattggccgggaatttgaggcctgccaaggaataggtaacacaacaggggagtgaaagcagggccttggagccagatggtaaaagattgttggcttttcccagcccatggggctctcttgccacttggcaggccacttggccagtaagtggcatgaaagcccgcccacccagggggccacgcaccagtgcatgtggctgtgttcccaaactttttggacaataaaatctgaatttcacatacttttcttatgtcattagatattacccttttacatcttttcactatttaaaaatgtaaaaatcattcttaacatttgggctgtgcaaaaacagctggtgggcccaattttggcctgtatttcacttgccaacccagatttatacttttgtatcatatttgacattttccattaaaagttatataacactacttttttgtactcgttacttttttaaaaaaactttcctacaaaggaaaatacattattttttaacaataaaagcccaaaatacatacacaaaaatgttaccccattaattatgggaattacttcaaggtaattccttattttgaaatatctttcccaatattttctcttatatcgctttttgaagacgcataacatgatcccaaataaacagttgaataaacaccaccctcctctcccctcctgcccagaaacccacccatctggagctgcatctcccaggaaaggagactctagagggaaccgccttcttgcatttctctagcctggattcccatgggaaagatgtgtatcttcatgctgagctttgaagattcttacagaataaaaattcttaccatatccttctgtcttaatagcacgttttaaagtctctagggagaagagatttctgtaagcactagtttccaaagaataaaaaaaaaaaatcacttctcaaaactcaaatggtatttcccatcacccccacaccatccagatttgttcagctttcttgaaaataaattatctaaatttttaaaaatattttcctaaaactctaaacagaagtaacgtcaaagggatcaatagcctcacttcttatgaaagctaaaactctacccctttatcaaaagctaaaactctacccctttatcagtaagtaagtgaaaatatctttgcaactctgaaaaaccatgctgggacattaatttctaaatacttaaatggcggccaggtgcagtccctcacacctgtaatcccagcacttggggaggtcgaggccagagattgcttgagcgagcccaggagttcaagaccagcctaggcaatatagcaagacctcgtcgctacaaaa

SEQ ID NO: 147756 - DNA, 356 bp, Homo sapiens
ggcacgagggaaaccctgtcagctgcacctacagaacctctccaaaatctgaacggttctccccgtccactgcccccaccctgctccagcccccttcccctcccctctggacatcccagagcctcctccctggcctccctgctcccatccctgccccccaatcatatcccacaaaggggatatgactcactcacttaaccggcaattctggagggtcttaaaacctggctgcctcaagaggctttaaaatgttatcagatgggggccaggtacagtggctcatgctggttccccacttgcagccagagggagctggtgaccacctgagtcaggtcagggccctcccctggctgcag

SEQ ID NO: 147757 - DNA, 272 bp, Homo sapiens
aaaaaaccaaagtgaaacactaaaaattccctatagatatattccaggraatattttaattgggctgattttaattaggctgtatcattgatgaattacagcatttaaagttcaaaatcagtaacttttaatctagggaattggaaaatattaagttgcaaagcaaaaaaaggtattttcttgaaaatactatttaatgtttaactagactatagggaggtccctaaggttgtttgccccgaagtggggttgggtttggaggctggtcccca

SEQ ID NO: 147758 - DNA, 1369 bp, Homo sapiens
aaaaaaccaaaagtgaaacactaaaaattccctatagatatattccaggaaatattttaattgggctgattttaattaggctgtatcattgatgattactggaatcgattttatgtcttttgtattttaatcacttgagttaatcaaccactggcaaatcccaccttgacaaagattaggattgtaaaaaacagatactgtggtagatttctagaaattcattcacatttaagacttcctaaaatggaataatagccttttgtttttcatgagcatattcgcacccctatatgaattacaggcatttaaagttcaaaatcagtaacttttaatctaggaaattggaaaataattaagttgcaaagcaaaaaaaggtattttcttggaaaatactatttaatgtttaactagactatagggtagttccttaagggttggtttggacctggaagtgggagttgggggtttgggaagctgggtgcccaggttgggtggtgggagtggtgtaggttttggttatggaaagttcctcctaccacctacctggtggtggagtggacacccaacatcccaggatgttcacagctctcccagagcttagtcagaaggagaaatccaaattgggtgtttaaacacccatttggcatattggacttgtcagtaccctttaacctcaatttaatataacaaggaaatcgtaaaatacttattaacctatcttagagtaaatgagtgtctggttttgagagttgttttttaactgaaagattatttctagatggggtagtgctttgtgctggtttctgcttccatatatttcccccagtcattttaattaggagaagatacccctagggtagaacctaaggcctttcccctttcttgggcccaaagtcctttaccccctatttaaccccccttggaatatttcgggactggctccacggttccatattataggggggccccagatttggtaatatagggatttcttccctaaccatggatggaaattaattctggtcccaagcccagccatggtgggcttccatattaagtagtaaccagaagtctggaacaattgggatgaaatttggacttcccaaggacaggcttaaactttttcaacggcaatttttaaaaactacactacactgttattgggttaatctggaccaaaatgtccctcaaagagtactttatttttatttaaagcatctgtttaattccaccctttaataattttggcaaagaagggtatgtgtgtattttaatatagccctgacctggaatttatatgtttttagctttagtatttaacctttttggaacaaataaaccttttttaaaacaagtttaaaaaaaaaaa

SEQ ID NO: 147759 - DNA, 322 bp, Homo sapiens
gaacggaacgcccgtatcatgaacaaaaataagtacatctgcgaggacaacagcgcacaggcctcaggcggcccctcccacaggcccagctcagaccagattacattcaacatcttgatgtcaggaaatggctacgtctggaggccaccgggacccccccgtgaagacaggacgcctcctccgagaggaggaccgatgccagggagcagtctcccagagcgcagtcccactggagcccacgtgtgcacctgcagcctctacactgtgactgtgtcaaggcaacatggcccagagctcacctgcaggctgggtcgatgcccag

SEQ ID NO: 147760 - DNA, 1761 bp, Homo sapiens
  misc_feature (1)...(1761): n = a,t,c or g
gaccatcagcctccccattttagctgactttccagggtcgttggcaaattttttgttctgtcttttccttgactaattgtagaactttgtgtgaggactttggttatccaaaatcacagaaatgaaccgttttgcagctgcgcagtctaaagggcaggccagggtctggaagcagggcccacgtggcggtccgctggcaggctggtcctggggagcattctgcggacccggtcacgggcttggttagtcatgcgtacatgtgtgccttggggtgctctgcactccacggcccttctcagccacacttcccaccccagggggtgcccccaggctgatctcatttctgatgttgagggctgtttggctctgtctgtatagcttgtaacaggagccttgggctaaggggctggggaaggaaaaccgagctggcattccgttctctggactttttatgcctgccatacctgctaaatgctcctcgaggtgcaggagcaggttgctgaagccagtggcttgccccgtggccctcctttcccagcactattcatgtgttcaagttttcccggactctgcccctacatctcagctgaatctccaggggagggttgcagagcattcgtgggagaccacttttcttgccttcggccttttaaatgctgactcacctccttttcgggaggagggcgttcctgtttttcacgggggggttccggtggccttccagacgttagccattttcctggacattcaagatgttgaatantgtaatctggtctgagctgggcctgtgggaggggccgcctgaggcctgtggcgctgttgtcctcgcagatgtacttatttttgttcatgatacgggcgttccgttccttaaagatgtatatattttcttactgtacataaagatgttccttaagtcgtacagaaggtgggcgcggcaaagggccttcgtgcagtgttgtttcagattgcccctgggggatcttctgtgtctttcagcgcccagccctgcgtgtttcctgggtgaagcagttttcacattcagtgttcttccagatgagcaataacgatgtattccgcttctgaacaggatcccatgccagtgtgggaacaccttgcccaattcttagttcagaagtgggcttgttatggacctgttcaggggtcacatgaggtctcgccagtttcctgggtcctcttcagaggcccagaaagttctaagttctgagtccccggccagggtcccttaaccacctcggcacagaggctgttggccaagtgtaaagggcctgcccccctgtgtgggggtttaaagtaaaactggaaaatgaagaacaattggaccgtgcctggctccctcccagaaggtcctgccacactccccaccttcacatgcccgttgaactcctccacagtcctaaagaccttccagggcccgggaccctttgtcccagccctgccacagtagagtgaggcctgccctctccccgcccaggcattgggatccccatttagaaacgggcattccaccttacagaaggtacctttttaactgcctcagtttttgacttattttaaatagtttgctgaaaactcctgataacacttgctacatatcatgttttaattgcttgtacagttaaccttttaattttatttagtaaagtgtatcaaagtaggacttttttttttttgtaaatacggtggttttattaaataaaagtccaatgtaaaattaaaaaaaagaaaaaaccaaaaaag

SEQ ID NO: 147761 - DNA, 2191 bp, Homo sapiens
ttttttttttttcggttgtctcaatagataactttatttgaaatggaaaatgcattttggaaattatggaaaataaatcacatcctcccccaaaatcatcctaagagacatatttacacaagttctgaccatgctaaaaaattcatgaattgtgatggtgtataaagcatttggtacatgatgatacttgctttccagaagctggcatttgcatattataaaacgttaagaagaaggctgacctcggaatgtaacagacaatagttttatgtttcttctcaatatacagtgacctggaaggactccctgttgttaaaacctgcttccccactgctcagcctgccatcagccatccagctgcagagcagtgggagagtaggtctcaccagtttttgtgcagatgcttctaacccagagtccttctgcttacttcattggacaatattgccctttctaagaaaacccttttagatcctgtactccacttagcaaatgccctgccagcaaagtcacagatgacttttttacccaatcttaggtaaatctggattatctgcccaaccgtgcaaggtcaataagccacccttgaaaactgtgtcaagatttgaggaaacaggtcttaagaacctatccaacacatgattccataaccaatacatcttaggttgttttaggcaaataggtgtatctcttgaatcactgatggattcaatatcaagatctataattttcacgtttaaaattttactctgccgaggacattttattggtaaagcaaaaaccagttagtttgacacacacgaaaaagaaaccaaatgttcacagtcctatcttcgtaggattctgtgctataaaattgctccaggttcaagtcttagaccactcttctaaggctgctactgaatataatattaacactggagccaagctaaaactacatgacttttcccctagggacagaaaacaagggatgtgtttgaactcatacacttgcagcaaactttactgtcagataataaaattagggctttctcttaaagggcttctttaagagaaatacagagtgtttggtatatgagagaaaaaaagttaaaacaggactttcaacttaatccagacttcctaacagtgtttacatgtgagggaaactcctttaagtaatgcgtagtgttttatttttaccatcattggagacaaaaaaaacaaaaacataaacatctgaagtgaaattataaagatggcttgatttctacattagagaatcccagcttgctcaatgaggaaaatgttcattttaaaagggccccttatagacatttgctctttgacgtcagcactccccatagagcacacccagatctaaatgggatttccactaaggaaagtctgtttaagaaacttcatcatgatgtttagcctgtcccaggaattcattgttctcaggggaatgacatgaggaggcaaaggaaaagggaacactcaggtgaggggcaaggaggacaggcatctcccagatgctgggggaaggttacacattttgtccttccttcctttgtcccaacagttattgagctcactgtgtatgaggcttggtgccaacacaagttcaaggacaaaagttcagtttccagatggaacattactcttaattttccaactttttacattttatgtttatttaaggagcgggtcttctattggatctgccctttcggttgaaaaatgcattttttacctttttccatgaagctgatttgtcaggcttcaaaatatcttaggtggttttgtatcattttcttacaggtagaatagagccactgggacattaaatgatgtacatttatattttgttttgtttagtcttattgagcgtgtttgcttttttgctctggaaaaattattaataataatttcaaaggtgtcaaaacaataaaagccattctacttctaatttcttagatttcacattaaatgctaagaggggttcagaatagaaaatgataaaggtcaacataaatatcacagcagactaaggaacaagggctacagaaagtcaagaaaccattactctggggccgggtgtggtggctcacacctgtaatcctagcactttgggaggccaaggcaggtggatcacctgaggtcagggtgagggatgaggagacgcctaatgccagtataggagcatatt

SEQ ID NO: 147762 - DNA, 470 bp, Homo sapiens
acttgtggagcgccagctctgcccaagacgccacctgggcggacagccaggagctctccatggccaggctgcctcacgtgcgcaagtgcgtggtggtggtcttgctgctgcaggggctgtccctgctcgagctgcttgacttcccaccgctcttctgggtcctggatgcccatgccatctggcacatcagcaccatccctgtccacgtcctctttttcagctttctggaagatgacagcctgtacctgctgaaggaatcagaggacaagttcaagctggttgaagcagactggatttttgctctgcccctgaccccttgtccctctttgagggaggggagctatgctaggactccaacctcagggactcgggtggcctgcgctagcttcttttgatactgaaaacttttaaggtgggagggtggcaagggatgtgcttaataaatcaattccaaacctcaaaaaaaaaaa

SEQ ID NO: 147763 - DNA, 876 bp, Homo sapiens
  misc_feature (1)...(876): n = a,t,c or g
ggaacgtgtgtgcgcgtgctggtgggcatgtgagatgagtgactgccggtgaatgtgtccacagttgagaggttggagcaggatgagggaatcctgtcaccatcaataatcacttgtggagcgccagctctgcccaagacgccacctgggcggacagccaggagctctccatggccaggctgcctgtgtgcatgttccctgtctggtgcccctttgcccgcctcctgcaaacctcacagggtccccacacaacagtgccctccagaagcagcccctcggaggcatgaggaaggaaaatggggatggctggggctctctccatcctccttttctccttgcctttcgcatgggctgggccttcccctccaaaacctccattcccctgctgccagcccctttgccatagcctgattttggggaggaggaaggggcgatttgagggagaaggggaaaaagccttatggcctgggtcctggtttccttcccctttcccagagggtcttacctgttcccagggtggcccccagggcaagccaggggcccaaacctatggcctgcgccccggtaaaggtgacccctgcccatttacccagcagccctggcatgttcctgccccacaggaatagaatggagggagctccagaaactttccatcccaaaggcagtctccggtggttgaagcagactggatttttgctctgcccctgacccacttgtnccctctttgagggaggggagctatgctaggactccaacctcagggactcgggtggcctgcgctagcttcttttgatactgaaaacttttaaggtgggagggtggcaagggatgtgcttaataaatcaattccaagcctcaaaaaaaaaaaaaaaaaaa

SEQ ID NO: 147764 - DNA, 618 bp, Homo sapiens; identical to SEQ ID NO: 133557

SEQ ID NO: 147765 - DNA, 824 bp, Homo sapiens
atggcggtcgtggcgccccgaaccctcctcctgctactctcgggggccctggccctgacccagacctgggcgggctcccactccatgaggtatttctccacatccgtgtcccggcccggcagtggagagccccgcttcatcgcagtgggctacgtggacgacacgcagttcgtgcggttcgacagcgacgccgcgagccagaggatggagccgcgggcgccgtggatggagcaggaggagccggagtattgggaccggcagacagagatctccaagaccaacgcacagattgacctagagagcctgcggatcgcgctccgctactacaaccagagcgaggacgacccccccccaagacacatatgacccaccaccccatctctgaccatgaggccaccctgaggtgctgggccctgagcttctaccctgcggagatcacactgacctggcagcgggatggggaggaccagacccaggacacggagctcgtggagaccaggcctgcaggggatggaaccttccagaagtgggcgtctgtggtggtgccttctggacaggagcagagatacacctgccatgtgcagcatgagggtctgcccaagcccctcaccctgagatgggagccgtcttcccagcccaccatccccatcgtgggcatccttgctggcctggttctctttggagctgtgatcgctggagctgtggtcgctgctgtgatgtggaggaggaagagctcagatagaaaaggagggagctactctcaggctgcaagcagtgacagtgcccagggctctgatgtgtctctcacagcttgtaaagtgtga

SEQ ID NO: 147766 - DNA, 1598 bp, Homo sapiens
atggccgtcatggcgccccgaaccctcctcctgctactctcgggggccctggccctgacccagacctgggcgggctcccactccatgaggtatttcttcacatccgtgtcccggcccggccgcggggagccccgcttcatcgccgtgggctacgtggacgacacgcagttcgtgcggttcgacagcgacgccgcgagccagaggatggagccgcgggcgccgtggatagagcaggaggggccggagtattgggaccaggagacacggaatgtgaaggcccagtcacagactgaccgagagaacctgcggatcgcgcttccgctaacttacaaccagagcgaggccggttcttcacaccctccagatgatgtatggcttgggacgtgggggttcggacggggcgctttccttccgcgggttaccaccagttacggcttacgacggaaaggataacatcgccttgaacgaggacctgcgctcttggaccgcggcggacatggcggctcagatcacccagcgcaagtgggagactccgcccatgaggcggagcagtggagagcctacctggagggccggtgcgtggagtgggctccgcagatacctggagaacgggaaggagacgctgcagcgcacggaccccccccaagacacatatgacccaccaccccatctctgaccatgaggccaccctgaggtgcatgggccctgagcttctaccctgcggagatcacactgacctggcagcgggatggggaggaccagacccaagtacacgaagctcgtgcagaccaggcctgcaggggatggaaccttcccacaagggggccagctgtgtgggacctttgggagaggagcagagatacacctgccaatgtgcaacatgagaggtctgcccaaagccctccaccatgagtatggtagccgtcttcccagcccacccatcccccatcgtggggcatccattgcctggccctggttctcctttggaagctgtgatcactggaagctgtggtcgctgcctgtgaatgtggaagaaggaagagctcagatagaaaaaggagggagttacactccaggctgccaagccagtgaccagtgcccagggctctgatgtgtctctcacagcttgtaaaagtgtgagacagctgccttgtgtgggactgagaggcaagagttgtttcctgcccttccctttggtggacttggaagaaccctggactttgtttcctgccaaaggcaccctgcatgtgtctgtgttcatgtaggcataatgtgaggaaggtggggagagcacccccaccccccatgtccaccatgaccctctttccccggttgagccgtggctccctctccaatcatctttcctgttccagagaggtggggctgaaggtgtctccatctctgtctcaacttcatggtgcactggagctgtaaattcttcccttccctaattaaaaattagaacctgagtataaaatttaacttttctccaaatcctttgccatgaagagggttgatgaggtaaattaaaggagaagattcctaaaaatttgagagacaaaataaatggaacacatgagaaccttccaaaaaaaaaa

SEQ ID NO: 147767 - DNA, 1816 bp, Homo sapiens; identical to SEQ ID NO: 136557

SEQ ID NO: 147768 - DNA, 1578 bp, Homo sapiens
cccacgcgtccgcccacgcgtccggtttctgagaatttaaaaatggggagtgcactactatccagatttgatttggtctttatcctgttagatactccaaatgagcatcatgatcacttactctctgaacatgtgattgcaataagagctggaaagcagagaaccattagcagtgccacagtagctcgtatgaatagtcaagattcaaatacttccgtacttgaagtagtttctgagaagccattatcagaaagactaaaggtggttcctggagaaacaatagatcccattccccaccagctattgagaaagtacattggctatgctcggcagtatgtgtacccaaggctatccacagaagctgctccgagttcttcaagatttttaccttgagctccggaaacagagccagaggttaaatagctcaccaatcacctaccagggcagctggaaatctttgattcgtctgacagaggcacgagcaaggttggaatttgagatgagggaagccaaccaaaagaagacgctgaggatatagtggaaatttatgaaaatatagcatgctaggaacttactctgatgaatttgggaacctagattttgagcgatcccagcatggttctggaatgagcaacaggtcaacagcgaaaagatttatttctgctctcaacaacgttgctgaaagaacttataataatatatttcaatttcatcaacttcggcagattgccaaagaactaaacattcaggttgctgattttgaaaattttattggatcactaaatgacccagggttacctcttgaaaaaaggcccaaaagtttacccagcttcaaactatgtaaaagggacttcacccaagttagggcctcctgggtttattgcaagattaaagccatctcagtgaagagtagtgcgtgcacgcacagacagacagacacacacacacacacacacacacacacacacacacacacacacacacagtcaaatactgttctctgaaaaatgatgtcccaaaagtattataataggaaaaaagcgattaaatataataaactaatttaagaagtgataaagtctccagatgcagtagctcacactgtaatgcacagtgactcaggaggctgaggtgagaggattccttgaggccagggttcgagaccaaccttgggcaacatggcaagaccccatttcttaaattagtttattatatttaatgcttttttcctattataatacttttgggacatcatttttcagagaacagtatttgactgtgtgtgtgtgtgtgtgtgtgtgtgtgtgtgtgtctgtctgtctgtgcgtgcacgcataatcttcactgagatggctttaatctgcaataaacccaggaggccctaacttggtgaagtccttttacatagtttgaagctggtaaacttttgggccttttttcaacgaggtaaccctggtcatttagtgatccaataaaattttcaaaatcagcaacctgaatgtttagttctttggcaatctgccgaagttgatgaaattgaaatatattattataagttctttcagcaacgttggtcga

SEQ ID NO: 147769 - DNA, 426 bp, Homo sapiens
gggagccgcacggtcccctctccttccccatcctctgggctggcctctccgggttcccccacccacaggagccttgggccgaccactcccccgatggcctcagccacggaggaccccgttctggagcgttatttcaaaggccacaaagctgcgatcacctccttggacctcagccccaacggcaagcaacttgctactgcttcttgggatacctttcttatgctatggaatttcaagccacatgctagagcttacagatatgatggtcacaaggatgttgtaaccagcgtgcagttttctccatatggatacttaatggctgctggcttagagacttatccgtgagactctggattcctgtttaataggaatattcttagaatttaaatgtctatcatattctagtccaaatgtaaactttttatc

SEQ ID NO: 147770 - DNA, 1631 bp, Homo sapiens
gacatggagtctcgctctgtcacccagcctggagtgcagtggtgctatcttggctgactgcaacctccgcctcccaggttctagcgattctcctgcctcagcctccccggtagctgggattacaggtgtgtgccaccgcacccggctaatttttttatttttagtagagacggggtctcacaccatgttggccaggctggtctcgaactcctggtctcaagtgatccgcccgcctcggcctcccaaagtgctgggattacaggcttgagccaccatgcccggccagacttacttttttgttaacggtctttgaaccttttcacggcacacatgtaaggccgcctgtgacatgtggtaccctggcctccaactggacaccaactgcatttataagtttagccgaaaatacaaaagttctgaaagtagccttaaaagaagtgccctttggctttgacatagcaatatcaaaagcaagtgggactgtgcaaatcagagccatgagttttatgaaaactactttcctttcaccatcatttgttagagaatgccacacccatgatcatgtaacattattacaatcatgaaatattactacattcgtgattaacattacccaaaaggcacatcttcaaatgttgaatttaagaaaatcccaaaaatcaaaacagtagagaatacattaaaaatcaagcatttaatttgtaaaccttaatgaaataacagcctactccagtttcttcaaaggtttgggagctttttataagagtggtcaggaagggcaaaaaaacaacatggaagacaggatttggaaacaaggccaaaatttaaaagacttaaccttttttttcttttaaatgagccacagaagggctcttttataatgttgacgcaaatcaacatttatattatagaaatgcactcagaagtaacagacacacaaggttaaaacctgattcttcccactaagttctggaaatttattctaacataatggtgcctttctgtacaaagaactgtaccatatcataaatttactgctagtaaactttaagccaccagaaatctttcagctgtgacaagcacttgattgtaatgacagatttcagagtctgaatactgaaaaatatatatatccaataaaaaatttttgaagggggaataaaagcacataaatggcagcagaggaattgatgttctaagcctgttttattacatgggacatcacactacccttaatttcactgaaggtatctgaaatgggtgagatgaaatcaataggattttctgctaccattgtaacagttctatatgtagttacaaagggtgttattcctagtgatgatgactcctttcatgggattcgacttaaaagttagatcctggccctttcaaagtttgatcctcaattcaaaatgagtccgtcttaaaagcctggctcatatggtcccattaagggaggctaacaatggtaatctataatacccaaacttgaagaataaagtctttatggataaaaaggaataacccaaaatatttgggctgttgaagtataagggcctgttgtaggacaatccctcctacttcctaatcccccccatacaatggcttaagagagcctcgtgccaagaatg

SEQ ID NO: 147771 - DNA, 776 bp, Homo sapiens
ttttttattttatttttcttgagacagtctcactctgttgcctaggctggagtgcagtggcacaatctcgactcactgcaacctctgcctcctgggttcaagcagttctcccaagtctcccaagtagctgggattacaggcgcatgccaccacgcccagctaatttttatatttttagtagagacggggtttcgccacgttggccaggctggtcttgaactcctgacctcaggtgatccacccgcctcgacctcccaaagtgctgggattacaggcgtgagccacggggcccagtcatgtccacttctttatatagaatttcccttatccattttagcagcaacatagagttccacatagaatttacactgttctctgcagtctcctaacttctgtttctgtactctttcaatagtgccttgcagctttttagttctctattcctcaggtttgtttcctataaaatggcaatacctactctgcctatttcacacttgtgaggataaaatgagataatatgaaaacatttggaaaagttccaagtaagacagaaatgtaaggtgtgattaagcagattattactatcaattatatgaagcataattttgattcccttatgaaatgaatttctaatgtttatataatgttaacaggtttttttagagcctgtgagttgttttctctctccgcctatgcttcttcacccctccccttcctcaaccccatagactccacactgttaaaagtattcttgaaacagaaattctaaaactcac

SEQ ID NO: 147772 - DNA, 469 bp, Homo sapiens; identical to SEQ ID NO: 100782

SEQ ID NO: 147773 - DNA, 656 bp, Homo sapiens
  misc_feature (1)...(656): n = a,t,c or g
gctaagcagganatggcgtaactcgggaggtgagcttgcagtagccgagatcatgccgtgcactccagctgggcaacagagtgaactcgtctcaaaaaaaaacagacaaccaaaactgagcacaaccatgtagaccctgatgaattatagaacattttagcacctagaacccccttttacttcctaacactttccctgccaatggcaacactatcctcattaaggagaaggttttatttttattttttaacttttattttcaggggtacatgtgcaggtttgttatatcgtaaactcatgtaggccgggcgcgggtggctcacgccctgtaatccccagcactttgggaggcccgaggcgggtggatcttgaggtcaggagatcgagaccatccctggctagcacggtgaaaccccgtctctactaaaaaatacaaaaaaaaattagccgggcgtagtggcgggtgcctgtagtcccagctacttgggaggctgaggcaggagaatggcgtgaacccgggaggcggactttgcagtgaagccgagattgcgccactgcagtccgcagtccggcctgggcgacagcacgggagatccgtctcaaaaaaataaaaaaataaaaataaaataaaataaaataaaatattttcccatgtt

SEQ ID NO: 147774 - DNA, 2554 bp, Homo sapiens
agtgccccttggcctctttacaaaaggagaagttggaaggggattgtgggaggagcccctgggggcctggtctgtcctccaccagaacttggagttgctgccagcagaggatctgtgcctcagctgaagactagctccggaatgtcataggggtgtgactgtgtaggccttctcctcctcctcgtttctgtggcatggcacaggttgcctggctgctcgagccttccccatgttgacatcctccacaagcttgcctttgctctgtctacagcttagtaccccattctggagggcactttctggtgcttggaaggagagaagaaagcaaaagccacatgcctggcatggtcaagccagagacagatccacctgtcccaggaaggaagaagtaaagggggcatgcagggcttttgggggccagattggctcagaaacatgtaggtcaaaagaatagagggggcccagtctataggcttcacaaggagccatggcctgtatttggggcattggggagcataaggcatctgaactggtccagatctcactcttatcttgggccaagccaacgtggagagaagcaacccaaccagactcttggcagcctgccttacagggtagcccaccttatagggtagccctcatatctgccctgtgccggccctctactgccccagctttggtacaggagtgagggagaagctggagcttgcacacccagtggccagaggggctgtcttcccagctcctcctcagggctttcctgtcagtgccaagccagttccccagccaggtttccgtgtgccatttgccagcgtgagggagctctgcgcgtgtgtgagggtgtttgtagaagagggcagtttcctttcaaatggccttaggaagggaaaagagtactccctccagcccctaggtagccttggccagggatgtgggccaagaacagtctgtggagctggccaacttgtggcatccactccaaatagcagagacccagtcacgcctgcttctggtcctccctgccctcagtatttggttttgtacaccaaagatgatctggcccatcttcctcccagaggcacaacagtaacatgttcctctgtcagcctgtgaaggcatgcagggttctgaagccacagactcagtctccccaagtcagcaatctctttcgtctctctctccttcaaacttcatcgcattcatagaagctgcttgcaggggtcgccggggctaaaccagggtgatcggcgaactttaccgtacagtacctcagtctagctgtcagatcaccccttttgctgtagcctctgttgaggtttttatatttgtgatcattggtaattcagtgtcctatgaagtgggcacagctccccacagagggcaagttgtcagcaggtctctgtgcactggtattggggcagggcagtgccctggggggtaagctaggtggctcagggagtggcagaagggccatttttccctctgccaaaaagacttccttggatttgtagatgttgaccccaaagtccctctgtcccccctccctgaagaggattttccctacctggtttcctactgaaaggggaggtaggggtagggaggaaaaaaaggacccatgtgtgatgctgttaagacaagacactgacgctggattatgggagggtcctccctgcaggcccttgtgggctcccttggcaaaggcccccaggctgggaaggagctcccccccactgccccatccctgcccgctttgtggcgggtagagtcagtgacagggaggcagccctccttttgtgtatatagagtgagctgatttgggctcaggaaaacctagtcgcttgttgctctcgtctgtgacatttttgtacactggtttgctactcatggcaagaaacagacaaagccccatgaaaaataaaacaaaacaaaagtcatttcaaacaaagctgttgttctgaaaactcttgctttcttttggtgtccattttgtgctctattttaaagaatctttcatttatattggtgttattgtagtgaagagaatgtgataggctgatctgtaatggtttctgtcaggagcttagcaaatgcctctgcccctcttcccctacccctgtccttcctcagttcccagctgggattggctaatgcactgggccagacccgttcacttttctcccctgaacccccacacagttgcttcccttagaaccagtctttgtacttctccctaaacaagcagcaggccttaggatttttgtccaggcctggttccttgccgtgcccctgtgccccccaccagtttgcctcaccctcttggggcatttttgtaatgtgttttcccctgtccttgtaaaaccttttgattgtaccgaaatggtatcgtgcagtcgcctttggaaataaatggtcattaatttgtgtacttagcattctgaattttagtctcaggtgtttctgttgttgaagatccttgaatgaaaaggaaccctcaccatggggcttactgttataatgtttcttcatttactgttattaaaagatttatgagaaa

SEQ ID NO: 147775 - DNA, 426 bp, Homo sapiens
  misc_feature (1)...(426): n = a,t,c or g
acgaaactaccttatggctggaggtgagacatgctggcggcaatactgctctttactgctctgagatgttggtgtaaagtcaaacataaatctgacctacgtgcacatcgaggcacagcacgttnnnnnnnnnnnnnnnnnnnnnnnnnnnnnnnnnnnnnnnnnnnnnnnnnnnnnnnnnnnnnnnnnnnaccctatagtcctgccatatccgcctcactgagatagtagagatagnnnnnnnnnnnnnnnnnnnnnnnnnnnnnaccagtgcccgcacaggnnnnnnnnnnnnnnnnnnnnnnnnnnnnnnnnnnnnnnnnnnnnnnnnnnnnnnnnnnnnnnnnnnnnnnnnnnnnnnnnnnnnnnnnnnnnnnnnnnnnnnnnnnnnnnnnnnnnnnnnnnnnnnntggcccccttcactcn

SEQ ID NO: 147776 - DNA, 399 bp, Homo sapiens
  misc_feature (1)...(399): n = a,t,c or g
agaaaaccgccttatggctggaggtgagacatgctggcggcaatactgctctttactgcactgagatgtttgtgtaaagtcaaacataaacctggcctacatgcacattgaggcacagcaccttnnnnnnnnnnnnnnnnnnnnnnnnnnnnnnnnnnnnnnnnnnnnnnnnnnnnnnnnnnnnnnnnnnnnnnnnnnnnnnnnnnnnnnnnnnnnnnnnnnnnnnnnnnnnnnnnnnnnnnnnnnnnnnnnnnnnnnnnnnnnnnaccagtgccgatgcgggtcctccgtatgctgagcgccggtcctctgggcccagtgttctttctcttnnnnnnnnnnnnnnnnnnnnnnnnnnnnnnnnnnnnnnnnnnnnnnnnnnnnnnnnnnnnngggggg

SEQ ID NO: 147777 - DNA, 560 bp, Homo sapiens
caaggtttctccccaccgagagagcctgagatatggcctcatgggaagggaaagccctgaccttcccccagcccgacacccataaagggtctgtgctggaagattagtgaaagaggaaggcctctttgcagttgagataagaggaaggcatctgtctcctgcttgtccctgggaatggaatgtcttggtgtaaaacccgagcgtacattctatttactgagataggagaaagccgccttatggctggaggtaagacatgctggcggcaatactgctctttactgcactgagatgtttgggtaaagtcaaacataaatctggcctacgtgcacatcgaggcacagcacctttccttaaacttatttatgacacagagtcctttgctcacatgttttcctgctgaccctctccccaccattaaccctacagtcctgccacatccccctcaccaagatagtagagatagtgatcaataaatactgagggaactcagagaccagagccggtgcgggtcctccatatgctgagcgcctgtcctctgggcccactgttctttctct

SEQ ID NO: 147778 - DNA, 769 bp, Homo sapiens
tccagctcactgcaacctccacctcccaggtttcaagtgattttcttgcatcggcctcccaactagccgggattacaggtgtgtgccaccacgccctggctaattttgtattttcagtagagaccgggtttcaccatgttggtcaggctggtctcgaactcctgacctcaggtgatccatccacctcggcctcccaaagtgctggaatgacaggcgtgacgactgtaccccggccagtgctgcttatttctgaagctcacttttggagttgcaagaactccctcttcactggggaaaacgtaattgaggcaaatcaaaatcttttggcattaagatttatatctgccatggatttacaaagtctaagaatagtcagaaatcaaacattttttttctaattattcttatccatactccccctgaggacagcttgtatagaacacgttctcccacatgacactggaaagtgcagtttagtgtgagtagtaaagtgaaatagaaagtaaggaaagtgggaaaataccaaattcgcaataattccaaatattatcaccaagtattaatttgtgtaaaataaaccccaagctggtcatttggccacaggtattccacctgtgttgtcactaaactgcatctatgttctggctgttatgctgattgagtgtactcggcaaacgtgggcaagacaggcagggtgaggatgagcctggcaactgataaagctttgaccatgtgggactgaggtgctgctgagactctcatgggccag

SEQ ID NO: 147779 - DNA, 1931 bp, Homo sapiens
ctttatggcgaaggatggagttttgctcttgttgcccaagctggagtgcaatggtgcgatcttcgcttactgcaacctctgcttcctgggttcaagtgattcccctgcctcagcctcccgagtagcagggattacagatggagcctcgctctgtcacccaggctggagtgcagtggcacaatctcgggtcactgcaacctccgccccccagcttcaagcgattctcctgtctcagcctcccgagtagctaggattacaggtgcacgccaccaggcctggcgtaatttttatatttttagtagagatgggattttgccttgttggccaggctggtctcaaactcctgaccttcaggtgacccatccaccttgggcctccccaaagtgctgggactacaaggtgtgagccaccatgccctggtcccccacttgttgattttgcagaaaagatagctgtgttacaacctgtcctaaggtcaggtatgaatacttgtgcttctttcttggctccccaagccagagggcattcctatgcccaggtgagagagcacggagtgttactttggcagcacagtcagttaccagaggtaggaaaagcaaaggccaggcaggacatgaggggcccttgcactggctggttctccctgccttcaccaccctccaggtgaatgactgggtgaataatgattgactgaggaggtaatgaataatttatggacactgatagacctcagtctcctcatctgaaagatgagtggttggagaagtttaatggttttcaaatgctttttttttttcagtcttcaaataagtgtttacgtaggaagcaccatatctgaaacaggtgacagtgggaccagtctgaatgaaatgagggttgggcaggcctgagctccaaaaccttctgatttgccccaagccctccttgtctttgctttggattatcttccacacaaattgggggaacttggacaaggtggtcatggaggtccctgaaagctcaaagactttctcattcccaggattccccatgttcatatgccagcatggatggggggtgctctgtagtcaagccagggtcctttggggggcttaagggatggagcccaggaaatggctctgggactcagcgggtgtccagagtctcatcaagccagggtttctttacttgggactgagtggctggtgcctgcacactgagttttgcaggcttactctcacagagtgagcttcctgcaggccccccactgcaacccctttccttcctggagctgtgtgctgactggtgcgtgagcaccccaggccctctccccatgctgctgatggtcagctttctctgcacgctcgtggttgccacagtcaacgctgataaaattgctgatgcagattgcctgcccagctgcgagtgctggcacgggaccagcagcccagacggtcactggaagtggttgggctgattattggcatcatctccattgtcctactcggttcttaaaggcatatggacttgcctcactcctacagcaaatgacggccatgggcaaagaggggcaacagaccccaccccgaaagacactccctcatctggttgaccttggcagggttaagggaaaaagatgtgaatgacctaggagctgagagccttagtggttcctgcccagagctgccagagtctttgttggccctcagggtgggaccctctcacatctctgtcagcttttcacagacaccaacctgttatgattcatttcacctgtcctgagcactagcaagaaaaattcgctgtagcttgtgatgtattattctggatttctcaactcattcatttgttcattcattcactataccattactgtctattataaggggggcacaatggtaggtgctgggaataaaaacgatgtttaacgtttaaaaaaaaaaaaaaaaaaa

SEQ ID NO: 147780 - DNA, 411 bp, Homo sapiens
actgttggcactagtggcaggagaagctgctggtatcatggaaaacataagtgacgatgtgattgttggccgatgcctggccattctcaaagggatttttggtagcagtgcagtacctcagcccaaagaaactgtggtgtctcgttggcgtgctgatccctgggctcggggctcttattcctgcacagcagtccccaagcatgtgagacagatgcattctaagggaagaggcccatgtgcctgtttctgccatgtaaggaaggctcttctagcaatactagatcccactgagaaaatccaccctggcatctgggctcctgatcagctgatggagctcctgatttgacaaaggagcttgcctcctttgaatgacctagagcacagggaggaacttgtccattagtttggaat

SEQ ID NO: 147781 - DNA, 2433 bp, Homo sapiens
atggatgaaagcttggccaacctctcagaagatgagtattattcagaagaagagagaaatgccaaagcagagaaggaaaagaagcttcccccaccaccccctcaagccccacctgaggaagaaaatgaaagtgagcctgaagaaccatcggggcaagcaggaggacttcaagacgacagttctggagggtatggagacggccaagcatcaggtgtggagggcgcagctttccagagccgacttcctcatgaccggatgacttctcaagaagcagcctgttttccagatattatcagtggaccacaacagacccagaaggtttttcttttcattagaaaccgcacactgcagttgtggttggataatccaaagattcagctgacatttgaggctactctccaacaattagaagcaccttataacagtgatactgtgcttgtccaccgagttcacagttatttagagcgtcatggtcttatcaacttcggcatctataagaggataaaacccctaccaactaaaaagacaggaaaggtaattattataggctctggggtctcaggcttggcagcagctcgacagttacaaagttttggaatggatgtcacacttttggaagccagggatcgtgtgggtggacgagttgccacatttcgcaaaggaaactatgtagctgatcttggagccatggtggtaacaggtcttggagggaatcctatggctgtggtcagcaaacaagtaaatatggaactggccaagatcaagcaaaaatgcccactttatgaagccaacggacaagctgttcctaaagagaaagatgaaatggtagagcaagagtttaaccggttgctagaagctacatcttaccttagtcatcaactagacttcaatgtcctcaataataagcctgtgtcccttggccaggcattggaagttgtcattcagttacaagagaagcatgtcaaagatgagcagattgaacattggaagaagatagtgaaaactcaggaagaattgaaagaacttcttaataagatggtaaatttgaaagagaaaattaaagaactccatcagcaatacaaagaagcatctgaagtaaagccacccagagatattactgccgagttcttagtgaaaagcaaacacagggatctgaccgccctatgcaaggaatatgatgaattagctgaaacacaaggaaagctagaagaaaaacttcaggagttggaagcgaatcccccaagtgatgtatatctctcatcaagagacagacaaatacttgattggcattttgcaaatcttgaatttgctaatgccacacctctctcaactctctcccttaagcactgggatcaggatgatgactttgagttcactggcagccacctgacagtaaggaatggctactcgtgtgtgcctgtggctttagcagaaggcctagacattaaactgaatacagcagtgcgacaggttcgctacacggcttcaggatgtgaagtgatagctgtgaatacccgctccacgagtcaaacctttatttataaatgcgacgcagttctctgtacccttcccctgggtgtgctgaagcagcagccaccagccgttcagtttgtgccacctctccctgagtggaaaacatctgcagtccaaaggatgggatttggcaaccttaacaaggtggtgttgtgttttgatcgggtgttctgggatccaagtgtcaatttgttcgggcatgttggcagtacgactgccagcaggggtgagctcttcctcttctggaacctctataaagctccaatactgttggcactagtggcaggagaagctgctggtatcatggaaaacataagtgacgatgtgattgttggccgatgcctggccattctcaaagggatttttggtagcagtgcagtacctcagcccaaagaaactgtggtgtctcgttggcgtgctgatccctgggctcggggctcttattcctatgttgctgcaggatcatctggaaatgactatgatttaatggctcagccaatcactcctggcccctcgattccaggtgccccacagccgattccacgactcttctttgcgggagaacatacgatccgtaactacccagccacagtgcatggtgctctgctgagtgggctgcgagaagcgggaagaattgcagaccagtttttgggggccatgtatacgctgcctcgccaggccacaccaggtgttcctgcacagcagtccccaagcataagacagatgatacacagggatgacattgacaaaactggcatcacagactcgcacagagtatacggaaacgagggagctttattggttacatattgtactgcagagccaacagagagcattcgcgccagaggatacatgcagacaggcagctccaatgatacacatgcacccaaggagccctga

SEQ ID NO: 147782 - DNA, 1063 bp, Homo sapiens
cactcctggcccctcgattccaggtgccccacagattgtagtcattccatcttcggaccctttcagataaccaagagcagagttaaaaggatgggcagcatttctgatttctcataatttggttttgtaaatctaggcagtctacattcagaatggaggagtccagagtgataagtcaaataacatttttgcttagtcaggttttgtccctaagaaacgaaagcgatgtttaattgcacttccattttgtaatggctcataggattgctgtaaggtctcaattactaggggcttccagggcatttctgagaaataaccctgggtccttgtctagacccttatgccagaccccactccaaagagcggtaagaattccttagtgtcatagcccaagacctgctgagctgcgaggctttaagtgtccctggattcaccaaatgtcctgtggcttcaggggtagcgaggctccctcccagaaggtagtttatacatgaggggaaggacgctttacaacggggtattctaaactgatgagaacacatgttaaggcattcactttagggacttaggcctagggtaggagttttattgtctcatttctacttgtcaattctgggaaagtgcctactgataagggagactcttcgatagaatgatgaatagtaattgggggggtcagcctttaaaaaggtcaacagcaatttaagtacttagcaatttaagtacaagaataaaggtatatgtgcagcctgccaattttctctttttcccctaaaatagccgattccacgactcttctttgcgggagaacatacgatccgtaactacccagccacagtgcatggtgctctgctgagtgggctgcgagaagcgggtaagaattgcagaccagtttttgggggccatgtatacgctgcctcgccaggccacaccaggtgttcctgcacagcagttccccaaggcatgtgagacagatgcattctaaggggaaggaggcccatgtgcctgtttctgccatgttaagggaaggctcttttatgcatactaggatcccactgagaaa

SEQ ID NO: 147783 - DNA, 3054 bp, Homo sapiens
  misc_feature (1)...(3054): n = a,t,c or g
cggcgcgcgggcagcgtgaagcgaggcgaggcaaggcttttcggacccacggagcgacagagcgagcggcccctacggccgtcggcggcccggcggcccgagatgttatctgggaagaaggcggcagccgcggcggcggcggctgcagcggcagcaaccgggacggaggctggccctgggacagcaggcggctccgagaacgggtctgaggtggccgcgcagcccgcgggcctgtcgggcccagccgaggtcgggccgggggcggtgggggagcgcacaccccgcaagaaagagcctccgcgggcctcgccccccgggggcctggcggaaccgccggggtccgcagggcctcaggccggccctactgtcgtgcctgggtctgcgacccccatggaaactggaatagcagagactccggaggggcgtcggaccagccggcgcaagcgggcgaaggtagagtacagagagatggatgaaagcttggccaacctctcagaagatgagtattattcagaagaagagagaaatgccaaagcagagaaggaaaagaagcttcccccaccaccccctcaagccccacctgaggaagaaaatgaaagtgagcctgaagaaccatcgggtgtggagggcgcagctttccagagccgacttcctcatgaccggatgacttctcaagaagcagcctgttttccagatattatcagtggaccacaacagacccagaaggtttttcttttcattagaaaccgcacactgcagttgtggttggataatccaaagattcagctgacatttgaggctactctccaacaattagaagcaccttataacagtgatactgtgcttgtccaccgagttcacagttatttagagcgtcatggtcttatcaacttcggcatctataagaggataaaacccctaccaactaaaaagacaggaaaggtaattattataggctctggggtctcaggcttggcagcagctcgacagttacaaagttttggaatggatgtcacacttttggaagccagggatcgtgtgggtggacgagttgccacatttcgcaaaggaaactatgtagctgatcttggagccatggtggtaacaggtcttggagggaatcctatggctgtggtcagcaaacaagtaaatatggaactggccaagatcaagcaaaaatgcccactttatgaagccaacggacaagctgttcctaaagagaaagatgaaatggtagagcaagagtttaaccggttgctagaagctacatcttaccttagtcatcaactagacttcaatgtcctcaataataagcctgtgtcccttggccaggcattggaagttgtcattcagttacaagagaagcatgtcaaagatgagcagattgaacattggaagaagatagtgaaaactcaggaagaattgaaagaacttcttaataagatggtaaatttgaaagagaaaattaaagaactccatcagcaatacaaagaagcatctgaagtaaagccacccagagatattactgccgagttcttagtgaaaagcaaacacagggatctgaccgccctatgcaaggaatatgatgaattagctgaaacacaaggaaagctagaagaaaaacttcaggagttggaagcgaatcccccaagtgatgtatatctctcatcaagagacagacaaatacttgattggcattttgcaaatcttgaatttgctaatgccacacctctctcaactctctcccttaagcactgggatcaggatgatgactttgagttcactggcagccacctgacagtaaggaatggctactcgtgtgtgcctgtggctttagcagaaggcctagacattaaactgaatacagcagtgcgacaggttcgctacacggcttcaggatgtgaagtgatagctgtgaatacccgctccacgagtcaaacctttatttataaatgcgacgcagttctctgtacccttcccctgggtgtgctgaagcagcagccaccagccgttcagtttgtgccacctctccctgagtggaaaacatctgcagtccaaaggatgggatttggcaaccttaacaaggtggtgttgtgttttgatcgggtgttctgggatccaagtgtcaatttgttcgggcatgttggcagtacgactgccagcaggggtgagctcttcctcttctggaacctctataaagctccaatactgttggcactagtggcaggagaagctgctggtatcatggaaaacataagtgacgatgtgattgttggccgatgcctggccattctcaaagggatttttcgtagcaagtgcagtacctcagccccaaagaaactgtggtgtctcgttggcgtgctgatccctggggttcggggttcttaatcctatggttgcgcaaggatcattctggaaaatgactatgatttaatggctcagccatatcactcctgggccccttcgattccaggtgccccacagccgattccacggactcttctttgcggggagaacattacgatccgtaactaccccagccaccagtgcatggtgctcttgctgaagtgggctnccgagaagccgggaaagaaattgccagacccagtttttggggggccatgtataacggttgcctcgccagggccacaccagggtgtttccttgcacagcaagtcccccaagcatgtgagacaagatgcattcctaagggaagaggccccatgtgccctgtttcctgcccatgtaaggaaggctcttctagcaatactagatcccccttagaaaaatccacccctggcatctgggctcctgatcagctgatggagctccctgatttgacaaaaggagcttgcctccttttgaatgacctagagcaccagggaggaacttgtccattagtttggaattgtgttcttcgtaaagactgaggcaagcaagtgctgtggaaataacatcatctttagtccccttgggggggggggtttgttttttttttttttatattttgagaccataaaacttcatataaaattggaaaaaaaaaaaaaaaaa

SEQ ID NO: 147784 - DNA, 447 bp, Homo sapiens
ttcacgcctccatgaatctggcttctctcttttacctgctgcacatcccaagtgtctgtgaggcgatagggctgaggaatctgcagagcctagagcctggagtcacagtgacaattcacacaggtacacaacactgttcatttgtctaacgcacacacacgtacacaaccctgttcattcatcacacacacacacacacacacacacacacacacacacacacacacacagtctcttacaggcacacagaaactcctcctctgctgctcaagcagacaggcctgaaattctactgaaactccagggatgacacgccccgttcacgccctgggtcttctggtcttcagcgcctctcatcctcaccgccggttccattccaaccagggactgtggaagcctccgctgatttctgtggagacgatctactcaccaccgtaaggctacagc

SEQ ID NO: 147785 - DNA, 420 bp, Homo sapiens
  misc_feature (1)...(420): n = a,t,c or g
nnnnnnnnnnnnnnnnnnnnnnnnnnnnnnnnnnnnnnnnnnnnnnnnnnnnnnnngcnnnnnnnnnnnngaaggggcataatttggggatgaggattggatataaggtaaaggatgggacattcttggacttacagatggggggattgcctggctnnnnnnnnnnttcccggccaaaaagaaaccatcagctttccaagggtgaaagagagataaatctgggaaaattatagggactacaggaaacttaatctttttctttgaaaaagcaattgtagcaaaaaaaaagaaaatttcttactgccatctaaaatggacatggacatcttaggggactagaagttaagggcataaattctcccagggatttttaattttagcattgtgattaacaccttctaaaattgccagaacttaaag

SEQ ID NO: 147786 - DNA, 934 bp, Homo sapiens
cacatttgtgacctccattggtatttctattgggcaatgctgtgctagactcaccagaacgtatacatatttttattttttagactgatgtatacagtgcccttgtatacatgtgtatttcctacggcagttaactgaatactctgttaagagggagatcgatcctcaaaaatctggatgttaggcttgacacattaaagcctgaaacagctagtaaatttgatggcatactaataatgaaaagcaattatttattaagttctggcaattttagaaggtgttaatcacaatgctaaaattaaaaatcactgggagaatttatgcccttaacttctagtccagtaagatgtccatgtcaattttagatgacagtaagaaattttctttttttttgctacaattgctttttcaaagaaaaagattaagttccctgaagtccctaataatcttcacagatttaatctctctttcacacttggaaagctgatggtttctttttgaccgggaattcttcttctaggccaggcaataacaccatctgtaagtccaagaaatgtcccatcctttaccttatatccaatcctcatccacaaattatgccccttcttttttttttttgcgatgggagtttcactcttgttggcccaggctgggaatggcaatggtgtgatctcagctcactgcaaccaccaactcccaggtcaactgattctcctgtctcagcctcccgagtagctgggaccacaggcacccaccatcgtgtccagctaattttttgtatttttagtagagactggggtttcaccatgttggccaggctggtcttgaactcctggcctcaagtgatccgcccgcctccgcctcccatagtgttgggattacaggcgtgagccaccatacctggcccatgccccttcttcttttaatataaacc

SEQ ID NO: 147787 - DNA, 835 bp, Homo sapiens
tttttcctttgagacagagccttgctctgtctcccagactggagtgcagtggtgtgatcatggctcactgcagccttggcctcacaggcgcaagagatcctcctacctcagcctcccaagtagctgggactacaggcacctgccaccatgcccagctaatttttcttattttttgtaaagacagagtctcactgtgttgcccaggctggtctcaaactcctggactcaagtgagcctcctgactcagcctagtgtgttgggattacaggcatgagccactgtggcctggcctggatttttcttctttaaaagaaatatttggatattttctggtttttctacaattacggcaactccaaaaggttggaaaataaaattgcaccattcgtaaaggaccatgaccgggaacctttgggaccacggccaggttgctttgaagggcagctttgaagagcagcactccatctgaatgtaacgctttgcatatttgcatatattttttagaaatattcttgtgactgcatacgttaccaccttaattttaccatgtaatagtaccaattctctccttggggatagggactgattctatcctataaatcatttagatcatcttaggacagtgctagtacatagtaggtgcttagtaaatacttgatagtttcaccacagaggatcctaggtccagggctaatttgatattgcttggggctggggaaggaggcatcatcaggtataacaaacacgcctaaacccacactgactttatgactgcaggcataagcatccctacaatgacacaaggctcatgttcttcacaagggaaagtgaatga

SEQ ID NO: 147788 - DNA, 639 bp, Homo sapiens
  misc_feature (1)...(639): n = a,t,c or g
gttaaagagacagggtcttgctttgtcacacagactggagtatagcggtgcgantcacagctcactgcatcctcaaactcctgggctcaagtgatcctcttgcctcagcctccagagaacccgggactacaggcatgagccaccatatctggctaatttttaaattttttgtagagatggggtctcactatgttacccaggctagtctgaaactcctggcctcaagggatcctcccaccttggcctcccaaatcactgggtttacaggtgtgagtcactgcatctggccaagagaaattattttaacttgtgttctaactatataatatcattagagaaggaccatggctgactggcttcttcaccctgcagctgggagaagagtgaggatcactggtgggagggccagaacttccatggctgatagggtttgggctcgcattccccacccaaatnctcatctcgaactgtaattccccacgagtggagggagggaccggtgggtggtgactggattcatgggggcagttttcccccacgtgttnctcataatggtatgtgagtttttcacaagattctgatggtttaaaagtggcaattggccccactttggctctctctccggccaccactgaagaa

SEQ ID NO: 147789 - DNA, 640 bp, Homo sapiens
gtagtgaatgtggaaaagctttcaaccgaaactcatacctgattttgcatcggagaattcacactcgagaaaagccctacaagtgcactaagtgtggcaaggccttcacccgcagctccaccctcactttgcatcacagaatctgatacagagcctcgctctgtcactcaaggctggagtgccagtggcatgatcttagctcactgcaacctccgcctcgcaggttcaagccattctcctgcctcagcctcccgagtagctgggactacaggcgtgcgccactgtgcccagctaatttttttttgtatttttagtagagacaaggtttcaccatgttggccaggctggtctcgaactactgacctcgtgatccgcctgcctcggcctcccaaagtgctgcgattacaggcgtgagccactgcgcccggccaagattgagctccctcttgcaatgtttctcaaattcatcacgattggaacataccgacggaattcattttctgtctgaagcaatgagtgctatacatgaaagttttcctcacatataatattcatcaagtttatttacagtataagctttccgatgctaagggctgagatgtgattaaaggctttgccgtattcatcacattcaggaggc

SEQ ID NO: 147790 - DNA, 1739 bp, Homo sapiens
  misc_feature (1)...(1739): n = a,t,c or g
tttttttttttttgagacagagtctctgttacccaggctggagtgcagtggtgcaatctcggctcactgcaacctctgcctcccagatttaggtgattctcctgcctcagcctcctgagtagctgggactacaggcgcccaccaccacgcccggctaatttttgtatttttagtagagacaggctttcaccacgttggccaggctggtctcaaactcctgacctcaagtgatccgcccacctctgcctcccaaagtgctgagattacaggagtgagccaccgtgcctggccagtcctatcctccccccaaccttttttttttttttgacatggagtctcacgccatcacccaggctggagtgcagtggcgccatcttggctcactgcaacctccgcctcccatgttcaagtgatcctcctgcctcagcctcctgagtagctgggactacaggcgcccgccaccacgcccagctaatttttttgtatttttatagtagagacggggtttcgccatgttagccaggatggtctcgatctcctgaccttgtgatccacccgccttggtctcccaaaagtgctgggattacaggcctgagccactgtgcccagccttatcctcaattttctaagcataaggatttaagagttagtgggaaagcatgactacggtttaaaagaacctggtcagctgaagcagtcccactttggccattccagtacactttcctactctcgcttcatggagaagaccgtctactgacaagagaatccatcccctttgcacacagtggtcacctgacagctcagaggtcaacttcttggttttgaggaaaaattcaaaaggctgcacgtttaaaggagttgttccatttcagtgccccattagcctgtctttcctcagaaatttaccaatctcttgatgtgataagcaccaaactatgaagcttttcccttcctctccccgctgctccgttctgtgaaccgactttttgtctacaatcacactgatttcttcactgtttgctctgaaacttcacgaattccaccgcactggactagdnnggtcagaagtttaccagtctcttgatgtgataagcaccaaactatgaagcttttcccttcctctccccgctgctccgttctgtgaaccgactttttgtctacaatcacactgatttcttcactgtttgctctgaaacttcactttttctgagtgatgtgttctgtcaaataggctaaaataaaatacagtatctgcttacaggtaatatacggaacaataacaagggactgaaggtacaaaacacacacggacattatggtcatatacaatatatagaagtacctaacgttaacaattttatgtaagaagttgcacattttgctatttttttaaagcatttccccacattttttttcatctgtagatcctctgcagttaagattgagcacccccccgcaacttttttttttgatacagagcctcgctctgtcactcaaggctggagtgccagtggcatgatcttagctcactgcaacctccgcctcgcaggttcaagccattctcctgcctcaaagggctttctctctggcatggattctgtgatgcaaagtgagggtggagctgcgggtgaaggccttgccacacttagtgcacttgtagggcttttctcgagtgtgaattctccgatgcaaaatcaggtatgagtttcggttgaaagcttttccacattcactac

SEQ ID NO: 147791 - DNA, 526 bp, Homo sapiens
agcacctgagtaggcccttgacacttgtgtgccctgggatgcctcctggcgcgaatcaggaggttctggaaggactctggctatattctgcaaatgatgctcatgccccttaccgtggctcagcttttcaacactattccctttgacctactggccatcttcctcacagccctcagatatcaacgggcacaaataagaccaactcaatttccacttgaatttacaaccaaaagcctgctgagttgattacagctgggccaatacagtacgaggcaataacaaattagtgtgggttgattctggaattggaaaagcttttgcttgtatggatacagcaaatccagatgtctctgaacaaagcaacaatttaaagcaacgacattttctgtcctttaagcacttaaaatcaggtgtggtgtgttttcaaaggcagaagtctgcattttgagcaaaaggtggttcccagctctaacaaggtaactggttagcatgacattaaagcttgggcaaggcttcaaacttaaaa

SEQ ID NO: 147792 - DNA, 296 bp, Homo sapiens
tctggctatattctgcaaatgtggctcatgccccttaccgtggctcggcgttgtggtgcctgagggacagccggccacctgcccagtactggtcagcttttcaacactattccctttgaccaactcaatttccacttgaatttacaaccaaaagcctgctgagttgattacagctgggccaatacagtacgaggcaataacaaattagtgtgggttgattctggaattggaaaagcttttgcttgtatggatacagcaaatccagatgtctctgaacaaagcaacaatttaaagca

SEQ ID NO: 147793 - DNA, 727 bp, Homo sapiens
acttggcgttgctcggccgtgtctacgatgtgctctccgcgagagacactacgagcttggtccacaatatagcgtgtcgaagatgactcagcggcgtagccatgtatacacgactcggctcaataccccgatatctacgactcggatctggtgcccctatgtccacaactcagcgctgtacccctacattcacgcaactcagctccgtacccctataatccactttactcagtgccgtacccggagggtgacaggacggttctacggagaggatgggctgcccaccccggcactgacccaggtagaagctgcgatcaccagaggcttggaggccaacaaactacagctgcaagagaagcagacattcccgccgtgcaacgcggagtggagctcagccaggggcagccggctctggtgctcccagaagagcccgaaagacgctgatgacacatcaatctacatgttttatcaaaaggtcggcgacaactcaatcgacagctggaaaaacgcgggccgtgtctttaaagacagcgataagttcgacgccaacgatccgatcctgaaagatcagacgcaagaatggtccggttctgcaacctttacatctgacggaaaaatccgtttattctacactgactattccggtaaacattacggcaaacaaagcctgacaacagcgcagaatggggtgaagcctgagggcacaacggagacgaccatgaaatga

SEQ ID NO: 147794 - DNA, 1988 bp, Homo sapiens
atgccgaccccgcgggactgcggccggctgcggagccgggctggcaggtcccgcgccggtgctgcgtgcagccgcggggccccgagggcagcacgggaggctcttgattgccggcggtgccgggacgccgggggaaaactcaacaaaaatccagtggaaggcttttctgcaggtttaatagatgacaatgatctctaccgatgggaagtccttattattggccctccagatacactttatgaaggtggtgtttttaaggctcatcttactttcccaaaagattatcccctccgacctcctaaaatgaaattcattacagaaatctggcacccaaatgagcacatgctcaggagtggcttcttggagaaaatgaccgttaagctgagaccggcagggagggtgacaggacggttctacggagaggatgggctgcccaccccggcactgacccaggtagaagctgcgatcaccagaggcttggaggccaacaaactacagctgcaagagaagcagacattcccgccgtgcaacgcggagtggagctcagccaggggcagccggctctggtgctcccagaagagtggaggtgtgagcagagactggattggcgtccccaggaagctgtataagccaggtgctaaggagccccgctgcgtgtgtgtgagaaccaccggcccccctagtggccagatgccggacaaccctccacacagaaatcgtggggacctggaccacccaaacttggcagagcaaagctgtactctgaaagctggccccaatggggaggttaggactgtgcctgctcagaagtctgtgggtgcctcagagaagggcaacaaccctaggctggaccctagccttgagagtacttcctactgccagagcccccagatttcttccggtggcagcagatactgccagaagagcctgcggtgcacacaccagaatccggtctattgccgcaggaagacacccgccagctcctgctctgggtggggtcaggctggtgagcagagcagctgctggggaggtgaccaaggacgtggcctggaccctccggggggctcactaagaaaccccacccagagtcagtacatcaaaacaaatgttgcaaacccgcacaggcttgttcagatcaaactttataataggaatctccttggtcgagcatttatggcaaagaagacgtccgcagtgacgactgtggaagcaaagaaaggaagtatgagaggagcgccaacgacagactctgcttcctggcacgacgacctgaggaaggaggatttcagcagcatgagcgctcagttgttatacaaaatgatcaaatccaagacagagtacccgctacataaagccatcaaagtggagagagaagacgtggtcttcctgtatctgattgaaatggattcccagctccctgggaagctgaatgaagcggatcataacggagatctggcattagatctagccctctcacgacgactggagagtattgccaccacgctggttagtcacaaagctgatgtggacatggtggacaagagtggctggagcttgttacacaaaggaatccaaagaggagatctctttgctgccactttcctcattaagaatggggcctttgtcaacgctgctacactgggtgcccaggagacaccactgcaccttgtggccttgtacagttcaaagaaacactcagcagatgtgatgtctgagatggcgcagattgcagaggcccttctgcaggctggtgccaaccccaacatgcaggacagcaaggggagcagagtacgggctccgtatggcagggactgtgttataatcatctcagtgttcctggcactgcgcatggaaaacagtaccttctcaactgacaaaccttctgaacaaagatataattcacacaatcacttcggcaagtccagtagcttgcatgcctgcaggtcgactctagaggatccccttcttcaagagggagcagaaaatga

SEQ ID NO: 147795 - DNA, 1633 bp, Homo sapiens
gagcgcgagcactagcgcgcgagagagagagcgagagcgcgcgcgccgatgacgtcacgctcggcgtctcggccatcttagctgtagatagaggcggcaacctcggaagtgcggagcgggtgggcctatatagatgttgaggtgcggaggccgtgggcttttgttgggcctggctgtagccgcagcagcggtaatggcagcacggcttatgggctggtggggtccccgcgctggctttcgccttttcataccggaggagctgtctcgctaccgcggcaggcccaggggacccaggggcctagtacttggcgttgctcggccgtgtctacgatgatgtcctcctggccggaggcactacgagcctgggtcccactatagcggcttcgcaggccgagacgcatccagagctttcgtgaccggggactgttctgaagcaggcctcgtggatgacgtatccgacctgtcagccgctgagatgctgacacttcacaattggctttcattctatgagaagaattatgtgtgtgttgggagggtgacaggacggttctacggagaggatgggctgcccaccccggcactgacccaggtagaagcttgcgattcaaccagaggctttggaggccaaacaaactacaagctgcaagagaagcagacattcccgccgtgcaacgcgggaggtggagctcagccaggggcagcccggctctggtgctcccagaagagtggaggtgtgagcagagactgggtttggctgtccccaggaagctgtataagccaggtgctaaggagccccgctgcgtgtgtgtgagaaccaccggcccccctagtggccagatgccggacaaccctccacacagaaatcgtggggacctgggaccacccaaacttggcagagtacacaggctgcccaccgctagccatcacatgctcctttccactctaagccgtagcctcttctgttaataacacacagagagctctgccaagcacctgagtaggcccttgacacttgtgtgccctgggatgcctcctggcgcgaatcaggagggtctggaaggacttctggctatattctgcaaatgttggctcatgccccttaccgtgggcttcggccgttgtgggtgccctgagggacagcccggccacctgcccccagacctgggtccaggcttttcaaacaacctattccccccttgccccctactggcccatccttccctcacagccccctcagatatccaacggggcaccaaataagcccccaacctcaatttccccacttgaatttaccaaccccaaaagccctgcctgagttgattaccagctgggcccaatacagtacgaggcaataacaaattagtgtgggttgattctggaattggaaaagcttttgcttgtaatggatccaggcaaatcccagatgtctctgaaccaaagcaacaatttaaagcgaacgacattttctgtcctttaagcacttaaaatcaggtgtggtgtgttttcaaaggcagaagtctgcattttgagcaaaaggtggcttcccagctctaacaaggtaactggttagcatgacattaaagcttgggcaaggcttcaaacttaaaaaaaaaaaaaaaaaactcgagactag

SEQ ID NO: 147796 - DNA, 673 bp, Homo sapiens
gcacagcctggagtgcaatagcgcaatctccactcactgcaacctccacctcccgggtccaagcgactctcctgcctgagcctcccgagcagctaggaccacaggcgcccaccaccgtgcccagctaattttttgtatttttagtagagatggggtttcaccatgttggccaggctggtctggaacttccgacctcaggtgatccacccgcctcggcctcccaaagtgctgggattacaggcgcgagccaccgcacccggcctgagagctaattttattaacttaggctaggaattataatctttcgctagaattactagtagctgatgataccttagccctactttctaccacaccccccaaaataatggcagaaggaatgagaaaggaagtgctttaaagaaataaaaacctttgcaaaggactgcaaaccagtgctcagaacacctgggtaagtctagaagagtagcaagcagaaagacaagctatctggcctatgtattacccaactactgtagttacgttttatctgcaacctggtgtgcacttttactcatcacaccaaacaccaggcttagagaccaaaaatccaaagtgattctcatccttggctacacaacagtcatctggagagcttttaaaataatgatgatagggctacacccaaaatgaa

SEQ ID NO: 147797 - DNA, 325 bp, Homo sapiens
caaatgcaaaatcaccccctttgcaagaaagcctctttgcaactggctctgtgctcaagccctgcagagggagatggcagagaggaaggctgcctacaagcatcacagtcccatccctgttggtaaccgtgttgtgcaaaaacaccttcatccccacccagtggggcccctgatctaatattcaaagtgtcagaggttccatatttgtaatagcaaatgggccctgactgtaaattagtgaagagtgaatgtaacttattacccacagggacaattccaaatgaaggccttaaatgatgctcagctaaaaaaaaaaaaaaaaaaa

SEQ ID NO: 147798 - DNA, 302 bp, Homo sapiens
gaagggctgcctacaagcctcacagtcccatccctgttgggacaattccaaatgaaggccttaaatgatgctcagctaagctggttcttgtgtggcctctgtaccttcaaaagctgccgagtcctatgattacacgtgatgggacttgtacacttgaagtgaaacacagttttaaaacttgctttgtttagaattcccacctcatttttccatggacaaaagtattctttatgtcctagtgcacttacaatttggtattacctgggagtgaaaagcaatattacagccatgcccaaaaaaaa

SEQ ID NO: 147799 - DNA, 1587 bp, Homo sapiens; identical to SEQ ID NO: 115287

SEQ ID NO: 147800 - DNA, 2130 bp, Homo sapiens
atgacatgctgccacaccgacgccgccgtgcctaacacctacatcgatatgccctacgcgagcccgctcacgctaagcagtgcttcccccttccagcactcaggagcccagctggcttcacctagtggatcccgcaccagggctgcaggtggagctgcctgccagtcccgcgccgtgtgctcgcattcctcagcccttgggtggtcgatgggactgggtgccatggagcagggggtgatgctcgtgggggaggctcgggctgcacaggagcccatggagtggagtggcctgggcatttatcaggctatgatgctcaacgtaacccgtgggccacttttcttgcagaaaaatcgcattcgctacaacaattaccaggaaaactgggggcccaccgtttgtggaggacactccaaaatcaccaaggcgtggggccaacccaatcactcccagtactgcgaggagcttccaccaggaaatcgctttgacgccggagccaagaagttgtggggaccccaggatcagcccaatggcacctccaagccttggccaaccaagaagggaaaaccccggtctccaaaaaaagaaggaaaaagagccttggtcccagcaacggatcatctccctgtactccagtcgcctaatctgcaagatggggacaatattatcttcctcacaggattgtccttaaagggcagcgcgttctgggagtggtccgttcctccctaccgaacctggcagattattaaaatcatccggaaagtgggcctttatctgatgaaaagtgatggtaatcccataggaaaatgtttcaacgtgcgcaagagttgcggcggcgagcagaggactaccacaaatgcaaaactctctcaacattcaatttctcatgtgttggctttttcagatccccccttctgcaagaaaggctctttgcaactggcggatgataatctcaagacacctcccgagtgtagtgctacacgtcccgctataccagccacgtacaagaccgagaaccttgcactaaaagtacgtaccacacgcacccagcccatacacccgccagcctctccaccctcagcagatgataatatcaagacacctgccgagcgtctgcgggggccgcttccaccctcagcggatgataatctcaagacaccttccgagcgtcagctcactgcccttccaccctcagcagatgataatatcaatacacctgccgagcgtctgagcgggccgcttccaccctcagcggatgataatctcaagacaccttccgagcctccaccctcagcagatgataatatcaagatacctgctgagcgtctgcggattccgcttccaccatcagccgatgataatctcaagacaccttccgagcctccaccctcagcagatgataatatcaagacacctgccgagcgtctgcgggggccgcttccaccctcagcggatgataatctcaagacaccttccgagcgtcagctcactccccttccaccctcagctccaccctcagcagatgataatatcaagacacctgccgagcgtctgcgggggccgcttccaccctcagcggatgataatctcaagacaccttccgagcgtcagctcactccccttccaccctcagctccaccctcagcagatgataatatcaagacacctgctgagcgtctgcgggggccgcttccaccctcagcggatgataatctcaagacaccttccgagcgtcagctcactccccttccaccctcagctccaccctcagcagatgataatatcaagacacctgccgagcgtctgcgggggccgcttccaccctcagccgatgataatctcaagacacctcccttagctactcaggaggctgaggcagaaaaaccacgcaaacccaagaggcagagggcggctgagatggaaccacctcccgaacccaagaggcggagggtcggtgacgtggaaccgtcacgcaaacccaagaggcggagggccgctgacgtggaaccatcatcacccgaacccaagaggcggagggtcggtgacgtggaaccgtcacgcaaacccaagaggcggagggccgctgacgtggaaccatcattacccgaacccaagaggcggaggttgagctga

SEQ ID NO: 147801 - DNA, 1659 bp, Homo sapiens
atggagacagagccttcaaaggccaaagccaatgacccaggatcagctgcagaaggtgtggtcttcgctagcatctcatcaggccttggggaggtcaccttcctctccctcactgccttctaccccagggccgtgatctcctggtggtcctcagggactgggggagctgggctgctgggggccctgtcctacctgggcctcacccaggccggcctctcccctcagcagaccctgctgtccatgctgggtatccctgccctgctgctggccagcatccttcggaaagctctggacaagatcgcggaaatcaagtctctgttggaagagaggcggattggccacaagtatttgggcctccgctattgtcctccactgtatgtcctctacacggatgccttttggagtgtgactccttattcggaggtgcatatagcatttacgatcttagaggaagtcagtctttgtgattccaagttgatccatattatcttcgtgagacttgcatatgcatgtccaaggtttaccgtttcggcctgggcggcgtcgatccccgagtacatggttcgtatcagcctccttacagcgcaggtagacatgaccatcataggtatcgccttcatgccctgcccacggcccctgatgcccacagtagcccccactgcagcccgggaaatgggtgtacatcacacaggggactcagcaggagaaaaactccacagagcgtgctgtgggcggggccggctgtgcagggagcaccgggtcctcgccctgcccctgtcctccacactcccctacagggactgtgcccctggctgcatcctgcattttcctccttttgtccacaggtatgaggtagatgacattgatgaagaaggcaaagcgagacacaccgtgagcttgcgccggatcatcccgctgacccggtggaaggccaaccccgagacagaccccgaggccttgttagtcaaggagaaaaccatgttctcaggatgctgtaaccttggtgacagcacggccaacacaggaagcctcggcaacacagccaagtgggcccgggtgcccaactacaccaatatgcagagactggtagtggccccgaacgtcggtctgcgctgttatttattggatacaaggctgaagggtcagggtaaagaatgtgagtcacctccaatgatagggctgaggtccatttgtatgcacacaaagaaaagagtttcttcctttcgaggaaataaaattggcctgaaagacgtcattactctacggaggcatgtggaaacaaaagttagagctaaaatccgtaagaggaaggtgacaacgaaaatcaaccgtcatgacaaaatcaatggaaagaggaagaccgccagaaaacagcttagcctctccccctgttcacagtgcctcaacctggtgttcctgctggcagacgtgtggttcggctttctgccaagcatctacctcgtcttcctgatcattctgtatgaggggctcctgggaggcgcagcctacgtgaacaccttccacaacatcgccctggagaccagtgatgagcaccgggagtttgcaatggcggccacctgcatctctgacacactggggatctccctgtcggggctcctggctttgcctctgcatgacttcctgtgccagctctcctga

SEQ ID NO: 147802 - DNA, 2412 bp, Homo sapiens
gtccttaaagggcagcgcgttctgggagtggtccgttcctccctaccgaacctggcagattattaaaatcatccggaaagtgggcctttatctgatgaaaagtgatggtaatcccataggaaaatgtttcaacgtgcgcaagagttgcggcggcgagcagaggactaccacaaatgcaaaactctctcaacattcaatttctcatgtgttggctttttcagatccccccttctgcaagaaagcctctttgcaactgggtaagtttgcttgttttccttgcttttgaacatagtctgccaggtcaggacatggatacatttttctccctacagctctgtgctcaagcccgcacaggacgctctgattgacgcactgccaggagtagcgctctgtcttggggctgcagccggcctcctcagctcgagtgtaacaacagtcgtggccatggcagcacctgacttcccagccctccttgaagctgactcttgcctttaaacccatggagctttctttctctttttcttgttctctttttcttttttcattttctttttctttctttctctttttctttttgtcttttttctttgttacagggatcccctttgaggtgcagaatcttgtatcacaataatcacgattccttggccaaggccttttgatgtcatggtccgtgtttttctccggatcgttgggcatgcggaggcagaaggagagcctggcagagtgaatgacaaacgcaagggaggctcccgcgggcacgcgcagggcggcccctccgggcgctgcggccgcggccccggccaaggggcgggtcccgggtcgggcaggaaggcctggcgctcgcaggcgaccttgcgccagtgcccgggcagggatcagggggctcagcgccttcgcgggaggtagagagagctgggggcatctgtgtgaccaccccgcgtaggtccgcgctgagccaggacacaggacaactgcccgcgcctggttagacaggcgaagcccaaactggcagatgtaacggtttcgggttttgcagcgctggtcgttccagttgaaggcagctgaagcctgcagctccacgcagttgccaaacccgtggttgtcaggctgcccaaaggcaaaactggtgaaggcctggtgctcccctgtggcccagcggaaggagtccttggcggtcttgtaggtgagccctgggccggggtagtcaaggttggcccactcagaccctggagtctgctgccagctgcctttctggcccctcttcccagcgctggcagcccccatgtgctccctaccgatccagaagttcctggtctcgaagtcactgtcaatcacctcgttggtggtctccaggcggcccagatagaaggcgaggatgtcctgcactttctggctcttgatctgggccagcaccccgcctttcctctgacatttcatcctggctctgtaataggtgtctgcctctgaagacaccatgaagcagtctccgtcgatcctcaggtcacaggtgtggaagggaaaatgcaccttggtggcacactgggctcccccgtagccgatgtcacagacgcacgagcactcctcctcccggaaccggccgtgcacacactgcaggctgcacctcacttggcagtatctgcccgtgtagccagggggacagtggcagtggcaggtgctgatgttgagacgtccatggttctggcagctcatgcgacaaggattcctggggacctcacagagcccccctgcatggtcccaggctttgaagcagcctgagacactggctgtgcagagcgaacaccaggcacccttcttataggggatgattgtcttcccgttgacctcccagttgcctccgggggagtaggcacagacaaaggcttctatcgctgtctggcctgcagagcacaggtgccgcccacagcccagctggcttgaggtggcccacacgagctgcgtgtagtgggtgcaggtggcgttgcgagcacactctcctgccgcgtggctgtaccgctgcccctctgcaaaccacaggctgaccacttcaacaaaggacgccaagcccgcgggcagcagctgcatgttccagcccacttgcagggtgcgccacaggccggacgccaggctcggggttgggattccacagagggctgccctggcttgagccagttgggccaggctgtcactccagtccagcctccgcatgtcagccgcagggggctggacccagctgcgcaggcggttgtgcagggagaggagcaagaaactctccttcctgttcagggctccggccatcggagcctgctcctgcagctggggtggccacacctctgcccaggtggtgccaaggagggccaggagcacagccaggagatgcccccggccaggggaggtctctggatgcagcat

SEQ ID NO: 147803 - DNA, 1356 bp, Homo sapiens
atggtgaagctctctattgtcctgaccccacagttcctgtcccatgaccagggccagctcaccaaggagctgcagcagcatgtaaagtcagtgacatgcccatgcgagtacctgaggaaggtgtctctcctgaagactatcttctggtctcgaaatggacatgatggatccacggatgtacagcagagagcctggaggtccaaccgccgtagacaggaagggctgaggtccatttgtatgcacacaaagaaaagagtttcttcctttcgaggaaataaaattggcctgaaagacgtcattactctacggagacatgtggaaacaaaagttagagctaaaatccgtaagaggaaggtgacaacgaaaatcaaccatcatgacaaaatcaatggaaagaggaagaccgccagaaaacacactggtgactgtcatccgggtgaggtggtgggccaagcccacttcgttcccgattctccggttcacattgccctccatggtatggcgcagccattgtttggcatccaggggggcgccctggaacctgcgggtcgcggcacaggttttttggattctccagtgtttcgacccattcggaagtataacgtccagatccccccttctgcaagaaaggctctttgcaactggtctctgctgctggtgtgtgtggggaagcctgagatcttcgtagcgatacactactatacaccaaacacaaagctggtgccattggcacgacctagaaacagccatgttcctcatcccccagagcgcaccacggtcactcagtacagcacgtgtgcgctgcttactgccctgtgcctgctgctgcctgtgctgcaggaaacagcccagagtcgaaggatggtcaccagccacccggaagacagtcctgctctggcacgcaaacacggagcatcgcaaccggccggcctcggctttccaagaactcagactgtcactcccgccttcacattccagaccccaacagcagctgagcccgcacttctgagcgcgtggctgggtagagctccagaaactgagacaatcacagacatggcaggctctgcagcagccgcccccacctgtgaaatgttaagagctcatggccatgatgacctctactttaaatgggaaccttgtgcctcctcccaagctatcactgtgctcccgaaacacagcggaactggtggaagccgccagggccctgccgtggcccaccccgcagccccctttcccaaggtgcgaggtggagagggtacgtactacttgcacctgtccgtcttctccgatctggtggatctgcacctgctgcacgttggccagcgcgtagtgcagggcctgcggctgcggctgtga

SEQ ID NO: 147804 - DNA, 686 bp, Homo sapiens
atgcgggtgctgtggatgctcttttggctcctcttttggctcctgctggaatttatcagccatcagtccacctgtgttatcaatactctggctgaccatcatcatcgtgggactgactttggtggaagtccttggttacgtatcattattgcatttccgagaagttataaagttgtccttaccctctggacagtttacctttggttgtctttcctgaagactatcttccagtctgaaaatggacatgatgtatccacagatgtacagcagagagccaggaggtccaaccgccgtagacaggaaggaaataaaattggcctgaaagacgtcattactctacggaggcatgtggaaacaaaagttagagctaaaatccgtaagaggaaggtgacaacgaaaatcaaccgtcatgacaaaatcaatggaaagaggaagaccgccagaaaacagtaagatgtgccttgacacaaatactgttgtaggaaccatgtgccaatcaaagtagacaactgtaaagtccttgagaatattttctacaatatttgtggcaaattcagtaggttcaaaattgagtttgtcctttctgcttcattagtttaagctgtataattcctttcccttcctacattcttgtttgtcattttttcgggggaagaggagttgctagtactggcattggttttcct

SEQ ID NO: 147805 - DNA, 513 bp, Homo sapiens
atgaaagaatgtgagcatgcagaaaaggagaggcagatgtctctcctgaagactatcttgtggtctcgaaatggacatgatggatccacggatgtacagcagagagcctggaggtccaaccgctgtagacagaaaggaaataaaattggcctgaaagacgtcattactctatggagacatgtggaaacaaaagttagagctaaaatccgtaagaggaaggtgacaacgaaaatcaaccatcatgacaaaatcaatggaaagaggaagaccgccaaaaaccactcttcaggaatccacatctctccagagctctttgttctcatgggtggcacctccagagtgaagaagatcctttgtcaagaagggaaacagaggggaaatgagagggtcctgcaggcagagctggaatcaacttccactctgcctcttgcaagctgtgtgaccctgggcacaatttctccttcctctggaaacctctgttttcttagatttggagcagggtggtcacactga

SEQ ID NO: 147806 - DNA, 5507 bp, Homo sapiens
caggacacgaggaaactgttaatgacttgggctttggaagtagctgttgtaatgaagaagtccgaaacatatgcacctttattctgtcttccgtctttccataaattttgcaaaggccttttagccgacactctcgttgaagatgtgaatatctgtctgcaggcatgcagcagtctacatgctctatcctcttccttgccagatgatcttttacagagatgtgttgatgtttgccgtgtccaactagtgcaccgtggaacttgtattcgacaagcatttggaaaactgttgaaatcaattcctttaggtgttttcctaagcgataacaatcacacagaaattcaagaaatttctttagcattaagaagtcacatgagtaaagcaccaagtaatacattccacccccaagatttctctgatgttattagttttattttgtatgggaactctcatagaacagggaaggacaattggttggaaagactgttctatagctgccagagactggataagcgtgaccagtcaacaattccacgcaatctcctgaagacagatgctatcctttggcagtgggccatatgggaagctgcacaattcactgttctttctaagctgagaaccccactgggcagagctcaagacaccttccagacaattgaaggtatcattcgaagtctcgcaggtcacacattaaaccctgatcaggatgttagtcagtggacaactgcagacagtgatgaaggccatggtaacaaccaacttagacttgttcttcttctgcagtatctggaaaatctggagaaattaatgtataatgcatacgagggatgtgctaatgccttaacttcacctcccaaggtcattagaacttttttgtataccaatcgccaaacttgtcaggactggctaacgcggattcgactctccatcatgagggtaggattgttggcaggccagcctgcagtgacagtgagacatggctttgacttgcttacagagatgaaaacaaccagcctatctcaggggaatgaattggaagtaagcattatgatggtggtagaagcactatgtgaacttcattgtcctgaagctatacagggaattgctgtctggtcatcatctattgttggaaaacatcttctgtggattaactcagtggctcaacaggctgaagggaggtttgaaaaggcctctgtggagtaccaggaacacctgtgtgccatgacaggtgttgattgctgcatctccagctttgacaaatcggtgctcaccttagccagtgctgggtgtaagagtgccagcctgaaacattgtctgaatggtgaatccagaaaaagtgtgctgtccaaaccgactgactcttcccctgaggttataaattatttaggaaacaaagcatgtgagtgctacatctcaactgccgattgggctgctgtgcaggaatggcagaacgctatccatgacttgaaaaagagtaccagtagcacttccctcaacctgaaagctgacttcaactatataaaatcattaagcagctttgagtctggaaaatttgtcgaatgtaccgagcaattagaattgttaccaggagaaaatatcaatctacttgctggaggatcaaaagaaaaaatagacatgaaaaaactgcttcgtaacatgtgaagtccagatccaagggaacctcagaaatccattgaagttccattgttaagaagttctgtttgtttggcaactgctttaaacccgatagaacaagatcagaagtggcagtctataactgaaaatgtggtaaagtacttgaagcaaacatcccgcatcgctattggacctctgagactttctactttaacagtttcacagtctttgccagttctaagtaccttgcagctgtattgctcgtctgctttggagaccacagtttctaacagactttcaacagaggactgtcttattccactcttcggcgaagctttacgttcatgtaaacagcatgacgtgaggccgtggatgcaggcattaaggtatactgtgtaccagaatcagttgttggagaaaattaaaggtatgatctcgtgaaatcttgagagaaactgaatgacgaatgaaactattgttcctgtttcacacagaagaaaactgaggttggcactcatcatgagcccctgttctcattctgcaaatggtgaagctctctattgtcctgaccccacagttcctgtcccatgaccagggccagctcaccaaggagctgcagcagcatgtaaagtcagtgacatgcccatgcgagtacctgaggaaggttatcaatactctggctgaccatcatcatcgtgggactgactttggtggaagtccttggttacatgtcattattgcgtttccgacaagttataaagttgtcattaccctctggatagtttacctttgggtgtctctcctgaagactatcttctggtctcgaaatggacatgatggatccacggatgtacagcagagagcctggaggtccaaccgccgtagacaggaagggctgaggtccatttgtatgcacacaaagaaaagagtttcttcctttcgaggaaataaaattggcctgaaagacgtcattactctacggagacatgtggaaacaaaagttagagctaaaatccgtaagaggaaggtgacaacgaaaatcaaccatcatgacaaaatcaatggaaagaggaagaccgccagaaaacagaaaatgtttcaacgtgcgcaagagttgcggcggcgagcagaggactaccacaaatgcaaaatccccccttctgcaagaaaggctctttgcaactgggtcagaatggcggcagcggagcatcgtcattcttcaggattgcccctacttggccctacctcacaagctgaaactttaaaaaaacaggatggggccaccagccacctcctccaactccaaccaacattctataattgataactccctggagccttcaagacaccttccgagtgtgtgctctatccccttccaccctcagcggatgataatctcaagacacctcccgagtgtctgctcactccccttccaccctcagctctaccctcagcggatgataatctcaagacacctgccgagtgcctgctctatccccttccaccctcagcggatgataatctcaagacacctcccgagtgtctgctcactccccttccaccctcagctccaccctcagcggatgataatctcaagacacctcctgagtgtgtctgctcactccccttccaccctcagctctaccctcagctccaccctcagcagatgataatctcaagacacgtgccgagtgtctgctccatccccttccaccctcagcggatgataatctcaagacaccttccgagcgtcagctcactccccttccaccctcagctccaccctcagcagatgataatatcaagacacctgccgagcgtctgcgggggccgcttccaccctcagcggatgataatctcaagacaccttccgagcgtcagctcactccccttccaccctcagctccaccctcagcagatgataatatcaagacacctgccgagcgtctgcgggggccgcttccaccctcagcggatgataatctcaagacaccttccgagcgtcagctcactccccttccaccctcagctccaccctcagcagatgataatatcaagacacctgccgagcgtctgcgggggccgcttccaccctcagcggatgataatctcaagacaccttccgagcgtcagctcactccccttccaccctcagctccaccctcagcagatgataatatcaagacacctgccgagcgtctgcgggggccgcttccaccctcagcggatgataatctcaagacaccttccgagcgtcagctcactccccttccaccctcagctccaccctcagcagatgataacatcaagacacctgccttccaccctcagcggatgataatctcaagacaccttccgagcgtcagctcactccccttccaccctcagctccaccctcagcagatgataatatcaagatacctgctgagcgtctgcggattccgcttccaccatcagccgatgataatctcaagacaccttccgagcgtcagctcactccccttccaccctcagctccaccctcagcagatgataatatcaagacacctgccgagcgtctgcgggggccgcttccaccctcagcggatgataatctcaagacaccttccgagcatcagctcactccccttccaccctcagctccaccctcagcagatgataatatcaagacacctgccgagcgtctgcgggggccgcttccaccctcagcggatgataatctcaagacaccttccgagcgtcagctcactccccttccaccctcagctccaccctcagcagatgataatatcaagacacctgccgagcgtctgcgggggccgcttccaccctcagcggatgataatctcaagacaccttccgagcgtcagctcactccccttccacactcagctccaccctcagcagatgataatatcaagacacctgccgagcgtctgcggggagcgtctgcgggggccgcttccaccctcagcggatgataatctcaagacaccttccgagcgtcagctcactccccttccaccctcagctccaccctcagcagatgataatatcaagacacctgctgagcgtctgcgggggccgcttccaccctcagcggatgataatctcaagacaccttccgagcgtcagctcactccccttccaccctcagctccaccctcagcagatgataatatcaagacacctgccgagcgtctgcgggggccgcttccaccctcagcggatgataatctcaagacaccttccgagcgtcagctcactccccttccaccctcagctccaccctcagcagatgataatatcaagacacctgccgagcgtctgcgggggccgcttccaccctcagccgatgataatctcaagacacctcccttagctactcaggaggctgaggcagaaaaaccacgcaaacccaagaggcagagggcggctgagatggaaccacctcccgaacccaagaggcggagggtcggtgacgtggaaccgtcacgcaaacccaagaggcggagggccgctgacgtggaaccatcatcacccgaacccaagaggcggagggtcggtgatgtggaaccgtcacgcaaacccaagaggcggagggccgctgacgtggaaccatcatcacccgaacccaagaggcggagggtcggtgacgtggaaccgtcacgcaaacccaagaggcggagggccgctgacgtggaaccatcattacccgaacccaagaggcggaggttgagctgagaagaggccagtgcactcaagcctgagcaataagaataaaaccgagtagaacaaaataaaaaattcaaaaaacaaaacaaaacccacactccaaaaactaacaaagaataaataaataatataaaaat

SEQ ID NO: 147807 - DNA, 2271 bp, Homo sapiens
atggcagcacctgcggatgtcacatgggcaggacagcagggaagtagcagcaaatgggtgctcctcagtggacaacaaaatgtttatatattcacagagagatcgatgtcttattgtgatgagtctcgactgtcatatcttcttcggaggatcacccgggaaaacgaccgagaccgaagattggctactgtaaagcagttgaaagaatttattcagcaaccagaaaataagctggttagagtgcagtgccaggctgtctttgactccggaacccctgatcaccttgcttcgcctcccggagtacctggatatacgcatgagcaccgtgccagcccgtcatcctatataattatttctagtgtctcccctgaagactatctctgggtctcgaaatgggacatgatggatcacgggatgtacagcagagagcctgaagttccaaccgccgtagacaggaagaaaagagtttcttcctttcgaggaaataaaattgtcctgaaagacgtcattactctacggagacatgtggaaacaaaagttagagctaaaatccgtaagaggaaggtgacaacgaaaatcaaccatcatgacaaaatcaatggaaagaggaagaccgccagaaaacagaaaatgtttcaacgtgcgcaagagttgcggcggcgggcagaggactaccacaaatgcaaaatccccccttctgcaagaaagcctctttgcaactgggtaagtttgtttgttttccttgcttttgaacatagtctgccaggtcaggacatggatacatttttctccctacagctctgtgctcaagccctgcagagggagatggcagagaggaaggctgcctacaggcatcacagtcccatccctgttggtaaccgtgttgtgcaaaaacaccttcatccccacccagtggggcccctgatctaatattcaaagtgtcataggttccatatttgtaataagcaaaatgggccctgaactgtaaattagtgaagagtgaatgtaacttattacccacaggggacaattcccaaatgagggccttaaatgatgctcagctaagctgggttcttgtgtggcctctgtaccttcaaaagctgccgagtcctatgattacacgtgatgggacttgtacacttgaagtgaaacacagttttaaaacttgctttgtttaggaattcccacctcatttttccatgggacaaaagtattctttatgtcctagtgcacttacaatttgggtattacctggggagtgaaaaggaaatattacagccatgcctaactggactttcttgagggtaaggattgttctgtccaggaaaaccctctcccagttcccctgcagctcttcaggaatccacatcttttccagagctcttttgtttctcatggggtggcacctccagagtgaagaagatcctttgtcaagaagggaaacagaggggaaatgagagggtcctgcaggcagagctgggaatcaactttccactctgcctcttgcaagctgtttgactctgggcacaatttcttcctttcctctggaaacctctgttttcttagatttggaagcaggatggtcacactgaccttgcagagttcttgagattcagagacagaacataaaaggcctggaaaacattctccaaaaagaagctgcaacatgtgtggacaatgggcttttcatgcctctcttactgtctcttactgtctgttgacctggtgcaagaaacatgctctggtgatggcttttgagggaggaatgaggatagacatatacactcctgtgtctcaaacatagcttctttattactctgttatgactctgtcttccctggggcaggaccccagcctgcctacatttgcagacagacacagtggcatgtggagacaacagtgtgtcccaaagacttttctttaccccctagctgtcggcagtactcagtggaagggtgatattatgacactgacactgctattttgaaacctggaggatggaaaggtgcaaaaatctatcaccagcaacagaaggtgcagactgtgttgggtggcggtaattttgctccatcaaatgaatatgtgtgaaaacattccctcctttgggccctacaggtcagaatggcggcacgggagcattcattcattctttcagggattgccctgctggccctaccgthacagctgaaaactttaaaaaaacaggatggggccaccagcccacctccttctactcaacaacattctataatcgataactccctgagcctc

SEQ ID NO: 147808 - DNA, 672 bp, Homo sapiens
tttttttttttttttttgagagaggatctggctctgttgcccaggctggagtgcattggcacgaacatggctcactgcagccccgaactcctgggctcaaacaatcctcccgcatagctggggctacaggagcactgccaccatgcccggcttttattttattttatttatttttagagacaaggtcttgctatgttgcctaggctggtcttgaactccttgggctcaagtaatcctcccacttcagcctcccaaagtgttgggattacaggcatgagccgccagctcccagtctctttactctttaaacatgtaaaactatcttcagctcgtggcttctacccacagaaccatccactcatgcactccccagggcactgtcctgcagaatcctgactgagtagtgctatgaattttcaaggaaacccttccggcatttggagaagcaccagggtgccctgaaaagcacacggctttaaaataccactggcccaccttgccaccattcaagcttgcagatctgcagttcagagttttggggaccttggcaatttgtcactgccttggccttagtttcccaagttataaaacggaaagagtctttctagtgatgtggatttgctatgctggcttgaatgcacctagggcactgccctgcagaaggcagattcc

SEQ ID NO: 147809 - DNA, 670 bp, Homo sapiens
tctattcacctcccaaaggccccacctcctaatcacagcacgggggtttgggttcaacataggaatttttttttgagatggcatctcacacagtgttgccaggctgtagtgcagtggcgcaatctctgctcactgcaacctccacctcccgggctcaaacaatcctcccacctcagcctcctgagtagctgggaccacaggtgtgcaccaccacacctggctaactttttgtacttttagtagagacgagatttcaccgtgttgctcagattggtctcaaactcctgagcttaagtgatttgcccacgttggcctcccaaagtgttgggattacagatgtgagacaccacatccaacctcaacatatgaattttagagtgacccaaacattcagtccatcacagtctcctgcaggattacagatgtataatcagtctgtaatccacaaagttctaagcaaaggaaaagaagtaccaatatcactattgctattgttattatcagcacccaagaccttccccagtcccagtgagtggaatattaagatgatcccaaagacgctcgacttcgctaacccgtaatactcacaggttccacccctttgattgtgggcagaacctgtgaatattatgatctgactgccatggttaccttatatgacaaaagggag

SEQ ID NO: 147810 - DNA, 799 bp, Homo sapiens
agagagtctcactggagtgcaatggcatgaatctcgcctcactgaaacctctgcctgcctcagcctcccacgtggctgggattacaggcgcgcaccaccacgcccagcttatttttgtatttttagtagagacggggtttcaccacattggccgggctggtctcaaactcttgacttcagatgatccacccgtctcggcctcccaaagtgctgggattacaggcatgagccaccgtgcctggcctttgttaaaatattttagtgctttacaaacacttaatatattgcaaaaaaacaaaaacaaaaacctcattaaaacctactttatctctttacatgtaaaaatcttctgaatccttccccttctgccatcccctaaagttcttttattggtagtcaagaacaagctataagccatactctacacaaacaccaatacaccgaaacacaaggtaacactctgccaatatgttttggatagactaagttaaatacttgaatggcttattcactttattactaagttgaccaattttttaaaaaagcaacaacacagctaaggttcttcctcaaacatcacctaaactaaaaaaaaagtgtgatacatgactacatttcaacacaagcacagacacaatgactcatcatttgcctatctaggaatttaactgaaggcagtaatcagagaagtgggcagatatgaaatcataatcttgtttacagtaggaaaaggctgaaaacctcccaagtattcaccgataggggattatttgtcaatgaaggtatacctacgcaatca

SEQ ID NO: 147811 - DNA, 440 bp, Homo sapiens
gctaaggtagctctcacacacctcggctctggggttgatacctgagcctgcaatagagccctgaaatcaagagcatggcttgagtgtgtgaatatgatgtgtgcacatgcttaatgagcgtgcaagtgtgcacacgtttgtggagaggagggtgttctggcctgagaaggagctcttttctgttcccaagcctcagaactcttgagctgtggcttacttgctgtcttcaccaggttcaagctccgtgggccacactgctgctgtgccaagaaggtgtacagcctccccaggatggggcctcatacaacccttcatctgcactcaacatttaatcgtgtccttgctgtctttttattttcctttttgtttgttagcaaaaacctctatttagatttcaataatcagagaagtgtaaaataaaacagattatattgtacttg

SEQ ID NO: 147812 - DNA, 1689 bp, Homo sapiens
  misc_feature (1)...(1689): n = a,t,c or g
tctgcatcatctacctggtggagggtcagtcagtcataacaagccagccctttgtggtgctgtacctgctggcaggcctgatacaggtgacaatcctgctgtacctggcagaagtaatggttcggctctgaccccagtgtgggtcctcattgccaagcagagcccacccatcgtgaaaatcctgaagtttggctggttcccaatcatcctggccatggtcatcagcagtttcggaggactcatcttgagcaaaaccgtttctaaacagcagtacaaaggcatggcgatatttacccccgtcatatgtggtgttggtggcaatctggtggccattcagaccagcccgaatctcaacctacctgcacatgtggagtgcacctgggcgttctgcccctcctgatgaagaaattttgccccaacccgcgttctactttttgtacgtcaaaaattaaattctatgtcatgctcgagactcttgctcttgctgggtgggtcccagggccatctgattttcttctacatcatctacctgggtggaggggtcagtcagtcataaacaagccagacctttgtgggtgctctaacctgctgggcagggcctgatccagggtgacaaatcctgctgtaacgggggcagaagtggaattggttcggctgacttggcaccagggcntgggatcctgacaaccactgcatcccctaccttacagggctgggggacctgctcggtactgggcctcctggggactctgctttttcactgactggctactgaagagcaaggcagagctggggtggcatcttcagaacttggcatctgggaccttccctaactggggccccgctgggtcccattttgctcattagaatttcctctcacatcagtgggatacagaattcagtttctcccttggcaaggtccttggggatggttgaccccgtgcctctgcagtaagccttttgttgagtctgcttaaggtagctctcacacacctcggctctggggttgataccttgagcctgcaatagagccctgaaatcaagaccattggcttgagtgtgtgaaatatgatggtgtggcaacatgccttaaatgaaccgtgcaaagtgtgccacacgtttgtggaagaggagggtgttcctggccctgaagaaggttaaaggaagagggcatgtcccagtaatgcttttgcaggggtgtgtttggctccttttcccatgccccatgcaacccccagattgggggtggaagcaaggaaagaagctcttttcctgttccccaagccctcagaactccttgaagctgtgggcttactttgctgtcttcacccaggttcaagtctccgtggggccacactgcctgctgtgcccaagaaggtgttacagcctccccaggatggggcctcatacaacccttcatctgcactcaacatttaatcgtgtccttgctgtctttttattttcctttttgtttgttagcaaaaacctctatttagatttcaataatcagagyaagtgtaaaataaaacagatatatattgtacttgaccctttatgtctttaaagatagttaatgcaaccctgaggcttggggtctataaataacaaaagcatctggnnnnnnnnnnnnnnnggggggcccgccttaaaggatcccttgggggggccaaagttaacgcgggaatgcag

SEQ ID NO: 147813 - DNA, 1105 bp, Homo sapiens
aattgcttttggccgctatgagcttgatacctggtatcattctccatggcctgaagaatatgcacggctgggacgtcttcagtatgtgtgaattctgaataaaatatatgaacagcctaacgatacttaccatgcatatggtcaattgtgcgtttgaccccccccttggcctacctaaggagctttctttggaaaccaggatggaaacattcttccctgccttaccttcctttcactccattcattgtcctctctgtgtgcaacctgagctgggaaaggcatttggatgcctctctgttggggcctggggctgcagaacacacctgcgtttcactggccttcattaggtggccctagggagatggctttctgctttggatcactgttcccctagcaatgggtcttggggcctattggcaatgtccatgggccttcccaaatcaaagtctcttcaaggccctcaagtgaaagttttggctaaaggttggtgtaaaaatcaagagaagcctggaagacatcatggatgccatggattagctgtgcaactgaccagctccaggtttgatcaaaccaaaagcaacatttgtcatgtggtctgacccatgtggagatgtttctggacttgctagagcctgcttagctgcatgttttgtagttacgatttttgggaaacccccactttgaagtgctgaaaaagtgtaaagggaaaagcttccctcctaaacccttggggcttgggatattgccccagaagaagaaatttgggcttttttttttcttaatggacaaagaggacagttgctgttcctcatgttcccaagtctgagatgcaacatgaccctcatcaatctggtgcctgggaagagttccctgtccattgagcagcacagccctgagtgctggcctctgtcaacccttattccactgcccttatttgacaaaggggttacatgctgctcaccttacttgccctgggattaaatcagttacaggccagagtctccttggagggcctggaactctgagtcctcctatgaacctctgaagcctaaatgaaattcttaaaatcaccgatggaaccaaaaaaaaaaaaaaaaaaaaaacg

SEQ ID NO: 147814 - DNA, 1506 bp, Homo sapiens; identical to SEQ ID NO: 146311

SEQ ID NO: 147815 - DNA, 692 bp, Homo sapiens; identical to SEQ ID NO: 146312

SEQ ID NO: 147816 - DNA, 2244 bp, Homo sapiens
  misc_feature (1)...(2244): n = a,t,c or g
atgcaggccatcaagtgtgctggtggttggaaagccgaagctgtaggtaaaacttgcctactgatcagttacacaagccaatgccatttcctggagaatatatccctactgtctttgacaatttattctgcccaatgttatggtagatggcaaaaccggtgaattcggggcttatgggatacaaggtggacagaaagattatgacagagttacgcccccctatccctatccggcaaggcagatgtgttcttaatttgcttttccccttgtgagtcctgcatcaatttgaaaatgtccgtgcaaagtggtatctgaacgtgcgacaccactgtcccaaccactccaaatcatcctagtgggaacttaaacttgatcttagggatgataaagaccacggatcgagaaactgaaggagaagaagctgactctccatcacctatccgcagggtctagcccatggctaagggagattgggtgctgtaaaatacctgggagtgctccggcggctcacacaagcgaaggcctcaagacagtgtttgacgaagcgatccgagcaagtcctctgcccgcctcccgtgaaagaaagaggaagagaaaattgcctgcctgttgtaaatgtctcagccccctcgttcttgggtcctgtccctttggaacctttgtaacgctttgctcaaaaaaaaaaaaaaaaaaaaaacaaaaaaaaaaaaacaacggtggagccttcgcactcaatgccaactttttgttacagattaatttttccataaaaccattttttgaaccaatcagtaattttaaggttttgtttgttctaaatgtaagagttcagactcacattctattaaaatttagccctaaaatgacaagccttcttaaagccttatttttcaaaagcgccccccccattcttggttcagattaagagttgccaaaataccttctggaactacactgcattgttgtgccgagaacaccgagcactgaactttgcaaaagaccttcggtttttgagaaagacggtagcttctgcagtttagggaggtgcagacactttgctcctcctatgtagttctcaggatgcgtaaagcaggaacagcctcccgaatggaggcgttggccattggaacttcaccagtgagttaggcaggcacgtgtttcccgacattaaccttgtactgtaatggagtgagcgtanacgcctccagctctttgggatcagtctttgtggatttcatagcggagttttctgaccagcttttgcgggagattttgaacagaactggctatttcctctaatgaagaattctggtttagctgtggggtgtgccgggtggggtgtggtggtggatcaaaggacaaagacagtaattttggaacaaaatacgaagtgggaagatttaccactaccattggtacaagggaatgaaagtggtcacgggggtaaaaactcctaaaagggttaatttctggtccaatgcagtagatgatgaaagaaaggttggtattatcaaggaaatggtttcttaagccttttcctttctcttacaccctgccatgcctcccccaaattggggcatttaattcatctttaaactggttgttctgttagtcgctaacttagtaaaggtgcctttccctaaaagaaccccttctgactgagcaatatgcctccttgtattataaaatctttctggataatgcattagaaggttttttttgtcgattagtaaaaagtgctttcccatgttaccttattcagaagctaataaggggctttccttagttttctagtaactaggtgtaaaaaatcntggtggttgcagcctttatagtttttaaaataattttaggataaattccttaaacctatgaacccttccttaaccatcactgtcttgccagattaccgacactggtcacttgaccaatactgaccctcttaccctcggccaaggcgaacacacgcctcctggtagtcgccttggcctattaatgttcctttggggtctgtgagggttctgtaaaactgtgctaggtgctggacgatgtttctgttacaacttaactcactggcgagaatacagcgtggggacccttcagccactacaacagaattttttaaattgacagttgcagaattgtggagtgtttttacattgatcttttgctaatgcaattagcattatgttttgcatgtatgacttaatacatccttgaatcataggaaaaactaacttaaag

SEQ ID NO: 147817 - DNA, 693 bp, Homo sapiens
atgtatggagtctctgccttcgtggtcctcagcccgacagggagactgcccagtgtgctgcaaaaggaaaaccaacaacagggagtgcccaactcaccccctctgcatgagcaaatgcagatggacactggactgtgccgactgacaccgggactcacacttgctggtcagtggacgagaggctctgactcgctgccaggtgctggtgaggctggaagaacttccttccttcctatgtacaatgcaaacagtgccgcttccagtgctacccacacgggtgcagcctcacgggagagttgcggagagagggaatgcgttcagttcagccagcggacggccagggatcggtggtgcatccgaggcagggctgagttagaacaggacatcctagactcggcggcagtgactattattcagaaatggcacatcaagggccggcctgcccttcatcctgcaggggtacttgggcatgtggaggcccctttctccctggtgttgcaactggagaggagtcggttcctgaagaacagatgggagagtgctggggccaggtaccctgggagagaggagggaaatgaaatccggcacaggggctgcggggataggggcagtcaggaggcggcagtgcggtgcaagggcccccccacgcggccagctgtggaacttccaccacgactccctgtcctctcctga

SEQ ID NO: 147818 - DNA, 2109 bp, Homo sapiens
tttttttttggcaaatcaattttattgtttaaaaaaataaacgttacatttgacatagaaaaagacattttaaaaatgttcttaaaaggtttaaaaaggcatttgttctggccaggcatggtggctcccgcctgttaatcccagcactctgggaggccgaggcggatggatcacctgaggtcaggagttcgagaccagcctggccaacatgggtgaaactccgtctctactaaaaaatattaaaaaaattagccgggcgtggtggcaggcgcctgtaatcccagctactcgggagggctgaggtagggagaatcacctgaacctggggagggcaaagtttgcaggcgagccgagatcgcggccacttgcactccagcctggggcgttcagagcgagactctgtcttcaaaaaaaaaaaaaagctttgttctgaatgtgcctcatcatcccaggcaggcatctgtaagtttccattgtttccacaaaaaccagtggggttcccctctctggaaaaaagcacgaacattcttgctgcttggcaatgggtggctctcatgcccacacctctccacccaagggaacagtctctctgctcctcacctggcagaagcccagaccctgagtccctagcgcggggcagagcacagaaacatgatccagatgcagcaggccccgcccgtcttagttctcctgcaacagcctcttagcactgctccactctgacctgcccggctggaatcacagttcccactccggcacaggtaaagatgagctcccaggatccagcaggggctctgcccctggggatctgccgccagccggctcttcccggtggacagaactaggaggggcaggctgtacccagcacatctcagagagatggaggcaagctgggttcctgatgatttccagctaatacaggtccttcctcctgcatgcaggcgccccgtaacgctttataacagacgcctctagacttctgtgggggtaaagtgaaggacccaaagcgacacaagtagtgtctgttcacactccccctttcagagcttattacgagcttctcggaatatactccatacagctttcagcaaatcagagtgtttacctctcccacaccaagggaagaaaagatgcaggctgcctttaaagcacctgtcagcaaggcagagggttttaaagatcagccttgagaatcaaagcagcagcagaagtgtcattactccagtgctctcccttcccgttcgtgggtcacacagagacaggcacatccccagcgctttgcaaacaagaagcgcttcccaaaagttggctagagggtacacttcggcaaagggatcatcttccccctggcttgctggactcttggaaatgcgtctgaaagcccttcgccatcccgtcttgtgctgatgacagcatgagccccggttgcaccttgctcagcaacaagctgcgagatcctcagcttgtcactcatacgccaccttgagctgctgacggcggcctggagaaccgtgtgtggctgttcttggatgacatatgctgtcactagccttcccagaacacccgctgcccagggttcctgctgccttccccggtggacagattttgcagggaagactgaggaaatgggagggggagctctgctctaaagcagaaggcacagaaggtggggtttttgttttatagggagactgcccagtgtgctgcaaaaggaaaaccaacaacagggagtgccggtactcaccccctctgcatgagcaaatgcagatggactctggtctgtgccgactgacaccgggactcacacttgctggtcagtggacgagaggtaaaagcaggcaggattattacaggaataaatctgcacttccaaagaggcagctcccatgactgagttacaatgcttggagcccccgagggcagagtggcaccagctgggaggttgacactgcatcactgcttcggatgccctcacaggctctgactcgctgccaggtgttggtgaggctgaaagaacttccttccttcctatgtacaatgcaaacagtgccgcttccagtgctacccacacgggtgcagcctcacgggagaggaggtccatcagtctgc

SEQ ID NO: 147819 - DNA, 452 bp, Homo sapiens
  misc_feature (1)...(452): n = a,t,c or g
ctcatgcccccgtcttgccagtgacacttgaagcctcccgacttccacagagtgcttcaggacacattttgagtgnnnnnnnnnnnnnnnnnnnncttcnnnnnnnnnnnnnngaaagggagtttcgttttgttccccaggttgaattgcagggccctgatttgggttaattgaaccttttgcttcccaggttaaagcaattttttggcttaaccttccaaagaatttggaattataaacttgccccaccacccccggtaaatttggaattttgggccaaaacggggttttcccatgtaaatcaggttggttttgaactcttgacttaaggggatccaccacttgggcttcccaaagggttaaaatgacaggcccaacccaccaggcccaccttgaggggaattttttttagggcccaggtaaactttaaaccgagggttaaaaaaaacccc

SEQ ID NO: 147820 - DNA, 3086 bp, Homo sapiens
ccagtgacgtggaattcctcttttgtctgcgttaaaaggttttctgacatccaatgacaccaatttaatcaactcctctgctttatcctctgctgtcacaagtgggctggcttcactatcttctcttactcttcagaactctgactcttctgcttcagcccctaacaagtgctatgccccatcagccatccctaccccacagaggacttccactccagggttggccctgttcccaggcctgccgtctcccgtggctaactcaacttccactcccctgacattgcctgtacagtctcctttagccactgctgcatcagcttccacgtcagtgccagttagctgtggctcctcagcctcccttttgcgtggcccccacccaggtacctcagatctgcatatttcatctacccctgctgcaacaactcttcctgttatgatcaaaactgagcccacaagtcctactccctcggccttcaaaggtccatctcattctgggaatccctctcatggcactttaggtttgtcagggacattgggccgtgcatatactttcaacatccgtgcccatcagtttatctgcttgccttaatcctgcattgtcaggtctctccagcttgagtactcctttaaatggttcaaatcctctttcctctatttcccttccaccacatggttcctccactcccattgcaccagtattcactgctcttccttcttttacttctttgaccaacaattttcctttaactggcaacccatctcttaatccgtcagtatctctcccagggtcattaatagccacctcatctaccgctgccacctccacatctctccctcatcctagctcaacggcagctgttctctcaggggctttctgcttcagcaccagtctcagcagcacctttccccctcaacctgtccactgctgttccctcacttttctctgttactcaaggacctctgtcatcttcaaatccctcctatccaggcttttctgtctctaataccccaagcgttacccctgctcttccctcattcccggggctgcaggcgccctctacagtcgcagctgtcacaccactacctgtgggctggccacagccccatccccagctcccagtcctcccaggattcggctcagcattcagtttccatttcaactcccgctcttggttgcacaagccgggttttatcatctgggactttaaagctggcaggcagttctggtttttcagggcttttggtccctcccgggtatccctgggtttcctcagaatccttcacaatcatccttgcaagaattacagcataatgcggctgcacagtcagcattgttacagcaggtccattcagcttcggctctgggaaagctatccagctcagcctgatggggtttcctagttatccttcagcgccaggaacaccattttctttggcaaccaagcctgtcccagagtgggtggcagtgaataccttttaacttttattctccttcagagcaacatcagaattgcctgagaactgcaatgaacaatctgacaaatgtgaagctggccaaaagtcggaaaatgagaatgagggtaatcctggagaaattgtgacaacaatttgaaaattgtggttgcattttaaagtgtgaacactcccctatgtaaatatgctgacaataaattgtatggagaatggtatttaaaaagtgtttggagacttttcacctgtcctattaaaattttgaattgtgtatgtgatctacataggaaaggatatttaaagagtaggttggaactctttataggccgaatacagccttaaatatgcttgtatagcatccactggcagaagtaatagttgtgcctcagacttgggggttgcatgtggccctgggggagttactacccttggtatgcatgagcggttcctattagcatcagtgggaactcagtactctgtatgtatccacaaaagggaacttgagacccacagttattcttaatttctgatattaacaaccgtacatactgctgaatttaactcaaaatatttcaggtaagtgaaagtggtgcttaatgtagactatagaatgactttcaggtgttttcaactgaaagtatatatccagaactgcatccttatagaaatacaagtaagacttaggataatttgccttcaaaacagttttcctaatctcagcagtatccagtgagtgaagaacacttgactgactcttgggccacctctgttacttactgtactatggaagctcctggtgaatgtttacaattatgggatgtagtatttcctatttgtacctttaagtcaaatgccttatatgaaatatgtgacaacaaatagagaagactggcctctgttagtaattatgccagtatgtactctatttaaggatctgtggtagtataacatgagtgaatgtcattaattttgaagtaataactgcccacatgtgggaagtaggggagtaaggagaatgaattaccaattctgtgattaaaagtgtaaactatagactctactgtagtacatttcaggatctagaagttttacttttataaagatggtgtccggaagatgttgctaatgtattttacttcaacatagggaacaaactttttaagtatattaataaacctgtatggatagtttttaacagttttttaaaataaactttatggatatgacaaatattctgtgttttactaagtgcttggataggccttctaaattttgtatacgtgctagagttaattattgaacatttttatccaaatttagttgtaactctgtttatactactgattgctcattcgtttaaatgatattttaatgtaaaagtcataaccaacatatgaacagacagatttatgtctttaaacacagaatgtaagctatagtttaatctgataccagttgctggaagttgccatttgtttttcttaaatctatacccataaaacttcttttaagattaaaaaaaaaaaaaaaaaaaaaaaaaaaaaaaaaaaaaaaaaaaaaaaaaaaagggcggccgctctaaaggatccggggttccgtccgcgggcttgcgactt

SEQ ID NO: 147821 - DNA, 771 bp, Homo sapiens
gcaacttctaaactatgcgccaggaccaggggggccccgttatgtggattgtgatcttttttgaaacggctaccacctctgtgtatcacgacctacgggcacctggagtttatttcgcttgcagctggccacccagtttgagaactggtatatgaagtatcagagccccattattcagacgaagtatggaggcagaaaccgtttcagggtttccccgggaccccccctcggatgttcccgtaaggtgtcccagaaaaagtctgctagagcagttaccatctgggtctggattcaaaaccccagaaaaatacctgtttggagagcccattgtggaatttttgccgatttcatgactgaaccagtcacccgacgaaagtgctggggaataaaaaggggatcttcactcgggcagagacaacccaacaaagtgcagcgttccttttgcgagagagatacttggaagattgcccaatgaaacccaggtatcccccactcagtagccaggtcacaatgtttggagaatacagcctgttgtagcttgagcaagactgatacccacctgcgtgtcccttcctcccccggaggtcagcgacttccacagcagcagaacaagtgcctcctggactgttcacggcagaccagaacgttttctggcctgggttttgtggtcatctattctagcagggaacactaaaggtggaaataaaagattttctattatggaaataaagagttggcatgaaagtggctactgaaaaaaaaaaaaaaaaa

SEQ ID NO: 147822 - DNA, 3213 bp, Homo sapiens
  misc_feature (1)...(3213): n = a,t,c or g
gctgggtttagtaggagacctggggcaaggccccctgtggacgaccatctgccagcttctctcgttccgtcgattgggaggagcggtggcgacctcggccttcagtgtttccgacggagtgaatggcggcggcggctgggatgctgctgctgggcttgctgcaggcgggtgggtcggtgctgggccaggcgatggagaaggtgacaggcggcaacctcttgtccatgctgctgatcgcctgcgccttcaccctcagcctggtctacctgatccgtctggccgccggccacctggtccagctgcccgcaggggtgaaaagtcctccatacattttctccccaattccattccttgggcatgccatagcatttgggaaaagtccaattgaatttctagaaaatgcatatgagaagtatggacctgtatttagttttaccatggtaggcaagacatttacttaccttctggggagtgatgctgctgcactgctttttaatagtaaaaatgaagacctgaatgcagaagatgtctacagtcgcctgacaacacctgtgtttgggaagggagttgcatacgatgtgcctaatccagttttcttggagcagaagaaaatgttaaaaagtggccttaacatagcccactttaaacagcatgtttctataattgaaaaagaaacaaaggaatactttgagagttggggagaaagtggagaaaaaaatgtgtttgaagctctttctgagctcataattttaacagctagccattgtttgcatggaaaggaaatcagaagtcaactcaatgaaaaggtagcacagctgtatgcagatttggatggaggtttcagccatgcagcctggctcttaccaggttggctgcctttgcctagtttcagacgcagggacagagctcatcgggaaatcaaggatattttctataaggcaatccagaaacgcagacagtctcaagaaaaaattgatgacattctccaaactttactagatgctacatacaaggatgggcgtcctttgactgatgatgaagtagcagggatgcttattggattactcttggcagggcagcatacatcctcaactactagtgcttggatgggcttctttttggccagagacaaaacacttcaaaaaaaatgttatttagaacagaaaacagtctgtggagagaatctgcctcctttaacttatgaccagctcaaggatctaaatttacttgatcgctgtataaaagaaacattaagacttagacctcctataatgatcatgatgagaatggccagaactcctcagactgtggcagggtataccattcctccaggacatcaggtgtgtgtttctcccactgtcaatcaaagacttaaagactcatgggtagaacgcctggactttaatcctgatcgctacttacaggataacccagcatcaggggaaaagtttgcctatgtgccatttggagctgggcgtcatcgttgtattggggaaaattttgcctatgttcaaattaagacaatttggtccactatgcttcgtttatatgaatttgatctcattgatggatactttcccactgtgaattatacaactatgattcacacccctgagaacccagttatccgttacaaacgaagatcaaaatgaaaaaggttgcaaggaacgaatatatgtgattatcactgtaagccacaaaggcattcgaagagaatgaagtgtacaaaacaactcttgtagtttactgtttttttaagtgtgtaattctaaaagccagtttatgatttaggattttgttaactgaatggttctatcaaatataatagcatttgacacattttctaatagttatgatacttatacatgtgctttcaggaagttccttggtgaaacaattgttgaggggggatctaggtaattggcagattctaaataatataatttccagatagtaattttaagagtactcatcgctcttgccaaataagttcagggtattcaaatcttggactagtcctgcaaggtataaagaataaaaatcccagtgagatacttggaaaccacagtttattattatttatctgggcaattattgtgtgtgtgaggatggaagggtagggaataatcgaacatctaaagccttgaataagagaatactaattgttttggtatgatgatactcagaaatggaggatattataggaaaaagaaatcctttggaattttaactaaaatcactgcatatgggaaattaagagatccaggaccatatttgataagagttcctaaaaataatgtaattattaatgctaaagactgctcatgtatcttgatctaattactaaataaattacatatttatttacctgataaatatgtatctagttctacaaggtcacatttatgtggaagtccaaagtcaagtccttaggggataattttgttttgggctcagttgttccctgcttccttttttttttttttttttttttgagatggagtctcgctctgttgcccaggctggagtgcagtggtgcgatctcagctcactgcatcctctgcctcccgggttcaagcaattctctgcctcagcctcccaagtagttgggattacaggcacctgccaccatgcctggctaatttttttgtatttttagtagagacgggggtttcactatgttggctaggctggtcttgaactcctgagcctcgtgagtccacccgccttggcctccccaaagtgctggggattaccaggcatgngcccacccgcacctgggccttccctgcttccctctctagaatcccaattaggggatgtttgttaactaattcatattggattaaaacagttaaacaaactttttttctttttaaaatgtgagaatcagtgaacctctggttttaggattaatcctgaaaccagggtccctggggagtaataaaattgggtcacattctgtaaagcacattctgtttatgaatgaacttatctcaaattgtaactcggggcctaacctatatgagatggctgaaaaaaataccacatcgtctgttttcactaaggtgatgccaaaatattttgctttatgtataattacagttctttttaaaacactggaagacctcatgttaaactctaaattgtgaaggcagaatctctgctaatttttcagattaaaattctctttgaaaaaatacaaaaaaaaaa

SEQ ID NO: 147823 - DNA, 1313 bp, Homo sapiens
  misc_feature (1)...(1313): n = a,t,c or g
tttatttttatttttgagacacagtttcactctgtcgcccagcctggatgtgcagtggcgtgatcttggctcactgcaacctccgcctcccaggttcaagtgattctcctgcctgaccctcccaagtagctggtattacaggcacgtgccactgtgcctggctaatttttgtatttttagtagagacagggttttgccatgttggccagtctggtctcgaactcctgacctccggtgatctgcctgcctcagcctcccaaagtgtttggattacaggcatgagccacggcgccaggctgcatggtcattttttagggagctgggaaaactggacatgcccccaagccccagggtcttccaaatccgattgcagcccccacatggccaatgctgtatcagcaggtgggcccgggaccctgctcatcccttcagccccatcctgcccctgcaaccttgccgggggcaggtgcccccttcgatgatctcaggtcagcatgacaaatcgtttggagacctgggcaatctggtttaacttaaaccttctcctaggacacaagccctggcagaaatccactggtaaaatgactcccgggcaacagtcaaggttttatttccagttaggtcccagcatgggggaagggagaggagaagtcactaggccattgatcccaactgtcatcccctagggagaccatatcccacaccccagggcctgggccatgcctcttttcctccttcaccctggagtcctgggaagttgatttgagaagatgctaggaacacaatgaaagccaattcatccgatccagttttcaagggttatttattaaaccccttggttctgaccccaagctaagtggggactcagcatcagaccctgcacttcagagagccccctgactttgggggaagacagagtcaggagaaaggcagccccagtgtgggccaggggctcagctgggaaggaaggacaagggggcttggggagaacccagagtttcaagagatcttngggaaacaggggaacggcatttccagacggagggcacaccttgggcatgggtaaggaaagcccatcgtgtgttctaggaagcatggatggatgaaacggggtcccagccgctatggacagccccgagtttcacctgtaaaaggcaggattatttgtttttaattttaattttaatttttttgagacagtcttgctcctcactgccgattttaaatgaatattaagcatgctaaattaatgatcaaagcacttaagaattttgcttagaacagcaatggctgcaaactttagttaattcctc

SEQ ID NO: 147824 - DNA, 485 bp, Homo sapiens
  misc_feature (1)...(485): n = a,t,c or g
agaaacactactaatttttgtatgttgattttgtatcttgcaagtttactgaattcatttaccaaatctaagggnnnnnnnnnnnnnnnnnnggaaacaaattttatttttgtgccccaggttgaagggcatgggcaaattttaagttaattgaaagttttgcctccgggtttaaagggattctccggcttaaccctcccaagtaccgggaataacgggcttgtcccaccaccccgggttaattttggaagttttagtaaaaacggggtttccccttgtggcccagttggttttgaactacggccctcagggaattgggccccttaagcctccttgaaattggaattaatcctttttttctctaaagtagaggtataatggggaaattttcaaaattccggataagtgtttcaaaaagcccccgttagggaaaacaggttcttttagaccagaaaaaccggttaaaaaacttggcctatttttcg

SEQ ID NO: 147825 - DNA, 765 bp, Homo sapiens
ctctttcattactaaaacttcggggacaggttttattttcactttttagggtgagtttttcattgttgcttaagtgattttcttaattcatttgattgtcacgttatccgcattagcagatgagatgatagagcttaagtagtctaaaaaacatgtatatttgcctttggaacgtttttttgtttgtttttggatacagggctttcctctgtcatccaggctggagtacagtggcgcaatcgtagctcactaacctggaactcctgggtcaagccatcctcccttcttgttctcccaaaacgttgggattacaggcatgagccactgcgtcctgacctgaaatagatgttttaaccttagtatttaaaaataggtatgttctggtcacttcaaaatcactaaatacttttgcttggcatctttctaaaaggcattataatctggtaacttttttgctaaataccttacaagcttccaccagtctgcagaagaatttctttgtctgacattttgagagaaagtagtgtggccccaagctttttttcctgtttagtccactgttcacatgctgaaatatttctgttcttgtttttatgctctcttgatttgtagtacttcaccttcctccacatcatcacataagctaaatctttctcacacttaaagaccagttcatcctgcaggcctctgatagcaaagaaaaaaaaagttcaagtagtaccctttgttttttgtaaagccttggtttgatttaatccccagccg

SEQ ID NO: 147826 - DNA, 1044 bp, Homo sapiens
tcagctcactgcaacacctccacctactgggttcaagcaattctcctgcctcagccacccaagtagctgggacctacaggtacgtgccaccacgcccagctaaattttgtatttttagtggagacggggtttcaccatgttggccaggatggtctcaatctcctgaccctgcgatctgcccacctcagcctcccaaagtgctgggattacaggcgtaagccaccgggcctggcctgttttatgattcttaatagttacttggtttaaatcacatttgatactatccttctgaaaagtctgagacagatctacaaactacagtcaaaattatagattaagaggaatgaatgcacctatttggctttaagttgaagatgaattatttctcatgctcattttcttgcggcagttatcttataaagacccccaaaggctttgtgattgtaagcactgtcatgatcacagaatgcaagcttctggtaccatgatcctcaacttagaggaggaagaaacccaggaccagagagctttaactcacttctctcagggaaaaattaaggagttgaagccacaggaacaggaaaaatgggctttggcccacttttaagctccccaggcttttcctaacccagacttgatttcccctcatgtccctagaaaagatcacctaatggtccaagtggaacaaagcacttacacgacctaaccccctatttggggtttttaacttaaagggaggctaatttttaatttaaactggctccgagatatgagttctgcaaaaggttggtccgcatcctttggccctctgggacattatcacttaaattggcttgtgcctggttaacaagaaatactgaccagaatgctcttcatggtagcttatacagttggttgcacttcatgcgggttcttgacatgtttaatttctacccttaatgcaatgaaatggtttcattaataaaagaccactttatataacaaataaatacatgggcggccgatcgcgaactaaaattggctggctccataccctctggtttc

SEQ ID NO: 147827 - DNA, 4192 bp, Homo sapiens
  misc_feature (1)...(4192): n = a,t,c or g
ggctgatgacgactggtggccaatgcagatactaattaagtgccctaatcaaattgtgagacagatgtttcagcgtttgtgtatccatgtgattcagaggctgagacctgtgcatgctcatctctatttgcagccaggaatggaagatgggtcagatgatatggatacctcagtagaagatattggtggtcgttcatgtgtcactcgctttgtgagaaccctgttattaattatggaacatggtgtaaaacctcacagtaaacatcttacagagtattttgccttcctttacgaatttgcaaaaatgggtgaagaagagagccaatttttgctttcattgcaagctatatctacaatggtacatttttacatgggaacaaaaggacctgaaaatcctcaagttgaagtgttatcagaggaagaaggggaagaagaagaggaggaagaagatatcctctctctggcagaagaaaaatacaggccagctgcccttgaaaagatgatagctttagttgctcttttggttgaacagtctcgatcagaaaggcatttgacattatcacagactgacatggcagcattaacaggaggaaagggatttcccttcttgtttcaacatattcgtgatggcatcaatataagacaaacttgtaatctgattttcagcctgtgtcgatacaataatcgacttgcagaacatattgtatctatgcttttcacatcaatagcaaagttgactcctgaggcagccaatcctttctttaagttgttgactatgctaatggagtttgctggtggacctccaggaatgcctccctttgcatcttatattctgcagaggatatgggaggtgattgaatacaatccttctcagtgtctagattggttggcagtgcagacaccccgaaataaactggcacacagctgggtcttacagaatatggaaaactgggtcgagcggtttcttttggctcacaattatcctagagtgaggacttctgcagcttatcttctggtgtcccttataccaagcaattcattccgtcagatgttccggtcaacaaggtctttgcacatcccaacccgtgaccttccactcagtccagacacaacagtagtcctacatcaggtctacaacgtgctccttggtttgctctcaagagccaaactttatgttgatgctgctgttcatggcactacaaagctagtgccctattttagctttatgacttactgtttaatttccaaaactgagaagctgatgttttccacatatttcatggatttgtggaaccttttccagcctaaactttctgagccagcaatagctacaaatcacaataaacaggctttgctttcattttggtacaatgtctgtgctgactgtccagagaatatccgccttattgttcagaacccagtggtaaccaagaacattgccttcaattacatccttgctgaccatgatgatcaggatgtggtgctttttaaccgtgggatgctgccagcgtactatggcattctgaggctctgctgtgagcagtctcctgcattcacacgacaactggcttctcaccagaacatccagtgggcctttaagaatcttacaccacatgccagccaataccctggagcagtagaagaactgtttaacctgatgcagctgtttatagctcagaggccagatatgagagaagaagaattagaagatattaaacagttcaagaaaacaaccataagttgttacttacgttgcttagatggccgctcctgctggactactttaataagtgccttcagaatactattagaatctgatgaagacagacttcttgttgtatttaatcgaggattgattctaatgacagagtctttcaacactttgcacatgatgtatcacgaagctacagcttgccatgtgactggagatttagtagaacttctgtcaatatttctttcggttttgaagtctacacgcccttatcttcagagaaaagatgtgaaacaagcattaatccagtggcaggagcgaattgaatttgcccataaactgttaactcttcttaattcctatagtcctccagaacttagaaatgcctgtatagatgtcctcaaggaacttgtacttttgagtccccatgattttcttcatactctggttccctttctacaacacaaccattgtacttaccatcacagtaatataccaatgtctcttggaccttatttcccttgtcgagaaaatatcaagctaataggagggaaaagcaatattcggcctccgcgccctgaactcaatatgtgcctcttgcccacaatggtggaaaccagtaagggcaaagatgacgtttatgatcgtatgctgctagactacttcttttcttatcatcagttcatccatctattatgccgagttgcaatcaactgtgaaaaatttactgaaacattagttaagctgagtgtcctagttgcctatgaaggtttgccacttcatcttgcactgttccccaaactttggactgagctatgccagactcagtctgctatgtcaaaaaaactgcatcaagcttttgtgtgaagatcctgttttcgcagaatatattaaatgtatccttaatggatgaaagaacttttttaaacaacaacattgtctacacgttcatgacacatttccttctaaaggttcaaagtccaagtgttttctggaggcaaactgtggccaatttggatcagcactctttattacaaacttgataagccagtatcagaacctacagtctgatttctccaaccgagttgaaatttccaaagcaagtgcttctttaaatggggacctgagggcactcgcttttgctcctgtcagtacacactcccaaacagttaaacccagctctaattccaactctgcaagagcttttaagcaaatgcaggacttgtctgcaacagagaaactcactccaagaggcaagaagccaaaggaaagaaaaactaaagatgatgaaggaggcaactcccatttaaaagggcgggcgtgttaggcagtgatgagggagcacactgtagacagctgcatcagtgacatgaaaacagaaaccaggggaggtcctgaccccaaccgagcacttctgacaatgagaccagagactcctcaattattgatccaggaactgagcaagatcttccttcccctgaaaatagttctgttaaagaatacccgaatggaaagttccatcttcgttttcaagaagacatgtcaaatatcaggtcacagcatgcagaagaacagtccaacaatggtagatatgaccgattgtaaagaaatttacagacctccacttgttccaaggattctaccctagctgaggaaggaatctgagttcccttcttacttctatctctgcagagctggtctgacttagctggacttgagaagctgtgatggccaagctttgccctcccagggaccctgaggttgctttatctctcagttgtgggccattccagaggactctttagtcatatgcagcaacatgaccattttaggataccctgtgttagggaccattggaatctacaatccatgttcgttcacaagggatatctgggcaaagggaaaccaagctgcttctttgaacattagggngttaggcattgtcttactttttaaagtccctcacccccaacccccatgctgtttgtataagttctgcttatttgtttgtgtgcttcagtttgtccagtgctctctgcttgaatggcaagatagatttataggcttaattcttggtcaggcagaactccagatgaaaaaaacttgcatcttcagtatacttcctaaagggcaatcagataatggatatgttttatgtaattaagagttcactttagtggctttcatttaatatggctgtctgggaagaacagggttgcctagccctgtacaatgtaatttaaacttacagcatttctcctgtgtatgatatggtgtcctctgtgccagttttgtaccttatagaggcagattgcctccgatcgctgtggttcttattatcaaaattaagtttacttgtatacggaacaaccacaagaaatttgattctgtaaagaatcctctttagctgtggcctggcagtatataaatggtgctttatttaacagaatacctgtggaggaaataaagcacacttgatgt

SEQ ID NO: 147828 - DNA, 3229 bp, Homo sapiens
attttttttttttttttttttgtgagataattaggaaagaagatttattgtttacccttgcagtgtttatggggggaaaaggtatttacagaattactgttgctagcgagaatatacagtaaagtttaaaacattttggagaattgattttgattcttaaaatgtgtctttttgcaacatatgctctggttacctataaatacatttattttggcccttgaaaacattcacatcctattctttgttagccttatttttccagtccttgttaactctctcagtgctggataataaacctgcatttcttttaaaacatttgttcagtttcggcatcagtgtcttcccccagcacttcctttatttaaaataggacccatttacttgtatgaaaaatagttgctgttaactaaaaattcaataggtgagttagacatggcttttcaagtaggattttcagtggcttcagattccatcatacacaagtgtatgttttttctgtgtaagttttttccgtgtaagttttttccgtgctcaaccgtaagtgctcaaccatcttctccccactttagtctgctatgtcaaaaaactgcatcaagcttttgtgtgaagatcctgttttcgcagaatatattaaatgtatcctaatggatgaaagaacttttttaaacaacaacattgtctacacgttcatgacacatttccttctaaaggtacgtagtactttggaaactcagtgtgtcatttccaattagttaatgcttgtggtttcattatgctggtcttttggagatttttttaaatcttctttttcaggttcaaagtcaagtgttttctgaagcaaactgtgccaatttgatcagcactcttattacaaacttgataagccagtatcagaacctacagtctgatttctccaaccgagttgaaatttccaaagcaagtgcttctttaaatggggtaagaattagccataggcggcgggagaaagtgtttaatctgtccttcagttaactgtgcggccttcatatgattagactctcgtagcgttaacgtgctgattcgagctcttaagccatgtgcgacaaaaaaacaagttttaaatacacgtttactatgccttgtatgtacacagcacactctatcaccttggaagctacaagctgggtatcattaaatgctgaagggtaataaagggaacatcttagtggtcttatctctacttgggtatatttttggaaacaatacttgtgatgtttctattactgcctatggctcctatgtaactgaaacaattaatgatctactgatttaaaaaaggcagttaaatctagagcattagttgccttgtgcagactcccatggacagccatgtcctagaataatggaaacactctgggaaatggggctaggatgttgaggcagcagcctccccaaattcacagtatggcataaaagcccaaacaggtgacagggctcagtaaggaaagaccttactatttgtgacatccatcagaattttaacttgagaaactgatttcaaggtttgtttttaaaattcttatatttccttttcccatttttcagaaaacactatttcaggctttggtctgacttactggttcgtgggcataaaataatgctattagtgactttaagaactaatgaggctgggcacggtggctcatgcctgcaatccaagcattttgggaggtcgaggccggtggataacgaggtcaggagattgagaccatcctggccaacatggtgaaaccctgtctctactaaaatagaaaaaattaagccaggcgtggtggcgggcgcctgtagtcccagctacttgggaggctgagggaggggaatcgcttgaacccgggtggtggaggttgcagcgagccgagattacaccactgcactccagccttgccaaagaacaagactccatctcaacaaaaacaaaaacaaaacaaaaaaaaaaaaacaactaatgaaatgctgtagtatcttaacactggctttctggttttatcattctaagaatcccagagaaaccagggtattcttaggaaagaatggattcctgggaaaataaacatctgcaattaactgtaaacaactgcatcaaagtgttggctttaggaatttgaaatgttcctatctgggttttggtaggacctgagggcactcgctttgctcctgtcagtacacactcccaaacagttaaacccagctctaattccaactctgcaagagcttttaagcaaatgcaggacttgtctgcaacagagaaactcactccaagagcaagaagccaaagaaagaaaaactaaagcgttagctttatggactactatcattacctttagggtgggaggagggagtaatacacttggtgtaactggtttaagagttgtgtgttcagctgaacctcctaaatataaatgctagaaacaaaattaacttcccacatccccccctaacgtgatcttaatgactttcagagaagtttcccttttggcatgtgttttcacagatgatgaaggagcaactcccattaaaaggcggcgtgttagcagtgatgaggagcacactgtagacagctgcatcagtgacatgaaaacagaaaccagggaggtcctgaccccaacgagcacttctgacaatgagaccagagactcctcaattattgatccaggaactgagcaagatcttccttcccctgaaaatagttctgttaaagaataccgaatggaagttccatcttcgttttcagaagacatgtcaaatatcaggtcacagcatgcagaagaacagtccaacaatggtagatatgacgattgtaaagaatttaaagacctccactggttccaaggattctaccctagcttgaggaagaatctgaagttcccttctacttctatctctgcagttctgtctgacttagctgacttgagaagctgtgatggccaagctttgccctcccaggaccctgaggttgctttatctctcagttgtggccattccagaggactctttagtcatatgcagcaacatgacattttagataccctgtgtaggaccattgaatctacaatccatgtcgtcacaaggatatctggcaaaggaaaccaagctgcttcttgacattaggtgtagcatgtctacttttaagtccctcacccccaacccccatgctgtttgtataagttttgcttatttgtttttgtgcttc

SEQ ID NO: 147829 - DNA, 566 bp, Homo sapiens
ctccagagtctcactctgctgcccaggctggagtgcagtggcccgatctgggctcattgcaactttcgcttcctgcgttcaagcaattctcgtgcctcagcctcccaagtagcagagattacaggcgtgcatcaccacgcccagctaatttttgtatttttagtagagacagggttttgccatgttagccaggctggtctcaaactcctggcctcaagcgatccacccgtctcagcctcccaaactgctaggattacaggtgtgagccaccatgcccaacccagagccaccttttatagacataaatctgttcttgtccttcccctgcttaaaagcccccagtgacttcccattatacccagtagttctctgtcagagcacttttaccatttcccccacccacagggatcacatagcaatgtctagaggcatttttgattgtcacaagtagcccaaaggagggatgcgggactactgaaatctaagatgtacacaatagtccctgcaacaaagaattctccagccctaagtgtcagcagtaccaagctgagaaactaacaatgaag

SEQ ID NO: 147830 - DNA, 2238 bp, Homo sapiens
ttttttttttttttttttgtaggtacaataaatctggattgatttttattacacatccttagtttagaatcacttttacattccctagacaaagagatgatacaagatgaatatcaattgtagaacttagagcccccaagtattgaattggcgtattctttgtctaaaggtagccaaagagaaggtcaagatcagtaataacttcaaggagccatgaagcccactgcctcctgcctgccccagggatcactccttttaataaataaccccagaaggcatttcattcagggaaacaaggggcagggcaggaaagggtgacaggattttctggaacaggtacaaaaccaaaagcccttgccgtgaatagacaatcacccaggccccactaatccttagcccagttcccctcagaagccatttttaagtatgggcttttaggagttttttaacagcccccattttcatcccacttgattggggttcaagatggtctgaggtgttgtctcccagtacgcccctcaaccctcaagtgggaaatgtgaggcagaactgatatccatgttaccagggattcgacacttctcagaaacttgacaacgattttaccttcagtgagggaggacttgtcagagtcagacaggaaaagcagagagcggcccacgcccccagttgccagccactctggcgcccttggtcatggaggtgtgggtggagcaattcaagcagcatgcaggcattggacgggaaataatccagcgttaggtcagtcttaagaaagtgcttcatgcctatgatttgtggccttgggttctgaatccaggggtctgagagacatgtgacttgaaaatagaaagcccagaatacattccccagatcagagtaaaagggggtcctattgggggttgccatacacagtctcaaaactcccttctccctgaatggtcatccttaagaaccctgttaaaacttgcctttcctgggctttgcctagctgctgcccggcatgaaaggcccctcagacggcctcaagaacattcctaggtatgaactagagacatgaaaacctagtcccctcagtgggcttggtaggtcctcctacatatttggctcaatgcagaacccaaaacagcagctttctggtgacagcacgacattctacaatctgctctattcaaatatttatcggataccattttgagagaagaaaagcaccagagactgcttggaaagggtacagcttcatttccaaatgagtcttcttttctttccacagtaccaccacatgcaacacagctgagtacaaggtcatgcctgtacaacttgtcttgtcttctcttagaaaagttctatgtgtcacttaaccacccttggtcagaagagtcacctcgagataccagtattaatgtatagggttatctgcagttttctttttctttctttctgtttttttttttttttttttttttttttttgggggagtctcactctgtcacccagggctggaatgcagtagtgttatctcgactcactgcaacctccgcctcccaggttcaagtgattctcgtgcctcagcctcccgagtagctaggactagaggcatgcaccaccacaccaggcaaatttttgtattttttagtacagatggggtttcaccaatgttggccaagctggtcttgtagttcctaaccctcagttgtccacccaccttcgccctcccaaagtgctaggattacaggcatgagtcaccatacccgcccggttatctgcagtttttcaattctcagatttgcctacatgaaatatttttaagccctacagaattccagattagcctttgaggaaatgtggtgtgaagagacacgtgtaaccagcagaaaatccagcttaggctaccccaccttagcgttttgttccttattcaaacaggcaaattccttagtaaataagaaagaagtaaagtttgatctcaagaaaatatgagggaaggctgaaaagggccctgggttcagaaagaagggttactaaaaaggagataagccgctggacaacagatctccattttgcagaatgctaagacattgcacttagtacctcctgtttcccatgggttttgatccagaaatgtgccctgggaactgagcagctgagttaaaatataactcaaggcccacctgagtcgccaccttcctgaggcaccgtgccagcaaggtgcaccagtgtggcagacctggagactca

SEQ ID NO: 147831 - DNA, 505 bp, Homo sapiens
  misc_feature (1)...(505): n = a,t,c or g
agatgcagcccncccattgaaacctttnatagagaggcgtaattcacggggccggccgggagggcctcgggggactgnnnnnnnnnnnnnnnnnnnnnnnnnnnnnnnnnnnnnnnnnnnnnnnnnnnnnnnnnnnnnnnnnnnnnnnnnnnnnnnnnnnnnnnnnnnnnnnnnnnnnnnnnnnnnnnnnnnnnnnnnnnnnnnnnnnnnnnnnnnnnnnnnnnnnnnnnnnnnnnnnnnnnnnnnnnnnnnnnnnnnnnnnnnnnnnnnnnnnnnnnnnnnnnnnnnnnnnnnnnnnnnnnnnnnnnnnnnnnnnnnnnnnnnnnnnnnnnnnnnnnnnnnnnnnnnnnnnnnnnnnngaggcattttttactgtctacagaaacttattgtaattcatttttcctcactccagtagtaagaattataccaaattgaaaagatatgaatgagtatcctaaaaaaagaaaaaggaagactctacacccttctcgttattcagatn

SEQ ID NO: 147832 - DNA, 474 bp, Homo sapiens
attgttttctgtctctatatcataatcctcagaaatcgcatgcacttctacagcaattggaacatcttcagcagtgtgaacttctataggactctcctcttgggtttgctggttgactgattcaggtgagtcacactcttcatcacaaattacaatatcagcagatttttctgtagaaaaggcagtgtggtctagaattctaagtacaggactgggaaccaggtagttctgatttctgtagacagtaaaaaatgccagtcagtcccccgaggccctcccggccggcccacgcagaggcggcggcggccgagagcgcaggcggaggggccgcgcggtccttcccgcggacgcacggcggcgggcagcgctgctccggccctagcgctcccggacgctgtgctgggccgacccctctccctccccgcgcgccccacgccctgagcgccaggcccctggcctaggctccgcggccgc

SEQ ID NO: 147833 - DNA, 527 bp, Homo sapiens
gtatgtcaagtatgtggttttcggagtagacttcacacaaatgttaacaggcatgttgctattgaacaaaccaaaaatttttcctcatgtttgtgatgactgtgggaaaggcttttcaagtatgctagaatattgcaagcatttaaattcacatttatctgaagggatttatttatgtcaatattgtgaatattcaacaggacaaattgaagatcttaaaattcatctagatttcaagcattcagctgacttgcctcataaatgtagtgactgcttgatgaggtttggaaatgaaagggaattaataagtcaccttccagtccatgagacaacttgattattctctttaacttacagaatgttagtttaaaataataaattcatcctttttttggagatgattaaatggatgattgtaaacacaacttatgaaatctgcctttaacaagtaacttttttaaattataaaattttattggcattgctccattttctgtatataaatatatctttaatgtggtattttc

SEQ ID NO: 147834 - DNA, 2077 bp, Homo sapiens
atggcccatgagtgccagaagacagtgaaggagagacaggacagaaataagcttcctgaagctggaaagacccagacagttccagaagaaaaggcaatatctggcattttgggggccatccctcaaactgactacattccccttctggccctctcgctctttggacaagctctccttggggactcctacatcgtcaccataattccacctgtaaagctcacccggagcgtgcccccaagccaggacagattaattcattcaatcaacaagatcacaccctattacgttccaggccatgtgcagtgcactcagaacacagagatcaatgggatgcagtcccacccacacacttcccatgtcagggctgatttccaacaggcaaaaaatgctacacgagatgtgttgatttgcaatgaattaaattataacttcagactgtctgacaatgggccaataatcaagttattcaaaggagattccatgctccccaccatagaatctgctccccacctaatgccgtgggctggcgttaggcattttttactgtctacagaaacttattgtaattcatttttcctcactccagtagtaagaattataccaaatgatgattctgataccgagacgtcaaatgacttgccaaaatttgcagatggaatcaaggccagaaacagaaatcagaactacctgggttcccagtcctgtacttaggaattcttagaccacacttgccttttcttacagaaaaatctgcttgatattgtaatttgtgatgaagagtgtgactcacctgaatcagtcaaccagcaaacccaagaggagagtcctatagaagttcacactgctgaagatgttccaattgctgtagaagtgcatgcgatttctgaggattaatgattatagagacagaaaacaattcctctgagagtctccaagacccaaactgatgaagaaccgccaacttaaacttttgtaaaattcttgacaagagccaagctttgaatgtgaactgcccagccgaaactggcctttaactgagagctaatagcaggtggcctctataaactgtgaactttgtgagtttaacagcaaatatttttctgacttaaagcagcatatgatcctgaagcataaacgtactgattcaaatgtgtgtcgagtatgcaaggaaagtttctctaccaatatgcttctgatagaacatgccaaactgcatgaagaggatcctattcgtttgtaaatactgtgagtataagccagtaatttttgagaacatcagccggcacattgcagacacccattttaggtgatccacctctattggtgtgaacagtgtgatgtacagttctcctcaagcagtgaactctacctacatttccaggagcacagctgtgatgaacagtacttgtgtcagttctgtgaacatgaaactaatgatccagaagaacttgcatagccatgtgggtaaatgaggcatgcatgtaaattaataggagttaagtgataaggtattaacaatgggtggaacatgggacagtatagcctcttaagcaaaattacctttgacaaatgtaaaaacttctttgtatgtcaagtatgtggttttcggagtagacttcacacaaatgttaacaggcatgttgctattgaacatacaaaaatttttcctcatgtttgtgatgactgtgggaaaggcttttcaaacaatacgtggaaaaggaaacgcggccagggcaaaacatttcctcttcttataaaccttgaactgagtacgtccctcaccaattatagagggtccccttgggcctcagaactttccacaagcgttgaggtctctatggcgatgctcccggctgccgaggcggaaacacaggggcatgactcaggtgaaagggagccattttctcagacccctggcctcatgcagcccttcagcatccccgtgcaaatcacacttcagggcagccggaggcgccaggggaggttgccagttcttggagactggagaccttttaaactcacctgtagctccccagcactgatcatagcccagcccatagttggtgctcaagaatga

SEQ ID NO: 147835 - DNA, 415 bp, Homo sapiens
acttgacccaggaagtctagctggcttcacctcttacatacagttcatgtacgatgagtttgtggaggaatatgagcctaccaaagcagacagctatcggaagaaggagctcaggatggggaggaagtacagatctatatcataaatacagctgggcaggaggactacactgcaattaaagacaactacttccactgtgtcttctctattacagaaatggaatcctttgcagctacagttgacttcaaggagcagatttaagagtaaaaaaagatgagaatattccatttctactggttggtaacaaatcagatttagaagataaaaggcaggtttctatagaagaggcaaaaaacagagctgactagtggaatgttatctatgtggaaacatctcctaaaacatgagctaatgt

SEQ ID NO: 147836 - DNA, 1317 bp, Homo sapiens
ttagagatgatcatctcttacatcagaagcaggatctaaatgatccctggatgcccaatttcctgaccctgctattgtcgtgggtggcaagataagaggagttgcatcacagatgaaaaagtaaggccgaagaagaccagagaagagttggttgaatgtgtagatataagatccatctgtgacattgtagaatgaaatttcaccggcttcatagtccaagaaaatcccaatgcagcgaggactttccagttggagaagaggcactgatggggaggcaaggaccatgtactcattccctttcagcagccacagggcccagaccccattctcaggagatggcatggtttccccctttcttggcagtgtgtcttgacagacccctaaaccccactctgctccttctcccaccagaacctcccagtaatgcctccctgatgagaagctctgcaaacccaggatgcagggccatgtgtcaaatcgctcagggttgttggggacatccctccatggttctccatcctgcacactgcgcaggtcggcggtcaagagcagactcgggtgcgccgtggcgggatccagctttacatccacttggaacttccttaagagctccctcctcccagggatgcagcatgctgtcttcagttccatggggatgttctctgcttccagccttgtgacagccttacttctgctcaggactcctctcacaccctccagcagacccagggctgggcgctggcacctctcctgcagctcatccgccagctccttcagggccttgctctgctggaccagccggctcttgctctcccgcagtctctgcagcgtcgctcgctcctccgcctccagccgcctcagctgccgttgctcctcctgggccagaaagccacgatgcttctcaaactccaatctgaagcgctgcctctgcatttccactttctccttccaaatgacagtctttttccccacgttggcctcctgagtcaaggcgtcctccaactctttcctcataagttccagagccatctggagctttacctgcaccgcgagccagtccgccgccccgagggctccggaagccgcggctgcgtggctccggccggagggtactcggtccttgtcgcctggaaggccccgcgccgggagcggtcgaaggaggagtctgacgggtggcgggggagcctgggcggctggaggaggaggaggaggaggaggagaaggaggaggaggactccgacgctttgctctggggagatccaccctcctcctggcggctctgcagcagccgccacagatcacttccggggcgctggg

SEQ ID NO: 147837 - DNA, 831 bp, Homo sapiens
ctaaattgtccatgtctgagtgagtgtgcgtgtgtgcatgagggcatcctgcaacaggacggtgtcctgttcaaggctggttccagcctggttccctgagttgctggaataggctctcaccatccaagagcctgcaccgcgagccagtccgccgccccgagggctccggaagccgcggctgcgtggctccggccggagggtactcggtccttgtcgcctggaaggccccgcgccgggagcggtcgaaggaggagtctgacgggtggcgggggagcctgggcggctggaggaggaggaggaggaggaggagaaggaggaggaggactccgacgctttgctctggggagatccaccctcctcctggcggctctgcagcagccgccacagatcacttccggggcgctggggagcggggcggggcagctggggagcgacttcctgtccgtgggctgagaggagggtgatcatgggcctgggccgcagaacagtggctcggagggcgcaggctgcccggcctccgccccctgcaagctgagggctgtccgcgctgtctttccgacggccccacccccggctctctgagctccgcgaggtgaagtcatctcccgggggctcgggagtggccgcgggcctcgcggaggttcccggatctcggcgtcgttgccgcggtgtccttgtctttcctggctggagggtctcgtggctgccctgggcctcatctaactgctgatcccctggagaattcgctttctcggacggtctgcgagttctttctgaggggtgtcggacccccctgcgactctgcaggtgtcggtgtggcactgagatcat

SEQ ID NO: 147838 - DNA, 1050 bp, Homo sapiens
ggaattcctccccagagcaaagcgtcggagtcctcctcctccttctcctcctcctcctcctcctcctccagccgcccaggctcccccgccacccgtcagagtcctccttcgaccgctcccggcgcggggccttccaggcgacaaggaccgagtaccctccggccggagccacgcagccgcggcttccggagccctcggggcggcggactggctcgcggtgcagattcttcttaatcctttggtgaaaactgagacacaaaatggctgcaaataagcccaagggtcagaattctttggctttacacaaagtcatcatggtgggcagtggtggcgtgggcaagtcagctctgactctacagttcatgtacgatgagtttgtggaggactatgagcctaccaaagcagacagctatcggaagaaggtagtgctagatggggaggaagtccagatcgatatcttagatacagctgggcaggaggactacgctgcaattagagacaactacttccgaagtggggaggggttcctctgtgttttctctattacagaaatggaatcctttgcagctacagctgacttcagggagcagattttaagagtaaaagaagatgagaatgttccatttctactggttggtaacaaatcagatttagaagataaaagacaggtttctgtagaagaggcaaaaaacagagctgagcagtggaatgttaactacgtggaaacatctgctaaaacacgagctaatgttgacaagagtggcccttcctgaagaccagatggtggaacacctgcaagtacatttcatcccactgccctagaccagctccagtatctagaaagactgctcactgggctgaggtattttttgatttaatgagagaaattcgagcgagaaagatggaagacagcaaagaaaagaatggaaaaaagaagaggaaaagtttagccaagagaatcagagaaagatgctgcattttataatcaaagcccaaactcctttcttatcttgaccatactaataaatataatttataagcattgccaaa

SEQ ID NO: 147839 - DNA, 2587 bp, Homo sapiens
atggctgcaaataagcccaagggtcagaattctttggctttacacaaagtcatcatggtgggcagtggtggcgtgggcaagtcagctctgactctaccagttcatgtacgatgagtttgtggaggactaagaagcctacaaaagcagacagctctcggaagaaggtagtgctagatggggaggaagtcccagatcggatatcctttagatacagctgggccaggaggacttacgctgcaattagagacaaactacttccgaagtggggaggggttcctctgtgttttctctattacagaaatggaatcctttgcagctacagctgagattcagggagcagattttaagagtaaaagaagatgagaatgttccatttctactggttggtaacaaatcagatttagaagataaaagaccaggttttctctaggaagaggcaaaaaaacagagctgagcagtggaatgttaactacgtggaaacatctgctaaaacacgagctaatgttgacaaggtattttttgatttaatgagagaaattcgagcgagaaagatggaagacattttattatttgaatggaacaaagaacacgaaaaggttagccgagagaatcagagagggaggctgcattttataatcaaagcccaaactcctttcttatcttgaccatactaataaatataatttataagcattgccattgaaggcttaattgactgaaattactttaacattttggaaattgttgtatatcactaaaagcatgaattggaactgcaatgaaagtcaaatttactttaaaaagaaactaatatggcttcaccaagaagcaaagctcaacttatttcataactgcctacatttatcatggtcctgaatgtagcgtgtaagcttgcgtttcttgggcagcctttcttgaaattgaagaagtgaaatgggggtggggagtgggaggaaaggtgacttcctctggtgtttattataaagcttaaattttatatcattttaaaatgtcttggtcttctactgccttgcaaaaatgacaattgtgaacatgatagttaaactaccacttttttttaaccattattatgcaaaatttacaagaaaagttattggcatggttgttgcatatagttaaactgaggagtaattcatctgtgaatctgctttaattacctgggtgagtaacttaggaaaagtgggtgtaaacttgtacatgggaattttttgaatatgccttaatttaggaaactgaaaaatatccggttatatcattctggggtgtgttcttactgacaccaggggtccgctgccccatgtgtcctgggtgagaaaatatatgcctgggcacagcttttgtataggaaaattcttgaggaagtaactgtccgctaggaagtctgtcccaaatttaaaatgtgtgccatattctgggttcttggaaaataaggttccagagctctttggatccgctttttaattaaactgcagttcatgtaaatgaagggccagcatatatacttgcaagataattttcagctgcaaggattcagcaccagttatgtttgaatgaaccctccttttctctgagattctgggtccctgggaaatcccttttctggctagtggttgagcatgttaagtgttaagtttttaatctgggagcagggcataggaagaaaatgtcagtagtgctaatgcattttgcactagaacgcttcgggaaaatattcatgcttgccatctgttcatttctaaatttatattcataaagttacagtttgatacaggaattattaggagtaattcttttctgtttctgtttataatgaagaacactgtagctacattttcagaagttaacatcaagccatcaaaccctgggtatagtgcagaaaacgtggcacacactgaccacacattaggctgtgtcccccattgtgtggtgtacctgctggaaggaattctagccatgctacttgggggacataatttccagtggggaaattatggccactggaccgattttttttttttttcctctttgcagtgggggctagggacagtttgatttcaacaaagtatttttttcttttttctcagtcctaatttgaacaggtcaaagatgtgttcaggcattccaggtaacaggtgtgtatgtaaagttaaaaataggctttttaggaactcacttctttagatatttacatcccagcttctcaatgttaaatatttgtcccttaaaggggttttgagaatgtacatctttcatttcgtatttctcaataggctatgcccatgtgcggaattcaagttaccaatgtaacactgggccagcgggccaggcaatctccatggtgtacttattacagtcttatttaaccagggggtcctaaccactgaacattgtggactttggctttgagacctttcctctcctggggactaagggtgctatgaagccaactgacaaagaatgcatcacggtgtcttaggctgatgccactacccgatttgtttatttgcaatttgagccatttaaagaccaataaacttccttttttaaaatgaaaaaaaaaaaaaaa

SEQ ID NO: 147840 - DNA, 486 bp, Homo sapiens
tatcatgtgctctgtaatcaagagggggatctttcagaaggagccactgtccctgcattgggattatcaaataaagctgtctttcagggagatatagcttctcagccttctgatgaagaggagctgttaactagtactggttttgagtatcagcaggtggcctttcagccctccatacttactggtaagatgtgacaaagacaatttaataaatcgctagaacacacagtatgttatctattgctgctgacctaaataagtgctatagaattcacttttacatagaaaaaaatagcttccatttattctatagcctcccactgaggatcatcttctgcagaatactttgtggcctgaagttcaaaaactgtaagttaaactgcatttagctctttggtctgattctgtcgtaacttctgacttttcctccccaccccacaatctgatgtcggctttttcttccttctacctacctttttcctcctg

SEQ ID NO: 147841 - DNA, 2224 bp, Homo sapiens
ccctctgtagcaggagctgcgactctatggtttcatgttacgcttccattctgtgcaaggctctgtggaaggagaagctgcacacattctggcatcataacagaatttcatttcttccatctgcattcaggccaataccaatattagcatgtggcaatgatgattgcagaattcacatatttgctcaacaaaatgatcagtttcagaaagtgctttctctctgtggacatgaggattggattagaggagtggaatgggcagcctttggtagagatcttttgctagcaagctgttcacaagattgcctgataagaatatggaagctgtatataaagtcaacatctttagaaactcaggatgacgataacataagactgaaagaaaatacttttaccatagaaaatgaaagtgttaaaatagcatttgctgttactctggagacagtgctagccggtcatgaaaactgggtaaatgcagttcactggcaacctgtgttttacaaagatggtgtcctacagcagccaatgagattattatctgcttccatggataaaaccatgattctctgggctccagatgaagagtcaggagtttggctagaacaggttcgagtaggtgaagtaggtgggaatactttgggattttatgattgccagttcaatgaagatggctccatgatcattgctcatgctttccacggagcgttgcacctttggaaacagaatacagttaacccaagagagtggactccagagattgtcatttcaggacactttgatggtgtccaagacctagtctgggatccagaaggagaatttattatcactgttggtactgatcagacaactagactttttgctccatggaagagaaaagaccaatcacaggtgacttggcatgaaattgctaggtctcagatacatgggtatgacctgaaatggttggcaatgattaatcggtttcagtttgtatctggagcagatgaaaaagttcttcgggttttttctgcacctcggaattttgtgggaaaatttttgtgccattacaggacaatcactgaatcatgtgctctgtaatcaagatagtgatcttccagaaggagccactggcccctgcattgggattatcaaataaagctgtctttccagggaggataaagctcctcagcctcctgatgaagaggagctgttaactagtactggttttgagtatcagcaggtggcctttcagccctccatacttactgagcctcccactgaggatcatcttctgcagaatactttgtggcctgaagttcaaaaactatatgggcacggttatgaaatattttgtgttacttgtaacagttcaaagactctgcttgcctcagcttgtaaggcagctaaaaaagagcatgcagctatcattctttgggaacactacatcttgggaaacaggtgcagaatttagttttccacagtttgacagtcacgcagatgggccttctcacctaatgaggaagtttcttactaggctgttttccagaggattcgaacctggtcattgtggaaaaagcatggatacaatctcacctgagttcgagccagtttttagtctttttgccttcaccaacaaaattacttctgtgcacagtagaattatttggtcttgtgattggagtcctgacagcaagtatttcttcactgggagtcgaagacaaaaaggtggttgtctggggtgagtgtgactccactgatgactgtattgagcacaacattggccccctgcctccctcagtcctggaccgtgggtggggctgtgaccagctgtcagcgtctgcccagtgctcccacccttctcaacgatacgtggttgcagtaggattggagtgtgggaaagatttgcttatatacctgggaaaaagactgatcaagttccagaaataaatgactggacccactgtgtaggaaacaagtcaaagccaaaagtcatacactgggctattcagaaaatttattgctgggaaggaatttgcagtggaaaaacttgaaccagaagggaaggcagaaggtgctgagtggtttacacttttgcaagctgtggttaagatcacactgtgaagatacacagagtcaacaaatgtgcactgtaatggacttaataactacatgcttgcagtcactggtatcttaaaatattatcatgtaaacaggtcatctttaccttcataaaaaaaaaaaaaaaa

SEQ ID NO: 147842 - DNA, 2238 bp, Homo sapiens
cgtcgactttttttttttgtttcttttttttggttgttgcacctactttaatgacaactttcaaaaaaaggaacaacatccatccacttcttaatgtctttatgaaacacagaggctagagtccccagccagcttctgaggcagccctgcacatcctgcaggtgggccacactcaacccatggccaaaccgtttgcttaaagctacaagtcctaggagctgaaggaactgggcaagccagtgcgtggaagcttatcgaacagcgcttcccagcccacacgagcaaagctgcgcaggatacagggaaggtgccgtgggtccctgtggggaaaatcctccagggcacatcgaaggcccgggcatgtttaggtgtgagatttgggacaaagtcctctgttctacaccagagtgggtagggaaccaagggcagggcattcagcttgcgtcataaggatctggtagatggaagtctcgctctgtcgcccgggctggaatgcaaataagtggtgcccacctccagctcaactgcaaacctccgcctcctgggctcaaagcggatcctccctggctcagcctcctcaagtagctgggacccacagatgtgcccacccacgccctggctgctttttgtctgtttggtagagacgggtttcaccatgttgccccaggctgctctgcaacttctgagctagagcgatttgtctgcctgagcctcccaaaatgctgggattacaggcatgagccaccatgctggccctgatacggttcccttgttttaaaagtgcattattccaacaagcaaaagtaccccgattccctttaactatgaaatacaatacaaacttcgaaacccaaaagaggtgtaaaaacttgtgtgccaaagaactgtccaaggtgaactttcctcaaattaaataaattgtccttacaatgattttcctgtaaagctttctgggtctgggaaacagacctgaagtattaacacaacttgggttaattgtggaaaaaagtgtcacttcaggtcaccccatttcccaaaagagcagcgggtcacccaaggggccccacagccacagaccggtctcagtcaaccggtctgctggctgcttttggatgagctgaagtaaaaatggattacattttaaaatacaaaattggacaccaggtgtaaacatacttgcaactgcaggcactccgagatacccaggtgcctcccctgttttcagcaaccttaggcaagcgcttaaaggggtgtgctatgggtcccgcggtgctggggcagctggggtgggcaaaaccacgagcagcctagtagatactcaagcaaaacgtcagcactgaagttgcagagaatgaaataccagcagcacagggacagcgagagtcttttggcttttgtctgtagcttatatgagcagagtccaatatccaattaaatagatagaattcactttgcgattctaattgtgctgagatccctaaaggtgaaagatccccatccttccagcagcagcagggcagcatgaagactgccaggcctcccagtcccccagcccccacatcccttggccttctggggagggggaggagctcccagaagggggaggagctcccagaacgcagcggctaaaagcctattttgcccctggtcatggagtagcccagtttcgcctcgttgttaatgaaggacatgagtcccacgtaggtctcgatgagcagggggcgctccaggatcagcacgccattcgcctgtcctggcaaagggctttctttttgggctttttttgacagcttggattaacagagccttgaagcttcccaactgacacagagatgctgtcttctcatctgcgccagccatcgggtgttctgtgaaagtggcatagggcacgttggtagaccagggattccatctgtttatgaaggaaggacgactttgcttgtcccactgaattcgaatcccaaaaccttctcgcttgttgagcgatttagggggaaactgcaattctccgtaggaaatggtgtctactgcgttgagcgctatccgcaccacctgttggcactggagactgatgaagtcgtattttcagataagcagggggtgctccgtgaccagcaccacccgctcattctcattgttccagtgatccacctcggtaagcagccacactccctggatctcgccgtcctccacgggccgcaccgccacgcggatcctcgtgccaagctggcgtaatca

SEQ ID NO: 147843 - DNA, 1692 bp, Homo sapiens
ttttttttttttgagatggagtctcgcactgtcacccaagctggagtgcagtggcatgatcttgggctcactgcaacctccagcctcctgggttcaagtgattctcctgtctcagcctcccacgtagctgagatcacaggtgcccaccaccacacctggcttattttttttatttttttatttttgtagggacggggttttactatgttgccaggctggttttgaacccctaacctcaagtgatctgcccgcctcggcctcccaaagtgctgggattacaggcatgtgccacccgcgccctggccagatgtggactctttaaagacatgctctgagtcagaggttcccagccagtgttaggatctctgagagcttacttccttcaatggccccccaggccatgggcgtatataatagttacagggagaacaggggctgggcatttcagccaacaagggtttcaaggtacgaagctaatgtggacatcaagaagtcagcctggcccagaggcagctaggcaggccactaagatacactacataaaccttttcccatggtgttctgggcctaacatgtaatactgcctcttctaactctcacagcctgcttaggttctgcacattgcccagaccttgaagcaaagcgcccttgcagagaaaaaaataacagcttttaattcacagatataggatggtcttgaccttcaaaggttcttccctttgccaccggttctaaaccaggggttttggggctagaggacaggttaatggggagacccgaattcattttattgaaggccttggccaaaagagcaagctagtgccccacctacatggatcccagcagggccaaattctcaacttgttggcttaacaaaagaatgaaaaagctcaaacagaaaacatactggacaaggttggtccagaacatgcaatcataaatggctatgggaataaatttattctgagcaatatctcagtctcacactcactaaattctagggtagttctattgaagatgtttaccatggtttagcgcactgagccctgcacccttccccaggctgccagggaagcagagaggtacaaacattcctaatgccccagtcagcctgttctccctatggggtccctggattacctgcagggacctgggggaaattggctccctgtcttcagctgagagtctggaatctgaaaccctagatgaatctactgaagaatgctcaagatgatgagataccaagctgaagtgaagtctaggggagaagagaaggcctgaacaaaagagctggggccttccaaagaggtgtatgagaggtgaggttagtagtgccaggctttcctatcttttccttctagtttgctagaaacaagtacaactttagggtgtggggggaaggcaggtagacatgaagaaatggaaatacagttcattctgctagacattttaaactggtttggcttgagaaaaatagaaagtctgtgcctgagaaccttcttttcctctcccttatttaagtacaatagcagctataatctgtgcagttcagctccaaaaaacagggctcctggaagactggctttcatggcagagagttgatggggtagattaatgggctctaggtaaggagcaacaccaagggtccctgaaaactgaggccaacacctgctccctgggggggggccattt

SEQ ID NO: 147844 - DNA, 856 bp, Homo sapiens
aaaatatggttgtttttcgtttttaagacggacgtctccattcttgtccaccctaggctggagtgcagtggcgcaatctctgctcactgcaacctccatctcccgggtttaagtgattctcacacctcagccttccgagtagctgggaccacaggcgcgcgccaccaagcccagctaatttttacatttttagtagaaatggggtttcaccatgttggccacgctggtctcaaactcccgacctcaagagatccgcccgcctcggcctcccgaagtgctgggactacatgcatgcgccactgtgcctggtcacaaatatgttaatgagccaattaagatggtgctgctcaaatgattctaattcaggaaacttaggttgcagctaggtaatctctagttctctaaagaataatacccaaatgacaggatttatgtgttgatgcaataatagctcagtctgtttcatgacctagctagagtcagaattggagcggtggctatagcacaggggtggctttatcctctctgaaggaaaagtaaagaagtatgaagaaagaggttgaaagaccagcgtacacagttgttgcccagatctcaaaattagcagcaagtatgtcagctgtcctaattattaccaaacaggtcctgggagtgtctgacacacatcataatataggtgcaatcagttccagaatctggttcatggatctgaaataatttagctataagaccttcagcaagaccatctctatggctagcatctctctccaataggtttgacaaagattcacctatgagtttcccgaagacaggctaggtatggccctcaataagaatttattctgactctcgtgcc

SEQ ID NO: 147845 - DNA, 1686 bp, Homo sapiens
tgggtcagacagggacatggcaagggaacacaggacagagggttccccagcttccacctcacccaccgccaattcatttagttagcaggcacaggggcaagctccggcacggctttctcaggcctatgccggagcctcgagggctggagagcgggaagacaggcagtgctcggggagttgcagcatgtacgtcaccatgagggcgaagcggccacgggaggggggccccgggacattgcgcagcaaggaggctgcaggggctcggcctgcgggcgccggtcccacgaggcactgcggcccagggtctggtgcggagagggcccacagtggacttggtgacgctgtatgccctcaaccgctcagcccctggggctggcttggcagacagtacagcatccaggggagtcaagggcatggggcgagaccagactatgcgaggcgggcggggcggagtgaatgagctctcatgagggaggatggtgcaggcaggggtgaggtagtgcatcgggcggcgagcgggaggcactggcctccagagcccgtggccaaggcggggctcgcgggcggcgacggagccgggatcggtgcctcagcgttcgggctggagacgaggccaggtctccagctggggtggacgtgcccaccagctgccgaaggccaagacgccaggtccggtggacgtgacaagcaggacatgacatggtccggtgtgacggctaagacttaggagcgctcgtgcgttgcttgtgaacacattatgctggtggggctgcggcaagaagcgggtctgtttctttacttcctccacggagtcggcacactatggctgccctctggggttcccagaacccacaacatgaaagaaatggtgctacccagctcaagcctggggcctttgaatccggacacaaaaccctctagcttggaaatgaatatgctgcactttacaaccactgcactaccttgacttcaggaatccggctcttggaaggttgaaagctagaggaaccagaccctcatcagccccaaccatcaaaggacaccattcggaacaagcagcgcccgcagcaccccacccccgcacccggcgacttcccatctttcatgggccacccccttcgggggaacgggttgaccaacaagccacaacatcatccccagagctgagctccttccaagcgggatgactgccgtccccaacaacctcccctcttcttctttttcaacccttctgtctctttggtttctggagcttttccctgtctttcccttttttcctgaaaagaattcaaaagcctcccacgactcttgtttcccccccgtccccttctgaaatttaatttgcacctaaagtcatttggcactggttgggagttgtgggagaagggccttggagtcttcagtaacggagtgtggcgttgagtgttgaggccaccttgggcaagtggctgtggcaggggcccgggcggcccttccatctggggccgggtgattggggcgccggttgttgttgcccgaggcctcgaccctgccctcgcctagtctggaagctccgaccgacatcacggagcagccttcaagcattccattacgccccatctcgctctgtgcccctccccaaccaggggcttcagcaggagcccctggactcatcatcaataaacactgttacagcaaaaaaaaaaa

SEQ ID NO: 147846 - DNA, 478 bp, Homo sapiens
cagcatcaggttcatttttgatgctttcatttttaaatgagtttacatgtactcatgattaattataaatttcactcaaaagaaggttaaaattcaaaagccaatagctgctttgcaagaaacattaacattcttcttatggaagacaaccttctggaatatccataaaactatgaaactataccaacagtaattgattctgggactgtttgggagaaaaaggtaatttagcttcattcattcattcattcattcatccatttatttatttatttatttgacagagtcttgctctgttgcccagactggagtacagtggagcgttcacagctgactgtaaccttgaaatccagagctcaagtgatcctcttgcctcagcccccgagtagctggggctacagaagtgtgccaccatgcccagctaattatttttattttctgtagagacagcgtcttactacattgcccagctagtctc

SEQ ID NO: 147847 - DNA, 496 bp, Homo sapiens
catggtgcatgttgttgctggattgaatggaacccattcctgtcccccggcctcgtcttctgtcctcacttttggtcatccacacccatgagcagcttcagcagagtgtaggtcccacttcaccccattctcctctcctctgacccctcagctccttggaagtcttggggtggggatctgagggggtgggtgggctgcaggaaattcagaaatgtagcaaagcccttccctgcaagaccccttgtggatgtttttgcatctacctgatttttagccccacccagggagactttataccccatgatcctgccccaccgttgctgttgtctgccagctgggtctagcatcacagggaagggggggatttatactcatggaaagaatactgtatctaccggaaaccaacctgtttactgtactgtatgtaaatatcatgccctttatatcctgtaatatatggcttcttttaaataaagtaaaatgtattaggactgaa

SEQ ID NO: 147848 - DNA, 525 bp, Homo sapiens
cagctgggctctggggataggctctgattaattagttactctgactctggtctgccgagatccatttccaacccagttgcgttgggagagggttgggaggcagcagagcatgggtgacagtgggagcacacgacttccttggagcctgggcctttgcgggtcccaggtggtcaggcagctggagcagaagtggaaatggcttaagatgctcatagcccagccccggctgtgtctactccaggccaagcctgggctgcagtccttgctatgttccccccagggccctggggggagggatcagggagactttataccccatgatcctgccccaccgttgctgttgtctgccagctgggtctagcatcacagggaagggggggatttatactcatggaaagactactgatcctaccggaaaccaacctgtttactgtactgttgtaaatatcatgccctttatatcctgtatattggcttcttttaaataaagtgaaatgtcttagaactgaaaaaaaaaaaaaaaaa

SEQ ID NO: 147849 - DNA, 1254 bp, Homo sapiens
tttttttcagttctaagacatttcactttatttaaaagaagccaatatacaggatataaagggcatgatatttacaacagtacagtaaacaggttggtttccggttaggatcagtagtctttcccatgagtaataaatcccccccttccctgtgatgctagacccagctggcagacaacagcaacggtggggcaggatcatggggtataaagtctccctgggtggggcttaaaatttaggtagatgcaaaaacatccacaaggggtcttgcagggaagggctttgcctcatttctttgagggcttgggagggaagggtcttgggtgagggatttgctcagaactaacacacagcccaccctgagcctgggaaatcatcccattcatagaaaattcccttccagagagaatctgggctttaacctgcaacccacccagtcccctccaagactcccccactcccaggagagagctcttctagagccagagcttggtgtctcaagggggaagacccctgtcctaggaaacccccagcaccctgatccctccccccagggccctggggggaacatagcaaggattgcagcccaggcttggcctggagtagacacagccggggctgggctatgagcatcttaagccatttccacttctgctccagctgcctgaccacctgggacccgcaaaggcccaggctccaaggaagtcgtgtgctcccactgtcacccatgctctgctgcctcccaaccctctcccaacgcaactgggttggaaatggatctcggcagaccagagtcagagtaacccattccccagagcctatccccagagcccagcttgttcccctcccctaatgcgcccttgtccccttccccccacccgaccacatttcctgaatttccctgcagccccaccccaccccctcagatcccccacccccaagacttcccaaggagctgaggggtcagaggagaggagaatggggtgaagtgggacctacactctgctgaagctgctcatgggtgtggatgaccaaaagtgaggacagaagacgaggccgggggacaggaatgggttccattcaatccagcaacaacatgcaccatgtctcgtccacaggaaaatgctgggctaccacaactgcctaccctagattaaaaaccccttcctttcataaaaatagatgagagtctaatgcttaataaatagattacatttagcttaagttacatcttatattctcccccaccccacc

SEQ ID NO: 147850 - DNA, 1122 bp, Homo sapiens
tctcgaactcccgacctcgtgatcccgccacctgggcctcccaaagtgctgggattacaggcaagagccactgtgcctggccctttctttcttttttagggtcagggtctcgctctgttgcccaggttgttgtgcagtggcatgatcgtggctcactgcagcctcaaactcctgggcccaagtgatcctcccgccacagcttcctgagtagcaggtgcacgcctaattttttttaagtaatttttgtagagatgggatctcactataatgcccaaggctggtcttaaactcccagccacaggtgatcctcctgcttgtctccttctcagcttcagcttgattcccacagggggcttcacaaggtttgaacccacacgacactccctccttgaggtaggagggctcagccccatgcttgtccgtcactggctatgggcttaagggaagagcaaggtggcctaggacaggtccctgaaacacactgggggaaaagtatattacatctgtaagttttggatggtgtagttaaaatacacatacaaatatagatacataaagcaagtgcggcaaaatgcaagaaacgtcagatctaggtgcagactttaatagtgttcgttgtaggattctttccacttttctgaaggttgaaatttttcatgataaaaatgtgaggaaaacagaggaggggtgtgtcaacccaaagcctgttcttttgtggactgccatcctgaaactgatgcccagacctgaccagcagtgcaaagagaacctgccagttatcctgaatgcattttctccctcatcttccacctgaggtcggtcacagatcatgtcagttttacctttgaaccatcttccctctcactgcccagttagtccaggctttagtcccggctgttgtattagtccaggccaggaagataacaacagccttttaattgggcatctttcttttcttttcccttttgttcttttgagacagagtctcgctctgtcttgcccaggctggaggtagagtgatgggcgatggaaaggggtatatggaagaactcatgcaagcaaatctaccaaaaataaagtaataaacattgatcaagggacaaaactaaccagaaatctggg

SEQ ID NO: 147851 - DNA, 2058 bp, Homo sapiens
  misc_feature (1)...(2058): n = a,t,c or g
gccagccgccgcgcgctgcagctcttcgggattcccgtgcgccagctgcagaagggcgcctgcccgttgggtctccaccagctgagcagcccgcgctacaagttcaacttcattgctgacgtttttgtttaagatcgcaccagccgtggtccacatagagctcttcctgagacacccgctgtttggccgcaacgtgcccctgtccagcggttctggcttcatcatgtcagaggccggcctgatcatcaccaatgcccacgtggtgtccagcaacagtgctgccccgggcaggcagcagctcaaggtgcagctacagaatggggactcctatgaggccaccatcaaagacatcgacaagaagtcggacattgccaccatcaagatccatcccaagaaaaagctccctgtgttgttgctgggtcactcggaccgaacctgtcggcctggggaagttttgtgggtggccatacggcagatcccttcgccctaacagaacacagtggacaacgggcatcgtcagcactgcccagcgggagggcagggagctgggcctccgggactccgacatggactacataccagacggatgccatcatccaactacgggaactccgggggaccactggtgaacctggatggcgaggtcattggcatcaacacgctcaaggtcacggctggcatctcctttgccatcccctcagaccgcatcacacggttcctcacagagttccaagacaagcagatcaaagactggaagaagcgcttcatcggcatacggatgcggacgatcacaccaagcctggtggatgagctgaaggccagcaactccgtacttcccagaggtcagcagtggaatttatgtgcaagaggttgtgccgaattcaccttctcagagaggcggcatccaaggtggtgacatcatcgtcaaggtcaacgggcgtcctctagtggactcgagtgagctgcaggaggccgtgctgaccgagtctcctctcctgctggaggtgcggcgggggaacgacgacctcctcttcagcatcgcacctgaggtggtcatgtgatggggcgcattcctccaagcgccaagcgtcagagcctgcagacaacggagggcagcgcccccccgagatcaggacgaaggaccaccgtcggtcctcagcagggcggcagcctcctcctggctgtccggggcagagcggaggctgggcttggccaggggcccgaatttccgcctggggagtgttggatccacatcccggtgccggggagggaagcccaacatccccattgtacatgatgatcctgaaagtcacttccaagttctccggatattcacaaaactgccttccatggaggtcccctcctctcctagcttcccgcctctgcccctgtgaacacccatctgcagtatcccctgctcctgcccctcctactgcaggtctgggctgccaagcttcttcccccctgacaaacgcccacctgacctgaggccccagcttccctctgccctagggacttaccaaagctgtaagggccaagggcttgctgcttgccaagcctggggggtccctggaagacaaggtcacaatctggatcccctttggggtgcgggggggtggggtccagcccagagcaggcactgagtgaaatgccccctgggnttcggagctgagcccccgccctgccaatgaggttttcctccccaggcaggcaggaggccgcggggagcaacgtggaaagtttggctgctgcctggggaagcttctccttccccaaggcggccatggggcagcctgcagaggacagtggacgtggagctgcggggtgtgaggactgagccggcttccccttcccacgcagctctgggatgcagcagccgctcgcatggaagtgccgccctagaggcatgcaggctgctgggcacccaccccctcatccagggaacgagtgtgtctcaaggggcatttgtgagctttgctgtaaatggattcccagtgttgcttgtaactgtatgtttctctactgtatggaaaataaagtttacaaagcacaaaaaaa

SEQ ID NO: 147852 - DNA, 397 bp, Homo sapiens
  misc_feature (1)...(397): n = a,t,c or g
caagggagtccaagccgtgatcccagccctttggggggcccaaatgggggaatttttttagctccagaggtccaaacccgcctggggcacaaggggaaaccccgttttttcttaaaattccaaaatttgcccggggtgggggggcccccccgtagggcccggttctccggggaattagggtaaagggccgctttagccccggggggtccagggggcttagactgggcccctgggccctaacctggggggcaaaggggggccccctttccnnnnnnnnnnnnnnnnngtgagagagaaggaagaaaggaagaccctggcactgatcacacctgcagtgatggctctctcagagtcactgaggccaagggaaccatccaaggacttagcaccaatcaag

SEQ ID NO: 147853 - DNA, 353 bp, Homo sapiens
cggcacgagtgatgattagaaggaagtagggcgattaacacacagtgttaatcacagtgggggaagggagaaatatgtttggcacccaggtaatgcactttaatactggaaagctccctgtactaccttgccccattttcatagtaaatagataagtgcagtagccatagcctgagaggcacatggtgaccaggggctcagggatgaatgtctggatcatgccactgggaagccaccaagaccagcagaggtgccagtggaggttgaggggcacctggaatggacagcagaggacagcagcaatcactgtcaactgcagggttaagaccaactgcagtggggacggtggctgc

SEQ ID NO: 147854 - DNA, 388 bp, Homo sapiens
caaactcgacaatagttccaagtggctagagaatggcacttttgatttgtctatcctacaagacctagataatttttgttgaaaaatgggcaaatggtccgaggtgccttatgtccaggcatttttttacaattcattccctccctagtctctgctcccaatgccacttgtcccagattttccttctttctctcccatccactcctcttgtctccaccccaaactcagagtcctctgaatcctccttttccactgacccctcttacctctcttctcccccggctgctccttgccaggctgaatcaggtcccaattcttccatagcctccgcttccccaccctataacccttctattacctttccttcttaacacctggtctggcttac

SEQ ID NO: 147855 - DNA, 1193 bp, Homo sapiens
tttttttttttttttttaaggtgacaaaaagtgtgggaaagattccacacctccctccccacgcccgccaatggtcctttacctgtccatgtttcagattaaataattagctcaagagatttgcacagaaagcgaattagcccttttctagtcagactgttaagctctcaggcggggcaactcggaaccccgtttcctcaccgaaggcttcaggaggccagcccagtgagggatgggaggtggctttagagggcgacagttgtgcagcactcatgaggcaacagtgcccgggacttttgaagtcacggaaggggctcctggaaacccgacagcttcagggtcccgcccctggggcgaccaaaaggagtcttggggggcgtgcgcgccgggggttggaatttgtggtaagcagattttttgggggaggaagggcgcaaagcagcttaggaaacgcacatcctcattctggaactatcccaaaggccccccatgcttctcagcaaggcctcgggctcagattgggcgggttggagccttccaccccaccttgggttcacccgcccgcaaggcctcgcgcctcacccgatccttctagagttgctggaagtccacggagcctccctaaccccccagcagcggggaagggagggcgagggagtggggaagaggcccgttattttgatctttcctgaattcttaagtcccttccatacccaggacatgagcgcgtttaccaggaaccgcagagaggtgtaaagacttcttgcagctgctcacccttcctctcccattactccttttccagtcctccccaccccccagcactctcgtgggtgcgggactgaagataggttttcttcgttgtcctgtgggtggtattctgattgggaagggattttttttcaattgtttacattctacctgagcagggaaagggggtgccaaaatgaagcatcattcacgtccagtcacatatgcagagacggggcaaacgtttgatgcaatcttgggtctcgctgctcccggggccgacaccgcaggcgatggcctaaggacttacctgctggggtagggcccgaacggcagtcccagacttaccctgggcagcggaaacaataccccagaggcaccgatcgctcactgcaggaactgttccccgctggctaggggcacggctgagcgcgggcaccgcc

SEQ ID NO: 147856 - DNA, 389 bp, Homo sapiens
caggtatctttagtcatcaactgggaccttcccactaacaggtaaaactatatccacaggtaagcgtatatctggaacactcccttaccccttcacacctggccctccctgggcttaaagctcctgatattcctcatccccttccttgaattccagaatcggtcgaggtggacggttagaccgaaaaggtggggctattaacaaggggacagaatatgacgagaggactctgcgagacattgagaccttctacaacacctccattgaggaaatgcccttcaatgttgctgaccacatgctgatgggctgccctgcaacgcaacccctttcgggcttaattattggggctagcgatcaatattagggcaatggaatcatgccagggatgc

SEQ ID NO: 147857 - DNA, 582 bp, Homo sapiens
ttaaatgagacagtgttgctctggcactcaggctggatgagtacagtggtgcaaacacagctgctccctgcagcctcaacctgggcttaagcaatcctcccaccttagcctcctgaatagctgggaccatagtcgatgtgccaccacattgggctaattttttaattttttgtagagacggagttttgccatgttgcccaagctggtctcgaacccctgggctcaagcagtcctcccacccctgcctcccatagtgttgtgattatagtgagcccactgcacccagcccaaactatagaatattttgaaaagaattttcttaataagttattttgcctcaagtctcaaagcagagtttggcccccgtttttcatactttcatcagtagccccaaacgttcactttcctttaagagctgccctgtagctttgcttcagaaaaagccttgaggaatatctggtcttaagataatttggttctttctaatatagggcttatatcaagggttaagacagcctgagaccctggctggatgtgcttgatggtcaccaaccctgtccaagttttgattgaccatcctgc

SEQ ID NO: 147858 - DNA, 373 bp, Homo sapiens
cctgcttcaacagtgcttggacggaacccggcgctcgttccccaccccggccggccgcccatagccagccctccgtcacctcttcaccgcaccctcggactgccccaaggcccccgccgccgctccagcgccgcctctccttagtcgccgccatgacgaccgcgtccacctcgcatgtgcgccataactacccatcaggactcaaaagccatcactaatcggcagaataacctggaccacttggacctattccgcctactgtctactgatgagactccatgtctcctgtaactattataacacattgctgttgagtaaattatgatattcattcttcttcagtcgatactgcgtcatacatggtctccattcg

SEQ ID NO: 147859 - DNA, 654 bp, Homo sapiens; identical to SEQ ID NO: 144884
  misc_feature (1)...(654): n = a,t,c or g

SEQ ID NO: 147860 - DNA, 698 bp, Homo sapiens
  misc_feature (1)...(698): n = a,t,c or g
actcttctggtcccacaagactcagagagaacccacccatggtgcttgtctcctgccgacaagaccaacgtcaaggccggcttggggtaaggtcggcgcgcacgctggcgagtatggtgcggaggccctggagaggatgttcctgtcctttccccaccaccaagacctacttcccgcacttcgaccctgagccacggtttctgcccaaggttaaagggcccacggcaaagaaggtggccgaacgcgctgaccaaagccgtggcgcacgtgggacgacatgcccaaacggcgctgtccgccctgaagcgacctgcacggcgcacaagctttcgggtgggacccggttcaacttcaaagctcctaaagccacttgccttgcttgggtgaaccttgggccgcccaccttccccggccgagtttcaacccctggcggttgcaacgccttccctggggacaaatttcctggggtttttgttgaagcaccgttgcttgaaccttccaaataacctttaaaggttggaagccttcgggttggccatgctttctttgcccctttggggcttccccccagggccctccttccctttcctggaacccgtaacccccgtggtcttttgaataaaattttgaattgggggggcaaaaaaaaaaaaaaaaaaaagatctttnaatttaagggggcggaaagtttatttcaa

SEQ ID NO: 147861 - DNA, 693 bp, Homo sapiens
ttctttttctttttttttttttttttttttaaatggagtctcactctgtcaccaggctggagtgcagtggcacaatctgggctcactgaaacctccacctcccaggttcaagcgattctcctgccttagcctcccgagtagctgggactacaggcatgtgccaccacatccagctaattttttttgtatttttagtagagaaggggtttcaccatgttggctaggaatgtctctatctcttgaccttgtgatccacccaccttggcctccaaaagtgctgggattacaggcgtgacgaccatagcccagctcactaagtctttcttctgccatcaattctggtattaaaggattctgaggcattcttcaaaatgtcaattgcatttatcagctccagaatttctacttgattctttcaaattattttaatctctgttaaatttatgtgataggattctgaattccttctctgtgctatctttaatttctttgactttcctcaacaaagctattttgaattctctgtgtgaaaggtcacaaatctgtttccccaggattggtccttggtgccttctttggttcatttggttaggtcatggatggtgtggatgccagtagatattgaagagttaggtatttattgtagtcttcactgtctgggcttatctgtacccatccttcttgggctttcca

SEQ ID NO: 147862 - DNA, 547 bp, Homo sapiens
tgaaatctcttcaaatatactggactctaataacctttgctgcttaaattcttccaagtaattaaagtctcctttaagaatcacttgctggtataaaatttcagcccaatctggacaaaatcgtagcctcagccacaatagaagcctggtagaaccgaggtagggccagaatacagtccatcagcttgtggcggcccaagttgatgagcattgtgttctggccagtgttcagaaagtgaatctgcagagttatcaacttggtgagccgctgacagtgctgggcctgtcgcacacaggagtcctgaggaacaagggtggagaggcacagtagagaaagacctagttgtcacctcctgtgtgaaccctcacaacggtattcaccccttctgttcctggttggcctatgatgccctcccgcttcacctggaaagagcccaaggacaaaagaaaataattttactgcagacagcaagtcccaaggccagtctgaaaaaagcctttgggttaccttggcataactctctgctgcatccaacatcagagtcag

SEQ ID NO: 147863 - DNA, 645 bp, Homo sapiens
ccttggtattgcactgcagagcactggcctcaggggaagctagtatggaggatctgcacccagagatccatgctctcctacaaagtgctgagctgcttgaggaagaagcacccgacattcccctaaggagagtccacagcacttcaagtctggatagtcagaagtttgtgacagtgccctccagtaatgaagtggtaactaacctggaaagtgctgacaagcaaatgcctccatgggaagaaactactgtcgacaggtcctctgtctgtatgatcttgccaaaggagttgggctgttccctacacagatgttgctgctcaggatggtgaagccatgctccggaaaatcttggcctctcagcagcctgaccggatgcaaacgagcccaggccttcatcagcacacagggccttaagccagatactgtggctgaactcgtggcagaagaggtgacacgggagctgcttacttcatcacagggaacaggtgcccatacccccggggattcccaacctctctgacagcattctctagttcccagtgttaaggatttggatgttgtgcttatatacatcctgtatgtggttctctcaaagtttctggattgcagtaatgtattttgtttaaataaaacaaaatacatgca

SEQ ID NO: 147864 - DNA, 3450 bp, Homo sapiens
gggcttcatgtataatatcttaatatgtatctaaaagatagcttttttatgttttattttatttttattttttcagacaaagtattactctgtcgcccaggctggcatgcagtggcacaatctcagctcactgcaacctccacctcccaggttcaagtgattcttctgcctcagcctcctgagtagctggcattacaggtgcctgccaccatgcctggctaatgtttgtttgttcttttgtttttgtttctgagacaggatctcactctgttgcctaggctggagtccaatagcctaatcttggctcactgcaacctcagcctcccaggcaactgggactacaggcatgcgccaccatgcccagctaatctgtgtgtgttttttgtttgtttgtttatttgtgtagtagagatggggtttcaccatgttggccaggctggtctcaaactcctgacctcaagtgatccacccgcctcagcctcccaaagtgctgggattacaggcatgagccactgtgcctggcgtagaaagtatttcttataattaaaaacgacacccagtctaactagtataacacctaaaaaattgtcagatctgtattttagatagtacgacacagtgaaatgcaatggcacttaagcagagagaagaaggatttttctttttctttttttaaatagaaggtgttagaacctgaactgggcctggtttgcatttgggaagagtccagtggggaaacaacacaaataaggtcttgagaatgaagaattgcatttatatagggagttgtaacaaatggcctggagagtatctgactctttatgaaacatttaatgagaaatgtgacttgctttggtgcctatggttgaatttgttgcgatgcttctgacattatgaaaattttcaaacatgcaaaaaagttccagtagttatccagtgaattcttatactcaccacctatatctatagttaacattttacttgtattttatccagttatcagctcatctatgagatggcccttatttatttgcctgctgtttttattctctatttgtcctgttatttcttgttagagaagagaaggtgttcttagatcagaagatgccattgtattaggtgacggcaaggttttgctgatttagtggaacaagattctactgggatgtgtgctgagctgaaccaaggaactgcccgaacgtgctgaacaaggacatttgcttctcagatacgtgaattcaattttaagcaagattcttgatctgcttcagagcagctttgatttaaagtaatttcagagcacttttccttgcatgagtaattttctgaatgtataaaatattctatttatgtttgaccttttggataaactgtgttgctgcagtgttggtccacactaccatcctaagtgaagacttagtaagtctgaggatctccaggcactggaaagagtgagaacctgggagtgaaagggttatagttagtgttcatttttcgggttttgtttcatagggagtcctgagtggggtaacctgaaatgttttaacagttgaagatcatcccattcctatccccagtaaaaataggcctttccacaatcttctaccagttaacttagctttttttttttttttccttaatagagtctcattcttgtcacctaggctggagtgcagtggcacggtctcacctcacttgcaacctcttgtctcccgggttcaagcaattctcctgcctcagcctcctgagtagctgggactaccaggcatgcatgcaccacacccggctagtttttggtgtatttagtagagacgggggtttcaccatgttggccaggctggtctcgaactcctgacctcaagtgatcctcccacctttgcctcccaaagtgctgggattacaggcatgagccactgtgcctggccagtgttttaggtttttggcactgaagggtagctatcctccccatttttaaaagtacaaagggcactatggagcaaactgttcttgttgatcttcctttgcataaatctggttaaaagacttcccttctaaggattcttgatactgctttgccattttaagtagaggtaatctaaaggcatggtgtacttagccataaaattcttacacttgtctcacctcaaagcagaggcaaggagcaatgtttacagtcaacttttaatacttactttttggaaatctacttcaaatatactggactttaataacctttgctgcttaaattcttccaagtaattaaagtctcctttaagaatcacttgctggtaattaaaatttccagccccaatctggaacaaaatcgtaggcctcagccacaatagaagcctggtaagaaccgaggtagggccagaattacagtccatcagcttgtggacggcccaagttgatgagcattgtgttctggccagtgttcagaaagtgaatctgcagagttatcaacttggtgagccgctgacagtgctgggcctgtcgcacacaggagtccttggcataactctctgctgcatccaacatcagagtcagggccttcagcagcagttgtttcagctggtgcccatccttgaggctgtcctcccagggctgagactcaatcaatttcagttggatgcgggcagctgcctcgtggttctcgccaatctcccggcacatgctgaagcacagggcaatcatattgtgcttttcactgtctccaggacggcagcgtttgatgtacgtccagcagggctgttttcagggtaccactcggatccaacttcttcctcattagcacttcaaagtagtgctttttatgcagcaaatcaaatatgtatgtcatcctcgttgtaccttcccaatgcccagtgaggaagccgtaccaccagccccatactcctcactgggggcccaggtggttatctgtgaagcaatgtgggcggcctgtaaggaactcggaatgatgcccctcccatgtggcaacgtcagggtgaaagcaaatgaatgggcccaggatcaggagctctgtggtgcaagacagttcccccatggggaaacggaggaaaaccttatcccaacaacttcatgccctacccaatgtgcggtcttgaacacagagtggtcagctgaagaaatgtctggctttcctctgttgggttgaacatctgcttatgtcctgttccctgtgatgaagtaagcagctcccgtgtcacctcttctgccacgagttcagccacagtatctggcttaaggccctgtgtgctgatgaaggcctgggctcgtttgcctcggctcaggctgctgagaggccaagattttccggagcatggcttcaccatcctgagcagcaacatctgtgtaggaacagcccaactccttggcaagatcatacagacaaaggacctgtcgacaatagttcttcccatggaggcatttgctcgcacgcgtgggtcg

SEQ ID NO: 147865 - DNA, 499 bp, Homo sapiens
  misc_feature (1)...(499): n = a,t,c or g
aagacagagtctcactctgtcgcccaggctggagtgcagtggtgtgatcttggctcactgcaacctccacctcccaggttcaagctattctcgtgcctcagcctcctaagtagctgggactacaggggtgcgctgccacgcccaactaanntttttgngcatttttagtagagatggggttttgccatgttgcccaggctggtcttgaactactgagctcaggcaatctgtttgcctcagcctcccaaactgctaggattacaggtgtgaaccaccacacctggccagttctctaattttaagtgaaaaaaatacctccctccctcccagggttattatagtgacagagaccttagcagtgtgtcttgcattcagtaagcactcactaaatgttagtgctgctgttatttatcacatacatcttcagaaacaccgaggatcctaggattcttatagttaccacctacttgtcacccattaatgttaacatttataaact

SEQ ID NO: 147866 - DNA, 951 bp, Homo sapiens
ttttttttgagatggagtctcactctgttgcccaggctggagtgcagtggcgcaatctcagctcactgcaagctctgcctcccgggttcaggccattctcctgcctcagcctcccaaatagttgagactacaggtgcccgccgccacggctagctaatttttttttgtattttttagtagagacagtgtttcaccgtctctactaaagatcaaggatggtcttgatctcctgacctggtgatccacccacctcagcctcccacagtgctgttgttaggtatcttctaaggaggagacaatgtctgagacagggactgtgcagagcctctgtcttctgaagcacagattgctttggatttggcaactgctgtcatttgggggttgccttgcttgctgccttggtgcttgttagttttgttctccatactctagctccaccttctcaggacactgctgccctaacagaagagcccagcagctcacagagccttcctgagttcagcatctttatgtgcaagctctgcagagcccttttcctcaggcttctgtgtggatggttgtgggatgacctgtggatgatgctctctgaagcctagcaccatttcctagaaacacagtcctggtcccagcagtaaacacttgcagacttctcatccaagagctgctggatttgggaactgggttgctctgcagccagctatgttgctgcatatcttacccaagaggcgtttgtggagatctgatcactatttgcaaaggtgtgtgccacaactgagagcacagggactctccattacttgggaacatcaaccatgctgctgggactgaagggaaagtgcctgcttccctaaatcctgtgactcatatacattagaacctgatcctggaagaccagcttctcctggtaattctgaggctgaggctgctcatgatgacattcccaaccattct

SEQ ID NO: 147867 - DNA, 3943 bp, Homo sapiens
gtgcattgagcgcgctccagctgccgggacggagggggcggcccccgcgctcggggcgctcggctacagctgcggggcccgaggtctccgcgcactcgctcccggcccatgctggaggcggcggaaccgcggggacctaggacggaggcggcgggcgctgggcggcccccggcacgctgagctcgggatgcggacgctgctgcctcccgcgctgctgacctgctggctgctcgcccccgtgaacagcattcacccagaatgccgatttcatctggaaatacaggaggaagaaacaaaatgtgcagagcttctgaggtctcaaacagaaaaacacaaagcctgcagtggcgtctgggacaacatcacgtgctggcggcctgccaatgtgggagagaccgtcacggtgccctgcccaaaagtcttcagcaatttttacagcaaagcaggaaacataagcaaaaactgtacgagtgacggatggtcagagacgttcccagatttcgtcgatgcctgtggctacagcgacccggaggatgagagcaagatcacgttttatattctggtgaaggccatttataccctgggctacagtgtctctctgatgtctcttgcaacaggaagcataattctgtgcctcttcaggaagctgcactgcaccaggaattacatccacctgaacctgttcctgtccttcatcctgagagccatctcagtgctggtcaaggacgacgttctctactccagctctggcacgttgcactgccctgaccagccatcctcctgggtgggctgcaagctgagcctggtcttcctgcagtactgcatcatggccaacttcttctggctgctggtggaggggctctacctccacaccctcctggtggccatgctcccccctagaaggtgcttcctggcctacctcctgatcggatggggcctccccaccgtctgcatcggtgcatggactgcggccaggctctacttagaagacaccggttgctgggatacaaacgaccacagtgtgccctggtgggtcatacgaataccgattttaatttccatcatcgtcaattttgtccttttcattagtattatacgaattttgctgcagaagttaacatccccagatgtcggcggcaacgaccagtctcagtacaagaggctggccaagtccacgctcctgcttatcccgctgttcggcgtccactacatggtgtttgccgtgtttcccatcagcatctcctccaaataccagatactgtttgagctgtgcctcgggtcgttccagggcctggtggtggccgtcctctactgtttcctgaacagtgaggtgcagtgcgagctgaagcgaaaatggcgaagccggtgcccgaccccgtccgcgagccgggattacagggtctgcggttcctccttctcccgcaacggctcggagggcgccctgcagttccaccgcggctcccgcgcccagtccttcctgcaaacggagacctcggtcatctagccccacccctgcctgtcggacgcggcgggaggcccacggttcggggcttctgcggggctgagacgccggcttcctccttccagatgcccgagcaccgtgtcgggcaggtcagcgcggtcctgactccgtcaagctggttgtccactaaaccccatacctggaattggagtcgtgttgtcattgactcgatttaaactccagcatttagataatcttgtgcaaaatgtgtttcagccgtatagtggatccacttttttttttttttttttttgagacggagtcttgctctgtcgcccaggctggagtgcagtggcctgatctctgctccctgcaagctccgcctcccgggttcacgccattctcctgcctcagcctcccatagctgggactacaggcgcccgccaacacgcctggctaattttttgtatttttagtagagacagggtttcaccatgttagccaggatggtctcgatctcctgacctcgtgatgggcccgcctcggcctcccaaagtgctgggattaaggcgtgagccactgcgcccggcccaagagaataggggagccaaggaggaaatgtggaaacgcagttgtgtggcccagcacgagcctgggcgaccaccgggtgacatccgtcccacatcagggcggcctcccaggtcccataagggtagccccctcatctgcaggacagagggaagccagtcagggcccccccggacgttaggaccaggagaaatcaacaggagggcagcccgtcctctctcttggggcgcccacccggcccggctgagccctgccccacccaactccacagggctgttttgcctccccacggaaggcgggctgaggagacaaccagatcaggagagcaaggtcatgaaggaggggacctctccacacaggtgttccgtgggaccctcagcagctctggctctgcctcaggaggtcacctgccgccctgtgggagccgcagagcctgacgctcagccccaggccagctgcggccaggcctgcgggcccctggtgatggggttacgtggggtgcgggatacagctgagtgggaaccggaaacctattctctttttaacaaaaataatcttaggataagaattattttaacaacatataaaactgtttcaagccctcctccccagagctggcgctcagcagccctagcggctgctccttcaggcgaagggtggtttgcagatgtggggagggtgtctggggacgttgctgagctggctgcagaagggtggggatatcagggcacagtctccatgtgtgtgccaagccctggcccccacagcgctcgatggacctcagcaagctgcccagccctggcccaggtgccccgactgtgggactcagttgttctgagcacatttgactccacttttcctttaaaaatgaatgtcttgttcctgtgcattggtggcatcacagaccccagctggggcgcgatgtcaaaggtcgggacagctgtgccgggaggcagccacagggaagctcacacatcctgtcagtgtcaccttggtttgcaaaacccatatccccggtaaaatgaggccggacagaggggctgttaggacagcaaagcagcagtgtccagagacccctcaatccccaaaggtccgcaccctgtcctgcacaccctgggccacgccggccacacccctctgctgcaacaagctcatccctggacttctgggagaatgaacccgaggttggtttggggagacaggtgaggcggttggatctacagaacaacccaccatttctgggggccgcagaggatccatcacagacggatactggggagtaaacggcccaggccaggtgcccaggaaaggacggctgagcatgtggagcgagagggaggcaggtggacgctgcagaccccaggttcagtgcggcccctcggctgttcctcccctgtagggtttggacagacccacccccagccttgcccagctttcaaaggacaaaagggagcatcccccacctactctcaggtttttgaggaaacaaagatttgtggtaactgaaggtgttgggtcagtggccaggtgccgacactgagctgtgacccagaggggacgctgaggaagtgggcgtgagtggacatgtcaggtggttaccaggcactggttgttgatggtcggtggttgggtgtgggcagtcatcagtcatcaggtgtgctcaggggacaatctcccctcaaccgcacatgtgccactgttcagcggagctgactggtttctcctggtagagggccggctgtatcctgacagatgcctggtgagcaggggaagcaggacccagtggtcaacaggtgtctttaactgtcattgtgtgtggaatgtcgcagactcctccacgtggcgggaatgagctgtgtaaatacttcaataaagcctgacttcacatctgca

SEQ ID NO: 147868 - DNA, 1050 bp, Homo sapiens; identical to SEQ ID NO: 144729

SEQ ID NO: 147869 - DNA, 1201 bp, Homo sapiens
cagcccgttaaatttcaaaaaattaaattgaaccagagtcccctggccccgttgaaggaaaaataaataaaaatgtgttagtgccaagtagtaatttttggcattaggggattgatacaattttgcccttaaatcagaattgaagtttaaaaaccaggccatagtttcccttaataaattttttttttttttttttttaagatggagtcttgctctgtcgcccaggctggagtgcagtggtgggatctcagctcactgcaacctctgcctcctgggttcatgccatttccctgcctcagcctcccgagtagctgtgactataggcgtccgccactactcccggctaattttttgtatttttagtagagacggggtttcaccgtgttagccaggatggtctcgatctcctgaccttgtgatccgcccgcctcggcctcccaaagtgctgggattacaggcgtgagccactgtgcccagctagaatctaagttctatgaaggcagagatgttcatctattttgttcaccactctatttccaaaaagctagaaaactgcctggtatagaatagttgctcgtaagcatttgtgggattattaaatgaactttatgtctcataagagctgttttctagcattaatcaaaggcagttcttctaggttctcacaaccttaggaaagataatatgtaatacttcgtatttacaaacagcttttgggtgagcactggaacccttttgtagacagtctcattcaaccacagtagacctaatatctaacgactgagggcaaagaagggatgtgagatgagcagtcaaatgctttcaggccagagaacaaaatagatgacccaggcccctgcttattcgctctgccctttgcccctggagctttagctgctttgcttagaggacagtctctccctcactgaagatacctaattgcacattagcaataggaaggtttcactggacccaaccagactcattcataacaaatagcgacacattcctttgcaacaaggttctaggatttccaacttcttgccaaggcaattctttaaatagaggaaatggctttcttttcaaattcatcttaatcaccaataagttaaaaggttaacaggaatttaaacccctcggatatgacagctgcctatattatttgttctaagaggaagaaagcttaaagtcaagataactg

SEQ ID NO: 147870 - DNA, 8887 bp, Homo sapiens
ttacaattgaaactctgggaattcaaaattaacatccttgcccatgagcttcttatagacaccagaaaagggttcaaccttgtgttccacattgttctgctgtgcttcgtccaaatgaatctttatgaggtggctgccatccagtttcacgtggattctcttgcccacaatttcgcttgggaagaccaagtcctcaaggatggcatcatgcacagctgtgagagtacagctcctgggaagcttttgcttattgtttgtacagcttttttgagttggcttaggcagaattctccttagctggacttgggttttctggaaagatttcagttgaggaacgggaacaaagattatgatagctttccgaccaccaccaacttcaatttccttggctgccgtaatattcagctcccagagctgagccttgaggtccaagttcatctccagctccagaagagcctgggagattccggattcaaactcatccggcttctcgccattgggcttcacgatcttggcccttgaactgaacatggtcttctccttgctgagcgctgtgttggtgaggtttgttgatgagtcccataacattgtgtctagttgatcttcttcctcttctccttcttcttcttctccttcttcttcttcttcttcttcttcttcttcttcttcttcttcttcttcttcttcttcttcttcttcttcttcttcttcctcctcctcctcctcctcctcctcctcctcctcctcctcttcttcttcttcttcttcttcttcttctttttttttttttttttgagacggagtttcgctctgtcgcccaggctggagtgcagtggcgcgatctcgactcactgcaagctccgcctcctgggttcacgccattctcctgcctcagcctcccgtgtagctgggactacaggcgcgtgccaccatgcccggctaatttttgtatttttagtagagacggggtttcaccgtgttagccaggatggtctcgatctcctgacctcgtgatccacccgtctcggcctcccaaagtgctgggattacaggcaatgagttgatttttaactactgggtttaggccaggcaggcccaggcctggttttgggcctggcgctgggctgcctgtctttggttttacttccttgttgttttttcttaaaacaggtactgaggccgggcgcggtggctcatgcctgtagatcccaccactttgggaggccgaggcgggcctgatcacgaggtcaggatatcgagacccatcccagctaaaaacggtgaaaccccccggctctacttaaaaaaatacaaaaaaattagccgggcgcggtggtgggcgcgtgtagtgccagctactcgggaggctgaggcaggagaatggcgtgaacccgggaggcggacgttgcatgtgagccggagatcccgccactgcactccagcctgggccacaggaggcgagactcccgtctcaaaaaaaaaaaaaaaaaaagaaaccacagcagctgtggctggggagcccagatgaagtgtggctctatcttgtatgtgagcacacccacattttcactgccattatctgggacagcagaaccaggtttggctcaacagatttctctttccacccatctattgcaggagtagtggtcttgctgcttctccagggaggtaagtagtcaataagtcactaccgcctggatctcctggcttgggtgctttcatttttgatgtacagtttctttttctgctacatgctttttctcttgattactctctccggttctgccactgacatatttatgacactgagtttttattctatctttttgtgtatcccttgttctagttctttttgagccactctctctctcacccctcccccatagctggcctcaatatgtgtgtgtgaatacaaacatacacaatgtttgtattatctgtttctctactgatctgtgtcatccatccatacatacatactgaatcttagtgctccatgggtgtttcatatgttggtggtatctctgtctctcaatgtattttttttttaatttttttgagacagggtcttgctctgtcatccaggctggagtacagtgacgcgatcatgggtcactgcagccttgacctctctagctccagtgatcctcccacctcagcctcttgagtagctgggaccacaggtgcacgccaccacacccagctaatttttgtattttttgtagagacaagttcttcctgcgctggccaggccagtttcacacgcctgggctcaaacagtcctcctgcctcaatctccccaagtgctaggattgcaggtgtgagctgccacatctggctttttactttgtatccttattctataagctcttttcttttcttttttcttttttttttttgagacggagtctcgctctgttgcccaggctggagtgcagtggcgcgatctcggctcactgcaagctccgccttccgggttcacgccgttctcctgcctcagcatcccgagtagctgggactacaggtgcccgtcaccgaattttttttgtatttttagtagagatggggtttcaccgtgatctcgatttcccgacttcatgatctgcccgagggattacaggcgtgagccactgcacccggcccttttctttttttttttttttttttttttttgagatggagtctcactctgttgcccaggctggagtgcagtggcttgatctcggctcactgcaacctcggcctccggggttcaagcaattctcctgcctcagcctcccaagtagctgggactacaggcgcgtgccaccacgcccggctaattttttgtatttttagtagagacggggtttcaccgcgttatccaggatggtctcgatctcctgacctcgtgatccacccgcctcggccttcaaaagtgctaggattacaggtgtgagccaccgcgcctggcctatacgcttttttctgttaaaaaatatttttaagtttttaaacttttgttaaaaattgagacagaagcaaacacattacttactaggcctacacagagccaggattatcagtatcaatcccttccgcctccacatcatgtcccactggaaggtcttcggggcagtaacggacatggagctgttatctcctaacatgccttcttctggaatacctcctgaaagacctgcctgaggctatttaacagttaactttttttttatatgtaagtaggagtactctaaaataacaatataaaatgtagtacaataaaataaataagccagtaacgtagttgtttattatcaagtatgtactgtacataattgtatatgctagacttttatacagctggcagcacagtaggtttatttataccagcacctccacaaacatgtgagtaatgctttgcacttgaccttctgtcagctatgacatccctaggttgcaggatttttcagcttcattataatcttatgggaccatcttcatatgtgagtggtctcttgacccaaacattgttatgtagcacatgactgtaaattttggaatcaccttgtcagtatttacaaaatagctttctgagatttagtggcaggatctcagctcgctgcaaactccgtctcccgggttcatgccattctcctgcctcagcctcccaagtagctgggactacaggcgcccaccactacgcctggctaattttttgtatttttagtagagacagggttttgccacattggccaggctggtctcaaactcctggcctcatgtgatctgcccgcctcagcctcccccagagtgctgggattacaggtatgagccactgcgcctggccaaaattgcctaaatttttaaaatcctaaattggtgttgaattttgtcaaatgctttcctgcattgattttgatgatcacttgatttttctccattcttttgttaatgtgctaaattatgttgcttaatttttgaatgaaaaaataatcttacattcctgaaataatttcggtttggttgtgatgttttattcattctatttcgtgctgaattcagtttgctaatattttgtttaggaattttgcatctatgttcatgagacagatcggcctgtaattttacttttttgtaatgtccttgtcaggtttaggcctcaaagttatgttgactttataaaatgaactgtgaagtatttcctcttttttatgctttagtttgagtaagattgattttttttaaaacttatgtcgtccttaaatatttattagaattcactagggaagttatcttggcctgttactttctttcttgagtaaattttgttttcattctttttttatagttaagtatattgagttagaatgcatacacaaacaaatgcacacaacttaaagtccagttctatgaattttgactaatgtataaacctgtttaacttccactgtaagcaaaatatagtgaattttcgtcaactaaaaagtccccttgtacccatttaccttcagtacctatccctaccccagccacaggcaacaaatgattttcatgtgcttatttgccatctgtatacctctttggttagttttctgtttatatcttttgcccatttatttttttttttttttgagacagagtcttgctatgttgcccaggcaggtcttgagctcctgggcttaggggatcctcccgcctcagcctcccaagtagttgggactacaggcacacactactactcttggtttgcctatttttaaatcaggttgtttgttttcttattattgtgttctctacactgtaggatattctacctttcctagaatttcatgtaaatggactcagacatactgttgtgtctggcctcttttgttcagtgtaatgtttttgagcttcatccttgcatgttatgtgtatcagtgattgattcaatttttattgctgcatagtattggattgtatagctataccacaatttgtttattcattctcctgttgatggaatattggttgtttccagtatttagctattattattattattttttttttttgagacggagtctcgctctgttgcccaggctggagtgcagtggcgcgatctcggctcactgcaagctccgcctcccaggttcacgccattctcctgcctcagcccccggagtagctgggactacaggtgcccaccaccacacccggctaattttttttttttttttttttttttttttttttttagtagagaaggggtttcactgtgttagccaggatggtctccatctcctgacctcgtgatccgcccgcctcggcctcccaaagtagtgggattacaggtgtgatagtatgaattttcttatggttagtaaggattgaagactggttaaaggctttgcaacatttttcacatttgtagggtttctctccagtgtgaattatcttatgtttagtaagagctgaggactctttaaaggctttgccacattctccacatttgtagggtttctctccggtgtgcaacctcttatgtctagttagggttgaagattggctaaatgctttgccacattcttcacatttgtagggtttctctctagtatgaattctcttatgtccatttagggttgaggatgatataaatgctttgccacattcttcacacttgtaaggtttctctccagtatgaattatcttatgtgtagtaagctttgaggatcgattaaaagctttcccacattcttcacatttgtatggtttctctccagtgtgcatcctcgtatgtctagttagggttgaggattggctaaatgctttgccacattcttcacatttgtagggtttctctccagtatgaattatcttatgttcagtaagagttgaagatttcctaaaagctttgccacattcttcacatttgtagggtttctctccagtatgaattatcttatgtgtagtaagggttgaggattggctaaaagctttgccacattcttcacatttgtagggtttctctccagtgtgcatcctcttatgtgtagtaaggtgtgaaggctggctaaatgctttgccacattcttcacatttgtagggtttctctctggtatgaattctcttatgttcagtaagggttgaggaccagataaatgctttgtcacattcttcactcttggaaggtttctctttagtatgaattatcttatgtgtcgtaagatttgaagattgattaaaagctttgccacattcctcacatttgtagagtttctctccagcatgtattattttatgtttagcaagggctgaggagtgcttaaaagctttgccacattctttacatttgtagggtttctctccagtatgaattgtcttatgcttagtaagggttgaggaacggctaaaagctttgccacattcttcacatttgtagggcttctctccagtgtgtatcctcttatgtctagttagggttgaagaccatataaatgctttgccacattctttacatttgaagggtttctctctagtatgaattcttttatgtttagtaaggcttgaggaccagttaaatgctttgccacattcttcacacttgtaaggtttctctccagtatgaataaacttatgtatagtaagatttgaagatcgattaaaagctttgccacattcttcacatttgtagagtttctctccagcatgtattattttatgtttagtaagggttgagagtcgcttaaaagttttgtcacattctttacatttgtagggtttctcttcagtatgagttatcttatgattagcaagggttgaggaattgctaaaagctttgccacattctttacatttgtagggtttctctccagtatgaattctcttatgtttagcaagggctgaagaatggctaaaagctttgccacattcttcacatttgtagggtttctctccagtgtgtatcctcttatgtcttcttagggttgaggaccatagaaatgctttgccacattcttcacacttgtaagacttctctccagtatgaattatcttatgtgtagaaagacttgaggaatgattaaaagctttgccacattcttcacatttgtagagtttctttccagcatgaattattttatgtgtagtaagggttgagaattgcttaaaagctttgccacattctttacatttgtagggtttctctctactatgaattatcttatgtttattaagggttaaggattgtctaaaagctttgccacattcttcaaatttgtagggtttctctccagtatgaattatcttatgtttagtaagggttgaggattgcctaaaagctttgccacattcttcacatttgtagggcttctctccagtgtgtatcctcttatgtctagttagggttgaagaccatataaatcctttgccacattctttacatttgaagggtttctctctagtatgaaatcttttatgtttagtaaggcttgaggaccagttaaatgctttgccacattcttcacacttgtaaggtttctctccagtatgaataaacttatgtatagtaagatttgaagatcgattaaaagctttgccacattcttcacatttgtagagtttctctccagcatgtattattttatgtttagtaagggttgagagtcgcttaaaagttttgtcacattctttacatttgtagggtttctcttcagtatgagttatcttatgattagcaagggttgaggaattgctaaaagctttgccacattctttacatttgtagggtttctctccagtatgaattctcttatgtttagcaagggctgaagaatggctaaaagctttgccacattcttcacatttgtagggtttctctccagtatgaattctcttatgtttagcaagggttgaagaatggctaaaagctttgccacattcttcacatttgtagggtttctctccagtgtgtatcctcttatgtctagttagggttgaggaccatagaaatgctttgccacattcttcacacttgtagattttctctttagcacagattattttatgtgtagtaagggttgagagctgcttaaaagctttgccacattcttcacatttgtagggtttatcttcagtatgaatttccttatgattagtaagggttgaggaccaatgaaaggttttttcacattctttacatttacaggacttctctgtaatataaacgcatttatgttgggttttgtgtaaacggatgcaaaatgacttgacacattttttacatttgaagcatttctttccggtatgtcttatcgtatgtctgtttgaatttaaaaatttatagaagactttcaaatatttcccacattgaaatactttgctctgggcagttgtgagacactggttaagtttattataaccttctttgtgcaccttacactcatccacacttttacaaccttttcttaactgtaaattctcatgtccacatttttcatattttctcagtaatactttttgaaaagaatcttccatgctctgctctggccaaaagtcttgaggaaaatgaggacatatacctgtgggttcatccaccatctcatgttgcttcatattccagggctcttttccttgctccagataagtaatcaggtctggcttagagagagcaatacccaggaaggccaggtttctgtagttctctaacatcacattcctatataaattctgctgtgcagtgtccagacattgccactcctccggagagaattctatggccacatccctaaatgtcaacagtcccatttctaggcttccaggggttcctggcatcttagctgtggctcttccaatacctgcaggtcacagggccacacaggctgggcctcctggagcagaggacacagagcagtgaagtcgagacctg

SEQ ID NO: 147871 - DNA, 837 bp, Homo sapiens
agagacagggtcttattctgacacccacattggagtgcagtggtttgatcaaaactcactgcagcctcaacctcctgggctcaagtgattctcctgccttagcttcctaagttggtgtcttgctatgttgcccaggttggtcttgaactcctggcctcaagtgaccctcctgcctcagcctcccaaagtgctgggattacaggtgtaagccagcacacccagctaggttagagatcttaatgaatcaaccaaggaccctgaagttggccagtggtgtgtctccaattaggtgcttccacatcatgagtgccaaaagcagaacaaggtggttaaaatcctagccttgctactcactagctgtgtaacctgagcaaacttctaaccccttctgaacttctcagtctatctctaaatttagggtaacattactactttaaaggatggtttgtgaggatttaatatacaaaaagtgccaagtgcagtaaatgcccctaatgtattgtatttgtctcaaaaattttaagtccggtttctgattcttggcttggtacatttcaatagaagctcacaaagtgtataaaaatgggaaaccttcctacagatccctgcattccccaagttagcccagtgttgtgctctgaagatattaaatgtatagacctcgtcactcacaatttatgagaaaatgagaacccaaacttggttgcataataacccaagcttagtggcatatttcttgtagccatcaagcctctagctgcctttgctaataatctgctgatatgtgtccacttctatgccccattctatgttgcagcctctgtaactgggcttgtg

SEQ ID NO: 147872 - DNA, 391 bp, Homo sapiens
gtggaggtttatgactttccaataagtgaaatgttaatgagggttattaaccctcactagtgtctgtttggaagtaacgacattcttccaaaaatcttggaaatgttgattctgaatgtgaatgaacatgattccctgatataataccctttcactgaaagaagctaactgaaggtgaatatcagaagagcgtgaaccatagacaaacgctgttgctcatagtactctgtcatcacaattactgctagccttacagaaaactctatcactctgcctgttccttatgcttctgactaagctcccaacaattattcacagaactgtagatgctcatagcttggctgatgatgatgtggaatgacaaacacatgtcagcataataccatctcac

SEQ ID NO: 147873 - DNA, 413 bp, Homo sapiens
aaattttatgtaaagtaaacacatctaatactttgtaaggtaggtaggtgtgtggttgtgtgtggatgttaagagtcttgttctgttaccccaggctggcagtgcggtggcacaatcatagctcactgcagccttgatctcactggctgaatccatcctcctccctcagcctccccagtagctgggaccacagacgtgcaccaccacgcccagctaatttttttaatttgtagaggcaggagctccctatgttgctcaggctggtcttgaagtctgggctcaagtgatccttccaccttggcctccaaaaatgttggaactacaggtgtgagccaccatgcctgtcctgttatttccgaaattaagaagatctatccgactcccagaataatacaactattctttcattattt

SEQ ID NO: 147874 - DNA, 2162 bp, Homo sapiens
ctgatgaaaggtccccaggatggagtggccagaaactcttgctgtggagactgcataagtgaagatgatgatgcaactgaatggattacattccaggtcaaacgtgtaaagaaacccactggagatcatatgaaaactgctgggaaaaaatgagaaacaggtcatatagaagatggacatcgttaccaagcaaacctagagatcactggccccaaggtggcatctcctgggccacaaggaaaaaaacgtgactaccagcgtctggggatggcccagcccgggacggaatgcctcaaactccgctggggtaggagctggactgcccttcgtgagtacctggcttgcagtttcttcaaaaaacattgacatcacagaacacatagattttgccacccctatacagcagccagcaatggagcctctttgcaatggcaatctccccacgagtatgcataccctgggaccacttgcatggggtttccaacccgagccagccttgcacttacacaggggagagtcagttaacagaggtattacaaaatctcgggcaaagaccaatatccacaacagtcgcttgaacagattggcaccccgaatgcccaaagttttggaaaagaacccagaccgtcctgggtcctcttccagcatggcaagccctctactgggagggtgtaaaggcccaaggaaagaaggccaatcgaactgccttccgcccagcgtctgcactatgggccacacccagatgaaggatgtgcccctgattagcctggccaacatcttgccacaattgccaagctctggaaatgacgccgtcatagtagccacccatgggcagtagagtttgcaccacactttgctgtgaaccccctttcacttgggcaatgtctacgtggcaatggaagaatttgaaaaagcactggtgtggtatgaatccacattgaagccttcagcccgagtttgtcccagccaagaaccgaatccagaccatccagtgtcacttaatgctgaagaagggacgggcgcttcttccttagtgcacttcttccttcttctctttctctttactcatggctctaaaaaaaaaggaataaggaaaagaaaccaatcattgtcagtatctactattaatgatgtgtgtgaaaataactaaggacttaacagggacttttacatatgtgggaattgggttgtttttgtttttacgtttctcctttcccccaaccaacctcagaagagggcacctttagaaacacacatttcttaaaaggaaagtgcagcttcaagatattgtgtaaatactgagccaagacatttctggagctgtgctctgtctccaaaaacctcaatgccctttagggcttttctcagtgggtcagctagccttctcctttggaggaggatgaaaccgcatagcttcatgactctgcttcctgtcgtagcctctgttgtcaatggaaatgcggaagcccatctggtgcccgtgcagggagaagcaacgttctgcgctctctccgttaagacctccattgctgtccccagtcttgtccattccatggcttgctgtgttacaaactcttcaggagggtagtttgcagggggagggaagggggaaatatgattttaaaaccaaaattatttccaacaaccaaaaattcttagggatcaccctgaccttggtaaggttattttatgttgggttcccgggaggggggcttgaggaaggggggaaatcaggcagtgttgcaacatctttataatttggtacttctaatttacaaatccacaaggaaacccaataaggttgaaatccctatataaccaggtttatatatatagaatatgtatatttgaagcccctcctacagactgagtctatgttttacctaagtctttgttcactgtgttaccccatcttgaaataaagttgtgaatgtcagctccctctctctgaggcctccaggacttagctcctcaggagggtaatgagccaaggttgagtgtttccatacaatgcttttacctttgatcccaggagaatcaggaaactccaacattttgggaatcttcaaggggcacatactgagaaaaaaaaataaaattgtttatgagcaaaaaaaaaaaaaaaaaaaaaaaaaaaaaaaaaaaaaaaaagggcggccgct

SEQ ID NO: 147875 - DNA, 5795 bp, Homo sapiens
gttggctgatagttcaccttcaaatcttcaaattattataaaagaactgctttctatgcatcaccagcctgaccctgctcttaccaaggagtttgattaccttcccccagtggatagcaggtccagttcagggtttgtggggctgagaaatggtggtgcaacttgttatatgaatgcagtcttccagcagctgtatatgcaacctgggctccctgagtcattactttcagtggatgatgacacagacaatccagatgatagcgtgttttaccaagtgcagtctctctttggacatttaatggaaagcaagctgcagtactatgtacctgagaatttttggaagattttcaagatgtggaataaagaactttatgtgagagaacagcaggatgcatatgaattctttactagtctcattgatcagatggatgaatacctcaagaaaatggggagagaccaaatttttaagaatacatttcagggcatctactctgatcagaagatctgtaaagactgtcctcacagatatgagcgtgaagaagctttcatggctctcaatctaggagtgacttcttgtcagagtttggaaatttctttggaccaatttgttagaggagaagttctagaaggaagtaatgcgtactactgtgaaaagtgtaaagaaaagagaataacagtgaaaaggacctgtattaaatctttacctagcgtcttggtaattcacctaatgagatttgggtttgactgggaaagcggacgctccattaaatatgatgaacaaataaggtttccctggatgctaaacatggagccttacacagtttcaggaatggctcgccaagattcttcttctgaagttggggaaaatgggcgaagtgtggatcagggcggtggaggatccccacgaaaaaaggttgccctcacagaaaactatgaacttgtcggtgtcatcgtacacagtgggcaggcacacgcaggccactactattccttcattaaggacaggcgagggtgtggaaaaggaaagtggtataaatttaatgacacagttatagaagaatttgacctaaatgacgagaccctggagtatgaatgctttggaggagaatatagaccaaaagtttatgatcaaacaaacccatacactgatgtgcgccgaagatactggaatgcctatatgcttttctaccaaagggtgtctgatcagaactccccagtattaccaaagaaaagtcgagtcagcgttgtacggcaggaagctgaggatctctctctgtcagctccatcttcaccagaaatttcacctcagtcatcccctcggccccataggccgaacaatgaccggctgtctattcttaccaagctggttaaaaaaggcgagaagaaaggactgtttgtggagaaaatgcctgctcgaatataccagatggtgagagatgagaacctcaagtttatgaagaatagagatgtatacagtagtgattatttcagttttgttttgtctttagcttcattgaatgctactaaattaaagcatccatattatccttgcatggcaaaggtgagcttacagcttgctattcaattcctttttcaaacttatctacggacaaagaagaaactcagggttgatactgaagaatggattgctaccattgaagcattgctttcaaaaagttttgatgcttgtcagtggttagttgaatattttattagttctgaaggacgagaattgataaagattttcttactggagtgcaatgtgagagaagtacgagttgctgtggccaccattctggagaaaaccctagacagtgccttgttttatcaggataagttaaaaagccttcatcagttactggaggtactacttgctctgttggacaaagacgtcccagaaaattgtaaaaactgtgctcagtactttttcctgttcaacacttttgtacaaaagcaaggaattagggctggagatcttcttctgaggcattcagctctgcggcacatgatcagcttcctcctaggggccagtcggcaaaacaatcagatacgtcgatggagttcagcacaagcactgagaatttgggaatcttcacaatacagtggccgttacttgttttgcattcagatgtctcatcccaaaggaatgttgctcctgggcatatttaagcaacgaccacccattagcattgctccctcaagccctctgttgcccctccatgaggaggtagaagccttgttgtttcatgtctgaagggaaaccttacctgttagaggtaatgtttgctttgcgggagctgacaggctcgctcttgggcactcattgagatgggtagtgtactgctgtttctgtaatgagcatttttccttcacaatgctggcatttcatttaaggaaccaactaggaaacggcttccacctcatgagtttaaaggaatacgtttcccaactactttcatggaaatattggttattgaagatcctatacaagcagagcgagtccaaatttgtgtttgagacagaaaatggattactagctttgatgcaccacagtaatcatgtggacagtagtcgctgctaccagtgtgtcaaatttcttgtcactcttgctcaaaagtgtcctgcagctaaggagtacttcaaggagaattcccaccactggagctgggctgtgcagcggctacatcactaagatgtccgatctttactggacaccacttagtaatgtctctaatgaaacatcaactggaaaaaccttttagcgaaccatttcagatcacgacacgttaccgtatgccacagctttgctgaatgaaaaagagcattcaggaagccgtaatgggtcgaagagtagacctgccaatgagaacggacacaggcatctacagcagggatcacaatctcccctggatgattgggtgagtttgagaagtgaccttgatgatgttgatccctaggagggaacatgcccagcctgagaggagtcaagacacaatactggatgctcagcaccttcttgggaatcagaatctcgaaccctttgggaagagccgggagattgggactggggaaagctgctgtgacttggggcggatcgtgtatttcttcaagggaaagctttttaaggccactaggaaggtttgggagctgtttgggcagtggggaggaactccggcatgtggatcagctgtcccgggagcgtggtctatatgtggattcacatttctgtggagattttcggaaatagagccagtggcagacttttttgttacacgaacatacaagagtgagcataaagctgttgctttctctacgatgctacaaaagaaattcctttggtttttatattttaagaaaaagcaagctgcttttagatatgtgggggcaaatttttaatcttgcagtaatattaaacaggaatatccaatttaaaatgatgtaaagatgtaataaaaattcctttttcattgtaaaatagtaattaaagtcaatttacacagacctttgtatttaatatgtccccccccattgtatagaatttccagatgggtcctagatgagaacccctatgccataagcctggatcctgatgaaaggttacccaggatcaggatcaaaaattggggaaatactaagctcttggaggatatttttcctgatataattaggattgaaaagaggcaattttggaaaatgctgtgttctccagaagtacagggtgcattatttggacatccaattcccttaaagaagttatgagttgttccccccaaacagattttaaaaacagccaaattaaaggcactttaagatataattttactgagtttaacttcacagaattatctttttaatgccttggagacatattgaataaactgtagtcttaaatcatgtgatctgcaatcgtttgcttttgcttaaaacataattactgaaacccttggtattggttgtatatgaagttaactatttgagttggtacacactcgcttgtgagtttcatagttattgtaatgcagaggaagggaatttgaggaatttgtttctcctcaacatgactaattaacactggaaaagtccagtcaaggtttaaggatttattttcccaggaaataaatataaaggcaattggaataaccatccatttaggtcgtatttcccaaaggtataggcaccattcactccatttatacccagctccctttatgggtgtgggggggagagggtttacacccacatatttgcatatatattttgtacattttgtattttgaattgctcacattttcgggccctgttttgcctttagttacaggtcctgccttattttcatctcaccatgcacagaactaggggagccttaggaagtgccaggttttcactgtcagatttgccaagtcacagaggcgcagccagccctgaagtgcctgtctggctgctgtggcattgtgtgggcatgtggccaggcagatggcatctcattatctgtgctcttcgccatggcccagtcttttcattctctgggcagtgagggtttctgtggctgttcagacttcattgttattctgtgacttgctgggaggttgggcagtggccttttgtcaaacacactgagaagatggaagggccagcacttaagagcagaactgtacccttagagaaacggacagaggcgagttggcaaacttcagacggttccaatggtcttgcagtttgaaatgtgatgttctaccattggttttgagtacgtgaatacttcctgtcctactgtttcccctaccctattctcaccttctctccgcccacatcctcaccaagagattgtgtggggacatgaccttgaaatgctgggcgatgatccacactggggatatcatcgctgggcgactgcacttttcagggagcccaaaatcaggagtgaaattgccacttctagtcccctttatttcctatgggaaacaacgccttccgcacccctaggcacctgccgtccttcactgttaaaggtttcatcagggttcgtccaccgtgtatattataccgcttcagatcatgttgcttatatttgtttgctggcaatgaccatcgtttttcacttttgctggtaaccacttggattggtggacagctaacagttcaatggaacctggtggatggacttttttttaatgtaggttacaacagtgacagttatggacagggcttaccttggaagagttgtcatttttactgccaattttttgggatgaagatgtttttataaacctttcaaaatgggtctgcaaacagagcagggaattgccacaattaactcaactcaataatgctgtgtgttcctcaaaaaagctccccttaggtgaggcccggatgcttaaagatgggcccgatttctgccccgttgaaagggcacccctgggaaaagaaaacaagcatcccccagcggggccatcctcaccccacgacttcctccctggagtccctcacacgggtcacttgacaacctacagtcagttttaggaacttagagtgcccgtatccatcagacttaccctgtccctgcccccaccttaccctgcctaacatccgaggtgtgtgcagttaccttcctgagcttggaacaagcagactggaattttcctctgctacctccttggtgtataaaatcttgtttataaaatttcaaaaggaagtagatacacttagggaagaaccttaattctaaatttggttcatgtgtggcaaaggttcttagcttctaaggaggtataaaataaatttttcaaaaacaaaaa

SEQ ID NO: 147876 - DNA, 499 bp, Homo sapiens
  misc_feature (1)...(499): n = a,t,c or g
gattgtgccgcatatcccacgggaatggcgataccataacagtacaccaccgcgagccctaggctagaactttagactagacctatgtagagatatactatgttcagagactacaagactcaataccattaatatgtcaattctttccaacctgacctatagattcagtgaaatcccattttgaatattcaggaggctttttgttttgtagaaattgggaactcaattctaaaatacatatggacatgcaaaggacctagattagtgaaaacaacttttaaaaataattctgaaagttggnnnnnnnnnnnnnnnnnnnnnnnnnnnnnnnnnnnnnnnnnnnnnnnnnnnnnnnnnnnnnnnnnnnnnnnnnnnnnnnnnnnnnnnnnnnnnnnnnnnnnnnnnnnnnnnnnnnnnnnnnnnnnnnnnnnnnnnnnnnnnnnnnnnnnnnnnnnnnnnnnnnnnnnnnnnnnnnnnnnnnnnnnnnnnnnnnnnnnnn

SEQ ID NO: 147877 - DNA, 518 bp, Homo sapiens
  misc_feature (1)...(518): n = a,t,c or g
gtaactttaggatgtaaaggtatattgtgaaccctagctgtgtcagaatctccatccctgaaacttctcattagtggtactggggtgggatcttggatggtgacattgaaactacactaaatcccctcactatgaatgggttgttaaaggcaatggtttgtgtcaaaactggtttaggattacttagagtgtgttcctgaagaaaagagtccaggtaaatggtatgatcaataaaggacaggctggtgctaacataaaatccaatannnnnnnnnnnnnnnnnnnnnnnnnnnnnnnnnnnnnnnnnnnnnnnnnnnnnnnnnnnnnnnnnnnnnnnnnnnnnnnnnnnnnnnnnnnnnnnnnnnnnnnnnnnnnnnnnnnnnnnnnnnnnnnnnnnnnnnnnnnnnnnnnnnnnnnnnnnnnnnnnnnnnnnnnnnnnnnnnnnnnnnnnnnnnnnnnnnnnnnnnnnnnnnnnnnnnnnnnnnnnnnnnnnnnnnnnnnnnnnnnnnnnnnnnccg

SEQ ID NO: 147878 - DNA, 1296 bp, Homo sapiens
tttttttttttgaagtctatctttttaatattcagtaacagctcctcagaaagagttacagactaggtggtccacggtagtaggagtcctttgaggtaagggaagactagccctagttgctaactaccatttaatccctattgccccagggtacacagcactgtaggtcatctttaatggctgtattgggcttggcctgtagaccagtattctgctcagggtctgcccaaatgcttttcgggcagtgcagctgaggcctaggtctaattaagagtttggtgttgggatccagttctactagccctagagaattaacctttcagccagttgcccatctataaaatacctatccttgggcagtattggattcttttttttttttttgaggtggagtctcactcttgtcgccaggctggagtgccgggctggagtacagtggtgtgatctcggctcactgcaacctctgcctccccaggttcgagtgattctcctgcctcagccttcagcttgcactaccacgcccagctaaattttttgtaattttcagtagagatggagtttcaccatgttggcaaagatggtctctatctcttgaccttgtgatccacccgccttggcctcccaaagtgctaggattacaatattggattttatgttagcaccagcctgtcctttattgatcataccatttacctggactcttttcttcaggaacacaatctaagtaatcctaaaccagttttgacacaaaccattgcctttaacaacccattcatagtgaggggatttagtgtagtttcaatgtcaccatccaagatcccaccccagtaccactaatgagaaatttcagggatggagattctgacacagctagggttcacaatatacctttacatcctaaagttacaaatgaaatccaagtgtataaagttaataccagtgatcactcactccccatcatttctcagagaatccaagcagctataaaagcatcattagtaataattttaaaaaaaagccaccagaaaggcagttttagaaagataaggggaaataggaaaccaagtatgttcaagaaaaccccactcttgggcactgtgaaatgccccttgcctgagtaaagatgtggattaacttctctccccttttcttagattaatgcaaaagccgagcatggtggtaacaagcctgtggtctcaattagctgggagactgaggtggaaggatcacttgggcccaggagggttaaaaaaaaaaaaaaaaaatccctggaagcattaaatagaagtgtttcct

SEQ ID NO: 147879 - DNA, 404 bp, Homo sapiens; identical to SEQ ID NO: 114045

SEQ ID NO: 147880 - DNA, 894 bp, Homo sapiens
cgcccagcccccagtggggttcccggcgcggggaatgtcccgggtggagctggctgagtcgcgcgctctgctccacccgacggggctgtgtgtgctgggcctggctcgcggcgaaccgagatggcagagcagtcggacgaggccgtcgaagtacctacacccttgagagatttcagatgcacaacccacagcaagagcacctggctgatcctgcaccacaagggggtacgatttgaccaaatttctggaagagcatcctggtggggaagaagttttaagggaacaagcttggaggtgactgctactgagaactttgaggatgtcgggccactctactgatgccagggaaatgtccaaaacattcatcattgggggagctccatccagttgacagaccaaagttaaacaaagcctccggaacctttaaaggctgtgtttaaggaaacttcttattcactactatttgattcttagttcccagttggtggaccaactggggtgatccctggccatctctgcagtgggccgtcgccttggatgtatccgcctataacatgggcagagggactgaaacacctccttcaggaagtcagcgcagggaagagcctgcttttgggacacggggaggaaaagaagccattgcttaactacttttcaactggaccaggaaacctttcacttggaaaacaatgatttttaatatatctctttcttttttctttcccgacattagaaacaaaacaaaaagaactgtcctttctgcgctcaaatttttcgagtgtgcctttttatttcatctactttattttgatgtttccttaatgtgtaatttacttattataagcatgatcttttaaaaatatatttggcttttaaagtaaaaaaaaaaaaaaa

SEQ ID NO: 147881 - DNA, 417 bp, Homo sapiens
  misc_feature (1)...(417): n = a,t,c or g
ctggagaattaataaagatcgggttttttggtttttttgaaaacggcttgggccccgggggggggtaggaccttcccctaatgggggaaaccaagggttgtagggccccaaaattttcccctggccttccaccctgggcaccaaagcgaacctttgcccnnnnnnnnnnnnnnnnnnnnnnccccccaaaaaagggggttttnnnnnnnnnntgaaaagggccccgggggttccccccccaacgcccaaagggccatccccccctggagggggggtaaaaaaaaagggccgggcctgaaagaaaaaacccctagggctttgggaaaagggcccaaatcccgcccccgggggacccgggacccccacttttggggggcccccgggccaatacccgggttgaaggggccccttaaaacg

SEQ ID NO: 147882 - DNA, 455 bp, Homo sapiens
actggggagttatcatcaccatgatggtgacctgttcagttgggcactctcttttggctgattgcaattttggcccaatgcaaccctctctatagaccatgactgaaagatgaaaccacctggtatctgaagcatcattggccttgaggaagaagacatgttttacagtgttcagtcattgaaatcaagaaagcgaattcctttttggatgcaaaatcacctccaaatgcaggccaccttcttcgactttgcctgtttggggcatcagctgccttaaatgttcataccacatttgaattttttttcacaatgcagtactttttccttgaccttatttacactttgatgaattatgtgtgtacttaacctaaactgtgctgattccacacaatgtttatggactcttccaagacagaagatgctctcttctgagaaatatattaatctatcccttg

SEQ ID NO: 147883 - DNA, 472 bp, Homo sapiens
gccatcttcaactggaccattggcttctgagtaagctgtgtgaggcctgggctagacctaatggtttattattggtggagagaaagatctggaaatacttgaggttattacatactagattagcttctaatgtgaaccatttttcttttaacagtgataaattattatttccgaagttaactgttcccttggtcgtgatacacactcgattaacaaacatactgttgtattttttccagttttgtttggctatgccaccacagtcatccccagggtctatacatactatgtttcaactgtattatttgccatttttggcattagaatgcttcgggaaggcttaaagatgagccctgatgagggtcaagaggaactggaagaagttcaagctgaattaaagatgaaagatgaagaagtaagccatggcactgttgatctggaccaaaaaggcactcaactaggaataaacact

SEQ ID NO: 147884 - DNA, 534 bp, Homo sapiens
cggccgcggctccggggaacggccgcgcatcggcgccccggctgcttctgctctttctggttccgctgctgtgggccccggctgcggtccgggccggcccagatgaagaccttagccaccggaacaaagaaccgccggcgccggcccagcagctgcagccgcagcctgtgggctgtgcagggccccgagccggcccgggtcgaggtgagcgggccgggatggggcgagcgaggctgcagggccggctgcgccgagtaccaggctccaggcctttgaaagcgccgcactccgccggcctcggctgggggaggggagcccggcccctgctcccggggtggagggcggtcggctgcgctgttttccggtgaggcctggtcttgcgcgctccttttagggaaagggagagggagagtccaagaggagcccgctagtaacgttgatctccggagggccaagatgctgctccgggatgggcgttttattgatcagatgtgtcttagagtagctagaaagactcatccctaccaaaaagtt

SEQ ID NO: 147885 - DNA, 1138 bp, Homo sapiens
cataaatgtagtttttttggagcatatttcatagaatttaaacacttagaaaagtcaagtgatttgtgtgctattttgatttgcttcctgtgcttactttcatttgtttattatttattttagtttcaacgaaccaaacttttaaatggaccgggagatgttgaaacgggtacaagcataacagtacctcagaaaaagtggttgcatgttatttcacccatttttgttcaaagttctaacattaccattcttagcaaaatggggtgatcgtctccaactactacaaattgaattggcagctagagaggtgagtgatatttgagaggagactgtttaaaatgaaacgtatttattattactttgttccagaaaaacactggacacactgaagtgggcccacagcattccttcatatgcaagactgttttacatctgataattcagctgctctctaaaattggccttctcccagttcctgctacctgcaggacccctatggtgtagccgtgggtggaactgtggggcactgcctgtgcacgggattggcagtaattggaggaagaatgatagcacagaaaatctctgtcagaactgtgacaatcataggaggcatcgtttttttggcgtttgcattttctgcactatttataagccctgattctggtttttaacaagctgtttgttcatctatatttagtttaaaataggtagtattatctttctgtacatagtgtacattacaactaaaagtgatgggaaaaatactgtattttgtaggcactggattttgtgagtttgaccccttattatgtctggaggatataatcattggattcctatttgtaacaagggagtttttaaaaggaaaccctgacttctaagtgtgggtttttttctctcccaaccataattatgttaatatggtcccccattttcttttgggtgcagaaccgttgtgcagtggggtctaccatgccaatttccttccagcactgacccctttttaaggaatacaaattttctccttcatcacttaggtgttttaagatgtttaccttaaagtttttcttggggaaagaatgaattaatttctatttcttaaaacatttccctgagccagtaaacagtagtttaatct

SEQ ID NO: 147886 - DNA, 1042 bp, Homo sapiens
agcggccgcggctccggggaacggccgcgcatcggcgccccggctgcttctgctctttctggttccgctgctgtgggccccggctgcggtccgggccggcccaagatgaagaccttagccaccggaacaaagaaccgccggcgccggcccagcagctgcagccgcagcctgtgggctgtgcagggccccgagccggcccgggtcgagaaaatatttacaccagcaggctccagttcataccaatacagaagatcctgctacccaaactaaatttggggatttatccaatgcaatttgtcgctgccattatccagttattaattggtatctgaaattggggtgagtagaacaattttttatagcagccatcatggcaatgcgctataaccggcctggaccgtgctgggctggtgcaatgctttgccttggggactaatgacatgcttgttcagcttttgtttggctatgccaccacagtcatccccaggggtctatacatacttatgtttcaacctgtattatttgccatttttggcattagaatgcttcgggaaggccttaaagatgagccctgatgagggtcaagaggaactggaagaagttcaagcctgaattaaagaagaaagatgaagaatttcaacgaaccaaatcttttaaatgggaccgggagatgttgaaacgggtacaagcataacagtacctccagaaaaagtgggttgcattttatttcacccatttttggtcaagctcttacattaacattcttagcagaatggggtgatcgctcttaacgtaactacaattgtattggcagctagagaggacccctatggtgtagccgtgggtggaactgtggggcactgcctgtgcacgggattggcagtaattggaggaagaatgatagcacagaaaatctctgtcagaactgtgacaatcataggaggcatcgtttttttggcgtttgcattttctgcactatttataagcccctgattcctggttttttaacgctgtttggtcatctatatttagtttaaaatag

SEQ ID NO: 147887 - DNA, 565 bp, Homo sapiens
cagcatgaccttcaagacgtggatgtggccttcacggaggaggaatagaggctagctggtccctgcccagaggaagctgtaccgagatgtgatagtggagaacttaaggaacctgctgtcagtggggcatccacccttcaaacaagatatatcacctatagaaagaaatgaccagctttggataatgacgacagcaacccgaataccgggaaatttaggtaaaaaccaaacagttataagttcttatagtaaactgttcatctgctttgcttcttcttaaccttgttggccatcacctggtccaaattgcccaatgtctttcctaggattattgcaacaccctttagtaatagcttaccctgttcccatccctctaccttcttaattctgttctttaagtggcaaagtgagtttttgttaccttgtgtcagactatgttgttcttctgctcaaaattctctgtgacttattttacatagagtaaaatccacttaatgtggctgacagagtcttacacggtgtgcttttcatcccccactacctctctaaatatatcttctatact

SEQ ID NO: 147888 - DNA, 820 bp, Homo sapiens
catcttttccctggctttggtgattcttaaactctttttctgtggcgaaattctgtgagtccatgaagctggattgtccctgacctcttttgaggaaggagagggttgcttctaactggtcctgggagatgccactgtgatgtatccgggatgaagacacaatcctggttacttcatagcctgtttttcttccccagccctgacttcctcaaaaagcactgcacagaggaggaggcagcagaaccccacttcagcttcttaggactctgcacttccccagaaggaagaattaaaaatgaatatgttcaaggaagcagtgaccttcaaggacgtggctgtggccttcacggaggaggaattggggcctgctgggccctgcccagaggaagctgtaccgagatgtgatggtggagaacctttaggaaccctgctgtcagtggggcatccacccttcaaacaagatgtatcacctatagaaagaaatgagcagctttggataatgacgaccagcaaccccgaagacagggaaatttagataccttatcttgtaaaagctctttttgctctatgacctggctcaaacttaaacttggatttgaagttagaagaaatgttggaagtcatttatatatgaagaaatgttggaaggactcatatatgcatacataccttgagtgactatgaatgaatggcgggccagtaacttcttggctgtggttgtaaactgtgagcactacaaaatgtttttccttattgataccatattatggtaggaaagacatggaataaaaaatttagatagtaaaaaaaaaaaaaaaaa

SEQ ID NO: 147889 - DNA, 1930 bp, Homo sapiens
atggaagactctgagctcccttcggcgcgctccgtactgccatctaaacgtatcggcgtggttcaatcgcagcagcgacctcctctaggtgagcgccactacggccctaccactcgagacggcgcgctgcatagcgcatactctcctactcaggctagatgtgtctctcatcccacctacgagaaatacccacacgtgtggaggggttggccccccttcagcccggagaaggagcggcagcgcctggagaatctgcggcggaaggaggaggccgagcagctgcgcaggcagaaggtggaggaggacaagcggcggcggctggaggaggtgaagctgaagcgtgaggaacgcctccgcaaggtgctgcaggcccgcgagcgggtggagcagatgaaggaggagaagaagaagcagattgagcagaagtttgctcagatcgacgagaagactgagaaggccaaggaggagcggctggcagaggagaaggccaagaaaaaggcggcggccaagaagatggaggaggtggaagcacgcaggaagcaggaagaggatgcacgtaggctcaggtggctgcagcaggtgcgagcacagggggaaacaggtctagagaggttaaatgacatcttaaaagtcatgagccagtctgttctggaggtgactccagaactcatccacagcctcttgttcatgcttggagccagtgtctgccctgaaggctcttgctgggtcctcagggagctgcaggagcgggagaaggccctgcggctgcagaaggagcagctgcagagggaactggaggagaagaagaagaaggaagagcagcagcgtctggctgagcggcagctgcaggaggagcaagagaagaaagccaaggaggcagcaggggccagcaaggccctgaatgtgactgtggacgtgcagtctccagcttgtacctcatctcccatcactccgcaagggcacaaggcccctccccagatcaacccccacaactacgggatggatctgaatagcgacgactccaccgatgatgaggcccatccccggaagcccatccccacctgggcccgaggcaccccgctcagccaggctatcattcaccagtactaccagccaccgaaccttctggagctctttggaaccattctcccactggacttggaggatatcttcaagaagagcaagccccgctatcacaagcgcaccagctctgctgtctggaactcaccgcccctgcagggcgccagggtccccagcagcctggcctacagcctgaagaagcactgaggctggcctgcggccttcttggcagcctcgcctcctgtccatgtctatctgtctgtctgtcggtctgtgtcttggtctgttgccctccttcttggcatgccattgtggagggcttggccaggtgtatataaacgtcctctgtgctgggtgtttctgctgcaggtggcaggtggccccaggcctgtttggaggatgggctgggtgggtgggtggggaagaatgggcccagccccacatggcctgcagacagtgctctgtaaatagttgttttaatttagctgaatgttagcattttagtctttggcattttagcgtttgggaggtagattaataaagtatattccttcaagcctgctgttgataccatgaagactgggcgcctcagtcccagccctgtagctgtgtgtcttgggccaccagtggcctgcaggacgaaggtactgttccatcacctgcggtgtgcctcaggatcaccaggtgcaggcccccaccctcggagatgctgctgcagtgaggtggttccactgcctggataacccttgaggaacacgtcagttactgtcacgatggggcaggtggagctccttcctattttttggggtgctccctgtttgtaaaggggagtttgttcattgggaaagag

SEQ ID NO: 147890 - DNA, 709 bp, Homo sapiens
  misc_feature (1)...(709): n = a,t,c or g
agttccacactgaagagaggtcttatgaatgtacagagtgtgggaaggcccttcaaacatagttccaccctccttcagcacaggaaagtccatactccagaaaggcgtcaggaggacagggcacatgggaaggtcgttagctgctagcaccgtgttcatcaggaaaggtcttattccagaaaggaggttaaggagagtggccgtgagagtgccatccgaaagaagctaaaccttgcacatcccaacacccaccccagggaganttccccgtgtgtgcctggtgtgtgggacgctttcgggaccccacattgcactctgaactttccctggggctgttggcagtgtcacatcactgagtttatccaccgccatccacctctatccaccccataaggtccctacagcaagtgggacagcagaccttgtgctccttgctctaaacagtagagaatcgttaatagtggagcccaaaacaggcctcattccctacccttgactggtttagctgtggacatgacccacctctggccggaggagctgagctggtatctgctgggggcttcctgggaaggtttaccattttcatggaaatggttgacattacacatggtatttgtcatgccctagcatggactgtctcatactgctttggactatgtggtaataaaggctttattgtttaacccgcttaaaaaaaaaaaaaaaaaaa

SEQ ID NO: 147891 - DNA, 507 bp, Homo sapiens
  misc_feature (1)...(507): n = a,t,c or g
ttttttttttttccccagatagggtctcaccctatcacccaggctggagtgcagtgatgcaatcacattttgctgcagcctcaaccttccaggttcaagggatcctcctgcctcagcctcctgagtagctgagactacaggcctgcaccatcatgccgggctaattttttaattttttgtagagaggggttacccaggctggtcttgaactcctggataaagtgatcctcccacccctgcctcccaaagagctgggatcacagatgtgagccacagtgaatggccaagaaaattatttacttaggaaaccagtatttttttcaaacagaatatttaaagcaaaaagtttgnnnnnnnnnnncccataatgttaacaatgtaattaaaatcataaattaaatttcttaaagcaaatgtatgacactgaattgaatctattccattattaccattgcctttaattattttcacttttgaaataaatactgctttttttttgagatggag

SEQ ID NO: 147892 - DNA, 1194 bp, Homo sapiens
  misc_feature (1)...(1194): n = a,t,c or g
ataaatcctgtttcaatgcattctttaactttgaggatatgcaagagatcacccagcacgtttgctgtctgtcatgtggatgccccaggccagcaggaaggtgcacccgtcntttcccaacagggtatcagtaccccacaatggatgagctggctgaaatgctgcctcctgttcttacccacctaagcctgaaaagcatcattggaattggagttggagctggagcttacatcctcaagcagatttgcactcaaccatccagagcttgtggaaaggcccttgtgctcattaatggttgacccttgccgctaaagggctggattgactgggcagcttccaaactctctgggcctgacaaccaatgttgtgagaaattattttggctcatcactttgggcaggaagagttacaggccaacctggaccctgatccaaacctacagaatgcatattgcccaagacatcaaccaagacaacctgcagctcttcttgaattcctacaatggacgcagagacctggagatcgaaagacccatactgggccaaaatgataacaaatcaaaaacattaaagtgttctactttactggtggtaggggacaattcgcctgcagttgaggctgtgatggcggactgtgggggactgccccacgtagttcagcctgggaagctcaccgaggccttcaagtactttttgcagggaatgggctacattcccgtatgtgcagctcagtcacctgagcaccgagtcagtaccatctgccagcatgactcggctcgcccgatcacgaacccactcaacctcgagtagcctcggctctggagaaagtcccttcagccggtctgtcaccagcaatcagtcagatggaactcaagaatcctgtgagtcccctgatgtcctggacagacaccagaccatggagatttccctcgatgatgtgcttctgagtgctctgctgaggaacaatgggaagtctgcccagcagaagaaaatctctgccaagcccaagcttgagttcctctgtccaaggccagggacctgtgaccatggaagcagaaagttctgctatactgtcctagtggacccgagagagagaagcaaggccacagccgtggccctgggcagtttcccggcaggtggcccggccgagctgtcgctgagactcggggagccattgaccatcgtctctgagtaa

SEQ ID NO: 147893 - DNA, 1783 bp, Homo sapiens
  misc_feature (1)...(1783): n = a,t,c or g
tttcgtccaaactctctggcctgacaaccaatgttgtggacattattttggctcatcactttgggcaggaagagttacaggccaacctggacctgatccaaacctacagaatgcatattgcccaagacatcaaccaagacaacctgcagctcttcttgagagtcctacaatggacgcagagacctggagatcgaaagacccatactgggccaaaatgataacaaatcaaaaacattaaaggggttctactttactggtggtaggggacaattcgcctgcagttgaggctgtggtcgaatgcaattcccgcctgaaccctataaatacaactttgcctaaagatggcggactgtgggggactgcccccagggtagttcagccctgggaagctcaccgaggccttcaagtactttttgcagggaatgggctacatccccttggttctctgttacagtaccatctggcagcatgacttcggttgcccgatcacggaacccactcaacctcgagtagcctcggctctggagaaagtcccttcagccggtctgtcacccagcaatcagtcagatggaacttcaagaatccttgtgagtcccctgatgtcctggacagacaacagaccatggaggtgtcctgctaagcagatgctcctccccctggaccattgcaagtccatccttcaaatgaccactccataatataacatttcatccaggtaaactggcctctactatctttaactcatgcatggccactgaacctctctctaggtagccatggatttatcattctctctgccatgcccacccccttttttgtatagcccaagaaccacttccatgccatactgtaacattccaacatctttagctgatcagatctctccatatcctctctttgccagctttttcccgtgctccccccaacttatgtaatcagataagatttctttgatcccgactctggtgtgtgcgagcacgcgtggtctgtggtttgtgtgtgcatagttctgtggttttagacacgctttcttgtagtgcttctgcaaaaaacaaaaaagggacttattttgcattctcaatggtgtttttaagggggattaggcagaacagatttctaggttggggtaggccactgcattctcttttgtttgcaaattggtcaacaaaatttgcaaagtgatttcaggagagagcagctttgagggaatgtgggaaaatcataattgccgtctgggaccattgattgattgtgaccagtaggcaggaaggggtgcctgttacatagagaggctccttctgtccaaatgaaatttcctgtatactccttctataaataaaagggaggaatatattctgctggaagcccatgaaccatcgctgaggttctgatacaacatagagttttttccaaggagtgaatgtgggtttaattactggactctcttagcacaggaaggtggaaacaaaatgccaggcctctgctctgaagagcaaaactcgtgtcgctgcagtatctgataccagacatccacatatccacaagaagtgcctcttaggtctgtgacagagagtgtgtctccattcctcagttcccagaaaggggagaggttttggcctaaaaagcatgtagatgggggagaaatgggtggggggagaggaacagccattaacacagtatcatgtttaacaagtatagccttgattttcagtagatgtaatggaagccaaattaaattgatacagaacccatttctcagagtcnnnnnnnnnnnnngaaacaa

SEQ ID NO: 147894 - DNA, 407 bp, Homo sapiens
ttttctattgagacagagtcttgctctgtcgcccaggctggagggaagtggcatgattccggctcactgcaacctcagcctcccaggttcaagtgattctcgtgcctcagcctcctgaatagctgggattacaggcctgcaccaccatgcctggctaacttttttttgtatttttagtagaaacagggtttaccatgttggccagcctggtctcaaactcctgacctcaagtgatccacccacctcggcctcccaaagtgctgggattacaggcttgagagaccgcgcccagcctcctccagaagattctaatgttcagtttgagaaccactggcaaagagaatgcaccatgcttcttttcaccttggggcccttaaagctctttcctctaactgaactgatgctca

SEQ ID NO: 147895 - DNA, 2427 bp, Homo sapiens
ttttttttttttcacagtaaatatatccttattttattgaacacttaaaaaaatctaaattacgtacatatctgcaaatttataaatggcaatttcaatggaaaacaaattttataagtaccataaagcagccaacaaacatgtccctccaccaaaatgcaccacattcacaatgcatccaggacattccagctcattttttcttcatttcctagggggaacgcaattgttttcatgctaaagatgggcggcttccttgaacttaggggaccacggtcaggcatggaccaccaccgtgggagaggggaggctaaccagccattctgccccacatccccagccgcctgtggacagaatcttcccataaaacatgggctccccagatggagcaccaaaggggagaccacagcagatacggattctgtggaccttgagaacccaattctatacaaatattttcaactctaagtccccaagagaaacattaacatttttggctatgaaataatttttccagcaatgaatttttttggatattcccacgagctggggaagggaacaagcataccttgaagaccatatgtattggcatcaaaatgtcacataaacacaccaacagctgggaacacacaatgctatgtatgtcaccatgtgatccacaacccacagcacatgtgaaagtgcctacaattactccctcagagcgggtgggaatgggccagaggagcttgccatggaaaaatccagaacataccccgtacacccaaagcaattccaaaaggacccaagtcacccctcagcaaaattgacattaaatggggaatgacttaacccaacaggtttaaatttttcattactaaactcttttttttttgggtgtgctattggcccatccccttcaatcatccagtacttaattttaaaaatggtgtgttaaagtgggagccagagaatccctaatcctaattcccatatttaggagaatctccttggtaatataaaaaaaggcacatatcaatacctacgtgatttgaaaaattacatagcatatgctattacatatttttcgtgtagtcagttgtattaacatataactgtgctactgttaggacttgaaatatttatacattgggcctacataaagtacctggacttttggggaaacttaaaatacaaaaaacagttttgaacagcctaaataaaaaatattctacctaaagcagagtatataattagtggtggacttcatgggtccaaacaggcactgtctgctggtggcctctcattgacggggactgctgcaggattgcgtcccctctgagtagacacaccctggctatgacggtgacccatgggtaagtcctccctgggagctaccagtgcagcccctgatgcgccctgcctgagactgcgggcggaggatgacaactgtgcggctttaaggttctggatgtaactgaggagatcaatagattgagagagaactgttaatattttgcaggcactttcacctcccacactctcagtgagctgtatccagacacttccaggagtgctgagtcaaatctgcatacttctttcaatttcagggtttatcaggccacacctctcaggctgtgcactacccaacactggcttgaagaagagcctcaaagcacaaagcagaaacaaaagcagagcccaatgctggctgcagggcactatggcctcaggctgaattgctcctggagttttgctatttaaccactgtaaactgtcttgttaaggtggaaaagagcaacgtcagggccctcattaactgttacaaagtggaaagaccagaatctgtagagggaaatgtcttccttatggttctaaagccatggtgcccacgcttgccttcccttccgtgtctaaatcgcctctgggtggacattacaacccactcacaagagaaaggggtaagagggctgtgagcagtaactcggaagaaagccttgattgatttttttttttttttttttttgagacagggcctcgctctagcacgccaggctcatgcctgcaattctggcactttgggaggctgagacaggaggactgcttgagcccaggaattcaagaccatcctgggcaacatgaagagaacctgtctccacaaaaattttttaaaaattagctgggcgcagtgatgtgtgcctgtagtccccgctactcaggaggctggggtgggggggatggcttgagcccaggaggttgaggctgcagtgagatgtgactgtgccaccatactccagcctggggtgacagggagtgaggccctgtctcttaaaacagtaattaattaaaatacttttagccaaccaaaataccccaagggaaaggaaaaaaggcacagcttgggggcaagcatggtcaagtgtgggtaacactgaatttgaggtgatg

SEQ ID NO: 147896 - DNA, 1209 bp, Homo sapiens
  misc_feature (1)...(1209): n = a,t,c or g
cgagggagagtgagagtttcactcttgtcgcccaggctggagtgcaatgacgcaatctcggctcacgttgcaacctccacctcctgggttcaagtgattctcctgcctcagcctcctgagtagctgggattacaggcatacaccaccacacccagctagtttttgtattattagtagacacgggggtttctccatgttggccaggctggtctcaaacttctaacctcaggtgattcaccaacctcggcctcccaaagcgccaggattacaggtgtcaaccactgtgcccggccctcaacatttctcaggcttcaaagaaaagcaggccgctgcagcacgtcacgcctctaatcccaggacggcaatcttacttgagcccaggagtttaagaccagcctgggcaacgtggcaaaaccatctctatcaatcaaaaatacaaaaaattagctgggaatgttgtatgtgcctgtggtcccagctactcaggaggctgaggcaggagggtcgcttgagcccatgaggtcaagtacgcagcgaggcatgatcatgccactcactccagcnctgggtgacagagcgagaccctgtctcaaaagggggaaaaaaggcaaacacacccattaggaatatcgttctacgttcagcttgatcatcaagttttgcaaaaacatttttccaagtttactcacctaaatcatgggttaagaagcacctagaaaagtccaaatttctgagggtaatgattcacaacaatcttaagcgcccagtagggctatcgggagggaaaaggaaaatcctccccttcctggcgccccaaggaatccagcccctttgtgggctgcagaggaagggaagcaagtttcagcctccccccagccctggctgggcccaatacctctgctggcccaggaggggtcactgcagcccttcaggtgacccaggggagctaaaagcccacccaggggccaccggggcaactcacttcagtcccctggtaataacccacaaaatgtgacgtttttccattttgcctttagatcctgaaataagaaagtaatctagtccacacatacatattgtgggtagtttgaaaaaaattatctctaaactttccaagaaatgattcgcacttaagctgcactccagcgacggggaacacagggactggaacacgacagcaccgcgcacctagaaagccgggaggactgc

SEQ ID NO: 147897 - DNA, 5197 bp, Homo sapiens
atgacgaatttggccatggtcgagagagactcagaggcagggaccgcggcttcgcggtttcctggcaaccacgcagccaagggcaaggcgcaggcgcactacaaagtctggcgcccagcagaggttaggtgtttaaagttaggacctgaatgggttacgttgcgatacacgatcaaacatcgcccttataagctctgtggaaaacgacagcacgtgttctttttcactagtagaagtgacgttggtttcatgttgacaactttgaagccatttggaagtgtttcagtggagagcaaaatgaataacaaagcgggctcctttttctggaaccttagacaattcagtacattagtttcaacaagcagaactatgaggctatgttgtttgggactttgcaaaccaaaaatagttcattcaaactggaacattttaaataactttcataacagaatgcaatcaactgatatcattagatatctctttcaggatgcattcatttttaaatcagatgttggctttcaaacaaagggcataagcactctaacagcccttagaattgaaagactactttatgctaaaagactgttttttgactcaaagcagtctcttgtccctgttgataaatctgatgatgaattgaagaaagtaaaccttaatcatgaagtctccaatgaagatgttcttaccaaggaaacaaaaccaaaccgtatcagcagtagaaaactgtctgaggaatgtaattccctgagtgatgtgttagatgcattttcaaaagcgcccacatttcctagtagcaactatttcacagcaatgtggacaattgccaaaagactgtctgatgaccagaagcgctttgaaaaacgactgatgtttagccaccctgcatttaatcagctctgtgaacatatgatgagagaagccaagatcatgcagtataagtacctactgttcagtcttcacgccatagtgaagcttggaatccctcagaacactattttggtgcagactttgctgagggtgacccaggaacgtatcaatgagtgtgatgagatatgcctttcagttttgtcaactgttttagaggcaatggaaccatgcaagaatgttcatgttctacgaacgggattcagaatactagttgatcagcaagtttggaaaatagaagatgtcttcacattacaagttgtgatgaagtgtattggaaaagatgcaccgattgctcttaagaggaaactggagatgaaagccttgagggaattagacagattttctgttttgaatagccaacacatgtttgaagtactagctgccatgaatcaccgatctcttatactcctggatgaatgcagtaaggtggtcctagataatatccatgggtgtcctttaagaataatgatcaacatattgcagtcctgcaaagacctccagtaccataatttggatctcttcaagggacttgcagattatgtggctgcaactttcgacatctggaagttcagaaaagttctttttatcctcattttatttgaaaaccttggctttcgacctgttggtttaatggacctgtttatgaagagaatagtagaggatcctgaatccctaaacatgaaaaacattctatctattcttcatacttactcttctctcaatcatgtctacaaatgccagaacaaagaacagttcgtggaagttatggctagtgctctgactggttatcttcacactatttcttcttgaaaacttattggatgcagtatattcattttgcttgatgaattactttcccctggctccttttaatcagcttctgcaaaaagacatcatcagtgagctgctgacatcagatgacatgaagaatgcttacaagctgcatactttggatacttgtctaaaacttgatgatactgtctatctgagggacatagccttgtcactcccacagctgccgcgggagctgccatcgtcacatacaaatgcaaaggtggcagaggtgctgagcagccttctgggaggtgaaggacacttctcaaaggatgtgcacttgccacacaattatcatattggattttgaaatcagaatgggacactaacagggaatcaagtgctaccactttcctggatgtgggtacaacttctgctaccggatattcaaaggttgcttacatatatttcatttgctgggctttctgaattaaaatcctaattctaaaagacttcatattaaatagcagtagtaaatctaagacttgatgtttgtatggagcctgcagcacaccaagagacttgtcatccatcaatgtactccttagaaagtgtaaatgtggacgttatggttgaatacaatggactacagtattggtcatttaatgagacagacatttttttaaaattaggttttgaagctatagttcaataaaacaatattaatataattgaaactatcaatgcagtgtagactttggacaagataatataatagtgatcataaagaataaagactcgaggcttctacaaaaatcaaatacccaataaatattttgctctaccaccaagacttttccagaggtagagaaaccgtagttttttaattaaactgtatttgtatgggttagagcacattgaagctaatcctaagttgtttctttggctcacacattacaaatagagtgtctctggggagaaatatgatgctataccatgagagaacatcctgcctcttcagtagatgcataagatcatgccatcattgcacacacccgtgggtcagttaccctttatgtaaaagctctgctacatggatcctgaccccaaggaacttgtatcttctgttaactccactggacacacacacacacataaatatgatagaaacatacaaaaaaatctgtagggatccaagctcttatctgcccatccctcttcattcacacacagttctgtgactttcacctctttctgaatgcatctagcttatttcttggccatcttttcaaccgctgtctttcctattagtgctacccatctcccctcagaagaggctttctctctgacctcattccaagatcagttttctttttcgggtactccgctattctggcataataaaataacagttgttctcagcataaagtcatgagaagtgaagaatgtgagcattcctttaaaaacataaaatttgtcttataacagccagagtataggtgaaggcagtaaggatataaatgtcttttttttttctttctttctcccagtaaacttagtatttccaaagtgccaggaacaatgaaaaaacaaattacaccttccacattttcgttatatttacagattttattttaacagtcttgcctttctcttggtgttttctttcttgtatttaaactcctatttctgttttttaaatgctgctttctctgggagatgatatgtgtaagaagagcatttactatttggtattatttacaccgttactactactggtagaataaataattatactcagatcagaaatcagcactacacagaaaacccttaaaattggtgctttcatgtctgaaaattttcctcttcaaaaatgtagccatccttaaagggaactgagaggtaactgtgtataatgttgtatatttttgatttataaagtagccttgtatagtggaatatctgcagaggccaagtaaaagaagtgaaggactaagacaggaatatcaaggattgtggtcggtggagagctcaacttggaaatctccagagaacaagaatgcagcaagactaaatagtaatatcaataactgttcttgttttgtttatttttgttttcagagtagctgtgctatgtgtttccagatctgcttattgtttgggttcaagccaccccagaggattccttgctatgaaaatgcggcatttgaatgcaatgggttttcatgtgatcttggtgagaaaaaaatgcaaatgaaatattctttaattactgatgtacattctaacagctgccaggaatcttgtggttgagactggttactaggactagaggaattgtcagcattattggaatgagtgctttagttactgttttctttgaaaaagaacattgctagtacacgatttgggttctgctcagctgattactgtcattactagagcttttacaaatgttgttctggtcagctttaatccttttttgctaagaagaagaatgcaaataatatattttcatatttaagatacacaaaaccatatttaatttccaggttatcttgaacaagggaaggaaagatgttaaagctttgttttcatggcctgtgtgaagctgttacaggatgtttgttgccagaaaaggctggatggttttaagaagatgggtctttctcttccctcttatgcttcaattttattttgtaccccacagcttctcttgaacagcctcttctgatgtttctaggtagtaggaaccttacaaatacatttatatatatgttgctgttggaatctatctaaatgccactcatttggtcctgcgcataatgtaagatgtaaacattccaagtcttctattattatactttagtattggaaatggattacgtgtggactattgagattaagatgactcctttctcttagtgggctactatttaagactttgttttttatattgctgattatatatattctaaggaagattttctcaagaaagcagtttttgcaccatttagaggacctttaaaatttgtataattttcacagttaaagctttcttaaaccctagcatgtagtcttattatgcctttaaaatatgagtagttataaggtcacatttgctttcaaaaagctattgtcctcatgttactttactatgtttggatctctaaactagctcttttgttagtatcgtctcacaaactgattattttcctctttctttggtaaggtcaataactgggagatggacaaactagagatggaagatgcagtcacatttttgaagactaaaatctattcagtagaagctcttcctgttgctgctgtaaatgtgcaaagcacacaataaagtgaaaatcaaccttttcatattaggagacatgcatttgtaaaaattaataaagatgacaagtcagttgtcaatggaattgagctatctgctaagacaaaaaatgttacctcagttcactattaaaattaattttaggagtgg

SEQ ID NO: 147898 - DNA, 1317 bp, Homo sapiens
agctgcatactttggatacttgtctaaaacttgatgatactgtctatctgagggacatagccttgtcactcccacagctgccgcgggagctgccatcgtcacatacaaatgccaaaggtggccagaggtcctgagcagcccttctgggaggtgaagggacacctccctcaaaggatgtggcaccttgccccacacaattatccatattgattttgaaatccagaatgggacacctaacaggaatccaagtgcctacccactttcctgatgtggatacaacttcctgcctacagatattcaaagagtagctgtgctatgtgtttcccagatctgcttattgtttgggttcaagccaccccagaggattccttgctatgaaaatgcggcatttgaatgcaatgggttttcatgtgatcttggtcaataactgggaagatggacaaactagagatggaagatgccagtcaccatttttgaagacctaaaatcctattcagtagaagcctccttccctgttgcctgcctgtaaaatggcaaagcacacaataaagtgaaaatcaaccttttcatattatgagacatgcatttgtaaaaattaatagagatgacgaagtcagttgtcaatggaattgagctatctgctaagacaaaaaatgttacctcagttcactattaaaattaattttaggagtggaagaaatgttgttactgccatttaaaaatatgctgagaaaattccagaagggttatttttccaaccacacctattccctctagtgcccagatatttgatttgtgagctgtacgtttcaccttttcatctttgatctactaaaaactggtttcttagttgtgaggtgtcacaggcaggttgatgtgggtagtagtccttgtctttggaatctgaatatttatactcctgctctaagctgttctaagacttggggttatgccctttaaatcattttcaagcattggcccaaataataattggacaaagttcctaaagttgtcaagtgtgtaagaattagtgaggtagctgttgaaaatgagtgaggatggtatttgtatttgtaataagcactgcaggtagagatatttcatgggttataataagagaaacacagatgagatgtagatggtaaggagtcttactgttgttggggtccttcctttctccttcttttttcccccttacccctcccacaatttcatgaagtcttttaaattaaatatatagctgaattgtgttgtgaatcagacctgaggactattttttcgattatgtgtgttcattctttgttcaaatatttgtcc

SEQ ID NO: 147899 - DNA, 763 bp, Homo sapiens
ctaagaaaaacctttattcccaacagacctctcattctacttcccccaggtaactccttagccacacatttgtttttttgagaccgtgtctcgctctgtagcccaggctggagtgcagtggcatcatcttggcctactgcaatctccatctcctgggttcaagcgattctcctgtctcagcctcccgagtaactgggactacaggcatgcaccaccacgcctggctaatttttatatttttagttgagatggggtttcatttcaccatgttggtcaggctggtctcaaacttctgacctcaggtgatccactcaccttggcctcccaaagtgctgggattacaggtgtgagccactgcacccggccccttatccacaaatttggattgagctacaggcagaggattgaaaatgtgtccttcctccttccctatactcatgccagctctctgctccagcttctcttggccccactagtcaccaatggccaggggcaggagcagaagccagagctggtcagggaggtaggatgaggtcttgtctcactgccctttcatagcattcccctttggaacctgatcctctcctggcttcctagggtctagccaggtggttctgttttccatggcctgcccctccactgttcctctcctgtacagcctgcctttgtagaagacagaatctcaggtgactttgatctccatggtatagtcctctgctttttctgtccttcatgactaggctcattggaggttccatctctg

SEQ ID NO: 147900 - DNA, 490 bp, Homo sapiens
ttggcgacgatgggtgtccagcagaggaatgggactggtagtggaacctaaatttgtacttctatgtataatatgaagcaaatataacaaaaaattagtatttgttcattgtaggtgactaaacagctgtttaatatattgtcctttatatttttccatacaagtattttaattttttttttttttttgaagatggagtcttgctctgttgcccagcctggagtgcagtggcacgactattggctcactgcaacctctgcctcccaggttcaagcaattctcccgcctcagcctcccgagtaagctgggattacaaggtgtgcgccacaatgcctggctaatttttatacttttaataagaaacagggatttcatcatgttggccaggctggtctccgaactcctggacctcaaggtgatcccgcccggccttgggctcccaaagtgctaggattacaggcatgagccatgaaggccagacaatgatttt

SEQ ID NO: 147901 - DNA, 1276 bp, Homo sapiens
caaactcctgggctcaagcagtcctcctgcctcagcctcccagagtattaggattataggtgtgagccactgccagaaaaacttttcctaagacaaggcaggttttacattatatttagattttttttaatgatgtcttttttggcagtgcacagccagagaacaacacatcacacacaggaaacagttgtgctcatgtgatgggggcctcagcactaggaaggagtggactattggcacacgcagcagcttgaataaatctgaaagtcactatgctgtgtaagagaagccaaattttaaaagtgcatactgtgtacagagggtgtcgagaatgcctcctacgtgacggaaagcagatccgtggttccctgcagactggcaggagcagattccaaaggcacaggaagaagcttgtgggtagagtgtgttcattatcttctgtgcattacaccataaaaaagctggtcataaaaatgcgaaccaaaaacaaaggtgaaactaggatatcgatttctcacctgtgtgattggtaaacgtgcagatgcgccgtcatgctttgcttatgaacctgtgggatacaaggactctcatacgtcactgcggaatgcagaatattgcagcctcatggaagaggatatggccccgtctaacaaaactacatggcattcgccctttgactcagcaattctagaatctgcctcaaaaaaaaactctggcaaagaaatgaaaggactttacccacagagttcttttcacagcctgaatgtgtttgccacaaagttcttcactgtggcatttgtaaaactggaaacaatcaaaatgtccatcagtaggggattgggaacattaattcgtgcagtggggaactccgtaccagaaggaggaatgaggaacgcctattgataaggggcagagtacatataatataatgcaaatatatatttgctttttcttaaaacagtacaaagataaaaatctaaagtggttgctgtggaggacaggggtcagtggtggaagtgagaccgaaatagactctgaagtaatatctggactttgaaattgttaagtgttttacatattaccaaactaagtttttaagatagtccctaaaattgaaagaatggtatctgaaatgaatgaatctaaattccttggattgcattctacaggcgccaaccctgagaccaaaatttggaaggtggccctgagcagcagctgaagggaagtgggaggtgagacaggaaagaggcggcggcatggggcgtccgggagccgg

SEQ ID NO: 147902 - DNA, 1044 bp, Homo sapiens
  misc_feature (1)...(1044): n = a,t,c or g
tttttttcttggtagagacagagttttgccatgctgcccaggctggagtgcagtggtgtgatctcggctcactgcagcctccacctcctgggctccagcagtcctcccacctcaacctccctaagagctgagactacaggtgtgagcnacccatgcctggctaatttttagagaccgggtttcacccctcttgccccaggctggtccccaaactcctgggctcaagcagtcctcctgcctcagcctccccagagtattgggattagtaggtgtgagccactgcccagaaaaaccgtttccctaagacaaggcaggtcttacattatatttaaattttttttaatgatgtcttttttggcagtgcacagcccagagaacaacacatcacacacaagaaacagttgtgcctcatgtgatggggacctcaagcactaggaaggagtggactgttggcgcacgcagcagcttgaataaatttgaaagtcactacgctgcgtaagagaagccaaataaagcgcatgctgtgtacagagggtgtcgagaatgcctcctacgtgacggaaagcagatccgtggttccctgccagactggcaggagcagattccaaaggcacaggaagaagcttgcagtacaaagataaaaatctaaagtggttgctgtggaggacaggggtcagtggtggaagtgagaccgaaatagactctgaagtaatatctggactttgaaattgcagctgctcccaaccccagaacctttgctgtcttgggacggatcaccactgcaagaggggaagttgctactgtgatgaattctgccatgtggcaccagactgccacccagaccacagtgtcctctgcaaccctggtaactcacatacaggcccgattccaccgacagcaaagctggatgctatggctggcagaggcaaaccctttgcctgcacttcaggccaaagccgggatgtggcctagatggttcctaaggtccctgacaatcctgagatcttgcatcttgtctatttcaggacaaaggtgcctacatgc

SEQ ID NO: 147903 - DNA, 758 bp, Homo sapiens
tatatttaactgtgaatgacacaagtggttggtcttagaaaaataccaggaacaatactaaattggatcccatttacagacaggtaaattgactatccctaagccaatctatggtcattcctatactttcccaaagttccaaagtatgaatgtcacatgaatgttgaattcttctttgaatgtatctattcttaaaatttacaccagcatagttaaaaccctctttgaaagacactggttctaaagagacccaaatatgagcagctaagctactatagatgccataatataagcagatatacctagttcttcaactcttatgaaagaaagaacatcgagtgacgtgcttttctttttgggagatggagtctcgctctgttgcttaagctgaagtgcagtgacatgatctcgactcactgcaacctctgcctcacgggttgaagagagtctcctgcctcagcctcccgagtagctgggactacaggcacctgccaccatgcctgactaatgtttgcatttttagtagaaatggggtttcactatattagccgggttggtcttcgaactcctgaccttgtgatcttgccagccttggctccccaaagtgctgggattacagggggtgagccaccatgcccggccaccaagtgattttcatacacactgaacaggattaacaaatgtaggttcaattgtaaggatactttgtaaccactgatgagatatgactagcctctttaggaaaaaaagctggtaaa

SEQ ID NO: 147904 - DNA, 1716 bp, Homo sapiens
  misc_feature (1)...(1716): n = a,t,c or g
ttttttttttcccccaccgcaacctccatctcccgggttcaagcaattctcctgcctcaccctcccaagtagctgggattacaggtgcccacctccacgcccagctaatttttgtatttttaatagagaccggttttgccatgttggccaggctggtctcgaactcctgacctcaggtgatctgcccaccccagcctcccaaaatgctgggattacaggcgtgcgaccgggcacgcagccagcaagttgtttttaaatgttaatatagaaaacagtgaaggattagctgaaaatatatgagcaggtgacattgaggtttactgaaatagccaatttgactggtgcttagactattgtgcagtaaacctaaaaggtagtggagaattgcttcctgctagcaggaagcctttcatcttcttgagtacccaaaccaggcttcaggtgtcctttgaggatagccaggtttgaaatttttagtttctcaggaagagctcttctatgtggcaggggctgatagggcaaaataaaatgacaatttctttattgctacagagtatcctcctataagttattaaacgagtgtaatgggtataatgcccttccattcacacaacagggacaccaccccagttttgttttctggggtttctttccccctttgtaggggantcaggataccttttgtagaaaaaaatggcttatgcccacgtaaaggtgaatttttagaaaccaccttctaggccgtttttggaaccccttactgaaatccctccccttgttacaggatgggcgtagaagtcacaagtcctgttaattggactgttgcttctttgcctgttcctgctttctctttctgtctggatagtcaggaaaagatttaatgtttaatatttaaacaaaatatttaatgtctatacagtaaaattattcaaacttcaaaccagtattgaaagcagttggaaaccagctaatagtttcttaatctcagatttcgagatgaatgtaaactgtattcttttgaaatgtgcaagtgtttgattcatgccatttgataaacttctgccttgtagtcattgtttgatgggaccaacttgtaaagtaatgagccttaaataaatctccatgcttgaaaaatgtgttctaaatgcaacacaaaaaacatgaagtgactgcccagaggtagaagttagttgtttagggtgggaaagggagatgacagctttccaaaggaagggaccctaaaacacacccaagattgtcttctacagggattgctggggcaggtctccgactaaaggtcttatgatgaaaaggaagaaacaagcccccaacacaaggctctgatacttattggtaaatgtaggagagaattaagaatttgttaattaaaatccaaacagagcttatttcagtagtcaagttacctgacatgataattatttctgcaggataattgatgttttatgttcttttttggactttatcttcttgcaaaaatttctacaaaaattgttttcttcatccttgtggtgcttattcatctgagccgtctccacagtcccaatgcctctgctttttgttttacttttgtagcataaggtttttgcttttgctttgccttaagagttccctagggagttaccagggcttttcgttttgtgtagcttttgcagcatggatcaaacattggcttactgtgctaatgtgtgaagagaa

SEQ ID NO: 147905 - DNA, 392 bp, Homo sapiens
  misc_feature (1)...(392): n = a,t,c or g
acatcactgcaagttttgagagccagcgtctaaagtgtccacggcatcctgggaggttttatccttggtgactctaatggtagatttttgtccaccttgttctatttgcttttgnnnnnnnnnnnnnnnnnnnnnnnnnnnnnnnnnnnnnnnnnnnnnnnnnnnnnnnnnnnnnnnnnnnnnnnnnnnnnnnnnnnnnnnnnnnnnnnnnnnnnnnnnnnnnnnnnnnnnnnnnnnnnnnnnnnnnnnnnnnnnnnnnnnnnnnnnacattggtctatttgtatttcatgaaagcagttctgaatgagagtaaatcaacttcagggtgtacagtggcccnnnnnnnnnnngcctgcatggaagaaggccaccttccacccttgtggtggga

SEQ ID NO: 147906 - DNA, 723 bp, Homo sapiens
ttttacaccctgaagctgatttactctcattcagaactgctttcatgaaatacaaatagaacaatgtgggctggatgcggtggctcacacctataatcccagcactttgggaggccaaggtgggtagatcgcttgagctcaggagtttgagaccagcctggggaaccatggtgaaaccccatctctccttaaaattttaaaacagaaaaatcaaaaacaaacaaaagcaaatagaacaaggtggacaaaaatctaccattagagtcgccaaggataaaacctcccaggatgccgtggacactttagacgctggctctcaactcttgcagtgacgtcacttcttcagcccaaggctgtcttcctggcatccatcagatccgcagccctggtttggaagtgtgtggagggctaggaaggatacctaattttcctcagcaaatccctctgccaaggggtacccaggactgaagagaaaccccagctctggtgtggagctgtgctgtccatggcagtgccaaggcagccagtggaagttggctgacaaggcaaactgaggcaatccacgcagaattcaatggccacccaggctggagtgcagtggcatgatcatggctaactgagcctccaactctcaggcttaagcaattctcccacctcagcctcccaagcagtggggaccacaggcaagtggcaccatgactaatttttttttattttttgtag

SEQ ID NO: 147907 - DNA, 10257 bp, Homo sapiens
atgcctattggatccaaagagaggccaacattttttgaaatttttaagacacgctgcaacaaagcagatttaggaccaataagtcttaattggtttgaagaactttcttcagaagctccaccctataattctgaacctgcagaagaatctgaacataaaaacaacaattacgaaccaaacctatttaaaactccacaaaggaaaccatcttataatcagctggcttcaactccaataatattcaaagagcaagggctgactctgccgctgtaccaatctcctgtaaaagaattagataaattcaaattagacttaggaaggaatgttcccaatagtagacataaaagtcttcgcacagtgaaaactaaaatggatcaagcagatgatgtttcctgtccacttctaaattcttgtcttagtgaaagtcctgttgttctacaatgtacacatgtaacaccacaaagagataagtcagtggtatgtgggagtttgtttcatacaccaaagtttgtgaagggtcgtcagacaccaaaacatatttctgaaagtctaggagctgaggtggatcctgatatgtcttggtcaagttctttagctacaccacccacccttagttctactgtgctcatagtcagaaatgaagaagcatctgaaactgtatttcctcatgatactactgctaatgtgaaaagctatttttccaatcatgatgaaagtctgaagaaaaatgatagatttatcgcttctgtgacagacagtgaaaacacaaatcaaagagaagctgcaagtcatggatttggaaaaacatcagggaattcatttaaagtaaatagctgcaaagaccacattggaaagtcaatgccaaatgtcctagaagatgaagtatatgaaacagttgtagatacctctgaagaagatagtttttcattatgtttttctaaatgtagaacaaaaaatctacaaaaagtaagaactagcaagtagaaaaacttctgtgagtcagacttcattacttgaagcaaaaaaatggcttagagaaggaatatttgatggtcaaccagaaagaataaatactgcagattatgtaggaaattatttgtatgaaaataattcaaacagtactatagctgaaaatgacaaaaatcatctctccgaaaaacaagatacttatttaagtaacagtagcatgtctaacagctattcctaccattctgatgaggtatataatgattcaggatatctctcaaaaaataaacttgattctggtattgagccagtattgaagaatgttgaagatcaaaaaaacactagtttttccaaagtaatatccaatgtaaaagatgcaaatgcatacccacaaactgtaaatgaagatatttgcgttgaggaacttgtgactagctcttcaccctgcaaaaataaaaatgcagccattaaattgtccatatctaatagtaataattttgaggtagggccacctgcatttaggatagccagtggtaaaatccgtttgtgttcacatgaaacaattaaaaaagtgaaagacatatttacagacagtttcagcaaagtaattaaggaaaacaacgagaataaatcaaaaatttgccaaacgaaaattatggcaggttgttacgaggcattggatgattcagaggatattcttcataactctctagataatgatgaatgtagcatgcattcacataaggtttttgctgacattcagagtgaagaaattttacaacataaccaaaatatgtctggattggagaaagtttctaaaatatcaccttgtgatgttagtttggaaacttcagatatatgtaaatgtagtatagggaagcttcataagtcagtctcatctgcaaatacttgtgggatttttagcacagcaagtggaaaatctgtccaggtatcagatgcttcattacaaaacgcaagacaagtgttttctgaaatagaagatagtaccaagcaagtcttttccaaagtattgtttaaaagtaacgaacattcagaccagctcacaagagaagaaaatactgctatacgtactccagaacatttaatatcccaaaaaggcttttcatataatgtggtaaattcatctgctttctctggatttagtacagcaagtggaaagcaagtttccattttagaaagttccttacacaaagttaagggagtgttagaggaatttgatttaatcagaactgagcatagtcttcactattcacctacgtctagacaaaatgtatcaaaaatacttcctcgtgttgataagagaaacccagagcactgtgtaaactcagaaatggaaaaaacctgcagtaaagaatttaaattatcaaataacttaaatgttgaaggtggttcttcagaaaataatcactctattaaagtttctccatatctctctcaatttcaacaagacaaacaacagttggtattaggaaccaaagtctcacttgttgagaacattcatgttttgggaaaagaacaggcttcacctaaaaacgtaaaaatggaaattggtaaaactgaaactttttctgatgttcctgtgaaaacaaatatagaagtttgttctacttactccaaagattcagaaaactactttgaaacagaagcagtagaaattgctaaagcttttatggaagatgatgaactgacagattctaaactgccaagtcatgccacacattctctttttacatgtcccgaaaatgaggaaatggttttgtcaaattcaagaattggaaaaagaagaggagagccccttatcttagtgggagaaccctcaatcaaaagaaacttattaaatgaatttgacaggataatagaaaatcaagaaaaatccttaaaggcttcaaaaagcactccagatggcacaataaaagatcgaagattgtttatgcatcatgtttctttagagccgattacctgtgtaccctttcgcacaactaaggaacgtcaagagatacagaatccaaattttaccgcacctggtcaagaatttctgtctaaatctcatttgtatgaacatctgactttggaaaaatcttcaagcaatttagcagtttcaggacatccattttatcaagtttctgctacaagaaatgaaaaaatgagacacttgattactacaggcagaccaaccaaagtctttgttccaccttttaaaactaaatcacattttcacagagttgaacagtgtgttaggaatattaacttggaggaaaacagacaaaagcaaaacattgatggacatggctctgatgatagtaaaaataagattaatgacaatgagattcatcagtttaacaaaaacaactccaatcaagcagcagctgtaactttcacaaagtgtgaagaagaacctttagatttaattacaagtcttcagaatgccagagatatacaggatatgcgaattaagaagaaacaaaggcaacgcgtctttccacagccaggcagtctgtatcttgcaaaaacatccactctgcctcgaatctctctgaaagcagcagtaggaggccaagttccctctgcgtgttctcataaacagctgtatacgtatggcgtttctaaacattgcataaaaattaacagcaaaaatgcagagtcttttcagtttcacactgaagattattttggtaaggaaagtttatggactggaaaaggaatacagttggctgatggtggatggctcataccctccaatgatggaaaggctggaaaagaagaattttatagggctctgtgtgacactccaggtgtggatccaaagcttatttctagaatttgggtttataatcactatagatggatcatatggaaactggcagctatggaatgtgcctttcctaaggaatttgctaatagatgcctaagcccagaaagggtgcttcttcaactaaaatacagatatgatacggaaattgatagaagcagaagatcggctataaaaaagataatggaaagggatgacacagctgcaaaaacacttgttctctgtgtttctgacataatttcattgagcgcaaatatatctgaaacttctagcaataaaactagtagtgcagatacccaaaaagtggccattattgaacttacagatgggtggtatgctgttaaggcccagttagatcctcccctcttagctgtcttaaagaatggcagactgacagttggtcagaagattattcttcatggagcagaactggtgggctctcctgatgcctgtacacctcttgaagccccagaatctcttatgttaaagatttctgctaacagtactcggcctgctcgctggtataccaaacttggattctttcctgaccctagaccttttcctctgcccttatcatcgcttttcagtgatggaggaaatgttggttgtgttgatgtaattattcaaagagcataccctatacagcggatggagaagacatcatctggattatacatatttcgcaatgaaagagaggaagaaaaggaagcagcaaaatatgtggaggcccaacaaaagagactggaagccttattcactaaaattcaggaggaatttgaagaacatgaagaaaacacaacaaaaccatatttaccatcacgtgcactaacaagacagcaagttcgtgctttgcaagatggtgcagagctttatgaagcagtgaagaatgcagcagacccagcttaccttgagggttatttcagtgaagagcagttaagagccttgaataatcacaggcaaatgttgaatgataagaaacaagctcagatccagttggaaattaggaaggccatggaatctgctgaacaaaaggaacaaggtttatcaagggatgtcacaaccgtgtggaagttgcgtattgtaagctattcaaaaaaagaaaaagattcagttatactgagtatttggcgtccatcatcagatttatattctctgttaacagaaggaaagagatacagaatttatcatcttgcaacttcaaaatctaaaagtaaatctgaaagagctaacactaggaaaaaaattttccatgaagcaaacgctgatgaatgtgaaaaatctaaaaaccaagtgaaagaaaaatactcatttgtatctgaagtggaaccaaatgatactgatccattagattcaaatgtagcacatcagaagccctttgagagtggaagtgacaaaatctccaaggaagttgtaccgtctttggcctgtgaatggtctcaactaaccctttcaggtctaaatggagcccagatggagaaaatacccctattgcatatttcttcatgtgaccaaaatatttcagaaaaagacctattagacacagagaacaaaagaaagaaagattttcttacttcagagaattctttgccacgtatttctagcctaccaaaatcagagaagccattaaatgaggaaacagtggtaaataagagagatgaagagcagcatcttgaatctcatacagactgcattcttgcagtaaagcaggcaatatctggaacttctccagtggcttcttcatttcagggtatcaaaaagtctatattcagaataagagaatcacctaaagagactttcaatgcaagtttttcaggtcatatgactgatccaaactttaaaaaagaaactgaagcctctgaaagtggactggaaatacatactgtttgctcacagaaggaggactccttatgtccaaatttaattgataatggaagctggccagccaccaccacacagaattctgtagctttgaagaatgcaggtttaatatccactttgaaaaagaaaacaaataagtttatttatgctatacatgatgaaacattttataaaggaaaaaaaataccgaaagaccaaaaatcagaactaattaactgttcagcccagtttgaagcaaatgcttttgaagcaccacttacatttgcaaatgctgattcaggtttattgcattcttctgtgaaaagaagctgttcacagaatgattctgaagaaccaactttgtccttaactagctcttttgggacaattctgaggaaatgttctagaaatgaaacatgttctaataatacagtaatctctcaggatcttgattataaagaagcaaaatgtaataaggaaaaactacagttatttattaccccagaagctgattctctgtcatgcctgcaggaaggacagtgtgaaaatgatccaaaaagcaaaaaagtttcagatataaaagaagaggtcttggctgcagcatgtcacccagtacaacattcaaaagtggaatacagtgatactgactttcaatcccagaaaagtcttttatatgatcatgaaaatgccagcactcttattttaactcctacttccaaggatgttctgtcaaacctagtcatgatttctagaggcaaagaatcatacaaaatgtcagacaagctcaaaggtaacaattatgaatctgatgttgaattaaccaaaaatattcccatggaaaagaatcaagatgtatgtgctttaaatgaaaattataaaaacgttgagctgttgccacctgaaaaatacatgagagtagcatcaccttcaagaaaggtacaattcaaccaaaacacaaatctaagagtaatccaaaaaaatcaagaagaaactacttcaatttcaaaaataactgtcaatccagactctgaagaacttttctcagacaatgagaataattttgtcttccaagtagctaatgaaaggaataatcttgctttaggaaatactaaggaacttcatgaaacagacttgacttgtgtaaacgaacccattttcaagaactctaccatggttttatatggagacacaggtgataaacaagcaacccaagtgtcaattaaaaaagatttggtttatgttcttgcagaggagaacaaaaatagtgtaaagcagcatataaaaatgactctaggtcaagatttaaaatcggacatctccttgaatatagataaaataccagaaaaaaataatgattacatgaacaaatgggcaggactcttaggtccaatttcaaatcacagttttggaggtagcttcagaacagcttcaaataaggaaatcaagctctctgaacataacattaagaagagcaaaatgttcttcaaagatattgaagaacaatatcctactagtttagcttgtgttgaaattgtaaataccttggcattagataatcaaaagaaactgagcaagcctcagtcaattaatactgtatctgcacatttacagagtagtgtagttgtttctgattgtaaaaatagtcatataacccctcagatgttattttccaagcaggattttaattcaaaccataatttaacacctagccaaaaggcagaaattacagaactttctactatattagaagaatcaggaagtcagtttgaatttactcagtttagaaaaccaagctacatattgcagaagagtacatttgaagtgcctgaaaaccagatgactatcttaaagaccacttctgaggaatgcagagatgctgatcttcatgtcataatgaatgccccatcgattggtcaggtagacagcagcaagcaatttgaaggtacagttgaaattaaacggaagtttgctggcctgttgaaaaatgactgtaacaaaagtgcttctggttatttaacagatgaaaatgaagtggggtttaggggcttttattctgctcatggcacaaaactgaatgtttctactgaagctctgcaaaaagctgtgaaactgtttagtgatattgagaatattagtgaggaaacttctgcagaggtacatccaataagtttatcttcaagtaaatgtcatgattctgttgtttcaatgtttaagatagaaaatcataatgataaaactgtaagtgaaaaaaataataaatgccaactgatattacaaaataatattgaaatgactactggcacttttgttgaagaaattactgaaaattacaagagaaatactgaaaatgaagataacaaatatactgctgccagtagaaattctcataacttagaatttgatggcagtgattcaagtaaaaatgatactgtttgtattcataaagatgaaacggacttgctatttactgatcagcacaacatatgtcttaaattatctggccagtttatgaaggagggaaacactcagattaaagaagatttgtcagatttaacttttttggaagttgcgaaagctcaagaagcatgtcatggtaatacttcaaataaagaacagttaactgctactaaaacggagcaaaatataaaagattttgagacttctgatacattttttcagactgcaagtgggaaaaatattagtgtcgccaaagagttatttaataaaattgtaaatttctttgatcagaaaccagaagaattgcataacttttccttaaattctgaattacattctgacataagaaagaacaaaatggacattctaagttatgaggaaacagacatagttaaacacaaaatactgaaagaaagtgtcccagttggtactggaaatcaactagtgaccttccagggacaacccgaacgtgatgaaaagatcaaagaacctactctgttgggttttcatacagctagcggaaaaaaagttaaaattgcaaaggaatctttggacaaagtgaaaaacctttttgatgaaaaagagcaaggtactagtgaaatcaccagttttagccatcaatgggcaaagaccctaaagtacagagaggcctgtaaagaccttgaattagcatgtgagaccattgagatcacagctgccccaaagtgtaaagaaatgcagaattctctcaataatgataaaaaccttgtttctattgagactgtggtgccacctaagctcttaagtgataatttatgtagacaaactgaaaatctcaaaacatcaaaaagtatctttttgaaagttaaagtacatgaaaatgtagaaaaagaaacagcaaaaagtcctgcaacttgttacacaaatcagtccccttattcagtcattgaaaattcagccttagctttttacacaagttgtagatacagttagcagcgacaaaaaaaactcagtatcaacaactaccggtttcagatgaaattttatttcagatttaccagccacgggagccccttcacttcagcaaatttttagatccagactttcagccatcttgttctgaggtggacctaataggatttgtcgtttctgttgtgaaaaaaacaggacttgcccctttcgtctatttgtcagacgaatgttacaatttactggcaataaagttttggatagaccttaatgaggacattattaagcctcatatgttaattgctgcaagcaacctccagtggcgaccagaatccaaatcaggccttcttactttatttgctggagatttttctgtgttttctgctagtccaaaagagggccactttcaagagacattcaacaaaatgaaaaatactgttgagaatattgacatactttgcaatgaagcagaaaacaagcttatgcatatactgcatgcaaatgatcccaagtggtccaccccaactaaagactgtacttcagggccgtacactgctcaaatcattcctggtacaggaaacaagcttctgatgtcttctcctaattgtgagatatattatcaaagtcctttatcactttgtatggccaaaaggaagtctgtttccacacctgtctcagcccagatgacttcaaagtcttgtaaaggggagaaagagattgatgaccaaaagaactgcaaaaagagaagagccttggatttcttgagtagactgcctttacctccacctgttagtcccatttgtacatttgtttctccggctgcacagaaggcatttcagccaccaaggagttgtggcaccaaatacgaaacacccataaagaaaaaagaactgaattctcctcagatgactccatttaaaaaattcaatgaaatttctcttttggaaagtaattcaatagctgacgaagaacttgcattgataaatacccaagctcttttgtctggttcaacaggagaaaaacaatttatatctgtcagtgaatccactaggactgctcccaccagttcagaagattatctcagactgaaacgacgttgtactacatctctgatcaaagaacaggagagttcccaggccagtacggaagaatgtgagaaaaataagcaggacacaattacaactaaaaaatatatctaa

SEQ ID NO: 147908 - DNA, 15450 bp, Homo sapiens
atgcctattggatccaaagagaggccaacattttttgaaatttttaagacacgctgcaacaaagcagatttaggaccaataagtcttaattggtttgaagaactttcttcagaagctccaccctataattctgaacctgcagaagaatctgaacataaaaacaacaattacgaaccaaacctatttaaaactccacaaaggaaaccatcttataatcagctggcttcaactccaataatattcaaagagcaagggctgactctgccgctgtaccaatctcctgtaaaagaattagataaattcaaattagacttaggaaggaatgttcccaatagtagacataaaagtcttcgcacagtgaaaactaaaatggatcaagcagatgatgtttcctgtccacttctaaattcttgtcttagtgaaagtcctgttgttctacaatgtacacatgtaacaccacaaagagataagtcagtggtatgtgggagtttgtttcatacaccaaagtttgtgaagggtcgtcagacaccaaaacatatttctgaaagtctaggagctgaggtggatcctgatatgtcttggtcaagttctttagctacaccacccacccttagttctactgtgctcatagtcagaaatgaagaagcatctgaaactgtatttcctcatgatactactgctaatgtgaaaagctatttttccaatcatgatgaaagtctgaagaaaaatgatagatttatcgcttctgtgacagacagtgaaaacacaaatcaaagagaagctgcaagtcatggatttggaaaaacatcagggaattcatttaaagtaaatagctgcaaagaccacattggaaagtcaatgccaaatgtcctagaagatgaagtatatgaaacagttgtagatacctctgaagaagatagtttttcattatgtttttctaaatgtagaacaaaaaatctacaaaaagtaagaactagcaagactaggaaaaaaattttccatgaagcaaacgctgatgaatgtgaaaaatctaaaaaccaagtgaaagaaaaatactcatttgtatctgaagtggaaccaaatgatactgatccattagattcaaatgtagcacatcagaagccctttgagagtggaagtgacaaaatctccaaggaagttgtaccgtctttggcctgtgaatggtctcaactaaccctttcaggtctaaatggagcccagatggagaaaatacccctattgcatatttcttcatgtgaccaaaatatttcagaaaaagacctattagacacagagaacaaaagaaagaaagattttcttacttcagagaattctttgccacgtatttctagcctaccaaaatcagagaagccattaaatgaggaaacagtggtaaataagagagatgaagagcagcatcttgaatctcatacagactgcattcttgcagtaaagcaggcaatatctggaacttctccagtggcttcttcatttcagggtatcaaaaagtctatattcagaataagagaatcacctaaagagactttcaatgcaagtttttcaggtcatatgactgatccaaactttaaaaaagaaactgaagcctctgaaagtggactggaaatacatactgtttgctcacagaaggaggactccttatgtccaaatttaattgataatggaagctggccagccaccaccacacagaattctgtagctttgaagaatgcaggtttaatatccactttgaaaaagaaaacaaataagtttatttatgctatacatgatgaaacatcttataaaggaaaaaaaataccgaaagaccaaaaatcagaactaattaactgttcagcccagtttgaagcaaatgcttttgaagcaccacttacatttgcaaatgctgattcaggtttattgcattcttctgtgaaaagaagctgttcacagaatgattctgaagaaccaactttgtccttaactagctcttttgggacaattctgaggaaatgttctagaaatgaaacatgttctaataatacagtaatctctcaggatcttgattataaagaagcaaaatgtaataaggaaaaactacagttatttattaccccagaagctgattctctgtctagaaaaacttctgtgagtcagacttcattacttgaagcaaaaaaatggcttagagaaggaatatttgatggtcaaccagaaagaataaatactgcagattatgtaggaaattatttgtatgaaaataattcaaacagtactatagctgaaaatgacaaaaatcatctctccgaaaaacaagatacttatttaagtaacagtagcatgtctaacagctattcctaccattctgatgaggtatataatgattcaggatatctctcaaaaaataaacttgattctggtattgagccagtattgaagaatgttgaagatcaaaaaaacactagtttttccaaagtaatatccaatgtaaaagatgcaaatgcatacccacaaactgtaaatgaagatatttgcgttgaggaacttgtgactagctcttcaccctgcaaaaataaaaatgcagccattaaattgtccatatctaatagtaataattttgaggtagggccacctgcatttaggatagccagtggtaaaatccgtttgtgttcacatgaaacaattaaaaaagtgaaagacatatttacagacagtttcagcaaagtaattaaggaaaacaacgagaataaatcaaaaatttgccaaacgaaaattatggcaggttgttacgaggcattggatgattcagaggatattcttcataactctctagataatgatgaatgtagcatgcattcacataaggtttttgctgacattcagagtgaagaaattttacaacataaccaaaatatgtctggattggagaaagtttctaaaatatcaccttgtgatgttagtttggaaacttcagatatatgtaaatgtagtatagggaagcttcataagtcagtctcatctgcaaatacttgtgggatttttagcacagcaagtggaaaatctgtccaggtatcagatgcttcattacaaaacgcaagacaagtgttttctgaaatagaagatagtaccaagcaagtcttttccaaagtattgtttaaaagtaacgaacattcagaccagctcacaagagaagaaaatactgctatacgtactccagaacatttaatatcccaaaaaggcttttcatataatgtggtaaattcatctgctttctctggatttagtacagcaagtggaaagcaagtttccattttagaaagttccttacacaaagttaagggagtgttagaggaatttgatttaatcagaactgagcatagtcttcactattcacctacgtctagacaaaatgtatcaaaaatacttcctcgtgttgataagagaaacccagagcactgtgtaaactcagaaatggaaaaaacctgcagtaaagaatttaaattatcaaataacttaaatgttgaaggtggttcttcagaaaataatcactctattaaagtttctccatatctctctcaatttcaacaagacaaacaacagttggtattaggaaccaaagtctcacttgttgagaacattcatgttttgggaaaagaacaggcttcacctaaaaacgtaaaaatggaaattggtaaaactgaaactttttctgatgttcctgtgaaaacaaatatagaagtttgttctacttactccaaagattcagaaaactactttgaaacagaagcagtagaaattgctaaagcttttatggaagatgatgaactgacagattctaaactgccaagtcatgccacacattctctttttacatgtcccgaaaatgaggaaatggttttgtcaaattcaagaattggaaaaagaagaggagagccccttatcttagtgggagaaccctcaatcaaaagaaacttattaaatgaatttgacaggataatagaaaatcaagaaaaatccttaaaggcttcaaaaagcactccagatggcacaataaaagatcgaagattgtttatgcatcatgtttctttagagccgattacctgtgtaccctttcgcacaactaaggaacgtcaagagatacagaatccaaattttaccgcacctggtcaagaatttctgtctaaatctcatttgtatgaacatctgactttggaaaaatcttcaagcaatttagcagtttcaggacatccattttatcaagtttctgctacaagaaatgaaaaaatgagacacttgattactacaggcagaccaaccaaagtctttgttccaccttttaaaactaaatcacattttcacagagttgaacagtgtgttaggaatattaacttggaggaaaacagacaaaagcaaaacattgatggacatggctctgatgatagtaaaaataagattaatgacaatgagattcatcagtttaacaaaaacaactccaatcaagcagcagctgtaactttcacaaagtgtgaagaagaacctttagatttaattacaagtcttcagaatgccagagatatacaggatatgcgaattaagaagaaacaaaggcaacgcgtctttccacagccaggcagtctgtatcttgcaaaaacatccactctgcctcgaatctctctgaaagcagcagtaggaggccaagttccctctgcgtgttctcataaacagctgtatacgtatggcgtttctaaacattgcataaaaattaacagcaaaaatgcagagtcttttcagtttcacactgaagattattttggtaaggaaagtttatggactggaaaaggaatacagttggctgatggtggatggctcataccctccaatgatggaaaggctggaaaagaagaattttatagggctctgtgtgacactccaggtgtggatccaaagcttatttctagaatttgggtttataatcactatagatggatcatatggaaactggcagctatggaatgtgcctttcctaaggaatttgctaatagatgcctaagcccagaaagggtgcttcttcaactaaaatacagatatgatacggaaattgatagaagcagaagatcggctataaaaaagataatggaaagggatgacacagctgcaaaaacacttgttctctgtgtttctgacataatttcattgagcgcaaatatatctgaaacttctagcaataaaactagtagtgcagatacccaaaaagtggccattattgaacttacagatgggtggtatgctgttaaggcccagttagatcctcccctcttagctgtcttaaagaatggcagactgacagttggtcagaagattattcttcatggagcagaactggtgggctctcctgatgcctgtacacctcttgaagccccagaatctcttatgttaaagatttctgctaacagtactcggcctgctcgctggtataccaaacttggattctttcctgaccctagaccttttcctctgcccttatcatcgcttttcagtgatggaggaaatgttggttgtgttgatgtaattattcaaagagcataccctatacagcggatggagaagacatcatctggattatacatatttcgcaatgaaagagaggaagaaaaggaagcagcaaaatatgtggaggcccaacaaaagagactggaagccttattcactaaaattcaggaggaatttgaagaacatgaagaaaacacaacaaaaccatatttaccatcacgtgcactaacaagacagcaagttcgtgctttgcaagatggtgcagagctttatgaagcagtgaagaatgcagcagacccagcttaccttgagggttatttcagtgaagagcagttaagagccttgaataatcacaggcaaatgttgaatgataagaaacaagctcagatccagttggaaattaggaaggccatggaatctgctgaacaaaaggaacaaggtttatcaagggatgtcacaaccgtgtggaagttgcgtattgtaagctattcaaaaaaagaaaaagattcagttatactgagtatttggcgtccatcatcagatttatattctctgttaacagaaggaaagagatacagaatttatcatcttgcaacttcaaaatctaaaagtaaatctgaaagagctaacatgcctgcaggaaggacagtgtgaaaatgatccaaaaagcaaaaaagtttcagatataaaagaagaggtcttggctgcagcatgtcacccagtacaacattcaaaagtggaatacagtgatactgactttcaatcccagaaaagtcttttatatgatcatgaaaatgccagcactcttattttaactcctacttccaaggatgttctgtcaaacctagtcatgatttctagaggcaaagaatcatacaaaatgtcagacaagctcaaaggtaacaattatgaatctgatgttgaattaaccaaaaatattcccatggaaaagaatcaagatgtatgtgctttaaatgaaaattataaaaacgttgagctgttgccacctgaaaaatacatgagagtagcatcaccttcaagaaaggtacaattcaaccaaaacacaaatctaagagtaatccaaaaaaatcaagaagaaactacttcaatttcaaaaataactgtcaatccagactctgaagaacttttctcagacaatgagaataattttgtcttccaagtagctaatgaaaggaataatcttgctttaggaaatactaaggaacttcatgaaacagacttgacttgtgtaaacgaacccattttcaagaactctaccatggttttatatggagacacaggtgataaacaagcaacccaagtgtcaattaaaaaagatttggtttatgttcttgcagaggagaacaaaaatagtgtaaagcagcatataaaaatgactctaggtcaagatttaaaatcggacatctccttgaatatagataaaataccagaaaaaaataatgattacatgaacaaatgggcaggactcttaggtccaatttcaaatcacagttttggaggtagcttcagaacagcttcaaataaggaaatcaagctctctgaacataacattaagaagagcaaaatgttcttcaaagatattgaagaacaatatcctactagtttagcttgtgttgaaattgtaaataccttggcattagataatcaaaagaaactgagcaagcctcagtcaattaatactgtatctgcacatttacagagtagtgtagttgtttctgattgtaaaaatagtcatataacccctcagatgttattttccaagcaggattttaattcaaaccataatttaacacctagccaaaaggcagaaattacagaactttctactatattagaagaatcaggaagtcagtttgaatttactcagtttagaaaaccaagctacatattgcagaagagtacatttgaagtgcctgaaaaccagatgactatcttaaagaccacttctgaggaatgcagagatgctgatcttcatgtcataatgaatgccccatcgattggtcaggtagacagcagcaagcaatttgaaggtacagttgaaattaaacggaagtttgctggcctgttgaaaaatgactgtaacaaaagtgcttctggttatttaacagatgaaaatgaagtggggtttaggggcttttattctgctcatggcacaaaactgaatgtttctactgaagctctgcaaaaagctgtgaaactgtttagtgatattgagaatattagtgaggaaacttctgcagaggtacatccaataagtttatcttcaagtaaatgtcatgattctgttgtttcaatgtttaagatagaaaatcataatgataaaactgtaagtgaaaaaaataataaatgccaactgatattacaaaataatattgaaatgactactggcacttttgttgaagaaattactgaaaattacaagagaaatactgaaaatgaagataacaaatatactgctgccagtagaaattctcataacttagaatttgatggcagtgattcaagtaaaaatgatactgtttgtattcataaagatgaaacggacttgctatttactgatcagcacaacatatgtcttaaattatctggccagtttatgaaggagggaaacactcagattaaagaagatttgtcagatttaacttttttggaagttgcgaaagctcaagaagcatgtcatggtaatacttcaaataaagaacagttaactgctactaaaacggagcaaaatataaaagattttgagacttctgatacattttttcagactgcaagtgggaaaaatattagtgtcgccaaagagtcatttaataaaattgtaaatttctttgatcagaaaccagaagaattgcataacttttccttaaattctgaattacattctgacataagaaagaacaaaatggacattctaagttatgaggaaacagacatagttaaacacaaaatactgaaagaaagtgtcccagttggtactggaaatcaactagtgaccttccagggacaacccgaacgtgatgaaaagatcaaagaacctactctgttgggttttcatacagctagcgggaaaaaagttaaaattgcaaaggaatctttggacaaagtgaaaaacctttttgatgaaaaagagcaaggtactagtgaaatcaccagttttagccatcaatgggcaaagaccctaaagtacagagaggcctgtaaagaccttgaattagcatgtgagaccattgagatcacagctgccccaaagtgtaaagaaatgcagaattctctcaataatgataaaaaccttgtttctattgagactgtggtgccacctaagctcttaagtgataatttatgtagacaaactgaaaatctcaaaacatcaaaaagtatctttttgaaagttaaagtacatgaaaatgtagaaaaagaaacagcaaaaagtcctgcaacttgttacacaaatcagtccccttattcagtcattgaaaattcagccttagctttttacacaagttgtagtagaaaaacttctgtgagtcagacttcattacttgaagcaaaaaaatggcttagagaaggaatatttgatggtcaaccagaaagaataaatactgcagattatgtaggaaattatttgtatgaaaataattcaaacagtactatagctgaaaatgacaaaaatcatctctccgaaaaacaagatacttatttaagtaacagtagcatgtctaacagctattcctaccattctgatgaggtatataatgattcaggatatctctcaaaaaataaacttgattctggtattgagccagtattgaagaatgttgaagatcaaaaaaacactagtttttccaaagtaatatccaatgtaaaagatgcaaatgcatacccacaaactgtaaatgaagatatttgcgttgaggaacttgtgactagctcttcaccctgcaaaaataaaaatgcagccattaaattgtccatatctaatagtaataattttgaggtagggccacctgcatttaggatagccagtggtaaaatcgtttgtgtttcacatgaaacaattaaaaaagtgaaagacatatttacagacagtttcagtaaagtaattaaggaaaacaacgagaataaatcaaaaatttgccaaacgaaaattatggcaggttgttacgaggcattggatgattcagaggatattcttcataactctctagataatgatgaatgtagcacgcattcacataaggtttttgctgacattcagagtgaagaaattttacaacataaccaaaatatgtctggattggagaaagtttctaaaatatcaccttgtgatgttagtttggaaacttcagatatatgtaaatgtagtatagggaagcttcataagtcagtctcatctgcaaatacttgtgggatttttagcacagcaagtggaaaatctgtccaggtatcagatgcttcattacaaaacgcaagacaagtgttttctgaaatagaagatagtaccaagcaagtcttttccaaagtattgtttaaaagtaacgaacattcagaccagctcacaagagaagaaaatactgctatacgtactccagaacatttaatatcccaaaaaggcttttcatataatgtggtaaattcatctgctttctctggatttagtacagcaagtggaaagcaagtttccattttagaaagttccttacacaaagttaagggagtgttagaggaatttgatttaatcagaactgagcatagtcttcactattcacctacgtctagacaaaatgtatcaaaaatacttcctcgtgttgataagagaaacccagagcactgtgtaaactcagaaatggaaaaaacctgcagtaaagaatttaaattatcaaataacttaaatgttgaaggtggttcttcagaaaataatcactctattaaagtttctccatatctctctcaatttcaacaagacaaacaacagttggtattaggaaccaaagtctcacttgttgagaacattcatgttttgggaaaagaacaggcttcacctaaaaacgtaaaaatggaaattggtaaaactgaaactttttctgatgttcctgtgaaaacaaatatagaagtttgttctacttactccaaagattcagaaaactactttgaaacagaagcagtagaaattgctaaagcttttatggaagatgatgaactgacagattctaaactgccaagtcatgccacacattctctttttacatgtcccgaaaatgaggaaatggttttgtcaaattcaagaattggaaaaagaagaggagagccccttatcttagtgggagaaccctcaatcaaaagaaacttattaaatgaatttgacaggataatagaaaatcaagaaaaatccttaaaggcttcaaaaagcactccagatggcacaataaaagatcgaagattgtttatgcatcatgtttctttagagccgattacctgtgtaccctttcgcacaactaaggaacgtcaagagatacagaatccaaattttaccgcacctggtcaagaatttctgtctaaatctcatttgtatgaacatctgactttggaaaaatcttcaagcaatttagcagtttcaggacatccattttatcaagtttctgctacaagaaatgaaaaaatgagacacttgattactacaggcagaccaaccaaagtctttgttccaccttttaaaactaaatcacattttcacagagttgaacagtgtgttaggaatattaacttggaggaaaacagacaaaagcaaaacattgatggacatggctctgatgatagtaaaaataagattaatgacaatgagattcatcagtttaacaaaaacaactccaatcaagcagcagctgtaactttcacaaagtgtgaagaagaacctttagatttaattacaagtcttcagaatgccagagatatacaggatatgcgaattaagaagaaacaaaggcaacgcgtctttccacagccaggcagtctgtatcttgcaaaaacatccactctgcctcgaatctctctgaaagcagcagtaggaggccaagttccctctgcgtgttctcataaacagctgtatacgtatggcgtttctaaacattgcataaaaattaacagcaaaaatgcagagtcttttcagtttcacactgaagattattttggtaaggaaagtttatggactggaaaaggaatacagttggctgatggtggatggctcataccctccaatgatggaaaggctggaaaagaagaattttatagggctctgtgtgacactccaggtgtggatccaaagcttatttctagaatttgggtttataatcactatagatggatcatatggaaactggcagctatggaatgtgcctttcctaaggaatttgctaatagatgcctaagcccagaaagggtgcttcttcaactaaaatacagatatgatacggaaattgatagaagcagaagatcggctataaaaaagataatggaaagggatgacacagctgcaaaaacacttgttctctgtgtttctgacataatttcattgagcgcaaatatatctgaaacttctagcaataaaactagtagtgcagatacccaaaaagtggccattattgaacttacagatgggtggtatgctgttaaggcccagttagatcctcccctcttagctgtcttaaagaatggcagactgacagttggtcagaagattattcttcatggagcagaactggtgggctctcctgatgcctgtacacctcttgaagccccagaatctcttatgttaaagatttctgctaacagtactcggcctgctcgctggtataccaaacttggattctttcctgaccctagaccttttcctctgcccttatcatcgcttttcagtgatggaggaaatgttggttgtgttgatgtaattattcaaagagcataccctatacagtggatggagaagacatcatctggattatacatatttcgcaatgaaagagaggaagaaaaggaagcagcaaaatatgtggaggcccaacaaaagagactagaagccttattcactaaaattcaggaggaatttgaagaacatgaagaaaacacaacaaaaccatatttaccatcacgtgcactaacaagacagcaagttcgtgctttgcaagatggtgcagagctttatgaagcagtgaagaatgcagcagacccagcttaccttgagggttatttcagtgaagagcagttaagagccttgaataatcacaggcaaatgttgaatgataagaaacaagctcagatccagttggaaattaggaaggccatggaatctgctgaacaaaaggaacaaggtttatcaagggatgtcacaaccgtgtggaagttgcgtattgtaagctattcaaaaaaagaaaaagattcagttatactgagtatttggcgtccatcatcagatttatattctctgttaacagaaggaaagagatacagaatttatcatcttgcaacttcaaaatctaaaagtaaatctgaaagagctaacatacagttagcagcgacaaaaaaaactcagtatcaacaactaccggtttcagatgaaattttatttcagatttaccagccacgggagccccttcacttcagcaaatttttagatccagactttcagccatcttgttctgaggtggacctaataggatttgtcgtttctgttgtgaaaaaaacaggacttgcccctttcgtctatttgtcagacgaatgttacaatttactggcaataaagttttggatagaccttaatgaggacattattaagcctcatatgttaattgctgcaagcaacctccagtggcgaccagaatccaaatcaggccttcttactttatttgctggagatttttctgtgttttctgctagtccaaaagagggccactttcaagagacattcaacaaaatgaaaaatactgttgagaatattgacatactttgcaatgaagcagaaaacaagcttatgcatatactgcatgcaaatgatcccaagtggtccaccccaactaaagactgtacttcagggccgtacactgctcaaatcattcctggtacaggaaacaagcttctgatgtcttctcctaattgtgagatatattatcaaagtcctttatcactttgtatggccaaaaggaagtctgtttccacacctgtctcagcccagatgacttcaaagtcttgtaaaggggagaaagagattgatgaccaaaagaactgcaaaaagagaagagccttggatttcttgagtagactgcctttacctccacctgttagtcccatttgtacatttgtttctccggctgcacagaaggcatttcagccaccaaggagttgtggcaccaaatacgaaacacccataaagaaaaaagaactgaattctcctcagatgactccatttaaaaaattcaatgaaatttctcttttggaaagtaattcaatagctgacgaagaacttgcattgataaatacccaagctcttttgtctggttcaacaggagaaaaacaatttatatctgtcagtgaatccactaggactgctcccaccagttcagaagattatctcagactgaaacgacgttgtactacatctctgatcaaagaacaggagagttcccaggccagtacggaagaatgtgagaaaaaatacagttagcagcgacaaaaaaaactcagtatcaacaactaccggtttcagatgaaattttatttcagatttaccagccacgggagccccttcacttcagcaaatttttagatccagactttcagccatcttgttctgaggtggacctaataggatttgtcgtttctgttgtgaaaaaaacaggacttgcccctttcgtctatttgtcagacgaatgttacaatttactggcaataaagttttggatagaccttaatgaggacattattaagcctcatatgttaattgctgcaagcaacctccagtggcgaccagaatccaaatcaggccttcttactttatttgctggagatttttctgtgttttctgctagtccaaaagagggccactttcaagagacattcaacaaaatgaaaaatactgttgagaatattgacatactttgcaatgaagcagaaaacaagcttatgcatatactgcatgcaaatgatcccaagtggtccaccccaactaaagactgtacttcagggccgtacactgctcaaatcattcctggtacaggaaacaagcttctgatgtcttctcctaattgtgagatatattatcaaagtcctttatcactttgtatggccaaaaggaagtctgtttccacacctgtctcagcccagatgacttcaaagtcttgtaaaggggagaaagagattgatgaccaaaagaactgcaaaaagagaagagccttggatttcttgagtagactgcctttacctccacctgttagtcccatttgtacatttgtttctccggctgcacagaaggcatttcagccaccaaggagttgtggcaccaaatacgaaacacccataaagaaaaaagaactgaattctcctcagatgactccatttaaaaaattcaatgaaatttctcttttggaaagtaattcaatagctgacgaagaacttgcattgataaatacccaagctcttttgtctggttcaacaggagaaaaacaatttatatctgtcagtgaatccactaggactgctcccaccagttcagaagattatctcagactgaaacgacgttgtactacatctctgatcaaagaacaggagagttcccaggccagtacggaagaatgtgagaaaaataagcaggacacaattacaactaaaaaatatatctaa

SEQ ID NO: 147909 - DNA, 2166 bp, Homo sapiens
atgcctattggatccaaagagaggccaacattttttgaaatttttaagacacgctgcaacaaagcagatttaggaccaataagtcttaattggtttgaagaactttcttcagaagctccaccctataattctgaacctgcagaagaatctgaacataaaaacaacaattacgaaccaaacctatttaaaactccacaaaggaaaccatcttataatcagctggcttcaactccaataatattcaaagagcaagggctgactctgccgctgtaccaatctcctgtaaaagaattagataaattcaaattagacttaggaaggaatgttcccaatagtagacataaaagtcttcgcacagtgaaaactaaaatggatcaagcagatgatgtttcctgtccacttctaaattcttgtcttagtgaaagtcctgttgttctacaatgtacacatgtaacaccacaaagagataagtcagtggtatgtgggagtttgtttcatacaccaaagtttgtgaagggtcgtcagacaccaaaacatatttctgaaagtctaggagctgaggtggatcctgatatgtcttggtcaagttctttagctacaccacccacccttagttctactgtgctcatagtcagaaatgaagaagcatctgaaactgtatttcctcatgatactactgctaatgtgaaaagctatttttccaatcatgatgaaagtctgaagaaaaatgatagatttatcgcttctgtgacagacagtgaaaacacaaatcaaagagaagctgcaagtcatggatttggaaaaacatcagggaattcatttaaagtaaatagctgcaaagaccacattggaaagtcaatgccaaatgtcctagaagatgaagtatatgaaacagttgtagatacctctgaagaagatagtttttcattatgtttttctaaatgtagaacaaaaaatctacaaaaagtaagaactagcaagactaggaaaaaaattttccatgaagcaaacgctgatgaatgtgaaaaatctaaaaaccaagtgaaagaaaaatactcatttgtatctgaagtggaaccaaatgatactgatccattagattcaaatgtagcacatcagaagccctttgagagtggaagtgacaaaatctccaaggaagttgtaccgtctttggcctgtgaatggtctcaactaaccctttcaggtctaaatggagcccagatggagaaaatacccctattgcatatttcttcatgtgaccaaaatatttcagaaaaagacctattagacacagagaacaaaagaaagaaagattttcttacttcagagaattctttgccacgtatttctagcctaccaaaatcagagaagccattaaatgaggaaacagtggtaaataagagagatgaagagcagcatcttgaatctcatacagactgcattcttgcagtaaagcaggcaatatctggaacttctccagtggcttcttcatttcagggtatcaaaaagtctatattcagaataagagaatcacctaaagagactttcaatgcaagtttttcaggtcatatgactgatccaaactttaaaaaagaaactgaagcctctgaaagtggactggaaatacatactgtttgctcacagaaggaggactccttatgtccaaatttaattgataatggaagctggccagccaccaccacacagaattctgtagctttgaagaatgcaggtttaatatccactttgaaaaagaaaacaaataagtttatttatgctatacatgatgaaacatcttataaaggaaaaaaaataccgaaagaccaaaaatcagaactaattaactgttcagcccagtttgaagcaaatgcttttgaagcaccacttacatttgcaaatgctgattcaggtttattgcattcttctgtgaaaagaagctgttcacagaatgattctgaagaaccaactttgtccttaactagctcttttgggacaattctgaggaaatgttctagaaatgaaacatgttctaataatacagtaatctctcaggatcttgattataaagaagcaaaatgtaataaggaaaaactacagttatttattaccccagaagctgattctctgtctaagcaggacacaattacaactaaaaaatatatctaa

SEQ ID NO: 147910 - DNA, 5771 bp, Homo sapiens
atgcctattggatccaaagagaggccaacattttttgaaatttttaagacacgctgcaacaaagcagatttaggaccaataagtcttaattggtttgaagaactttcttcagaagctccaccctataattctgaacctgcagaagaatctgaacataaaaacaacaattacgaaccaaacctatttaaaactccacaaaggaaaccatcttataatcagctggcttcaactccaataatattcaaagagcaagggctgactctgccgctgtaccaatctcctgtaaaagaattagataaattcaaattagacttaggaaggaatgttcccaatagtagacataaaagtcttcgcacagtgaaaactaaaatggatcaagcagatgatgtttcctgtccacttctaaattcttgtcttagtgaaagtcctgttgttctacaatgtacacatgtaacaccacaaagagataagtcagtggtatgtgggagtttgtttcatacaccaaagtttgtgaagggtcgtcagacaccaaaacatatttctgaaagtctaggagctgaggtggatcctgatatgtcttggtcaagttctttagctacaccacccacccttagttctactgtgctcatagtcagaaatgaagaagcatctgaaactgtatttcctcatgatactactgctaatgtgaaaagctatttttccaatcatgatgaaagtctgaagaaaaatgatagatttatcgcttctgtgacagacagtgaaaacacaaatcaaagagaagctgcaagtcatggatttggaaaaacatcagggaattcatttaaagtaaatagctgcaaagaccacattggaaagtcaatgccacatgtcctagaagatgaagtatatgaaacagttgtagatacctctgaagaagatagtttttcattatgtttttctaaatgtagaacaaaaaatctacaaaaagtaagaactagcaagactaggaaaaaaattttccatgaagcaaacgctgatgaatgtgaaaaatctaaaaaccaagtgaaagaaaaatactcatttgtatctgaagtggaaccaaatgatactgatccattagattcaaatgtagcaaatcagaagccctttgagagtggaagtgacaaaatctccaaggaagttgtaccgtctttggcctgtgaatggtctcaactaaccctttcaggtctaaatggagcccagatggagaaaatacccctattgcatatttcttcatgtgaccaaaatatttcagaaaaagacctattagacacagagaacaaaagaaagaaagattttcttacttcagagaattctttgccacgtatttctagcctaccaaaatcagagaagccattaaatgaggaaacagtggtaaataagagagatgaagagcagcatcttgaatctcatacagactgcattcttgcagtaaagcaggcaatatctggaacttctccagtggcttcttcatttcagggtatcaaaaagtctatattcagaataagagaatcacctaaagagactttcaatgcaagtttttcaggtcatatgactgatccaaactttaaaaaagaaactgaagcctctgaaagtggactggaaatacatactgtttgctcacagaaggaggactccttatgtccaaatttaattgataatggaagctggccagccaccaccacacagaattctgtagctttgaagaatgcaggtttaatatccactttgaaaaagaaaacaaataagtttatttatgctatacatgatgaaacatcttataaaggaaaaaaaataccgaaagaccaaaaatcagaactaattaactgttcagcccagtttgaagcaaatgcttttgaagcaccacttacatttgcaaatgctgattcaggtttattgcattcttctgtgaaaagaagctgttcacagaatgattctgaagaaccaactttgtccttaactagctcttttgggacaattctgaggaaatgttctagaaatgaaacatgttctaataatacagtaatctctcaggatcttgattataaagaagcaaaatgtaataaggaaaaactacagttatttattaccccagaagctgattctctgtcatgcctgcaggaaggacagtgtgaaaatgatccaaaaagcaaaaaagtttcagatataaaagaagaggtcttggctgcagcatgtcacccagtacaacactcaaaagtggaatacagtgatactgactttcaatcccagaaaagtcttttatatgatcatgaaaatgccagcactcttattttaactcctacttccaaggatgttctgtcaaacctagtcatgatttctagaggcaaagaatcatacaaaatgtcagacaagctcaaaggtaacaattatgaatctgatgttgaattaaccaaaaatattcccatggaaaagaatcaagatgtatgtgctttaaatgaaaattataaaaacgttgagctgttgccacctgaaaaatacatgagagtagcatcaccttcaagaaaggtacaattcaaccaaaacacaaatctaagagtaatccaaaaaaatcaagaagaaactacttcaatttcaaaaataactgtcaatccagactctgaagaacttttctcagacaatgagaataattttgtcttccaagtagctaatgaaaggaataatcttgctttaggaaatactaaggaacttcatgaaacagacttgacttgtgtaaacgaacccattttcaagaactctaccatggttttatatggagacacaggtgataaacaagcaacccaagtgtcaattaaaaaagatttggtttatgttcttgcagaggagaacaaaaatagtgtaaagcagcatataaaaatgactctaggtcaagatttaaaatcggacatctccttgaatatagataaaataccagaaaaaaataatgattacatggacaaatgggcaggactcttaggtccaatttcaaatcacagttttggaggtagcttcagaacagcttcaaataaggaaatcaagctctctgaacataacattaagaagagcaaaatgttcttcaaagatattgaagaacaatatcctactagtttagcttgtgttgaaattgtaaataccttggcattagataatcaaaagaaactgagcaagcctcagtcaattaatactgtatctgcacatttacagagtagtgtagttgtttctgattgtaaaaatagtcatataacccctcagatgttattttccaagcaggattttaattcaaaccataatttaacacctagccaaaaggcagaaattacagaactttctactatattagaagaatcaggaagtcagtttgaatttactcagtttagaaagccaagctacatattgcagaagagtacatttgaagtgcctgaaaaccagatgactatcttaaagaccacttctgaggaatgcagagatgctgatcttcatgtcataatgaatgccccatcgattggtcaggtagacagcagcaagcaatttgaaggtacagttgaaattaaacggaagtttgctggcctgttgaaaaatgactgtaacaaaagtgcttctggttatttaacagatgaaaatgaagtggggtttaggggcttttattctgctcatggcacaaaactgaatgtttctactgaagctctgcaaaaagctgtgaaactgtttagtgatattgagaatattagtgaggaaacttctgcagaggtacatccaataagtttatcttcaagtaaatgtcatgattctgttgtttcaatgtttaagatagaaaatcataatgataaaactgtaagtgaaaaaaataataaatgccaactgatattacaaaataatattgaaatgactactggcacttttgttgaagaaattactgaaaattacaagagaaatactgaaaatgaagataacaaatatactgctgccagtagaaattctcataacttagaatttgatggcagtgattcaagtaaaaatgatactgtttgtattcataaagatgaaacggacttgctatttactgatcagcacaacatatgtcttaaattatctggccagtttatgaaggagggaaacactcagattaaagaagatttgtcagatttaacttttttggaagttgcgaaagctcaagaagcatgtcatggtaatacttcaaataaagaacagttaactgctactaaaacggagcaaaatataaaagattttgagacttctgatacattttttcagactgcaagtgggaaaaatattagtgtcgccaaagagtcatttaataaaattgtaaatttctttgatcagaaaccagaagaattgcataacttttccttaaattctgaattacattctgacataagaaagaacaaaatggacattctaagttatgaggaaacagacatagttaaacacaaaatactgaaagaaagtgtcccagttggtactggaaatcaactagtgaccttccagggacaacccgaacgtgatgaaaagatcaaagaacctactctgttgggttttcatacagctagcgggaaaaaagttaaaattgcaaaggaatctttggacaaagtgaaaaacctttttgatgaaaaagagcaaggtactagtgaaatcaccagttttagccatcaatgggcaaagaccctaaagtacagagaggcctgtaaagaccttgaattagcatgtgagaccattgagatcacagctgccccaaagtgtaaagaaatgcagaattctctcaataatgataaaaaccttgtttctattgagactgtggtgccacctaagctcttaagtgataatttatgtagacaaactgaaaatctcaaaacatcaaaaagtatctttttgaaagttaaagtacatgaaaatgtagaaaaagaaacagcaaaaagtcctgcaacttgttacacaaatcagtccccttattcagtcattgaaaattcagccttagctttttacacaagttgtagtagaaaaacttctgtgagtcagacttcattacttgaagcaaaaaaatggcttagagaaggaatatttgatggtcaaccagaaagaataaatactgcagattatgtaggaaattatttgtatgaaaataattcaaacagtactatagctgaaaatgacaaaaatcatctctccgaaaaacaagatacttatttaagtaacagtagcatgtctaacagctattcctaccattctgatgaggtatataatgattcaggatatctctcaaaaaataaacttgattctggtattgagccagtattgaagaatgttgaagatcaaaaaaacactagtttttccaaagtaatatccaatgtaaaagatgcaaatgcatacccacaaactgtaaatgaagatatttgcgttgaggaacttgtgactagctcttcaccctgcaaaaataaaaatgcagccattaaattgtccatatctaatagtaataattttgaggtagggccacctgcatttaggatagccagtggtaaaatcgtttgtgtttcacatgaaacaattaaaaaagtgaaagacatatttacagacagtttcagtaaagtaattaaggaaaacaacgagaataaatcaaaaatttgccaaacgaaaattatggcaggttgttacgaggcattggatgattcagaggatattcttcataactctctagataatgatgtaagcaggacacaattacaactaaaaaatatatctaa

SEQ ID NO: 147911 - DNA, 12500 bp, Homo sapiens
atgcctattggatccaaagagaggccaacattttttgaaatttttaagacacgctgcaacaaagcagatttaggaccaataagtcttaattggtttgaagaactttcttcagaagctccaccctataattctgaacctgcagaagaatctgaacataaaaacaacaattacgaaccaaacctatttaaaactccacaaaggaaaccatcttataatcagctggcttcaactccaataatattcaaagagcaagggctgactctgccgctgtaccaatctcctgtaaaagaattagataaattcaaattagacttaggaaggaatgttcccaatagtagacataaaagtcttcgcacagtgaaaactaaaatggatcaagcagatgatgtttcctgtccacttctaaattcttgtcttagtgaaagtcctgttgttctacaatgtacacatgtaacaccacaaagagataagtcagtggtatgtgggagtttgtttcatacaccaaagtttgtgaagggtcgtcagacaccaaaacatatttctgaaagtctaggagctgaggtggatcctgatatgtcttggtcaagttctttagctacaccacccacccttagttctactgtgctcatagtcagaaatgaagaagcatctgaaactgtatttcctcatgatactactgctaatgtgaaaagctatttttccaatcatgatgaaagtctgaagaaaaatgatagatttatcgcttctgtgacagacagtgaaaacacaaatcaaagagaagctgcaagtcatggatttggaaaaacatcagggaattcatttaaagtaaatagctgcaaagaccacattggaaagtcaatgccaaatgtcctagaagatgaagtatatgaaacagttgtagatacctctgaagaagatagtttttcattatgtttttctaaatgtagaacaaaaaatctacaaaaagtaagaactagcaagactaggaaaaaaattttccatgaagcaaacgctgatgaatgtgaaaaatctaaaaaccaagtgaaagaaaaatactcatttgtatctgaagtggaaccaaatgatactgatccattagattcaaatgtagcacatcagaagccctttgagagtggaagtgacaaaatctccaaggaagttgtaccgtctttggcctgtgaatggtctcaactaaccctttcaggtctaaatggagcccagatggagaaaatacccctattgcatatttcttcatgtgaccaaaatatttcagaaaaagacctattagacacagagaacaaaagaaagaaagattttcttacttcagagaattctttgccacgtatttctagcctaccaaaatcagagaagccattaaatgaggaaacagtggtaaataagagagatgaagagcagcatcttgaatctcatacagactgcattcttgcagtaaagcaggcaatatctggaacttctccagtggcttcttcatttcagggtatcaaaaagtctatattcagaataagagaatcacctaaagagactttcaatgcaagtttttcaggtcatatgactgatccaaactttaaaaaagaaactgaagcctctgaaagtggactggaaatacatactgtttgctcacagaaggaggactccttatgtccaaatttaattgataatggaagctggccagccaccaccacacagaattctgtagctttgaagaatgcaggtttaatatccactttgaaaaagaaaacaaataagtttatttatgctatacatgatgaaacatcttataaaggaaaaaaaataccgaaagaccaaaaatcagaactaattaactgttcagcccagtttgaagcaaatgcttttgaagcaccacttacatttgcaaatgctgattcaggtttattgcattcttctgtgaaaagaagctgttcacagaatgattctgaagaaccaactttgtccttaactagctcttttgggacaattctgaggaaatgttctagaaatgaaacatgttctaataatacagtaatctctcaggatcttgattataaagaagcaaaatgtaataaggaaaaactacagttatttattaccccagaagctgattctctgtcatgcctgcaggaaggacagtgtgaaaatgatccaaaaagcaaaaaagtttcagatataaaagaagaggtcttggctgcagcatgtcacccagtacaacattcaaaagtggaatacagtgatactgactttcaatcccagaaaagtcttttatatgatcatgaaaatgccagcactcttattttaactcctacttccaaggatgttctgtcaaacctagtcatgatttctagaggcaaagaatcatacaaaatgtcagacaagctcaaaggtaacaattatgaatctgatgttgaattaaccaaaaatattcccatggaaaagaatcaagatgtatgtgctttaaatgaaaattataaaaacgttgagctgttgccacctgaaaaatacatgagagtagcatcaccttcaagaaaggtacaattcaaccaaaacacaaatctaagagtaatccaaaaaaatcaagaagaaactacttcaatttcaaaaataactgtcaatccagactctgaagaacttttctcagacaatgagaataattttgtcttccaagtagctaatgaaaggaataatcttgctttaggaaatactaaggaacttcatgaaacagacttgacttgtgtaaacgaacccattttcaagaactctaccatggttttatatggagacacaggtgataaacaagcaacccaagtgtcaattaaaaaagatttggtttatgttcttgcagaggagaacaaaaatagtgtaaagcagcatataaaaatgactctaggtcaagatttaaaatcggacatctccttgaatatagataaaataccagaaaaaaataatgattacatgaacaaatgggcaggactcttaggtccaatttcaaatcacagttttggaggtagcttcagaacagcttcaaataaggaaatcaagctctctgaacataacattaagaagagcaaaatgttcttcaaagatattgaagaacaatatcctactagtttagcttgtgttgaaattgtaaataccttggcattagataatcaaaagaaactgagcaagcctcagtcaattaatactgtatctgcacatttacagagtagtgtagttgtttctgattgtaaaaatagtcatataacccctcagatgttattttccaagcaggattttaattcaaaccataatttaacacctagccaaaaggcagaaattacagaactttctactatattagaagaatcaggaagtcagtttgaatttactcagtttagaaarccaagctacatattgcagaagagtacatttgaagtgcctgaaaaccagatgactatcttaaagaccacttctgaggaatgcagagatgctgatcttcatgtcataatgaatgccccatcgattggtcaggtagacagcagcaagcaatttgaaggtacagttgaaattaaacggaagtttgctggcctgttgaaaaatgactgtaacaaaagtgcttctggttatttaacagatgaaaatgaagtggggtttaggggcttttattctgctcatggcacaaaactgaatgtttctactgaagctctgcaaaaagctgtgaaactgtttagtgatattgagaatattagtgaggaaacttctgcagaggtacatccaataagtttatcttcaagtaaatgtcatgattctgtcgtttcaatgtttaagatagaaaatcataatgataaaactgtaagtgaaaaaaataataaatgccaactgatattacaaaataatattgaaatgactactggcacttttgttgaagaaattactgaatgtagcacgcattcacataaggtttttgctgacattcagagtgaagaaattttacaacataaccaaaatatgtctggattggagaaagtttctaaaatatcaccttgtgatgttagtttggaaacttcagatatatgtaaatgtagtatagggaagcttcataagtcagtctcatctgcaaatacttgtgggatttttagcacagcaagtggaaaatctgtccaggtatcagatgcttcattacaaaacgcaagacaagtgttttctgaaatagaagatagtaccaagcaagtcttttccaaagtattgtttaaaagtaacgaacattcagaccagctcacaagagaagaaaatactgctatacgtactccagaacatttaatatcccaaaaaggcttttcatataatgtggtaaattcatctgctttctctggatttagtacagcaagtggaaagcaagtttccattttagaaagttccttacacaaagttaagggagtgttagaggaatttgatttaatcagaactgagcatagtcttcactattcacctacgtctagacaaaatgtatcaaaaatacttcctcgtgttgataagagaaacccagagcactgtgtaaactcagaaatggaaaaaacctgcagtaaagaatttaaattatcaaataacttaaatgttgaaggtggttcttcagaaaataatcactctattaaagtttctccatatctctctcaatttcaacaagacaaacaacagttggtattaggaaccaaagtctcacttgttgagaacattcatgttttgggaaaagaacaggcttcacctaaaaacgtaaaaatggaaattggtaaaactgaaactttttctgatgttcctgtgaaaacaaatatagaagtttgttctacttactccaaagattcagaaaactactttgaaacagaagcagtagaaattgctaaagcttttatggaagatgatgaactgacagattctaaactgccaagtcatgccacacattctctttttacatgtcccgaaaatgaggaaatggttttgtcaaattcaagaattggaaaaagaagaggagagccccttatcttagtgggagaaccctcaatcaaaagaaacttattaaatgaatttgacaggataatagaaaatcaagaaaaatccttaaaggcttcaaaaagcactccagatggcacaataaaagatcgaagattgtttatgcatcatgtttctttagagccgattacctgtgtaccctttcgcacaactaaggaacgtcaagagatacagaatccaaattttaccgcacctggtcaagaatttctgtctaaatctcatttgtatgaacatctgactttggaaaaatcttcaagcaatttagcagtttcaggacatccattttatcaagtttctgctacaagaaatgaaaaaatgagacacttgattactacaggcagaccaaccaaagtctttgttccaccttttaaaactaaatcgcattttcacagagttgaacagtgtgttaggaatattaacttggaggaaaacagacaaaagcaaaacattgatggacatggctctgatgatagtaaaaataagattaatgacaatgagattcatcagtttaacaaaaacaactccaatcaagcagcagctgtaactttcacaaagtgtgaagaagaacctttagatttaattacaagtcttcagaatgccagagatatacaggatatgcgaattaagaagaaacaaaggcaacgcgtctttccacagccaggcagtctgtatcttgcaaaaacatccactctgcctcgaatctctctgaaagcagcagtaggaggccaagttccctctgcgtgttctcataaacagctgtatacgtatggcgtttctaaacattgcataaaaattaacagcaaaaatgcagagtcttttcagtttcacactgaagattattttggtaaggaaagtttatggactggaaaaggaatacagttggctgatggtggatggctcataccctccaatgatggaaaggctggaaaagaagaattttatagggctctgtgtgacactccaggtgtggatccaaagcttatttctagaatttgggtttataatcactatagatggatcatatggaaactggcagctatggaatgtgcctttcctaaggaatttgctaatagatgcctaagcccagaaagggtgcttcttcaactaaaatacagatatgatacggaaattgatagaagcagaagatcggctataaaaaagataatggaaagggatgacacagctgcaaaaacacttgttctctgtgtttctgacataatttcattgagcgcaaatatatctgaaacttctagcaataaaactagtagtgcagatacccaaaaagtggccattattgaacttacagatgggtggtatgctgttaaggcccagttagatcctcccctcttagctgtcttaaagaatggcagactgacagttggtcagaagattattcttcatggagcagaactggtgggctctcctgatgcctgtacacctcttgaagccccagaatctcttatgttaaagatttctgctaacagtactcggcctgctcgctggtataccaaacttggattctttcctgaccctagaccttttcctctgcccttatcatcgcttttcagtgatggaggaaatgttggttgtgttgatgtaattattcaaagagcataccctatacagtggatggagaagacatcatctggattatacatatttcgcaatgaaagagaggaagaaaaggaagcagcaaaatatgtggaggcccaacaaaagagactagaagccttattcactaaaattcaggaggaatttgaagaacatgaagaaaacacaacaaaaccatatttaccatcacgtgcactaacaagacagcaagttcgtgctttgcaagatggtgcagagctttatgaagcagtgaagaatgcagcagacccagcttaccttgagggttatttcagtgaagagcagttaagagccttgaataatcacaggcaaatgttgaatgataagaaacaagctcagatccagttggaaattaggaaggccatggaatctgctgaacaaaaggaacaaggtttatcaagggatgtcacaaccgtgtggaagttgcgtattgtaagctattcaaaaaaagaaaaagattcagttatactgagtatttggcgtccatcatcagatttatattctctgttaacagaaggaaagagatacagaatttatcatcttgcaacttcaaaatctaaaagtaaatctgaaagagctaacatacagttagcagcgacaaaaaaaactcagtatcaacaactaccggtttcagatgaaattttatttcagatttaccagccacgggagccccttcacttcagcaaatttttagatccagactttcagccatcttgttctgaggtggacctaataggatttgtcgtttctgttgtgaaaaaaacaggacttgcccctttcgtctatttgtcagacgaatgttacaatttactggcaataaagttttggatagaccttaatgaggacattattaagcctcatatgttaattgctgcaagcaacctccagtggcgaccagaatccaaatcaggccttcttactttatttgctggagatttttctgtgttttctgctagtccaaaagagggccactttcaagagacattcaacaaaatgaaaaatactgttgagaatattgacatactttgcaatgaagcagaaaacaagcttatgcatatactgcatgcaaatgatcccaagtggtccaccccaactaaagactgtacttcagggccgtacactgctcaaatcattcctggtacaggaaacaagcttctgatgtcttctcctaattgtgagatatattatcaaagtcctttatcactttgtatggccaaaaggaagtctgtttccacacctgtctcagcccagatgacttcaaagtcttgtaaaggggagaaagagattgaaaaattacaagagaaatactgaaaatgaagataacaaatatactgctgccagtagaaattctcataacttagaatttgatggcagtgattcaagtaaaaatgatactgtttgtattcataaagatgaaacggacttgctatttactgatcagcacaacatatgtcttaaattatctggccagtttatgaaggagggaaacactcagattaaagaagatttgtcagatttaacttttttggaagttgcgaaagctcaagaagcatgtcatggtaatacttcaaataaagaacagttaactgctactaaaacggagcaaaatataaaagattttgagacttctgatacattttttcagactgcaagtgggaaaaatattagtgtcgccaaagagtcatttaataaaattgtaaatttctttgatcagaaaccagaagaattgcataacttttccttaaattctgaattacattctgacataagaaagaacaaaatggacattctaagttatgaggaaacagacatagttaaacacaaaatactgaaagaaagtgtcccagttggtactggaaatcaactagtgaccttccagggacaacccgaacgtgatgaaaagatcaaagaacctactctgttgggttttcatacagctagcgggaaaaaagttaaaattgcaaaggaatctttggacaaagtgaaaaacctttttgatgaaaaagagcaaggtactagtgaaatcaccagttttagccatcaatgggcaaagaccctaaagtacagagaggcctgtaaagaccttgaattagcatgtgagaccattgagatcacagctgccccaaagtgtaaagaaatgcagaattctctcaataatgataaaaaccttgtttctattgagactgtggtgccacctaagctcttaagtgataatttatgtagacaaactgaaaatctcaaaacatcaaaaagtatctttttgaaagttaaagtacatgaaaatgtagaaaaagaaacagcaaaaagtcctgcaacttgttacacaaatcagtccccttattcagtcattgaaaattcagccttagctttttacacaagttgtagtagaaaaacttctgtgagtcagacttcattacttgaagcaaaaaaatggcttagagaaggaatatttgatggtcaaccagaaagaataaatactgcagattatgtaggaaattatttgtatgaaaataattcaaacagtactatagctgaaaatgacaaaaatcatctctccgaaaaacaagatacttatttaagtaacagtagcatgtctaacagctattcctaccattctgatgaggtatataatgattcaggatatctctcaaaaaataaacttgattctggtattgagccagtattgaagaatgttgaagatcaaaaaaacactagtttttccaaagtaatatccaatgtaaaagatgcaaatgcatacccacaaactgtaaatgaagatatttgcgttgaggaacttgtgactagctcttcaccctgcaaaaataaaaatgcagccattaaattgtccatatctaatagtaataattttgaggtagggccacctgcatttaggatagccagtggtaaaatcgtttgtgtttcacatgaaacaattaaaaaagtgaaagacatatttacagacagtttcagtaaagtaattaaggaaaacaacgagaataaatcaaaaatttgccaaacgaaaattatggcaggttgttacgaggcattggatgattcagaggatattcttcataactctctagataatgatgaatgtagcacgcattcacataaggtttttgctgacattcagagtgaagaaattttacaacataaccaaaatatgtctggattggagaaagtttctaaaatatcaccttgtgatgttagtttggaaacttcagatatatgtaaatgtagtatagggaagcttcataagtcagtctcatctgcaaatacttgtgggatttttagcacagcaagtggaaaatctgtccaggtatcagatgcttcattacaaaacgcaagacaagtgttttctgaaatagaagatagtaccaagcaagtcttttccaaagtattgtttaaaagtaacgaacattcagaccagctcacaagagaagaaaatactgctatacgtactccagaacatttaatatcccaaaaaggcttttcatataatgtggtaaattcatctgctttctctggatttagtacagcaagtggaaagcaagtttccattttagaaagttccttacacaaagttaagggagtgttagaggaatttgatttaatcagaactgagcatagtcttcactattcacctacgtctagacaaaatgtatcaaaaatacttcctcgtgttgataagagaaacccagagcactgtgtaaactcagaaatggaaaaaacctgcagtaaagaatttaaattatcaaataacttaaatgttgaaggtggttcttcagaaaataatcactctattaaagtttctccatatctctctcaatttcaacaagacaaacaacagttggtattaggaaccaaagtctcacttgttgagaacattcatgttttgggaaaagaacaggcttcacctaaaaacgtaaaaatggaaattggtaaaactgaaactttttctgatgttcctgtgaaaacaaatatagaagtttgttctacttactccaaagattcagaaaactactttgaaacagaagcagtagaaattgctaaagcttttatggaagatgatgaactgacagattctaaactgccaagtcatgccacacattctctttttacatgtcccgaaaatgaggaaatggttttgtcaaattcaagaattggaaaaagaagaggagagccccttatcttagtgggagaaccctcaatcaaaagaaacttattaaatgaatttgacaggataatagaaaatcaagaaaaatccttaaaggcttcaaaaagcactccagatggcacaataaaagatcgaagattgtttatgcatcatgtttctttagagccgattacctgtgtaccctttcgcacaactaaggaacgtcaagagatacagaatccaaattttaccgcacctggtcaagaatttctgtctaaatctcatttgtatgaacatctgactttggaaaaatcttcaagcaatttagcagtttcaggacatccattttatcaagtttctgctacaagaaatgaaaaaatgagacacttgattactacaggcagaccaaccaaagtctttgttccaccttttaaaactaaatcacattttcacagagttgaacagtgtgttaggaatattaacttggaggaaaacagacaaaagcaaaacattgatggacatggctctgatgatagtaaaaataagattaatgacaatgagattcatcagtttaacaaaaacaactccaatcaagcagcagctgtaactttcacaaagtgtgaagaagaacctttagatttaattacaagtcttcagaatgccagagatatacaggatatgcgaattaagaagaaacaaaggcaacgcgtctttccacagccaggcagtctgtatcttgcaaaaacatccactctgcctcgaatctctctgaaagcagcagtaggaggccaagttccctctgcgtgttctcataaacagctgtatacgtatggcgtttctaaacattgcataaaaattaacagcaaaaatgcagagtcttttcagtttcacactgaagattattttggtaaggaaagtttatggactggaaaaggaatacagttggctgatggtggatggctcataccctccaatgatggaaaggctggaaaagaagaattttatagggctctgtgtgacactccaggtgtggatccaaagcttatttctagaatttgggtttataatcactatagatggatcatatggaaactggcagctatggaatgtgcctttcctaaggaatttgctaatagatgcctaagcccagaaagggtgcttcttcaactaaaatacagatgaccaaaagaactgcaaaaagagaagagccttggatttcttgagtagactgcctttacctccacctgttagtcccatttgtacatttgtttctccggctgcacagaaggcatttcagccaccaaggagttgtggcaccaaatacgaaacacccataaagaaaaaagaactgaattctcctcagatgactccatttaaaaaattcaatgaaatttctcttttggaaagtaattcaatagctgacgaagaacttgcattgataaatacccaagctcttttgtctggttcaacaggagaaaaacaatttatatctgtcagtgaatccactaggactgctcccaccagttcagaagattatctcagactgaaacgacgttgtactacatctctgatcaaagaacaggagagttcccaggccagtacggaagaatgtgagaaaaataagcaggacacaattacaactaaaaaatatatctaa

SEQ ID NO: 147912 - DNA, 5771 bp, Homo sapiens
atgcctattggatccaaagagaggccaacattttttgaaatttttaagacacgctgcaacaaagcagatttaggaccaataagtcttaattggtttgaagaactttcttcagaagctccaccctataattctgaacctgcagaagaatctgaacataaaaacaacaattacgaaccaaacctatttaaaactccacaaaggaaaccatcttataatcagctggcttcaactccaataatattcaaagagcaagggctgactctgccgctgtaccaatctcctgtaaaagaattagataaattcaaattagacttaggaaggaatgttcccaatagtagacataaaagtcttcgcacagtgaaaactaaaatggatcaagcagatgatgtttcctgtccacttctaaattcttgtcttagtgaaagtcctgttgttctacaatgtacacatgtaacaccacaaagagataagtcagtggtatgtgggagtttgtttcatacaccaaagtttgtgaagggtcgtcagacaccaaaacatatttctgaaagtctaggagctgaggtggatcctgatatgtcttggtcaagttctttagctacaccacccacccttagttctactgtgctcatagtcagaaatgaagaagcatctgaaactgtatttcctcatgatactactgctaatgtgaaaagctatttttccaatcatgatgaaagtctgaagaaaaatgatagatttatcgcttctgtgacagacagtgaaaacacaaatcaaagagaagctgcaagtcatggatttggaaaaacatcagggaattcatttaaagtaaatagctgcaaagaccacattggaaagtcaatgccaaatgtcctagaagatgaagtatatgaaacagttgtagatacctctgaagaagatagtttttcattatgtttttctaaatgtagaacaaaaaatctacaaaaagtaagaactagcaagactaggaaaaaaattttccatgaagcaaacgctgatgaatgtgaaaaatctaaaaaccaagtgaaagaaaaatactcatttgtatctgaagtggaaccaaatgatactgatccattagattcaaatgtagcacatcagaagccctttgagagtggaagtgacaaaatctccaaggaagttgtaccgtctttggcctgtgaatggtctcaactaaccctttcaggtctaaatggagcccagatggagaaaatacccctattgcatatttcttcatgtgaccaaaatatttcagaaaaagacctattagacacagagaacaaaagaaagaaagattttcttacttcagagaattctttgccacgtatttctagcctaccaaaatcagagaagccattaaatgaggaaacagtggtaaataagagagatgaagagcagcatcttgaatctcatacagactgcattcttgcagtaaagcaggcaatatctggaacttctccagtggcttcttcatttcagggtatcaaaaagtctatattcagaataagagaatcacctaaagagactttcaatgcaagtttttcaggtcatatgactgatccaaactttaaaaaagaaactgaagcctctgaaagtggactggaaatacatactgtttgctcacagaaggaggactccttatgtccaaatttaattgataatggaagctggccagccaccaccacacagaattctgtagctttgaagaatgcaggtttaatatccactttgaaaaagaaaacaaataagtttatttatgctatacatgatgaaacatcttataaaggaaaaaaaataccgaaagaccaaaaatcagaactaattaactgttcagcccagtttgaagcaaatgcttttgaagcaccacttacatttgcaaatgctgattcaggtttattgcattcttctgtgaaaagaagctgttcacagaatgattctgaagaaccaactttgtccttaactagctcttttgggacaattctgaggaaatgttctagaaatgaaacatgttctaataatacagtaatctctcaggatcttgattataaagaagcaaaatgtaataaggaaaaactacagttatttattaccccagaagctgattctctgtcatgcctgcaggaaggacagtgtgaaaatgatccaaaaagcaaaaaagtttcagatataaaagaagaggtcttggctgcagcatgtcacccagtacaacattcaaaagtggaatacagtgatactgactttcaatcccagaaaagtcttttatatgatcatgaaaatgccagcactcttattttaactcctacttccaaggatgttctgtcaaacctagtcatgatttctagaggcaaagaatcatacaaaatgtcagacaagctcaaaggtaacaattatgaatctgatgttgaattaaccaaaaatattcccatggaaaagaatcaagatgtatgtgctttaaatgaaaattataaaaacgttgagctgttgccacctgaaaaatacatgagagtagcatcaccttcaagaaaggtacaattcaaccaaaacacaaatctaagagtaatccaaaaaaatcaagaagaaactacttcaatttcaaaaataactgtcaatccagactctgaagaacttttctcagacaatgagaataattttgtcttccaagtagctaatgaaaggaataatcttgctttaggaaatactaaggaacttcatgaaacagacttgacttgtgtaaacgaacccattttcaagaactctaccatggttttatatggagacacaggtgataaacaagcaacccaagtgtcaattaaaaaagatttggtttatgttcttgcagaggagaacaaaaatagtgtaaagcagcatataaaaatgactctaggtcaagatttaaaatcggacatctccttgaatatagataaaataccagaaaaaaataatgattacatgaacaaatgggcaggactcttaggtccaatttcaaatcacagttttggaggtagcttcagaacagcttcaaataaggaaatcaagctctctgaacataacattaagaagagcaaaatgttcttcaaagatattgaagaacaatatcctactagtttagcttgtgttgaaattgtaaataccttggcattagataatcaaaagaaactgagcaagcctcagtcaattaatactgtatctgcacatttacagagtagtgtagttgtttctgattgtaaaaatagtcatataacccctcagatgttattttccaagcaggattttaattcaaaccataatttaacacctagccaaaaggcagaaattacagaactttctactatattagaagaatcaggaagtcagtttgaatttactcagtttagaaagccaagctacatattgcagaagagtacatttgaagtgcctgaaaaccagatgactatcttaaagaccacttctgaggaatgcagagatgctgatcttatgatacggaaattgatagaagcagaagatcggctataaaaaagataatggaaagggatgacacagctgcaaaaacacttgttctctgtgtttctgacataatttcattgagcgcaaatatatctgaaacttctagcaataaaactagtagtgcagatacccaaaaagtggccattattgaacttacagatgggtggtatgctgttaaggcccagttagatcctcccctcttagctgtcttaaagaatggcagactgacagttggtcagaagattattcttcatggagcagaactggtgggctctcctgatgcctgtacacctcttgaagccccagaatctcttatgttaaagatttctgctaacagtactcggcctgctcgctggtataccaaacttggattctttcctgaccctagaccttttcctctgcccttatcatcgcttttcagtgatggaggaaatgttggttgtgttgatgtaattattcaaagagcataccctatacagtggatggagaagacatcatctggattatacatatttcgcaatgaaagagaggaagaaaaggaagcagcaaaatatgtggaggcccaacaaaagagactagaagccttattcactaaaattcaggaggaatttgaagaacatgaagaaaacacaacaaaaccatatttaccatcacgtgcactaacaagacagcaagttcgtgctttgcaagatggtgcagagctttatgaagcagtgaagaatgcagcagacccagcttaccttgagggttatttcagtgaagagcagttaagagccttgaataatcacaggcaaatgttgaatgataagaaacaagctcagatccagttggaaattaggaaggccatggaatctgctgaacaaaaggaacaaggtttatcaagggatgtcacaaccgtgtggaagttgcgtattgtaagctattcaaaaaaagaaaaagattcagttatactgagtatttggcgtccatcatcagatttatattctctgttaacagaaggaaagagatacagaatttatcatcttgcaacttcaaaatctaaaagtaaatctgaaagagctaacatacagttagcagcgacaaaaaaaactcagtatcaacaactaccggtttcagatgaaattttatttcagatttaccagccacgggagccccttcacttcagcaaatttttagatccagactttcagccatcttgttctgaggtggacctaataggatttgtcgtttctgttgtgaaaaaaacaggacttgcccctttcgtctatttgtcagacgaatgttacaatttactggcaataaagttttggatagaccttaatgaggacattattaagcctcatatgttaattgctgcaagcaacctccagtggcgaccagaatccaaatcaggccttcttactttatttgctggagatttttctgtgttttctgctagtccaaaagagggccactttcaagagacattcaacaaaatgaaaaatactgttgagaatattgacatactttgcaatgaagcagaaaacaagcttatgcatatactgcatgcaaatgatcccaagtggtccaccccaactaaagactgtacttcagggccgtacactgctcaaatcattcctggtacaggaaacaagcttctgatgtcttctcctaattgtgagatatattatcaaagtcctttatcactttgtatggccaaaaggaagtctgtttccacacctgtctcagcccagatgacttcaaagtcttgtaaaggggagaaagagattgatgaccaaaagaactgcaaaaagagaagagccttggatttcttgagtagactgcctttacctccacctgttagtcccatttgtacatttgtttctccggctgcacagaaggcatttcagccaccaaggagttgtggcaccaaatacgaaacacccataaagaaaaaagaactgaattctcctcagatgactccatttaaaaaattcaatgaaatttctcttttggaaagtaattcaatagctgacgaagaacttgcattgataaatacccaagctcttttgtctggttcaacaggagaaaaacaatttatatctgtcagtgaatccactaggactgctcccaccagttcagaagattatctcagactgaaacgacgttgtactacatctctgatcaaagaacaggagagttcccaggccagtacggaagaatgtgagaaaaataagcaggacacaattacaactaaaaaatatatctaa

SEQ ID NO: 147913 - DNA, 11027 bp, Homo sapiens
  misc_feature (1)...(11027): n = a,t,c or g
cacattggaaagtcaatgccaaatgtcctagaagatgaagtatatgaaacagttgtagatacctctgaagaagatagtttttcattatgtttttctaaatgtagaacaaaaaatctacaaaaagtaagaactagcaagactaggaaaaaaattttccatgaagcaaacgctgatgaatgtgaaaaatctaaaaaccaagtgaaagaaaaatactcatttgtatctgaagtggaaccaaatgatactgatccattagattcaaatgtagcaaatcagaagccctttgagagtggaagtgacaaaatctccaaggaagttgtaccgtctttggcctgtgaatggtctcaactaaccctttcaggtctaaatggagcccagatggagaaaatacccctattgcatatttcttcatgtgaccaaaatatttcagaaaaagacctattagacacagagaacaaaagaaagaaagattttcttacttcagagaattctttgccacgtatttctagcctaccaaaatcagagaagccattaaatgaggaaacagtggtaaataagagagatgaagagcagcatcttgaatctcatacagactgcattcttgcagtaaagcaggcaatatctggaacttctccagtggcttcttcatttcagggtatcaaaaagtctatattcagaataagagaatcacctaaagagactttcaatgcaagtttttcaggtcatatgactgatccaaactttaaaaaagaaactgaagcctctgaaagtggactggaaatacatactgtttgctcacagaaggaggactccttatgtccaaatttaattgataatggaagctggccagccaccaccacacagaattctgtagctttgaagaatgcaggtttaatatccactttgaaaaagaaaacaaataagtttatttatgctatacatgatgaaacatcttataaaggaaaaaaaataccgaaagaccaaaaatcagaactaattaactgttcagcccagtttgaagcaaatgcttttgaagcaccacttacatttgcaaatgctgattcaggtttattgcattcttctgtgaaaagaagctgttcacagaatgattctgaagaaccaactttgtccttaactagctcttttgggacaattctgaggaaatgttctagaaatgaaacatgttctaataatacagtaatctctcaggatcttgattataaagaagcaaaatgtaataaggaaaaactacagttatttattaccccagaagctgattctctgtcatgcctgcaggaaggacagtgtgaaaatgatccaaaaagcaaaaaagtttcagatataaaagaagaggtcttggctgcagcatgtcacccagtacaacattcaaaagtggaatacagtgatactgactttcaatcccagaaaagtcttttatatgatcatgaaaatgccagcactcttattttaactcctacttccaaggatgttctgtcaaacctagtcatgatttctagaggcaaagaatcatacaaaatgtcagacaagctcaaaggtaacaattatgaatctgatgttgaattaaccaaaaatattcccatggaaaagaatcaagatgtatgtgctttaaatgaaaattataaaaacgttgagctgttgccacctgaaaaatacatgagagtagcatcaccttcaagaaaggtacaattcaaccaaaacacaaatctaagagtaatccaaaaaaatcaagaagaaactacttcaatttcaaaaataactgtcaatccagactctgaagaacttttctcagacaatgagaataattttgtcttccaagtagctaatgaaaggaataatcttgctttaggaaatactaaggaacttcatgaaacagacttgacttgtgtaaacgaacccattttcaagaactctaccatggttttatatggagacacaggtgataaacaagcaacccaagtgtcaattaaaaaagatttggtttatgttcttgcagaggagaacaaaaatagtgtaaagcagcatataaaaatgactctaggtcaagatttaaaatcggacatctccttgaatatagataaaataccagaaaaaaataatgattacatgaacaaatgggcaggactcttaggtccaatttcaaatcacagttttggaggtagcttcagaacagcttcaaataaggaaatcaagctctctgaacataacattaagaagagcaaaatgttcttcaaagatattgaagaacaatatcctactagtttagcttgtgttgaaattgtaaataccttggcattagataatcaaaagaaactgagcaagcctcagtcaattaatactgtatctgcacatttacagagtagtgtagttgtttctgattgtaaaaatagtcatataacccctcagatgttattttccaagcaggattttaattcaaaccataatttaacacctagccaaaaggagcaaattacagaactttctactatattagaagattcaggaagtcagtttgaatttactcagtttagaaaaccaagctacatattgcagaagagtacatttgaagtgcctgaaaaccagatgactatcttaaagaccacttctgaggaatgcagagatgctgatcttcatgtcataatgaatgccccatcgattggtcaggtagacagcagcaagcaatttgaaggtacagttgaaattaaacggaagtttgctggcctgttgaaaaatgactgtaacaaaagtgcttctggttatttaacagatgaaaatgaagtggggtttaggggcttttattctgctcatggcacaaaactgaatgtttctactgaagctctgcaaaaagctgtgaaactgtttagtgatattgagaatattagtgaggaaacttctgcagaggtacatccaataagtttatcttcaagtaaatgtcatgattctgtcgtttcaatgtttaagatagaaaatcataatgataaaactgtaagtgaaaaaaataataaatgccaactgatattacaaaataatattgaaatgactactggcacttttgttgaagaaattactgaaaattacaagagaaatactgaaaatgaagataacaaatatactgctgccagtagaaattctcataacttagaatttgatggcagtgattcaagtaaaaatgatactgtttgtattcataaagatgaaacggacttgctatttactgatcagcacaacatatgtcttaaattatctggccagtttatgaaggagggaaacactcagattaaagaagatttgtcagatttaacttttttggaagttgcgaaagctcaagaagcatgtcatggtaatacttcaaataaagaacagttaactgctactaaaacggagcaaaatataaaagattttgagacttctgatacattttttcagactgcaagtgggaaaaatattagtgtcgccaaagagtcatttaataaaattgtaaatttctttgatcagaaaccagaagaattgcataacttttccttaaattctgaattacattctgacataagaaagaacaaaatggacattctaagttatgaggaaacagacatagttaaacacaaaatactgaaagaaagtgtcccagttggtactggaaatcaactagtgaccttccagggacaacccgaacgtgatgaaaagatcaaagaacctactctgttgggttttcatacagctagcgggaaaaaagttaaaattgcaaaggaatctttggacaaagtgaaaaacctttttgatgaaagagcaaggtactagtgaaatcaccagttttagccatcaatgggcaaagaccctaaagtacagagaggcctgtaaagaccttgaattagcatgtgagaccattgagatcacagctgccccaaagtgtaaagaaatgcagaattctctcaataatgataaaaaccttgtttctattgagactgtggtgccacctaagctcttaagtgataatttatgtagacaaannnnnnnnnnnnnncacattggaaagtcaatgccaaatgtcctagaagatgaagtatatgaaacagttgtagatacctctgaagaagatagtttttcattatgtttttctaaatgtagaacaaaaaatctacaaaaagtaagaactagcaagactaggaaaaaaattttccatgaagcaaacgctgatgaatgtgaaaaatctaaaaaccaagtgaaagaaaaatactcatttgtatctgaagtggaaccaaatgatactgatccattagattcaaatgtagcaaatcagaagccctttgagagtggaagtgacaaaatctccaaggaagttgtaccgtctttggcctgtgaatggtctcaactaaccctttcaggtctaaatggagcccagatggagaaaatacccctattgcatatttcttcatgtgaccaaaatatttcagaaaaagacctattagacacagagaacaaaagaaagaaagattttcttacttcagagaattctttgccacgtatttctagcctaccaaaatcagagaagccattaaatgaggaaacagtggtaaataagagagatgaagagcagcatcttgaatctcatacagactgcattcttgcagtaaagcaggcaatatctggaacttctccagtggcttcttcatttcagggtatcaaaaagtctatattcagaataagagaatcacctaaagagactttcaatgcaagtttttcaggtcatatgactgatccaaactttaaaaaagaaactgaagcctctgaaagtggactggaaatacatactgtttgctcacagaaggaggactccttatgtccaaatttaattgataatggaagctggccagccaccaccacacagaattctgtagctttgaagaatgcaggtttaatatccactttgaaaaagaaaacaaataagtttatttatgctatacatgatgaaacatcttataaaggaaaaaaaataccgaaagaccaaaaatcagaactaattaactgttcagcccagtttgaagcaaatgcttttgaagcaccacttacatttgcaaatgctgattcaggtttattgcattcttctgtgaaaagaagctgttcacagaatgattctgaagaaccaactttgtccttaactagctcttttgggacaattctgaggaaatgttctagaaatgaaacatgttctaataatacagtaatctctcaggatcttgattataaagaagcaaaatgtaataaggaaaaactacagttatttattaccccagaagctgattctctgtcatgcctgcaggaaggacagtgtgaaaatgatccaaaaagcaaaaaagtttcagatataaaagaagaggtcttggctgcagcatgtcacccagtacaacattcaaaagtggaatacagtgatactgactttcaatcccagaaaagtcttttatatgatcatgaaaatgccagcactcttattttaactcctacttccaaggatgttctgtcaaacctagtcatgatttctagaggcaaagaatcatacaaaatgtcagacaagctcaaaggtaacaattatgaatctgatgttgaattaaccaaaaatattcccatggaaaagaatcaagatgtatgtgctttaaatgaaaattataaaaacgttgagctgttgccacctgaaaaatacatgagagtagcatcaccttcaagaaaggtacaattcaaccaaaacacaaatctaagagtaatccaaaaaaatcaagaagaaactacttcaatttcaaaaataactgtcaatccagactctgaagaacttttctcagacaatgagaataattttgtcttccaagtagctaatgaaaggaataatcttgctttaggaaatactaaggaacttcatgaaacagacttgacttgtgtaaacgaacccattttcaagaactctaccatggttttatatggagacacaggtgataaacaagcaacccaagtgtcaattaaaaaagatttggtttatgttcttgcagaggagaacaaaaatagtgtaaagcagcatataaaaatgactctaggtcaagatttaaaatcggacatctccttgaatatagataaaataccagaaaaaaataatgattacatgaacaaatgggcaggactcttaggtccaatttcaaatcacagttttggaggtagcttcagaacagcttcaaataaggaaatcaagctctctgaacataacattaagaagagcaaaatgttcttcaaagatattgaagaacaatatcctactagtttagcttgtgttgaaattgtaaataccttggcattagataatcaaaagaaactgagcaagcctcagtcaattaatactgtatctgcacatttacagagtagtgtagttgtttctgattgtaaaaatagtcatataacccctcagatgttattttccaagcaggattttaattcaaaccataatttaacacctagccaaaaggagcaaattacagaactttctactatattagaagattcaggaagtcagtttgaatttactcagtttagaaaaccaagctacatattgcagaagagtacatttgaagtgcctgaaaaccagatgactatcttaaagaccacttctgaggaatgcagagatgctgatcttcatgtcataatgaatgccccatcgattggtcaggtagacagcagcaagcaatttgaaggtacagttgaaattaaacggaagtttgctggcctgttgaaaaatgactgtaacaaaagtgcttctggttatttaacagatgaaaatgaagtggggtttaggggcttttattctgctcatggcacaaaactgaatgtttctactgaagctctgcaaaaagctgtgaaactgtttagtgatattgagaatattagtgaggaaacttctgcagaggtacatccaataagtttatcttcaagtaaatgtcatgattctgtcgtttcaatgtttaagatagaaaatcataatgataaaactgtaagtgaaaaaaataataaatgccaactgatattacaaaataatattgaaatgactactggcacttttgttgaagaaattactgaaaattacaagagaaatactgaaaatgaagataacaaatatactgctgccagtagaaattctcataacttagaatttgatggcagtgattcaagtaaaaatgatactgtttgtattcataaagatgaaacggacttgctatttactgatcagcacaacatatgtcttaaattatctggccagtttatgaaggagggaaacactcagattaaagaagatttgtcagatttaacttttttggaagttgcgaaagctcaagaagcatgtcatggtaatacttcaaataaagaacagttaactgctactaaaacggagcaaaatataaaagattttgagacttctgatacattttttcagactgcaagtgggaaaaatattagtgtcgccaaagagtcatttaataaaattgtaaatttctttgatcagaaaccagaagaattgcataacttttccttaaattctgaattacattctgacataagaaagaacaaaatggacattctaagttatgaggaaacagacatagttaaacacaaaatactgaaagaaagtgtcccagttggtactggaaatcaactagtgaccttccagggacaacccgaacgtgatgaaaagatcaaagaacctactctgttgggttttcatacagctagcgggaaaaaagttaaaattgcaaaggaatctttggacaaagtgaaaaacctttttgatgaaagagcaaggtactagtgaaatcaccagttttagccatcaatgggcaaagaccctaaagtacagagaggcctgtaaagaccttgaattagcatgtgagaccattgagatcacagctgccccaaagtgtaaagaaatgcagaattctctcaataatgataaaaaccttgtttctattgagactgtggtgccacctaagctcttaagtgataatttatgtagacaaactgaaaatctcaaaacatcaaaaagtatctttttgaaagttaaagtacatgaaaatgtagaaaaagaaacagcaaaaagtcctgcaacttgttacacaaatcagtccccttattcagtcattgaaaattcagccttagctttttacacaagttgtagtagaaaaacttctgtgagtcagacttcattacttgaagcaaaaaaatggcttagagaaggaatatttgatggtcaaccagaaagaataaatactgcagattatgtaggaaattatttgtatgaaaataattcaaacagtactatagctgaaaatgacaaaaatcatctctccgaaaaacaagatacttatttaagtaacagtagcatgtctaacagctattcctaccattctgatgaggtatataatgattcaggatatctctcaaaaaataaacttgattctggtattgagccagtattgaagaatgttgaagatcaaaaaaacactagtttttccaaagtaatatccaatgtaaaagatgcaaatgcatacccacaaactgtaaatgaagatatttgcgttgaggaacttgtgactagctcttcaccctgcaaaaataaaaatgcagccattaaattgtccatatctaatagtaataattttgaggtagggccacctgcatttaggatagccagtggtaaaatcgtttgtgtttcacatgaaacaattaaaaaagtgaaagacatatttacagacagtttcagtaaagtaattaaggaaaacaacgagaataaatcaaaaatttgccaaacgaaaattatggcaggttgttacgaggcattggatgattcagaggatattcttcataactctctagataatgatgaatgtagcacgcattcacataaggtttttgctgacattcagagtgaagaaattttacaacataaccaaaatatgtctggattggagaaagtttctaaaatatcaccttgtgatgttagtttggaaacttcagatatatgtaaatgtagtatagggaagcttcataagtcagtctcatctgcaaatacttgtgggatttttagcacagcaagtggaaaatctgtccaggtatcagatgcttcattacaaaacgcaagacaagtgttttctgaaatagaagatagtaccaagcaagtcttttccaaagtattgtttaaaagtaacgaacattcagaccagctcacaagagaagaaaatactgctatacgtactccagaacatttaatatcccaaaaaggcttttcatataatgtggtaaattcatctgctttctctggatttagtacagcaagtggaaagcaagtttccattttagaaagttccttacacaaagttaagggagtgttagaggaatttgatttaatcagaactgagcatagtcttcactattcacctacgtctagacaaaatgtatcaaaaatacttcctcgtgttgataagagaaacccagagcactgtgtaaactcagaaatggaaaaaacctgcagtaaagaatttaaattatcaaataacttaaatgttgaaggtggttcttcagaaaataatcactctattaaagtttctccatatctctctcaatttcaacaagacaaacaacagttggtattaggaaccaaagtctcacttgttgagaacattcatgttttgggaaaagaacaggcttcacctaaaaacgtaaaaatggaaattggtaaaactgaaactttttctgatgttcctgtgaaaacaaatatagaagtttgttctacttactccaaagattcagaaaactactttgaaacagaagcagtagaaattgctaaagcttttatggaagatgatgaactgacagattctaaactgccaagtcatgccacacattctctttttacatgtcccgaaaatgaggaaatggttttgtcaaattcaagaattggaaaaagaagaggagagccccttatcttagtgggagaaccctcaatcaaaagaaacttattaaatgaatttgacaggataatagaaaatcaagaaaaatccttaaaggcttcaaaaagcactccagatggcacaataaaagatcgaagattgtttgtgcatcatgtttctttagagccgattacctgtgtaccctttcgcacaactaaggaacgtcaagagatacagaatccaaattttaccgcacctggtcaagaatttctgtctaaatctcatttgtatgaacatctgactttggaaaaatcttcaagcaatttagcagtttcaggacatccattttatcaagtttctggtaacaagaatggaaaaatgagaaaattgattactacaggcagaccaaccaaagtctttgttccaccttttaaaactaaatcacattttcacagagttgaacagtgtgttaggaatattaacttggagggaaacagacaaaagcaaaacattgatggacatggctctgatgatagtaaaaataagattaatgacaatgagattcatcagtttaacaaaaacaactccaatcaagcagcagctgtaactttcacaaagtgtgaagaagaacctttagatttaattacaagtcttcagaatgccagagatatacaggatatgcgaattaagaagaaacaaaggcaacgcgtctttccacagccaggcagtctgtatcttgcaaaaacatccactctgcctcgaatctctctgaaagcagcagtaggaggccaagttccctctgcgtgttctcataaacagctgtatacgtatggcgtttctaaacattgcataaaaattaacagcaaaaatgcagagtcttttcagtttcacactgaagattattttggtaaggaaagtttatggactggaaaaggaatacagttggctgatggtggatggctcataccctccaatgatggaaaggctggaaaagaagaattttatagggctctgtgtgacgtaaaggccacatag

SEQ ID NO: 147914 - DNA, 12500 bp, Homo sapiens
atgcctattggatccaaagagaggccaacattttttgaaatttttaagacacgctgcaacaaagcagatttaggaccaataagtcttaattggtttgaagaactttcttcagaagctccaccctataattctgaacctgcagaagaatctgaacataaaaacaacaattacgaaccaaacctatttaaaactccacaaaggaaaccatcttataatcagctggcttcaactccaataatattcaaagagcaagggctgactctgccgctgtaccaatctcctgtaaaagaattagataaattcaaattagacttaggaaggaatgttcccaatagtagacataaaagtcttcgcacagtgaaaactaaaatggatcaagcagatgatgtttcctgtccacttctaaattcttgtcttagtgaaagtcctgttgttctacaatgtacacatgtaacaccacaaagagataagtcagtggtatgtgggagtttgtttcatacaccaaagtttgtgaagggtcgtcagacaccaaaacatatttctgaaagtctaggagctgaggtggatcctgatatgtcttggtcaagttctttagctacaccacccacccttagttctactgtgctcatagtcagaaatgaagaagcatctgaaactgtatttcctcatgatactactgctaatgtgaaaagctatttttccaatcatgatgaaagtctgaagaaaaatgatagatttatcgcttctgtgacagacagtgaaaacacaaatcaaagagaagctgcaagtcatggatttggaaaaacatcagggaattcatttaaagtaaatagctgcaaagaccacattggaaagtcaatgccacatgtcctagaagatgaagtatatgaaacagttgtagatacctctgaagaagatagtttttcattatgtttttctaaatgtagaacaaaaaatctacaaaaagtaagaactagcaagactaggaaaaaaattttccatgaagcaaacgctgatgaatgtgaaaaatctaaaaaccaagtgaaagaaaaatactcatttgtatctgaagtggaaccaaatgatactgatccattagattcaaatgtagcaaatcagaagccctttgagagtggaagtgacaaaatctccaaggaagttgtaccgtctttggcctgtgaatggtctcaactaaccctttcaggtctaaatggagcccagatggagaaaatacccctattgcatatttcttcatgtgaccaaaatatttcagaaaaagacctattagacacagagaacaaaagaaagaaagattttcttacttcagagaattctttgccacgtatttctagcctaccaaaatcagagaagccattaaatgaggaaacagtggtaaataagagagatgaagagcagcatcttgaatctcatacagactgcattcttgcagtaaagcaggcaatatctggaacttctccagtggcttcttcatttcagggtatcaaaaagtctatattcagaataagagaatcacctaaagagactttcaatgcaagtttttcaggtcatatgactgatccaaactttaaaaaagaaactgaagcctctgaaagtggactggaaatacatactgtttgctcacagaaggaggactccttatgtccaaatttaattgataatggaagctgtcatgtcataatgaatgccccatcgattggtcaggtagacagcagcaagcaatttgaaggtacagttgaaattaaacggaagtttgctggcctgttgaaaaatgactgtaacaaaagtgcttctggttatttaacagatgaaaatgaagtggggtttaggggcttttattctgctcatggcacaaaactgaatgtttctactgaagctctgcaaaaagctgtgaaactgtttagtgatattgagaatattagtgaggaaacttctgcagaggtacatccaataagtttatcttcaagtaaatgtcatgattctgttgtttcaatgtttaagatagaaaatcataatgataaaactgtaagtgaaaaaaataataaatgccaactgatattacaaaataatattgaaatgactactggcacttttgttgaagaaattactgaaaattacaagagaaatactgaaaatgaagataacaaatatactgctgccagtagaaattctcataacttagaatttgatggcagtgattcaagtaaaaatgatactgtttgtattcataaagatgaaacggacttgctatttactgatcagcacaacatatgtcttaaattatctggccagtttatgaaggagggaaacactcagattaaagaagatttgtcagatttaacttttttggaagttgcgaaagctcaagaagcatgtcatggtaatacttcaaataaagaacagttaactgctactaaaacggagcaaaatataaaagattttgagacttctgatacattttttcagactgcaagtgggaaaaatattagtgtcgccaaagagtcatttaataaaattgtaaatttctttgatcagaaaccagaagaattgcataacttttccttaaattctgaattacattctgacataagaaagaacaaaatggacattctaagttatgaggaaacagacatagttaaacacaaaatactgaaagaaagtgtcccagttggtactggaaatcaactagtgaccttccagggacaacccgaacgtgatgaaaagatcaaagaacctactctgttgggttttcatacagctagcgggaaaaaagttaaaattgcaaaggaatctttggacaaagtgaaaaacctttttgatgaaaaagagcaaggtactagtgaaatcaccagttttagccatcaatgggcaaagaccctaaagtacagagaggcctgtaaagaccttgaattagcatgtgagaccattgagatcacagctgccccaaagtgtaaagaaatgcagaattctctcaataatgataaaaaccttgtttctattgagactgtggtgccacctaagctcttaagtgataatttatgtagacaaactgaaaatctcaaaacatcaaaaagtatctttttgaaagttaaagtacatgaaaatgtagaaaaagaaacagcaaaaagtcctgcaacttgttacacaaatcagtccccttattcagtcattgaaaattcagccttagctttttacacaagttgtagtagaaaaacttctgtgagtcagacttcattacttgaagcaaaaaaatggcttagagaaggaatatttgatggtcaaccagaaagaataaatactgcagattatgtaggaaattatttgtatgaaaataattcaaacagtactatagctgaaaatgacaaaaatcatctctccgaaaaacaagatacttatttaagtaacagtagcatgtctaacagctattcctaccattctgatgaggtatataatgattcaggatatctctcaaaaaataaacttgattctggtattgagccagtattgaagaatgttgaagatcaaaaaaacactagtttttccaaagtaatatccaatgtaaaagatgcaaatgcatacccacaaactgtaaatgaagatatttgcgttgaggaacttgtgactagctcttcaccctgcaaaaataaaaatgcagccattaaattgtccatatctaatagtaataattttgaggtagggccacctgcatttaggatagccagtggtaaaatcgtttgtgtttcacatgaaacaattaaaaaagtgaaagacatatttacagacagtttcagtaaagtaattaaggaaaacaacgagaataaatcaaaaatttgccaaacgaaaattatggcaggttgttacgaggcattggatgattcagaggatattcttcataactctctagataatgatgaatgtagcacgcattcacataaggtttttgctgacattcagagtgaagaaattttacaacataaccaaaatatgtctggattggagaaagtttctaaaatatcaccttgtgatgttagtttggaaacttcagatatatgtaaatgtagtatagggaagcttcataagtcagtctcatctgcaaatacttgtgggatttttagcacagcaagtggaaaatctgtccaggtatcagatgcttcattacaaaacgcaagacaagtgttttctgaaatagaagatagtaccaagcaagtcttttccaaagtattgtttaaaagtaacgaacattcagaccagctcacaagagaagaaaatactgctatacgtactccagaacatttaatatcccaaaaaggcttttcatataatgtggtaaattcatctgctttctctggatttagtacagcaagtggaaagcaagtttccattttagaaagttccttacacaaagttaagggagtgttagaggaatttgatttaatcagaactgagcatagtcttcactattcacctacgtctagacaaaatgtatcaaaaatacttcctcgtgttgataagagaaacccagagcactgtgtaaactcagaaatggaaaaaacctgcagtaaagaatttaaattatcaaataacttaaatgttgaaggtggttcttcagaaaataatcactctattaaagtttctccatatctctctcaatttcaacaagacaaacaacagttggtattaggaaccaaagtctcacttgttgagaacattcatgttttgggaaaagaacaggcttcacctaaaaacgtaaaaatggaaattggtaaaactgaaactttttctgatgttcctgtgaaaacaaatatagaagtttgttctacttactccaaagattcagaaaactactttgaaacagaagcagtagaaattgctaaagcttttatggaagatgatgaactgacagattctaaactgccaagtcatgccacacattctctttttacatgtcccgaaaatgaggaaatggttttgtcaaattcaagaattggaaaaagaagaggagagccccttatcttagtgggagaaccctcaatcaaaagaaacttattaaatgaatttgacaggataatagaaaatcaagaaaaatccttaaaggcttcaaaaagcactccagatggcacaataaaagatcgaagattgtttatgcatcatgtttctttagagccgattacctgtgtaccctttcgcacaactaaggaacgtcaagagatacagaatccaaattttaccgcacctggtcaagaatttctgtctaaatctcatttgtatgaacatctgactttggaaaaatcttcaagcaatttagcagtttcaggacatccattttatcaagtttctgctacaagaaatgaaaaaatgagacacttgattactacaggcagaccaaccaaagtctttgttccaccttttaaaactaaatcgcattttcacagagttgaacagtgtgttaggaatattaacttggaggaaaacagacaaaagcaaaacattgatggacatggctctgatgatagtaaaaataagattaatgacaatgagattcatcagtttaacaaaaacaactccaatcaagcagcagctgtaactttcacaaagtgtgaagaagaacctttagatttaattacaagtcttcagaatgccagagatatacaggatatgcgaattaagaagaaacaaaggcaacgcgtctttccacagccaggcagtctgtatcttgccagccaccaccacacagaattctgtagctttgaagaatgcaggtttaatatccactttgaaaaagaaaacaaataagtttatttatgctatacatgatgaaacatcttataaaggaaaaaaaataccgaaagaccaaaaatcagaactaattaactgttcagcccagtttgaagcaaatgcttttgaagcaccacttacatttgcaaatgctgattcaggtttattgcattcttctgtgaaaagaagctgttcacagaatgattctgaagaaccaactttgtccttaactagctcttttgggacaattctgaggaaatgttctagaaatgaaacatgttctaataatacagtaatctctcaggatcttgattataaagaagcaaaatgtaataaggaaaaactacagttatttattaccccagaagctgattctctgtcatgcctgcaggaaggacagtgtgaaaatgatccaaaaagcaaaaaagtttcagatataaaagaagaggtcttggctgcagcatgtcacccagtacaacactcaaaagtggaatacagtgatactgactttcaatcccagaaaagtcttttatatgatcatgaaaatgccagcactcttattttaactcctacttccaaggatgttctgtcaaacctagtcatgatttctagaggcaaagaatcatacaaaatgtcagacaagctcaaaggtaacaattatgaatctgatgttgaattaaccaaaaatattcccatggaaaagaatcaagatgtatgtgctttaaatgaaaattataaaaacgttgagctgttgccacctgaaaaatacatgagagtagcatcaccttcaagaaaggtacaattcaaccaaaacacaaatctaagagtaatccaaaaaaatcaagaagaaactacttcaatttcaaaaataactgtcaatccagactctgaagaacttttctcagacaatgagaataattttgtcttccaagtagctaatgaaaggaataatcttgctttaggaaatactaaggaacttcatgaaacagacttgacttgtgtaaacgaacccattttcaagaactctaccatggttttatatggagacacaggtgataaacaagcaacccaagtgtcaattaaaaaagatttggtttatgttcttgcagaggagaacaaaaatagtgtaaagcagcatataaaaatgactctaggtcaagatttaaaatcggacatctccttgaatatagataaaataccagaaaaaaataatgattacatggacaaatgggcaggactcttaggtccaatttcaaatcacagttttggaggtagcttcagaacagcttcaaataaggaaatcaagctctctgaacataacattaagaagagcaaaatgttcttcaaagatattgaagaacaatatcctactagtttagcttgtgttgaaattgtaaataccttggcattagataatcaaaagaaactgagcaagcctcagtcaattaatactgtatctgcacatttacagagtagtgtagttgtttctgattgtaaaaatagtcatataacccctcagatgttattttccaagcaggattttaattcaaaccataatttaacacctagccaaaaggcagaaattacagaactttctactatattagaagaatcaggaagtcagtttgaatttactcagtttagaaagccaagctacatattgcagaagagtacatttgaagtgcctgaaaaccagatgactatcttaaagaccacttctgaggaatgcagagatgctgatcttcatgtcataatgaatgccccatcgattggtcaggtagacagcagcaagcaatttgaaggtacagttgaaattaaacggaagtttgctggcctgttgaaaaatgactgtaacaaaagtgcttctggttatttaacagatgaaaatgaagtggggtttaggggcttttattctgctcatggcacaaaactgaatgtttctactgaagctctgcaaaaagctgtgaaactgtttagtgatattgagaatattagtgaggaaacttctgcagaggtacatccaataagtttatcttcaagtaaatgtcatgattctgttgtttcaatgtttaagatagaaaatcataatgataaaactgtaagtgaaaaaaataataaatgccaactgatattacaaaataatattgaaatgactactggcacttttgttgaagaaattactgaaaattacaagagaaatactgaaaatgaagataacaaatatactgctgccagtagaaattctcataacttagaatttgatggcagtgattcaagtaaaaatgatactgtttgtattcataaagatgaaacggacttgctatttactgatcagcacaacatatgtcttaaattatctggccagtttatgaaggagggaaacactcagattaaagaagatttgtcagatttaacttttttggaagttgcgaaagctcaagaagcatgtcatggtaatacttcaaataaagaacagttaactgctactaaaacggagcaaaatataaaagattttgagacttctgatacattttttcagactgcaagtgggaaaaatattagtgtcgccaaagagtcatttaataaaattgtaaatttctttgatcagaaaccagaagaattgcataacttttccttaaattctgaattacattctgacataagaaagaacaaaatggacattctaagttatgaggaaacagacatagttaaacacaaaatactgaaagaaagtgtcccagttggtactggaaatcaactagtgaccttccagggacaacccgaacgtgatgaaaagatcaaagaacctactctgttgggttttcatacagctagcgggaaaaaagttaaaattgcaaaggaatctttggacaaagtgaaaaacctttttgatgaaaaagagcaaggtactagtgaaatcaccagttttagccatcaatgggcaaagaccctaaagtacagagaggcctgtaaagaccttgaattagcatgtgagaccattgagatcacagctgccccaaagtgtaaagaaatgcagaattctctcaataatgataaaaaccttgtttctattgagactgtggtgccacctaagctcttaagtgataatttatgtagacaaactgaaaatctcaaaacatcaaaaagtatctttttgaaagttaaagtacatgaaaatgtagaaaaagaaacagcaaaaagtcctgcaacttgttacacaaatcagtccccttattcagtcattgaaaattcagccttagctttttacacaagttgtagtagaaaaacttctgtgagtcagacttcattacttgaagcaaaaaaatggcttagagaaggaatatttgatggtcaaccagaaagaataaatactgcagattatgtaggaaattatttgtatgaaaataattcaaacagtactatagctgaaaatgacaaaaatcatctctccgaaaaacaagatacttatttaagtaacagtagcatgtctaacagctattcctaccattctgatgaggtatataatgattcaggatatctctcaaaaaataaacttgattctggtattgagccagtattgaagaatgttgaagatcaaaaaaacactagtttttccaaagtaatatccaatgtaaaagatgcaaatgcatacccacaaactgtaaatgaagatatttgcgttgaggaacttgtgactagctcttcaccctgcaaaaataaaaatgcagccattaaattgtccatatctaatagtaataattttgaggtagggccacctgcatttaggatagccagtggtaaaatcgtttgtgtttcacatgaaacaattaaaaaagtgaaagacatatttacagacagtttcagtaaagtaattaaggaaaacaacgagaataaatcaaaaatttgccaaacgaaaattatggcaggttgttacgaggcattggatgattcagaggatattcttcataactctctagataatgatggcaaaaacatccactctgcctcgaatctctctgaaagcagcagtaggaggccaagttccctctgcgtgttctcataaacagctgtatacgtatggcgtttctaaacattgcataaaaattaacagcaaaaatgcagagtcttttcagtttcacactgaagattattttggtaaggaaagtttatggactggaaaaggaatacagttggctgatggtggatggctcataccctccaatgatggaaaggctggaaaagaagaattttatagggctctgtgtgacactccaggtgtggatccaaagcttatttctagaatttgggtttataatcactatagatggatcatatggaaactggcagctatggaatgtgcctttcctaaggaatttgctaatagatgcctaagcccagaaagggtgcttcttcaactaaaatacagatatgatacggaaattgatagaagcagaagatcggctataaaaaagataatggaaagggatgacacagctgcaaaaacacttgttctctgtgtttctgacataatttcattgagcgcaaatatatctgaaacttctagcaataaaactagtagtgcagatacccaaaaagtggccattattgaacttacagatgggtggtatgctgttaaggcccagttagatcctcccctcttagctgtcttaaagaatggcagactgacagttggtcagaagattattcttcatggagcagaactggtgggctctcctgatgcctgtacacctcttgaagccccagaatctcttatgttaaagatttctgctaacagtactcggcctgctcgctggtataccaaacttggattctttcctgaccctagaccttttcctctgcccttatcatcgcttttcagtgatggaggaaatgttggttgtgttgatgtaattattcaaagagcataccctatacagtggatggagaagacatcatctggattatacatatttcgcaatgaaagagaggaagaaaaggaagcagcaaaatatgtggaggcccaacaaaagagactagaagccttattcactaaaattcaggaggaatttgaagaacatgaagaaaacacaacaaaaccatatttaccatcacgtgcactaacaagacagcaagttcgtgctttgcaagatggtgcagagctttatgaagcagtgaagaatgcagcagacccagcttaccttgagggttatttcagtgaagagcagttaagagccttgaataatcacaggcaaatgttgaatgataagaaacaagctcagatccagttggaaattaggaaggccatggaatctgctgaacaaaaggaacaaggtttatcaagggatgtcacaaccgtgtggaagttgcgtattgtaagctattcaaaaaaagaaaaagattcagttatactgagtatttggcgtccatcatcagatttatattctctgttaacagaaggaaagagatacagaatttatcatcttgcaacttcaaaatctaaaagtaaatctgaaagagctaacatacagttagcagcgacaaaaaaaactcagtatcaacaactaccggtttcagatgaaattttatttcagatttaccagccacgggagccccttcacttcagcaaatttttagatccagactttcagccatcttgttctgaggtggacctaataggatttgtcgtttctgttgtgaaaaaaacaggacttgcccctttcgtctatttgtcagacgaatgttacaatttactggcaataaagttttggatagaccttaatgaggacattattaagcctcatatgttaattgctgcaagcaacctccagtggcgaccagaatccaaatcaggccttcttactttatttgctggagatttttctgtgttttctgctagtccaaaagagggccactttcaagagacattcaacaaaatgaaaaatactgttgagaatattgacatactttgcaatgaagcagaaaacaagcttatgcatatactgcatgcaaatgatcccaagtggtccaccccaactaaagactgtacttcagggccgtacactgctcaaatcattcctggtacaggaaacaagcttctgatgtcttctcctaattgtgagatatattatcaaagtcctttatcactttgtatggccaaaaggaagtctgtttccacacctgtctcagcccagatgacttcaaagtcttgtaaaggggagaaagagattgatgaccaaaagaactgcaaaaagagaagagccttggatttcttgagtagactgcctttacctccacctgttagtcccatttgtacatttgtttctccggctgcacagaaggcatttcagccaccaaggagttgtggcaccaaatacgaaacacccataaagaaaaaagaactgaattctcctcagatgactccatttaaaaaattcaatgaaatttctcttttggaaagtaattcaatagctgacgaagaacttgcattgataaatacccaagctcttttgtctggttcaacaggagaaaaacaatttatatctgtcagtgaatccactaggactgctcccaccagttcagaagattatctcagactgaaacgacgttgtactacatctctgatcaaagaacaggagagttcccaggccagtacggaagaatgtgagaaaaataagcaggacacaattacaactaaaaaatatatctaa

SEQ ID NO: 147915 - DNA, 14780 bp, Homo sapiens
atgcctattggatccaaagagaggccaacattttttgaaatttttaagacacgctgcaacaaagcagatttaggaccaataagtcttaattggtttgaagaactttcttcagaagctccaccctataattctgaacctgcagaagaatctgaacataaaaacaacaattacgaaccaaacctatttaaaactccacaaaggaaaccatcttataatcagctggcttcaactccaataatattcaaagagcaagggctgactctgccgctgtaccaatctcctgtaaaagaattagataaattcaaattagacttaggaaggaatgttcccaatagtagacataaaagtcttcgcacagtgaaaactaaaatggatcaagcagatgatgtttcctgtccacttctaaattcttgtcttagtgaaagtcctgttgttctacaatgtacacatgtaacaccacaaagagataagtcagtggtatgtgggagtttgtttcatacaccaaagtttgtgaagggtcgtcagacaccaaaacatatttctgaaagtctaggagctgaggtggatcctgatatgtcttggtcaagttctttagctacaccacccacccttagttctactgtgctcatagtcagaaatgaagaagcatctgaaactgtatttcctcatgatactactgctaatgtgaaaagctatttttccaatcatgatgaaagtctgaagaaaaatgatagatttatcgcttctgtgacagacagtgaaaacacaaatcaaagagaagctgcaagtcatggatttggaaaaacatcagggaattcatttaaagtaaatagctgcaaagaccacattggaaagtcaatgccacatgtcctagaagatgaagtatatgaaacagttgtagatacctctgaagaagatagtttttcattatgtttttctaaatgtagaacaaaaaatctacaaaaagtaagaactagcaagactaggaaaaaaattttccatgaagcaaacgctgatgaatgtgaaaaatctaaaaaccaagtgaaagaaaaatactcatttgtatctgaagtggaaccaaatgatactgatccattagattcaaatgtagcacatcagaagccctttgagagtggaagtgacaaaatctccaaggaagttgtaccgtctttggcctgtgaatggtctcaactaaccctttcaggtctaaatggagcccagatggagaaaatacccctattgcatatttcttcatgtgaccaaaatatttcagaaaaagacctattagacacagagaacaaaagaaagaaagattttcttacttcagagaattctttgccacgtatttctagcctaccaaaatcggagaagccattaaatgaggaaacagtggtaaataagagagatgaagagcagcatcttgaatctcatacagactgcattcttgcagtaaagcaggcaatatctggaacttctccagtggcttcttcatttcagggtatcaaaaagtctatattcagaataagagaatcacctaaagagactttcaatgcaagtttttcaggtcatatgactgatccaaactttaaaaaagaaactgaagcctctgaaagtggactggaaatacatactgtttgctcacagaaggaggactccttatgtccaaatttaattgataatggaagctggccagccaccaccacacagaattctgtagctttgaagaatgcaggtttaatatccactttgaaaaagaaaacaaataagtttatttatgctatacatgatgaaacatcttataaaggaaaaaaaataccgaaagaccaaaaatcagaactaattaactgttcagcccagtttgaagcaaatgcttttgaagcaccacttacatttgcaaatgctgattcaggtttattgcattcttctgtgaaaagaagctgttcacagaatgattctgaagaaccaactttgtccttaactagctcttttgggacaattctgaggaaatgttctagaaatgaaacatgttctaataatacagtaatctctcaggatcttgattataaagaagcaaaatgtaataaggaaaaactacagttatttattaccccagaagctgattctctgtcatgcctgcaggaaggacagtgtgaaaatgatccaaaaagcaaaaaagtttcagatataaaagaagaggtcttggctgcagcatgtcacccagtacaacactcaaaagtggaatacagtgatactgactttcaatcccagaaaagtcttttatatgatcatgaaaatgccagcactcttattttaactcctacttccaaggatgttctgtcaaacctagtcatgatttctagaggcaaagaatcatacaaaatgtcagacaagctcaaaggtaacaattatgaatctgatgttgaattaaccaaaaatattcccatggaaaagaatcaagatgtatgtgctttaaatgaaaattataaaaacgttgagctgttgccacctgaaaaatacatgagagtagcatcaccttcaagaaaggtacaattcaaccaaaacacaaatctaagagtaatccaaaaaaatcaagaagaaactacttcaatttcaaaaataactgtcaatccagactctgaagaacttttctcagacaatgagaataattttgtcttccaaatagctaatgaaaggaataatcttgctttaggaaatactaaggaacttcatgaaacagacttgacttgtgtaaacgaacccattttcaagaactctaccatggttttatatggagacacaggtgataaacaagcaacccaagtgtcaattaaaaaagatttggtttatgttcttgcagaggagaacaaaaatagtgtaaagcagcatataaaaatgactctaggtcaagatttaaaatcggacatctccttgaatatagataaaataccagaaaaaaataatgattacatggacaaatgggcaggactcttaggtccaatttcaaatcacagttttggaggtagcttcagaacagcttcaaataaggaaatcaagctctctgaacataacattaagaagagcaaaatgttcttcaaagatattgaagaacaatatcctactagtttagcttgtgttgaaattgtaaataccttggcattagataatcaaaagaaactgagcaagcctcagtcaattaatactgtatctgcacatttacagagtagtgtagttgtttctgattgtaaaaatagtcatataacccctcagatgttattttccaagcaggattttaattcaaaccataatttaacacctagccaaaaggcagaaattacagaactttctactatattagaagaatcaggaagtcagtttgaatttactcagtttagaaaaccaagctacatattgcagaagagtacatttgaagtgcctgaaaaccagatgactatcttaaagaccacttctgaggaatgcagagatgctgatcttcatgtcataatgaatgccccatcgattggtcaggtagacagcagcaagcaatttgaaggtacagttgaaattaaacggaagtttgctggcctgttgaaaaatgactgtaacaaaagtgcttctggttatttaacagatgaaaatgaagtggggtttaggggcttttattctgctcatggcacaaaactgaatgtttctactgaagctctgcaaaaagctgtgaaactgtttagtgatattgagaatattagtgaggaaacttctgcagaggtacatccaataagtttatcttcaagtaaatgtcatgattctgttgtttcaatgtttaagatagaaaatcataatgataaaactgtaagtgaaaaaaataataaatgccaactgatattacaaaataatattgaaatgactactggcacttttgttgaagaaattactgaaaattacaagagaaatactgaaaatgaagataacaaatatactgctgccagtagaaattctcataacttagaatttgatggcagtgattcaagtaaaaatgatactgtttgtattcataaagatgaaacggacttgctatttactgatcagcacaacatatgtcttaaattatctggccagtttatgaaggagggaaacactcagattaaagaagatttgtcagatttaacttttttggaagttgcgaaagctcaagaagcatgtcatggtaatacttcaaataaagaacagttaactgctactaaaacggagcaaaatataaaagattttgagacttctgatacattttttcagactgcaagtgggaaaaatattagtgtcgccaaagagtcatttaataaaattgtaaatttctttgatcagaaaccagaagaattgcataacttttccttaaattctgaattacattctgacataagaaagaacaaaatggacattctaagttatgaggaaacagacatagttaaacacaaaatactgaaagaaagtgtcccagttggtactggaaatcaactagtgaccttccagggacaacccgaacgtgatgaaaagatcaaagaacctactctgttgggttttcatacagctagcgggaaaaaagttaaaattgcaaaggaatctttggacaaagtgaaaaacctttttgatgaaaaagagcaaggtactagtgaaatcaccagttttagccatcaatgggcaaagaccctaaagtacagagaggcctgtaaagaccttgaattagcatgtgagaccattgagatcacagctgccccaaagtgtaaagaaatgcagaattctctcaataatgataaaaaccttgtttctattgagactgtggtgccacctaagctcttaagtgataatttatgtagacaaactgaaaatctcaaaacatcaaaaagtatctttttgaaagttaaagtacatgaaaatgtagaaaaagaaacagcaaaaagtcctgcaacttgttacacaaatcagtccccttattcagtcattgaaaattcagccttagctttttacacaagttgtagtagaaaaacttctgtgagtcagacttcattacttgaagcaaaaaaatggcttagagaaggaatatttgatggtcaaccagaaagaataaatactgcagattatgtaggaaattatttgtatgaaaataattcaaacagtactatagctgaaaatgacaaaaatcatctctccgaaaaacaagatacttatttaagtaacagtagcatgtctaacagctattcctaccattctgatgaggtatataatgattcaggatatctctcaaaatgtagcacgcattcacataaggtttttgctgacattcagagtgaagaaattttacaacataaccaaaatatgtctggattggagaaagtttctaaaatatcaccttgtgatgttagtttggaaacttcagatatatgtaaatgtagtatagggaagcttcataagtcagtctcatctgcaaatacttgtgggatttttagcacagcaagtggaaaatctgtccaggtatcagatgcttcattacaaaacgcaagacaagtgttttctgaaatagaagatagtaccaagcaagtcttttccaaagtattgtttaaaagtaacgaacattcagaccagctcacaagagaagaaaatactgctatacgtactccagaacatttaatatcccaaaaaggcttttcatataatgtggtaaattcatctgctttctctggatttagtacagcaagtggaaagcaagtttccattttagaaagttccttacacaaagttaagggagtgttagaggaatttgatttaatcagaactgagcatagtcttcactattcacctacgtctagacaaaatgtatcaaaaatacttcctcgtgttgataagagaaacccagagcactgtgtaaactcagaaatggaaaaaacctgcagtaaagaatttaaattatcaaataacttaaatgttgaaggtggttcttcagaaaataatcactctattaaagtttctccatatctctctcaatttcaacaagacaaacaacagttggtattaggaaccaaagtctcacttgttgagaacattcatgttttgggaaaagaacaggcttcacctaaaaacgtaaaaatggaaattggtaaaactgaaactttttctgatgttcctgtgaaaacaaatatagaagtttgttctacttactccaaagattcagaaaactactttgaaacagaagcagtagaaattgctaaagcttttatggaagatgatgaactgacagattctaaactgccaagtcatgccacacattctctttttacatgtcccgaaaatgaggaaatggttttgtcaaattcaagaattggaaaaagaagaggagagccccttatcttagtgggagaaccctcaatcaaaagaaacttattaaatgaatttgacaggataatagaaaatcaagaaaaatccttaaaggcttcaaaaagcactccagatggcacaataaaagatcgaagattgtttatgcatcatgtttctttagagccgattacctgtgtaccctttcgcacaactaaggaacgtcaagagatacagaatccaaattttaccgcacctggtcaagaatttctgtctaaatctcatttgtatgaacatctgactttggaaaaatcttcaagcaatttagcagtttcaggacatccattttatcaagtttctgctacaagaaatgaaaaaatgagacacttgattactacaggcagaccaaccaaagtctttgttccaccttttaaaactaaatcgcattttcacagagttgaacagtgtgttaggaatattaacttggaggaaaacagacaaaagcaaaacattgatggacatggctctgatgatagtaaaaataagattaatgacaatgagattcatcagtttaacaaaaacaactccaatcaagcagcagctgtaactttcacaaagtgtgaagaagaacctttagatttaattacaagtcttcagaatgccagagatatacaggatatgcgaattaagaagaaacaaaggcaacgcgtctttccacagccaggcagtctgtatcttgcaaaaacatccactctgcctcgaatctctctgaaagcagcagtaggaggccaagttccctctgcgtgttctcataaacagctgtatacgtatggcgtttctaaacattgcataaaaattaacagcaaaaatgcagagtcttttcagtttcacactgaagattattttggtaaggaaagtttatggactggaaaaggaatacagttggctgatggtggatggctcataccctccaatgatggaaaggctggaaaagaagaattttatagggctctgtgtgacactccaggtgtggatccaaagcttatttctagaatttgggtttataatcactatagatggatcatatggaaactggcagctatggaatgtgcctttcctaaggaatttgctaatagatgcctaagcccagaaagggtgcttcttcaactaaaatacagatatgatacggaaattgatagaagcagaagatcggctataaaaaagataatggaaagggatgacacagctgcaaaaacacttgttctctgtgtttctgacataatttcattgagcgcaaatatatctgaaacttctagcaataaaactagtagtgcagatacccaaaaagtggccattattgaacttacagatgggtggtatgctgttaaggcccagttagatcctcccctcttagctgtcttaaagaatggcagactgacagttggtcagaagattattcttcatggagcagaactggtgggctctcctgatgcctgtacacctcttgaagccccagaatctcttatgttaaagatttctgctaacagtactcggcctgctcgctggtataccaaacttggattctttcctgaccctagaccttttcctctgcccttatcatcgcttttcagtgatggaggaaatgttggttgtgttgatgtaattattcaaagagcataccctatacagtggatggagaagacatcatctggattatacatatttcgcaatgaaagagaggaagaaaaggaagcagcaaaatatgtggaggcccaacaaaagagactagaagccttattcactaaaattcaggaggaatttgaagaacatgaagaaaacacaacaaaaccatatttaccatcacgtgcactaacaagacagcaagttcgtgctttgcaagatggtgcagagctttatgaagcagtgaagaatgcagcagacccagcttaccttgagggttatttcagtgaagagcagttaagagccttgaataatcacaggcaaatgttgaatgataagaaacaagctcagatccagttggaaattaggaaggccatggaatctgctgaacaaaaggaacaaggtttatcaagggatgtcacaaccgtgtggaagttgcgtattgtaagctattcaaaaaaagaaaaagattcagttatactgagtatttggcgtccatcatcagatttatattctctgttaacagaaggaaagagatacagaatttatcatcttgcaacttcaaaatctaaaagtaaatctgaaagagctaacatacagttagcagcgacaaaaaaaactcagtatcaacaactaccggtttcagatgaaattttatttcagatttaccagccacgggagccccttcacttcagcaaatttttagatccagactttcagccatcttgttctgaggtggacctaataggatttgtcgtttctgttgtgaaaaaaacaggacttgcccctttcgtctatttgtcagacgaatgttacaatttactggcaataaagttttggatagaccttaatgaggacattattaagcctcatatgttaattgctgcaagcaacctccagtggcgaccagaatccaaatcaggccttcttactttatttgctggagatttttctgtgttttctgctagtccaaaagagggccactttcaagagacattcaacaaaatgaaaaatactgttgagaatattgacatactttgcaatgaagcagaaaacaagcttatgcatatactgcatgcaaatgatcccaagtggtccaccccaactaaagactgtacttcagggccgtacactgctcaaatcattcctggtacaggaaacaagcttctgatgtcttctcctaattgtgagatatattatcaaagtcctttatcactttgtatggccaaaaggaagtctgtttccacacctgtctcagcccagatgacttcaaagtcttgtaaaggggagaaagagattgaaaaataaacttgattctggtattgagccagtattgaagaatgttgaagatcaaaaaaacactagtttttccaaagtaatatccaatgtaaaagatgcaaatgcatacccacaaactgtaaatgaagatatttgcgttgaggaacttgtgactagctcttcaccctgcaaaaataaaaatgcagccattaaattgtccatatctaatagtaataattttgaggtagggccacctgcatttaggatagccagtggtaaaatcgtttgtgtttcacatgaaacaattaaaaaagtgaaagacatatttacagacagtttcagtaaagtaattaaggaaaacaacgagaataaatcaaaaatttgccaaacgaaaattatggcaggttgttacgaggcattggatgattcagaggatattcttcataactctctagataatgatgaatgtagcacgcattcacataaggtttttgctgacattcagagtgaagaaattttacaacataaccaaaatatgtctggattggagaaagtttctaaaatatcaccttgtgatgttagtttggaaacttcagatatatgtaaatgtagtatagggaagcttcataagtcagtctcatctgcaaatacttgtgggatttttagcacagcaagtggaaaatctgtccaggtatcagatgcttcattacaaaacgcaagacaagtgttttctgaaatagaagatagtaccaagcaagtcttttccaaagtattgtttaaaagtaacgaacattcagaccagctcacaagagaagaaaatactgctatacgtactccagaacatttaatatcccaaaaaggcttttcatataatgtggtaaattcatctgctttctctggatttagtacagcaagtggaaagcaagtttccattttagaaagttccttacacaaagttaagggagtgttagaggaatttgatttaatcagaactgagcatagtcttcactattcacctacgtctagacaaaatgtatcaaaaatacttcctcgtgttgataagagaaacccagagcactgtgtaaactcagaaatggaaaaaacctgcagtaaagaatttaaattatcaaataacttaaatgttgaaggtggttcttcagaaaataatcactctattaaagtttctccatatctctctcaatttcaacaagacaaacaacagttggtattaggaaccaaagtctcacttgttgagaacattcatgttttgggaaaagaacaggcttcacctaaaaacgtaaaaatggaaattggtaaaactgaaactttttctgatgttcctgtgaaaacaaatatagaagtttgttctacttactccaaagattcagaaaactactttgaaacagaagcagtagaaattgctaaagcttttatggaagatgatgaactgacagattctaaactgccaagtcatgccacacattctctttttacatgtcccgaaaatgaggaaatggttttgtcaaattcaagaattggaaaaagaagaggagagccccttatcttagtgggagaaccctcaatcaaaagaaacttattaaatgaatttgacaggataatagaaaatcaagaaaaatccttaaaggcttcaaaaagcactccagatggcacaataaaagatcgaagattgtttatgcatcatgtttctttagagccgattacctgtgtaccctttcgcacaactaaggaacgtcaagagatacagaatccaaattttaccgcacctggtcaagaatttctgtctaaatctcatttgtatgaacatctgactttggaaaaatcttcaagcaatttagcagtttcaggacatccattttatcaagtttctgctacaagaaatgaaaaaatgagacacttgattactacaggcagaccaaccaaagtctttgttccaccttttaaaactaaatcacattttcacagagttgaacagtgtgttaggaatattaacttggaggaaaacagacaaaagcaaaacattgatggacatggctctgatgatagtaaaaataagattaatgacaatgagattcatcagtttaacaaaaacaactccaatcaagcagcagctgtaactttcacaaagtgtgaagaagaacctttagatttaattacaagtcttcagaatgccagagatatacaggatatgcgaattaagaagaaacaaaggcaacgcgtctttccacagccaggcagtctgtatcttgcaaaaacatccactctgcctcgaatctctctgaaagcagcagtaggaggccaagttccctctgcgtgttctcataaacagctgtatacgtatggcgtttctaaacattgcataaaaattaacagcaaaaatgcagagtcttttcagtttcacactgaagattattttggtaaggaaagtttatggactggaaaaggaatacagttggctgatggtggatggctcataccctccaatgatggaaaggctggaaaagaagaattttatagggctctgtgtgacactccaggtgtggatccaaagcttatttctagaatttgggtttataatcactatagatggatcatatggaaactggcagctatggaatgtgcctttcctaaggaatttgctaatagatgcctaagcccagaaagggtgcttcttcaactaaaatacagatatgatacggaaattgatagaagcagaagatcggctataaaaaagataatggaaagggatgacacagctgcaaaaacacttgttctctgtgtttctgacataatttcattgagcgcaaatatatctgaaacttctagcaataaaactagtagtgcagatacccaaaaagtggccattattgaacttacagatgggtggtatgctgttaaggcccagttagatcctcccctcttagctgtcttaaagaatggcagactgacagttggtcagaagattattcttcatggagcagaactggtgggctctcctgatgcctgtacacctcttgaagccccagaatctcttatgttaaagatttctgctaacagtactcggcctgctcgctggtataccaaacttggattctttcctgaccctagaccttttcctctgcccttatcatcgcttttcagtgatggaggaaatgttggttgtgttgatgtaattattcaaagagcataccctatacagtggatggagaagacatcatctggattatacatatttcgcaatgaaagagaggaagaaaaggaagcagcaaaatatgtggaggcccaacaaaagagactagaagccttattcactaaaattcaggaggaatttgaagaacatgaagaaaacacaacaaaaccatatttaccatcacgtgcactaacaagacagcaagttcgtgctttgcaagatggtgcagagctttatgaagcagtgaagaatgcagcagacccagcttaccttgagggttatttcagtgaagagcagttaagagccttgaataatcacaggcaaatgttgaatgataagaaacaagctcagatccagttggaaattaggaagaccatggaatctgctgaacaaaaggaacaaggtttatcaagggatgtcacaaccgtgtggaagttgcgtattgtaagctattcaaaaaaagaaaaagattcagttatactgagtatttggcgtccatcatcagatttatattctctgttaacagaaggaaagagatacagaatttatcatcttgcaacttcaaaatctaaaagtaaatctgaaagagctaacatacagttagcagcgacaaaaaaaactcagtatcaacaactaccggtttcagatgaaattttatttcagatttaccagccacgggagccccttcacttcagcaaatttttagatccagactttcagccatcttgttctgaggtggacctaataggatttgtcgtttctgttgtgaaaaaaacaggacttgcccctttcgtctatttgtcagacgaatgttacaatttactggcaataaagttttggatagaccttaatgaggacattattaagcctcatatgttaattgctgcaagcaacctccagtggcgaccagaatccaaatcaggccttcttactttatttgctggagatttttctgtgttttctgctagtccaaaagagggccactttcaagagacattcaacaaaatgaaaaatactgttgagaatattgacatactttgcaatgaagcagaaaacaagcttatgcatatactgcatgcaaatgatcccaagtggtccaccccaactaaagactgtacttcagggccgtacactgctcaaatcattcctggtacaggaaacaagcttctgatgtcttctcctaattgtgagatatattatcaaagtcctttatcactttgtatggccaaaaggaagtctgtttccacacctgtctcagcccagatgacttcaaagtcttgtaaaggggagaaagagattgatgaccaaaagaactgcaaaaagagaagagccttggatttcttgagtagactgcctttacctccacctgttagtcccatttgtacatttgtttctccggctgcacagaaggcatttcagccaccaaggagttgtggcaccaaatacgaaacacccataaagaaaaaagaactgaattctcctcagatgactccatttaaaaaattcaatgaaatttctcttttggaaagtaattcaatagctgacgaagaacttgcattgataaatacccaagctcttttgtctggttcaacaggagaaaaacaatttatatctgtcagtgaatccactaggactgctcccaccagttcagaagattatctcagactgaaacgacgttgtactacatctctgatcaaagaacaggagagttcccaggccagtacggaagaatgtgagaaaaataagcaggacacaattacaactaaaaaatatatctaatgaccaaaagaactgcaaaaagagaagagccttggatttcttgagtagactgcctttacctccacctgttagtcccatttgtacatttgtttctccggctgcacagaaggcatttcagccaccaaggagttgtggcaccaaatacgaaacacccataaagaaaaaagaactgaattctcctcagatgactccatttaaaaaattcaatgaaatttctcttttggaaagtaattcaatagctgacgaagaacttgcattgataaatacccaagctcttttgtctggttcaacaggagaaaaacaatttatatctgtcagtgaatccactaggactgctcccaccagttcagaagattatctcagactgaaacgacgttgtactacatctctgatcaaagaacaggagagttcccaggccagtacggaagaatgtgagaaaaataagcaggacacaattacaactaaaaaatatatctaa

SEQ ID NO: 147916 - DNA, 18348 bp, Homo sapiens
atgcctattggatccaaagagaggccaacattttttgaaatttttaagacacgctgcaacaaagcagatttaggaccaataagtcttaattggtttgaagaactttcttcagaagctccaccctataattctgaacctgcagaagaatctgaacataaaaacaacaattacgaaccaaacctatttaaaactccacaaaggaaaccatcttataatcagctggcttcaactccaataatattcaaagagcaagggctgactctgccgctgtaccaatctcctgtaaaagaattagataaattcaaattagacttaggaaggaatgttcccaatagtagacataaaagtcttcgcacagtgaaaactaaaatggatcaagcagatgatgtttcctgtccacttctaaattcttgtcttagtgaaagtcctgttgttctacaatgtacacatgtaacaccacaaagagataagtcagtggtatgtgggagtttgtttcatacaccaaagtttgtgaagggtcgtcagacaccaaaacatatttctgaaagtctaggagctgaggtggatcctgatatgtcttggtcaagttctttagctacaccacccacccttagttctactgtgctcatagtcagaaatgaagaagcatctgaaactgtatttcctcatgatactactgctaatgtgaaaagctatttttccaatcatgatgaaagtctgaagaaaaatgatagatttatcgcttctgtgacagacagtgaaaacacaaatcaaagagaagctgcaagtcatggatttggaaaaacatcagggaattcatttaaagtaaatagctgcaaagaccacattggaaagtcaatgccaaatgtcctagaagatgaagtatatgaaacagttgtagatacctctgaagaagatagtttttcattatgtttttctaaatgtagaacaaaaaatctacaaaaagtaagaactagcaagactaggaaaaaaattttccatgaagcaaacgctgatgaatgtgaaaaatctaaaaaccaagtgaaagaaaaatactcatttgtatctgaagtggaaccaaatgatactgatccattagattcaaatgtagcacatcagaagccctttgagagtggaagtgacaaaatctccaaggaagttgtaccgtctttggcctgtgaatggtctcaactaaccctttcaggtctaaatggagcccagatggagaaaatacccctattgcatatttcttcatgtgaccaaaatatttcagaaaaagacctattagacacagagaacaaaagaaagaaagattttcttacttcagagaattctttgccacgtatttctagcctaccaaaatcagagaagccattaaatgaggaaacagtggtaaataagagagatgaagagcagcatcttgaatctcatacagactgcattcttgcagtaaagcaggcaatatctggaacttctccagtggcttcttcatttcagggtatcaaaaagtctatattcagaataagagaatcacctaaagagactttcaatgcaagtttttcaggtcatatgactgatccaaactttaaaaaagaaactgaagcctctgaaagtggactggaaatacatactgtttgctcacagaaggaggactccttatgtccaaatttaattgataatggaagctggccagccaccaccacacagaattctgtagctttgaagaatgcaggtttaatatccactttgaaaaagaaaacaaataagtttatttatgctatacatgatgaaacatcttataaaggaaaaaaaataccgaaagaccaaaaatcagaactaattaactgttcagcccagtttgaagcaaatgcttttgaagcaccacttacatttgcaaatgctgattcaggtttattgcattcttctgtgaaaagaagctgttcacagaatgattctgaagaaccaactttgtccttaactagctcttttgggacaattctgaggaaatgttctagaaatgaaacatgttctaataatacagtaatctctcaggatcttgattataaagaagcaaaatgtaataaggaaaaactacagttatttattaccccagaagctgattctctgtcatgcctgcaggaaggacagtgtgaaaatgatccaaaaagcaaaaaagtttcagatataaaagaagaggtcttggctgcagcatgtcacccagtacaacattcaaaagtggaatacagtgatactgactttcaatcccagaaaagtcttttatatgatcatgaaaatgccagcactcttattttaactcctacttccaaggatgttctgtcaaacctagtcatgatttctagaggcaaagaatcatacaaaatgtcagacaagctcaaaggtaacaattatgaatctgatgttgaattaaccaaaaatattcccatggaaaagaatcaagatgtatgtgctttaaatgaaaattataaaaacgttgagctgttgccacctgaaaaatacatgagagtagcatcaccttcaagaaaggtacaattcaaccaaaacacaaatctaagagtaatccaaaaaaatcaagaagaaactacttcaatttcaaaaataactgtcaatccagactctgaagaacttttctcagacaatgagaataattttgtcttccaagtagctaatgaaaggaataatcttgctttaggaaatactaaggaacttcatgaaacagacttgacttgtgtaaacgaacccattttcaagaactctaccatggttttatatggagacacaggtgataaacaagcaacccaagtgtcaattaaaaaagatttggtttatgttcttgcagaggagaacaaaaatagtgtaaagcagcatataaaaatgactctaggtcaagatttaaaatcggacatctccttgaatatagataaaataccagaaaaaaataatgattacatgaacaaatgggcaggactcttaggtccaatttcaaatcacagttttggaggtagcttcagaacagcttcaaataaggaaatcaagctctctgaacataacattaagaagagcaaaatgttcttcaaagatattgaagaacaatatcctactagtttagcttgtgttgaaattgtaaataccttggcattagataatcaaaagaaactgagcaagcctcagtcaattaatactgtatctgcacatttacagagtagtgtagttgtttctgattgtaaaaatagtcatataacccctcagatgttattttccaagcaggattttaattcaaaccataatttaacacctagccaaaaggcagaaattacagaactttctactatattagaagaatcaggaagtcagtttgaatttactcagtttagaaaaccaagctacatattgcagaagagtacatttgaagtgcctgaaaaccagatgactatcttaaagaccacttctgaggaatgcagagatgctgatcttcatgtcataatgaatgccccatcgattggtcaggtagacagcagcaagcaatttgaaggtacagttgaaattaaacggaagtttgctggcctgttgaaaaatgactgtaacaaaagtgcttctggttatttaacagatgaaaatgaagtggggtttaggggcttttattctgctcatggcacaaaactgaatgtttctactgaagctctgcaaaaagctgtgaaactgtttagtgatattgagaatattagtgaggaaacttctgcagaggtacatccaataagtttatcttcaagtaaatgtcatgattctgtcgtttcaatgtttaagatagaaaatcataatgataaaactgtaagtgaaaaaaataataaatgccaactgatattacaaaataatattgaaatgactactggcacttttgttgaagaaattactgatgcctgcaggaaggacagtgtgaaaatgatccaaaaagcaaaaaagtttcagatataaaagaagaggtcttggctgcagcatgtcacccagtacaacattcaaaagtggaatacagtgatactgactttcaatcccagaaaagtcttttatatgatcatgaaaatgccagcactcttattttaactcctacttccaaggatgttctgtcaaacctagtcatgatttctagaggcaaagaatcatacaaaatgtcagacaagctcaaaggtaacaattatgaatctgatgttgaattaaccaaaaatattcccatggaaaagaatcaagatgtatgtgctttaaatgaaaattataaaaacgttgagctgttgccacctgaaaaatacatgagagtagcatcaccttcaagaaaggtacaattcaaccaaaacacaaatctaagagtaatccaaaaaaatcaagaagaaactacttcaatttcaaaaataactgtcaatccagactctgaagaacttttctcagacaatgagaataattttgtcttccaagtagctaatgaaaggaataatcttgctttaggaaatactaaggaacttcatgaaacagacttgacttgtgtaaacgaacccattttcaagaactctaccatggttttatatggagacacaggtgataaacaagcaacccaagtgtcaattaaaaaagatttggtttatgttcttgcagaggagaacaaaaatagtgtaaagcagcatataaaaatgactctaggtcaagatttaaaatcggacatctccttgaatatagataaaataccagaaaaaaataatgattacatgaacaaatgggcaggactcttaggtccaatttcaaatcacagttttggaggtagcttcagaacagcttcaaataaggaaatcaagctctctgaacataacattaagaagagcaaaatgttcttcaaagatattgaagaacaatatcctactagtttagcttgtgttgaaattgtaaataccttggcattagataatcaaaagaaactgagcaagcctcagtcaattaatactgtatctgcacatttacagagtagtgtagttgtttctgattgtaaaaatagtcatataacccctcagatgttattttccaagcaggattttaattcaaaccataatttaacacctagccaaaaggcagaaattacagaactttctactatattagaagaatcaggaagtcagtttgaatttactcagtttagaaaaccaagctacatattgcagaagagtacatttgaagtgcctgaaaaccagatgactatcttaaagaccacttctgaggaatgcagagatgctgatcttcatgtcataatgaatgccccatcgattggtcaggtagacagcagcaagcaatttgaaggtacagttgaaattaaacggaagtttgctggcctgttgaaaaatgactgtaacaaaagtgcttctggttatttaacagatgaaaatgaagtggggtttaggggcttttattctgctcatggcacaaaactgaatgtttctactgaagctctgcaaaaagctgtgaaactgtttagtgatattgagaatattagtgaggaaacttctgcagaggtacatccaataagtttatcttcaagtaaatgtcatgattctgttgtttcaatgtttaagatagaaaatcataatgataaaactgtaagtgaaaaaaataataaatgccaactgatattacaaaataatattgaaatgactactggcacttttgttgaagaaattactgaaaattacaagagaaatactgaaaatgaagataacaaatatactgctgccagtagaaattctcataacttagaatttgatggcagtgattcaagtaaaaatgatactgtttgtattcataaagatgaaacggacttgctatttactgatcagcacaacatatgtcttaaattatctggccagtttatgaaggagggaaacactcagattaaagaagatttgtcagatttaacttttttggaagttgcgaaagctcaagaagcatgtcatggtaatacttcaaataaagaacagttaactgctactaaaacggagcaaaatataaaagattttgagacttctgatacattttttcagactgcaagtgggaaaaatattagtgtcgccaaagagtcatttaataaaattgtaaatttctttgatcagaaaccagaagaattgcataacttttccttaaattctgaattacattctgacataagaaagaacaaaatggacattctaagttatgaggaaacagacatagttaaacacaaaatactgaaagaaagtgtcccagttggtactggaaatcaactagtgaccttccagggacaacccgaacgtgatgaaaagatcaaagaacctactctgttgggttttcatacagctagcgggaaaaaagttaaaattgcaaaggaatctttggacaaagtgaaaaacctttttgatgaaaaagagcaaggtactagtgaaatcaccagttttagccatcaatgggcaaagaccctaaagtacagagaggcctgtaaagaccttgaattagcatgtgagaccattgagatcacagctgccccaaagtgtaaagaaatgcagaattctctcaataatgataaaaaccttgtttctattgagactgtggtgccacctaagctcttaagtgataatttatgtagacaaactgaaaatctcaaaacatcaaaaagtatctttttgaaagttaaagtacatgaaaatgtagaaaaagaaacagcaaaaagtcctgcaacttgttacacaaatcagtccccttattcagtcattgaaaattcagccttagctttttacacaagttgtagtagaaaaacttctgtgagtcagacttcattacttgaagcaaaaaaatggcttagagaaggaatatttgatggtcaaccagaaagaataaatactgcagattatgtaggaaattatttgtatgaaaataattcaaacagtactatagctgaaaatgacaaaaatcatctctccgaaaaacaagatacttatttaagtaacagtagcatgtctaacagctattcctaccattctgatgaggtatataatgattcaggatatctctcaaaaaataaacttgattctggtattgagccagtattgaagaatgttgaagatcaaaaaaacactagtttttccaaagtaatatccaatgtaaaagatgcaaatgcatacccacaaactgtaaatgaagatatttgcgttgaggaacttgtgactagctcttcaccctgcaaaaataaaaatgcagccattaaattgtccatatctaatagtaataattttgaggtagggccacctgcatttaggatagccagtggtaaaatcgtttgtgtttcacatgaaacaattaaaaaagtgaaagacatatttacagacagtttcagtaaagtaattaaggaaaacaacgagaataaatcaaaaatttgccaaacgaaaattatggcaggttgttacgaggcattggatgattcagaggatattcttcataactctctagataatgatgaatgtagcacgcattcacataaggtttttgctgacattcagagtgaagaaattttacaacataaccaaaatatgtctggattggagaaagtttctaaaatatcaccttgtgatgttagtttggaaacttcagatatatgtaaatgtagtatagggaagcttcataagtcagtctcatctgcaaatacttgtgggatttttagcacagcaagtggaaaatctgtccaggtatcagatgcttcattacaaaacgcaagacaagtgttttctgaaatagaagatagtaccaagcaagtcttttccaaagtattgtttaaaagtaacgaacattcagaccagctcacaagagaagaaaatactgctatacgtactccagaacatttaatatcccaaaaaggcttttcatataatgtggtaaattcatctgctttctctggatttaaaattacaagagaaatactgaaaatgaagataacaaatatactgctgccagtagaaattctcataacttagaatttgatggcagtgattcaagtaaaaatgatactgtttgtattcataaagatgaaacggacttgctatttactgatcagcacaacatatgtcttaaattatctggccagtttatgaaggagggaaacactcagattaaagaagatttgtcagatttaacttttttggaagttgcgaaagctcaagaagcatgtcatggtaatacttcaaataaagaacagttaactgctactaaaacggagcaaaatataaaagattttgagacttctgatacattttttcagactgcaagtgggaaaaatattagtgtcgccaaagagtcatttaataaaattgtaaatttctttgatcagaaaccagaagaattgcataacttttccttaaattctgaattacattctgacataagaaagaacaaaatggacattctaagttatgaggaaacagacatagttaaacacaaaatactgaaagaaagtgtcccagttggtactggaaatcaactagtgaccttccagggacaacccgaacgtgatgaaaagatcaaagaacctactctgttgggttttcatacagctagcgggaaaaaagttaaaattgcaaaggaatctttggacaaagtgaaaaacctttttgatgaaaaagagcaaggtactagtgaaatcaccagttttagccatcaatgggcaaagaccctaaagtacagagaggcctgtaaagaccttgaattagcatgtgagaccattgagatcacagctgccccaaagtgtaaagaaatgcagaattctctcaataatgataaaaaccttgtttctattgagactgtggtgccacctaagctcttaagtgataatttatgtagacaaactgaaaatctcaaaacatcaaaaagtatctttttgaaagttaaagtacatgaaaatgtagaaaaagaaacagcaaaaagtcctgcaacttgttacacaaatcagtccccttattcagtcattgaaaattcagccttagctttttacacaagttgtagtagaaaaacttctgtgagtcagacttcattacttgaagcaaaaaaatggcttagagaaggaatatttgatggtcaaccagaaagaataaatactgcagattatgtaggaaattatttgtatgaaaataattcaaacagtactatagctgaaaatgacaaaaatcatctctccgaaaaacaagatacttatttaagtaacagtagcatgtctaacagctattcctaccattctgatgaggtatataatgattcaggatatctctcaaaaaataaacttgattctggtattgagccagtattgaagaatgttgaagatcaaaaaaacactagtttttccaaagtaatatccaatgtaaaagatgcaaatgcatacccacaaactgtaaatgaagatatttgcgttgaggaacttgtgactagctcttcaccctgcaaaaataaaaatgcagccattaaattgtccatatctaatagtaataattttgaggtagggccacctgcatttaggatagccagtggtaaaatcgtttgtgtttcacatgaaacaattaaaaaagtgaaagacatatttacagacagtttcagtaaagtaattaaggaaaacaacgagaataaatcaaaaatttgccaaacgaaaattatggcaggttgttacgaggcattggatgattcagaggatattcttcataactctctagataatgatgaatgtagcacgcattcacataaggtttttgctgacattcagagtgaagaaattttacaacataaccaaaatatgtctggattggagaaagtttctaaaatatcaccttgtgatgttagtttggaaacttcagatatatgtaaatgtagtatagggaagcttcataagtcagtctcatctgcaaatacttgtgggatttttagcacagcaagtggaaaatctgtccaggtatcagatgcttcattacaaaacgcaagacaagtgttttctgaaatagaagatagtaccaagcaagtcttttccaaagtattgtttaaaagtaacgaacattcagaccagctcacaagagaagaaaatactgctatacgtactccagaacatttaatatcccaaaaaggcttttcatataatgtggtaaattcatctgctttctctggatttagtacagcaagtggaaagcaagtttccattttagaaagttccttacacaaagttaagggagtgttagaggaatttgatttaatcagaactgagcatagtcttcactattcacctacgtctagacaaaatgtatcaaaaatacttcctcgtgttgataagagaaacccagagcactgtgtaaactcagaaatggaaaaaacctgcagtaaagaatttaaattatcaaataacttaaatgttgaaggtggttcttcagaaaataatcactctattaaagtttctccatatctctctcaatttcaacaagacaaacaacagttggtattaggaaccaaagtctcacttgttgagaacattcatgttttgggaaaagaacaggcttcacctaaaaacgtaaaaatggaaattggtaaaactgaaactttttctgatgttcctgtgaaaacaaatatagaagtttgttctacttactccaaagattcagaaaactactttgaaacagaagcagtagaaattgctaaagcttttatggaagatgatgaactgacagattctaaactgccaagtcatgccacacattctctttttacatgtcccgaaaatgaggaaatggttttgtcaaattcaagaattggaaaaagaagaggagagccccttatcttagtgggagaaccctcaatcaaaagaaacttattaaatgaatttgacaggataatagaaaatcaagaaaaatccttaaaggcttcaaaaagcactccagatggcacaataaaagatcgaagattgtttatgcatcatgtttctttagagccgattacctgtgtaccctttcgcacaactaaggaacgtcaagagatacagaatccaaattttaccgcacctggtcaagaatttctgtctaaatctcatttgtatgaacatctgactttggaaaaatcttcaagcaatttagcagtttcaggacatccattttatcaagtttctgctacaagaaatgaaaaaatgagacacttgattactacaggcagaccaaccaaagtctttgttccaccttttaaaactaaatcacattttcacagagttgaacagtgtgttaggaatattaacttggaggaaaacagacaaaagcaaaacattgatggacatggctctgatgatagtaaaaataagattaatgacaatgagattcatcagtttaacaaaaacaactccaatcaagcagcagctgtaactttcacaaagtgtgaagaagaacctttagatttaattacaagtcttcagaatgccagagatatacaggatatgcgaattaagaagaaacaaaggcaacgcgtctttccacagccaggcagtctgtatcttgcaaaaacatccactctgcctcgaatctctctgaaagcagcagtaggaggccaagttccctctgcgtgttctcataaacagctgtatacgtatggcgtttctaaacattgcataaaaattaacagcaaaaatgcagagtcttttcagtttcacactgaagattattttggtaaggaaagtttatggactggaaaaggaatacagttggctgatggtggatggctcataccctccaatgatggaaaggctggaaaagaagaattttatagggctctgtgtgacactccaggtgtggatccaaagcttatttctagaatttgggtttataatcactatagatggatcatatggaaactggcagctatggaatgtgcctttcctaaggaatttgctaatagatgcctaagcccagaaagggtgcttcttcaactaaaatacagaagtacagcaagtggaaagcaagtttccattttagaaagttccttacacaaagttaagggagtgttagaggaatttgatttaatcagaactgagcatagtcttcactattcacctacgtctagacaaaatgtatcaaaaatacttcctcgtgttgataagagaaacccagagcactgtgtaaactcagaaatggaaaaaacctgcagtaaagaatttaaattatcaaataacttaaatgttgaaggtggttcttcagaaaataatcactctattaaagtttctccatatctctctcaatttcaacaagacaaacaacagttggtattaggaaccaaagtctcacttgttgagaacattcatgttttgggaaaagaacaggcttcacctaaaaacgtaaaaatggaaattggtaaaactgaaactttttctgatgttcctgtgaaaacaaatatagaagtttgttctacttactccaaagattcagaaaactactttgaaacagaagcagtagaaattgctaaagcttttatggaagatgatgaactgacagattctaaactgccaagtcatgccacacattctctttttacatgtcccgaaaatgaggaaatggttttgtcaaattcaagaattggaaaaagaagaggagagccccttatcttagtgggagaaccctcaatcaaaagaaacttattaaatgaatttgacaggataatagaaaatcaagaaaaatccttaaaggcttcaaaaagcactccagatggcacaataaaagatcgaagattgtttatgcatcatgtttctttagagccgattacctgtgtaccctttcgcacaactaaggaacgtcaagagatacagaatccaaattttaccgcacctggtcaagaatttctgtctaaatctcatttgtatgaacatctgactttggaaaaatcttcaagcaatttagcagtttcaggacatccattttatcaagtttctgctacaagaaatgaaaaaatgagacacttgattactacaggcagaccaaccaaagtctttgttccaccttttaaaactaaatcacattttcacagagttgaacagtgtgttaggaatattaacttggaggaaaacagacaaaagcaaaacattgatggacatggctctgatgatagtaaaaataagattaatgacaatgagattcatcagtttaacaaaaacaactccaatcaagcagcagctgtaactttcacaaagtgtgaagaagaacctttagatttaattacaagtcttcagaatgccagagatatacaggatatgcgaattaagaagaaacaaaggcaacgcgtctttccacagccaggcagtctgtatcttgcaaaaacatccactctgcctcgaatctctctgaaagcagcagtaggaggccaagttccctctgcgtgttctcataaacagctgtatacgtatggcgtttctaaacattgcataaaaattaacagcaaaaatgcagagtcttttcagtttcacactgaagattattttggtaaggaaagtttatggactggaaaaggaatacagttggctgatggtggatggctcataccctccaatgatggaaaggctggaaaagaagaattttatagggctctgtgtgacactccaggtgtggatccaaagcttatttctagaatttgggtttataatcactatagatggatcatatggaaactggcagctatggaatgtgcctttcctaaggaatttgctaatagatgcctaagcccagaaagggtgcttcttcaactaaaatacagatatgatacggaaattgatagaagcagaagatcggctataaaaaagataatggaaagggatgacacagctgcaaaaacacttgttctctgtgtttctgacataatttcattgagcgcaaatatatctgaaacttctagcaataaaactagtagtgcagatacccaaaaagtggccattattgaacttacagatgggtggtatgctgttaaggcccagttagatcctcccctcttagctgtcttaaagaatggcagactgacagttggtcagaagattattcttcatggagcagaactggtgggctctcctgatgcctgtacacctcttgaagccccagaatctcttatgttaaagatttctgctaacagtactcggcctgctcgctggtataccaaacttggattctttcctgaccctagaccttttcctctgcccttatcatcgcttttcagtgatggaggaaatgttggttgtgttgatgtaattattcaaagagcataccctatacagtggatggagaagacatcatctggattatacatatttcgcaatgaaagagaggaagaaaaggaagcagcaaaatatgtggaggcccaacaaaagagactagaagccttattcactaaaattcaggaggaatttgaagaacatgaagaaaacacaacaaaaccatatttaccatcacgtgcactaacaagacagcaagttcgtgctttgcaagatggtgcagagctttatgaagcagtgaagaatgcagcagacccagcttaccttgagggttatttcagtgaagagcagttaagagccttgaataatcacaggcaaatgttgaatgataagaaacaagctcagatccagttggaaattaggaaggccatggaatctgctgaacaaaaggaacaaggtttatcaagggatgtcacaaccgtgtggaagttgcgtattgtaagctattcaaaaaaagaaaaagattcagttatactgagtatttggcgtccatcatcagatttatattctctgttaacagaaggaaagagatacagaatttatcatcttgcaacttcaaaatctaaaagtaaatctgaaagagctaacatacagttagcagcgacaaaaaaaactcagtatcaacaactaccggtttcagatgaaattttatttcagatttaccagccacgggagccccttcacttcagcaaatttttagatccagactttcagccatcttgttctgaggtggacctaataggatttgtcgtttctgttgtgaaaaaaacaggacttgcccctttcgtctatttgtcagacgaatgttacaatttactggcaataaagttttggatagaccttaatgaggacattattaagcctcatatgttaattgctgcaagcaacctccagtggcgaccagaatccaaatcaggccttcttactttatttgctggagatttttctgtgttttctgctagtccaaaagagggccactttcaagagacattcaacaaaatgaaaaatactgttgagaatattgacatactttgcaatgaagcagaaaacaagcttatgcatatactgcatgcaaatgatcccaagtggtccaccccaactaaagactgtacttcagggccgtacactgctcaaatcattcctggtacaggaaacaagcttctgatgtcttctcctaattgtgagatatattatcaaagtcctttatcactttgtatggccaaaaggaagtctgtttccacacctgtctcagcccagatgacttcaaagtcttgtaaaggggagaaagagattgatgaccaaaagaactgcaaaaagagaagagccttggatttcttgagtagactgcctttacctccacctgttagtcccatttgtacatttgtttctccggctgcacagaaggcatttcagccaccaaggagttgtggcaccaaatacgaaacacccataaagaaaaaagaactgaattctcctcagatgactccatttaaaaaattcaatgaaatttctcttttggaaagtaattcaatagctgacgaagaacttgcattgataaatacccaagctcttttgtctggttcaacaggagaaaaacaatttatatctgtcagtgaatccactaggactgctcccaccagttcagaagattatctcagactgaaacgacgttgtactacatctctgatcaaagaacaggagagttcccaggccagtacggaagaatgtgagaaaaatatgatacggaaattgatagaagcagaagatcggctataaaaaagataatggaaagggatgacacagctgcaaaaacacttgttctctgtgtttctgacataatttcattgagcgcaaatatatctgaaacttctagcaataaaactagtagtgcagatacccaaaaagtggccattattgaacttacagatgggtggtatgctgttaaggcccagttagatcctcccctcttagctgtcttaaagaatggcagactgacagttggtcagaagattattcttcatggagcagaactggtgggctctcctgatgcctgtacacctcttgaagccccagaatctcttatgttaaagatttctgctaacagtactcggcctgctcgctggtataccaaacttggattctttcctgaccctagaccttttcctctgcccttatcatcgcttttcagtgatggaggaaatgttggttgtgttgatgtaattattcaaagagcataccctatacagtggatggagaagacatcatctggattatacatatttcgcaatgaaagagaggaagaaaaggaagcagcaaaatatgtggaggcccaacaaaagagactagaagccttattcactaaaattcaggaggaatttgaagaacatgaagaaaacacaacaaaaccatatttaccatcacgtgcactaacaagacagcaagttcgtgctttgcaagatggtgcagagctttatgaagcagtgaagaatgcagcagacccagcttaccttgagggttatttcagtgaagagcagttaagagccttgaataatcacaggcaaatgttgaatgataagaaacaagctcagatccagttggaaattaggaaggccatggaatctgctgaacaaaaggaacaaggtttatcaagggatgtcacaaccgtgtggaagttgcgtattgtaagctattcaaaaaaagaaaaagattcagttatactgagtatttggcgtccatcatcagatttatattctctgttaacagaaggaaagagatacagaatttatcatcttgcaacttcaaaatctaaaagtaaatctgaaagagctaacatacagttagcagcgacaaaaaaaactcagtatcaacaactaccggtttcagatgaaattttatttcagatttaccagccacgggagccccttcacttcagcaaatttttagatccagactttcagccatcttgttctgaggtggacctaataggatttgtcgtttctgttgtgaaaaaaacaggacttgcccctttcgtctatttgtcagacgaatgttacaatttactggcaataaagttttggatagaccttaatgaggacattattaagcctcatatgttaattgctgcaagcaacctccagtggcgaccagaatccaaatcaggccttcttactttatttgctggagatttttctgtgttttctgctagtccaaaagagggccactttcaagagacattcaacaaaatgaaaaatactgttgagaatattgacatactttgcaatgaagcagaaaacaagcttatgcatatactgcatgcaaatgatcccaagtggtccaccccaactaaagactgtacttcagggccgtacactgctcaaatcattcctggtacaggaaacaagcttctgatgtcttctcctaattgtgagatatattatcaaagtcctttatcactttgtatggccaaaaggaagtctgtttccacacctgtctcagcccagatgacttcaaagtcttgtaaaggggagaaagagattgatgaccaaaagaactgcaaaaagagaagagccttggatttcttgagtagactgcctttacctccacctgttagtcccatttgtacatttgtttctccggctgcacagaaggcatttcagccaccaaggagttgtggcaccaaatacgaaacacccataaagaaaaaagaactgaattctcctcagatgactccatttaaaaaattcaatgaaatttctcttttggaaagtaattcaatagctgacgaagaacttgcattgataaatacccaagctcttttgtctggttcaacaggagaaaaacaatttatatctgtcagtgaatccactaggactgctcccaccagttcagaagattatctcagactgaaacgacgttgtactacatctctgatcaaagaacaggagagttcccaggccagtacggaagaatgtgagaaaaataagcaggacacaattacaactaaaaaatatatctaa

SEQ ID NO: 147917 - DNA, 7990 bp, Homo sapiens
atgcctattggatccaaagagaggccaacattttttgaaatttttaagacacgctgcaacaaagcagatttaggaccaataagtcttaattggtttgaagaactttcttcagaagctccaccctataattctgaacctgcagaagaatctgaacataaaaacaacaattacgaaccaaacctatttaaaactccacaaaggaaaccatcttataatcagctggcttcaactccaataatattcaaagagcaagggctgactctgccgctgtaccaatctcctgtaaaagaattagataaattcaaattagacttaggaaggaatgttcccaatagtagacataaaagtcttcgcacagtgaaaactaaaatggatcaagcagatgatgtttcctgtccacttctaaattcttgtcttagtgaaagtcctgttgttctacaatgtacacatgtaacaccacaaagagataagtcagtggtatgtgggagtttgtttcatacaccaaagtttgtgaagggtcgtcagacaccaaaacatatttctgaaagtctaggagctgaggtggatcctgatatgtcttggtcaagttctttagctacaccacccacccttagttctactgtgctcatagtcagaaatgaagaagcatctgaaactgtatttcctcatgatactactgctaatgtgaaaagctatttttccaatcatgatgaaagtctgaagaaaaatgatagatttatcgcttctgtgacagacagtgaaaacacaaatcaaagagaagctgcaagtcatggatttggaaaaacatcagggaattcatttaaagtaaatagctgcaaagaccacattggaaagtcaatgccaaatgtcctagaagatgaagtatatgaaacagttgtagatacctctgaagaagatagtttttcattatgtttttctaaatgtagaacaaaaaatctacaaaaagtaagaactagcaagactaggaaaaaaattttccatgaagcaaacgctgatgaatgtgaaaaatctaaaaaccaagtgaaagaaaaatactcatttgtatctgaagtggaaccaaatgatactgatccattagattcaaatgtagcacatcagaagccctttgagagtggaagtgacaaaatctccaaggaagttgtaccgtctttggcctgtgaatggtctcaactaaccctttcaggtctaaatggagcccagatggagaaaatacccctattgcatatttcttcatgtgaccaaaatatttcagaaaaagacctattagacacagagaacaaaagaaagaaagattttcttacttcagagaattctttgccacgtatttctagcctaccaaaatcagagaagccattaaatgaggaaacagtggtaaataagagagatgaagagcagcatcttgaatctcatacagactgcattcttgcagtaaagcaggcaatatctggaacttctccagtggcttcttcatttcagggtatcaaaaagtctatattcagaataagagaatcacctaaagagactttcaatgcaagtttttcaggtcatatgactgatccaaactttaaaaaagaaactgaagcctctgaaagtggactggaaatacatactgtttgctcacagaaggaggactccttatgtccaaatttaattgataatggaagctggccagccaccaccacacagaattctgtagctttgaagaatgcaggtttaatatccactttgaaaaagaaaacaaataagtttatttatgctatacatgatgaaacattttataaaggaaaaaaaataccgaaagaccaaaaatcagaactaattaactgttcagcccagtttgaagcaaatgcttttgaagcaccacttacatttgcaaatgctgattcaggtttattgcattcttctgtgaaaagaagctgttcacagaatgattctgaagaaccaactttgtccttaactagctcttttgggacaattctgaggaaatgttctagaaatgaaacatgttctaataatacagtaatctctcaggatcttgattataaagaagcaaaatgtaataaggaaaaactacagttatttattaccccagaagctgattctctgtcatgcctgcaggaaggacagtgtgaaaatgatccaaaaagcaaaaaagtttcagatataaaagaagaggtcttggctgcagcatgtcacccagtacaacattcaaaagtggaatacagtgatactgactttcaatcccagaaaagtcttttatatgatcatgaaaatgccagcactcttattttaactcctacttccaaggatgttctgtcaaacctagtcatgatttctagaggcaaagaatcatacaaaatgtcagacaagctcaaaggtaacaattatgaatctgatgttgaattaaccaaaaatattcccatggaaaagaatcaagatgtatgtgctttaaatgaaaattataaaaacgttgagctgttgccacctgaaaaatacatgagagtagcatcaccttcaagaaaggtacaattcaaccaaaacacaaatctaagagtaatccaaaaaaatcaagaagaaactacttcaatttcaaaaataactgtcaatccagactctgaagaacttttctcagacaatgagaataattttgtcttccaagtagctaatgaaaggaataatcttgctttaggaaatactaaggaacttcatgaaacagacttgacttgtgtaaacgaacccattttcaagaactctaccatggttttatatggagacacaggtgataaacaagcaacccaagtgtcaattaaaaaagatttggtttatgttcttgcagaggagaacaaaaatagtgtaaagcagcatataaaaatgactctaggtcaagatttaaaatcggacatctccttgaatatagataaaataccagaaaaaaataatgattacatgaacaaatgggcaggactcttaggtccaatttcaaatcacagttttggaggtagcttcagaacagcttcaaataaggaaatcaagctctctgaacataacattaagaagagcaaaatgttcttcaaagatattgaagaacaatatcctactagtttagcttgtgttgaaattgtaaataccttggcattagataatcaaaagaaactgagcaagcctcagtcaattaatactgtatctgcacatttacagagtagtgtagttgtttctgattgtaaaaatagtcatataacccctcagatgttattttccaagcaggattttaattcaaaccataatttaacacctagccaaaaggcagaaattacagaactttctactatattagaagaatcaggaagtcagtttgaatttactcagtttagaaaaccaagctacatattgcagaagagtacatttgaagtgcctgaaaaccagatgactatcttaaagaccacttctgaggaatgcagagatgctgatcttcatgtcataatgaatgccccatcgattggtcaggtagacagcagcaagcaatttgaaggtacagttgaaattaaacggaagtttgctggcctgttgaaaaatgactgtaacaaaagtgcttctggttatttaacagatgaaaatgaagtggggtttaggggcttttattctgctcatggcacaaaactgaatgtttctactgaagctctgcaaaaagctgtgaaactgtttagtgatattgagaatattagtgaggaaacttctgcagaggtacatccaataagtttatcttcaagtaaatgtcatgattctgttgtttcaatgtttaagatagaaaatcataatgataaaactgtaagtgaaaaaaataataaatgccaactgatattacaaaataatattgaaatgactactggcacttttgttgaagaaattactgaaaattacaagagaaatactgaaaatgaagataacaaatatactgctgccagtagaaattctcataacttagaatttgatggcagtgattcaagtaaaaatgatactgtttgtattcataaagatgaaacggacttgctatttactgatcagcacaacatatgtcttaaattatctggccagtttatgaaggagggaaacactcagattaaagaagatttgtcagatttaacttttttggaagttgcgaaagctcaagaagcatgtcatggtaatacttcaaataaagaacagttaactgctactaaaacggagcaaaatataaaagattttgagacttctgatacattttttcagactgcaagtgggaaaaatattagtgtcgccaaagagttatttaataaaattgtaaatttctttgatcagaaaccagaagaattgcataacttttccttaaattctgaattacattctgacataagaaagaacaaaatggacattctaagttatgaggaaacagacatagttaaacacaaaatactgaaagaaagtgtcccagttggtactggaaatcaactagtgaccttccagggacaacccgaacgtgatgaaaagatcaaagaacctactctgttgggttttcatacagctagcggaaaaaaagttaaaattgcaaaggaatctttggacaaagtgaaaaacctttttgatgaaaaagagcaaggtactagtgaaatcaccagttttagccatcaatgggcaaagaccctaaagtacagagaggcctgtaaagaccttgaattagcatgtgagaccattgagatcacagctgccccaaagtgtaaagaaatgcagaattctctcaataatgataaaaaccttgtttctattgagactgtggtgccacctaagctcttaagtgataatttatgtagacaaactgaaaatctcaaaacatcaaaaagtatctttttgaaagttaaagtacatgaaaatgtagaaaaagaaacagcaaaaagtcctgcaacttgttacacaaatcagtccccttattcagtcattgaaaattcagccttagctttttacacaagttgtagctgaaaatctcaaaacatcaaaaagtatctttttgaaagttaaagtacatgaaaatgtagaaaaagaaacagcaaaaagtcctgcaacttgttacacaaatcagtccccttattcagtcattgaaaattcagccttagctttttacacaagttgtagtagaaaaacttctgtgagtcagacttcattacttgaagcaaaaaaatggcttagagaaggaatatttgatggtcaaccagaaagaataaatactgcagattatgtaggaaattatttgtatgaaaataattcaaacagtactatagctgaaaatgacaaaaatcatctctccgaaaaacaagatacttatttaagtaacagtagcatgtctaacagctattcctaccattctgatgaggtatataatgattcaggatatctctcaaaaaataaacttgattctggtattgagccagtattgaagaatgttgaagatcaaaaaaacactagtttttccaaagtaatatccaatgtaaaagatgcaaatgcatacccacaaactgtaaatgaagatatttgcgttgaggaacttgtgactagctcttcaccctgcaaaaataaaaatgcagccattaaattgtccatatctaatagtaataattttgaggtagggccacctgcatttaggatagccagtggtaaaatcgtttgtgtttcacatgaaacaattaaaaaagtgaaagacatatttacagacagtttcagtaaagtaattaaggaaaacaacgagaataaatcaaaaatttgccaaacgaaaattatggcaggttgttacgaggcattggatgattcagaggatattcttcataactctctagataatgatgaatgtagcacgcattcacataaggtttttgctgacattcagagtgaagaaattttacaacataaccaaaatatgtctggattggagaaagtttctaaaatatcaccttgtgatgttagtttggaaacttcagatatatgtaaatgtagtatagggaagcttcataagtcagtctcatctgcaaatacttgtgggatttttagcacagcaagtggaaaatctgtccaggtatcagatgcttcattacaaaacgcaagacaagtgttttctgaaatagaagatagtaccaagcaagtcttttccaaagtattgtttaaaagtaacgaacattcagaccagctcacaagagaagaaaatactgctatacgtactccagaacatttaatatcccaaaaaggcttttcatataatgtggtaaattcatctgctttctctggatttagtacagcaagtggaaagcaagtttccattttagaaagttccttacacaaagttaagggagtgttagaggaatttgatttaatcagaactgagcatagtcttcactattcacctacgtctagacaaaatgtatcaaaaatacttcctcgtgttgataagagaaacccagagcactgtgtaaactcagaaatggaaaaaacctgcagtaaagaatttaaattatcaaataacttaaatgttgaaggtggttcttcagaaaataatcactctattaaagtttctccatatctctctcaatttcaacaagacaaacaacagttggtattaggaaccaaagtctcacttgttgagaacattcatgttttgggaaaagaacaggcttcacctaaaaacgtaaaaatggaaattggtaaaactgaaactttttctgatgttcctgtgaaaacaaatatagaagtttgttctacttactccaaagattcagaaaactactttgaaacagaagcagtagaaattgctaaagcttttatggaagatgatgaactgacagattctaaactgccaagtcatgccacacattctctttttacatgtcccgaaaatgaggaaatggttttgtcaaattcaagaattggaaaaagaagaggagagccccttatcttagtgggagaaccctcaatcaaaagaaacttattaaatgaatttgacaggataatagaaaatcaagaaaaatccttaaaggcttcaaaaagcactccagatggcacaataaaagatcgaagattgtttgtgcatcatgtttctttagagccgattacctgtgtaccctttcgcacaactaaggaacgtcaagagatacagaatccaaattttaccgcacctggtcaagaatttctgtctaaatctcatttgtatgaacatctgactttggaaaaatcttcaagcaatttagcagtttcaggacatccattttatcaagtttctggtaacaagaatggaaaaatgagaaaattgattactacaggcagaccaaccaaagtctttgttccaccttttaaaactaaatcacattttcacagagttgaacagtgtgttaggaatattaacttggagggaaacagacaaaagcaaaacattgatggacatggctctgatgatagtaaaaataagattaatgacaatgagattcatcagtttaacaaaaacaactccaatcaagcagcagctgtaactttcacaaagtgtgaagaagaacctttagatttaattacaagtcttcagaatgccagagatatacaggatatgcgaattaagaagaaacaaaggcaacgcgtctttccacagccaggcagtctgtatcttgcaaaaacatccactctgcctcgaatctctctgaaagcagcagtaggaggccaagttccctctgcgtgttctcataaacagctgtatacgtatggcgtttctaaacattgcataaaaattaacagcaaaaatgcagagtcttttcagtttcacactgaagattattttggtaaggaaagtttatggactggaaaaggaatacagttggctgatggtggatggctcataccctccaatgatggaaaggctggaaaagaagaattttatagggctctgtgtgacgtaaaggccacatag

SEQ ID NO: 147918 - DNA, 14306 bp, Homo sapiens
atgcctattggatccaaagagaggccaacattttttgaaatttttaagacacgctgcaacaaagcagatttaggaccaataagtcttaattggtttgaagaactttcttcagaagctccaccctataattctgaacctgcagaagaatctgaacataaaaacaacaattacgaaccaaacctatttaaaactccacaaaggaaaccatcttataatcagctggcttcaactccaataatattcaaagagcaagggctgactctgccgctgtaccaatctcctgtaaaagaattagataaattcaaattagacttaggaaggaatgttcccaatagtagacataaaagtcttcgcacagtgaaaactaaaatggatcaagcagatgatgtttcctgtccacttctaaattcttgtcttagtgaaagtcctgttgttctacaatgtacacatgtaacaccacaaagagataagtcagtggtatgtgggagtttgtttcatacaccaaagtttgtgaagggtcgtcagacaccaaaacatatttctgaaagtctaggagctgaggtggatcctgatatgtcttggtcaagttctttagctacaccacccacccttagttctactgtgctcatagtcagaaatgaagaagcatctgaaactgtatttcctcatgatactactgctaatgtgaaaagctatttttccaatcatgatgaaagtctgaagaaaaatgatagatttatcgcttctgtgacagacagtgaaaacacaaatcaaagagaagctgcaagtcatggatttggaaaaacatcagggaattcatttaaagtaaatagctgcaaagaccacattggaaagtcaatgccaaatgtcctagaagatgaagtatatgaaacagttgtagatacctctgaagaagatagtttttcattatgtttttctaaatgtagaacaaaaaatctacaaaaagtaagaactagcaagactaggaaaaaaattttccatgaagcaaacgctgatgaatgtgaaaaatctaaaaaccaagtgaaagaaaaatactcatttgtatctgaagtggaaccaaatgatactgatccattagattcaaatgtagcacatcagaagccctttgagagtggaagtgacaaaatctccaaggaagttgtaccgtctttggcctgtgaatggtctcaactaaccctttcaggtctaaatggagcccagatggagaaaatacccctattgcatatttcttcatgtgaccaaaatatttcagaaaaagacctattagacacagagaacaaaagaaagaaagattttcttacttcagagaattctttgccacgtatttctagcctaccaaaatcagagaagccattaaatgaggaaacagtggtaaataagagagatgaagagcagcatcttgaatctcatacagactgcattcttgcagtaaagcaggcaatatctggaacttctccagtggcttcttcatttcagggtatcaaaaagtctatattcagaataagagaatcacctaaagagactttcaatgcaagtttttcaggtcatatgactgatccaaactttaaaaaagaaactgaagcctctgaaagtggactggaaatacatactgtttgctcacagaaggaggactccttatgtccaaatttaattgataatggaagctggccagccaccaccacacagaattctgtagctttgaagaatgcaggtttaatatccactttgaaaaagaaaacaaataagtttatttatgctatacatgatgaaacattttataaaggaaaaaaaataccgaaagaccaaaaatcagaactaattaactgttcagcccagtttgaagcaaatgcttttgaagcaccacttacatttgcaaatgctgattcaggtttattgcattcttctgtgaaaagaagctgttcacagaatgattctgaagaaccaactttgtccttaactagctcttttgggacaattctgaggaaatgttctagaaatgaaacatgttctaataatacagtaatctctcaggatcttgattataaagaagcaaaatgtaataaggaaaaactacagttatttattaccccagaagctgattctctgtcatgcctgcaggaaggacagtgtgaaaatgatccaaaaagcaaaaaagtttcagatataaaagaagaggtcttggctgcagcatgtcacccagtacaacattcaaaagtggaatacagtgatactgactttcaatcccagaaaagtcttttatatgatcatgaaaatgccagcactcttattttaactcctacttccaaggatgttctgtcaaacctagtcatgatttctagaggcaaagaatcatacaaaatgtcagacaagctcaaaggtaacaattatgaatctgatgttgaattaaccaaaaatattcccatggaaaagaatcaagatgtatgtgctttaaatgaaaattataaaaacgttgagctgttgccacctgaaaaatacatgagagtagcatcaccttcaagaaaggtacaattcaaccaaaacacaaatctaagagtaatccaaaaaaatcaagaagaaactacttcaatttcaaaaataactgtcaatccagactctgaagaacttttctcagacaatgagaataattttgtcttccaagtagctaatgaaaggaataatcttgctttaggaaatactaaggaacttcatgaaacagacttgacttgtgtaaacgaacccattttcaagaactctaccatggttttatatggagacacaggtgataaacaagcaacccaagtgtcaattaaaaaagatttggtttatgttcttgcagaggagaacaaaaatagtgtaaagcagcatataaaaatgactctaggtcaagatttaaaatcggacatctccttgaatatagataaaataccagaaaaaaataatgattacatgaacaaatgggcaggactcttaggtccaatttcaaatcacagttttggaggtagcttcagaacagcttcaaataaggaaatcaagctctctgaacataacattaagaagagcaaaatgttcttcaaagatattgaagaacaatatcctactagtttagcttgtgttgaaattgtaaataccttggcattagataatcaaaagaaactgagcaagcctcagtcaattaatactgtatctgcacatttacagagtagtgtagttgtttctgattgtaaaaatagtcatataacccctcagatgttattttccaagcaggattttaattcaaaccataatttaacacctagccaaaaggcagaaattacagaactttctactatattagaagaatcaggaagtcagtttgaatttactcagtttagaaaaccaagctacatattgcagaagagtacatttgaagtgcctgaaaaccagatgactatcttaaagaccacttctgaggaatgcagagatgctgatcttcatgtcataatgaatgccccatcgattggtcaggtagacagcagcaagcaatttgaaggtacagttgaaattaaacggaagtttgctggcctgttgaaaaatgactgtaacaaaagtgcttctggttatttaacagatgaaaatgaagtggggtttaggggcttttattctgctcatggcacaaaactgaatgtttctactgaagctctgcaaaaagctgtgaaactgtttagtgatattgagaatattagtgaggaaacttctgcagaggtacatccaataagtttatcttcaagtaaatgtcatgattctgttgtttcaatgtttaagatagaaaatcataatgataaaactgtaagtgaaaaaaataataaatgccaactgatattacaaaataatattgaaatgactactggcacttttgttgaagaaattactgaaaattacaagagaaatactgaaaatgaagataacaaatatactgctgccagtagaaattctcataacttagaatttgatggcagtgattcaagtaaaaatgatactgtttgtattcataaagatgaaacggacttgctatttactgatcagcacaacatatgtcttaaattatctggccagtttatgaaggagggaaacactcagattaaagaagatttgtcagatttaacttttttggaagttgcgaaagctcaagaagcatgtcatggtaatacttcaaataaagaacagttaactgctactaaaacggagcaaaatataaaagattttgagacttctgatacattttttcagactgcaagtgggaaaaatattagtgtcgccaaagagtcatttaataaaattgtaaatttctttgatcagaaaccagaagaattgcataacttttccttaaattctgaattacattctgacataagaaagaacaaaatggacattctaagttatgaggaaacagacatagttaaacacaaaatactgaaagaaagtgtcccagttggtactggaaatcaactagtgaccttccagggacaacccgaacgtgatgaaaagatcaaagaacctactctgttgggttttcatacagctagcgggaaaaaagttaaaattgcaaaggaatctttggacaaagtgaaaaacctttttgatgaaaaagagcaaggtactagtgaaatcaccagttttagccatcaatgggcaaagaccctaaagtacagagaggcctgtaaagaccttgaattagcatgtgagaccattgagatcacagctgccccaaagtgtaaagaaatgcagaattctctcaataatgataaaaaccttgtttctattgagactgtggtgccacctaagctcttaagtgataatttatgtagacaaactgaaaatctcaaaacatcaaaaagtatctttttgaaagttaaagtacatgaaaatgtagaaaaagaaacagcaaaaagtcctgcaacttgttacacaaatcagtccccttattcagtcattgaaaattcagccttagctttttacacaagttgtagtagaaaaacttctgtgagtcagacttcattacttgaagcaaaaaaatggcttagagaaggaatatttgatggtcaaccagaaagaataaatactgcagattatgtaggaaattatttgtatgaaaataattcaaacagtactatagctgaaaatgacaaaaatcatctctccgaaaaacaagatacttatttaagtaacagtagcatgtctaacagctattcctaccattctgatgaggtatataatgattcaggatatctctcaaaaaataaacttgattctggtattgagccagtattgaagaatgttgaagatcaaaaaaacactagtttttccaaagtaatatccaatgtaaaagatgcaaatgcatacccacaaactgtaaatgaagatatttgcgttgaggaacttgtgactagctcttcaccctgcaaaaataaaaatgcagccattaaattgtccatatctaatagtaataattttgaggtagggccacctgcatttaggatagccagtggtaaaatcgtttgtgtttcacatgaaacaattaaaaaagtgaaagacatatttacagacagtttcagtaaagtaattaaggaaaacaacgagaataaatcaaaaatttgccaaacgaaaattatggcaggttgttacgaggcattggatgattcagaggatattcttcataactctctagataatgatgaatgtagcacgcattcacataaggtttttgctgacattcagagtgaagaaattttacaacataaccaaaatatgtctggattggagaaagtttctaaaatatcaccttgtgatgttagtttggaaacttcagatatatgtaaatgtagtatagggaagcttcataagtcagtctcatctgcaaatacttgtgggatttttagcacagcaagtggaaaatctgtccaggtatcagatgcttcattacaaaacgcaagacaagtgttttctgaaatagaagatagtaccaagcaagtcttttccaaagtattgtttaaaagtaacgaacattcagaccagctcacaagagaagaaaatactgctatacgtactccagaacatttaatatcccaaaaaggcttttcatataatgtggtaaattcatctgctttctctggatttagtacagcaagtggaaagcaagtttccattttagaaagttccttacacaaagttaagggagtgttagaggaatttgatttaatcagaactgagcatagtcttcactattcacctacgtctagacaaaatgtatcaaaaatacttcctcgtgttgataagagaaacccagagcactgtgtaaactcagaaatggaaaaaacctgcagtaaagaatttaaattatcaaataacttaaatgttgaaggtggttcttcagaaaataatcactctattaaagtttctccatatctctctcaatttcaacaagacaaacaacagttggtattaggaaccaaagtctcacttgttgagaacattcatgttttgggaaaagaacaggcttcacctaaaaacgtaaaaatggaaattggtaaaactgaaactttttctgatgttcctgtgaaaacaaatatagaagtttgttctacttactccaaagattcagaaaactactttgaaacagaagcagtagaaattgctaaagcttttatggaagatgatgaactgacagattctaaactgccaagtcatgccacacattctctttttacatgtcccgaaaatgaggaaatggttttgtcaaattcaagaattggaaaaagaagaggagagccccttatcttagtgggagaaccctcaatcaaaagaaacttattaaatgaatttgacaggataatagaaaatcaagaaaaatccttaaaggcttcaaaaagcactccagatggcacaataaaagatcgaagattgtttatgcatcatgtttctttagagccgattacctgtgtaccctttcgcacaactaaggaacgtcaagagatacagaatccaaattttaccgcacctggtcaagaatttctgtctaaatctcatttgtatgaacatctgactttggaaaaatcttcaagcaatttagcagtttcaggacatccattttatcaagtttctgctacaagaaatgaaaaaatgagacacttgattactacaggcagaccaaccaaagtctttgttccaccttttaaaactaaatcacattttcacagagttgaacagtgtgttaggaatattaacttggaggaaaacagacaaaagcaaaacattgatggacatggctctgatgatagtaaaaataagattaatgacaatgagattcatcagtttaacaaaaacaactccaatcaagcagcagctgtaactttcacaaagtgtgaagaagaacctttagatttaattacaagtcttcagaatgccagagatatacaggatatgcgaattaagaagaaacaaaggcaacgcgtctttccacagccaggcagtctgtatcttgcaaaaacatccactctgcctcgaatctctctgaaagcagcagtaggaggccaagttccctctgcgtgttctcataaacagctgtatacgtatggcgtttctaaacattgcataaaaattaacagcaaaaatgcagagtcttttcagtttcacactgaagattattttggtaaggaaagtttatggactggaaaaggaatacagttggctgatggtggatggctcataccctccaatgatggaaaggctggaaaagaagaattttatagggctctgtgtgacactccaggtgtggatccaaagcttatttctagaatttgggtttataatcactatagatggatcatatggaaactggcagctatggaatgtgcctttcctaaggaatttgctaatagatgcctaagcccagaaagggtgcttcttcaactaaaatacagatatgatacggaaattgatagaagcagaagataacaaatatactgctgccagtagaaattctcataacttagaatttgatggcagtgattcaagtaaaaatgatactgtttgtattcataaagatgaaacggacttgctatttactgatcagcacaacatatgtcttaaattatctggccagtttatgaaggagggaaacactcagattaaagaagatttgtcagatttaacttttttggaagttgcgaaagctcaagaagcatgtcatggtaatacttcaaataaagaacagttaactgctactaaaacggagcaaaatataaaagattttgagacttctgatacattttttcagactgcaagtgggaaaaatattagtgtcgccaaagagtcatttaataaaattgtaaatttctttgatcagaaaccagaagaattgcataacttttccttaaattctgaattacattctgacataagaaagaacaaaatggacattctaagttatgaggaaacagacatagttaaacacaaaatactgaaagaaagtgtcccagttggtactggaaatcaactagtgaccttccagggacaacccgaacgtgatgaaaagatcaaagaacctactctgttgggttttcatacagctagcgggaaaaaagttaaaattgcaaaggaatctttggacaaagtgaaaaacctttttgatgaaaaagagcaaggtactagtgaaatcaccagttttagccatcaatgggcaaagaccctaaagtacagagaggcctgtaaagaccttgaattagcatgtgagaccattgagatcacagctgccccaaagtgtaaagaaatgcagaattctctcaataatgataaaaaccttgtttctattgagactgtggtgccacctaagctcttaagtgataatttatgtagacaaactgaaaatctcaaaacatcaaaaagtatctttttgaaagttaaagtacatgaaaatgtagaaaaagaaacagcaaaaagtcctgcaacttgttacacaaatcagtccccttattcagtcattgaaaattcagccttagctttttacacaagttgtagtagaaaaacttctgtgagtcagacttcattacttgaagcaaaaaaatggcttagagaaggaatatttgatggtcaaccagaaagaataaatactgcagattatgtaggaaattatttgtatgaaaataattcaaacagtactatagctgaaaatgacaaaaatcatctctccgaaaaacaagatacttatttaagtaacagtagcatgtctaacagctattcctaccattctgatgaggtatataatgattcaggatatctctcaaaaaataaacttgattctggtattgagccagtattgaagaatgttgaagatcaaaaaaacactagtttttccaaagtaatatccaatgtaaaagatgcaaatgcatacccacaaactgtaaatgaagatatttgcgttgaggaacttgtgactagctcttcaccctgcaaaaataaaaatgcagccattaaattgtccatatctaatagtaataattttgaggtagggccacctgcatttaggatagccagtggtaaaatcgtttgtgtttcacatgaaacaattaaaaaagtgaaagacatatttacagacagtttcagtaaagtaattaaggaaaacaacgagaataaatcaaaaatttgccaaacgaaaattatggcaggttgttacgaggcattggatgattcagaggatattcttcataactctctagataatgatgaatgtagcacgcattcacataaggtttttgctgacattcagagtgaagaaattttacaacataaccaaaatatgtctggattggagaaagtttctaaaatatcaccttgtgatgttagtttggaaacttcagatatatgtaaatgtagtatagggaagcttcataagtcagtctcatctgcaaatacttgtgggatttttagcacagcaagtggaaaatctgtccaggtatcagatgcttcattacaaaacgcaagacaagtgttttctgaaatagaagatagtaccaagcaagtcttttccaaagtattgtttaaaagtaacgaacattcagaccagctcacaagagaagaaaatactgctatacgtactccagaacatttaatatcccaaaaaggcttttcatataatgtggtaaattcatctgctttctctggatttagtacagcaagtggaaagcaagtttccattttagaaagttccttacacaaagttaagggagtgttagaggaatttgatttaattcagaactgagcatagtcttcactattcacctacgttttagaccaaaatgtatcaaaaatacttcctcgtgttgataagagaaacccagagcactgtgtaaactccagaaatggaaaaaacctgcagtaaagaatttaaattatcaaataacttaaatgttgaaggtggttcttcagaaaataatcactctattaaagtttctccatatctctctcaatttcaacaagacaaacaacagttggtattaggaaccaaagtctcacttgttgagaacattcatgttttgggaaaagaacaggcttcacctaaaaacgtaaaaatggaaattggtaaaactgaaactttttctgatgttcctgtgaaaacaaatatagaagtttgttctacttactccaaagattcagaaaactactttgaaacagaagcagtagaaattgctaaagcttttatggaagatgatgaactgacagattctaaactgccaagtcatgccacacattctctttttacatgtcccgaaaatgaggaaatggttttgtcaaattcaagaattggaaaaagaagaggagagccccttatcttagtgggagaaccctcaatcaaaagaaacttattaaatgaatttgacaggataatagaaaatcaagaaaaatccttaaaggcttcaaaaagcactccagatggcacaataaaagatcgaagattgtttatgcatcatgtttctttagagccgattacctgtgtaccctttcgcacaactaaggaacgtcaagagatacagaatccaaattttaccgcacctggtcaagaatttctgtctaaatctcatttgtatgaacatctgactttggaaaaatcttcaagcaatttagcagtttcaggacatccattttatcaagtttctgctacaagaaatgaaaaaatgagacacttgattactacaggcagaccaaccaaagtctttgttccaccttttaaaactaaatcacattttcacagagttgaacagtgtgttaggaatattaacttggaggaaaacagacaaaagcaaaacattgatggacatggctctgatgatagtaaaaataagattaatgacaatgagattcatcagtttaacaaaaacaactccaatcaagcagcagctgtaactttcacaaagtgtgaagaagaacctttagatttaattacaagtcttcagaatgccagagatatacaggatatgcgaattaagaagaaacaaaggcaacgcgtctttccacagccaggcagtctgtatcttgcaaaaacatccactctgcctcgaatctctctgaaagcagcagtaggaggccaagttccctctgcgtgttctcataaacagctgtatacgtatggcgtttctaaacattgcataaaaattaacagcaaaaatgcagagtcttttcagtttcacactgaagattattttggtaaggaaagtttatggactggaaaaggaatacagttggctgatggtggatggctcataccctccaatgatggaaaggctggaaaagaagaattttatagggctctgtgtgacactccaggtgtggatccaaagcttatttctagaatttgggtttataatcactatagatggatcatatggaaactggcagctatggaatgtgcctttcctaaggaatttgctaatagatgcctaagcccagaaagggtgcttcttcaactaaaatacagatatgatacggaaattgatagaagcagaagatcggctataaaaaagataatggaaagggatgacacagctgcaaaaacacttgttctctgtgtttctgacataatttcattgagcgcaaatatatctgaaacttctagcaataaaactagtagtgcagatacccaaaaagtggccattattgaacttacagatgggtggtatgctgttaaggcccagttagatcctcccctcttagctgtcttaaagaatggcagactgacagttggtcagaagattattcttcatggagcagaactggtgggctctcctgatgcctgtacacctcttgaagccccagaatctcttatgttaaagatttctgctaacagtactcggcctgctcgctggtataccaaacttggattctttcctgaccctagaccttttcctctgcccttatcatcgcttttcagtgatggaggaaatgttggttgtgttgatgtaattattcaaagagcataccctatacagtggatggagaagacatcatctggattatacatatttcgcaatgaaagagaggaagaaaaggaagcagcaaaatatgtggaggcccaacaaaagagactagaagccttattcactaaaattcaggaggaatttgaagaacatgaagaaaacacaacaaaaccatatttaccatcacgtgcactaacaagacagcaagttcgtgctttgcaagatggtgcagagctttatgaagcagtgaagaatgcagcagacccagcttaccttgagggttatttcagtgaagagcagttaagagccttgaataatcacaggcaaatgttgaatgataagaaacaagctcagatccagttggaaattaggaaggccatggaatctgctgaacaaaaggaacaaggtttatcaagggatgtcacaaccgtgtggaagttgcgtattgtaagctattcaaaaaaagaaaaagattcagttatactgagtatttggcgtccatcatcagatttatattctctgttaacagaaggaaagagatacagaatttatcatcttgcaacttcaaaatctaaaagtaaatctgaaagagctaacatacagttagcagcgacaaaaaaaactcagtatcaacaactaccggtttcagatgaaattttatttcagatttaccagccacgggagccccttcacttcagcaaatttttagatccagactttcagccatcttgttctgaggtggacctaataggatttgtcgtttctgttgtgaaaaaaacaggacttgcccctttcgtctatttgtcagacgaatgttacaatttactggcaataaagttttggatagaccttaatgaggacattattaagcctcatatgttaattgctgcaagcaacctccagtggcgaccagaatccaaatcaggccttcttactttatttgctggagatttttctgtgttttctgctagtccaaaagagggccactttcaagagacattcaacaaaatgaaaaatactgttgagaatattgacatactttgcaatgaagcagaaaacaagcttatgcatatactgcatgcaaatgatcccaagtggtccaccccaactaaagactgtacttcagggccgtacactgctcaaatcattcctggtacaggaaacaagcttctgatgtcttctcctaattgtgagatatattatcaaagtcctttatcactttgtatggccaaaaggaagtctgtttccacacctgtctcagcccagatgacttcaaagtcttgtaaaggggagaaagagattgatgaccaaaagaactgcaaaaagagaagagccttggatttcttgagtagactgcctttacctccacctgttagtcccatttgtacatttgtttctccggctgcacagaaggcatttcagccaccaaggagttgtggcaccaaatacgaaacacccataaagaaaaaagaactgaattctcctcagatgactccatttaaaaaattcaatgaaatttctcttttggaaagtaattcaatagctgacgaagaacttgcattgataaatacccaagctcttttgtctggttcaacaggagaaaaacaatttatatctgtcagtgaatccactaggactgctcccaccagttcagaagattatctcagactgaaacgacgttgtactacatctctgatcaaagaacaggagagttcccaggccagtacggaagaatgtgagaaaaataagcaggacacaattacaactaaaaaatatatctaa

SEQ ID NO: 147919 - DNA, 22413 bp, Homo sapiens
atggaggaaaactcattagaattcttaagtgatcttacaccgggagatcaggacccatctcagagtgaagaggaagacattgaaaagaccagaagagaatcagaatatcccttcattgatggtctacaaaatgaagtcggagattttgtgactggatataaagaaaaaagatggaaaaataaagatcctaaagacagtttccaaaacgttatgtctatagttgaattagacaacacaccaaagaattacctctctaaggaaggtgataacttgtttgtaagtttgttactgaggccaaatgaaatctccgttacttgtccaatactgactcaaaacctttcctgtgtaacaactgatgactgctctggcatgaaggtagaaaagcatattagaaataggcataccatagcattagacacccaggacctttctgcggaaacttcatgcttatttatgaagaagagagaaatagtagataaaaatctctcacatgaacccattctgtgccatcaacatggaatcagaatgtcagataaagttttaagagaggaacaagtgtatacaactaaaatcaatcactgggcttttttcacaaccaatttatctgatgaagatttacagctgggctctgacagacagccctattttggtagctggcctgcaggacctcataagtttatatgtgaacagagaccaaagaaagatagagcatgtaagttggctggtcctgacagcagggggcaatggattcaaatgatcttcacttcggtggcagcatcagaaccaggaaacaatccagaaatattgacagacaaactactgataggaaatgaagatttttcacctccacctgaaactatggattcattcatagaaacaaacctcttcagaagctgcttacctcaaccggatataccaaagaatgccttagaatcaacaaaaaataagaaaaggaggaagaaaaggattttcaatttggtaccaaattttgacttattaggacagagtcgtatcggtgtaaaagaaagggagaaatgtgacctgttaacaaaaaaccatggactaaaaattactttgggagaagaaaaagatagaatttcagaaaggaacagtgaagaggagaataaacaaaaacttatgacctttgatcatcatccattgtggttttaccttgatattatcaaagctacccctttaaatattgatggacagcgttattctcattgcctgtcatttaacagactaaggtgctctgcatctttatacaaaaattatattccttcttttgtgctacataatttatctagtatttggaagccatcttttacaaacaagaaactgtttttgactttcgaatctcagacaagagtaggtaataaactaaatgatgcagggtttatttctccagaaattttacatagtcatcctgatacttcgtgctctttgggagtcacttctgattttcactttttaaatgaaaggtttgatagaaagctgaaaagatgggaagaacctaaggaattaccagctgaggacagccaagacttaacaagcactgactaccgttcccttgagctaccattatcacaagggtttgcctttcaattagtaaagctttttggatctccaggcgttccaatggatttaggaccaataagtcttaattggtttgaagaactttcttcagaagctccaccctataattctgaacctgcagaagaatctgaacataaaaacaacaattacgaaccaaacctatttaaaactccacaaaggaaaccatcttataatcagctggcttcaactccaataatattcaaagagcaagggctgactctgccgctgtaccaatctcctgtaaaagaattagataaattcaaattagacttaggtttattgcattcttctgtgaaaagaagctgttcacagaatgattctgaagaaccaactttgtccttaactagctcttttgggacaattctgaggaaatgttctagaaatgaaacatgttctaataatacagtaatctctcaggatcttgattataaagaagcaaaatgtaataaggaaaaactacagttatttattaccccagaagctgattctctgtcatgcctgcaggaaggacagtgtgaaaatgatccaaaaagcaaaaaagtttcagatataaaagaagaggtcttggctgcagcatgtcacccagtacaacattcaaaagtggaatacagtgatactgactttcaatcccagaaaagtcttttatatgatcatgaaaatgccagcactcttattttaactcctacttccaaggatgttctgtcaaacctagtcatgatttctagaggcaaagaatcatacaaaatgtcagacaagctcaaaggtaacaattatgaatctgatgttgaattaaccaaaaatattcccatggaaaagaatcaagatgtatgtgctttaaatgaaaattataaaaacgttgagctgttgccacctgaaaaatacatgagagtagcatcaccttcaagaaaggtacaattcaaccaaaacacaaatctaagagtaatccaaaaaaatcaagaagaaactacttcaatttcaaaaataactgtcaatccagactctgaagaacttttctcagacaatgagaataattttgtcttccaagtagctaatgaaaggaataatcttgctttaggaaatactaaggaacttcatgaaacagacttgacttgtgtaaacgaacccattttcaagaactctaccatggttttatatggagacacaggtgataaacaagcaacccaagtgtcaattaaaaaagatttggtttatgttcttgcagaggagaacaaaaatagtgtaaagcagcatataaaaatgactctaggtcaagatttaaaatcggacatctccttgaatatagataaaataccagaaaaaaataatgattacatgaacaaatgggcaggactcttaggtccaatttcaaatcacagttttggaggtagcttcagaacagcttcaaataaggaaatcaagctctctgaacataacattaagaagagcaaaatgttcttcaaagatattgaagaacaatatcctactagtttagcttgtgttgaaattgtaaataccttggcattagataatcaaaagaaactgagcaagcctcagtcaattaatactgtatctgcacatttacagagtagtgtagttgtttctgattgtaaaaatagtcatataacccctcagatgttattttccaagcaggattttaattcaaaccataatttaacacctagccaaaaggcagaaattacagaactttctactatattagaagaatcaggaagtcagtttgaatttactcagtttagaaaaccaagctacatattgcagaagagtacatttgaagtgcctgaaaaccagatgactatcttaaagaccacttctgaggaatgcagagatgctgatcttcatgtcataatgaatgccccatcgattggtcaggtagacagcagcaagcaatttgaaggtacagttgaaattaaacggaagtttgctggcctgttgaaaaatgactgtaacaaaagtgcttctggttatttaacagatgaaaatgaagtggggtttaggggcttttattctgctcatggcacaaaactgaatgtttctactgaagctctgcaaaaagctgtgaaactgtttagtgatattgagaatattagtgaggaaacttctgcagaggtacatccaataagtttatcttcaagtaaatgtcatgattctgttgtttcaatgtttaagatagaaaatcataatgataaaactgtaagtgaaaaaaataataaatgccaactgatattacaaaataatattgaaatgactactggcacttttgttgaagaaattactgaaaattacaagagaaatactgaaaatgaagataacaaatatactgctgccagtagaaattctcataacttagaatttgatggcagtgattcaagtaaaaatgatactgtttgtattcataaagatgaaacggacttgctatttactgatcagcacaacatatgtcttaaattatctggccagtttatgaaggagggaaacactcagattaaagaagatttgtcagatttaacttttttggaagttgcgaaagctcaagaagcatgtcatggtaatacttcaaataaagaacagttaactgctactaaaacggagcaaaatataaaagattttgagacttctgatacattttttcagactgcaagtgggaaaaatattagtgtcgccaaagagtcatttaataaaattgtaaatttctttgctgaggccaaatgaaatctccgttacttgtccaatactgactcaaaacctttcctgtgtaacaactgatgactgctctggcatgaaggtagaaaagcatattagaaataggcataccatagcattagacacccaggacctttctgcggaaacttcatgcttatttatgaagaagagagaaatagtagataaaaatctctcacatgaacccattctgtgccatcaacatggaatcagaatgtcagataaagttttaagagaggaacaagtgtatacaactaaaatcaatcactgggcttttttcacaaccaatttatctgatgaagatttacagctgggctctgacagacagccctattttggtagctggcctgcaggacctcataagtttatatgtgaacagagaccaaagaaagatagagcatgtaagttggctggtcctgacagcagggggcaatggattcaaatgatcttcacttcggtggcagcatcagaaccaggaaacaatccagaaatattgacagacaaactactgataggaaatgaagatttttcacctccacctgaaactatggattcattcatagaaacaaacctcttcagaagctgcttacctcaaccggatataccaaagaatgccttagaatcaacaaaaaataagaaaaggaggaagaaaaggattttcaatttggtaccaaattttgacttattaggacagagtcgtatcggtgtaaaagaaagggagaaatgtgacctgttaacaaaaaaccatggactaaaaattactttgggagaagaaaaagatagaatttcagaaaggaacagtgaagaggagaataaacaaaaacttatgacctttgatcatcatccattgtggttttaccttgatattatcaaagctacccctttaaatattgatggacagcgttattctcattgcctgtcatttaacagactaaggtgctctgcatctttatacaaaaattatattccttcttttgtgctacataatttatctagtatttggaagccatcttttacaaacaagaaactgtttttgactttcgaatctcagacaagagtaggtaataaactaaatgatgcagggtttatttctccagaaattttacatagtcatcctgatacttcgtgctctttgggagtcacttctgattttcactttttaaatgaaaggtttgatagaaagctgaaaagatgggaagaacctaaggaattaccagctgaggacagccaagacttaacaagcactgactaccgttcccttgagctaccattatcacaagggtttgcctttcaattagtaaagctttttggatctccaggcgttccaatggatttaggaccaataagtcttaattggtttgaagaactttcttcagaagctccaccctataattctgaacctgcagaagaatctgaacataaaaacaacaattacgaaccaaacctatttaaaactccacaaaggaaaccatcttataatcagctggcttcaactccaataatattcaaagagcaagggctgactctgccgctgtaccaatctcctgtaaaagaattagataaattcaaattagacttaggtttattgcattcttctgtgaaaagaagctgttcacagaatgattctgaagaaccaactttgtccttaactagctcttttgggacaattctgaggaaatgttctagaaatgaaacatgttctaataatacagtaatctctcaggatcttgattataaagaagcaaaatgtaataaggaaaaactacagttatttattaccccagaagctgattctctgtcatgcctgcaggaaggacagtgtgaaaatgatccaaaaagcaaaaaagtttcagatataaaagaagaggtcttggctgcagcatgtcacccagtacaacattcaaaagtggaatacagtgatactgactttcaatcccagaaaagtcttttatatgatcatgaaaatgccagcactcttattttaactcctacttccaaggatgttctgtcaaacctagtcatgatttctagaggcaaagaatcatacaaaatgtcagacaagctcaaaggtaacaattatgaatctgatgttgaattaaccaaaaatattcccatggaaaagaatcaagatgtatgtgctttaaatgaaaattataaaaacgttgagctgttgccacctgaaaaatacatgagagtagcatcaccttcaagaaaggtacaattcaaccaaaacacaaatctaagagtaatccaaaaaaatcaagaagaaactacttcaatttcaaaaataactgtcaatccagactctgaagaacttttctcagacaatgagaataattttgtcttccaagtagctaatgaaaggaataatcttgctttaggaaatactaaggaacttcatgaaacagacttgacttgtgtaaacgaacccattttcaagaactctaccatggttttatatggagacacaggtgataaacaagcaacccaagtgtcaattaaaaaagatttggtttatgttcttgcagaggagaacaaaaatagtgtaaagcagcatataaaaatgactctaggtcaagatttaaaatcggacatctccttgaatatagataaaataccagaaaaaaataatgattacatgaacaaatgggcaggactcttaggtccaatttcaaatcacagttttggaggtagcttcagaacagcttcaaataaggaaatcaagctctctgaacataacattaagaagagcaaaatgttcttcaaagatattgaagaacaatatcctactagtttagcttgtgttgaaattgtaaataccttggcattagataatcaaaagaaactgagcaagcctcagtcaattaatactgtatctgcacatttacagagtagtgtagttgtttctgattgtaaaaatagtcatataacccctcagatgttattttccaagcaggattttaattcaaaccataatttaacacctagccaaaaggcagaaattacagaactttctactatattagaagaatcaggaagtcagtttgaatttactcagtttagaaaaccaagctacatattgcagaagagtacatttgaagtgcctgaaaaccagatgactatcttaaagaccacttctgaggaatgcagagatgctgatcttcatgtcataatgaatgccccatcgattggtcaggtagacagcagcaagcaatttgaaggtacagttgaaattaaacggaagtttgctggcctgttgaaaaatgactgtaacaaaagtgcttctggttatttaacagatgaaaatgaagtggggtttaggggcttttattctgctcatggcacaaaactgaatgtttctactgaagctctgcaaaaagctgtgaaactgtttagtgatattgagaatattagtgaggaaacttctgcagaggtacatccaataagtttatcttcaagtaaatgtcatgattctgttgtttcaatgtttaagatagaaaatcataatgataaaactgtaagtgaaaaaaataataaatgccaactgatattacaaaataatattgaaatgactactggcacttttgttgaagaaattactgaaaattacaagagaaatactgaaaatgaagataacaaatatactgctgccagtagaaattctcataacttagaatttgatggcagtgattcaagtaaaaatgatactgtttgtattcataaagatgaaacggacttgctatttactgatcagcacaacatatgtcttaaattatctggccagtttatgaaggagggaaacactcagattaaagaagatttgtcagatttaacttttttggaagttgcgaaagctcaagaagcatgtcatggtaatacttcaaataaagaacagttaactgctactaaaacggagcaaaatataaaagattttgagacttctgatacattttttcagactgcaagtgggaaaaatattagtgtcgccaaagagtcatttaataaaattgtaaatttctttgatcagaaaccagaagaattgcataacttttccttaaattctgaattacattctgacataagaaagaacaaaatggacattctaagttatgaggaaacagacatagttaaacacaaaatactgaaagaaagtgtcccagttggtactggaaatcaactagtgaccttccagggacaacccgaacgtgatgaaaagatcaaagaacctactctgttgggttttcatacagctagcgggaaaaaagttaaaattgcaaaggaatctttggacaaagtgaaaaacctttttgatgaaaaagagcaaggtactagtgaaatcaccagttttagccatcaatgggcaaagaccctaaagtacagagaggcctgtaaagaccttgaattagcatgtgagaccattgagatcacagctgccccaaagtgtaaagaaatgcagaattctctcaataatgataaaaaccttgtttctattgagactgtggtgccacctaagctcttaagtgataatttatgtagacaaactgaaaatctcaaaacatcaaaaagtatctttttgaaagttaaagtacatgaaaatgtagaaaaagaaacagcaaaaagtcctgcaacttgttacacaaatcagtccccttattcagtcattgaaaattcagccttagctttttacacaagttgtagtagaaaaacttctgtgagtcagacttcattacttgaagcaaaaaaatggcttagagaaggaatatttgatggtcaaccagaaagaataaatactgcagattatgtaggaaattatttgtatgaaaataattcaaacagtactatagctgaaaatgacaaaaatcatctctccgaaaaacaagatacttatttaagtaacagtagcatgtctaacagctattcctaccattctgatgaggtatataatgattcaggatatctctcaaaaaataaacttgattctggtattgagccagtattgaagaatgttgaagatcaaaaaaacactagtttttccaaagtaatatccaatgtaaaagatgcaaatgcatacccacaaactgtaaatgaagatatttgcgttgaggaacttgtgactagctcttcaccctgcaaaaataaaaatgcagccattaaattgtccatatctaatagtaataattttgaggtttcagatgaaattttatttcagatttaccagccacgggagccccttcacttcagcaaatttttagatccagactttcagccatcttgttctgaggtggacctaataggatttgtcgtttctgttgtgaaaaaaacagtcagaaatgaagaagcatctgaaactgtatttcctcatgatactactgctaatgtgaaaagctatttttccaatcatgatgaaagtctgaagaaaaatgatagatttatcgcttctgtgacagacagtgaaaacacaaatcaaagagaagctgcaagtcatggatttggaaaaacatcagggaattcatttaaagtaaatagctgcaaagaccacattggaaagtcaatgccaaatgtcctagaagatgaagtatatgaaacagttgtagatacctctgaagaagatagtttttcattatgtttttctaaatgtagaacaaaaaatctacaaaaagtaagaactagcaagactaggaaaaaaattttccatgaagcaaacgctgatgaatgtgaaaaatctaaaaaccaagtgaaagaaaaatactcatttgtatctgaagtggaaccaaatgatactgatccattagattcaaatgtagcacatcagaagccctttgagagtggaagtgacaaaatctccaaggaagttgtaccgtctttggcctgtgaatggtctcaactaaccctttcaggtctaaatggagcccagatggagaaaatacccctattgcatatttcttcatgtgaccaaaatatttcagaaaaagacctattagacacagagaacaaaagaaagaaagattttcttacttcagagaattctttgccacgtatttctagcctaccaaaatcagagaagccattaaatgaggaaacagtggtaaataagagagatgaagagcagcatcttgaatctcatacagactgcattcttgcagtaaagcaggcaatatctggaacttctccagtggcttcttcatttcagggtatcaaaaagtctatattcagaataagagaatcacctaaagagactttcaatgcaagtttttcaggtcatatgactgatccaaactttaaaaaagaaactgaagcctctgaaagtggactggaaatacatactgtttgctcacagaaggaggactccttatgtccaaatttaattgataatggaagctggccagccaccaccacacagaattctgtagctttgaagaatgcaggtttaatatccactttgaaaaagaaaacaaataagtttatttatgctatacatgatgaaacatcttataaaggaaaaaaaataccgaaagaccaaaaatcagaactaattaactgttcagcccagtttgaagcaaatgcttttgaagcaccacttacatttgcaaatgctgattcagttcacttagcaactaaactgtatgtttacaaagtgattttatctccctatgagaagactttagtgaatagctcagtgaatagtagagttgaaaatgtcactgaaacaataaaggacttagcaatttataaaaccactgtcaccgattccacctggagtggatgccatggtgcgggtgcagatccccttcaggaccaaggcatgtgaatcagaaaccagaagaattgcataacttttccttaaattctgaattacattctgacataagaaagaacaaaatggacattctaagttatgaggaaacagacatagttaaacacaaaatactgaaagaaagtgtcccagttggtactggaaatcaactagtgaccttccagggacaacccgaacgtgatgaaaagatcaaagaacctactctgttgggttttcatacagctagcgggaaaaaagttaaaattgcaaaggaatctttggacaaagtgaaaaacctttttgatgaaaaagagcaaggtactagtgaaatcaccagttttagccatcaatgggcaaagaccctaaagtacagagaggcctgtaaagaccttgaattagcatgtgagaccattgagatcacagctgccccaaagtgtaaagaaatgcagaattctctcaataatgataaaaaccttgtttctattgagactgtggtgccacctaagctcttaagtgataatttatgtagacaaactgaaaatctcaaaacatcaaaaagtatctttttgaaagttaaagtacatgaaaatgtagaaaaagaaacagcaaaaagtcctgcaacttgttacacaaatcagtccccttattcagtcattgaaaattcagccttagctttttacacaagttgtagtagaaaaacttctgtgagtcagacttcattacttgaagcaaaaaaatggcttagagaaggaatatttgatggtcaaccagaaagaataaatactgcagattatgtaggaaattatttgtatgaaaataattcaaacagtactatagctgaaaatgacaaaaatcatctctccgaaaaacaagatacttatttaagtaacagtagcatgtctaacagctattcctaccattctgatgaggtatataatgattcaggatatctctcaaaaaataaacttgattctggtattgagccagtattgaagaatgttgaagatcaaaaaaacactagtttttccaaagtaatatccaatgtaaaagatgcaaatgcatacccacaaactgtaaatgaagatatttgcgttgaggaacttgtgactagctcttcaccctgcaaaaataaaaatgcagccattaaattgtccatatctaatagtaataattttgaggtttcagatgaaattttatttcagatttaccagccacgggagccccttcacttcagcaaatttttagatccagactttcagccatcttgttctgaggtggacctaataggatttgtcgtttctgttgtgaaaaaaacagtcagaaatgaagaagcatctgaaactgtatttcctcatgatactactgctaatgtgaaaagctatttttccaatcatgatgaaagtctgaagaaaaatgatagatttatcgcttctgtgacagacagtgaaaacacaaatcaaagagaagctgcaagtcatggatttggaaaaacatcagggaattcatttaaagtaaatagctgcaaagaccacattggaaagtcaatgccaaatgtcctagaagatgaagtatatgaaacagttgtagatacctctgaagaagatagtttttcattatgtttttctaaatgtagaacaaaaaatctacaaaaagtaagaactagcaagactaggaaaaaaattttccatgaagcaaacgctgatgaatgtgaaaaatctaaaaaccaagtgaaagaaaaatactcatttgtatctgaagtggaaccaaatgatactgatccattagattcaaatgtagcacatcagaagccctttgagagtggaagtgacaaaatctccaaggaagttgtaccgtctttggcctgtgaatggtctcaactaaccctttcaggtctaaatggagcccagatggagaaaatacccctattgcatatttcttcatgtgaccaaaatatttcagaaaaagacctattagacacagagaacaaaagaaagaaagattttcttacttcagagaattctttgccacgtattttctagcctaccaaatccagaggagccattaaatgaggaaacagtggtaaataagagagatgaagagcagcatcttgattctcatacagactgcattctgcagtaaaagcaggcaatatctggaactttcccagtggcttcttcatttcagggtatcaaaaagtctatattcagaataagagaatcacctaaagagactttcaatgcaagtttttcaggtcatatgactgatccaaactttaaaaaagaaactgaagcctctgaaagtggactggaaatacatactgtttgctcacagaaggaggactccttatgtccaaatttaattgataatggaagctggccagccaccaccacacagaattctgtagctttgaagaatgcaggtttaatatccactttgaaaaagaaaacaaataagtttatttatgctatacatgatgaaacatcttataaaggaaaaaaaataccgaaagaccaaaaatcagaactaattaactgttcagcccagtttgaagcaaatgcttttgaagcaccacttacatttgcaaatgctgattcaggtttattgcattcttctgtgaaaagaagctgttcacagaatgattctgaagaaccaactttgtccttaactagctcttttgggacaattctgaggaaatgttctagaaatgaaacatgttctaataatacagtaatctctcaggatcttgattataaagaagcaaaatgtaataaggaaaaactacagttatttattaccccagaagctgattctctgtcatgcctgcaggaaggacagtgtgaaaatgatccaaaaagcaaaaaagtttcagatataaaagaagaggtcttggctgcagcatgtcacccagtacaacattcaaaagtggaatacagtgatactgactttcaatcccagaaaagtcttttatatgatcatgaaaatgccagcactcttattttaactcctacttccaaggatgttctgtcaaacctagtcatgatttctagaggcaaagaatcatacaaaatgtcagacaagctcaaaggtaacaattatgaatctgatgttgaattaaccaaaaatattcccatggaaaagaatcaagatgtatgtgctttaaatgaaaattataaaaacgttgagctgttgccacctgaaaaatacatgagagtagcatcaccttcaagaaaggtacaattcaaccaaaacacaaatctaagagtaatccaaaaaaatcaagaagaaactacttcaatttcaaaaataactgtcaatccagactctgaagaacttttctcagacaatgagaataattttgtcttccaagtagctaatgaaaggaataatcttgctttaggaaatactaaggaacttcatgaaacagacttgacttgtgtaaacgaacccattttcaagaactctaccatggttttatatggagacacaggtgataaacaagcaacccaagtgtcaattaaaaaagatttggtttatgttcttgcagaggagaacaaaaatagtgtaaagcagcatataaaaatgactctaggtcaagatttaaaatcggacatctccttgaatatagataaaataccagaaaaaaataatgattacatgaacaaatgggcaggactcttaggtccaatttcaaatcacagttttggaggtagcttcagaacagcttcaaataaggaaatcaagctctctgaacataacattaagaagagcaaaatgttcttcaaagatattgaagaacaatatcctactagtttagcttgtgttgaaattgtaaataccttggcattagataatcaaaagaaactgagcaagcctcagtcaattaatactgtatctgcacatttacagagtagtgtagttgtttctgattgtaaaaatagtcatataacccctcagatgttattttccaagcaggattttaattcaaaccataatttaacacctagccaaaaggcagaaattacagaactttctactatattagaagaatcaggaagtcagtttgaatttactcagtttagaaagccaagctacatattgcagaagagtacatttgaagtgcctgaaaaccagatgactatcttaaagaccacttctgaggaatgcagagatgctgatcttcatgtcataatgaatgccccatcgattggtcaggtagacagcagcaagcaatttgaaggtacagttgaaattaaacggaagtttgctggcctgttgaaaaatgactgtaacaaaagtgcttctggttatttaacagatgaaaatgaagtggggtttaggggcttttattctgctcatggcacaaaactgaatgtttctactgaagctctgcaaaaagctgtgaaactgtttagtgatattgagaatattagtgaggaaacttctgcagaggtacatccaataagtttatcttcaagtaaatgtcatgattctgttgtttcaatgtttaagatagaaaatcataatgataaaactgtaagtgaaaaaaataataaatgccaactgatattacaaaataatattgaaatgactactggcacttttgttgaagaaattactgaaaattacaagagaaatactgaaaatgaagataacaaatatactgctgccagtagaaattctcataacttagaatttgatggcagtgattcaagtaaaaatgatactgtttgtattcataaagatgaaacggacttgctatttactgatcagcacaacatatgtcttaaattatctggccagtttatgaaggagggaaacactcagattaaagaagatttgtcagatttaacttttttggaagttgcgaaagctcaagaagcatgtcatggtaatacttcaaataaagaacagttaactgctactaaaacggagcaaaatataaaagattttgagacttctgatacattttttcagactgcaagtgggaaaaatattagtgtcgccaaagagtcatttaataaaattgtaaatttctttgatcagaaaccagaagaattgcataacttttccttaaattctgaattacattctgacataagaaagaacaaaatggacattctaagttatgaggaaacagacatagttaaacacaaaatactgaaagaaagtgtcccagttggtactggaaatcaactagtgaccttccagggacaacccgaacgtgatgaaaagatcaaagaacctactctgttgggttttcatacagctagcgggaaaaaagttaaaattgcaaaggaatctttggacaaagtgaaaaacctttttgatgaaaaagagcaaggtactagtgaaatcaccagttttagccatcaatgggcaaagaccctaaagtacagagaggcctgtaaagaccttgaattagcatgtgagaccattgagatcacagctgccccaaagtgtaaagaaatgcagaattctctcaataatgataaaaaccttgtttctattgagactgtggtgccacctaagctcttaagtgataatttatgtagacaaactgaaaatctcaaaacatcaaaaagtatctttttgaaagttaaagtacatgaaaatgtagaaaaagaaacagcaaaaagtcctgcaacttgttacacaaatcagtccccttattcagtcattgaaaattcagccttagctttttacacaagttgtagtagaaaaacttctgtgagtcagacttcattacttgaagcaaaaaaatggcttagagaaggaatatttgatggtcaaccagaaagaataaatactgcagattatgtaggaaattatttgtatgaaaataattcaaacagtactatagctgaaaatgacaaaaatcatctctccgaaaaacaagatacttatttaagtaacagtagcatgtctaacagctattcctaccattctgatgaggtatataatgattcaggatatctctcaaaaaataaacttgattctggtattgagccagtattgaagaatgttgaagatcaaaaaaacactagtttttccaaagtaatatccaatgtaaaagatgcaaatgcatacccacaaactgtaaatgaagatatttgcgttgaggaacttgtgactagctcttcaccctgcaaaaataaaaatgcagccattaaattgtccatatctaatagtaataattttgaggtagggccacctgcatttaggatagccagtggtaaaatcgtttgtgtttcacatgaaacaattaaaaaagtgaaagacatatttacagacagtttcagtaaagtaattaaggaaaacaacgagaataaatcaaaaatttgccaaacgaaaattatggcaggttgttacgaggcattggatgattcagaggatattcttcataactctctagataatgatgaatgtagcacgcattcacataaggtttttgctgacattcagagtgaagaaattttacaacataaccaaaatatgtctggattggagaaagtttctaaaatatcaccttgtgatgttagtttggaaacttcagatatatgtaaatgtagtatagggaagcttcataagtcagtctcatctgcaaatacttgtgggatttttagcacagcaagtggaaaatctgtccaggtatcagatgcttcattacaaaacgcaagacaagtgttttctgaaatagaagatagtaccaagcaagtcttttccaaagtattgtttaaaagtaacgaacattcagaccagctcacaagagaagaaaatactgctatacgtactccagaacatttaatatcccaaaaaggcttttcatataatgtggtaaattcatctgctttctctggatttagtacagcaagtggaaagcaagtttccattttagaaagttccttacacaaagttaagggagtgttagaggaatttgatttaatcagaactgagcatagtcttcactattcacctacgtctagacaaaatgtatcaaaaatacttcctcgtgttgataagagaaacccagagcactgtgtaaactcagaaatggaaaaaacctgcagtaaagaatttaaattatcaaataacttaaatgttgaaggtggttcttcagaaaataatcactctattaaagtttctccatatctctctcaatttcaacaagacaaacaacagttggtattaggaaccaaagtctcacttgttgagaacattcatgttttgggaaaagaacaggcttcacctaaaaacgtaaaaatggaaattggtaaaactgaaactttttctgatgttcctgtgaaaacaaatatagaagtttgttctacttactccaaagattcagaaaactactttgaaacagaagcagtagaaattgctaaagcttttatggaagatgatgaactgacagattctaaactgccaagtcatgccacacattctctttttacatgtcccgaaaatgaggaaatggttttgtcaaattcaagaattggaaaaagaagaggagagccccttatcttagtgggagaaccctcaatcaaaagaaacttattaaatgaatttgacaggataatagaaaatcaagaaaaatccttaaaggcttcaaaaagcactccagatggcacaataaaagatcgaagattgtttatgcatcatgtttctttagagccgattacctgtgtaccctttcgcacaactaaggaacgtcaagagatacagaatccaaattttaccgcacctggtcaagaatttctgtctaaatctcatttgtatgaacatctgactttggaaaaatcttcaagcaatttagcagtttcaggacatccattttatcaagtttctgctacaagaaatgaaaaaatgagacacttgattactacaggcagaccaaccaaagtctttgttccaccttttaaaactaaatcgcattttcacagagttgaacagtgtgttaggaatattaacttggaggaaaacagacaaaagcaaaacattgatggacatggctctgatgatagtaaaaataagattaatgacaatgagattcatcagtttaacaaaaacaactccaatcaagcagcagctgtaactttcacaaagtgtgaagaagaacctttagatttaattacaagtcttcagaatgccagagatatacaggatatgcgaattaagaagaaacaaaggcaacgcgtctttccacagccaggcagtctgtatcttgcaaaaacatccactctgcctcgaatctctctgaaagcagcagtaggaggccaagttccctctgcgtgttctcataaacagctgtatacgtatggcgtttctaaacattgcataaaaattaacagcaaaaatgcagagtcttttcagtttcacactgaagattattttggtaaggaaagtttatggactggaaaaggaatacagttggctgatggtggatggctcataccctccaatgatggaaaggctggaaaagaagaattttatagggctctgtgtgacactccaggtgtggatccaaagcttatttctagaatttgggtttataatcactatagatggatcatatggaaactggcagctatggaatgtgcctttcctaaggaatttgctaatagatgcctaagcccagaaagggtgcttcttcaactaaaatacagatatgatacggaaattgatagaagcagaagatcggctataaaaaagataatggaaagggatgacacagctgcaaaaacacttgttctctgtgtttctgacataatttcattgagcgcaaatatatctgaaacttctagcaataaaactagtagtgcagatacccaaaaagtggccattattgaacttacagatgggtggtatgctgttaaggcccagttagatcccctcgcctcttagctgtcttaaagaatggcagactgacagttggtcagaagattattcttcatggagcagaactggtgggctctcatgatgcctgtacacctcttgaagcgccagaatctcttatgttaaagatttctgctaacagtactcggcctgctcgctggtataccaaacttggattctttcctgaccctagaccttttcctctgcccttatcatcgcttttcagtgatggaggaaatgttggttgtgttgatgtaattattcaaagagcataccctatacagtggatggagaagacatcatctggattatacatatttcgcaatgaaagagaggaagaaaaggaagcagcaaaatatgtggaggcccaacaaaagagactagaagccttattcactaaaattcaggaggaatttgaagaacatgaagaaaacgcaacaaaaccatatttaccatcacgtgcactaacaagacagcaagttcgtgctttgcaagatggtgcagagctttatgaagcagtgaagaatgcagcagacccagcttaccttgagggttatttcagtgaagggccgtttagggccttggattatccccggccaaatgttgaatgataagaaacaagctcagatccagttggaaattaggaaggccatggaatctgctgaacaaaaggaacaaggtttatcaagggatgtcacaaccgtgtggaagttgcgtattgtaagctattcaaaaaaagaaaaagattcagttatactgagtatttggcgtccatcatcagatttatattctctgttaacagaaggaaagagatacagaatttatcatcttgcaacttcaaaatctaaaagtaaatctgaaagagctaacatacagttagcagcgacaaaaaaaactcagtatcaacaactaccggtttcagatgaaattttatttcagatttaccagccacgggagccccttcacttcagcaaatttttagatccagactttcagccatcttgttctgaggtggacctaataggatttgtcgtttctgttgtgaaaaaaacaggacttgcccctttcgtctatttgtcagacgaatgttacaatttactggcaataaagttttggatagaccttaatgaggacattattaagcctcatatgttaattgctgcaagcaacctccagtggcgaccagaatccaaatcaggccttcttactttatttgctggagatttttctgtgttttctgctagtccaaaagagggccactttcaagagacattcaacaaaatgaaaaatactgttgagaatattgacatactttgcaatgaagcagaaaacaagcttatgcatatactgcatgcaaatgatcccaagtggtccaccccaactaaagactgtacttcagggccgtacactgctcaaatcattcctggtacaggaaacaagcttctgatgtcttctcctaattgtgagattatattatcaaagtcctttattcactttgtatgggccaaaggaagtctgtttccacacctgtctcagcccagatgacttcaaagtcttgtaaaggggagaaagagattgatgaccaaaagaactgcaaaaagagaagagccttggatttcttgagtagactgcctttacctccacctgttagtcccatttgtacatttgtttctccggctgcacagaaggcatttcagccaccaaggagttgtggcaccaaatacgaaacacccataaagaaaaaagaactgaattctcctcagatgactcgcatttaaaaaatacagtgaaattgctcttttggaaagaaattcactagctgacgaacaacttgccttgataaatacccaagctcttttgtctggttcaacacgagaaaaacaatttatatctgtcagagaatccactaggactgctcccaccaggtcagaagattatctcagactgaaacgacgttgtactacatctctgatcaaagagacaggagagttcccacggccactactgaagaatgtgagaaaaataagccggacacaattacaactaaaaaatatatctaagcatttgcaaaggcgacaataaattattgacgcttaacctttccagtttataagactggaatataatttcaaaccacacattagtacttatgttgcacaatgagcaaagaaattagtttcaaatttacctcagcgtttgtgtatcgggcaaaaatcgttttgcccgattccgtattggtatacttttgcttcagttgcatatcttaaaactaaatgtaatttattaactaatcaagaaaaacatctttggctgagctcggtggctcatgcctgtaatcccaacactttgagaagctgaggtgggaggagtgc

SEQ ID NO: 147920 - DNA, 1487 bp, Homo sapiens
tgcaatctctgcctcccggattcaagtgattctcctgcctcagcctcccaagtagctgggaaaacaggcctgtgccaccacaccggagtagtttttgtatttttagtagagatggggtttcaccatgctggccaggctggtcttgaactcctgacctcaggtgatctgtgtgccccagcctcccaaagcgctgggattacaggtgtgagccactgagcccagccatttaggaagtattataaaggcccttaaagttttgtaaggaaatgaaagggctttgtattaccttttcaataggcaacaatgtactttttctttccttagactttggcttactggaagatttaattaaaaggtagaggagaagtaaatttgctgtaataattttgctgtaaataaaacaaagagtttattttattagataaagaatgtgaagtaagcatgaagagacaggctttgggagaaatacccagaaagggatttttcaaagatggcattgtttaatctccgtgtggccctcggttcgtgcaatcacagatgagccacaatgagggccagccccctacttgtttggggctccgaaactcttaccaaacatcaatttttattcttggggatagaaaaatagtatgtgctatctctaatacgctacttccgatatttaattaaagaagtatttttaatgtaggtgtccacagggctccatttcattggaaaacaactggactatggatggataggacaggctcctggattgggcaaaagttccgatgggtatatttcaggaattaaattttggcccgcggcacctaaacactgacaacatttagcttaaaggttttccatggagaagagtggtaagagctgtagttagcaaaattggcatcctctttaagggtgtcaattctgtgctgctttgcaaattgttgaaacttttgattttctgtttggcaatgctagtcagtgttcacttcttacagattagccaagaatttttatctaaatgcagaaacttattaatgaaatccatttaaactatacttacacaacatttttgggaggccctgctggtaacaattatatatggatgcagaaagtattgccaagagtcccattttccaatttttaaatctgcaaatatctgattacgattgatgaaattcccgttgtattgtatgtgtgaatataaatatcctgaattcctcccgggggaccttggttttccgtcccaaggatgttggcagtggacacttagtttacctcaggaattgcaatcatgtaagactatattcggaaaaaatgctggagtatataattttggatactgatataaaatcatcaagatggaagttaagcagaattgtcacgtgtagtccatagcgcttttatatgcattattctgtaatttgtttgtactgcggcaactttttatactttcaatgtatcatttaataaaaaaaataagcaagtcaaaaaaaaaaaaaaaa

SEQ ID NO: 147921 - DNA, 676 bp, Homo sapiens
ggtggttgggggaggttggggggatggagggtagaaccgagctgggatagtgcaccactgcatccagtctgggtgacagagtgagaccccgtctcaaaaaaaaaaaatgcatcttataccttgagggtccatggagtctttcacgccttcgtgtgtgtgtgtgtgtgtgtgtgtgtgtgtgtgtgtgtgtgtgtgtgtgttcaggtcaacttctggaatttctgtttcatttcttggatcaatctgtctgttcaggtgtcagtactagactattttaatccctgtatgtatgtatgcatgtatgtatgtatgtatttattttgagacggagttttgctcttgttgcccaggctagagtgcaatggtgtggtctcggctcactgcaacctccacctcctgggttcaaacgattcattctcctgcctcagcctcccaactagctaggattacaggcgtgcgccaccacacccaactaatttttttgtattttcagcagagatggagtttcaccgtgttagccaggatggtctctatctcctgacctcaggtgatctgcacccccgcttggcctcccaaagtgctgggattacaggggtgagccaccgcacccggccattccttttataacctttcacacacataaccggagtgtgtaaaattttggttagtttgtcaa

SEQ ID NO: 147922 - DNA, 516 bp, Homo sapiens
  misc_feature (1)...(516): n = a,t,c or g
ggatccatcccgcctcccggcgtctcactgtgtgccctaccctttgaaacacgcccccgcgcccgccctgccgtagaccaggcagcgaggaagcccacagtctccgggggcgctgcgcgcgaagtagcacgtgcttctcgaaacaccgcagcccccgggtcccgccccgcccggcgcgcgcactcgaacccgcccagagagcgaatgaagccagcctggaagatccccagtctcgagacagagcctgacaggggcagatgcactggaaggaccctgtctgggtttagcaaccaagcagccatcctggccccacaggtgtgggacttctgggtcttctcctggctggcttcttgctagaggatttcaagagacccagcaagactgtattgtcccactgaatgctcaagatattggttagaagtagaaaaggggagggggtagtatntagcctctgtccccactaaaaattattcccaattgtcatttgtgtcatctgtttagcttacagttttaatc

SEQ ID NO: 147923 - DNA, 998 bp, Homo sapiens
ggattcatcccgcctcccggcgtctcactgtgtgccctaccctttgaaacacgcccccgcgcccgccctgccgtagaccaggcagcgaggaagcccacagtctccgggggcgctgcgcgcgaagtagcacgtgcttctcgaaacaccgcagcccccgggtcccgccccgcccggcgcgcgcactcgaacccgcccagagagcggtgcgtggcgctgggtgcgagcagggtctagcccacccccaccctcaccccaccccaccccaccctgcttttttcaggttcatcaaggtttgcgcagtggatccgcgaatgaagccagcctggaagatccccagtctcgagacagagcctgacaggggcagatgcactggaaggaccctgtctgggtttagcaaccaagcagccatcctgaccccacaggtgtgggacttctgggtcttctcctggctggcttcttgctagaggatttcaagagacccagcaagactgtattgtcccactgaatgctcaagttatatgttagaagtagaaaaggggagggggtagtatttagccttctgtccccactaaaaatttattcccaaattgtcatttgtgtcatctgtttagcttaccagttttaatccttgtcaaaatgatcatttgccagggtgcataaaacaccctatttgatgagaactggttttaaaggaaaatggggccatcagaaggaagccggttggtgtgaagagacgtctgggaagagcccctggcgagggccctcattccactgggtgacccagaaggagaaaaccgcgatggcgcttctcatttgaaatgttttcctttatggacagtgtttacgcaattgtctataactgtgtacttttgttgattgatcgtgtatacataatgtaaaataattgtgttctctgagctcacattttgttggaaccaaagacctttagatgcttccctacattaaaacattttactgtaaaaaaaaaaaaaaaaaaa

SEQ ID NO: 147924 - DNA, 365 bp, Homo sapiens
  misc_feature (1)...(365): n = a,t,c or g
actggaagaattannnnnnnnnnnnnnnnnnnnnnnnnnnnnnnnnnnnnnnnnnnnnnnnnnnnnnnnnnnnnnnnnnnnnnnnnnnnnnnnnnnnnnnnnnnnnnnnnnnnnnnnnnnnnnnnnnnnnnnnnnnnnnnnnnnnnnnnnnnnnnnnnnnnnnnnnnnnnnnnnnnnnnnnnnnnnnnnnnnnnnnnnnnnnnnnnnnnnnnnnnnnnnnnnnnnnnnnnnnnnnnnnnnnnnnnnnnnnnnnnnnnnnnnnnnnnnnnnnnnnnnaagggttggacaagctagccttatgtcatgtccagaatgcaatttaacaggaatttcaagcaaaactaacaaaaaattaaatccccaaa

SEQ ID NO: 147925 - DNA, 500 bp, Homo sapiens
  misc_feature (1)...(500): n = a,t,c or g
actggaagaattaactaaaaatacaaaattagccgagtagctgggactacaggcatgcgccaccacgcctgactaatttttgtatttttagtagagatgggatttcattatgttggccagctggtcttgaacttctgagctcaggtgatccacccgccttagcctcccagagtgctaggataacaggcatgagccgcccgcgcctggccaaaatagcataatgttttaagaaagtttacgaatttgtccttgggccacattcaaaaccatcatgggccaagggttggacaagctaagccttaaggtcaatgtccagaatgcaatttaacaggaatttcaagcaaacctaacaaaaaattaaatccacaaaaaaatatcattttgggtaaatgcactgtctcacacactttactactaaggtcccattccaaaccatgacgaccctttacataaaattagggcattctcaccaagtttctnaagatgatttctnaacatta

SEQ ID NO: 147926 - DNA, 444 bp, Homo sapiens; identical to SEQ ID NO: 146295

SEQ ID NO: 147927 - DNA, 369 bp, Homo sapiens
ctaaaacatcttgcagacagagtggccatgtatgtgcatgcatatacactctacagtgctgttagaccttttggctgcagaatttacatagtacatgacgaagttaaggataaagcttttgaactagaactcagctgggttggtgaattaactaatggaagacatgaaattgttccaaaagatataagagaagaagcagagaaatatgctaaggaatctctgaaggaagaagatgaatcagatgatgataatatgtaacatttactccagcatctattgtattttaaatttctactccagtccaatgtaactatttagccctggattatacatactgtccaattttcattaaatttttgtcttataact

SEQ ID NO: 147928 - DNA, 508 bp, Homo sapiens
tttggctacaacattccactaaatcatctgccagacagagtggccatgtatgtgcatgcatatacactctacagtgctgttagaccttttggctgcagtttcatgttagggtcttacagtgtgaatgacggtgcgcaactctacatgattgacccatcaggtgtttcatacggttattggggctgtgccatcggcaaagccaggcaagctgcaaagacggaaatagagaagcttcagatgaaagaaatgacctgccgtgatatcgttaaagaagttgcaaaaataatttacatagtacatgacgaagttaaggataaagcttttgaactagaactcagctgggttggtgaatgaatctctgaaggaagaagatgaatcagatgatgataatatgtaacatttactccagcatctattgtattttaaatttctactccagtccaatgtaactatttagccctggattatacatactgtccaattttcattaaatttttgtcttataact

SEQ ID NO: 147929 - DNA, 1666 bp, Homo sapiens
ttttgaagacggagtcttgctctgtcaccccaggctggagggcagtggcacccatctctgctcactgcaacctctgccctcccagggttcaagcgatcctcctgcctccgcctccccaagtagctgggattacaggaacatgccaccataccctggctacttttgtatttttggcttcaccaataatacagagacgggttttcaccaggctagtttcaaactcttgaactcacgtgatctgcctactttggcccccgtaaagtgctgggattacaggcatgaacactgcaccaggcctcttaagtatatattctatcaaagatacagtcattgcatgttagagcaacatttgcttaattaactttgcttgggtatcttattctgaaactgttcattcagttacaagtagaggaatttaacccacttaaattccaggttgttgtagcttaacttgcccacaggtgtgggatataacaattttaaaaatcaattttaaacacctgttttctcttaacaggaatctctgaatgaagaagatggatcagatgatgataatatgtaacatttactccagcatctgttgtattttaaatttctactccagtccaatgtaactatttagccctggattatacatacgtgtccaattttcattaaatttttgtcttataactattgaagtttggttaatatctgctttacaaaattggtgggggggaatgaggacatttactcagtattaaaatatagatttatgactactgaaaaattccctggttaaaatgctgcagaattaattccaagactgtagattaattcaaagccccatcttcatcactcaactagaatttacagatcatattctcctgggcttttgtacaaaaagcacctaccaacttagtggacaaataactgatacggtttcccactttcatatgaagtaactggtggtcatcagtcactgttaatctttagatgtgatacagatgacagatgtttcagttttggataatttttcaaaaactgacccttcctcaaaaaagacccttcaatacatgagtcaaggatgtttttgcttttttcctttattgtggtgaggggcggatttaaggatcagtagagtccctattctgtcactaaagagatttcttgatctctaaagattaaaataaaaataccaacatcagacagctttcatgttaaaaatcagaatttatgttaaagtgctctgtaaacagaactgttactaagtggaataaacagtactgtggccgataagaataacttgaagctgaaaagcagtactcacagcaggaacaatttgaactcaggccatgtatacacaccctctagtggactcatgccagtgtcactccattgaagtgttgtgctttcctaagaaggtaatctagccactgaatttgggtgcagggtatcgctggactttgagcatttgtgtagtttaaatagcaaatcattatacctgagtattaatagctaactactacacaaacaactcaaaaccagtaatgtcatgtcattaccatggcttcttttatgtaacattatctgctacattttaccactcaaaatatatttaaaatatgtattttaaaatatattagagcatatggctcaagcaatcctcccacctcagcttggtaac

SEQ ID NO: 147930 - DNA, 809 bp, Homo sapiens
gcaaagatggggttgttcttggggtaagaaaaataagtccttcttaaacctatgaagaagggttccaaacaaaaagacttttttaatgtttgatcggcaatgttgaaatggccagtagcaggttttgttggcagatgctcgttctttagcagacatagcaagagaagaagcttccaacttcagatctaactttgggctacaccattccactaaaacatcttgcagacagagtggccatgtatgtgcatgcatatacactctacagtgctgttagaccttttggctgcagtttcatgttagggtcttacagtgtgaatgacggtgcgcaactctacatgattgaccccatcaggtgtttcatacggttattggggcttgtgccatgcgccaagccaggccagcttgcaaagacgggaattggagaggctccagttgaagaaattgccttccggtgatatcgttaaagaagttgcaaaaataatttacatagtacatgacgaagttaaggataaagcttttgaactagaactacagctgggcttggtgacttaactaaattgaagacatgaaattcttcccaaaagactctaagagacgaagcagagaaatatgctaaggaatctctgaaggaagaagatgaatcagatgatgataatgtgtaabcymttactccagcatctattgtattttaaatttctactccagtccaatgtaactatttagccctggattatacatactgtccaattttcattaaatttttgtcttaaaaaaaaaaaaaaaaaaaaaaaaaaaagtcgtatcgatgt

SEQ ID NO: 147931 - DNA, 635 bp, Homo sapiens; identical to SEQ ID NO: 119465

SEQ ID NO: 147932 - DNA, 1028 bp, Homo sapiens
  misc_feature (1)...(1028): n = a,t,c or g
acacatatttggaaaggctaaggaatatgccaatagccaggtggtcactaaagaccaatatgcagtcatctgtttagggggagatgcggtcccaggnkctagtctccacgtgagtgagactatggagaaaacctagaaaaagctagaatgagccactttgtcacctgcctgactgaaggaagaaggaaatgtatagtaaaacctgtacactatgacagggtcaagaaaattacccagagaaagaaggagatcccagtagtcttcctcaatcgagtccctgaggcccttgggaaatgcacccatgcagacccagaggcagcagaggggaagcatcgcgtgccatgcattttatccttcagtcagctccggacattagaagggaattacagaaaattttggaggccagaccccagacccctgctgttgactttggcagaaggcggcttttaaggttttcaataacggacaggacacagatgggcaggtaagaagaggagactgaccaagacagcacagctttctggctgccctaatttcatccaccatcttcagggtgaccctagggtttttcaggagaccaacttattccgaagacagcccaacctttggatgggagccaatgtgcctactgcaggatgggagggtgttcactgggaggagaggcttccctggacctcctttaaaacaggacagccggcaggcaaccctggccagccgccactcctcaccaagctttcagatgagattgatacacaccgcctgacagcaccctgggctctgactgcagcacactccatcgtcattcacaccacggagcctcaggtcacccttgatgtgggcagttctaggaactggccttaggaaatctaactatgaaaccaaggttatggagtatcccaccttcaggaaggaacattgaacaattgatttgacagtcttcttgccgccagccaggaccaccaagtggccctttaaccaaggaggaaccaggcggcaaccaggttacggttgacccggctttttcttac

SEQ ID NO: 147933 - DNA, 727 bp, Homo sapiens
  misc_feature (1)...(727): n = a,t,c or g
ggtgtttttaaccttttggtaaagtttgtgtctttcaggtttcaatagctccaagtcaagctaatgatggcccaagaattccaacccataacatcccaggagcaccccagtccctacaggtctttaggacagccagtgagagatttccccaccccctaaagttgggccggggacgacatcccctgttccagcgggaagtcgccttccagaagatggggatcttcagcccctttctcccttaagaatagagggtgaaatctcctcagggggaaatagagatagaacagaaatggaatggggttgcttcttcataatacttaaccatgccttctacttaaagttctagggaactggccttagggaaatctaactatgaaaccaaggttatgggagttttcccacctcagggaagggaacactggaacaactggattggacagtcttctttggccgccagccaggaccaccaagtgggcccatttaaccaagaggaaccaggcgcaaccaggttacgctggacccgcatctcctacctctcatgtgctttgcccagcccagcctgcataccttactcatgatgtcaattcccaagtttcgctaataaaaacatctctgcaagcctcttcagggagccancnnnnnnnnnnnnnnnnnnnnnnnnnnnnnnnnnnnggnnnnnnnnnnnggggggcccaggcttttttctttttaggggggggtttttttt

SEQ ID NO: 147934 - DNA, 958 bp, Homo sapiens
agttcaccttgtccccaggcagaatgcatgtgcgatccggcttacggaaccttgccctcccaggctcaaatgattctcgtgcctcagtctcccaagcagctggattcacagcagcgccaccacatctggttcatttgtatttttagaagagacggtggttcacccatgttgtccaggctggtttcaaacccctgacctcaggcgatccacacgtctcagcatcccaaagtgctgggattacaggcgtgagccaccgcaccctgtcaagatttttctaaagctctcatttttctcctactgggtttttcctgtttgcgccctcaatctttctctgtctctttttgtgtacacctttttgtctaattctctctctctattgtattcctcacacacaggaagcaagctccaatgctatgagatgctccatgtagagacccacataccaaagggtgagggggtgctcagccgagtagaaagaaggaaagtcaggctctccagccacactaaaccctgtcaattttcacatgagtcagcttaaaggctcatgctttcccagtccagcttcagttaagaccacagcccccagtctcataaaagacctgaaggcagaggtagccagctgaactgtgtccagattctggtccacacaaattatgagatattatatgttgttgaaaagtgctgacttttagggcaatgttgtcagaaaggagcagatatctaacctcatctcccaggccctaggattctccatccctctgcttatctctttctcacggatgtctgcagccaaactaggtccctttttacctctgccaaactcacacctatgagtcttttcactaagggtggcttctccctgacacatgcttgtgcagatgcctccctgctgtcatcctcatcatggattaaaagtcacctcacgtgaggcctgaggtcctcccatgcaataattatc

SEQ ID NO: 147935 - DNA, 623 bp, Homo sapiens
tttttttgagacagggtctcactctgtcacacaggctggagtgcagtggggtgatcttggctcactgcaacctccacctcccaagctcaaggggtcctcccaccccagcctaccgagtagctgcaggcactacaggcacacgccaccaagtccggctgattttttgtatttttgtagagatggggttttgccatgctgcccaggctggtgtcgaacttctggactcaagcgatatgcctgccttggcttcccaaggtgctgggactacaagcatgagccaccacacctggcgcccttacctaaattttggcaagttccccagaaagaaaaattaagcaaaatgtacattcagcagtaaaactccaaaagaattgaatccccatggtttttagtggtggtgtcgtctgaatgtttcagttcacgggtcattctgactcagagttagcaagctcatatgaactcctaaaagaatgggccatccttccatttgtgtgttcacagagaaagaatttactaactacctatgacatgtcaagcagcatactgggaactggatataaaaaggtagacagatatagtcctcatctctaaagacctcacaatttagtcagggagtgagaaac

SEQ ID NO: 147936 - DNA, 352 bp, Homo sapiens
ccaaaattgaaaggcctttgtctatcattccatgagggcaaaaaaagattatcttactttttatcatggcttaaccttaatacccactggatttcggagaacagtggccactgcatggttctcatgcttacagtacgatcctgtagctagatttgttttgtaagaaggaagaggaatgagatgaaataccctatgtataatgttttatgttgctttggaaaagtacaacaatgtagaaaaaggtaaaatcatgataaagtaagaaattaaagactgtttggactgatttacaagaaagagatgatgctatgatggttcagttaaaggaacctatgactcacccccctccact

SEQ ID NO: 147937 - DNA, 576 bp, Homo sapiens
ttttttttttttttttaagagacaggttctcactctgtggcccaggctggagtgcagtggacaatcatagctcactgtaaattcaaattcctgggcccaagcaatcctcccctcagcctctggagtagctacatgtgcgaccatgcccgctaatttatcttaattttttagaagttaggtcttgctatgttgcccaggccggtcctgaagtcctggcctcaagcgatcttcctgcgtcacgcacccaaagtgcttggagtagaagtctgagctaccacgcctggccctgaaagctattttatggaagaatttaaactaaagatctccaaatattattcataattacatacccatgttggtatctatggtttacttaatctaccatttttataggatttacaatatgccaatataaaataatcgtctgtatcccaaaaatagagcataagaaaaagactaaaatttgttttatttatggtacaaaagtttgttctcacaaatattttaaataaaatattgaatatgcttcattatttctgaagatcttaacaccgtgtgatacagagattcaaagat

SEQ ID NO: 147938 - DNA, 611 bp, Homo sapiens
tttttgagacagagtctcactctgtcacccaggctggagtgcagtggcaaatcttggctcactgtaacacctgtctcccaggttcaagcaattctcatgcctcagcctcccaagtagctgggattgcaggcgagcatcaccacgcccagataattttcatatttttagtagagacagggtttcaccatgttggccaggctggtctcgaactcctgacctcaggtgatctgcctgcctcgccctcccatagtgctgggattacaggcatgagcaccacacccgggtctggtgaattaatttctaaataacactcactagatcatataaccaatctcatgcatcactgaaaggaacctgacactaaactgtgctcaacttaaatcatcaaggtctatagttatacatactacatatggacaactagaagaagagaacactaggaagtatttcactacaagttactttcaatacagaggattaagcatccatgttctattttcataatgaaataaagattcttcatatgccatcttgttttttaaactgtaaaaattacaaccataattcatattctttaggaggcgaaagccctaaaactagttgatggccaa

SEQ ID NO: 147939 - DNA, 372 bp, Homo sapiens
  misc_feature (1)...(372): n = a,t,c or g
tttagccttatcaaaatatcaatgatgttacttatgaaaatggaaaaataaaatctacaattcatatggaacccaggagactccaaatagccaaagcacgtttgaacannnnnnnnnnnnnnnnnnnnnnnnnnnnnnnnnnnnnnnnnnnnnnnnnnnnnnnngtagtatggtactggcataaaaagagacacatagatcactggaacagattagagaactcaaatataaatcgacacatttgtagccaactcattttgacaaaggtgccaggagcaaacactaaggatcatcccnnnnnnnnnnnnnnnnnnnnnnnnnntatgcacaaaaatgaaaccagaccccatctctcctcatacacaaaaaata

SEQ ID NO: 147940 - DNA, 597 bp, Homo sapiens
tgaggcaggatctctctctctgccacccaggctggagtgcagtggtgcaatcatgactcattatagccttgacctcctaggctcaagcaatccacctacctcagacacccaactagttggggttagaggtgtgtgccaccatgcccagctaatttttgtatttttttgtagagacaggattttgccatatcacccaggctagtctcctgggctcaagtgatcgaactgcctcagcctcccaaagtgctaggattgcaggtgtgagctatcacatccagcctttttgctttattaaatgagtagttaattcctgaaataccgctcctttcacaagacaatgaagtctagtgagatgtccttggtacttaaggactatcttaggggaacaattacttaattacaacacataacactctttcccaaaacctgaaagaagtcaccttttaaaaacagactactttgaagtattctgtctccccaagacaggaaagtgaagaatggaaggaggacttaaaatatatattttttggagaaagcttttgatgtgactttcccagtattaaacaatacctcttagcaatgattgcatcttttggg

SEQ ID NO: 147941 - DNA, 952 bp, Homo sapiens
  misc_feature (1)...(952): n = a,t,c or g
gcgtcgacttttttttttttttttccaggaggagtaatgttttgtcacacaggctggagtgcagtggcacaatctcatctcacggcaacctctgccttctgggttcaagtgattctcctgcctcaagcctcccaagtagctaggattacaggcgtgcatcaccatactcagctcatttttatatttttaatagagacagggtttcgccatgttgaccaggctggtcttgacctcctgacctcaggtgatcctcccgcctcagcctcccaaaatgctgggattacaggcgtgaggtaccatgcctggcctcctcccgaggagtttgcaactttgaccaaatacttcaaaagctacctcaaatccttccgaagaanttaacagaagagaggaggctggggatttatttgggaacctaaccgtgctctcatagagaaagcttcttcactcactactccaagtatttaaaaatgctattttcatattaaaggaactttaccaagaacgtctgttcttcttcctaagatactgcaaacccccttctttgtgttacttattactccacaataaaaccctatttatttcacaacttattagctcatgcagcgtcccattttgacaaaattctgttgaaagcccagtacaatttcagttaccgcgcagggcaccattaacaaaatggttatctgttatagtgatgaatgcaccctgagcaccatattgccatttttacttcctgtagccgacttctcccctatttctacattatatccaagacattatcacatagtggtatacaaacatccatcaatccttcttactgctacatattactaggagatgaactatgtatttgccacagatataaatttacaaaatattaaattcctacccatatggtttacattttacatgcccagaagcaacgtatgattttccataattcggacgcgtg

SEQ ID NO: 147942 - DNA, 416 bp, Homo sapiens
ggtctacgagccatctcagcccactagctgggagcagggccctgtccagctccagccccagggtcgccaggagtgacatggctgtagcacaggtgctgggcactgatggcaacaggagaggctgcaccagcagctggcacgaggctctggaggatgctcaggtgggcgaagacaggcaccaaggcgaaagtggaagacctacacgcgtgagacaagagtgggtgtggtcaggacagcgtcatccaccggccaaaatcaaggggaagccaagccacacccccaggcacgtccatgaggctcctccctcccccttccaaccaccgtttagaacactaagcctcagcctctccgaattctaaatttgccctttctttacccaaatctctgagccccacccactcccaagggaatttctt

SEQ ID NO: 147943 - DNA, 386 bp, Homo sapiens
  misc_feature (1)...(386): n = a,t,c or g
ggcggcctccttattannnnnnnnnnnnnnnnnnnnnnggggtaggcactcaatatttattgaatacatggatgagttcttcctcccccatcttcccctgccctccactccccagctccaccttccacctgcccttacctgccaggggctctcccccgctgcttccaccgtgtgcaggccggagcccaccagccgcagctgcccctcactgtccagcaccctgcgctccaaggcactgaggatctcgctgacttgagagtcctgctccccaggggccccagagcagagctgcccgcatgcctgcatggcccctgccacctgctcctccaacagatccaaccgcccccccagctccccgctcacattggccagcagcccccccaact

SEQ ID NO: 147944 - DNA, 698 bp, Homo sapiens
  misc_feature (1)...(698): n = a,t,c or g
cccagcgcctaaatcagggcgtggcccattgtaggctctcaattatttattgaatacatggatgagttcttcctcccccatcttcccctgccctccactccccagctccaccttccacctgcccttacctgccaggggctctccccccactggaagcccgccctccaggcgtcccccaaggaccttcatagggaacccaggggggcaggggccgggggaagtttcccccatagtcttacgaagcccatcccagccccactaacctgggaaccagggcccctgtcccagctcccagcccccagggtcgcccaggagtgaacatggctgttagcacaggtgctgggcactgtatgggcaacaggagaagcctgcacccagcanttgggcacgaggctctggagggatgctcaggtgggcgaagacaagggcaccaaggcgaaantgggaagactcccatgggctgcagcaaggagaggcggcggcggctctcggctgaagaaagaaggtgggagcggagagcgcaggcgtggtgagcgcggagacgggccgggggcacaaaggggtcgaggctacagagccatggccggggctacgcaggcagaggcggcgacactcttccctctgagccggggatccagccctctccttgtggctccggggtctggtttcctcctcctgactctaagctctggtttctt

SEQ ID NO: 147945 - DNA, 665 bp, Homo sapiens
aaagacaggttctcattttgtggcccaggatgaagtgcagtgacacaactgaacctcactgctgacccctgaactcctgcgctcaagtgatccttccaccgcagccttctgagtagatgggactacaggcgtgcaccaccatacctggctaattaaaaaaaatttttgtagagtcgaggtcttgctatgttgcctaggttggtcttccactcctgggcctcaagtgatcctctcaccactcagtagggcgagagccactgcacccagctttccattattttcaagtaaagatgaacctatttgaaggctaaagggcattcttcacagggacaagatactaatttaataatttaattcatacttttaattcagtattacttaaataggtctatggcctggaaagcttctcaaagaattaaagcgaaccctgtgcaaggtgcttatgtgccatagaaattttgttcagcattccactcaatgacaaagttaacaaattgccataaattagagaaaccaaatatattagtctagatctaatttactgttctcccaatgataagagctgcaaacaggaagtcccctgattttcccccctcaaatcctcacaaatttgttttctttttatgtaggctcaaattaatctaatatgtatgtaaaagtaaggg

SEQ ID NO: 147946 - DNA, 554 bp, Homo sapiens
ccgattttcatgcctcagcctcccgagtagctgggacatgcaccactactccaggctaattttttatatttttagtagagaccaggttttgcccatgttggccaggctggtctcgaacttccagcctcaaatgatccacctgcctcgacctcccaaagtgttgtgattacagccatgagccaccgacgcctggctcttgtacctatcttctaaaaaataatgtaattgacatgcagttgttttataaacagagaacatgaaaaaggattctgtattttaaaaaaattcaaaagaaaaaatatcaaagagagtcctgtggtctctaaagaacttccaggtctgaaagactggtttcagattgccatgttgcacagaattactggaaaagatttttaaaaacgatctcccctgggagagtcaccaggtgatactgatgttgtcagtccctggccagctagaggacacagccatgtaatttaggtattgccacatctaactcctctgcctcttattaaatatgggacctcaggatactggtatataataaaaaaatt

SEQ ID NO: 147947 - DNA, 949 bp, Homo sapiens
gagacggagctcgactcagccacccaggctgcagtgcagtggcaccatcccggctcactgcaacctccacccgccaagtccaagcgattatcccgccccagcctcccgagtagctgggaccacaggcgcgcgctaccaccatgcccagccaatttctgcattctcctcagcagagacggggtttcaccatgctggccaggatggtctcaaactcctgacctcaggcgatccacccgcctcggcctcccaaagtgcctggaccacaggcgtgacagccacgcctggccccagatttagattttaaataaaacgtgaggtactgggtcaaagggggctctgcaggtcgatgatctcctcaaacctgccaaaggcctccccatcctatggcaactggattggggggtgtcattccaaacaccctcagaaccctgccccagatattcatctgtgaacaaggtatttcaacacctaattttgaaacaattcctacatcctagccaggtcagtttaatcattttcccagaatctgaactactgtcagggatagactcaagtgagattaacacagggttaatcttcaatcttaacacaattatcaattagttctcccagtgggaacgattaagggcttttgtccaacatgtaggcatttctgctgttaacctattaaggtcttcatattaccagttccccggggataggatagatattatgtcaggtcccaaggatagggagtttatgtttccatggaattaagccatattctcaggactgattctagaacagctggtttcatgaggcatatggcgtagattaaaaaaaaacaaaacaaagtgacttacattgactttaagaaaaaattaattaagatgtatttaacctttaagtatagaatgattgtataaattagatttcaactgaaaggacaattagcgattcagagaaagct

SEQ ID NO: 147948 - DNA, 575 bp, Homo sapiens
agtaatttgccattacttaacatttcattaaatggatgtttccaaaattatatttgttcttgagaccttttgagtgatcacagtttctgctattctccataaggcctcagtttgacccagtgatgaaatcttgaataaaacacagaggaatggggttggattttgcagtgcttcccttgcaggtgaaatggccaccagacccaggctttctggaatgcattcattttctgcagttgaaagggacaatcccggatctgaaagaaagagccccagtgacttcaagagtggagccagggcatgctggacactgcatagctatggccaagtgtgtcacctctgagggagatgtgagagaaacgcaaagggatcgcttgtgactgtgccttctcgatgtatgatggactgttctgctcaaatagcaacagtagggctgattggagccattgtacagtgtcgggaacataccagcacactgagaatagcatcatgtcataaggacccagagcaggtggaccctgctgtgatgcacaaaggtgagggtgcagctgcccaggacacactcatgcatgtttgtg

SEQ ID NO: 147949 - DNA, 435 bp, Homo sapiens
  misc_feature (1)...(435): n = a,t,c or g
gggttcnaagcgaatcctccctgncctcagncctccccgagtaggtgggattaataggcacacgccatcaatgccccagcctaatttttttgtacttttagtagacagggggtttcaccatgtcgaccaagctggtcttgatctcctgacttcaagtgattcacccgccttggcctcccaaagtgctaggattacaggcgtgagccaccatgcctagcctgggaatacacatttttaagagtgagattcaaaactctacatttcttttagaagtatcccagatgaatcttagattttgagttccactactctgtaatgctcaagtaactatccctctggatggttgttcaagtgtacacatttatcaagtctttaaaaacgtagtatgatatttaacctagtgctttttggctcccactaaactgttgctacttt

SEQ ID NO: 147950 - DNA, 475 bp, Homo sapiens
  misc_feature (1)...(475): n = a,t,c or g
ctggtgtgtatcctaaatatggaaggaagaaaagctttgacctggaaatactacgcaaaaggttttgaagggaaaaaaagtggtttcacacctcttgttattccttagagtcacttcaaggcctgtttgaatgtggcaggttagaaagagagagaatgtctttcatttgaagagtgttggacttgtgtgaaaggagatgtgcgtgttggaatctgcttttccaagccgccagggtcctgacggcagcaggacgaagcctgttgtggcgtcttctgggaaagcctgaccgtgtgttcggacggcactggctcctttccgaagttctcagtaactgagcccagagtaactgcacgcctttgtgcagctctggagctccaccaactctcggncctgcagttctcaagcgagctaatcttgtcattaatcgatagaagctaacttccgagttaggacctagttactttgctctcaacat

SEQ ID NO: 147951 - DNA, 4281 bp, Homo sapiens
  misc_feature (1)...(4281): n = a,t,c or g
gatggcggcggcagcagtcgacagcgcgatggaggtggtgccggcgctggcggaggaggccgcgccggaggtagcgggcctcagctgcctcgtcaacctgccgggtgaggtgctggagtacatcctgtgctgcggctcgctgacggccgccgacatcggccgtgtctccagcacctgccggcggctgcgcgagctgtgccagagcagcgggaaggtgtggaaggagcagttccgggtgaggtggccttcccttatgaaacactacagccccaccgactacgtcaattggttggaagagtataaagttcggcaaaaagctgggttagaagcgcggaagattgtagcctcgttctcaaagaggttcttttcagagcacgttccttgtaatggcttcagtgacattgagaaccttgaaggaccagagattttttttgaggatgaactggtgtgtatcctaaatatggaaggaagaaaagctttgacctggaaatactacgcaaaaaaaattctttactacctgcggcaacagaagatcttaaataatcttaaggcctttcttcagcagccagatgactatgagtcgtatcttgaaggtgctgtatatattgaccagtactgcaatcctctctccgacatcagcctcaaagacatccaggcccaaattgacagcatcgtggagcttgtttgcaaaacccttcggggcataaacagtcgccaccccagcttggccttcaaggcaggtgaatcatccatgataatggaaatagaactccagagccaggtgctggatgccatgaactatgtcctttacgaccaactgaagttcaaggggaatcgaatggattactataatgccctcaacttatatatgcatcaggttttgattcgcagaacaggaatcccaatcagcatgtctctgctctatttgacaattgctcggcagttgggagtcccactggagcctgtcaacttcccaagtcacttcttattaaggtggtgccaaggcgcagaaggggcgaccctgggacatctttgactacatctacatagatgcttttgggaaaggcaagcagctgacagtgaaagaatgcgagtacttgatcggccagcacgtgactgcagcactgtatgggggtggtcaatgtcaagaaggtgttacagagaatggtgggaaacctgttaagcctggggaagcgggaaggcatcgaccagtcataccagctcctgagagactcgctggatctctatctggccaatgtacccggaccaggtgcagcttctcctcctccaagccagggtttactttccacctggggaatcttgccagagaagtctttctgtcttgttttgaaggtgcttgacatcctccagcacatccaaaccctaggacccggggcagcacggggcggtggggctacctgggtgcagcacactctagagcacattttaggcgcaaaaaggaggaggtgggcgtagaggtgaagcttgcgttccgatgagaaagcacagagatgtcttgctacttccttcgggttcattatgaaggcttaaagaggtatgggcttattaactgtgttgattctacggctggggaccccacctggcatggatngggacacgagttggattcccggaacatgaacgttccacagcctgccgcacggccaccaccagcctttctataacgtgctggtggaggacggctcctgtcgatacgcagacccaagaaaactttggaatataacgctgagccctcaagaaatctcacacacctgacgtgggacgcgtatattctcagagatttactctgcactcactacatacccaaacgcagagctctgagatccggtatccagaagatctggagtttgtcctatgaaacggtgcaagaatatttacaagtgcaaaagaaaagagaacatagaatgagtaaagtctagagaggacattgcacctttgctgctgctgctatcttccaagagaacgggactccggaagaagacgtctccacggagcccttcgggacctgctgcaccagggaaagccacttccaccagtagtgctggttgcctcctacttaagttttaaataccgtgtgctcttccccagctgcaaagacaatgttgctctccgcctaccctagtgaattaatttgaaaggcactgtgtcagtggcatggcttgtatgcttgtcctgtggtgacagtttgtgacattctgtcttcatgaggtctcacaagtcgacgctcctgtaaatcattctttgtattcactccattcccctgtctgtctgcatttgtctcagaacatttcccttggctggacagatggggttatgcatttgcaataatttccttctgatttctctgtggaacgtgttcggtcccgagtgaggactgtgtgtctttttaccctgaagttagttgcatattcagaggtaaagttgtgtgctatcttggcagcatcttagagatggagacattaacaagcttaagggtaattagaatcatttgaatttatttttttctaaatatgtgaaacaccaggatttcaagtgttttatctttttttttttaaatttaaatgggaatataacacagttttcccccttccccatattccctctcttgagtttatggcacatcctctataaatccattagttttcctattttattacataaaattccttttagaaaatgcaaatagtgaactttgtgaatggatttttcccatactcatcctacaattcctcccattttaaatgacctacttttattttttaatttaaaaaatctacttcagtatcatgagtaggtcttacatcagtgatgggttctttttgtagtgagacatacaaatctgatgttaatgtttgctcttagaagtcatactccatggtcttcaaagaccaaaaaaatgaggttttgcttttgtaatcaggaaaaaaaaaaaattaatgaaccttaaaaaaaaaaaaaaaaaggttttgaagggaaaaaaaagtggtttcacacctcttgttattccttaggagtcacttcaaggcctgtttgaatgtgggcaggttagaaagagagagaatgtctttcatttgaagagtgttgggactttgtgttgaaagggagatgtgcgtgttgggaatctgcttttccaagccgccgggttcctggacgggcagcaggacggaagcctgttgtgggcgtcttctggggaaagcctgaccgtgtgtttcggacggcactgggctcctttccgaagttctcagtaactgagcccagagtaactgcacgccttttgtgcagctctggagctccaccaactctcggcctgccagttctcaagcgagctaatcttgtcattaatcgatagaagctaacttccgaagttaggacctagttactttgctctcaacatttaaaataatgcagttgctctagtgaatggggcgttaggggcctgtctctgcacctgtctgtccatctgcatgcagtattctcacccatgttgaatgcctgctgcttgtttaccctttggaaaccctggggtgaccaaggtttggaaagccacctgagaccacttcatagcaagggaaggctttaagcagttactagaaagagatggggatttggcccctggctcctccagcctgaatgagctatttaatccactgtccatgttcctcatcagtcaaatccaaagtcaaaggatttgaacctgcatctggaaacgtaaccactcacagcacctggcccgccaaggttgggaggattgtacactactttcatttaaaggggaaagtttgataatacggaattaattaatatgaatgagatgcattaataagaacctgagcatgctgagagttgcaattgttggttttctggtttgattgatttccttttttcttagacacatcaaagtcaagaaagatggttttacctttactgacccagctgtacatatgtatctagactgtttttaaatgtctttcttcatgaatgcttcatggggctccaggaagcctgtatcacctgtgtaagttggtatttgggcactttatatttttctaaaaacgtgttttggatcctgtactctaataaatcataagtttctttttaaaaattttccaaaacttttctccattttaaaaagccctgttataaacgttgaactttcacaatgttaaaatgttaaatatttggatatagcaacttcttttctcttcaaatgaatgccaagatttttttgtacaatgattaataaatggaacttatccagag

SEQ ID NO: 147952 - DNA, 339 bp, Homo sapiens; identical to SEQ ID NO: 122381

SEQ ID NO: 147953 - DNA, 743 bp, Homo sapiens
  misc_feature (1)...(743): n = a,t,c or g
ttttgctcttgtcaaccccaggctggagtgcaaaggcgtgatctcagctcactgcaacctctgcctccctggattcaagtgattctcctgcctcagcctcccaagtagctgggattaacaggcgcccgccaccacacctggctattttttgtattatttagtagagatagggttttgccatatttgccaggctggtctcaaactcctgagatcaggtgatccacccgcctgggcctcccaaagtgctgggattacaggcatgagccaccatgctcagccccatttgctacttttaaactgtttacttcctttcctgggtatcccactccactcccctctataagcccgatgaactttgttacagttctcagccttggattatagagctgtatggatccatattttaaaaattcaaaccagctcatgctctgattaaaaaaaaaaaaaaaacaaacttttgtgccactttcagagtgtgagaccgcctgggacgcatgctttgggaatttctggagcatttgagaagttgatgggcagctaggaaattctgtgctggaactatgacaagttctgggcagcccatctgccctgggggaggggcaggtttcggagagtttctgtggcctggggcantcccctttcccagggcaaggctctgcacctttcagcacttttgtagcctgtgtncacagctgacgaggacttggtttttnaagaaatatttgggttgggaggggnccgtt

SEQ ID NO: 147954 - DNA, 1494 bp, Homo sapiens
gagacagagtctcactctgtcacccaggctggagtgcagcggcacaatcttggctcactgcaacctccacctcccaggttcaagcaattctcctgcctcagcctcccaaatagctgggaccataggtgcacgccaccacacctggctaatttttgtattttttgtagagatgggtttccaccatgttggccagactctcgaactccctggcctcaagtgatctgcttgcctcaagcctctcaaagtgctgggataacaggcgtggagccactgcaaccccagcggagttatccctaaaataaggaaccactatagtggacctataggggactatgcttttaaatgcccttgttacttagagactggaagcaggaataacatagagcaattgtttttcaaactccagaattcctaggagatttcttaaaggataacttgctgggctgggggtagaagttaggggaatatgttcctcatgcttatttcactgcctaaggcccgaaggccagctacattttcatggtttatgagagtttcatgtaagatttgtcttgagcacaaagttttgtattaaaaaagaaaaacagaggttttcaagatgtcaaagagcaaaaagaagtcctgtgttcctgtgaaatggcacttttcagtagcaatacagatgtactgccttggaagtgtatttctaaaaagcagtcaatgacatgtgatgtgttttatgaaaagcctaatttttcaagtccatggttaagtgaatattttgtatgaccattgtctctaatgtcactataaaatttttaaaagattttaagttgcttttacaaaaaatagctacaatacaaaataaggattaaacaagtttaattacagttctttcccccgccccaatgaaactaactcagtggatccaacttctcatctttaagacatggatagggcaggacacaaattctgcttgtttattgaataagagacacacagtaaactaacaaagaaactaacttaaaataaggtaattctttctgaaatctgctgaatgcctgaagtaaaatgttctaggtcagaagagatttcaatctaattttagttatagaaactgcaacttgtgatgatcctattatcccagctagctttcggcaaaattggtttcattttgtgagaaaaagcaaatatactataggttgtcaggtgtaacaagtccttgggttagagactctgtttggtcttacctaaaatggtaggactgtttttcagtgacattagctacataacacattatgaacttcttggcactatgattagttatacgatgattaaaacactcaaaaggagcaactatcccaactgagatgcagaggcagagcactgtgtgaacattagggtttgctatcctgagtttacatgtcaccatctgaaaaacccaacgacaataaaccttcaactttgaatccttcccaaactccaaaaacatggaatagaagcatctcaactcta

SEQ ID NO: 147955 - DNA, 1110 bp, Homo sapiens
ggaggcggagtctcactctgtcgcccaggctggagtgcagtgatgcgatctcagctcactgcaacctccgcctcccaggtttgagcaattctcctgcctcagcctccagagtagctgggattataggcgcctgccaccatgactggctaatttttgtatttttagtagagacagggttttgccatgttggccaggctggtcttgaaactcctgacctcaggtgatccacccgcctcggcctcccaaagtgctgggattacaggcatgagcaccgcacccggccaacacagatgtttattgatcgtggaggataaattgtggaaaatgtttttctctcttttaccatttttgggaagagggataggtaagtgcagggagtttgtgctgaaacagcgcctggcaatttttcagaaatgaatttgatattgcgctccacctttgagctgttcacacctgtggctacccctggaaagcgctggggttgttgatgcttttggctgcccggcttcctgaggtctcgctgctttttggggaaagatgactggcttccctgtgggacgcttttgtctgacacgtgatgatgtggtcctgcctgccactgtgcaccatcccaggtattgaattttgaccttttcttttcaagtttctgtgcttagtgtttttaatgtttacttttgccacttacaataatatcaccaaaataatatgcatagaggtgtggaagaaacatataaaacatgagcagaatgagacaattccttgggctgcagcttggacccaactgaatcctgagtgctctgtggctgacgctgtctacccgtgggagagacacactcaggagtggccgtttggccaaaaaagaaggtcatggcccctggcctggcccccgccctgcagggacacagaagccacaccatttgcaccatccacgccttgctccagaaggcctggccgccttctccctgggggtgattcaaggatttggtctcggaccagacccccctccacagctgcccggccccagacccatctattggattgagggtgtgtgggctggaaccagtgggtcactgtggcagcttcatctgagccgaaggtgtgggtcctctg

SEQ ID NO: 147956 - DNA, 839 bp, Homo sapiens
tttttttttttgagatatggtctggctctgttgcccaggctagagtgcggtggcacgatttttggctcactgcaacctccgcctcctgggctcaagccatcctcctacctcagcctcctaagtagctggaaccaaaggcacatgccatcatgtccagctaatttttgcattttttgtagacacaggatttcaccatgttgccaggctggtcttgaactcctgaactcaagcaatctgcccacctcggcctcccaaagtgctgggatcatatgcatccatcactgcgcctgggccaacatttttttttttaactatcatcctaggagttcaagtagataaacgtttttatggcaacttaaccaggaaagacattcagaaattgggtaattatgtgtgggaggggttggaattattgtccccacaaaaattcatgctgaagccctaaccatctacctgtacctcaaaatgtgagtatatttgaagataggccctgaagaggtaactaagttaaaatgggattgttaggatgggccctaatccaacctgagtggtatccttattaaaagagaagattaggacacagacacccagacagagggaccatacaaggacacagtaaggaagggcagccatctgcaagccaagcagaggagggcctcaggaagaatcttaaagctgttcgacaccttgtcctggggttttcagccttccagaactgcaggaaaataagtttctattgtgtaagtcactcagtttgtggtactttgctatggtatccttagcccactaataaagcgatgataaccactgaagtttgtaaaaactgttcataaatagtg

SEQ ID NO: 147957 - DNA, 457 bp, Homo sapiens
tttttttttttttttttgagacagagtttcgctcttgcccaggctggaatgcatggcatgatctcggctcactgcaacctccaccacctgggttcaagtgattctcctacctcagcctcccaagtagctgggattacaggtatgtgccaccacgcccggctagttttgaatttttagtagagatggggtttcaccatgttggccaggctggttttgaactcttgacctcaagtgatccacctgcctcagcctcccaaagtgctgggattataggcgtgagctagcgcacccagccaggaacaaatgatttcttatagggttataaggttagtctaaccaacattttaacaatacagcatagctgctgcactcctgaagtttatgacaatctgggcagtttcgatggcaatcaccatgcaaccctacacctcttatgcaacactgtggctattattgc

SEQ ID NO: 147958 - DNA, 1126 bp, Homo sapiens
agcgccatgctgtaggtggggtctggcctggtctctgcccagcaaactggctgtggcccgggcaatccctctcctcctgggtctgtttctggggctatggagttgagggtggagccagcagcaaggggacagggctcgctgggggacccgcctgcctgtgctgctgccaggagctctggaactcccaatacctggcagcttctttgcctctcagagttgcagcccttgggtgatgttgcagctcacatttccccatttctgattactgcttgccccacttcctcctgtgtcccctgcacccactggatgggacttggttagtcagctgcagcctgtctcctcacccagggggcgttgcccgaggtcggggcctgatctgcttcccctccacgggcaacccttccattctagttccttcccttcctcctccatgcaggcctcaggtgaacctgttcagccttgcccctccaggagctcagggtctgaaaaggaggtctacagactgtagagccagagagtgggcctggggccctaaagtgcgaggctttggcctggttgagggggtagggccttttggggcactctggctttgctggctccgttcctgaggtgacacccggatcaccccacgtgttaaaccccgagccgcgggctgccctgtgctggatattgcctacatccagcagccctctgagggatggtttttggcctgcctccgttgccagggtcctcactggtgtgaccaaccatctggcttttaacactaaaaagccccacatcctgaggaatcccatgacacagaaagccctgggttttttcagtgatgcacaaggttgggtggaaagtatgaaacccacacagagggatgacagcaccatttgtagcatcggatggaaatggcgtggatgatctgcctcgagtggtcactgtcgccatgttgcctgacgtggatgctggcatcaggacttgtgattcaccatggatcacatcactcaggctgcaactccgcacgctgcagtcatgcatgttagcagcacttgcctaggagtctgctgcagattcagtgttgggctttttgtctagacggtgctggtttcagtcttgacatcatgaatattgggactgt

SEQ ID NO: 147959 - DNA, 1008 bp, Homo sapiens
gttttgagacagggtctctctctgtcaacccaggatagaatgcagtggcactatgatagctcactgcaaccttgaactcctgggctcaagtaatcctcagcctcccaagtagctgcgaccacaggcacgtgccatcacacctggctaacttttttgtttgtttttgtttttggagatggagtctcactgtattgctcaagctggtcttgaactcctggcttcaagtgatcccaaagcactgggattacaggcatgagccaggcatgcctggctgggttttcctaatttcttaaaatgaactggtcatttatttgtgaactctcttcttgtataataatattaggctataaatttccctgtaagtactgctttagcggttatcccccaaattttgatatagtgtgcacttgttttgtgtgagatggaattagtttaaaattggactggaaaagctctagttttgtctgtagggactttaggtatctcattttgacatttaaatgcagtgagctttattattattgtttaacatctggaagatcccatgacaatatggagggcaagtttgactgctgatggtttctggttggcatacgtgattaggtaggcactctggctcaactgtgttaccccagaagggtataaaatccctgcatgggatcatctgacttgagctctcctgaagccagcatttctctctcagatattggtggcttggatcctggaaagtgaaatccatatccagtgtaatgaaatgggagtcctggaaaactgcccggatttgtgtcctgacatagcatatgggcacgcattctttctcttgctgcaccgatatcctttgccttaacaaaacctcacacgagtattctctgtggagttttgtgagtattttcaattacatttttgaaattttttcatttggtgatgaaaatgggatatttgctatgatctctgagtccattttaaataacaatggctaaggagttattgggcagaatgaaatatggt

SEQ ID NO: 147960 - DNA, 365 bp, Homo sapiens
  misc_feature (1)...(365): n = a,t,c or g
ggcacgagccattctaaaaaataactaggcagaaatcttcaaaaatattaaagtcacggaaaccaagaaaaaatatgaacctgttccagattaaaggaaactaaacagacctaacattttaatacaatgtttgattttgaacttgaactttttgtnnnnnnnnnnnnnnnnnnnnnnnnnnnnnnnnnnnnnnnnnnnnnnnnnnnnnnnnnnnnnnnnnnnnnnnnnnnnnnnnnnnnnnnnnnnnnnnnnnnnnnnttgattgcacaaggagaatgtctttatgtgtggaaaataaatagtcaacattctgtcttcaagcttctgaaaaaactctgcttttagggcatagatagaagtggatg

SEQ ID NO: 147961 - DNA, 1500 bp, Homo sapiens
ggctcactgcaacctctgccttccaggttcaagtgattctcctgcctcagcttctcgagtaactgggattaccggtgtgcaccaccgcactcagctaatttttgtatttttagaagagatggggttttgccacattggccaggctggtctcgaactcctgacctcaagtgatttgcctgcctcggcctcccaaagtgttggtgttaaggacatgagccacagtgtccagccaaccagagactacttgtttcgtggccatatttaaacggtctaagaagggaaaagtggaagactgtgtctgtactttaacattaatgaactattacaatttagaaacatatataagtctcccacacttcctttattttcacaaaaatgccatagagagacaaattgaaacataaaaaactagatatattctctcatcccatgagccagccatggaaacagagagcagctcaattagtagcagaggaacaggtgaattatcatccacttctatctatgccctaaaagcagagttttctcagaagcttgaagacagaatgttgactatttattctccacacataaagacattctccttgtgcaatcaaactaccaatgtttaaaatcaggaaatttgcattaatgtattattataatctaatccttcagccctattcaagcattagcacttgtctcaatagtgtcttatataacaaaaagttcaagttcaaaatcaaacattgtattaaaatgttaggtctgtttagtttcctttaatctgaaacaggttcatattttttcttggtttccgtgactttaatatttttgaagatttctgcctagttattttttagaatggctctcccatcttgagtatgtgtgatgtttcctcatgtatgaatgaagcatatacatctttgtcagaaatatcccagaagcaattctgtactctcctcattatgttctgttgggtgggccatggtttttgatttgtctcattactgatgatggttacttttattatttgataaaggttgtatataacttatctattatggcataatacattagctaaaaccttagcggtgtaaaacagcagatacttacgtttctcataggaatggctctattgagtacctctgtctcaaggcttctcaagagtttgtagctaccttgttggctggggttgcggtctgatctaaaggcttagttagggggtggtagaaatcttccatatgttctttgctacgtggacctcacaggcctacatcataacgtggcagctggctttcctcagaatgaactacccaaaagagagctagacagagagaaaaaccctctgatggaagccatagtctatctataccataatctggaaagtgacttcacctcccgtccgccatattatacaagtaagtgctacgagaatacaagaaagccgggatcattgagggctttccaacagtctacgcaccactctatatactgtggctctcaatgattcatgttgct

SEQ ID NO: 147962 - DNA, 336 bp, Homo sapiens
  misc_feature (1)...(336): n = a,t,c or g
ggcacgagcttagaagaaataatctgattcttgaaaaccacaaactattaaaactcaaccaagatgaaataatctgaatatcctataaccattaaagaattaaattcataatttaaaatctcctgataaatctccagacccagatgccctggcttctttgnnnnnnnnnnnnnnnnnnnnnnnnnnnnnnnnnnnnnnnnnnnnnnnnnnnnnnnnnnnnnnnnnnnnnnnnnnnnnnnnnnnnnnnnnnnnnnnnnnnnnnnnnnnnnnnnnnnnnnnnnnnnnnnnnnnnnnnnnnnnnnnnnnnnnnnnnnnnnnnnnnnnnnnnnnnncttn

SEQ ID NO: 147963 - DNA, 798 bp, Homo sapiens
tacataaatgtaattatacattttgtacacataaactgctggcgggaatgtcaaaaggtacaattaacttgaaaaagacttttagcagttccttaaaaatttaaatatacacttatcatatgatttagccatcccagtcctaggtatttgcccaagagaaatgaaagcttatgtccacataaagacttgtaaatgaatgctcatagcagctttacataatagcccaaaactggaaccaacaaatgtccatcaacaggtgaatggtataaacaaactgttatattctataccatgcagcactactcagcgataaaaaataatgaatgattgatacataaaacaacatggaagaacctcaaagaagccagggcatctggggtctgaagatttcttttatcaggagattttaaattatgaatttaattctttaatggttataggatattcagattatttcatcttggttgagttttaatagtttgtggttttcaagaatcagattatttcttctaagttgtcatgtgtataagccgaaagttacagtatttcctcattatctttttaatgactgcctgatttatagtgatactcttcatttcattcttgataataatgatttgtgttttgtctttttgtcagtctttctacaggtttatgggattttcttgattgttttttgaagaaccagttttttgtttatgtatttttctatttgcagtttcattgatttctgcttttggttatttcctttcttttgcctgctttgggcttattttgctattctttttcttgtttctt

SEQ ID NO: 147964 - DNA, 779 bp, Homo sapiens
  misc_feature (1)...(779): n = a,t,c or g
gcgcacgctgcttcacctcttcgccggcgggtgtggaggcacagttggtgctattttcacttgtccactagaagtcattgagacacggttgcagtcttcaagattagctctccggacagactactatcctcacgttcatctggggaccattagtggagctggaatggcgagaccaacatccgcgacacctggactctttcacggtctgaagtcgatcttggagaaagagggaccaaagtcactttttagaggctcgcgtccaaatttggttggagttgcaccatcaagggctgtatactttgcatgttactccaaagccaaagagcaatttaatggcattttcgcgcctaacagcaatattgtgcatattttctcagctggctctgcagagtgaggggctctaagcagatgaatacactccagtgtgctcgttacgtttaccagaccgaagcattcgtggcttctatagaggattaactgcctcgtatgctggaatttccgaaactataatctgctttgctatttatgaaagtttaaagaagtatctgaaagaagctccattagcctcttctgcaaatgggactgagaaaaattccacaagtttttttggacttatggcagctgctgctctttctaagggctgtcctcctgcattgcttatcacacgaagtcataaggacgaggctccgggaagagggcacaagtacaagcttttgtcagacggcgcgcctggtgttccgggaagaaagctacctgcctttatagaggnctgttgccca

SEQ ID NO: 147965 - DNA, 1187 bp, Homo sapiens
ctcttcgccggacgggtgtggaggcacagttggtctattttcacttgtccactagaagtcattaagacacggttgcagtcttcaagattagctctccggacagtctactatcctcaggttcatctggggaccattagtggagctggaatggtgagaccaacatccagtgacacctggactctttcaggttctgaaggctgtatactttgcatgttactccaaagccaaagagcaatttaatggcattttcgtgcctaacagcaatattgggcatattttcccagctggctctgcagcttttatcccgaatcccttaatggattcctatatggatggttaaaacccgaatgcagctagaacagaaagtgaggggctctaagcagatgaatacactccagtgtgctcgttacgtttaccagaccgaaaggcattcggtggcttctatagaggattaactgcctcgtatgctggaatttccgaaactataatctgctttgctagtttatgaaagtttaaagaagtatctgaaagaaggtccattagccttctttggcaaatgggactgaggaaaaattccacaagtttttttggacttatggccagctgctgctctttctaaagggctgtgcctcctgcatggcttattcccacacggaagtccattaaggacggaggctcccgggaaaaggggcacccaagtaccaagtctttttgtccagaacggcgcgcgctgggtgttcccggggaagaaggctacccttgcctttttatagagggactgtttgcccccagctttatccggcagatccccaaatactgcccattgtgttgggctacttatggaggttaattgtgtacctgttaggaagaccgtaacttcagtaacagggccgggaaaattgtggctctagaagaattaaaactggaaaaactctagaggaatttttttttccccttggatgtttagaaagtttgagactgaaacaggaaaggccataaaatatcttggttcatatcacctgttggacatttccttttggattcatgctttctggaaggtttaaattcattaacggttaatagttaattataactttttttttaacttaagaggattcagggttaagcaccaactaaattaaatcatgctatttaatttaagtataaaaaaaaaccaaaaaaaaaaa

SEQ ID NO: 147966 - DNA, 2219 bp, Homo sapiens
  misc_feature (1)...(2219): n = a,t,c or g
tttttttttgcccccgagacagagtcttactctgttgcccaggctggagtgcagtggcacgatcctggttcactgcaccctctgcctcccaggttcaagcgattctcctgcctcagcctcccaagtagctggtactacaggtgcgtgccaccacacctggcttattttagttattttagtagagatagggtttcaccatgttggccaggctggtctcggaactcctgactgcaggtgatccgtcctccttgggctcccaaagtgctggggattatagggtntgagcccccacgcctggggccaacttgattatattaattttgggttttttgttttgttttgttttgttttttaatttttcaaagaatttgtggatcttggtataaagtcattggaacatatctgttttaacagcaagagatcctaggcagatacttcaaaaggttaaaaattcttaatcctacagaaattttaaatgaatcttatcaatgttttgtaaacaaacaatatgaatggccaaaaaaattgccctccattttactggcaggtaatttatattgtcttacttaaaaatccccccctaatttttccaattgtactttatcgtgttgttttcaatgagataagtattttcctaggggaaagcattttccagcataatatttgcttgggtagcatcccgggttttagtattttaaccaaggggccttttaaatattgaaaacccatagttcagaaaatgttagtattgctgcccttctttcacataaatttttttttaaattatactattattttgcttaattttatattgggttaaaacaaccttcaagaaggttaactaggaaagaagacctttttgttttatttttactatttatatatagaagacaaatcaggcattggtggatagttttacatggaccagttatccaacgggtcatagtatggaagtgtggcagttggttccttattagtaaattatgtttgatttttaaacctatttaagtactaaatagttgagatgaaaactgaaggaaaaatgccaatgtggacgtttgtgtatagctagccttaaaaaaacttcccatggtttttagggtgacttttttcccccctccttaagtactctgggggaaacaatgaagaatggggccatctccaattccagatgtaaacaaaaagtaatttttatttcaacatttaatgtaactgctattattgtggattcttgtcttgtgtattttctttcccttattcaagtaatatatgaataactttccttaaaatgatttgatccaagatacgtcatttctgtattggcaaaaatgccacgtattaaagtgtaattcttgaatttaggttgaattgatgactttttaaaacaaaacaaacactggacagttctacattgtattgccgtttgcgaattgccgtgaacaccacgcacacgtgcaggagaatgtagtggccataagaacactggcgctttttaaaactttcccaagctagctacttattttcattttcagggttgagtactctaagctctctacttactgtgagaagttttctacattgtaaaattaaaagattatatttaaaatacttctttagggatgttattcagccatcaaaaaaaaacccaactaaaatgtcttacccgtaaaagtatttatttaaaagcctcatttgtgggagatttcggtggactttccttgggttaagctggtcttggtatttacttaatttgtccccctcaacccaggtgttttcttttcagcctgttactgtccctgtgcccatttttaaaaatagcccatccatgagtaagggccttcctttaaaataatcccctgacaatatcctttggcattaatacgacaataaagacaagacagtatatgtatgttttccattccctgttttgtacggagtgccctcattttgtagtcatgaaagtaacatagtaccttaaataaaaatgtaatgactaatcctaaggtcctaggaataactattgtagaagctaagtagaacgacttagtttggggtgtcaattttctatcaacgcaaacaccttagggtacccagaccaattttatgtatatatattctgaaaatgctccctttttaatgtggtccatttgttgccttctaagttgagaggacaaaactgaataaaatggaatgttaattgtaaaaaaaaaaaaaaaaaa

SEQ ID NO: 147967 - DNA, 378 bp, Homo sapiens
ccctcatggggcttatgattctggaagcactgctttgcacagggaagtagcaccaggagggggtaaagaaagagggactttggagccccaagattggcaaaaactatagctaatgagagaggtgaactgtagagtctagataatggggaaggagaggtgccagagcaagaagggattctcacagggccctacgggtcagtcctgaattggctttactagaactcaggcccagcacaatggctcacatctgtaatcccagcgctttgggaggccgaggtgggtggatcacttgagatcaggagtttgagaccaacctggccaacctggagaaaccctgtctctactaaaaataaaaattagccgtcatggtggcaaaaa

SEQ ID NO: 147968 - DNA, 390 bp, Homo sapiens
ggtaatattgtttacaaagtagcttattagaaatgcttaaaaggaaacttttaggagtcctttgtttactatttatttaacaaatgttgatcaaacatttatgtatcaaatatttaacattaaagggttatttatattttattactgctagaaaaggcctttcagacttgaagtcaaaatggagagttaatagctgacttcttcctctgcaggtgttacaagaggcatttagtcgctgtgtggctgtcttgactcgttctagtaaaccaagtgacatgtcagtacaggtgtgtggatacataagtaaatgctacagtgtggctgctcagtttgaggaatgccgagagaagatcacggaaatgcctagcatcatcaaggatctctgtcggg

SEQ ID NO: 147969 - DNA, 357 bp, Homo sapiens
  misc_feature (1)...(357): n = a,t,c or g
cagcatgccagctaaacttttccttatggttgaattttctggagttgcttgttcttcagccaaatannnnnnnnnnnnnnnnnnnnnnnnnnnnnnnnnnnnnnnnnnnnnnnnnnnnnnnnnnnnnnnnnnnnnnnnnnnnnnnnnnnnnnnnnnnnnnnnnnnnnnnnnnnnnnnnnnnnnnnnnnnnnnnnnnnnnnnnnnnnnnnnnnnnnnnnnnnnnnnnnnnnnnnnnnnnnnnnnnnnnnnnnnnnnnnnnnnnnnnnnnagacttatttattacaggcttctcttttctccctgccactcattctaatgttcagatggaacccacttccctttagatgtatcactata

SEQ ID NO: 147970 - DNA, 597 bp, Homo sapiens
  misc_feature (1)...(597): n = a,t,c or g
aagtttccaagccnaagcctccgagtaatttaagaggtaggaacccaaacctgcttcagggttgtgctactaattcactctgcnccttctgaaacattcgattaattgcttcacaggctaagacccaacagtatctgctcgcttttttcattcccattccatcagtgggccaatggtctctaaagatgccatggctcgaacacacagctcattttccagacaaggcatggataacccgaatggcactccttaggaatggcattgttccctatgattcattgccctggataactttgggaagatggcccaatggcgggacctgatctgccagctgaggttgtgcgctgaagagacacactgttgccattgtcaaggtttccagagtttctccctgcaggtgtaaaacaaaaataaatcaactataaaatactcatacagtcctaaatatccaaggtaatgtatttggtgttcaaaactagggattcaaaagttctaaagtgctgatacttgaaaacagattcactaatcctaagagaacaacgaacttcccattttctttcataaaaggcatgaatctaaaggactttaagaatatgc

SEQ ID NO: 147971 - DNA, 3924 bp, Homo sapiens
cacacctcgtcttcagagtaacacaagagcactttatcagtattgccccattcctataatcaactatccacaactcgaaaatgaactattttgtaatatttattacctcaaacaactgtgtgatacactccggtttccagattggccaattaaagacccggttaagcttctaaaagatacccttgatgcctggaagaaagaagtagaaaagaagccacctatgatgtcaatagatgatgcttatgaagtgcttaatctgcctcaaggacagggaccgcatgatgagagcaagattaggaaagcttacttcagacttgcacaaaagtaccaccctgataagaatccagaagggagggacatgtttgaaaaagtaaataaagcatatgaatttttatgtaccaaatcagcaaaaatagtggatgggccagatccagagaatataattttaattctaaaaacacagagcatcctcttcaaccgtcataaagaagatttacagccttataaatatgcaggataccccatgcttattcggactataacaatggaaacttcagatgacctccttttctcaaaagaatcaccattgttgcctgcggctacagagctagctttccatactgtcaactgttcagccctcaatgctgaagagctcagaagagagaatggactagaggtgttacaagaggcatttagtcgctgtgtggctgtcttgactcgttctagtaaaccaagtgacatgtcagtacaggtgtgtggatacataagtaaatgctacagtgtggctgctcagtttgaggaatgccgagagaagatcacggaaatgcctagcatcatcaaggatctctgtcgggtactatattttggcaagagtattccccgcgtagctgctcttggggtagaatgtgtcagttcttttgctgtggatttctggctacagacacacctatttcaggctggaattttgtggtatctccttggttttctgtttaattatgactacacactagaagagagtggcattcagaaaagtgaagaaacaaaccagcaggaggtagcaaacagccttgccaaactgagtgtccatgctctgagtcgccttggagggtatttggctgaagaacaagcaactccagaaaatccaaccataaggaaaagcttagctggcatgctgacaccctatgttgctagaaaacttgctgtggctagtgtgactgagattttgaagatgcttaacagcaacacagaaagtccatatttgatatggaacaattctacaagagcagaaggacttgaatttcttgaatcccaacaagaaaacatgattaagaaaggtgattgtgacaaaacttatggatcagaatttgtctacagtgatcatgccaaataacttattgtacgttagatttttgttagggtgtataatgaagttcctactttccaactggaggatccaaaagcatttgctgcaagtctcttggattatataggctcgcaggcccaatacttgcacacattcatggccatcacacacgcggcaaaagtggagtcagagcaacatggagatcgcttaccgagagtagaaatggcttttgaggctctgagaaatgtcataaaatacaatccaggttctgagagtgaatgacattgggcactgtaggtgtatattttctcttctccgcgtttcatggagctggtcaagtacagcaggttggctttaagaggttgtgaatatagtgacatctaaccaagactgtgtcaacaatattgctgaatcaatgggttttgtccagtttattggctcttctacattcattgccatcaagtcggtcagcttggttctgggaaactctttatgctttggacatccgagtacaaaaattaatcaaagaagcaatggcaaagggtgctttgattccatttactggatatgttctgcaattcaacacatccacaggttcgagcccaaacagcagaactttttgccaaaatgacagcagataaactgataggtccaaaggttcgaattaccgttaatgaaatttctaccaagcgttttcatgggatgctatgagagacaatcctgaagctgctgtacatattttttgaaggaactcatgaaaatcctgagttaatttggaatgataattccagagataaagtgtccacaacagttagggaaatgatgctagagcactttaaaaatcagcaggacaaccctgaggcaaactggaagttgcctgaagattttgctgtggtgtttggagaagcagagggtgaacttgctgttggaggagtcttcttgaggatctttattgcacaaccagcctgggttctaagaaagcctagagaatttcttattgccctgttagaaaaattaactgagctcctagagaagaacaatcctcatggagaaactctggaaaccttgacaatggcaacagtgtgtctcttcagcgcacaacctcagctggcagatcaggtcccgccattgggccatcttcccaaagttatccaggcaatgaatcataggaacaatgccattcctaagagtgccattcgggttatccatgccttgtctgaaaatgagctgtgtgttcgagccatggcatctttagagaccattggcccactgatgaatggaatgaaaaagcgagcagatactgttggtctagcctgtgaagcaattaatcgaatgtttcagaaggagcagagtgaattagtagcacaagccctgaaagcagatttggttccatacctcttaaaattactcgaaggcattggccttgaaaacctgggacagcccagcagccacttaaggctcagaattggttaaagctcttcaagggcaatgactcgaagttttgcagtatggggagaacagggtgaatgaaatcctgtgccctttctttcagtctgggagtgcctttcaaagatccaggaacatgatttgttcatttcttgaggtcacatacagcaggatacctcacaggacctggagttgctggctaccttaccgcaggtacatctacatcagtcatgtctaacctgccacctcctgtagaccatgaggcaggcgaccttggctatcagacttgaaatattcacgagagacaataaacgctgaaaggccagtgccaagtccacattcctccagctgatacgttgaagcaaactcttactgcctttctcctggtttcatgacagtgttattcctttttctataaatatatttttaggaaaaaaagtcagtgatcctaattgtatcacattataagaaagcactctgtggatcaacataagtgggtacacaagaatttttttttttcttggtgtatgtaaggcacatttggtcccttaaatccgttttacaaaaccggtgatccaaaaaggccaaaactttctttctaaggtttttgtaatttttttttttggaacctagccatgactggtggggttgagcctacagtcaaacaaaaattggggcctaaggtcaccttttccccccccggaaagaatattttccccctctccctgcatccaaagtcctgccgtggcccatccctccccccccacccatcccaagacctattaggttttgtcccctgcaccccttcactggcatccctcaatcattaacccttctgaaaggctcacagtacacattagtatgtataactggcttttaccaaattgaatgacaaggagcttgtgcaaaacaaatttaaaaatggatgtcaagatgtcatgtaaaagatgagtatcattctgaaatgttctctacaactatcacatatataaagcttctctatattgaatgtacattatacagatcattcatatgtgtacataaaattttaaaaataaagggaattgactgctttgttaatgagaaaaaaaaaaaaaaaaaattccctgcggccg

SEQ ID NO: 147972 - DNA, 358 bp, Homo sapiens
aacagactcaatgcaacccctattaaaattccaactgccttttttgcagaaatggacaaactgaatcctaaattcctaaaactgaattcctaaaatttatatagaaatgcaagggactccacatagccaaaacaatattgataaagaaaaagaacgtggataaacaaaaacaacgctgggggactcatacttccctactgtatcttactacaaagaaacaataatcaagacattgggtaaaaaaatgttttaaagataatgtagtaatggcatagggacagacacagaccaatgaaatagaaatcagagtccagaaataaacccttaaatttatggtaaattattttcaacagtatta

SEQ ID NO: 147973 - DNA, 370 bp, Homo sapiens
  misc_feature (1)...(370): n = a,t,c or g
cctccccagactcaagcaattctccctgcctcagcctcccnaagtagctgggattacaagcgtctgccnaccatgtccagcaaattttttgtatttttagtagagacagagttttaccatgttggccaggctggtctcgaactctttacctcaagtgacctgcccaccttagcctcccagattgctgggattacaggtgtgagtcactgtgcctggcctgaataatcaatattagttcaacactctttttaaaagtatgaaaactgtgacttggacaagttgagtgaatagcccaaggtcacaccgttatttagtggccaagttgagattagccaaataattgtattgaattaacaaagtaaaggcactt

SEQ ID NO: 147974 - DNA, 359 bp, Homo sapiens
ataatagttaaaaagtggaaacaacccaaatgtccaccaactgatgaatggataaataaaatgtgggatatccaggcaatagaatataatttggccatataaacaaagtagtgatacatgctacaacatgcatgaaacttgaaaacatcatgctaagtgaaagaagtcagttacaaagggccacatactgtaatgatgccatttatataaaaaatccagaataggcaaatccatagagaacggagataggaaacagattagtggttgccagaggagggtatagggagtaactgctaatggttactgagtttctttctggggtgatgaaaacgaagccctcaaagagcttctagtctaga

SEQ ID NO: 147975 - DNA, 790 bp, Homo sapiens
cttttctttttttttttttagacagagtctcactctgccgcccaggctggagcgcactggcgcgatctcagctcactgcgacctccacctcccgggttcaagccattctcctgccttagtagctgggactacaggcgcacaccaccacacccagccaatcttccttgcatttctagcagacacagggcttcaccatgccggccaggctggcctcaaactcctgacctcaaacgatccgcccaccccggcctcccaaagcgctgggactacaggcgtgagccaccgtgcccagccatttttttctgaactacctaccatttttttttccctttaagccttttatggaaatatctaaaatagtagggattaatgatcatggactagaaagttatttgattttatgtcctcagagattaataatgtaaagctgaagatgattttttaatcaaagaatctgatagtgtaaaatatctgatgtaggaatatgtaattgatgacaactgagggagctaataagagtaaaattagaaaactctaaaagagaaagcgtaatagatttgctctgctctgcacaactcatttgatttaataaagtcactatgtgtgcatctatatggctttactgtaagcacaagatgtcagctgatataaaaaattcctaatactttgtacttggtctgagaattggcaatgtagggtcagactttcacttatttctcttattttccctagatgcaatgttccacccttcatgccttatttgccttgaaattcagaacttccacctgcg

SEQ ID NO: 147976 - DNA, 1292 bp, Homo sapiens
agcaaacacttccctctgccactgtctccccagagcaggctggtgctttcccccttgccctccactctgcccaagagtccctgggaccagcgcagacagttccagggagcacagggcctccgcagccagcacccagcggtccgggcccaccaggagagccgggatgagagcgcctgtgtgccagtcacaaagcgtttatttcacacaaacaatctcattgaagcccacaataaccgttccagggcaggtttgacgcttttccaggttacaaacaacaaactcgcccaggccacacagtcagaaggggttgcgggggcctcgaacccagaccttgagtctcacgagccagcccacggcatgcagcgagaattctcaggggtcacagccgtctcccaagcggacactgtcatgaattaccctgtttctaacgggtgggaaaatccaaggctcagggtgattcaagtaacctacctggtaccccatgtaccattctttggggatgagacagttaaaaggaatcaagctctggggttttaagcccccaccccacccctccacccccggttttctggatgtctaaagctgcgtcccgaacctggcaggtgcctcacaggtcaatgctgattgtcaccaacggtggggacaaagacttctcaggtagaacagcctcctcccaaggcaggggcttctgaagcctccagcctcagggagggcatggggggcggaggagcaggtcatcactccgtttggaaattgccaaatgtattctacattcttaaaatcacctgggccacaacaccaacaaagacatgttggtccagatgaagttttatcctagatacaaatatttccaaaatattgtgtttccactggggggaaacccaccagtgactgcctgtccccggcaggaagggcagtgaggccccagaacaggtagagacccatccccagttcagcgtttcctccgaagagtctttgccaagaaacacaccctttccttttaaacaaatgcgcgtacgctagccaaacagcccactcagctctttccagccatttaaaccctgccctccacaggtggcgagcatctattatgtgcctactagtgcaggaggcagggtgtaaagggccagggcagtgtgggcctcagaggaggggttcaagggcagcttcgtggaaatctccctgagcctgtctccccacccgtcctcaggagaccaggacccagccccgcccacctccaagggacactaggtgcctgatagagccccccagccttaggtcacacacaggcc

SEQ ID NO: 147977 - DNA, 361 bp, Homo sapiens
gagaagagtcttgctctgtcgtccagggtggagtgcaatggtgcgatctcagctgactgcaaactctgcctcccaggttcaagcaatttttgtgcctcggcctcccgagtagctggaattacaggtgcccaccaccatgcccagctaaaaaaaaaaatgctattttaaaataattaggtcactaaataagactccaggtggacatgaatttggtgggggggggacatttcagcccactacagtgataacagagaacatcaggggatatgctacaatcattagagctgaaagaacctcaaaggtaaccttttccacagatgttaaacagacttcttctctgatgccagccccaagggactgg

SEQ ID NO: 147978 - DNA, 643 bp, Homo sapiens
  misc_feature (1)...(643): n = a,t,c or g
taatttttgagatagagtttcactcttattgtccaggctggagtgcaatggcgctatcttggctcactgcaacctccacctcccgggttcaaacgattgtcctgcctcagccttccaagtagctgggattacaggcatgtgccaccatacctggctacttttttgtatttttagtaaagatggggtgtctccatgttggccaggctggtcccaaactcctgacctcaggtgatccagccgcctcagcctctcaaagtgctgggattacaggcccaagccaccgcacctggcttagaagctttttaatttgatgtgatcccatttgtccattttgctttagtttcctatgcttatagggcattactcaagaaatctctgcccagttcaatgtcctggagagcttctcaatgttttcttgtagacgtttcatgcatggaggtcttagatttaagtctgtaatccattttaatttgattttgtatatgggcgagagatagcatctagtttcattcttcctcatggattgcttctgcttgagacaggatcgctctgtcaccaggctggagcgtagtaacatgctatagtcatgnagcctaacctccgggctcaaggatctccactagctcccatagtgagacacagc

SEQ ID NO: 147979 - DNA, 456 bp, Homo sapiens
tttttttttttgagacagggtctaactctgttgcccaggctggagtgcagtggtgtaatcatagctcactgcggcctcgaccatctggactcaagtgatcctcctaactcatcctcccaagtagcttggactactggtgtacaccacactcagctactttttaaatttttttgtaaagatgaggtctcactgtgtttcccagactggtctcaaactgtctagagggtagagcacattagagatgagtatgaaacaacacagcactgcttatatcctagtaactgaagctgcataatacatacatgtgagtttattatgctattctatttgtaggtgtacagattgagtttccttaatccaaaaatccaaatccaaaacttcccgagcaccaacataacaaagaaaaaactccctggagtatatcggattttggatttctggatttagaatgctcaa

SEQ ID NO: 147980 - DNA, 318 bp, Homo sapiens
gagacagagtttcgctctgtcgcccaggctggagtgcagtggcgtgatcttggctcactgcaacctccgccttctgggtttaagtgatcctcctgcgtcagctcccaagtacctgggattacaggtacatgccaccatgcccggctactctcctgaacacttaaaaaatattttattcataaggatatcagaggagaatattatccttatccataagcaaattatggataaaatatcagtattttatccattaggatatcaatgattatgatttgtaagatactacttcctcaaaattgaggatttttctgtcttgtg

SEQ ID NO: 147981 - DNA, 267 bp, Homo sapiens
  misc_feature (1)...(267): n = a,t,c or g
gcacgagctgaaatgctgattgtacagtatattcttcccagattgactcactgtgcaatctttacaatactttttatcttttcacttttgacataggtaatgttgttgagcagttgagcaatgttcagtccagttgtgaagctggagaagnnnnnnnnnnnnnnnnnnnnnnntgaggnnnnnnnnnnnnnnnnnnnnnnnnnnnnnnnnnnnnnnnnnnnnnnnnnnnnnnnnnnnnnnnnnnnnnnnnnnnnnnnnnnnnnnnnn

SEQ ID NO: 147982 - DNA, 1490 bp, Homo sapiens
tcaaaaggtaaacttctttacaaagaaaagtgttagcaactataagctctggaaagaccagcatcagggcctcttcccacccactaaatctaatttcctatctctagaagctactgtggctaaactcttagaaaccagttacattggctgggcatggtggctcatgccaaatttaatgcccaaaaggaggttgtgagctttgggcctgacagatgctgctttaaataaatatgttgagttttaaatcatgcacctgaggcttctgagttgctttgagaccctttctgctttacttccataagtgggtgggctgagttaaaaaaatcttcaatcaaaatcatgaaaacagttgtaatttttaagatactgaacagatatactgtatacaggaaccagaatatggcggaaaaaagtattgcacaaaacaatctagaagttatgtttcctggaccactcatttttcttcttcattcatagaccagagcttgctttctgaaagcatggcataaaagtccactgctcctcactcctctgacttttgagactttctgacttaaaaaacctagaatctttttttttttttgagacggagtctcgctctgtcaccccaggctggagtgcagtggcgggatctcggctcactgcaagctccgccacccgggttcacgccattctcctgcctcagcctctccgagtagctggggactacaggcacctgcctccatgcccagctaatttttttgtattttttttagtagagaccgttagtatttttgtattcaccgttttagccgggatggtctcgatctcctgacctcaagtgatccacccaccttggcctcccaaagtgctgggattacaaggctgagccaccgcgcccggcctctgctttgttttttaaaaaaaaagaaatgcaagagagggagggaggcgcctcctgaccataaaagctgatttcttgatttttttttcttttttttttgaaatggagtcttgctctgtctccaaggctggagtggagtggcatggtctcagctcactgtaagctctgcctcacaggttcacgccattctcctgcctcagcctcctgagtagctgggactacaggcgcccgccaccacagctggctaattttttgtatttttagtagagacgaggtttcaccatgttagccaggatggtctggatctcctgacctcgtgatccacctgccttggcctcccaaagtgctgggattacatgcgtgagccaccgcacccggcctcccctcacttaatttttaaaacccatttctcttctccagcttcacaactggactgaacattgctcaactggctcaacaacattacctatgtcaaaagtgaaaagataaaaagtattgtaaagattgcacagtgagtcaatctgggaagaatatactgtacaatcagcatttcagagctggaagggatctttaagatccaatccagcacccacattttaccaatgag

SEQ ID NO: 147983 - DNA, 782 bp, Homo sapiens
gagacaggatctcactctgttgcccaggatggagtgcaattgttgcaatcacagctcactgcagcctacacctctgggactcaagcaatccttctacatcagcctccctagtagctagggccacaggcttgccccactgcatcctgctaacatttttgggtttcccttgtagaaatggggtctccctatgttgcccatgctggtcttgaactcctgggctcaagtgatcctcccaaagtgctggggattacaggcttcagccactgtgcctgggctcttcattaatttctatgactatataatggaccagagttcatttaattaggtccctactgataggattttttgaggtactgcccatttaaacaatggctacaatggaataaggctgtacattcacaattcctataagtaaaattccctaagtccaaagggcatgtgcattttataattttgatacttacaaattgttgcctgcaaagatcgcactactttaccttctcactagcaatgcacaaaaattaacaatgcattccttgttagtttgtaggaatgctgtatatattacggaaattagccttttgcctgtgacaagttgcatatattcttttctcaggttgtcttttgtttgtagtggttggtaccaggtaaaatttgttaaacatttttacacagttgactttattcatcttttcattaatggcttgtaggttttatagtatagttagaaagaccatcactaatctggtattataaaataattctcctcgtgccgaattctt

SEQ ID NO: 147984 - DNA, 1040 bp, Homo sapiens
tgagatggagtcactctgtcacccaggctggagtgcagtggcgtgatctcagctcacggcaaccccctccttccgggttcaagggattctcctgcctcagcctcctgagtagctgggactacaggcacaacccaccacgcccaatttttttttttttttttttttttgagacggagtcttcctctgtcgccaggatggagtgcagtggcacgatctccactcactgcaacctgtgcctcccgggttcaaacaattttcctgcctcagcctcccaagtagctgggactacaggtgtgcggcaccacgcccagctaatttttttgtattttagtagagacgggttttcagcacgttggccaggctggtctcaatctcttgaccttgtgatttgcccaccttggcctctcaaactgctggaattacaggcgtgagtcactgcacccagctggctaagttttgtatttttagttgagacggggtttgccatgttggccaggctggtgcagttttgattttatgtttatttctacattctaaaattaatatgttttccccacttcactgcacacctgcttccactgtgtcactcgcacctgccacagaggccgacacgcaagcgcttgtacattcggtggagatgggaaagaacgtggcctgcaaacgcagagctgtgacccccaaataacactgttcctctcctcctctcccttcctgtgaggggaaagacccacttagccctgagccccatctctcagcatctgggtctgaaagaggcagccagtccctgtgagccccaaagccctgacctcagagctgcaggagagagctgggagctgcgaggtgggagctgggagctgcgaggtgggagctgggaggtggaaactgggaggagggaggcgggagctgggagctggcaggtgggaggcaggagctgggagctgggaggcgggaggcgggaggcgggagctgggaggcgggaggcgggagctgggagctgggagctggaaggtgggagctgggaggtgggaactgcgaggaag

SEQ ID NO: 147985 - DNA, 552 bp, Homo sapiens
gagacggagtttcactcttgttgcccaggctggagtgcgatggcacattctcggctcactgcaacctctgcctcctgggttcaagcggttctcctgcctcagcctcccgagtggctgggattacaggctcatgccaccatgtccggctaatttttgtatttttagtagagatgcggtttcaccacgttggccaggctggtcctgaacgcctgacctcaggtgatctgcccgcctaggcctcccaaagtgctggtattacaggcgtgacagccacgcctagccagtacaaattatgctctctgattataatgaaattaaactaaagtaagtaattaagagataacaagaaaaatctccaaacatctggaagttaaacaatgtacttctatataataagtcaaaaaggaagtttcctggaatttagaggtaacttggtccagatagacttgaaaataccaatatcaaaattttggcaggatgtaaacctcacttgaagcaatttatggcttaatgttaaattggaaattgaaggtctccatcaataggaagccc

SEQ ID NO: 147986 - DNA, 587 bp, Homo sapiens
gactttttttttttgagagacagcatctcactctgtcacccaggctggagtgcagtggtgtgatcccagctcactgcaacccccgcctcctgtgttcaagcaatcctcttgcctcagcctcccgagtagctgggactacaggcatgtgccgccctgctcagtggatacagcatttcaatcctcttgatcccattccctttaaggagtggagagtgatctccacttctgctttcatggtcatcgtgtgaccttgggcaaggcactgctcctctgggcttctggtttcccatgggtaaagcgaggccagtgtagacatttcaagagataacgtcaggcaaaggtacaaatggccagtaatgcctgaaagatgcttcagctcaggcaccaattacatggtaacagatgctgtcaatgtaacttatcagcaaagctatccctagcttagctctgagtgtggggtttacagatctgtctaaaatacgcttctcaaacttaaaagtgcacacaaatcaccccaggggatattgttaaaacgcagattcacactctgtagttctgggtggggcccaagattctgcctcgtgccg

SEQ ID NO: 147987 - DNA, 709 bp, Homo sapiens
caccatgcctggctaattttttttattttttgtagagacaggaactcactatgctgcctagtgcggtctcagactcctgggttcaagtgctcttcctgtctagacctcctgaagtgctgggattataggcatgagccactgcacctgccccaaataacccttcttaagacagagtctcactcttgttgcccaggctgaagttcagtggcatgatctcggctcactgcaacctctgactcccaggttcaagcgattctcctgcctcagcctcccaagtaggtgggattacaggtgtgcgtcaccacgtctggctaatttttgtacttttaaatttttgtattttttagtagagacaggggtttcaccatgttggccaggctggtctggaactcctgacctcaggtgatccacctgccttggcctcccaacatgctggcattataggcgtgagccaccacacgtggccggataggggtgtaattctaaaaaatctagtagtttctttttgcatattttaatgtggggatatatattcagcatagttaataggcaagagtgctatggaaggtaaatataatatcagaatagttgttcaaacattaactctctaagagattaagcatttttaaaactttttcgttattttgaaaaatttctaacctgcaggaaagttagaacactcattacgatgaatccccttagatcttcc

SEQ ID NO: 147988 - DNA, 1117 bp, Homo sapiens
ctatgtaaggttatggaagattctgctctttgaaaaccatccatgaccccaagcctcaggcctgatatgttcttcagagatcctggggcattagctttccagtatacctcttctggatgccattctccatggcactattccttcatctactgtgaagtgaagttggcgcagccctgaagaaactacctaggagaactaatagacacaggagtgacagggactttgttatcagaaccagattcctgccggctcctttgaaaacaggtcatattgtgctcttctgtttacaagaggaaacaggatggaataaaagaaattggggatcttgggtttggagggacagtgaagctttagagcacatggaacttcaagggtttagttgacttctggcagggactttcacagagagagctgtgcccatcattcagtccaagtgctttctctgcccagacagcacagaactccagccccgcttacttacatggatcatcgagtttccaccttaaaatatgattctatttattttgagttcactgtttaccaaattaggaacttaaaacaaagttacataaaaagttattgtgactccacttaattttagtgacgtatttttgtatatataggccaacctataccacatccaaaattatgtatctattacagcccctagaagctttataaatacagtgtgtcttcttttattcacaaaatttttgaaatcgtggtaatatggtttgaaacctgtatcttaactattttttttttaaattgagacagggtctcactctgtcactcaatctggaatgcagtggcacaatcttgcctcactgcaacgcctgcctctcaggctcaagcaaacctctcacctcagcctgctgagtagctgggactgcaggcacatgccaccaaacttggccattttttgtcttacgtagagacaagatttcaccgttttgcccaggctggtctcaaactcctgggctcaagcaatgtattgaattttaaaataaccaggcactcactcttatgaattaataaacatttggaggtatataaagtaaaaagttaaagtctttcctgtaagttaacacaaatgttaactattgttaaaaacttt

SEQ ID NO: 147989 - DNA, 1104 bp, Homo sapiens
gacagtttactatatttctacataatattgtgctttaatgaatcttcataatgatgagtttagtcatcaagcaaagtttaagtcataatctcccctctaggaaaaatttctaagttcatagcctacgtgtgtgtatgtgtgcgtgttgaaacagaagtgtgtgtgtgtgtgtgcatgtgtggcgcgtgctgcctgcacggcgtgccagttttctgtgtttgtgtgtttgaaaaccgtgtgaggatttaactgtggggttttcccctgtattcaagtatacgctttttttttttggcgcattgggtcaaacggttgttattattagcctcctaactttgcactgagtgtcctcgcccttcctttagcttaatcctatacattacaggaggattcctaggacaggggtgggcgacaattcatgtgtaaatgtttaactcaagggacctctgtgactgcgtttaaaaaaggtacagtgtatatctctggagaaataacatgtataccttacctttagcagcctttttattgtggacctaatgccaagaaaattattccccagagtattgcacccatttttcccatttgggaatataaagttaaagagaaaaaaaaaaaaaaactgttgttgaactgtggcccatagatacttgtaaagaatggatggttccgtggaaggaacagaaacaagcacttgggcgtgggttgtgactgcttttgggggagcctggggtttgggctcccacctgtttacagacctttttttctccttcagactttaaaattttaaaaatttaaaaaggaattaaaaaaaaaaaaaaagacttccgccgaaaagaaacctattttcaaaaggcatatgcgttcttttaaagctttgggacggaacagggttgttccctcggccatcggcggggactttgtcgatttgctttcgccccttcgtcaaggtgacaggcgttgtggccactgtcttgcacatgccggacgcgctctcaggaaagccagggctcccgagggcagctccacaccatttcatgtatttttaaacccaactcctagcactgaagatgttatttaaaaaaaaaaaaaacaaaacaaaacaaa

SEQ ID NO: 147990 - DNA, 1320 bp, Homo sapiens
gaaacagagtctggctcttttgcccaggcttgagtgcagtggcacaatctcggctcactgcaacctccgcctcctgggttcaagcaattctcctgtctcagcctcctgagtagctgggacaggcgcatgcagccatgcccagctaatttttgtattttcagtagagtcagggtttcgccatgttggtcaggctggtcgtgaacttctgacctcaggtgattcacccacctcggcctcgcaaagtgctgggattactccccgtgagccaccacacccggcccatttctttctttctttagcaacaatagacattgttctacttcctggattccacgatctaaagctaaaagataaggagaatctggcttcctcccaaagcagctatgatgaactcctatcaacactgttttggacagctggaccctgaagggtacactcaggaaaacaggaatatttgtggtcatttccaaacccaatgcatcagggccgactttagaaacatagtcacaattttatgcctcatactgcttaaacaaatttagtgctatagtccaccaaagatcttaatcaaaaggaaattagaaagggtctggctggggaacattttgagacccaactaaaacccaagatatagttaagtctgatgaaaaagtggtcacccaaacatttacttatttttcactcttgattctgtgaaaaggcttctgaagaccagctttagtttctctccaacctaggaccttattgattgggtgctgagggctttttcagaaggtgtaactcgtttccattctgttttggaggaactgatgaggcttgttttctctgggtgtgcttcttgttcccccagaatgtgtaccatttcctttgatcatcacaacagtcctctgaggcaggcagcagaggccaaccctctccatttttactgatgagaataagcagatgacttgcccagggttttcttataagtaaagctatgatactagagccaaatgctcaagtccaaaacttcaattttttaatgtgaaagcatcaaaaaaggggtgtgactgctaatttactaacaaatctgttgatctgaacatctggacgatataacccacacatgagttattcccctttgaggctggccacaatattaatcctaaccaatatttagagttctcctgcaaatgacggccgcaaagttgcccttaccaaacacgtaactggcccaacctaggaaactatttttctggtggacaagagaaaggaactaaaaaatccacagctgccatgagaaagagtgataataatatttatattatcttcaagatttta

SEQ ID NO: 147991 - DNA, 336 bp, Homo sapiens
tcatgtcttaatctccagttcagctctgattttgattatttcttgtcttctgctagctttggagttggtctgctgttgtttatctaggtcctctaggaacaccttcagcagatgcacatactcaggactctcaaaaacccctccacactgggctgcccgggctcgtctggatgatgtcttctctctccgtaccttctcatcccattccttgaacatggagcttgtccaagatttaactgcctcagctcccatgtattcttccacctctcgtgatccgcccgcctcggcctcccaaagtgctgggattacaagcgtgagccaccgcgcccggcccat

SEQ ID NO: 147992 - DNA, 466 bp, Homo sapiens
ttttttatctagtcatttatttttgacacagagtctagctctgttgcccaggctggagtgcagtggcacaatctcggctcactgcaagctccgcctcctgggttcacgccattctcctgcctcagcctcccgagtagctgggactacaggcgcccgccaccacgcccggctaattttttttgtatttttagtaaagacggggtttcaccgtgttagccaggatggtctcgctctcctaacctcatgatccgcccgcctcggcctcccaaagtgctgggattacaggcgtgagccactggtgcccagccaacaattaagattttaattgtgttctattttgtattgatacttgattttaagaaccctattctaagtctgggtttttattttggatcagcaatttagcttacacagtcagtactgaaatgcaatgctaaatttaaaggaaaccttgaatcatgaattc

SEQ ID NO: 147993 - DNA, 403 bp, Homo sapiens
gcgtcgaccgcccaggctggagtgcagtggccaatcgcggctcaactgcaaactccgcctcccgggttcacgcctttctcctgcctcagcctcccgagtagctgggactacaggcgcccgccaccaagcccggctaattttttgtatttttagtagagacggggtttcaccatgttagccaggatggtctccatctcctgaccttgtgatccgcccgcctcgtcctcccaaagtgctgggattacaggcttgagccaccgcgcccggcctgtgatcagaattttaagaagggcaggaagaaacaaaactattggtggtctagattagaggtcacaaattattttatgtaaaggtccagagagcaaatattttaggttttgtgggtcatacagtctcgtcgagc

SEQ ID NO: 147994 - DNA, 1007 bp, Homo sapiens
tgagacagagtctcgctctgtcgcccaggctggagtgcagtggcgcaatctcggctcactgcaagttctgcctcctgggttcatgccattctcctgcctcagcctcccgagtagctgggactacaggcgcccgccaccacgcccagctaattttttgtatttttagtagagacggagtttcacccggggctcgatctcctgacctcgtgatccacctgcctcggcctcccaaagtgctgggattacaggcgtgagccaccgcacccggccaaaagattgttattcttgaagatgctcctactgcaaggtattaacaagactttgctttaggaaattgctaactggtgaggaggcacccatgcctcattttagagacagagctagtgcctgacaagtgttacactctcttctgcttggagaagcatatgctatgaccggcttgtggatattcaatttaaaattttatttatgaaaacaaaattaccattactgttttttagtcaaaatgaattatactttataattctataaggccaaggagctacttacttgaaaaatgagcatattgtttttggtcatttttctttgcaaagtaaaagggaaaaaattattgcacttagttgaagagagggccttctgtgtgacttgcaacaaagcagaattaatgtgattagtattaagaaaatactccttttatggttattggcattttcatggttagattttcttcagaattatagtacgccgatgccattttgtaagattgtgaaatggtttgctagtacaagtaagaactcaattctttcaaataccatggcatacacgttaagcattttgaagtaaaaattacattaaagaaaatgtcctgaaatgttgaaaaattataagcttttttctcttcgtaaacaggtgtatggttggggtcacaacgaccacggccagcagggcaatggcgcgtccactggtaacaggatgacgaaatggtcgttccgggaatttcggtgagg

SEQ ID NO: 147995 - DNA, 5459 bp, Homo sapiens
gcggggagccggcggttatctgggcggcggagcgctcacaatgtggcaggagacagaaaagataagatgctcccaagtcccttgcagctctcttcagaagaaaaatcactagtgctctgctcttgccataataccaaacctttttgactcatgctttggtgctgcaacactggaagaattgcacacagtttccaggaatatctttttttcatttgagtgattctttgtggatgagaaaagatttgagtcttaataattaccttgttttaaagctatttctttatagtctgaactgtttaataaattgggccacttaccaatgagccacacagccagttcttgtcaggagctggttgaaaactgtgctgtgcatgtagcaggaatggcacaagaagatagccgtcgtggtcaagtgccatcttccttttatcatggtgccaaccaagaacttgacctgtccaccaaagtgtacaaaagggaatcaggaagtccttattctgtgttagtggacaccaagatgagcaaaccgcatctccatgaaacagaagaacagccatatttcagggagacaagagcagtgtctgacgtgcatgctgttaaggaagaccgggagaattctgatgacacagaggaggaagaggaagaagtctcttacaaaagggagcagatcatagtggaggtaaaccttaataatcaaacattaaatgtatctaaaggggaaaagggtgtctcttctcagtccaaagagactcctgttcttaagacaagcagtgaggaggaagaggaagagagtgaggaagaggccacagatgacagcaatgactatggagagaatgaaaagcagaagaaaaaggagaagatagtagagaaagtcagcgttacacaaaggagaaccaggagagctgcctctgttgccgcagctaccacttcccctactcccagaactacaagaggtcgtaggaagagtgtagagccacctaagcgtaagaagcgggccacaaaggagcccaaagcaccagtccagaaagctaagtgtgaagagaaagagactctgacctgtgagaagtgccccagggtatttaacactcgctggtacctggagaagcacatgaacgttactcataggcgcatgcagatttgtgataaatgtggcaagaagtttgtcctggaaagtgagctgtcccttcaccagcaaacagactgtgaaaaaaacattcagtgtgtttcctgtaacaaatcgttcaagaaactctggtcccttcatgaacatatcaagatcgtccatggatatgcagaaaagaaattttcctgtgaaatttgtgagaagaaattctataccatggctcatgtgcggaaacacatggttgcacacacaaaagacatgccatttacatgcgaaacctgtggaaaatcattcaaacgcagtatgtcactcaaggtgcactccttgcagcattctggagagaagccctttagatgcgagaactgtgacgaaaggtttcagtacaagtaccagctacgctcccacatgagcattcatattgggcacaaacagttcatgtgccagtggtgtggcaaggatttcaacatgaagcagtacttcgacgaacacatgaaaacacacactggagagaaaccctttatctgtgaaatctgtggcaaaagcttcaccagccgccccaacatgaagagacaccgcagaactcacacaggcgagaagccctatccatgtgatgtgtgtggccagcggttccgcttctcgaacatgcttaaggcccacaaggagaagtgctttcgggtgaccagccccgtgaatgtgccacctgctgtccagatcccacttacaacttccccagccaccccagttccttctgtggtgaacacagccacaaccccaacccctccaatcaatatgaatcctgtaagcactcttccccctcggcccatcccccaccccttctcacacctgcacatccacccacaccctcaccacccacaccaccttcccatccctccagtccctcacctcccgccacctccagctctctttaagagtgagcctttaaatcatagaggccagagtgaggacaactttctgcggcacctggcagagaagaacagttcagcacagcatcattaacatccgtctccttagtgtgttctccaggagacacgtccccatgtgtgagcgtgcacagagggagtcggtgagcatttccttagttctcagactctcctccgcctctaccaagagcttcgccagtgtcactgaatcaacagatccaagggaatgaacaagaagactaccttgagctcacagagggactgtcatctaaaccaggggaaccactgaactaaagcccaatttgcttgcattttctgatgacttttataagtttcaaatactcagacttgtggaattttataatttcatatcagctgatgaggtatgcttgcttttatatcccagacttctcctcaaagaggggataggcctggtttcctttgtactaatcgggaaggctgtgagattaatccagagcattaattgtatcactgtgtatggtaaggaattcttttcagcttttggtgccagctacagagttgagctggccatgtttcacagtatatcaagcattatagagaaagacagaaattttcttctttgtgtagctctcctaacgcactctttattttactacagaaattattttagagtttttgtatagacttctttggtagtctgtttctaaaatgaaatgtatttcaataagcagtgtaattttttcagtgtagctgaacctatgttgtaaaatagaaaaaaatttttataatcatcaaaatgtgattcttaaagatgcatataacttctataattcaaagctattcttacatccgtacaactcaaaaggtgcttcagagactagatgtatctgagagggtctccagaccaggttactgcaaaaatgaggttttgctttcaggatttggcgtaaatacttggtagttttgacatctctgcttaacactcaagagaggctccctaatgtgctcctgtcctccatgttctgcttggcttcgttagtgcattacatgaaatgatttgcaggggatggggccttttccagggaagtcacctaaagcttgcatgttttgaaaatttgaataaggctgtttgctgacaggaggaggaagtagtggagatcatttcatctcagtcacgtctgtttctcacttcccttaggaattgtgttgatgtttaacttttatgggatgacaaattgaaatcgctcattttgaggttgctttatttttctagaattgttataagaagctaaaatagtaaacttaaaatcacaaacatgacattgctgatagtggctgagaaattcagatgagaagacaaattggttatgaattttgaaatatctattatatgtaaaatgtggatatgttcacaaccttgagctattttaacacagtttaaatatagtgagggaaaactcctaagttttactgccctgtcctctgcaaattatgtaataccagcattcttaggcgataaagagagcagcacctctagtacctttaggcagattactttttcaagtttggggaacttcaaaagaccataatcaaccaggagcttattataggaaaggctgaacagaagggctagtgtattgattacacttaacagatcatatttatccagactcagtatagcttaaaattttgtatttctttatctgagagaactgagttcccaggctaaatcacttacctcccaccccctctccaattttttttttaagagacaaggtcttgctatgttgcccaggctagagtgcagtggctattcacaggtgcagttatagcacactacagcctccaactcttgggttcaagcaaccctgcctcagctaaccaagtagctgggactacaggtgcatgctaccatgcccagtccattttttaatcttgaaatttcttcatttttctttcttcggtttcttaaaatctttgcctgaatcagaacgctggcttttatttatttttttatttttaatattaaatgtgcagatatgcttcgagcacttttctaactaatgagctctgtggtaagaaaaaatgaactctttcaattgagattaagtccatatttttcaaacatcacgttctctattggctttttggtttagtgtttctaaattttctccttctgattttgcctgtcttatataatgagcataggaaaattttggaatgaggcagaaaagtatatcaagacatacttcctggttttggatgtaagttttaaagaatggtatttttaatatttgtacacattctttgagcacccaggtacccaagccaataaggaaagttaattccttgcatatgactgttatatctttagtggttgtctccctctccctccacagtctccttggcattccatgacaagtttgtcaacctacacttttatatagacatgtcattatttcatggtcaagcctgtagtattaaaatgatttttttaaaagatgtaaactgtgcttagttaattggttatattttgttctgtttttttttttttttttttttttttttgagatgtggagtctcgctctgtcgcccaggctggagtgcagtggccgcaatctcggctcacttgcaagctccgcctcccaggttcatgccattctccttgcctcagcctcccaagtagctgggattacaggcgcctgccaccacgcccggctaattttttttttttttttttggatttttagtagagaccgttagtatttttgtattcaccgtgttagccaggatgggtctcgatatcctgacctcgtgatctacccacctcagcctcccaaagtgctgggattacagggcgtgagccaccacgtccaactgccttattttgttctgaataaatttacagtattgggcagcaattctggattctagacttgagaccacagaatcaaccatttcatgaggttgtactgtaattatacactggaatattcaggtagtcatctttgatttttcattcaagtaaatatagccataagaaaatatctgctatacaggaaaaccagtattaagcaaataccaccatccttaacagaaacaaaaatatatatatatattatttttaaaaattagcattgtcatacagtacaattcttagtgaagtgtattgtggaacaatttagaaacttcctttttttcccctagattaaggatactttccttgacttgagacttgtggtcttcaggaaaactactcagaatataatgactcctcatcagtatcatattgtatataaataatgaaatgcattaagaatattcacaacattgaacccaggaggcggagcttgcagtgagccgagattgcgccactgcgctccagcctgggcaacagagcgagactccatctc

SEQ ID NO: 147996 - DNA, 585 bp, Homo sapiens
gctttttttttttttttgagacagggcctggctctggtgcccatgctggagtgcaggggcaagactacagctcactgcaacctctgcctcctggactcaaagcgatcctcctgcctcagcctcccgagtgctgggactacaggtgcatgtcaccatgcctggctaatttttgtattttttgtagcgatggggtttcgcatgttgcccacgctggcctcgaactccttggctcaagtgatccacccacgttggcctcctgaagcgctgggattacaggcgtaagccactgcacctggcccctctttatttaggtctggtcttttggtaaagtttgagagctttcttaacacagattttgtatttctagttttattcatatttaaaaattttggaagagatggggcctcactatgttccccaggctggtcttgaactgctgggctcaagagatcctcctgactcggcctaccaaagtaccgagattataggcatgagccaccatgcccggccttctttacatttttgttggaatgctatgatctgcatattttgttgctcatatgcagccacttttatcttaggcta

SEQ ID NO: 147997 - DNA, 1078 bp, Homo sapiens
cccagcctggagtgcagtggcacgatctcagctcaatgcaacctccacctcccaggttcaagtgtttctcctgtctcagcctcttgatagctaggactacaggtgccccgcacccatgccccagcctaatttttgtatttttatttagagatacggtttcacccatgttggcgagtctggtcttggactcctgactttaagtgatccgcccgccttgggtctcccaaagtgctggggattacaggtgtgagccaccacacctgggccagggatagggcagacttttaaatgggcgtctgggcttccccgatagcaagagttccaaggggacagcaagtaagaagctgtcagcctctttaaggatcagggatcctgaaacttgacacaatggtcacttccacttttggataaagcaatcagagccacccatattcaaggggaggagataaaacccttaggtcttgggggacttgagtgtcaaagaatttgtggccacctttagttctccacattctccagccaggatgaaaagggtttgtttttagttggacattatcctagtctgacctcataatgaaatgttttgcattcatgtagatctttacacattaaaagacagttcatgtgcactgtctcaatttgtcctcacaatatctctgagatagtagttgggcaacaaggagacagaggcacagaggtgagaggcctagggtcacacaacttcctggggacagagttgagacttacatctcaatctcttttctctgagtccatgtagagggattctggtttgtttaaccaggtcactttgctctcagacacagagagcaacagaagatgaaagcatatttccctttggctgaaaatgtggccacagagctttgcaggtgaagttcaagttgctggtaaatgtcatgttaacatggctactgcagcccctgctattggtaaggactcttttttttttttttgggacagtttgctgtgcctcccaggctggagagcaaagcaggttttaagaatattgcaccaaggaagccatagctttgcacaactccatggaataaccaagtttttt

SEQ ID NO: 147998 - DNA, 903 bp, Homo sapiens
tttttttttaagacagattcttgctctgtcgcccaggctggagtacagtggcgcgatctcggctcactgcaacctccgcctcccaggttcaagcgattctcccgctctagcccctcaaataactgggacaacaggcatgtgcccagctaattttttatatttttagtagagacagggtttcaccatattggccaagctggtctcaaactcctaaccttgtggatccactgtcctcccaaaatgctgggattacaggcgtgacagccgcacccgacctttttaattatttttaaagatgaggtctcactgtattgcccaggctagtctcaaactcctgggctcaagcaatccccctgcctcaacctcccaaagtgtcgggatcacaggtgtgagccgtccagcctagctggaagacatttttttaaataccaaaaccaaatttatagagatgaaaaaacacaatggctcatacagaaaatggccatagcttaccagcagcttaaaagatcagtgggcttgaagacgtggaaacagaatctaccaaaaatgaaacgcaaactgaagaagatgagcagactcacggacccatgagtccacagcaagcagcccattcgagtacctgggactgcaggaggcaggggaagagaccgaatagctagaatatttccaaattgcataaaaatgacaaagcctacaaatcttgacaaacccccaaaacacacacacataccctaaagcttatcaaattacagaaaaccagggataaagagaaaaaatcaaaagcagccgcagaatacatcacatgatgactttcatgtatcagtcaagagatagaaacatttaacacgaagaataaaataaacaggaacagagggttgcactaacatgtaaaaaatgcccgca

SEQ ID NO: 147999 - DNA, 412 bp, Homo sapiens
  misc_feature (1)...(412): n = a,t,c or g
ctgttgcccaggctggagtgcagtggtggtatctcagctcactgcaacctccgcctcccgggttcacgtcctgtctcagccntcagtgtagctgggattacaggcatgcaccaccatgctcggctaacttttgtatttttggtagagacggggtttcaccatgatggccaggctggtctcgaactcctgacttcaagtgatccgcctgccttggcctcccaaagtgctgggattacaggcgtgcacccacacccagctccaaactcatcttgtctacacacggacaaacgtgtgcacacatggcacaaaccaagctagaagacactgattctctagatggagggactaagattttcttttttcctttatcaacattttaccagttattccttccaaatgaanaggtgctgcc

SEQ ID NO: 148000 - DNA, 383 bp, Homo sapiens
  misc_feature (1)...(383): n = a,t,c or g
aaagaggnnnnnnnnnnnnnnnnnnnnnnnnnnnnnnnnnnnngaaagagcagttcagatagtgatgatgaagaaaagaagcatgaaaaattgaaaaaggctctgaacgcagaggaggcccgccttcttcatgtcaaggagaccatgcagattgatgagaggaagcggccttacaatagcatgtatgaaactcgagaacctactgaagaggaaatggaggcatatagaatgaaacgtcagaggccagatgaccccatggcctctttccttggacagtagcaactagtcagaagaccatccaagatagatgcagctgatacattcttttcagcttcttattgatgattgtagatagaaaaatccttgtttattcttcttgctgc

SEQ ID NO: 148001 - DNA, 357 bp, Homo sapiens
  misc_feature (1)...(357): n = a,t,c or g
gctttttttcaagtattcctattgtactggagaagctgggaaggagattgttaactctgaggagtgtattataaatgagataactggggaagaatctgtgaaaaaacctcaaaccctcatggagctgcatcaagaaaaactgaaagaggnnnnnnnnnnnnnnnnnnnnnnnnnnnnnnnnnnnngaaagagcagttcagatagtgatgatgaagaaaagaagcatgaaaaattgaaaaaggcactgaacgcagaggaggcccgccttcttcatgtcaaggagaccatgcagattgatgagaggaagcggccttacaatagcatgtatgaaactcgagaacctactgaagaggaaan

SEQ ID NO: 148002 - DNA, 1952 bp, Homo sapiens
atgtcagccacagttgtagatgcagttaatgctgcacccctatcggggtccaaagaaatgagtttggaagaaccaaagaagatgaccagagaggactggagaaagaagaaggagctagaagaacagcgaaaattgggcaatgctcctgcagaagttgatgaagaaggaaaagacatcaacccccatattcctcagtatatttcttcagtgccatggtatattgatccttcaaaaagacctactttaaaacaccagagaccacaaccagaaaaacaaaagcagttcagctcatctggagaatggtacaagaggggtgtaaaagagaattccataattactaagtaccgcaaaggagcatgtgaaaattgtggggccatgacacacaaaaagaaagactgctttgagagacctaggcgagttggagccaaatttacaggtactaatatagctccagatgaacatgtccagcctcaactgatgtttgactatgatgggaagagggatcggtggaatggctacaatccagaagaacacatgaaaattgttgaagagtatgccaaagttgatttggcaaaacgaacattgaaagcccagaaactccaagaggaattagcctcaggaaaattagtggaacaggctaattctccaaaacaccagtggggagaagaggaaccaaattctcagacggaaaaagatcataatagtgaagatgaggatgaagataaatatgcagatgatattgacatgcctggacagaattttgactccaagagacgaattactgtccggaatctcaggattcgagaagatattgcaaaatatttgaggaatttagatccaaattctgcctactatgatccaaaaactagagcaatgagagagaatccttatgccaatgcaggaaagaatccagatgaagtgagttatgctggagataactttgttaggtacacaggagataccatttcaatggctcagacacagttgtttgcatgggaagcctatgacaagggatctgaagtgcatctacaggcagatcctacaaagctagagctgttgtataagtccttcaaagtcaaaaaagaagatttcaaagaacagcagaaagaaagcatcctggaaaagtatggtggccaagaacatttggatgcccctccagctgaattgcttttagcccagactgaagactatgtggagtactcaagacatgggacagtcatcaaaggacaggagcgggctgttgcctgctctaagtatgaggaggatgtgaagatccacaatcacacacatatctggggatcgtactggaaagaaggccgcagggggaaccaaatgctgtcactctttttccaagtattcctattgtactggagaagctgggaaggagattgttaactctgaggagtgtattataaatgagataactggggaagaatctgtgaaaaaacctcaaaccctcatggagctgcatcaagaaaaactgaaagaggaaaagaagaggaggaaaatgaaaaagaagaagcatcgaaagagcagttcagatagtgacgatgaagaaaagaagcatgaaaaattgaaaaaggcactgaacgcataggaggccacgccttcttcatgtcaaggagaccattgcagatttgatgagaggaagcggccttacaatagcatgtattaaacttcaagaccttattgaagaggaaatggaggcatatagaatgaaacgtcagaggccagatgaccccatggcctctttccttggacagtagcaactagtcagaagaccatccaagatagatgcagctgatacattcttttcagcttcttattgatgattgtagatagaaaaaatccttgtttattcttcttgctgcctggctttaataaatatttcagatgcctcacagttaagttcactcctttccatactgaggaaacaaaaaaaaaaaaaaaaa

SEQ ID NO: 148003 - DNA, 484 bp, Homo sapiens
  misc_feature (1)...(484): n = a,t,c or g
gcggtnnnattgcattcatcgcctgcggaattcggcacgagaataatttgtcagaggataaactcccaacctagacctttcacttaaaatagtgtgaatttgtatatgtttttaaaagaaccagtactnnnnnnnnnnnnnnnnnnnnnnnnnnnnnnnnnnnnnnnnnnnnnnnnnnnnnnnnnnnnnnnnnnnnnnnnnnnnnnnnnnnnnnnnnnnnnnnnnnnnnnnnnnnnnnnnnnnnnnnnnnnnnnnnnnnnnnnnnnnnnnnnnnnnnnnnnnnnnnnnnnnnnnnnnnnnnnnnnnnnnnnnnnnnnnnnnnnnnnnnnnnnnnnnnnnnnnnnnnnnnnnnnnnnnnnnnnnnnnnnnnnnnnnnnnnnnnnnnnnnnnnnnnnnnnnntgcgtctccnnnnnnnnnnngggtaaatttaaatttaaaaaaattattattacccggtattttgtttactaaaataaaaggcct

SEQ ID NO: 148004 - DNA, 924 bp, Homo sapiens
tacaaaggcattttattttagtaaacaaaatactggttattattattttttttaattttaattttacctttttttttttggagacgcagtcgctctgtcacccaggctggagggcagtggcacgacctaggctcactgcaacctccacctcccggattcaagcaattctcctgcctcagcctcccgagtagctgggattacagacgcgcgccactacacctggctaatttttatatttttagtagagacaggattttaccatgttggccaggctggtctcaaactcccgatctcaggcgatccactcgcctcggcctcccaaagtgctgggatttcaggtaaaagccagcatacccggccagtactggttcttttaaaaacatatacaaattcacactattttaagtgaaaggtctaggttgggagtttatcctctgacaaattattcaataattaagtctttcttctctttcttctcagctggagtccactcaagctgacatttacatggcagaatcttcagttatcttttttctctgattgcttcttcctttcagcctccagtttttgttgttttgcctccaacctttttctttgatacattttcaccccagcaaatgtcaggcagagaattaatgtttttgctgccaagatatacagcagcaggggcacgtgctcaagaaccttccaattcatggtagactgtgaattcactcctgatcaacacaagcccccaacagacaagtacatgagaggcagctggaaggtctgatctgggcaggaagaaagaagcaggtcaatttggagttcctagggcagaccaccttagaaagatgtctctttgatggagagagggaatgtgaacagaaagtgagctccacagagaggtgggctgtgtcctgacaaggcgattgagctcgtgcc

SEQ ID NO: 148005 - DNA, 847 bp, Homo sapiens
taaagacagagtctcattctgtcacccaggctggagcccagtggcaggatctcagctcagtgcaatctccacctcccgggttcaagcgattctcatgtctcagcctcccaagtaactgggactacaggcgtgtaccactacacccggctaattttttataattttagtagagacggggtttcaccatgccggctaggtcggtctcgaactcctgacctcaggtgatccgcccaccttggcctcccaaaatgctgggattacaggtgtgagccactgcgcccggcctattgtgatatttctttacttaataactagcagatgaatctcttaacagtattctgttttcctctaagcatgcataaaaagtggtcaaataagtccatgatgactcatcaccttttccctgcaaggagtgtactgtagattaccaaacctgcagaagccgtctgtgtggagacaggaggaggacaaaccaggcttgctctgcttcacacccagagacctggagccacagcatgtggaaattgctttcatgaccttttataccccctgctgataaagcaattagaaaactgaagagtttcacggtggtgagatagaatttcacaatactgagtgagatattagcaatggactctccgtatgtccctatggtctacaagcttaatatgtatctttacccaaacacataaaaaaattcattaactggagaaacaagattgtggccatagtcaacactctataatgtcaccatcttcaccactatctctgcttaaaattctgccgtactatcttcagaataaggataatgaattggaaatacgaccatttcttttcattgcccttg

SEQ ID NO: 148006 - DNA, 337 bp, Homo sapiens
cctccgtctcaggctgccccggacatgagcaagcccccgacagctcagccagacttcccctatggtcagtatgcaggttaccggctttggacgagggcagaaccacaacgtgcaaggttccacccctaccgacgctagcccgcggcgccgcgacgtctgcacggcccagacccaggattccaaacttgtgaactcgtgacaatcacaaacttggcggcaaagtggcgactcaaccttgggggggggggcggggggagggcgcgaggcttttggagcggctgtgggtgtcgtctggactgaggtttttaaatatttctttctctaacccatcagcaca

SEQ ID NO: 148007 - DNA, 397 bp, Homo sapiens
caaacgcacttttttttattcaaaccagggtcaaactggtcaatgggaaacgccctgaagccacgtgcctggggagaaaggcttcctactcggttcggttcagcgctgcgtgggatccacgcggttggctgggcgcaacccccacagttcacctcaaacactaccaagcaggtcagtcgacaaaagcagggaattaaacaaaaaacagaaatacactcagtagatttcttttagaagctcccagagtttttggaccaccaagtcccaacccccaaagccaggagcggtccatagccaccaatcgcctgtcctgccggcacccacattccttgcgggccatatccttgctgccacgtgggcgggggctggcctgcccagccattggcagcgttgggca

SEQ ID NO: 148008 - DNA, 420 bp, Homo sapiens
  misc_feature (1)...(420): n = a,t,c or g
taccacacgagctagtgtgagctgatcattgctccttctcacctcctgccatgatactgtcagttaccttagttaacaagctgaatatttagtagaaatgatgcttctgctcaggaatggcccacaaatctgtaatttgaaatttagcaggaaatgacctttaatgacactacattttcaggaactgaaatcattaaaattttatttgaataattnnnnnnnnnnnnnnnnnnnnnggggcggccgttttaaaggatccttggggggcccaaagtttacccgggcttgcaacgtcaaagctttttccctatagggggccgaattataacctacctgggaatttttggaaaggaccttaactttgggggggggacatattgggacaacctacctacggagttttaaggctctaagggaaat

SEQ ID NO: 148009 - DNA, 361 bp, Homo sapiens
  misc_feature (1)...(361): n = a,t,c or g
ttaattcggctccctatagggaaaaaactattcctctgcatgcccgcgtaaacttgggcccccccagggatcctttaaaacggcccccccnnnnnnnnnnnnnnctgttaccctctccttttcactctctctcattccttccctttcttctttcaacatctaacatggtaaagttttgtgctaataaccaaggcaagacaaaacttatattcatgttcttccataaagaatctcatatcatcataggaaggccaagggcccaaagggaaaagaaagagaaagaagaggggaatccaaatgaatgtctcttagatgtctcactgcgcacgggcttttccggacatcttcccggacgcgtggg

SEQ ID NO: 148010 - DNA, 389 bp, Homo sapiens
  misc_feature (1)...(389): n = a,t,c or g
cagatccccagctagcttataattcgcccccctatagggaaaaagctatttcgttgcaagcccgggtaaacttgggcccccccagggatcctttaaagcggcccccccnnnnnnnnnnnnnnnnnncaatgttcagtttcctttaatgacccccatctccctgaagggcaggtgcaggcagttaggtgatggcaagagatgttcacttgaagatcttgccctgattgaaggatgcccacatgctggaaggccccctcccaggaaaagtactctcgaaccagcgtttgggtctcctcgctgccaggatccagtttccgccatgtgtatgactcgtagtccacctgccaatctggactcagcggaaaggcaagctcctggcctcggaagac

SEQ ID NO: 148011 - DNA, 404 bp, Homo sapiens
  misc_feature (1)...(404): n = a,t,c or g
gcttcaataccctgttgttgaaccagtgacttttttttattgtgctgatgggttagagaaagaaatatttaaaaacctcagtccagacgacacccacagccgctccaaaagcctcgcgccctccccccgcctcaccccacatgctccctggttctcatgctttctctaacttcctcaccccttaaccaaaaaggggtggtttcttttgtgcatatagccattcttaaatatcagggatgtaaacctcactttattaaaaaattatcccgccnnnnnnnnnnnnnnnnnnnnnnnnnnnnnnnnnnnnncaaaacnnnnnnnnnnnnnnnnnannnnnnnnnnnnnnnnnnnnnnnnnnnnnnnnnnngcccgcccgccccctcttttctttggggggagggtaa

SEQ ID NO: 148012 - DNA, 513 bp, Homo sapiens
  misc_feature (1)...(513): n = a,t,c or g
tgcggcgcacacctgggcccgtgcagggctcagcttggcagcagctctgagggcagctcaatgaaaaagtgaatgcacacgcccttgttggcgtggcctggcatggcctggtgctatcggcagccgctctccactccccgactgatactcaattacgtgaagccaagaaagatgatttttagaacctttgcctatattaggttgtacttatgtacatattttgcagtgtttcacaggagaaagtggccttaactgccccttattctctctccacgttgtaaataaacatgtgtttaatacaagttaaagctatgtatgnnnnnnnnnnnnnnnggggcggccgttttaaaggatccttggaggggcccaagtttacgcgggcatgcagacgaatagctttctccttatagggagccgaattataacctagctggggatctttgaaaaggacccttatttttgtggggggacatatttgggcaacctccctacagaaatttaaggctttaaggg

SEQ ID NO: 148013 - DNA, 1320 bp, Homo sapiens
  misc_feature (1)...(1320): n = a,t,c or g
catttatattttccttaaagccttaaatttttgtagggaggttgtcccaataagtccccccccaaaagtaagggttcttttcaaagattcccaggtaacaagttttcccgttccggcgttgtaaaaaggcggccagggcctaggttataaaaccgccccctataaggaaaaaactaattcgttgcaagcccgggtaaacttgggcccctccaggggtcctttaaaacggccgccccnnnnnnnnnnnnnnnctaatccaaacgcacttctctttattcaaaccagggtcaaactggtcaatgggaaacgccctgaagccacgtgcctggggagaaaggcttcctactcggttcggttcagcgctgcgtgggatccacgcggctggctgtgcgcaaccccccacagtttcacctccagacactaccaagcaggtcagtcgaacaaaagcaaggaattaaacaaaaaacagaaatacactcagtagatttccttcctagaagctccccagagtttctggacccacccaagtccccaaccccccaaagcccaggagccgaggggactaacagcgcacccccttcccaccagtgcccgacggaaaccccgttttaaattaaaaaataagcccagtatacatccgtagaaaatttctcttaaaaatctcacaatttgtaaatgtatattttttctttaacataaaagtttacaatataccgtaaaacaaaaggctcaggaaaataatttccaaaaaaaaaggaagaaaaagaaacctgaagttttgaaattaaagctgaagacattttttttaaaccctgttgttgaaccagtgactttttttttattgtgctgatgggttagagaaagaaatatttaaaaaccctcagtccagacgacacccacagccgctccaaaagcctcgcgccctccccccgctacgcccccccaaggttgagtcgccactttgccgccaagtttgtgattgtcacgagtttacaaattttggaatcccgggtactgggccgtgcagacgtcgcggcgccgcgggctaagcgtcggtaagggagtggaaccctttgacacgttgtaggttctgcccttcgtccaaaggccgctggccgccggcgggggggccccccgaccactggcacggagggacccccgtaggaaaggaggctgctggctggggtctgagaagccctgtccgaagccactcaagtcatgcccgtaacctgaatactgaccataggggaagtctggctgagctgtcgggggcttgctcatgtccggggcagcctgagacggaggcggtgggaaagccag

SEQ ID NO: 148014 - DNA, 499 bp, Homo sapiens
  misc_feature (1)...(499): n = a,t,c or g
tttatattttccctagagccttaaatttctgtagggaggttggcccattatgtccccccccaaaaataaggttccttcccaaaaattccaagctaggttataattcggctccctataaggaaagagctatgtcgtcgcatgcccgcgtaaacttgggcccctccaaggatcctttaaaacggccgccccnnnnnnnnnnnnnnacacaaagacaattatttaagacctttattaacaggtgcttgcagtttgttgacttttttgaaaaaatcaagttgtaaacttttattacaaattaaaaatgaagttcttaaaaatctcaacttgaccagatatgaaacaatttaaaaacctttaaaggcgtattgagaaaaaccaggcttttttaaaaaacacgtttgttactaccaaaaagagacgtctttaggtaaaaataataaaaaccccatgctgcatagataatgcagatagttccggacgcgtgggtcgacccaggagt

SEQ ID NO: 148015 - DNA, 1580 bp, Homo sapiens
caggctggagtgcactggcgcaatctcgggctcactgcaacctcctcctcctcccacattgaggcgattctcctgcctcagcctcccaagtagctgggattacaggcacccgccatcacacccagctaattttttttttttttttttattattagtagaagccaggtttcaccatgttggccagggtggtctcgaactcctgacctcaagtgatccgtccacctcggccttgcaaattgctgggattacaggtgtgagccaccgtgccgagccagccccattttttaaatgatgttttggttaagagtggaccatgagaattagctgacagcatcccctttctctctccctgccttggtgggaccctccctgtgggaccttggtcaagtcctcgaacttttgtcccgtatttaagatggagctgttttacctacttcataagacagttgcgagggtgccattgattcttgactgcaaaataccttgaaacccttatataaagactgaagtcaacggagcctagtgaaagacttactttgtggcttgtggttgaaagtcacatcaaaagacaaatgtggccacgttcaggaattggagacttactggcatggctctacagctgctcagttattaatcatgcagactaacctgtcaacactggggagatgcaacatagcaaaaggacagagaaattaggaattttttgtgcagaaagccctaaattcccacctggaatgtaacttacagctcccttacctactcttcacacatggccctcaaacatgctaggattgggcttatacataggccaacacaaaatacaaacgtgacgtgttcatgtagcctagtggctatatgcctattctccatgtaccctgcatggtagtgctgcaaactttaaagtacatttctttcacagcagtattttttttcataagtggcatataaatctcattcaatgaaatggggaaatcacgttgagaagttggtctgtcatctcccattgagcaaagactggcaggagataataaaaataaatatgggcacacatgtattaatatacagcacgcatttacaagtttattttcccagataaaaattgtgctattaaggacagctctaccaagacagtctgcaccatttccaagtctcagttaattttaccagcaacctgcctgcctttctggagatgggctgtgaaaatatgggaagttccccctcaagtaggccccaagaaacagttcctagattttacctaagttttattttgtccaggttttttaaattttttccagtgagccgtggtgactgcacaggttacgtgctgtgaaaagctgggctaaatattctttctgtaaagtcaaacaggattccatcccctgtgaaataacacaaaatttcactctctaaaagcaccagcatgtaaactagaatgaaagaaggaaattatgtactgtatgcctaatattctttgtgaatgtctttcatttaactaaaattatattagaaaccagattgataaataaaaaattcaaagtagttttaattatcctaaaaaaaaaaaaaaaaaaaaaagtttt

SEQ ID NO: 148016 - DNA, 1549 bp, Homo sapiens
cccagcagcccttcgtgaatcctgcactgccacctggctatagctacactggtcttccctactacacaggcatgcccagtgccttccagtatggccccaccatgtttgtccctccagcctcagccaagtaacatggggtgaacctcagcactcccacacctcccttccagcaggccagtaggttatggccagcacggctacagtacaggttatgacgacctgacccaggggacagcagcaggagactactccaaaggtggctatgctggatcatcgcagggcaccaaacaagtctgcaggttttggggcctgggcaaaggagtatcagtgtcttcaagcaccactggtctacctgatatgactggttctgtctacaataagacacagacttttgacaagcagggatttcatgcagggacgcctccacctttcagcctgccctcggtcttgggctccactgggcccctggcctcgggagcgggcccctggctatgcacccccaccattcctacacatcttgccagcccaccagcagccccactcacagctgctgcaccaccaccttccgcaggatgcacagagtggctcgggtcagcgcagccagcccagctccctgcagcccaagtctcaagcctccaaacctgcctacggcaactctccatacttggacaactaaacccaggagagaggggtggggctggggcaaaggcttatcctgggcaggagagaacaacacgagcacgtatttgggagcccaagtgccccttttctaaaaattccccgacatgtgtcagccatgccctctgtggggagtctgcctccccagactgggctactgtatgtaatgtatttatgtatgtatttgtaaatgtgatagaagtctgggggggagttgggggatggcggcagatgttagccaggtctgcccctccccattcaaagcccccttctcccaactgtagcaaaataagcacccccaacccccatctgcccttcaggtccttcctgcacagcctggcaactgcccagtgggcccactaggggcagtactctggaagggctggttcaaggcttgtttggggtataggggtcaggtaccaatgaagaatcacgacttgtctcactcctttggaaattgttttcctttccctgtgtaattacttcataccctctgtttttgagaaactgttccgtttgtcatctgtcatggtctccttccacccaaatcttcatctgggaatagcagcggtatccctcgcacccaagctgtggccacctgtttgtcttcatatagaaacagggggcttctggtctggtcatgtccctagagacttactagagactgggctggaccatggaaaaaaaaaaaaataaatctgagttattcagccagtcagctcccctttaaaaatctaaggtatctccaagcaacacatctccattctagttgtcttgaaccacgtgggcaactgtttcaggggttttctcttgcccaatccccacctaataaagttctgagagcatgaaaaagaaaaaaaaaaaagttttg

SEQ ID NO: 148017 - DNA, 911 bp, Homo sapiens
  misc_feature (1)...(911): n = a,t,c or g
tttgagacagagtgtctcactcttgcccagaacccaggctggagtgcagtggcccaatctcggctcactgcaacctccacctcccaggttccagcgattctcatgcctcagcctcctgagtagctgggactataggcatgcaccaccatgccccactaaattttgtatttttagtagaaacagagtttcaccatgttggccaggctggtctcgatctcctgacctcatgatctgcccgccttggcctcccaaagtgtgggattacaggcgtgagccactgtgcccagcatggtgtttcttatatcaggtgttttagggagctcgcttgcttattccattctttaatccttacagtgtgccacacgtatgaagtttataacgtattaatgatctcattacccaaaaccagaacataatttcacaagggttcctacttctgtattgttttattatctcaaaaatttaaataacatgttctgctgtttattgttcttgttatccactgtattagcaccttccctgatgtgctttggaggttgatcaatgaatttctgagactttctgctggaattactttaagggtgtcttattagatgatgaaaagttggctgagacacccttcaagtgaccatgtcattgttttcttgctatgtctttagcttaatgattaagatacaattctttttaaaatcaaatggtattagttattatgtttcccaaattagaaatcgattttagttaacattttattttattttattctattttatttatttttgagacagagtctcgcctcctgntgcccaggcctggagtacaatggcgccaatctcagctcactccaaatctccgcctccccaggttcaagcgatttttcctggcctcagccatcccgagtagctggggattac

SEQ ID NO: 148018 - DNA, 396 bp, Homo sapiens
ttcatttaaaactttgcttagatgttttacattgccatcacctcttcttgagaaaaaggtgtgtcccccaccccaacccctaggagccagcagactatctttctgaggggccacaagcacactcccacgtggagaacaagggcagtggatgaagggaacggggatttttcaaactaatgttttgactttcccattggcaatgcttgctacgcttaatctgattgcatctcagggacctgtagcaacatctccaattgtacagtgtaagccaaagtcaaatgtggggtatatgaagaaattcagagcatcagccagttctccagaaccagccccttgccactgtaaagtgaaaggctcctgtgaggagggcgctgggattgtgtaaggtcaattcgc

SEQ ID NO: 148019 - DNA, 1431 bp, Homo sapiens
gcggccgccgcggccgaccccccgcgctgctggcctcggcgctgggcctgggcggctgcgtgccctggggtgccgggcgactgcggcgcggccacggccccgagcccgactcgcccttccgccgcagcccgccccgcggccccgcctccccgcagcgctgacctccacgcccggacccctggccaccccgacaagcttcgccgaggtgccgaccgaccgactgatcgcggacgccggctggaaggactacggatccgcaggaagaggcagttgggggccaggggcccagtagaggaggctgagctccttccaactcctcagaacctccactctatggatctggacctctggattcggctttctccctgggcactgccttcaggaagacgttgagaattgaccttacacaatcccagcgccctcctcacaggagcctttcactttacagtggcaaggggctggctcctggagaactggctgatgctctgaatttcttgatataccccacatttgactttggcttacactgtacaattggagatgttgctacaggtccctggagatgcaatcagattaagcgtagaaagcattgccaattgggaaagtcaaaattaatttattttttttttcccttcccccctaccccatccccagccaagaatttcttttcaagatatcgtcatcattcttaaacaacattcttaacccccagctggggttcccaattttaatagatgtcattgcttcaagtctaacggcgccgggaggcctgtttgagggaaaacattagtttgaaaaatccccgttcccttcatccactgcccttgttctccacgtgggagttgtgcttgtgggccctcatgaaagatagtctgctggctcctaaggggttgggggttgggggacacacttttttcttcagggaagaggtgatgggcaatgtaaaacatttaaggcaaagtttttaaatgaaaaaaaggaaacacatttaaacatcctgataatggagggaaggggggcacatttacacatagcccagaacttgtagaattctgcatagtgaatgtatattgaattagtctcctgccttatacattcaggaggaataaatttccataatgtaaggcaaatgcatggggctcttaggttcactttgcaagtgcccttgctgcctttcctctgtgtctattatggctctttaaggtgacgggtcctggagcagcttgtattttttttcgtttggcagtctggccctgttgactttgatttgcagaccaattctcccttgacctgactcacagccgcctgctcttacccccctcctcaggaagtcttcctcattaaaggatgtgatgacggagctcacggatgagaatgcacatgtgagactgtgagacacctaaggacgtttgggcgaactggtgacaacat

SEQ ID NO: 148020 - DNA, 853 bp, Homo sapiens
caatgctgaattatccgttagattttcaccccagtttttttgttggtttttttttttttgagatggagtctcgctctgatcgccaggctggaagtgccagtgggcgtgatctcgagtcactgccatcctgtgtctcccgggttcaaagcgattctcctgcctcagcctcccaagtagctgggactacaaggtgtgtgccactaagctcagctaatttttgtatttttagtagagacggggtttcaccattttgaccaggatggtcttgatctcttgacctcatgatctgtccacctctgcccctcaaagtgctgggattacgtgatccacccgcctcagcctcccaaagtgctgggattacaggcgtgacgtgtgcctggcccaccccagcattttttaagatgtatgtattcgttgttctgtttttcccagatgattctgtcgtaaagtgatgctatgttgtcgttacaaacatcaaagtgattttagcggtttttgatgggattattcaagtgtcagaattaactgttcaaaatgttctgaatcatgtagatacactggcaggtaacctgtttatgggagaacaagtacacgtgctgttacgtgggcactgtacagtgcatgtgccacgtaaacagcgttctgggggtccagtgacggaacactttacctgacagcggatcccccaatattctcgtgcagtgtgtttggaatcctggtctgggctctcggcgttggccttgtagatcaagtaggggaagtgagtgatgttcagtcatgctgctgggacacttggttttccagatgaaaacacataaataaaactacatgcaccatgaaaaaaaaaaaaaaa

SEQ ID NO: 148021 - DNA, 1080 bp, Homo sapiens
atggggattcaccacgttggccaggctagtctcgaactcctgacctcaggtgatctgcccgcctcagcctcccaaggaagaggcgtgcggctctactacatcggaggggaggtcttcgcagagtgcctcagtgacagcgctatttttgtccagtctcccaactgtaaccagcgctatggctggcacccggccaccgtctgcaagatcccaccagaccttacaggcctgcagagcacagaagacaaagacacggatgagttcaatataagggacgggtgccaagcaccaagccagcagcccaggaaaggcccccctctccacaccatctccctatttttggaagccctctttgcagacttctccctgctctgggagtcggagcttgtgggccagccttccatctccccttgcagccctgtttctgtgtttttggcaggatgcaacctgaagatcttcaacaaccaggagttcgctgccctcctggcccagtcggtcaaccagggctttgaggctgtctaccagttgacccgaatgtgcaccatccgcatgagcttcgtcaaaggctggggagcggagtacaggagacagactgtgaccagtaccccctgctggattgagctgcacctgaatgggcctttgcagtggcttgacaaggtcctcacccagatgggctccccaagcatccgctgttccaaacatactgattgggaggtgcgtgttcagcagaacctgcacacaggacagcgggaaaaatcgatgagcgccacctctttaaaaactcacttacgtttgtcctttttcactttgaaaagttggaaggatctgctgaggcccagtgcatatgcaatgtatagtgtctattatcacattaatctcaaagagattcgaatgacgctcgacccaagcagcattatttcccctaagtcagcggttctcaaagtgggtcccaggaccgaaccagcagcatcggttatcacacagatgttaaagatgcaaattctcaggccccacgccaggcctactgaagccgcaactctggagtggggccctccaggtgactgtgacatagctcacttctga

SEQ ID NO: 148022 - DNA, 1215 bp, Homo sapiens
gccctttatattttttttaaaaattcaaaaaattagtttattagcttaatataattaggtccaatggaatcctgttttgatctcaatacttcccatattgcaatatataaatgtgacaaattcagctgttttgtggcatagataagtgtctaagctgggcagttagtctaccccgtttcatagttcatgttcttcatggctttgcagcatttgtcactttctatgatgtgttcaaagaccagaaaaggccacacttgacctgtcagctggtccttgaacagctgtaggtttttttttttttttttgagaccagagtctcccttctgttgtccagctgggagtgggcagtagcgcaacctcgactcactggcaacctctggcctccaggttcaagtgattctcctcctccagactcctggagtagctggggattacaggcacatggccaccatggcccggctgatttttatatttttagtagagatggggttccaccatgttggccaggctggtcttgaacttcctgacctcaagtgatccacccacctcggccttcccaaagtggctgggattacagggcgtgaaacccaacacccgggccgtaggttttaactaataattagggtattactctatcattctctatcattcaaattctccaggtactgacctggtttttattttatttatttatttatttacttatttatttttgagacaggaacaaaactctgctgcccaggctagagtacagtagtggcacaatcttggctcactgcagtctccacctcctggggttctattgattcctgtgcctcagcctcccaagtagctgggactacaggtgtgcaccaccacaccaggctaatttttttatttttagtagagatggggtttcaccatgttggccaggctggtcttgaactcctgacctcaggtgatctgcctgcctcagcctcccaaagtgctgggattacagatatgacccccattgtctgccatcaattctttatcaatccttagagataacaatgttaccagaaagatcaacaagttgtaccactcagttcagcagtatgaatcaggagggttttaaagctatctgataggatcactgctgtcctaattgttcaaagaaccgttgcacacaaagatgtagtttctgttttaactcaagaaagaaaaagagaaggttcatgtcatacttctcgtgcc

SEQ ID NO: 148023 - DNA, 500 bp, Homo sapiens
ccatagttggtaaggctttcctttaagtgtgaaatatttagatgaaattttctcttttaaagttctttatagggttagggtgtagtaaagcattaggagggtcattcttgtcacaaaagtgccactaaaacagcctcaggagaataaatgacttgcttttctaaatctcaggtttatctgggctctatcatatagacaggcttctgatagtttgcaactgtaagcagaaacctacatatagttaaaatcctggtctttcttggtaaacagattttaaatgtctgatataaaacatgccacaggagaattcggggatttgagtttctctgaatagcatatatatgatgcatcggataggtcattatgattttttaccatttcgacttacataatgaaaaccaattcattttaaatatcagattattattttgtaagttgtggaaaaagctaattgtagttttcattatgaagttttcccaataaaccaggtattctaaaaa

SEQ ID NO: 148024 - DNA, 2032 bp, Homo sapiens
cgcccggcccgcgcgctcctccgatccgctgctctccgctccgctcggccccgcgccgcccgtcaacatgatccgctgcggcctggcctgcgagcgctgccgctggattctgcccctgcttttactcagcgccatcgccttcgacatcatcgcgctggccggccgcggctggttgcagtctagcgaccacggccaagacgtcctcgcgtgtggtggaaatgctcccaagaagggcggcggcagccgggtcctacgaaggaagggctgtcagagcctcatggagtacgcgtggggtagagcagcggctgccatgctctttctgtggcttcatcaatcctggtgatcttgtttcatcctctccttcttcggcccctctgttggaccccagaatgcttgtcttcctgagaagtgattggaggtctccttgccttggctgctgtgttccagatcatctccctgggtaatttaccccgtgaagtacacccagaccttcacccttcatgccaagccccgctgtcacttacatctataactggggcctacggttttggggtggggcagccacggattatcctgactcggctgtgccttcttcttctggctgcctccccaactacggaagatggaccttctggggcaatgccaagcccaggtacttctacacatctgcctaacttgggaatgaaatgtgggagaaaatcgctgcctgctgagatgggactcccagaaggaaggaaactgtttctcccaggcggactttggaaccccattttttggccagtgttccatcattattaaactagtcaaaaatgcttaaaataatttgggaggaaaatatttttttaagtagtgttatagttttcatgtttatcttttattatgttttgtgaagttgtgtcttttcacgtaattaccctatacctatgccaatatttccttatatctatccataacatttatactacatttgtaagagaatatgcacgtgaaacttaacactttataaggtaaaaatgaggtttccaagatttaataatctgatcaagttcttgttatttccaaatagaatggactccggtctgttaagggctaaggagaagaggaagataagggttaaaagttggttaatgaccaaacattctaaaagaaatgcaaaaaaaaaagtttattttccaagccttcgaactatttaagggaaagcaaaatccatttcctaaatgcatatcctttgtgaggatttcctcattaatatcctgaatccttcctttccggctaaggcttcatgttgactcgatatgtcatctagggaaagtactatttcatgggtccaaacctgttgccatagttgggtaagggctttcctttaagtgtggaaatatttaggatggaaattttctctttttaaagttctttataggggttaggggtgtgggggaaaatgctatatttaataaatcctgttaggtgttttgtgtttatatgttcagaacccagagtagactggattggaaggatggactgggtctaatttatcatgactgatagatctggttaagttgtgtagtaaagccattaggagggtcattccttgtcacaaaaagtgcccactaaaaccagccctcaggaagaataaatgaccttgccttttccctaaatcctccgggtttatctgggcccctatccatatagacaggcttcctgatagtttgcaacctgtaagccagaaaccctacactatagttaaaacccccggtctttccttggtaaacagattttaaatgtcctgatataaaacatgcccacaggagaattcgggggatttgagtttctcttgaatagcatatatatgatgcatcggataggtcgattatgattttttaccatttcgacttacataatgaaaaccaattcattttaaatatcagattattattttgtaagttgtggaaaaagctaattgtagttttcattatgaagttttcccgaataaaccaggtattctaaacttgaagtcgacgcggccgcgaattta

SEQ ID NO: 148025 - DNA, 1321 bp, Homo sapiens
cggtttttttttttttaagattgttctcatacaagatttattccccagcacacccctcccctcctcagttcacagtggagactatggagattcagggcaggatccctcaggtacaagaaacaccttccgaagattttgctctccttccttccctccctcttgccaactcccaaggcctgaagcgcacactcatgcaaacacacgaaatccccctccttccccacacctcctgtcttttccacatcagagctctgaaccttgagagggtgtcaaaagtctgtttgaggaagcctaaaagtggggggagatggccattaccccctgacccaccccactatggaggtgactatggaggacacctaactctttccctctttctggtcaaccattttcaactcccctggccctctgtaccttctcccatccaacccaaaaccaaacatgtccagcaacaccccccacctgccagtacatgaaaaacaggctctgtcccaacatccctcaccccaagtacaggggtgttgggggagtggccccctgaggatccagccaaagggttaatgccagaaggaaaagaggaacaaaaagcgtttgggccttgaagctcctgccttggggaaggcaaaaggcctaatagactggccacaggttttagaatccaagtacccatgtttaaggtttcctgtcctccacatccacatgaatttccacctaggggcctgccagaacagaataccccctccagaggggtcctcctgctgattacagcccacattccttacctattggctccatcccttaaaaggaggcccccacccaagttgggaagcagttgaaaaataaaagctgtaaaggagctgaaacaggaagtaaagaataggtggtgcaagaagattatggccccctgggatgaatgacatggagcccatttgtaaagtgctactgtatcatcccccatgaattattgcttctccaaaggaggagcagaggaaggaacaggaacatagaaatgagtatggtattgctttgctcactgctgaggctgatgggccagatggacccaggggttatcagaaaccgaagattaactacacagctccagaagactcagacctcaaaatacagaggtgctcatttatcctcccagccaatttatccccctgggccaaggtaatgtaaaaaaggcccctccccccatcatattcacattttttaaatttcccaaacaatactttggacccctggggttcaggccccaaaaaatggtgggctaaattaaaaggagcaggcctgtttttcaaaaccaaaggacaagtttgct

SEQ ID NO: 148026 - DNA, 409 bp, Homo sapiens
tcccctgggacctgtggccgccgcccacagaccatgctcctggggcgcctgacttcccagctgttgagggccgttccttgggcctctctccctcgcaagggggcccagctggagctggaggagatgctggtccccaggaagatgtccgtcagccccctggagagctggctcacggcccgctgcttcctgcccagactggataccgggaccgcagggactgtggctccaccgcaatcctaccagtgtccgcccagccagataggggaaggggccgagcagggggatgaaggcgtcgcggatgcgcctcaaattcagtgcaaaaacgtgctgaagatccgccggcggaagatgaaccaccacaagtaccggaagctggtgaagaagacgcggttcctgcggaggaaggtcc

SEQ ID NO: 148027 - DNA, 361 bp, Homo sapiens
ttacagcacatcgccggccggccaggtagggcggctctctccctcgcaagggggcccagctggagctggaggagatgctggtccccaggaagatgtccgtcagccccctggagagctggctcacggcccgctgcttcctgcccagactggataccgggaccgcaggacatgtggctccaccgcaatcctaccagtgtccgcccagccagataggggaaggtccaggagggacgcctgagacgcaagcagatcaagttcgagaaagacctgaggcgcatctggctgaaggcggggctaaaggaagcccccgaagggctggcagacccccaagatctacctgcggggcaaatgagtctggcgc

SEQ ID NO: 148028 - DNA, 417 bp, Homo sapiens
cggatcacagcagcaacgggcgggaagggcggcgccagactcatttgccccgcaggtagatcttgggggtctgccagccttcgggggcttcctttagccccgccttcagccagatgccttcatccccctgctcggccccttcccctatctggctgggcggacactggtaggattgcggtggagccacagtccctgcggtcccggtatccagtctgggcaggaagcagcgggccgtgagccagctctccagggggctgacggacatcttcctggggaccagcatctcctccagctccagctgggcccccttgcgagggagagaggccgccctacctgggccggccggcgatgtgctgtaaaggggcccgcagacccggctgcccagcactccagagacgggccaaggcgggcggccgc

SEQ ID NO: 148029 - DNA, 1119 bp, Homo sapiens
gggcttgggaagggtcagcgggaggcctgagggcgccgggcgctgcggcaggcgggcccggggtccagccgagagggtccgggcgccaggcaacgcgattcgcgcgggggtgaacccggggagggggccggcctccccgttctgggacctttcggtgcgtccgagcgcgacaccgcccgcgtcgggggcttgggagcctcggggcgcgagctgtgttggaagcaaagtcctccttgtgggttggggtggcggagggagaagggaagcgagggtcgcggcgggaccagacgccccagtcccggcccgcccgcgactactgaaggcgctgccgcctgacctgaacgggcacttgtgttccagctcccctgggacctgtggccgccgcccacagaccatgctcctggggcgcctgacttcccagctgttgagggccgttccttgggcaggcggccgcccgccttggcccagtctctggagtgctgggcagccgggtctgcggtctccctttacagcacatcgccggccggcccaggtaggcgcggtctctctccctcgcaagggggcccagctggagctggaggagatgctggtccccaggaagatgtccgtcagccccctggagagctcggctcacggcccgctcgcttcctgccccagactggattaccgggaccggcagggacttgtgggctccaccgcaatcctacccagtgtccgcccagcccagataggggaaaggggccgaagcaggggggatgaaaggcgtcgcggatgcgccttcaaatttcaagtgcaaaaacgtgcttgaagatcccgccggctgaaagattgaaccaccacaagttaccggaaagcttgttgaaagaagacgcggttccttgcggagggaaggttccaagaagggacgcctggagaacgcaagcagattcaagtttcgagaaagacctgaaggcgcattttggttgaaggcgggggctaaagggaagcccccgaaagcttggtaaaacccccaagatttaacttgcggggcaaatgatgtcatgcgccgcccttcccgcccgttgctgctgtgatccgtagtaataaattctcagaggactcaaaaaaaaaaaaaaaaaa

SEQ ID NO: 148030 - DNA, 669 bp, Homo sapiens
  misc_feature (1)...(669): n = a,t,c or g
tggttgccccngccaaaacctcccctgtgcctcangtgaaccctcccaacctcagcctccctgagtagcctaggactaacaggtgtgcaaccaaccataccccagctaatttttgtattttttgtggagacagggtttctccatgttgcccaggctggtcttgaactcctaggctcaagcagttcaccggccttggctcccaaacagctggttacaggtgcaagccaccatacccgtccgcagtagaactttctgcagtgatggaaatgttctgtaacctgttcctgtaacagtaagggtagcctacctagtcccatgtgattattgagtcccttgaaaatgtggctggcgttccatgagtaactgaatttttaatattaccttaatttttattaatttaaaatttaaatagtcacatgtggctactggcccatgcaagtctgatatccagtggggcagtcaaattttaaagctactacattagtcagttgtgttaggtggttggttcatggcagttttttgaatattaaatatgaatacataaatacaaaagttaaataaaagcctaagcatggaccagtgatgaaagtgtgtcatgaaccaaatattatatccatacatttctcaacagatgaagtccattatgtaaaggtttctgtttctccagtt

SEQ ID NO: 148031 - DNA, 428 bp, Homo sapiens
  misc_feature (1)...(428): n = a,t,c or g
aattnaacagtcttttctttttttgaaaacaaggtacttgctccgtcaccccaggctggaatacagtggcacaataacagctcactgtagtgacctccagactcaactgatctttccacctcagcctcccaagtagctagggccatagctgtgcgcatgccaccatgcccggctaattttttattttttatagagacagggtctccttatgttagcccaggttggtctcaaacacctgggttcaaatgattctcctgcctcagcctcctgaaatgctaggattacaagcatgagccaccacacccagccaacagagtcttttgggtatctattaggattcttatattatctagctcctatttacatttgctatcttgcaaatatatcagtttctcatacataatacaattcaggtgccacaaagtcat

SEQ ID NO: 148032 - DNA, 357 bp, Homo sapiens
  misc_feature (1)...(357): n = a,t,c or g
nnnnnnnnnnnnnnnnnnnnnnnnnnnnnnnnnnnnnnnnnnnnnnnnnnnnnnnnnnnnnnnnnnnnnnnnnnnnnnnnnnnnnnnnnnnnnnnnnnnnnnnnnnnnnnnnnnnnnnnnnttgggggaaaaggcccggccagggggggaggaacccttggggcccccctttgcctgggggaaaacccctaaaaagggcttccttgggccctttcccactgggcggttccaagggtcctccccagggctttaaaaaggcccttttttaaaagggggcccaagttttaaaaacctaaacctggttcccaaaacagggtttttaaacccccaaaaatttgggaaacgcccttgggaaat

SEQ ID NO: 148033 - DNA, 1154 bp, Homo sapiens
gtttcactcttgttacccaggctggagtgcaatggtgcgatctcagctcactgcaacctccgcctcccagttcaagtgattctcctgcctcagcccccaagtagctgggattacaagtgtgcgccaccacacccagctaattttttatttttagtagagatgagatttcaccatgtgttggtcaggctggtcttgaactcctgaactcaagtgatccacctgcctcgacctcccaaagtactggggattacaggcgtgcgacttggtgcccagccttgtacttttttttttttttattgtagctctgtatagcacttggataatgtctgggtgtctccttaaccatcaaactgttcctttatttaaaaatggtttaattaccggtttagaaattctagtcctcaataagtgggtggctcatgctattgttgttcctaaagctaagctttgctgggaaggaaatgccctatagtttcttaaagaatcattaatccttataggattcctgagttactgttttgttcctccccactgcttcccattcctgagttttgtaattcctaatccttctataatttctattaccttccaccatagtcattctttccttacgcaaagcccaaggaatgagctgctgctactttaaagtgtggtcattatgatgaatgtgaaaagagttttggcttgttctaaataatttttacaagttatggtacagacagttgttacatatcaaaaaaaacctgtttattgaaacaggaaataaaaaagggatcttttacattatagaattaaaactaattttttcttgtatataaactaattggtttgattttaaatatttctggcttttattaatatgtcttaattttgagtttgaaaatgttaagtgcaataaaaacatactagtacagattttgttttgttccaattggcatactctggggatgatcacttaaaaaaacagattttacataatgcctacttctggtagatgtcttatgagattgttctgctttttctaagttacttagatgttggatatgtacatagctgtttcttgttctgtatacatttctcaaatgtacacttgtattataataacctcccagttctaggggatatttgtgcaataaatacacatgtcaacttga

SEQ ID NO: 148034 - DNA, 1013 bp, Homo sapiens
taataaacatccgattttatttacaaagcattaaagcttcagcaagaagtacccaaggctaagtctcatcttgtacaaaactacagattttttttttttttttttttgagatggagtcttgctcctgtcgcccagactggagtgcaatggcatgatctcagctcactgcaacctccgcctcctgggtttaagcgattcttctgcctcagcctcccaagtagctgggattacaggtgcccgccaccacgcccagctaatttttgtatttttagtagagacggggtttcaccatgttgaccaggctggtctcaaacacctgacctcagatgatccaccagcctcggcctccccaagtgctgggattacaggcgtacacccacggcctggccaagaaaatcaagatttacctggtttatgtgttgaccagctatacacagagaattctagatttttttctaaaaattattatcaaacccccaatttcaccagtagaaaaagagatcttaagatttctgtgtttttttttccagcataactcagttacttatggctgggagaaaatatgtagggagataatctaatacctaattcgaaggaagaaaatatctaattctaagtcttgagttcttctcatcagaccatagcaggatttaacatttaacatttttcagaagcttctaaatagacttcattcagttttttgtccacagcagtggcatttaaattactgtacctttaagacatggaattgctgggaggcttgggaaaccttgagtgcaatttccctaacacgacctccaaggagaatagagcacaacagtggttggaaaaactctcaaaattttacccaattgtatgttttctacattgtcagtatctagctttatatagttaatatgtacttctaaaatttctgacagcgtttggtgtataaaacagaccaagctcaagatgtaaagaagattgagaaattccacagtcaactaatggacttatggtagccaaggaagccc

SEQ ID NO: 148035 - DNA, 688 bp, Homo sapiens
attttcaaattactgatacaaatttgccagagaaacaattacatgttttacctaacatcaaataatctccagtttctaagacagatgcatttcttgttcaatttccaaaagtaaataaaggctttctaactgaaaacatttgcatccctagctctctaaagtaattaaaaagaaaattacaaaaaatgaccttctaagcttctgaacagcccacttagttacataaagtactttctgtcccaacactttctctaattcaaagagatataggcttcattgagtacacgacaaagtcttcatttcaaaccattcactcagtttccatggtaacattgcgggcttctttggctcccataagtcgcattagttgactgtggaatttctcaatcttcttaacatcttgagcttggtctgttttatacaccaaacaaactaaatcatctgttactttaacacacaagttcccatcagaatgcctatatttgagaaccacacgtgccttcatagggtcagcgaggtaaagcttctcggcagcgcggctgaactcctcccaggtctggtactgcggcatcgtggcctagagtggaaaagtaaagagaagcaaggcctcagaacccggcccaacaaactacctacgtccgggagtcgccaaccgacgcgagtcccagcagccccaagatggcggcgc

SEQ ID NO: 148036 - DNA, 582 bp, Homo sapiens
tttttttttgttctgagccaccaacgtaatttatgtctaagaagatactctagagatatggcggcaataataaaatcaaaatttttcttataggccaggcagggtggcttatgcctataatcccagcactttgggaggccgaggtgggcagattacttgagcccaggagttcaagtgctcctgagcaaggagttcaagtgcagcctaagcgacatggtgaaaccccatcactaaaaaaaataaaaaatttttctaattcaactccacaacctttttacatatttaaacattacaatgctcaaaaaagattcttcaagtttgtttacatgtctaacttaaaattttctagtaaatgtaagggctagtactgttcctgtacccctaaaggtaatttacctacattcccacaggaaccactgaaagaaccccaacttgggagtactgcaacccaaatgttccaagaacatccataattaaatcttcccaagacacatataccttaaacaccttctcatggaatgtcatgaaattcttgaacccacgtaagaagttgcagctcagtgcacataaagttgagacaga

SEQ ID NO: 148037 - DNA, 631 bp, Homo sapiens
cctatgttgagtgcctatgtttagggtattatctagacattagtggtacatataagcataattaatccaaggttcctactttaattatatgtgaggtaagtagcatcttgattagtcctgatgttatttcattatatatcatggtcaatttaattttagaattatacatctgaagagaggggaagttttcaaagtggttttattagcatgttatttaacataataaagtattaatgtaatatttatggatatatttaaagaaatgaatgacttttaacgagattttctcccctctctctctctcattaggttcttggagtgtcaatgttttaataccagtacacaattaaatctgtggtgaagtcattttctaagtggaagaggaaattttaaagtgtggtagatacagtgaaattctgtacagatttttctctaaggagaatatgacatgcttatgcttaccaagatcaagtgcattgaggggcagttttgtttgcctgaataaacgtaaaggacaagtaaacaatttgatgataagctacagtttttcttagaaagtaaatattttatttatgcgctgttagttggcttttgaatcgattatttcatgcttttttttaaaaaaaaaaaa

SEQ ID NO: 148038 - DNA, 2532 bp, Homo sapiens
cttggaaagtttcatacctttcagatgtcacccggaggaggggttggtttgctttcactgtagtcctaccggaattcttgtctggccggtgtggttgtgaccacatgtcagttcatgtgtgtatccgcgcccggggggtcaaggtacgaagtaaaaactcaaaccatcctacggaaacacggaaaagtgttggggggcatgcggctttcactcactagagaaagtagtattagtgacagtatgtggttagccaggaaacaaaccctgcacacccctgttatgatgcagacaccacacctcactcccactatttgagaagagccccaaaggattccgccctgaaggataccttcatgagtgtttttatccaatgcagactgaacatcatcaaacacctcttgattataatcggcgtggcacaagcctattggaagatgatgaagagccaattgtggaagatgttatgatgtcctcagaaggggaggattgaggatcttaatgagggaatggattttgacaccatggatatagatttgccaccatcaaagaacagaccgagagagaacagaacctgaaagctgatttctttgatccaggcttcaattatggatgaatcagttcttgggagtgtcaatgttttaataccagtacacaattaaatctgtggtgaagtcattttctaagtggaagagggaattttaaaagtgtggtagatacagtgaaattctgtacagatttttctctaaggagaatatgacatgcttatgcttaccaagatcaagtgcattgaggggcagttttgtttgcctgaataaacgtaaaggacaagtaaacaatttgatgataagctacagtttttcttagaaagtaaatattttatttatgcgctgttagttggcttttgaatcgattatttcatgcttttttttaaaaaaaaaaaaaaaacaaaataacaatctgaagaggcatttggtacagatatgaattctcttacatttatttactggttgcactaaataatgatgacctctgctggatttctgtttacatccacaaaacaatgttaaggatgtatttattcccctaccctgaagaaagtgtaggatagaattgtttttagcattctaaatgtaaatgcttaaaacgtcaatcaacaaaactttgttatatatattcggaattgaggacaaaattaaacttataatgcagaacttttacaattttttcatctatatgtattttaagatatttttaaaatccaagagcttatctatacttttcagaaatatccagatgcagtgaactgccataaggtaccctagtctcaaacatgcttatcccattatcaaccctgaaagattgcttgtcctttaagataaaaatgtaatgttgtgatattccttccagtaatgccactgtattttgtctccaaataaaagaagcttattgtagtatgtttgcagaaaaattctaaacaccaccctatacagcttattagagtgtgggaatagggatctaaattttaaataaaattatatatatatataaattggtgctgattttataattgcggcagttttgtttagttttttcttacttttaaattccaacttaaaattatgaggtttcagaaatatattgaaagtttaacaatgtttaaaaatagaaaagcatgagcgttcatgctttaaaatgatttttaaatttgcattttatattgttttatctatctgtctttgcaagcagtcttcaggttaaagatacttctaacaggttacagtacatttcctctgtatgtaaattagatgggataatacgaattcataacccataatattctttgaaagctaagctctaaacttcattttatgtcctttcacaaataaattagtttaaaacagaaagtggctacttgccattttgacatcaactcattttgcgaggcttaggcagctagacatcgtttaaaacaaaatattaacttatattacatgtgtatctatctattgtcagccgtctctcagttcttgaggtatattattttaatcattccatgccttaatatgcttgcaatacaagaatatcttcagatgggtgaataccaaaaggctttcagttttttagtcagaaatcaagcattgggctgtggtagccaaaaaccataggttagctaaaaagatcatgatacaattattttattaagtcatggttaataacaaatgaatccagacttgtctaacagattttccatcaacaaatattgttatgtgcaaaagtattgcctatgttgttttacacaccactggcattaactaggaactgctgagagggactgtatatatggatttttaaacctaagttgattttttttctcactcttggaaggggtacttctttgtgaaagcagttcttacagctttgttttcaacccagctaaaaatgttttatatattactctaacctgttgtcctccacattctattgtcctaattgtactggtgttctgatttgtatttatggcttgaggacagt

SEQ ID NO: 148039 - DNA, 543 bp, Homo sapiens
ctggagacttccccgcttatgtttacaatgctggatagagatatgtctggcacatgggtttcaatgaatttaaagaactctgggctgtactgaatggctggagacaacacttatcaagttttgacactgacaggagtggaacagtagacccacaagaattgcagaaggccctgacaacaatgggatttaggttgagtccccaggctgtgaattcaattgcaaaacgatacagcaccaatggaaagatcaccttcgacgactacatcgcctgctgcgtcaaactgagggctcttacagacagctttcgaagacgggatactgctcagcaagttcattcaatgtgtcatgagtgtttaaatcaagaggaagctgcatgaatgtaatcaacattccaactggagctctcctttgcttgtcctctttgcttcggtaatatgtataaacttacatcacgactttctcttaacagctgttgtaaagtttattactttatgtacaactgaagttttgttttagttttgataataaattctttggaacttt

SEQ ID NO: 148040 - DNA, 2125 bp, Homo sapiens
atggcgtacccggggcatcctggcgccggcggcgggtactacccaggcgggccctcagtggtgaaagaagaaaacttgattcggcagaatgacgtgtatgtgtttcctgtttcacagtatggaggggctcccggagggcctgcgtttcccggacaaactcaggaatcgctggtatggttactttgctgctgtagctggacaggatgggcagatagatgctgatgaattgcagagatgtctgacacagtctgggcattgctgggaggatacaaaccttttaacctgggagacttgccggcttatggtttcaatgctgggatagagatatgtctggcacaatggggttttcaattgaattttaaagaactcttggggctgttacttgaatgggctgggagaccaacactttatcagtttttgccactgacagggagtgggaacagtaggacccacaagaattgccagaaggcccctgacaaacaatggggttttaggtttgagtccccccaggctgttgaatttcatttgcaaaacgatacagcacccaatgggaaagatcaccttcgacgactacatcgcctgctgcgttcaaacttgaggggtctttacagacagcttttcgaagacggggatacttgctcagcaagggtgtttgttgaatttccccatatggattgattttcatttcaattgtgttcatggagtgtttaaatcattaggaagctgcatgaatgtaatcaacgattccaactggagctctcctttgcttgtcctctttgccttcgggtaatatgtataaacttacatcacggactttctctttaacagctggttgtaaagttttattactttatggtaccactggaaggttttgtttttaggtttttgattaataaattcttttggaactttaataagatctagtctgttacaccatttagaactttcctgagccattatcagtcatgccttattttcttgctaaaactctatgtaaaatttaagtatgccaaaatgtttaagtcacattatttatttttcattgtgagacacctaaaaactgttaatcatatgtacagctgttatcctttccctctccctacaaagaatactcccacacataaaaacttaggtaaatgacatagacgcacttgggtgaaataaaacaacaaaaaaggtaatccagtaatccacgtcaggattcaccttagaagtttagcacacgcccttcaaaacctgttgaaaaatttggattgcgaaatactatctggcaccaagtccctttttgtcatctatttaaacctttgttaactctccttaaaaatcttgtacattataagcttaactatataaaaagaaaattgatagaaaaagactaagggaatatatggaaatattaacaatgtttattttggatgaatggaattctagatgactttaattttctttatatcagtatttttcagattttctatatgctttccttttaaaatcagattttagtttttaaaatactgatacatccattttgatataccatgtattcacactttaaaaaatacacatagcagagtatcggaaagtatgtaccaaaacattgatctggctaccactgggagtcaggatcatgagttcatcttcttccttcttcttactgcttttccaaacattctccagtaagccaggtactaccatttataatggaaggaattttttaaaaaattttaagctgtacactttcaagtaagatctgaattctaatgctggcttgtgcctcttactatgtggtttggtccattaatagataatgcccccagtttcagtttccccccatcctttgaaaaggagataatatgttatctcttgggagtaggttctgaatatgaagtgtgttgatacaagaagcactgacaatgtttctgtttcttaaatttaaaactggcctggtttgccttttttttatcaagagagcttaacagataaaaaatgaaattaggtctattttctacttgccagcagaggtatctgtcttattttaggatgcaaggtgtgaaacttaccattcaactgaacaactagttgtcaactaatgaaaataaaacattttctctaagcaaaaaaaaaa

SEQ ID NO: 148041 - DNA, 7285 bp, Homo sapiens
  misc_feature (1)...(7285): n = a,t,c or g
tgttggcacaagattacaacctacaatttcaatgcccttccctcctacacagctcaaatggaaggaaactgattaacacatagaaaggaacggcaggctcacaggtttaagcatttgtttttacaaaaaggagtgggatatgggggtggtcaagttttacgggtaataacaacattctctctagatggcagggggtaagtctgcctgtcctccattgctggtaccacataagggatacattagtaaagtaaggtaagggttatatgtgtggctggcctgttctttagagaggaaggtgggatggtatctgctgtgtacctgtctcagaccaaacctggggctggaccagtgcccctttcttctcagccctcctccacagcctgactgtactgccagccgcacccatgagaaggaagtgttgaaggaagcctgaagacatccacctcgagaaaaggaaacaggaaaactattccttccgccttctctggaccaaattcactccctcagctccagagagtgctgcaaaaatcttccttagggacgctgtgaagacacggggaagaggccagccctgagcgggcaagaagaaagcttgaactttccatgcagtaccaagcaaggctattttggaaacaagcaaacaaacaaaaaatggaaaccaacaccatataaccacaggttgggtagctcctaaatcctggacagcatttggattgggggtaagggcaattttactccagctccttgtyttataacccgcacaaggtgccrrgaggttaaggaccacaactgacctctctttccctacaagcaccattccttggattcccagttttgttgagctcatttgaggtcatccttgccatcctcttaaaaaatgacacagcctcttggttattccattttctatccctttctayaattatgaacrcactctctaaacaggagatctatatatgctctcatcctgcaacccaagagattaggygacctaatgatgagaaggctaacttatttgctttcctgggtggtcctgatggaaatgaacagcagcagagttctggtgggatagagcagtctagtctgagccactgtgtgattccccaggggactggtccctgggtacatgggtccctggctctctgtctcagttccacagatattactcaacttggccatttacgcctcagctaaaacatatgagcatgagggaaaagggacaagaaatacttttgtcctctagaaaaacttaactcaatacatcttggctactttgcctcaacccacggggttccctggaaacatttgttgaacttggccaagaggagattgtatatggatggcacacctggaaaaggggagaaagcacactagttcatctcttttataagtagaatggtcccagggatgttaacctttctgatgctgatagtagatgagtggagtggggtaatcgtgaaaacttaaaaacccttaagctgtttggagactacwcaccacagtggagcaaaccaaggtggggcctcactgccctcctcagagcccatccctgaccatgtcattggataggatggaagacaaagtctytgaaatggaggctgggctggcaaaagtaagtatgaagatgctactactggccttccacttcctctctctgatacacctaagaaggtgagagacactagcttcaattccattttacaacagttctcaacaacctgaaatattcttgacttccttaagcacatggaaaactggtaagctatatctttctaactgaaattttacttattctaaccaaccttttctttgattatcaaccagtttgacagtcttcagatcacaaaacaatagaacagacctgacatttacaaaactgtactacatacttatttcttttacagtagagctgaccaattacttttctaactactaatgcaacaccatgccactgggccctggactctgatgtttctgatccctgagcaacacatctatgtccattcacagatggaaatgaaagagtgagattctcagaggctaaacaacattctgggaagcaaattggatttttgaagggagagtcctccttagaaaattctggagccaaacatgctcccagtcacgagggaatggkktragccgggccaggtttcctgtctgtgrgctatagctcccttcctgaactccctcmtgtyctttgggaaggacacaagcytcttgctcattaagcaaaggccctccaagtctcctttttacttcagcactttggaaacyytccaagacttaacttccgatctggggaggttctacgtggagcagacctatcccttcttattcctgttcctgggtgtctccataatcagcctctaccttccctggcataagtcatatctgttatgctgcaggaacygagtaaccaaagctagatatcccttggaccactgattagtgacacattttctccacaacaaagggaggttaaagacaaaggtttaaccctgagaaactttttttttggcaagataataaagaggttaaagaggctacgtggatctgtcactgctttagcttaccattttcaattcagcaccaaagtgctcagaaagacaggctcagwtcaggacgacttcttaaagggatacacaggcaatattactggcaaaatgattttccaaagctgagccacgcgccccaccctacagggaggggagtagaatcttatggcccagcattggcattgaggcatcttgctttttttcctcagaattccacaaaggcttaagagtgatctaaatgcctggctggaagctcaagtctaggagagctattttactgcactgttgagatgttctctgcaaggtagtcacagataataagcaatttagtagataattattctatacaagaattaatgttctctgaaacagtgattaatagaatcttcacatctggcctggctgggaggcttgggggcaggaaagggagggtggaaggatgggtagcacatcaaaatggtgatgaactggcaaaacgacaatgctgctgtttttgtatcctttaaagcctatatcccagggttttaaacgacgccgggggtgtgcttcacatctggcctggctgggaagcttgggggcaggaaagggaaggtggaaggatgggtagcacatcaaaatggtgatgaacctggcaaaacgacaatgctgctgttttgtatccctttaaagcctataacagtttaatgacgcttttttkgtgtgcttcctgataggaagtcaaataagttttagtattaagaactggggatataamccaaaggaaacctagagtcaactgactgctggaggaacagaagcaatgrctttctttccacccttcttagatagtaatcttacttttgttggctaaaagcactttcttcagcattctgagttaacacgggttccctataagctcccctccccaggtggacagtcytattttctaagacaagctcaaagctcaaactcaccaaattaccactataaacaaagcttcagggaagagacataacctwacttcaaaagcttcaggtcagagacrgccaaaatcatgtgactgctagcytcarstcaagyagtgtgcccaaatcattcacaaaatgggattccctttccttttcttttttttttttttggagacggagtcttgctctgtcgcctaggctgcagtgcagtcggcgggatctcggctcactgcaacatccacctcctgggttcaagcgattctcctgcctcagcctcccgagtagctgggactacaggagcgtgccactacacctggctaatttttgtatttttagtagagatgggggttttcaccatattagtcaggctggtcttgaactcctgaccttgtgatccacccgtcctcggcctccccaaagtgctgggattacagggcntgagccaccatgaccagcccttccatttattaatttataaggggactagaaggacaaactatttgattaatttgaaggtgagaaggtatcattttctcagatgctccaactaggcttcttcacatccctcaaaggttatcagctaaagacaagagtttctgaggctttatgcaaaaacatggtcaaaatgtgaaaccgcccttttagaggcagggttttgtgaaaggcttgctggcctccaaaggagagtatgcctaaactctctgggctcccaggacctgtggtgacctcaagctaacctgatgcacagacaacagtatcttttagggactgcagccaatgttcccccaatttacttttttttttataccttaaaatatcaaatgtttcatttttaggtgatatcccaagtgacacagaaacacagctcctccggatggtgaagtctccgctgcaaaactcacgaaacagcacagaggatgactctagggtgctctcccacttgctccaagttaggcaggtgccctgatggaggcaaggctgagccattaacatgcacagctccatatcctggaagcctctgtagccttgaggagataggctctatccaacaggactcagaataaatgactgccacctcaactgagcagtatgaactgcccacctcaactrggcagtctgacctcttccacagtctttaagaaacagaagagccatttgcattatttaatcaccactcaataatctcctccctccccatagctgcttgagttaactgtcccacaagtgtcctgtgtttwgtawagatgagggttattttctgawatgcagatgggamtaggatgaagctgtattatcaattacagagacagccaactctcatttctcttaaagcaaaaattcattccactgtgatttctccaggtatttcctgcaattctaaatccgcccttgatattagagaatattaaaatcacacagttgtggcaaaaatcacattgtggctattaaatcctttttgtgaactaaaaaaagtgaatgtggcttaggctaagctgttttttttttttttttttttaaagatgaggatgcggactccaacaaaggcattaagaaagtactagatgaaaatgagaaatatgtgaaggataacatgtgaaatgtacactcaggtctaacaaatacctattatttctctggttaagaaggtttagcaggagcctccaatgagcactgtatgtacagaaaagggaaggagcaggaggaggaacagatctgcacagaatttttttcttaaaaaccacaaagggtgacttttttcttctaaggcaagccaggcctgagaggcatttacatggggctggctcctaatatcaaaacaaaatatttctttggccacaaagggaacttggactatggtaggcaacacattttacaaaacttactggcaaaacacttcccagagggccagtggacctactctggttccccagaggcttccaagaagcaaggccttcaagtgccttcatgttcccatgggngcttgtgccagtgcaatgccagaaggcggatattcctgctgtgaacgccaccctcgagaccttctgcagcctgagagggggtgatactcccacaccctttgatccttccagatggctcagcctagatctagcagtgagagagccctctccatgcagggcagatggagtggtggacacttgtgaaaacaaaacactaactgttccatcctgttatatttgctgtgaggaaaattaagattcctgttgtatgggctgcactgtttctggaagactacaggaaaatctaacatgggttgacacttcctgggtagcccttctgtacatacacacacacacacccaggggagaaggccaggagagaaaatcctggtccaaaagatcacatgaccttactagtgtttccccaatgactgtaatttataaactaaaaatttttacaaatccactgctatcttcttctgtcctgagtttggtagactttaatggatgctccagcaataaccagaatctaggacatgcagactcactgtgagcgagaagctagggatctgccctaaacataggaacctgtttctatcaagcctgaatgaggtcagctctggtagaattaatgacaaatcaatgtcagtgaaatattctgcaaacagggtagcttttgtgcctttcttttggattattttcctttggggagataagaggtattgccaacccatgggtcctaactaatctatcactaaaggactgtgacgacattcctcagtaaagacagtcatggtgtttactgtgcccaaggagggaaaatcccagatcatcagaatccccagtgcaacagaaaacagcacccagtttcaacaattctgatgttggacaaagcctctttttgtcagttaagaaagcgtaagcacaatctctcagtcaattgcattaacaggaatccattcatgtcactgaaaaatacttcttggcacagttcactttccgtgacccaaagacaccaacaacaatcaaaactgcactttcagggtagtatattgttacactagcccagtcaaaacatactcagaacatttaaaaatgtataaattactgttagcactgcagttccgttttattgtcttatttatttattgagacagagtcttactctgttgcccaggctggagtgcagtggcatgatcttggcttactgcaacttctgcctctcaggtttaagcaattctcatgcttcagcctaccaagtagctgggattacaggagtgcaccatcatgcccagctaatttttgtattttagtagagatggggttttgccatgttggtcaggctggtctcaaactcctggcctcaagtgacccacctgccttggcctcccaaagtgctgggattacaggtgtgagccactacacccagccctgcagtccctttttaaagagtactggactgttttcctgcaaagtactttcaaatccataccataaaggtagaatttatctgggaagaatgtgttttttgaattccacctggcacttggttaaatctactttattttgccctttatttatttgaacagaactttagaatgctctaggtcaggaaaagaaacagtgtgttcgtttttaagaaggatgtgtgaatagtaagttggcattcagactcaagtcccatggtattgttcttatccaatgggacctctccttgggaatataattcctttaccagaggtatcatggtatcccaagaatataactgctcccttggctctgtgtgtgaagattgggggagaggatgtaaactaagagtata

SEQ ID NO: 148042 - DNA, 434 bp, Homo sapiens
agtctcgctctgtcgcccaggctggagtgcggtggcgtgatctcagctcactgcaacctccgcctcccaggttcaagcaattctcctgcctcaacttcccaagtagctgggactacaggtgcgcaccaccacgcccggctaatttttgtaattttagcagagatgaggtttcgccatgttggccaggttggtctcgaactcctgacctcaggtgatccaccagcctcggcctcccaaagtgctgggattacagatacgagccactgtgcctggccttttactttctgactctgacctctagaaagaggcagggttgctctgctctgtgatattccttttctatacttcccatttaatcccatgatgccatagcaacatgcgaatcacatagctgtcaccgtgtggccacatttctgccactgtggctctccttc

SEQ ID NO: 148043 - DNA, 533 bp, Homo sapiens; identical to SEQ ID NO: 144751

SEQ ID NO: 148044 - DNA, 420 bp, Homo sapiens; identical to SEQ ID NO: 144752
  misc_feature (1)...(420): n = a,t,c or g

SEQ ID NO: 148045 - DNA, 481 bp, Homo sapiens
taaagtcatcgggtgcagtggctgtggtgctcccattcaagtttccgaggtgaagctgctttccttttcatcagggcagcgaaccgttttcctcccagctgaggtgaaggccatagggacggagcatgatcacgtcctccctctgcaggaattggctatgagagggctgtatcatacctaccacagcttgctgaaaggaagacaactgttagttttgtggcttactgctgctccacccagtgtctgcagacttttgacctgctgagttgataaacactcaagaacctcaggagcgctgccagcttgacactggggaatccagccagtccagcacactcttccatcctgtcctgtccaatgcgggggcactgcagaactctctagaaatgtcatgattggagcttcagagctaaaatgccttcacccttcccccaagttggaatatatcctcccccaaattaaaaaaaaaaaaaaaaaaaaa

SEQ ID NO: 148046 - DNA, 731 bp, Homo sapiens
agcgaaccgttttcctcccagctgaggtgaaggccaaagggacggagcatgatcacgtcctccctctgcaggaattggctatgagagggctgtatcatacctaccacagcttgctgaaagatttgaactttctgtctccaatctcattacccagaagtttcctagagctgctgcactgccctctggggcactgtcatcggtgtagtgagcctatgtttaccatcgtctaccccaagctcttttcccttgagagagacgccaatggcagggctgcaccagtggaagacaactgttagttttgtggcttactgctgctccacccagtgtctgcagacttttgacctgctgagttgataaacactcaagaacctcaggagcgctgccagcttgacactggggaatccagccagtccagcacactcttccatcctgtcctgtccaatgcgggggcactgcagaactctctagaaatgtcatgattgagcttcagagctaaaatgccttcacccttcccccaagttggaatatatcctcccccaaattaaggacccatttgtcttctgtgtttttcctttttatgtgagtgtgtcttttacagaaaccatttagattgatgggcctccccaaatctaatttaaagcaagtttccggtccttggagaacagtgacttgatcatctagccagattcccttttgaacacacataccttcagtgatgcttcctctcctcc

SEQ ID NO: 148047 - DNA, 1231 bp, Homo sapiens
  misc_feature (1)...(1231): n = a,t,c or g
taccccaccacaccataccaacaccatcccatctcatcaccgccccccatccccacacacaaccaccaccaaaaaccccctaccccatcccatcgcccacagccaaccnaacgctatacctaccaccacaaccacaccgcactcacgcccatcgctccaacacgtcaatccaaccccccacacaacacccatcaccacacacccagccacctcgcacgaactccagccccccacaccaaccataccctcccccaacgcattcccccgtacccaccgggcacatagcacactccacaagcccactcacatcctgctgggtagcgggcctcgtcccagccgcggcgcgcgcccagccccgcttcgcgccccagcccgaccgacccagcccttagagccaatccgttatcccgaagttacggatccggcttgccgactttcccttacctacattgttccaacatgccaaaggcctgttcaccttggagacctgctgcggatatgtgtacggctcggcgcgagatttcgaccatttaaaccggattttcaagggccagcgagagctcaccggacgccgccggaaacgcgacgctttccaaggcacgggccgatctctcggggcgaacccattaccagggcagccctgcccttcacaaagaaaagagaactctaccccggagttcccgccggcttcttccgggatcggtcgcgttaccgacactggacgcctcgcggccgcgccatctccgccactccggattcggggatctgaacccgactcccctttcgaatcggccgaggggcaccggaggccatcgccccgtccctttcgaacggcgctcgcccaatctctaaggaacgagtgagaccaattttcaactgcttggttacaattggaacccttctccacttcggccttcaaaagttcttcgtttgaatatttgctactaccaccaagatctgcacctgcggcggctccacccgggcccaaagccataggcttcaaggctcaccgcagcggccctcctactcgtcgcggcgtagcgtccgcggggctccgggggcggggagcggggcgtgggcgggaggaggggaggaggcgtgggggggggccttgaagccaatgcgggggcactgcagaactctctagaaatgtcatgattgagctccagagctaaaatgccttcacccttcccccaagttggaatatatcctcccccaaattaaggaaaaa

SEQ ID NO: 148048 - DNA, 299 bp, Homo sapiens
  misc_feature (1)...(299): n = a,t,c or g
nnnnnnnnnnnnnnnnnnnnnngagatggagtctcactctgtcacccaggctggagtgcagtggtgcgatctcagctcactgcaccctccgcctcccgggttcaagcgattctcctgcctcagcctcctgagaagctgggattacaggcatgtgcaccacacccggctaatttttgggtttcaccacgttggtnaggctggtntcaaactcctgacatcgtgatcctcctgcctcggcctcccaaagtactgggattacaggcgtgngaattngtgcctgggcaacntacatttttttt

SEQ ID NO: 148049 - DNA, 906 bp, Homo sapiens; identical to SEQ ID NO: 122328

SEQ ID NO: 148050 - DNA, 2878 bp, Homo sapiens
ttttttttaattgtggaatcagtgtaatgggaaagtgacctgccctggtgcatttggctgtttcatcaagttgccaccagcatttctaaggagaaagaaaccatttttagggaaatggtgatttaagataaagccacgaaactcacaaaattcaggtcgtatgctgccgtaattctaaaaatacattttgttttgacttgggtaattttgttcaggagaaaaataattagagacgaaactctaaagcttctggatttgataagtttgtcagtggggaagggacaatgctaccgggttgtttttttttggttttttttttttttttttgagatgaagtctcactctgtcatccaggctggagtgtagtggtgcaatctcagctcactgcaacctctgcctcccgggttcaagtgattctcctgcctcagcctccctagtagctggggttactggcatgtgacaccacacccagccaatttttgtatttttagtagcaacagggtttcaccatgttgggcaaggctggtctcgaacccctgacatcagggtgatccgcccaccttggcctcccaaagtgctgggattacaggcgtgagcacccgtgccctgccccttttggatggaagactttactgagcacactgtccctggcattcataatgttactattcctggcactgggcagcaaatgccaccccagttgctgtgacaaccaaaaatgtgccctagccccaacactctcaaacaccattcggtgacagcaccgccccagttgagaatgactaggagggtctcatcaaattctacaagataactttatgaattaagaaaaaaagatgaaaggtgagaaattttcagttgcatgtctctgataattattcccacaactgagagattcaattatcattttgaatttttacatttgctcactagttcttttaaccttctctaaaatgtacatttttgtaaatcaagtagttggaactaaatccaacactgataattgccatttcaaacactgatctgaaaagtgaattagaagctgtacaatatcatcattagaaattctgcatatggctaataaatattccttttaaaattaatagagtctaaagtcttccaaatgatctttacagatagagtgggacactatagaattctgattatatgatttagattttagggatgttttaacattttcaaaccactagaaggacattgggaacagaaagtaatagagccaacgtcacgtggtaatgatcaatagtccagttctacgaggagaacaattttaagctcttcactgaggccaattctgctgtattctaattccttttaggttcttggtggtagagtaatgagctatgaccatctctggaatactggtgaggaaaatggcagcagtaaagaaatgaggaaaatattacctaattaatgataaagttaggtccagtacagagtcctgttatttttctctttggccctatttggctgcttttattaatgcatcagaactttatggaataatcatatgagatttatacgtaaattaaggaaaaaatgtccatttcattcagttcatatggttctaaacgtattgctgatcattcttaaatgagactccaggtttacattcttacataaagtgcagggatcccgaagttagccccaaagatccccttgccttaaaaaagacttgctcaaatgttcccttatcaggtggggcctttcctgaccacactttaaaaacctcaacacccacccatgggccttgtcctccttcccggcttcattttttggcatatacttatcaaatgtgaacatatgatgcatttgctttatttatcatcgatcttcactcactggcatgtaagctctgtgagtgcaaagattttcatctagctatcttccagaacagtgtctggcacagagaaggagctctatgaatatgtgttgaatgaatgactatctttgccttgtaaaccccatgctattggctctctcttcaggtggctgaccactgcaccccagggcatgctggaaagacaggagtcccaagccctcccttctgctcttactccaagcttttcttccttgggtgcattgactcaagtcaggtagtacttctcctatgtctgagcacagacaggctgtgttcatgtatttgtacatatgtgtgaatacccagagaaactagtagcatgggtatatgggggaatccatcttttagggagagactttatctactgtttatgtgtttagtctcacctcagaccaggttaagctggccagggctcatagtttcatagaagcaacagaaaaaaatctgtttagcttacattctaagcatgttctcttttatctttcctgaaagctatccacttttaatttcatctcatattacagagaaaatattatttgaaactgatagctttccagaaggttactgaaatcacttatttttcagtgtcttcactggcaccattcatagtagctaacattagccactttccgtgggcctggtgctgtgttaaagtgctttacatatattatttcttttaatccgcacaatgatcctttcaagtaggtactgttattattcccacgctgaagatcagcaaacagacgcacaaagataaaacaattttcccaaggttgtcaagcaactgagcccaggattctgagtgacagtcagactctgatccctttcttcatcaataagccacctaggctgctgtacacctcacacccagaactttctactagttatttctccccaaatgaagctggcacagcatactgatcattatgtggtatttttcacctctcaaggggcattagaaacacgtcacgcttcaaattccaagaggcttttaat

SEQ ID NO: 148051 - DNA, 1026 bp, Homo sapiens
ttttttttttttttttttgagacagagtctcgttctgttgctcacactggagggcaggggggggatctcgcaacctccacctcccaggttcgagggattcttgggcctcaaactcctgggtagctgacattacaagccccacgcatggctaattttatttttagtagagatggggttttcgccatgttggccaggctggtcttgaactcctcagcctcaagcgatttgcctggcttggcctcccacagtgctgggattacagggcgtgagccaccatgcccgccctatcttctcttataaggaacaccagtcatattggattaagggcctgccctgctccagtatgacctcatcttagctacttacaaccacaaccacagtatttccaaataaggtcacatactgaggctccaggaagtacatgaattttggagaggacaccattcagcccagtacattcagtttctatttaacataaaaaataattcccatcctatacagggtgaaaaaatgacttatgaaataggtgaaagattgttgaatatacaaatgtgatctgttcttttccaatcacatacagagataagaattttttgggaatatagtctcattcacaaatatgtattatatgcaaagagaaatttatacaatgttcaagtaggattcagggaattaacctaggtgcattctcttgtttctatttcaaccatattgttctccagatttttttcctaattctgatttccctgtaggattgttcagatttaaataaagcctgtaaagcagaagtagtgaacaagcctgggtactaaagttaaatattacagaggcagataaaataagtctgaggaaaattcatgcatttaattctatctattttgcccacatagttatgctgatatttcattcacttggattcaccaacctaaaatttgtaactataatggagaatcttttttctgtatttgaaaaaagtgcactgagcaaattaatagtataaatatgatttcaaggataactaagaga

SEQ ID NO: 148052 - DNA, 312 bp, Homo sapiens
tttttttttttgtagagatggagtcttactatgttgcccaggctggtcttatattcctgggctcaagtgattctcccatcttggcctcccaaaatgctgggataacaggcacaagccacagtccccagcccacctaaatccattaattaattaaggttgccaaacggtaatatcctgtcatttctttttaattttgcatctggagtacatttatgaagagtgctttccctcatctactatttgctttgccagtgaaccatcatatgagaggcaggaataaatgcttgattcttttccattacctgccagttt

SEQ ID NO: 148053 - DNA, 360 bp, Homo sapiens
  misc_feature (1)...(360): n = a,t,c or g
aacaattacctatagaggagcaaagataagaattacatctgattcatcttcagaaaccatgcaagcaagagaagagtagagtgaaatattttaagtgttgaaaggnnnnnnnnnncccactaacctaaaattctatattctgggaaattatcatttaaaagtaaaggagaaataaagacttttaaggcaaacaaaatcaaaggaatttgtttccagtagacctgtcttgcaaggcatgttaaaagtagttcttcagagagaaggaaaattatataggtcagaaacgcagacctataaaaagaaagaaaaagcatccgagaaggaataaaggaaaaaggtaaaatatgttttatttttttc

SEQ ID NO: 148054 - DNA, 777 bp, Homo sapiens
ggagacagggtcttgctctgttgcccaggctagagtgcagaccatagctcactgcagtcttgaccttccgggctcaagcgatacttctgtctcggcctcctgagtaactggaaacacaggtgtatgccaccatgccctgctaatttttttaatttttatttttgtagagacaagttctccccatgttgcctaggctagtctcgaactcctggggctcaagggatcttcctgtctcaaccccccgtaagtgttggggattacaggtgtggggcttaccatgccttaaccttgtttatttatggaaggatgggggtctttgctatgttggcacaggctgggcctcaaactcctgggctctagtaatcctctttctctcagtctcctgagtagctaggactaccaggcacatgtgctggctgtgcctgaatcatccttgaaatttgtaactgataatttacaggaatatacgtaaacccaagatacattgaaaatctgggctgaagttacttggtacttgaccaaggacttctgggttcactgtgcagactggcttttccagtactgatgagatgttgctgcacttgagaatgggaacaaggtataaaagctgaagagaccgtagatgtaatggcttcactgaactaagataatccttccttacccagttatgtttctaaggaacaggtatattatcaagtgtgagatgtttgggatatacgcaagctgtgcctggaaatcatgacagcgcctctatgctgttgatgtaccagccatgcc

SEQ ID NO: 148055 - DNA, 375 bp, Homo sapiens
aggtctcactttgttgcccaggctggtctcaaactcctggcctcaggaaatcctcctgccttggctcccaaagtgttaaaattataggcatgaaccactgcactgactggacacacccgttactccacccctactagctgtggaaccctgaacccagtcactcacatagtcctagcatgtttctcacctgcaaaataaggtagttagatgatctttaagatctcttttagttctgagttttagggcaacaagtaatacagatgaggtcagtgggcatcaagggctcccacatccccttccagagggaagggccagatctacatcaggccctgggagacagaactggggatcccacatcagtccagggccaaagat

SEQ ID NO: 148056 - DNA, 439 bp, Homo sapiens
gggaacgagtttagtatattaaaatcaccagggtctgttgttttccgaaatggaaattggcctataccaggagagcggatcccagacgtggctgcattgtccatgggcttctctgtgaaagaagacctttcttggccaggactcgcagtgggtaacctgtttcatcgtcctcgggctaccgtcatggtgatggtgaagggagtgaacaaactggctctacccccaggcagtgtcatttcgtaccctttggagaatgttgacctgctctttctttctgaactgcaagtgctacatgatatttcaagcttgctgtctcgtcataagcatctagccaaggatcattctcctgatttatattcactggagctggcaggtttggatgaaattgggaagcgttatggggaagactctgaacaattcagagatgcttctaagatcc

SEQ ID NO: 148057 - DNA, 552 bp, Homo sapiens
gggaacgagtttagtatattaaaatcaccagggtctgttgttttccgaaatggaaattggcctataccaggagagcggatcccagacgtggctgcattgtccatgggcttctctgtgaaagaagacctttcttggccaggacttcgcagtgggtaacctgtttcatcgtcctcggggctacccgtcatgggtgatgggtgaagggaagtggaaccaaactggctctaaccccgcaggcagttgtcatttcgtacccctttggagaatagagtgtatatggtagggaaggcaaactcagtgtttggaagacctttcagtcaccttgcgccagctccgtaatcgcctgtttcaagaaaactctgttctcagttcactccccctcaattctctgagtaggaacaatgaagttgacctgctctttctttctgaactgcaagtgctacatgatatttcaagcttgctgtctcgtcataagcatctagccaaggatcattctcctgatttatattcactggagctggcaggtttggatgaaattgggaagcgttatgg

SEQ ID NO: 148058 - DNA, 2016 bp, Homo sapiens
gtatattaaaatcacccagggtctgttgttttccgaaatggaagattggcctatacccagggagagcggatcccccagacgtggctgccattgtcccatgggcttcctctgtgaaagaaagacctttcttggccaggactcgcagtgggtaacctgtttcatcgtcctcgggctacccgtcatggtgaatgtgaatggagtgaacaaactggatctaccccccaggcagtggcatttcggtaccctctggagaatgcagttccttttagtcttgacagtgttgcaaattcccattcactccttatttttctgaggaaacctcctgttgttttgcagttggctcccagtgaggaaagagtgtatatggtaagggaagggcaaactcagtgtttgaagacctttcacgtcaccttgcgccactcccgtaatcgcctggttttcaagaaaactctgttcctcagtttcactccccctcaaattctcctgagtaggaacaatgaagttgacctgctctttctttctgaactgcaagtgcgtacatgatatttcaagcttgccgtctcgtccaaagcatctaggcaagggatcattctcctgatttatatttcactgggagctgggcaggtttgggatgaaattggggaaggcgttattgggggaagactctgaacaattcagagatgcttctaagatccttgttgaccgctctgcaaaagtttgcagatgaccatgtaccagtctttatggtgggaaatccagtggtagagttagtccactgtccaagtcatttgaacacctcccctccattagggaagacaagggacctacccctgaggccaaaacaagcgcaggaaccccagcaagtcccctataaccttgccatataagtataattttgaatattcccgtggttttcaacatggtactttggataatgatccgccttggccttggctggtgattatcacctcttacaatatttggaacatggatccctggatatgatagcatcatttataggatgacaaaccagaagatttccgaatggattgaatgttacctgtggcccagaattagaaaaagggggtttggaaattggctgttttgttaaaatactatcttttagtgtgctttaaagtagatagtatactttacatttataaaaaaaaatcaaattttgttctttattttgtgtgtgcctgtgatgtttttctagagtgaattatagtattgaggtgaatccccattgtggtatagattccataatatgcttgaatattatgatatagccatttaataacattgatttcattctgtttaatgaatttggaaatatgcactgaaagaaatgtaaaacatttagaatagctcgtgttatggaaaaaaagtgcaccggattttattggacaaacttacgaatgctaaccttctttacaccggcatagggtgaaaatcatatttggggctatggtatacctatgaaccaatttggaaatggccttaatttgatgtaaataacctctgaaaccaaggaggaaaaggtttttaaacttaggagtagcccctaaaatatggatgtgcctaaaataaaccgccttagttttggaacctgtaccctgagtaaccagaggaccagcctgtttttttaacccctccttcctgccaagtttgttggcccctacatgggcctaatatggatacctaaaaatacctacattgatcctaagaagaaacttagccttgtggagtatatagatgccttttcattatacacacaaaaaatccctgagggacattttgaggcaaggaatataaaacgatttttatttcagtaacttttccccctgtgtaagttactatggtttgtggtacaacttcattctatagaatattaagtggaagtgggtgaattctactttttatgttggagtggaccaatgtctatcaagagtgacaaaaaaactccaatgatgattccaaaaaaaaaaaaaaaaaaaaaaaaaaagggcggccgct

SEQ ID NO: 148059 - DNA, 697 bp, Homo sapiens
taatgttgcctctggccaggtgcagtagctcatgcctggctccacttagtacataccaaacacaagtgaaaacacaagtccacacagaaacttgcatatgaatgtttatagcagcattattcataatagtcagaaggtagaaacaacccaaatgtccatcagaaaataaatgaacaaaatatggcatatccatacaatgaaatagtattcagccacaaaaaagaataaagtactgacatatgctacaatatagatgaacactgaaaatatgctaagtcaaagaagctactaacaaaagactacatagtacctgtttctactcatgtatatgaaaatccaaaatagggaaatgtacagatataaagtagattaatgggttgctttgcactggtaggggaagagggactagaggagcagtgcagtgataaccataatggttgtgcagctctgtgaatatactgaagactactgaactttaaatgggcaaactatatggtatgtgaaattacaacttaataaagtcatttcttaaaaaaagaactttaaagatacttgcaaatttacatcaatgttatccactggcaaatgattaattaaaaatcatgtaatgcacaggaacagaaactagcccagaatgatattcttttcctgggctcctcatttccatgagttaatgacttgactgtgaagtgaataa

SEQ ID NO: 148060 - DNA, 732 bp, Homo sapiens
tgagacagagtctcgctctgtcgcccaggctggagttcagtgacgcaatctcagctcgctgcaactctgcctcctgggttcaagtgattcttcagcctcagcctccgaagtagctgggattacaggtgcatgcacgatgcctagctaatttttctgtttttagtagagacagggttttgccatgctagccaggctggtcttgagctcctgacctcaagtgatcctcctgcctcagcctcccaaagtgctaagattacaagcatgagccaccatgccctgcccctattttctaataaggtcacattctgggattcctggtgaatgtgaatttttggaggacagtattcagtctagcaaaaggcagaacatcctcattttcttccctacctcagaaataaagaagttaacttcaatccctcggagagagagagaggcttcctgagcttccaacaatcaattatccaaatattagtcacagaagagcactaagggttgcgcacagcacgctggccagcccgttctcaagagtctgtcaagtttaaggtgaacgctaatcctgaatgagttttaaaatatatttggcatttcctcgtcattggaaaatgttctcgcattgtgatggctggggcttccctctcaggtgtaatctgcgaagtcagatgtgacacagcctgggtgaggtgggccaagctgggaactgggttaggaggccagctgggatctgagaccttg

SEQ ID NO: 148061 - DNA, 606 bp, Homo sapiens
tttttttttttttttaaggagagcaaagttgaggactacataatttcttgacttataaagctacaataatcagtgcagtatggtatgctgtcagggtagaaaatagatcaacagaacagaatagagtccagaaatagacctacatgtatgtggtcaaagatgccaggtaagtcaatgggaacagaatactcttctaatattgttgaacaactaaataatcacatggagaaaaatgaacctcaatcttgacctcacactgcacagaaaagtctacttgaaatgggtcatagacttaaatgtaaaagctaaaactgtcagtcctttaggacaaaacatcacagaaagtcttcacaactttggggtaggtaaatatttcttagacacataaagcattagccccataaattttttttcaataaattagacatcatcaggattaagatcttttgctcttaaaaagatgccattaataaaatgaaaaagtggccaggtgtggtggctcactaaaataaccttctgatctttagtcccatttttcatgttcttaaatattagaggacaatggtacctatattctgataactggaaagttattttcttttctga

SEQ ID NO: 148062 - DNA, 1329 bp, Homo sapiens
tggtggtgggggtagtggccggtgagggcccaggctggtcagcgtcccgtcttgcacacccaggtggcctccctttttgctggagtcccctgtgtcctcagccatcccaagaagggtttgctggtccctcctttccccccgtccaagaaaggccacctgggcaagccccattgtcctctgccttctgctggcagaggagcagctggactggggcctttggcacagcagccggtgtctcctgcgcccgcctcccccatggccccatgcaagcccaaggggcttccccccttgcccatgggagtagagcccgagatcctggccactatgccagttctgacctcgcatccccctaccccgagcccatgcagtctgggaacatgccgccttctctccaagcctctgtgcctttgttccaaggtggtctcaccctcctgtccctggctgggctaggtggtcctgtccaggcttcctgcagctcccccctcactttgacactggactaggatgcagcctcccttctgtgtccccttgagggtaccctgggtcccctcatcaggggcaagaggcatgaaagagtcggggctggatggccaggggtttctgggcccgacgcctagtgcaagcccctggggtccgtggtttgacattcgtctgcctggctgcaaacaaggaatccttgcctttaaggtgacaggccctccgacaggcttcccagactttgaaggaaaaaggtttaagaaagaaaacaaacccccaggttagttggagtcaaaagccccagacactgtaaaatagaaccccccttccaccaaccccccgccggccccagcattccttacctgggactgcggtgcctaccgagggcctgcgggctttttgcttgtgtgccaaccttccctgttaagtcttattttaaaaaacatcgacgatacattgaaatgtgttgaacgttttgaaaagctaacagcttccaagcagccaaaagcaactgttgttttggcaagacggtcctgatgtacaagcttgatttgaaattcactgctcactttgatacgttattcagaagacccaagggaatggctgtccccatcctcatgtggctgtgtgggagctcagctgtgttgtgtggcagtttattaaactgtccccccagatcgacacgcagctaagcctcctgcaattgtatgtgttataaaaaagccccctagtgaagtgctgtcgtccagtctctcttgggtgtggtttgaatgatctcgggatgcatgactaaaatggaattacgatggcagatcggaaacgcgtttataaacaagtgatggtttgaaaaaa

SEQ ID NO: 148063 - DNA, 399 bp, Homo sapiens
ccacaacagctgagatgcttttccttctggagaaaggacacaaaggttgactggctgcttttaaacagaggggcacggtggttggagaaaaaaacacgtctccaccggggaccctgggccaggcccagactgatgcgggcgcagcgggaagaggcgctcagaagagaaggcgggaaccccccgcctcggggtcctggcggggaggaggcgccgcttctccggagcagcagcgggaggccggcgcgtctcagacctagcagaagtccggagcgtcaccctccgaccctcgctccgcctcccgctaggccctcctgccccgccctgcctaggttgagcatgagcgctggctgaggtgaaaacccagctaggaagctgctggagagcgggcccacgcgtccg

SEQ ID NO: 148064 - DNA, 1516 bp, Homo sapiens
cccaggctgcacaatcttggctcactgcaacctctgcctctcaggttcaagtgattctcctgcctcagcctcctgagtaactgggaataacaggcacgcacaaccatgccccggcctaatttaaagaacagggttttgccatgttggcccatgaacatgttggtcttcaactccctgacctcaagtgatccacttgaggtctccacttgaggtcctcagcctcccaaagtgctgggattacaggcatgagccactgtgcccagcccaggaagttcacacacttgagtatgaacaaaaagttgggaaaattaaatgctttaaaattacagcatggaaagacagaattatttggctgttggaactgggtattctgggtttagaaaattattcatttatttaaaattccaactttcccaaaatgttgcaaaatcaataattaaaggagaaaatattgtttaaggtaaaggtgcaaaataccatactgatacaccaatttgaacataaaaggagaagtcttgagtttttctaagtttgcaatcaagctcaatattggacttttctaaatttcatcagcatacaaaaaatattaactttgccaagcaacattattgagagaacattacaaaatccttacttagataagggatggttcatgcatttttatggaaatatataatggtaagttctcaatgtgaagttttccatggggataatgcaactagtgaaacaaagtcaaatacatttcaaatgataaaatggaaatcttgtttccttatacagatagttcctgacttaagaggatgtgacttacagtttctcaacattacaatggtaatccatacaatactatttttcaccttcagtattcaataattacatcagatattcaacacctttttataaaatagatgatgcattagaatgtgtgtgatgaatattataggtagcctgcgctaagctagggcgtatggtaagttgggtgtataaaatgcatttatgacttgcaatgttttcaacttacaatgggtttagtgggaggtagcccccctgtaagtccaggatcatctgtacttttccagggaccacagaaatttgctagaagataaaataggcatccttgaatgtcaaaaatgtttttccagcacaaaattccctaatgctttacatcttcagaaatgtgattttttaataattcatttatccatctaatttttacaagatattttatgcaacacaaaaagcataacagcagcccaaaatatccatgatactttatcacagtaaattaaaatagtgacatttgggttacatatcacttaagatacatatatatatactatatggaggcccctccctaaatgagaaaaagatttaatccagccctactttatttcatttagtttgggtgttgtaatgtagttcacccccctttattttgctcattcagttatgtattactatggttattctgtggttcctgcctaagcatatttattttatataaactgttactcag

SEQ ID NO: 148065 - DNA, 1231 bp, Homo sapiens
ggattaggctccctggggccccctgctgctgtgcccacctgcccacccaggtccccacctcctgcagcccagagggagctctgcaatgtgggacactccctgctggcacagccacaccagatggacatgttggatgggctgtgcccttccccccaactgtggcccccacaaggaggtccccaagatctccaccccagtcatgctgatggggccttcagcaccagctctgtcctgggtcgatggaggaaatgcatacgccccatggccttgcccttcctggggcatcccacatcgtgccgccgacactgtgtgcccctggggggagtgaaggggccaggggcatttgacccccagcttaggctggctatgccctgagcctgccaacccagtttcagacactcatccttcatccttcctgctgccgccctggggttcctctataaacctcgctgctcagctgcccccacaagtcccacatgccccgcatgcgtggcaattgccttcagcccccaagtgagtggtgggtgggtggcaagctgggcctagcacttgctgatagccactatgggctcgactctgtgctaagtggtatctggggacacagaggcaatcagacctggttccccccctggtggagttcacagtctagtggaggacagactgttaacaaatggcaacacggcttcatgcgtgccaggatcagagtacaaatcaggctgtggcaggcctcactggtaatggaaaagtgagggaggcttcacggaggaggtgtcataggagctcagcctcaacggctgctcggaaccctccgaatcccacaaatgggaaacgaatcccacaagatgggaagccgtgctctatacagaagggagggcctgtgcacaggcctcaggtgtcagtaagcccagaaatcccagggacagagtcaggatggctggagcatggactgcggggggaacagagaagggggtggagcaaaaggttgggaccatgtgacccagggaagatgctggatggaggattctgaacctcatttgtggacggtcaggagtcaacaaagggaggagagaggactcactggtcaagagtgtcggctgtgacacaagggccatcatccctgaatgcccaccaattgccccgcactgtgctgatgatgataataataactacgtccattgagcactctccagaaaaaaaaaaaaaaaaaaaaaaaaaaaaaagtcgtatcgat

SEQ ID NO: 148066 - DNA, 1577 bp, Homo sapiens
  misc_feature (1)...(1577): n = a,t,c or g
aatttatatttcccctaaagccttaaaattctgtagggaggttggcccaatatgtcccccccccaaaataagggtcctttccaaaaattcccaggtagcagattttcccgtttccacgttgttaaaaaacgggcaagggccagggtataaaacggccccccataaggggaaaggttttacgttgcaagcccgggttaaatttgggccccccaagggtcctttaaaaagggcccgccnnnnnnnnnnnnnngcaacacaagtcaatctttaatggaaaccggcggtataaatacataacaattcttgttacaataaacgtgcttttgagatttttaaatctgagctcatctcatcagattgcataaaaaattaaaatagtatcaaattgacacctaactggaactgggctcaggatggaaaattccattccttggcatggatacctaagttcaatgcaaaggggagggatgcctttaacactgggaagacaatgaatgacttagcttaaaaaaaagtaccgagagaacgggtgtaaaaaacgggtatttaaaaaatccatttttaaaaaaacccaaaagggaacgggttcctcctttagttacaatcccatggaggctctcttaggggcctctcccgtgtgggccaggcacaggcaacccctggctagggggcacaaacgggctgggcctgagatctggcccagctggccttgcccactggtctgcacagggactccatggggcacagcctgtgtgtgaggaaggagacacctgtcatgccagtcctgggagcacacccacccttctgcaggtccggggggggggtcccttacacagacgccgctcatcctctgtctccccttcccaagtgacttcacttcagtcctgtggacccaagataaggctagtccccacaggctctctcttcttcaaataatgagtaggaaaaagagacaaactttctgaaacatgcagtttccgacccaaataggccacataccccaacttctgtgttacttgggacaggtgagcccggtggagccctaaggacctactgtataagcgaatgtcctctgagagntatactcaagagtctgttgcccttccagaaagccagagggaacactcacaaatgcagaggtactagaggggagaaatacgtgctctgccttcccccaggccaaccacactctgctttagagaccctctcagaaagcaccagagaggaggaccagacgctgccacccacctcaagccacacccctgccacctgctgctgcgcccaatggaggtcctgtcctgtccgggcaacagccaaactggcgacaatggacacatccaacagtcagctgtcggataaggtgaaggtggcccaactgctcagagtaacactgttctcaaatgtttaaaaaggacaggtgaagtctgggtctccttttttaaagcagacaccaatacttacataactagtacatgttggcctttcaccagcactcactggcactcacaggtgccttacataccttacgggggccaacactgacaggtattagtacgtcgcaagttgctgtaataatg

SEQ ID NO: 148067 - DNA, 3209 bp, Homo sapiens
gtctgagtgctgggcgcgttttagcgatggcttctgctctcaacagcaaaattaacccgcccggcacttgccagggctccaaagccgacggtggcgccggctggagaatggactgtgatccccagatgcacgtgaaaatgtgcaagaagatcgcccagctcaccaaggtgatttatgccctgaacacccgccaggatgaggctgaggccagcatggaggcgctgcgggaagcgcaccaggaggagctccagaatgcggtggcagagaccaaggccaggctcctgcaggaacagggctgcgcagaggaggaagcccttctacagcgcatccaggccctggagagcgccctggagctgcagaagaggctgacggaggaggcgctggctgagtcggcctcgtgcaggctggagacgaaggagagagagctgagggtggaggcagagcacgccgagcgagtcctcacgctctccagggaaatgctggagctcaaggctgactacgagaggaggctccagcacctgacgagccacgaggctaccccgcagggccggctgccccaggagagccctgaaaccaagtcggagccaggccagggcccggagatgcaggaggtcctgctagaggtgcagcggctgcgagtggagaaccagcagctgagcaaggactacgcccgcaaggccgaggagctgcaggccacctacgagagggaaaacgaggccatccggcaggccatgcagcagtcggtgagccaggccctgtggcagtggcaggagaaggagtcggacctccgcaagaacttccaggtccaggagtcagccctgcaggctcaggtccggaagctggaaggagacctggagcacagaggccgcaagataagtgacctgaagaagtacgcccagaagctgaaggagaggattcagcacctggatgtgcagcttaaggaggctcgacaggagaattcagagttgaaaggcactgcaaaaaaacttggggagaagctggctgttgccaaagacagaatgatgctgcaggagtgtcgtgggacacagcagacagatgccatgaagactgagttagtttcagagaacaaagtcctgcgggaagagaatgacttggaagccggcaatcttcatcctcagcaggatcaaagctgtctcaaggagtgcccttgcatgaaaggaggcacagatatgcagaccaagaaagaggcaagtgctgagacagaatatatgaagcaacaatatgaagaagaccttcgtaaaatcaaacatcagacagaagaggagaagaaacatctcaaagaccagctagtgaagcgactagaagacttggtaaagaagcacaccgtggaaatcaaatccgttcgctcgtccgtggaggctgaaagaaagaaactgcagagggaagtagaagcacagttggaggaagtgaggaagaaatcagaaaaggagataaagcagctggaagaagagaaagcagccctcaatgtgaagctccagaattctctgcttgaggttttaaggctggaagaatttatccaacaaaataagacacgccccacaggagctgaggaaagtccccaggaattaggccgccagcactgcagcattctggagacccaggatccatgcttgaagctggatgaaacttcgccgagaggagaggagtatcaagataagttagcagctgaagaaggaaccagcagtgatgaagaagaaaggaccaaagtgcttctcaaggagggaagtgacccacaacctccactgggctctttgttgaaggagaaaacatccaaaatccagcgtctagaggaggactggcaaagccagaaggccaaattgcaagcccaggtctcacagatgcagcaggctctggagcagtgcaccagcaactacagggaggacctgcaggcactcaagcagctctcggacctggagagggagaagctgcagcatgagctccaggagaccactcagcagaaccacgccatgaaagcccagctcgaggcttcccaccagagagccctgcgcatgctggagaaggccagacatcaggaactcaaggccacagaggaacgcttgaagaaggaatccagccacagcctccagatccaacaccagacacaccgactggagctccaggccttggaggaaaaggccaggcaagagctgcaggaggagcgtgagaggatgcaggcacagcaggccctgctgctagagtcgctcagacaggagctgtcggagcagcaagctgcctgttctgggcaccagaaggacttggaggcactgcaggccgagctgagggctctgggcagacagcaagccagcagccagtgtccaggagacagcaaggatcacataatcgccacagaggagtggggcggcccgggccaggccggctccccaccgggcgctgctgggcagggttccggcgagggatgcgggctctgggaggagaacgcgcagctccaggacgcggtgcggcggctgcgcgcggaggtggagcagcatcagcaggaggcgcagaagctccgagaccagcgcaggttcctggaggagactcagcaagcccagcgggccagggaggtggagacactgcgccaggaacaccggaaggagatgcaggccatggtggcagatttcagtagtgcccaggcccagctccaggcccggctggctgccctggaagccgaactgaaagattccggagagaagccagggaagggagcgtccaggcccgaggaccttcagctcattggccgcctgcagacccgcctgaaggagagagaggacatcatcaagcagctcacggaagagagaagatttcactacgcagcattccccagtgccatgtcccaccggaatcggtctttctctttcaatcctcacccgggatatttgaccccttccatgaagaaaaagaaggtggaggacgtgcccagccgcgtggtcagcgtgccgaacctcgcctcctatgcaaagaactttctgagtggcgatctgagttccaggattaatgcccctccaataactacatcacccagcttggacccaagccccagctgtggccggacctacaaacccaaccagtctacagatgcaaaaactgccacaaggaccccagatggtgaaacggcccaagccaaagaagcccagcagaaacagggctctccgcaccaggaatggttcaccaagtacttttctttctaa

SEQ ID NO: 148068 - DNA, 2328 bp, Homo sapiens
gacctggatgtgcagcttaaggaggctcgacaggagaattcagagttgaaaggcactgcaaaaaaacttggggagaagctggctgttgccaaagacagaatgatgctgcaggagtgtcgtgggacacagcagacagatgccatgaagactgagttagtttcagagaacaaagtcctgcgggaagagaatgacttggaagccggcaatcttcatcctcagcaggatcaaagctgtctcaaggagtgcccttgcatgaaaggaggcacagatatgcagaccaagaaagaggcaagtgctgagacagaatatatgaagcaacaatatgaagaagaccttcgtaaaatcaaacatcagacagaagaggagaagaaacatctcaaagaccagctagtgaagcgactagaagacttggtaaagaagcacaccgtggaaatcaaatccgttcgctcgtccgtggaggctgaaagaaagaaactgcagagggaagtagaagcacagttggaggaagtgaggaagaaatcagaaaaggagataaagcagctggaagaagagaaagcagccctcaatgtgaagcttcagaattctctgcttgaggttttaaggctggaagaatttatccaacaaaataagacacgccccacaggagctgaggaaagtccccaggaattaggccgccagcactgcagcattctggagacccaggatccatgcttgaagctggatgaaacttcgccgagaggagaggagtatcaagataagttagcagctgaagaaggaaccagcagtgatgaagaagaaaggaccaaagtgcttctcaaggagggaagtgacccacaacctccactgggctctttgttgaaggagaaaacatccaaaatccagcgtctagaggaggactggcaaagccagaaggccaaattgcaagcccaggtctcacagatgcagcaggctctggagcagtgcaccagcaactacagggaggacctgcaggcactcaagcagctctcggacctggagagggagaagctgcagcgtgagctccaggagaccactcagcagaaccacgccatgaaagcccagctcgaggcttcccaccagagagccctgcgcatgctggagaaggccagacatcaggaactcaaggccacagaggaacgcttgaagaaggaatccagccacagcctccagatccaacaccagacacaccgactggagctccaggccttggaggaaaaggccaggcaagagctgcaggaggagcgtgagaggatgcaggcacagcaggccctgctgctagatttcggcaaattggaggatcttaggcctccaggctctgcttcctctgcctgcccccacatcatccccagcacaaaactctcccccttttcagttgccacatcaataaaaccactcacacacagcatcttcgaagttaacagagagtcgctcagacaggagctgtcggagcagcaagctgcctgttctgggcaccagaaggacttggaggcactgcaggccgagctgagggctctgggcagacagcaagccagcagccagtgtccaggagacagcaaggatcacataatcgccacagaggagcggggcggcccgggccaggccggctccccaccgggcgctgctgggcagggttccggcgagggatgcgggctctgggaggagaacgcgcagctccaggacgcggtgcggcggctgcgcgcggaggtggagcagcatcagcaggaggcgcagaagctccgagaccagcgcaggttcctggaggagactcagcaagcccagcgggccagggaggtggagacactgcgccaggaacaccggaaggagatgcaggccatggtggcagatttcagtagtgcccaggcccagctccaggcccggctggctgccctggaagccgaactgaaagattccggagagaagccagggaagggagcgtccaggcccgaggaccttcagctcattggccgcctgcagacccgcctgaaggagagagaggacatcatcaagcagctcacgaaaaagaaggtggaggacgtgcccagccgcgtggtcagcgtgccgaacctcgcctcctatgcaaagaactttctgagtggcgatctgagttccaggattaatgcccctccaataactacatcacccagcttggacccaagccccagctgtggccggacctacaaacccaaccagtctacagatgcaaaaactgccacaaggaccccagatggtgaaacggcccaagccaaagaagtccagcagaaacagggctctccgcaccaggaatggttcaccaagtacttttctttctaa

SEQ ID NO: 148069 - DNA, 1368 bp, Homo sapiens
ttatcaaaattattgttactattaatactttacatttctatatgatgtaaaaagtactttcatgtacatacatcattttatttttatccttactttaactttgtgaagtacataaaactagtgatattatctttttttttttttttttttttttttgagacagagtctcactcttgtcgctcaggctggagggcagtggcgcaatctcagctcactgcaacctctgcctcccgggttcaagcgatttccctgtctcagcctcctgagtagctgggattataagtgcccaccaccacacctggctaattttttgtatttttagtagagaccgggtttcaccatgttgcccaggctggtctcgaactcctgaccttaggtgatccacccacctccatctcccaaagtgctgggattacaggcgtgagccaccaagcccggcccgattaagagactttagaattccaaggtgatagagtaaatcttgaggaataatgttagtaataatactgaaactatattgaagatttttgtgccaagtcctgtgctaagcacatcctatggattaattcctttagtctcacgtcagtctgatgagataggtgctgtattatcttaattctaaaggcaaggtatatggagacctggagaggtcaagtgacctgtccaaggccacagagctaagaatgaggaagactgtaatttgaattcagacctccaggccagatggagtccacctttttgtataacccatgctgaagttttcaggtaagtgattcagtgtcccttgtctaatcatccatgaaaaaaggccttctggaatttggtaccaggtgctagaaagaatcctaattcccctcttatctacagggaaattggaattagggcccctgtccccaacatcccccccaaaccttgtggcaagtttttgccatctgtaaaactggttggggtttgtagggtcccggcccaccagcctggggcttgggttcccaagcctgggtgatgtaagttattggaaggggcattaatccctggaactcagatcgcccactcaggaaagttctttgcataggaggccgaggttcggcacgctgacccacgcggctgggccacgtcctccaccttctttttctgtttgtattaatggaccaggttagtgcaatgcaatgcaaaaaacaaaataaagcattattgtaaaagcaaataatgctcacccaatcaaaattgtatcggagaagaaagccaaccaattttcattttatacacttacatgctattttttaaagcacttttccctccaatcttcattttgtataataaatcaaatatgtatgttcacaacctcttaaccaaaaaaaaaaaaaaaaa

SEQ ID NO: 148070 - DNA, 1625 bp, Homo sapiens
  misc_feature (1)...(1625): n = a,t,c or g
tttttttttttttttatgtttaaaattaatgactttattgacacaaactttgcaatgaaaagtgggtatcctaataggatagtaaggattagtttctgtctcatacatacatgaaaaagtagccagatgcatttttagtcacatgggtttaacttctggttgctgtctccgtgaaatccagattgttctggggaggggccagatcatgtgccctgcatttccttctcccctgtaagtgagaaagtgtttctatataaaaacagaggacactttcttaagggtgaataaaattcccaaacaacatggcagcagtgaactgatgcagaaacaaaggctgtaaagagaagccacaaagcacatccccaggggggaaagagcccttgaacttgcagggatcacttcccaacctttgggcagctggggggctcctgctgagtaaatgccagtggggacatatgaatcacaggtttttcttttatcttattattgttaaaaacattttttagaacataaagttcctaaaagccctttctcaaagaatcacaaaatgatgaaggtttagaaaaactatagttgcgtgtatggtaaagtcttgtacattgattagaacacctagtttaagacacaaacctaccctgaatataaaagtttccattgcagagtgattttgcaacacacactataccttaagggtctaattcagtctcctagttatgaagtcactgttagattcaggatagatagtcacgactaaccagaccccaaatccctcaacatctgcatagtacctggcacaggatggacatttaatgttttgtgaataaatatacaatctgccaatggaaggaaggaaggaaaaatgacactacccacttgtgtttgaagaataacagagttagcagataaggaggttgcgtatctgacttttgacctgcatgtcagttctctggactatgttacataaacataacaccaataggctgcctatttctgcctaaacatgggaatttattgatatagtttgggcacaactttagtcctatctttcccaatcccagggcatgttaacaatccttgaaaaatcatgctacattactttgggngggaaaatacttccagatggaacatgtttcaaggacatactaggaaaattattcctattcaaaacatcctttttctgtggtcagctacctcatttctaatgcaggtgcacatcaatctaatgtcagtatgaatacacatcaaccagggtgctgggctttctaaagtggattcctttggcaggatgcccaaaatggacagtccgggggggcagtgttacagagggggccccggggggaggccctggcctggctggcccacatgttcttctggggatccatcttccctcttcctacgggggggtttccaatctttggatttaaccaattggcaagtggaccccgataggaggaggggaaggacagttcaaggaaggacaagcaaagggaactgggaaaagctatgcaaaattgcaatgtcctagctggagcccctgaggggtatcccttatttggatgcattggccacaagcatggtgacatttaaggactggaggccaacatggacactggaataggaggact

SEQ ID NO: 148071 - DNA, 1454 bp, Homo sapiens
gcggccgctgaccccggcccctcgctcctgcatcatcgacaaggatgagctgaaggacggcccttcctgcccagcacgttgcaagcacttggccaggccggccctccaggctgctgctgcgtgggggcccgggtgcccccaggtccatgcagactggggattcggtggggaggggcgcttctaaggaaccaaactgacgctcactctgggcttcccaagcaccctttagcacggagcccaccccaaaggccttcccaccgtgccatgggacagggcagcccgatgccagctgggcctacctgaacttgtgcccaggccctgcccccaccctctcaggatggcctagacttggggaacagagccgggtggggttgcagcccggagtgtctgtcaaaggcaccaggtggagagggcccggcacaggcccaccctggtccaaaccctcacacttacagaaaaccccaatggtgctggaaactgtcgcccggccacgccttggccccttccccacccaggagggaggtggcacttcttaacctgtacagttttattgtaccaagagactcgccccgcccctgtatcataagcctttaaatggagtcaactttttaattatatatataaagataaatatatataaatatatatataaactttttaaaactgtgaaaaatagctatgaaattataaaaaaaaaaacattctgacgtgccagaatattattttttatttcctgttagattatagtgtctaggcaccggcttcaccggccctcccagtcccccagcacaccccccgcccaccccgcccaagtgtactgtacctcacccccccaggatagagaagtgttttgtaaggaaaaaaagagggagaggcaggagccggcccaagcccgagggtccctgcttgggccccagaaagcactttaaccagggccccaagcctttcaagggaaaccaaggcctcaaccagacaatcttgaggggaaggaaaagccagactttggggtttgttttttgggggaattattggttttttttttttatgtttcttttgggattttgtttgttgggcaaattctgtgtggatcttttttttcataaaaaaaaaaaaaagaaaagatttaattggaaaaaaaaaaaaaaaaaaaaagggggggcccgttttaaagaacccctgggggggcccaaagttaacccgggcttgcaaggtaaaaacttttttccttatagggggccgttttaaaacctacctgggaatttttggaaagaacccttattttgggggggggacatattgggccaacctccctccagaattttaaggctttagggaaaataaaaaattttaaagggtaaaaggggtaaaacaacctcaatatcctggcggttgaaaagttttctttccggggtttattttataaaaattttatccccggggctggggtttattat

SEQ ID NO: 148072 - DNA, 1770 bp, Homo sapiens
ttttttttttttttttttgaaatggagtcttgccctttcgcccaggctggagtgcagtggtgcgatctcggctcactgcaagctctgcctcccgggttcacaccattctcctgcctcagcctcctgagtagctgggactacaggcgcccgccaccacacctggctaattttttgtatttttagtagacatgggttttcaccgtgttagccaggatggtctcgatctcctgacctcatgatccgcccgccttggcctcccaaagtgctgggattacaggcgtaagccacgcatgcccagcctataatgtttttaaagatgatgggtaacataaaaatactatgtggtaataacttagaatactaggtctggaggaggagaacaggcctagcccatgtgaaagaataagcagtagctaatctatgtggtcttgaggtatagtataaacctggaaagttctctgaacctcttcagatactgagggttgcccaattaaaacaacaacaacaacaacaacaacaaaactttatcagatgtactgaatgacttcattctctgataaatttcaaagcttccagaacagaggatcaactattgtaactattgcccatttctggtccaggaaatacctttctgataaagagtgctcataaaacgcttgtgttgttttcattcattctatctagaagtgggcaaataccaaaacctttatcccagattaaggtcggataataagtgaacctgatgacctactttagaatgacaattcaaacagctatccctgaaaccagacaactacacgagttatgccttgaagcagatctttcaaagtgcaacgaaacattactcctgtttttcacttgaggagactaaattatggtcatatcttttccatgatactgattttttatttaacataaaccaaatactgactgaatcaaagactaaaaccccacaaaatttcatcctttaaaacaaaaagcaataaaatcccacccctaaatcaggcctcaaagttcaaagaaatgtttaaaaatcccccatatgggatctgacatgaatgtctattattgtcccccccaagtcttctcaaaaatcactttaaaatcttgctttgagaccctaagttttcttggaaataaaatacatttatagattgttttaaacctactgaattttactatttctgcttgctttcttcccatttaataaaatcaaaataaaaaattttgaccaaataaatatttattgaaaggtcctgcccaccaaaaaagcttcaggtttttaaaaacatataatcaaacaacaatgttcttctgattaaaaaaaaaaaaaagtacttatttaaatctgaggatccttatatgttcaatagaggattgtggtgatcctttgtattttaaaaaaaataattgtggggcctactttacgtatctcctgtataaaaaccagctttcactcccacatgaatagagaagatgctgaatacgcaggaatctgattatccctcacgtgattattaccggcccctctggggcaatctgcttgctcactcattctgccaccattctcttcattcaagtgtttaacagcacatttatcaaaggcagctctccgatgcaatgtttaacgagtgtcttctcaaggagtgtatccgtgtcatttattcttctcatccaggtaagcaccgaacttcacaagtactactaaaaatcttcttcaaattatattgataatggacttatttctgaccgtttttggatttgggaaaa

SEQ ID NO: 148073 - DNA, 1027 bp, Homo sapiens
cgttgtattcattcacatagatataatttataataatgcattttgtttattaaaaaatgactgggccaggcagagtggctcatagtggctcatgcctgtaatcccagcactttgggaggctcaggtgggaggattgcttgagcccaggagttcaagaccagcctgggcaacatggcgaaaccctgtctctacaagaaatacaaaaaaatgagctgggactacaggcgcccatcaccacgcccggctaatttttcttgcatttttagtagagacagggttttgccatgttgccccggctggtctcgaactcctgggctcaagcaattcgcccacctgagcctcccaaagtgctgggattacaggcgtgagccaccacacccggcctcaaattttcttattgcccttgagcaactgaaagtttttccgaacatgtaacattcaaattgggatccatactgaagagcaaatatatgtaaaaggcgaacattcaatttaaaacattctaatgagttttgtttttttcctcttttatgcgatttgacagggttccactgagaacaaaaaaatctgctccttacaaagtatactttcctgcattaaaaaaaatatatatcatatatatgatatatatatcatatatatgtgatatatatatcatatatatatcatatatatgtgatatatatatatatatcatatatatgatatatatatatcacatatatatcatatatatatcatttagacagcagatccaagaaggtggccaggcatagtcaagtttcttctatggcttgttaaaatcactgaggtatcatatgatgatcatcacttgtgatatttatgtgtaagctgctttcctatgaaagccacattcaaaagtgacccaatcccatcagtccataaaggtaaaagaatgtgaggatctcggctcaggggttgcggcagaaaactgcaatcacaagtgctccaaagcttcagcaggcaagtagaaaaagaaaaaccgttttgttcccggacgcgtggg

SEQ ID NO: 148074 - DNA, 1002 bp, Homo sapiens
tgccaggaaaagttttctgtagtgacgcacgtgttgtgtgtgtatgtgtgcgtttgaggctatattactcattgctacggcagttcaaaatgacttggaaaaaaacaatgaacgctggtcattgatatgtatactgacatgtttaagggaagttactgtggtctgtaacttatgaaatacataaaaaatatgatgggtggagtgacggacacatggacagatatgaagcaagcactgtaaaatattagtggtagtttttgtatgcccatactcacggcaccattattcacagtagctaagagatggaagcaatatgtgcccatcagtgggtgaatgatcaacaaaatgtggtatattcatacagtggaatattattcagcctctaaaaggaagatacgctgacatgtgctgcaacatggatgaatcttgaggacatgatgctaagtgaagtaagccagtcactggaagacaaatactctatgcttccatttatgtgaagtatctagagcagtcaaatgcatagaaacaagtagaatggtagttgccaaggactgggggaggaggaaatgaggagttgtttaatgggtatagtgtttcagttttgcaagataaaaagtcctgtggattggttgcacagttaagttatgtgatgccggtatgccaactcaactgtacactctaaaatggttaaagatggtaaatcttatctttattttaccacagtttttttttaaagcatggtaaacaccatttcccaggatgtaaatcggtactaaaaaaaaagtgctccaaagtaagatatatttgggaaacacagggataactaaggttagataggtgttctttattgcaggaattctaagagcatttaacaaattaatttacactgggaattttcagtgtggagggtctggctcatagcatttcacaaacattatacttcagagtcccaaagcctttaaataaaatgttaatggtagaaactccttaaaaaaaaaaaaa

SEQ ID NO: 148075 - DNA, 382 bp, Homo sapiens
tttcagctattataattcatctttattatcttaaaaagaagtctgcattaggaaagggtgagagataatgaagtaacagaaaaataatctcaaacactttactatttaaataataaacctgggttatagcttatgaaacagtgcagttcaccaaaagttcatttcaattcctaatacatctctacctcatagtctcgctattcttaaaccacaaattaattcgttagaagaagaaacctaaccattttggtgcaaaaagtcatctcccgttccaaagatgagaggtgagagaaatgacgataattttcacaaagttttactaaatgtaaccaatgtagataagccacaaggactgcgaagtccaaagtggttctgctgggga

SEQ ID NO: 148076 - DNA, 1003 bp, Homo sapiens
ttttttttttgatacagagtcttactctgtcgcccaggctggagtgcagtggcatgatctctgctcactgcaacctccgcctgctgggttcaagcaattcttctgcctcagcctccctagcagccaggattacagacatgcactaccatggctggctaatttttgtatttttagtagagacagggtttcaccatgttggccaggctggtctcaaactcctgacctcaagtgatctgcccgcctcgggctcccaaagtgctgggattacaggcatgagccaacgcaccctgcaacaattaagtttaaaaaccactgagttaaggaatttcaggtgtgtgccatactgcattataaatgcctaaaaacatacgagttagtaagcaaattataaaaacaatattatagcaatttattgtttccttttttatggctttcttacttatcgcttattttaatgttggttttgaaacttgttcttattgtaatctgataccttaattgcactgtttcataagctataacccaggtttattatttaaatagtaaagtgtttgagattatttttctgttacttcattatctctcaccctttcctaatgcagacttctttttaagataatgaagatgaattatagtagctgaggaaggaggacaaagaaagcactgaagaagtgataaaggggaatgaaatgagatgttatcagaaattgctttttctttgggtacagaatgggaggtcccatgttttactgggtcttttactgatgatgattattatttgggtctcttttggggttcaagataatctcttttaagagatgacttttggtattaatttttaaatatttttcttgtttttcgatacttaatcttttaaaatggagtgttcttgtcatacacatctcacataattattggtgaggagaaattggatagcgaattaccaaattgggcaaattttcaattaggaggaaacacaaccgccacttcagaactttttccc

SEQ ID NO: 148077 - DNA, 481 bp, Homo sapiens
  misc_feature (1)...(481): n = a,t,c or g
aaaaccataaaatgttccccagttttgcagcacgttaaatttcaaaaaattaaattgaaccagagtcccctggcaccgttgaaggaaaaataaatagaaatgtgttagtgccaagtagtaatctttggcattaggggattgatacaattttgacattaaatcagaattgaagtttaaaaaccaggcaatagtttacattaataatttttttttttttttttttttaagatggagtcttgctctgtcgcccaggctggagtgcagtggcgcgatctcggctcactgcaagctccgcctcgcgggttcacgccattctcctgcctcagcctcccgagtagctgggactacaggcgcccgctaccacgcccggctaattttttctatttttagtagagacggggtttcaccatgttagccaggatggtctcaatctcctgacctcgtgatctgcctgccgaattcctcgncacggcatacagat

SEQ ID NO: 148078 - DNA, 21189 bp, Homo sapiens
cctccgacagcctctccacaggtaccatgaaggtctccgcggcacgcctcgctgtcatcctcattgctactgccctctgcgctcctgcatctgcctccccatattcctcggacaccacaccctgctgctttgcctacattgcccgcccactgccccgtgcccacatcaaggagtatttctacaccagtggcaagtgctccaacccagcagtcgtctttgtcacccgaaagaaccgccaagtgtgtgccaacccagagaagaaatgggttcgggagtacatcaactctttggagatgagctaggatggagagtccttgaacctgaacttacacaaatttgcctgtttctgcttgctcttgtcctagcttgggaggcttcccctcactatcctaccccacccgctccttgaagggcccagattctgaccacgacgagcagcagttacaaaaaccttccccaggctgggtgcggtggctcacgccctgtaatccccagcactttgggaggccaaggtgggtggatcacttgaggtcaggagattgagaccatccctggctaacacggtgaatacaaaaatactaacggtctctactaaaaaaatacaaaaaaattagctgggcgtaagtggcgggcgcctgtagtcccagctactcggagaggctgaggcaggagaatggcgtgaacccggaaggcggagcttgcagtgagccgagattgcgccactgcactccagcttgggcgaccagagcaagactccattaaaaaaaaaaaaaatgcttaccaataggttagtagcattttgattgcaaaagctgaagccaggactatttgaactttttcccactcatttattcctttgttcattcaatgaatacatactgtgtactttatgtgtagggtactatattaagcataagctgcagataagaggccagccagcactttaaaagccgtgagaaaacaagtatcagaataactataagtgactatataattagggcaataaggataatgggaccttagtaaaactaaagatgatttggcagtagctgagagggaaggtaaagaaagccatgacaaagttgaaggcaacttttgagcatatttcaagggcatatttagacaaggagatatgggactcataagcagagctggaataggaaagaagatcaaggtaaactgcttagatgcatgtacaacattctgaaattaacctctgactttgccctcaagttacttatgttctcgtgggaaagatgagagatgaacacggttatcatccaagacagatggtgcccacagctgcttagatctctggttccagggtaaagctccctcagctagaggcagagtcaaagttgaatttcctccttactggctcaaaccacacctcatattgaaataataaaaatgcatgctccctggagcaactgacttgttatctaatacatttgcttttttgtgttcacttggagaacagtcttttcggaaaaattccaaggagctgtagtgtacatactcttctctcctggtgttataattggctgaggtcaaggggcaaaaaagcagagattcattcaagatggaaatattccaaggccttagcatctgtttcccagaacagagtcttacattctttaaccaggctccatcccacagttcagccctgcctcctttcaacaggcagctgaaaaaacctccttcccacctctccttctcacaaccatcagtagaaggcgctagctgtgggtgaaagggaagcactcagcctgccaaactgctggacatgagccttcaccctttttctgacctccacaaaaattttaaaaagtttaaattcctgtgcttccacgcttatgagaaatacagcaaccatgaatagaggaagattatgttttcaacttgagaaaaaatactgaggctttgggcagccccccacttccccacggggacacaatcctctcaaccctttccagcactttttgtttccctcttccagaggtcatctggtgtgagagggagatacacatcttgaatccagcagcaacgtgacattccatctctttccccccattgcacaagagtcccttccggacctcgggaagcagaagctgccagctctgaaatgtattttcaaggcagcacattgtgtgcacttttaccctaccctcacaactgagaggaaatgtttattttcaatttagcttttgactgcttctaaaaaataagccacttttcaattacacagaggctttaaaatgaagtgccaagatttaacacatgttctaagggctctggtttcctgtgtttctttggtgaggagtgaagtccagcaactggtgagccaaagaataggattcatttacaacagagcagtggttctcaaagtgtggttcctaaaccagccacatcagcatcaccaggaacttgatagaaatgcaaaccaccccagactccaccccagacagattgaatccgaaattctaagaatagggcccaagaatctacggtctagggagcttccaggcgattctcattacgccaaagctgggaaaccactgcaatattgggttgttgccagtgaagagtttgctaaactccaaaagcaaataaataggctagaagtcagagcctcttctagacagttttgttttttgttttttttttaacctgagtataagatcagaaccagtggtggcacaggagaaagcaaaaaccactaagtggctataaagacagagctaacactgagggtaattacagtaagaggattcacatggaaagagctccagttctgtgccaggttacgcgaagggctttccattccttatcttactgagagcttttaatttttgtttacgcttttaaacatgaaaagggttttagtcaaccaagaattgaaccactgtgttcactgaagggaacacaattcttggctttctctttaagctttcttattctccctaggaccacacagaagaaggcagagccagcatttaccagtctgtattcacaaactcttccaaagaaatgatgtgctttccagacttcccttatccggatgattacccaaactatatacaccacagcaagctccaggaatatataaagacatatgctcaaaagaaggatcttttaagatacatatagtttgaggtaggggtctcataacttgtactgttgaaattaagatatgtgtgggttagagaaaaaggaggcagcaaactattataaaaattagagccaaatgtttgggcacctcagtaatcaaatgttgggtctgattataaagcattcatgcattgattttttctctcctagacttactagttcactagtctctgagagctttcagactaccttagaaaatggaggcagctagcccatcattgtccactttccaccctcatgctctgatgttttggaaataatccaaaatgctttagtatatattaggaattttgtcagttcaatgccaatgagttgtggttcaaaaaaccagagcatttggtagggtttctcccattacattatgaaaaggttaacaacttaaatgggaaatatagtcattgcccccatctttacccactcagttcattagtttttttattaaaaaggtgagatttcagcattgtttctgcgagaataatgttttacatttatttgggactctttattgagcatttctgtctgtatgtttggaactcttaacctcaattaactgctgctaaatgcagaacacttgcatatagtgggaaaaacaatcagcaaaattatgaaccatggtgatatttacatcattattttacctggagtagccccaaatgtatagttaaaataaaattttccaatagtcattttattccattcattcattacattcatttgcttccattatggtgttaatatcaacaaacattaatgaagttcctattgtgtgcttgcattgtgctatgtgttatatgtaaaagaaaaagaggtctaagacttagctctcaagaagttatttcaaaataaatatgtaaagagtaagtaaaaagattccagtaacaatttcaatcaaagagaaaattttttaaagctctttatgatttgtttataaataaaacaatgctatggagatcatgaagcaagaggcaacactttgggggaaggtattttctagaggaggtaaaatttagttgtatttagtaggtgttttagataaatgagtggcatgagtaaaattagagaggtgggaaaatgccctgctcatttggagaacagtgggcaaaccaagttggttaggagggagatatatatgctaggatgagatatggccacatatatcagtaaactagtgtgtactgtgactttgaaaaatagaggattattttgcaaccatgtaaaagaagtccaaagaagggacatccagagcttatgtgatggcaccaaagttatcaaagattcagcttcacccatcttagcacgtggcctacatcatgacgtttgccttgtggtgcaaaacagttgctgaagcttgagccgtcacatctgccttctagcaaaaaaaaaaaaaaagtaaagaatgaagggcaaagggatgttctctcagctgaatcagctccccttttacaaattctcctgaaaaaactgtccaacattgcttatatctcacaggccaccctagttgcacaggaacctggaaaatgcatcccttttctgtgtatgttgtcgctccaaacaaaatcagggttctgttagtaagaatgaagggagaatggacattagggaagcaatttgcagaatatgttccagaaaagtctgtgggaataacagaaaataaaactaaaagagtaaattggaacaaaattgtatggacttaatagtaatcgcattcaaaatgtagaataagttttagaggctgtgaagtaacagaaattgagcagtgaattgagcagagaaattgagaaatgaatatagtccttcaggaagattaatctgacaagcaggacaaaggatggcttgtaggaaatgggaggctgaagacaggctaggtataggttcttgccgtagtccatgcaagggagtgataaggacttgaatgaaggcagtgttagcaatcatggaaagaaagcgtgagattgggagataaatactgtttaaacatgaggcaaggatggagaaataacaaggaaaacaagtcatggatttgaagcataagtggctgggagtttcatgtcatcattcaaagaaataagaaagtcagaagccagtttcaaaggaaatttaagtaggtcaatcaaaacctgctacatatgaggaagtattaggtggccctccagatggaaaggtcaagctaaactggatagaagagagaccaaggatagatgtatttgtatattcataccacaaaacttgctaattttttttttttttttttgagacggagtctcgctctgtcgcccaggctggagtgcagtggcgcaatctcggctcactgcaacctccgcctcccgggttcacaccattctcctgcctcagcctcctgagtagctgggactacaggcgcccgccaccacgcccggctaattttttgtatttttagtagagacagcgtttccaccatgttagctaggatggtcttgatctcctgacctcgtcatccacccgcctcggcctcccaaagtgctgggattacaggcataagccaccgcgcctggccgtaaagttgctatatttctaagataagagtatttatgcagagcaaaagagatgccaacgatcaaaccttgagatattcccatacttattgagtagatggaagatgaggtcagaaaaggaggaagccatgtcagtagagggtagccataagaaaataacacagatttgttatatgacatcattcacaaaaatattcagtgtgatttacccctaaatcaactaacttgatgtcaaaaagtaaatgtactccagtgagtaatttttcttgtgagattcaaagactcactgaagattcactgtgactccaattttactatctttctatacatttctgaatgaccaagagagctcgtaacaattatttcctccacagaaacaaggcaagaaggaaaaaaactttcacatgtagaattataaatggaaaaataaattttctagttttcttaaagaccctggtttccggtataaagaaatgtcccagcttcttagtcacgggccaatgggttgttgttactgaaaaggatgggaaacaggaatctactatttttgatgctgtaatgatttgttcaggacatcacgtataccccaatctgccaacggattcctttcctggtaagtttggaaaatatataataatctagggacttatatgcaaacatcaagagttagaaacatatctttctataggtattacataatgattattcttagatttcaaaagaaaaaaattaagtttaatgataggatatagtaataaatagcctcataagtccttatgttaaaataatcaaggactgcaagccagagatcagacaaacacaagttcctgtgttacagacagtaactcaaatataagttctaacagcacacggggtctccgagcacagttacattaaaaaaaagtagagtccaactgccaaatggtttaaagaaagacacgtttacttatgttatttataggagactcctaggtttctaatttcatcttcatccacaatttgcaaataaactttagaaatctcagtgatttgtgtgtgggtacacacatgggtgtgtgtatagcagcatacttcattaccatccgaaagtggcaaacctcaaataaatacaatatacatggaggcttccttccatttttccttccttccttgccacaggaacacaatctactcaaagatattagagtttccatgtctaggtatgatgtccataggccgaggaaaattaaagagtgaaggttcaggaggaatataagattaaaactcttaatgttaacgggcagcatatttaatgtttatgagcatgggatcagaacacctggcctcaacttactattccactagttccttaccacttaacttctttgtctcaatttcctcttcttttaaaatagggacaatagcccaccatgcagggatgttatcaagattaaatagttaaaacgtgtaaagcatttatcagaggatctagcccacagagttaacttaataaatattaaccattattattatcgaaacatacattctcatgccttaagattttttaaggaactaaaagtaagttttagggggcttaatgtcaaaaaatgctaaatggataaatgcacttcaactagggaattttttaattacaactgataataggtttaaaaagacacaaagaaaacatcttcataatttctgaaaatcagttcaaacaacttgccatgttccacttaggcctggaccagtttcgaggcaactacctccatagccgggattataagaatccagaagccttcaaggggaagagggtcctcgtgattggtctggggaattcgggatctgacattgctgttgagctcagccgtctggctacacaggtacatgacgtaaaggttttgggaaataaacctaaggtagggctgtgctactaaatcagtagccaaggcacagaggatggtacttctatgtcacaccacaagagatccacctcttctatgtggcccttcaaatcaaggaggacttgagacatcctccatgtgaagccaggtaatgtggcccgtgctagtaaggaagtacattccactgaatccagaagtaagtgcatgagtgcgtgtatgtacagatgagtgtgtatgtgtgtatttcttgttttcattttatattctgatcacctccaaatagactagttcctggtcaggcttaatctttatttatttaacagtatttattataacgtatcatgcaaaaagcactgtgtttaccactctgaagttctgaaagatatgcatgacttggtatttactaacattaattcaatcaacagcagatgctcaacaaatattgggcacttactatgcttactatgtgtcagaactatgataaactaaaaataaatgcataaataagttagactagttcctgacttcaagaaagagtcaatggatggagatggagttgacaggtacacacagactatcaccagaggagatggtgagtcttccagtagaattaggtgtggcaatagcaacacagggaaaagagaatctaacttagcctggatgaggtcaaggaagacttcccagaggactccaagctaaatcatgtatcatcgatagaccctaaagaaacaacatatttttaagaaaacaggttctcaataaataaattcttaaatggatgtaaataaaaccttaattttttaaactaaaaattcccttcagttatcacaaagttaaagtctattttgcaaagacggtaaaatagataagcagccagactcatctcagggctgaggcggttgccatggtttgggttgctcaggagaagtccttggggtatgtgtatagggagaactggaaaaggcaaccagagacagagaacagaattaaatccttgacatctcgtcagcctaatttcagctagagatttagctacacttttcccacacctagtccactatcaccagccacaaccactggggctcactggatcatctggtccctaccagacttgccatcttagtctatgagtatgtgaagattaaaccatcacagttgaacacagagccctgttgttcctagagtgatgattctaatcctttcaacaactacacaccagccctcaggggcagtgaaagaatcctgtctctactagtttaaattttagactttaaaaaaaattttttttattttaagttctgggatacatgtacagaacatgcataggtctgcacatgccatggtggtttgctgcacctatcaacccttcatctagattttaagccccacatgcattaggtatttgtcttaatgctctccctcccctagccctccatccccccgacaggccttggtgtgtgttgttccccttcctgtgtccatgtgttctcatgattcaactcctgcttatgagtgagaacatgcagtgttcggttttctgttcctgtgttagtttgctgaggatgatggtttccagcttcatccatgtccctgcaaaggacatgaactcattcttttttatggctgctagacaacttatttagactcgccttttaaaagtgttcctacttggatattgaggaaaatgcacggaagtgcccaaagaagtgtgttgtgtttgcttatttcttacagagtaatgctgaaatctgtgttgcttttccccaccaggtcattatcagtaccagaagtgcttcctgggtcatgagtcgggtctgggatgatggctatccttgggatatgatgtatgttacccgctttgcatcctttctccggaatgtccttccttcattcatctctgactggttatatgtccagaagatgaacacgtggtttaagcatgagaactatggcctgatgcctttaaatgggtacttaaaaatggaaattttttttattcaaaaaaggggggcactcatttaatgaatttattctctctagaacttacttttgttgtctcattgagcctagaaacattaaactcaaggtttcacaggtgacggaatatgcccagagaccacgtatggcttggaaaacttattgaaattagtccagtacagaaagggtatggaaaaatctgaaatggagatgacgcaggcagataaatcaccctgacatgcatgatgcatttgtggtggctacaagctatagcatagaactttgaggactgaacaaactcaaattggtttttggaagaatatcttgtccgtgcttatgggtgtatgaagacatcaataataatacttgcttctcaagatggttgtggtattcaataatataaaaatataaaaattgctttctaaatgataaagctttaaaaaaattggttcttcttagtctcaatttttctaatgtgcttcaaaggagcaaataacaaaatagtgttaatcaacatgtctcagcaagtaggaagtctcaaaacaaaagtgcacacttcctccacccctgaaatgttgacatttttgcagaaccatcaggaggcatggaacacataaagtaatggagagtcacaactaacgtggcctgtaagattagtcagattcatttatttacttctttatagagacagggcccaacatttactaattaggaagtcattccaggtagaagaatcagcatatcaatagaaaaaaagaatatttaagttggtaagaaaagaaagaattgagaaattttatctcctggcccatgctagccaaaaagtttcattgtgtttagagaaagatggtaagaaaaaggaggaactgtaaatcaaaagagcaaatgccagatttaggagctaaactgtcagtccaaagcacttatactaccaagtcttgcaggctgctataaccctttaaaatatgttgattttatgcatttaaaattatgtttaacactgtggcttgcttgacagtagagggtgggaggaggaagagaatcagaaaaaaatacttatcaggtactatgcttattacccaggcgacaaaattatctatacaccaaacccctgtgacacacaatttacttatataacaaaccatggacccccaaacctaaaataaaagtttttaaaaattatgtttaatatagtaagtcccatagcttgagctggttaagattttttatcttgtaagagtaactataaattatattttggccttgccatttagacaattaaaacatagttttagaaattcattcattctgaaaactaagcttccttttggaaagggttccaattaccctaagtttctggagggagaaagggggaggaaaaacaggtttcattgtggtctatgttttgctaccttgtaaggtaaaagaagaggttgcaggattagataaacagaaaatgatgtggaagtatagagacaaatttcaggatttacaaggtttctttgtgtctgagatacttgcaggaaattccggaatctcaaaggaaacttaaatcaaaatgaaatatattgtcctgaaaaatattattcctagaattttggcaactaaaatgcaatatcaaagttgttacacttttttgtggacacagctgatgaaagaaaaccaaacatggcaataaaacttcccaccactgcaagtctgatttctccatgtaagacaagacgttaaagttatgataatagtgcacttataacaacagtgcttgcatgtgccaggaactgttttaagtgctttaaggataattgatcatttaattttcacaacaacctatgaggaagattccatcatcatccccattttacacataaagaaacaaatacagaaaagtaacaactagtaagagatggagctaggttatgaacctgggccatctgcttccagagttggcgttcttaaccactttagtatgtctataaattagttttagtctcatttaggaaaggaattgccatgagagaagagagtcagtggcactcatgctgatgtttaagtgcttgatgttatttcaatgttatgggctgttgcaggtatttcttggaaatgagctatttacagcaagggtgtttgcctctcattgctgtagttccctgagaaaagagcctgtgttcaatgatgagctcccatcccgcatcctgtgtggcactctgtccatcaagcccagtgtgaaggagttcacggaaacctcagctgtgtttgaggatgggaccatgtttgaggctatcgactctgtcatctttgcaacaggctatgattattcctaccccttccttgatgagaccatcatgaaaagcagaaacaatgaggttaccttgtttaaaggcatcttccccccactaatggagaagccaaccttggctgtgattggcttggttcagtcccttggagctgccatccccacagcagacctgcaagcctggtgggctgctaaagtatttgcaagtaggtgggccattctgtctttcattcattttatcaatgaacatttactgaacacctgctatatgcaaagcactgtgctagggatacaatgagaacaagacaaacatgttccttgacctctcaaggcttaaaatggggtgtgggggatgccataataggggaaatttgggggggttctagtgaggggagttggactgttgcacagagcaaacagtatacaggaagtcataaaggtgagggaaagcatgaaatgtgtaaggacccagaaacattttggtggaagggaatataaagcagaggcagggagtggcaagaaatataggtttataagccacgttaaagagcttaaacttctcatagggattaaggacttcgcaagattttaagcaagaaaaaaatagcagaggataactgcaatgtcaggctacattataaagattggaagggccctggtgagggttggaggtgtgccagaaacctcactggtgtcaacttctgtcagaataacaaagtcaggccactctgattctcatgacaatcttcttcttctctccctctactctagacctcatggtctccaggggctacaagtatgcttatgtgaggaaatcaagaatatgaggattacatggagaaaggcaatgtctcaaatatattaatttactccagtcatactgaatattatcattattattgaaaagtgttcttttattcaggtattctccaaaatattgaccaatataggtataacttacctaacataactaatccataaaaacttacactattggtaattaacaaaccattacaatcatggaatatatgtatatatattgtctaaaactttgtagataaataaatttctatttcaaatacaccatgaaagatcatcatttaaataaaccccatcatgaaatcttttgtaaaggtgctccctgcaaaatacttctattgcctttttccttcgaaaggcacaacaatgccaagagcctggggtattatgagaagactggatatagttcataaacctaagaaatttacatgaagcaaatggtatcatttatttattcagcaaatacttactgaacacctactatgtgtcaggctctaacctggcacttaggacacaacaacaaacgaagcagaacaaaattctggcctcttactttctagcagggtgtccagccaatatcaatcatagggtactaccaggttgacataagacactaacgatgactgggaaatattcatgcactgcaaattttagagtaactttcttccactgttacaaaggcaaataagctaccatcaccagttaaaagaagttgcattgatgtagtgaaattcacaaaaagctaaaacttgtctgctgccccttaaaacaccttgcatagttgcagaagatgtttaaaatcctatgcttccttccattacctcatttaaaatggcagaaaccttaaagggaactgttttaccagattctttcttcagagaagttttaggaaaaggatacagaaaaaaaaggaagaaattattaagctattatatgcatgaagtgtactgagcacatatgttgaggattaggtcctctataatgttaccgaaataagagactgagtgatttgaagctacaaatgtctctgctgtcactatctcactacaggccagcttttccaattcccaaaggttcattaacttttcagatctttgtttctatgaactggtattttgctaaagatatcaaagacatctccagctcctcttaatacaaaagttttcaggaatacagtttataaaaaccaaatgatttccatcatatgtcattatatatttctgatttgtgtttttcaatatttttctcttcatttcttttctagactcatgtaccctgccaaccacgaatgaaatgatggatgacactgatgagaaaatggggaaaaaactcaagtggtaagcagctaactgtacttgctaatagagcaagttcctaaaatgtgcctttatgtgtagaaaaacattaatatgctttaatattgtcattagtcagagtttacattttctgaacacttgcaataatcaaaaaatgtttagatagtaaacagtcatcacacttctcttgtgtaactcaagaatagaggttttctatcagggataattttgccctccaggtgacatatggcaaaatctggagacacttttggtcattgtgagtggagagggcatgctatcagcatcttatgagtagagaacagggattctgctaaccatccaacaatgcagagcacagttcaccaaaacaattatctggctcaaaatgtcaatagtgctgaggttaagaaacaactctataaatgactacagttgacctttgaacaacacaggtttgaattatatgggtccacttatacatggattttttcaattaacataatgcagattgggcatggtggctcacgcctgtaatcccagcactttgtgaggctgaggcgggcggattacctgaggtcaggagttcgagaccagtctggccaacatggtaaaaccctgtctctactaaaaatacaaaaaaaattagtcgagtgtggtggtgtgcacctgtaatcccagctactcgggaggctgaggcaggggaattgcttgaatcagggaggtggaggttgcagtgagccaagatcgcgccactgcactctagcctaggtgacagagtgagactccatctcacaaaaaaaaaaaaaaaaaatgcaattttttggagatttgcagcaatttaaaaactcaaggccaggcgcggtggctcacgcctgtaatcccagcacttcgagaggccgaggcgggtggatcatgagttcaggagatcaagaccatcctggctaacatggtgaaaccccgtctctactaaaaatacaccaaaattagccgggcgtggtggcgggtgcctgtagtcccagctactcgggacgctgaggcaggagaatggcgtgaacccaggaggcggacttgcagtgagcccagattgtgccactgcactccagtctgggcaacagagtgagactccgtctcaaaaaaaaaaaacctcaaagatgaattgtgtagcctagaaatattttaaaaaattaagaaaaagatgccatgtataaaatatttgtagatactagtctattttatcatttactaccataaaatatacacaaatctattattaaaaattaaaatttatcaaaactaaatgcatacaaactcttagactatacatggcaccattcatagtcaacagaaatgtaaacaaacataaagatgcaatattgtcataactgcataaaatatagcacataatgtgctagtataataattttgcagtcacctcttgttggtattgcagtgagctcaagtgttttgagtatctacttaaaatgctgtgtgacattagtcattttcacctgagcagttcatatctccagtaaattctgcctcacagtaaaaagtgatctctcaaggttctcacatatttttatcatgtttagtgcaataccttaagcctttaataacaccatgggctccatatgaagtgtcattaatgatgttggaagtgctcccaagaagcagagaaaagttatgacattataataaaaaaattgagttgcttaatgtatactatacattgaggtctgcagctatagttgcccaccatttcaagataaatgaatccagtgcaactatgccagcaggcatgaaatcttgcactttttgtaaaatatctttttattttggattgaaaatgcagctttttatgtgggtgcaggattgctataaggaagtatacatatagactctaatataatttgagaaaaagtgaagttattatatgacaaagcaaaaggaaggtgaaggatctagagctggaaaagttaatgccagcaaaggatgatttgattacatcagaaagagtttggcttcaaaaatgtcaagataacaggagacacgcatgctgccaaccaagaagaaggagatgaattcccagatgtcattatgaaaatcattgaggagaaaggatttctgcctgaacagatttttaacacagacaaaagtgccctattctggaaaaaaaaaaaaaaaaaaagccacaaaggccatttattaataaggagcagaagtgagcaccaagattaggcaggaaagaataagctaactactgttttgtgcaaatgcagtcagatttatgatcaggatggcccctacctatgaagctaccccctcaaaccttgaagggaaaagatgaatatcagcttcctatcttttggttatacaagaccctttttctggattagctctgtcaatgctttgtccctgaagtcagaaagtccttgccaataagagactgccttttaaagtttttttgatatagacaatgcccctgaccacccagaaccccatgagttcaacatggaaggcatcgaagtagtctaatttcccccaaacacaacattctaattcagcctttatatcagggagtcataaggacctttaaggctcatcacataccatactctatggaaaagatagtcaatgctgtggaagataacccaacagagagaacatcatgaaagtctggaaggattataccattgaagatgccctaattgttatagaaaaagccatgaaagccatcaatcctaaaacaacatatttctcctggagaaaactatgtccagatgttatatatgacttcagaggatttacaacagaccagtcacagaaatcatgaaaaagattatggatatggcaaaataaaaaggtgagggtgaagggtttcaagatatggatcatggagaaattcaacagctaatagacaccactaatagacacttttaattccacactagaggaactaaaagatgacttgatggagatgagtccttccaaagcagtgccagatgagaacgaagacatagaaaaagccatgccagaaataaattgacattagatcatctggcagacaggttccagttatttaagacttcttttgacttcttttatataacatggacccttctatgatacaggcactgaaactaaagcaaatgatagaggaaggattactactatatagaaaatttttagagaaataaaaaagcaaagtcagacagaaattataatatatttccataattacaccaatgggcctgcctctcctgcccccaattctacctcctccatctcttccgcttctgccaggcctgaaacagcaagaccaaccccttctgtttctcctcctactcctcagcctactcaacataaagatgataaggatgaagacatttatgataaaccacttccacttaatgaatagtaaacatattttttcttcctcataattttcttaataacattttcttttctccatattactttattgtaagaatagtatttaatacgtatgacatataaaatatgtgttaatcaactgtttgcattattggtaaggcttccagtcaacaggttattaagagttaagtatttggggagtcaaaagttatacatggatttttgactgcaagagggctcaatgcccctaacccctcagttcttccaaagtcaactgatataggaagtttctttactttttcaagcatttaacattgcattgatatgtcaacctaaaggaaaacactgaggcaaatttaatataaaaagagaattgatttgggccaagtttgaggactgcaacccaggagcacagagtcaaattgccctgaatatgcactccgttggcagcagttacaagtaggttttttaaaggaaatacaaaagagtcaacttctaagttgtttaccaagaacttacattaaaattatataagctattgattggctatatactgttcttcgtatcacaaattctacgaacatgaagatgatgagtgagacagctagtcaggaataaaaatgccttttaacaattgccgccaggcttggtagagggcagcatgacaagtcccatacacgtggctctctcagcttgataaattttgcatacctcacatagtgcaaactactctgagctatttttcttctctcacattgaatgccacaatgtagtcacccattcagggcctagagaagaaaagaaatggaaccctcagattcaacaaaacctctcctgcacaacttcagccagttgacgaacaacttgcagagttgggcacttttatgtgctaacaattcatgcagcttgataccctttcctttagagcccagtagaaataaaaatgaggaaatagagaggttaaaatgttcatcttattgcttaaatgataagctgctcttcagagtttcaaaaagcaaattacaccatattccaactaaaagaactatagaggcggaaaggaggtgatctcttttctctctgtcataaaaggtaatggccaacacccctataacaaaagacaggttaacaagagaaaacgtgacagatttattacgtgcacatgtgtgcatgagagccttacaaaacatgaactcaaaggagggccagatcattcatgtttaaatattctcttcactggggttaggggagatggaagtgtaaaagtaaatgatttttcagaggaaattaataagtccaaagaacacagattagaccaagtttctctgggctttgggggaggtgtaatcacccaacagattcatcttgctcactgcccagaaaagctgatgccctgagaacagcaggtttttccaatagagagagtttaataaacacacagctgtcagaggcatttgaaccagagtgactccatcttgaataggggctgggtaaaatgaggctgagacccactaggctgcattcccaggaggttaggcattcttagtcacaggatgagaaaagaggccagcacaagattcaggtcacaaagacctggctgataaaacaggattcagtaacgaagctggccaaaacccaccaaaaccaagatgatgaaaaaagtgacctctggtcgtcctcactactcattatatgctgattataatgaattagcatgctagaagacactcccaccagcactgtgatagtttacaaatgccatggcaatatcaggaagttaccctatatagtctaaaaaggggaggaaccctcagttctgggaactgcccatttctttcctgtaaaacttatgaataatccaccccttgtttaacatgtaatcaagaagtaactataagtatactcagttgagcagcccatgccactgctctgcctatgaagtagccattcttttattcctttactttcttaataaactcgctttcactttatggactggccctgaattctttcttgtgagaggtccaagaaccctcttttggggtctggccagctaaacggaaggacaggagtttattactactcaaatcagcctccatgaaaattcagaggctagatttttttaaggatagtttggtagtcaggggctagggaatggggaatgctgattggttgggtcagggatgaaaccatagggagtcaaagcttgtcttctggtcttcctgggaggagaccacatgacaagatgaaccagtttaccagtctgggtagtgccagccggcccatcagaatgcagggtctgaaaaatatcttgagcaccaatggtaggttttataatggtgatgttatccataggagcaattggggacttctgactgcatgactcctgagccctaatttcttatcttgtggctaatttgttagttctacaaaagcagtctgatctccaagcaaggagggggtttgttttgggaaagggctgttaccatctttgtttcaaagttaaactgtaaactaaatgtctcccatagttagcttggcctatgctcaggaatgaataatggcagcttggagattagaagaaagatggagtaattacatttttttttcacatttttttcactgtcacaatttttttaaaggtgatttcagaggtaacatcacaggacatgggagactaaagggaggaaagtatgtcaaacaaaggctgtcctgttctgcagacgaaacctcacagaaagcaactctcagagtcagtagcctatgatgaaagtttctctgtcagacattcagcagtgcctgactctcagtctctctctcctgcaagttaatctttcctagagtgggcaagggaggcctccgagaaagcctagtttccatcttctgtttacttccttttattttctccacagataaaaatctccttcacaaaaggcagcttttcagggctgtttctgtctgcaggccctctgaatagccatctcaaaatctgtcaacgaagtgtatattttgcagtaaaatattttttgttttctttagtatgaaacaatttatattattagattacaggagtattaaaaccatccatgatctcacttttaaacaaaccaatctgaaagtctaacattggggcagattctaagcaatgtcttataaagaataattatgtgttaatgagtaaactaagttaattagtctccttaaaccagagggtcagtttactccaggccacatggtcaaaggcaaaagtccaacattacatcaaactcaaatagagattaggaaggaggagaaaagcagctcacttagctaaagaaaaaacaataaattcaattttgtggaaaaggagggcataaatggaggtgctatctaaaatgttatttttctgaaagaaaaaataagaaattaatgctcctatttgcaactgtaacacttattccagtatgttctcttctttcttcatgtttggccagagccagactttgcagacagattacatcacatatgtggatgagctgggctctttcataggggccaagcctaacataccatggctcttcctgacagatccccgcctggccctggaggtgtactttggcccttgcagcccataccagtttcgactgatgggaccagggaagtgggatggggccagaaatgccatcctgacccagtggaaccggacagtgaagccaaccaggacaagagttgtcagtgaagttcagcgaccccatcccttttacaatttgcttaaaatgctttcattcccattactccttctggctgttacacttacattttattaa

SEQ ID NO: 148079 - DNA, 1758 bp, Homo sapiens
  misc_feature (1)...(1758): n = a,t,c or g
cgttgtaaattactctttccttgctttctttttttaacttgagacccagtttcgctcttcttgcccaggctggagtgcactggcgcgatctcgactcactgcaacctccgccgctgaggttcaagtgattctcctacctcaagtctcctcagtagctgggattatgggcatgcgccaccacgcccggctaattctgtacttttagtagagacagggtctctccatgttagtcagggtggtctcatactccccacctcaggtgatccgcccgcctcggcctcccaaagtgctgggattacaggcgtgacgaactgcgcccggcctccttccttgttttcttaagacaaaagtgctgtatttcctgacaaatgcatcggctagagctcaaggtttaaagagaaaacacaactgtcttcctcctccctcattcccggtgtcttatgccccacaactttctttgcagaagaaattttgaattcaatgctgtgatctaattaaagatgctattaaactaaaaaggttatccaccagaaatgaggccacggcctctcatgcccagaacctggaggtgcggcaaagcaaggaggccaaccgcggaaacgccgccaacaccccactccctgagctggcaccctacagctacaagacacagaaggacaaaacagccaggaagccacgaactaggcatcccccaaggcacgcaatgcccgcttatcactgcacatccacaacagaattgaggccagaggactaacttccctggaccacagatgctctgtcccaatctccagaaaagtcgaatcaacagaaagatcccaggcaacgtcagagggattcaggaaagctttttctaagaaactgatctcatcttaattacagcatgctcaaatgcaccaaaggaaagccacaggctcatacttagacgatcaccgcttctgttggaaaggcagaagatgcagggaagtctctgtttggatcttttgaaaattccagcctttaacagttgcctatgtttgcacataaatattcatttaggccagaagaaaatgtatccattgtttttctgcaacaaatgacaccattttcccttaatgtggcaagcaaatgccgtatcacctgtcctagttactagagaagcagaaccctcctagaactcttgtcagctttattacaggagaaggaggtaggcccgtccttcttccttaacccatctcccccnactggatggcaaatggcctgcagttggctgctcccccaggaatcctacgctggagaacccaagtggtaaggtgctgtcctaaagagcctacgaaagccagactctgacctcccaaaacttcaccccactgagttgtcaggggctaacaggtaccctgacaggcagttcacaaaccctcctgtcccctggcaacagtgcacacagctcagtgctgttgggacttggcatctctggtctaagcctgtgggagtatgagaaagctaagcagtggcctgaactcggcctggtatcctaaccctctagagacgcagcaaagccagatgcccagagggagatctccttgtcttctctggctcaatgagatgctaattttggaagctggtatacgtagcacaaaacacaagctagtgtaaagatgctgtagttcaaacactgctgtctctctcctaatcaagtggcatgtttcttttttcacccctaagaggtttgggactgtttgcttaagatctcatgtcaatgtctgaaggagggaagccagc

SEQ ID NO: 148080 - DNA, 374 bp, Homo sapiens
aattcggcacgaggagcacgcttccagcccggagtgctggaggccccctagcccagacagacatctctgcaccctggggcctggacctgcctcctgcctgcccctctcccgccagactgttagaaaatggacactgtgcccagcccggaccttggcagcccaggccggggtggagcatgggcctggccacctctctcctttgctgaggcctccagcttccaaagctgtcacttcgcgtgccctcgctgcttctgtgtgtggtgagcagaagtggagctggggggcgtggagagcccggcgcccctgccacctccctgacccgtctaatatataaatatagagatgtgtctatggctgaaaaaaaaaaaaaaaaa

SEQ ID NO: 148081 - DNA, 2345 bp, Homo sapiens
  misc_feature (1)...(2345): n = a,t,c or g
atggcggcggcggcggctcaggggggcgggggcggggagccccgtagaaccgagggggtgggcccgggggtcccgggggaggtggagatggtgaaggggcagccgttcgacgtgggcccgcgctacacgcagttgcagtacatcggcgagggcgcgtacggcatggtcagctcggcctatgaccacgtgcgcaagactcgcgtggccatcaagaagatcagccccttcgaacatcagacctactgccagcgcacgctccgggagaaccagatcctgctgcgcttccgccatgagaatgtcatcggcatccgagacatatctgcgggcgtccaccctggaagccatgagagatgtctacgttgtgcaggacctgatggagactgacctgtgcaagttgcgtgaaaagccaagcaagctgagcaatgaccatatcttgcttactttcctcttaccagattccttggcggggccttcaagttacatccacttccgccaacggtgctccacctgagatcttaaagccctccaacctggctcattcaacaccacctggcggaccttaaggtttgtggattcgggcctggccgggatttgccgatcctggaggcatgaccacaccggcttcctgacggagtagtgtggctacgcgctggtaccgggccccagagatcatgctgaactccaagggctataccaagtccatcgacatctggtctgtggggctgcattctgggtggagatgctctctacccgggccatctttccttggcaagcactacctggatcagctcaaccacattctgggcatcctgggcttccccatcccaggaggacctgaattgtatcatcaacatgaaggcccgaaactacctacagtctctgccctccaagaccaaggtggcttgtgccaagctttttcccaagtcagacttcaaagccctttgacctgctggaccggatgttaaacctttaaccccaataaacggatcacagtggaggaagcgctggctcaccccctacctggagcagtactatgacccgacggatgagccagtgggcgaaggaagcccttcacctttcggcatggagcttggatgacctacctaaggagcggctgaaggagctcatcttcccaggagacaggcacgcttccagcccgggagtgctgggaggccccctagccccagacagacatctctgcaccctgggggctggacatgccctcctgcccggcccctctcccgacgagactgttagaaaatggacactggtgccaagccgggcctttggcagcccaggccggggtggagcatgggcctggccacctctctcctttgctgaggcctccagcttcaggcaggccaaggccaagggctttctcctccccacccgccctccccacggggccttcgggaccttcaggtggcccccagttcaaatctcccccgctgctgctgctggcttgtgcgccctttacgcttccccaagcggtccccagtctcctggcagttcctggaatggaagggttcaaggctgcccccaacctgctgaagggcataggtggaggagtggggggcgctgaaatagggactcaagggccatgcctgcccccccctcatctcattcaaaaccccaccctagtttccctgaaggaacattccttagtctcaaagggctagcatccctgaggagcccaggccgggccgaaatccccctccctgtcaaagctagtcacttcgcgtgccctcgctgcttctgtgtgtggtgaagcagaagtggagctgncggggcgtggagagcccggctgcccctgccacctccctgaccccgtctaatatattaagttaggagatgtgtctatggctgaccctggctctgtctgtgttcgcgacgcccccgccctgccccgtgcggctctgaggacagacttgacttgggctttcaggggcctggtgcccttcactcccagctgcccagggctggggacggggctctggagagctccagactcctagaaagaagggggtcagttttccccttagtcactgtcctgtcctctcgctaatggcttcctgtctaactggctgggggtgattcggggtgactcaggagcaccctacacacccctggatcctctgaaatggcaaggggtaggcatgttggatgcgctggctacaagtaccagtgagagggagaggtcctgacagtacttgggtggtttatactcccctcatgtagcccaggacggggctgctgggggctgggaagggcctggggatatgagagccagggctacttgcctcacctcctgacactacccagcttcagccgaaccctgcagcctg

SEQ ID NO: 148082 - DNA, 1515 bp, Homo sapiens
tcactgcccgctttccagtcgggaaacctgtcgtgccagctgcattaatgaatcggccaacgcgcggggagaggcggtttgcgtattgggcgccagggtggtttttcttttcaccagtgagacgggcaacagctgattgcccttcaccgcctggccctgagagagttgcagcaagcggtccacgctggtttgccccagcaggcgaaaatcctgtttgatggtggttccgaaatcggcaaaatcctgcccgctttccagtcgggaaacctgtcgtgccagctgcattaatgaatcggccaacgcgcggggagaggcggtttgcgtattgggcgccagggtggtttttcttttcaccagtgagacgggcaacagctgattgcccttcaccgcctggccctgagagagttgcagcaagcggtccacgctggtttgccccagcaggcgaaaatcctgtttgatggtggttccgaaatcggcaaaatcctgcccgctttccagtcgggaaacctgtcgtgccagctgcattaatgaatcggccaacgcgcggggagaggcggtttgcgtattgggcgccagggtggtttttcttttcaccagtgagacgggcaacagctgattgcccttcaccgcctggccctgagagagttgcagcaagcggtccacgctggtttgccccagcaggcgaaaatcctgtttgatggtggttccgaaatcggcaaaatccattaattgcgttgcgctcactgcccgctttccagtcgggaaacctgtcgtgccagctgcattaatgaatcggccaacgcgcggggagaggcggtttgcgtattgggcgccagggtggtttttcttttcaccagtgagacgggcaacagctgattgcccttcaccgcctggccctgagagagttgcagcaagcggtccacgctggtttgccccagcaggcgaaaatcctgtttgatggtggttccgaaatcggcaaaatccctgtgtgagggctacttcgatggccccctctacccagagatgtccaatgggactctgcaccactacttcgtgcccgatggggactatgaggagaacgatgaccccgagaagtgccagctgctcttcagggtgagtgaccacaggcgctgctcccagggggaggggagccaggttggcagcctgctgagcctcaccctgcgggaggagttcaccgtgctgggccgccaggtggaggatgctgggcgcgtgctggagggcatcagcaaaagcatctcctacgacctgcggcgggagtcccaccagatcggggatgcctactccaactcggacaaatccctcactgagctggagagcaagttcaagcagggccaggaacaggacagccggcaggagagcaggctcaacgaggactttctgggaatgctggtccacaccaggtccctgctgaaggagacactggacatctctgtggggactagctctctttatctcggctgtctgctccagctctgtggctcctgcagcccccat

SEQ ID NO: 148083 - DNA, 2113 bp, Homo sapiens
  misc_feature (1)...(2113): n = a,t,c or g
tttcgtgacgaaaccagctgtaatttgagagcagagagatcctcaggatatctttagccaaaggaaaagctccgcattcccacccagtccagaaattgaaatactatcagggggcaagagcctttctctccagctacacactccatctcccgggagcaaggggaaactccgagaggagggcaacagagccagcatcttgccagggccccggaggaggggttccccgctacgcctgtgccggaggagttccagtcaccgagcgaggggcgcaagggtgggtgcatcctgcgctgcggcgggcgcgctacccagacgctggtgtgcagagccacatgaagcctgctggggactgggggccagggagcaacaagccagctgggactgacgcggacgctgtctcagggagacgctgactcccaaagacactcccttccttgggcctgggaaaaaagtctcctcctggggtccctggccatcctgaatatccagaaatgggggttctgaagctcttctgcatgagtttcttctgccacctgtgtcaaggctacttcgatggccccctctacccacagatgtccaatgggactctgcaccactacttcgtgcccgatggtgactatgaggagaacgatgaccccgagaagtgccagctgctcttcagggtgagtgaccacaggcgctgctcccagggggaggggagccaggatggaagcctgctgagcctcaccctgcgggagggagttcaccgtgctgggccgccaggtgggaggatgctgggcgcgtgcttggagggcatcagcaaaagcatctcctacgacctagacggggaagagagctatggcaagtacctgcggcgggagtcccaccagatcggggatgcctactccaactcggacaaatccctcactgagctggagagcaagttcaagcagggccaggaacaggacagccggcaggagagcaggctcaacgaggactttctgggaatgctggtccacaccagggccctgctgaaggagacactggacatctctgtggggctcagggactaatacgagctgctggccctcaccattaggagccatgggacccgactaggtcggctgaaaaatgattatcttaaagtataggtggaaggatacaaatgctagaaagagggaatcaaatcagccccgttttggagggtgggggacagaagatggggctacatttcccccataccctactatttttttatatcccgatttgcactttgagaatacatctaaggtcatctttcaaaagagaaaaattggacacttgagtgactttgtttttagttttgtttttgtacattatttatgtgattgttatggaattgtcacctggaaagaacaattttaagcaatgtcatttctagatgggtttctaattctgcagagacacccgtttcagccacatctaaaagagcacagtttatgtggtgcgggnattaaacttccccatcctgcagattatgtggaaatacccaaaggataatagtgcatagctcctttcagcctctaggccttcactcctgggctccaaaagctatcccagttgcctggtttttcaaatgaggttcaaggtgctgctttgcatgcctgccaacccatggaagttgtttcttacttcttttctctcttatttattaacccatggtctgagagttgtttataattaaatgtaacagtattgccacaaaactataggcaaatcgtgtttgcagggagatttcctgatgcctctgtggggtgtgtgtaagttaaagtgggccacatttaaagaaggccaagctttgtagtgggttgcacagtcacactgatatgctgatttgctctttctcattgtatgtctatgctttgtcatcagtgctatagtaaattacaaagaaataggtagattgtatgaacatacccacaaatgcctatgatttaggttaccaatgtattctttctcatttggggttttgcttctgtctgtctgtttattggaaacttgtacttcaagtagggggaatcgtaattctaataactccttagctaagttttattattcaggcaataaacatgttttcatgtaaaaaaaaaaaaaa

SEQ ID NO: 148084 - DNA, 1733 bp, Homo sapiens
cagaaagaaattatttattttttttgagatggagtctcactctgtcgtctaggctaagagggcagtggcgcaatctcggctaaagtgcaacctccgcctccctgggttcaaagcaattctcctgtctcagcctcccaagtagctgggactacaggcgcatgccaccatgcccagctaatttttgtattttagtagagatagggtttcactgtttggccaagctggtcttgaactcccgacctcatgatccacccacctcagcctcccaaagtgctgggattacaggcgtgagccaccgcgcccagacctagaaaggaatacatttaaatgagctctgcacagcactggcgaaggagggacgggcctggtcagggaggtgaagggcaggtgctgccacacctgctcctctgctccatttactctctgaccaggctgtatcccagagagctggcccagccccatgcctccccctcatcttcccctaactgctctgtgcaaggccacccatgcaggcaccaaacacccacacctgacgaagactgtctcctcttgcggtgctgttttgcagcccactccacagagaaaggactaggctgcggccagggctgggaccagtgcactgacacagacacagttcaacacgacactccccaggaggagaaaggtgggtggtgaggttgggtcacacctcctcagttggtttgttttgtacctgaatgtatgagttctccagaagaaaccccagtaacacagggggtgcagaggctctgcctccctcacatggcctgagctgaccatagtgaggccctggcaatgggcaggagccttgctgactcctttgggctttgggctccacctcaccatcataaccccttggcactcaggtctgcctggtggctgggaagcttccatctagaaaaccgcactggaaaggattctttaaccatgttgctctaacagggctgtgcactgttcagtacatgccatgcagatttctgcttccttgcttttgctcatgtgtttttcatctcactgtctgtcctgccattgactacaacccaaagcctcagaggcacagaactttcccagaccatctggtctaccctgatcttatctactataaacgtctttagatagtccttgattttctgcttgatgtgcagcagtcacctaaaagctcccttaggccacatattacgtcttttaccttttttgttttctacaatatctagcgcaaagccaggcacacacacactaaaaaataatattaaaattatgggtggttgaaaaggaacaaaaaaaagaaagatccccaggctgtatatcagccacccaaggatctcaacagattccaacttcaggctctatattggggtggcacttcctgcaagatggcgagttatattacttgtactctcacgaggcaacacttcacatgcttaagccaatttctgggatcacaatcttgcttagttggtaatactaccatggaagccaaggaaagaagaggtaccacatgacaaatcagaggtgggctgtgtttatggtgcacagcttcatcttgtggggccacccttccacagttcaggtaatggtgcaagtttcctccctgttcagctacaagggaggaagactggtcactccacgtgggactaaggaagaaggcaatgctcccagatgaggcagtcctataaattaccaggacactggggccccacccaaaccatcaggaa

SEQ ID NO: 148085 - DNA, 1667 bp, Homo sapiens
cgagaccaccctggccaacatgcgaaaccccatctctacgaaaaatagaaatattagccgggcatggtgtcaggcacctgtaatcccagctacttgggaggctgaggcaggagaattgcttgaactcgggaggcagaggttgcagtgagccaagatcatgccatcccactctagcttgggcaatagagcaaggctccgtctcaagaaaagaaggtcatttcccaagactagcatagggagtatccatttaaaatacattcatcttcctcccatttccgtgctattaatcacttgttagagcaacatgacatgcccagcatcccacttccccgaaaatgtctactccttcttactctggaggctcttgttgcctaggaccttcaggaaaacaccaatttcaccacagtaggaaccggggaggcaggggataggttcagctttttctggattaggcacattttggttcagggtcttaacttgaggggcctctccgggtactaacatcctgcgatagttggttcccatgaggcacagaagagcctccagtagagtcaaagtcctgctgcagcggcccccacccccaaggttcctatcatttcccctccttaaaccaaaaaatatgttattcctaacacattagtgtccaatccccaatgggttgtcctccttatctgtcctaaatagcaaaatccatgaaaatccagctgttttatttgcataggacaacgtaacctgtctgtggtaactttgtttttattttaactcttactaagaaaaatctaatcctaaaacatttggattctaaacatgtaaaatgtgacagcctgcaattttgtagacagtgaagtaatggctgctatttataaatggaacatctatcaaaataagtaactgtttataaaattcagtttttgtagggttttccaaggaaaaatcaccttggttgaatgtttctcactcattaaactttgcgagaagtgattcatattcagtactgtttttaatcactttttaaaatataaggaccgaatgcaaggaaaccaaagttttattaataatttttatataactaaaataaaatagatgtggagggatctgtgatcatataaaaagggagggttactgaaagaattttagccaatatattgattcagggaaaaggagctgttttataaatggatccattccactgttccctatggttctatgtatctttcaaaccgatacctttactatttaaagagcgtaaatagtgaaagtaagatggtcatacttactgactttatctatttaagtttgatggagataaactatatcttggctagtggctactgtgtctgtgaatgtaaccagtacttctttaagctctattcagtagggttccagcccctgcttttttgttgtttctagccactgtttttttgtttgttggttccttacaccccaggtaataaccaatcattttgggttgggatttccattcctttttatttctgcctttgggtaaactgatgattaagtaggcaaactacttttactttcaaagagccccaagggcttaatgaccccatttgtaactgagaaaggattcttgttttagaaatcattctataaatgatactgctggattgattgccgcgggttgatagctggaggaattgttttgg

SEQ ID NO: 148086 - DNA, 1221 bp, Homo sapiens
gcggccgccgcgccctggcacagagagagccctgcccagccgtctcaggagccggccccgagtgaggacagaaaccccttccccgtcaagctccggtccacctccctctcgctcaaatacagggatggcgcctctcaggaggtgaagggtgtgaagaggtacagtgccgaggtccggttagaaaggtcgctgaccgtgctcccgaaggaggagaagtgtcccctcgggacggacccccgcccttcgaggcaccagggcccccagcgaccaaggaaaggggaaggcccggccccccgagccgctcagctccaagccgcccctgccccggaagccgcttctgcagagcttcacgctcccgcaccagcccgcgccccccgacgccggcccgggagagcgggaacccaggaaggagcccaggacggcggagaaaaggccgctgcgcaggggagctgaaaagagtctgccgcctgcagcaacagggcctggagctgatgggcagcctgcgccaccctggatcaccgtcactcggcagaagcggagggggaccttggaccagccacccaaccaggaagacaagcctggggcacggaccctgaagtctgaaccaggaaagcaagccaaggtgcccgagagaggccaggagcctgtgaagcaagctgactttgttcgcagcaagtctttcctgataacccctgtgaagcccgctgtggaccggaagcagggggcaaagctcaacttcaaggaggggctgcaaagaggaatctcattgtcccatcagaacttggcagctcagtctgcattgatgatggagaaggaactgcatcagctgaagagagccagttatgccagtacagatcagccatcctggatggaacttgccagaaagaaatctcaagcttggagtgacatgccccaaattataaaataggtgggcagtgcgctgataaagcatgtgcactaccctgacaagccacttaattaaaaactgccagggtattgtggcaaacacactgtgaaacttaaagattgaatttatcatccaggtatgacgaacttggggaaaaagaaggaaccaggcgacacagagaggataaacacacagccatactcctgggccagagggcccagaaacatgaacaacattgtggaagtccaggaaccagttcctgtgcccaaaggtacgaatgtggcttttccaattcccttggtaaagaaacgcct

SEQ ID NO: 148087 - DNA, 435 bp, Homo sapiens
  misc_feature (1)...(435): n = a,t,c or g
gaaaaaattaataaaattaggtggttaccacaacagaatgctgctcattttctactgggtacaaatgataaggctataaaattatggaaaataagtgaacgggataaaaaagcagaaggttataacctgaaagacgaagatggaagacttcgagacccatttaggatcacggcgctacgggtcccaatattgaagcccatggatcttatggtagaagcgagtccacggcgaatttttgcaaatgctcacacatatcatataaattccatttcagtaaatagtgatcatgaaactcccagacatcgtggacatcaagcctgctaacatggaggagctgaccgaagtcatcactgcagccgagttccacccgcaccagtgcaacgtgttcgtctacagcagtagcaaagggaccatccgcctgtgtgacatgcgctn

SEQ ID NO: 148088 - DNA, 397 bp, Homo sapiens
gggaagacttggaatagaccagtattccattttgtagcatattttcataactctgcgtaattggttatttgggggtattgcctgtacagaattattacttagccatgaatataaacttgtcctctttcgttatctactataagtgttctaattatgtgctgctgtgatctttgttttgaattcctatttccttccatttttaggtcccaatattgaagcccatgggatcttatgggtaggaagcgagtccacgggcgaatttttgcaaatgctcacacatatcatattaaattccattttcagtaaatagtgatcatggaaacatatctttctgcagatgacctgagaattaatttatggcacttagaaatcacagatagaagctttaacatcgtgg

SEQ ID NO: 148089 - DNA, 2101 bp, Homo sapiens
  misc_feature (1)...(2101): n = a,t,c or g
cccttgaggagctggttgcctcgcctccctgattctcaagcggacatcatttccaccgttgagtttaattactctggagaccttcttgcaacagggacaagggcggcagagttgttatttttcagcgtgaacaagaggtactggcccagccccgccgtcctgccctgccatgaagtgtgagcagctttctcagcacttcctgcagagaagtctggcaggggtgtgaattctctcttcccttcagggagagaataaaaggcgccctcattctaggggagaatataatgtttacagcaagcttttcaaagtcatggaaccgggggttttgactatttgaaaagtctagaaattgaggaaaaaattaataaaattaggtggttaccacaacagaatgctgctcattttctactgtctacaaatgataaaactataaaattatggaaaataagtgaacgggataaaagagcagaaggttataacctgaaagacgaagatggaagacttcgagacccatttaggatcacggcgctacgggtcccaatattgaagcccatggatcttatggtagaagcgagtccacggcgaatttttgcaaatgctcacacatatcatataaattccatttcagtaaatagtgatcatggaaacatatctttctgccagatgacctggaggaattaatttatgggcacttaggaaatcacaggtaggaagcttttaacatcgtggacatccaagcctgctaacatggaggagctgaccgaagtcatcactgcagccgagttccacccgcaccagtgcaacgttgttccgtctacagcagtagcaaagggaccatccgcctgtgtgacatgcgcctcttcggccctgtgcgacagacactccaaagtttttttgaagagcctgaagatcccaagcaagtaggtccttcttctcaggaaataatttcatccatatcccgatgtaaaattccagtcatagtggggcggtacatggatgaccagaggattacctgttcggtggaaggtgtggggaccttcaacatgggaggaggcagggccggtgggaggacccaccagggtccacgagtacctggcgcacaaagcttctgctctctctaatgagaacgactgcatcttttgacaagttttgagtgttgctggaacggtttcggatagcgccatcatgaccgggtcctataacaacttcttcaggatgtttgatagagacacgcggagggatgtgaccctgggaggcctcgagagagagcagcaaaccgcgcgccagcctcaaaccccggaaggtgtgtacggggggtaagcggaggaaagacgagatcagtgtggacagtctggacttcaacagagaagatcttgcacacagcctggcaccccgttggacaatgttatttgccgtggctggccaccaataaacttgtacatattccaggacaaaatcaactagagacgcgaacgtgaggaccaagtcttgtcttgcatagttaagccggacatttttctgtcagagaaaaggcatcattgtccgctccattaagaacagtgacgcacctgctacttcccttcacagacacaggagaaaagccccctccgctggaggcccggtgtggttccgcctcggcgaggcgccgagacaggcgctgctgctcacgtggagacggctcctcggaagcagaagttgacgggacacttgctcccaaaaagggtcatttacctcatgaataaatggtatttatttcaggtccggagcctttcctttcccaaatttataggaccaaaaaattaaacatccaatgagaaaaagttattgtcagataccgctctttctcccaactttccctctttctctgccgatcacacttggggccttcactgcagcgtgggtgtggccaccgtccgtggtcctctcggcccttccctccagagtccaggtggatctcttgtggaatgtgtggattgtggcccaagcaagngctcaggcggccccactcacccaacaggcatccgcccgccaccccttcgggtgtgagcgctcaataaaaacaacacacttataaagtgtttttaaatccaaaaaaaaaaaa

SEQ ID NO: 148090 - DNA, 973 bp, Homo sapiens
tacgacgtgctaaacgaacgcagtgtcagcctaaactaaccctacctaatggaatacgctgctgccgccgtttttttttctaatctattcttatttctttttaaaaaacagggtacacttctatttattatgcaatcatctccaaagtagacagagaactagatcagatatcccaacctgtattgactacagaaaatagtcaaaaccacttcatagaaattgtactgtttttcctaaataaacagaaaatctgggtacacacaacatgtttgaatattttaatccctggccaggcatgctagctcacgcctgtaatcccagcacttggggaggccgaggtgggaagatcacgaggtcaggaattcgagaccagcctggccaacacggtagaaaccccatctctactaaaaataaaaaattagccaggcatggtggtgggcgcctataatcccagctacttgggaggctgaggcaggagaatcgtttgaacccaggaggcagaggttgcagtgagccgagatcgcgccactgcactccagcctgggtgacagagcgagactccgtctccaaaaaaaaaaaacaaaaaaaaaaccacacatttaatccctaagcataaaagattaactggaggcaaactaagattgagccgtcaatctgaagtattttactcaataagggtaaccccctattgggctgtcactagcgtgtcacctcagccgagaccagcatgaaggtcaaaggcgaagccacctctgtagacccacctcacctgcccctcccccatccagtcacctgtgcagctggctagtccctcggcccctaaagacctaatcaagttggtgagttcagacccaacatcatcaggaaatctgtaaatttggagaaacttgttttcaaagcaaaaacccagatgaagaaaaaaaaattttttaggccaggcacgatggctcacacgaattccaccgcactggac

SEQ ID NO: 148091 - DNA, 251 bp, Homo sapiens; identical to SEQ ID NO: 121834
  misc_feature (1)...(251): n = a,t,c or g

SEQ ID NO: 148092 - DNA, 1921 bp, Homo sapiens
gaatactaggctttcctttttttgtgagatgggggtctcacactgtggctcaggctggagtgcagtggtgtgatcatggctcactgcagcctcgaagccccggggtcaagtgatcctctcacctcagcctcctgggtagctggaaccacaggcacgcaaccaccactcctggctagttttgtttttttagtagaataaggtctcactgtgttgcacaggctggtctctaactccttacctcaaaccatcctcctgccttggcctcccaaacatgttgggattacaggtgtgagccactggacctggccaaatactgggttttcagtgctcactgccactaataaaaatctgaaattctttcattatgcaatttctaagtgcctggtgagggccaagctcagttctaggctcttgaagattgaagagagaaacaaggctctgtctgctcctgttgtctctgtgagcatctttgacagagtgctcagattgttgggatatagtgcatcggactggcagcctgaatttgtggagaccgcagtcagtaactttgtgatatatggaatatttagaggacagtaacccatttccctacagccctacctgatcacatcgtgccctgctgggccataccccaaacagcccaccttcctctaggcctggccatggccctgtgcctgccacattgaggattaagtcaggatatcttgagccctctcaaatccctgtttattcaggcctctgccacatatagagccagccttctgtccccaccacttccactaccatggagcccacttaagtaaaacgctctctggggcccagcttcgccagaaaagacaccaggggaagcaaggctcaaaaccaggggcagctaaatctgatcttgtgggaccagtctctaagtaagggctttcagcgtcggctgtctgtccattgctttccaaataggatgcagcaatgattggtacatgggtattaagatcggtagtaggggctagtccaagtttagcaatagccaaactggagagcctctgaagtatgagagtcccagagggatttgtcagctcctggcagacatcctgattttcaccttcctgagtctaccctaccccagagggtgccagtctcactgtggtgaatggttagcccagtgttgtgctgcatccacacccagcaacggagtcccgtgcttgcaggctggtgggatgctgtcctctgggttaagactgtctcccttctcgggagcactgggagggttctccatcttgcgtgtttcagtgggaagttggcagatacggaaaacaggcccctataggggaaggcagttccatgtaaaatgaattaatttctttcccaaaagacttaaaattttttcctatttcaattttcctttcaaaaaaggaaatacattcatgtagttcaaaacttaagaaaacaaaagtctgttcagcaaaagactcccactccgtttccccaaacgctgagccccaccccccatccctggtagccaagaagtgtttccaaattttaaggtttaaagaaacaaagtcccctggatttgtgttagggatgtcttcctgagagtgggttgtggtccgttttgaccctggcggttgacctcggcccactaggatcatgccgcccttttccagggaggagggcctccccatcaccctgtacagtggccaccccagccctggcactgcccgcccttgctcagcgtacctttcccatggcactctgacgtactggatgtttggtttctgaagttactggctgtttaccctgccgggatgtaagcccctccagggcaggggcttgtctcgtgttcagtgctgcatcccagcttgctgggcacggtacctggtccatggcgttcaataaatcaccccttggatgagtgaaaaaaaaaaaaaaaaaa

SEQ ID NO: 148093 - DNA, 401 bp, Homo sapiens
gcagcctctacatcgagatcccgggcggcgcgctgcccgaggggagcaaggacagctttgcagttctcctggagttcgctgaggagcagctgcgagccgaccatgtcttcatttgcttccacaagaaccttcagctttttgggctttgagattgtgagaccggggcatccccttgtccccaagagacccgacgcttgcttcatggcctacacgttcgagagagagtcttcgggagaggaggaggagtagggccgcctcggggctgggcatccggcccctggggccaccccttgtcagccgggtgggtaggaaccgtagactcgctcatctcgcctgggtttgtccgcatgttgtaatcgtgcaaataaacgctcactccgaattagcggggggtttcttgg

SEQ ID NO: 148094 - DNA, 499 bp, Homo sapiens
  misc_feature (1)...(499): n = a,t,c or g
gaaacagggggcccggttgaccccctnccaaaagtgtcctgtannggccncgaannntngggncgacccacgcgtccgaccttgcatggtcctatgagggaaaccctggattccattagggatcccaggaactgtgggcacccattttctgtgtctcccagcccatttccactcctagtttgtcatggataatttttgttcttccctgtgtgatttttgccatcaaaataaaaatttgagactcgttnnnnnnnnnnnnnnnnggggcggccgttttaaaggacccctggaggggcccaagtttacccgggcttgcaacgaattagttttttccttatagggggcggttttataacctaggccctggccgcctttttacaacgccggaacgggaaaacttgttacctgggaatctttgaaaagaacccttacttttggggggggacttattgggacaacctccctacaaaaatttaaggctttaaggaaaatataaatg

SEQ ID NO: 148095 - DNA, 1153 bp, Homo sapiens
aatgatcggctgaattgaacaagagaactaacttcacacgaaagacgaagatttccacgtcccagttccaggctcacagacgcccaacagcataaactggcgacaagtgctgagtgccggcagccctctacattcgagatcccgggccggcgcgctgccgaggggggagcaaggaacagctttgcagttctcctggagttcgctgaggggccagctgcgagccgaccatgttctccatttgcttccacaagaaccgcgagggacaaaagccccccttgctcccgaaccttcagcttttttgggcttgaagattttgaagaccggggcaaccccctggtccccaaagagacccccgacgcttgctttcatggccttacaacgttcgagagagaagtcttccgggagaggaggaggaagtaggggcccgcctccggggcctggggcaattcccccgccctggggcccacccccttgtcaagcccgggtggggtaaggaacccgtagactcgcctcatctcgccctgggtttgtcccccatgttgtaatcgtgccaaataaacggctccactccgaattaagcggtggattttcttgaaagtttaatattgtggttggtgatactgaagtatttgcctttaattcctaaataaaaatttatattttacttttttattggctggcttaagatgattcaaattatccttgtactttgaggagaaagtttcttatttggagtcttttggaaacagtcttagtcttttaacttggaaagatgaggtattaaatcccctccattgctctccaaaagtccaataaagtgattacaccctaaaagatgcaaatctgtgggaaaaaggggcgcccgttttaaaggacccttggggggcccaaagttaacccgggcttgcaacgtaatagttttttccttatagggagccgtataaaaagctacttgggaattttgggaagggaccttaattttgggggggggacatattggaacaatttacttacagaaattaaaggctttagggaaattttaaaattttaaagggaaaaaggggtaaacctacctgaataggctggcggttggaaagtttggttaacggagttggattaaggaaatttttttccccgggggcttattgttttt

SEQ ID NO: 148096 - DNA, 1889 bp, Homo sapiens
  misc_feature (1)...(1889): n = a,t,c or g
ttttttttcctcgagagagatccttgctctgtcacccaggctggaatgcagtggcatgatctcggctcactgcaacctccgcctcctgggttcaagtggttctcatgcctcagtttcccaagtagctgggattacaggtgcccaccaccacacccagccaatttttgtatttttagtagagacagggtttcaccatattggccaggctggtctcgaactcctgacctcatgatccacccacctcggcctcccaaagtgctgggactacaggtgtgagccacagcgcctggcctgtttgttttttgagatagagtttcactcttgttgcccaggctggagtgcagtggcgtgatctcggctcactgcaacctctgcctcccgagttcaagtgattctcctgcctcagtctcccaagcagccgggatcacaggcacctgccatcactcccagctaaatttcatattttcagtagagacagggtttcaccatgttggccaggctggtcttgaactcctgacctcaggtgatccacccgcctcagcctcccaaagtgctgggattacaggtgtgagccaccacgcctggccgaacaaaagttttttaatcttactgatctccatctttccagctgctctgaacagaggggcagggcggggaaaagtcatgtcacagactctgcccacagcagccattctgaggtgccttttcagtctcttatcctcttttgagctttcctcttcttaannnnnnnnnnnnnnnnnnnnncattgtactcattaatcccctcctcaatttttaacagaattataaaagcaaagtcaaaaggtccttcaggatgactgggaggcttcctaggctaacttttgcatttgaaaatggaaaaaataaattacttgatatttgtgataagactaagatttcttaaaagtctgcacatcaatatattacctgggcttaggagggtgagggcacagtatccatctgcacccctctccctcgtattttttaaaaacaggcaaaatatgtaagaaaaggctggtgccacgttggaaagacagagccgtgccctgtcctatggccagtgctgctgtggccctgcagcctgggcagatggagtccggatgctggggcctcatggccactttaggccaataacatactccagactctacagccccgttcaccagcaaaggtatgccctgaggggaaccactgggtgttgggagttgaaggcacacaaagcagggactaaaggcaaatggggcttcacgatgcagcgacatgaagacagaacttggtgtgggccccaaaggcaaccttgcagggctcacataaaaggaaaataggacagaaagccacgagttccacaagcagaatcatttctggtcttacatctgagggcatttgtagagaaaagtccaaggcaatgtcccctgggtcttgagagaaaaatcctacgcaaaagagggcagacaagtgcggtgctcgtcttgagggagcctgaacctgaccctgaccctgacgggctggatgcgagaggggctgagtatggctgtattcagtaaggaaactggtagcagacttttctagaaggtggaaagaaaaagcaaagactttcacagatacaaaaattgttttcaaaacaattacctagaaagttcactgcggttgggtggggaataagtgtaatattttcatttcaaatgagccatggggctactaatggattataaaagaggatggccagttctggtcttccttcccttcccttaacccccgaaccttcctactcctgacattttccctaccctcactgcaacccacccccatcctggcccaaaattaatttgcccagccactgcaccaaaccagccttgacacacaattgt

SEQ ID NO: 148097 - DNA, 1097 bp, Homo sapiens
  misc_feature (1)...(1097): n = a,t,c or g
gaaaaactttaatgaaggaatgtacccatgtacatatgtgaactttttcatattgtattatcaaggtatagacttttttggttatgatacagttaagccaaaaacagctaatctttgcatctaaagcaaactaatgtatatttcacattttattgagccgacttatttccacaaatagataaacaggacaaaatagttgtacaggttatatgtggcatagcataaccacagtaagaacagaacagatattcagcagaaaactttttatactctaattctttttttttttttttttgagacagagttttagtcttgtttcccaggctggagtgcaatggcacaatcttggctcactgcaacctccgcctcctgggttcaggcaattttcctgcctcagcctcccaagtagctgggattacaggcacccaccaccatgcccagctaatttttgtatttttaatagagagctaataattgtatatttaataaagacgggtttcaccatgttggccaggctggtcttgaactcctgacctcaggtgatcctcctgcattggcctcccaaagtgctggaattccaggcatgagccactgcgcccagtctacacactaattcttgttagcccaacagctgttctgttctatctacccctcatttcacgctcaaggagtcatacctagaatagttacacacaagagggaaactggaagccaaacactgtacagtattgtgtagaaagtcacctccctactccttttattttacatgagtgctggatgtgttttgggcagatgagctttcagctggaggcctgatgggaaattggaggntaacctgcaaagacataaacagtatttatgagttatatcttagttcttgaaattgtgggaatgcatgattgacaatattatttttaatttttattttttcaagtaataccagtactkgtttaactatagccagaactggctaaaatttttatattttcagagttgaagttggtgaagacattcatgatttaaacaccagatcctgaaaggggttaaatctactttgaaatgaatctgcaatcagtatttcaaagcttttcttgtaa

SEQ ID NO: 148098 - DNA, 761 bp, Homo sapiens
atttatttttattttttgagatggagtcttgctctgttgcccaggctggagcacagtggcgcgatctcggatcactacaaggtccgcctcctgggttcacgccagtctcctgcctcagcctcccgagtagctgggactacaggtgcctgccaccacgcccggctaattttttttgcatttttagtagagacgggtttcaccgtgttagccaggatggtctcgatctcctgacctcgtgatccacccgcctcagcctaccaaagtgctgggattacaggcgtgacgaccgcgcctggcctgctcttttaaataaacatttgccttgcagctttctattttgtttaaaatgctaccattttttcgtaagataagagatatgttctaacctaatttccaaattactttgtgaattccatgaagattttccatacttgatacttaggaggttaaaaaatggttttaaagtgccattaagtcttaagtagatggaaattatagaatagttttcctagatttgcatgtgcaattgcatcttgctctgttatttgctaggcagactgactgattggattctagaagaggagccgatttgaggcatcctattgagcaaacatctgtagatgaatagtggcgcattaaatcagacctattgtaaaaatatatgtcctgtactgacttgtttgcttaagttataagcacagaaatagtgacgcaatggttcaactgctcagctgacgggcttgttgtggtgaacgatttat

SEQ ID NO: 148099 - DNA, 1438 bp, Homo sapiens
ttagctgcttgcctctgtgcgtaaccgcacgcccacggccgtgatgagggcggcccccttgccgctgccatcctcagacaggaggaaggacacgttacattttggtgacagttccttcaccgtctggtgcatgattctggagaagtgtggatgaagcttgtagagtgtcccgtccactcccacagtcacattcagacggtccagtcctctgttctcgcggatcttatccacaaccgcagccatgcctgcgccacacagctgtgcggccctcctggacaccaccccgcacactgtcttgacgaggatactgtcatcgcaggtgctattcagacctagctgctggaggatagcccggacctggagcagtgctaatcggtcactctcgatctgagagagaaacttggtctcaaagatgccccgggtcttcagcgtctcagagatctgccctcggaagaggaatcccttcttggtgaagtcgattaagatgttgcggacgatttcacccaggtacataccactgatcatcttctcatacctgggctccagccaggaaagcactaacccgtagcccctggaaagccgcaggctggccaggagctctggtggctgggctggaatcacaggcactcccatgaacattttcacagggccagatcctgggccatctgagaggtctgcacaacccagggtgtgggacagcacctgctgccttaagagcaactgctggttccggaaggtcaaggccaccacgccaccaatgagctccatgatgaggcagatcccaaggatgtacatgaatgcttggagaaggtacaggttgtcacggagggacgccagcacaccaatgaaggagaccatgaacatgacgacgcccaggaggatgaggatgatggctggagccaggaaggcactttcaagggttttatatttctgccgctcaacctctgcatagatgcccacagacaggaccagggccccaatcagacctgtaatcccagcactttgggaggccgaggcgggcagatcacgaggccaggagatcgagaccatcttggctaacaaggtgttctattactcaacaggaatcttcaaggatgcaggtgttcaacagcccatctatgccaccatcagcgcgggtgtggttaatactatcttcactttactttctaatcactataatgggatgagctttgtctgtattggggctatcttggtctttgtggcctgttttgaaattggaccaggccccattccctggtttattgtggccgaactcttcagccagggcccccgcccagctgcgatggcagtggccggctgctccaactggacctccaacttcctagtcggattgctcttcccctctgctgctgatcattgtgattacaccgggcccccttggacaatcctgacaatctcccagactcaagatctttaa

SEQ ID NO: 148100 - DNA, 1229 bp, Homo sapiens
gagacggagtctcgctctatcgtccaggctggagtgcaggggcgcgaactcggctcactgcaaactctgcctccggggttcaccccattctcctgccccagcctgtagctgggactacaggcacccgccacaacactcggctaattttttagcatttttagtagagacggggtttcaccgtgttagccaggatagtctcgatctcctgacctcatgatccgcccgcctcagcctcccaaagtgctgggattacaggcgtgagccaccacgcccggccccaaacgggtagatttcttttgtttttgttttttttttttgagacagagtcttgctctgtcacccagattggagtgtgcagtgggcacgatcttggctcactgcacactccgccccccggggatcacgccattctcctgcctcagcctcccgagtagctgggactacaggcgcccgcgactacgcccggctaatttttttttttttgtattttttagtagagacggggtttcactgtgttagccaggatggtctcgatctcctgaccttgtgatctgcccgcctcggcctcccaaagtgctgggattacaggcgtgagccaccgcacccggccttcattcactttctttaaatgcctccaagttgattattctcctagctcatatctccttgatgtgcatgagggagcactgggtctaatttttgggggctgagaaggtaagaaggtgaggtcagtttttcccaggagtcctaaaaaattctggtaccttacattgagggtgtgggagaaagggtgtcatagttctgaaaataggcagtagcatgaagcaccagacctgtctcattccttattagatgtctatctcaaatgacagagtttgaaaaaatattggttttacccattggatatttcccatgcctgactcgggaaaataacattttctgacttttttctattttcttgccctgcacagaccctacctggtacaattttctatttcttagctcaaagtgtctatacaatgggttgcctggtatgtcagctgccctcactcttgtgtaatagaaatatattgcccaggctggggacgtggaggagacgaactggattcctccctcctcctgttgccaggcctctctgcattggcactttatcctttcagtgtttctggctgtgttgggttcatttgtgagactgatgtaacaataaagtgaaatcttcccctctgaaa

SEQ ID NO: 148101 - DNA, 678 bp, Homo sapiens
gccgctttttttttttttttttgagacggagtttcactttgttgcccaggctggagtgtagtggcatgatctcggctcgctgcaacctccacctccctggttcaggtgatatttgtgcctcggccccctgaatagctgggattacaggcgtgggccaccacgcctggttaatctctgtatttttagtagaggtagagtttcaccgttttggccaggctggtttcgaactcctggcctcaagtgatctgccaccttggcctcccaaggtgctgggaatacaggcgtgagccactgtgcccgccctgatgagatattttattaccaatgttagtattgagaaactgaaatggtgcgaagaagcacaacccaggatcgcgctggcagcaccacagtacttaaactgttgggtcaattaaggccagaaagggaaattgttaatttagctctgggtgctttggtttacaggaacataactcctaactgacatctgacatcatgatagccatatgtgctcagctctgggtagagtttctgcagttactcatctgaactaatgaacaataactgtccactagtcactttatgccgtgtaactagctctaggccatactttcactggttgctggtgtgaaagctgaaattcatattgttacattctggtgaagacccctgacgaaa

SEQ ID NO: 148102 - DNA, 288 bp, Homo sapiens
caaagattcactgtatttattcattctcctccaacattagcataattaaagccaaggaggaggaggggggtgaggcgaccgaagagctggagggacgccatagggagaagtcatttgcggaagaaggcgatctgaggtctccaggtgcaacctggtcgacctagaaccgaagggcccctgggggcactggcaagggggacccgtaaacgccgactgaagggccgagaggagacgcgaggaactgtgacgcttgtccgaggccacgggccagacctgtgctagtatggg

SEQ ID NO: 148103 - DNA, 748 bp, Homo sapiens
agcggccgcccttttttttttttttttttttttttttttttttttttagaaggagtctcactctgtcacccaggctagactgcagtggcactattcttggctcactgcaagctccgcctcctgggttcacactattctcctgcctcagcctcccgagtagctgggaccacaggcgcccgccaccatgcctggctaacttttttttgcatttttagtagagacgggatttcagcgtgttagccagggatgggtctcgatctcctgacctcaggtgatccacccgcctcgggtctctcaaagtgctggggattacagggcgtgagccacctgcggcccagccatctttcttttcttgctttctctttcttttctttcgagaccgggtctttgctctgtcgcccaggctggactgcagtgggcacaatcatagctcactgcaagctccgtctcccgggttcacgccattctcctgccacagcctcccgagtagctgggactgcaggcacccgccaccacgcccggctaatttttttgtatttttagtagagacggggtttcaccgtgttagtcaggatggtctcgatctcctgtcctcgtgattcgcccgcctcggcctcccacagtgctgggatcacaggggtgagcccccacgcctggccaatgtatcgcgtaagcaaatgcagacttcttatatttagtgtccaagttgaaaggccaatggccaactaggaggccatatttgcgaaaa

SEQ ID NO: 148104 - DNA, 570 bp, Homo sapiens
gtttcccggaggttcaagcaatccatcccaccgtgagcctcctgaggctgggaccacaggtgtgtaccacccatgcctggctaattttttttttcttctagagatggggtgtccctatgttgcccaggctagtcttaaactcttgggctcaagtgatcctcccatcccagccttcccaaagtgctgtgattacaggcatgagccactgtgcctgtctgtactggcttcttaaaacaaaacaaatcaaaataaagcaaacaggtatgagtaaagtgataaagctatttcctttgtgagacttgtataaccagtttttatttgcgtatatatttactgtgtatagcttttcattgtatagtttttattaaaataggattctgggcatgttaaaataaataggacatatactgaggaaacccccatacatctactggaaaacagtttcaaaaagacccatgggcttatggctgcaaatgtacaatcttatctaaaagagaaccttccctttggtccccttctccttaggagaagaacttctgcttaactttatgtaacatatccatatcaaag

SEQ ID NO: 148105 - DNA, 629 bp, Homo sapiens
  misc_feature (1)...(629): n = a,t,c or g
aagaaaacaggaagaaggaagagaaatatgatagattatgaaaagaagaagaataaggaacaggaagaaagaagaaagaaaaggaagaagaggaagnnnnnnnnnnnnnnnnnnnnnnccgaagaaaagaaagaagagaagaaagaagaagagggaggaggaagaagaaaacaggaagaaggaagaggaagaagaataagacaagaagaggaagaagatcgaagaaaacatgagagtagaagaagattacgagccgttggagacgaagtaattaacaaagtgtgccaagagctcaaaaggaccatacctgttggacgggattacaggcccttggacccatcctcatgaaaaagatcagtgtacaaacatttgcctcctgggctctgcatgactgtgcatttcagtagaatcacctggaggtctgttaacagtgattttttaaaaagcccttaaatgatggtcatcttctgttcaggtggctccacacgctgaggtcccacgtgcctgaaggtctggcccctccggttacatggctgtgcacctcctgggggcactcggggctgcgtttgctttcttcctgatattttctgttaaaaacaagaatcttacttcctctgttgcctaaaaaa

SEQ ID NO: 148106 - DNA, 318 bp, Homo sapiens; identical to SEQ ID NO: 10372

SEQ ID NO: 148107 - DNA, 1609 bp, Homo sapiens
  misc_feature (1)...(1609): n = a,t,c or g
agcggccgcgtgcaggggctgctggaggaggaggcggcggctcgaggccgtctggagcgcacccgtctcggagcgcttgcgctgccccgcggggacaaggcccggacgggcgccgccggccgccagcgcccgcccgtctcgcagcaagagaggtggagaagagcgagtacttgagaaagaagaggaagaagatgatcgatgaagatgaagatgaagaagatcgatgtgtcagaggcgctctgaagtggccccgagcagtgaccgtcctggcaggtgcccagcaccaccaagcttaacggcgagcggggacctcagagtgccaaggagagggtcaaggagtggaccccctgcggaccgcaccagggccaggatgaagggcgggggccagccccgggcagcggcacccgccaggctgttctccatggcagccatgaacaaggaagggggaacaggtgtttttttccttcccagcttctgttgccaccgggccagactccccgtcccccgtgcctttgcccccaggcaaaccagccctacctggggccgacgggaccccctttggctgtcctcccgggcgcaaagagaagccatttgatccccgttcgagttggaacgtgatgggatttcgttcgaatattttacttgaggcttgatttccggagcaggcgacagcttttccaagagcaggaaattgatggcaaatctttgctgctcatgcagcgcacagatgtgcttcaccggcctgtccatccgcctcgggccagccctgaaaatctacgagcaccacatcaaggtgcttcagcaaggccactttgagggatgatggaccccgatggcttcttaggctgagcgcccagcctcacccctgccccaagcccattccggcccccatctcacccaagatcccccagagtccagggagctggacgggggacaccctcagccctcattaacagattccaagggagaggggcacccttttgttccttatcttttgccctttgtgttttgttttcacacacatctgctcctcagcacgtcggtgtggggaggggattgctccttaaacccccaggtgggctgacccctccccacccagtccaggacattttaggaaaaaaaaaatgaaatgtggggggcttctcatctccccaagatcctcttccgttcagccagatgtttcctgtataaatgtttggatctgcctgtttattttggtgggtggtcttttcctcccccccctaccacccatgccccccttttcagtttgcccctggcctccaagcccctaggggactagctgggttggggttcctcgggccttttctctcctccctcttttctttctgttgattgtcgctccagctggctgtattgctttttaatattgcaccgaaggttttttaaataaaattttaggaaaagaaagacaaatttaaaactaaaaaaaaacttaaataaacaatnnnnnnnnnnntaaaaaaaaagacaaannnnnnnnnnnnnnnnctttttaaaaaatcctggggggggcccaaccttcccggggggggaaaaaaaaannnnnnnnnnnnnagggggggggtattaaaagggcggggggggtttt

SEQ ID NO: 148108 - DNA, 427 bp, Homo sapiens
atctgtaatcagttaacaaatctggttgtcctatttaaggtaatccttttgccgggtgcagtggctcatgcctataatcccagcactttgggaggcccaggcaggaggattacttaggccaggagtttgtgaccagcctgggcaatatagcaagacttcatctctaataaataaattaaaaaatcctccctccttatgatgcaggccaaattttatttaagaggtagtgtttcagtaaaaaaaatgtcaaaggaggagtgaggtatgcccatttttagagtcatcaatttatagagctttggtgttctctagatctttgatgtgacttagggccgttgtttcttaagaataaggtccaaaggccataggtctgaattcacctgtggatatctatttaaatatgggagaggcctggaccccgaccctg

SEQ ID NO: 148109 - DNA, 2402 bp, Homo sapiens
  misc_feature (1)...(2402): n = a,t,c or g
cgcgccgannatccgggtcgacgatttcgtggctgcacattcccgttgttgcgttgcgtttccttcctctttcactccgcgctcacggcggcggccaaagcggcggcgacggcgacgcgagaacgacccggcggccagttctcttcctcctgcgcacctgccctgctcggtcagtcagtcggcggccggcgcccggcttgtgctcagacctcgcgcttgcggcgcccaggcccagcggccgtagctagcgtctggcctgagaacctcggcgctccggcggcgcgggcacccacgagcggagcttcgcagcggcccccagaggaggcaggcgagtgagcgagtccgaggggggtggccggggcaaggtggtggcgccgcgaagatggtcgccaagcaaaagatcccgtatggcccaacgagaagcacagcaaagaacatcaccccagcgcggcaacggtcggccaaagacctcggagaaatgccccccggaagagaaggcggtctgtaggacccctggttaatgggctctccttcatttttgttgtctggggttttacagcaattttcccagattattcaaagtatcaggatggggcatgttaagtgacttgacctttaagatgtttacatttcttcctgtgaatttttaactttggaactcattccttgatgttttgataccctgggtttgaaaacaatttcagtaaaagcatcctggcctcaagaatgacttctcctatcatggcttcatgtgtccattcccaaggttttctttcatgagtncaattccaagtttcctagcccataccacagtgccttgcaacaaaacaccacatggattaaaggcaataaaatttgattgttaagatacagtagtgggaccctacttattcagtcaattaagagtaagtttttttatgtgggtattaaaacacgatgaacaattagtctaactctgcatagacagggtctagattttgttaacccaaatgtataactgcagttagcttaaattacaatttgaagtcttgtggtttttaatataagctaaggcactttattactcttttgaactgaaagcacactcccttataggttcatgtaactggtcctggtaataaaggtgcttattaaatgggaacaactacacagccctagtttttgccacaacctttaggcatcttaaaaagttttaaaaggcttctaaattgtcctaatattaaaggggaggtgcttataggnccacaacatctatttttacccatattgtttccattacactaccttgggattttggcatgagtgagtataggtaacccaaggatgccattaaaaaaaaaacttggtccgttttctggactttaatcagttactgtggggtttccacttaaaggctaccgtggtggagtgaagtcagtcagggaaggtttgtttatgttacatttatttcaccagaactattttaatatatccaagggggtttactatgccaaacaaaattctagggaaaaatactgctaaaaatgggtgcctcatcagaacatgctgttgagtcccaatgtgccataaggcattttagcatgttaaatagcacttttaatagccaaaaaagggcacatcaactgcggagttatccttaggtttgccaatgctttttctagattaatgatttttcaatcattagggtactagacacatcagcctaaagtggcatctggaattgaatggatttactgataatgatcagtctttagtcttccctttgttatatgactttataggttatgattgatcaaatttacgttttactaatggtaagggtgagggtcatagggcaggttttgggttttctagtactgttgaaaactgcaagtattggctatttgtatacttagccataacttggtgaaaaaaaaccctgagcacagtgtctatgtattaatgcgttggaaagaaagctgcttgtgtttgctttgttaattgcctcaggatatttcttttaaaataagctgttttaagaggaacagaagggaaatcctgctacctagtctatacacagcatgaacctcacagggggcttcctgatacccctcaaacatggagaacagtaagggagcagagtggttaaaggactttccaggaacttaactattcctggaataaggaatgaatccaactgacctttgggcccagcaggttttttaacctaaaattggttaccttgccctttcctcaccccagttaatcagtctctgtacttgtttccccttttttgaaaccaagtgtcttgggttaacttaattctgttttatggttgtgctaaattcatagcaggtgccttattctttgcttttagtcaaaccattccatatcagaattttccttggtttactatagatatt

SEQ ID NO: 148110 - DNA, 840 bp, Homo sapiens
agcggagccctttattggaatggcttccaaccctgtgtttttataatggtaaaggactagaacagatagaaagagataacagctttcataatgtggcagaagctacgtttacactcaagctgattcaatcactgattgcaagtggaatagcaggctctatgattggtgtgataacattatacaaatcccagatgtacaagctttgtcatttactcagtgctgtggactttcaccatcctgatattaaaactgtgcaggtgtccacagtagatgctttcaaggaagctgaaaaggagatcattattctgtcctgtgtaaggacaagacaagtaggattcattgattcagaaaaaagaatgaatgttgcattgactagaggaaagaggcatttgttgattgtgggaaatttagcctgtttgaggaaaaatcaactttggggacgagtgatccaacactgcgaaggaagggaagatggattgcaacatgcaaaccagtatgaaccacagctgaaccatctccttaaagattattttgaaaaacaagtggaagaaaaacagaagaaaaagagtgaaaaagagaaatctaaagataaatctcattcataaaaagacatggtgtaaatattttgtatttatgtaaattcagactcattttacatgatatattttttatatttttattactctaaaccctcttattaaaaatatgatatttaaataacatagtaaacacatgtaaaaattttgttcttcaaaaaagtgtacacaaggtagtataaaatcctactcatcaaaataagcttttttctacacaaaaacaaacaaaacacaacaacaaaac

SEQ ID NO: 148111 - DNA, 1468 bp, Homo sapiens
tttttttttttcaaaacaagtcgttatttattataaaatcagtggcttcctgaattaagaagactttttttttttaaaaccaaaataggctcaaagaagctggctggaggttgaaattggctgacgaaacatcttcttcctcccaccagcaagtttgtgggacacatcacgtttctgccaagtgctacagctggaagcccatattcatagaagcaccctgacagcccttctccagcaacttccagaaaacagaacctgagcactcaaagctgcatcagccccatgtggccttgctcccagagaagcatctgccagtttgggcatggaggaacagaaagtgggcagggaattctccttgggctccttaggaaggcaattgggagcccagggaagcgttcggccccagtgcagcctaattgggagggagggaatgggtaagaggctgcttgggcttcttcttcctcaccctcatgtaaggtgactgcccctctggctccttcagagctcttcccttccaagttcctactgagaaataagaaggcacaaaggaaaatcagccacctcctggaggtcactgtgggccacctgctttgctaagagccaagcacagacccctgcattctccctgcaggagagcccacccggctcagaagaaagcaattccgcctgtggggaggagaggaagggaggggaggggaggacacatggtgaggtggaagcagcgagcagagcttctccatccctcctctccttccctgccagaaatgcaattaagcaagtgggcccagactcagccgcaccacgacaggcgcttcctgctgggggaagtcaaaagggctgtagccagtgggaaagggaggtcatcgggccccagatctaattaaccaacctgccttgcttttgacgttgctgcatttcctctattaacattaatgattgttgtgtctgaatgtccaagcatggccagaagcttccctccccaccacccagtaggtagcacagcctgtccctgggaccaatatccagtctccgtggcaaccgcctcctgaagatgctttaaagagatctgaccctgtcagagttgttgggagcttcagaggagggaaaatggagtgtggcggattcatcattaaatattgaagcatcaaagtcctctgagacaaaagaaatattttgtcatgcaccaggaaggtggaggcaggcttaagggctggccttgggtggtttggttctaccacagggttttcttcatcccttttggggaggaagtggaaggggcagctctgagcttcttgtttgagctgcagagtggtagatgcaggaagctggcatgcatttctaggtgccatgggtcttcactgctgaagcagtgacagagagaaagggaattgcccatggagtgagggaggggtgagcagaggaggactgcagaagtgacactgggaaagctcagcaggtgacaggaaca

SEQ ID NO: 148112 - DNA, 307 bp, Homo sapiens
  misc_feature (1)...(307): n = a,t,c or g
agcagacttgtcagcagaagccttatagaccaggagagaatgggatgatatattcaaagtgctaaaagnnnnnnnnnnggccagccaaagatactatatccatccaagttatcactcataaatgagannnnnnnnnnnnnnnnnnnnnnnnnnnnnnnnnnnnggaattcaccaccagattggtcctataagaaatgcttaagggaatcctacacatggaagcacaaggacagtatttgccatcatgaaaacataccaaagtataaaacctactggtagagcaagcacacaaataagcaaaaaaaag

SEQ ID NO: 148113 - DNA, 383 bp, Homo sapiens
atagctggagaggtcaacacccctcgatcagtaactgacagatccagctagcagaaattcaggagggtatagttcaactgaatagtgccatccatcgactggatgtactaacattaatagaatacttcctctaacaacagcagaatatacattcttctcccacttgtatagaacattcaccaaatagcccacattctgggccatatgacacaccttaacaaaggtaaaagaatagaaatcatacaaagcatgctctcagaccataatggaattcaaccagaaatcagtaacagaaagatagctggaaaatccccaaatacttagagatctaaaaacacacttatccataaacacaggactcaaaaaagtagtctcaagagaaa

SEQ ID NO: 148114 - DNA, 834 bp, Homo sapiens
tatcgtcaggcctcgcaggtacacccccctttccttctgaaggggctgtgtgcaggagccagccgggctgaggctctggggagcccgcctctccctgtgggcccagcgtgctggtatctcccttgtggtccctgagatcagcgttgccctcctggctctctggggccctctgcagagccagggtcatgaaacctttcctgtccagggaggcccatgtgcagcccagctgggacttcctgccctgcccctgtgctgattctgtaactcctgtgctgagagccagaggcacagcttgtctcccatctcccaccttccctgcatggtctgtgccccgtttccagccgggtgcagccccctcctctgcagatctagtgcatttccatgctgcctctgggccttcagcttctctgtcttcctccctcagcaccaaagccccgtctcttccattaggagcttgtcttcctgctgggggtgttacctgactctttggcccaccctcgggcctctgtggaggcctccttgaggcctgactggggggggtcttgtgtgggctgcaggtgtgcactgggcctgcttgtggccaggccaggcctctgggggcagcatcaggcacgtctgtgtggctgtgggggtgcagggagctccagcccagaaggaaggaggggcggggctggggaaggggctcggcagctttgcctgtggtcgtccgcacctgccaccggcctactttgcctgtggtcgtccgcacctgccaccggcctactttgtcctagacctcccttttgcaaaagtgctcagaaatataaatatttaatttaaaaatgaaaaaaaaaa

SEQ ID NO: 148115 - DNA, 340 bp, Homo sapiens
  misc_feature (1)...(340): n = a,t,c or g
tttttgtctcccaaataaactttattttgaaaagaatatcacaagatagtcatgtaaatttaaatatggcacactgagcagtattgacgcaaattatatagtcatgtaaccatgtttcggtcaatgtacaatatnnnnnnnnnnnnnnnnnnnnnnnnnnnnnnnnnnnnnnnnnnnnnnnnnnnnnngctagggatgtctnnnnnnnnnnnnnnnnnnnnnnnnnnnnnnnnnnnnnnncttggtttttgaccaaaaagtttnnnnnnnnnnnnnnnnnnnnnnnnnnnnnnnnnnnnnnnnnnnnnnnnnnnnnatatttgtacagctatgcaatgtg

SEQ ID NO: 148116 - DNA, 951 bp, Homo sapiens
ttttttttttttttttatctcccaaataaactttattttgaaaagaatatcacaatatagtcatgtaaatttaaatatggcacactgagcagtattgacgcaaattatatagtcatgtaaccatgtttcggtcaatgtacaatatatatatgatgggggccccacagattataatcggagttgaaaaattcctgtcacctgctagggatgtcttgatcctgaccctgcataggcctaggctagtgtgtttgtcttggtttttgaccaaaaagtttaaaaattcaaaatttaaactagataaaaagcttatataataaggatataaggaaaatatttttgtacagctatgcaatgtgtgttttaagctacgttattactagaaggagtcccaaaaattgtttttaaataagtttctaaactagaaaatttacagtaagctaaggttagttttttattatttctataaaaattatagaattttttttttttgagacagagtcttgctcctctgtcacccagactagagtgcagtggttcgatcttggctcaactgcaacctccacctcctggattcaagcaattctcctgcctcagcctctcaatcagctggcactacacgcatgtgccaccacacctggctaattatcgtatttttagtagagatggggtttagccatgttggcccggctggtcccaaactcatgacctcgagtgatccacccaccttggcctcccataatgctgggattacaggcgggagccactgcacccggccaacagtcatcttaataggagctccgagctggattcctgtcctgataggatcacagcccctcaggacacagaacgggcctacaaccccacatacctggaggccatgaaaggggtcatgtccagctccagggggaaggacacaaacgtaatgttcttccgccgcagcttggctgagtg

SEQ ID NO: 148117 - DNA, 327 bp, Homo sapiens
  misc_feature (1)...(327): n = a,t,c or g
tgaaagtccttgaaagacatgatgtgctaaaactcacacaagtaaaatatgtaatctcaatatgcatacactaaagaaatggaatcaatagttaataatcttccaaagaagaaaacaccaggcctacacagtttcactggtgaattctaccaaacatttaagaatgaaatgatattaacatcctataatttctcccagaaatttgaagcagaggaaatactnnnnnnnnnnnnnnnnnnnnnnnntctcttaactaccaaaactagataaagacattataagaaaagaaaattgaagacaannnnnnnnnnnnnnnnnnnnnnnttg

SEQ ID NO: 148118 - DNA, 853 bp, Homo sapiens
  misc_feature (1)...(853): n = a,t,c or g
cgacctcatgtgcaagaaaatgaagcacctgtggctcttcctcctgctggtggcggctcccagatgtgtcctgtcccagctgnnnnnnnnnnnnnnnnnnnnnnnnnnnnnnnnnnnnnnnnnnnnnnnnnnnnnnnnnnnnnnnnnnnnnnnngactccgtccgtcataatagttactactggggctgggtccgccagccctcagggaaagaactagagtggattggaagtctctattttactgggaccacccactacagcccgtccctcaagagccgagtcaccatctcggcagacacgtccgagaaccagttctccctgacgctgacctctgtgaccgccgcagacacggctgtctattactgtgcgagaccccgtaatatagtgggacnnnnnnnnnnnnnnnnnnnnnnnnnnnnnnnnnnnnnnnnnnnnnnctccaccaagggcccatcgggcttccccctggcaccctcctccaagagcacctctgggggcacagcggccctgggctgcctggtcaaggactacttccccgaaccggtgacggtgttcgtggaactcaggcgccctgaccagcggcgtgcacaccttcccggctgtctacagtcctcaggactttactccctcagcagcgtggggaccgtgcccctccagcagctttgggcaccccagaacctacatcttgcaacgggaaatcacaaagcccagcaacaaccaaggtggacaaaggagagttgagccccaaaatcttggtgacaaaaactcaacacatgctccacccgggccccagcaccttgaaactccttgggggggacccgtcagtcttttctttttcccccccaaaaccca

SEQ ID NO: 148119 - DNA, 2448 bp, Homo sapiens
cacagctcctcaccatggactggacctggaacatccttttcttggtggcagcagcaacaggtgcccactcccaggttcagctggtgcagtctggggctgaggtgaagaagcctggggcctcggtgaaggtctcctgcaaggcctctggttacacctttaccaacaatggtctcgcctgggtgcgacaggcccctggacaagggcttgagtggatgggatggaccatcgcttccaacggtaagacaaattatgcacagaagttccagggcagagtcaccatgaccacagatacatccacgaacacagcctacatggagctgaggagcctgagatctgacgacacggccgtgtattactgtgcaagagagaaggataactacgcgacgggggcctggtttgcttactggggccaagggaccctggtcaccgtctcctcaggtgagtcctaagcttggtacccgggaattcagatctgcagcatgctcgagctctagatatcagctttctggggcaggccgggcctgactttggctgggggcagggagggggctaaggtgacgcaggtggcgccagccaggtgcacacccaatgcccatgagcccagacactggaccctgcatggaccatcgcggatagacaagaaccgaggggcctctgcgccctgggcccagctctgtcccacaccgcggtcacatggcaccacctctcttgcagcttccaccaagggcccatccgtcttccccctggcgccctgctccaggagcacctccgagagcacagccgccctgggctgcctggtcaaggactacttccccgaaccggtgacggtgtcgtggaactcaggcgccctgaccagcggcgtgcacaccttcccggctgtcctacagtcctcaggactctactccctcagcagcgtggtgaccgtgccctccagcagcttgggcacgaagacctacacctgcaacgtagatcacaagcccagcaacaccaaggtggacaagagagttggtgagaggccagcacagggagggagggtgtctgctggaagccaggctcagccctcctgcctggacgcaccccggctgtgcagccccagcccagggcagcaaggcatgccccatctgtctcctcacccggaggcctctgaccaccccactcatgctcagggagagggtcttctggatttttccaccaggctcccggcaggcacaggctggatgcccctaccccaggccctgcacacaaaggggcaggtgctgggctcagacctgccaagagccatatccgggaggaccctgcccctgacctaagcccaccccaaaggccaaactctccactccctcagctcggacaccttctctcctcccagattccagtaactcccaatcttctctctgcagagcccaaatcttgtgacaaaactcacacatgcccaccgtgcccaggtaagccagcccaggcctcgccctccagctcaaggcgggacaggtgccctagagtagcctgcatccagggacaggccccagccgggtgctgacacgtccacctccatctcttcctcagcacctgaactcctggggggaccgtcagtcttcctcttccccccaaaacccaaggacaccctcatgatctcccggacccctgaggtcacatgcgtggtggtggacgtgagccacgaagaccctgaggtcaagttcaactggtacgtggacggcgtggaggtgcataatgccaagacaaagccgcgggaggagcagtacaacagcacgtaccgggtggtcagcgtcctcaccgtcctgcaccaggactggctgaatggcaaggagtacaagtgcaaggtctccaacaaagccctcccagcccccatcgagaaaaccatctccaaagccaaaggtgggacccgtggggtgcgagggccacatggacagaggccggctcggcccaccctctgccctgagagtgaccgctgtaccaacctctgtccctacagggcagccccgagagccacaggtgtacaccctgcccccatcccaggaggagatgaccaagaaccaggtcagcctgacctgcctggtcaaaggcttctaccccagcgacatcgccgtggagtgggagagcaatgggcagccggagaacaactacaagaccacgcctcccgtgctggactccgacggctccttcttcctctacagcaggctaaccgtggacaagagcaggtggcaggaggggaatgtcttctcatgctccgtgatgcatgaggctctgcacaaccactacacacagaagagcctctccctgtctctgggtaaatgagtgccagggccggcaagcccccgctccccgggctctcggggtcgcgcgaggatgcttggcacgtaccccgtgtacatacttcccgggcgcccagcatggaaataaagcacccagcgctgccctgggcccctgcga

SEQ ID NO: 148120 - DNA, 1677 bp, Homo sapiens
gccgaggtgcagctggtggagtctggcggaggcttggtccagcctggggggtccctgagactctcctgtgcagcctctggattcagtttcagtaaagcctacatgaactgggtccgccaggctccagggaaggggctggagtgggttggccgcattaaaactaagaaagatgctgggacaacagactacgctgcacccgtgaaaggcagattcaccatctccagagacaattccaagaacaccctgtatctgcaattgaacagcctgagagctgaggacacggctgtctattactgtgcgaaagatgagtttagttctacccggaagaacttcttgactggtcaatcaaagacctttgcggcctactacggtatggacgtctggggccagggaaccctggtcactgtctcctcagcctccaccaagggcccatcggtcttccccctggcaccctcctccaagagcacctctgggggcacagcggccctgggctgcctggtcaaggactacttccccgaaccggtgacggtgtcgtggaactcaggcgccctgaccagcggcgtgcacaccttcccggctgtcctacagtactcaggactctactccctcagcagcgtggtgaccgtgccctccagcagcttgggcacccaagacctacacctgcaacgtgaatcacaagcccagcaacaccaaggtggacaagacagttgagctcaaaaccccacttggtgacacaactcacacatgcccaccgtgcccaacaccttgacttcctggggggaccgtcagtcttcctcttccccccaaaacccaaggacaccctcatgatctcccggacccctaggggtcacatgcgtggtggtggacgtggacccacggaagacccctgagggtcaagttccaacttggtacgtggaacggccttggaggtacataagtgccaagacaaaagccgcgggaaggagcagtacaacagctactgaccgtgtggtcaagcgtcctaaccgtcgtggcaccaggactgggctgaatggcaagggagtacaaagtgcagggtctcccacaaaagccctccccaagcccccatcgaagaaacccatctcccaaagccaaagggcagcccccagaacccacaggtgtacaccctgcccccatcccgggatgagctgaccaagaacctaggtcagcctgacctgcctggtcaaaggcttctatccccagcgacatcgccgttgaattggagagcaattggccagccgggaaacaacttcaaagaccacgcctcccgtgctggactccgacggctccttcttcctctacagcaagctcaccgtggaccaagagcaggtggcagcaaggggaacgtctttttcatgctccgtgatgcatgagcgctctgcacaacccctacacgcagaagagcctctccctgtccccgggtaaaatgattccgacggccgacaagcccccgctccccgggtctctcgccggtcgcacgaaagatgcttggcacggtacccccgtttacatacttcccagagcacccaagcatggaaataaagcacccaccccttggccctgggcaaaaaaaaaaaaaaaaaaaaaaaaaaaaaaaaagggcggccgctctagagtatccctcgaggggcccaagcttacgcgtacccagctttcttg

SEQ ID NO: 148121 - DNA, 474 bp, Homo sapiens
acgagggtcaatgagaatcagattgagtccaaggcagcctatgcccttttctacaaacgccaggacgtggcgcgacgcctgctgtccccggccggctcattggcgccccagcctcccctgcctgcagctccccacccagctctgagttcatggatgttaattgagagccctgggtcctgccacagaaaaaaaaaaaaaaagccctctctgcaatctcgcttctcgtgttcgccccgcttctcgtgtctcctcctagcagtgcgcgccccgcctgtgtttgcccttccagcagtgaccctcccttctagtctttatttatggtcgtgcccttccctctcctcagcccagagtgttctgcgtgggtggtgatgggggttcacctgaacacagagtgtattttcttattgaggccctgtaccttctgctggtgtgtgtgtatttttaaagcaccagtttgctcccaaaaaaaaaaaa

SEQ ID NO: 148122 - DNA, 773 bp, Homo sapiens
  misc_feature (1)...(773): n = a,t,c or g
gagattctcatcatccacctgaaacgcttttcctacaccaagttctcccgagagaagctggacaccctcgtggagtttcctatccggtcaggggccagggagaggatggctgggggaaggcagggaaaggagggggtgtaccagtattaaccctctccccacccacagggacctggacttctctgagtttgtcatccagccacagaatgagtcgaatccggagctgtacaaatatgacctcatcgcggtttccaaccattatgggggcatgcgtgatggacactgtatgtgccaggctgtgggtggggcctgccctgggggttctgggcaggggggcgatcaggaccttcccagtgagtgactagggatgtgagccagtggtgaaggttnatccgtggtgggaaggaagtgaacaagaagtgaaatctggacactttctgaagaggccaggaagggtaggcgaggataactctccttccctttcagacacaacatttgcctgcaacaaggacagcggccagtggcactactttgatgacaacagcgtctcccctgtcaatgagaatcagatcgagtccaaggcagcctatgtcctcttctaccaacgccaggacgtggcgcgacgcctgctgtccccggccggctcatctggcgccccagcctcccctgcctgcagctccccacccagctctgagttcatggatgttaattgagagccctgggtcctgccagcagaaaaaaaaaaaaaaaagccctctctgcaatctcgaaaa

SEQ ID NO: 148123 - DNA, 3262 bp, Homo sapiens
gaattccgcttctacagctgctgctgcggcggctatggcggcggcacgggcggtggactgaggatagagagccacagcacgaggagctgccaggcctggacagccagtggcgccagatagaaaacggcgagagtgggcgagaacgtccactgcgggccggcgaaagctggttccttgtggagaagcactggtataagcagtgggaggcatacgtgcagggaggggaccaggactccagcaccttccctggctgcatcaacaatgccacactctttcaagatgagataaactggcgcctcaaggagggactggtggaaggcgaggattatgtgctgctcccagcacgtgcttggcattacctggtcagctggtatggtctagagcatggccagccacccattgaacgcaaggtcatagagctgcccaacatccagaaggtcgaagtgtacccagtagaactgctgcttgtccggcacaatgatttgggcaaatctcacactgttcagttcagccataccgattctattggcctagtattgcgcacagctcgggagcggtttctggtggagccccaggaagacactcggctttgggccaagaactcagaaggctctttggataggttgtatgacacacacatcacggttctcgatgcggcccttgagactgggcagttgatcatcatggagacccgcaagaaagatggcacttggcccagcgcacagctgcatgtcatgaacaacaacatgtcggaagaggatgaggacttcaagggtcagccaggcatctgtggcctcaccaatctgggcaacacgtgcttcatgaactcggccctgcagtgcctcagcaatgtgccacagctcaccgagtacttcctcaacaactgctacctggaggagctcaacttccgcaacccactgggcatgaagggtgagatcgcagaggcctatgcagacctggtgaagcaggcgtggtctggccaccaccgctccattgtgccacatgtgttcaagaacaaggttggccattttgcatcccaatttctgggctaccagcagcatgactctcaggagctgctgtcattcctcctggacgggctgcatgaggaccttaatcgggtgaagaagaaggagtatgtggagctgtgcgatgctgctgggcgaccggatcaggaggtggcacaggaggcatggcaaaaccacaaacggcggaacgattctgtgatcgtggacactttccacggcctcttcaagtccacgctggtgtgccccgattgtggcaatgtatctgtgaccttcgaccccttctgctacctcagtgttccactgcctatcagccacaagagggtcttggaggtcttctttatccccatggatccgcgccgcaagccagagcagcaccggctcgtggtccccaagaaaggcaagatctcggatctatgtgtggctctgtccaaacacacgggcatctcgccagagaggatgatggtggctgatgtcttcagtcaccgcttctataagctctatcagctagaggagcctctgagcagcatcttggaccgtgatgatatcttcgtctatgaggtgtcaggtcgcattgaggccattgagggctcaagagaggacatcgtggttcctgtctacctgcgggagcgcacccctgcccgtgactacaacaactcctactacggcctgatgctttttggacaccccctcctggtatcagtgccccgggaccgcttcacctgggagggcctgtataacgtcctgatgtaccggctctcacgctacgtgaccaaacccaactcagatgatgaggacgatggggatgagaaagaagatgacgaggaggataaagatgacgtccctgggccctcaactgggggcagcctccgagaccctgagccagagcaggctgggcccagctctggagtcacgaacaggtgcccgttcctcctggacaattgccttggcacatctcagtggcccccaaggcgacgacgcaagcagctggttcaactgcaagacggtgaactccaatgggcacaaccgactgcaccactccccttgcacgaagtccaatgccaagccggtacattgctattcgacttggaagccaagagatgaagaagccgttactatgacgagtaagagggtgaagggctacgtgaaggcaatgccttccgtcgggggtacgtatgaaggaaggctcccgtgcggctgcaggagtgcattgagctcttcaccactgtggagccccccccctttggggggaaaagaaagggaaaaaccctgggtactgccccttcctgcaagcagcaccagctggcaacccaagaagcttggacctgtggatgcctgccggagattctcatcatccacctgaaaacgttttttccttacacccaagttctccccgaaaagaagctggaacacccctcgtggaagtttccctatcccgggaccctggacttctcctgaagtttgtcatccaggcccaccagaatgaagtcgaaatccgggagctgtacaaaatatgacctcatccgcggtttcccaaccattaatgggggcatgcgtgatgggacacttacacaacatttggcctgcaacaaggacagcggccagtggcacttacttttgattgacaacagcgtgttccccttgttcaattgaggaattcagattcgagttccaagggcagcctatgtccttcttctaccaacgccaggaacgttggcgcgacgcctgctgtccccgtgccgtgctcatctggcgccctcagtcctcccctgcctgcacgctccctcacctcagctcgtgagttcatgtgatgttatattgagagccctgggtcctgccccagaaaaaaaaaaaaaaaaagccctctctgcaatctcgcttctcgtgtccgccccgcttctcttattcgtgttaggtgcccccgccaggcattgcaggcttagtcgtggctactgttctcctgtgccgctgaatcgctctctcccgggaaagaacaggtcgtgtctcctcctagcagtgcgcgccccgccttgtgtttgcccttccagcagtgaccctcccttctagtctttaatttatggtcgtgcccttccctctcctcagcccagagtgttctgcgtgggtggtgatgggggttcacctgaacacagagtgtattttcttattgaggccctgtaccttctgctgtgtgtgtgtatatataaagcaccagtctgctccccaaaaaaaaaacggaattc

SEQ ID NO: 148124 - DNA, 1550 bp, Homo sapiens
ctgggggctggtcacgtaggtaccttctacctaccatgtaccaaaattctagactcccaggaagaaagcaggttttcagcacaaaccacaggttagctaccatgaacgactcttttcagtgagtggagccctcctgttaaggtttaaatatgtcccccaaagttcaagtgttggaaatttaattgacattgtaaaagtgttatgagacctttaaaaagtaattaggtaaggagggctttgccctcattaaatgaaattagtgctgcctatcttgggagtgggctcatgatcaaaggctaagtttagaccccatatatctttctcatgctcacttgccatgtggtgccttctgccatggccaagaccctcactagatgctggcaccatgttcttggactgcctagcctccacacctgtcaaccaaataaacttctgttcattataaaatacgttagtttgtgtaattctgttatgacagcagaacagactaagataccttctgatatctaagttcccagatgcaacagctgaggacaaaccttataatcaggcctttcaaaggataagtcaggctggctgtgttactcttttctgcatacttagtgacattcccacaggaataatcatcatagacattttcagattcaagaagacccttctaattcagaaacaccttttttttttttttttaagacagagtcctgctctgttgcccaggctagagtgcggtggcacgatctgggctcactgcaacctctgcctcctgggcccaaatgattctcctgcctcagcctcctgagcagctgggattacaggcacatgccaccatgcctggccaatttttgtattttttatttttttggagatggagtcttgctccatcacccaggttggagtgcagaggcacgatcttggcttactgcaacctctgcctcctgggttcaagcgattattctgcctcagcctcccaagtagctgggattacaggcgtccaccaccatgcccggttaattttttatatttctaccagagatggggtttcaccatgttgtcaaggctggtctcaaactcctgacctcaggtgatccacccatctgggtcggcctcccaagtagctgggattacaggcacgcagccacaatgctcagctaatttttgtgttttttagtagagacagggtttcaccatgttagccaggctggtcacaaactcctgaccttaaggatccatccacctgcctcggcctcccaaagtgctgggattacaggcgtgagccaccatgcctggcctgcccatccattctttacctggcaaccgaattgatattttccaaatacaaatcatatgatttcgtccctttggttaaaacctaccaatcggcttcaaatccaaactcctttgtgtcatgtggcatctcttctgctgccttttcaagctcagcttatgcaattctcctctgttctcactgtgttctgggcactcattagcttttacacagctctaaggcccagtagatgttttgccccatggccttgcatctgctgccttct

SEQ ID NO: 148125 - DNA, 1836 bp, Homo sapiens
cctctgcctcctgggttcaagtgattctcgtacctcagactcccgagtagttgggattacaggtgcccaccaccacacccgactaatttttgtatttttagtagccatgtggttttgccatgttggccaggctggtttcgaactcctgacctcaggtgatccacccacctcagcctcccaaagtgctgggattacaggtgtgagccaccgttcccggcctattgtagattttcttaactacttgctaaggaaatcatatccttttacatgaactacaggtttagaacttggttttaagacaactgctatggccagaaggtaaatgggaattgccttattgaaggtaacattgattgcctaataagaaaatgaattgtttgccacagagttgaatttaatttgagttagatagttcaggatgtaggcacttgccctattaaatgaatcagatttgttctatttatataatattagaattaatatattatcatgtaagtgggaattttattttgttaagtggactctcaaattttagaacttgtgtgaaatatctcccagaaaacccaaaaggtttcaaggtatcacccaaagctagggaatcaaccaacgtactttattaatgcaagaccccaatttaagccccaggcaggaatccaacagtaacatttttcctttaggttaagcagtaatttttttgaattgtcatttttaatgggtctcacacatgcatattgctaatatcattcatgtttgaggttttcaacaaagaaccaatttattaatataatgtacaaaaatagttggttcattttttgaattcagtctttgaaataaaactccttgttttggccgtgtttctgaatgtattgggtgattcacccccaagctaattttttaaagtcatttttgaagttggggaagtctcatgaggaggatgttgaagtatgtatttaatcaagagtcatggatttcaaactaggttttacatattaagcagttaggtgttcctaatttaatgggggtaaatgtgtgtttggataaatatctgaaaattttatccttaagtatatataataatttggccccctaaaatgtcctaaagcctattttaaacaaggtgttaaatgagcccaaaacaattaagtaattagaacagtacatttttatccagagtgtcctgtcatatgcaatgaatgtatgtaatactaaaaaatcatgactacttttatcaaagaaaaaccacacattaatcctattaatcatgaaagcgtagcattgtaaattaaaggttttctttgaggctcttgaaagtgatcccattgctttcctgttttaaaaatattttatgctctttatttccacttctgtgaatgtgatatttctattttgtgattatgttactgaataaacaaacttgctacataaaattcttagcaattaaacccattctgattctgccattttgtctcaaatgtaatatacccttttaatatcatatgtttacatatttatgaatgattaatcatttttgtttgcattaaactttatgaaatgtcagaaatgattttactctaatgaaactcaaattttgcccaaagtagcaatattcttaaagatgttgaattttgactggttgaattttatatagtaacacacaagtcgtgatcatcaatattattgcagaccaggactctgcttatatgccttgctaacaaagatttcttttacagaggggtttttcccctctaaaaatttaaggtagaaattacatttaattaagccagttaaatgccccatggcttcatatagtaatataaaaaaactttttgaagtgag

SEQ ID NO: 148126 - DNA, 1389 bp, Homo sapiens
tttttttttttatttgagacagagtttcactcattgcccaggctggagtgcaatggcgcaactgtggctcactgcaacctccacctactgggttcaagcaattctcctgcctcagcctctggaggagctggcattacaggtgccgccaccatgcccagctaatttttgtatttttagtaaagacagggttccactatgtcggtcaaggctgatctcgaacttctgacctcaggtgatccaaccgcctcggcctcccaaagtgctggggattacaggtgtgaaccaccaatgcccagccagcaaacagttttaatttcactgtaagtcttggtcctcttttgaatgcagtctctctcttttttttttttgggggggggacagtctcgctctgttggccaggctggagtgcagtggcatgatcttgactcactgcaacctctgtctcccgggctcaagcaattctcctccctcagcctcccgagtagctgggattacaggggtgtgccactgcgcctggctaatttttgtatttttagtagagatggggtttcactatgctggccaggctggtcttgaactcctgaccttaaggccaatcccacccgcctcggccttccaaaagggtggggattataggcgtgagccaccgtgcccggccgaatgtagtttctttgaatgaaaatagtcaatgctttgaacatcatttgaaagttaatgaatttaaggagaggacacatgtatgaaggaacagtgattctgggcacacagctagttaaacctgagttatttcaccggaaatttacctttagtgagagcaactagctgtaatgcaaaacaaatgaaatcctccaaatcacctagattccctagaatttatcatctaaccccaattcctgttatttcttcaaatgatatttgtgaacatcaagtcaataaatggcttcatttggagcaaatcacttaaaaaagatgaagcatggaattgctgctaaaaacaaatgtttcccctcatctgtcctttatacacatggggctagtaatgctgcagtgttcaaatattcagtctaaaacaggcgaaacaatcttctaattttgtaacactggtgattccccccctcttctgggcacaatctgaggtatataaagggaactcaattctccagggcaaaaaacacccaattaacacccaccaggattctgttactgagacactggcattacaatgctgttatgacaggcagtacgtgttcctctctcagtgagaaaaagggtattaattcgactgggccataggaatgtggcaaaagtttttatacaactgaaacagtggtttccccgaggcttagaaaagcaaaggaaaaactggaagggtctggctgaccattttgc

SEQ ID NO: 148127 - DNA, 710 bp, Homo sapiens; identical to SEQ ID NO: 114848

SEQ ID NO: 148128 - DNA, 2279 bp, Homo sapiens
ggcacgaggaacgacagagacagcgggagctggaaagacaaaaggaaatagaagaaagggaaaaaaaggcgtaaagacagacatgaagcaagtgggtttgcaaggagaccagatccagattctgatgaagatgaagattatgagcgaagagaggaggaaaagaagtatgggcggagctgccattgccccacccacttctctggtagagaaagacaaagagttaccccgagattttccttatgaagaggactcaagacctcgatcacagtcttccaaaagcagccattcctcccccagtgtaccgaggaacaagacagacccgagatctccaacccggacctaagcaactccttcctcgctaacatggggggcacggtggcgcacaagatcatgcagaaagtacgggcttccgggagggcccagggtcttggggaagcatgagcagggcctgagcactgccttgtcagtggagaagacgatacaagcgtggcggcaagatcatcgtgggcgacgccacagagaaagatgcatccaagaagtcagattcaaatccgcctgactgaaatacttaagtgtcctactaaagtggtcttactaaggaacatggttggtgcgggagaggtggatgaagactgtggaagttgaaacccagggaagaatgtgaaaaaatatggccaaagttggaaaatgtgtgattatttgaaattcctgggtgccccctgatgatggaagccagtacgggatattttttagaaatttgagaagagttgaactcagcaattaaagcggttgttgccttgaaatgggaggtatttttggtgcaccgggtggtaaaaagcaatgtttctacaaatttgggccaaattcagggtcttggatttggccaggaaccaagtttggatttttaaagaacctagagcacgagtcatctccggtgatcccttaaatgaactgcaggctgtagaaaagaaggaaaaaggtccacagcctccatggctgtttgcatacccaagactcttggaaggacttctaagatatatgttgattgatccctttttttattttgtggttttttaatatagtataagaatccttttagaaaaaacagacaatctgtgtgcctctctggttgtttctctttttttattattactcctgagttgatgacattttttgttagatttcatggtaattctcaagtgcttcaatgatgcagcatttcttgcactaaaaaaaaaaaaaaaaaaaactagaaagttttgggacatggggttatattaaattattctttgtttttctttttcttttaataaagcctgcaagttactaaattgtagtttcataaattctgaagaaaagtatcatcttggcagggtgccaaaggtgaaaatgatgctttctctaacagagaaattcttagtgacgccagtcgtagaaaaacggtctttacaaccttgaataagattggaagaattggtggaaccataccatgggccctattgggatgaatcatttgcccgtaggctaaatcagactgtagggtttgtgatggatttatggagtatgtgggtatagaaatcatgaatctagcattttgttttcagagattcaagcatatgtcttaagggtagatcagaaatgacaaatgaattcaaaaccctagcaagggtgcattggtaaatgtgtgcccagttatgttttggaaaatggcagttccttggggtcatgtttctactgggcaaaatttgcaatagtgttctattgtatgtaattttaaaatttataagattatcccacgttggcccaagtaaactggtactgcccaatagaattctggaattgtgagaaaattgtatccattgaaagttccagtaggatgtgtggcttaaaaatttatcaggaccacaaaaaagaaaacaaaaatatttggtactggaggttccattgcccagggcagggagggtatttcccagaaaatactcatgcctgtgttctgttccttgctttcccaaatactgcatgtgactttcctaagcggcagctgaaagactcgagcccgtgctgtctcctttggttattatgacatgaaagtgtatcaagaactcagcatttctttgcatccatggacttggtttggagacataaggaatattctgaccctttttaaaaaaaggattttttcatgtttttatttaacataaataaaagaataacattttatcttttgaggtattattttattgaataacattgcgttttatgataaaaaaaaaaaaaaa

SEQ ID NO: 148129 - DNA, 1787 bp, Homo sapiens; identical to SEQ ID NO: 144180

SEQ ID NO: 148130 - DNA, 1553 bp, Homo sapiens; identical to SEQ ID NO: 144181

SEQ ID NO: 148131 - DNA, 1862 bp, Homo sapiens; identical to SEQ ID NO: 147222

SEQ ID NO: 148132 - DNA, 1295 bp, Homo sapiens; identical to SEQ ID NO: 144182

SEQ ID NO: 148133 - DNA, 1149 bp, Homo sapiens
gcaccgcgcgagcttggctgcttctggggcctgtgtggccctgtgtgtcggaaagatggagcaagaagccgagcccgaggggcggccgcgacccctctgaccgagatcctgctgctttcgcagccaggagcaccgtccctccccggattagtgcgtacgagcgcccagtgccctggcccggagagtggaatgatccccgaggcccagggcgtcgtgcttccgcagtagtcagtccccgtgaaggaaactggggagtcttgagggacccccgactccaagcgcgaaaaccccggatggtgaggagcaggcaaatgtgcaataccaacatgtctgtacctactgatggtgctgtaaccacctcacagattccagcttcggaacaagagaccctggttagaccaaagccattgcttttgaagttattaaagtctgttggtgcacaaaaagacacttatactatgaaagaggttcttttttatcttggccagtatattatgactaaacgattatatgatgagaagcaacaacatattgtaaatgattgtgctaacttatttcccctagttgacctgtctataagagaattatatatttctaactatataaccctaggaatttagacaacctgaaatttattcacatatatcaaagtgagaaaatgcctcaattcacatagatttcttctctttagtataattgacctactttggtagtggaatagtgaatacttactataatttgacttgaatatgtagctcatcctttacaccaactcctaattttaaataatttctactctgtcttaaatgagaagtacttggttttttttttcttaaatatgtatatgacatttaaatgtaacttattattttttttgagaccgagtcttgctctgttacccaggctggagtgcagtgggtgatcttggctcactgcaagctctgccctccccgggttcgcaccattctcctgcctcagcctcccaattagcttggcctacagtcatctgccaccacacctggctaattttttgtacttttagtagagacagggtttcaccgtgttagccaggatggtctcgatctcctgacctcgtgatccgcccacctcggcctcccaaagtgctgggattacaggcatgagccaccg

SEQ ID NO: 148134 - DNA, 9234 bp, Homo sapiens; identical to SEQ ID NO: 145209

SEQ ID NO: 148135 - DNA, 2372 bp, Homo sapiens
gcaccgcgcgagcttggctgcttctggggcctgtgtggccctgtgtgtcggaaagatggagcaagaagccgagcccgaggggcggccgcgacccctctgaccgagatcctgctgctttcgcagccaggagcaccgtccctccccggattagtgcgtacgagcgcccagtgccctggcccggagagtggaatgatccccgaggcccagggcgtcgtgcttccgcagtagtcagtccccgtgaaggaaactggggagtcttgagggacccccgactccaagcgcgaaaaccccggatggtgaggagcaggcaaatgtgcaataccaacatgtctgtacctactgatggtgctgtaaccacctcacagattccagcttcggaacaagagaccctggttagaccaaagccattgcttttgaagttattaaagtctgttggtgcacaaaaagacacttatactatgaaagaggttcttttttatcttggccagtatattatgactaaacgattatatgatgagaagcaacaacatattgtatattgttcaaatgatcttctaggagatttgtttggcgtgccaagcttctctgtgaaagagcacaggaaaatatataccatgatctacaggaacttggtagtagtcaatcagcaggaatcatcggactcaggtacatctgtgagtgagaacaggtgtcaccttgaaggtgggagtgatcaaaaggaccttgtacaagagcttcaggaagagaaaccttcatcttcacatttggtttctagaccatctacctcatctagaaggagagcaattagtgagacagaagaaaattcagatgaattatctggtgaacgacaaagaaaacgccacaaatctgatagtatttccctttcctttgatgaaagcctggctctgtgtgtaataagggagatatgttgtgaaagaagcagtagcagtgaatctacagggacgccatcgaatccggatcttgatgctggtgtaagtgaacattcaggtgattggttggatcaggattcagtttcagatcagtttagtgtagaatttgaagttgaatctctcgactcagaagattatagccttagtgaagaaggacaagaactctcagatgaagatgatgaggtatatcaagttactgtgtatcaggcaggggagagtgatacagattcatttgaagaagatcctgaaatttccttagctgactattggaaatgcacttcatgcaatgaaatgaatcccccccttccatcacattgcaacagatgttgggcccttcgtgagaattggcttcctgaagataaagggaaagataaaggggaaatctctgagaaagccaaactggaaaactcaacacaagctgaagagggctttgatgttcctgattgtaaaaaaactatagtgaatgattccagagagtcatgtgttgaggaaaatgatgataaaattacacaagcttcacaatcacaagaaagtgaagactattctcagccatcaacttctagtagcattatttatagcagccaagaagatgtgaaagagtttgaaagggaagaaacccaagacaaagaagagagtgtggaatctagtttgccccttaatgccattgaaccttgtgtgatttgtcaaggtcgacctaaaaatggttgcattgtccatggcaaaacaggacatcttatggcctgctttacatgtgcaaagaagctaaagaaaaggaataagccctgcccagtatgtagacaaccaattcaaatgattgtgctaacttatttcccctagttgacctgtctataagagaattatatatttctaactatataaccctaggaatttagacaacctgaaatttattcacatatatcaaagtgagaaaatgcctcaattcacatagatttcttctctttagtataattgacctactttggtagtggaatagtgaatacttactataatttgacttgaatatgtagctcatcctttacaccaactcctaattttaaataatttctactctgtcttaaatgagaagtacttggttttttttttcttaaatatgtatatgacatttaaatgtaacttattattttttttgagaccgagtcttgctctgttacccaggctggagtgcagtgggtgatcttggctcactgcaagctctgccctccccgggttcgcaccattctcctgcctcagcctcccaattagcttggcctacagtcatctgccaccacacctggctaattttttgtacttttagtagagacagggtttcaccgtgttagccaggatggtctcgatctcctgacctcgtgatccgcccacctcggcctcccaaagtgctgggattacaggcatgagccaccg

SEQ ID NO: 148136 - DNA, 11557 bp, Homo sapiens
  misc_feature (1)...(11557): n = a,t,c or g
agcggccgccctttttttttttttttttgaatacaatttcagctttattgaccccctaaagtctacaaatccttgggactctactgacccttgctgtaaagtgaagggagtgaaagtatttggaatataggtaggacctctaatataataaagatgtcactttaaaatcaatttattcaacaaacatttattataacattcatatgccaaaaaactatgctatggagatgcaaaaatcaaaagggttccttttcatgcccttaaggagctcacattctagtaaagacttttgaaaactaaaacaatacagtacgatttaagtgacatacaatagaggtaggttgtaattacagttggtgacacggaaagtggaagaagttagatgactctccttgagtggagcaaaggaggtttcacagaggaaatgcttatgtcagcgcctgcaagatgcataggaattttccaagtggggaaggatgactaagcacacttgattgcaaagagttacagcattttaccaagggcgggaggcctgggccaaaatgtgagcttcttgaagaagtgataagtcctgtttcacccagaacattcggtggaggaaacacatcagaagaccttgtacaccaaacagaggagtttggctttctcctgaaagttcctgaagtcactgaaggatattagggagtaacactggtcagagggcttctagaaagcctgctgtggtaacattgagcaacagagaggagaccagctaggtataggaggcaggttagtactgtaggtatttattaataatagcaatgaagatgaaagagtgatgtatcagagaggtggagataaaatcagtaaaacttagacactaaatgataggggaaggtggaggagaggaatgagcctagaaaacttagaatataatggttcctaaaattaacccaaagtaagggacacaggcattagagtaggttttgccagagaatgaatgtttttaagacacacacaggtgtcctctgggacaacccaagaaaagtgcaacaggcagatggattgaggagtctggctaaagataaggatttaggaactgctgaattaaaattacccaagcgtgagaagtggtgttgtgattaagagagaaaaaaaaaatggaggtctgaggaataacatttaaggaataaatgaagaggccaaaaggtggggggtggttcaggagtgagcaaaatgtaagaagtcaagggaataaatctttaaagtaggggttgtcaaaaatgtcaaatacagaaaaaaagtcaagtactagcttgtgaattaaactgtggatttagaattaagattttagactttacaggaagggactgttaaccagagagccaaatggcagattttagttaaggagccagtagaaggtgacaaagtagaggtaagaatattccttcaaaaagattggcagctaaaaaaaaaaagaggccggcgcgtgggtggctcacgcctgtaatcccagcactttgggaggtcgaggtgggtggatcacgaggtcaggagatcgagaccatcctggctaacacggtgaaacactgcctctactaaaaatccaaaaaaaaattagccaggcatggtggcaggctcctgtagtcccagctactcaggaggctgaggcaggaggcaggagaatggcatgaaagcaggaggcagagcttgcagtgagccgagattgcaccactgcactccagcctgggcgacagagtgagacgccgtctgaaaaaaaaaaaaaattttcataggccaccagttgcggtggctcacacctgtaatcccagcatttgggagactgaggcgggcagatcacttgagcccaagagttcaagaccagtctgggccacatagtgagacaccatctctacaaaaaaaatacaaaaaattagccaggtgtcatggtgtgcacctgtaatcctagctactcggaaggctgaggcacgagaatcgcttgaacctgggaagcagaagttgcagtgagccatgatcacaccactgcactccagcctgggggacagagtgagaccctgtctcaaaaaaaaaaaaaaaaaaaaaacaccaccaccaaaaaaccaaaagaatgaacaagaagagtgagactatttaatagcacaacggggtgactataatcaataataacttaagtgtatattttaaaataactaaggtgataaataactaacagtaaaataggattgtttgtaacacaaaggataaatgcttaagatggatgccccattctccatgatgtgattattatgtattgcatgcctgtatcaaaacatctcatgaaccccataaatatatacacctagtatgtaaccacaaacatttagaatttgggaaataaacatcccctctnacccatgcagattgcttctcctttggtggtgataaccacaatctcctgattgacctcaatgccgtcctcatatcgaataacacctggaagcataatcttggccccatagcagatggcatttacctgcagagatggcaccaagtgtaaggggcccagctgctgccctccaccccactcccacaccagagtaaaggaggacaacaagggagtggggcctgacaccaggaaacagggatgacacttatagcccactagctgcaaggggcatgagtggtactcagaagagccacctcactgtgctataggtaccactctccgcacattacacacgactcaaaagtagtaaagaagactttcaggttttcaggttctagagactcacaagtattttcttttttttttttttttttttaattttcaggcagaacctccctctgttgtccagggtggagtgcagtggcacattctcggctcactgcaacctccatctcccaagttcaagtgattctcagtctcccaaggagctgggattacaggcacgtgccaccacgcccagctaatttttgtatttttaatagagacagggtttcaccatattgcccaggctggtctcaaactcctgagctcaagcaatttgcctggcccggcctcccaaagcgctgggattatgggtgtgagccaccgcacgtggtccatattttcatttgaaacataaaaatagccttggcattccttaattactcctctctcctccttatgaggagaaagaacagatttactggagatccaggcaataacaggctcttaaagaacttgagaacaagattactgagccctgttgaaccaatcacacaaaagtcttggtgcagaatttataggtcagtgggtacaagttaaggctacctctccagaggttcaatggtacccaatgcacccatctgcctcataccatctccactcacctagacctcttttgatcacattctcccctccctttacattcacccagaagccaatggtttgataaggagaggacatcacatttatgttgtccactgttttgtgactgagttttttcaactattatggtgccatctttcagtatttattacagcctatacacatacaaaaaatgtgaacatctatacaagatttgaatataaataattaccaactacaaacattttaaatatccagaaatttttatccctcaagttagagaaaaagacaatgttttaatttataaaaggccaactctctgatcatcataaaaacacagctcacagccttgatctcctgggctcaagctggtctcaaactccttcctggactcaagtgatcctcttgcctcagcctgccaaagtgctaggattataggcatcagccactgtgcctggcctaatgtgccttatttttaagtatgcctaccattaaacttttactttaaattaatatacttggtttggacttgaaaaaaataaaataaaacccaaggaaaacaataaaaagagcaagcgtcatctttggagtacgttctttccaaatataaactcctaacccggaacttactgcactgtctttcataaccagccgtttatgagatgtcaacagcttttccaaagggtaaacaactcgccgtaggtaactctcatccttgtggttatcatacagccactgagcatcaagcacatcatgcattgtcaccatgtggtcctgaaaagcagccatgtatgaaaataattcagtttatttgtatctcagcccatcagaccccaaacttcctaaaactgaatgtcacttgtttactagtccaagctcattatgttttcagcctcttcagtcctggctcttccaggcatctttttttttttttttttttttttttgagacggagtctcgctctgtccgcccaggctggactgcggactgcagtggcacaatctcggctcactgcaagctctgcttcccgggttcacgccattctcctgcctcagcctcccgagtagcttgggacttacaggcgcccgccaccacgcccggctaattttttttgtatttttagtagagacggggtttcaccttgttagccaggatggtctcgatctcctgacctcatgatccacccgcttcggcctcccaaagtgctgggattacaggcgtgagccaccgcgccctcttccaggcatctttaaccgttgaagtattagaccccaagcaggcatttttgtaggctgggaggcaaatgaatagaataatactttctacccaatcatctcccttagcccattttaatgtcccaaagtttaattaacagaacagggaagctgccctggactgaactcaacactttggaaagcatctttcccacgacatgaagcaagtggagtgccatcaaaggctggcagatggtaagaaccagctctaaaacttctagccccgtaacacataccttttcactcatgactccagaacgaaccctccgaagctcctgcatctgaccaccaactcccaataacaaaccaaggtgcacacataatgtccgactgtaggtgtcagcctcacaactcacccaaaagattcctaagatacacacacacaaaagaaaagcagcacctactgtaaatacatcactggttgagaaatgcagttatccttcatctgagccaccaagactagaggtgacagacacacttcttaaaatataagcatttgctgtaaagatctgtaattctggccaggcacggtggctcacgcctgtaattccagcactttgggaggcagaggcgggtggatcacgacgtcaggaggtcaagaccatcctggctaacatggtgaaaccccgtctctactaaatgtacaaaaaattagccgggcatgatggcgggcgcctatagtcccagctacttgggaggctgaggcaggaaaatggtgtgaacccgggagacagagtttgcagtgagccgagatcatgccaccgcactccagcctgggcgacagagcgagactccgtctcaaaaaaaaaaaaaaaaaaaaaaagatctgtaattctgatattagcagaatttttaacacttaagttgcaggtatattcagcatggtatgtttcatggatgggaggaaaattggcattgtcttaaatttacttctgacaacagaaacttctaagcagtcaaaattgcagcaaataaaaaacacatgcaaaacatactttggtgaaaacacttacctttgaacaaagcaccgaactacacaaatgcagaatgaaaacatttcaactccagcagaagcagtcatcataaaaggtgtaaaagccatctcactttactaggcactgttcactttttcaacaaaagataacaaaaactatcgcccacagacaatatcccagctgtagggcaggttttagaaagtcttcaacttcaagggcatctacttttaataagagaacagaatcctgaagaatgtgttcatacccactcacaggcctaatgactcacctaatcttctttcaggatcgtattcaatcattttgctctcgtagatggtcctcactcggagctgcctctttactgcagcaataagtgggggtcgctggaataaggcacctgtcagagtttctagggcctaagaacaaacacaaatgaaaacaaacacctcatcagaatgtacatgtgcagtcactggtccaggctggctgcagcagccgactgaaaaggggacaaaaggagtcagtcaggacagctaacccatctccagatgtttaggggctcagagatccaagtcaacaaagggtgtcctccctacaattgcagacttaccctagaaagctgggtccccccttcaatagcattgtgcagccggacaatccccacatactctttgcctgaaaaatgacaaaagagtagtcaggtgtggccactgagttttctgttttccatatttcttatatgctcagtcactcccattttgcacagcaggaaaagcggcagtttgaccttgtgtttctataaaatttgcattaagagagatttcatggtgatgatgtgggaaagaatgaagacactttctcactgggaattcaatgtactaacagggacagttgggagtactcagtgtagaagctgcgtggaaaaagccttgcaagataagcaggcttttctcagataaaaatgaacgaaggatactttaggcagaagcggtagcacagagtgagaagcctggagtgacaagctgagagctgaacccggacaaatggatccagtcagcttgatgaatacatgcttagtatgtggaattccaaaaagcgcggaccaccaagatctggcaggggacagaacgtacacagaaaccaaaacaatatccttgctttaggatttttttttttcttaatgaagaaatagtttccagcagacaaaacatagaagggaaatacagaaagcttttcactctagccagtccttccctccctctcccacatacctgcactctgttgtgacttcaccaagcgagtggctcgttctatgcacacgattaaacaaccagtcaccttgggatccagagtaccactgtgccctgtcttctccacccgaagtatccgtcgaatccaggctaccacctcatgggaagaggggttagagggcttgtcaagattaatgaaacctgtcctggaatggaaaaaaaaaaaattaatgtatcacccactcttaatgctccagtgaaacaacaaatctgaaaagttaaaaagaaaaataattcactgcgggtacaggttatatattcaagacaaagctattctggcatgccactgccttcctgaatagctgatgtgaaagcattttcaaaagaaagtaagtttgcacagtgcctcctcccaacacttacctgatatagtccccaatctctctcttcagaggattttaaccacatgcaagaggtgtatagtgtgttgtccttacattcagcttatcaaaattctacaaagcaacgacacaacacaaaacaaaataccatgtcgtgagcacatgtaaaaaaagagtcagtaccactatgtggcccacaaactggcataggtctgcaagatggactaagtacaaaaactgagaactgttgacaaactcagcaatttaacattgtggggacatgtgttctacaacagtgttgagtgcactgccaattttttaaaaacttggttctcatttcagataccttaaggaatcctgctttaaactgtatcagtgggcacttcccaaagtcaaggatgccagcagtaagcattctcaatcaattgtttaacacttggaaataacgtaaaagcaggcattcatctgatgcacgattttaaccacatacctttagcaaaaggggccactgagacgtgtccaacttagcaactttggattcaggtttgataagaaattcttcagcgtgttgtatttccttcgacaggacagaaatataacctattaaacttcccacccgattttgaacaattccattactgccatggaaatgtatgccttttaaacagaaaacaaggcttcctatgccttttcactgggacctccaagggaaagagagagaagaaatgaaccaggagtacagaggggaagtgaaatgtcactaagatgggtccaaacatttaaagagaaagggggatggcgggtctgtgggtggcataaggaagacaaattcagagacagcagttggtaaggccagcaccatttagtaagctatgcctgaaggacacttggactgtctggggctgtgtcatttcagtgctttttcgaatctacacaatgactaccaatgctggcccattccttggaaacctttaaaaacacttctttcctttagtttgttatttaagtaaactttctttttagtcaaagtgaagtcaaacacattactactcacggctacatcttcttctggcaatgacttccgctcctttttcttcttatgtttctttggcaaaataattactaaaaaaacaaacacaggatttgggaattttccccaagaataaatgaaacaagggtttaaaataaagaccgaaattagggcaggtaggaaatggattttaggtctacaattacagtcacatgccacataatgttttgcaagtacagactgcgtatgtgatggtggcccccataagattataacagagctgaaaaattcctatctcctagtgatgtcttgatgatcctgaccctgtgtaggtcaaggctactgtgtgtgctgtgtttgtgtcttagttaacaaaaaaaaattttttaagaaaaaaattaaaaaattttaaaatagaaaacttataaataaggagataagcagagaaaatatttacgtacagctaaataatgtgtttgttttaagctaagtattattacaacagtcgaagtaaaaagtttataaagttacagtaagctaaggttgatttattctgaagaaaaatatatttttataaatttagtgtagcctaggtgtacagattataaagtctccagtagtgtaatgtctgaggccttcacattcagtcaccgactcaaccagggcaacttccagctcagcaagctccattcatggtaagtgccctcctcttcgggtgcaccacttataaccttgtgtactatatatatataatatacatacatataatacatacatatataatatacatatatacacacacatatttatatatatataattttttttttttgagacggtcacactctttccccaggctggagtgcagtggcagaaactcggctcactgcaatctccgcctcctgggctcaagcgattctcctgcctcagcctcccaagtagctgggactacaggtgcccgccaccgcgcccggctaaattttttttgtatttttagtagagaacgggaattcgccatgttggccaggctggtcttgaactcctgatctcaggtgatccgcccgcctcggcctccctaagtgttgggactacaggcgtgagccaccatgcctggccccaaccagaacacttctgagcgtggaagaggatgctgttaattactcaagaccaaaaggcataaaaggagacatatgtccacccaagtgataaggcagtttgggaaactacatttcccagtatgccctgccccttgaaagttaaaaatcttaactggcacagagcaccctgggacacctgtggttagcaccatttaagaagtaaaaggtatagggttgggttctgacgtgaaggctttccccttccatgggacacttaaccagacacaggacacaacacctgaggtgaaatttcaatgggtattaagtctggggtagagcttctctctccccaaatctagcttccaaagatgtggagctggtggagctgtccattggtccactgccctgtttctcctgggtgctgcctctgcctcctcatatcaccagcgtccccactgccactagtctgtagggggattccgggctaggtgctcttcccactcgacttcaaccaacttatatagctccatggtggcctgggcatcttccacagaggaatgtccgctcttcccaacctggatatcccggtttagcagcttcttggtgagatgcttcagagacatggtggcattctccgggcagtcagccttccggttgaggggggggatatgggaggtgtcacgggtgagggacttggggtgaaagtactgaagggctttgaagtcgttgtggatggcatgccccaccactatcttccctgtgagtatcttcaagatctctccatccttgaaatgctcactcccacaagttttctttcttctggaatccaccttcctcttccacaggtgatttccatggtataccctgtttggactcatactgccagtggctccttaccttcttattgatctccaccccatgacattaatttgccttcagtcctaaatgacactcatgtttgagatgtccatgtatttagttcagttctggcttgctacatgaagtcctttaactattaccattatgttggccttagacacatggctgggacccgggctccagggaggctaacaaaagcccaaaattacatgcaattagatgtgtatgggtactagaggaagagaatctgtggctttcatcaaattctcagagtctacaaaccgtaaaaaattaagaatcacatataaactaaagttgcagaagcaaccttattcacactagttttggaaccaagtaaaataaaaataacttctcaatatttcaggaaactgttttttttttttgagatggagtcttgctctgttgcccaggctggagtgtactggcgcgatcttggctcactacaacctccgcctcccgggttcaagcgtttctcctgcctcagcctcccaagtagctgggactactggcacctgccaccatgcctggctaagttttgtatttttagtagagacggagtttcaccatatgggccaggctggtcttgaactcctgatcttgtgatctgcccgcttcaggctcccaaagtgctgggattacaggtgtgagccaccacacctggccttcaggtaacttattttttaaaagagatgaggtcttgctatttttcccaggttggctggcctcaaactcctgggctcaagcaatgctctcacctcaaactcctgagtagctgggattacagacacatgtcaccacacctagccatttcaggctcttgaagtaggaggacatgctaccaatgaggacaaccgaagaacacaccacaggctctgaaggccattcccaaatgaggttccaaacaggttttcaacaaaagtgacagtcctgcatagcctcccaaagggaccccctctgaaggggctaggctcatctggacataccttagtctcataaccccagcttggcactggggaagtgctttatgatgaaaaccagacgtagtcccgtgaactagatatttcgttactcctgacttcacctacttactgtccaccaccaccttcacttcttattaacctcgacatatagccctcatcaaagctgggcagatttgctgtctcagacccgtcccatcttctgcctctcctatgcctttgcttggctgcgcccctttgtgcacaagatgtttaactcttctttccgtcttttctaaaatagtcagtcacctcacctctaacgc

SEQ ID NO: 148137 - DNA, 698 bp, Homo sapiens
ggcacgaggtgcaacaattcttttacagatatggaacttatagaagcctatcaaaaaaaaaatctagttcctttctttccatataagcaaggctagttcaaaacacagtggcccaactaaaagaggttcaatataagttattttttggttttttgttttttgagtagcgtctcactctgttgcccaggctgggtacagtgctgtgattatagctcactgcaacctcagtctcctgggctcaagtgacccttttttttcagcctcctgagtagctgggactacaggcatgtgccaacatgcctggctaatttttgatcgttagtggagatgaggtctcgctatgttgcccaggctggaaatgtaaattttcttaatctcccatcttagacttatttggtcggcttggagttaggaaggaatttctcactgtagtgccaaacctgaaatggtaattgtgtttgagcaagttccctgaacataagggggcgaggggaggaagaggaacgatccaggccatttttgttgatacataatagttgcacatattttttcatgtgatgtttcgatatatgcatacaatgtgtaatgatcagatcagggtaattgagatatttgttgcctcaaacattttttctttgttgggaatgtttaaactcttctagctgttttgaaatatacaataaatgattgttaactat

SEQ ID NO: 148138 - DNA, 1614 bp, Homo sapiens
tttttttttaagaaaagttaaatgtaatagacacatttaaatggtttacaaattaggggcagtccattgttttttttcttgagctggagtcttcctctgtcgcctaggctgcagtgcagtggcgtgatctcgtctcactgcaacctccgcctccctggttcaagcaattctcctgcctcagcttcctgaatagctgggattacaggcgcacaccacaatcctggctaatttttctgtatttttcagtagaggcaggtttcaccatgttggccaggctggtcttgaactcctgacctcaagtgatccaccccggccttctacccttccccaaagtggctggggatttaccaggcatggagccattgcaccccagtgggggcaggtccctttccacaggtcttgagctcccagcacagaacacacttgttctattcccgtgaagtatgggctcagctgtaatttccaacggattcatctttcttgccgatgctacctttttagaggattatacagggagtattcaaggtaagctaaagtaaaactatggaaaaacagctcattaatacattctgagtgttcacagaactgtaggcagtgacacatttttgtcattaattcttgacaatcacatacaccgtaaacctacaggaattccaagaactagaggtctgaggactctgaatcttctgcaagttacatatgatttaagagaaaaagaatcaaccctgtataccttagaaatgaggttacagtattgacttcaagaatataaggctcctactgagtctaaaaagacttcgtttcagttcttttggaatgcaaccctgcagtttaagaataatgggagcacaacttccacaggtaacttctacatttattttataccaaaaaagttatgtgcaaccaaataaacattcttacatatttacatttggttttatttaccagttagcaaaacagtgccttaaatctctgataaaagagtatttctatctagattaaagcgcgcgaaacctgcccagtgaactccattttaaatgacttgtttactctggagcttaaacgcactagtaagaaatatttctgatggaacatactacacagatcacatacccaataaatacttaagggccatgcttaatacacgttttataacaaaatatttcaccttttctggggcgaaatttgtagtaaaaaaatgtttaacccaagtagccggggctcccacccttggcccttttttggttgatgggaagggtagttctcacaattagaaaccataagtgctgcctgaggtgtctgaaatgtttcacccatgactgtgtgttagagaaaaagacacgaggacagaaattgcatattaggtcattaggtctttttccccaaataggttaccagaaataacagtgggtctccttgttggcatctaataatgatcttccaagacaagatctcctgtcactcttggtaccaatctaagttgtgaagtaattgctgaagataactctgtacttttgcaaatagtcttttccaaaactaaatgaaaaacaaaagtcaacaaatagtttttatttttatttttttatttgagacagagtttcactcattgcccag

SEQ ID NO: 148139 - DNA, 1050 bp, Homo sapiens; identical to SEQ ID NO: 145880

SEQ ID NO: 148140 - DNA, 792 bp, Homo sapiens; identical to SEQ ID NO: 126056

SEQ ID NO: 148141 - DNA, 963 bp, Homo sapiens; identical to SEQ ID NO: 145881

SEQ ID NO: 148142 - DNA, 2811 bp, Homo sapiens
cagagacggacacaggatgagctctaagtacccgcggtctgtccggcgctgcctgcccctctgggccctaacactggaagcagctctcattctcctcttctatttttttacccactatgacgcttccttagaggatcaaaaggggctcgtggcatcctatcaagttggccaagatctgaccgtgatggcggccattggcttgggcttcctcacctcgagtttccggagacacagctggagcagtgtggccttcaacctcttcatgctggcgcttggtgtgcagtgggcaatcctgctggacggcttcctgagccagttcccttctgggaaggtggtcatcacactgttcagtattcggctggccaccatgagtgctttgtcggtgctgatctcagtggatgctgtcttggggaaggtcaacttggcgcagttggtggtgatggtgctggtggaggtgacagctttaggcaacctgaggatggtcatcagtaatatcttcaacacagactaccacatgaacatgatgcacatctacgtgttcgcagcctattttgggctgtctgtggcctggtgcctgccaaagcctctacccgagggaacggaggataaagatcagacagcaacgatacccagtttgtctgccatgctgggcgccctcttcttgtggatcttctggccaagtttcaactctgctctgctgagaagtccaatcgaaaggaagaatgccgtgttcaacacctactatgctgtagcagtcagcgtggtgacagccatctcagggtcatccttggctcacccccaagggaagatcagcaagacttatgtgcacagtgcggtgttggcaggaggcgtggctgtgggtacctcgtgtcacctgatcccttctccgtggcttgccatggtgctgggtcttgtggctgggctgatctccgtcgggggagccaagtacctgccggggtgttgtaaccgagtgctggggattccccacagctccatcatgggctacaacttcagcttgctgggtctgcttggagagatcatctacattgtgctgctggtgcttgataccgtcggagccggcaatggcatgattggcttccaggtcctcctcagcattggggaactcagcttggccatcgtgatagctctcacgtctggtctcctgacaggtttgctcctaaatcttaaaatatggaaagcacctcatgaggctaaatattttgatgaccaagttttctggaagtttcctcatttggctgttggattttaagcaaaagcatccaagaaaaacaaggcctgttcaaaaacaagacaacttcctctcactgttgcctgcatttgtacgtgagaaacgctcatgacagcaaagtctccaatgttcgcgcaggcactggagtcagagaaaatggagttgaatcctttctctgccactctttgaggagaatctcaccatttattatgcactgtagaatacaacaataaaatacagccatgtaccacataacaacatctggtaaacaacagactgcatatatgatggtggtcatccagtaagctaaggttaatttattattattccttgttttttttttttttttttttttttttttttgggatgtagtcttactctgtcacccaggctagagtgcagtggcaccatcttggctcactgcaacctctacctcctgggttcaagcaattctcctgcctcagcctcccgagtagctgggattacaggcacccaccacatctggctaattttttgtatttttagtaaagatggggtttcaccatgttggccaggctgatctcaaactcctgacctcaagtgatctgcccgcctcggcctcccaaagtgctggaaccacaggcctgagccactgtgcccagccttgtttgcttttttaacagataacagtgtgctcatagaaactgctttgacatgactgcaatcatgtgcttcatagaaacttaattagattataccactagagtcttcagatttttatacttttttttttgaaacggagtctcactctgtcaccaggctggagtgcagtgccgcaatctcggctcactgcaacctccgcctcccaggttcaagcaattctcctgcctcagcctcccgagtagctgggattacaagtgcacactaccacgcccagctaatttttgcatttttactagacagggtttcaccatgttggctaggatagtttcaccaggatctcttggcctcatgatcagcctgcctcggcctcccaaagtgctgggattacaggtgtgagccaccgtgcccagcctatacttccctttttgaataccatttgggcgttttgaagaattaacagctttgtgaacgtggcagtgcttgtgattcaggcttccactgagaccaaggggagaacctggttgcaggacaaacagacggacagcgtgtggcagtgtttaaatgctcttctgaaggctgatacgacagctctctgtgcactgattgcatatgcatcccaagattatattattgttttctactgctatgtgtcacactttgccaaacaggatgtggaaaatgaataagcggttttccttaaggcaccttccttaacaagacaattggtcaaaatgaactccattgcttaagaaacacataaacaccatttagtcactgaacatagctatatgtatggttgttactatgggaaatcttgttttgccaattttctttgaaaattctggcagaccaaggttctttttgtttacataatacttgaaaaataaaaatgaacaagctaacaaactaccaagttttca

SEQ ID NO: 148143 - DNA, 481 bp, Homo sapiens
ttttgggtgtgggggacagggtctcactctgtcatccagtctggagtgccagttcactgtagtctcaaactcccgggctgaagtaatcctcccatctcagtctcccaagtaggtgggacaacaggcatgcaccaccgtgtctggctttttaaaaaatttttgtagagacaggggtctcactatgttgcccaggctggtctcaaattcctgggcacaagcaattctcccgcctcagcttcccgaagtattgggattacaggtgtgagccacaacacctggcctgttcctactttaattcttttgctgtgtctttatggccaacaaattcagcaatactatagctacattatctctaaaagatcaatgctggagctggcatcagaaaacaaggtcaacttcgaacagtttattttccttaataggaaaatgaatgagacggggtctcattttcttaagaaaatgaacattaactttgtgacaa

SEQ ID NO: 148144 - DNA, 382 bp, Homo sapiens
tttttgagacatgatgctgctctgtcacctaggctggaatgcagtggtgcagtctcggctcactgcaacctccacctcctgtgctcaggcgatcctcccaccttagcctcccaagtagctgggagtacagccacacatgctaatttttgtattttttgtagagacggtttcgctgtgttgcccagactcctgggttaaagtaatcgtcccgcttcatcttcctaaaatactgggattacaggtgtgagccaccgcgcccagcccagcttatttctttcttattcctttttcttttagcttctctgttcttctctttcctgtttttccttctagcctagctttcttttcccatcagtcacttagtacgttcctcagaatgttc

SEQ ID NO: 148145 - DNA, 373 bp, Homo sapiens
cctcggagacgggtggcatggggagcagctagaacaatgcagattcatccataatccctttctgctgttcaccaccacccatgatccatctgtgtagtttctgaacagtcagcgattccaggttttaaatagtttgtaaattttcagtttctacacacaaaaatataagagctaagaaaccagacgagagattacctgaatgtggcacacagataagaaaagacacattgaaaagggtaagaaggacagttttacattacttgtgtcacacctccctcagtccctgagatcccagcatggagagagagactgttcacctgggggaaggaggggaagtgtacaccagacttaaaccctaacattgagctcgccc

SEQ ID NO: 148146 - DNA, 816 bp, Homo sapiens
gcctataccattcaaggacagtatgccattccacagccagatttgaccaagctgcaccagttggcaatgcaacagtctcattttcccatgacgcatggcaacaccggattcagtgcaggtttggatgcatctgctcagactacttctcatgaactcaccattccaaacgatttgattggctgcataatcgggcgtcaaggcgccaaaatcaatgagatccgtcagatgtctggggcgcagatcaaaattgcgaacccagtggaaggatctactgataggcaggttaccatcactggatctgctgccagcattagcctggctcaatatctaatcaatgtcaggctttcctcggagacgggtggcatggggagcagctagaacaatgcagattcatccataatccctttctgctgttcaccaccacccatgatccatctgtgtagtttctgaacagtcagcgattccaggttttaaatagtttgtaaattttcagtttctacacactttatcatccactcgtgattttttaattaaagccgttttaattcctttctctgttcagctgttgatgctgagatccatatttagttttataagcttccccccggtttttttttttttttggttttttttttttggctcatgaatttttctgtttgtcatggaaatgtaagagtggaatattaatacatttcagtttagttctgtaatgtcaggaatttttcaaaaaaattaaaagatgggactggagctttttctttgtgaatagaaactggatgccacagtgattcatgtgggttttattcctcttgtctt

SEQ ID NO: 148147 - DNA, 343 bp, Homo sapiens
ggcacgaggtagtggcagcgtgatactatgagatagccttctattgcgcaggaagtggcaggcaccctggcagagttggatgtgaccctgcagctgctcgaggacaagttcctccagaacaaggtcttccttactgggcctcacatctccttagctgacctcgtagccattacggagctgatgcatcccgcgggagctggctgccacgtcttctaaggcctgcccacgctggccacatggcggcagctcgtggaggctagcccgggggaggacctcttccaggaggtccatgaggtcattttgaaggccaccgacttcccacctgccgaccacaccatatagc

SEQ ID NO: 148148 - DNA, 421 bp, Homo sapiens
  misc_feature (1)...(421): n = a,t,c or g
ggcacgagnnnnnnnnnnnnnnnnnnnngtattcagtgtccactcccctaagggattccccaaaccccaatcatctcagctctctgggacactgccctgctagctcccaaaccgagccccaggcaccccagcaagcattaggccaacccgccaccaagctactcccacacccgcagccacccagccccagcccagcagcaaaccttgagtcagcgccaccagcctctgcacctctcctcctctgcctccactctgcccagctgggggaagctcaggcaccacctgaataagaaaccccagagnnnnnnnnnnnnnnnnnnnnnnnactctcatggtcgctgcccaggccagcatcagaactgctctgagaaacactgtcctcctgatggcaaagaaggacgtgagaacggctcacggacgg

SEQ ID NO: 148149 - DNA, 582 bp, Homo sapiens; identical to SEQ ID NO: 146258
  misc_feature (1)...(582): n = a,t,c or g

SEQ ID NO: 148150 - DNA, 490 bp, Homo sapiens
catgtgaagtcactgtgccagcccagaacactggtctcgggcccgagaagacctcctttttccaggctttaggtatcaccactaaaatctccaggggcaccattgaaatcctgggtgtccgcaatgttgccagtgtctgtctgcagattggctacccaactgttgcatcagtaccccattctatcatcaacgggtacaaacgagtcctggccttgtctgtggagacggattacaccttcccacttgctgaaaaggtcaaggccttcttggctgatccatctgcctttgtggctgctgcccctgtggctgctgccaccacagctgctcctgctgctgctgcagccccagctaaggttgaagccaaggaagagtcggaggagtcggacgaggatatgggatttggtctctttgactaatcaccaaaaagcaaccaacttagccagttttatttgcaaaacaaggaaataaaggcttacttctttaaaaagta

SEQ ID NO: 148151 - DNA, 983 bp, Homo sapiens
tcgcggaaagctgtgtgcttatggcagaccacccatgatgcgcaggtccatcgagggcaacctgaaaacaacccagcctctgaagaattgcttcctcattaaccgggggcatttgggcttttgtttcacccagggaggaccctcactgagatcaagggacatgttgctggcccaataaggttgccaactgctgcccgttgttggtgccaattgcccccatgtgaagtcactgtgccagccccagaacactggtctcggggcccgagaagacttctttttttccagggctttaggtatcacccactaaaaatctcccagggggcacccattgaaaatcctgaagttatgtgcagcttaatcaagacttggagacaaaatgggaagccaaacgaaagccaaggctgctgaaaaaatgctcaaaaatctccccccttctccctttggggctggtcaacccaagcaaggtgttccgaaaaaatggcaagcatcctacaaaccctgaaagtgcttgaatatccacaagaggaaaactctgccattctcgctttcctgggagggtgtcccgcaaatgttgccaagtgtctgtcctgcaagattggctaccccaactgttgcatcaagtacccccattcctatcatcaaacgggtacaaacgagtccctggcccttgtctgtggacgccggattacaccttccccacttgctgaaaaggtcaaggcttttcttggctgatccatcctgcctttgtgtgctgctgccgcctgtgggttgctgccaccacagcttgcttcgctctgctgctgcagcccccagctaaggttgaagccaaggaagagtcggaggagtcggacgaggatatgggatttggttctctttgactaatcaccaaaaaagcaaccaactttagccaagttttaatttgcaaaaacaagggaaataaaggcttactttctttaaaaaaaaaaaaaaaaagggcggccgct

SEQ ID NO: 148152 - DNA, 917 bp, Homo sapiens
agatggagtttcactcttgttgtcgcccaggctgcaatggcacaatcttggcttactacaacctccgcctccctagttcaagggattctcctgcctcagcctcccaggtagctgggattacaggcatgtgcaccatgcctggctaattttgtatttttagtagagacggggtttcgccatgttggtcagactggtcttgaactcctgacctcaggtgatccgcccgcctcagcctcccaacgtgctgggattacaggtgtgagccaccgtacctggcagaaaatgtactttctttctcagaaatacttttaaaaaaaattgaagggtgaggagaaaaacatcttggagaagaggacccattaaaactttaaatatctgtgggaaccatttttcctgattttccctttttttaacatcatggcaaagatgggtttttttccaacaaaatttaatttaatatctttccacttgaagattttaggtttgttttcaatacttaatgaatataaaactaaaggagaaaagccaacctggaaataatttaaactttatatgaacatttcgataagagtttgtgggattttttctgtaggataatatatttgatccgggaactcaagtgcatgggaaacatggattttgatttttaaaatctaaaaaaaaaaaaaattaaaatcatgcttccctctattgcagtatcagttatttagtcacagaatggtattttatgtaaattaaaattaggtgaatgcaatgcaggtaactggttttggaatgggaatgtgcagtgctttatgtttggggagttggagcagggtatcttttcatcaattaggaaggaaagtttggaaacttctgattacctttatggtgggttcccttattaattgccccttgctaaaactgcctaaccaacg

SEQ ID NO: 148153 - DNA, 782 bp, Homo sapiens
aaaactttttttttttttttttgagacagggtcttgttctgctgcccaggctagagtgcagtagcacagatcatggctcactgcagccctgacatcctgggctcaagggagtagctgagaccacaggctcaagccaccatgctcagcttcttttatttttgtagacaaggtctcactatgttgcccaaggtggtcttgaactcctgggctcaagcaatcctcccaccccagcctcccatgtagccgggactacaggcatgtacctatgcttggtctttaagggctttataattaaatttacacacagcttctgagacagtgcttcttaataacacagagttgcgtggcatgtacttaaacagtaactttaggttcacacagtaaataaaatctcacaatgcccaaaatttggaaaataggactaaaacaagggtagatgtgtgtagtttcaaaagtctcacccactgaactcatcctatgcaaattccttaacccaatcatgctgtttccaatagggtccacgacacttcgtcatgtccattagatgatgcaaaaaaggaccaaaatggctaacactcccttattttcaacaagaagtacagttcttaaatgataggaatctgttgtgactatgcctctgcaggtgtcaattatctgaaatcccctcaatttagtacgtattatgaactaacaaaatatttttgttttacatcagtcttaatagtcccattttgctcaattgggaatagtgctagctctcttgtttgagaactgttacttca

SEQ ID NO: 148154 - DNA, 2173 bp, Homo sapiens
  misc_feature (1)...(2173): n = a,t,c or g
tcccattttggatgtttcatataaatggaattatacactatgtgttctgtgactgacttctttcctgtaacacagtttttccaaggtttcaccatggggtgggcagggtgtggtggctcacatgtatactaatcccagcgtgttggttgggatgccaatgtggaaggatcgcttgaggcctggagttcaagaccagcttgacaacatagcaaaaccccatctctgtaaattaaaataaaaataaaccaggcatgggtgtgtgcctgcctcagcctcccgagtagctgggattacaggcatgggccaccacacccagctaattttttgtgttttctttttagtagagacggggttttaccatgcgtgccaggctggcctcaaactcctgaccttgtgatccacccacctcagcctcccaaagtgctgggattacaggcgtgagtcaccgggcaggctgttctgaagcttttagatctcaggtctaaggcttcctttcccttcttctcccagctagtttgtgctaattaagagaccttttatactgttttattgcctgtttgaagaaataatttttatcacgtttttgtaagatatctataattttaaatgtttataaattgtttaatttattagcatcttaatgtaccccatttttatatactgaatgtggccttttgagtgaaataggaagcttcatggtgttggagccaccttttgtacagttgtttaaagtttcccattgtcacggaaaacattggttgcaaagcccctcaaagccctcaagtgccttctgtgagtttaaatgtgctggtgccctccagaaaagcctcggcctcagctccgtttccgcctgttccctcccccagggataatgaatgggttactgcactgtaaagacccgtgggtctcttttcacttaaatagggagattcggagtttcccagtttacatggaatgaagtctggaatttaaggacgggtgatggaaacttgagggttccagttactcttcgggggactccgaggggaaattattncctggaggacatgggagtaattcttaacaaattttaaactattgttacagatccacatacatgttgtttaagtacctaatgttttggctggaacttttaaaagttaatttccaaaatggattagggattccatggataattaaacccttttattgctcatttttttagtaggaagaatatcacttatttttagacttgtaaaatgtatgaactggtgagcggacatctgttaagagagtcactagtcagaatgttaaaggagtgcatgcaggatgccccaaatgtcgtgaactcttgttactcctgtatgtagtagtgtaagcatgtgacttttaacaccatttggtttgaaactaatgtagagatgcctgattccaaacaggtgtggagaatattgaacggctcagaagccgcgtcccttacttaacacaattccgaatctccctcatccatgatgcgtccattggatcactcgctggtggtcactgtgtggccagttactagggggaattctgcctctgactgttctttttcctttgggtctttaaacacccctgtcgtgggatgtgctcactggatttgtgggctatgttgaaggtatcactttgtcttgagggttttcaaatatttccaggatccatgctggttggcaaaaaggactcccatgccctctgtggaaatccatgtcccacaggggggacctgccctcccgtgatgtccccacctttccttcaaggtccgtccatatgagtccctccccctttacaacaccttattatggtatttttcaagttattccttccttagatttgcagtaccctactgaaatttgtgttttttatagttgaagttaggaaaatgcctatttgatttgtatttagatatttaagtcacttgtccaatgatgtgtatgtactaagcctcatgtaaccgatttgaagtcagacttaaaaatgtatttacagattcacttgagactttttaatcggttcttcaaatatttcatgtttacattaaaaatttccagagaagcataaaagtattcactttcctgccttgtcatttctggaaagattttggggagatattttattgcatattaattaataaattgttctactaggaaaaaaaaaaaaa

SEQ ID NO: 148155 - DNA, 431 bp, Homo sapiens
ggcacgaggatcaatttatcaaaatgatacaacaatttcaaaacatgtatctagataacagagcttcagaatgcacagtgagagaactggtaaaacaaaaggttaaatggagaaacccacaataatatttggagatttcaataaccctgtgtcactaattgaaggaagtagtaaatagaaaatcagcgggactatggaaaacttgaagaacacagccaattttacttaattgatttttataaaatgttccgcacaacagcatcagaatgcacattcatttccagtgcacacagaacatttacaaaatagaccattttctgtggtgtaaaagaggtctcaataaatgtaagatgattcaaatcatacagaatgtggtctgtgaccacacagctttaaataagaaaccaatgccagaaagatctctagaaaag

SEQ ID NO: 148156 - DNA, 392 bp, Homo sapiens
ggtcgactttttttttttttttttgagatggagtatcactctgttacccaggctggagtacagtggcgcaatctcggctcactgcaagctctgcctctcgggttcatgccattctcctgcctcagcctcccaagtagctgggactataggtgcccgccaccagcacacccggctaatttttttttgcatttttagtagagacggggtttcaccgtattagccaggatggtctcgatctcctgatctcatgatccgcccgcctcagactcccaaagtgctgggattacaggcctgagccaccgcgcccggccaaagggcactatgacttttaagagatggcatgtacttgatatgcaaaagggggagacaggttccttaacttataatgaaga

SEQ ID NO: 148157 - DNA, 1009 bp, Homo sapiens
  misc_feature (1)...(1009): n = a,t,c or g
ggcacgaggaacccaagccttgatgatgatgactggacagcgtgccatgcaagtccacactgaggcggcaggctcacttcctaaccaggagcaatatgctttactcatggagacatggcagcttaatggagagaagaatcgtgtctcctagtgacctggaccttgtcatgtcagaagggttgggcatgcggtatgcattcattggacccctggaaaccatgcatctcaatgcagaaggtatgttaaagctattgcgacagatacagcgaaggcataaaacatgtcgtgcagacttttggacccattccagagttttccagggcccactgctgagaaggttaaccaggacatgtgcatgaaggtcccctgatgacccgggagcactttagctgccagggaggcattgggagggacgagttgcctcatggagactcgcccaagtttgaaggagttcaagttgcagcccccagttgaattttctttgttaattgcagcttcccactcctctcaattggaaggcccctatttggggaacaactgcaaagccccttaaatccagcccctctgtgaacataaggtaagcaagccccacgggagatccttaagctggctgtcttggtgtgcaagcctgaagttggggtggttccaggccggtaagtctgccccgtcacttttggatccatagccctggaatctggcggcacagcaagcacttgcgtttcttcggggctgtcgatttcccngccaccctgggcagataaccctggagatttttcaccttttctttttcagcttgattgcaatttgactatattttacagcccagtgattgtagtttcatgtttaatatgttggcaaaatatttttgtaattattttctaatccctttctgagtactctggggccctgcatttatgaggcacctaccttcattttgctaacgcttattctgcaataaaagtttttgattccttaaaaaaaaaaaaaaaaaaaaaaaagggcggccgct

SEQ ID NO: 148158 - DNA, 491 bp, Homo sapiens; identical to SEQ ID NO: 119905
  misc_feature (1)...(491): n = a,t,c or g

SEQ ID NO: 148159 - DNA, 1179 bp, Homo sapiens
aggagggttcctgcctgtgccagaaacccttaagaaaaagcgaaggaatttcgcagagctgaagatcaagcgccttgagaaagaagtttgcccaacagatgctttcgaaaggcaaggcagcaagctaatctatgaaaaagcaaagcacgtatcacaaggaatataggcagatgtacagaacctgaaatttcgaatgggcgaggatgggcaagaaaaagctggccaacttcgtatgtacctgcagaaccccaaatttggcgttttgtcatcagaatcagaggtatccaatggagtgagccccaaaggttccgaaaggtttttccagcttcttcgccttcgtcaaattcttcaatgggaaccttttgtgaaagctcaaccaaggcttccgatttaacatggctgaggatttttagagcccatatattgccatggggggtacccccaatctgaaagtcagtaaaatgaactaatcttacaagcgtgggttatgggcaaaatccaataagaagcggaattgctttggacagataacgctttggattgctcgatctcttggtaaaatacggcatattcttgcatgggaggatttgattcatgagatctatactgtttggaaaacgcttcaaaagaggcaaataacttcctgtggccccttcaaattgtccttctccaccaaggtggaaatgaagaaaaagaccacccattttggtggaaggtggagatgctggcaacaggggaggaccagatcaacaggcttattagaagaatgaactaaggtgagagacctcatcctgagaaaggttgagttaatgttagagtataagtggtggtaatcttgaatacttttcccattaaatattgatgggggtttgaattttaatcagtgcttttgtggggagtgggggtcaactatcttaatgattacaggtgggtttgtttacgtgcttttgaggacctttctggaggaaaggaaaagcctgttttggggagtctttaaagatggaaattgggtggtcttaaaaatgtaaactcaatcattactttataactgcctagtttatgttaattgttagctgcctaaagtgttttctaatggttttcttttttcctttcaggtgtctaccatgattatttttctaagctggttggttaataaacagtacctgctctcaaattgaa

SEQ ID NO: 148160 - DNA, 819 bp, Homo sapiens
agccaccatgtccagctcctttttgaattttttgtggagatggggtctccctgtgtttcccaggctgttctctaactcctgggctcaagtgatcctcctgtcttggcctccgagaatgttggaattaaagaccaccacaccctgcctaaagctagttttaaattatagcgtgtgtgtttgtatatatatattttttagagatggggtcttgctcatttgcccaggctggagtactgtggtacaatcatagctcgctgcagcgttgaactcctgggctctagcaaatctctctcctcagtccactgagtagctgggactacaggcatgtaccaccatgcctggttatatatttttaatatttaaaaaaatgccagtgtcagaaaaataagaacaatatcttgtttttggaattagaaatgtaatacatgcacaggttaaaaatttaaatagtgcaaaagagtacatagtgaaaaatagcctccttccctccctagttacctgatccctgtctcccagagacactctttctagcttatttggggtagccactgacaaatattctttcgcctatactattattcatatgtttatatttctctatgtctaacacattaacacacatatatacacatatgcatgagtgcacacatgggaagcctaatgtactctgaattttcttacctaatgggcttatcttgtagtttgttccacattcgcacatagaaatctactttattctttctcgtggctgtgtaaatattccattatatgtttatattattagattctttataatggatatattagtggtttatagtc

SEQ ID NO: 148161 - DNA, 397 bp, Homo sapiens
ggcacgagggtttcaccatgttggtcaggctggtctcgaactcctgacatcgtgatccacaggcctcggcctcccaaagtgctgggattacaggcgtgagccaccatgccaatcctttttttttttgacagagtctaactgggttgcccaggctggagtgcagtggcgcgttctcagctaactgcaacctccgcctgcctaattcaagggattctcatgcctaagcatcctgagtagcctttcaggggttacaggtgcctgccaccaacccagctaactttttttttttttaaaaaggggttttttttttggttcccaagctggaatgccatggggaaaaaatggtttaattgaacctttggcccccgggttccggaaaattcccgggcctaacccg

SEQ ID NO: 148162 - DNA, 398 bp, Homo sapiens
ttcaaagacccaacctggcccaaacatggtgaaaactcccctctcccactaaaaatgccaaaaaattaccccaggttatggtggcaacacgtctgtaatccccagcctacttgggaggctgaggtgggagaattgcttgaaccccaggaggcagaggttgcagtgagccaagatcacgccactgcactccagcctgggtgacagagtgagactccatctcaaaaaaaagaattttgtgcaaaacttcaagacactaaggaaacaatctttaaatattttggactggggccaggcgtggtggctcacacctgtaatcccagcactttgggaggctgaggcaggcggatcacctgaggtcaggagttcgagaccagcctggccaacatggtgaaaccctg

SEQ ID NO: 148163 - DNA, 788 bp, Homo sapiens
cgcaggaattttttttttttttttttgagatgtagtctcgctgtgtcacccaggctggagggcagcggcgcgatctccgctcactgcaagctctgcctcccgggatcatgtcattctcctgcctcagcctcccaggatagtatttttaatacccaacatttaaatgttggaaggaattctacttctaaatcaaaacctatagattatttttagggcataagccatgtttgtactgcagtagaatctttgaaaagtcatcaatagtataggttgaactaacatatttttctaaacataatatatttgttattggctcaacctaataaaatgagtcattgcattctaagcataatgacctgtattttgtaatatcatataatatatagtatatgtagagtatgtacatatatttatgtatcttcatatcagtactgaaatttaattacaaatacattctgagaaatcctactttttatatagtatttgtgttggttttcactatttccacttataggaattccatgccaatgattataggaaaaaaagatgccgattcatcaaaatatttagccaagttttgtctttggcaacaaagagtggccactttccttaaactcattccaatgacaatgtcctctgcaaatctgcaaatcagtcaggattcctagccaagcaggtcagaggggaagaagaaaacaaatgtgttcaaaaagagcagtatgattacccctttttggacaaaaatatttgccaggttttgctaccaaaaaataatgttttctcgtgcc

SEQ ID NO: 148164 - DNA, 845 bp, Homo sapiens
  misc_feature (1)...(845): n = a,t,c or g
tgagaaagagtctcgctccgtcaccaggctggagtgcaggggcgcaatctcggctcactgaaacctccacctcccgggttcaagccattctcctccctcagcctcccacgtagctgggactacaggcgcatgcaccacacccagctaattttttttgtatttttagtagagacggggattcaccatgttggacaggatggtctcaatcacttgaccttgtgatccgcctgcctcagcctcccaaagtgctgggattacaggcgtaacaacccgtgcctggcccataaataaatattttaaaaatttaatatttaatataataatatatatagctcacataaacaaatggtcttgagataaaaatgtttgagagttgctgtttcatagcaggcatctcgcaccctatggaacattactggctgctatggaccactttagttccttggcacactcaatgcatgcttcattttaaatctgattcaatagatcatttgcaaaaaaaaatgttaaacttattttcaggtatggggatttaatctgacagtgaaaaattgaggtctaactggatttagttaaagtctgagatataaagcctgtttttcttcgtgatatcaaaatgaaataatctttaaatgtattcacaagttgactctgatgtatgaaacagaaaaccagctgggcacggtggntcacacttgcaatcccagcacttcaggagcctaggcaggcagatcccctgaggtcgggagttcgagaccagcctgaccaacatggtgaaatcccatgtctaccaaaaatgcaaaattagccaagcatggtgcgcatgcctgtaatcccagctactt

SEQ ID NO: 148165 - DNA, 675 bp, Homo sapiens
ctccttaaatgcctatcaccacccccccaacttgagctagaacttacaaggcaaaattctaaggaacagcaagcactgctgcacgatcaggggtaaacagctgttcttttagtcacttgtaatgaaaatgctactacctccaatctgttaacatagctttatggattagatgagcagtcacttcttggtatccaggccccttacctagtagtggggtaaaaaataaagattggtttctagtatatctggttttgaacctttcttgaatgtataatacgttatggctagagaggtagcttaaatcccataaacctttgccagccctttcataaaaacaggttgtttaaaagtagcattttataagctatttcccagatggggctgaattaactagtagtatccgtgtgccctttttttatagcaatgtacttttttttttttgagacaagagtctcgctgtcaccaggctggagtgcagtggcacgatctcggctcactgcagcctccgcctccggggttcaagcgattctcctgcctcagcctctagagtagctgagattacaggcaagcgccaccacgcccagctaatttttgtatttttaatagaggcccggtctccccatgttggccaggatggtctcaatctcctgacttcgtgctcgtgccgaattcgtg

SEQ ID NO: 148166 - DNA, 1206 bp, Homo sapiens
atggagaccgatgaccatatgggtggcatccctgcccggaatagtaaaggggaaaggcttctgctttatattggcatcattgacattctacagtcttacaggtttgttaagaagttggagcactcttggaaagccctgatacatgacggagacactgtctcagtgcatcgcccaggcttctatgctgaatggttccagcgcttcatgtgcaacacggtatttaagaagattcccttgaagccttctccttccaaaaaacttcggtctggctcatctttctctcagcgagcaggctccagtggcaactcctgcattacttaccagccattggtctctggggaacacaaggcacaagtgacaacaaaggcggaagtggagccaggtgttcaccttggttgtcctgatgttttacctcagactccacctttggaggaaatcagtgagggctcacctactcctgaccccagtttctcacctctagttgaagagactttgcaaatgctaactacaagtgtggacaacatttgtcattcaaagacccgcagcaaccctgagaacaacgtgggccttatcacactggataatgactgtgaagtgctgaccacactcaccccagacactggccgtatcctgtccaagctacatactgtccaacccaagggcaagatcaccttctgcatgggcatccacgtggcccatctggctctgaagcaccgacaaggcaacaatcacaagatccgcatcattgcctttgtgggaaacccggtggaggacaatgagaagaatctggtgaaactggctaaatgcctcaagaaggagaaactggccttggtccttcgtgtatttatggaagagcagcggcagcggcaggaggaggaggcccggcaggcagctgcagcttctgctgctgaggccgggattgctacgactgggactgaagactcagacgatgccctgctgaagatgaccatcagccagcaagagtttggccacactgggcttcctgacctaagcagtatgactgaggaagagaagattgtttgtgccatgcagatgtccctgcagggagcagagtttggcctggcagaatcagcagacattgatgccagctcagccatggacacatctgagccagccaaggaggaggatgattacgacgccaccaaggacagcaagaaggacaagaaggaggaagacaagaagtga

SEQ ID NO: 148167 - DNA, 634 bp, Homo sapiens
ggtgaacacagaaaagctgacagcctttgtaaacacgttgaatggtaaaaatggaaccggttctcatctggtgacagtgcctcctgggcccagttaggctgatgctctcatcagttctccgattttggctggagaaagtggagccatgctgggtcttggtgccagtgactttgaatttggagtagatcccagtgctgatcctgagctggccttggcccttcgagtatctatggaatatcagcggcagcgacagcgaggagtatgcccggcgggcagctgcagcttctgctgctgaggccgggattgctactactgggactgaaggtgaaagagactcagacgatgccctgctgaagatgaccatcaagccagcaagaagtttggccgcacttgggcttcctgacctaaagcagtatgactgaggaagagcagattgcttatgccatgcagatgtccctgcagggaagcagagtttggccaggcggaatcagcagacattgatgccagctcagctatggacacatctttagccagccaaggaggaggatgattacgacgtgatgcaggaccccgagttccttcagagtgtcctagagaacctcccaggtgtggatcccaacaatgaagccattcc

SEQ ID NO: 148168 - DNA, 2216 bp, Homo sapiens
aaggaagaacatattttaatggttgaaacctgtctttatgaggcgattatgacagcaaaaaatattataatgaataacaatgcatagtctacgctttgtaatatttcatacaataattcctttatcatttacatctcttaatgctagaaaagcattctgaagatgccaagcgtaagttgcaactgagtaaaaaaaaaaagcaaaatttactcaatttccagaagaggtgcagaacagagaatgaaggtccttaaaatataaaccgctagtgtgctaaaatgatgtccatttgcaggatcagtgacaaaatatttaagcccataaagaaaagagttatacctgctgtatgaaggtattcatagagaaatatgagtcataagccaattatttataaatgtctttcaaaatatttggtgcacatgaaatgcagtatactgatggtcctggagactgttgagcatgtacactcttcttctgaattggccacccagaaaccaattattgaatcagaacaacacaaattggtttgtgcttgagccaggtttattttattgttttcgatctgcatgcacaatatgaaatcataaaagcaacaaacatcaccacaccaacactgagtaagatcatttctatcaggccaaggaggtttatttttccagttacttgacttctgaacatgtttgccttctcatcaccaatggtcccagtctcattaagccaaagaataggcacaatatagttcctcttcagattctttaatacttgaattttttctgatggcttgaccaataggttgacctgcagccgttttgcaaattgtaaagtgaatccagttataggttcaatatccaagtatgtcctatgttcttcttcatttgggtttaatccatcaataggttctgaaacatcaggacttgcatacagaaaatgaggaagtgaaatgtacacaggtctcccttctttgcatttgctgatgtctagcacaccatatgatgtacaattttttgagataattttttctgtgcagaaacaatagttgtctgggttttcaactggagaggcaaaggccttggatggaagaacaaatctatacacagggattcctttcagattaacgtcggattcaaatacagcatagattgacctgcaaatatcagaagaaaagaactgcaatacctggcttttctcaacaaaaggtggaaatgaggctgcatctgtaccattaatcatgtcgcagtgactttcccaataggacagattccttttacctttatatgtgtcgattatggcaactttacttatgttatcttttccattgaaaactttataaactccatctgcagtattgttgtaaggataaaacagaccaactgtggtagtaacagggtacggaaccaaactcaaaaatggatccctatagccccataacagttctctcaaagttctgacttggaacatagaagattttgacttgttaataagtgaattgaggatcatttgaacaaattgattttgatagatatgggatgcagctgccacagccagattgagaactgtgaagttgtcagcctctgttccaactgatagtgaaggttcgaagatggcaccattgggctgcaggaaagagactgtgttgtcctcagcgtcctgggttacattttccttggctagaaaacgaactctgtacgtataaggacctctttgcttaacttgaatgttgctgctgttcatcatcacttcctgtggattttgcacatcaaagatccaaaactgtctgtaaacttctgtgcctgttttaacccaatttttaaaagcaattgtaccttcttcgaggacaacttgctttttaattgtcttctggataagcaggtctccaactggcattagaatacctccaaacacagccaggacagcaccaatgacagccccagcgatgagcccacagttccggtcacagcccatttttcttgttcaggaggtgaattagtgttaagcacctgtttcttgcaaactcctggatatgattaaagtggtttctacaagctctggttcttattcacaaatcaacagcaagacatgaattttacaggaaaggaactgatgagtcacagaaagaatcaattcgtctaatcattggaaagctatctttaaaatggctaagaaggatttttcaatcaaatgctccaacatttggacaattcttaataggatcaaat

SEQ ID NO: 148169 - DNA, 3258 bp, Homo sapiens
  misc_feature (1)...(3258): n = a,t,c or g
tttttttttttttttttgagatggaatctcgctctgtcaccaggctggagtgcagggacgcgatctcagttcactgcaacctctgcttcccaggctcaagagattcagtctcccgagcagctgggactaacaggcatgggccacccacaccccgcctcatttttgtatttttaagtaagaagatgaaggtttcaaccatgttggcccaggatggtcttggatctccctgacctcgtgatccacctgcctccccaaagtgctgggattaacaggcatgagccaccatgccctggccatgtatacacatcttaatacaaatattttcagagataaccattgcgtgatagctattttttttcttgaaatgataccctccttcacccttttctgtcagaactgaaagctacatagcttcttctatttcttcatgcgcttgttagaagcaatatgcattatcctattttccgatgctgtggattctctaatctgtttatccatttgcagacgctattgattttcaaacataagttatgaatacctgctataattctgtggttaatatccaactttggaaagaaaatgtgtttctatctaagggtacaatttttatatgactaaaacatataaattcatccatgagcaattgcaagtgtgcaaacatttaccctttttgaacaacattaactttgccagggcaaaacaaagtcacacatgtaacatattccccaagttgccccactccctccacagtgcatatgtnnnnnnnnnnnnnnnnnnnnnnnnccaaagcccagatttcatgtaaaaaaaatctccccttaagtaattatttttcctactgcatatttttaatctcgttgtctttgtatatgaattgtctttcctcttatattccttttacagaatttgagaaatgaaaccctgaggaatgataaagattatacatgtattcaaccaatattaaagacatataggtcaaaaccttttctgatatctaaatgctatgagatcatccctgtattaagatctgagtcatgattagtcataatatacaggtcaatatgtatattctcatccaattatctttaaaagtttctacattatataactcagccctacatgcctcaatgattaaaaaactttcctttatattagatggacatgtccacaaatatcctaatgcaaatagaataaaccttgtantcatccagaaggaacatgtcctacaatgttatcttacatattaatatcttggacagatacttcttttatcttcccagttaaaaggaaaggcactaagtatgctttaagcaccttcagagatgcaaaagatctttccaaacaggtagattcttggtttgtggcttttctgtagtaatgctcaacatttactctggcggctatcataaggaggaggctaaaagttattttcaattttagtatccaaacaggccagttactattcctttgtcctgtatccttctgtgggtaaaacacaagctagaatttggtttatcttccctttctatgctggagctttttaggagaactaatgctctcagaataagtgaacccctgctcaagaaacagagttacctattaatgtgtctccttatgaaaaaggaaaaacctttgcaattgtcctactgctgtaaaggatgaaaccaaatgtctttttgttcttcatccaattagcttaaaaaattagcctagaacaaagtggtagaaatttagaaagcatatttcagcaaggactatggatttataaagaaatgtggattcagataaaatatacttcagagagaaaattaggataaacattttatgacacaacaggaactagaaaaagcacaggaatttaaggaagaacatattttaatggttgaaacctgtctttatgaggcgattatgacagcaaaaaatattataatgaataaccaatgcatagtcctacgctttgtaatatttcatacaataattcctttatcatttacatctcttaatgctagaaaagcattctgaagatgccaagcgtaagttgcaactgaggtaaaaaaaaaaaaggcaaaatttacttcaatttccccagaagagggtgccagaaacagaagaatgaaaggtcccttaaaaatataaaccgctaggtggtgccttaaaatgatgtcccatttgccaggatcagtggacaaaatatttaagccccataaagaaaagagttataccctgctgtatgaaggtattccatagagaaatatgagtcataagccaattatttaaaaaatgtctttccaaaatatttggtgccacatgaaaatgcaagtaatactgatggcccctggagactgttgccagttgaatagggcagctactgggatgatggtgtttcccccggatgaggattacaggaatgcagggcctaggatttgttgagcatgtacactcttcttctgaattggccacccagaaaccaattattgaatcagaacaacacaaattggtttgtgcttgagccaggtctgtagaaacggaaatcaattcagttgtggaaatgatgaattttcaaaagctgctgggtttttttttgtgcaaggtagagcattttcataacatctcaataatccttttgaaatgtgcagttgcttagtgcaaaaaaagaaatagtgccaccatttcttcaactaaaagataaggtgtgctttgtaaaagtaaagcatatccaattttcatcctgttggtcggtattaccaagggtcatgatgtagctggcgcacaaatgtgaagaatcatttactacctgtagagtggcagtatatcttagatatcatactttttattaatcagttcagtttctctagctgcagagagaagttctctaacggacttcaccaatagggcaaaacacattcccattccagaaaggcacataagaagggtgcttctcaaccctcaagacaagcacacaccaggcaaggaacggtagctgaagtgcatctgccctggaccagcatttccacacccttcagaccaagttccatttaaaggtgtatgtactactttcaaaaggaccattgggttattttcttgtgaccccctgagtaaaaccacacattaaagctcccccgtcttacactttgctacttcttacatacctgtcttcttacttgttcctattgtttacaaatctgcccaaagatataatttttatgatattaagagctgaattttgcttaagaaaatctacatatcttttgtgattct

SEQ ID NO: 148170 - DNA, 737 bp, Homo sapiens
ttttttttttggagacgtagtcttgctctgttggcctggctggagtgcagcggtgtcatcttggctcactgcaaactccgcttcccgggttcaagtgattctcctgcctcagcctccggagtagttgggactacaggcgcccaccaccacactcggcttttttgtatttttagtagagacgggtttcaccatgttggccaggatggtctcgatctcttgacctcgtgatccacccgccttggcctcccaaagtgttgcgattacaggcgtgagccaccacgcctggacgggtagccagtagtttctagggctggagagatctaggatgagagaagtttccacattcctgttacaggctctctaaggcttcagctcctttttctaggactaagctggatctcaagtaaacactagagagggggcagctgaagctccaggagtgtgtggggctccctggggctgaatggcggtggcgggcaggcgagctgggctgtgctcgggtgtgttacagtaaagacgcccagcttggcgctggcccggccttttcacggttttaggctctacagagagcggctgcagagctcacccggctggcaggagccaccgaggccggacacgtgggcgacttattgaccaagtggggaggaagcagccccgcactgctctcccgactgcggaccaccgttgggctcctgcgcatcataagccccaccgcctcacctccagtccctcgtgcc

SEQ ID NO: 148171 - DNA, 707 bp, Homo sapiens
gagacagggtctccctctgtcacccagactggaatgcagtagcattcagtactgctcactgtaacctcgacctcccaggctcaagtgatcctcctgtctcagaccccgcaagtagctgggactacaggcacatgccacaatacacagctgatttttgtattttttgtagagatggggttttgccatctttcccaggctgttctccaactcctgggctagaccaatccacccactttggcctcccaaagtgctgggattataggcgtgggccaccttgcctgggcccctctttctattttgattacttaaattggagagggatgttaggtgggagagacacagagaacaaagaagaaccaaatagaagattcagaaaggattgctgtgctacttaaggatttctctattctggctaaaccagtattgccaaagtctcaagcagatcacaagcttatttctaacaggtcttttcagagtaagtgacagagggaatcaacatgggtcaagaagcagttaatgaatggcaagtagccaggcaggttaccacaaagcaggtttgcagactcatgggatgaaatataggcactttgagtctggcaaagactaaaacacaagaatgataagactgcctagggccaaccagatttatgcaatggtagtttcttctggagtttactcagtgttctgaattcttccagtctcgtgcc

SEQ ID NO: 148172 - DNA, 1383 bp, Homo sapiens
gcgtcgacttttttttttttttttggagacagagtttcgctcttcttgcccaggctggagtacaatggcgcaatctcagctcaccgcaacctctgtctcctgggttttcaagcgattctcctgcctcaagcctcctgagtagcccaggattacaggcatgcgccaccacacctggctaattttgtatttttagtagagacggggtttctccatgttggtcaagctggtctcaaactccccgaactctcggtaatccacccgccttggcctcccaaagtgctgggattacaggcatgagccactgcacccagcctaataactgatataatttttttaagtgaaatgaaatgttcctttatttacatatgaattaaatagaaaattcaaagtaattcttttaataaaaacccatatactaatatattttaaggttggatacttaacagcattttcacaagatccaaagtgtggatgacgaactaggcaataaggacatgtgtgccacataactaagggtaactaaaggaagatgagtacctcacaaccaaaagcagttaactatgcctggcataccaccctgtcatgtgggcagatcactgttcccatgctgggtaagagtctccaagaagggaagcccttatgcagtaattctgtaactatattaaatttggtaatctaacattaaactttttcgtgagcagtgaatatacacatggtccatatgaaaactgccttggagaccgggttaaattattaaataaactaaaaggggagaaatgcctggataagataaaattatgtcaatccccgggtgttccaatggaataaagaaataagcagcagctgcttccaaaagtagactatgatcagaaacctccagatggtaacctttaaaaattgtggaatcccagagtctcaacctaaacctacataggagctacagcccagggagttctttctaagttcctcaagtgattctgatgattggccaagctggaaacttctgaactgggggagaaagccaacctaggtaaatgtagagacttttagaattcaacatttgattatcatttactccacattttcccccagctgtctcaccttctctatttttctaacagtgaacaataaaagggcttggcaagtgaaggaaaaagtcagtagagtacctaaaatggatttgactatattcaagccactttcatatattaactagataaaaggataccatactgctatttgaaattcaatcacaaagcaaaaatgtcataattttaatgtattttaagggaagacggggtttttaacatgaatatgtaatacaaaaccaattctaaataataatatttaaaagaagaaaaaatctgtataattatttagaag

SEQ ID NO: 148173 - DNA, 526 bp, Homo sapiens
ttttttttgagacaaagttcagctctgtcacccaggctggagtacagtggcacaatcttggctcactgcaacctccgcctcccgctttcaagagattctcctgcctcagcctccctagtagctgggattataggcacctgccaccacgcccagctaacttttgtatttttagtagagatgggttttcaccatgttgaccatgctgatcttgaactcccgacctcaagtgatccacccaccttggcctcccaaagtgctgggattataggagtgagccaccgcgcccggccctagatgctcatttctaatgaaaacattgtgatccaaaagaattattgattaccaactcagcattaacttaagcaacagaaagttctacatttggaagttggatttctttaaggagagaaacaaaagtaggaataatttgcagtactatttatcaagggatactgtacacatatctgggccctttatacatgttgtttgacttaaaccccacaactacctgatgaggtctcgtgcc

SEQ ID NO: 148174 - DNA, 389 bp, Homo sapiens; identical to SEQ ID NO: 146223

SEQ ID NO: 148175 - DNA, 675 bp, Homo sapiens
gcttttcttggaatctctcaccacagagctgtagaaaagccctattctggtttccagaatgggaagagacctcccaactatgctgagaagggggagtaccagttaactggccgccggcccgtgggggttggtgagaaggagggtgagcttggcggtgacgcacggccctcacgtgaccgggagctgcagagctacgcagccttcggtgcagtcgtcactcgtgtctcgctaccagctccccgctgccctgcgctcggcgggctggcatccggcccgggggaaagcggaccaggagtaatggagtccaaagagaaacgagcagtaaacagtctcagcatggaaaatgccaaccaagaaaatgaagaaaaggagcaagttgctaataaaggggagcccttggccctccctttggatgctggtgaatactgtgtgcctagaggaaatcgtaggcggttccgcgttaggcagcccatcctgcagtatagatgggatatgatgcataggcttggagaaccacaggcaaggatgagagaagagaatatggaaaggattggggaggaggtgagacagctgatggaaaagctgagggaaaagcagttgagtcatagtctgcgggcagtcagcactgacccccctcaccatgaccatcatgatgagttttgccttatgccctga

SEQ ID NO: 148176 - DNA, 7347 bp, Homo sapiens
atgagtgacaacggcgtgcgcactggggcaccgagcacagaccagagaacggggatgtctgtgcgtgcggagtggaggaggggggagttcctggtgactggccgccggcccttggtgggtgggggtgctggggaggagggcgagctcggcggtgacgcgcggtcctcacgtgacccggagctgcagagctacgcagccttcgttgcagtcgtcactcgcatctggctaccagctccccgctgccctgcgctcggcgggctggcatcgggcccggggaaagcggagcagttttccagatccctctacctacctgaccatcttggtgaaggaaatggtgggcttttggggaaatccctagaaccctacagatctgcctgcatgtctgctgcagggcttaagatcactggaagcaaagaaacaaagaggagattgctcctgatcagtatagactggtccagagatctcatgaatttatgtatctactttagggtgtactgccaagagaagcaagaggagaggagggaactgcctcggatcattacaggtccacctccagaggcagctgtagtggcctttgagtggctgaagaccagcaccctcacaggcctacacccacaactaccactctctttaccccagcccgagtgcgctctaccataccttgttcgtgcttttagcaggggtgattacatgggccgcattcaggaagtgggctgggtgactgcaggactggtgatctgggctggcacctgctactacatttacaaatttaccaagggaagagcccagagtgtgaggactcttgccagaaatggatccacagttaagatggagactgtggttggggtacagagccagaccttggccataaatgaagcagagattaagactaaaccccaagtcgagattggagcagaaactggagcaagaagtgggcctagggctgaagtagagaccaaggccactgctatagccatacacagagccaactctcaggccaaggcaatggttggggcagagccagagactcaatctgagtccaaagtggtggctggaacactggtcatgacagaggcagtgactctgactgaggtcaaggccaaagccagggaagtggccatgaaagaagcagtgacccaaactgatgctgaggctggcaaaatagttaagaaagaagcagtgacacagaccaaggctaaagcttgggcgctggttgccaagacagaggccaagagagaagcaatgacccagaccaaagctgaaactcatatattggctgaaaaagagacagagattaacagagtaatggttacacagagtgagaccttggcagtacccagggaagtggccaagatgggggccacgaacaagactggaattgtggatgaaaccaagacaagagctctggaagagactgtgagtgtggctaagactcagtctgaggccaggcctggtgccacagttgatgctaggggaaatcccaatggcatgtccagggaggtggctggagtggacatgaagtcctgtgcacagtctcaggctgtgaccaagatccagggtgatgacatgcctggtactggggttgaggacatggggaattgtaaaaccatgtctagggcagagtctggggcagacacgagggcttctgctcagcctcaaatttttgccaaaacccagactgaggccattcctggggcaaagattgatgccgggggtaacaccaatgccatgtgtaaggtgggggcaggggcagatgtgagagcttgtatacaacctcagactgtggccaagaaacaggctgaggtgacgtctggtgccagggttgatggtaggggaaataccaatgtcatatctaaggcaataactggagctgacatgagagctgctgctcagcctcaagctgttgccagtactcacgctgaggccatgtctgatgctaaggttaagaacagaggcaatcccaatgccatgactaaagcaggggccaaggcaaacttgagggccaattcccaggttgaggccttgcctgatgccagggataagagcagaggcaatcccaatgttatggctaaggtgggggatgggacagacatgttgtcctgtacacagcctcagcttgtggccagtgttcaggctgataccttgtctgatggcaaaattaaggtcaggggcaatgtcaataccatgcctaaggaaggagctggggtggatatgaaggctcaaggtatggcccagagccagggtgaagccttacctaatactagaggtaaggctaggggcaaagccaaagccaagtgtaagacagggcctgggatggacatgaaaacctgtacacaacctcaggctggggtcaagaccccagctgaggccttgcttgattccagggttgatggtaggggcaatcctaatgccacttctaaagccgggactaaggcagaccagagggtctgtggtcagcccctggttgtggccaatccccagggtgaggccttgcctggtgccaagaataaagtcaagggcaatccccatactgtgcttaaggtgggggctggagaaggtacaacagactctgcccagcctgaggcagtggtcagtttccagggtgaggccttgcttggcaccaagaataaagttaagggtaatcccaatgttgtgcttaaggcagaagttggggaaggtgcaatgggcactgcccagcttcagattatggccagttccaagggtgaggccttgcttgattctaagaataaggtcaagggtaattccaatgctgtgtctaaggcaggggctgggacagatacaacaggctctgtccagccccagattgtggccaattcccagggtgaggtcttgcctggtgccaagaataagatcagaggcaatcccactactgtgcctaattcaggggttgggccatatacaacagactctgcccggctccaggctgtggccaattctcagggtgaggtcttgcctggtgccaaaaataaggtcaaggccaatcttaatgctgtgtctaaggcagaagctgggatgggtgcaacaggctctgtccagccccaggctgtggctaattcccattgtgagaccttgcctggtgccaagaataaggtcaggggaaattggaatgctgtgtctaaggcaggggctgggatggatacaaggggctctgcccagccccaggctgtggccaattcccagggtgaagtcttgcctggtgccaagaataaggtcaagggcaatcccaatgtcgtgtctaaggcaggggccagagaagatacagtgggctctacccagcctcaggttttggccagctcccagcgtgagaccttgcctggtgccaggaataaggtcaagggcaattccaatgttgtgtctaaggcaggggccagagaagatacaatgggctctgcccagcctcaggttgtggccaactcccagcgtgagaccttgcctggtgccaggaataaggtcaagggcaattccaatgctatttctaaggcagaggctggggcaggcataatgggctctgtccaggtccaggttgtggccagttttcagggtgaggtcttgcctggggccaaaaataaggtcaggggcaattccaatgctgtgcctaaggcagaggctggggcagatacagtgggctctgcccagccccaagctgtcgctaattcccagagtgagaccttgcttggtgccaggaataaggtcaagggcaataccattgctgtgcctaaagcagggactggggcaggcacaaggcactctgcccagcctcagattgtggccggttcccagggtgagaccttgcctggggcaagggacaagtctatgtccacttctgaggcagaagccacagcagaagatgaggcctatgcaaagcctgaggctgaggccatgcccacttctgagagtgagggtgggtcaggcactcaagcctgcagaaagactcagcctaacatccatgactactactggaatgggattggtgttgaagactggattgctgctgagcggtggatcaaatttaggtttcagaccatggatggagactgggaaaatagcgtgtcctgggctgatgatgagaatgaagccagtattgggtcctggagtggggctagtgataaggctgggattattcggtcttgggctgtggcttgtgatgagaccagtgttaagtcctgggctggggccagggctgagaatgtggttggtattgggacttgggctagagctggggagcaggccagtggagggctctgggctgggggtcagactagtgaggggacctgggctggggacaaggccagtggaggagcctggactggggctgagaaccaggccagtggggggtcttgggctctcgctgggaatcaggccattggagagctttgggctgcgggtcaggccagtgatgggtcctggcctgggggacaggccagtggggtgtcctgggttggggaagaggccattggagggtcctggactggggctgagaaccaagccagtgaagggtcttgggctggagctggggctgggaatatgagtagtgtttcatactgggctggggttgtggatcaggccggtggagggtcctgggctgggactagtgatcaatctggtggtgggtccaagcctagatttgaggatcaagccagtggagaagggtcctgggctggggctggtggccaggctagtggagggtcaatgttggggcctgaggaccagtccagtggaaggtcttgggctgacactgcagaccaagccagtggagggtctaggctgggccacgtagatcagtccagtggtggggcctgggctgggacacttgatcagtctggtggtgggtccaagcctagatttgaaaatcagaccacagaagaagggtcttgggctggggctggtggccaggctggtggagggtccaaggtggggcctgaagaccagtccagtggaaggtcatgggctaactctggggaccaaatcagtggaggattcttagttgggattgtggaccaggccaatggagggtcctggactggggctgggcatccagctagtgttgggccaaagcctatatttgaggatcaggtcagtggcagagggtcctgggctgatgccagggagcaggttgttggagattctaggctggggcttagggaccagtctagtggagattcctgggctggcactggggaccaggccagtggatggttctgtgtttgccctgggagtcagacgaatggagggtcttggggtggggctagtggccaggatgttggagggtctaggccagggcccacgaaccagtccagtgctgggtcctgggatagccctgggagtcaggtcagtggaagctgctggactggggctggggctgtggatcaggctggtggttgttccaaacctggatttgaggatcaggccattggaggggggttctggcctggtgctggggaccagactggtggaggctccaggccagggtctgaggatcagtccagtggaataggttcctggggtgtggctggtggccaggtccttgggggagctaggccggggcctgcagaccagtccagtggtgggtcctgggctggcactgggaatcagtccagtggaaggtcctggattgggcctggggatcaggctgttgactgttccaagcctgaatttgaggatcaggcttgtggaggaggctcctgggctggtgctgggagccaagccagtggagaatcctgggctggatctaggcctgggaatgaggccattggaggatctaggatgggatctgaggaccaggccactggaggatcctgggctagatctgaggaccaggccagtggaaggttccaggtcagttttgaggtggaggccaatgaaggattctggtttgggcctggagctgaggccgttatagggtcttggtgctggacagaggaaaaagctgatattgtgtccaggcctgatgataaagatgaggccactactgcatccagatcaggggctggggaagaggccatgatttgttctaggattgaggctgagaacaaggctaagtctaggcttggggctggggaagaggctggtgtagagtcctggaccttggctaggaatgtgggagaggatgagctaagtagagagtccagccctgatattgaggagatcagtttaaggtctttgttttgggctgagagtgagaacagtaatacgttcagatctaagagtgggaaagatgccagttttgagtctggagctggggataacaccagcatcaaggataagtttgaggctgctggtggagttgatatagggtcttggttctgtgctggtaatgaaaacacaagtgaggacaaatctgcacctaaggctaaagccaaaaagtcatctgagtcaagaggcatatatccgtacatggtccctggggcaggaatggggtcatgggatggagccatgatctggtcggaaactaagtttgcacaccaaagtgaggccagcttcccagttgaagatgagtccagaaaacaaaccaggactggggaaaaaactcggccctggtcttgccgctgtaaacacgaagctaatatggatccacgagatcttgaaaaactcatttgcatgattgagatgactgaagatccttctgttcatgaaatagccaataatgctttatataacagtgctgattattcttattctcatgaagttgttcgtaatgtaggtggaatttcagttattgaaagcttgctcaataatccctaccccagtgttaggcagaaggctttaaatgcactgaataatatctcagtggctgctgaaaaccataggaaggttaaaacttacttaaaccaagtatgtgaagacactgtcacctatcccttgaattcaaatgtgcagttggctggactaaggttgataaggcatctgactattaccagtgaatatcagcatatggttacaaattatatttcagaatttcttcgtttgttaacggtgggaagtggagaaactaaagaccatgttttgggaatgcttttgaatttctctaaaaatccatctatgacaaaagacttgctcattgccaatgcaccaacatcactgattaacatttttagcaagaaagagacaaaggagaatattcttaatgctctttcactatttgaaaatataaattaccattttaaaagaagagcaaaagcatttacccaggacaaattcagtaaaaattccctttatttcctattccaacgacctaaagcatgtgccaagaaacttcgagccttagcagcagaatgcaatgaccctgaggtgaaagagagagttgagctattaataagtaaactctga

SEQ ID NO: 148177 - DNA, 863 bp, Homo sapiens
  misc_feature (1)...(863): n = a,t,c or g
tacgcagccttaggtgcagacgtcactcgtgtctcgctaccaactccccgctgccctgcgctcggtgcgctggcatccggcccgggggaaagcggaccaacccttctgcaggactgcggggccaagtgtcccggcggncgcaacctcgtggcgagaatcgggagaaggaggagactacaaggataggcccaggagtaatggagtccaaagagaaacgagcagtaaacagtctcagcatggaaaatgccaaccaagaaaatgaagaaaaggagcaagttgctaataaaggggagcccttggccctccctttggatgctggtgaatactgtgtgcctagagggaaatcgtagggcggttccgcgtttagggcagcccatcctgcagtatagatgggatatgatgcataggccttggagaacccacaggccaagggatgaagagaagagaataatggaaaaggattggggaggaggtgagacagctgatgggaaaaagctggagggggaaaagccagttggagtcataagtctgcggggcgagtcaggcactgaccccccctcacccatgacccatcatgattgagtttttgccttattgcccctgaatccttgatggttttccctaaagttattacgggaaacagacccctgctttccgaatttacatgttccatgatgtgcccctgtttgtaaacctttacctgtcacttgtttaccgtgggtctcctattaccaagcttctaatttgaattattgtgtttttgaaccagtctgtaagatttttgttagcagaagaattttacctattgcttggaaagatgctcattatagtgaagttaataaagcacctttaaaaagcaaaaa

SEQ ID NO: 148178 - DNA, 579 bp, Homo sapiens
gagatggagtctcactctgtcatccaggctagagtgcagtggacaatcttggttcattgtaacctctgcctcttgggttcaagcgattctcctgcctcagccttccaagtagctgggatcacaggtgtgcactacaacgcctgagtaatttttgtatttgttagtagagacagggttttgctatgttggccaggctggtcttgaattcctgacctcaactgatccgcctgcctcaggcttccaaaattgctggaattacagggatgagaaaccacaccccgccgagactgtttcaaaaacaacaacgacaaaaaattatatttgtgtctcaactataaactataaaaagaaaaatctaggtctatcaaatattttatagaaataagtattcttaaacagtaattagagttctctgatggctgttatcctaaattattgtaggtcaataaatttacctttggaaaacaaaagtgtaatgtcaagtacatagtttataaccatttttttaactgaattaatattaaaaaattcaggtttaccgtaagttaactgtcaacatgaacttcaacatcaagagac

SEQ ID NO: 148179 - DNA, 933 bp, Homo sapiens
tttgagacagagtctcacgctctgcagcccaagctggagtgagtggtgcaactcagctcactgcaacctctgcctcccaggttcaagtgattctcctgccttagcctcccgagtacctgggattacaggcacacaccaccacgtccagctaatttttgtatttttagtagagacagggtttcaccatgttgggcaggctggtctcaatccctggacctcaagtgatccacctgccttggcctcccaaagggttgggattacatgcatgagccactgtgcctggctcacacatttcttgaatcatgcccaggttatgagaatagagggtcagggccagaatcttgggaatatgagttctaagaaaagggttttccgtgatacccttggctggctttcttcactttgggcatttaaggaaactaaaactccagacgggaagagcttgccccaagagcatgcagctactggtctggctgtgtctcctcggtgccagccatgcaggcctctccccatctgaccttcactcggggaccttccctggctgtgctgaaacccatggcttcatgagttgtgctgagccctccccagtcgacagtggtgaagatcgaaagattttgctggattctagaccgtggtttctcaatctcagccctattggtatttgcggccgggtaattctttgctgtgtgggagctgtcctgtgtattgtaggacactgagcagcatcaatggcctctacctactggatgcagtagaccgctcccccgacaatctcacaaccaactccagaccttggcaagtgtgccctggggagcaaaatcaccttcagttaagaaccactgctccagagcatgaagaactactcagctttggcagaaagggaatcccaaaatataagctcaattcattttataatattttgttttgcccacg

SEQ ID NO: 148180 - DNA, 445 bp, Homo sapiens
gcggccgcctactactactatacggctgcgagaagacgacagaaggggagacacaaccagcagctgatccaggaggtccgctgcagcggccaggagctgagcagggtgcaggaggagctgaagttgaggcagcagctgctctcacagaatgacaagctattgcagtctctccgagtggagctgaaggcgtatgagaagctggatgaagagcacaggagactgagagatggtgacaaatatcccatggaaagtgataattcatttgatctgtttgattcctcccaggcagtgacaccaaaatcagtttcagagactcctccactctctgggaatgacacggactccctctcctgcgacagtggcagttcggcaactagcactccgtgtgtgtcccgcctggtcaccggccaccacctgtgggccagcaagaatggccgccatgtcc

SEQ ID NO: 148181 - DNA, 4265 bp, Homo sapiens
gacagtatcaacaacctgcaggctgagttaaacaagatttttgccctgcggaagcaactggagcaggatgtgctttcatatcagaatttgcggaagaccttggaggagcagatcagcgaaattcggaggcgggaagaagaatcattttcactttatagtgatcaaacatcttatctaagtatttgccttgaagaaaacaatcggtttcaagtggaacatttttctcaagaagaacttaagaaaaaggtcagtgaccttatacagctagtgaaggagctgtatacagacaaccagcacctgaagaaaaccatttttgatctctcctgcatgggtttccagggaaatgggtttccagatagacttgcgtctacagaacaaacagagattatgaaagacctttccaaaggaggctgcaaaaatggatacttaaggcacacggagtctaagatttcagattgtgatggggcccacgcacctggctgcctagaagaaggtgcattcataaacctgcttgcccctttgttcaatgagaaggccacattattactggaatccaggccagaccttctgaaagtggtacgggaactgcttctgggacaactattcttgacagagcaggaagtttctggagaacaccttgatggtaaaactgagaagacacctaagcaaaaaggtgaacttgtacattttgtccaaaccaactcattttccaagccacatgatgaactgaagttgtcttgtgaggcccagctagtaaaggcaggcgaagtgcccaaggtaggactgaaagatgcctcagtgcagactgtggccacggagggcgacctgctgagattcaagcatgaagcaacaagagaggcttgggaagagaaaccgatcaacactgcactcagcgcagagcatcggccagagaacctgcacggggtgcctgggtggcaggctgccctcctttccctccctggtattaccaacagagaggctaagaagtcccgcttgccaatcctaataaaaccatcccggtcattaggaaatatgtatcgtctccctgccacccaggaggtggtgacgcagctgcagagccagatcttggagctgcagggggagctgaaggagtttaaaacttgtaataagcaacttcaccaaaagttaattctggctgaagcagtgatggaggggaggccaacgcccgacaaaacgttgctgaatgctcagccccctgtgggagcagcctaccaggacagcccaggagagcagaaaggaattaaaaccacatcttctgtctggagagacaaggaaatggacagtgatcagcaaagaagctacgagattgactctgagatttgcccacctgatgaccttgccagcttgccatcatgcaaagaaaatcctgaagatgttctgagcccaacttcagtagctacttacctgagttccaagagtcagccttctgctaaagtcagtgtgatggggactgatcagtcagagagcattaatacctcaaatgagacagaatacttaaaacagaaaatccatgacttggaaactgagctggaaggctaccagaatttcatatttcagcttcaaaagcactcccagtgcagtgaggccataattacagttttgtgtgggacagaaggggcccaggatggcttgagcaagcccaagaatggttctgatggggaagaaatgaccttttcaagtttgcaccaagtgcgatacgtgaaacacgtgaaaatcctcggtccgctggccccagagatgattgacagcagggtgctggagaacctcaaacagcagctggaggaacaggaatacaagctgcagaaggagcagaatttgaacatgcaacttttcagtgagatccataatctgcagaataagttcagagatctctcacctcccagatacgattcattagttcagtcccaagccagggagctctcccttcaacggcagcagattaaggatggccatggcatctgtgtcatctcccgtcaacacatgaacaccatgattaaggcatttgaggagttgctgcaggccagtgatgtggattactgtgtggccgagggtttccaggaacagctgaatcaatgtgctgagctgctggagaaattggaaaagctatttctcaacggaaaatcagttggagtggaaatgaacacccagaatgaactgatggagaggattgaggaagacaacttaacctaccaacatcttctgcctgaatctcctgagccttcagcctctcatgcgctctctgattatgaaacatctgaaaagtccttcttctcacgagaccagaagcaagataatgagacagagaagacttcagttatggtgaacagtttttctcaagacttactaatggaacacatacaggaaattcgaactttgagaaagcgtttagaagaatctattaaaacaaatgagaagctacggaaacagttggaacggcaaggatctgaatttgttcaaggttctacaagcatttttgcttctggttcagagcttcatagttctctaacatcagaaattcatttcttgaggaagcagaaccaggccctcaatgcaatgctcattaaaggatccagagataaacagaaggagaatgacaaattacgagagtccctctccaggaagaccgtgagcctggagcaccttcagcgggagtatgccagcgtgaaggaagaaaatgaaaggctgcagaaagaatgcagcgagtaaggagagacacaaccagcagctgatccaggaggtccgctgcagcggccaggagctgagcagggtgcaggaggagctgaagttgaggcagcagctgctctcacagaatgacaagctattgcagtctctccgagtggagctgaaggcgtatgagaagctggatgaagagcacaggagactgagagaggcgtcgggagaaggctggaaggggcaggatcctttcagggacctgcacagcctcctgatggagatccaggctctgcgcttgcaactagaaaggagcatcgaaaccagcagcactctgcagagcaggcgtcaaggaacagctggcaaggggggcagagaaggcacaggaaggagccctcactctggctgtccaagccgtgtccatccctgaggtgccccttcagcctgacaaacacgatggtgacaaatatcccatggaaagtgataattcatttgatctgtttgattcctcccaggcagtgacaccaaaatcagtttcagagactcctccactctctgggaatgacacggactccctctcctgcgacagtggcagttcggcaactagcactccgtgtgtgtcccgcctggtcactggccaccacctgtgggccagcaagaatggccgccatgtcctgggcctgattgaggactatgaggccctgctcaaacagatcagccagggacagaggctccttgctgaaatggacatttcaaacccaagaggctcccagctccacaagtcaagagctggggaacaaagggtccacaccccagcaccactgagcaagtttgtgagcagtgtgagcacggccaagctgaccctgggaagaggcctacaggcgggcttgaagcttctctgggagagtctcactccccgaggatggccagttgccccttcactgtgagcagatttggagaaatgaaaggcagagggtccccaaactacataaaaaattgtttgaacaagaaaagaagtttgcaaaaacaccttgaaggtttttgcagctgagcaaagcgccaggaaaaagtcatctttgatcaatttggtcgtaacccacaaaatccttcggaaggccagaggaaacctggagcttaggcctgggggagcccattcaagaaccatgcagtcccagcagacgcaggctcctgagaagaactttcagccaatgaaagcttgtgcttcccccaccgagctcacgctgtctctttgttcccaagtgtggttcctatttattgaggaagaaagagctgtctggccaaaggaaatctattttttcccttcatgttttctctcctgaaagttgggcttgagagttgttgtccagaaaggttgcaggtggctccacaaacgggtggtaaaaaggcctcgaggctccttggatgttgtatttcagatcaggggcaggcaccggagttcgaggctgtgcgccttggtggggcttcacgtcttcccctggatttgcttagtactcagccagtgccacagtttgaagaatcccattaaatgattcatttcatttcaaaaaaaaaaa

SEQ ID NO: 148182 - DNA, 1912 bp, Homo sapiens
  misc_feature (1)...(1912): n = a,t,c or g
tccggcaacattaaagtcttggaaagatttttgtatattgacacaaaattctcacaaaaccgatgccaaaaagctttacccatggcccacagtgcctaccagtcaaatttgcctcataattacacaatgactgtccataacaatcaacttgcccaggctcttcgagtgtacagtcaacatgctataggtgcagtattgtacaaatactccatgcaagtacatgaggactgctacaaattttggagcaatggccatgcagctctgtgaggagaggagtttaactgatcaacactgtgtgcacaaatttcactcattacctaaatcaggagaaaaaccagaggctgatagaaatccgcctgtgctatatcacaatagccgagctcgatctactggtgcttgcaactgtggaaggaaacaagcacctcgagatgatccctttgatatcaaagcagccaattatgacttctatcagcttctgggaagaaaagtgttgtgggaaaattggatccatattcaatttcccagtatttggaaccaagtactccaggatcctggctcctggcttaaaaatggaatcctctcctgctcctccagattcggatgctgataaacttaaagaaaaagaacctcaaacccaaggagagagcacgagcctgagtttagctttgagtttgggccaatccacagatagcttaggtacctatccagctgatccacaagcaggaggagataatccagaagttcatggtcaagtagaagtgaaaactgagaagagaccaaacttcgttgatcgacaggcatccacagttgagtatctcccaggcatgctacattcaaattgccctaaaggtctcctacccacattctccagctgggtctttgttaaactaggccctggctagtcttataactttcatacayggtttmggaccaacagggctttattccagggaacaaattatcttatgccttggggacattgtcatccagggctaggagctggagatgaaggagacttagacacaaactcttggcctgctccaaataaagctattcctggaaagagaagtgcggttgtaatgggaagaggaagacggcgagatgacatagctcgagcttttgtgggctttgaatatgaagactctcgaggtcggagattcatgtgctctggggccttgacaaagtaatgaaagtaatggggaagtggggccaaagggattcagcttttaaaagcccttaaatagttgacatgcccttatatattctgtcatcctctcaaggtagaagggctgaaaaccctcattacgctccaacttatgaggctttttgttgtggttcctgatgcctcctttgccagataatactaatgcctcaggttccagccaggccccacccacccatgtcccggtattctaccccagaaaaaccaagaaatcacccccctccccacccgaagggccccttggggttttgaagatncccccctaatgccatatgtgaaccgaagaagaggaccctgtttccccccccccaaggaaaatgtgccagttaaatgaagcctacaaggtgcccccgtggggttccttaaggcagtaacacaaataagtgttttcccagccagttcaatccctatacttgagtctggtttttgtttttggtatttgtggctgtgtttttggtatgtgtttactgtgttttcccaaatccaaaaatgtgttttggttacaggagttcagtatttggaaacttaatttgttctactttttcattatattgttgatatttattgtaaacgtgactacaactttctaataaagattggttgttctagaaaagaatataaaatacatggatgatacctgttttttctcgtttctgttttactctccataattaaacatgtttctattat

SEQ ID NO: 148183 - DNA, 1181 bp, Homo sapiens
  misc_feature (1)...(1181): n = a,t,c or g
gaggggggctggatggaggactatgactacgtccacctacaggggaaggaggagtttgagatgacccatatagagctgctggataagggcagcatcactcggcagggcatgagccagctgtagttggagcagctgaagctgtttgtacgactggaacaggaggtgtcacggcccatagaccacgacctggccatctggacgccagcccaacccctggccccggggcgttcaggcggttttggggccctcggaccggcagctgctgctcttctacctggagcagtgtgaggccaacctgaccacactgaccaacgccgtggacgccttctttaccgccgtgggccaccaaccagccgcccaagatcttggtgggcgccagcaaggttgttctcctcaggcgcccacaagctggtgttcatcggggacacactgtcacggcaggccaaaggctgctgacgtgcgccagccaggtgacccattacagcaacctgctggtgcgacctcctgcnagggcatcgtggccaccaccaaaggccgctgccttgcagtaccccatcgcctttcccgggcccaaggacatggttggaaaagggtcaaggagctgggccacagcacccaagcagtttccgccgcgttcttaagggcaacttggaagcccgcctgagggttggtgaccccaaggaagggaaggcaaggggaggggttgcggcggtcccagctccctggcttccccatgttcaagagttcgcttgttgccaacaggctttagggacaggaccccaagctctgcgtcggtcctggtgcccctggatgccccaggaatcctgtatatatttatggccgggacagggtgtggggccatgccctcctcaggagcccgaaaagcccaggggccggccagtgggccttcccccagcatgcacccacgggcccgggttggggttaccacaaccgggctgggaatgaaagggtcctgcagcctgcaggaccatcgtgccaccccgagggctgagcctggtcccacaaagggtgccgtgtccccctgacagggccagtgcagtttggtgtgtcctccgccttaccaggagaagaacctgaagaactatttttcgttattggttttccaatcatttgactaagagtctcccatttaaataaagtttttaaaaggaagagcaaaa

SEQ ID NO: 148184 - DNA, 1228 bp, Homo sapiens
ttttttttttgctgcagagtctcgctctgctggtcaggctagagtacagtggtgcgatctcggctcactgcaacctctgcctcccaggttcatgcgagtctcctgcctcagcctcctgagtagctgggattacaggcacctgccaccacgcttggctatgatttttgtatttttggtagagacagggtttcaccgtgttggctaggctgttctcaaactcctgacctcaagtgatccacccacctcagcctcccaaagtgctgggattacaggcatgagccaccatgcccagtctatttttattttttgagacaggatctggctctattgcccagggtggagtgcaatagtgcaatcttggctcactgcagcctctgcctcccaggctcaaaccatcctcccacctcagcctcctgagtagctaggactacaggcgtgtaccaacatgcccatctaatttttgtatttttggtagagatggggtttcgccatgttgcccagactggtctggaactcctgggctcaagtgaacctccaaccttggccctcccaaagtgctgggattacagacgtgagccaccatacccatccctattttctttaaaaaatgtgttttttacaaaatgtatggtaagtatatgtatttactgtgctttgtgataattttctcagtgacaaaaaatttccaattttgttaacatccatggtaaaatgatcctaatttcaaaaatttgttctagagccaagatccttataacctctataaatgtgtgtgaatagttagttggcaggtcctacaaagaaatgtcatttttattcatgtattttgggttgtttaaacatttctgtaagatttaaaatacttttcttcttatggctagaattctcagcatctactcccatgcctgcctttctaaaatctattggccagtttaagggtatttacaataatacaacttaaagacaaagtgtccataagtcattatttctaacagacagcataacacagtagaaattgccctgaccaaggaattagaagactggaattcaagtcctaactctgccactaactttgcaggatgaccttaggcaagtcatgtcacttctctcatttgtcaaataatgcaaatgattccattctaaggtattttccacctctaaaattgctttcatttactattattattttttaaataatgaaaacactttctgggaattgtctgagcgt

SEQ ID NO: 148185 - DNA, 320 bp, Homo sapiens
  misc_feature (1)...(320): n = a,t,c or g
ggctcaggtggaattcacagactgccactgtccagtcgtccagagcagcctatcgtctggctatgggccccaggatgctttagccacttgagccggctccaggtgaccgtgtaagtgagataaagcaaaggtgtcgtgagctgcaccactcactagctcagcaccccaggcaccaggctggaaaccacatctcgcacccaattctccatttaaaaattttacnnnnnnnnnnnnnnnnnnnnnnnnnnnnnnnnnnnnnnnnnnnnnnnnnnnnnnnnnnnnnnnnnnnnnnnnnnnnnnnnnnnnnnnnnnnnnntgcc

SEQ ID NO: 148186 - DNA, 341 bp, Homo sapiens
ttttttttgagacggagtcttgctctgtcagccaggctggagtgcagtggcgtgatcttggctcactgcaagctctgcctcctgggttcacgccattctcctgcctcagcctcccgagtagctgggactacaggcacctgccaccacacccggctaattttttgtatttttagtagagacagggtttcaccgtgttagccatgatggtcttgatctcctgactcgtgatccacctacctcggcctcccagagtgctgggattacaggtgtgagccaccgcgcccggccaatcgttgccatttttatgttctgtgaatacccactgtttagctcccactttt

SEQ ID NO: 148187 - DNA, 481 bp, Homo sapiens
  misc_feature (1)...(481): n = a,t,c or g
tcccgggtggtaattgaaatagctaaattattatttgaaaataggccaatttatatagataatagaattttataagggtgatttatattccaaataatggcccccnnnnnnnnnncagggccttttcaaatagggtcaacaggggatctttaatttaactgcattaaatgacatatggattacttttgtttttaggaaataacccccaccttaatctatattgnnnnnnnnnnnnnnnnnnnnnnnnnnnnnnnnnnnnnnnnnnnnnnnnnnnnnnnnnnnnnnnnnnnnnnnnnnnnnnnnnnnnnnnnnnnnnnnnnnnnnnnnnnntctctactatagtatagtagaatatatactactannnnnnnnnnnnnnnnnnnnnnnnnnnnnnnnnnnnnnnnnnnnnnnnnnnnnnnnnnnnnnnnnnnnnnnnnnnnnnnnnnnnnnnnnnnnnnnnnnnnnnnnnnnnnnnnnnnnn

SEQ ID NO: 148188 - DNA, 1468 bp, Homo sapiens
tttttttttttttttttagcatttttttcaaaatagggatttattataaaaactatacaaactttttatcactcacaaatgatgaaaaattttaaacaattagtatcctccctccaaaatagtgtgttctgtctttacagtcttcactggcagtgcattcagatagtatagaaaataacaaacattccatataactttgtccctacagtaaataattttttaaaacttttcatcaagtttcagtgttactgaagttaattatagacagtaaggattacagaataagcagtaaatggtcacctgcactgtatttttcaaagcaaaaattgttttatattttctatgttgttttatcctgccccaaacacttaaaagcaaaaagttaaaagatttttccccagttaccctgaaaacttcaaaaaatcctattgtactttgaaaaaaactttaaaaaccagcatcatttaaatagtggttaactcataaacgtgtatgcaacaacattcccacaaccctaataccactcaggcctgcagagtcaccagctcacaataaattcagtgctctgaaaaagctggggggaaagcccctgagtagtaagtatgcaacccagggtgtcgggtgctttcttgtggtgaaacaatgggtgtcaaaactgaggggactctccaaggtcctaatgaaaagcagctcctctaaacacctgaatcctttttgactccattctcatcactttaaggatgaagcctttctgtacaaaggctttgtacagaaattattaaaaactatattttacactaatgctaacagctaattgagcagaaagaactatgaagtacaaatttttctaaggttttcttattaatggcaatacagacttttttttttttgagacggagtctcgctctgttgcccagggtggagtgcagtggcgtgatcttggctcactgcaacctctgcctcctgggttcaagcgattctcctgcctcagcctcccgagtagctgggattacaggcacctgccacaataccccagctaaatttttgtatttttagtagagacagggtgtagtagtatatattctactatactatagtagagaccactatgttggccaggctggtctcgaactcctgaccccaggtgatccacccgcctcgacctcccaaaatgctgggattacaggtttgagccaccgcacctggtcggcaatatagattaaggtgggggttatttcctaaaaacaaaagtaatccatatgtcatctaatgcagttaaattaaagatcacctgttgacactatttgaaaaggccttgaaaaaaaaaagggggccattatttggaatataaatcacccttataaaattctattatctatataaattggcctattttcaaataataatttagctatttcaattaccattttaagcaataaaaggcaaaaacaaagggaacctactgaat

SEQ ID NO: 148189 - DNA, 336 bp, Homo sapiens; identical to SEQ ID NO: 146801

SEQ ID NO: 148190 - DNA, 891 bp, Homo sapiens
gacattgtatttagtctttccttccattcattaaacaaatcttactgtgcatgtagggagtatagaatgctacatttaatcttacgagatcatgctgtttaccaaattttatgatgaaattaatgctttcttcagtaggcagtcttacattgtaggcagactcctgtcaagttttgtctttcaaaatggtcctcattagcaagttaccaaaagtaaaaatagggcaataaagtaacagaattccttttaaacccatagtaagctcttctggcatgaatttatagccctcttctacccttccagccaaaggtcattccaaatgctatatgtggaatttgtctgaagggtaaggagtccaacaagaaaggaaaggctgaatcacttatacactgctcccaatgtgagaatagtggtaagtatctgaaatgtctttttaaaattttaaccaccgtatttattggttcaaaaactagaatttatagtttcaggcagatttcaaccaaagagtcaccaaattaaatacacagggtagcttgtgaggcatagacacagcccatgtgttttcctctacattgtatattcatttctctttggcgatttgacattatagccattctctggaagtcctaaagcaaactagtattttatgtgccatattaagttaaaatttcttatgtgagataccactaatactggttttgatttaggccatccttcttgcctggatatgacaatggagcttgtttctatgattaagacctacccatggcagtgtatggaatgtaaaacatgcattatatgtggacaaccccaccatgaagaagaaatgatgttctgtgatatgtgtgacagaggttatcatactttttgtgtgggccttggtgctattcc

SEQ ID NO: 148191 - DNA, 1390 bp, Homo sapiens
gtttgctgtgaaccttgctacttgtacttggttgaagttctaggtacctttagtcaagggatggaaaaataaagccatacgcagttttgttacctcagttaccccaaaaataggaaaagcagcaagcacagtattttaaagatcataattcctataaaaggactgtgcacaaagtgtttagactccattttcattaggcaggttgactaaaaatgattgcagtaacaggtttatataaaatagagcaacctttcatgctgtgacacaaatcaaaaggttgataactttgtaattttactctggagattctaaccgaagttggtgtaagttttcaagagttactaaaatcaagttggaaatgatttacgtacacttccctgagcctggactaaagcctcatgcctgtaccccaagtaggtgatggtacttttctatacaaaaaggatttcctggcaggcaggtatttacaaagtttgttcctgtaccagtccaataatgacaactctaaatccagctgcaccaaatcttagtgggccatttgtcatacctatgaaaattcttcagttattaaataactttgtcagtgctacctatggtaggccggaaacaatgtagattaggaagtttcatgaaaattaacttttggggctatggagaaacagttaagtatcttaagttactaaacatttccactgaatttttggagtgagccaaggttactataaaatactttggaagatgaattctctacctggagttagtttcgagagtaagcgtagcttttaacagaaataactgcagattttaagctcataatttgcaaaaaaaatcttttattggcatgaaaataatcgttgtaaatggcgaccaaatattccacttaaatgcatatacagtattacgagtcaaaaactattttatccctctttgctgtttttcccccttctgcccactttcctgggtgttgggggggcccgctgacaacagtcacaaatccagcgacctaggaaaaaaattgttaatatagaatgaaaaattatctttacaggactgaattttaagcccatcttaaactcttctgccttagctattcacttaatgatattcctctctgggattttgtgggtgaggaaggggcactatggagttccttaatttaaggaaaaaatgtaaacttggatccaatgtaatcaatggcccatgccaaaaatttccattgcaagtccaaggggggatgggagagatgcaatgccatacggtggatacggacctttaagaaagtacaatctttcctgaaattcaaacactatcatacttcaaaaggtcaaaacccattccggaatttggcttttttaagactttttctctcctgctcactggcagctgtgtg

SEQ ID NO: 148192 - DNA, 730 bp, Homo sapiens
tggacgcggttatcaaaaccctggccgtcaatgcacttcggacagactgtctgaacatgtatctgaaggggaaagccctcctgacagccaggaggactctttccagggaagacagaaatcaaaagacaaagctgccactccaagaaaagatggtcccaaacgttctgtactgtccaagtcagttcctgggtacaagccaaaggtcattccaaatgctatatgtggaatttgtctgaagggtagggagtccaacaaagaaaggaaaggctgaatccactttatacactgctcccaatgtgagaatagtggcccatccttcttgcctggatatgacaaatggagcttgtttctatgattaagaccttaccccatggcagtgtatggaatgtaaaacatgccatatatgtggacaacccccaccatgaagaagaaatgatgttctgttgatatgtgtgacagaggttaccatactttttgtgggggccctgggtctaatccaacaaggcccttgaatttgtaactgttgtcagcgggcccccccaacacccaggaaagtgggcagaagggggaaaaacagcaaagagggataaaatagtttttgactctaatactgtatatgcatttaaagtggaatatttggtgccatttacaacattattttcatgccaataaaagattttttttgcaaagtaaaaaaaaaaaaaaaaaaaaaaaaaaaaagtcgtatcga

SEQ ID NO: 148193 - DNA, 428 bp, Homo sapiens
tccttggaagacagggtcttgctctgtcacccaggcacagcttactgcagccttgaactcctgggatcaatcagtcctcctgctcttactctcacctctgaggcctcctctgcctggaagagattacagggaaattccaggcagcccttgtcaattgtttttatgaattctttacctgttccttttaaagacaaggaaactgaggcccaaagttctaagttgtttggcaaatggagtctcctaccctcagctcctgcaaggacctgggggacccccaggtcatggcagccacatgattctgcagcctttggtccagtgctgctccttggaacagttgagtgtggcctcaaaccattctcctgggtagctcagtcataaaacaccgaatgcctgcctcaaaatagcctctgagggaagggagctgttga

SEQ ID NO: 148194 - DNA, 1452 bp, Homo sapiens
  misc_feature (1)...(1452): n = a,t,c or g
cttgtagacagggtcttgctctgtcacccaggcacagcttactgcagccttgaactcctgggatcaatcagtcctcctgcctcagcctcccgagtagctaagactaacaggtatgtaccaccatgcctggtttattgttttatttttttggcagagatgggtctcactgtgttgcccaggctgatctcaaactcctggcctcaagcgatcctcccatctcagcctcccaaagtgctgggattacagacctgagccaccacacctggggcaacagagtgaaacctgtccctgttttcctgctcttactctcacctctgaggcctcctctgcctggaagagattacagggaaattccaggcagcccttgtcaatggttttaatgaattctttaccggttccgtttaaagacaaggaaactgagggcccaaagttctaagttgtttggcaaatggagtctccttaccctcagctcctgcaagggacctggggggacccccaggtcaaggcaggccacatgattcttgcaggcagacaggggacctaggaggcacatctggatctcagccccacccctggcaacctgcctgcctagagaactcccaagatgacagactaagtaggattctgccatttagaataattctggtatcctgggcgttgcgttaagttgcttaactttcattctgtcttacgatagtctttcagaggtgggaacagatgaagaaaccatgccccagaagaaggttaagtgacttccctctttaatggaagccaagttgttccaaccctaggttttgcctgataccaagacctgtggcccccacctccccattngcaagggtctctggtgggggggtcttttgggatggatctcccctagggctgggctggaacttcattgtacttgttgtcttcttagggtaacccacccctgaagagaaggggtgggcattcagggaaccgcagggaacccaagcagccttttggtcccagtgctgctcccttggaacagttgaaatgtggccctcaaaaccattctccctgggtaagctcaagtcataaaacacccgaatgcctgcctcaaaatagccctctgagggaagggagctgttgacaagtgaagccctcaggttgtgtgggattcccagcaggttattacagcttgtggggggagggagggtccattccaccgagctttgaatcccagggtcccctcagcttcactgggcgcacagtgtctgtcccaggaaagaagcaaatggacagtgacggactgatggagagacttacagctgccttgtctaaaacctgggatcttaaaagtgttattttggcttttattttttaaaaaaagaaaaggaaaattggcaattgtattaatccattctcgaattgctgtaaagaaatacctgagactgggtaatttaatttataaagaaaagaggtttaaaa

SEQ ID NO: 148195 - DNA, 1152 bp, Homo sapiens
cgaatagctgggattacaggcatccgctgtcatgcctggctaatttttgtatttttagtagagacgggggtttcaccatcttgaccaaactggtcttgaactcttgacctcgtgatccagctgcctcggcctctcagagtgttgggattacaggcgtgagcacgcatggcctggcctcttggaatatttaataagctaaaaaattcttatacacaggtagattaattaggtagccaggagtggcccctgaaagtatgtctggcaaaacctagaactgcatcctagccatcactgtaccttctgccctccctgctgtctcctctgccagttacagttaaaaggttgtggggtgagggacgctggggcaggagtcccaggcgtcttgcttgttcagcttccccaggcccgggccttgccttgccgaggccatctggggcgttcccacggtggagagtgtggtgcttgtgacgcggtggtgctgggagccatccctggtggcagatgtgggctctcactgcaagtcagtgtaagtccccagggactgtcagcagcacgtcctgctgcccctctctctgcagaagccctggtaacctgcgtttggaaaaatctctaaggatttctgaggagctgtcaggccatgtccttgtccaccctgtgtggggcacggcttcgacatggctctgctccccgtcgtgggctgaagaaaggagcagggtggggctgtgcccttgggaaaaggaggcccctccccgaacatgccctttgtgccgaggtcccctgtcccatgcctgttctcccatcccccgggaccttacggccgatggggtggcccaccagagccctattcccaagagtctggtttagggctgggtcttccccatcttcacctctgagtcttaggcgatgcgtgaccacgcagcccccttccaggagtctggtttagggctgggtcttcccatcttcacctctgagtcttaggccgtgcatgaccacgcagccccttcccggagtctggtttagggctgcgtgctcaagagtctggttttgggctgggtctttcccatcgccctggaggaggcttttgtctcatctcatgattcacattaaactaatgtgccatgaagcttagcctgaaaaaaaaaaaaaaaaaaa

SEQ ID NO: 148196 - DNA, 717 bp, Homo sapiens
atgaagaaagacttgccagacagttttgaggccatcaaggatccatgtgaggatagagatgacttcttaacactgatctcagaagtggatttcgataacaacatacagttgtctctcacactggctgcactatccattggactgtggtggacttttgatagatctagaagtggttttggccttggagtaggaattgccttcttggcaactgtggtcactcaactgctagtatataatggtgtttaccaatatacatctccagatttcctctatgttcgttcttggttaccatgtatattttttgctggaggcataacaatgggaaacattggtcgacaactggcaatggtatttattcgcgataagctcatggagcggcgtaaccgtcgcacaggaaggacagagaaagcgcggatctgggaagtgacggacagaacggtcaggacctggattggggaggcggttgccgccgctgctgctgacggtgtgacgttctctgttccggtcacaccacatacgttccgccattcctatgcgatgcacatgctgtatgccggtataccgctgaaagttctgcaaagcctgatgggacataagtccatcagttcaacggaagtctacacgaaggtttttgcgctggatgtggctgcccggcaccgggtgcagtttgcgatgccggagtctgatgcggttgcgatgctgaaacaattatcctga

SEQ ID NO: 148197 - DNA, 2824 bp, Homo sapiens
  misc_feature (1)...(2824): n = a,t,c or g
atggcagaaggagagacagagtcacctgggcccaaaaagtgtggcccatatatttcatctgtcactagccagagtgtgaacttgatgattcgaggagtagtgctattttttattggagtatttcttgcattagtgttaaatttacttcagattcagagaaatgtgacgctctttccacctgatgtgattgcaagcatcttttcttctgcatggtgggtacccccatgctgtggcacggcttcagctgtgattgggttattatacccctgcattgacagacatctaggagaaccacataaatttaaaaagagagtggtccagtgtaatgcggtgtgtagcagtctttgttggtataaatcatgccagtgctaaagtggatttcgataacaacatacagttgtctctcacactggctgcactatccattggactgtggtggacttttgatagatctagaagtggttttggccttggagtaggaatgcttttctttggcaactgtggtcactcacctgtaagtatataatggtgtttaccaatatacatctccagatttcctctatgttccgttcttggttacccatgtatattttttgctggaggcataacaatgggaaacattggtcggacaactggcaatgtacgaatgtaaagttatcgcagaaaaaatcccatcaggaatgaagaaggcaaaaaaatatcttttgtacagaaaagcaagatgaaaaggatgtgaaatggtagatataccaacaaaacttcagactgtaaaattgccaggatgcagttttccccttgattggccgtgtgtgtatatatggaataaatatatatatacacacacacatattactgcaatcctgtgattgcttcatctgtaaatcagttgtaaacctttacatatttgacttaaataactgtaagatatatatgtactacattaaaaagtgttgattaatagatgaaatttttaaattaattttttaaaacatgccatacattgtatcacaatgttaatgtgccaagatattgttcctgtcatgcagagtataagaatgctttgaacaatttgtaggacttagtggaaataaaataagagggaaaggccaaaaacaaacaaacaaaaggctatggggggagctgggtattttctctttaggcttactgttgtgcctttttatttttctaatcacagcagtatgagttatgagtgccctaatttgtggttagtttctaatttaatgttgtttcatagagtttgggagtgttttggataccgggttgaaaatgaacttctggtttcaaacctgcgttactgggagacagcccaaagagtaattttctgttttggacaggttttactgggaagtatatgtgatgaggcagaagaggttatcaggcatttaaattgttttgggttctaaatttgggaacagtattatattaatttaaaagtaagggaacattaggagggattttaattaggaataaatacatgttttgggaaatacagtgacctcttgcagtgtcacaaaagtgcaaagtgatattaggctgtccatctggccantacaggaatctcattgcttttgcacatgggagcatatagggaaactccaaacagatcacaatgagggtttctaaatctgttggggttctgtcttcttattggggttctgtgaaggcaaaccactgtaggctttagctggggttcagtcatatggacttcgttgggtggggatggcctagggtttttcatcttacatgcagtcttggggggtgggatgaatacataatttcttatgtattcgtgtatcccttagtggaatagttccaagtctgtttaaggagtgtattgagatggcattctctgcatgttaaagatcttaatggcaaccagcacctcttaagtatggtttaaacatattcttagctaattttttccattagtttttgaaattggtggcaagttgtctgatccacaaagggcaagatcttctgaagtactctggggtgtgaagtatgtgtgcacacgtgtgtgtgttgggaagttgaagtgagaagaatgtgtcctggtgcatgtggcccctgcctttccccagaatgtccaagtagatatttttacccctttgaggtttaaaaggcaattaccctatccagacctgaggatcctggtatggcccaaaccttaatcctgcctttatggttttccagggctgaagggtgtgaaaatccctaagaggatttccatattgaatatgtgtacacaatccttaactatccgtggtggaaaacatacctactataatttattattatatcttcccagataatgttattcatttagaacaaataaggtatattttttagaatcaactttgtaagcactataaaatctttaataagttataaggtctatgatgtgtttcctttaaaaaattgcctgttaaaagccaaccccgtattaaatatggtaattatcatctgggttaagagtctgtttttccttcctttgtggtaagtccttagaatatggtactgtggattaatctaatgaaattaacatatgtggttgaagttacccaagaaacgatgaaaagaaactaaatatagttgacccttgaacaacaggagttaggggcaccactccccaacatagttgaaaatccatgtataacttttgactcctccaaaacttaactactaatagcctactcttgatgggaagccttaccaataagaaacagttgatgaacacatattgtgtatggtatatgtattatatactgttttcttacaatagtgtaagtctaaggaaaaaaaa

SEQ ID NO: 148198 - DNA, 537 bp, Homo sapiens
  misc_feature (1)...(537): n = a,t,c or g
aggccntttgnnnnnnnnnnnagnnnnnnnnnnttagatcnccnctcttagatccacattccagagnggacgaantctcgatgccgccttcacccgcatcaactgtcatgggaagacctacctcttcaagggtagtcagcactgtcgctttgaggatggcgtcctggaccctgattacccccgaaatatatctgacgggttcgatggcatcccggacaacgtggatgcaggcttggccctccctgcccatatctacagtggccgggagcgggtctacttcttcaaggggaaacagtactgggagtaccagttccagcaccagcccaatctagaggagcgtgaaggcagctccctgtcggctgtgttcgaacactttgccatgatgcagcgtgacagctgggaggacatcttcgagcttctcttctggggcaaaacctctgctggtaccagacagccccagttcattaacctggactggcacggcgagccatggcaagcggacgcagccatggctggccgcatctacatctcaggcat

SEQ ID NO: 148199 - DNA, 384 bp, Homo sapiens
agatccttttttttagttttttttgacattcagccaatctgcctattctttgtaagggcaagagatacatattcccaagctcaacacataattacgctcaagctcaacacataatctcactcaagacaacttctttttgaaaatgaagtaaaagacagtgggctcacctatggagccctacacactagttaggagcaagggtttgatggtcacttggcaagttggatatctttaaaagacactgcgaagtggaaaaatggggacgagctctgctcttactaccagagctgctgcacagactatacggctgagtgcaagccccaagtgactcgcggggatgtgttcactatgccggaggatgagtacacggtctatgacgatggc

SEQ ID NO: 148200 - DNA, 1739 bp, Homo sapiens
  misc_feature (1)...(1739): n = a,t,c or g
ccggtcgacccacgcgtgcgctgcctctccctcccttcctcaggcattagagttgagacttcagggagaccagagcccagcttgggaggcactgagctagaagccctgccatggcacccctgagaccccttctcatactggccctgctggcatgggttgctctggctgaccaagagtcatgcaagggccgctgcactgagggcttcaacgtggacaagaagtgccagcgtgacgagctctgctcttgactaccagagctgctgcacagactatacggctgagtgcaagccccaagtgactcgcggggatgtgttcactatgccggaggatgagtacacggtatatgaacgactgggcgaggagaaaaacaatgccactgtccatgaacaggtggggggcccctccctgacctctgacctccaggcccagtccaaagggaaatcctgagcagacacctgttctgaaacctgaggaagaggcccctgcgcctgaggtgggcgcctctaagcctgaggggatagactcaaggcctgagacccttcatccaggggagacctcagcccccagcagaggaggagctgtgcagtgggaagccattcgacgccttcaccgacctcaagaacggttccctctttgccttccgagggcagtactgctatgaactggacgaaaaggcagtgaggcctggggtaccccaagctcatcccgagatgtctggggcatcgagggccccattcgatgccgccttcaccccgcatcaacttgttcaggggaagaccttacctcttcaaagggtagtcagtactgggcgcttttgaggatggtgttcctgggaccctggatttacccccgaaatatctcttggacggctttcgatgggcattccncgggacaaacgtgggattgcagccttgggcctcccttgcccattagcttacagtggccgggagcgggtcttatttctttcaaagggggaaacagtactggggagttaccagtttccaggcaccagccccgttcaggaggagtgtgaaggcagctccctgttcggctgtgttttgaacactttgccatgatggcagcgggacagctggggaggacatctttcgagcttctctttctggggggcagaacgctctggctgggttaccagaacagccccagtttcatttagccggggaatgggcacggtgtgccagggccaagtggacggcagccatgggtnggccgcatcttacatcttcagggcatggcaacccggccccttctttggccaaagaaaaaaaaggtttaggcattcgcaaccggcaaaggctaccgttcactaacgggacgcacagccgtggccgctaaccagaaactccccgccggcccatcccgcgccaatgtggctgtcctttgttcttccaagtgaggagagcaacttgggagccaaacaactatggatgactacaggatggacatggcttgtggcttgccacctgtgaacccattcaagagtgtttttttttttnttttggagacaagtactaccgagtcaatcttcgcacacggcgagtggacactgtggaccctccctacccgacgctccatcgctcagtactggctgggctgcccagctcctggccatctgtaggagtcagagcccacatggccgggccctctgtagctccctcctcccatctccttcccccagcccaataaaggtcccttagccccgaaaaaaaaaaaaaaaaaaa

SEQ ID NO: 148201 - DNA, 426 bp, Homo sapiens
ggaattcgacgggcactggtgccttgtgcatgtcggggtctgacgctggctccctgttgcagagtgtgactccagctgtgtgggctgcacaggggaaggcccaggaaactgtaaagagtgtatctctggctacgcgagggagcacggacagtgtgcaggtcagtgacggggtctgtgctggacgctggtggacccttcccaagtgaccatgatgtgaatggccccagcaggtactgccagggatgggaagcagttgagacccgtcctgcagacgtggctcccccagggtcactgtgcactcgccctgaggtccacgtgagacacagaagcagtgggggtgggggacgggctctgcatggccgaccctggtgtggatggcgctgctgcaccagcctctcgccggtggcctcgttccccaggtccacc

SEQ ID NO: 148202 - DNA, 1454 bp, Homo sapiens
  misc_feature (1)...(1454): n = a,t,c or g
tttcgtccgcgccggaggccgccaagaagccgacgccctgccaccggtgccgggggctggtggacaagtttaaccaggggatggtggacaccgcaaagaagaactttggcggcgggaacacggcttgggaggaaaagacgctgtccaagtacgagtccagcgagattcgcctgctggagatcctggaggggctgtgcgagagcagcgacttcgaatgcaaccagatgctagaggcgcaggaggagcacctggaggcctggtggctgcagctgaagagcgaatatcctgacttattcgagtggttttgtgtgaagacactgaaagtgtgctgcgtctccaggaaccgtacggtcccgactgtctcgcatgccagggcggatcccagaggcccgtgcagcgggaatggccactgcagccggagatgggagcagacagggcgacgggtcctgccggtgccacatggggtaccagggcccgctgtgcacttgactgcatggaccggctacttcagctccgctcccggaacgagacccacagcatcttgcacagcagtcaggaccggcctctccgattcttacccgccttgctgtctgtctcttggatgttggcgtggcgtgggccacgcatggatccgtggccggaacacgcacacccagccaggctacagctccagagtatggatagctgccttctctccagcctgtgacgagtcctgcaagacgtgctcgggcctgaccaacagagactgcggcgagtgtgaagtgggctgggttctgaacaagggcgccttgtgtggatgtggaaaagtgtgcggcccaaaccgcctccctgcagcgctgcgcagttctgtaagaacgccaacggctcctacacgtgcgaaggagtgtgactccagctgtgtgggctgcacaggggaaggcccaggaaactgtaaacagtgtatctctggctacgcgagggagcacggacaagtgtgcagatgtggaacgagtgcntcactagccagaaaaaaccctgtgtgaggaaaaaacgaaaacttgctacaatactcccggggagctacggtctgtgtgtgtcctgacggcttcgaagaaacggaagatgcctgtgtgccgccggcagaaggctgaagccacagaaaggagaaagcccgacacagctgcccctcccgtgaagacctgtaatgtgccggacttaaccctttaaattattcagaaggatgtcccgtggaaaatgtggccctgaggatgccgtctcctgcagtggacagcggcggggagagagctgccgctcctctaacggttgattcctcatttgtcccttaaacagctgcatttcttggttgttcttaaacagacttgtatattttgatacagttctttgacataacaattgaccattgtaggtaatcaggaggcaaaaaaaaaaaaaaaaaaaaaaagtcgtatcgatgt

SEQ ID NO: 148203 - DNA, 444 bp, Homo sapiens
atgagatcttttggccagctgaccctgtgtcccaggaatgggacagtcacagggaagtggcgagggtctcacgtcgtgggcttgctgaccaccttgaacttcggagacggtccagacaggaacaagacccggacattccaggccacagtcctgggaagtcagatgggattgaaaggaggagctggctctgtgtggctccaggctgctggtcttgggctccttcctgcttctcttctgtggccttctctgctgtgtcactgctatgtgcttccacccgcgccgggagtcccactggtctagaacccggctctgagggcactggcctagttcccgacttgtttctcaggtgtgaatcaacttcttgggccttggctctgagttggaaaaggttttagaaaaagtgaagagctggaatgtgggggaaaataaaaagcttttttgccc

SEQ ID NO: 148204 - DNA, 1386 bp, Homo sapiens
tttttttttttttgggcaaaaaagctttttattttcccccacattccagctcttcactttttctaaaaccttttccaactcagagccaaggcccaagaagttgattcacacctggggagaaagaaaataaaacaacaaaacaggtcgaagagctgctagaggaagctctgagatgtgtgcagaaattgaggaaggagcagagggagtgacagctagagaccaatacgggcatttaatcccaactaaggtagcctcaggaccccagggtctgtcaggggccaggaagccctcctttcccagtccaaggttgagagggtcctgtcatttcctgtcccaaagtaggtggttggggcatttaggcccagccatcagcaaaataagcacagttgatcttgagcttccacttcctctggcctgatcagttccctgggcctcaactatttccacttttcccatagtaacttcctagggcactgcagccagctgaagctgagaccagttcaagagctggatgcataacacatggctctcaaatttcatgcacccccctctgacaagtgaagattttttgcagaaatattttttcctttagtgagctgatgtgtgaactggttaaccaacatgacccccacccactgctacgtttgtgaagctgattccctccaaagatcttgttaacggaatcagctttttctaaaggtaacgatgactaaatggaagacagaaggtgcatgtcaagttcttgggcacatactatgtccccagtaaatgagtatcatcagttagactcttctgagcggttcaagttgaattttacaaaatttccatcataaaactgggtattggaatttcaggacaaaagcaagacaaacatggttcatattcaggacaaatcatcaaatgtgaaccctcttaactcaccattgttacccaaatgcttggatgtgaactagttatgagtcttaaaatcacaatgttgcttgaaagaagtcagccacaaaagaatgtgtatgattctgtctacatagtttcaaaaataagtaaaaccaaactatattatttaggaatacatacatggcaatacattataaagcaggacagtaatttctagggagagagagggcattgtcaggaaggaagggaccatggggcgtttctggacagctggtaatattctactcagtggtatttataagtatccactttataataatttgccaagctgtccttttatgctattggacttttctacataagtgttaaatattttataataaaaaagttaaagtaattagaaaaatattgaatgctgacggtgtcaacctgcctcccagctccataagggagagctgtggttgaagaggttctcggggactcagaagcagc

SEQ ID NO: 148205 - DNA, 1110 bp, Homo sapiens
cgtgcggtggaattccgcggccccgctcgtgacgtcgcggggggcgccggcctccgcccggccccgagggcaggctctccccggaggctcagccccctctgctccccatgggcaactgccaggcagggcacaacctgcacctgtgtctggcccaccacccacctctggtctgtgccactttgatcctgctgctccttggcctctctggcctgggccttggcatgcttcctcctcacccacaggactggcctgcgcagccatgacatcccccaggactgggtctcttttttgagatcttttcggccagctgaccctgtgtcccaggaatgggacacgtcacagggaagtggcgagggtctcacgtcgtgggcttgctgaccaccttgaaccttcggagacggtccagacaggaacaagacccggacaattccaggccacagtcctggggaagtcaggatgggattgaaaggatcttcttgcaggacaactggtccttatcacagccagggtgacccaccagaaaggactgcaggaacctgcctaatattttagtgctgttccaaggaatcctacccctcccagcccagcccacccatattcctgcttcagaggagggggctggaaatgccaccctgagccctagaaatgggtgaggaatgtgttagtgtctggagcccatgaaggcccttgtgcttgaccaagctgctcacctcggagggagctggctctgtgtggctcccaggctgctgggtcttgggctccttcctgcttctcttcttgtggccttctctgctgtgtcactgctatgtgcttcccacccgcgccgggacgtcccactggtctagaacccggctctgagggcactggcctagttcccgacttgtttctcagacagaatcatacacattcttttgtggctgacttctttcaagcaacattgtgattttaagactcataactagttcacatccaagcatttgggtaacaatggcgtgaatcaacttcttgggccttggctctgagttggaaaaggttttagaaaaagtgaagagctggaatgtgggggaaaataaaaagcttttttgcccaaaaaaacataaaaagctggtg

SEQ ID NO: 148206 - DNA, 426 bp, Homo sapiens
cgcagggggaagttgcagggccatgacgtggacttcctcatcacccaccccaaggagggtcaggaggcggggctgctgcctagagtgatgtgccgcctgcaggaccagggcctcatcctgtaccaccagcaccagcacagctgctgggctgctgtggggggatccacgaggccctgcccatcctggaaggccgtgagagtggacttggtagttgcacccgtcagccagttccctttcgccctgctcggttggactggctccaagcttttccagcgggagctgcgccgcttcagccggaaggagaagggcctgtggctgaacagccatgggctgtttgacccggagcagaagacatttttccaagcggcttcagaggaagacatcttcagacacctgggccttgagtaccttcctccagagcagagg

SEQ ID NO: 148207 - DNA, 784 bp, Homo sapiens
ttgatcgacgtccctagtccgtgtggtggaattccacgctgaccggcggcttccgcagggggaagttgcagggccatgacgtggacttcctcatcacccaccccaaggagggtcaggaggcggggctgctgcctagagtgatgtgccgcctgcaggaccagggcctcatcctgtaccaccagcaccagcacagctgctgtgagtcccctacccgcctggcccaacagagccacatggacgcttttgagagaagtttctgcattttccgcctaccacaacctccaggggctgctgtggggggatccacgaggccctgcccatcctggaaggccgtgagagtggacttggtagttgcacccgtcagccagttccctttcgccctgctcggttggactggctccaagcttttccagcgggagctgcgccgcttcagccggaaggagaagggcctgtggctgaacagccatgggctgtttgacccggagcagaagacatttttccaagcggcttcagaggaagacatcttcagacacctgggccttgagtaccttccttcagaacaaaaaaacccccggaccttgccttgtgcccccacttccactcaggaaattgggctgcccccaacctggccactgaatgtctccaggcagatatgctgccccctgacccccaccttcacccctccccgccaaggcctggctcttccggaggtcaattgtgcctgcaggatcagatgagcccctgctggtgtgctgcacggtgtgatgaggtatgagccctcaag

SEQ ID NO: 148208 - DNA, 1682 bp, Homo sapiens
  misc_feature (1)...(1682): n = a,t,c or g
agagtnccagggttctcccccctggganccanagatgaccctnggaanncgcnnctgcattntccgcctaccacaacctccaggggctgctgtggggggatccacgaggccctgcccatcctggaaggccgtgagagtggacttggtagttgcacccgtcagccagttccctttcgccctgctcggttggactggctccaagcttttccagcgggagctgcgccgcttcagccggaaggagaagggcctgtggctgaacagccatgggctgtttgacccggagcagggaagcagcagtggcaagactcctaggtcacggaagtcctgcttctgttgcagaagacatttttccaagcggcttcagaggaagacatcttcagacacctgggccttgagtaccttcctccagagcagagaaacgcctgagcctgcctgtgtcccccacttccactcaggaaattgggctgcccccaacctggccactgaatgtctccaggcagatatgctgccccctgacccccaccttcacccctccccgccaaggttctggctcttccggaggtcaattgtgcctgcaggatcagttgagcccctgctggtgtgctgcagggtgtgatgaggtgggagccctcagtgccagcctcatcactgtgtgaccctgggtctgctcttaagcctccccatggctcacgttcctgccctggatgggatgtgagtggggcccacatcgtggagctgcggtggggcctgcagtcatgaatggcaagtggtccctgatgtgcagggtcccattattttgcactgcagttaactgtggctcctgcagggcaccctgcccagtaatgcccagaagagaaccatgcatacctgcactgcatttgagagccatgagctggaggctgtggttcgtgccagcaaggagcctactgtctggtgtgctgtaggcatctggagagggagagggcctgggtaggagctgggaggaagataattttcaactatggggcttcagtactgcagcgccccgagccatgctctgtgcttctgccttttagggcttgttctcagcacaatgtctcaaaaataggtcatatcctgccactcccagtcgcagagccctttaatggttccaaaaccctaaagtctcaccacatagcccctggctctggcgatctctccagccccactggccccgagctgcttgacgtcaccggcttcctatttgatgctacccaggcccccttgtggccaactccctccccttctcactggaggcagaagcactgaggtgggctggacatgggtgccctccacgtccctcatatccccaggcacactctggcctcaggttttgccctggccatgtcatctacctggagtgggccctccccttcttcaaggccttgaatcaaaagccacttttgttaggcgaggatttcccaagaccactcatcacattaaaaaatatttttgaaaacatgcagtaaagttgactcttggggtgcagtttttgcacacgtagggcacaccaggtccatccccagaacacttcccatgctgtcctattgtggtcatgtgcttctccacccccacccacttagcggtgctacatccctatagttttgctttctctagaatgtcatgtaaatagaaccaaactatatttaacctttaaaaaaaaa

SEQ ID NO: 148209 - DNA, 428 bp, Homo sapiens
tttttttttttttttttaaaacgttgcaaattcctttactgttatcccccccaccaccaggaccatgtagggtgcagtctttactccctaacccgtttcccgaaaaaggtgctacctcctttccagacagatgagagagggcaggacttcaggctggatccaccactgggctctccctcccccagagtttaatctctcaactgctatgttccagtgcctcccaaagaaaagtgaattaccctaatagttaagacaagaaggcaaatggctaagttatcagtagcaaaaaaataaataaaaagaatcctaccaaatcatgctaatgggcaccactgcctaggaggatgctctaattgggaacctactactttgatgagacacctcttccactacagaaaatatctaagcctcttcccctccctcgtgcc

SEQ ID NO: 148210 - DNA, 779 bp, Homo sapiens
ttgtagacccacgcgcccgccccgtctcccagggcacaagctccctagcctctttttattcattgcccctgagctcccagagtcacccctccgcctccgcagccagtgaagtgtgttgtgcctgctgaagtgatcaccccccgcccccagccctgcatcaggccacaggtcttggctttctccttatcaccatttgctgttatcacggcgacacagcaggggaatccagggccccgccgccaagtggttacccaagtcaccactcctgacccaaaaatcaggcatggcattaaaacgttgtcaaattcctttactgttatcccccccaccaccaggaccatgtagggtgcagtctttaattcccttaacccgttttcccgaaaaaggtgcttacctcctttccagacagatgaagagagggcaggacttcaaggctgggatccaaccactggggctctccctcccccagcctgggagcacggggagggggagggtgacggctggtgactgattggatgggtagtgggctgagaagaggggattagggaagggtatttccagggttcagccttgttcctgcagctttgccgctgagtgtaaggaaaaacaggcatgacagaccagggtgaagggtcgctgcccagcatgggccaccggccatgcgtggggtggcccaataaacaccgtggactcccagcaaggctgctgcctggtgtttcgaggctgctgtggtcgcagacagccgcctcgccttggctccctgtcaacaaggtgggggt

SEQ ID NO: 148211 - DNA, 1529 bp, Homo sapiens
  misc_feature (1)...(1529): n = a,t,c or g
ttttttttttttttttttacttcaacaagcatttattaaacgcctactatgtgctcagcactatactaggcactcgggggtgcagagatacaaatgtaaaagttattattcctgccctcaaggagcttacaatttaattttgggnaaataaatacaaatatgaaactgtaacacagagtgctagaaaataattacaaagcaacatattagtaagtacatggacccacagtacaaactcaaaaggataagtgctgaggcagcacagaaatgagggaggtcatcgcatgagggtgatgtcaatcaggggagagctcagtcagaagatataaagggaaaaaaggttttgaagggagtgatgaacatgagccgggacccaaagagccaatcctaagccaaaaaagaatagccatgaagaaaaggccaccagaggcaagaagcctaataaagacatccagtagaaaggcctgtaggaaagtttgaaacctgttgaatccaaggtgaatatgcctagagagtaatgaaggcctgatgaatattaggccataagaggtaatggagaatttggaacacccactgcccccataggaattatcctactgggtgttaccttagtgaaaatgaaattttacaatagagatattgtaaaaaatgggtgtttgaaggaaggatccgtctttgaaaaattatctactgggtgttactgaaaatgaaaattttacaatacggatattgtaaaaatggagtttgaggaggagcacccttagaaactttataccaagatggggatcctgggagcaaggaaattggaaaaaaaagaattacagtaacctgggcctcagatctacatgaaaagctataatgggatgagagaaatgggagatcaagcctcaaggagaaaactgattaaaaactggactgacagcaagtttttggacatggagaatggagagcagaaaaagataactccaaggcctggggtaaaaatataaaggtggtgaaacttttccagggcaaaggaattacgcaatgaggcctgtttaaaaagaaaacgggggctggggatatatggtgatgaatcctgttttcaaatatcaagttgtacaggtacctgtggaaaattccaaaagtcacaaactgacccacagggtgggaaaaatgaagtcattcgaatacaaatagtaggtataaacaatcaaaatggataaataggagtatagaaaatgaagtgaataaaagacagggagattattctcagtggagaagaggagaaaggggagtgggtggaaagatcaactaaaaaaagaaagccagatattagagaaaaaggatcccccaagccaaaggagggagaattcaccaatataaaatataaattagatcaaaaaagccaagaaataataataaaaaaaggccttattatttgtccactggtgagtctaagaacatttcactggaatgctaagtatgaaagccagtaaaaagaagttttaagaacagattaatgaaaaaggggggttgaaaaatcaaag

SEQ ID NO: 148212 - DNA, 232 bp, Homo sapiens
ggaagtccttattaagagagggtctcgagagtgcaatgcttgtcctgaagagtttgctgccattttcctattttgtttcaagtatgtccagtggcaattggtcagcacttcacaatcacctgggacccgaggacaccgggaccgcctctccttacaatcgctgctcttaaagggggcgcgaccacttaggcaagaggagctcaactcgcggcactaccctcgggccgaatct

SEQ ID NO: 148213 - DNA, 400 bp, Homo sapiens
ttcccaaatgcagagtcttgagtgatgaagtatccagatgaatgtgcatgagcatgctgcaaagctgccttctgttgggctgcaatatgctgctgctcagcgtgatcccggaagtccttattaagagagggtctcgagagtgcaatgctagctccaggatgatttgttgaagactggttcagcataagtagttttcttttctatttgtccagttctgccaagattgcaactctatttttgttttgaaaacctgggaacagaggacaccgggaccgcctctccttacaatccctgctctctaaagggggcgcgaccccttaggcaagaggagcacaactcgcggcagtacaaccttcccgcccccacgaaatggtcgacccggaaattccgggccggtacg

SEQ ID NO: 148214 - DNA, 1516 bp, Homo sapiens
ctttgagacaaagactcactgtcacccaggctggagtgcagtgacaccgtctcagctcactgcaacccctgcctcccaggctcaagcgattctcctgcctcagcctcccgagtagctgggactacaggcgtgtgccaccacacatggccaactttttatacttttagtagagacagggtttcaccacgttggccaggctggtctcaaactcctgatctcaagtgatctgcccgccttggcctcccaaagtgctgggaccacaggcatgaggcaccgtgcccagccaaaaagttttcagttagaacaaaaatggaaaacagaaccacacaaactcatcatttatgtggtaacactaaataagaggatgtacaaattaaaaacctaccacattccctattatttttaattgcatctagtcacaacatttataagaagcatatgtttataaaaagatggttaagactggtttaggtaatttattccttgaggtttggttttaaaagtggaaaaaaggggggaagttagttataagtccagaaagaatatttcaggatgatacatgttgactataaacgcaaaaggtatactgatagcaatcctataaacagcaaatatggatgcaattgatttaagcctattagttcattttttaaaagcagccttgtttctttaaagttaagtactataaatgattctttgaaaatctactgtggacatgatatattccagtcaaacttgccaggagttggggggaatgacttccgtgaccatccagttcacagtctgattgagagttaaacagcattacaaaaaagttacagtcacggtacataatcaattccttggaccgatacagcttccacagctctcatcatcctggttattcttctttcagctttcacttacacattcctttctttcagacaaacaaaaaatatcaaagttcaccaaaattcttaaagtcacagttcatgtagcactgaatgatagtagctttggcatttgatattacaaagtcacttttccatcgcaaatgttttcttcattctgggtcaaggcgaggtaaaacaggaagaataaggttcccaaatgcagagtcttgagtgatgaagtatccagatgaatgtgcatgagcatgctgcaaagctgccttctgttgggctgcaaatatgctgctgcttcagcgtgatcccggaagtccttattaagagagggtctcgagagtgcaatgctagctccaggatgatttgttgaagactggttctgcataagtagttttcttttctctttgtccagttctgccaagattgcaactctatttttgttttgaaaaccttgtcctgaagagtttgctgccattttcctattttgtttcaagtatgtccagtggcaattggtcagcacttcacaatcacctgggacccgaggacaccgggaccgcctctccttacaatcgctgctcttaaagggggcgcgaccacttaggcaagaggagctcaactcgcggcactacaac

SEQ ID NO: 148215 - DNA, 3511 bp, Homo sapiens
ggaagccagacagctggctcgagcctctcctgctcagcaccatggctaagacccctagtgaccatctgctgtccaccctggaggagctggtgccctatgacttcgagaagttcaagttcaagctgcagaacaccagtgtgcagaaggagcactccaggatcccccggagccagatccagagagccaggccggtgaagatggccactctgctggtcacctactatggggaagagtacgccgtgcagctcaccctgcaggtcctgcgggccatcaaccagcgcctgctggccgaggagctccacagggcagccattcaggaatattccacacaagaaaacggcacagatgattccgcagcgtccagctccctgggggagaacaagcccaggagcctgaagactccagaccaccccgaggggaacgaggggaacggccctcggccgtacgggggcggagctgccagcctgcggtgcagccagcccgaggccgggagggggctgtcgaggaagcccctgagcaaacgcagagagaaggcctcggagggcctggacgcgcagggcaagcctcggacccggagcccggccctgccgggcgggagaagccccggcccctgcagggcgctagaggggggccaggccgaggtccggctgcgcagaaacgccagctccgcggggaggctgcaggggctggcggggggcgccccggggcagaaggagtgcaggcccttcgaagtgtacctgccctcgggaaagatgcgacctagaagccttgaggtcaccatttctacaggggagaaggcgcccgcaaatccagaaattctcctgactctagaggaaaagacagctgcgaatctggactcggcaacagaaccccgggcaaggcccactccggatggaggggcatctgcggacctgaaggaaggccctggaaatccagaacattcggtcaccggaaggccaccagacacggctgcgagtccccgctgccacgcccaggaaggagacccagttgacggtacctgtgtgcgtgattcctgcagcttccccgaggcagtttctgggcacccccaggcctcaggcagccgctcacctggctgcccccggtgccaggactcccatgaaaggaagagcccgggaagcctaagcccccagcccctgccacagtgtaagcgccacctgaagcaggtccagctgctcttctgtgaggatcacgatgagcccatctgcctcatctgcagtctgagtcaggagcaccaaggccaccgggtgcgccccattgaggaggtcgccctggaacacaagaagaaaattcagaagcagctggagcatctgaagaagctgagaaaatcaggggaggagcagcgatcctatggggaggagaaggcagtgagctttctgaaacaaactgaagcgctgaagcagcgggtgcagaggaagctggagcaggtgtactacttcctggaacagcaggagcatttctttgtggcctcactggaggacgtgggccagatggttgggcagatcaggaaggcatatgacacccgcgtatcccaggacatcgccctgctcgatgcgctgattggggaactggaggccaaggagtgccagtcagaatgggaacttctgcaggacattggagacatcttgcacagggctaagacagtgcctgtccctgaaaagtggaccactcctcaagagataaaacaaaagatccaactcctccaccagaagtcagagtttgtggagaagagcacaaagtacttctcagaaaccctgcgttcagaaatggaaatgttcaatgttccagagctgattggcgctcaggcacatgctgttaatgtgattctggatgcagaaaccgcttaccccaacctcatcttctctgatgatctgaagagtgttagacttggaaacaagtgggagaggctgcctgatggcccgcaaagatttgacagctgtatcattgttctgggctctccgagtttcctctctggccgccgttactgggaggtggaggttggagacaagacagcatggatcctgggagcctgcaagacatccataagcaggaaagggaacatgactctgtcgccagagaatggctactgggtggtgataatgatgaaggaaaatgagtaccaggcgtccagcgttcccccgacccgcctgctaataaaggagcctcccaagcgtgtgggcatcttcgtggactacagagttggaagcatctccttttacaatgtgacagccagatcccacatctatacattcgccagctgctctttctctgggccccttcaacctatcttcagccctgggacacgtgatggagggaagaacacagctcctctgactatctgtccagtgggtggtcaggggcctgactgaatgcccaacactgcatctctcttcctgcttctggccttgtatcttgcattcacactcaatagtcacggaatgccgactaggtgctagctgctatgggaaatgcaaaaataacaaaatagttactgtgcccacggagcctacccgattatagcagaggtaagttaggaacgaacatgttagtcaatccgggtgaagacatgtactgatgacacaccatggatttcagaggaggaagtacggagtcgttgcataatccgcccctggtgggtggcactctcaggtgctcctgaacagaagatttggccctcattttccctcagaaccccacggcaaggatatatgtccccttgttctctctgcttctgtcttgaggatatgggaagcctagagaaacgcaagcagactggattgggatagaagtatttgtgtacctggattaatgaactatgattttttttttttttttttgagaccaaatcttgctctgtggcccaggctggagtgcagtggcacgatctcagctcactgcaacctccacctcccaggttcaagcgattctcctgcctcagcctcctgagcagctgggattacaggtgcgtgccaccacaccaggctggttttcttgtatttttagtagagacgggggtttcaccatgttagccaggctggtctcgaactcctgacctcaggtgatccacccgcctcagcctcccaaagtgctgggattacaggcatgagccactgtgcccggcctatgattcttttttttttttttttttgagacaaagttttgctcttgtcacccaggctggagtgcagtggtgcaatcttggctcactgcaacctccgcctcccaggttcaagagattctcctgcctcagcctccgaagtagctgggattacaggcgcccgccaccatgcccggctaattttttgcatttttagtagacatgaggtttcatcatgttggccaggccggtctcaaactcctgacctcaggtgatgcacccacctcagcctcccaaagtgcagggattacaggcatgagccaccatgcctggccatgattcttaagagaattgactgggcctcatgaataaaaaaattagaaaatctaaaaaaaa

SEQ ID NO: 148216 - DNA, 1505 bp, Homo sapiens
  misc_feature (1)...(1505): n = a,t,c or g
cgacttttttttttttttgagacggtgtctcactctgtcacccaggctagagtgcacctgagccatcttggctcactgcaacctctgcttcccacgttcaagcaattctcttgcctcagcctcccaggtagctgagattacaggcgcctgctactacacccagctaatttttgtattttcagtagagacagggtttcaccatgttggtcaggctggtctcgaactcctgacctcaggtgatccacccgcctccgcctcccaaagtgctgggattacaggtatcagccaccgtgcctggcctaataattggaacattttcattatgaaaatgtcatcagctttgccaaaagaaacaaccaattgacttgttgggcggttggtttccattttcatgtcaattttatgtatacagctagaatacccaaggagaccactaaaatcagttaaacaagtagggtatatacaaagaaagatgaaacccgaaagtacataaaaaggatttaaatccgattttagatgtacctagtgtgtatttcttatctctagacaagttcatgtttattgtttaatttatgcccaagtgaagttgtaaacttatggttcaactctgacacagaatttgtcacttgtctgaggtcagtggcaggtttctctgctgtcaagcactctgtgtcacccaccagattagtataactattaattcagactgtactcctatgtttaagataatttttacaagagctggctgaagcagcacattagtaacctgacaagatttctttttcccttttcagggggaaagggtcaccttaaaaataaattattttcagggactttgggaatctaatgataaatattacacataatctatgaatagcttaatcctttatatattccttaaaataggaattcctcgacatcactcctggccacactttccttggcctgtgttgttgctatgtgtatttgaaagtaatatctgcattncccttttaaggatgttctgtaagtcatatttgtcagttatacagagtagtcttcctttttccccacggttcagtggaatccctcactgaacagtaataatagcaatagctaacaacatctgcacagcaccttacagtttgcaaagaacgttcacacattctcgatttgagttttgcatagtgaacctgttaccgagatgtctcttgacgtcgatgctaaaaggtgttagaatctttacatcacgtagagtcatttgaatatgctgtagtattgaatagtgccctgactagggggaggatttggatgtgctgcatttcaagccgtgtataatcatcaaaatggggggcttgagttctttagctacttggaatcccgatttacttctgggtaagtgatgcttttctaaccgttttctggatggattttgtattcactatattgtagcttgtaatttgtataaatgtaccatctgatgtcattaaaaaaagtgtttgtagtgctaaaaaaaaaaaaaaaaa

SEQ ID NO: 148217 - DNA, 398 bp, Homo sapiens
ctggctcactgcaacctccgcctcccaggctcaagtgattctcctgcctgagcatcccgagtagctgggattacaagcgcctgccaccatgcccagctaatttttgtatttttagcagagttggggtttcaccaggttggccaggctggtctcgaactcctgacttcaggtgatccacctgcctcaacctcccaaactgttgggattacaggcataagccaccatgcctggcccccagagattctatctaaaggaacaatggggaagcaaatggtcaacatgctccttttagctagcagctgcagggagatgggtcacagtgcaccagcacaccttggtcaatgcctacctatgattttgcctaaagacctggctgtaattatcattaaccctgtgag

SEQ ID NO: 148218 - DNA, 417 bp, Homo sapiens
cagcccagactggaatgcagtggtgatctctgctcagtaaaacctccacctcccaggttcgagcgattctcctgcctcagcctactgagttgctgagactacaagcgcacgccaacatgcccagctaatttttgtattttgtggtagagacggagtttcaccatgttggccaggctggtctcgaactcctgacctcaagtgatctgcccgcctcagcctccgaaaatcctcagattacaggcatgaactactgcatctggcctgaatggtactattatattcatagtctcaccaatacaattattaaatagctattattcaagtaatacatcttttctaatacaaaacattgagaaaattacaaggtttgaggaccgataaataatatttaacaataatgatgatgttaattaaata

SEQ ID NO: 148219 - DNA, 418 bp, Homo sapiens
  misc_feature (1)...(418): n = a,t,c or g
gacgggcgcttggctcacgcctgtatccccagcactttgggaggctgaggcgggcggatcacgaggtcaggagatcgagaccatcctggctgacacggtgaaaccccgtctctactgaaaatacaaaaaaattagccaggcgtggcggcgggcgcctgtagtcccagctactcgggaggctgaggcaggagaatggcgtgaacccgggaggcggacgttgcagtgagccgagatcgcgccactgcactccagcctgggcgacagagcgagactccgtctcaaaaaaaaaagaaagtgataatactgtaatcccagtactttgggacactgaggcgggtggatcacctgaggtcaggagttcgagaccagcctggtcagcttggcaaaaccccatctctactanaaaaaaaaaaaaagt

SEQ ID NO: 148220 - DNA, 267 bp, Homo sapiens; identical to SEQ ID NO: 147981
  misc_feature (1)...(267): n = a,t,c or g

SEQ ID NO: 148221 - DNA, 477 bp, Homo sapiens; identical to SEQ ID NO: 144632

SEQ ID NO: 148222 - DNA, 1045 bp, Homo sapiens
aaaaccataaaatgttccccagttttgcagcacgttaaatttcaaaaaattaaattgaaccagagtcccctggcaccgttgaaggaaaaataaatagaaatgtgttagtgccaagtagtaatctttggcattaggggattgatacaattttgacattaaatcagaattgaagtttaaaaaccaggcaatagtttacattaataatttttttttttttttttttttaagatggagtcttgctctgtcgcccaggccagactgcggactgcagtggcgcgatctcggctcactgcaagctccgcttcccgggttcacaccattctcctgcctcagcctcccgagtagctgggactacaggtgcccgccaccgcgcccggctaattttttttgtaattttttttttagtagagacgggggtttcaccgtgttagccaggatggtctcgatctcctgacctcaagtgatccacccaccttggcctcccaaagggctggggattacaggcttgagccactgcacccggcttttttttttttaatggatggaatctccttctgtcacccaggctggaatacagtggcacgatcttggctcattgcaaccgatgcctccccagttcaggtgattttcctggctcagcctcccgagtagccaggattacaggtgcatgccaccgtgccaggctaattttttgtatttttagtagagacgaggtttcaccatgttagccaggatggtctggatctcctgacctcgtgatccacctgccttggcctcccaaagtgctgggattacatgcgtgagccaccgcacccggcctcccctcacttaatttttaaaacccatttctcttctccagcttcacaactggactgaacattgctcaactgctcaacaacattacctatgtcaaaagtgaaaagataaaaagtattgtaaagattgcacagtgagtcaatctgggaagaatatactgtacaatcagcatttcagagctggaagggatctttaagatccaatccagcacccacattttaccaatgag

SEQ ID NO: 148223 - DNA, 350 bp, Homo sapiens
  misc_feature (1)...(350): n = a,t,c or g
ggcacgagattattgttttaagagtcagagtctcaccctgttgcccaggctggagtgcaagcagtggactgatcatggttcattgcagcgtcatactcctaggctcaagcgattatcctgtctcagcctcctgcgtatctggggctgtaggcaggtaccaccttggctaagttttaaattgttttggaggcaaggtcttgctgtgttgcccaagctggtttcgaactcttggcctaaaatgaccctcctgcctcagcctctcaggttgctgggattacaggagtgagccactgcactggcttggtnttatntttatttattttttgaaaacggattttgntgtgntgccn

SEQ ID NO: 148224 - DNA, 711 bp, Homo sapiens
gaccatcactacgtcatgcttcgcacgaggccgggtggcagtgccctcacctgggccagccactaccaggatatactgaactccgaacagagctgcctcaatgaggggacggctatggccgacctggagtctctgcggcctcccagcgccgagcctggcgggtcagtgtgtggaggggagggactgggtggaggggaaggcaggataatgcagtggggggcatggtggagaggggaaagggccccttgactgaggggctctgctcccaggtcctcagaacaggagcagatggagcaggcgatccgtgctgagctgtggaaagtgttggatgtcagtgacctggagagtgtcactttcaaagagatccgccaggctctggagctgcgcctggggctccccctccagcagtaccgtgacttcatcgacaaccagatgctgctgctggtggcacagcgggaccgagcctcccgcatcttcccccacctctacctgggctcagagtggaacgcagcaaacctggaggagctgcagaggaacagggtcacccacatcttgaacatggcccgggagattgacaacttctaccctgagcgcttcacctaccacaatgtgcgcctctgggatgaggagtcggcccagctgctgccgcactggaaggagacgcaccgcttcattgaggctgcaagagcacgaaatcgtcgacccgggaaa

SEQ ID NO: 148225 - DNA, 702 bp, Homo sapiens
ttttttttgaaacagagtcttgctctttcacccaggctggagtgcagtggcacgatctcggcacactgtgatctccgcctcccggattcaagtgattctccctcagcctcctgagtagctgggactacaggcgcccaccaccacgcacagctaatatatatatatagtatttttagtagaaacggggtttccctatgttggccaggctggtcagaaactcctgacctcatgtaatctgccagccttggtttcccaaagtgctaggattacaggtgtaagccactgcgcccagctctgtaacttccttttaacagtaaagcatttcaaaccacttacattaagactggaagctagaactcctcagtcattcctcctttaaatataaaaatatggagacttctagactttataattctagctttaataagcaaattctagattttaatctcttagttccttttcacataggacaaattagtacatttttatgaaaataattttattcagctgaaagataaactttaccatttcaaattcctagaacatttctgcttaaaagaatatagacacaagttcttgactaggttactgagacatttttgtaactaactgatgggatgacgccagatgacaaacagcctcttcatacttatttataagaatctccagattctgcacaagaatgttatatcacctcgtgcc

SEQ ID NO: 148226 - DNA, 364 bp, Homo sapiens
gcgtcgacctatcagatttaaatgaaaaaagagaaggaagaggctgattgctggagtgttaaagaaatcttggccgggcgtggtggtcacgcttgtaatcccagcactttgggaggccgaggcgggtggatcacgaggtcaggagatcgagaccatcctggctaacacggtgaaaccccgtctctactaaaaatacaaaaaaaaattagccgggcgtgatggcgggcgcctgtagtcccagctactcgggaggctgaggcaagagaatggcgtgaacccgggaggcggagcttgcagtgagccgagattgcgccactgcactcccgcctgggccacagagacgaactccgtctcaaaaaaaaaa

SEQ ID NO: 148227 - DNA, 399 bp, Homo sapiens
tttatctagtcatttatttttgacacagagtctagctctgttgcccaggctggagtgcagtggcacaatctcggctcactgcaagctccgcctcctgggttcacgccattctcctgcctcagcctcccgagtagctgggactacaggcgcccgccaccacgcccggctaattttttttgtatttttagtaaagacggggtttcaccgtgttagccaggatggtctcgctctcctaacctcatgatccgcccgcctcggcctcccaaagtgctgggattacaggcgtgagccactgtgcccagccaacaattaagattttaattgtgttctattttgtattgatacttgattttaagaaccctattctagtctgggtttttattttggatcagcaattta

SEQ ID NO: 148228 - DNA, 1189 bp, Homo sapiens
tgagactgagtctcactctgtcacccaggctcaagtgcagtagcacaatcctcatcctcctgagtagctgggattacaggtgcccaccaccatgcccggctaatttttttttttttttttttttttgagacggagtctcacgtttgtcacccagattggagtgtgcagtggcacaatctcggctcactgcaagctccgccccctggggttcacgccattctcctgcctcagcctcccgagtagctgggactagcaggcgcctgccaccacgcctggctaatttttttgtattttttagtagagacagggtttcaccgtgttagccaggatggtctcgatctcctgaccttgtgatccgctcgcctcggcctcccaaagtgctaggatttacagggcgtgagccaccgcgcccagcttgtatgcttttctaaaggagaacagaatagagaagaggttaagttaggatttcagggttcacatcttggagctggtcaatcaagggtgatgggccataatgcagtcttacatcagtatgtcatcctggtgtgcgggtacctgtctctttcctttgccattgccaggtgtcaggtggtgtgtggtccatgggaaaagtctccctgcagacacagatggttgggttcacctgcagtttcatgctggtcaagcctgggttccagaaaagcaagaagggagagtgagtgcactcttcttgcttcctgcctccaattttccacccccgcaccttgaagacaatatgttgtgccccaaatgtgttcacaggaacaaggtcttaataaaaagcctccaatgggaatagaatatcaggaaaaaggccacatctatggtaattaatggcagaaaagctggagagttggattctgcggggctgctgacaggtgaactctggtcctctgcacctgtttatgggccatgcagactggtggggtggcagatgttagcctaagacccctagcagtgcctgttgctttgtgagtggagatagagactcttacatttaaaaatggaaaaacatttcacaaattaccataaattgtagttaatatgtagaaaaactcattcatactacttttctaaaatagacatgacttcagcagcagcttttttttgttgtattttgagacagtgtctcactgcactccagccgggcgacagagcaagattctgtctc

SEQ ID NO: 148229 - DNA, 565 bp, Homo sapiens
  misc_feature (1)...(565): n = a,t,c or g
gagacggagtctcgctctgtcgccaggctggagtacagtggcgcgatctcggctcactgtaacctcctccgcctcctgggttccagcgattctcctgcctcagcctcccgagtagctgggactacaggcgtgcgccaccactcccacataattttttgtatttttagtagagacggggtttcaccgtgttggccaggatggtctcaaatctctngacctcgtgatctgtgtgctgggagtacaggcgtgagccaccgcgcccggccttaagcccctttctttaaggctcaagggcatattttcacactgcagtgcatcacaaccgttttcattcttccagtgttcctttcttctggtctccagccacctgccaggtacttctgattaattacatataagatttatccaagccaccccctccgtttctaccaactggacttcattctcttcagttcctgctagaatgcacctcctacctgaagtcttccctcatcaatgccctccatgatcagcctttgactctggaatcccttaatatattcctcagatcattagagctcgtgcc

SEQ ID NO: 148230 - DNA, 850 bp, Homo sapiens
ttggtgtgttttttttgagacagagactcactctgccgcccaggctggagtgcagtggtgcaatctcagctcactgcaacctccgcctcctggggtcaagcaattctcctgcctcagcctcccgagtagctgggattacaggtgtgcatcaccatgcctggctagcttttgtatttttagcagagcatgaggtttcaccatgttgacttgtctcgagctcctgacctcaggtaatccacccacttcggcctcccaaagtgctgggatacaagggtgtcagccaccacacctggccctcgatattttaattattagaaattattaacttggaaaaagctttctgtgttagcctttaatgagtatttggtgatatgggtagaaaggctttatctaatcccaaaagaaaaacaggcccagaggtaatagtttttatttttagtctttatattctatagagggtgataagagtcacaagccttcttatgtttacattaataactctaaataacctgaaatcacacaaactcagtctatttccccccagctgaatattatttaaaaattccaccatcactattgcttttgattctttctgaagtctcattattgtctgtaggtaatcagtatatgtatttatgtggactgtatacactaaatgtctataaaagagaaagatgatctttagggcatatttaagaattacaaataagagtttggcagttatgtgaaaattttagaagcctcattttagaaacaagaattctgatttggccaatatttctgatttacagctaacagatgattatttttcacaaaacaactgctcttccttgctgtttatcttctgttg

SEQ ID NO: 148231 - DNA, 740 bp, Homo sapiens
tttttttttttcttttttctgagacagggtcttactctgtcggccaggctggagtgcagtggcatgatctcagctcactgcagcctcgacctccctgggctcaggtgatcctcccacctcagcctcctgagtagctgggactacaggcacatgccaccacgcctggctaatttttctatttttagtagagacagggtttcaccatgttgcccaggctgggaccctctcaaagcacagaaaccacatccagcctgtggaacaggtgagagctacttgttccaaggatggccagtgaccaaagagaaagagatcagcaactctcctcaggctggcctgggttatgctgcacgtggtgatggagggaagctgtggaaagctggtgggtaacagtggtagggtaagtgtaacccagcatgtgtgcacatgagagcaagagccaatcagcaggcaggcaggcgagggagcacaggccgagcactcagggaaggatgatgatttgggagctgaatctgcaaacaggaccattccaacacaaagaggttcaggaacaacagagggacatcaccctcagcctaagcatgccagcaaaagttgatgctgagagccctggtgggatggggtagggggccaaaaagccaacaggaggaagaccaatgctgggaggatgtggaaggggaggtaacggaaccgtgaatgcccaggatgtcggcagccacccggagtgcactgggcctcgtgcc

SEQ ID NO: 148232 - DNA, 426 bp, Homo sapiens
  misc_feature (1)...(426): n = a,t,c or g
taacagtggccatgaaccttnggcctcaactggcaaacctctgtctccccaagttcaaagcgaatcctccttgccctccagcttccatgaagaagctggaattaaacacgtgtaatgtcaaccacaccctggcctaatttttttggtatttttgtagagatgggatttcgtcatattggccaggctggtcttgaactcctgacctcaagtaatccacccatcttggcctcccaaagtgctgggattacaggcttgagccaccgcgtccagcctacctcttcctaactttctagagtggcttccatagataaggactttcatctgcagttgggttttagtttgctggttgaaaaggtggtggtgactctgtttccaattgggtgcagtggtatagtcttcatgaagattcttcatctttctcgtgcc

SEQ ID NO: 148233 - DNA, 727 bp, Homo sapiens
gagatggagtctcgtctgtcgcccaggctggagtaacagtggcacgatcttggctcactgcagcctctgcctcctgggttcacgccggttgtcctgcctcagcctcacaagtagctgggactgcaggcgcctgcactacgcccggctaattttttttgtatttttaagtagagatggggtttcactgtgttagcccaggatggtctcgatctcctgacctcaagtgatctgcccgcctcagcctcctaaagtgctgggattacaggtgtgagccaccgcgcctgggcctaaataaaaagtcttgaaatggaagatattcacctaaccctccaaaaaaaccatgatgtaaatgaagcacgaaatcacacccattttgtctctttccctaaattcaaaataggtcccctggcattagttccatgccgagactaggaaaacttgaaccctagtactgttttttaaaaaccagtttttaacaggaaaatttaaaactgtatgttttgaaatcattaagtaaaaagttttgtttgctttgcataaggagtagcctcttggattcttcatagtgggtaatttttgtgtcatatccatttaggatgttgaaccatttcatttgtgcatgtgtatatgtgcccaaattcatcctctttgtttagaatctgcttacaaataaaactaatagaatctgaatacatttatcatatattcttccagggtattgaagtca

SEQ ID NO: 148234 - DNA, 381 bp, Homo sapiens
ggcacgaggaggtaagcacagcctctgactctttagacacagttggcttggcctcccttaagaaggtagaaactacattttaaagctattgaagggatttcaagccttggagagcagatgaaaccaagtatgtggatgctcctctgtccacagatcaagatcaagctgaccctacctattcagataaaacaagcaaaaacttgcaggcaaattcccaaggtgcaagggtcacagtagaagaatgtgggtccttcatcctttcctgtaccttgggacatggttcaggcatgattgaggcaccctgggcactgaatccctaccttgggttaggccctgtgcaaatactggaaacacaaaaatgaattgaaaatgactcatacc

SEQ ID NO: 148235 - DNA, 719 bp, Homo sapiens
gacaagaaatcaacatatttataaaaaaaaaaacaagctacttccccaaactaaattaaaaattaaagaaccaccaccaccaccaccaacaacaacaacaaaaacaacaacaacaacaaaaaaaacagatggatcccagggtttctttttctttctttaaaaaaaaaaaaagttcaaccccaaagcccagtcaataattcccctaaagtagcagaaactccctccgaggtagatatctgagtcagacactctccgtcccaccgaagcgattcctattggtttaaagatgaagctgccgttatgaaggtaagtaagccgtccggaggggcggggggtggggatgcattggggcgtggcccatgtcctctgtccagaagtcatgtccccatttttggcatctctgattgggcagggctggcgtctccacagattccagagcatacaagtggggtggggaagggaaagtgggggagcccaggagagaaacagaatagttgcaagcgtgagtatgcgtgtgtgacgtgcgggagatggagagcagattcccaaggtgcaagggtcacagtagaagaatgtgggtccttcatcctttcctgtaccttgggacatggttcaggcatgattgaggcaccctgggcactgaatccctaccttgggttaggccctgtgcaaatactggaaacacatagatgaattgaaaatgactcatacctagccgt

SEQ ID NO: 148236 - DNA, 397 bp, Homo sapiens
  misc_feature (1)...(397): n = a,t,c or g
tttgggagtttttttgttgttgaactgcacaaattctttatatacnnnnnnnnnnnnnnnnnnnnnnnnnnnnnnnnnnnnnnnnnnnnnnnnnnnnnnnnnnnnnnnnnnnnnnnnngtgttgacaacgtcctgcacaaaagttttaaattttgatataatttaatttactcattttttcttttcttgcgtatgcttttggtgtcatatccaagaaatagtaatcgctgtcaaatccagtatcatgaagctttttgtcctataatttttctaagagtcttatagttttagttcannnnnnnnnnnnnnnnnnnnnnnnnnnnnnnnnnnnnttattgtaaggtaagatcaaacttcttttggacaaanannnctagttttccccgaacgcgtgggt

SEQ ID NO: 148237 - DNA, 485 bp, Homo sapiens
gcgtatgcttttggtgtcatatccaagaaatagtaatcactgtcaaatccagtatcatgaagctttttgtcctataatttttctaagagtcttatagttttagttcatttaggtctttgatccattttgagttaatttttgtatttattgtaaggtaagatccaacttcttttggacatggatatctagttttcccaacaccatgttttaaaggtttttactttttttgagacagggtgtcgttctgttgcagtggcatgctcatggctcactgcaggctcaaccttctgggttcaagcccaagccatcctctcacctcagacttctgagtagcgaggactgcagacatacaccaccacgcctggctaatctttttttttatttttttttgtagagatgggatctcaccatgttgcccaggctggtctcaaactcctaggctcaagtgatcctcccgtcttggcctcccataatgctgggatgag

SEQ ID NO: 148238 - DNA, 489 bp, Homo sapiens
tttgagacagagttttgctcgttacccaggctggagtgcaatggcacgatctcggctcactgaaacctccgcctcccgggttcaagtgagtctcctgcctcagcctcccaagtagctggaattacaggcgcctgccaccacgccccagctaatttttgtatttttggtagagacggggtttctccatgtatgtcaggctggtctcaaactcccgacctcaggtgatccacctgcctcggcctgaggtgatccgcccgcctcggcctcaaaaaagatgtgtcccacgcaagcataatccccggaacttacgtgcatgtgaccttatttggaaaaaggatctttgcaattgtaatcagatttaggatcttgagatgagatcatcctggactaactggatgggccctaaatccaatcacaactgtcctcagagatagaacaggcatgagccacttgctgggcttcagttggattttgtactgggttgaatgg

SEQ ID NO: 148239 - DNA, 499 bp, Homo sapiens
  misc_feature (1)...(499): n = a,t,c or g
caacgatctcggctcactgaaaacctccgcctcccgggttcaagtgagtctcctgcctcagcctccccaagtaagctggaattacaggcgcctgccaccacgccccagcttaatttttgtatttttggtagagacggggtttctccaatgtatgtcaggctggtctcaaactcccgacctcaggtgatccacctncctcggcctcccaaagtgcntgggattacaggcgtgaaccaccgcgctcggccacaaattggattttgaaacttccatcagctgcttcttgtgcagcacctcccaggaggtaggttgtatgataatttctgtttttagagatgatgaaattgcggcccaaggaggtttcatgactcaccacaggggcacccagcaaattggcatccgagccaaaatgagagtgcaagcttttgagtttccaatgtaaagctcatcaaactttgacattacttctttttatataagggctcgtgccgctcgtgcc

SEQ ID NO: 148240 - DNA, 1152 bp, Homo sapiens
atggggtttcgccatgttggccaggctggtctcaaactcctgacctcaggtgatccgcctgcctcggcctcccaaagttctcggattacaggtgtgagccaccgtgcccggactatgggcctctccagggcgctctaccggatacctgccctgaaggtttggctcctaatcaatgtggaattaaaaaagcaaatgatggctcatgtagatgttacatgccttattaataaatctccttccctcaccaggccaatgggcaagagactcagtgctgagactgggaagggacagaaggagaaacagaaacagacaggagctggctgcgccgtgctcccttcacgcggctttccacccaaagcgcatcacggccgccagcccctgacgctagccccttcgccacctcccagaaccttctctccctctcccccacacacgcacactcacactcacacatgcagtcccatctgcccccgccagagccgctccttccagggccccaggatgccagatccggatccgggagatgcaacttgcggcgccggcccaggaggctcggcacctgctcgagccgccgggccgcgctcagccccgcgccgagccaaagcccgagtccaagcccgagtccaagcccgagcccaagcccgctgggtccgcgccctcaccttgctcgccgcgcacccccgcctgcagcccgtcccggctcggatcgcccgccgcgccgcgcagagctcctcctcgcctccgccggcgactcccgcgaagtccccacccccagaggcgtcgggcgcggcggcgccgcccgccctcggcctggagcgctttcctggggcgtcacccaaccacctgacccggtcgacctgtgcgctccgccacgtcggcgcgggcggcgcagcgctaggagggccgggcgcaccccgactcccgcaccggctggaagtcggccgggaggagggaagaggacggcgaggagatggactcggccatggaggctgcgtggagcctgcttgggaaccgggatggcgtttgccttccaccatcaagttatttataaaatcaaaagtttcctccgaggccttggagatgccctttctctgcatctgcgaacacctactttcctatacttacagtaggaaacacaggaacgttatttag

SEQ ID NO: 148241 - DNA, 937 bp, Homo sapiens
aatttaaaaaaatatctttaattaaagaagacttaatttaaggcatcatactgacatctactggcttggtactaaactgtaaatttgacatacactgcatttttttttaaaccctcaaaattaaaaggaatatagatgctattctgggaaagtagaaaaattaattgaaagcagtaacattgacatcaggacaactaatattatgtaaagtctaacccataaagaacaatactagttctctattgcttctttctttctgatatactgtctttcaaataaactgatttttttttttttttctttttgagatggagtttcactcttgtcgcccaggctggagtgtagctgcatgatcctgagtgactgcaacctccgcctcctgggttcaagcgattctcctgcctcagcctaccaagtagctgggattacaggcacccaccaccatggccagctaatttttatatttttagtagagaccgggtttcaccatgttggccaggctggtctcgaactcctaacctcaggtgatccacctgcctcggcctcccaaagtgttgggattacaggtgtgagccaccgtgcccggcctgaactgaatttttaatgaatgcttttagagactgatcaagaggggattttttggtgatgagtaaaataaacaaaaagtttcaaaaaacttgcaaaaattaatgcatcacgctaaattatgatgtcgactgaaaatttatcagatgatctatagacctttaacacataatacttctataaattataaaatttctaggcatcataataaaacaaatttggtaattaaatactacagtcaattaatctgatgaccattaccggagctaaacctacaccaaagttaatcctagaacactttgcaatgcacaagcatgtcactcaacgagtctataataatttgaagactagt

SEQ ID NO: 148242 - DNA, 853 bp, Homo sapiens
aaagccttcatcagagcggacgatccaacccaacatgctgtttcccatcctcaaaaggcacggggaccaatggccacccaactccttcccaaccctcccctccagggacgagagatggccccctctttccctttccccactctgcaagcactcccccaccaacgggtgcatcacagcccctcactgggaccagggggcctccctctccggtggaaccagtgtcacatgcctgtgcatctctgtgattctcagagggtctgaggtccgagcaccctgctgtggcctgtgggaagacgctacaaagtcccactggatctaaaccagaggcctgttctggcgagcagggaaactgtgtcctggcagagatcgtggtcctgggcacacaggacccctcagcacactgaggtggagctggggcgaggggagggggtgcgctctgggtaactgaaggtgtgaagggcccagggcctgtttctgggcagtgcaggaagtcccagccccatgcctgtggtgagatcccctgtagggccccccccaccatgggcacttcggggcctctacggtcttccaaagctgtgtcctcatttccactgcagcagaggggcgtccccagctccgtcaaacagccctttctgtttctggagtcctacaagtggaggcccaaatccgttcccatgttgaggcaaggccctggctgttccttcctctctggaaaccgccttgaactcttcctttgggacatgcctcctcgaccagccttgaaggggtgctcctctctcactacctggaaccaaacacccccttcctttgtgtacaagggcaataaagagtagaccttcatcttctttatttt

SEQ ID NO: 148243 - DNA, 530 bp, Homo sapiens
gagatggagtctcgctctgtcgcccaggctggagtgcaatggcatgatcttggctcactgcaacctctgcctcctgggttcaagcgattctcctgcctcagcctcccgagtagctgggattacatgcgcgcacaccaggcctggctaattttttgtatttttagtagagatggggtttcaccttgttggtcaggctggtctcaaactcctgacctcgtcatctgccaacctcagcctcccaaagtgctgggattacaggcatgagccaccgcacccggccaaacagtttgcttgtaatccaaagtggcaggttcaatacaaagatcactcggtagcaggtgggttataatcctaccatttatgaatgctgttcaagggagactattctggaggataaaagagaaggcttcgaaattatgcatttcaatttccctctaccaaagaactaacccaatctagaaaagatttttaaaactaaattaaatatctcctaaaaagattctatcactgcatttggtaaatctcgtgcc

SEQ ID NO: 148244 - DNA, 625 bp, Homo sapiens
tttttttttttttgagacaaggtctcgctttgttgcccaggctggagtatagtggcatgcttatggctcaccgcagcctcgacctcctgggcccaagccatcctcccaactcagcctcccaagttaggactataggcacacactactatgcctggctaattttgtattttttggtagagacagggttttaccatgttgcccagactggtcttgaactcctgagtgtaagggatccgcctgccttggcctcccaaagtgctgggattgcaggtgtgagccaccgtgcccggcctggctgcattttttgatctacaactgaaccttagactatgatgatttcttttccttctggtgtcccaaatgcccattcgactcccgaggagccactgaattattaattcaatgctgagaaaagcccctctaccattcttacatgcatcaggtgtgtgtactggaaaggggatgggtcgggggtctcagtggaagcagcccagctgaggatgacactgccttaggggctcaggtaatagagagctgcctggtagaagatgggtcatgatgcctgcagccagggctgggggccccctttgttacatgcttgggataaggtccctcataggaggcc

SEQ ID NO: 148245 - DNA, 819 bp, Homo sapiens
atgcgggatgaagacaagcctgaggacgagatggcccaaaagcgggccagcctgctggagcggcagcagcggcgagcagaggaggcgcggcggcgcaagcagtggcaggaggtggagaaggaacagcggagggaggaggccgcgaggctggcccaagaggaggccccgggcccagccccgcttgtgtccgcagtcccgatggcgactccagcccctgctgcccgggctccagccgaggaggaggtgggcccccggaagggggacttcacgcggcaggagtacgagcgccgggcccagctgaagctgatggacgacctcgataagcacgccgcgctgcgtggtatccagcgccttaccgactcggggcatcaagtcaataacgtcgaggttattgcccgtcgttgtgagcgttttgcgggtacggaaacagagcgtctggaagatctcaattcccttgccagactgactacccccaacaccatcgtgctggctgtacgcggcggttacggtgccagtcgtttactggcagatattgactggcaggcactggtggctcgccaacaacatgacccgttgctcatttgcggacatagcgattttaccgcaattcagtgcggtcttctggcgcatggcaatgtcatcacctttagcggccccatgctggtagcaaactttggcgcggatgaactgaacgcctttaccgagcaccatttctggctggcgttacgcaatgaaaccttcaccattgaatggcaaggggaaggcccgaaatttcggggccgaaggcacagttgtggggaggcaatcttgcgatgctga

SEQ ID NO: 148246 - DNA, 1165 bp, Homo sapiens
ggcccccggaagggggacttcacgcggcaggagtacgagcgccgggcccagctgaagctgatggacgacctcgataaggtgctgcggccccgggctgcggggtccgggggtccaggtcggggcgggcggagggccacccggcctcgctcgggttgctgtgacgactcagccctggcacgaagcccagcccgcggcctgctgggctctcggctgagcaaaatctattcccagtccaccctgtcactgtccactgtggccaacgaggcccacaataacctcggggtgaagaggcccacgtctcgggctccctccccgtcaggtcttcatgtccccaagccgcctgcctgggaagccgcgaacgggactggggaaaatgggcagcaatgcttccttccccagcgtcagtgcccgagtaacacaggttccacgggtgttacaaagaacccagcgccaagttccaacaagtttcattcatccacaatgccctattcacactgctgcgggggggggccccggggggggggcccaaaaaaaaggggttgaacgaaccgcagaagaatcgcattctggaggaaattgagaaaagcaaggccaaccacttcctgatcctctttcgcgaactcgaagctgccagttccggggcgctctacacgctgtcgggggagacagaggagcttgtcgcggctggcagggtatgggccccggaccgtcacgcccgccatggtggaaaggcatctacaaagtacaactcgggaccgcaagcgctttcacccagatccccgccaagaccatgttccattgaggcgttcgatggcctttcaccattccaggggacaccttttgggcaggggcaaaggaaacccaccatttcccaagaaggggcggcggcaccccctaaattagccccacccgggcggtccaacgggccgggccctgtgtgctgcggccgccatccccctggaggacagtcagtcggtattccctgggtcctgtctgtccccaaccgtgtctgggtggggctggagtctccaccctctgactttgagtccagtcctgctgtgggggctgagctgggaggttcagggactcagggctcagctcagtccccttgtctgtcctcccccacttcttgaataaaataatttaaagagaaaaaaaaaaaaaa

SEQ ID NO: 148247 - DNA, 458 bp, Homo sapiens
tttttttttctgcagtgaaaacatttattttacagcagtaatctttatttcaggtcaacattcagacatacaagacggagatcaccatgcgaacccagcctggcccttagatgtgtgtgctcgagccaggatcatccagagtctgatagcgcctgcaccccaacacggttggattccaggacgccagtgccaaacccagagaaaggacaaccagcttccatgcatttgcatttaatttttaaaaacaatacatatttcagtgttaacttcctcccctcacctggcttgaaatattttccccattttctagggaaacaaaatctaccaaaaggtgccgcctgcaagaccccgggcccagccacttctggagggtggtgctgtgtggactcctctggggccaggacagggccccttcctgggctcctcttcagatgcagctttgccactgtttgtatctg

SEQ ID NO: 148248 - DNA, 1596 bp, Homo sapiens
tttttgagacggagtcttgctcttgtcacccaggctagagtacaatggcatgatcccggctcactgcaaccttcgccttctgggttcaagagattctcctgcctcagccctccaagtacccgggactacaggcacccaccaccacgcctggccaatttttttttttttttttgtatctttagtagggttttgccacgttggcctggctggtccttaactcccacctcgtgatccacccgcctcggcctcccaaagtgctaggaccacaggcgcgagccaccacgcccagccccctgtctctttttttaaaacacgaatttaaaagcagaaagaaaaaatctgtgcgtgtttagactcagattcttaattagctagtatttcttaattcaatcaataaattattaaggaccttttcactgctccctttttaaagtcttctttgggagtggatttgaagtgcttcttaattaccaaggctctcaaagagaaggataaaattaaaatctgatggggtaaccatttaaataaggacaactgggggtaacccatttctccaggacccctctctgcaacagagagctattctctttctttggcctagtaaacctttggttttaaccctaaaaaaaaaaaaaaaaagcaattggaaaaaatttcaagtcaatgaataaaataagatttggggataatggtagatgctaattatgaaagtcgactgtttcctttgaagggggagttcaaagctgtttttttgatgtgaattctttgggagacaatagaaaatggctaaataggatataacagaaacttttaaggatggaattcaactttacctaaaaaaggtttcaggccaggcatggtgtttagaaaacggaggtgaaaacacaatcaagaggagggggcatttatccacatctggaccaggcaggagggaagcaaggttccagccgcaaggggtgtggagggctgagatcagctgctgctctccaaaaccagggatctgcgggactagcgagtaagacatacgtggggtccgcagtgaaaacatttattttacaacagtaatctttattttaggccaacattcagacatacaagacggagatcaccatgcggaaccagcctggcccttagatgtgtgtgctcgagccaggatcagccggagtctgacagcgcctgcaccccaacacggtcggattccgaggacgccagtgacaaaaaccagtgcatgggacaagcagcttccatgcgtgtgcatttgatttttaaaagcaatacatatttcagtgttaacttcccccctcacctgggcttgaaacattttccccatttttccgggggaaacaaacttttaccaaaggggtgcccgcctgcagggaccccggggcccagcccctttctgggagggtgggtgctgtgtgggactcctctggggggccgaaccgggggccagcacagggccccttcccagggccgcccttcagatgcagctttgccactgaccgtatctgctgctcagaaaatcagctttcatgtttcaaggcagggaagggcttccagtcccctcctcgatttcacaccgggacacacacctgg

SEQ ID NO: 148249 - DNA, 592 bp, Homo sapiens
cagccaagaccgcgccggaccttgaatatgtggcctggggttggcaggagtgcttttcattgagcctggcaatttagcacactgatgctgaggatgattgaggttggtctacctcatctctgataattctggaaggaatggaggagtctcaacatgtgttctgatcacaagatccgtggtttgtactcaaagcccagaatccccaagtgcctgcttttgatgatgtctacagaaaatgctggctgagctgaacacatttgcccaattccaggtgtgcacagaaaaccgagaatattcaaaattccaaatttttttctaaagacttttgttgaaatagctttactgtttctcaagtgttttggagaaaaaaatcaaccctgcaatcactttttggaattgtcttgatttttcggcagttcaagctatatcgaatatagttctgtgtagagaatgtcactgtagttttgagtgtatacatgtgtgggtgctgataattgtgtattttctttgggggtggaaaaggaaaacaattcaagctgagaaaagtattctcaaagatgcatttttataaattttattaaacaattttgtt

SEQ ID NO: 148250 - DNA, 612 bp, Homo sapiens
tggaagggatggaggaggtctcaacaatgtgtttctgacacgagatgcgtgggtgtgaagtcaaagggcaggaatccccaggtggcctgcttttaatgatgtctacagaaaatgctggctgaggtgagcacgtttgcccaattccaggtgtgcgcagaaaaccgagaattataaatgctggctgagctgaacacatttgcccaattccaggtgtgcacagaaagccgagaatattcaaaattccaaatttttttcttaggagcaagaagaaaatgtggccctaaagggggttagttgaggggtagggggtagtgaggatcttgatttggatctctttttatttaaatgtgaatttcaacttttgacaatcaaagaaaagacttttgttgaaatagctttactgtttgtcaagtgttttggagaaaaaaatcaaccctgcaatcactttttggaattgtcttgatttttcggcagttcaagctatatcgaatatagttctgtgtacagaatgtcactgtagttttgagtgtatacatgtgtgggtgctgataattgtgtattttatttgggcgtgcaaaaggaaaacaattcaagatatataaagaattcaaa

SEQ ID NO: 148251 - DNA, 858 bp, Homo sapiens
  misc_feature (1)...(858): n = a,t,c or g
gaaaatgtggccctaaagggggttagttgaggggtagggggtagtgaggatcttttgattggatctccttttatttaaatgtgaatttcaacttttgacaatcaaagaaaagacttttgttgaaatagctttactgtttctcaagtgttttggagaaaaaaatcanaccctgcaatcactttttggaattgtcttgatttttcggcagttcaagctatcatttagcaaactgatgctgaggatgattgaggtgggtctactcatctctgaaatttctgnaaggaatgnaggagtctcaacatgtgtttctgaccaagatccgtggtttgtactcaaagcccagaatcccaaagtgcctgcttttgatgatgtctacagaaaatgctggctgagctgaacacatttgcccaattccaggtgtgcacagaaaaccgagaatattcaaaattccaaatttttttcttaggagcaagaagaaaatgtggccctaaagggggttagttgaggggtagggggtagtgaggatcttgatttggatctctttttatttaaatgtgaatttcaacttttgacaatcaaagaaaagacttttgttgaaatagctttactgtttctcaagtgttttggagaaaaaaatcaaccctgcaatcactttttggaattgtcttgatttttcggcagttcaagctatatcgaatatagttctgtgtagagaatgtcactgtagttttgagtgtatacatgtgtgggtgctgataattgtgtattttctttgggggtggaaaaggaaaacaattcaagctgagaaaagtattctcaaagatgcatttttataaattttattaaacaattttgtta

SEQ ID NO: 148252 - DNA, 356 bp, Homo sapiens
  misc_feature (1)...(356): n = a,t,c or g
aagacagacgnnactatgaaaaagtgggcttgnagatggcaggagagctgtccattgagcctggccctacccctcaactaaccccctttagggccacattttcttcttgctcctaagaaaaaaatttggaattttgaatattctcggttttctgtgcacacctggaattgggcaaatgtgttcagctcagccagcattttctgtagacatcatcaaaagcaggcacttggggattctgggctttgagtacaaaccacggatcttgtgtcagaaacacatgttgagactcctccattccttccagaattttcagagatgaggtagacccacctcaatcatcctcagcatcagtttgc

SEQ ID NO: 148253 - DNA, 130 bp, Homo sapiens
  misc_feature (1)...(130): n = a,t,c or g
ccagctacttgggaccacaggcatgcaccactacgcatgactaattttttaaataggtagtgaggatcttgatttggatctctttttatttaaaatgtgnatttcaacttttgacatcaaaggaaaagac

SEQ ID NO: 148254 - DNA, 4034 bp, Homo sapiens
gcttgcggaagtcagttcagactccagcccgctccagcccggcccgacccgaccgcacccggcgcctgccctcgctcggcgtccccggccagccatgggcccttggagccgcagcctctcggcgctgctgctgctgctgcaggtctcctcttggctctgccaggagccggagccctgccaccctggctttgacgccgagagctacacgttcacggtgccccggcgccacctggagagaggccgcgtcctgggcagagtgaattttgaagattgcaccggtcgacaaaggacagcctatttttccctcgacacccgattcaaagtgggcacagatggtgtgattacagtcaaaaggcctctacggtttcataacccacagatccatttcttggtctacgcctgggactccacctacagaaagttttccaccaaagtcacgctgaatacagtggggcaccaccaccgccccccgccccatcaggcctccgtttctggaatccaagcagaattgctcacatttcccaactcctctcctggcctcagaagacagaagagagactgggttattcctcccatcagctgcccagaaaatgaaaaaggcccatttcctaaaaacctggttcagatcaaatccaacaaagacaaagaaggcaaggttttctacagcatcactggccaaggagctgacacaccccctgttggtgtctttattattgaaagagaaacaggatggctgaaggtgacagagcctctggatagagaacgcattgccacatacactctcttctctcacgctgtgtcatccaacgggaatgcagttgaggatccaatggagattttgatcacggtaaccgatcagaatgacaacaagcccgaattcacccaggaggtctttaaggggtctgtcatggaaggtgctcttccaggaacctctgtgatggaggtcacagccacagacgcggacgatgatgtgaacacctacaatgccgccatcgcttacaccatcctcagccaagatcctgagctccctgacaaaaatatgttcaccattaacaggaacacaggagtcatcagtgtggtcaccactgggctggaccgagagagtttccctacgtataccctggtggttcaagctgctgaccttcaaggtgaggggttaagcacaacagcaacagctgtgatcacagtcactgacaccaacgataatcctccgatcttcaatcccaccacgtacaagggtcaggtgcctgagaacgaggctaacgtcgtaatcaccacactgaaagtgactgatgctgatgcccccaataccccagcgtgggaggctgtatacaccatattgaatgatgatggtggacaatttgtcgtcaccacaaatccagtgaacaacgatggcattttgaaaacagcaaagggcttggattttgaggccaagcagcagtacattctacacgtagcagtgacgaatgtggtaccttttgaggtctctctcaccacctccacagccaccgtcaccgtggatgtgctggatgtgaatgaagcccccatctttgtgcctcctgaaaagagagtggaagtgtccgaggactttggcgtgggccaggaaatcacatcctacactgcccaggagccagacacatttatggaacagaaaataacatatcggatttggagagacactgccaactggctggagattaatccggacactggtgccatttccactcgggctgagctggacagggaggattttgagcacgtgaagaacagcacgtacacagccctaatcatagctacagacaatggttctccagttgctactggaacagggacacttctgctgatcctgtctgatgtgaatgacaacgcccccataccagaacctcgaactatattcttctgtgagaggaatccaaagcctcaggtcataaacatcattgatgcagaccttcctcccaatacatctcccttcacagcagaactaacacacggggcgagtgccaactggaccattcagtacaacgacccaacccaagaatctatcattttgaagccaaagatggccttagaggtgggtgactacaaaatcaatctcaagctcatggataaccagaataaagaccaagtgaccaccttagaggtcagcgtgtgtgactgtgaaggggccgccggcgtctgtaggaaggcacagcctgtcgaagcaggattgcaaattcctgccattctggggattcttggaggaattcttgctttgctaattctgattctgctgctcttgctgtttcttcggaggagagcggtggtcaaagagcccttactgcccccagaggatgacacccgggacaacgtttattactatgatgaagaaggaggcggagaagaggaccaggactttgacttgagccagctgcacaggggcctggacgctcggcctgaagtgactcgtaacgacgttgcaccaaccctcatgagtgtcccccggtatcttccccgccctgccaatcccgatgaaattggaaattttattgatgaaaatctgaaagcggctgatactgaccccacagccccgccttatgattctctgctcgtgtttgactatgaaggaagcggttccgaagctgctagtctgagctccctgaactcctcagagtcagacaaagaccaggactatgactacttgaacgaatggggcaatcgcttcaagaagctggctgacatgtacggaggcggcgaggacgactaggggactcgagagaggcgggccccagacccatgtgctgggaaatgcagaaatcacgttgctggtggtttttcagctcccttcccttgagatgagtttctggggaaaaaaaagagactggttagtgatgcagttagtatagctttatactctctccactttatagctctaataagtttgtgttagaaaagtttcgacttatttcttaaagcttttttttttttcccatcactctttacatggtggtgatgtccaaaagatacccaaattttaatattccagaagaacaactttagcatcagaaggttcacccagcaccttgcagattttcttaaggaattttgtctcacttttaaaaagaaggggagaagtcagctactctagttctgttgttttgtgtatataattttttaaaaaaaatttgtgtgcttctgctcattactacactggtgtgtccctctgcctttttttttttttttaagacagggtctcattctatcggccaggctggagtgcagtggtgcaatcacagctcactgcagccttgtcctccccaggacttagaatagtgcctaaagtgctgcagccaaagacagagcggaactatgaaaagtgggcttggagatggcaggagagcttgtcattgagcctggcaatttagcaaactgatgctgaggatgattgaggtgggtctacctcatctctgaaaattctggaaggaatggaggagtctcaacatgtgtttctgacacaagatccgtggtttgtactcaaagcccagaatccccaagtgcctgcttttgatgatgtctacagaaaatgctggctgagctgaacacatttgcccaattccaggtgtgcacagaaaaccgagaatattcaaaattccaaattttttcttaggagcaagaagaaaatgtggccctaaagggggttagttgaggggtagggggtagtgaggatcttgatttggatctctttttatttaaatgtgaatttcaacttttgacaatcaaagaaaagacttttgttgaaatagctttactgtttctcaagtgttttggagaaaaaaatcaaccctgcaatcactttttggaattgtcttgatttttcggcagttcaagctatatcgaatatagttctgtgtagagaatgtcactgtagttttgagtgtatacatgtgtgggtgctgataattgtgtattttctttgggggtggaaaaggaaaacaattcaagctgagaaaagtattctcaaagatgcatttttataaattttattaaacaattttgtt

SEQ ID NO: 148255 - DNA, 4036 bp, Homo sapiens
aacaaaattgtttaataaaatttataaaaatgcatctttgagaatacttttctcagcttgaattgttttccttttccacccccaaagaaaatacacaattatcagcacccacacatgtatacactcaaaactacagtgacattctctacacagaactatattcgatatagcttgaactgccgaaaaatcaagacaattccaaaaagtgattgcagggttgatttttttctccaaaacacttgagaaacagtaaagctatttcaacaaaagtcttttctttgattgtcaaaagttgaaattcacatttaaataaaaagagatccaaatcaagatcctcactaccccctacccctcaactaaccccctttagggccacattttcttcttgctcctaagaaaaaatttggaattttgaatattctcggttttctgtgcacacctggaattgggcaaatgtgttcagctcagccagcattttctgtagacatcatcaaaagcaggcacttggggattctgggctttgagtacaaaccacggatcttgtgtcagaaacacatgttgagactcctccattccttccagaattttcagagatgaggtagacccacctcaatcatcctcagcatcagtttgctaaattgccaggctcaatgacaagctctcctgccatctccaagcccacttttcatagttccgctctgtctttggctgcagcactttaggcactattctaagtcctggagtatatcactcttgcttcagagctaaataaacattaatgaacacacttactcagaacaagtcactggatagctgcccattgcaagttacatactcaggagatgaaagagggaagccattaaaggtcttcagagtagacaatacctagtcaagatgtggccagacaaagacacaaacttcttaccctaaaagagcccaataatttctgcatcagagaactcctatcttgggcaaagcaactgaattcaggagtgagagttgatattaaaacatggaggctgggcacagcagctcatgcccacaatcccagcactttggggggccaaggcagaaggattgcttgaggccaggagtttaagaccagcttgggcaacatagcaagaccccatctgtacaaaaaaataaaaaggaggctggtgggagaactgcttgagccccagagtttgaggttacagtgagctatgatcacatcactgcatcccaggcctgggcgatggagcgaaactgtctcttaaaaaatggcagggagttggggagctgggcaggtgcagtggctcatgtctgtaatcccaatactctgggaggccaagatgggaggatcacttgagcccaggagtttgagaccagcctgggtaacacagggagaccccgtctcaaatatttaaaaaattagtcatgcgtagtggtgcatgcctgtggtcccagctacttgggaggctgaggtgcaaggatagcttgagcctgccaccagcaacgtgatttctgcatttcccagcacatgggtctggggcccgcctctctcgagtcccctagtcgtcctcgccgcctccgtacatgtcagccagcttcttgaagcgattgccccattcgttcaagtagtcatagtcctggtctttgtctgactctgaggagttcagggagctcagactagcagcttcggaaccgcttccttcatagtcaaacacgagcagagaatcataaggcggggctgtggggtcagtatcagccgctttcagattttcatcaataaaatttccaatttcatcgggattggcagggcggggaagataccgggggacactcatgagggttggtgcaacgtcgttacgagtcacttcaggccgagcgtccaggcccctgtgcagctggctcaagtcaaagtcctggtcctcttctccgcctccttcttcatcatagtaataaacgttgtcccgggtgtcatcctctgggggcagtaagggctctttgaccaccgctctcctccgaagaaacagcaagagcagcagaatcagaattagcaaagcaagaattcctccaagaatccccagaatggcaggaatttgcaatcctgcttcgacaggctgtgccttcctacagacgccggcggccccttcacagtcacacacgctgacctctaaggtggtcacttggtctttattctggttatccatgagcttgagattgattttgtagtcacccacctctaaggccatctttggcttcaaaatgatagattcttgggttgggtcgttgtactgaatggtccagttggcactcgccccgtgtgttagttctgctgtgaagggagatgtattgggaggaaggtctgcatcaatgatgtttatgacctgaggctttggattcctctcacagaagaatatagttcgaggttctggtatgggggcgttgtcattcacatcagacaggatcagcagaagtgtccctgttccagtagcaactggagaaccattgtctgtagctatgattagggctgtgtacgtgctgttcttcacgtgctcaaaatcctccctgtccagctcagcccgagtggaaatggcaccagtgtccggattaatctccagccagttggcagtgtctctccaaatccgatatgttattttctgttccataaatgtgtctggctcctgggcagtgtaggatgtgatttcctggcccacgccaaagtcctcggacacttccactctcttttcaggaggcacaaagatgggggcttcattcacatccagcacatccacggtgacggtggctgtggaggtggtgagagagacctcaaaaggtaccacattcgtcactgctacgtgtagaatgtactgctgcttggcctcaaaatccaagccctttgctgttttcaaaatgccatcgttgttcactggatttgtggtgacgacaaattgtccaccatcatcattcaatatggtgtatacagcctcccacgctggggtattgggggcatcagcatcagtcactttcagtgtggtgattacgacgttagcctcgttctcaggcacctgacccttgtacgtggtgggattgaagatcggaggattatcgttggtgtcagtgactgtgatcacagctgttgctgttgtgcttaacccctcaccttgaaggtcagcagcttgaaccaccagggtatacgtagggaaactctctcggtccagcccagtggtgaccacactgatgactcctgtgttcctgttaatggtgaacatatttttgtcagggagctcaggatcttggctgaggatggtgtaagcgatggcggcattgtaggtgttcacatcatcgtccgcgtctgtggctgtgacctccatcacagaggttcctggaagagcaccttccatgacagaccccttaaagacctcctgggtgaattcgggcttgttgtcattctgatcggttaccgtgatcaaaatctccattggatcctcaactgcattcccgttggatgacacagcgtgagagaagagagtgtatgtggcaatgcgttctctatccagaggctctgtcaccttcagccatcctgtttctctttcaataataaagacaccaacagggggtgtgtcagctccttggccagtgatgctgtagaaaaccttgccttctttgtctttgttggatttgatctgaaccaggtttttaggaaatgggcctttttcattttctgggcagctgatgggaggaataacccagtctctcttctgtcttctgaggccaggagaggagttgggaaatgtgagcaattctgcttggattccagaaacggaggcctgatggggcggggggcggtggtggtgccccactgtattcagcgtgactttggtggaaaactttctgtaggtggagtcccaggcgtagaccaagaaatggatctgtgggttatgaaaccgtagaggccttttgactgtaatcacaccatctgtgcccactttgaatcgggtgtcgagggaaaaataggctgtcctttgtcgaccggtgcaatcttcaaaattca

SEQ ID NO: 148256 - DNA, 848 bp, Homo sapiens
tttttttttatggtttaacaaaattgtttaataaaatttataaaaatgcatctttgagaatacttttctcagcttgaattgttttccttttccacccccaaagaaaatacacaattatcagcacccacacatgtatacactcaaaactacagtgacattctctacacagaactatattcgatatagcttgaactgccgaaaaatcaagacaattccaaaaagtgattgcagggttgatttttttctccaaaacacttgagaaacagtaaagctatttcaacaaaagtcttttctttgattgtcaaaagttgaaattcacatttaaataaaaagagatccaaatcaagatcctcactaccccctacccctcaactaaccccctttagggccacattttcttcttgctcctaaaactacagtgacattctctacacagaactatattcgatatagcttgaactgccgaaaaatcaagacaattccaaaaagtgattgcagggttgatttttttctccaaaacacttgagaaacagtaaagctatttcaacaaaagtcttttctttgattgtcaaaagttgaaattcacatttaaataaaaagagatccaaatcaagatcctcactaccccctacccctcaactaaccccctttagggccacattttcttcttgctcctaagaaaaaaatttggaattttgaatattctcggttttctgtgcacacctggaattgggcaaatgtgttcagctcagccagcattttctgtagacatcatcaaaagcaggcacttggggattctgggctttgagtacaaaccacggatcttgtgtcagaaacacatgttgaga

SEQ ID NO: 148257 - DNA, 610 bp, Homo sapiens
  misc_feature (1)...(610): n = a,t,c or g
ccccatctgnacaaaaaaatnaaaagnaggctggtgggagaactgcttgagccccagagtttgaggttacagtgagctatgatcacatcactgcatcccagcctggacgatggagcgaaactgtctcttaaaaaatggcagggagttggggagctgggcaggtgcagtggctcatgtctgtaatcccaatactctgggaggccaagatgggaggatcacttgagcccaggagtttgagaccagcctgggtaacacagggagaccccgtctcaaaccgactttttcatagttccgcctctgtcctttggctgcaagccactttaggcactattcctaagtccctggagtatatcactcttgccttcagagctaaataaacattaatgaacacacttactcagaacaagtcactggatagctgccccattgcaagttacatactcaggagatgaaagagggaagccattaaaggtcttcagagtagacaatacctagtcaagatgtggccagacaaagacacaaacttcttaccctaaaagagcccaataatttctgcatcagagaactcctatcttgggcaaagcaactgaattcaggagtgagagttgat

SEQ ID NO: 148258 - DNA, 6839 bp, Homo sapiens
aacaaaattgtttaataaaatttataaaaatgcatctttgagaatacttttctcagcttgaattgttttccttttccacccccaaagaaaatacacaattatcagcacccacacatgtatacactcaaaactacagtgacattctctacacagaactatattcgatatagcttgaactgccgaaaaatcaagacaattccaaaaagtgattgcagggttgatttttttctccaaaacacttgagaaacagtaaagctatttcaacaaaagtcttttctttgattgtcaaaagttgaaattcacatttaaataaaaagagatccaaatcaagatcctcactaccccctacccctcaactaaccccctttagggccacattttcttcttgctcctaagaaaaaatttggaattttgaatattctcggttttctgtgcacacctggaattgggcaaatgtgttcagctcagccagcattttctgtagacatcatcaaaagcaggcacttggggattctgggctttgagtacaaaccacggatcttgtgtcagaaacacatgttgagactcctccattccttccagaattttcagagatgaggtagacccacctcaatcatcctcagcatcagtttgctaaattgccaggctcaatgacaagctctcctgccatctccaagcccacttttcatagttccgctctgtctttggctgcagcactttaggcactattctaagtcctggagtatatcactcttgcttcagagctaaataaacattaatgaacacacttactcagaacaagtcactggatagctgcccattgcaagttacatactcaggagatgaaagagggaagccattaaaggtcttcagagtagacaatacctagtcaagatgtggccagacaaagacacaaacttcttaccctaaaagagcccaataatttctgcatcagagaactcctatcttgggcaaagcaactgaattcaggagtgagagttgatattaaaacatggaggctgggcacagcagctcatgcccacaatcccagcactttggggggccaaggcagaaggattgcttgaggccaggagtttaagaccagcttgggcaacatagcaagaccccatctgtacaaaaaaataaaaaggaggctggtgggagaactgcttgagccccagagtttgaggttacagtgagctatgatcacatcactgcatcccaggcctgggcgatggagcgaaactgtctcttaaaaaatggcagggagttggggagctgggcaggtgcagtggctcatgtctgtaatcccaatactctgggaggccaagatgggaggatcacttgagcccaggagtttgagaccagcctgggtaacacagggagaccccgtctcaaatatttaaaaaattagtcatgcgtagtggtgcatgcctgtggtcccagctacttgggaggctgaggtgcaaggatagcttgagcctgggaggacaaggctgcagtgagctgtgattgcaccactgcactccagcctggccgatagaatgagaccctgtcttaaaaaaaaaaaaaaaggcagagggacacaccagtgtagtaatgagcagaagcacacaaattttttttaaaaaattatatacacaaaacaacagaactagagtagctgacttctccccttctttttaaaagtgagacaaaattccttaagaaaatctgcaaggtgctgggtgaaccttctgatgctaaagttgttcttctggaatattaaaatttgggtatcttttggacatcaccaccatgtaaagagtgatgggaaaaaaaaaaaagctttaagaaataagtcgaaacttttctaacacaaacttattagagctataaagtggagagagtataaagctatactaactgcatcactaaccagtctcttttttttccccagaaactcatctcaagggaagggagctgaaaaaaacaaaattgtttaataaaatttataaaaatgcatgctttgagaataccttttctcagcttcgcattgttttccttttccacccccaaagaaaataccacaattatacagcacccacacatgtatacactcaaaactacagtgacattcctctacacagaactatattccgatatagcttgaactgccggaaaaatcgaagacaattccaaaaacgtgattgcagggtttgattttttttctccaaaacacttgaggaaacaggtaaaggctattttcaacaaaaggtcttttctttggattggtcaaaaggttggaaattcacatttaaaattaaaagagatcccaaatcaaagaccctcaactacccccctacccccctcaaacttaaccccccttttagggcccacattttttcttcttggctccctaagaaaaaaatttgggaattttggaatattcccgggttttctggggcacacctgggaattggggcaaatgtggttcagctcagccagcattttctggaggacatcatccaaaggcaggccacctgggggaattctggggctttggagtacaaacccaagggatcttggtgtcagaaaacacatgttgagactccttccaattcccttcccagaatttttcagtagatgaggtaagacccacctcgaatcatcctcagacatcagtttgctaaattgcccaggctcaatgacaagctcttcctgcccatctccaagcccactttttatagtttccgcttctgtctttggctgcagcacctttaagcactattctaagtccctggagtatatcactcttgcttccagagcttaaataaacatttaatgaaacacacttactcaagaacaagtcactggatagctgccccattgcaaagttacatactcaggagatgaaagagggaagcccattaaaaggtcttcagagtagacaataccctagtcaagatgtggccagacaaagacacgaacttcttaccctaaaagagccccaataatttctgccatcaagagaactccctatcttgggcaaagcaactgaattccaggagtgagagttgatattaaaacatggaggctgggcacagcagctcatgcccacaatcccagcactttggggggccaaggcagaaggattgcttgaggcccaggagtttaagaccagcttggggcaacatagcaagaccccatctgtacaaaaaaataaaaaggaggctggtgggagaactgcttgagccccagagtttgaggttacagtgagctatgatcacatcactgcattcccaggcctgggctgatggagcgaaactgtctcttaaaaaatggcagggagttggggagctgggcaggtgcagtggctcatgtctgtaatcccaatactctgggaggccaagatgggaggaccacctgagcccaggagtttgagaccagcctgggtaacacagggagaccccgtctcaaatatttaaaaaattagtcatgcgtagtggtgcatgcctgtggtcccagctacttgggaggctgaggtgcaaggatagcttgagcctgggaggacaaggctgcagtgagctgtgattgcaccactgcactccagcctggccgatagaatgagaccctgtcttaaaaaaaaaaaaaaaggcagagggacacaccagtgtagtaatgagcagaagcacacaaattttttttaaaaaattatatacacaaaacaacagaactagagtagctgacttctccccttctttttaaaagtgagacaaaattccttaagaaaatctgcaaggtgctgggtgaaccttctgatgctaaagttgttcttctggaatattaaaatttgggtatcttttggacatcaccaccatgtaaagagtgatgggaaaaaaaaaaaagctttaagaaataagtcgaaacttttctaacacaaacttattagagctataaagtggagagagtataaagctatactaactgcatcactaaccagtctcttttttttccccagaaactcatctcaagggaagggagctgaaaaaccaccagcaacgtgatttctgcatttcccagcacatgggtctggggcccgcctctctcgagtcccctagtcgtcctcgccgcctccgtacatgtcagccagcttcttgaagcgattgccccattcgttcaagtagtcatagtcctggtctttgtctgactctgaggagttcagggagctcagactagcagcttcggaaccgcttccttcatagtcaaacacgagcagagaatcataaggcggggctgtggggtcagtatcagccgctttcagattttcatcaataaaatttccaatttcatcgggattggcagggcggggaagataccgggggacactcatgagggttggtgcaacgtcgttacgagtcacttcaggccgagcgtccaggcccctgtgcagctggctcaagtcaaagtcctggtcctcttctccgcctccttcttcatcatagtaataaacgttgtcccgggtgtcatcctctgggggcagtaagggctctttgaccaccgctctcctccgaagaaacagcaagagcagcagaatcagaattagcaaagcaagaattcctccaagaatccccagaatggcaggaatttgcaatcctgcttcgacaggctgtgccttcctacagacgccggcggccccttcacagtcacacacgctgacctctaaggtggtcacttggtctttattctggttatccatgagcttgagattgattttgtagtcacccacctctaaggccatctttggcttcaaaatgatagattcttgggttgggtcgttgtactgaatggtccagttggcactcgccccgtgtgttagttctgctgtgaagggagatgtattgggaggaaggtctgcatcaatgatgtttatgacctgaggctttggattcctctcacagaagaatatagttcgaggttctggtatgggggcgttgtcattcacatcagacaggatcagcagaagtgtccctgttccagtagcaactggagaaccattgtctgtagctatgattagggctgtgtacgtgctgttcttcacgtgctcaaaatcctccctgtccagctcagcccgagtggaaatggcaccagtgtccggattaatctccagccagttggcagtgtctctccaaatccgatatgttattttctgttccataaatgtgtctggctcctgggcagtgtaggatgtgatttcctggcccacgccaaagtcctcggacacttccactctcttttcaggaggcacaaagatgggggcttcattcacatccagcacatccacggtgacggtggctgtggaggtggtgagagagacctcaaaaggtaccacattcgtcactgctacgtgtagaatgtactgctgcttggcctcaaaatccaagccctttgctgttttcaaaatgccatcgttgttcactggatttgtggtgacgacaaattgtccaccatcatcattcaatatggtgtatacagcctcccacgctggggtattgggggcatcagcatcagtcactttcagtgtggtgattacgacgttagcctcgttctcaggcacctgacccttgtacgtggtgggattgaagatcggaggattatcgttggtgtcagtgactgtgatcacagctgttgctgttgtgcttaacccctcaccttgaaggtcagcagcttgaaccaccagggtatacgtagggaaactctctcggtccagcccagtggtgaccacactgatgactcctgtgttcctgttaatggtgaacatatttttgtcagggagctcaggatcttggctgaggatggtgtaagcgatggcggcattgtaggtgttcacatcatcgtccgcgtctgtggctgtgacctccatcacagaggttcctggaagagcaccttccatgacagaccccttaaagacctcctgggtgaattcgggcttgttgtcattctgatcggttaccgtgatcaaaatctccattggatcctcaactgcattcccgttggatgacacagcgtgagagaagagagtgtatgtggcaatgcgttctctatccagaggctctgtcaccttcagccatcctgtttctctttcaataataaagacaccaacagggggtgtgtcagctccttggccagtgatgctgtagaaaaccttgccttctttgtctttgttggatttgatctgaaccaggtttttaggaaatgggcctttttcattttctgggcagctgatgggaggaataacccagtctctcttctgtcttctgaggccaggagaggagttgggaaatgtgagcaattctgcttggattccagaaacggaggcctgatggggcggggggcggtggtggtgccccactgtattcagcgtgactttggtggaaaactttctgtaggtggagtcccaggcgtagaccaagaaatggatctgtgggttatgaaaccgtagaggccttttgactgtaatcacaccatctgtgcccactttgaatcgggtgtcgagggaaaaataggctgtcctttgtcgaccggtgcaatcttcaaaattcactctgcccaggacgcggcctctctccaggtggcgccggggcaccgtgaacgtgtagctctcggcgtcaaagccagggtggcagggctccggctcctggcagagccaagaggagacctgcagcagcagcagcagcgccgagaggctgcggctccaagggcccatggctggccggggacgccgagcgagggcaggcgccgggtgcggtcgggtcgggccgggctggagcgggctggagtctgaactgacttccgcaagc

SEQ ID NO: 148259 - DNA, 750 bp, Homo sapiens
ttgagacagagtctcactctgttgcccaggatggagtgcaatggcgccatctcagctcactgcaacctccacttcttggattcaagtgattctcctgcctcagtctcccgagtagctgggattacagctgcccatcacccacacttagctaatttgttttttttttttttttttaatagagccggggtttcatcattttggcctggctggtctcgaactacagacctcaggtgatctgcctgcctcggccttccaagatgctgggattacaggcatgagccactgcaacccggccggaattactgagtttagatcataccccatttacctagacattctcatacatctctccagtgtggttttcttcatatattttccccatcacttctttttgaaagttcctattttgtaacatctttatcaacatttagtattttcagtctttgtaattgctgtaaatcccccaaatataaaatcgtatcttaatgtcgggtttatttgtccttctttgatgaccaataaagttaaacatctttttttacatttgttgaccatttaggccttttcttttctcagtgattgttcattatttttccctattgtcaatagaaagttgtatttaaaaaaaaatgatttgtaggatttgtttttatattttagataattacttattggttctatatcacatatatcatttcccagcagctcatttttccacattagcaagttttagtgaataaaagttttaag

SEQ ID NO: 148260 - DNA, 468 bp, Homo sapiens
tttttgagacagagtctcattcttgtcacccaggctggagtgcagtggcgtgatctttgctcactgcagcttctgcctcccgggttcaagtgattctcctgcctcagcctcctaagtatctgggatgataggcacccgcaaccatgcccagctaatttttgtatttttagtagaggtgaggtttcaccatgttggccaggctggtcttgaactcctggcctcaagtgatccacccgcctcagcctcccaaagtgctgggtttacatgtgtgagccactgtgcccagccccttcactgccctttgaagactccctccttccactgtagtctgtgacctctgggcttctggagggacgggactccagtaccccagtactcacgccggctcccccttagtgggcacgtgctgtgtgccagggccaggcactcttcctgcagcaccactgcaggctccatgcagccccataa

SEQ ID NO: 148261 - DNA, 693 bp, Homo sapiens
gagacagggtctcgctccatcactcaggttggagtgcagtggtgcaatcacggctcactgcagccttgacctcccaggccgaagcaatcctcccacctcagcctcctgagtatagctggtgcttcaggtgagtgtcgccacacccagctgattaaaaatttatattttttgtaaatacagggtgtcgctatgttgtccaggctggtctcaaactcctggcttcaggagcaaagcaatcctcctgccttggcctctcgaagtgctgggattaaaggcgtgacgaccaatgcccagcctccaagtgtatttgtacatcagtctgtatgggcacaaagacagcatcctcattcttttctaaagctgcagagtattcaaccgttgggataaactgtggtttattgtggaagtgccccactgatggacatctatgtagcaatgaatgcccttgcacacacgcacttttcacatgtgtgagtaatgtacctacaggataaactcccagtggagtaactgacgcaaaagatatatacatttatgatttttacagatgttaccaaattgcctcgcatggaaaatggaaaatgcagtcatgcctgtctccctacaggaaggcagggattgtcgccatattatcagtgagaaacgaagcttagagaggtcaagaaacttgcctgaagtcccatccctcgtgcc

SEQ ID NO: 148262 - DNA, 906 bp, Homo sapiens; identical to SEQ ID NO: 122328

SEQ ID NO: 148263 - DNA, 1078 bp, Homo sapiens
  misc_feature (1)...(1078): n = a,t,c or g
tttttttttttttctcggagtctcactctgtcatccaggctggagcgcagtggcgtgatctcggctcactgcaacctctctgcctcccgggctcaagcaattctcctgcctcagcctcctgagtagctgggattacaggtgcccgccaccacgcctggctaatttttatatttttagtagagacggggtttcaccatattggccaggctggtcttaaactcctgaactcaagtgatccacccacctcggcctcccaaagtgctgggattacaggtgtgagccaccctacccagccctcttttcttttttttaaaggaaagtggatcatctctgatggtctctgcaactctaaggttccataagtgaaggcattcaggaccctctagggcagcactgagctcaagcccgtagttggagcccagaaagctgaaatttggcactgcaagtctacaaaacaaatgggctatgcagcagactaggcagcactgggcccagaggggctctaagcccatggntgcacccccctccgccccgcccccaccagagatggggtccctgggctgctccatcccacagaaaaatcccagggaagtgaggtcttccttcaccaggggnagaggcacatatctgaacgagaacgtttgcttccgttcctaaagaacgaacaagaagtccttgcttccaaggactacaaggagaaagcagaaggcacagcgaggcttccagtgggcgctcaccctgcgaatagagagcaggaaccaggagaatgttctgtagaaagctctaaaaatgtcaccacttcccccatataatcgcagttcctccccggtgtgtgtccctgcttgtgacctcttaggaactgaaccgtacaaggatccagaggttcccaagataggggcccctaggggtggacggaacctcagaggttatcaatcgccctcaccgtcctcagagggctcggacctgcagaacgttcccagatgggggcaccaactgccccctgaagtgtccttctctgagaagtccctatagtcatggcctcaggcaccctcctcctctccccaactccttggtccac

SEQ ID NO: 148264 - DNA, 808 bp, Homo sapiens
  misc_feature (1)...(808): n = a,t,c or g
tttttttttttttttttttgagacagagtcttactctgtcacccaggctggagtgcagtggcatgatctcggcttactgcaacctctgcctcccgggttaaagcaattctcctccctcagcctccccgagtagttagcgtaacaggctcgccaccaccatgcccagttaatttttgtacttttggtaaaggactggggttcaccatggtgggccaggctgggtccggaacttctgacctcaaggtgatctgcccacctgggcttcccaaggtgctggggattacagggtgtgagccacggcgcctgggncaattctggataacaccataaatttaagttccttttcactttttcccacaaggataaattacgggctttacaacatttttttcaggagcccaaccatggacttagattctacaaaattaatttcacttttaaacctcaaattccacaaaaatgggtttaaaggaaactcatttatatttaccccgggaaatcctaaacttcttgataatacccacacattttagtttccttcctcacttccttccccacaagataaataatttcagctttacaacattttcctcagagcccaaccatgactacactgtgcaaaatgaattaatttcacttttaaatctcaaatcccggtaaaaatgagtttacttaaaatgaaactcacttgcatttaccacagaaatttaaactcttaattacaccatataccttaattccttttcacttctttccataagataaatcacaactttacaacattttctgagcccaaccntgactagat

SEQ ID NO: 148265 - DNA, 406 bp, Homo sapiens
cactaatttgctttaaatggctttacaccatagtgaatgagttattttatttataatttgctttgttccagaaagtattttaggcagattacaaatattttataatagaagtagcatagattaaaaagtgatggagggaggccgggcacggtggctcatacctataatcccagcacttcgggaggccgaggcaggtagatcatctgaggtcagcagtttgagaccagcctggccaacatagtgaaaccccgtctctgctaaaatacaaaacaagccgggcacagtggctcatgcctgtaatcctagcactttgggaggccgaggcggacaggtcatgaggtcatgaggtcaggagatcaagaccatccgggctaacacggtgaaaccccgtctctaccaaaactac

SEQ ID NO: 148266 - DNA, 635 bp, Homo sapiens
agcctgggcaacaaagtgagaccctgtctctaaaaaagattgaaaaataaaaaagaggaaaagaaagattattactgttgaagaaggagatgcattgaggagatggatacacctattttaagggaactatcattcaacgttttctctttttttttttttgagacgggagctcgcctcctgtggcccaggctggagtgcagtggcgggatctcggctcccttgcaagctccgcctcctgggttcacgccattctcctgcctcagcctctctgagaagctgggactacaggcgcccgccaccacgcccggctaatttttttgtatttttatagtagagacggggtttcaccgtgttagccaggatggtctcgatctcctgacctcgtgatcaggcccgcctcggcctcccaaagtgctgggattacaggcgtgagccaccgcgcccgacctagaagctgtatttcttttgactcaactgtgacacttgcccaataggtcctatgtttttcatatgatgggtgcttacttacatttattgacatattgaacaattattatggaaaggcttaagatgtctgagttaaaaattttcttccctgaaggaagcaagggagaaagtcaaacagtcatatctca

SEQ ID NO: 148267 - DNA, 939 bp, Homo sapiens; identical to SEQ ID NO: 126917

SEQ ID NO: 148268 - DNA, 1026 bp, Homo sapiens; identical to SEQ ID NO: 126918

SEQ ID NO: 148269 - DNA, 423 bp, Homo sapiens
  misc_feature (1)...(423): n = a,t,c or g
cttcgtcagatatcnaaaatatcatcgtattcagtgtcctaactcagggctgtgaggctgtctacagcagtgtatctggccttaaagctcacctgggctcttgtacattgggaaactttgtggctggaaaatacaaatgtcttctatgtcagaaagaatttgtgtcagagagtggtgtcaagtatcacatcaactccgtccatgctgaggtgaggcttttgtaatcctgtgggcctgatatgtaagccacaagagaggtagactttgtccctattgttatggactaaggctgtcaaggaaagcatctctaaagtggttaccagagccattagagttaaaatattctctaaacttagatatataattggatttttctgtgaaggtatttgaagtcactgtgaggggtgggcggggtggcttatt

SEQ ID NO: 148270 - DNA, 2398 bp, Homo sapiens
atgatcgaaagttaaaatatactcgtccagggctccctaccttcagccaggaagtactacataaatggaagacagatatcaagaaatatcatcgtattcagtgtcctaaccagggctgtgaggctgtctacagcagtgtatctggccttaaagctcacctgggctcttgtacattgggaaactttgtggctggaaaatacaaatgtcttctatgtcagaaagaatttgtgtcagagagtggtgtcaagtatcacatcaactccgtccatgctgaggactggttcgttgtaaacccaacaacaaccaaaagctttgaaaagctgatgaagataaagcagccggcagcaagaagaagaaaagcggaggcagcagcacaggagcagaaggtctctaagaaaggcggcagcagcctgggcattgagcttcccgagacagagccgagtcttagagtagggaaggatcagaggaggaataatgaggaactggtagtgtcagcctccctgtaaggaaccagagcaggagccagtgccagcacagttccagaaagtaaagcccccaaagactaatcataaacgaggaaggaaatagggcagtcagtgtaaaagtgctcctaggaaagcagatgtgatgctgttgtcacggggacctgtgctgggaggactgagtgaagattctttcagctgtttgtgttaaggctgtgactttctcagctccttcctcctgtgtaaatttcactgtcttcccttcttacattttgattcccccctccccttttaagtaggttttcctgctattcctcgtcaaagtcctcttgtttttttatcttgcccaaaagagctccctctcaagggccaactataggctcctcttggccctgtaacaaaactaaggaaacctctttggttgtcctttccttcctggggtatagaatgttcttgggaagctccattggatttagtagctgctccatcatctagcttgtgaaaaccattccaaactaattttttaaaaccataactgatttgtcattttgtatttgtgatataacaagtctagaagttagaactgttgtcattcacataataagattactctgtctccttgggaaaaaaactttatggaggctgtttgtcctctcaatatggttttaagattgaaagtaccgaaaacggatttaggatgaaaactctagaactaccctatgctgtttatactggaaaatgctttgtaccaagtagcagtgactagacccacagacatgaaaagcaaccttagggagtaaagtgacccaaacattgaaaatgacaggaaagaggaaagtagaagcagccattaaatacttgccccaactttcctgggagccccgaggccttcatccataggctatgatcacttggccctctgaagcttattttttgcttctttggttttaagaattgagaaatatcacattgcccctgatgttttgacagtctcctagtgctcctggtagtgccactaaggggaaaaccaaggtgcgcatttccttctccctggactttaccttacttgttagtctacgccccactgtttccacccatccccttagccaacctctgtctttttgaattttctgagaatattgtcctatcctcttttatatatggagttctctcctctttatatcctgagactttgacaccagatgtagatatttatctggagctggaaagaaaaattctttttctgtaccctcatgcctatctggtaatgtttaatgggttaatttctctttgagggtggctttcctctggaaccattggttagagcagcctttgttgtcgtgtttctggattcctcttccccccattttggcgtaaaataattggtcttatatattcttgccctattcttgggcatatgcccacataaaaaatgaaccctgatatagaccaagtacctacccttttccaaattcctgaaaggcctattacccactttaacctctttgtgcctccctcccaaatagcctttaaaatgtgggcttttgtgaaggaccacttttcaaacaggggagcactgaaacctgaattggatactgcccagaataggtagttttgaaacaagttaaggacatggtatatgcactctgcattttcattggcagtgtgccctttaaagccctttcagtagatgagggttgtcagggaggagaaatgaagaagcttatgttaatttctggtgagtaagacctggggaatgtttggcaatgacaaaagaaataaatgactctcagaaagatgtttctagtgttctttgacgccgacctgctgcatgactccttgacactgtatgggggtaagaagatggctagagatgggggtgagtttgaaataaattccacatgcagttgtctcag

SEQ ID NO: 148271 - DNA, 462 bp, Homo sapiens
agctcccgagacatacttctctgcacagacatagcctctcggggcctggacagcactggtgtggagctggttgtcaattatgatttccccccaacgctgcaagattgagctggcggctcgccgaaggagaagtcttccaggactagcatcctcggtgaaagagcctttgccccaagcaacctgattttgacaaatctgattaaaatgtgatgctagaacagggatctttcccagtatcttgagtgggtgaccacacttgtcagtgggaggctctgggctgccctgtcggctccttgagggcgggatgaactgctttgtgacttggaaaggtacgctgctggccagcattggagaagaagctgctgagcatggctttctgtagtctttagcaagacacaagtggattttgactttgtatcatgtcatgatttctaacaataaatgatgtttttatgtgcaaaa

SEQ ID NO: 148272 - DNA, 1750 bp, Homo sapiens
gcacgaggcccgcactaagggaaacatggctcttagcgcggcccggttgcggcttctttttcccttcgtgaattcggtttgcttcctggcgccgccgacgggggcttcacggtccgcagtcccgacgaaacccttgccgggtggtgcgcatcccagtggcttctacaagcggcaagttggaacagcggcaagagcaggcggcggaaccttcccgagggccggtgcttggttcgacccggaccgctgctggtttcggcgcggcggccggagttgaacacggccggcgcgcctcacactgggccgttgggagcgcgcgccgctagcctctcaaggctggaagagtcgacgcgcgcgtcgggaccacttctccaatcgagcgcgcgcaacaggaggcgccagcggtgcgaaagctctcgtctaagggcagctttgctgaccttggggcctggaagccccgtgtgctgcacgcactacaggagggctgcgcctgaagtcgttcaagcccacaaccgtgcagtctagcaccatcccctcactacttcgcggccgccatgtcgtttgcgccgcagaaaccggcagtggcaagactctcagctacctcctgccgctgcttcaacggctcttgggccagccaagcctggactcccttcctatccccgcgccccgaggcctggtccttgttccttcccgagaattggcccaacaggtgcgggctgtggcccaacccttgggccgctccttgggcctgctggtgcgggacctggagggaggccacggcatgcgtaggatcaggctgcagctgtccagacagccttcagcagatgtgcttgtggccactccaggggctctgtggaaggccctgaaaagtcgactgatcagtctggagcaactctccttcttggtgttggatgaggcagacacactgctggatgaaagcttcctggaactggtggactacatcttagagaagaaggacctggctgtctttctgtaccatctgcgccttgaggccgaggtggaggtggtggagatgctgggtcctcacggccaaccctgtccccagcataacagtgacatctctgcatacacctacgagcggacgctgatgatggagcagcggtcgcagatgctgcggcagatgagactgaccaagactgagcgggagcgagaagcccagctggtcaaggatcggcactcggccctgcggctggagagcctgtactcggacgaggaagatgagtctgcagtgggggctgacaagatccagatgacgtggaccagggacaagtacatgactgagacctgggaccccagccatgcccctgacaatttccgggagctggtgcacattaagccggaccaatccaatgtgcggcgcatgcacactgctgtgaagctcaatgaagtcattgtcacgcgctcccacgacgcccgcctggttctcctaaacatgcctggcccacccaggaacagttggtgcacaactagtagccgaacagagaagcgacaatggaactgcccagccgtcagaaccgaaaaaaacgcacaaacccgacagacaataatcgccgaaacgaagacgcaaaaaaaagacaccgaaccaagaataccggaagcagacctagcggtgcagtatgacaaccactacaccaacaccaagtactgcttgtgccagatgctacgagaacagctggagtcgccccagggaaggttgctccatgctgcccagtcttcccgggaaatttggtaa

SEQ ID NO: 148273 - DNA, 1976 bp, Homo sapiens
atggctctaacgcggccggtgcggctcttttccctcgtgactcggttgctcctggcgccgcgacggggcctcacggtccgcagtcccgacgaacccctgccggtggtgcgcatcccagtggctctacagcggcagttggaacagcggcagagcaggcggcggaacctcccgaggccggtgctggttcgacccggaccgctgctggtttcggcgcggcggccggagttgaaccagccggcgcgcctcacactgggccgttgggagcgcgcgccgctagcctctcaaggctggaagagtcgacgcgcgcgtcgggaccacttctccatcgagcgcgcgcaacaggaggcgccagcggtgcgaaagctctcgtctaagggcagctttgctgacctgggcctggagccccgtgtgctgcacgcactacaggaggctgcgcctgaagtcgttcagcccacaaccgtgcagtctagcaccatcccctcactacttcgcggccgccatgtcgtttgcgccgcagaaaccggcagtggcaagactctcagctacctcctgccgctgcttcaacggctcttgggcccacccaagcctggactcccttcctatccccgcgccccgaggcctggtccttgttccttcccgagaattttttccaacatttgcgggctgtggcccaacccttgggccgctccttgggcctgctggtgcgggacctgggagggaggccacggcatgcgtaggatcaggctgcagctgtccagacagccttcagcagatgtgcttgtgggccactccagggggctctgtgggaaggccctgaaaagtcgactgatcagtcttggaagaactctccttctttggtgttggatgaaggaagacacactgctgggatgaaaagcttcctgggaactggtggaattacatcttaagagaagagccacattagcagaaggcccagctgacttggaagaccccttcaatcccaaagctcagttagtgctggtaggagccacatttcccgagaggtgtaggccagttgctgaataaagtcgccagcccagatgctgtcaccaccatcaccagctccaagctccactgtatcatgcctcatgtgaaacagacatttctgagactgaagggagcagataaggtggccgagctgggtgcacatccttcaagcatcgttaccagagcagaaaagggactgggtccctcaggaactgggttctgtgttctgtaatagctccagcactgtgaactggctgggatatattctggatgaccacaaaatccaacacctaaggttgcaggggcaaatgccagccttgatgagggtaggaatcttcccagtccttccagaagagctcccgagacatacttcttctgcacagacatagcctcttcggggcctgggacagcactggtgtgggagctggttgtcaattattgatttccccccaacgcttgcaagattaacattccacagagcaggggagagtgggcccgtgtggggagccgaaggcccaggccaccgtcatcaagttttgtgacccatccctgggatgtgaacccctggttcaaaaaagattgaagcctggcggctcgcccgaaggaagaagtcctccccggactagccatccctcggtgaaaaaagccctttgccccccaaagcaaccctgattttgaacaaaacctgattaaaatgtgaatgcctaaaaacagggatctttccccagtatccttgaagtgggtgacccacacttgtcagtgggaggctctgggcctgccctgtcggctccttgagggcgggatgaactgctttgtgacttggaaaggtacgctgctggccagcattggagaagaagctgctgagcatggctttctgtagtctttagcaagacacaagtggattttgactttgtatcatgtcatgatttctaacaataaatgatgtttttatgtgcaaaaaaaaaaaaaaa

SEQ ID NO: 148274 - DNA, 868 bp, Homo sapiens
aagatggagtctcactctattccaggctggaatgcagtggcacaaatctcagctcactgcaacctccgcctcccaggttcaaacaattctgatgcctcagcctcccgagtagctgggattactggtacacaccaccacgcctggctaatttttgtatttttagtagagatggggtttcaccatgttggtcaggctggtctcgaactcctgacctcaggtgatccacccacgttggcctctcaaagtgctgggattacatgcatgagcaaccacgcttggcctaccatactatttttgaagtaaacattctccattacctattactgtagataatacactacaaaaacaatttatgaccactaataatcttacgaaagctttttccctctaggaaacttataaataacatgttgtatgaaatatcatgagtttatctccacgctaaggttcacttatggactcacttggtccacgggccccaagttaagaaggccattttggcagattatccccagcctttattagtaccctgtttatcccgcctaattagaacgacaatccttaatcctaggcccacaatattttcctgaagcctcaagaaaataatttaggggaggaagagaggaagatggaaatagacaaattttcactacaaggcactgtgatctaactatttttacctgttctcccttctatcagcacaattaagagtatgcacaattaagagtataacattccacttttattactacgagctaacaactgttcatacttactgacaggtgaacaaaattacaaattattcaatgttctccagcttagctttcatactttagcttacatcttttaatttatatttcctcgtgcc

SEQ ID NO: 148275 - DNA, 347 bp, Homo sapiens
  misc_feature (1)...(347): n = a,t,c or g
cgccccccacatccgattaagttttgcannnnnnnnnnnnnnnnnnnnnnnnnnnnnnnnnnnnnnnnnnnnnnnnnnnnnnnnnnnnnnnnnnnnnnnnnnnnnnnnnnnnnnnnnnnnnnnnnnnnnnnnnnnnnnnnnnnnnnnnnnnnnnnnnnnnatcatttttgtgatggcaatttttctcattgcaggaagtgcattgaacacagtttactcttttcacagttactcaggatcatcactgtgagcattatttaatgcacagtggtgtcctcaggggctctgaagttctgcggggctgcttgttctcaggccacaaagctttttgagttcttgctcgtgcc

SEQ ID NO: 148276 - DNA, 410 bp, Homo sapiens
tgtcacccaggctggagtacagtggcttgctctcagctcactgcaacctctgcctcctggttcaagtgattctactgcctcagccttccaagtagctgggagtacaggcacacaccaccacatccgactaagttttgcattttttttttagtagagggggtctcaccatattggccaggctggtctcaaactcctggcctcaggtgatccgcccgccttggcctcccaaaggtgctgggattacaggtgtgagccaccatgcccagccctaatcatttttgtgatggcaatttttctcattgcaggaagtgcattgaacacagtttactcttttcacagttactcaggatcatcactgtgagcattatttaatgcacagtggtgtcctcaggggctctgaaggtcgacgc

SEQ ID NO: 148277 - DNA, 1477 bp, Homo sapiens
  misc_feature (1)...(1477): n = a,t,c or g
aaactagccacatgtggtggtgcaggcatgtagtctcagctactagggaggctgaggtgggagaaccactggagcccagacaatcaaggctgcaatgagctatgactgcaccattgcacaccagcctgggcaacaaaataagaccctctctctcagaaaaaaagaaaataaactgtttttctgagttccgtaaactgttctagcaaattattaaacccaagaagacagttacgggaacccccgattggtaacagggtgggtcaaaagtatggtgcactttaggnnnnnnnnnnnnnnnnnnnnnnnnnnnnnnnnnnnnnnnnnnnnnnnnnnnnnnnnnnnnnnnnnnnnnnnnnnnnnnnntgtcagaataaagtcatgggatacccagttaatatccagagcactgaagaatctggtgtagaaactccatacatacattccagtcggaagtgtgtgagtagagacaaacatgggcttttctgtcacctacctgcttaactgcataggagaggcaatatgtggtgctcatgaacaaggcaaacattaaagtcagaccagacccaacatttgactcagtcttaatatccagttgagcctgcgcaaatcattcattattcctaaggttttcctcaactccatttcattaaattggggataactgtggcacctacatgtgattctgtgagaattaacaaaatattatgcttggggttattgtgatcattatacctgttccaaactatttgacaaggacagtgatggatgaagacatcagaaaatcagaaactgcaatgaggtctctcaggcaaaattccatacaagcaaattactgtgtctacaaagcattcctgccacacttaattcaccattccctgaacaaaatatgccatcttcgttgttcaggtctgtacagtgctggtttcccttcccgggcagtttgcgctatcccatcccggcccattccccatccctccacctcccccttccctccccactttcatacaactcttcctcatcttacaggacttggcttcaatgtcaccttaactggaagcttctctcactctccagaagagcttcccattgcacttgatgcatgcactattatttgaccatttttgagttacagtccaagtctttttgtacctgaataacatgtttcccagtcagtctctcttcctggattcagaagtctttcatggtaggtccagaatgaaaggtgatgtctggggctcaggtgtgttgaggtccccatgcctggactatgggtgctgagtgggatttacttgtccatccattttctatattccagcactgggaaactagggtttatccatcttgataagatgtcatttaaattccacttcgcaagaaccacaaatggaagaaaggccatgaaaccacaggacagtacttgttctcaagggaatcttcagctcaggtggctctcatgaagctgatttatcaagttgta
